United States Patent Application Publication US 2005/0118625 A1 - sequence listing, part 9

SEQ ID NO: 150841 - DNA, 25 bp, Probe Sequence
acatcttcccaagctgtgaaaattt

SEQ ID NO: 150842 - DNA, 25 bp, Probe Sequence
actttcccatgagtgtgatccacat

SEQ ID NO: 150843 - DNA, 25 bp, Probe Sequence
acttagccacctgatgactaatgac

SEQ ID NO: 150844 - DNA, 25 bp, Probe Sequence
actttgccacctgtttgatgtgcag

SEQ ID NO: 150845 - DNA, 25 bp, Probe Sequence
actttccacctggtcatatactctg

SEQ ID NO: 150846 - DNA, 25 bp, Probe Sequence
acttctaaccgcaatagtgactctg

SEQ ID NO: 150847 - DNA, 25 bp, Probe Sequence
acttctatgtcggtataatggcccg

SEQ ID NO: 150848 - DNA, 25 bp, Probe Sequence
acttcttgtcagatatcttggaatc

SEQ ID NO: 150849 - DNA, 25 bp, Probe Sequence
actttgcttcatagtattggagcac

SEQ ID NO: 150850 - DNA, 25 bp, Probe Sequence
acttgttttagttctgatccaggga

SEQ ID NO: 150851 - DNA, 25 bp, Probe Sequence
acttgttttacatcatatacagaaa

SEQ ID NO: 150852 - DNA, 25 bp, Probe Sequence
acttgattttcgagatattcagaac

SEQ ID NO: 150853 - DNA, 25 bp, Probe Sequence
acttgaattgtgcaatttgtagaac

SEQ ID NO: 150854 - DNA, 25 bp, Probe Sequence
acttgaagtggttgtgttgtagggt

SEQ ID NO: 150855 - DNA, 25 bp, Probe Sequence
acttcaaggcttttgctggaaacag

SEQ ID NO: 150856 - DNA, 25 bp, Probe Sequence
acttcaaggtgcagctcgtggacaa

SEQ ID NO: 150857 - DNA, 25 bp, Probe Sequence
acttggaggtgatgccgggaagact

SEQ ID NO: 150858 - DNA, 25 bp, Probe Sequence
acttgttcccaaagctggagaagac

SEQ ID NO: 150859 - DNA, 25 bp, Probe Sequence
acttgttgcaccaaagtgatacaaa

SEQ ID NO: 150860 - DNA, 25 bp, Probe Sequence
acttgaagcacagagggctagggag

SEQ ID NO: 150861 - DNA, 25 bp, Probe Sequence
acattgaagacgtcattgcccaggg

SEQ ID NO: 150862 - DNA, 25 bp, Probe Sequence
acttaggatctgtggccatgcaagc

SEQ ID NO: 150863 - DNA, 25 bp, Probe Sequence
acttcaggtgtgcagccctgagctc

SEQ ID NO: 150864 - DNA, 25 bp, Probe Sequence
acttctgagctgctaccacatgaca

SEQ ID NO: 150865 - DNA, 25 bp, Probe Sequence
acaccggcggtaccagtaagtgctc

SEQ ID NO: 150866 - DNA, 25 bp, Probe Sequence
acatcctttgtttgccagtgaagtc

SEQ ID NO: 150867 - DNA, 25 bp, Probe Sequence
acatactttgtttctactattgtgg

SEQ ID NO: 150868 - DNA, 25 bp, Probe Sequence
acttttattacagtcaattttgagg

SEQ ID NO: 150869 - DNA, 25 bp, Probe Sequence
actttcatttaatccattgtcaagg

SEQ ID NO: 150870 - DNA, 25 bp, Probe Sequence
actttgaggccttaccttatgaagc

SEQ ID NO: 150871 - DNA, 25 bp, Probe Sequence
actttaaacatgtaattttgatagc

SEQ ID NO: 150872 - DNA, 25 bp, Probe Sequence
actttaaaaggaatgttgccaagct

SEQ ID NO: 150873 - DNA, 25 bp, Probe Sequence
acttctaaaaggaactatgtctgga

SEQ ID NO: 150874 - DNA, 25 bp, Probe Sequence
acttttataaggaagcagctgtcta

SEQ ID NO: 150875 - DNA, 25 bp, Probe Sequence
acttctctctaaggagaatggccca

SEQ ID NO: 150876 - DNA, 25 bp, Probe Sequence
acttgtccttaccacaaggcctgat

SEQ ID NO: 150877 - DNA, 25 bp, Probe Sequence
acttgttgcttaatgcccaaccacc

SEQ ID NO: 150878 - DNA, 25 bp, Probe Sequence
acttcttttattcccaactgcagat

SEQ ID NO: 150879 - DNA, 25 bp, Probe Sequence
acttccattttttgccagacaaatt

SEQ ID NO: 150880 - DNA, 25 bp, Probe Sequence
actttcactttctagctagcagaat

SEQ ID NO: 150881 - DNA, 25 bp, Probe Sequence
actattcacatgattatttgccatt

SEQ ID NO: 150882 - DNA, 25 bp, Probe Sequence
actttcaatgaccttttgtgcatct

SEQ ID NO: 150883 - DNA, 25 bp, Probe Sequence
actttgcaaataattgttgtgactc

SEQ ID NO: 150884 - DNA, 25 bp, Probe Sequence
acttttattatttggatgtatatca

SEQ ID NO: 150885 - DNA, 25 bp, Probe Sequence
acttgttattgtgttagtgatactg

SEQ ID NO: 150886 - DNA, 25 bp, Probe Sequence
acttgttagtgtattcattcatatt

SEQ ID NO: 150887 - DNA, 25 bp, Probe Sequence
acttggttgttaacatggtcatatt

SEQ ID NO: 150888 - DNA, 25 bp, Probe Sequence
actttgttttcaagcactgtaatgt

SEQ ID NO: 150889 - DNA, 25 bp, Probe Sequence
actttttcaacaagcacgaccatgg

SEQ ID NO: 150890 - DNA, 25 bp, Probe Sequence
acttattgaatatatgatcggccat

SEQ ID NO: 150891 - DNA, 25 bp, Probe Sequence
acttactgaatacttactatgtatc

SEQ ID NO: 150892 - DNA, 25 bp, Probe Sequence
acttcaatgaatacctactctcctc

SEQ ID NO: 150893 - DNA, 25 bp, Probe Sequence
actttgatgacaacagcgtctcccc

SEQ ID NO: 150894 - DNA, 25 bp, Probe Sequence
actttacacatgcaggaatctccac

SEQ ID NO: 150895 - DNA, 25 bp, Probe Sequence
acttaatcacagaggtgacatccca

SEQ ID NO: 150896 - DNA, 25 bp, Probe Sequence
acttaataagttcagtgcatctaga

SEQ ID NO: 150897 - DNA, 25 bp, Probe Sequence
actttgaaacttcactcatgccata

SEQ ID NO: 150898 - DNA, 25 bp, Probe Sequence
actttcgtacttggcagtaccatct

SEQ ID NO: 150899 - DNA, 25 bp, Probe Sequence
actttccaacttggcagtaaatcta

SEQ ID NO: 150900 - DNA, 25 bp, Probe Sequence
actttcctactgcaagtacaatcta

SEQ ID NO: 150901 - DNA, 25 bp, Probe Sequence
actttgccaagtccaattatcttct

SEQ ID NO: 150902 - DNA, 25 bp, Probe Sequence
actttgccaaatactttcttcacca

SEQ ID NO: 150903 - DNA, 25 bp, Probe Sequence
acatttgtaaatgtcttttcaaaag

SEQ ID NO: 150904 - DNA, 25 bp, Probe Sequence
actttctcaaacctgcaggtctcag

SEQ ID NO: 150905 - DNA, 25 bp, Probe Sequence
actttcgaggatttgcagtgcgtct

SEQ ID NO: 150906 - DNA, 25 bp, Probe Sequence
actttgagactagttcaggccttcc

SEQ ID NO: 150907 - DNA, 25 bp, Probe Sequence
acatttggcttacccagacaatccc

SEQ ID NO: 150908 - DNA, 25 bp, Probe Sequence
acatctttccacaggcaacagacct

SEQ ID NO: 150909 - DNA, 25 bp, Probe Sequence
acatttctcttccggaataacgctt

SEQ ID NO: 150910 - DNA, 25 bp, Probe Sequence
acttcctctttagggtaaccatcat

SEQ ID NO: 150911 - DNA, 25 bp, Probe Sequence
acttgccttttgctggaaacattga

SEQ ID NO: 150912 - DNA, 25 bp, Probe Sequence
acttgctctttctgtggcaaaacca

SEQ ID NO: 150913 - DNA, 25 bp, Probe Sequence
acttcctgagatttgataaaaccca

SEQ ID NO: 150914 - DNA, 25 bp, Probe Sequence
acttcctgatgagcctggttaacca

SEQ ID NO: 150915 - DNA, 25 bp, Probe Sequence
acttccggatccgcagaggaactga

SEQ ID NO: 150916 - DNA, 25 bp, Probe Sequence
acattttggtctctgcagttaagtg

SEQ ID NO: 150917 - DNA, 25 bp, Probe Sequence
acttttgtgatcagtcatttttatg

SEQ ID NO: 150918 - DNA, 25 bp, Probe Sequence
acttttgtcacaattcatttttatt

SEQ ID NO: 150919 - DNA, 25 bp, Probe Sequence
actttattctttgttctttatgtag

SEQ ID NO: 150920 - DNA, 25 bp, Probe Sequence
actttttttctgtgacatttatgtc

SEQ ID NO: 150921 - DNA, 25 bp, Probe Sequence
actttttttctgtgacatttatgtc

SEQ ID NO: 150922 - DNA, 25 bp, Probe Sequence
actttgctatgtgctcctaatgtat

SEQ ID NO: 150923 - DNA, 25 bp, Probe Sequence
actttgctgtgattccgtttgtatc

SEQ ID NO: 150924 - DNA, 25 bp, Probe Sequence
acttagcttgttcagatctctgcat

SEQ ID NO: 150925 - DNA, 25 bp, Probe Sequence
acttactatgtatcaggcatctgtg

SEQ ID NO: 150926 - DNA, 25 bp, Probe Sequence
actttctgtgttgaagcactgttgg

SEQ ID NO: 150927 - DNA, 25 bp, Probe Sequence
cagctttttggtgaactttagtgga

SEQ ID NO: 150928 - DNA, 25 bp, Probe Sequence
actttatctgttgagcctttatgtg

SEQ ID NO: 150929 - DNA, 25 bp, Probe Sequence
acttttattgcagatgtctttagag

SEQ ID NO: 150930 - DNA, 25 bp, Probe Sequence
acattggtgcagccctagttttagg

SEQ ID NO: 150931 - DNA, 25 bp, Probe Sequence
acaggttcatctctatttaaaggaa

SEQ ID NO: 150932 - DNA, 25 bp, Probe Sequence
acttcttcacatgctatttcaaaaa

SEQ ID NO: 150933 - DNA, 25 bp, Probe Sequence
acttcaagaagtcactgtcagagaa

SEQ ID NO: 150934 - DNA, 25 bp, Probe Sequence
acttcaacgtgtcagattgcaggaa

SEQ ID NO: 150935 - DNA, 25 bp, Probe Sequence
cctgggctaggtcagttcggaaact

SEQ ID NO: 150936 - DNA, 25 bp, Probe Sequence
ccgggtcaggaagcttcgtgaggtc

SEQ ID NO: 150937 - DNA, 25 bp, Probe Sequence
ccttttgcggaatcccagagggtca

SEQ ID NO: 150938 - DNA, 25 bp, Probe Sequence
ccccatcggtaatccaccagttgga

SEQ ID NO: 150939 - DNA, 25 bp, Probe Sequence
aacccacggaaagcctcatttgtgt

SEQ ID NO: 150940 - DNA, 25 bp, Probe Sequence
caatacgcgggatagccccaaatgt

SEQ ID NO: 150941 - DNA, 25 bp, Probe Sequence
cagctattttagtaaccccaagagt

SEQ ID NO: 150942 - DNA, 25 bp, Probe Sequence
acttccatacagtgaacgccataag

SEQ ID NO: 150943 - DNA, 25 bp, Probe Sequence
acttcctcggcatgagtcagccaag

SEQ ID NO: 150944 - DNA, 25 bp, Probe Sequence
actttgccgcagtaggtcaggtagc

SEQ ID NO: 150945 - DNA, 25 bp, Probe Sequence
actttcttatgctggatcaggtaaa

SEQ ID NO: 150946 - DNA, 25 bp, Probe Sequence
acttacttatctgtatcggtcaggg

SEQ ID NO: 150947 - DNA, 25 bp, Probe Sequence
acttatctgtatcggtcagggtcca

SEQ ID NO: 150948 - DNA, 25 bp, Probe Sequence
acttagatgtcaatggtcagggatg

SEQ ID NO: 150949 - DNA, 25 bp, Probe Sequence
acttactgccagaacatcaaggagt

SEQ ID NO: 150950 - DNA, 25 bp, Probe Sequence
acttactgaccatctgaagtatgtc

SEQ ID NO: 150951 - DNA, 25 bp, Probe Sequence
acttactgaccatctgaagtatgtc

SEQ ID NO: 150952 - DNA, 25 bp, Probe Sequence
actttctgactcctctagagaaggc

SEQ ID NO: 150953 - DNA, 25 bp, Probe Sequence
acttttggctcagtcatagaaacac

SEQ ID NO: 150954 - DNA, 25 bp, Probe Sequence
acttttggtatcccagaacatgaca

SEQ ID NO: 150955 - DNA, 25 bp, Probe Sequence
acttgctctggtaaaatgaaatgga

SEQ ID NO: 150956 - DNA, 25 bp, Probe Sequence
acttgtgcatgggctaaaaccagga

SEQ ID NO: 150957 - DNA, 25 bp, Probe Sequence
acatatgtgcagtgtcagcaccatc

SEQ ID NO: 150958 - DNA, 25 bp, Probe Sequence
acataggcttcactcatcctacttt

SEQ ID NO: 150959 - DNA, 25 bp, Probe Sequence
acatacccacaaatgcctatgattt

SEQ ID NO: 150960 - DNA, 25 bp, Probe Sequence
acttcctcagagatggcaaattcac

SEQ ID NO: 150961 - DNA, 25 bp, Probe Sequence
acattcctcaatggtaagactcttc

SEQ ID NO: 150962 - DNA, 25 bp, Probe Sequence
acttatgccaatgaatgtactctgt

SEQ ID NO: 150963 - DNA, 25 bp, Probe Sequence
acttattcaattgagacctttagct

SEQ ID NO: 150964 - DNA, 25 bp, Probe Sequence
acttttcagaatggcttcttttact

SEQ ID NO: 150965 - DNA, 25 bp, Probe Sequence
actttatcagtatgctttgttgaaa

SEQ ID NO: 150966 - DNA, 25 bp, Probe Sequence
acttctatagttttctcctttagag

SEQ ID NO: 150967 - DNA, 25 bp, Probe Sequence
acttcataacgtaactgcctttcag

SEQ ID NO: 150968 - DNA, 25 bp, Probe Sequence
acttctataccgattgtcttgtgcc

SEQ ID NO: 150969 - DNA, 25 bp, Probe Sequence
acttcaaatcctttggtcactgtga

SEQ ID NO: 150970 - DNA, 25 bp, Probe Sequence
acttcaagagcctctggcatctctt

SEQ ID NO: 150971 - DNA, 25 bp, Probe Sequence
acttcatagaccactgagttctagt

SEQ ID NO: 150972 - DNA, 25 bp, Probe Sequence
acttcactaactgctatattctata

SEQ ID NO: 150973 - DNA, 25 bp, Probe Sequence
acttggttccatctgatatcactgt

SEQ ID NO: 150974 - DNA, 25 bp, Probe Sequence
acttgtttcacgctatatcaggatg

SEQ ID NO: 150975 - DNA, 25 bp, Probe Sequence
actttcttcaccaatctcatgagga

SEQ ID NO: 150976 - DNA, 25 bp, Probe Sequence
acttactgtcacatagctctgacgt

SEQ ID NO: 150977 - DNA, 25 bp, Probe Sequence
acttccttcatcacatcttatgttg

SEQ ID NO: 150978 - DNA, 25 bp, Probe Sequence
acttagtcaattccatcttactctt

SEQ ID NO: 150979 - DNA, 25 bp, Probe Sequence
acttcacctattcatgagtattatt

SEQ ID NO: 150980 - DNA, 25 bp, Probe Sequence
acttccgtcattctttttacattgt

SEQ ID NO: 150981 - DNA, 25 bp, Probe Sequence
acttccttactaattattacaatag

SEQ ID NO: 150982 - DNA, 25 bp, Probe Sequence
acttcacctacaatattgttaacta

SEQ ID NO: 150983 - DNA, 25 bp, Probe Sequence
acttcacacagacaagtggctaagt

SEQ ID NO: 150984 - DNA, 25 bp, Probe Sequence
acttcccaaaatgtcgtacactccg

SEQ ID NO: 150985 - DNA, 25 bp, Probe Sequence
acttttcccattgacgtacaatggg

SEQ ID NO: 150986 - DNA, 25 bp, Probe Sequence
actttctgccctataccatcaatag

SEQ ID NO: 150987 - DNA, 25 bp, Probe Sequence
actttttcatgtatatccaggctat

SEQ ID NO: 150988 - DNA, 25 bp, Probe Sequence
acttcttccagtgagattagtgttt

SEQ ID NO: 150989 - DNA, 25 bp, Probe Sequence
acttctaactgtgcaatttgttctt

SEQ ID NO: 150990 - DNA, 25 bp, Probe Sequence
acttctaccttccagagttacttca

SEQ ID NO: 150991 - DNA, 25 bp, Probe Sequence
acttctacctatcaagttctgttag

SEQ ID NO: 150992 - DNA, 25 bp, Probe Sequence
acttctaccaactcagcttttacac

SEQ ID NO: 150993 - DNA, 25 bp, Probe Sequence
actttaccctcatcagcatttacaa

SEQ ID NO: 150994 - DNA, 25 bp, Probe Sequence
acttgtcaaccatggaatcttacaa

SEQ ID NO: 150995 - DNA, 25 bp, Probe Sequence
acttatcagaccaggccacattaac

SEQ ID NO: 150996 - DNA, 25 bp, Probe Sequence
acttatcagaccaggccacattaac

SEQ ID NO: 150997 - DNA, 25 bp, Probe Sequence
actttcaaagaaagccatcttattc

SEQ ID NO: 150998 - DNA, 25 bp, Probe Sequence
actttagaccaaacagatctggcat

SEQ ID NO: 150999 - DNA, 25 bp, Probe Sequence
acattgtcagacttataactataga

SEQ ID NO: 151000 - DNA, 25 bp, Probe Sequence
acattgtaactaaaatcttcctcag

SEQ ID NO: 151001 - DNA, 25 bp, Probe Sequence
actttcaacatttactcagtttagt

SEQ ID NO: 151002 - DNA, 25 bp, Probe Sequence
actttcagactttgatcacgtgtta

SEQ ID NO: 151003 - DNA, 25 bp, Probe Sequence
actttaggtctattccagtgagtga

SEQ ID NO: 151004 - DNA, 25 bp, Probe Sequence
acttctatggacttatctgcgaact

SEQ ID NO: 151005 - DNA, 25 bp, Probe Sequence
acttctggcgaatgatctgggagtg

SEQ ID NO: 151006 - DNA, 25 bp, Probe Sequence
actttacagaatccagttgtgcagc

SEQ ID NO: 151007 - DNA, 25 bp, Probe Sequence
actttatctgacagcagacgtgcac

SEQ ID NO: 151008 - DNA, 25 bp, Probe Sequence
acttttctatattgttcagctgaca

SEQ ID NO: 151009 - DNA, 25 bp, Probe Sequence
acttattccatttgtacctaagaga

SEQ ID NO: 151010 - DNA, 25 bp, Probe Sequence
acttttcctttgtccatcgaggtgt

SEQ ID NO: 151011 - DNA, 25 bp, Probe Sequence
acttgttctttacccatggaatgta

SEQ ID NO: 151012 - DNA, 25 bp, Probe Sequence
acatttatacttgccttggactgta

SEQ ID NO: 151013 - DNA, 25 bp, Probe Sequence
acatctttgttgacccggtacttca

SEQ ID NO: 151014 - DNA, 25 bp, Probe Sequence
acttcttgattgtcagtctgtgtca

SEQ ID NO: 151015 - DNA, 25 bp, Probe Sequence
acttctggattcttcttgctgatga

SEQ ID NO: 151016 - DNA, 25 bp, Probe Sequence
cactccatcgatgttcttcttcgga

SEQ ID NO: 151017 - DNA, 25 bp, Probe Sequence
acataccgatttaagtgctaggagc

SEQ ID NO: 151018 - DNA, 25 bp, Probe Sequence
acttccggtttcttcatattgaggg

SEQ ID NO: 151019 - DNA, 25 bp, Probe Sequence
acttctctgtgtaacctcatttggg

SEQ ID NO: 151020 - DNA, 25 bp, Probe Sequence
acttcctcagtgagccctggagggg

SEQ ID NO: 151021 - DNA, 25 bp, Probe Sequence
acttccagctgattggcatccagga

SEQ ID NO: 151022 - DNA, 25 bp, Probe Sequence
acttgccaggagttgtctgcgagat

SEQ ID NO: 151023 - DNA, 25 bp, Probe Sequence
acttgcccagatgttctcagatatg

SEQ ID NO: 151024 - DNA, 25 bp, Probe Sequence
acattcccatctgtcaccaattggt

SEQ ID NO: 151025 - DNA, 25 bp, Probe Sequence
acattcctagtgttcaaatactgtg

SEQ ID NO: 151026 - DNA, 25 bp, Probe Sequence
acatcccgagaagtccagacggctg

SEQ ID NO: 151027 - DNA, 25 bp, Probe Sequence
acatcaacgagggggagacggccat

SEQ ID NO: 151028 - DNA, 25 bp, Probe Sequence
acattacagaacagctagaggtcct

SEQ ID NO: 151029 - DNA, 25 bp, Probe Sequence
acttcacagcccagcatgggggccc

SEQ ID NO: 151030 - DNA, 25 bp, Probe Sequence
acttcagcacctatggggggctgct

SEQ ID NO: 151031 - DNA, 25 bp, Probe Sequence
acttctacgctgagcagggcgacgt

SEQ ID NO: 151032 - DNA, 25 bp, Probe Sequence
acttctcaccatttgagttgcccat

SEQ ID NO: 151033 - DNA, 25 bp, Probe Sequence
acttatcaccattcttatgtcactt

SEQ ID NO: 151034 - DNA, 25 bp, Probe Sequence
acttttccatatggtataccttgaa

SEQ ID NO: 151035 - DNA, 25 bp, Probe Sequence
acttctgatcgaaggtcatccctct

SEQ ID NO: 151036 - DNA, 25 bp, Probe Sequence
acttctgatcgaaggtcatccctct

SEQ ID NO: 151037 - DNA, 25 bp, Probe Sequence
acatcatgtccgacgggatacctat

SEQ ID NO: 151038 - DNA, 25 bp, Probe Sequence
acatcatgcgcctccgggagaaatt

SEQ ID NO: 151039 - DNA, 25 bp, Probe Sequence
acatcatccagaccggggcggacat

SEQ ID NO: 151040 - DNA, 25 bp, Probe Sequence
acattccagaggcgcaggggcctgg

SEQ ID NO: 151041 - DNA, 25 bp, Probe Sequence
acttcctagatgggatggcggccgg

SEQ ID NO: 151042 - DNA, 25 bp, Probe Sequence
acttcatctatggaggctgccgggg

SEQ ID NO: 151043 - DNA, 25 bp, Probe Sequence
acattcaaatcaggccagcgcggtg

SEQ ID NO: 151044 - DNA, 25 bp, Probe Sequence
acttctgagatagcctgggatgagc

SEQ ID NO: 151045 - DNA, 25 bp, Probe Sequence
acattgcatagaagccattggggag

SEQ ID NO: 151046 - DNA, 25 bp, Probe Sequence
acattcatagaaacagcgtggggta

SEQ ID NO: 151047 - DNA, 25 bp, Probe Sequence
acattggaagtcatcttggagcgta

SEQ ID NO: 151048 - DNA, 25 bp, Probe Sequence
acatttgtatggatttaagagtatt

SEQ ID NO: 151049 - DNA, 25 bp, Probe Sequence
acttttttggtgtctcagatgagta

SEQ ID NO: 151050 - DNA, 25 bp, Probe Sequence
acttgatttgggccttgaagagtaa

SEQ ID NO: 151051 - DNA, 25 bp, Probe Sequence
acttttgctagtggctggagagatt

SEQ ID NO: 151052 - DNA, 25 bp, Probe Sequence
acttctctgtagatcgctgagcgat

SEQ ID NO: 151053 - DNA, 25 bp, Probe Sequence
acttctctagcatgctctctgagga

SEQ ID NO: 151054 - DNA, 25 bp, Probe Sequence
acttcctacagggtcatggcaacaa

SEQ ID NO: 151055 - DNA, 25 bp, Probe Sequence
acttcctgcaggcggagactgacaa

SEQ ID NO: 151056 - DNA, 25 bp, Probe Sequence
acttgaactggcaggaaatgcatca

SEQ ID NO: 151057 - DNA, 25 bp, Probe Sequence
acttcaagggacggaaacatcagca

SEQ ID NO: 151058 - DNA, 25 bp, Probe Sequence
acttatccggcatcaccaaacagca

SEQ ID NO: 151059 - DNA, 25 bp, Probe Sequence
acttcatggctgaaacaccaaaggc

SEQ ID NO: 151060 - DNA, 25 bp, Probe Sequence
acttgtgaatatgtacctacatggc

SEQ ID NO: 151061 - DNA, 25 bp, Probe Sequence
acttgaaaaggatctggactcagca

SEQ ID NO: 151062 - DNA, 25 bp, Probe Sequence
acttaaagaggacgcgtcactcgct

SEQ ID NO: 151063 - DNA, 25 bp, Probe Sequence
acttccaagagtactgtgtcttcct

SEQ ID NO: 151064 - DNA, 25 bp, Probe Sequence
acttccaatcttactttgtctcttg

SEQ ID NO: 151065 - DNA, 25 bp, Probe Sequence
acttccacagttatgattgtcctcc

SEQ ID NO: 151066 - DNA, 25 bp, Probe Sequence
acttggaagttgttgctttcccagt

SEQ ID NO: 151067 - DNA, 25 bp, Probe Sequence
acttggggatgggttgttcctgcag

SEQ ID NO: 151068 - DNA, 25 bp, Probe Sequence
acttcggcttggcatacttattcag

SEQ ID NO: 151069 - DNA, 25 bp, Probe Sequence
acttccgcattgaaaccttcactgt

SEQ ID NO: 151070 - DNA, 25 bp, Probe Sequence
acttcctataatacaggcttccgat

SEQ ID NO: 151071 - DNA, 25 bp, Probe Sequence
acttcacagtaaatcatttctcctg

SEQ ID NO: 151072 - DNA, 25 bp, Probe Sequence
acttcaatgtgtcatttccggctgc

SEQ ID NO: 151073 - DNA, 25 bp, Probe Sequence
acttcaagctcatgtttgaccgctc

SEQ ID NO: 151074 - DNA, 25 bp, Probe Sequence
acttcaggtcattttcagtcctcta

SEQ ID NO: 151075 - DNA, 25 bp, Probe Sequence
acttctggtctctttggtgacctgt

SEQ ID NO: 151076 - DNA, 25 bp, Probe Sequence
acttctgatttgaaattgtaccttt

SEQ ID NO: 151077 - DNA, 25 bp, Probe Sequence
acttgtgtattgagtcttaactgta

SEQ ID NO: 151078 - DNA, 25 bp, Probe Sequence
acttcttcaggcagtgctgtaagct

SEQ ID NO: 151079 - DNA, 25 bp, Probe Sequence
acttcagtgggatgctgtgtctagt

SEQ ID NO: 151080 - DNA, 25 bp, Probe Sequence
acttcaaaggcattcctgttgatgt

SEQ ID NO: 151081 - DNA, 25 bp, Probe Sequence
acttggaaggtgccctgtgctatgt

SEQ ID NO: 151082 - DNA, 25 bp, Probe Sequence
acttctgacagagtgtgccgtctct

SEQ ID NO: 151083 - DNA, 25 bp, Probe Sequence
acttcagcaagcagtaggttttact

SEQ ID NO: 151084 - DNA, 25 bp, Probe Sequence
acttcagacacaagtcatcgtttgt

SEQ ID NO: 151085 - DNA, 25 bp, Probe Sequence
acttcaagacatcatgtcgtacatg

SEQ ID NO: 151086 - DNA, 25 bp, Probe Sequence
acttcatagagctgtgtctgtatac

SEQ ID NO: 151087 - DNA, 25 bp, Probe Sequence
acattaaacatggaggtctatatca

SEQ ID NO: 151088 - DNA, 25 bp, Probe Sequence
acttagctattagtgacctatgaca

SEQ ID NO: 151089 - DNA, 25 bp, Probe Sequence
acttataattcactggtcctgcatc

SEQ ID NO: 151090 - DNA, 25 bp, Probe Sequence
acttgcaaataactggccacatcat

SEQ ID NO: 151091 - DNA, 25 bp, Probe Sequence
acttgcaaagaactgacatcctaac

SEQ ID NO: 151092 - DNA, 25 bp, Probe Sequence
acttcagaatgaacatgataccata

SEQ ID NO: 151093 - DNA, 25 bp, Probe Sequence
acttcaacgcaattgcaacagcaat

SEQ ID NO: 151094 - DNA, 25 bp, Probe Sequence
acttcgagactcatgcacaagcttc

SEQ ID NO: 151095 - DNA, 25 bp, Probe Sequence
acttcgctcatcaggcataatgtct

SEQ ID NO: 151096 - DNA, 25 bp, Probe Sequence
acttggctggcaactctgaagtcat

SEQ ID NO: 151097 - DNA, 25 bp, Probe Sequence
acattgatggacacttaagatgatt

SEQ ID NO: 151098 - DNA, 25 bp, Probe Sequence
acataatctgttgttacagtttaac

SEQ ID NO: 151099 - DNA, 25 bp, Probe Sequence
acataatcagtatatttggtttcta

SEQ ID NO: 151100 - DNA, 25 bp, Probe Sequence
acatatttgacttatatggtgttta

SEQ ID NO: 151101 - DNA, 25 bp, Probe Sequence
acatcttcgactttaggtgcatccc

SEQ ID NO: 151102 - DNA, 25 bp, Probe Sequence
acatcacggagcacgagctagtccc

SEQ ID NO: 151103 - DNA, 25 bp, Probe Sequence
acatcacgggatgtgacacagactg

SEQ ID NO: 151104 - DNA, 25 bp, Probe Sequence
acttctgggtgggtgacgagctgta

SEQ ID NO: 151105 - DNA, 25 bp, Probe Sequence
acttctgggtgggtgacgagctgta

SEQ ID NO: 151106 - DNA, 25 bp, Probe Sequence
acttcatctggaagcctacggtgtt

SEQ ID NO: 151107 - DNA, 25 bp, Probe Sequence
acttctctgagatcgaacggactgt

SEQ ID NO: 151108 - DNA, 25 bp, Probe Sequence
acatttctggacagtacctgattgt

SEQ ID NO: 151109 - DNA, 25 bp, Probe Sequence
acttctctggactgatcctattcac

SEQ ID NO: 151110 - DNA, 25 bp, Probe Sequence
acttccttcaatgattgccattcac

SEQ ID NO: 151111 - DNA, 25 bp, Probe Sequence
acttctcttattgttcagttcatcc

SEQ ID NO: 151112 - DNA, 25 bp, Probe Sequence
acttgtcttaagcctacagtatcag

SEQ ID NO: 151113 - DNA, 25 bp, Probe Sequence
acattgttttaactaagatagcttc

SEQ ID NO: 151114 - DNA, 25 bp, Probe Sequence
acttatttatagccaactgattttc

SEQ ID NO: 151115 - DNA, 25 bp, Probe Sequence
acttgtttaaactctgtcttccagg

SEQ ID NO: 151116 - DNA, 25 bp, Probe Sequence
acttgtttaaactctgtcttccagg

SEQ ID NO: 151117 - DNA, 25 bp, Probe Sequence
acttgcttttaattcagcggttctc

SEQ ID NO: 151118 - DNA, 25 bp, Probe Sequence
acttggtgttagccacgctgtttac

SEQ ID NO: 151119 - DNA, 25 bp, Probe Sequence
acttgactgtcatacctctatttag

SEQ ID NO: 151120 - DNA, 25 bp, Probe Sequence
acttgacaatcattacactaaaaca

SEQ ID NO: 151121 - DNA, 25 bp, Probe Sequence
acattgactaatccaactaacctca

SEQ ID NO: 151122 - DNA, 25 bp, Probe Sequence
cacttttaaggctctaatcaccaaa

SEQ ID NO: 151123 - DNA, 25 bp, Probe Sequence
acttcttgaaggtgctgacggccag

SEQ ID NO: 151124 - DNA, 25 bp, Probe Sequence
acttcgtggaggtgcgcagtggact

SEQ ID NO: 151125 - DNA, 25 bp, Probe Sequence
acttgagtgaggagtgcggggagct

SEQ ID NO: 151126 - DNA, 25 bp, Probe Sequence
acttgggagcagaggcaggagaatc

SEQ ID NO: 151127 - DNA, 25 bp, Probe Sequence
acttgcgggccatggaggagcgata

SEQ ID NO: 151128 - DNA, 25 bp, Probe Sequence
acttcaagagcccagtcaagacgat

SEQ ID NO: 151129 - DNA, 25 bp, Probe Sequence
acttaaataccgtatgtgcaccata

SEQ ID NO: 151130 - DNA, 25 bp, Probe Sequence
acttacccaccttatgtgactaggg

SEQ ID NO: 151131 - DNA, 25 bp, Probe Sequence
acttacccttgtgtgtttagatgtg

SEQ ID NO: 151132 - DNA, 25 bp, Probe Sequence
acttccccttgagtgctatgttgga

SEQ ID NO: 151133 - DNA, 25 bp, Probe Sequence
acttcctttgtgtttatatggcgtt

SEQ ID NO: 151134 - DNA, 25 bp, Probe Sequence
acttcctgatattgttgatacatgc

SEQ ID NO: 151135 - DNA, 25 bp, Probe Sequence
acttcactgaggctgtcattgctgc

SEQ ID NO: 151136 - DNA, 25 bp, Probe Sequence
acttcatcagtgcttagcatatgta

SEQ ID NO: 151137 - DNA, 25 bp, Probe Sequence
acattcttgggcaattgcagataat

SEQ ID NO: 151138 - DNA, 25 bp, Probe Sequence
acttctgtggcgtggcagaaatgaa

SEQ ID NO: 151139 - DNA, 25 bp, Probe Sequence
acttctgtgtatatctgaaagatta

SEQ ID NO: 151140 - DNA, 25 bp, Probe Sequence
acttgcgtggtttcatgtaagctgt

SEQ ID NO: 151141 - DNA, 25 bp, Probe Sequence
acttgcacttgaatccatgtcacag

SEQ ID NO: 151142 - DNA, 25 bp, Probe Sequence
acttgcattgattatactggccagc

SEQ ID NO: 151143 - DNA, 25 bp, Probe Sequence
acttgctgatgatggcatggaccgt

SEQ ID NO: 151144 - DNA, 25 bp, Probe Sequence
acttcatgtatatcaagcacagcag

SEQ ID NO: 151145 - DNA, 25 bp, Probe Sequence
acttcatctgtatcaagcacagcag

SEQ ID NO: 151146 - DNA, 25 bp, Probe Sequence
acttcactgggataatcagcagcgt

SEQ ID NO: 151147 - DNA, 25 bp, Probe Sequence
acttaccgaagcgaacgcagccttt

SEQ ID NO: 151148 - DNA, 25 bp, Probe Sequence
acattgacctgaaagaccgaccatt

SEQ ID NO: 151149 - DNA, 25 bp, Probe Sequence
acttgttctggcaaaccagaccctg

SEQ ID NO: 151150 - DNA, 25 bp, Probe Sequence
acatattttgtcaccaagaccctac

SEQ ID NO: 151151 - DNA, 25 bp, Probe Sequence
acatattttgtcaccaagaccctac

SEQ ID NO: 151152 - DNA, 25 bp, Probe Sequence
acttcttggccagccaagtgccctt

SEQ ID NO: 151153 - DNA, 25 bp, Probe Sequence
acttccatggaagccagagtcagcc

SEQ ID NO: 151154 - DNA, 25 bp, Probe Sequence
acttccacgtggaccaagtgaccac

SEQ ID NO: 151155 - DNA, 25 bp, Probe Sequence
acttggacatgggccccagatacca

SEQ ID NO: 151156 - DNA, 25 bp, Probe Sequence
acttggacatacgtgaccactcacc

SEQ ID NO: 151157 - DNA, 25 bp, Probe Sequence
acttgtggaatcagagccttactta

SEQ ID NO: 151158 - DNA, 25 bp, Probe Sequence
acttggtggtcctgcaccaaactac

SEQ ID NO: 151159 - DNA, 25 bp, Probe Sequence
acttggaggtgccagggcagcaaac

SEQ ID NO: 151160 - DNA, 25 bp, Probe Sequence
acttgccaggtggacttgaccaact

SEQ ID NO: 151161 - DNA, 25 bp, Probe Sequence
acttcaaagtcatcttgccagccag

SEQ ID NO: 151162 - DNA, 25 bp, Probe Sequence
acatcttagctgtcagtaaaatgca

SEQ ID NO: 151163 - DNA, 25 bp, Probe Sequence
acattcttctgatgtaacatgtgat

SEQ ID NO: 151164 - DNA, 25 bp, Probe Sequence
acatcttacaactgaacatgtatgt

SEQ ID NO: 151165 - DNA, 25 bp, Probe Sequence
acattctataactgataactccctg

SEQ ID NO: 151166 - DNA, 25 bp, Probe Sequence
acattctataactgataactccctg

SEQ ID NO: 151167 - DNA, 25 bp, Probe Sequence
acatattgaacctgttgatcactta

SEQ ID NO: 151168 - DNA, 25 bp, Probe Sequence
acttctaatcagtgttatagttgag

SEQ ID NO: 151169 - DNA, 25 bp, Probe Sequence
acatgggaataactgttcgtttgag

SEQ ID NO: 151170 - DNA, 25 bp, Probe Sequence
acaggcggattagctatcttccaac

SEQ ID NO: 151171 - DNA, 25 bp, Probe Sequence
acatacagtttagggtcctagcgca

SEQ ID NO: 151172 - DNA, 25 bp, Probe Sequence
acatttgcctttgagctccgagata

SEQ ID NO: 151173 - DNA, 25 bp, Probe Sequence
acttgtctctgtagaagctccgggt

SEQ ID NO: 151174 - DNA, 25 bp, Probe Sequence
acttcttcgacatcttctggtggat

SEQ ID NO: 151175 - DNA, 25 bp, Probe Sequence
acttcgaggccattgcgttggtgga

SEQ ID NO: 151176 - DNA, 25 bp, Probe Sequence
acttgggtcctgagtatggtgacta

SEQ ID NO: 151177 - DNA, 25 bp, Probe Sequence
acttgggtcctgagtatggtgacta

SEQ ID NO: 151178 - DNA, 25 bp, Probe Sequence
acttgttacctatgatatggttcca

SEQ ID NO: 151179 - DNA, 25 bp, Probe Sequence
acttgtgcccctgaaagtgtactca

SEQ ID NO: 151180 - DNA, 25 bp, Probe Sequence
acttggtccatctgaaagtgtcacc

SEQ ID NO: 151181 - DNA, 25 bp, Probe Sequence
acttgagcccaggagatcaaggctg

SEQ ID NO: 151182 - DNA, 25 bp, Probe Sequence
acttcagctccgggaatgagcctgc

SEQ ID NO: 151183 - DNA, 25 bp, Probe Sequence
acttcctcagtggaaatgcaggatg

SEQ ID NO: 151184 - DNA, 25 bp, Probe Sequence
acttccagcagttgaatttggcggg

SEQ ID NO: 151185 - DNA, 25 bp, Probe Sequence
acttgtatattctaatgtttgccag

SEQ ID NO: 151186 - DNA, 25 bp, Probe Sequence
acttgttaagcatagtgcctgacac

SEQ ID NO: 151187 - DNA, 25 bp, Probe Sequence
acttcatttggcttgtgtgcatctg

SEQ ID NO: 151188 - DNA, 25 bp, Probe Sequence
acttcatcatctagattatccattc

SEQ ID NO: 151189 - DNA, 25 bp, Probe Sequence
acttcatgctctgataactgccttt

SEQ ID NO: 151190 - DNA, 25 bp, Probe Sequence
acttcccataataaccactttgcat

SEQ ID NO: 151191 - DNA, 25 bp, Probe Sequence
acttctccataatattcatccctgt

SEQ ID NO: 151192 - DNA, 25 bp, Probe Sequence
acttctctgatcaaaattacttttc

SEQ ID NO: 151193 - DNA, 25 bp, Probe Sequence
acattctcatacatttaacttgtaa

SEQ ID NO: 151194 - DNA, 25 bp, Probe Sequence
acttgtctaaaaatactgctttaca

SEQ ID NO: 151195 - DNA, 25 bp, Probe Sequence
acttgtcataaaatcgatcagtttg

SEQ ID NO: 151196 - DNA, 25 bp, Probe Sequence
acttcttagaatgcatgatgtgttt

SEQ ID NO: 151197 - DNA, 25 bp, Probe Sequence
acattcctagaagatgataattgtg

SEQ ID NO: 151198 - DNA, 25 bp, Probe Sequence
acttccttgctacagcaagctctgg

SEQ ID NO: 151199 - DNA, 25 bp, Probe Sequence
acttcctgttacaataactgctcat

SEQ ID NO: 151200 - DNA, 25 bp, Probe Sequence
acttgccattttaatacacgtcatt

SEQ ID NO: 151201 - DNA, 25 bp, Probe Sequence
acattccatgttaaactacggtcat

SEQ ID NO: 151202 - DNA, 25 bp, Probe Sequence
acttcactgtctacaaccagcgggt

SEQ ID NO: 151203 - DNA, 25 bp, Probe Sequence
acttcatttgtcttaccttggtgtc

SEQ ID NO: 151204 - DNA, 25 bp, Probe Sequence
acattacctggtttcctgggattca

SEQ ID NO: 151205 - DNA, 25 bp, Probe Sequence
acatcaacgtcgggtcacatgggaa

SEQ ID NO: 151206 - DNA, 25 bp, Probe Sequence
acttcactgtctctgctcaataaaa

SEQ ID NO: 151207 - DNA, 25 bp, Probe Sequence
acttcacttctttgtatattatgta

SEQ ID NO: 151208 - DNA, 25 bp, Probe Sequence
acttcagtgactgtggtgtatatgt

SEQ ID NO: 151209 - DNA, 25 bp, Probe Sequence
acttcagtcagcccatggtctatag

SEQ ID NO: 151210 - DNA, 25 bp, Probe Sequence
acatatttcagcattggctctacag

SEQ ID NO: 151211 - DNA, 25 bp, Probe Sequence
acagattctgcgcttgatttgggga

SEQ ID NO: 151212 - DNA, 25 bp, Probe Sequence
acttctgcctggagacttagggcac

SEQ ID NO: 151213 - DNA, 25 bp, Probe Sequence
acttggcctcagctggctgtatgga

SEQ ID NO: 151214 - DNA, 25 bp, Probe Sequence
acttgccacaccagtgcaattcagc

SEQ ID NO: 151215 - DNA, 25 bp, Probe Sequence
acattccacccaaggagttccactt

SEQ ID NO: 151216 - DNA, 25 bp, Probe Sequence
acatctaccgcgggagatttcccaa

SEQ ID NO: 151217 - DNA, 25 bp, Probe Sequence
acataaccctggaagtatgtagcca

SEQ ID NO: 151218 - DNA, 25 bp, Probe Sequence
acatatggcccgggagctacaacaa

SEQ ID NO: 151219 - DNA, 25 bp, Probe Sequence
acatagcccctagattgctcaatca

SEQ ID NO: 151220 - DNA, 25 bp, Probe Sequence
acataccaactgtcaatgaaaacct

SEQ ID NO: 151221 - DNA, 25 bp, Probe Sequence
acaaccaaccatattaacacctagc

SEQ ID NO: 151222 - DNA, 25 bp, Probe Sequence
acaaaagtaaaccagaccactctag

SEQ ID NO: 151223 - DNA, 25 bp, Probe Sequence
acagagaagtcacagggcagtacct

SEQ ID NO: 151224 - DNA, 25 bp, Probe Sequence
acataagttcagtagttgcttccct

SEQ ID NO: 151225 - DNA, 25 bp, Probe Sequence
acataagttcagtagttgcttccct

SEQ ID NO: 151226 - DNA, 25 bp, Probe Sequence
acaggagttacaggttctaagccag

SEQ ID NO: 151227 - DNA, 25 bp, Probe Sequence
acatgggtaacgatgaccacaccaa

SEQ ID NO: 151228 - DNA, 25 bp, Probe Sequence
acagtggaaattctgccgagcctct

SEQ ID NO: 151229 - DNA, 25 bp, Probe Sequence
acatcgagaagattcctgtggatcc

SEQ ID NO: 151230 - DNA, 25 bp, Probe Sequence
acttggaagactatgtggcccggcc

SEQ ID NO: 151231 - DNA, 25 bp, Probe Sequence
acttgtgaagaaggttcccgcttca

SEQ ID NO: 151232 - DNA, 25 bp, Probe Sequence
acttgtacaccagtttattactcta

SEQ ID NO: 151233 - DNA, 25 bp, Probe Sequence
acataagaaccctttatgtaccatc

SEQ ID NO: 151234 - DNA, 25 bp, Probe Sequence
acaattaaccccattcagatcgtcc

SEQ ID NO: 151235 - DNA, 25 bp, Probe Sequence
acatactaacccttcttcaagatgg

SEQ ID NO: 151236 - DNA, 25 bp, Probe Sequence
acatacttacttttttgtagtgaga

SEQ ID NO: 151237 - DNA, 25 bp, Probe Sequence
acattttacattccatcttttctga

SEQ ID NO: 151238 - DNA, 25 bp, Probe Sequence
acatttgctagcttgtagttttcta

SEQ ID NO: 151239 - DNA, 25 bp, Probe Sequence
acattggctacttgaggtttgacat

SEQ ID NO: 151240 - DNA, 25 bp, Probe Sequence
acattggccacacaggctatctgaa

SEQ ID NO: 151241 - DNA, 25 bp, Probe Sequence
acattgtgccaataatcatttaata

SEQ ID NO: 151242 - DNA, 25 bp, Probe Sequence
acttctggcaagtagtctctaaaat

SEQ ID NO: 151243 - DNA, 25 bp, Probe Sequence
acttccgccagatgtgctgcaaaac

SEQ ID NO: 151244 - DNA, 25 bp, Probe Sequence
acttccctcacaatgatgatgcaaa

SEQ ID NO: 151245 - DNA, 25 bp, Probe Sequence
acttctgtctgccacatgaggaggg

SEQ ID NO: 151246 - DNA, 25 bp, Probe Sequence
acttctgtctgccacatgaggaggg

SEQ ID NO: 151247 - DNA, 25 bp, Probe Sequence
acttctactgtattggcgagcatgg

SEQ ID NO: 151248 - DNA, 25 bp, Probe Sequence
acttccttgatgttggtggtggtgc

SEQ ID NO: 151249 - DNA, 25 bp, Probe Sequence
acttgcctacagtggggtgcagtcc

SEQ ID NO: 151250 - DNA, 25 bp, Probe Sequence
acttcccctattgggcatggcagct

SEQ ID NO: 151251 - DNA, 25 bp, Probe Sequence
acttggtgattcttgggcaggagct

SEQ ID NO: 151252 - DNA, 25 bp, Probe Sequence
acttggtggatgttggacaggtggg

SEQ ID NO: 151253 - DNA, 25 bp, Probe Sequence
acacatgggtgctattggggttggg

SEQ ID NO: 151254 - DNA, 25 bp, Probe Sequence
acaaggcagccatgggtctgggggc

SEQ ID NO: 151255 - DNA, 25 bp, Probe Sequence
acaagggtcagtctgtcgggtgggg

SEQ ID NO: 151256 - DNA, 25 bp, Probe Sequence
acaaggtaagtgctgtgaggggagc

SEQ ID NO: 151257 - DNA, 25 bp, Probe Sequence
acatagtctacagcctggaagtgcc

SEQ ID NO: 151258 - DNA, 25 bp, Probe Sequence
acatgaaaaccagcaggaaggccct

SEQ ID NO: 151259 - DNA, 25 bp, Probe Sequence
acagaaaggactgcaggaacctgcc

SEQ ID NO: 151260 - DNA, 25 bp, Probe Sequence
acatcaacaagacggctgccaacct

SEQ ID NO: 151261 - DNA, 25 bp, Probe Sequence
acatcaacgagctgactatgaagct

SEQ ID NO: 151262 - DNA, 25 bp, Probe Sequence
acatcataagaggggctttccggta

SEQ ID NO: 151263 - DNA, 25 bp, Probe Sequence
acttgagaggagccctgattccttt

SEQ ID NO: 151264 - DNA, 25 bp, Probe Sequence
acttgagagcgactctgtgtcccag

SEQ ID NO: 151265 - DNA, 25 bp, Probe Sequence
acttgagtgtgaacagttacctgga

SEQ ID NO: 151266 - DNA, 25 bp, Probe Sequence
acttgagtgtgaacagttacctgga

SEQ ID NO: 151267 - DNA, 25 bp, Probe Sequence
acttgcaaatgaaactccccagaga

SEQ ID NO: 151268 - DNA, 25 bp, Probe Sequence
acttgcagcaatggcaatcccaccc

SEQ ID NO: 151269 - DNA, 25 bp, Probe Sequence
acttgccagaaccaattcaaccgga

SEQ ID NO: 151270 - DNA, 25 bp, Probe Sequence
acttgcggacaggaattcggcccag

SEQ ID NO: 151271 - DNA, 25 bp, Probe Sequence
acttcggtgcagtaattctggctga

SEQ ID NO: 151272 - DNA, 25 bp, Probe Sequence
acatttggtgtatgtgcttggctga

SEQ ID NO: 151273 - DNA, 25 bp, Probe Sequence
acattttgataacgctgtgtactca

SEQ ID NO: 151274 - DNA, 25 bp, Probe Sequence
acttgttatgagcctgcattctatt

SEQ ID NO: 151275 - DNA, 25 bp, Probe Sequence
acttcttctgggactttgagtgcct

SEQ ID NO: 151276 - DNA, 25 bp, Probe Sequence
acattcttgctttggttctgacttc

SEQ ID NO: 151277 - DNA, 25 bp, Probe Sequence
acttctatgttgccaggatttctcc

SEQ ID NO: 151278 - DNA, 25 bp, Probe Sequence
acttcattgtggccatggttagctc

SEQ ID NO: 151279 - DNA, 25 bp, Probe Sequence
acagtgcacctggccgaaatagctc

SEQ ID NO: 151280 - DNA, 25 bp, Probe Sequence
acagtgcacctggccgaaatagctc

SEQ ID NO: 151281 - DNA, 25 bp, Probe Sequence
acagtgcacctggccgaaatagctc

SEQ ID NO: 151282 - DNA, 25 bp, Probe Sequence
acttgacctcggcagagaagtagtg

SEQ ID NO: 151283 - DNA, 25 bp, Probe Sequence
acttgggataggactgagtggtagg

SEQ ID NO: 151284 - DNA, 25 bp, Probe Sequence
acttggatatacttctggtcagtag

SEQ ID NO: 151285 - DNA, 25 bp, Probe Sequence
acttgtgaaacattgtgtgggattg

SEQ ID NO: 151286 - DNA, 25 bp, Probe Sequence
acttgagaaagttgttgtggtgttg

SEQ ID NO: 151287 - DNA, 25 bp, Probe Sequence
acttggcaaatgagtttcgctgtta

SEQ ID NO: 151288 - DNA, 25 bp, Probe Sequence
acttgtgctttcagttagccttctg

SEQ ID NO: 151289 - DNA, 25 bp, Probe Sequence
acttggttgtgatgttatccttctt

SEQ ID NO: 151290 - DNA, 25 bp, Probe Sequence
acttcgtcctgaggttactctatat

SEQ ID NO: 151291 - DNA, 25 bp, Probe Sequence
acttcgccgagagggtgacctctct

SEQ ID NO: 151292 - DNA, 25 bp, Probe Sequence
acttcgccgagaaggtgagctccct

SEQ ID NO: 151293 - DNA, 25 bp, Probe Sequence
acttggacgctgcagaatggctccc

SEQ ID NO: 151294 - DNA, 25 bp, Probe Sequence
acatagtcacgtcaacagttcaccc

SEQ ID NO: 151295 - DNA, 25 bp, Probe Sequence
acatagtacataggtgatcaattca

SEQ ID NO: 151296 - DNA, 25 bp, Probe Sequence
acatagccagtaggttctttattca

SEQ ID NO: 151297 - DNA, 25 bp, Probe Sequence
aagaccgttggtgcctagaggacta

SEQ ID NO: 151298 - DNA, 25 bp, Probe Sequence
aatccccttgggtgttaagactcag

SEQ ID NO: 151299 - DNA, 25 bp, Probe Sequence
aattggtctaggcttgttacaacaa

SEQ ID NO: 151300 - DNA, 25 bp, Probe Sequence
acttgtttggaacttgtcataaaat

SEQ ID NO: 151301 - DNA, 25 bp, Probe Sequence
acattttctggtactctgtgaaaga

SEQ ID NO: 151302 - DNA, 25 bp, Probe Sequence
acattttttgtacttctccaagaag

SEQ ID NO: 151303 - DNA, 25 bp, Probe Sequence
acattaattcagtcactttcaaaga

SEQ ID NO: 151304 - DNA, 25 bp, Probe Sequence
acattcatcttcgactttctaaaaa

SEQ ID NO: 151305 - DNA, 25 bp, Probe Sequence
acttctctctcctttacgagacgaa

SEQ ID NO: 151306 - DNA, 25 bp, Probe Sequence
acattcctctagcttcctggaggac

SEQ ID NO: 151307 - DNA, 25 bp, Probe Sequence
acatatcgtcttcttcgtgggaaag

SEQ ID NO: 151308 - DNA, 25 bp, Probe Sequence
acatatcgatttttctcgctgtggc

SEQ ID NO: 151309 - DNA, 25 bp, Probe Sequence
acatctgcgtttgtcctttgagagg

SEQ ID NO: 151310 - DNA, 25 bp, Probe Sequence
acatcttactagttcctgtgggggt

SEQ ID NO: 151311 - DNA, 25 bp, Probe Sequence
acatggtattatcaactgggccagg

SEQ ID NO: 151312 - DNA, 25 bp, Probe Sequence
acatcgctacattgccaacttgggc

SEQ ID NO: 151313 - DNA, 25 bp, Probe Sequence
acatccttcgattactattcgtgcc

SEQ ID NO: 151314 - DNA, 25 bp, Probe Sequence
acatcacctaattaagagtctggaa

SEQ ID NO: 151315 - DNA, 25 bp, Probe Sequence
acatcccatacgtagttttgagagg

SEQ ID NO: 151316 - DNA, 25 bp, Probe Sequence
acatcacctgtccaagttcaaattg

SEQ ID NO: 151317 - DNA, 25 bp, Probe Sequence
acatatcctggcctcactaagaaag

SEQ ID NO: 151318 - DNA, 25 bp, Probe Sequence
acttctcattgcatcgtaatgaaat

SEQ ID NO: 151319 - DNA, 25 bp, Probe Sequence
acttctgcattcaggttggcaggaa

SEQ ID NO: 151320 - DNA, 25 bp, Probe Sequence
acttgcatgcattcattggttgttc

SEQ ID NO: 151321 - DNA, 25 bp, Probe Sequence
acttgcagtgaatggcttttccttt

SEQ ID NO: 151322 - DNA, 25 bp, Probe Sequence
acattgatttactgatcttttttca

SEQ ID NO: 151323 - DNA, 25 bp, Probe Sequence
acttggttatactatattctgtttc

SEQ ID NO: 151324 - DNA, 25 bp, Probe Sequence
acttggttcatgataactgccctga

SEQ ID NO: 151325 - DNA, 25 bp, Probe Sequence
acttggtttcatttcatgtgcccta

SEQ ID NO: 151326 - DNA, 25 bp, Probe Sequence
acttggacattctcatgcgagcctt

SEQ ID NO: 151327 - DNA, 25 bp, Probe Sequence
acttctgtccctgcaggacttagca

SEQ ID NO: 151328 - DNA, 25 bp, Probe Sequence
acatttcctactgcagtatttgagc

SEQ ID NO: 151329 - DNA, 25 bp, Probe Sequence
acatttcctactgcagtatttgagc

SEQ ID NO: 151330 - DNA, 25 bp, Probe Sequence
acttctccacgtgctgtgttatggt

SEQ ID NO: 151331 - DNA, 25 bp, Probe Sequence
acttgcctctggacactggttattt

SEQ ID NO: 151332 - DNA, 25 bp, Probe Sequence
acatggcccaggacaaggttgctca

SEQ ID NO: 151333 - DNA, 25 bp, Probe Sequence
acaggcccatgaattacttcctcac

SEQ ID NO: 151334 - DNA, 25 bp, Probe Sequence
acatcggccttaatcctggttaccg

SEQ ID NO: 151335 - DNA, 25 bp, Probe Sequence
acatcgagcctgatgagcgctgctt

SEQ ID NO: 151336 - DNA, 25 bp, Probe Sequence
acatcacctgctacatgatggccgt

SEQ ID NO: 151337 - DNA, 25 bp, Probe Sequence
acatcacgcatacctgtagccatgt

SEQ ID NO: 151338 - DNA, 25 bp, Probe Sequence
acatcaacatctgctatcacttatc

SEQ ID NO: 151339 - DNA, 25 bp, Probe Sequence
acagagacacgggcatccttgactc

SEQ ID NO: 151340 - DNA, 25 bp, Probe Sequence
acaggacatgcacaccacttagtta

SEQ ID NO: 151341 - DNA, 25 bp, Probe Sequence
acatccctagatactactcaagtta

SEQ ID NO: 151342 - DNA, 25 bp, Probe Sequence
acatagctttgtttacccagatata

SEQ ID NO: 151343 - DNA, 25 bp, Probe Sequence
acatactacgtaatggccggctgtc

SEQ ID NO: 151344 - DNA, 25 bp, Probe Sequence
acatttaagagatttcctagttcaa

SEQ ID NO: 151345 - DNA, 25 bp, Probe Sequence
acattgttagagtattatcaagtaa

SEQ ID NO: 151346 - DNA, 25 bp, Probe Sequence
acttctgtgaattttaccactcagt

SEQ ID NO: 151347 - DNA, 25 bp, Probe Sequence
acattcgatacatcttcacagccac

SEQ ID NO: 151348 - DNA, 25 bp, Probe Sequence
acataggtgatcaattcacaaggcc

SEQ ID NO: 151349 - DNA, 25 bp, Probe Sequence
acatcagggacttcctagaggaggc

SEQ ID NO: 151350 - DNA, 25 bp, Probe Sequence
acttgggaaagctaaggtgggcaga

SEQ ID NO: 151351 - DNA, 25 bp, Probe Sequence
acttgctgccattagtaaggatttc

SEQ ID NO: 151352 - DNA, 25 bp, Probe Sequence
acattgctgccataccaggcaatta

SEQ ID NO: 151353 - DNA, 25 bp, Probe Sequence
acttgcctgtagtctcagctactta

SEQ ID NO: 151354 - DNA, 25 bp, Probe Sequence
acttccatcttgtaatgctacaatt

SEQ ID NO: 151355 - DNA, 25 bp, Probe Sequence
acttctgcatcttacagtcagcaca

SEQ ID NO: 151356 - DNA, 25 bp, Probe Sequence
acttgctgatattgcacagtcacag

SEQ ID NO: 151357 - DNA, 25 bp, Probe Sequence
acatcctgaatctgacccaggcaaa

SEQ ID NO: 151358 - DNA, 25 bp, Probe Sequence
acatcctgactctgacttctttgga

SEQ ID NO: 151359 - DNA, 25 bp, Probe Sequence
acatactggtcgtcttgttatagga

SEQ ID NO: 151360 - DNA, 25 bp, Probe Sequence
acttctgttctgtttggattggtga

SEQ ID NO: 151361 - DNA, 25 bp, Probe Sequence
acttcgagtcagtgctggatcggga

SEQ ID NO: 151362 - DNA, 25 bp, Probe Sequence
acttccagtcgaatgctgaaccgcg

SEQ ID NO: 151363 - DNA, 25 bp, Probe Sequence
acttcggctatgacctgtaccgggt

SEQ ID NO: 151364 - DNA, 25 bp, Probe Sequence
acattcgagttgaggtacgcgcgcg

SEQ ID NO: 151365 - DNA, 25 bp, Probe Sequence
acattcgagctggcaatggctaccc

SEQ ID NO: 151366 - DNA, 25 bp, Probe Sequence
cactccgagctggacgtgcgaacgg

SEQ ID NO: 151367 - DNA, 25 bp, Probe Sequence
acttcgagatacgggcacatacgga

SEQ ID NO: 151368 - DNA, 25 bp, Probe Sequence
acttccagaagcagtgccatgaatg

SEQ ID NO: 151369 - DNA, 25 bp, Probe Sequence
acttccaacagttgctgactcacat

SEQ ID NO: 151370 - DNA, 25 bp, Probe Sequence
acatgtccaacgtgcagactccacg

SEQ ID NO: 151371 - DNA, 25 bp, Probe Sequence
acatcgccagcaggatggacaccac

SEQ ID NO: 151372 - DNA, 25 bp, Probe Sequence
acatcagcctgatattctatgctga

SEQ ID NO: 151373 - DNA, 25 bp, Probe Sequence
acattccatgttttaatctgagcct

SEQ ID NO: 151374 - DNA, 25 bp, Probe Sequence
acttccagtgttcaagctttttcaa

SEQ ID NO: 151375 - DNA, 25 bp, Probe Sequence
acttccagtgttcaagctttttcaa

SEQ ID NO: 151376 - DNA, 25 bp, Probe Sequence
acttccttggttaagctgtcttgta

SEQ ID NO: 151377 - DNA, 25 bp, Probe Sequence
acattgccttggtgaagctgtctgc

SEQ ID NO: 151378 - DNA, 25 bp, Probe Sequence
acatcctccttgggagggtccagta

SEQ ID NO: 151379 - DNA, 25 bp, Probe Sequence
acatcctcaccaagagattgtgtgg

SEQ ID NO: 151380 - DNA, 25 bp, Probe Sequence
acatcatctcccaaggggtgctaaa

SEQ ID NO: 151381 - DNA, 25 bp, Probe Sequence
aactgctgccttcgaagtgtgcgaa

SEQ ID NO: 151382 - DNA, 25 bp, Probe Sequence
acatcttgcattaggaagtgactta

SEQ ID NO: 151383 - DNA, 25 bp, Probe Sequence
acatttgtgtgatggcttgactcaa

SEQ ID NO: 151384 - DNA, 25 bp, Probe Sequence
acattttcatgcacagtagattcaa

SEQ ID NO: 151385 - DNA, 25 bp, Probe Sequence
acagtagctaaaactcagattcaag

SEQ ID NO: 151386 - DNA, 25 bp, Probe Sequence
acatctttaaaagcatagtcacaga

SEQ ID NO: 151387 - DNA, 25 bp, Probe Sequence
acatcttttaatcattcaccccatt

SEQ ID NO: 151388 - DNA, 25 bp, Probe Sequence
acattgtttatatcagttcacccgt

SEQ ID NO: 151389 - DNA, 25 bp, Probe Sequence
acaccattttgatcattaacccgag

SEQ ID NO: 151390 - DNA, 25 bp, Probe Sequence
acagccaacttttcttaataccata

SEQ ID NO: 151391 - DNA, 25 bp, Probe Sequence
acagaaacttttcctttgtccatcg

SEQ ID NO: 151392 - DNA, 25 bp, Probe Sequence
acaaggattcttctatttcaccagc

SEQ ID NO: 151393 - DNA, 25 bp, Probe Sequence
acaaagtttctctttactgccacag

SEQ ID NO: 151394 - DNA, 25 bp, Probe Sequence
acttgagttctatttaccttgcaca

SEQ ID NO: 151395 - DNA, 25 bp, Probe Sequence
acattatttctctaaaacttccaca

SEQ ID NO: 151396 - DNA, 25 bp, Probe Sequence
acataggtgtctccaaaatctttga

SEQ ID NO: 151397 - DNA, 25 bp, Probe Sequence
acatggtttctgcccataaccagga

SEQ ID NO: 151398 - DNA, 25 bp, Probe Sequence
acttgtctgcctcacatattctaag

SEQ ID NO: 151399 - DNA, 25 bp, Probe Sequence
acttgtctgagactgactttatcaa

SEQ ID NO: 151400 - DNA, 25 bp, Probe Sequence
acttgttgagatagttggttgccac

SEQ ID NO: 151401 - DNA, 25 bp, Probe Sequence
acttgttgagatagttggttgccac

SEQ ID NO: 151402 - DNA, 25 bp, Probe Sequence
acatttatgaatcgtaggactgctg

SEQ ID NO: 151403 - DNA, 25 bp, Probe Sequence
acatctacgttgctcagagccggtg

SEQ ID NO: 151404 - DNA, 25 bp, Probe Sequence
acaggatcctttcaacagggctgcc

SEQ ID NO: 151405 - DNA, 25 bp, Probe Sequence
acaggtggatttcgacaaggtcatt

SEQ ID NO: 151406 - DNA, 25 bp, Probe Sequence
acatggccctttacatagtggttat

SEQ ID NO: 151407 - DNA, 25 bp, Probe Sequence
acatgacccatttaatgcagcttgc

SEQ ID NO: 151408 - DNA, 25 bp, Probe Sequence
acatatcactgaaagaaggctggca

SEQ ID NO: 151409 - DNA, 25 bp, Probe Sequence
acataccggtaagtggggcaagact

SEQ ID NO: 151410 - DNA, 25 bp, Probe Sequence
acatcactggggtcacttgggaaga

SEQ ID NO: 151411 - DNA, 25 bp, Probe Sequence
acatgacagggccccggtgtgagga

SEQ ID NO: 151412 - DNA, 25 bp, Probe Sequence
acatcagcgaggacccgagctgggc

SEQ ID NO: 151413 - DNA, 25 bp, Probe Sequence
acatagcagaggctccaggctgact

SEQ ID NO: 151414 - DNA, 25 bp, Probe Sequence
acatatctaggttcaagtgcgccag

SEQ ID NO: 151415 - DNA, 25 bp, Probe Sequence
acattgccaaaatagtgtgccacta

SEQ ID NO: 151416 - DNA, 25 bp, Probe Sequence
acatgcccaaacttcgtcggcagat

SEQ ID NO: 151417 - DNA, 25 bp, Probe Sequence
acatttcacaaattcgctggggata

SEQ ID NO: 151418 - DNA, 25 bp, Probe Sequence
acatgttgccaacaccttgagaagc

SEQ ID NO: 151419 - DNA, 25 bp, Probe Sequence
acattattagtgcatcctctgatgg

SEQ ID NO: 151420 - DNA, 25 bp, Probe Sequence
acatatattatacttgctactggaa

SEQ ID NO: 151421 - DNA, 25 bp, Probe Sequence
acatctttgatcatctaatctggat

SEQ ID NO: 151422 - DNA, 25 bp, Probe Sequence
acatattttttccacatgcaggaaa

SEQ ID NO: 151423 - DNA, 25 bp, Probe Sequence
acattttggtgtgactaggccacac

SEQ ID NO: 151424 - DNA, 25 bp, Probe Sequence
acatttctcgtagactacccagaaa

SEQ ID NO: 151425 - DNA, 25 bp, Probe Sequence
acattcctttggtatcagacccgaa

SEQ ID NO: 151426 - DNA, 25 bp, Probe Sequence
acatcaactttgctatgaaacccac

SEQ ID NO: 151427 - DNA, 25 bp, Probe Sequence
acatcctttcatgataaaaacactc

SEQ ID NO: 151428 - DNA, 25 bp, Probe Sequence
acatccttgtctaatttcaataact

SEQ ID NO: 151429 - DNA, 25 bp, Probe Sequence
acatcagcttgccctgttaaaagat

SEQ ID NO: 151430 - DNA, 25 bp, Probe Sequence
acatcatttgcctgtttacatagtc

SEQ ID NO: 151431 - DNA, 25 bp, Probe Sequence
acattgttcatctttagtgcacttt

SEQ ID NO: 151432 - DNA, 25 bp, Probe Sequence
acatttacacatctagcagtcagtt

SEQ ID NO: 151433 - DNA, 25 bp, Probe Sequence
acatgataacactaggccagttttg

SEQ ID NO: 151434 - DNA, 25 bp, Probe Sequence
acatgaagcccctggcatttgctgg

SEQ ID NO: 151435 - DNA, 25 bp, Probe Sequence
acatgaagcccctggcatttgctgg

SEQ ID NO: 151436 - DNA, 25 bp, Probe Sequence
acagtgatcgccaataggactatgt

SEQ ID NO: 151437 - DNA, 25 bp, Probe Sequence
acatgtacctgcacgggctgaggaa

SEQ ID NO: 151438 - DNA, 25 bp, Probe Sequence
acattacttggagggttgcagtttc

SEQ ID NO: 151439 - DNA, 25 bp, Probe Sequence
acattgaaatgtcaggtagtgttct

SEQ ID NO: 151440 - DNA, 25 bp, Probe Sequence
acattcaggaggcaagtcaatcttt

SEQ ID NO: 151441 - DNA, 25 bp, Probe Sequence
acattcactggtaaattcaagtttt

SEQ ID NO: 151442 - DNA, 25 bp, Probe Sequence
acatttctattcagagtactgtttt

SEQ ID NO: 151443 - DNA, 25 bp, Probe Sequence
acatctttttctcactgagcgtctg

SEQ ID NO: 151444 - DNA, 25 bp, Probe Sequence
acatcgtttgttcatgctacaccat

SEQ ID NO: 151445 - DNA, 25 bp, Probe Sequence
acttgtttgttgaatgtctcctctc

SEQ ID NO: 151446 - DNA, 25 bp, Probe Sequence
acttggtataggaagcttagctctc

SEQ ID NO: 151447 - DNA, 25 bp, Probe Sequence
acattgtttaccaagctgtagtgct

SEQ ID NO: 151448 - DNA, 25 bp, Probe Sequence
acattgaggttcactctttgtgcta

SEQ ID NO: 151449 - DNA, 25 bp, Probe Sequence
acattgattttaactgctttggtgt

SEQ ID NO: 151450 - DNA, 25 bp, Probe Sequence
acatttgtacattcctgatactggg

SEQ ID NO: 151451 - DNA, 25 bp, Probe Sequence
acataattaaacatgatcctgagtt

SEQ ID NO: 151452 - DNA, 25 bp, Probe Sequence
acatcaagttaccatatgatttagc

SEQ ID NO: 151453 - DNA, 25 bp, Probe Sequence
acatcccttcacaaagagtatatgc

SEQ ID NO: 151454 - DNA, 25 bp, Probe Sequence
acatctcctcctacattgaacagac

SEQ ID NO: 151455 - DNA, 25 bp, Probe Sequence
acttcctttatcatctagcagcagc

SEQ ID NO: 151456 - DNA, 25 bp, Probe Sequence
acttgttatttgacttagcaggtgc

SEQ ID NO: 151457 - DNA, 25 bp, Probe Sequence
acttgttgatttctgatgtgcaggg

SEQ ID NO: 151458 - DNA, 25 bp, Probe Sequence
acttgcttcacgtggatgctcagtg

SEQ ID NO: 151459 - DNA, 25 bp, Probe Sequence
acattctctccctgaagcaagtgtg

SEQ ID NO: 151460 - DNA, 25 bp, Probe Sequence
acttgcctcctgttgacacaattgt

SEQ ID NO: 151461 - DNA, 25 bp, Probe Sequence
acttggctcctctaaacatttgctg

SEQ ID NO: 151462 - DNA, 25 bp, Probe Sequence
acttgagtctcaggtaatgctttcc

SEQ ID NO: 151463 - DNA, 25 bp, Probe Sequence
acttgcaataaggctgtgatgttct

SEQ ID NO: 151464 - DNA, 25 bp, Probe Sequence
acatacaaatgggcttatattgcgc

SEQ ID NO: 151465 - DNA, 25 bp, Probe Sequence
acattcacaatgtcttgtttggctg

SEQ ID NO: 151466 - DNA, 25 bp, Probe Sequence
acatcatcaactgcggcatctacct

SEQ ID NO: 151467 - DNA, 25 bp, Probe Sequence
acatcttacatggatagcagtaggc

SEQ ID NO: 151468 - DNA, 25 bp, Probe Sequence
acatctaccagtccaaggaggccgg

SEQ ID NO: 151469 - DNA, 25 bp, Probe Sequence
acatcgtcacagtgggcgagtgccg

SEQ ID NO: 151470 - DNA, 25 bp, Probe Sequence
acatcgtcacagtgggcgagtgccg

SEQ ID NO: 151471 - DNA, 25 bp, Probe Sequence
acatgcttcatcgtcggtccgggct

SEQ ID NO: 151472 - DNA, 25 bp, Probe Sequence
acatcttattgttggtaatagtgct

SEQ ID NO: 151473 - DNA, 25 bp, Probe Sequence
acatctaaagtgcgaattcagtcaa

SEQ ID NO: 151474 - DNA, 25 bp, Probe Sequence
acatggagacggcgagactgcgtca

SEQ ID NO: 151475 - DNA, 25 bp, Probe Sequence
acatgtcgacgccatcgagcaacag

SEQ ID NO: 151476 - DNA, 25 bp, Probe Sequence
acattgccatcccatgcaacaacaa

SEQ ID NO: 151477 - DNA, 25 bp, Probe Sequence
acattgccatcccatgcaacaacaa

SEQ ID NO: 151478 - DNA, 25 bp, Probe Sequence
acttgtcacgcatgccacacaagaa

SEQ ID NO: 151479 - DNA, 25 bp, Probe Sequence
acatctgtcacttgtcctgaaaaaa

SEQ ID NO: 151480 - DNA, 25 bp, Probe Sequence
acatgagtccggactgtgtaagtaa

SEQ ID NO: 151481 - DNA, 25 bp, Probe Sequence
acatggggaaagtcagaaagataga

SEQ ID NO: 151482 - DNA, 25 bp, Probe Sequence
acatggtggaccccaaggacatcga

SEQ ID NO: 151483 - DNA, 25 bp, Probe Sequence
acatttgggccagctaaacatgctt

SEQ ID NO: 151484 - DNA, 25 bp, Probe Sequence
acatttgagagctaactatattttt

SEQ ID NO: 151485 - DNA, 25 bp, Probe Sequence
acatctttgacaacactaatgtttt

SEQ ID NO: 151486 - DNA, 25 bp, Probe Sequence
acattcttgacaactatttgctttt

SEQ ID NO: 151487 - DNA, 25 bp, Probe Sequence
acatatactgacagctcatttatcc

SEQ ID NO: 151488 - DNA, 25 bp, Probe Sequence
acttggcagccttgtgatgtcatac

SEQ ID NO: 151489 - DNA, 25 bp, Probe Sequence
acatttcatgtcaggattgcaagca

SEQ ID NO: 151490 - DNA, 25 bp, Probe Sequence
acatcttcttcatgagcaaagtcac

SEQ ID NO: 151491 - DNA, 25 bp, Probe Sequence
acatatgtttcacagtacaggatct

SEQ ID NO: 151492 - DNA, 25 bp, Probe Sequence
acatttctctgagcagtcagggtgg

SEQ ID NO: 151493 - DNA, 25 bp, Probe Sequence
acttgtcttgcttatggcatgaggg

SEQ ID NO: 151494 - DNA, 25 bp, Probe Sequence
acttgtcatgtcatacagtttgtga

SEQ ID NO: 151495 - DNA, 25 bp, Probe Sequence
acttggcagtcagagcatcatgctt

SEQ ID NO: 151496 - DNA, 25 bp, Probe Sequence
acttggcgctcagagcctgcaagtg

SEQ ID NO: 151497 - DNA, 25 bp, Probe Sequence
acatggtgtgccacaggctgcaagc

SEQ ID NO: 151498 - DNA, 25 bp, Probe Sequence
acatggtgtgccacaggctgcaagc

SEQ ID NO: 151499 - DNA, 25 bp, Probe Sequence
acatagtggctctgcgtgccaaggt

SEQ ID NO: 151500 - DNA, 25 bp, Probe Sequence
acatatctgtcttggtggcccaatg

SEQ ID NO: 151501 - DNA, 25 bp, Probe Sequence
acatttggctaggtgtctctcacgg

SEQ ID NO: 151502 - DNA, 25 bp, Probe Sequence
acatttggctaggtgtctctcacgg

SEQ ID NO: 151503 - DNA, 25 bp, Probe Sequence
acatataggtgagggtctccacatt

SEQ ID NO: 151504 - DNA, 25 bp, Probe Sequence
acatccggtgtggtcttgtacattt

SEQ ID NO: 151505 - DNA, 25 bp, Probe Sequence
acatagaccttcgctttatttttgt

SEQ ID NO: 151506 - DNA, 25 bp, Probe Sequence
acagaaccttaagtttatgtttgag

SEQ ID NO: 151507 - DNA, 25 bp, Probe Sequence
acagttccgtaagctctttattggt

SEQ ID NO: 151508 - DNA, 25 bp, Probe Sequence
acagtcctgcttagagcccttaaaa

SEQ ID NO: 151509 - DNA, 25 bp, Probe Sequence
acatattacattagtggcacttaat

SEQ ID NO: 151510 - DNA, 25 bp, Probe Sequence
acatattccatttgtcctttcagaa

SEQ ID NO: 151511 - DNA, 25 bp, Probe Sequence
acttgtgacatatttcttgctctaa

SEQ ID NO: 151512 - DNA, 25 bp, Probe Sequence
acttgctcaaatattggcagctaga

SEQ ID NO: 151513 - DNA, 25 bp, Probe Sequence
acttgtcccaagtctgacagccaga

SEQ ID NO: 151514 - DNA, 25 bp, Probe Sequence
acttgaccgaaggtaagcaggcatg

SEQ ID NO: 151515 - DNA, 25 bp, Probe Sequence
acttgacgcatgaagtttcgcaaca

SEQ ID NO: 151516 - DNA, 25 bp, Probe Sequence
acttggctcttattcttccacaaga

SEQ ID NO: 151517 - DNA, 25 bp, Probe Sequence
acactgacttatttccctaaactat

SEQ ID NO: 151518 - DNA, 25 bp, Probe Sequence
acattgtcattttttcttagaactt

SEQ ID NO: 151519 - DNA, 25 bp, Probe Sequence
acattctttatgcttttagtagtat

SEQ ID NO: 151520 - DNA, 25 bp, Probe Sequence
acattattccatttgtattttaggt

SEQ ID NO: 151521 - DNA, 25 bp, Probe Sequence
acattgtaccaaatgttttcctttg

SEQ ID NO: 151522 - DNA, 25 bp, Probe Sequence
acattttcagctatatttacttttt

SEQ ID NO: 151523 - DNA, 25 bp, Probe Sequence
acattttcctgtgcattaacctctg

SEQ ID NO: 151524 - DNA, 25 bp, Probe Sequence
acttgtgttcaatctgtgaagcctt

SEQ ID NO: 151525 - DNA, 25 bp, Probe Sequence
acatctggagattttcggaacgctt

SEQ ID NO: 151526 - DNA, 25 bp, Probe Sequence
acatcgccgagtttcggctcaactt

SEQ ID NO: 151527 - DNA, 25 bp, Probe Sequence
acatcccatacatataggcaaactc

SEQ ID NO: 151528 - DNA, 25 bp, Probe Sequence
acatcttataaaatggccccatccc

SEQ ID NO: 151529 - DNA, 25 bp, Probe Sequence
acatcttcaactaaaatcccatact

SEQ ID NO: 151530 - DNA, 25 bp, Probe Sequence
acatctgtctccagaaaccagcaga

SEQ ID NO: 151531 - DNA, 25 bp, Probe Sequence
acatcgtgatcaacgcaaacccggc

SEQ ID NO: 151532 - DNA, 25 bp, Probe Sequence
acatcagagacaaggaagcccccca

SEQ ID NO: 151533 - DNA, 25 bp, Probe Sequence
acatccagaaagagtccaccctgca

SEQ ID NO: 151534 - DNA, 25 bp, Probe Sequence
acatccagaaagagtccaccctgca

SEQ ID NO: 151535 - DNA, 25 bp, Probe Sequence
acatgccagaaaagtgaagtcctag

SEQ ID NO: 151536 - DNA, 25 bp, Probe Sequence
acatgagctaagtttggagacctga

SEQ ID NO: 151537 - DNA, 25 bp, Probe Sequence
acatgagctaagtttggagacctga

SEQ ID NO: 151538 - DNA, 25 bp, Probe Sequence
acatagctcaatgcctggaatatta

SEQ ID NO: 151539 - DNA, 25 bp, Probe Sequence
acatcctcatcaagcctgagacttt

SEQ ID NO: 151540 - DNA, 25 bp, Probe Sequence
acattctcacataagcccagttcat

SEQ ID NO: 151541 - DNA, 25 bp, Probe Sequence
acattcgaagaacccgtatacataa

SEQ ID NO: 151542 - DNA, 25 bp, Probe Sequence
acatgcctgtaatcccagttatctc

SEQ ID NO: 151543 - DNA, 25 bp, Probe Sequence
acatttgttagaaccagtcttttga

SEQ ID NO: 151544 - DNA, 25 bp, Probe Sequence
acatttgtgttacttacctttggag

SEQ ID NO: 151545 - DNA, 25 bp, Probe Sequence
acatttgtttagtaaatcccttcag

SEQ ID NO: 151546 - DNA, 25 bp, Probe Sequence
acatttctggtttataatctccttt

SEQ ID NO: 151547 - DNA, 25 bp, Probe Sequence
acattgttgtttgtaatcacactct

SEQ ID NO: 151548 - DNA, 25 bp, Probe Sequence
acataggttttgattgtcacctcaa

SEQ ID NO: 151549 - DNA, 25 bp, Probe Sequence
acagtagttttatttccacagccac

SEQ ID NO: 151550 - DNA, 25 bp, Probe Sequence
acagtagttttatttccacagccac

SEQ ID NO: 151551 - DNA, 25 bp, Probe Sequence
acatgacagtggttatatttcaacc

SEQ ID NO: 151552 - DNA, 25 bp, Probe Sequence
acatccagtgagggttttattacgc

SEQ ID NO: 151553 - DNA, 25 bp, Probe Sequence
acatccaaggcagcttattcgaact

SEQ ID NO: 151554 - DNA, 25 bp, Probe Sequence
acatcaaagcaatctgtacaaaagc

SEQ ID NO: 151555 - DNA, 25 bp, Probe Sequence
acatcactggaatcttccaaattct

SEQ ID NO: 151556 - DNA, 25 bp, Probe Sequence
acagcagttgaaccattccacattc

SEQ ID NO: 151557 - DNA, 25 bp, Probe Sequence
acaggttaacctgctggcattgtat

SEQ ID NO: 151558 - DNA, 25 bp, Probe Sequence
cggattttaaatagcgtattgtata

SEQ ID NO: 151559 - DNA, 25 bp, Probe Sequence
caggtattttcacaggtttgtttct

SEQ ID NO: 151560 - DNA, 25 bp, Probe Sequence
aatttcactttgcggagttggtcct

SEQ ID NO: 151561 - DNA, 25 bp, Probe Sequence
acattacctcctctggatgttactt

SEQ ID NO: 151562 - DNA, 25 bp, Probe Sequence
acattaactgcccatttgtgtaatt

SEQ ID NO: 151563 - DNA, 25 bp, Probe Sequence
acattaattgctgtcctatgataca

SEQ ID NO: 151564 - DNA, 25 bp, Probe Sequence
acattactgtgtgagttgtgcaatt

SEQ ID NO: 151565 - DNA, 25 bp, Probe Sequence
acattgacgtagtcgttgtcattcc

SEQ ID NO: 151566 - DNA, 25 bp, Probe Sequence
acattcagttgttcaggttcattcg

SEQ ID NO: 151567 - DNA, 25 bp, Probe Sequence
acattgctgttgtgcaggtctcttc

SEQ ID NO: 151568 - DNA, 25 bp, Probe Sequence
acattctcaagtggcagtttcatta

SEQ ID NO: 151569 - DNA, 25 bp, Probe Sequence
acattgtactgttgctttaatatga

SEQ ID NO: 151570 - DNA, 25 bp, Probe Sequence
acattgtactgtgctttttctggaa

SEQ ID NO: 151571 - DNA, 25 bp, Probe Sequence
acatggtggcatgcgcttgtttaaa

SEQ ID NO: 151572 - DNA, 25 bp, Probe Sequence
acattgggcatgagggatatataga

SEQ ID NO: 151573 - DNA, 25 bp, Probe Sequence
acatgttgggatgggaaactggagt

SEQ ID NO: 151574 - DNA, 25 bp, Probe Sequence
acatgttgtgagaggacccagtgga

SEQ ID NO: 151575 - DNA, 25 bp, Probe Sequence
acatttcttgtaggcatcaccatga

SEQ ID NO: 151576 - DNA, 25 bp, Probe Sequence
acatttttgtattacagcactgcac

SEQ ID NO: 151577 - DNA, 25 bp, Probe Sequence
acattatgaatgtataacccagaca

SEQ ID NO: 151578 - DNA, 25 bp, Probe Sequence
acaccggagagaaaccctacaaatg

SEQ ID NO: 151579 - DNA, 25 bp, Probe Sequence
acatcacttgaacaaccctcagaaa

SEQ ID NO: 151580 - DNA, 25 bp, Probe Sequence
acatccagtgaaaatacccctcaaa

SEQ ID NO: 151581 - DNA, 25 bp, Probe Sequence
acatccacagtataaggcacctaca

SEQ ID NO: 151582 - DNA, 25 bp, Probe Sequence
acatctacgtatttagtcatcgcta

SEQ ID NO: 151583 - DNA, 25 bp, Probe Sequence
acatctacgtattagtctcgctatt

SEQ ID NO: 151584 - DNA, 25 bp, Probe Sequence
acatctacgtattagtcatcgctat

SEQ ID NO: 151585 - DNA, 25 bp, Probe Sequence
acatctacgtattagtcatcgctat

SEQ ID NO: 151586 - DNA, 25 bp, Probe Sequence
acatctacgtattagtcatcgctat

SEQ ID NO: 151587 - DNA, 25 bp, Probe Sequence
acatctacgtattagtcatcgctat

SEQ ID NO: 151588 - DNA, 25 bp, Probe Sequence
acatcatatctgataaccagaggtc

SEQ ID NO: 151589 - DNA, 25 bp, Probe Sequence
acattttgaccaaccgcagcaatgc

SEQ ID NO: 151590 - DNA, 25 bp, Probe Sequence
acatctattcccatccagagacatt

SEQ ID NO: 151591 - DNA, 25 bp, Probe Sequence
acatcttctcccactaggaatttaa

SEQ ID NO: 151592 - DNA, 25 bp, Probe Sequence
acatcatttacgtggacaactttca

SEQ ID NO: 151593 - DNA, 25 bp, Probe Sequence
acatatttataagggagtcacttta

SEQ ID NO: 151594 - DNA, 25 bp, Probe Sequence
acattgttttatcaagtcactgtta

SEQ ID NO: 151595 - DNA, 25 bp, Probe Sequence
acatctttttgtcacttcatcgttt

SEQ ID NO: 151596 - DNA, 25 bp, Probe Sequence
acatcttatatttgtgacccttgtt

SEQ ID NO: 151597 - DNA, 25 bp, Probe Sequence
acattggaacactatacctattatt

SEQ ID NO: 151598 - DNA, 25 bp, Probe Sequence
acatgtgcgagaggcttacctatgg

SEQ ID NO: 151599 - DNA, 25 bp, Probe Sequence
acatggagagcaggcaattcaaatt

SEQ ID NO: 151600 - DNA, 25 bp, Probe Sequence
acattggccagtggactcatccatt

SEQ ID NO: 151601 - DNA, 25 bp, Probe Sequence
acattagccagtagctcactctttt

SEQ ID NO: 151602 - DNA, 25 bp, Probe Sequence
acattgaccagcttgtctgtctggt

SEQ ID NO: 151603 - DNA, 25 bp, Probe Sequence
acatagtcagactttctcttggtat

SEQ ID NO: 151604 - DNA, 25 bp, Probe Sequence
acaggacagactaactttttaaatg

SEQ ID NO: 151605 - DNA, 25 bp, Probe Sequence
acaggtcaagaataacacttcaaag

SEQ ID NO: 151606 - DNA, 25 bp, Probe Sequence
acaggtagggacactactttcatgg

SEQ ID NO: 151607 - DNA, 25 bp, Probe Sequence
acatggtaaaaccctgtctctactg

SEQ ID NO: 151608 - DNA, 25 bp, Probe Sequence
acattatatagatccactttctcac

SEQ ID NO: 151609 - DNA, 25 bp, Probe Sequence
acatttagatgacccaggctttcaa

SEQ ID NO: 151610 - DNA, 25 bp, Probe Sequence
acattcatcaatatccctcttgtaa

SEQ ID NO: 151611 - DNA, 25 bp, Probe Sequence
acattataaatctctcctcttcaaa

SEQ ID NO: 151612 - DNA, 25 bp, Probe Sequence
acatagctaaaccctgtctctacta

SEQ ID NO: 151613 - DNA, 25 bp, Probe Sequence
acatcctactgtgcgtgtatatacg

SEQ ID NO: 151614 - DNA, 25 bp, Probe Sequence
acatcccagcctgtggttacagtgc

SEQ ID NO: 151615 - DNA, 25 bp, Probe Sequence
acataccactctcatggttcatagt

SEQ ID NO: 151616 - DNA, 25 bp, Probe Sequence
acataaccatctttgattaccagct

SEQ ID NO: 151617 - DNA, 25 bp, Probe Sequence
acatcaacctcatgggtttggcttg

SEQ ID NO: 151618 - DNA, 25 bp, Probe Sequence
acattagctgtctaggcgtgtgggt

SEQ ID NO: 151619 - DNA, 25 bp, Probe Sequence
acatctagtgccatcgctgtggtag

SEQ ID NO: 151620 - DNA, 25 bp, Probe Sequence
acattctcttcaatccttggtgtga

SEQ ID NO: 151621 - DNA, 25 bp, Probe Sequence
acattctctggtgcttgtggatgaa

SEQ ID NO: 151622 - DNA, 25 bp, Probe Sequence
acatatcattaagcattggctgaaa

SEQ ID NO: 151623 - DNA, 25 bp, Probe Sequence
acatatctcttatcttacgaaaaaa

SEQ ID NO: 151624 - DNA, 25 bp, Probe Sequence
acatcttcctcttttacgtgaatga

SEQ ID NO: 151625 - DNA, 25 bp, Probe Sequence
acattttgcctgttttctgtttcaa

SEQ ID NO: 151626 - DNA, 25 bp, Probe Sequence
acattttgcctgttttctgtttcaa

SEQ ID NO: 151627 - DNA, 25 bp, Probe Sequence
acattttgcctgttttctgtttcaa

SEQ ID NO: 151628 - DNA, 25 bp, Probe Sequence
acattgttgccgtttcatacttcta

SEQ ID NO: 151629 - DNA, 25 bp, Probe Sequence
acatatacaccgtgcaatactatgc

SEQ ID NO: 151630 - DNA, 25 bp, Probe Sequence
acatataacccagcaaatctgtact

SEQ ID NO: 151631 - DNA, 25 bp, Probe Sequence
acatttactccagcatctattgtat

SEQ ID NO: 151632 - DNA, 25 bp, Probe Sequence
acatttcgtacttcatctacatgtt

SEQ ID NO: 151633 - DNA, 25 bp, Probe Sequence
acatttgcttctgacacaactgtgt

SEQ ID NO: 151634 - DNA, 25 bp, Probe Sequence
acatcttgggttacccactctgtcc

SEQ ID NO: 151635 - DNA, 25 bp, Probe Sequence
acatgatttgtaaagccgacagtat

SEQ ID NO: 151636 - DNA, 25 bp, Probe Sequence
acatggttgtaatatgcgactgcga

SEQ ID NO: 151637 - DNA, 25 bp, Probe Sequence
acatctgtcagaaaattgtaccgat

SEQ ID NO: 151638 - DNA, 25 bp, Probe Sequence
acatcaggaattgtagatatccgta

SEQ ID NO: 151639 - DNA, 25 bp, Probe Sequence
acatctgggtggttagcattcaagt

SEQ ID NO: 151640 - DNA, 25 bp, Probe Sequence
acatcaaggtatcatatcccaagta

SEQ ID NO: 151641 - DNA, 25 bp, Probe Sequence
acataaagcttgctaccgctcaaaa

SEQ ID NO: 151642 - DNA, 25 bp, Probe Sequence
acttggatgattgtcaccggaggta

SEQ ID NO: 151643 - DNA, 25 bp, Probe Sequence
acactggtgctgagtgaccgggggc

SEQ ID NO: 151644 - DNA, 25 bp, Probe Sequence
acatcggttgttaaagcaggagagg

SEQ ID NO: 151645 - DNA, 25 bp, Probe Sequence
acatcaggactggtcagaaggacag

SEQ ID NO: 151646 - DNA, 25 bp, Probe Sequence
acagggcccagttaatggcagagca

SEQ ID NO: 151647 - DNA, 25 bp, Probe Sequence
acatctcagtccataaagcaaagct

SEQ ID NO: 151648 - DNA, 25 bp, Probe Sequence
acatcacgtacctgaagcacgactc

SEQ ID NO: 151649 - DNA, 25 bp, Probe Sequence
acatgcctgctagaaattcagctga

SEQ ID NO: 151650 - DNA, 25 bp, Probe Sequence
acatcaaggatctaccagtgtctga

SEQ ID NO: 151651 - DNA, 25 bp, Probe Sequence
acatcaaggctggatacggttgact

SEQ ID NO: 151652 - DNA, 25 bp, Probe Sequence
acatcatcaaggtcagagggtaaat

SEQ ID NO: 151653 - DNA, 25 bp, Probe Sequence
acatgcagcaactagcaggcgggaa

SEQ ID NO: 151654 - DNA, 25 bp, Probe Sequence
acatcagcactctgctggttctgtt

SEQ ID NO: 151655 - DNA, 25 bp, Probe Sequence
acatatgagctatgtgttgatgttg

SEQ ID NO: 151656 - DNA, 25 bp, Probe Sequence
acatatgcctcaggtgtgcttttgg

SEQ ID NO: 151657 - DNA, 25 bp, Probe Sequence
acattccactggtttctgtctatgt

SEQ ID NO: 151658 - DNA, 25 bp, Probe Sequence
acattcccatggtggcctcaagaaa

SEQ ID NO: 151659 - DNA, 25 bp, Probe Sequence
acattcccatggtggcctcaagaaa

SEQ ID NO: 151660 - DNA, 25 bp, Probe Sequence
acatgccccagagttgaccaaaaaa

SEQ ID NO: 151661 - DNA, 25 bp, Probe Sequence
acatcccacagaggaaacagaatgg

SEQ ID NO: 151662 - DNA, 25 bp, Probe Sequence
acatccccagcagcagacaacatag

SEQ ID NO: 151663 - DNA, 25 bp, Probe Sequence
acattgccgactgatgaagacagca

SEQ ID NO: 151664 - DNA, 25 bp, Probe Sequence
acagtgcagtgaccttcataaagca

SEQ ID NO: 151665 - DNA, 25 bp, Probe Sequence
acatgctgacataggcttaacagaa

SEQ ID NO: 151666 - DNA, 25 bp, Probe Sequence
acattggcagtgccacccacagaac

SEQ ID NO: 151667 - DNA, 25 bp, Probe Sequence
acattgccatctcacccaagagatt

SEQ ID NO: 151668 - DNA, 25 bp, Probe Sequence
acattcagcactcttccaggaatag

SEQ ID NO: 151669 - DNA, 25 bp, Probe Sequence
acattcgaccctagactggatcacg

SEQ ID NO: 151670 - DNA, 25 bp, Probe Sequence
acagtccagaccagactgtcccagt

SEQ ID NO: 151671 - DNA, 25 bp, Probe Sequence
acatttagacgcagctctatccctt

SEQ ID NO: 151672 - DNA, 25 bp, Probe Sequence
acatttagacgcagctctatccctt

SEQ ID NO: 151673 - DNA, 25 bp, Probe Sequence
acatattaacttgtgctgtcgcctt

SEQ ID NO: 151674 - DNA, 25 bp, Probe Sequence
acatcattattttaggagttgcctt

SEQ ID NO: 151675 - DNA, 25 bp, Probe Sequence
acacatttgcatgaaggacttcctg

SEQ ID NO: 151676 - DNA, 25 bp, Probe Sequence
acatcctgtgcatcaaggacatggc

SEQ ID NO: 151677 - DNA, 25 bp, Probe Sequence
acatccggccatggacgcaatggcc

SEQ ID NO: 151678 - DNA, 25 bp, Probe Sequence
acattctggccaggcacgatggctc

SEQ ID NO: 151679 - DNA, 25 bp, Probe Sequence
acatctatgggagcaaggagctgcg

SEQ ID NO: 151680 - DNA, 25 bp, Probe Sequence
acatccaaggaaggcagcaggcgcg

SEQ ID NO: 151681 - DNA, 25 bp, Probe Sequence
acatccaggcaccggagcaggtaga

SEQ ID NO: 151682 - DNA, 25 bp, Probe Sequence
acatcacgccagctgaggtgggtgt

SEQ ID NO: 151683 - DNA, 25 bp, Probe Sequence
acatgcaggtagctgtttggcagtt

SEQ ID NO: 151684 - DNA, 25 bp, Probe Sequence
acatgccgtgggagctgctgggatt

SEQ ID NO: 151685 - DNA, 25 bp, Probe Sequence
acatgccagaagttagagtgtggac

SEQ ID NO: 151686 - DNA, 25 bp, Probe Sequence
acatccaccatgtcttgcaatgagc

SEQ ID NO: 151687 - DNA, 25 bp, Probe Sequence
acatcactccatttctactgagact

SEQ ID NO: 151688 - DNA, 25 bp, Probe Sequence
acatcccatgtgtttctctgaactg

SEQ ID NO: 151689 - DNA, 25 bp, Probe Sequence
acatcccatgtgtttctctgaactg

SEQ ID NO: 151690 - DNA, 25 bp, Probe Sequence
acatcccatgtgtttctctgaactg

SEQ ID NO: 151691 - DNA, 25 bp, Probe Sequence
acattgcctggctatgctgtttact

SEQ ID NO: 151692 - DNA, 25 bp, Probe Sequence
acattctctggcaagtgttctcagc

SEQ ID NO: 151693 - DNA, 25 bp, Probe Sequence
acattcctgagaagtggaccccaga

SEQ ID NO: 151694 - DNA, 25 bp, Probe Sequence
acattcactgtctggtgatacctat

SEQ ID NO: 151695 - DNA, 25 bp, Probe Sequence
acatgtcaaaaccctgtacctacaa

SEQ ID NO: 151696 - DNA, 25 bp, Probe Sequence
acatctagtttctcgtcagaaatca

SEQ ID NO: 151697 - DNA, 25 bp, Probe Sequence
acatttgtttcaatgccccaaacag

SEQ ID NO: 151698 - DNA, 25 bp, Probe Sequence
acattctgtttactgccacaagcac

SEQ ID NO: 151699 - DNA, 25 bp, Probe Sequence
acatctagattatccagcacaatca

SEQ ID NO: 151700 - DNA, 25 bp, Probe Sequence
acatcaagtgtatcatatgccaagt

SEQ ID NO: 151701 - DNA, 25 bp, Probe Sequence
acataaatgctgaacattccatatt

SEQ ID NO: 151702 - DNA, 25 bp, Probe Sequence
acataacagctgcatcattgaccgc

SEQ ID NO: 151703 - DNA, 25 bp, Probe Sequence
acatgggcagtgactttgacgtctt

SEQ ID NO: 151704 - DNA, 25 bp, Probe Sequence
acatgggctgatacgttgactccgg

SEQ ID NO: 151705 - DNA, 25 bp, Probe Sequence
acagggcgatttttggtgccttact

SEQ ID NO: 151706 - DNA, 25 bp, Probe Sequence
acagagggccttttagccctaatga

SEQ ID NO: 151707 - DNA, 25 bp, Probe Sequence
aacagaggcaaatcaaccctaggaa

SEQ ID NO: 151708 - DNA, 25 bp, Probe Sequence
acatcggtctaatctactttaggac

SEQ ID NO: 151709 - DNA, 25 bp, Probe Sequence
acagggtctacatcaactattacga

SEQ ID NO: 151710 - DNA, 25 bp, Probe Sequence
acagggtggagtgtactatatacta

SEQ ID NO: 151711 - DNA, 25 bp, Probe Sequence
acagagccgggtgtgaactatggtt

SEQ ID NO: 151712 - DNA, 25 bp, Probe Sequence
acagaacgtcctgtcaactcagctg

SEQ ID NO: 151713 - DNA, 25 bp, Probe Sequence
acagatgcacgtgccattcaggccg

SEQ ID NO: 151714 - DNA, 25 bp, Probe Sequence
acagcagcattcatgtcatgtcatg

SEQ ID NO: 151715 - DNA, 25 bp, Probe Sequence
acatggcagtcacggcgtctgatga

SEQ ID NO: 151716 - DNA, 25 bp, Probe Sequence
acatggcagctgacggtgacttcaa

SEQ ID NO: 151717 - DNA, 25 bp, Probe Sequence
acatcgagtagagaacatcagccat

SEQ ID NO: 151718 - DNA, 25 bp, Probe Sequence
acatcaggtattgcactctcagtct

SEQ ID NO: 151719 - DNA, 25 bp, Probe Sequence
acatcgtgtcaagtgaagtagtttt

SEQ ID NO: 151720 - DNA, 25 bp, Probe Sequence
acatttgctctggctagcagtcttt

SEQ ID NO: 151721 - DNA, 25 bp, Probe Sequence
acatacacacatgcgtgcaggcttg

SEQ ID NO: 151722 - DNA, 25 bp, Probe Sequence
acatcacacactggggcctgttgtg

SEQ ID NO: 151723 - DNA, 25 bp, Probe Sequence
acatatcacctcatggcctattata

SEQ ID NO: 151724 - DNA, 25 bp, Probe Sequence
acatgaaatgttctgcactgattaa

SEQ ID NO: 151725 - DNA, 25 bp, Probe Sequence
acatgctaaactctgcagtgaatga

SEQ ID NO: 151726 - DNA, 25 bp, Probe Sequence
acatcagagaattcgtactgaagag

SEQ ID NO: 151727 - DNA, 25 bp, Probe Sequence
acataataagacctcatctcagaga

SEQ ID NO: 151728 - DNA, 25 bp, Probe Sequence
acatatatatgttagttctcaggat

SEQ ID NO: 151729 - DNA, 25 bp, Probe Sequence
acataattgctccaagcttcctgta

SEQ ID NO: 151730 - DNA, 25 bp, Probe Sequence
acattcaggcaccagcatattccta

SEQ ID NO: 151731 - DNA, 25 bp, Probe Sequence
acatccaagagcccattctacaagt

SEQ ID NO: 151732 - DNA, 25 bp, Probe Sequence
acatcacaagacgtcttgcactcat

SEQ ID NO: 151733 - DNA, 25 bp, Probe Sequence
acatgccgtgactctggactatatc

SEQ ID NO: 151734 - DNA, 25 bp, Probe Sequence
acatgtccgtctgctggatcaacag

SEQ ID NO: 151735 - DNA, 25 bp, Probe Sequence
acatatgccagttcctcgtagagat

SEQ ID NO: 151736 - DNA, 25 bp, Probe Sequence
acatatctcatgaatattcgtgcaa

SEQ ID NO: 151737 - DNA, 25 bp, Probe Sequence
acattacatgtattttgtgcaatta

SEQ ID NO: 151738 - DNA, 25 bp, Probe Sequence
acattatcagccctattgtcaaata

SEQ ID NO: 151739 - DNA, 25 bp, Probe Sequence
acatataccacccatagtgcttcac

SEQ ID NO: 151740 - DNA, 25 bp, Probe Sequence
acatagcagcacatccttgaggtac

SEQ ID NO: 151741 - DNA, 25 bp, Probe Sequence
acatcactgccaacttagacagccc

SEQ ID NO: 151742 - DNA, 25 bp, Probe Sequence
acattcagcacatatataacgtctc

SEQ ID NO: 151743 - DNA, 25 bp, Probe Sequence
acatcccactttttactgtttcagg

SEQ ID NO: 151744 - DNA, 25 bp, Probe Sequence
acattcaattttttggtctttctgc

SEQ ID NO: 151745 - DNA, 25 bp, Probe Sequence
acattcttgttttaagtgcctttag

SEQ ID NO: 151746 - DNA, 25 bp, Probe Sequence
acattttcttcataacccatttgga

SEQ ID NO: 151747 - DNA, 25 bp, Probe Sequence
acatttttgtactaactagcattgt

SEQ ID NO: 151748 - DNA, 25 bp, Probe Sequence
acatttttgtactaactagcattgt

SEQ ID NO: 151749 - DNA, 25 bp, Probe Sequence
acattttctaactaagcatacctta

SEQ ID NO: 151750 - DNA, 25 bp, Probe Sequence
acatttcctaactcagcttacactg

SEQ ID NO: 151751 - DNA, 25 bp, Probe Sequence
acatcttcctaacttgcctgatagc

SEQ ID NO: 151752 - DNA, 25 bp, Probe Sequence
acattttcatagttctgcctattgt

SEQ ID NO: 151753 - DNA, 25 bp, Probe Sequence
acattttctggatctcctgcatgtc

SEQ ID NO: 151754 - DNA, 25 bp, Probe Sequence
acatgttttgaaaatccttgtactt

SEQ ID NO: 151755 - DNA, 25 bp, Probe Sequence
acaggtctagtccaatcctattttt

SEQ ID NO: 151756 - DNA, 25 bp, Probe Sequence
acaggactttatacctcttttactg

SEQ ID NO: 151757 - DNA, 25 bp, Probe Sequence
acagaaattatatcccctttgagcc

SEQ ID NO: 151758 - DNA, 25 bp, Probe Sequence
acagactaatacaccacacctatag

SEQ ID NO: 151759 - DNA, 25 bp, Probe Sequence
acataccaaaatgcacctctttcat

SEQ ID NO: 151760 - DNA, 25 bp, Probe Sequence
acatccttaaaggcaccatctaata

SEQ ID NO: 151761 - DNA, 25 bp, Probe Sequence
acatttctaaatcccatcttgatat

SEQ ID NO: 151762 - DNA, 25 bp, Probe Sequence
acattttcataacacactggagcat

SEQ ID NO: 151763 - DNA, 25 bp, Probe Sequence
acatcttactaaacaccagagagtt

SEQ ID NO: 151764 - DNA, 25 bp, Probe Sequence
acatttgagccatgtcacacaaact

SEQ ID NO: 151765 - DNA, 25 bp, Probe Sequence
acatggtgggcaccttcacagacac

SEQ ID NO: 151766 - DNA, 25 bp, Probe Sequence
acatggtgatggccacagtcaagaa

SEQ ID NO: 151767 - DNA, 25 bp, Probe Sequence
acaggtaatgcatcagctctggcca

SEQ ID NO: 151768 - DNA, 25 bp, Probe Sequence
acaggatttcatcatgttgcccagg

SEQ ID NO: 151769 - DNA, 25 bp, Probe Sequence
acacgacccttatcgacgaggacgt

SEQ ID NO: 151770 - DNA, 25 bp, Probe Sequence
acacctcccttagctactcaggagg

SEQ ID NO: 151771 - DNA, 25 bp, Probe Sequence
acacccctcgtcaatttccaggagg

SEQ ID NO: 151772 - DNA, 25 bp, Probe Sequence
acatactccatagtcttttcctgtg

SEQ ID NO: 151773 - DNA, 25 bp, Probe Sequence
acatttctgtgagtgctgacttgtc

SEQ ID NO: 151774 - DNA, 25 bp, Probe Sequence
acatcctcgtggtcatgcacatttg

SEQ ID NO: 151775 - DNA, 25 bp, Probe Sequence
acatcctggaagtatgtttatggag

SEQ ID NO: 151776 - DNA, 25 bp, Probe Sequence
acatcctggaggagtctgacattga

SEQ ID NO: 151777 - DNA, 25 bp, Probe Sequence
acatccgtttattgtcctcatagac

SEQ ID NO: 151778 - DNA, 25 bp, Probe Sequence
acatccgtgtgtaatatcccgagaa

SEQ ID NO: 151779 - DNA, 25 bp, Probe Sequence
acatccgtgtgtaatatcccgagaa

SEQ ID NO: 151780 - DNA, 25 bp, Probe Sequence
acatgcacttatccaatgatcccgc

SEQ ID NO: 151781 - DNA, 25 bp, Probe Sequence
acatgacgtacataacccgttccat

SEQ ID NO: 151782 - DNA, 25 bp, Probe Sequence
acatcaggtatataccagaccccct

SEQ ID NO: 151783 - DNA, 25 bp, Probe Sequence
acatcagacttctcagagacccact

SEQ ID NO: 151784 - DNA, 25 bp, Probe Sequence
acatgaacccaggagagacgcccta

SEQ ID NO: 151785 - DNA, 25 bp, Probe Sequence
acatgaccgatgcagggaaggccat

SEQ ID NO: 151786 - DNA, 25 bp, Probe Sequence
acatgagggagcgtgggtagcctct

SEQ ID NO: 151787 - DNA, 25 bp, Probe Sequence
acatgctggctaagaacgtagactc

SEQ ID NO: 151788 - DNA, 25 bp, Probe Sequence
acatgccttcagtatactaacactc

SEQ ID NO: 151789 - DNA, 25 bp, Probe Sequence
acatgccttcagtatactaacactc

SEQ ID NO: 151790 - DNA, 25 bp, Probe Sequence
acatccttaaatatacaatcggaat

SEQ ID NO: 151791 - DNA, 25 bp, Probe Sequence
acatacctcaatataataaaggcca

SEQ ID NO: 151792 - DNA, 25 bp, Probe Sequence
acaaccccagcagtgaaaaaacgct

SEQ ID NO: 151793 - DNA, 25 bp, Probe Sequence
acaaccccaaccagagtgacctgat

SEQ ID NO: 151794 - DNA, 25 bp, Probe Sequence
aaagttaaaccaaatctgccaccat

SEQ ID NO: 151795 - DNA, 25 bp, Probe Sequence
acaagtggaagacccccttcagtat

SEQ ID NO: 151796 - DNA, 25 bp, Probe Sequence
acatgaaaaaatcccagccctagta

SEQ ID NO: 151797 - DNA, 25 bp, Probe Sequence
acagaacaactaccaaccaaaccag

SEQ ID NO: 151798 - DNA, 25 bp, Probe Sequence
aaggccaggtagacctccaaactag

SEQ ID NO: 151799 - DNA, 25 bp, Probe Sequence
cacggcaaggtcgcctaagggcttt

SEQ ID NO: 151800 - DNA, 25 bp, Probe Sequence
acatcacaagtatgccaagtaatga

SEQ ID NO: 151801 - DNA, 25 bp, Probe Sequence
acatcaccatcatcaaagaccaaaa

SEQ ID NO: 151802 - DNA, 25 bp, Probe Sequence
acagcacgcacatcaaaaacaaggg

SEQ ID NO: 151803 - DNA, 25 bp, Probe Sequence
acacttaaacagtataaaatgcgtg

SEQ ID NO: 151804 - DNA, 25 bp, Probe Sequence
gaggattattaagctaaaacctggg

SEQ ID NO: 151805 - DNA, 25 bp, Probe Sequence
acagtataaaatgcgtgaacccggg

SEQ ID NO: 151806 - DNA, 25 bp, Probe Sequence
cacgttaaacttgtcttatctcagg

SEQ ID NO: 151807 - DNA, 25 bp, Probe Sequence
acatgtgtaaaggtttcatgttcac

SEQ ID NO: 151808 - DNA, 25 bp, Probe Sequence
acatgtggaagaacctttaatcaga

SEQ ID NO: 151809 - DNA, 25 bp, Probe Sequence
acagaggaactaacgtccaacgaca

SEQ ID NO: 151810 - DNA, 25 bp, Probe Sequence
acagagaaactgtggtcctttataa

SEQ ID NO: 151811 - DNA, 25 bp, Probe Sequence
acagggttctaggagctcctgggta

SEQ ID NO: 151812 - DNA, 25 bp, Probe Sequence
acatggtttggagtcgactttggta

SEQ ID NO: 151813 - DNA, 25 bp, Probe Sequence
acagggagggagactatttcaggaa

SEQ ID NO: 151814 - DNA, 25 bp, Probe Sequence
aagaggggaagtctcttcctgcctc

SEQ ID NO: 151815 - DNA, 25 bp, Probe Sequence
aagaggggaagtctcttcctgcctc

SEQ ID NO: 151816 - DNA, 25 bp, Probe Sequence
aagaaggaataatctaccctgacta

SEQ ID NO: 151817 - DNA, 25 bp, Probe Sequence
acagtaggagacttcaataccccac

SEQ ID NO: 151818 - DNA, 25 bp, Probe Sequence
acaggagaggcctgaaggacccagg

SEQ ID NO: 151819 - DNA, 25 bp, Probe Sequence
acatggtaggcagctatgggccccg

SEQ ID NO: 151820 - DNA, 25 bp, Probe Sequence
acatggccgggctgctgaagcccac

SEQ ID NO: 151821 - DNA, 25 bp, Probe Sequence
acaggcgtgcaccggtagagggcac

SEQ ID NO: 151822 - DNA, 25 bp, Probe Sequence
acatgcctgtcctgaaagcggctgc

SEQ ID NO: 151823 - DNA, 25 bp, Probe Sequence
acatctcaataacaaactggctgct

SEQ ID NO: 151824 - DNA, 25 bp, Probe Sequence
acagcaaataagcaggacgggccca

SEQ ID NO: 151825 - DNA, 25 bp, Probe Sequence
acagcattttagcatggtaagttcc

SEQ ID NO: 151826 - DNA, 25 bp, Probe Sequence
acagttgtcaagaatgcatcaaagc

SEQ ID NO: 151827 - DNA, 25 bp, Probe Sequence
acatgttgctccgatcatcacagga

SEQ ID NO: 151828 - DNA, 25 bp, Probe Sequence
acatgttgatatacatctacatata

SEQ ID NO: 151829 - DNA, 25 bp, Probe Sequence
acatggttcccacaatcataggtat

SEQ ID NO: 151830 - DNA, 25 bp, Probe Sequence
acaggtactctcatattcaacttgt

SEQ ID NO: 151831 - DNA, 25 bp, Probe Sequence
acatcttgacttgtaatcaattatg

SEQ ID NO: 151832 - DNA, 25 bp, Probe Sequence
acatcttatgttgaaatcactttct

SEQ ID NO: 151833 - DNA, 25 bp, Probe Sequence
acatctgacaccaggaacctttctc

SEQ ID NO: 151834 - DNA, 25 bp, Probe Sequence
acatccaagtgcacagaaccatttt

SEQ ID NO: 151835 - DNA, 25 bp, Probe Sequence
acatctacctggaaggcaccttgct

SEQ ID NO: 151836 - DNA, 25 bp, Probe Sequence
acatctacctggaaggcaccttgct

SEQ ID NO: 151837 - DNA, 25 bp, Probe Sequence
acatctacctggaaggcaccttgct

SEQ ID NO: 151838 - DNA, 25 bp, Probe Sequence
acatctacattgattgagacttggc

SEQ ID NO: 151839 - DNA, 25 bp, Probe Sequence
acatctacttgcttaaattgtgggc

SEQ ID NO: 151840 - DNA, 25 bp, Probe Sequence
acatctcacttccgaaccggggaag

SEQ ID NO: 151841 - DNA, 25 bp, Probe Sequence
acaccacattttgaccttgtagggg

SEQ ID NO: 151842 - DNA, 25 bp, Probe Sequence
acatatagctttgcaaccttgtact

SEQ ID NO: 151843 - DNA, 25 bp, Probe Sequence
acagaaggtcatgacccacgtcagc

SEQ ID NO: 151844 - DNA, 25 bp, Probe Sequence
acagaatgggctggtttctttcaag

SEQ ID NO: 151845 - DNA, 25 bp, Probe Sequence
acagaatgttctgtttcattttaca

SEQ ID NO: 151846 - DNA, 25 bp, Probe Sequence
acagctatgtagaactttttttgaa

SEQ ID NO: 151847 - DNA, 25 bp, Probe Sequence
acatcttttgtactctttcatgctt

SEQ ID NO: 151848 - DNA, 25 bp, Probe Sequence
acatcatttcgttctttatcattca

SEQ ID NO: 151849 - DNA, 25 bp, Probe Sequence
acatatatattgcttttctttgcag

SEQ ID NO: 151850 - DNA, 25 bp, Probe Sequence
acatctctctctctttttttaaaat

SEQ ID NO: 151851 - DNA, 25 bp, Probe Sequence
acatcgtgtctcagttctttgtaga

SEQ ID NO: 151852 - DNA, 25 bp, Probe Sequence
acatcagtattctgccatcattttt

SEQ ID NO: 151853 - DNA, 25 bp, Probe Sequence
acatgattattcagtcctttagttt

SEQ ID NO: 151854 - DNA, 25 bp, Probe Sequence
aagggccccagtgttaatgtcttag

SEQ ID NO: 151855 - DNA, 25 bp, Probe Sequence
acaggagcgtccttttctaatgtct

SEQ ID NO: 151856 - DNA, 25 bp, Probe Sequence
acatgaacgactgctactccaagct

SEQ ID NO: 151857 - DNA, 25 bp, Probe Sequence
acatgaacgacaacgtcctgcactc

SEQ ID NO: 151858 - DNA, 25 bp, Probe Sequence
acatgataaagcactattcagccat

SEQ ID NO: 151859 - DNA, 25 bp, Probe Sequence
acagtcaaactgttttcccaacgtg

SEQ ID NO: 151860 - DNA, 25 bp, Probe Sequence
acagtaactcagagattaccaaccc

SEQ ID NO: 151861 - DNA, 25 bp, Probe Sequence
acaggaagattgagttccccctgcc

SEQ ID NO: 151862 - DNA, 25 bp, Probe Sequence
acaggaagattgagttccccctgcc

SEQ ID NO: 151863 - DNA, 25 bp, Probe Sequence
acatgtacgtagaatgtttcaccct

SEQ ID NO: 151864 - DNA, 25 bp, Probe Sequence
acatgaacgaagcctttgcatccct

SEQ ID NO: 151865 - DNA, 25 bp, Probe Sequence
acaggtaacaggctatgacccttag

SEQ ID NO: 151866 - DNA, 25 bp, Probe Sequence
acaggaaacacgctagtgaccatta

SEQ ID NO: 151867 - DNA, 25 bp, Probe Sequence
acagtagaaaaccatatggggacta

SEQ ID NO: 151868 - DNA, 25 bp, Probe Sequence
acagtggggcaggctttggggttgc

SEQ ID NO: 151869 - DNA, 25 bp, Probe Sequence
acagtggggtacattgtgggcttta

SEQ ID NO: 151870 - DNA, 25 bp, Probe Sequence
acatcatggagaatacatttttggt

SEQ ID NO: 151871 - DNA, 25 bp, Probe Sequence
acatcaggaatgactctgtctttgc

SEQ ID NO: 151872 - DNA, 25 bp, Probe Sequence
acacgtgaggtcccttttgctattt

SEQ ID NO: 151873 - DNA, 25 bp, Probe Sequence
acaccgagggcggttatcgctgcat

SEQ ID NO: 151874 - DNA, 25 bp, Probe Sequence
acaccggcgtgggaatgtgggaaca

SEQ ID NO: 151875 - DNA, 25 bp, Probe Sequence
acactgggcctagggagggctcgaa

SEQ ID NO: 151876 - DNA, 25 bp, Probe Sequence
acatggggccggtgatggtatgctg

SEQ ID NO: 151877 - DNA, 25 bp, Probe Sequence
acatgagccctggatgagtatggta

SEQ ID NO: 151878 - DNA, 25 bp, Probe Sequence
acatgatgcccctgagtactgtgaa

SEQ ID NO: 151879 - DNA, 25 bp, Probe Sequence
acaactcaacggctacatagaaaaa

SEQ ID NO: 151880 - DNA, 25 bp, Probe Sequence
acagactctcacagggcaaaaaaaa

SEQ ID NO: 151881 - DNA, 25 bp, Probe Sequence
acataatcacccttgtcacaaacaa

SEQ ID NO: 151882 - DNA, 25 bp, Probe Sequence
acatatacacgaatagacatcaaac

SEQ ID NO: 151883 - DNA, 25 bp, Probe Sequence
acatatacacatactgaggctaaca

SEQ ID NO: 151884 - DNA, 25 bp, Probe Sequence
acatgacagacacaaggctcagatg

SEQ ID NO: 151885 - DNA, 25 bp, Probe Sequence
acatgactatcagaagggagaccag

SEQ ID NO: 151886 - DNA, 25 bp, Probe Sequence
acatgtttgacgtgggtggccagcg

SEQ ID NO: 151887 - DNA, 25 bp, Probe Sequence
acatgtttgacgtgggtggccagcg

SEQ ID NO: 151888 - DNA, 25 bp, Probe Sequence
acatgtatatgtctgggcaaggcca

SEQ ID NO: 151889 - DNA, 25 bp, Probe Sequence
acagtgaagtgttgaggacccgcag

SEQ ID NO: 151890 - DNA, 25 bp, Probe Sequence
aatcgaaggtgaagccaccccagtt

SEQ ID NO: 151891 - DNA, 25 bp, Probe Sequence
acatgaggagggaggccctgcctgt

SEQ ID NO: 151892 - DNA, 25 bp, Probe Sequence
acatgaggagggaggccctgcctgt

SEQ ID NO: 151893 - DNA, 25 bp, Probe Sequence
acagagtgttaaagcctccaccgtg

SEQ ID NO: 151894 - DNA, 25 bp, Probe Sequence
acagggttagcaggtggtcaccagg

SEQ ID NO: 151895 - DNA, 25 bp, Probe Sequence
acaggaaatgagcccggaacgcagg

SEQ ID NO: 151896 - DNA, 25 bp, Probe Sequence
acagtcaatgggccgtggaaaagcg

SEQ ID NO: 151897 - DNA, 25 bp, Probe Sequence
acaagttgcaggcgctggcaaacgc

SEQ ID NO: 151898 - DNA, 25 bp, Probe Sequence
acatcgatgtggaggtggacgaccc

SEQ ID NO: 151899 - DNA, 25 bp, Probe Sequence
acatcaaaggaacttgtggctgtcg

SEQ ID NO: 151900 - DNA, 25 bp, Probe Sequence
acatatgaatgacattgctgtcgtt

SEQ ID NO: 151901 - DNA, 25 bp, Probe Sequence
acatatgcttgaaaacttctgctat

SEQ ID NO: 151902 - DNA, 25 bp, Probe Sequence
acatgtgcataaggaactgcttcta

SEQ ID NO: 151903 - DNA, 25 bp, Probe Sequence
acatgtcagtgaggaaatcacctag

SEQ ID NO: 151904 - DNA, 25 bp, Probe Sequence
acatctcagctggagccattgacct

SEQ ID NO: 151905 - DNA, 25 bp, Probe Sequence
acatctgcattggacaactccaccc

SEQ ID NO: 151906 - DNA, 25 bp, Probe Sequence
acatcatgctgatcaagctctccac

SEQ ID NO: 151907 - DNA, 25 bp, Probe Sequence
acatcatgctgatcaaactctcctc

SEQ ID NO: 151908 - DNA, 25 bp, Probe Sequence
acatcatgctgatcaaactctcctc

SEQ ID NO: 151909 - DNA, 25 bp, Probe Sequence
acatgctgtcactaagcagctttta

SEQ ID NO: 151910 - DNA, 25 bp, Probe Sequence
acatcagatgactggctgttttctc

SEQ ID NO: 151911 - DNA, 25 bp, Probe Sequence
acatcgctgacgctgattgtgttcc

SEQ ID NO: 151912 - DNA, 25 bp, Probe Sequence
acatcagtgactggtatatcttcat

SEQ ID NO: 151913 - DNA, 25 bp, Probe Sequence
acatagcttctggtgatatcttctc

SEQ ID NO: 151914 - DNA, 25 bp, Probe Sequence
acatagcttctgttgactctaactt

SEQ ID NO: 151915 - DNA, 25 bp, Probe Sequence
acatacttcatagaccactgagttc

SEQ ID NO: 151916 - DNA, 25 bp, Probe Sequence
acatcacatttaggacgttgaagat

SEQ ID NO: 151917 - DNA, 25 bp, Probe Sequence
acatgaagcttcatgcacttaaaga

SEQ ID NO: 151918 - DNA, 25 bp, Probe Sequence
acagaacttctgcaaatgaaaaatg

SEQ ID NO: 151919 - DNA, 25 bp, Probe Sequence
acagatgacttcaccacagaaactt

SEQ ID NO: 151920 - DNA, 25 bp, Probe Sequence
acataacttcaggtacagcagagat

SEQ ID NO: 151921 - DNA, 25 bp, Probe Sequence
acataattgtcagattcaccaaagt

SEQ ID NO: 151922 - DNA, 25 bp, Probe Sequence
acatcttagtcatacgaccataaat

SEQ ID NO: 151923 - DNA, 25 bp, Probe Sequence
acatactgaggctaacagactaaag

SEQ ID NO: 151924 - DNA, 25 bp, Probe Sequence
acatcatctgtgaataacacagctt

SEQ ID NO: 151925 - DNA, 25 bp, Probe Sequence
acatctgctgtaagaaacagttctt

SEQ ID NO: 151926 - DNA, 25 bp, Probe Sequence
acatgctctgtaaagggtcttcctg

SEQ ID NO: 151927 - DNA, 25 bp, Probe Sequence
acatgaccttatgggactttcctac

SEQ ID NO: 151928 - DNA, 25 bp, Probe Sequence
acatgaccttatgggactttcctac

SEQ ID NO: 151929 - DNA, 25 bp, Probe Sequence
acatgaccttatgggactttcctac

SEQ ID NO: 151930 - DNA, 25 bp, Probe Sequence
acatgaccttatgggactttcctac

SEQ ID NO: 151931 - DNA, 25 bp, Probe Sequence
acatgaccttatgggactttcctac

SEQ ID NO: 151932 - DNA, 25 bp, Probe Sequence
acatgaccttatgggactttcctac

SEQ ID NO: 151933 - DNA, 25 bp, Probe Sequence
acatgaccttatgggactttcctac

SEQ ID NO: 151934 - DNA, 25 bp, Probe Sequence
acatgaccttatgggactttcctac

SEQ ID NO: 151935 - DNA, 25 bp, Probe Sequence
acatgaccttatgggactttcctac

SEQ ID NO: 151936 - DNA, 25 bp, Probe Sequence
acatgaccttatgggactttcctac

SEQ ID NO: 151937 - DNA, 25 bp, Probe Sequence
acatgaccttatgggactttcctac

SEQ ID NO: 151938 - DNA, 25 bp, Probe Sequence
acatgaccttatgggactttcctac

SEQ ID NO: 151939 - DNA, 25 bp, Probe Sequence
acatgaccttatgggactttcctac

SEQ ID NO: 151940 - DNA, 25 bp, Probe Sequence
acatcccatctgtggatcttctgac

SEQ ID NO: 151941 - DNA, 25 bp, Probe Sequence
acatctccatgcatactattgtccc

SEQ ID NO: 151942 - DNA, 25 bp, Probe Sequence
acatctctcagcatttactgtacgc

SEQ ID NO: 151943 - DNA, 25 bp, Probe Sequence
acagcagctcctttgtaagtaccag

SEQ ID NO: 151944 - DNA, 25 bp, Probe Sequence
acatgccatcactggaatttcccac

SEQ ID NO: 151945 - DNA, 25 bp, Probe Sequence
acagattcctgtggcaaattctacc

SEQ ID NO: 151946 - DNA, 25 bp, Probe Sequence
acagtctacctgtcagattcttgtc

SEQ ID NO: 151947 - DNA, 25 bp, Probe Sequence
acagttgtagctacatactcaatgt

SEQ ID NO: 151948 - DNA, 25 bp, Probe Sequence
acatgttcgtggactcctcatgtgc

SEQ ID NO: 151949 - DNA, 25 bp, Probe Sequence
acatcgtgccatggactaccagtgc

SEQ ID NO: 151950 - DNA, 25 bp, Probe Sequence
acatgcgtgtcagcacatacagccg

SEQ ID NO: 151951 - DNA, 25 bp, Probe Sequence
acatcatattcagcccatcacgctg

SEQ ID NO: 151952 - DNA, 25 bp, Probe Sequence
acatcatcaacgtccacagcatgtc

SEQ ID NO: 151953 - DNA, 25 bp, Probe Sequence
acatccatcatttgcaactgctgtt

SEQ ID NO: 151954 - DNA, 25 bp, Probe Sequence
acatcacgcatgtcattcactgcct

SEQ ID NO: 151955 - DNA, 25 bp, Probe Sequence
acatcacgcatgtcattcactgcct

SEQ ID NO: 151956 - DNA, 25 bp, Probe Sequence
acatcacgcatgtcattcactgcct

SEQ ID NO: 151957 - DNA, 25 bp, Probe Sequence
acatcatcagagtggctgtcctgga

SEQ ID NO: 151958 - DNA, 25 bp, Probe Sequence
acatgctgaagatggggctctgagg

SEQ ID NO: 151959 - DNA, 25 bp, Probe Sequence
acatgtgaatgatacggtaactttt

SEQ ID NO: 151960 - DNA, 25 bp, Probe Sequence
acatggactataacgttgatttctt

SEQ ID NO: 151961 - DNA, 25 bp, Probe Sequence
acaggacattacagtggctttcttg

SEQ ID NO: 151962 - DNA, 25 bp, Probe Sequence
acagaacctatctactcgttgttga

SEQ ID NO: 151963 - DNA, 25 bp, Probe Sequence
acagaatcgaactctgcacttctct

SEQ ID NO: 151964 - DNA, 25 bp, Probe Sequence
acatgatatacatcacctgccacct

SEQ ID NO: 151965 - DNA, 25 bp, Probe Sequence
acatcctacaagacacagtgaccat

SEQ ID NO: 151966 - DNA, 25 bp, Probe Sequence
acatcctcattgttcacagtgaaaa

SEQ ID NO: 151967 - DNA, 25 bp, Probe Sequence
acatctctatttcccacagacagga

SEQ ID NO: 151968 - DNA, 25 bp, Probe Sequence
acatcattgcttcctttctacagga

SEQ ID NO: 151969 - DNA, 25 bp, Probe Sequence
acatcttcttggtcttgcataaggc

SEQ ID NO: 151970 - DNA, 25 bp, Probe Sequence
acatctgtttgttctatctccagtc

SEQ ID NO: 151971 - DNA, 25 bp, Probe Sequence
acagagtttgtctttcctctgtccc

SEQ ID NO: 151972 - DNA, 25 bp, Probe Sequence
acatgagctttgtggtccttgtacc

SEQ ID NO: 151973 - DNA, 25 bp, Probe Sequence
acaagtaccagggccactgttaccg

SEQ ID NO: 151974 - DNA, 25 bp, Probe Sequence
acaggaattcagagacacagttgac

SEQ ID NO: 151975 - DNA, 25 bp, Probe Sequence
acaggaaacagctatgaccattagg

SEQ ID NO: 151976 - DNA, 25 bp, Probe Sequence
acaggtcattagttaccttctgcat

SEQ ID NO: 151977 - DNA, 25 bp, Probe Sequence
acagggcttcatcgtaactgcttct

SEQ ID NO: 151978 - DNA, 25 bp, Probe Sequence
acaggcgcgtgccaacaagcctgct

SEQ ID NO: 151979 - DNA, 25 bp, Probe Sequence
acagtcctgatgacaaacccttggt

SEQ ID NO: 151980 - DNA, 25 bp, Probe Sequence
acagaccattctaacacccaaggct

SEQ ID NO: 151981 - DNA, 25 bp, Probe Sequence
acacctgtcctggagaccgaagtgc

SEQ ID NO: 151982 - DNA, 25 bp, Probe Sequence
acatccttaggatgcacccaagctt

SEQ ID NO: 151983 - DNA, 25 bp, Probe Sequence
acatgccttaggtaactgcagaaat

SEQ ID NO: 151984 - DNA, 25 bp, Probe Sequence
acatccgtagattttcatgaatata

SEQ ID NO: 151985 - DNA, 25 bp, Probe Sequence
acatccagaagaagcgtcagaacaa

SEQ ID NO: 151986 - DNA, 25 bp, Probe Sequence
acatcggagagttcatgccagaaaa

SEQ ID NO: 151987 - DNA, 25 bp, Probe Sequence
acatgcaggaatctccacacaaatg

SEQ ID NO: 151988 - DNA, 25 bp, Probe Sequence
acagaggcaagaatcccaaggggtg

SEQ ID NO: 151989 - DNA, 25 bp, Probe Sequence
acaggaccagtagcaaaggagtgtg

SEQ ID NO: 151990 - DNA, 25 bp, Probe Sequence
acatgggccagggccaggagtgggt

SEQ ID NO: 151991 - DNA, 25 bp, Probe Sequence
acagtgccttgggactggactggca

SEQ ID NO: 151992 - DNA, 25 bp, Probe Sequence
acaggacacagggacatgtgactga

SEQ ID NO: 151993 - DNA, 25 bp, Probe Sequence
acatgcgcgtcaatggacatgctga

SEQ ID NO: 151994 - DNA, 25 bp, Probe Sequence
acagatgcctgaatgcaagcagcag

SEQ ID NO: 151995 - DNA, 25 bp, Probe Sequence
acatcagctgcataccagcagagcc

SEQ ID NO: 151996 - DNA, 25 bp, Probe Sequence
acatcagtgtgctctgcactgtcct

SEQ ID NO: 151997 - DNA, 25 bp, Probe Sequence
acatcctggatgttgcacggcagct

SEQ ID NO: 151998 - DNA, 25 bp, Probe Sequence
acatctgggcagttgtaccatgcat

SEQ ID NO: 151999 - DNA, 25 bp, Probe Sequence
acatgctcggaggcctggccatata

SEQ ID NO: 152000 - DNA, 25 bp, Probe Sequence
acatctctgagtgcttggtggtgac

SEQ ID NO: 152001 - DNA, 25 bp, Probe Sequence
acatctgctggagtgttgctgttgc

SEQ ID NO: 152002 - DNA, 25 bp, Probe Sequence
acatcctgtgggactctgttgatgg

SEQ ID NO: 152003 - DNA, 25 bp, Probe Sequence
acatcatcgaggggctctgctgtgt

SEQ ID NO: 152004 - DNA, 25 bp, Probe Sequence
acatcatcggtggacttgatgaaga

SEQ ID NO: 152005 - DNA, 25 bp, Probe Sequence
acatcatcaggtcgcacgtgaagga

SEQ ID NO: 152006 - DNA, 25 bp, Probe Sequence
acatcatcagcgcgcaagagggcag

SEQ ID NO: 152007 - DNA, 25 bp, Probe Sequence
acatcccagggcttatggtgcagca

SEQ ID NO: 152008 - DNA, 25 bp, Probe Sequence
acatctacaacgttatcgtcacagc

SEQ ID NO: 152009 - DNA, 25 bp, Probe Sequence
aactacatcacttgtatctccagcc

SEQ ID NO: 152010 - DNA, 25 bp, Probe Sequence
acatgcaacatgctgttcctccagc

SEQ ID NO: 152011 - DNA, 25 bp, Probe Sequence
acatctcccgagaaatgctccagca

SEQ ID NO: 152012 - DNA, 25 bp, Probe Sequence
acatctccatgctgtattgtcacaa

SEQ ID NO: 152013 - DNA, 25 bp, Probe Sequence
acatccgcattgctgataccaatat

SEQ ID NO: 152014 - DNA, 25 bp, Probe Sequence
acaccacttagttaccaatagcttc

SEQ ID NO: 152015 - DNA, 25 bp, Probe Sequence
acaccctatgggtggcttcagcttt

SEQ ID NO: 152016 - DNA, 25 bp, Probe Sequence
acatgcctcttgcaaagggtctcct

SEQ ID NO: 152017 - DNA, 25 bp, Probe Sequence
acatgtcgcttttaaggaagtgctc

SEQ ID NO: 152018 - DNA, 25 bp, Probe Sequence
acagccttttattgagtggggcaag

SEQ ID NO: 152019 - DNA, 25 bp, Probe Sequence
acagccttttattgagtggggcaag

SEQ ID NO: 152020 - DNA, 25 bp, Probe Sequence
acagcatctgttcaaagtcgtaggg

SEQ ID NO: 152021 - DNA, 25 bp, Probe Sequence
acatgattttgcctattgtgattat

SEQ ID NO: 152022 - DNA, 25 bp, Probe Sequence
acatgtatgttcttgtttgtatcat

SEQ ID NO: 152023 - DNA, 25 bp, Probe Sequence
acatgatcttgtgttttgctatcct

SEQ ID NO: 152024 - DNA, 25 bp, Probe Sequence
acatctttccctaaatcgatccatg

SEQ ID NO: 152025 - DNA, 25 bp, Probe Sequence
acagctttttgtaaatgcgtcctga

SEQ ID NO: 152026 - DNA, 25 bp, Probe Sequence
acagtttagttggagtgtagcactg

SEQ ID NO: 152027 - DNA, 25 bp, Probe Sequence
acagtttgggatcccatgaagagag

SEQ ID NO: 152028 - DNA, 25 bp, Probe Sequence
acagtcactgggacccaaaactcag

SEQ ID NO: 152029 - DNA, 25 bp, Probe Sequence
acagatactttagggataattccaa

SEQ ID NO: 152030 - DNA, 25 bp, Probe Sequence
acagaatcccaataatagtcccaca

SEQ ID NO: 152031 - DNA, 25 bp, Probe Sequence
acagaagtccactaaagttcaccaa

SEQ ID NO: 152032 - DNA, 25 bp, Probe Sequence
acaggagccactcaaagtctcccga

SEQ ID NO: 152033 - DNA, 25 bp, Probe Sequence
acaggtgacctgaaaaactatccga

SEQ ID NO: 152034 - DNA, 25 bp, Probe Sequence
acaggaatctctggaaaactatcag

SEQ ID NO: 152035 - DNA, 25 bp, Probe Sequence
acaggaatctctggaaaactatcag

SEQ ID NO: 152036 - DNA, 25 bp, Probe Sequence
acagtaatttgctacagaatcatca

SEQ ID NO: 152037 - DNA, 25 bp, Probe Sequence
acatgtaaagctgtcacaatcaatg

SEQ ID NO: 152038 - DNA, 25 bp, Probe Sequence
acagtaattgccttacatgacttga

SEQ ID NO: 152039 - DNA, 25 bp, Probe Sequence
acatgtggtagcagctctggtttga

SEQ ID NO: 152040 - DNA, 25 bp, Probe Sequence
acatgttgttgcagcttgatggttc

SEQ ID NO: 152041 - DNA, 25 bp, Probe Sequence
acatcttggtgaagttgtcccctgg

SEQ ID NO: 152042 - DNA, 25 bp, Probe Sequence
acatctgaggtatgttgtaggcctg

SEQ ID NO: 152043 - DNA, 25 bp, Probe Sequence
acatggaggatggtgtcctgaggcc

SEQ ID NO: 152044 - DNA, 25 bp, Probe Sequence
acatggagttgttcctttggccaca

SEQ ID NO: 152045 - DNA, 25 bp, Probe Sequence
acatggagttgttcctttggccaca

SEQ ID NO: 152046 - DNA, 25 bp, Probe Sequence
acatgaggttcaacatcggtggccc

SEQ ID NO: 152047 - DNA, 25 bp, Probe Sequence
acatgggagtcaagaaggtggagca

SEQ ID NO: 152048 - DNA, 25 bp, Probe Sequence
acatggaatgccagacgctggggat

SEQ ID NO: 152049 - DNA, 25 bp, Probe Sequence
acatgaaatgtgtgcccatggctgg

SEQ ID NO: 152050 - DNA, 25 bp, Probe Sequence
acatgcagttcgtggcacaagcagg

SEQ ID NO: 152051 - DNA, 25 bp, Probe Sequence
acagcaactgggccagcaaagttga

SEQ ID NO: 152052 - DNA, 25 bp, Probe Sequence
acagatatataggccaactattagt

SEQ ID NO: 152053 - DNA, 25 bp, Probe Sequence
acagatcttaaatatgctagtagta

SEQ ID NO: 152054 - DNA, 25 bp, Probe Sequence
acagctttcaaatcgtccgcgatga

SEQ ID NO: 152055 - DNA, 25 bp, Probe Sequence
acaggtccgcaaccagatagggaga

SEQ ID NO: 152056 - DNA, 25 bp, Probe Sequence
acaggtgcacgaagtcccgtgtaga

SEQ ID NO: 152057 - DNA, 25 bp, Probe Sequence
acagttgccatgtagaccccttgaa

SEQ ID NO: 152058 - DNA, 25 bp, Probe Sequence
acatgatgctggattacctctctta

SEQ ID NO: 152059 - DNA, 25 bp, Probe Sequence
acatgatgtgtggcgtacactctca

SEQ ID NO: 152060 - DNA, 25 bp, Probe Sequence
acatgttctgcatgtccagctcaac

SEQ ID NO: 152061 - DNA, 25 bp, Probe Sequence
acagtctctgcatgtttccaagagc

SEQ ID NO: 152062 - DNA, 25 bp, Probe Sequence
acatgtcaccattaattctcaacga

SEQ ID NO: 152063 - DNA, 25 bp, Probe Sequence
acatgcgtctcatctttcataacca

SEQ ID NO: 152064 - DNA, 25 bp, Probe Sequence
acatgattccttgttcatatccact

SEQ ID NO: 152065 - DNA, 25 bp, Probe Sequence
acatgtactatttcttgctacctgt

SEQ ID NO: 152066 - DNA, 25 bp, Probe Sequence
acatggcaattctatttgtaacatt

SEQ ID NO: 152067 - DNA, 25 bp, Probe Sequence
acatgcataatgagatctttgaaga

SEQ ID NO: 152068 - DNA, 25 bp, Probe Sequence
acatctgatatccagttcttggagg

SEQ ID NO: 152069 - DNA, 25 bp, Probe Sequence
acatcgtcttcaccatcaatggagt

SEQ ID NO: 152070 - DNA, 25 bp, Probe Sequence
acatctgtttcaggaacatggcagt

SEQ ID NO: 152071 - DNA, 25 bp, Probe Sequence
acatcgttatctggaggcaacttct

SEQ ID NO: 152072 - DNA, 25 bp, Probe Sequence
acatcgttcaccgaatacactttgt

SEQ ID NO: 152073 - DNA, 25 bp, Probe Sequence
acatctgagcatcccaaaacctctt

SEQ ID NO: 152074 - DNA, 25 bp, Probe Sequence
acatcgcatcatcaaaagttatctt

SEQ ID NO: 152075 - DNA, 25 bp, Probe Sequence
acatgccctcacttaagtctacagt

SEQ ID NO: 152076 - DNA, 25 bp, Probe Sequence
acatgaccataaatagcgtatacga

SEQ ID NO: 152077 - DNA, 25 bp, Probe Sequence
acagcaccatcatttacgaagaccc

SEQ ID NO: 152078 - DNA, 25 bp, Probe Sequence
acatccagcactgtaagaagctgtc

SEQ ID NO: 152079 - DNA, 25 bp, Probe Sequence
acatccagtggattacagaatttct

SEQ ID NO: 152080 - DNA, 25 bp, Probe Sequence
aacaccgggaaacattttggctcat

SEQ ID NO: 152081 - DNA, 25 bp, Probe Sequence
acaccggaggggattgttctgtctt

SEQ ID NO: 152082 - DNA, 25 bp, Probe Sequence
acatccttgtggcacattttttttt

SEQ ID NO: 152083 - DNA, 25 bp, Probe Sequence
acagggttggtagttgttactcatt

SEQ ID NO: 152084 - DNA, 25 bp, Probe Sequence
acagggcttggtggtggtagcattt

SEQ ID NO: 152085 - DNA, 25 bp, Probe Sequence
acaggtcttacgatgttatgagtct

SEQ ID NO: 152086 - DNA, 25 bp, Probe Sequence
acaggtcttattttcatcggagtta

SEQ ID NO: 152087 - DNA, 25 bp, Probe Sequence
acagtgtcttttttcggtgaactat

SEQ ID NO: 152088 - DNA, 25 bp, Probe Sequence
acaggagcttcctactatggagaac

SEQ ID NO: 152089 - DNA, 25 bp, Probe Sequence
acaggcagctacatgttatggatga

SEQ ID NO: 152090 - DNA, 25 bp, Probe Sequence
acagtcacgtcatgttaggtgtctg

SEQ ID NO: 152091 - DNA, 25 bp, Probe Sequence
acatgaatctatgcgtgaaggttct

SEQ ID NO: 152092 - DNA, 25 bp, Probe Sequence
acatgagactcacagttggagttct

SEQ ID NO: 152093 - DNA, 25 bp, Probe Sequence
acagaacatgcattagtgtgggcta

SEQ ID NO: 152094 - DNA, 25 bp, Probe Sequence
acagatgctcatcatggctggaatg

SEQ ID NO: 152095 - DNA, 25 bp, Probe Sequence
acagatgctcaagtgaggctgcagg

SEQ ID NO: 152096 - DNA, 25 bp, Probe Sequence
acagtgtggactggagccgagatgg

SEQ ID NO: 152097 - DNA, 25 bp, Probe Sequence
acatggttgacgttgcaaaggcgct

SEQ ID NO: 152098 - DNA, 25 bp, Probe Sequence
acatcgccttcctgcagaatgtgct

SEQ ID NO: 152099 - DNA, 25 bp, Probe Sequence
acatctgcctgtcacaatatattct

SEQ ID NO: 152100 - DNA, 25 bp, Probe Sequence
acatccctgatcctatcaattttac

SEQ ID NO: 152101 - DNA, 25 bp, Probe Sequence
acatccctgatactgtgtatgcttt

SEQ ID NO: 152102 - DNA, 25 bp, Probe Sequence
acatccctgatactgtgtatgcttt

SEQ ID NO: 152103 - DNA, 25 bp, Probe Sequence
acatgaaggacacttggatgatggt

SEQ ID NO: 152104 - DNA, 25 bp, Probe Sequence
acatgatcaagtccttctatactgc

SEQ ID NO: 152105 - DNA, 25 bp, Probe Sequence
acatgcactggctcattttatgtgc

SEQ ID NO: 152106 - DNA, 25 bp, Probe Sequence
acatgcctggtggaagtctgatagc

SEQ ID NO: 152107 - DNA, 25 bp, Probe Sequence
acatgcttggtgtagcctatgaagc

SEQ ID NO: 152108 - DNA, 25 bp, Probe Sequence
acatcgtggatgtggcgctgaagat

SEQ ID NO: 152109 - DNA, 25 bp, Probe Sequence
acatggtgaatgacggcgtggagga

SEQ ID NO: 152110 - DNA, 25 bp, Probe Sequence
acatgcgtgttaatggctgttcgag

SEQ ID NO: 152111 - DNA, 25 bp, Probe Sequence
acatgcatgtgtcagtggctttgga

SEQ ID NO: 152112 - DNA, 25 bp, Probe Sequence
acagatgagagacgcaggttttgat

SEQ ID NO: 152113 - DNA, 25 bp, Probe Sequence
acatgggaagcccatcttcatctgc

SEQ ID NO: 152114 - DNA, 25 bp, Probe Sequence
acatggtgcactgcagtcttctggt

SEQ ID NO: 152115 - DNA, 25 bp, Probe Sequence
acagatggctgcgcaccatctctgt

SEQ ID NO: 152116 - DNA, 25 bp, Probe Sequence
acagatggctgcgcaccatctctgt

SEQ ID NO: 152117 - DNA, 25 bp, Probe Sequence
acatgcaggcctggatcctgcactg

SEQ ID NO: 152118 - DNA, 25 bp, Probe Sequence
acatgcagtgcccagtcattgctgt

SEQ ID NO: 152119 - DNA, 25 bp, Probe Sequence
acagacgtctcagagtcgtcagtgc

SEQ ID NO: 152120 - DNA, 25 bp, Probe Sequence
acagtggtgtccgagaagtcaggca

SEQ ID NO: 152121 - DNA, 25 bp, Probe Sequence
acatgtggggctccagagactcact

SEQ ID NO: 152122 - DNA, 25 bp, Probe Sequence
acatgtgttggcttcgtgattaaaa

SEQ ID NO: 152123 - DNA, 25 bp, Probe Sequence
acatgtattacttggtgtatcgata

SEQ ID NO: 152124 - DNA, 25 bp, Probe Sequence
acatgtaagaattgcttgttgggaa

SEQ ID NO: 152125 - DNA, 25 bp, Probe Sequence
acagacagcaggtcgctttctacgg

SEQ ID NO: 152126 - DNA, 25 bp, Probe Sequence
acagacaaatgggttgccaactcca

SEQ ID NO: 152127 - DNA, 25 bp, Probe Sequence
acagaatctagtcctgggcaacttc

SEQ ID NO: 152128 - DNA, 25 bp, Probe Sequence
acatgattcttctggatgacaactt

SEQ ID NO: 152129 - DNA, 25 bp, Probe Sequence
acatgtctttaggtggaaattctgg

SEQ ID NO: 152130 - DNA, 25 bp, Probe Sequence
acatgctctttgctgagacagagtt

SEQ ID NO: 152131 - DNA, 25 bp, Probe Sequence
acatgtgctttgcagaggccaggga

SEQ ID NO: 152132 - DNA, 25 bp, Probe Sequence
acatgtgctttattagactctggga

SEQ ID NO: 152133 - DNA, 25 bp, Probe Sequence
acatggctgtgtttgcagcctgctc

SEQ ID NO: 152134 - DNA, 25 bp, Probe Sequence
acaggcatgtgatatgatgctcggc

SEQ ID NO: 152135 - DNA, 25 bp, Probe Sequence
acatggctatgtggagcactcggtt

SEQ ID NO: 152136 - DNA, 25 bp, Probe Sequence
acatgcagttgtgggaccgcagttt

SEQ ID NO: 152137 - DNA, 25 bp, Probe Sequence
acatgagtgtcctgactccttttac

SEQ ID NO: 152138 - DNA, 25 bp, Probe Sequence
acagggtccgtgtctttgtatattc

SEQ ID NO: 152139 - DNA, 25 bp, Probe Sequence
acagtgttacttttaacattgcctc

SEQ ID NO: 152140 - DNA, 25 bp, Probe Sequence
acagctgtgttctggtacaacctct

SEQ ID NO: 152141 - DNA, 25 bp, Probe Sequence
acaggtgtgtaccgttcaatcaacc

SEQ ID NO: 152142 - DNA, 25 bp, Probe Sequence
acagggtgttgcagtaacaaaatca

SEQ ID NO: 152143 - DNA, 25 bp, Probe Sequence
acagtcctgttcacaaagaaaaacg

SEQ ID NO: 152144 - DNA, 25 bp, Probe Sequence
acagtactattcatcacaggaaaga

SEQ ID NO: 152145 - DNA, 25 bp, Probe Sequence
acagttctagtttcaccttacacag

SEQ ID NO: 152146 - DNA, 25 bp, Probe Sequence
acagtatctgatggcccacctataa

SEQ ID NO: 152147 - DNA, 25 bp, Probe Sequence
acagtttatcgaccagtttgaatct

SEQ ID NO: 152148 - DNA, 25 bp, Probe Sequence
acacttatttagcattttaacattt

SEQ ID NO: 152149 - DNA, 25 bp, Probe Sequence
acacggaggttgtgtttacaatgta

SEQ ID NO: 152150 - DNA, 25 bp, Probe Sequence
acagtggggtttagtactccaaatg

SEQ ID NO: 152151 - DNA, 25 bp, Probe Sequence
acagttgagagtattgtaccaatat

SEQ ID NO: 152152 - DNA, 25 bp, Probe Sequence
acacattaaatcagttagccccatt

SEQ ID NO: 152153 - DNA, 25 bp, Probe Sequence
acatgttccaatatgattccaccca

SEQ ID NO: 152154 - DNA, 25 bp, Probe Sequence
acatgcccctataaattcagcccag

SEQ ID NO: 152155 - DNA, 25 bp, Probe Sequence
acatccctttagaataactgccacc

SEQ ID NO: 152156 - DNA, 25 bp, Probe Sequence
acactctttaagacaaattcccatc

SEQ ID NO: 152157 - DNA, 25 bp, Probe Sequence
acagctcttttaatacaatttcctt

SEQ ID NO: 152158 - DNA, 25 bp, Probe Sequence
acagtttctctaatagcatttacaa

SEQ ID NO: 152159 - DNA, 25 bp, Probe Sequence
acagtatacataaaggtcctccaaa

SEQ ID NO: 152160 - DNA, 25 bp, Probe Sequence
acagttacatcttaattccatccaa

SEQ ID NO: 152161 - DNA, 25 bp, Probe Sequence
acagttaccctaagacagagcctaa

SEQ ID NO: 152162 - DNA, 25 bp, Probe Sequence
acactgttctccaaaggtaccttat

SEQ ID NO: 152163 - DNA, 25 bp, Probe Sequence
acacgtttaaatctgcataacttca

SEQ ID NO: 152164 - DNA, 25 bp, Probe Sequence
acatcctatttactctggtaacttc

SEQ ID NO: 152165 - DNA, 25 bp, Probe Sequence
acatcctaggtaagtggttgacatt

SEQ ID NO: 152166 - DNA, 25 bp, Probe Sequence
acatcctacgaaatgtgcctcaagt

SEQ ID NO: 152167 - DNA, 25 bp, Probe Sequence
acatcccacaaaatggcccttggtg

SEQ ID NO: 152168 - DNA, 25 bp, Probe Sequence
acaaaaccaagttcccactggtgat

SEQ ID NO: 152169 - DNA, 25 bp, Probe Sequence
acaaaaccaagttcccactggtgat

SEQ ID NO: 152170 - DNA, 25 bp, Probe Sequence
acaggaacaaagtaacagcctttca

SEQ ID NO: 152171 - DNA, 25 bp, Probe Sequence
acagctaaaagagcacacccgtcta

SEQ ID NO: 152172 - DNA, 25 bp, Probe Sequence
acactgaaacataaatccgcaagtc

SEQ ID NO: 152173 - DNA, 25 bp, Probe Sequence
acacgaagctgcttgagcatcctca

SEQ ID NO: 152174 - DNA, 25 bp, Probe Sequence
acaggcatgagcgactgtgcctctc

SEQ ID NO: 152175 - DNA, 25 bp, Probe Sequence
acatggctgagcctttcagtgccac

SEQ ID NO: 152176 - DNA, 25 bp, Probe Sequence
acatgcccatgtgtctaggccatct

SEQ ID NO: 152177 - DNA, 25 bp, Probe Sequence
acatccatgatgggatcggagccat

SEQ ID NO: 152178 - DNA, 25 bp, Probe Sequence
acatgcgatatacacagcagaccta

SEQ ID NO: 152179 - DNA, 25 bp, Probe Sequence
acatggagaagatccaggtcatcaa

SEQ ID NO: 152180 - DNA, 25 bp, Probe Sequence
acatggcagaagcttgaggttataa

SEQ ID NO: 152181 - DNA, 25 bp, Probe Sequence
acagtggacgctgtgggttgcttcg

SEQ ID NO: 152182 - DNA, 25 bp, Probe Sequence
acatgtatacgtgtatggtccttgg

SEQ ID NO: 152183 - DNA, 25 bp, Probe Sequence
acagtaatttcctggtcacatcatt

SEQ ID NO: 152184 - DNA, 25 bp, Probe Sequence
acatggattttttcgtgtccgctgt

SEQ ID NO: 152185 - DNA, 25 bp, Probe Sequence
acatgtgtttttccgttcatctgtt

SEQ ID NO: 152186 - DNA, 25 bp, Probe Sequence
acagagtttcagatcggtcactgat

SEQ ID NO: 152187 - DNA, 25 bp, Probe Sequence
acagagtgttcgattctgccctatt

SEQ ID NO: 152188 - DNA, 25 bp, Probe Sequence
acaggagtacagatgtccctcccgt

SEQ ID NO: 152189 - DNA, 25 bp, Probe Sequence
acaggagtacagatgtccctcccgt

SEQ ID NO: 152190 - DNA, 25 bp, Probe Sequence
acaggagtacagatgtccctcccgt

SEQ ID NO: 152191 - DNA, 25 bp, Probe Sequence
acagtatctaacattaccattcacg

SEQ ID NO: 152192 - DNA, 25 bp, Probe Sequence
acagttccaactgtacatacatact

SEQ ID NO: 152193 - DNA, 25 bp, Probe Sequence
acagtgatccactttaacaacccta

SEQ ID NO: 152194 - DNA, 25 bp, Probe Sequence
acagtgatccactttaacaacccta

SEQ ID NO: 152195 - DNA, 25 bp, Probe Sequence
gacggaaactttgacgatgcgctta

SEQ ID NO: 152196 - DNA, 25 bp, Probe Sequence
acaggtagactttcaactattgtta

SEQ ID NO: 152197 - DNA, 25 bp, Probe Sequence
acatgggtaccaaaagtgttgttat

SEQ ID NO: 152198 - DNA, 25 bp, Probe Sequence
acatgtttacgggaggcgcttggtt

SEQ ID NO: 152199 - DNA, 25 bp, Probe Sequence
acagttaacatagagtggtttcttc

SEQ ID NO: 152200 - DNA, 25 bp, Probe Sequence
acagttacatagaatagggcttgac

SEQ ID NO: 152201 - DNA, 25 bp, Probe Sequence
acagttatcctttcacagtgttccc

SEQ ID NO: 152202 - DNA, 25 bp, Probe Sequence
acatgttatcacctactactatttc

SEQ ID NO: 152203 - DNA, 25 bp, Probe Sequence
acatgttaccaatatcaccatcttg

SEQ ID NO: 152204 - DNA, 25 bp, Probe Sequence
acatgcatctatgactattccctct

SEQ ID NO: 152205 - DNA, 25 bp, Probe Sequence
acagtgcatttgccttgtcacctgt

SEQ ID NO: 152206 - DNA, 25 bp, Probe Sequence
acaggcagatatggctttctccttc

SEQ ID NO: 152207 - DNA, 25 bp, Probe Sequence
acaggagcaaatctttccatcttac

SEQ ID NO: 152208 - DNA, 25 bp, Probe Sequence
acaggccacatacgtttccctgaaa

SEQ ID NO: 152209 - DNA, 25 bp, Probe Sequence
acatggcccacacgttgtatttggt

SEQ ID NO: 152210 - DNA, 25 bp, Probe Sequence
acaggcccagcattgctggttctat

SEQ ID NO: 152211 - DNA, 25 bp, Probe Sequence
acatggcccagctggaggcctgtgt

SEQ ID NO: 152212 - DNA, 25 bp, Probe Sequence
acatggcccagctggaggcctgtgt

SEQ ID NO: 152213 - DNA, 25 bp, Probe Sequence
acaggagccatgagatgtagccttg

SEQ ID NO: 152214 - DNA, 25 bp, Probe Sequence
acatggagtgcatggatggcgccct

SEQ ID NO: 152215 - DNA, 25 bp, Probe Sequence
acatgtgtgagctgatgtaccacct

SEQ ID NO: 152216 - DNA, 25 bp, Probe Sequence
acatgttgcgactctacatacctct

SEQ ID NO: 152217 - DNA, 25 bp, Probe Sequence
acatgattcttatttacaaccccag

SEQ ID NO: 152218 - DNA, 25 bp, Probe Sequence
acatgaatgctttgttacagaccca

SEQ ID NO: 152219 - DNA, 25 bp, Probe Sequence
acactagctctgtattaatccccat

SEQ ID NO: 152220 - DNA, 25 bp, Probe Sequence
acactagctctgtattaatccccat

SEQ ID NO: 152221 - DNA, 25 bp, Probe Sequence
acactagctctgtattaatccccat

SEQ ID NO: 152222 - DNA, 25 bp, Probe Sequence
acactagctctgtattaatccccat

SEQ ID NO: 152223 - DNA, 25 bp, Probe Sequence
acactagctctgtattaatccccat

SEQ ID NO: 152224 - DNA, 25 bp, Probe Sequence
acactggcttttgttcactttgccc

SEQ ID NO: 152225 - DNA, 25 bp, Probe Sequence
acatgctggcatgtattttacttgt

SEQ ID NO: 152226 - DNA, 25 bp, Probe Sequence
acatgcttctttattactctgttat

SEQ ID NO: 152227 - DNA, 25 bp, Probe Sequence
acatgtaattttgatagctgtttta

SEQ ID NO: 152228 - DNA, 25 bp, Probe Sequence
acagtagctttgtagtgggttttct

SEQ ID NO: 152229 - DNA, 25 bp, Probe Sequence
acagttctgtaatgtaggcactttt

SEQ ID NO: 152230 - DNA, 25 bp, Probe Sequence
acagatagttaatgtaccaatgtta

SEQ ID NO: 152231 - DNA, 25 bp, Probe Sequence
acagaagcattctcagaaacttgtt

SEQ ID NO: 152232 - DNA, 25 bp, Probe Sequence
acatgaatgtacttaaagtattgtt

SEQ ID NO: 152233 - DNA, 25 bp, Probe Sequence
acatgcacattttaaaagcctcttt

SEQ ID NO: 152234 - DNA, 25 bp, Probe Sequence
acatgcacattttaaaagcctcttt

SEQ ID NO: 152235 - DNA, 25 bp, Probe Sequence
acatgctatttcaaaaagcctgttt

SEQ ID NO: 152236 - DNA, 25 bp, Probe Sequence
acagttggatctggatgaagccatt

SEQ ID NO: 152237 - DNA, 25 bp, Probe Sequence
acagtacagtcagttaagccatggt

SEQ ID NO: 152238 - DNA, 25 bp, Probe Sequence
acagcactagttattcatgccatag

SEQ ID NO: 152239 - DNA, 25 bp, Probe Sequence
acagacatgaaattgcctcacctgc

SEQ ID NO: 152240 - DNA, 25 bp, Probe Sequence
acagtctgactatgtgctaccgtag

SEQ ID NO: 152241 - DNA, 25 bp, Probe Sequence
acagatctgactcttcatttttaag

SEQ ID NO: 152242 - DNA, 25 bp, Probe Sequence
acatgacagcattcgatttttttaa

SEQ ID NO: 152243 - DNA, 25 bp, Probe Sequence
acatggcctaaaatgtttctacaaa

SEQ ID NO: 152244 - DNA, 25 bp, Probe Sequence
acaggtaaaatattatgtcatacta

SEQ ID NO: 152245 - DNA, 25 bp, Probe Sequence
acatggtgaaagcttatctctagta

SEQ ID NO: 152246 - DNA, 25 bp, Probe Sequence
acatggtgaaaccccatctctacag

SEQ ID NO: 152247 - DNA, 25 bp, Probe Sequence
acatggtgaaaccccatcttactag

SEQ ID NO: 152248 - DNA, 25 bp, Probe Sequence
acatggtgaaaccccatctgtacta

SEQ ID NO: 152249 - DNA, 25 bp, Probe Sequence
acatggtgaaaccccatctgtacta

SEQ ID NO: 152250 - DNA, 25 bp, Probe Sequence
acatggagaaaccccatctctacta

SEQ ID NO: 152251 - DNA, 25 bp, Probe Sequence
acatggtgaaaccccatctctttaa

SEQ ID NO: 152252 - DNA, 25 bp, Probe Sequence
acatggctgttaacccactgcatgc

SEQ ID NO: 152253 - DNA, 25 bp, Probe Sequence
acatggtgtcttacctttgcaagat

SEQ ID NO: 152254 - DNA, 25 bp, Probe Sequence
acaggtgtcaccatcatttctagta

SEQ ID NO: 152255 - DNA, 25 bp, Probe Sequence
acaggctctatcagtcatgtcctgg

SEQ ID NO: 152256 - DNA, 25 bp, Probe Sequence
acagcaccatcaaggcacgttggag

SEQ ID NO: 152257 - DNA, 25 bp, Probe Sequence
acagtatctgcctcacggtggaaaa

SEQ ID NO: 152258 - DNA, 25 bp, Probe Sequence
aactactaaactgggggatattatg

SEQ ID NO: 152259 - DNA, 25 bp, Probe Sequence
acactgtcataatctctggggtcat

SEQ ID NO: 152260 - DNA, 25 bp, Probe Sequence
acaccctgagaattctgggagccag

SEQ ID NO: 152261 - DNA, 25 bp, Probe Sequence
acacccggaaatgaggaccatcact

SEQ ID NO: 152262 - DNA, 25 bp, Probe Sequence
acacaacccaaaaacgatacgccat

SEQ ID NO: 152263 - DNA, 25 bp, Probe Sequence
acacaaccaaccatattaacaccta

SEQ ID NO: 152264 - DNA, 25 bp, Probe Sequence
aaatagaaacctgtattcataccta

SEQ ID NO: 152265 - DNA, 25 bp, Probe Sequence
acagatggggagcttttcttaccta

SEQ ID NO: 152266 - DNA, 25 bp, Probe Sequence
acagtgggggcatttctttatatca

SEQ ID NO: 152267 - DNA, 25 bp, Probe Sequence
acagctgaagggttttatttacaat

SEQ ID NO: 152268 - DNA, 25 bp, Probe Sequence
acaggcatttggatttttctacttc

SEQ ID NO: 152269 - DNA, 25 bp, Probe Sequence
acagtgcataagcagttttttttgt

SEQ ID NO: 152270 - DNA, 25 bp, Probe Sequence
acagctgtaagatattcgtcggttc

SEQ ID NO: 152271 - DNA, 25 bp, Probe Sequence
acatggtagagtctccaacctgttc

SEQ ID NO: 152272 - DNA, 25 bp, Probe Sequence
acaggatgaggtctcgaccctgtcc

SEQ ID NO: 152273 - DNA, 25 bp, Probe Sequence
acagggagtctgatccatcccattc

SEQ ID NO: 152274 - DNA, 25 bp, Probe Sequence
acaggaagatcaagttctccctgcc

SEQ ID NO: 152275 - DNA, 25 bp, Probe Sequence
acatggagagattatgtttcttcta

SEQ ID NO: 152276 - DNA, 25 bp, Probe Sequence
acatgtggagttttgcagtgcttct

SEQ ID NO: 152277 - DNA, 25 bp, Probe Sequence
acatggaggattttagagatgcctg

SEQ ID NO: 152278 - DNA, 25 bp, Probe Sequence
acagcaacgtcttgaacaggcgctg

SEQ ID NO: 152279 - DNA, 25 bp, Probe Sequence
acagaaacatgttaaaggccggaca

SEQ ID NO: 152280 - DNA, 25 bp, Probe Sequence
acagagcaaggtttcaaggagggga

SEQ ID NO: 152281 - DNA, 25 bp, Probe Sequence
acaggagagggcgttcaggatggca

SEQ ID NO: 152282 - DNA, 25 bp, Probe Sequence
acagtgggtggtgtcagcagctcac

SEQ ID NO: 152283 - DNA, 25 bp, Probe Sequence
acagagtatgggtcatctcagcccc

SEQ ID NO: 152284 - DNA, 25 bp, Probe Sequence
acaggctgcgggtacagcaggccgc

SEQ ID NO: 152285 - DNA, 25 bp, Probe Sequence
acaggctgcgggtacagcaggccgc

SEQ ID NO: 152286 - DNA, 25 bp, Probe Sequence
acatggtgcgagcacagaagatcca

SEQ ID NO: 152287 - DNA, 25 bp, Probe Sequence
acatgtgtgcaagaaataacagctc

SEQ ID NO: 152288 - DNA, 25 bp, Probe Sequence
acatggtgaattgaatcctgcagct

SEQ ID NO: 152289 - DNA, 25 bp, Probe Sequence
acatggagacattaaccttcagctg

SEQ ID NO: 152290 - DNA, 25 bp, Probe Sequence
acatgcaagactgacaccttgggcc

SEQ ID NO: 152291 - DNA, 25 bp, Probe Sequence
acagcatcaacaaacccttggcaac

SEQ ID NO: 152292 - DNA, 25 bp, Probe Sequence
acaccagtgcaattcagcaatttca

SEQ ID NO: 152293 - DNA, 25 bp, Probe Sequence
acacggctcacattgcatgcaagtt

SEQ ID NO: 152294 - DNA, 25 bp, Probe Sequence
acacggctcacattgcatgcaagtt

SEQ ID NO: 152295 - DNA, 25 bp, Probe Sequence
acaggccccagcatcaagatctggg

SEQ ID NO: 152296 - DNA, 25 bp, Probe Sequence
acagaggccttcatcatagactggt

SEQ ID NO: 152297 - DNA, 25 bp, Probe Sequence
acagtacctgctctcaaattgaaaa

SEQ ID NO: 152298 - DNA, 25 bp, Probe Sequence
acagtacctgtaatgagaaacagta

SEQ ID NO: 152299 - DNA, 25 bp, Probe Sequence
acagtgccctgtttacaacagattg

SEQ ID NO: 152300 - DNA, 25 bp, Probe Sequence
acaggcccagatgttgctgagcatg

SEQ ID NO: 152301 - DNA, 25 bp, Probe Sequence
acaggcctcagcctatgtctgagca

SEQ ID NO: 152302 - DNA, 25 bp, Probe Sequence
acaggcccacaaattctgatactgt

SEQ ID NO: 152303 - DNA, 25 bp, Probe Sequence
acagactcttgtattctgaaagtac

SEQ ID NO: 152304 - DNA, 25 bp, Probe Sequence
acatgacacgtgatttggaaagaga

SEQ ID NO: 152305 - DNA, 25 bp, Probe Sequence
acatgaacagatttcttgaataaaa

SEQ ID NO: 152306 - DNA, 25 bp, Probe Sequence
acatgaacgttgccatatgcacaaa

SEQ ID NO: 152307 - DNA, 25 bp, Probe Sequence
acagagcaagggcctgtctcagcaa

SEQ ID NO: 152308 - DNA, 25 bp, Probe Sequence
acaggcagggccatgactcattaga

SEQ ID NO: 152309 - DNA, 25 bp, Probe Sequence
acaggctggtgcatacactagacga

SEQ ID NO: 152310 - DNA, 25 bp, Probe Sequence
acaggctagcacaatacctaactca

SEQ ID NO: 152311 - DNA, 25 bp, Probe Sequence
acaggcatatgcatatcctgctact

SEQ ID NO: 152312 - DNA, 25 bp, Probe Sequence
acagcatgctatctatagttaataa

SEQ ID NO: 152313 - DNA, 25 bp, Probe Sequence
acaggttcttcttgtgtagtcacat

SEQ ID NO: 152314 - DNA, 25 bp, Probe Sequence
acaggttctagatttcatactccat

SEQ ID NO: 152315 - DNA, 25 bp, Probe Sequence
acaggaatcaagagctgccctcctt

SEQ ID NO: 152316 - DNA, 25 bp, Probe Sequence
acaggaggacgaggcttcctgctct

SEQ ID NO: 152317 - DNA, 25 bp, Probe Sequence
acaggagcgcacgagcggtggcttg

SEQ ID NO: 152318 - DNA, 25 bp, Probe Sequence
acaggggccaactagggccaggtgg

SEQ ID NO: 152319 - DNA, 25 bp, Probe Sequence
acaggaggccaagggcagctccagg

SEQ ID NO: 152320 - DNA, 25 bp, Probe Sequence
acaggcagtggacagacaggcctgg

SEQ ID NO: 152321 - DNA, 25 bp, Probe Sequence
acatggctgtggtcgaagaggtttt

SEQ ID NO: 152322 - DNA, 25 bp, Probe Sequence
acatggggatgctttagggtgagtc

SEQ ID NO: 152323 - DNA, 25 bp, Probe Sequence
acaggctggcaggttagagttggtg

SEQ ID NO: 152324 - DNA, 25 bp, Probe Sequence
acaggttgcaaattatggagtggga

SEQ ID NO: 152325 - DNA, 25 bp, Probe Sequence
acaggcttagaacttgcagagtgtg

SEQ ID NO: 152326 - DNA, 25 bp, Probe Sequence
acaggcatttgctactgtgtctggt

SEQ ID NO: 152327 - DNA, 25 bp, Probe Sequence
acagacaatgctgagtggtcgattc

SEQ ID NO: 152328 - DNA, 25 bp, Probe Sequence
acaggagaggaatagcatcgacatc

SEQ ID NO: 152329 - DNA, 25 bp, Probe Sequence
acagaaatggaagtagcatctacat

SEQ ID NO: 152330 - DNA, 25 bp, Probe Sequence
acagagactgagtcactggcccatc

SEQ ID NO: 152331 - DNA, 25 bp, Probe Sequence
acagctcagtagtcagaggacccaa

SEQ ID NO: 152332 - DNA, 25 bp, Probe Sequence
acactagctggacgggtaccaaaca

SEQ ID NO: 152333 - DNA, 25 bp, Probe Sequence
acagtacgagactctgttccaaaaa

SEQ ID NO: 152334 - DNA, 25 bp, Probe Sequence
acagagggagactctgtctcgaaag

SEQ ID NO: 152335 - DNA, 25 bp, Probe Sequence
acagtagaaacatctctatcagaaa

SEQ ID NO: 152336 - DNA, 25 bp, Probe Sequence
acagtgttaactgccatatatgtaa

SEQ ID NO: 152337 - DNA, 25 bp, Probe Sequence
acagcttctgaagtggcaagtacta

SEQ ID NO: 152338 - DNA, 25 bp, Probe Sequence
acagttctggaggatggttgcacga

SEQ ID NO: 152339 - DNA, 25 bp, Probe Sequence
acagattcacgtgatggattgcatc

SEQ ID NO: 152340 - DNA, 25 bp, Probe Sequence
acagattcacgtgatggattgcatc

SEQ ID NO: 152341 - DNA, 25 bp, Probe Sequence
acagtgtcactgtcagatggtctgc

SEQ ID NO: 152342 - DNA, 25 bp, Probe Sequence
acatgtgtgcctcagatctgttcca

SEQ ID NO: 152343 - DNA, 25 bp, Probe Sequence
acagtgtgtcttcagcagtgttcag

SEQ ID NO: 152344 - DNA, 25 bp, Probe Sequence
acagggacctgaaaggatccagaaa

SEQ ID NO: 152345 - DNA, 25 bp, Probe Sequence
acagggacactgaattgggacacat

SEQ ID NO: 152346 - DNA, 25 bp, Probe Sequence
acagaggttctgcttgggataatga

SEQ ID NO: 152347 - DNA, 25 bp, Probe Sequence
acagtcgtcgggaaggaacaagagg

SEQ ID NO: 152348 - DNA, 25 bp, Probe Sequence
acagtcggtgggaaacaaaagcatg

SEQ ID NO: 152349 - DNA, 25 bp, Probe Sequence
acagatcgtgtgtgtaaacaagcaa

SEQ ID NO: 152350 - DNA, 25 bp, Probe Sequence
acagataatgttctcactacccata

SEQ ID NO: 152351 - DNA, 25 bp, Probe Sequence
acagatactttgttcgttcacactc

SEQ ID NO: 152352 - DNA, 25 bp, Probe Sequence
acagtgttattgcctcaattccacc

SEQ ID NO: 152353 - DNA, 25 bp, Probe Sequence
acagagttctgtcgcagaaaccccc

SEQ ID NO: 152354 - DNA, 25 bp, Probe Sequence
acaggcttctcagggacatatccac

SEQ ID NO: 152355 - DNA, 25 bp, Probe Sequence
acaggtggcatatgcgagcaaagca

SEQ ID NO: 152356 - DNA, 25 bp, Probe Sequence
acagagtgatcattccagttaagcg

SEQ ID NO: 152357 - DNA, 25 bp, Probe Sequence
acaggctgtgacagaattaacagtt

SEQ ID NO: 152358 - DNA, 25 bp, Probe Sequence
acatggtgttgcacaagtacgtttt

SEQ ID NO: 152359 - DNA, 25 bp, Probe Sequence
acagtgttacccaaggttgtgtctt

SEQ ID NO: 152360 - DNA, 25 bp, Probe Sequence
acaggcttgtctgcctggttttcct

SEQ ID NO: 152361 - DNA, 25 bp, Probe Sequence
acaggcattccatagcagtgctttt

SEQ ID NO: 152362 - DNA, 25 bp, Probe Sequence
acaggcattatctctgcaattttag

SEQ ID NO: 152363 - DNA, 25 bp, Probe Sequence
acagagcctacccaaataagaagga

SEQ ID NO: 152364 - DNA, 25 bp, Probe Sequence
acagtgcctactgctatcaaaagag

SEQ ID NO: 152365 - DNA, 25 bp, Probe Sequence
acagtgactcaccctttaaagatgt

SEQ ID NO: 152366 - DNA, 25 bp, Probe Sequence
acaggatgcatctacctttccaaac

SEQ ID NO: 152367 - DNA, 25 bp, Probe Sequence
acaggaatctgaaatctaccaagac

SEQ ID NO: 152368 - DNA, 25 bp, Probe Sequence
acagaagaccagacatctatcagaa

SEQ ID NO: 152369 - DNA, 25 bp, Probe Sequence
acagacacagcctgcttcatcaagt

SEQ ID NO: 152370 - DNA, 25 bp, Probe Sequence
acagatagagccttctgtgttgcag

SEQ ID NO: 152371 - DNA, 25 bp, Probe Sequence
acagtaggctgcatctggagagcat

SEQ ID NO: 152372 - DNA, 25 bp, Probe Sequence
acagtgatggttctgcgcaacatgg

SEQ ID NO: 152373 - DNA, 25 bp, Probe Sequence
acagatgtggttgcatcctaactcc

SEQ ID NO: 152374 - DNA, 25 bp, Probe Sequence
acagcttctgttgactctaacttcc

SEQ ID NO: 152375 - DNA, 25 bp, Probe Sequence
acatgttcatttgattcataacaag

SEQ ID NO: 152376 - DNA, 25 bp, Probe Sequence
acatgtcctctcgcattgtaaatac

SEQ ID NO: 152377 - DNA, 25 bp, Probe Sequence
acagtgacctgcgcaatgtttatat

SEQ ID NO: 152378 - DNA, 25 bp, Probe Sequence
acagtgagactcgcagcatggtgga

SEQ ID NO: 152379 - DNA, 25 bp, Probe Sequence
acatgtcagactcctagagggcctc

SEQ ID NO: 152380 - DNA, 25 bp, Probe Sequence
acatgtcagaagaatcggtggtcct

SEQ ID NO: 152381 - DNA, 25 bp, Probe Sequence
acagtaacgttcattggttcctttg

SEQ ID NO: 152382 - DNA, 25 bp, Probe Sequence
acagtcgactttattcttctactct

SEQ ID NO: 152383 - DNA, 25 bp, Probe Sequence
acagttgtttctatgccttctgacc

SEQ ID NO: 152384 - DNA, 25 bp, Probe Sequence
acagtagatgttaagtgtctttatc

SEQ ID NO: 152385 - DNA, 25 bp, Probe Sequence
acagtccttctgagattgttaagca

SEQ ID NO: 152386 - DNA, 25 bp, Probe Sequence
acaggcctgcccagagatgggaata

SEQ ID NO: 152387 - DNA, 25 bp, Probe Sequence
acagacctctccagagcacttagtg

SEQ ID NO: 152388 - DNA, 25 bp, Probe Sequence
acaccacctctcacaatttaggcag

SEQ ID NO: 152389 - DNA, 25 bp, Probe Sequence
acaccacccacatatgtcatataga

SEQ ID NO: 152390 - DNA, 25 bp, Probe Sequence
acagccaaccagatacccataatat

SEQ ID NO: 152391 - DNA, 25 bp, Probe Sequence
acagtcctagagaattcctctattt

SEQ ID NO: 152392 - DNA, 25 bp, Probe Sequence
acagttatatataatatcctttttt

SEQ ID NO: 152393 - DNA, 25 bp, Probe Sequence
acagtgttgatgacaaatgcctttt

SEQ ID NO: 152394 - DNA, 25 bp, Probe Sequence
acagttgtgctgtcaatacctcata

SEQ ID NO: 152395 - DNA, 25 bp, Probe Sequence
acagattttgtcaaactccaaagac

SEQ ID NO: 152396 - DNA, 25 bp, Probe Sequence
acatggtttacatgttccaatatga

SEQ ID NO: 152397 - DNA, 25 bp, Probe Sequence
acaggttgtggattaatctttattt

SEQ ID NO: 152398 - DNA, 25 bp, Probe Sequence
acaggttggggaacactttatatga

SEQ ID NO: 152399 - DNA, 25 bp, Probe Sequence
acaggcatggtgtgaaacttgatgt

SEQ ID NO: 152400 - DNA, 25 bp, Probe Sequence
acacagtgcggatgaacctggactt

SEQ ID NO: 152401 - DNA, 25 bp, Probe Sequence
acaagtgacttattaccgaaactgg

SEQ ID NO: 152402 - DNA, 25 bp, Probe Sequence
acaggtttcttgtacacagaatatc

SEQ ID NO: 152403 - DNA, 25 bp, Probe Sequence
acatgtgtctgtggtatctaaaaaa

SEQ ID NO: 152404 - DNA, 25 bp, Probe Sequence
acagggcatgtgactttgaaagaga

SEQ ID NO: 152405 - DNA, 25 bp, Probe Sequence
acagagacagtacctgtaatgagaa

SEQ ID NO: 152406 - DNA, 25 bp, Probe Sequence
acagagaatgttaatggataccaga

SEQ ID NO: 152407 - DNA, 25 bp, Probe Sequence
acagctaatgattcaatgcgagaca

SEQ ID NO: 152408 - DNA, 25 bp, Probe Sequence
acagccaagtataatcggtccccag

SEQ ID NO: 152409 - DNA, 25 bp, Probe Sequence
acacaaacttggtggtcctgcacca

SEQ ID NO: 152410 - DNA, 25 bp, Probe Sequence
acagacacactttttgtccctgcat

SEQ ID NO: 152411 - DNA, 25 bp, Probe Sequence
acagactcaaagttactctccttcc

SEQ ID NO: 152412 - DNA, 25 bp, Probe Sequence
acagtctcaggacaacttagcctcc

SEQ ID NO: 152413 - DNA, 25 bp, Probe Sequence
acagttgaggggaactttgccagca

SEQ ID NO: 152414 - DNA, 25 bp, Probe Sequence
acagacggggaaactgaggctcaga

SEQ ID NO: 152415 - DNA, 25 bp, Probe Sequence
acagttggggaaatgctgactacag

SEQ ID NO: 152416 - DNA, 25 bp, Probe Sequence
acagggaggctaagtgtggtacagg

SEQ ID NO: 152417 - DNA, 25 bp, Probe Sequence
acagcggagtgatagactgctttag

SEQ ID NO: 152418 - DNA, 25 bp, Probe Sequence
acagcaggatcaagacaacccgttg

SEQ ID NO: 152419 - DNA, 25 bp, Probe Sequence
acagggtcatggcaacaacgtctcc

SEQ ID NO: 152420 - DNA, 25 bp, Probe Sequence
acaaggtcagagaacgagaccatcc

SEQ ID NO: 152421 - DNA, 25 bp, Probe Sequence
acagtgttcacagcacagcacacct

SEQ ID NO: 152422 - DNA, 25 bp, Probe Sequence
acagttgcctcaaatgagcaccatt

SEQ ID NO: 152423 - DNA, 25 bp, Probe Sequence
acagggcattcaaatgggctgctgc

SEQ ID NO: 152424 - DNA, 25 bp, Probe Sequence
acagtgtgaatcctgaggtgccgcc

SEQ ID NO: 152425 - DNA, 25 bp, Probe Sequence
aaatgagaacgtaggttgaccaagt

SEQ ID NO: 152426 - DNA, 25 bp, Probe Sequence
acagaagaacacagactggaccaac

SEQ ID NO: 152427 - DNA, 25 bp, Probe Sequence
acagacagaaaccgaaagctctata

SEQ ID NO: 152428 - DNA, 25 bp, Probe Sequence
acaccaaaaatttagatgccttaat

SEQ ID NO: 152429 - DNA, 25 bp, Probe Sequence
acagaaaagatgataaaccttagaa

SEQ ID NO: 152430 - DNA, 25 bp, Probe Sequence
acagcaaagagagttacgaattacg

SEQ ID NO: 152431 - DNA, 25 bp, Probe Sequence
acaaaacacgctgcaggagttcctg

SEQ ID NO: 152432 - DNA, 25 bp, Probe Sequence
acagagaacagcgccaaactccact

SEQ ID NO: 152433 - DNA, 25 bp, Probe Sequence
acagaaggcacagctaacggccagt

SEQ ID NO: 152434 - DNA, 25 bp, Probe Sequence
acagtagccatagctgacagcatcc

SEQ ID NO: 152435 - DNA, 25 bp, Probe Sequence
acaggaccagatacagaatgcacag

SEQ ID NO: 152436 - DNA, 25 bp, Probe Sequence
acaggaccagttacactccatacgc

SEQ ID NO: 152437 - DNA, 25 bp, Probe Sequence
acagtgacaggctccactttgaggc

SEQ ID NO: 152438 - DNA, 25 bp, Probe Sequence
acagacaatgtcatgcaaaaacaga

SEQ ID NO: 152439 - DNA, 25 bp, Probe Sequence
acaggattaacttaacaatagatgt

SEQ ID NO: 152440 - DNA, 25 bp, Probe Sequence
acaagcatgtaacaaaaaaggtgta

SEQ ID NO: 152441 - DNA, 25 bp, Probe Sequence
acagactaagaggaaacaaagcgtt

SEQ ID NO: 152442 - DNA, 25 bp, Probe Sequence
acagatctacacaaactacaaaagt

SEQ ID NO: 152443 - DNA, 25 bp, Probe Sequence
acagatgtaccttttgcaataccgt

SEQ ID NO: 152444 - DNA, 25 bp, Probe Sequence
acagttactcactttgtgtaatctg

SEQ ID NO: 152445 - DNA, 25 bp, Probe Sequence
acagttaccgcacctgtctaaactt

SEQ ID NO: 152446 - DNA, 25 bp, Probe Sequence
acagtgtaaggctctgtcttaaaaa

SEQ ID NO: 152447 - DNA, 25 bp, Probe Sequence
acagaacaagaccctgtctctaaaa

SEQ ID NO: 152448 - DNA, 25 bp, Probe Sequence
acagagacacggtgttctccgagta

SEQ ID NO: 152449 - DNA, 25 bp, Probe Sequence
acagggatctgggggatctccacgt

SEQ ID NO: 152450 - DNA, 25 bp, Probe Sequence
acagggatctgggggatctccacgt

SEQ ID NO: 152451 - DNA, 25 bp, Probe Sequence
acagggatctgggggatctccacgt

SEQ ID NO: 152452 - DNA, 25 bp, Probe Sequence
acaggctgacagagaagattcccga

SEQ ID NO: 152453 - DNA, 25 bp, Probe Sequence
acaggctgacagagaagattcccga

SEQ ID NO: 152454 - DNA, 25 bp, Probe Sequence
acagtgttcagttcaagttgcccga

SEQ ID NO: 152455 - DNA, 25 bp, Probe Sequence
acagtgtgctcagtaaagtcttcca

SEQ ID NO: 152456 - DNA, 25 bp, Probe Sequence
acaggaggcagacaatgaccccacg

SEQ ID NO: 152457 - DNA, 25 bp, Probe Sequence
acaggaggcagacaatgaccccacg

SEQ ID NO: 152458 - DNA, 25 bp, Probe Sequence
acagagagcgagacgcggagtcccc

SEQ ID NO: 152459 - DNA, 25 bp, Probe Sequence
acagggctgtggagatggctccggc

SEQ ID NO: 152460 - DNA, 25 bp, Probe Sequence
acagacatggggaggcagccctgac

SEQ ID NO: 152461 - DNA, 25 bp, Probe Sequence
acagacatgatgcggtctacggccc

SEQ ID NO: 152462 - DNA, 25 bp, Probe Sequence
acagtgatatagctgtggagctggc

SEQ ID NO: 152463 - DNA, 25 bp, Probe Sequence
acagttaatgtggctgggagggact

SEQ ID NO: 152464 - DNA, 25 bp, Probe Sequence
acagtggacatggcttggggtagag

SEQ ID NO: 152465 - DNA, 25 bp, Probe Sequence
acagtggcctgctattgaggaaagg

SEQ ID NO: 152466 - DNA, 25 bp, Probe Sequence
acagttggaccaaggcaataaggat

SEQ ID NO: 152467 - DNA, 25 bp, Probe Sequence
acagggtgaccaacgcaagaacata

SEQ ID NO: 152468 - DNA, 25 bp, Probe Sequence
acaggagggcccgcaaggtatatca

SEQ ID NO: 152469 - DNA, 25 bp, Probe Sequence
acaggcagagtacccctgacgtttt

SEQ ID NO: 152470 - DNA, 25 bp, Probe Sequence
acaggcaagtcctgcattaggattt

SEQ ID NO: 152471 - DNA, 25 bp, Probe Sequence
acagcgggtcactgttttgacttaa

SEQ ID NO: 152472 - DNA, 25 bp, Probe Sequence
aacgaaacctagtgaagcatctttt

SEQ ID NO: 152473 - DNA, 25 bp, Probe Sequence
acaggacaacacaaggtaagtgctg

SEQ ID NO: 152474 - DNA, 25 bp, Probe Sequence
acaggacttcgcagatgtcacattg

SEQ ID NO: 152475 - DNA, 25 bp, Probe Sequence
acagacacttcgggactcaatgctt

SEQ ID NO: 152476 - DNA, 25 bp, Probe Sequence
acagaactcccaggacttcatggat

SEQ ID NO: 152477 - DNA, 25 bp, Probe Sequence
acagctgagtccgacaaccattggg

SEQ ID NO: 152478 - DNA, 25 bp, Probe Sequence
acagatactctcgtgcaaaaggggt

SEQ ID NO: 152479 - DNA, 25 bp, Probe Sequence
catcctagcttcttctaagggggga

SEQ ID NO: 152480 - DNA, 25 bp, Probe Sequence
acagtagtatgtactcaaattgggg

SEQ ID NO: 152481 - DNA, 25 bp, Probe Sequence
acagaataattccacaacaggaagg

SEQ ID NO: 152482 - DNA, 25 bp, Probe Sequence
acagaaaagtgcccagagcatagat

SEQ ID NO: 152483 - DNA, 25 bp, Probe Sequence
acagtaattgttccttgtgcatgtt

SEQ ID NO: 152484 - DNA, 25 bp, Probe Sequence
acagtaatctgtccttttctggtgc

SEQ ID NO: 152485 - DNA, 25 bp, Probe Sequence
acagatgaccgtttgttacttgtgg

SEQ ID NO: 152486 - DNA, 25 bp, Probe Sequence
acagtagatcactttttactctgtg

SEQ ID NO: 152487 - DNA, 25 bp, Probe Sequence
acagttcctctgttttagattggaa

SEQ ID NO: 152488 - DNA, 25 bp, Probe Sequence
acagtttcttgttgtgttttagaat

SEQ ID NO: 152489 - DNA, 25 bp, Probe Sequence
acaggtacctatctgtttctaaata

SEQ ID NO: 152490 - DNA, 25 bp, Probe Sequence
acaggctcacctagacatgtgttct

SEQ ID NO: 152491 - DNA, 25 bp, Probe Sequence
acagtgtaacatgtcacttgtgctt

SEQ ID NO: 152492 - DNA, 25 bp, Probe Sequence
acagttcaacaatccgtggctgctc

SEQ ID NO: 152493 - DNA, 25 bp, Probe Sequence
acaggtaaccactgctgctactgtt

SEQ ID NO: 152494 - DNA, 25 bp, Probe Sequence
acagagagaacctctcccacttttt

SEQ ID NO: 152495 - DNA, 25 bp, Probe Sequence
acagaaccagcctgtcagagccttt

SEQ ID NO: 152496 - DNA, 25 bp, Probe Sequence
acagtccaggccaagtagagccccg

SEQ ID NO: 152497 - DNA, 25 bp, Probe Sequence
acagggagcaccaaaggaccttcgt

SEQ ID NO: 152498 - DNA, 25 bp, Probe Sequence
acagggatccacagcgtgactatgt

SEQ ID NO: 152499 - DNA, 25 bp, Probe Sequence
acagggaccagaatgttttgttgtt

SEQ ID NO: 152500 - DNA, 25 bp, Probe Sequence
acagggacaatttgacttcctcttt

SEQ ID NO: 152501 - DNA, 25 bp, Probe Sequence
acagtgcggattgagagcgtccctc

SEQ ID NO: 152502 - DNA, 25 bp, Probe Sequence
acagagggataggcacagtctccac

SEQ ID NO: 152503 - DNA, 25 bp, Probe Sequence
acaggtgagagggcagaggctcacc

SEQ ID NO: 152504 - DNA, 25 bp, Probe Sequence
acagtctacatgggcaaagtgacct

SEQ ID NO: 152505 - DNA, 25 bp, Probe Sequence
acagttgagcagacagccacattgg

SEQ ID NO: 152506 - DNA, 25 bp, Probe Sequence
acaggagagacaccgcctgcggtgg

SEQ ID NO: 152507 - DNA, 25 bp, Probe Sequence
acagtgcggataaaggtgcggatgc

SEQ ID NO: 152508 - DNA, 25 bp, Probe Sequence
acaggctacaatacaggtcagagac

SEQ ID NO: 152509 - DNA, 25 bp, Probe Sequence
acagggatcagattagatgctcagg

SEQ ID NO: 152510 - DNA, 25 bp, Probe Sequence
acagggatgatggagagttcatgaa

SEQ ID NO: 152511 - DNA, 25 bp, Probe Sequence
acagccgatctgctgcaggtcagca

SEQ ID NO: 152512 - DNA, 25 bp, Probe Sequence
acagctctgacatggcagtgtaggg

SEQ ID NO: 152513 - DNA, 25 bp, Probe Sequence
acagtggagcttcagggcgtggtgc

SEQ ID NO: 152514 - DNA, 25 bp, Probe Sequence
acaggggctgtggagtgacctggtg

SEQ ID NO: 152515 - DNA, 25 bp, Probe Sequence
acaggcagttggccagagagcctgg

SEQ ID NO: 152516 - DNA, 25 bp, Probe Sequence
acaggctgatttggagtgagccaga

SEQ ID NO: 152517 - DNA, 25 bp, Probe Sequence
acagcctgtattggagcgtcaagcc

SEQ ID NO: 152518 - DNA, 25 bp, Probe Sequence
acagcatttacttaagtaatcctct

SEQ ID NO: 152519 - DNA, 25 bp, Probe Sequence
acagcattctaaactattcacccat

SEQ ID NO: 152520 - DNA, 25 bp, Probe Sequence
acagctggctaatacatatatacct

SEQ ID NO: 152521 - DNA, 25 bp, Probe Sequence
acagcttcacaatggccatgaacgc

SEQ ID NO: 152522 - DNA, 25 bp, Probe Sequence
acagcgacccaaagccgaaggacag

SEQ ID NO: 152523 - DNA, 25 bp, Probe Sequence
acagcgacccaaagccgaaggacag

SEQ ID NO: 152524 - DNA, 25 bp, Probe Sequence
acaggaggaacaggacctagaaaga

SEQ ID NO: 152525 - DNA, 25 bp, Probe Sequence
acagtaggaatagacgtagacacac

SEQ ID NO: 152526 - DNA, 25 bp, Probe Sequence
aaacaggaggtgcacgtaccaccca

SEQ ID NO: 152527 - DNA, 25 bp, Probe Sequence
aaccaggcgggctgtgaaccagccc

SEQ ID NO: 152528 - DNA, 25 bp, Probe Sequence
aatccagtgggtgagtgccctcaga

SEQ ID NO: 152529 - DNA, 25 bp, Probe Sequence
acaggcaagggatcagatgcccctg

SEQ ID NO: 152530 - DNA, 25 bp, Probe Sequence
acagtgcccgtgtcggagccgcgcg

SEQ ID NO: 152531 - DNA, 25 bp, Probe Sequence
acaggtgcggtgtgcaccgagcgcg

SEQ ID NO: 152532 - DNA, 25 bp, Probe Sequence
acagatggctgccatgcttacctga

SEQ ID NO: 152533 - DNA, 25 bp, Probe Sequence
acagggcagcgtgtaggtgaccaca

SEQ ID NO: 152534 - DNA, 25 bp, Probe Sequence
acaggacggtttatgagcacacaat

SEQ ID NO: 152535 - DNA, 25 bp, Probe Sequence
acagccacggggtttgcaatagcaa

SEQ ID NO: 152536 - DNA, 25 bp, Probe Sequence
acagtcactgtgtgtatggattaca

SEQ ID NO: 152537 - DNA, 25 bp, Probe Sequence
acagacaatctgtgatatggtgttt

SEQ ID NO: 152538 - DNA, 25 bp, Probe Sequence
acagacacaatgtacattaagttta

SEQ ID NO: 152539 - DNA, 25 bp, Probe Sequence
acagatgaaattaatgtgcacagat

SEQ ID NO: 152540 - DNA, 25 bp, Probe Sequence
acaggaagactgatgttcatgggta

SEQ ID NO: 152541 - DNA, 25 bp, Probe Sequence
acaggaccctgcatgatactggaat

SEQ ID NO: 152542 - DNA, 25 bp, Probe Sequence
acagtgagccctggctgtgacagga

SEQ ID NO: 152543 - DNA, 25 bp, Probe Sequence
acactagctcaccagcagtgaatcc

SEQ ID NO: 152544 - DNA, 25 bp, Probe Sequence
acaatacccagagctcaatccagta

SEQ ID NO: 152545 - DNA, 25 bp, Probe Sequence
acagataaggaaactcatcctcaga

SEQ ID NO: 152546 - DNA, 25 bp, Probe Sequence
acagcatgggtaatacctgcctcca

SEQ ID NO: 152547 - DNA, 25 bp, Probe Sequence
acagaggagaagaagcctgctgcat

SEQ ID NO: 152548 - DNA, 25 bp, Probe Sequence
acagaggagaagaagcctgctgcat

SEQ ID NO: 152549 - DNA, 25 bp, Probe Sequence
acagggagtgaggagccttgctgct

SEQ ID NO: 152550 - DNA, 25 bp, Probe Sequence
acaggtgatggagtcatgcttttgc

SEQ ID NO: 152551 - DNA, 25 bp, Probe Sequence
acagtgctgtctgatctgtgctttc

SEQ ID NO: 152552 - DNA, 25 bp, Probe Sequence
acagtgtgtatattatctcttgctc

SEQ ID NO: 152553 - DNA, 25 bp, Probe Sequence
acaggtgtgaaccactgtgctcagc

SEQ ID NO: 152554 - DNA, 25 bp, Probe Sequence
acagctgggaaccacgatctacaag

SEQ ID NO: 152555 - DNA, 25 bp, Probe Sequence
acagtatgtgtagcaggcttacaag

SEQ ID NO: 152556 - DNA, 25 bp, Probe Sequence
acagtagtccccacttatctgaggg

SEQ ID NO: 152557 - DNA, 25 bp, Probe Sequence
acaggactccccaagcggaatgagg

SEQ ID NO: 152558 - DNA, 25 bp, Probe Sequence
acaggactccccaagcggaatgagg

SEQ ID NO: 152559 - DNA, 25 bp, Probe Sequence
acaggactccccaagcggaatgagg

SEQ ID NO: 152560 - DNA, 25 bp, Probe Sequence
acagtgtccccacagagcgaataaa

SEQ ID NO: 152561 - DNA, 25 bp, Probe Sequence
acagtggccctgtgcaggctgaaaa

SEQ ID NO: 152562 - DNA, 25 bp, Probe Sequence
acagtggaactgtcccagctttaag

SEQ ID NO: 152563 - DNA, 25 bp, Probe Sequence
acagtggaactgtcccagctttaag

SEQ ID NO: 152564 - DNA, 25 bp, Probe Sequence
acagtggtcatttccatactgtttg

SEQ ID NO: 152565 - DNA, 25 bp, Probe Sequence
acagtgagtctgtcagcgcaggttt

SEQ ID NO: 152566 - DNA, 25 bp, Probe Sequence
acagcatcgtcaacgacgaggttcg

SEQ ID NO: 152567 - DNA, 25 bp, Probe Sequence
acagacctattctcaggagttctcc

SEQ ID NO: 152568 - DNA, 25 bp, Probe Sequence
acagactacttataggagcatcttc

SEQ ID NO: 152569 - DNA, 25 bp, Probe Sequence
acaggttctgattctaatacatttc

SEQ ID NO: 152570 - DNA, 25 bp, Probe Sequence
acagcgttgcagaacatgaacgatt

SEQ ID NO: 152571 - DNA, 25 bp, Probe Sequence
acagagcttcagtgtgagaggatcg

SEQ ID NO: 152572 - DNA, 25 bp, Probe Sequence
acagacctcagggatatatgatata

SEQ ID NO: 152573 - DNA, 25 bp, Probe Sequence
acagtgcccagggctctgatgtgtc

SEQ ID NO: 152574 - DNA, 25 bp, Probe Sequence
acagtccttggaccattctgatcca

SEQ ID NO: 152575 - DNA, 25 bp, Probe Sequence
acagtccttggaccattctgatcca

SEQ ID NO: 152576 - DNA, 25 bp, Probe Sequence
acagtccttggaccattctgatcca

SEQ ID NO: 152577 - DNA, 25 bp, Probe Sequence
acagatgccttgcacgtttattcca

SEQ ID NO: 152578 - DNA, 25 bp, Probe Sequence
acagtgcactaattcagtttttcca

SEQ ID NO: 152579 - DNA, 25 bp, Probe Sequence
acagtgccagaatatttttctgaag

SEQ ID NO: 152580 - DNA, 25 bp, Probe Sequence
acagtctcatgttaacttgaaataa

SEQ ID NO: 152581 - DNA, 25 bp, Probe Sequence
acagtctttgaatatcgaacacgca

SEQ ID NO: 152582 - DNA, 25 bp, Probe Sequence
acagtctctctttatataaatacac

SEQ ID NO: 152583 - DNA, 25 bp, Probe Sequence
acagttcacaatctagtaatagcaa

SEQ ID NO: 152584 - DNA, 25 bp, Probe Sequence
acagttacctggaaatactgatgat

SEQ ID NO: 152585 - DNA, 25 bp, Probe Sequence
acagctaaccgtgaacacttaatgt

SEQ ID NO: 152586 - DNA, 25 bp, Probe Sequence
acaccccggtggaagcatttagagg

SEQ ID NO: 152587 - DNA, 25 bp, Probe Sequence
acacgctcactgcgaaggcaggtta

SEQ ID NO: 152588 - DNA, 25 bp, Probe Sequence
acagcaggcttaaacccaggcttat

SEQ ID NO: 152589 - DNA, 25 bp, Probe Sequence
acagagtctctgtgacacgcagtgc

SEQ ID NO: 152590 - DNA, 25 bp, Probe Sequence
acagcatgtcctgcaacaagcagct

SEQ ID NO: 152591 - DNA, 25 bp, Probe Sequence
acagagatgcactctccagtgactc

SEQ ID NO: 152592 - DNA, 25 bp, Probe Sequence
acagaggcaatgccaccatgataca

SEQ ID NO: 152593 - DNA, 25 bp, Probe Sequence
acagctcactatgacctgaacaatt

SEQ ID NO: 152594 - DNA, 25 bp, Probe Sequence
acagccctgacagcctggaaaacat

SEQ ID NO: 152595 - DNA, 25 bp, Probe Sequence
acagcaccagacgcgatggcaaagt

SEQ ID NO: 152596 - DNA, 25 bp, Probe Sequence
acagcaaggacccgtggcatggggc

SEQ ID NO: 152597 - DNA, 25 bp, Probe Sequence
acagaagtgatccgcgggctgtgat

SEQ ID NO: 152598 - DNA, 25 bp, Probe Sequence
acaggtgtgtacgtaggtgtatgtg

SEQ ID NO: 152599 - DNA, 25 bp, Probe Sequence
acagggctgatagttgtggttttgt

SEQ ID NO: 152600 - DNA, 25 bp, Probe Sequence
acactgggatagatgcttgtttgta

SEQ ID NO: 152601 - DNA, 25 bp, Probe Sequence
acagtaagataggttctgctttctg

SEQ ID NO: 152602 - DNA, 25 bp, Probe Sequence
acagcaaagacagcttccatacctg

SEQ ID NO: 152603 - DNA, 25 bp, Probe Sequence
acagcaaagacagtcgccgaggcac

SEQ ID NO: 152604 - DNA, 25 bp, Probe Sequence
aacaaccgaatccctggacactaag

SEQ ID NO: 152605 - DNA, 25 bp, Probe Sequence
acacccctgaaccacgaggaaacag

SEQ ID NO: 152606 - DNA, 25 bp, Probe Sequence
acagcccctccaggcaagggagaag

SEQ ID NO: 152607 - DNA, 25 bp, Probe Sequence
acacctccctttcaaggacaacacg

SEQ ID NO: 152608 - DNA, 25 bp, Probe Sequence
acacttccctatgttggagacccaa

SEQ ID NO: 152609 - DNA, 25 bp, Probe Sequence
acacctccgtgtgatttatgagcgc

SEQ ID NO: 152610 - DNA, 25 bp, Probe Sequence
acagggctcgagaaacctatgggct

SEQ ID NO: 152611 - DNA, 25 bp, Probe Sequence
acagaggacgagctgccctatgatg

SEQ ID NO: 152612 - DNA, 25 bp, Probe Sequence
acagggcaggcgggcccatgaagaa

SEQ ID NO: 152613 - DNA, 25 bp, Probe Sequence
acagggacacgttccctggaagaca

SEQ ID NO: 152614 - DNA, 25 bp, Probe Sequence
acagctggacacatgagccctggat

SEQ ID NO: 152615 - DNA, 25 bp, Probe Sequence
acagggaacttgccctgcatctatt

SEQ ID NO: 152616 - DNA, 25 bp, Probe Sequence
acagggagacagtgctgtcctcttg

SEQ ID NO: 152617 - DNA, 25 bp, Probe Sequence
acaggggacagctatgacccctagc

SEQ ID NO: 152618 - DNA, 25 bp, Probe Sequence
cacaggtgggcgatcacccgaagtc

SEQ ID NO: 152619 - DNA, 25 bp, Probe Sequence
acagccgtggtgatcaccaccaggc

SEQ ID NO: 152620 - DNA, 25 bp, Probe Sequence
acagacctgtggctccaaggaatct

SEQ ID NO: 152621 - DNA, 25 bp, Probe Sequence
acagtcttgtagttcctcaaacatc

SEQ ID NO: 152622 - DNA, 25 bp, Probe Sequence
acagttcagtagtttaaagaatctt

SEQ ID NO: 152623 - DNA, 25 bp, Probe Sequence
acagttcactttttacagtgctatt

SEQ ID NO: 152624 - DNA, 25 bp, Probe Sequence
acagttcacattcagctcagcagag

SEQ ID NO: 152625 - DNA, 25 bp, Probe Sequence
acagctgctgagtttactccatagc

SEQ ID NO: 152626 - DNA, 25 bp, Probe Sequence
acaagctagttgttctgccagatgt

SEQ ID NO: 152627 - DNA, 25 bp, Probe Sequence
acaggtgagctgcacgctgggatgt

SEQ ID NO: 152628 - DNA, 25 bp, Probe Sequence
acaggggctgtcctctagaattctt

SEQ ID NO: 152629 - DNA, 25 bp, Probe Sequence
acagctgggctggaacgtgaactca

SEQ ID NO: 152630 - DNA, 25 bp, Probe Sequence
acagtggagagttacaggacagtca

SEQ ID NO: 152631 - DNA, 25 bp, Probe Sequence
acagggagaggtccacagacaatcc

SEQ ID NO: 152632 - DNA, 25 bp, Probe Sequence
acagagggcaggagcacagacccct

SEQ ID NO: 152633 - DNA, 25 bp, Probe Sequence
acagaggcggagatcagcatgacca

SEQ ID NO: 152634 - DNA, 25 bp, Probe Sequence
acagggctggctggacgaggtagtt

SEQ ID NO: 152635 - DNA, 25 bp, Probe Sequence
acagaggggtagctgggatcatgct

SEQ ID NO: 152636 - DNA, 25 bp, Probe Sequence
acagcagtcggttggagcgagcatc

SEQ ID NO: 152637 - DNA, 25 bp, Probe Sequence
acagtgtggaggcaggcgcgatcag

SEQ ID NO: 152638 - DNA, 25 bp, Probe Sequence
acagcatgtggaggcttggatggaa

SEQ ID NO: 152639 - DNA, 25 bp, Probe Sequence
acagagctgcgagtcatgggattca

SEQ ID NO: 152640 - DNA, 25 bp, Probe Sequence
acagactcaggcgatgtgctttatg

SEQ ID NO: 152641 - DNA, 25 bp, Probe Sequence
acacctgcagtttgagcgctttgtg

SEQ ID NO: 152642 - DNA, 25 bp, Probe Sequence
acagcctgatgtttgggaccttttt

SEQ ID NO: 152643 - DNA, 25 bp, Probe Sequence
acagcctgatgtttgggaccttttt

SEQ ID NO: 152644 - DNA, 25 bp, Probe Sequence
acagcctgctgttcatgtacaaggt

SEQ ID NO: 152645 - DNA, 25 bp, Probe Sequence
acagctgcactggcaagaaaatgga

SEQ ID NO: 152646 - DNA, 25 bp, Probe Sequence
acagtgctcacctaaatccatctga

SEQ ID NO: 152647 - DNA, 25 bp, Probe Sequence
acagtgtattctagatcatctaaga

SEQ ID NO: 152648 - DNA, 25 bp, Probe Sequence
acagatgtcatcttgcttccttaat

SEQ ID NO: 152649 - DNA, 25 bp, Probe Sequence
acagtatcactgtctttcctagatg

SEQ ID NO: 152650 - DNA, 25 bp, Probe Sequence
acagctggccatgatatgttaagat

SEQ ID NO: 152651 - DNA, 25 bp, Probe Sequence
acactggctctgggacttgcagaag

SEQ ID NO: 152652 - DNA, 25 bp, Probe Sequence
acagcagcctctgaagttggacagc

SEQ ID NO: 152653 - DNA, 25 bp, Probe Sequence
acagagccttgtggtggctgtacag

SEQ ID NO: 152654 - DNA, 25 bp, Probe Sequence
acagacctgcagctgagggtcctgt

SEQ ID NO: 152655 - DNA, 25 bp, Probe Sequence
acagtcctgcggaaatgtgtcttgt

SEQ ID NO: 152656 - DNA, 25 bp, Probe Sequence
acagtcactggaaagagtgccagtc

SEQ ID NO: 152657 - DNA, 25 bp, Probe Sequence
acagcctcattgctaagtgtactgc

SEQ ID NO: 152658 - DNA, 25 bp, Probe Sequence
acacctgcttggaggctgcaacggg

SEQ ID NO: 152659 - DNA, 25 bp, Probe Sequence
acaccagttggtgtcagacccgagc

SEQ ID NO: 152660 - DNA, 25 bp, Probe Sequence
acaccattgtggtgtcggctacggc

SEQ ID NO: 152661 - DNA, 25 bp, Probe Sequence
acagacggctggtttggaccactgg

SEQ ID NO: 152662 - DNA, 25 bp, Probe Sequence
acagaagctttatttgagaacaggt

SEQ ID NO: 152663 - DNA, 25 bp, Probe Sequence
acagaaatcttctattgaatgggaa

SEQ ID NO: 152664 - DNA, 25 bp, Probe Sequence
acagtattgcgttgtcagactagga

SEQ ID NO: 152665 - DNA, 25 bp, Probe Sequence
acagtttgcagatttcgaatatagc

SEQ ID NO: 152666 - DNA, 25 bp, Probe Sequence
acagaattcagagtccagcacatca

SEQ ID NO: 152667 - DNA, 25 bp, Probe Sequence
acagtattcagtgcacagaaatctt

SEQ ID NO: 152668 - DNA, 25 bp, Probe Sequence
acagtttcattgtctaacacacttc

SEQ ID NO: 152669 - DNA, 25 bp, Probe Sequence
acagtatttggagaactcactgatg

SEQ ID NO: 152670 - DNA, 25 bp, Probe Sequence
acagataaagctgctaactcctgat

SEQ ID NO: 152671 - DNA, 25 bp, Probe Sequence
acagttagattttacagcttctgat

SEQ ID NO: 152672 - DNA, 25 bp, Probe Sequence
acagtgtacgtgaaagcgctttgct

SEQ ID NO: 152673 - DNA, 25 bp, Probe Sequence
acagttccctgaatacgtttgcttt

SEQ ID NO: 152674 - DNA, 25 bp, Probe Sequence
acagttctgcttatgcacgtatatt

SEQ ID NO: 152675 - DNA, 25 bp, Probe Sequence
acagtaggcccagtgcaagtatttg

SEQ ID NO: 152676 - DNA, 25 bp, Probe Sequence
acagtttcgccagacagcaaatgtt

SEQ ID NO: 152677 - DNA, 25 bp, Probe Sequence
acagtttggccgtaaagatgtggct

SEQ ID NO: 152678 - DNA, 25 bp, Probe Sequence
acagtctgcggggcttgaagagtca

SEQ ID NO: 152679 - DNA, 25 bp, Probe Sequence
acactcctgggagttttgttcacct

SEQ ID NO: 152680 - DNA, 25 bp, Probe Sequence
acacctctcccagttgttgggattt

SEQ ID NO: 152681 - DNA, 25 bp, Probe Sequence
acacccccaagtgcatatgggtctg

SEQ ID NO: 152682 - DNA, 25 bp, Probe Sequence
acacccaacaagtcaatgagggact

SEQ ID NO: 152683 - DNA, 25 bp, Probe Sequence
acagcacaaagaagtaagggcagtt

SEQ ID NO: 152684 - DNA, 25 bp, Probe Sequence
acagcaacgagggatgggggggtag

SEQ ID NO: 152685 - DNA, 25 bp, Probe Sequence
acagatactgggctgcggggatgct

SEQ ID NO: 152686 - DNA, 25 bp, Probe Sequence
acagaacagtgccgttgggtgatgc

SEQ ID NO: 152687 - DNA, 25 bp, Probe Sequence
acagaccgggctggagggtgacctt

SEQ ID NO: 152688 - DNA, 25 bp, Probe Sequence
acaagccgcggggcaaaatgtcctc

SEQ ID NO: 152689 - DNA, 25 bp, Probe Sequence
acagaccgcaggggcaagacagccg

SEQ ID NO: 152690 - DNA, 25 bp, Probe Sequence
acagaccaacctggcattacagttg

SEQ ID NO: 152691 - DNA, 25 bp, Probe Sequence
acagactaccggattacagattttg

SEQ ID NO: 152692 - DNA, 25 bp, Probe Sequence
acagatctggttcacttacgatgat

SEQ ID NO: 152693 - DNA, 25 bp, Probe Sequence
acactcatagctgtagattacgtga

SEQ ID NO: 152694 - DNA, 25 bp, Probe Sequence
acagttgcagtggaagtcatgaggt

SEQ ID NO: 152695 - DNA, 25 bp, Probe Sequence
acagactgacgcgagcagccaaggt

SEQ ID NO: 152696 - DNA, 25 bp, Probe Sequence
acagactgatccaagatgacactgc

SEQ ID NO: 152697 - DNA, 25 bp, Probe Sequence
acagacattccagtgatagcatcca

SEQ ID NO: 152698 - DNA, 25 bp, Probe Sequence
acagcagcacgccagataactcaga

SEQ ID NO: 152699 - DNA, 25 bp, Probe Sequence
acagatgcatgccacagtagatgtc

SEQ ID NO: 152700 - DNA, 25 bp, Probe Sequence
acagagcctcacagatgatgtccat

SEQ ID NO: 152701 - DNA, 25 bp, Probe Sequence
acagcagcttcagttttgtgccaac

SEQ ID NO: 152702 - DNA, 25 bp, Probe Sequence
acagtcttctattgttggaccactt

SEQ ID NO: 152703 - DNA, 25 bp, Probe Sequence
acagtctttaaattgacccatcatc

SEQ ID NO: 152704 - DNA, 25 bp, Probe Sequence
acagtcacctgaacaatgacccatc

SEQ ID NO: 152705 - DNA, 25 bp, Probe Sequence
acagcagacctagccatgggcacaa

SEQ ID NO: 152706 - DNA, 25 bp, Probe Sequence
acagcgatactagggctgacagcac

SEQ ID NO: 152707 - DNA, 25 bp, Probe Sequence
acagcagatcccaggtacagagggc

SEQ ID NO: 152708 - DNA, 25 bp, Probe Sequence
acagaatccatcagggccatgagtg

SEQ ID NO: 152709 - DNA, 25 bp, Probe Sequence
acagaatttcgatgcctatgtgagc

SEQ ID NO: 152710 - DNA, 25 bp, Probe Sequence
acagagtgttcctgctcattttgtc

SEQ ID NO: 152711 - DNA, 25 bp, Probe Sequence
acagtgcagattccacgttcttgtt

SEQ ID NO: 152712 - DNA, 25 bp, Probe Sequence
acagctgctagtctgcaacctagtt

SEQ ID NO: 152713 - DNA, 25 bp, Probe Sequence
acagcacaagagaaactcctagttt

SEQ ID NO: 152714 - DNA, 25 bp, Probe Sequence
acagcacaaaagcactttgagtggc

SEQ ID NO: 152715 - DNA, 25 bp, Probe Sequence
acagcaccagaatttcgtcgttggg

SEQ ID NO: 152716 - DNA, 25 bp, Probe Sequence
acagatccaatgttgctgcagtttt

SEQ ID NO: 152717 - DNA, 25 bp, Probe Sequence
acagactgcctgaattgagaatttt

SEQ ID NO: 152718 - DNA, 25 bp, Probe Sequence
acagactgcctgaattgagaatttt

SEQ ID NO: 152719 - DNA, 25 bp, Probe Sequence
acagcacagctaatttggtatcttt

SEQ ID NO: 152720 - DNA, 25 bp, Probe Sequence
acagcctgctacagacgttcttttt

SEQ ID NO: 152721 - DNA, 25 bp, Probe Sequence
acactactgaggtggttctttctat

SEQ ID NO: 152722 - DNA, 25 bp, Probe Sequence
acagccctggtgtggtgtggtttaa

SEQ ID NO: 152723 - DNA, 25 bp, Probe Sequence
acacctttggtcttgatggctgttt

SEQ ID NO: 152724 - DNA, 25 bp, Probe Sequence
acacctttgaatttgcggatgctga

SEQ ID NO: 152725 - DNA, 25 bp, Probe Sequence
acacccagtcattttgcggtgaaaa

SEQ ID NO: 152726 - DNA, 25 bp, Probe Sequence
acagccaaagctgttgcggtgaccc

SEQ ID NO: 152727 - DNA, 25 bp, Probe Sequence
acagacaaactgctgtcgggctacc

SEQ ID NO: 152728 - DNA, 25 bp, Probe Sequence
acagacaaactgctgtcgggctacc

SEQ ID NO: 152729 - DNA, 25 bp, Probe Sequence
acagtttactggttgttccattcct

SEQ ID NO: 152730 - DNA, 25 bp, Probe Sequence
acagttttatagtcagttctttaca

SEQ ID NO: 152731 - DNA, 25 bp, Probe Sequence
acagtttcaggagatgtgacatttg

SEQ ID NO: 152732 - DNA, 25 bp, Probe Sequence
acagttatcaggggatgtacatctc

SEQ ID NO: 152733 - DNA, 25 bp, Probe Sequence
acagttcatcatttggtgcttagtc

SEQ ID NO: 152734 - DNA, 25 bp, Probe Sequence
acagtgctgaacttggcttttgcgc

SEQ ID NO: 152735 - DNA, 25 bp, Probe Sequence
acagttgctgactcacattagtgcc

SEQ ID NO: 152736 - DNA, 25 bp, Probe Sequence
acagtattgtgctcctgtagtcctg

SEQ ID NO: 152737 - DNA, 25 bp, Probe Sequence
acagtatctgctgttcttcagtcct

SEQ ID NO: 152738 - DNA, 25 bp, Probe Sequence
acagaatatgctccattatatcctc

SEQ ID NO: 152739 - DNA, 25 bp, Probe Sequence
acagtattgctatttatattcattc

SEQ ID NO: 152740 - DNA, 25 bp, Probe Sequence
acagtacagctatttctcatcaatt

SEQ ID NO: 152741 - DNA, 25 bp, Probe Sequence
acagtacagacagcatggatatttc

SEQ ID NO: 152742 - DNA, 25 bp, Probe Sequence
acagtaggacaccatccttctgttc

SEQ ID NO: 152743 - DNA, 25 bp, Probe Sequence
acagataggaatgacctatggctta

SEQ ID NO: 152744 - DNA, 25 bp, Probe Sequence
acagcaaggacagcacctacagcct

SEQ ID NO: 152745 - DNA, 25 bp, Probe Sequence
acagaattcataacacttggcactt

SEQ ID NO: 152746 - DNA, 25 bp, Probe Sequence
acagaagtatatcctttgacacata

SEQ ID NO: 152747 - DNA, 25 bp, Probe Sequence
acagagagataacgagctggctaaa

SEQ ID NO: 152748 - DNA, 25 bp, Probe Sequence
acagcaaggaatcgagctactcaca

SEQ ID NO: 152749 - DNA, 25 bp, Probe Sequence
acagcagaggaatagctcagcctga

SEQ ID NO: 152750 - DNA, 25 bp, Probe Sequence
acagcatggagttgcaagtcctctg

SEQ ID NO: 152751 - DNA, 25 bp, Probe Sequence
acagctgcgatgagctgtgatcgca

SEQ ID NO: 152752 - DNA, 25 bp, Probe Sequence
acagctggtctgtgtgtccagttcc

SEQ ID NO: 152753 - DNA, 25 bp, Probe Sequence
acactggaccattggatcgatatta

SEQ ID NO: 152754 - DNA, 25 bp, Probe Sequence
acagatgtgacgcggacaatgcatt

SEQ ID NO: 152755 - DNA, 25 bp, Probe Sequence
acagagtgcactcgaggggactttc

SEQ ID NO: 152756 - DNA, 25 bp, Probe Sequence
acacgtgcctggtcaggctggcttc

SEQ ID NO: 152757 - DNA, 25 bp, Probe Sequence
acagctggccgctgagggagcattc

SEQ ID NO: 152758 - DNA, 25 bp, Probe Sequence
acagatggttgctcagggacaaggt

SEQ ID NO: 152759 - DNA, 25 bp, Probe Sequence
acagatgttcgctcagatgtatcag

SEQ ID NO: 152760 - DNA, 25 bp, Probe Sequence
acagtcttcagccacagttgtgatg

SEQ ID NO: 152761 - DNA, 25 bp, Probe Sequence
acagctattcccagctgctgatgtt

SEQ ID NO: 152762 - DNA, 25 bp, Probe Sequence
acagcttataccatggaatgaggac

SEQ ID NO: 152763 - DNA, 25 bp, Probe Sequence
cacccacagtcccgagactgggatc

SEQ ID NO: 152764 - DNA, 25 bp, Probe Sequence
acaccaagatggcgagccagtgtgg

SEQ ID NO: 152765 - DNA, 25 bp, Probe Sequence
acagaccaagggctcacagtctgcg

SEQ ID NO: 152766 - DNA, 25 bp, Probe Sequence
acagcccttgctggggacagttgct

SEQ ID NO: 152767 - DNA, 25 bp, Probe Sequence
acagtccaagccctggataatgctt

SEQ ID NO: 152768 - DNA, 25 bp, Probe Sequence
acagctccatggtaggagtcaatct

SEQ ID NO: 152769 - DNA, 25 bp, Probe Sequence
acagctaaggcaagagactggactg

SEQ ID NO: 152770 - DNA, 25 bp, Probe Sequence
acagtaagagaaagacggcaggtcc

SEQ ID NO: 152771 - DNA, 25 bp, Probe Sequence
acagcctcagaaaaactgcacggtg

SEQ ID NO: 152772 - DNA, 25 bp, Probe Sequence
acagcctggaaacatcgcgaggagg

SEQ ID NO: 152773 - DNA, 25 bp, Probe Sequence
acagttgagaaactctcctgccggg

SEQ ID NO: 152774 - DNA, 25 bp, Probe Sequence
acagttgtacagttcccagtctggc

SEQ ID NO: 152775 - DNA, 25 bp, Probe Sequence
acagatagtccataccctgttgcac

SEQ ID NO: 152776 - DNA, 25 bp, Probe Sequence
acaccaggccaatccttgttaacca

SEQ ID NO: 152777 - DNA, 25 bp, Probe Sequence
acaccagtcacttaacttgttagcc

SEQ ID NO: 152778 - DNA, 25 bp, Probe Sequence
acagtcagtccgcaagatatttatg

SEQ ID NO: 152779 - DNA, 25 bp, Probe Sequence
acagtagatgtccacataataaaat

SEQ ID NO: 152780 - DNA, 25 bp, Probe Sequence
acagctagggactgattagaaatgc

SEQ ID NO: 152781 - DNA, 25 bp, Probe Sequence
acaaatgggatctgaattaaagcta

SEQ ID NO: 152782 - DNA, 25 bp, Probe Sequence
acagaggtggttttattgataagat

SEQ ID NO: 152783 - DNA, 25 bp, Probe Sequence
acaaattggttatattctaagatct

SEQ ID NO: 152784 - DNA, 25 bp, Probe Sequence
acagagatccagataagagttaaaa

SEQ ID NO: 152785 - DNA, 25 bp, Probe Sequence
acaaatcaatttgggagtctaaata

SEQ ID NO: 152786 - DNA, 25 bp, Probe Sequence
acacttattttgggggaatatctat

SEQ ID NO: 152787 - DNA, 25 bp, Probe Sequence
tcgtcggttttctgagggtacttca

SEQ ID NO: 152788 - DNA, 25 bp, Probe Sequence
ttggggtctttgtggggtattgttg

SEQ ID NO: 152789 - DNA, 25 bp, Probe Sequence
gagacgggttagtggggctttctat

SEQ ID NO: 152790 - DNA, 25 bp, Probe Sequence
tggaattaagtacaggggtttatag

SEQ ID NO: 152791 - DNA, 25 bp, Probe Sequence
ggatttccatttcaggtggttttct

SEQ ID NO: 152792 - DNA, 25 bp, Probe Sequence
aagtctcccttatggaggcttttct

SEQ ID NO: 152793 - DNA, 25 bp, Probe Sequence
acagtcaacctttctagtagtttat

SEQ ID NO: 152794 - DNA, 25 bp, Probe Sequence
acagtaaccacaatctaaatattta

SEQ ID NO: 152795 - DNA, 25 bp, Probe Sequence
acagaaatgctctatttacaaattt

SEQ ID NO: 152796 - DNA, 25 bp, Probe Sequence
acagattatctgtatttaaatgtat

SEQ ID NO: 152797 - DNA, 25 bp, Probe Sequence
acagatttggcctatatgaaagcta

SEQ ID NO: 152798 - DNA, 25 bp, Probe Sequence
acagcttatgacccattaggcctat

SEQ ID NO: 152799 - DNA, 25 bp, Probe Sequence
acagctatgaccacttaggcctatt

SEQ ID NO: 152800 - DNA, 25 bp, Probe Sequence
acagctatgaccattagggcctatt

SEQ ID NO: 152801 - DNA, 25 bp, Probe Sequence
acagctatgaccattaggcctattt

SEQ ID NO: 152802 - DNA, 25 bp, Probe Sequence
acagctatgaccattaggcctattt

SEQ ID NO: 152803 - DNA, 25 bp, Probe Sequence
acagctatgaccattaggcctattt

SEQ ID NO: 152804 - DNA, 25 bp, Probe Sequence
acagctatgaccattaggcctattt

SEQ ID NO: 152805 - DNA, 25 bp, Probe Sequence
acagctatgaccattaggcctattt

SEQ ID NO: 152806 - DNA, 25 bp, Probe Sequence
acagctatgaccattaggcctattt

SEQ ID NO: 152807 - DNA, 25 bp, Probe Sequence
acagctatgaccattaggcctattt

SEQ ID NO: 152808 - DNA, 25 bp, Probe Sequence
acagctatgaccattaggcctattt

SEQ ID NO: 152809 - DNA, 25 bp, Probe Sequence
acagctatgaccattaggcctattt

SEQ ID NO: 152810 - DNA, 25 bp, Probe Sequence
acagctatgaccattaggcctattt

SEQ ID NO: 152811 - DNA, 25 bp, Probe Sequence
acagctatgaccattaggcctattt

SEQ ID NO: 152812 - DNA, 25 bp, Probe Sequence
acagctatgaccattaggcctattt

SEQ ID NO: 152813 - DNA, 25 bp, Probe Sequence
acagctatgaccattaggcctattt

SEQ ID NO: 152814 - DNA, 25 bp, Probe Sequence
acagctatgaccattaggcctattt

SEQ ID NO: 152815 - DNA, 25 bp, Probe Sequence
acagctatgaccattaggcctattt

SEQ ID NO: 152816 - DNA, 25 bp, Probe Sequence
acagctatgaccattaggcctattt

SEQ ID NO: 152817 - DNA, 25 bp, Probe Sequence
acagctatgaccattaggcctattt

SEQ ID NO: 152818 - DNA, 25 bp, Probe Sequence
acagctatgaccattaggcctattt

SEQ ID NO: 152819 - DNA, 25 bp, Probe Sequence
acagctatgaccattaggcctattt

SEQ ID NO: 152820 - DNA, 25 bp, Probe Sequence
acagctatgaccattaggcctattt

SEQ ID NO: 152821 - DNA, 25 bp, Probe Sequence
acagctatgaccattaggcctattt

SEQ ID NO: 152822 - DNA, 25 bp, Probe Sequence
acagctatgaccattaggcctattt

SEQ ID NO: 152823 - DNA, 25 bp, Probe Sequence
acagctatgaccattaggcctattt

SEQ ID NO: 152824 - DNA, 25 bp, Probe Sequence
acagctatgaccattaggcctattt

SEQ ID NO: 152825 - DNA, 25 bp, Probe Sequence
acagctatgaccattaggcctattt

SEQ ID NO: 152826 - DNA, 25 bp, Probe Sequence
acagctatgaccattaggcctattt

SEQ ID NO: 152827 - DNA, 25 bp, Probe Sequence
acagctatgaccattaggcctattt

SEQ ID NO: 152828 - DNA, 25 bp, Probe Sequence
acagctatgaccattaggcctattt

SEQ ID NO: 152829 - DNA, 25 bp, Probe Sequence
acagctatgaccattaggcctattt

SEQ ID NO: 152830 - DNA, 25 bp, Probe Sequence
acagctatgaccattaggcctattt

SEQ ID NO: 152831 - DNA, 25 bp, Probe Sequence
acagctatgaccattaggcctattt

SEQ ID NO: 152832 - DNA, 25 bp, Probe Sequence
acagctatgaccattaggcctattt

SEQ ID NO: 152833 - DNA, 25 bp, Probe Sequence
acagctatgaccattaggcctattt

SEQ ID NO: 152834 - DNA, 25 bp, Probe Sequence
acagctatgaccattaggcctattt

SEQ ID NO: 152835 - DNA, 25 bp, Probe Sequence
acagctatgaccattaggcctattt

SEQ ID NO: 152836 - DNA, 25 bp, Probe Sequence
acagctatgaccattaggcctattt

SEQ ID NO: 152837 - DNA, 25 bp, Probe Sequence
acagctatgaccattaggcctattt

SEQ ID NO: 152838 - DNA, 25 bp, Probe Sequence
acagctatgaccattaggcctattt

SEQ ID NO: 152839 - DNA, 25 bp, Probe Sequence
acagctatgaccattaggcctattt

SEQ ID NO: 152840 - DNA, 25 bp, Probe Sequence
acagctatgaccattaggcctattt

SEQ ID NO: 152841 - DNA, 25 bp, Probe Sequence
acagctatgaccattaggcctattt

SEQ ID NO: 152842 - DNA, 25 bp, Probe Sequence
acagctatgaccattaggcctattt

SEQ ID NO: 152843 - DNA, 25 bp, Probe Sequence
acagctatgaccattaggcctattt

SEQ ID NO: 152844 - DNA, 25 bp, Probe Sequence
acagctatgaccattaggcctattt

SEQ ID NO: 152845 - DNA, 25 bp, Probe Sequence
acagctatgaccattaggcctattt

SEQ ID NO: 152846 - DNA, 25 bp, Probe Sequence
acagctatgaccattaggcctattt

SEQ ID NO: 152847 - DNA, 25 bp, Probe Sequence
acagctatgaccattaggcctattt

SEQ ID NO: 152848 - DNA, 25 bp, Probe Sequence
acagctatgaccattaggcctattt

SEQ ID NO: 152849 - DNA, 25 bp, Probe Sequence
acagctatgaccattaggcctattt

SEQ ID NO: 152850 - DNA, 25 bp, Probe Sequence
acagctatgaccattaggcctattt

SEQ ID NO: 152851 - DNA, 25 bp, Probe Sequence
acagctatgaccattaggcctattt

SEQ ID NO: 152852 - DNA, 25 bp, Probe Sequence
acagctatgaccattaggcctattt

SEQ ID NO: 152853 - DNA, 25 bp, Probe Sequence
acagctatgaccattaggcctattt

SEQ ID NO: 152854 - DNA, 25 bp, Probe Sequence
acagctatgaccattaggcctattt

SEQ ID NO: 152855 - DNA, 25 bp, Probe Sequence
acagctatgaccattaggcctattt

SEQ ID NO: 152856 - DNA, 25 bp, Probe Sequence
acagctatgaccattaggcctattt

SEQ ID NO: 152857 - DNA, 25 bp, Probe Sequence
acagctatgaccattaggcctattt

SEQ ID NO: 152858 - DNA, 25 bp, Probe Sequence
acagctatgaccattaggcctattt

SEQ ID NO: 152859 - DNA, 25 bp, Probe Sequence
acagctatgaccattaggcctattt

SEQ ID NO: 152860 - DNA, 25 bp, Probe Sequence
acagctatgaccattaggcctattt

SEQ ID NO: 152861 - DNA, 25 bp, Probe Sequence
acagctatgaccattaggcctattt

SEQ ID NO: 152862 - DNA, 25 bp, Probe Sequence
acagctatgaccattaggcctattt

SEQ ID NO: 152863 - DNA, 25 bp, Probe Sequence
acagctatgaccattaggcctattt

SEQ ID NO: 152864 - DNA, 25 bp, Probe Sequence
acagctatgaccattaggcctattt

SEQ ID NO: 152865 - DNA, 25 bp, Probe Sequence
acagctatgaccattaggcctattt

SEQ ID NO: 152866 - DNA, 25 bp, Probe Sequence
acagctatgaccattaggcctattt

SEQ ID NO: 152867 - DNA, 25 bp, Probe Sequence
acagctatgaccattaggcctattt

SEQ ID NO: 152868 - DNA, 25 bp, Probe Sequence
acagctatgaccattaggcctattt

SEQ ID NO: 152869 - DNA, 25 bp, Probe Sequence
acagctatgaccattaggcctattt

SEQ ID NO: 152870 - DNA, 25 bp, Probe Sequence
acagctatgaccattaggcctattt

SEQ ID NO: 152871 - DNA, 25 bp, Probe Sequence
acagctatgaccattaggcctattt

SEQ ID NO: 152872 - DNA, 25 bp, Probe Sequence
acagctatgaccattaggcctattt

SEQ ID NO: 152873 - DNA, 25 bp, Probe Sequence
acagctatgaccattaggcctattt

SEQ ID NO: 152874 - DNA, 25 bp, Probe Sequence
acagatgatggatgtgttacctagg

SEQ ID NO: 152875 - DNA, 25 bp, Probe Sequence
acagcagagggagttaagccatagg

SEQ ID NO: 152876 - DNA, 25 bp, Probe Sequence
acagcctgaggggtacagcaaaggg

SEQ ID NO: 152877 - DNA, 25 bp, Probe Sequence
acaccagtgtgggcatccagtgagg

SEQ ID NO: 152878 - DNA, 25 bp, Probe Sequence
acactcggtcatgtgctcagacaac

SEQ ID NO: 152879 - DNA, 25 bp, Probe Sequence
acactcacgattgctcaaccaaaaa

SEQ ID NO: 152880 - DNA, 25 bp, Probe Sequence
acacctgcatttgctgaacttaaac

SEQ ID NO: 152881 - DNA, 25 bp, Probe Sequence
acaccctatcttgtcaataaacagc

SEQ ID NO: 152882 - DNA, 25 bp, Probe Sequence
acacccttaggcagaaagaacaagc

SEQ ID NO: 152883 - DNA, 25 bp, Probe Sequence
aacggctttggcagacagtaacgtc

SEQ ID NO: 152884 - DNA, 25 bp, Probe Sequence
taaccctacctgtcaacgtaacgat

SEQ ID NO: 152885 - DNA, 25 bp, Probe Sequence
cagaccctaaaactcacgtggtcgt

SEQ ID NO: 152886 - DNA, 25 bp, Probe Sequence
acaccctaactactcccaggtagat

SEQ ID NO: 152887 - DNA, 25 bp, Probe Sequence
acaccgtaactatccgcactagaaa

SEQ ID NO: 152888 - DNA, 25 bp, Probe Sequence
acaccgtaactatccgcactagaaa

SEQ ID NO: 152889 - DNA, 25 bp, Probe Sequence
acacttgtaatcccaccactttggg

SEQ ID NO: 152890 - DNA, 25 bp, Probe Sequence
acacctgtagtcccaacacttaggg

SEQ ID NO: 152891 - DNA, 25 bp, Probe Sequence
acacctgtagtcccaggtacttggg

SEQ ID NO: 152892 - DNA, 25 bp, Probe Sequence
acagacttactctcaggtcagttga

SEQ ID NO: 152893 - DNA, 25 bp, Probe Sequence
acagactgttccttcattttcctgt

SEQ ID NO: 152894 - DNA, 25 bp, Probe Sequence
acagacctatcggccttatttctga

SEQ ID NO: 152895 - DNA, 25 bp, Probe Sequence
acagattcttcagccctttggtaac

SEQ ID NO: 152896 - DNA, 25 bp, Probe Sequence
aaactactgcactccgttgaatacc

SEQ ID NO: 152897 - DNA, 25 bp, Probe Sequence
acaactacgacgcggagaacaaact

SEQ ID NO: 152898 - DNA, 25 bp, Probe Sequence
acactctaggacggggaacgacaat

SEQ ID NO: 152899 - DNA, 25 bp, Probe Sequence
acaccaagaagagtggggcccacct

SEQ ID NO: 152900 - DNA, 25 bp, Probe Sequence
acacctggaatttggttactccact

SEQ ID NO: 152901 - DNA, 25 bp, Probe Sequence
aactttaagactgttacgccactca

SEQ ID NO: 152902 - DNA, 25 bp, Probe Sequence
aactctctaacatgtttaaccctca

SEQ ID NO: 152903 - DNA, 25 bp, Probe Sequence
acactccaatgatagttttcccgtt

SEQ ID NO: 152904 - DNA, 25 bp, Probe Sequence
acagcattagctgaaatttaccctt

SEQ ID NO: 152905 - DNA, 25 bp, Probe Sequence
acagcatatactgacctatttttct

SEQ ID NO: 152906 - DNA, 25 bp, Probe Sequence
acagacaaccatctctttttatatt

SEQ ID NO: 152907 - DNA, 25 bp, Probe Sequence
acagacacaccgactttgtcctttt

SEQ ID NO: 152908 - DNA, 25 bp, Probe Sequence
acagccacaaggaccgtttcatttc

SEQ ID NO: 152909 - DNA, 25 bp, Probe Sequence
acaccctaggactcatctacatttc

SEQ ID NO: 152910 - DNA, 25 bp, Probe Sequence
acaccaggagcgatccatctacgta

SEQ ID NO: 152911 - DNA, 25 bp, Probe Sequence
acaccaaggcagatgctcctctggt

SEQ ID NO: 152912 - DNA, 25 bp, Probe Sequence
acagagcaagtcactctcgattggt

SEQ ID NO: 152913 - DNA, 25 bp, Probe Sequence
acagaaactcgggtcgctctgtgtg

SEQ ID NO: 152914 - DNA, 25 bp, Probe Sequence
acagacacactaggcctgtgtattt

SEQ ID NO: 152915 - DNA, 25 bp, Probe Sequence
acagaaacacaaccggatgtcttga

SEQ ID NO: 152916 - DNA, 25 bp, Probe Sequence
acagaaccacggcggtgaagcagtg

SEQ ID NO: 152917 - DNA, 25 bp, Probe Sequence
acagataacacacaagagggagcag

SEQ ID NO: 152918 - DNA, 25 bp, Probe Sequence
acagaggaaacagaatgggagctga

SEQ ID NO: 152919 - DNA, 25 bp, Probe Sequence
acagaggcatcagcatcgaaggggc

SEQ ID NO: 152920 - DNA, 25 bp, Probe Sequence
acagaggagatgctgctgaagcgcg

SEQ ID NO: 152921 - DNA, 25 bp, Probe Sequence
acagagatcatgatgtctacacagg

SEQ ID NO: 152922 - DNA, 25 bp, Probe Sequence
acagagatatgcacacacacggatg

SEQ ID NO: 152923 - DNA, 25 bp, Probe Sequence
acagcaggatgggaaagcgggcaga

SEQ ID NO: 152924 - DNA, 25 bp, Probe Sequence
acagcgtggcgctgaacggggatgg

SEQ ID NO: 152925 - DNA, 25 bp, Probe Sequence
acactgtgcccatctacgaggggta

SEQ ID NO: 152926 - DNA, 25 bp, Probe Sequence
acagctggttacattgctaggcgag

SEQ ID NO: 152927 - DNA, 25 bp, Probe Sequence
acacggtgtacatttccagagcctt

SEQ ID NO: 152928 - DNA, 25 bp, Probe Sequence
acagagggctaaatccatgaagttt

SEQ ID NO: 152929 - DNA, 25 bp, Probe Sequence
acagatcggtgtaatcctgagagat

SEQ ID NO: 152930 - DNA, 25 bp, Probe Sequence
acagagctgagctttagccgagagt

SEQ ID NO: 152931 - DNA, 25 bp, Probe Sequence
acagccatgatctttagcacagtga

SEQ ID NO: 152932 - DNA, 25 bp, Probe Sequence
acagcgcaatcctattctagagtcc

SEQ ID NO: 152933 - DNA, 25 bp, Probe Sequence
acagatgtcccattttcagactgct

SEQ ID NO: 152934 - DNA, 25 bp, Probe Sequence
acagatgaactctttctggcctgct

SEQ ID NO: 152935 - DNA, 25 bp, Probe Sequence
acagctaacatcattgcagcacctt

SEQ ID NO: 152936 - DNA, 25 bp, Probe Sequence
acagcttctatttgtgaaccattag

SEQ ID NO: 152937 - DNA, 25 bp, Probe Sequence
acagcatcttcccaaaaccattgat

SEQ ID NO: 152938 - DNA, 25 bp, Probe Sequence
acagcactgagcccaataacttgaa

SEQ ID NO: 152939 - DNA, 25 bp, Probe Sequence
acagccggcagcaacagtacctgca

SEQ ID NO: 152940 - DNA, 25 bp, Probe Sequence
acagccagtcagaaccataaagcta

SEQ ID NO: 152941 - DNA, 25 bp, Probe Sequence
acacacatatacacgaatagacatc

SEQ ID NO: 152942 - DNA, 25 bp, Probe Sequence
acaacgaatttggctacagcaacag

SEQ ID NO: 152943 - DNA, 25 bp, Probe Sequence
acaacgaatttggctacagcaacag

SEQ ID NO: 152944 - DNA, 25 bp, Probe Sequence
acagaatgaatttatgcacacacaa

SEQ ID NO: 152945 - DNA, 25 bp, Probe Sequence
acagagtgagactgcatctcaaaaa

SEQ ID NO: 152946 - DNA, 25 bp, Probe Sequence
acagagtgagaatctgtctcaaaaa

SEQ ID NO: 152947 - DNA, 25 bp, Probe Sequence
acagagcgagactccatctcggaaa

SEQ ID NO: 152948 - DNA, 25 bp, Probe Sequence
acagagcgagactccatctcaaaaa

SEQ ID NO: 152949 - DNA, 25 bp, Probe Sequence
acacgcgattgcgcaatgccataaa

SEQ ID NO: 152950 - DNA, 25 bp, Probe Sequence
acaccgatgtgcgcacacacagata

SEQ ID NO: 152951 - DNA, 25 bp, Probe Sequence
acacctgtgctattaccacagtcaa

SEQ ID NO: 152952 - DNA, 25 bp, Probe Sequence
acaccttctagtagctcaagctagt

SEQ ID NO: 152953 - DNA, 25 bp, Probe Sequence
acacgtttactactatagctgaata

SEQ ID NO: 152954 - DNA, 25 bp, Probe Sequence
acagctattatactactttctcgtt

SEQ ID NO: 152955 - DNA, 25 bp, Probe Sequence
acagctcagttcaccatgattctct

SEQ ID NO: 152956 - DNA, 25 bp, Probe Sequence
acagccgaaaccgatgtgtctatgg

SEQ ID NO: 152957 - DNA, 25 bp, Probe Sequence
acagccaacccggctgcgtgtagag

SEQ ID NO: 152958 - DNA, 25 bp, Probe Sequence
acagcacagacagcgagcgctggaa

SEQ ID NO: 152959 - DNA, 25 bp, Probe Sequence
acagagctgtgtgctgcactgtggg

SEQ ID NO: 152960 - DNA, 25 bp, Probe Sequence
acacggtgcagcgatgccgggagat

SEQ ID NO: 152961 - DNA, 25 bp, Probe Sequence
acacgctgcgccggaagtgtgaact

SEQ ID NO: 152962 - DNA, 25 bp, Probe Sequence
acacgctcttacagtcgatggactt

SEQ ID NO: 152963 - DNA, 25 bp, Probe Sequence
acacgctcttacagtcgatggactt

SEQ ID NO: 152964 - DNA, 25 bp, Probe Sequence
acagagcatctagctggtgcgctgg

SEQ ID NO: 152965 - DNA, 25 bp, Probe Sequence
acagagcactccttgatgggcatgg

SEQ ID NO: 152966 - DNA, 25 bp, Probe Sequence
acagcccaagcagatagctcatggc

SEQ ID NO: 152967 - DNA, 25 bp, Probe Sequence
acagaccatggagtatcatttgact

SEQ ID NO: 152968 - DNA, 25 bp, Probe Sequence
acagagtcaagattctgtcttgaat

SEQ ID NO: 152969 - DNA, 25 bp, Probe Sequence
acagagtctaaactatcctgaaaac

SEQ ID NO: 152970 - DNA, 25 bp, Probe Sequence
acagaagccagaaaatcctgccaaa

SEQ ID NO: 152971 - DNA, 25 bp, Probe Sequence
acagaaggcagatcctcctgctaca

SEQ ID NO: 152972 - DNA, 25 bp, Probe Sequence
acagacgatgaatctcccatgtgtc

SEQ ID NO: 152973 - DNA, 25 bp, Probe Sequence
acagacaggatgcaccacatctagt

SEQ ID NO: 152974 - DNA, 25 bp, Probe Sequence
aacatcaggtaagccattagttagg

SEQ ID NO: 152975 - DNA, 25 bp, Probe Sequence
acagctaggtattcccattatgtta

SEQ ID NO: 152976 - DNA, 25 bp, Probe Sequence
acagcgatggttctacattgatttt

SEQ ID NO: 152977 - DNA, 25 bp, Probe Sequence
acagcttgtagtttgccaggatttt

SEQ ID NO: 152978 - DNA, 25 bp, Probe Sequence
acacctgtagatattactgtacttt

SEQ ID NO: 152979 - DNA, 25 bp, Probe Sequence
acagactgcctgagctcttctgtaa

SEQ ID NO: 152980 - DNA, 25 bp, Probe Sequence
acagactgcctgagctcttctgtaa

SEQ ID NO: 152981 - DNA, 25 bp, Probe Sequence
acagacgcttgaggacaggcttaaa

SEQ ID NO: 152982 - DNA, 25 bp, Probe Sequence
acagcccactgagaagagcttccag

SEQ ID NO: 152983 - DNA, 25 bp, Probe Sequence
acagcagcactcccgaagagatgcc

SEQ ID NO: 152984 - DNA, 25 bp, Probe Sequence
acagcagagccactgagatttgtgt

SEQ ID NO: 152985 - DNA, 25 bp, Probe Sequence
acagcagtggacgatgttgtgcaat

SEQ ID NO: 152986 - DNA, 25 bp, Probe Sequence
acagcagtggacgatgttgtgcaat

SEQ ID NO: 152987 - DNA, 25 bp, Probe Sequence
acagagtggccatgtatgtgcatgc

SEQ ID NO: 152988 - DNA, 25 bp, Probe Sequence
acagcctgagcttagctcagcgccg

SEQ ID NO: 152989 - DNA, 25 bp, Probe Sequence
acactgccagcatggtggcacctgc

SEQ ID NO: 152990 - DNA, 25 bp, Probe Sequence
acactgccagcatggtggcacctgc

SEQ ID NO: 152991 - DNA, 25 bp, Probe Sequence
acagcagccacaatgaggaactcct

SEQ ID NO: 152992 - DNA, 25 bp, Probe Sequence
acagcagtgatctgggcaagctccc

SEQ ID NO: 152993 - DNA, 25 bp, Probe Sequence
acagctgatctctcggcagaaactc

SEQ ID NO: 152994 - DNA, 25 bp, Probe Sequence
acagcatgtctcttctcgaagacaa

SEQ ID NO: 152995 - DNA, 25 bp, Probe Sequence
acagcagcctgcagctggattacgc

SEQ ID NO: 152996 - DNA, 25 bp, Probe Sequence
acagagctgctggcccgatataagc

SEQ ID NO: 152997 - DNA, 25 bp, Probe Sequence
acacgtggctccagatcaaagcggc

SEQ ID NO: 152998 - DNA, 25 bp, Probe Sequence
acacgggccaccatgaacttggcac

SEQ ID NO: 152999 - DNA, 25 bp, Probe Sequence
acaccttctaacctgtgaattggca

SEQ ID NO: 153000 - DNA, 25 bp, Probe Sequence
acacctatatgaacacagtttgtac

SEQ ID NO: 153001 - DNA, 25 bp, Probe Sequence
acaccatcattaagaataattgaac

SEQ ID NO: 153002 - DNA, 25 bp, Probe Sequence
acagcccagaggagatagtgcagaa

SEQ ID NO: 153003 - DNA, 25 bp, Probe Sequence
acagcccgacgaaaggatgccaaat

SEQ ID NO: 153004 - DNA, 25 bp, Probe Sequence
acacctggcaagaatattaaaacta

SEQ ID NO: 153005 - DNA, 25 bp, Probe Sequence
acacttggtaattgtactaaagcca

SEQ ID NO: 153006 - DNA, 25 bp, Probe Sequence
aaattgtgctagtttctccaaatgc

SEQ ID NO: 153007 - DNA, 25 bp, Probe Sequence
aacaatggtaggcttccagttaaag

SEQ ID NO: 153008 - DNA, 25 bp, Probe Sequence
acaccatgtgtgccaagttccagtt

SEQ ID NO: 153009 - DNA, 25 bp, Probe Sequence
acaccagctatcacaggtccatggt

SEQ ID NO: 153010 - DNA, 25 bp, Probe Sequence
acaccagttctgactgaaccatgcc

SEQ ID NO: 153011 - DNA, 25 bp, Probe Sequence
acagctatgtttgcagcaacaatct

SEQ ID NO: 153012 - DNA, 25 bp, Probe Sequence
acagctatcgctttacaacattttg

SEQ ID NO: 153013 - DNA, 25 bp, Probe Sequence
acagcttgactcctacaagaatggt

SEQ ID NO: 153014 - DNA, 25 bp, Probe Sequence
acagcttcccccatagaaggatttc

SEQ ID NO: 153015 - DNA, 25 bp, Probe Sequence
acaaactccggcactgggtttgctc

SEQ ID NO: 153016 - DNA, 25 bp, Probe Sequence
acagaacagggcccctgggattagc

SEQ ID NO: 153017 - DNA, 25 bp, Probe Sequence
acagaaaggtctctctgttcctcac

SEQ ID NO: 153018 - DNA, 25 bp, Probe Sequence
acaaaatgcccatgttggtcctctg

SEQ ID NO: 153019 - DNA, 25 bp, Probe Sequence
acaaaatgcccatgttggtcctctg

SEQ ID NO: 153020 - DNA, 25 bp, Probe Sequence
acactgaccttatatgtgacccctg

SEQ ID NO: 153021 - DNA, 25 bp, Probe Sequence
acaaggcttgaatctgtattaccca

SEQ ID NO: 153022 - DNA, 25 bp, Probe Sequence
acactagcttaatctggtttacgga

SEQ ID NO: 153023 - DNA, 25 bp, Probe Sequence
acacgcagttcgtgcggttcgacag

SEQ ID NO: 153024 - DNA, 25 bp, Probe Sequence
acagcacgttcctggtgttcatgtc

SEQ ID NO: 153025 - DNA, 25 bp, Probe Sequence
acagcacattcctggtgtttatgtc

SEQ ID NO: 153026 - DNA, 25 bp, Probe Sequence
acagcaagatcctgtctttgtaaaa

SEQ ID NO: 153027 - DNA, 25 bp, Probe Sequence
acagaccacgcacgtgatttgtcca

SEQ ID NO: 153028 - DNA, 25 bp, Probe Sequence
acaccaaccatgctgtttacaacct

SEQ ID NO: 153029 - DNA, 25 bp, Probe Sequence
acagccacaccattggattttcttc

SEQ ID NO: 153030 - DNA, 25 bp, Probe Sequence
acagaccaccatatgttctttgact

SEQ ID NO: 153031 - DNA, 25 bp, Probe Sequence
acagacagcatggatatttcctgtt

SEQ ID NO: 153032 - DNA, 25 bp, Probe Sequence
acagcacatcatctaaatcccattc

SEQ ID NO: 153033 - DNA, 25 bp, Probe Sequence
acagactcaggaaaatgtgccagta

SEQ ID NO: 153034 - DNA, 25 bp, Probe Sequence
acagaccagccaaagttccaaagaa

SEQ ID NO: 153035 - DNA, 25 bp, Probe Sequence
acagaaagacgttttccaacatgta

SEQ ID NO: 153036 - DNA, 25 bp, Probe Sequence
acagacctcggttctcattaaagta

SEQ ID NO: 153037 - DNA, 25 bp, Probe Sequence
acagacctgtagtctacttgagagt

SEQ ID NO: 153038 - DNA, 25 bp, Probe Sequence
acaaccgtaactgccagagtctgaa

SEQ ID NO: 153039 - DNA, 25 bp, Probe Sequence
acaaaacttcttgtcagacataaag

SEQ ID NO: 153040 - DNA, 25 bp, Probe Sequence
acacgttctttaaccaactgaaatg

SEQ ID NO: 153041 - DNA, 25 bp, Probe Sequence
acacgttctttaacaaactgaaatg

SEQ ID NO: 153042 - DNA, 25 bp, Probe Sequence
acactgacctcttgtctcaaaaaaa

SEQ ID NO: 153043 - DNA, 25 bp, Probe Sequence
acagcatgacgtccgctttggagaa

SEQ ID NO: 153044 - DNA, 25 bp, Probe Sequence
acagcaacgtggtcttggacacaac

SEQ ID NO: 153045 - DNA, 25 bp, Probe Sequence
acagacctgatactttggatccagc

SEQ ID NO: 153046 - DNA, 25 bp, Probe Sequence
acagcagggagacttgggtcggcct

SEQ ID NO: 153047 - DNA, 25 bp, Probe Sequence
acagcaaggctgtcggggtcaagct

SEQ ID NO: 153048 - DNA, 25 bp, Probe Sequence
acagcaaggctgtcggggtcaagct

SEQ ID NO: 153049 - DNA, 25 bp, Probe Sequence
acagacagcctgcgtgttgtaaata

SEQ ID NO: 153050 - DNA, 25 bp, Probe Sequence
acagaacctgtgatgctttcaccta

SEQ ID NO: 153051 - DNA, 25 bp, Probe Sequence
acagcttgggtgtgtgttcatcctt

SEQ ID NO: 153052 - DNA, 25 bp, Probe Sequence
acacgggcgagaagcgcttctcctg

SEQ ID NO: 153053 - DNA, 25 bp, Probe Sequence
acaccaagctagaaggcttccacac

SEQ ID NO: 153054 - DNA, 25 bp, Probe Sequence
acaccaactatgaggcgggcaagga

SEQ ID NO: 153055 - DNA, 25 bp, Probe Sequence
acaccagtcttgagaggtggccagc

SEQ ID NO: 153056 - DNA, 25 bp, Probe Sequence
acaccagtatagaatagacagggag

SEQ ID NO: 153057 - DNA, 25 bp, Probe Sequence
acaccaatagagataatacaggcag

SEQ ID NO: 153058 - DNA, 25 bp, Probe Sequence
acacgaatagacatcaaactcaatg

SEQ ID NO: 153059 - DNA, 25 bp, Probe Sequence
acacatggtagagtctccaacctgt

SEQ ID NO: 153060 - DNA, 25 bp, Probe Sequence
acactggaatgcatatactacttta

SEQ ID NO: 153061 - DNA, 25 bp, Probe Sequence
acactggcatctgttgaaatttgga

SEQ ID NO: 153062 - DNA, 25 bp, Probe Sequence
acactggattcagtgcaggtttgga

SEQ ID NO: 153063 - DNA, 25 bp, Probe Sequence
acagcagagcaatgtcagttttcat

SEQ ID NO: 153064 - DNA, 25 bp, Probe Sequence
acagcaagaacagtccatgttgtat

SEQ ID NO: 153065 - DNA, 25 bp, Probe Sequence
acagcagagaccttcctgcttttta

SEQ ID NO: 153066 - DNA, 25 bp, Probe Sequence
acagcaggaccagatctgctatctc

SEQ ID NO: 153067 - DNA, 25 bp, Probe Sequence
acagcaaatactgtatgttctcact

SEQ ID NO: 153068 - DNA, 25 bp, Probe Sequence
acagaaagaatgccttgtgattatc

SEQ ID NO: 153069 - DNA, 25 bp, Probe Sequence
acagaaggaatgtcttatattgttc

SEQ ID NO: 153070 - DNA, 25 bp, Probe Sequence
acaaatgaacccttaatcttttcag

SEQ ID NO: 153071 - DNA, 25 bp, Probe Sequence
aagaaaacccagagtgccctgttct

SEQ ID NO: 153072 - DNA, 25 bp, Probe Sequence
acagcaacacatgccatacttccgg

SEQ ID NO: 153073 - DNA, 25 bp, Probe Sequence
acagacaccatggtgcacctgactc

SEQ ID NO: 153074 - DNA, 25 bp, Probe Sequence
acagcaacgatattgccctggtcca

SEQ ID NO: 153075 - DNA, 25 bp, Probe Sequence
acagcaaagtgaagaccttgtacag

SEQ ID NO: 153076 - DNA, 25 bp, Probe Sequence
acagacatgggcagagtaattggca

SEQ ID NO: 153077 - DNA, 25 bp, Probe Sequence
acagcctgtacctgaaggtgaaggg

SEQ ID NO: 153078 - DNA, 25 bp, Probe Sequence
acagcctgtatcttgggggacaggg

SEQ ID NO: 153079 - DNA, 25 bp, Probe Sequence
acagccattgacctaaacgccaggg

SEQ ID NO: 153080 - DNA, 25 bp, Probe Sequence
acagaattccgaagaacccaggcct

SEQ ID NO: 153081 - DNA, 25 bp, Probe Sequence
acagacttcaccagcaccatcaagc

SEQ ID NO: 153082 - DNA, 25 bp, Probe Sequence
aaccttccaactgcttgcaagcttc

SEQ ID NO: 153083 - DNA, 25 bp, Probe Sequence
acacactagccttcttttgtacttt

SEQ ID NO: 153084 - DNA, 25 bp, Probe Sequence
acacctactgtgagttctgctacaa

SEQ ID NO: 153085 - DNA, 25 bp, Probe Sequence
acacagtgccaaaagttcctacaaa

SEQ ID NO: 153086 - DNA, 25 bp, Probe Sequence
acactatagaacaagtttgtacaaa

SEQ ID NO: 153087 - DNA, 25 bp, Probe Sequence
acagcttacactaaattatgtccac

SEQ ID NO: 153088 - DNA, 25 bp, Probe Sequence
acactctacactctattctttattc

SEQ ID NO: 153089 - DNA, 25 bp, Probe Sequence
acacgatacattctaggctacttcc

SEQ ID NO: 153090 - DNA, 25 bp, Probe Sequence
acagctatcaattttgtggctactc

SEQ ID NO: 153091 - DNA, 25 bp, Probe Sequence
acagctccaatggcaagtggtacca

SEQ ID NO: 153092 - DNA, 25 bp, Probe Sequence
acagctgtttgaaagatggtggcga

SEQ ID NO: 153093 - DNA, 25 bp, Probe Sequence
acagcttctagtaaatcctggcaga

SEQ ID NO: 153094 - DNA, 25 bp, Probe Sequence
acagctacgaggaacaccggcaaga

SEQ ID NO: 153095 - DNA, 25 bp, Probe Sequence
acagctacgagagacgcaacgaggg

SEQ ID NO: 153096 - DNA, 25 bp, Probe Sequence
acagcataagagttcctgaatcggg

SEQ ID NO: 153097 - DNA, 25 bp, Probe Sequence
acactggctgggacgctagaagggt

SEQ ID NO: 153098 - DNA, 25 bp, Probe Sequence
acagcgaggggtgggatcacagcat

SEQ ID NO: 153099 - DNA, 25 bp, Probe Sequence
acacagagggggccttcacagtgac

SEQ ID NO: 153100 - DNA, 25 bp, Probe Sequence
acagcagaaagggtttgctcaggaa

SEQ ID NO: 153101 - DNA, 25 bp, Probe Sequence
acagctgtaagcagctctctgccag

SEQ ID NO: 153102 - DNA, 25 bp, Probe Sequence
acagctggaagctctggtgcaaacc

SEQ ID NO: 153103 - DNA, 25 bp, Probe Sequence
acagctggaagctctggtgcaaacc

SEQ ID NO: 153104 - DNA, 25 bp, Probe Sequence
acactggctagctccgtaatgaatg

SEQ ID NO: 153105 - DNA, 25 bp, Probe Sequence
acacagcctaacgctgtcaagacat

SEQ ID NO: 153106 - DNA, 25 bp, Probe Sequence
acactggaccactcgaagatggcat

SEQ ID NO: 153107 - DNA, 25 bp, Probe Sequence
acagcagtaacctctgcagacttaa

SEQ ID NO: 153108 - DNA, 25 bp, Probe Sequence
acagcgagaaactggaggcgatcca

SEQ ID NO: 153109 - DNA, 25 bp, Probe Sequence
aagctggtacaaggtgttcgaccct

SEQ ID NO: 153110 - DNA, 25 bp, Probe Sequence
aacgagtcacggagctgtcgactcc

SEQ ID NO: 153111 - DNA, 25 bp, Probe Sequence
aagtaatccttgagttcaggcccca

SEQ ID NO: 153112 - DNA, 25 bp, Probe Sequence
caataaaccttcagattcggtcggt

SEQ ID NO: 153113 - DNA, 25 bp, Probe Sequence
aaaaatacatccgcagggttcggat

SEQ ID NO: 153114 - DNA, 25 bp, Probe Sequence
cagcaaacatactctgcggtcggtc

SEQ ID NO: 153115 - DNA, 25 bp, Probe Sequence
acagcaagattctctgcagtcattg

SEQ ID NO: 153116 - DNA, 25 bp, Probe Sequence
acagcagtgttctcacagtgtgggg

SEQ ID NO: 153117 - DNA, 25 bp, Probe Sequence
acacttgattcagatcaggtcggct

SEQ ID NO: 153118 - DNA, 25 bp, Probe Sequence
acactatgttagttgcatttaggtt

SEQ ID NO: 153119 - DNA, 25 bp, Probe Sequence
acagcaagccaacttctttagcagt

SEQ ID NO: 153120 - DNA, 25 bp, Probe Sequence
acagcatgaaagtcttcctgaagca

SEQ ID NO: 153121 - DNA, 25 bp, Probe Sequence
acagcaatacagtcctcttgaggca

SEQ ID NO: 153122 - DNA, 25 bp, Probe Sequence
acagcagatatcaatctcgcttagg

SEQ ID NO: 153123 - DNA, 25 bp, Probe Sequence
acagctgacatcatacctaatggcg

SEQ ID NO: 153124 - DNA, 25 bp, Probe Sequence
acaccacattcttcctaacagctgg

SEQ ID NO: 153125 - DNA, 25 bp, Probe Sequence
acagcaccttcttttgagacattag

SEQ ID NO: 153126 - DNA, 25 bp, Probe Sequence
acagcccatgtgagtgtattcaaag

SEQ ID NO: 153127 - DNA, 25 bp, Probe Sequence
acagccgcctgtatgtttcaataaa

SEQ ID NO: 153128 - DNA, 25 bp, Probe Sequence
acacctcactctttatagtgcacaa

SEQ ID NO: 153129 - DNA, 25 bp, Probe Sequence
acacctacaccattatcttggaaag

SEQ ID NO: 153130 - DNA, 25 bp, Probe Sequence
acagctctacaaggaacagggtgag

SEQ ID NO: 153131 - DNA, 25 bp, Probe Sequence
aatttgaaaggcaaggtaggaggat

SEQ ID NO: 153132 - DNA, 25 bp, Probe Sequence
aaatgtaagcggaggccaggtgtgg

SEQ ID NO: 153133 - DNA, 25 bp, Probe Sequence
aaattaagcagacccggcgttggca

SEQ ID NO: 153134 - DNA, 25 bp, Probe Sequence
aaatctaggacgaccagtcaggacg

SEQ ID NO: 153135 - DNA, 25 bp, Probe Sequence
aagaaatctgacccggtcgtctcgt

SEQ ID NO: 153136 - DNA, 25 bp, Probe Sequence
acaaaatcttcggcgtgacgaccct

SEQ ID NO: 153137 - DNA, 25 bp, Probe Sequence
acagaagacttcggttcctgttctt

SEQ ID NO: 153138 - DNA, 25 bp, Probe Sequence
acagaagttgactgacatccttttc

SEQ ID NO: 153139 - DNA, 25 bp, Probe Sequence
acacacagttgacaacagggttccc

SEQ ID NO: 153140 - DNA, 25 bp, Probe Sequence
acacctgctgaacataggcggctcc

SEQ ID NO: 153141 - DNA, 25 bp, Probe Sequence
acacggatgataccatcggggacct

SEQ ID NO: 153142 - DNA, 25 bp, Probe Sequence
acagcttagatgttaaggtgtacct

SEQ ID NO: 153143 - DNA, 25 bp, Probe Sequence
acagcttgagcgtttccatgtgcta

SEQ ID NO: 153144 - DNA, 25 bp, Probe Sequence
acagctatgagccatagcctattta

SEQ ID NO: 153145 - DNA, 25 bp, Probe Sequence
acactgatgggctgcactttttgga

SEQ ID NO: 153146 - DNA, 25 bp, Probe Sequence
acagctgtggcctgcacattcagct

SEQ ID NO: 153147 - DNA, 25 bp, Probe Sequence
acagcgtggacaaatctctcagcca

SEQ ID NO: 153148 - DNA, 25 bp, Probe Sequence
acagcaggtgacaggcctagctata

SEQ ID NO: 153149 - DNA, 25 bp, Probe Sequence
acagcacagtgacggttctagatct

SEQ ID NO: 153150 - DNA, 25 bp, Probe Sequence
acagcctgtacaccatgtctagtgg

SEQ ID NO: 153151 - DNA, 25 bp, Probe Sequence
acagcctgttacgacatcgatgtgg

SEQ ID NO: 153152 - DNA, 25 bp, Probe Sequence
acaccgccttgcgcatagcagaggc

SEQ ID NO: 153153 - DNA, 25 bp, Probe Sequence
acaactttctcccagaggcagtgac

SEQ ID NO: 153154 - DNA, 25 bp, Probe Sequence
acagcctttttaggccacagtgacc

SEQ ID NO: 153155 - DNA, 25 bp, Probe Sequence
acagcctgtttcatcctgaagacac

SEQ ID NO: 153156 - DNA, 25 bp, Probe Sequence
acacctgtaatccgactgtaagctc

SEQ ID NO: 153157 - DNA, 25 bp, Probe Sequence
acagcctgtagaactgactcctaga

SEQ ID NO: 153158 - DNA, 25 bp, Probe Sequence
acacctgtagttccagctactcagt

SEQ ID NO: 153159 - DNA, 25 bp, Probe Sequence
acacctggagtgacctctagtcgct

SEQ ID NO: 153160 - DNA, 25 bp, Probe Sequence
acaaacggatgcacccgtctttaga

SEQ ID NO: 153161 - DNA, 25 bp, Probe Sequence
acaaatccactgagccggtgtacat

SEQ ID NO: 153162 - DNA, 25 bp, Probe Sequence
acacataccacaaaccggtaactgt

SEQ ID NO: 153163 - DNA, 25 bp, Probe Sequence
acaaaccatatacatctggttacca

SEQ ID NO: 153164 - DNA, 25 bp, Probe Sequence
acaaattagaagaacggcctcacct

SEQ ID NO: 153165 - DNA, 25 bp, Probe Sequence
acaccaatcagatcttcggcctgag

SEQ ID NO: 153166 - DNA, 25 bp, Probe Sequence
acactcaacggtttggatcctagaa

SEQ ID NO: 153167 - DNA, 25 bp, Probe Sequence
acaaccgagccttttgcaactatga

SEQ ID NO: 153168 - DNA, 25 bp, Probe Sequence
acaaacggctgtctgccaactggta

SEQ ID NO: 153169 - DNA, 25 bp, Probe Sequence
acaagaggggtcacaaactgctggc

SEQ ID NO: 153170 - DNA, 25 bp, Probe Sequence
acacacagtggattcttacatactc

SEQ ID NO: 153171 - DNA, 25 bp, Probe Sequence
acacggcttgtggcattggcatact

SEQ ID NO: 153172 - DNA, 25 bp, Probe Sequence
acactggccgatgatgtaaacctgg

SEQ ID NO: 153173 - DNA, 25 bp, Probe Sequence
acagccccagctggggcaaacagcc

SEQ ID NO: 153174 - DNA, 25 bp, Probe Sequence
acagcaccttggtgccagtgatccc

SEQ ID NO: 153175 - DNA, 25 bp, Probe Sequence
acagccacttagtgatcagctccct

SEQ ID NO: 153176 - DNA, 25 bp, Probe Sequence
acagcaacaaaagcatcagcctcct

SEQ ID NO: 153177 - DNA, 25 bp, Probe Sequence
acacagacaatgggtccacgtcctg

SEQ ID NO: 153178 - DNA, 25 bp, Probe Sequence
acagcatagagacagtcccctcgat

SEQ ID NO: 153179 - DNA, 25 bp, Probe Sequence
acagctagaagctgtgccccagttc

SEQ ID NO: 153180 - DNA, 25 bp, Probe Sequence
acagcatggggcttggctccaagtt

SEQ ID NO: 153181 - DNA, 25 bp, Probe Sequence
acacatacctcgagctgcacatagt

SEQ ID NO: 153182 - DNA, 25 bp, Probe Sequence
acacattccggccggacatcgtggt

SEQ ID NO: 153183 - DNA, 25 bp, Probe Sequence
acagcagtatggatgggactctggg

SEQ ID NO: 153184 - DNA, 25 bp, Probe Sequence
acacagtagtagtaggctcctggag

SEQ ID NO: 153185 - DNA, 25 bp, Probe Sequence
acagctttgctaccaggtctgttga

SEQ ID NO: 153186 - DNA, 25 bp, Probe Sequence
acagctgcctgaatgcaaagttgat

SEQ ID NO: 153187 - DNA, 25 bp, Probe Sequence
acagcacactgtagctatagttgtt

SEQ ID NO: 153188 - DNA, 25 bp, Probe Sequence
acagcacactgtagctatagttgtt

SEQ ID NO: 153189 - DNA, 25 bp, Probe Sequence
acagcgcagctctattaagctgtgg

SEQ ID NO: 153190 - DNA, 25 bp, Probe Sequence
acagctgtttatagctactgtgaca

SEQ ID NO: 153191 - DNA, 25 bp, Probe Sequence
acagctagtgcttgggatcgtacat

SEQ ID NO: 153192 - DNA, 25 bp, Probe Sequence
acagccatggctaaggaaggacaag

SEQ ID NO: 153193 - DNA, 25 bp, Probe Sequence
acagcacttgtgaggaagttcctgg

SEQ ID NO: 153194 - DNA, 25 bp, Probe Sequence
acagcattttccagaagcttctttg

SEQ ID NO: 153195 - DNA, 25 bp, Probe Sequence
acagcttttgccagaagtgatgttc

SEQ ID NO: 153196 - DNA, 25 bp, Probe Sequence
acacttttcaccaaataggttctga

SEQ ID NO: 153197 - DNA, 25 bp, Probe Sequence
acacagtttcccattatgccgttgg

SEQ ID NO: 153198 - DNA, 25 bp, Probe Sequence
acacatgtgttccgcctgaagaagt

SEQ ID NO: 153199 - DNA, 25 bp, Probe Sequence
acagctctttggacactaggaaaaa

SEQ ID NO: 153200 - DNA, 25 bp, Probe Sequence
acagctgttgtggtttagggaagga

SEQ ID NO: 153201 - DNA, 25 bp, Probe Sequence
acagctgtgtactcttaggctaaga

SEQ ID NO: 153202 - DNA, 25 bp, Probe Sequence
acagcttgtgattcgctctagactt

SEQ ID NO: 153203 - DNA, 25 bp, Probe Sequence
acagctggcctaggctcaatgtctt

SEQ ID NO: 153204 - DNA, 25 bp, Probe Sequence
acagcatcagggggctcagagtctg

SEQ ID NO: 153205 - DNA, 25 bp, Probe Sequence
acagcacggccatccaggagctgtt

SEQ ID NO: 153206 - DNA, 25 bp, Probe Sequence
acagcacggccatccaggagctgtt

SEQ ID NO: 153207 - DNA, 25 bp, Probe Sequence
acaccgtggacagcaaatgcttccc

SEQ ID NO: 153208 - DNA, 25 bp, Probe Sequence
acacggtgggcctgaagctgcaccg

SEQ ID NO: 153209 - DNA, 25 bp, Probe Sequence
acactgttggctgtgaggaatgcac

SEQ ID NO: 153210 - DNA, 25 bp, Probe Sequence
acacccggtgcagaggaaccatcta

SEQ ID NO: 153211 - DNA, 25 bp, Probe Sequence
acacccgggccttgcatataaataa

SEQ ID NO: 153212 - DNA, 25 bp, Probe Sequence
acacccaggtggactacttaatcaa

SEQ ID NO: 153213 - DNA, 25 bp, Probe Sequence
acacccaggtggactacttaatcaa

SEQ ID NO: 153214 - DNA, 25 bp, Probe Sequence
acagcccagtttgttcatgtcagtg

SEQ ID NO: 153215 - DNA, 25 bp, Probe Sequence
acagcccagcacaggtatttcaggt

SEQ ID NO: 153216 - DNA, 25 bp, Probe Sequence
acagcttctgacaggtccttcagga

SEQ ID NO: 153217 - DNA, 25 bp, Probe Sequence
acactacgacaagttttgtcagcga

SEQ ID NO: 153218 - DNA, 25 bp, Probe Sequence
acactacaacattctctttaacgat

SEQ ID NO: 153219 - DNA, 25 bp, Probe Sequence
acactatatcaaagcctcaaaacag

SEQ ID NO: 153220 - DNA, 25 bp, Probe Sequence
acacattcttgatcaccaaacaact

SEQ ID NO: 153221 - DNA, 25 bp, Probe Sequence
acagctttatgatatcaaagactca

SEQ ID NO: 153222 - DNA, 25 bp, Probe Sequence
acagcattttgcaagacataagggt

SEQ ID NO: 153223 - DNA, 25 bp, Probe Sequence
acacttctctgcatgaatacaactg

SEQ ID NO: 153224 - DNA, 25 bp, Probe Sequence
acacgttcgttgtcaacattatagt

SEQ ID NO: 153225 - DNA, 25 bp, Probe Sequence
acacctacttcgtgacaggcatcgt

SEQ ID NO: 153226 - DNA, 25 bp, Probe Sequence
acaacttcttcgtgtagagctcctc

SEQ ID NO: 153227 - DNA, 25 bp, Probe Sequence
acacaagccgtaaaatcgagtcctt

SEQ ID NO: 153228 - DNA, 25 bp, Probe Sequence
acacaagccgtaaaatcgagtcctt

SEQ ID NO: 153229 - DNA, 25 bp, Probe Sequence
acagcagtgcttacatcaaatccag

SEQ ID NO: 153230 - DNA, 25 bp, Probe Sequence
acaagatcatctactcacacttcac

SEQ ID NO: 153231 - DNA, 25 bp, Probe Sequence
acagcatgaataaaacactcatccc

SEQ ID NO: 153232 - DNA, 25 bp, Probe Sequence
acagcatgaataaaacactcatccc

SEQ ID NO: 153233 - DNA, 25 bp, Probe Sequence
acacagacacggcaaccatccgatt

SEQ ID NO: 153234 - DNA, 25 bp, Probe Sequence
acacagacacggcaaccatccgatt

SEQ ID NO: 153235 - DNA, 25 bp, Probe Sequence
acacaagaatggccaacctaaaatt

SEQ ID NO: 153236 - DNA, 25 bp, Probe Sequence
aaccagatcgagctacctaagaaca

SEQ ID NO: 153237 - DNA, 25 bp, Probe Sequence
aaatagcgccagcgtcctaggaacc

SEQ ID NO: 153238 - DNA, 25 bp, Probe Sequence
acaatgggtcagctgtaccaggaac

SEQ ID NO: 153239 - DNA, 25 bp, Probe Sequence
acactgggtaacctgatcgtggaga

SEQ ID NO: 153240 - DNA, 25 bp, Probe Sequence
acacgtgggcacctgagcacaggga

SEQ ID NO: 153241 - DNA, 25 bp, Probe Sequence
acacagcttagccgaggaagagcca

SEQ ID NO: 153242 - DNA, 25 bp, Probe Sequence
acacatctgccaccggaaataccat

SEQ ID NO: 153243 - DNA, 25 bp, Probe Sequence
acacgccgctggctcaaagacaatg

SEQ ID NO: 153244 - DNA, 25 bp, Probe Sequence
acagcccttcgccacaagaagatgg

SEQ ID NO: 153245 - DNA, 25 bp, Probe Sequence
acagcctcgtctggaaaaaggacca

SEQ ID NO: 153246 - DNA, 25 bp, Probe Sequence
acagcctcgtctggaaaaaggacca

SEQ ID NO: 153247 - DNA, 25 bp, Probe Sequence
acaactcgtgtttaatatagggaag

SEQ ID NO: 153248 - DNA, 25 bp, Probe Sequence
acaaacctggtgtaaattggcaaat

SEQ ID NO: 153249 - DNA, 25 bp, Probe Sequence
aaataaaggcgttcaatctgcaaaa

SEQ ID NO: 153250 - DNA, 25 bp, Probe Sequence
acactgggagagcttcgatcagaac

SEQ ID NO: 153251 - DNA, 25 bp, Probe Sequence
acactgggaagttatcgtcgacatc

SEQ ID NO: 153252 - DNA, 25 bp, Probe Sequence
acactggaaggtgacgacctcatcc

SEQ ID NO: 153253 - DNA, 25 bp, Probe Sequence
acagctggaagatggacgcaccctg

SEQ ID NO: 153254 - DNA, 25 bp, Probe Sequence
acacgtgcagagggagcacccctcg

SEQ ID NO: 153255 - DNA, 25 bp, Probe Sequence
acaccacggcactacaaccttggtg

SEQ ID NO: 153256 - DNA, 25 bp, Probe Sequence
acactagggccatgagcgcactgat

SEQ ID NO: 153257 - DNA, 25 bp, Probe Sequence
acacgagtggctttgacgagctcca

SEQ ID NO: 153258 - DNA, 25 bp, Probe Sequence
acagccaagggaaacacagcttcac

SEQ ID NO: 153259 - DNA, 25 bp, Probe Sequence
acagccaagggaaacacagcttcac

SEQ ID NO: 153260 - DNA, 25 bp, Probe Sequence
acactgaagggaccaaagttgcagc

SEQ ID NO: 153261 - DNA, 25 bp, Probe Sequence
acactacctgagtccaacaggggtc

SEQ ID NO: 153262 - DNA, 25 bp, Probe Sequence
acagcccctggatgctaacaggggc

SEQ ID NO: 153263 - DNA, 25 bp, Probe Sequence
acacctccaggagtctacatcaagg

SEQ ID NO: 153264 - DNA, 25 bp, Probe Sequence
acagcctcatcgaatttgatacatt

SEQ ID NO: 153265 - DNA, 25 bp, Probe Sequence
acaccaacagaactgtgcaaattgc

SEQ ID NO: 153266 - DNA, 25 bp, Probe Sequence
acacaaggcatgaggtcaaaagctt

SEQ ID NO: 153267 - DNA, 25 bp, Probe Sequence
acacatagacagttgtacaaaagca

SEQ ID NO: 153268 - DNA, 25 bp, Probe Sequence
acagcgagactccatctcaaaaaaa

SEQ ID NO: 153269 - DNA, 25 bp, Probe Sequence
acagcgagagctccatctcaaaaaa

SEQ ID NO: 153270 - DNA, 25 bp, Probe Sequence
acactggcagagctcacagatgaga

SEQ ID NO: 153271 - DNA, 25 bp, Probe Sequence
acactggctggaatatacatagaca

SEQ ID NO: 153272 - DNA, 25 bp, Probe Sequence
acacggtggtcatcatgaacatgca

SEQ ID NO: 153273 - DNA, 25 bp, Probe Sequence
acacggcggcttggagaaacccagg

SEQ ID NO: 153274 - DNA, 25 bp, Probe Sequence
acacgtctggctaggagaaactatc

SEQ ID NO: 153275 - DNA, 25 bp, Probe Sequence
acagcgacggtgggaagatgcctta

SEQ ID NO: 153276 - DNA, 25 bp, Probe Sequence
aacaggggtgctcagtactttacgc

SEQ ID NO: 153277 - DNA, 25 bp, Probe Sequence
acacacctggggagtacatttgaca

SEQ ID NO: 153278 - DNA, 25 bp, Probe Sequence
acacccagcccgtaatatctttaca

SEQ ID NO: 153279 - DNA, 25 bp, Probe Sequence
acaccgagacttttagtttgcgaag

SEQ ID NO: 153280 - DNA, 25 bp, Probe Sequence
acaccggaccatgtcatgtcctgct

SEQ ID NO: 153281 - DNA, 25 bp, Probe Sequence
acagcctggataagtttgccttctg

SEQ ID NO: 153282 - DNA, 25 bp, Probe Sequence
acacctctcaatggttgtgcacaat

SEQ ID NO: 153283 - DNA, 25 bp, Probe Sequence
acacacactcatagccattaacgag

SEQ ID NO: 153284 - DNA, 25 bp, Probe Sequence
acaccgcactgacacacattcagag

SEQ ID NO: 153285 - DNA, 25 bp, Probe Sequence
acaccacagtcaaagcctcaagaga

SEQ ID NO: 153286 - DNA, 25 bp, Probe Sequence
acaccacatgttctcactcataggt

SEQ ID NO: 153287 - DNA, 25 bp, Probe Sequence
acacaccaatatcttcttcaggctc

SEQ ID NO: 153288 - DNA, 25 bp, Probe Sequence
acacattcagagtttgttaagacat

SEQ ID NO: 153289 - DNA, 25 bp, Probe Sequence
acacttcaagaactcgtcaaacagc

SEQ ID NO: 153290 - DNA, 25 bp, Probe Sequence
acactctgcgtgaactcgtgggatc

SEQ ID NO: 153291 - DNA, 25 bp, Probe Sequence
acactgctgccgtatctacatgtgg

SEQ ID NO: 153292 - DNA, 25 bp, Probe Sequence
acacgtcatggaccatgactgggcg

SEQ ID NO: 153293 - DNA, 25 bp, Probe Sequence
acagctccagagcttgactggatgg

SEQ ID NO: 153294 - DNA, 25 bp, Probe Sequence
acagcccaggcatagacgagctggc

SEQ ID NO: 153295 - DNA, 25 bp, Probe Sequence
acagccgcttctggaacggcagcct

SEQ ID NO: 153296 - DNA, 25 bp, Probe Sequence
acacctctgtctgggaagagactct

SEQ ID NO: 153297 - DNA, 25 bp, Probe Sequence
acaccatcttcttgagaatgaggac

SEQ ID NO: 153298 - DNA, 25 bp, Probe Sequence
acaccatctggcgaggtcatttact

SEQ ID NO: 153299 - DNA, 25 bp, Probe Sequence
acaccagcttggagtcaactacatg

SEQ ID NO: 153300 - DNA, 25 bp, Probe Sequence
acaccatttcatacttcaactaatt

SEQ ID NO: 153301 - DNA, 25 bp, Probe Sequence
acacacatttctatagtgaaggtat

SEQ ID NO: 153302 - DNA, 25 bp, Probe Sequence
acacctgtactagttgagaaagctg

SEQ ID NO: 153303 - DNA, 25 bp, Probe Sequence
acacctccaacttttatgatagctg

SEQ ID NO: 153304 - DNA, 25 bp, Probe Sequence
acaacttcgactcctctgagaagga

SEQ ID NO: 153305 - DNA, 25 bp, Probe Sequence
acaccttgagaccctctacagtggt

SEQ ID NO: 153306 - DNA, 25 bp, Probe Sequence
acacttgtggtcacactacagtggg

SEQ ID NO: 153307 - DNA, 25 bp, Probe Sequence
acactggaggtcaaccggaggctgc

SEQ ID NO: 153308 - DNA, 25 bp, Probe Sequence
acaagcaaaccttctcaggaggtgt

SEQ ID NO: 153309 - DNA, 25 bp, Probe Sequence
acacaaaatccattccaggtagctc

SEQ ID NO: 153310 - DNA, 25 bp, Probe Sequence
acacggcaaccatccgatttctcaa

SEQ ID NO: 153311 - DNA, 25 bp, Probe Sequence
acacgtggacatttccacttgtgtt

SEQ ID NO: 153312 - DNA, 25 bp, Probe Sequence
acaccttcaccaaccacatggtttt

SEQ ID NO: 153313 - DNA, 25 bp, Probe Sequence
acaaagtccccgcacatgtgtttaa

SEQ ID NO: 153314 - DNA, 25 bp, Probe Sequence
acaatgtggccgaggactttgattg

SEQ ID NO: 153315 - DNA, 25 bp, Probe Sequence
acagctggggccacaactttggtga

SEQ ID NO: 153316 - DNA, 25 bp, Probe Sequence
acagctggggcccgagagatggtgg

SEQ ID NO: 153317 - DNA, 25 bp, Probe Sequence
acacaggggcctcatggcatggtca

SEQ ID NO: 153318 - DNA, 25 bp, Probe Sequence
acacaaggacgtctgcgcagcaaga

SEQ ID NO: 153319 - DNA, 25 bp, Probe Sequence
acacacagggcactggttccaggaa

SEQ ID NO: 153320 - DNA, 25 bp, Probe Sequence
acaacaggaaatgagcccggaacgc

SEQ ID NO: 153321 - DNA, 25 bp, Probe Sequence
acaccaagaagtgaacctcgaatct

SEQ ID NO: 153322 - DNA, 25 bp, Probe Sequence
acaccaaatggcggatgacgccggt

SEQ ID NO: 153323 - DNA, 25 bp, Probe Sequence
acaccaccaagtgggagtggctggt

SEQ ID NO: 153324 - DNA, 25 bp, Probe Sequence
acacccgcatcaggggagggatggt

SEQ ID NO: 153325 - DNA, 25 bp, Probe Sequence
acactcacgccctgtgggtgatggt

SEQ ID NO: 153326 - DNA, 25 bp, Probe Sequence
acacatactgtcagactgggtctgg

SEQ ID NO: 153327 - DNA, 25 bp, Probe Sequence
acacatacgggccacatggggtagg

SEQ ID NO: 153328 - DNA, 25 bp, Probe Sequence
acacaaaggtcccatttgcagttag

SEQ ID NO: 153329 - DNA, 25 bp, Probe Sequence
acaccaaactatctcattgcaattt

SEQ ID NO: 153330 - DNA, 25 bp, Probe Sequence
acactcaagacttttgactgccatt

SEQ ID NO: 153331 - DNA, 25 bp, Probe Sequence
acactggagtcttgcaagacccagg

SEQ ID NO: 153332 - DNA, 25 bp, Probe Sequence
acacggagtgcttgcatctggaaag

SEQ ID NO: 153333 - DNA, 25 bp, Probe Sequence
acagcctcagaccagctatggggag

SEQ ID NO: 153334 - DNA, 25 bp, Probe Sequence
acagcctagcaccagggagatccag

SEQ ID NO: 153335 - DNA, 25 bp, Probe Sequence
acacctatgacgtccaggtcacagc

SEQ ID NO: 153336 - DNA, 25 bp, Probe Sequence
gatgaggtctcaagtgtaagtgtgg

SEQ ID NO: 153337 - DNA, 25 bp, Probe Sequence
acacgacagagtgcacacatcctgg

SEQ ID NO: 153338 - DNA, 25 bp, Probe Sequence
acactgttagtgccacagcacctgg

SEQ ID NO: 153339 - DNA, 25 bp, Probe Sequence
acacagattcagccatcaccaactg

SEQ ID NO: 153340 - DNA, 25 bp, Probe Sequence
acagcctatatcaaacatgcacacg

SEQ ID NO: 153341 - DNA, 25 bp, Probe Sequence
acagcctgcaaaaccatgagcctat

SEQ ID NO: 153342 - DNA, 25 bp, Probe Sequence
acaccatggaatactatgcagccaa

SEQ ID NO: 153343 - DNA, 25 bp, Probe Sequence
acaccatgagtaactatctgcagag

SEQ ID NO: 153344 - DNA, 25 bp, Probe Sequence
acaccagcatggatctcccgaaatt

SEQ ID NO: 153345 - DNA, 25 bp, Probe Sequence
acacaaacagttagccctaattctc

SEQ ID NO: 153346 - DNA, 25 bp, Probe Sequence
acacaagtgcaatggccctgaggtc

SEQ ID NO: 153347 - DNA, 25 bp, Probe Sequence
acacaaggctccaagacctaggctc

SEQ ID NO: 153348 - DNA, 25 bp, Probe Sequence
acaaggttgccacacctagttctgc

SEQ ID NO: 153349 - DNA, 25 bp, Probe Sequence
acaaggttgccacacctagttctgc

SEQ ID NO: 153350 - DNA, 25 bp, Probe Sequence
acaaggttgccacacctagttctgc

SEQ ID NO: 153351 - DNA, 25 bp, Probe Sequence
acaagcgaagaacccagcaagtccc

SEQ ID NO: 153352 - DNA, 25 bp, Probe Sequence
acagccagaaacgaccaagaacaac

SEQ ID NO: 153353 - DNA, 25 bp, Probe Sequence
acagccgagaacaacagctagcacc

SEQ ID NO: 153354 - DNA, 25 bp, Probe Sequence
acaccagaagcacttcatgggccag

SEQ ID NO: 153355 - DNA, 25 bp, Probe Sequence
acacccacaagcgcatggttcagtc

SEQ ID NO: 153356 - DNA, 25 bp, Probe Sequence
acagcgctcaaaactcggtgatcat

SEQ ID NO: 153357 - DNA, 25 bp, Probe Sequence
acagccgcgagagctgcgaggatgc

SEQ ID NO: 153358 - DNA, 25 bp, Probe Sequence
acagctcctgaacgtcagcagctag

SEQ ID NO: 153359 - DNA, 25 bp, Probe Sequence
acagccctcaacgtgatgagctatg

SEQ ID NO: 153360 - DNA, 25 bp, Probe Sequence
acagccccaatactgcatatggtgt

SEQ ID NO: 153361 - DNA, 25 bp, Probe Sequence
acacgtacatacatgatgatggctt

SEQ ID NO: 153362 - DNA, 25 bp, Probe Sequence
acaccattaacaagatgagccttgt

SEQ ID NO: 153363 - DNA, 25 bp, Probe Sequence
acaccaaataccagacgcttgagct

SEQ ID NO: 153364 - DNA, 25 bp, Probe Sequence
acaccgagatagacacggccttcgt

SEQ ID NO: 153365 - DNA, 25 bp, Probe Sequence
aaatcagaatagcgtggccgtcctt

SEQ ID NO: 153366 - DNA, 25 bp, Probe Sequence
acaacgaagggcgtggggtgcccag

SEQ ID NO: 153367 - DNA, 25 bp, Probe Sequence
acaaattagtcgggtgtggtggcac

SEQ ID NO: 153368 - DNA, 25 bp, Probe Sequence
acaaatttacatgcatgtttgttac

SEQ ID NO: 153369 - DNA, 25 bp, Probe Sequence
ccggattcccggatattatctacgt

SEQ ID NO: 153370 - DNA, 25 bp, Probe Sequence
aacgattccctggttatgattctga

SEQ ID NO: 153371 - DNA, 25 bp, Probe Sequence
acacgttctttgtttgtgcttctgt

SEQ ID NO: 153372 - DNA, 25 bp, Probe Sequence
acacgctttttttaggtgcagggcg

SEQ ID NO: 153373 - DNA, 25 bp, Probe Sequence
acacgcttttccttaggtatgccga

SEQ ID NO: 153374 - DNA, 25 bp, Probe Sequence
aagccatcattcaccttggttaggt

SEQ ID NO: 153375 - DNA, 25 bp, Probe Sequence
acacctctatctcccttgggaataa

SEQ ID NO: 153376 - DNA, 25 bp, Probe Sequence
aaactatatgtgaccggaccttaag

SEQ ID NO: 153377 - DNA, 25 bp, Probe Sequence
aacaaatcttaacaaccttgagagg

SEQ ID NO: 153378 - DNA, 25 bp, Probe Sequence
acacaaactaagcctacattttggc

SEQ ID NO: 153379 - DNA, 25 bp, Probe Sequence
acaaatacgcacaaaaatattaggt

SEQ ID NO: 153380 - DNA, 25 bp, Probe Sequence
acaaaacgcagcgcatggtaccagg

SEQ ID NO: 153381 - DNA, 25 bp, Probe Sequence
acaaaggctgaggaactgttccata

SEQ ID NO: 153382 - DNA, 25 bp, Probe Sequence
acaaatggagcacatcctgaagcca

SEQ ID NO: 153383 - DNA, 25 bp, Probe Sequence
acacaaacacagctcctgcaacaat

SEQ ID NO: 153384 - DNA, 25 bp, Probe Sequence
acagctaacattatactgaacaatg

SEQ ID NO: 153385 - DNA, 25 bp, Probe Sequence
acagctgaaattcatgtgttcaaat

SEQ ID NO: 153386 - DNA, 25 bp, Probe Sequence
acagctgcaagaacttttccagata

SEQ ID NO: 153387 - DNA, 25 bp, Probe Sequence
acactgacatgtaattcttctctat

SEQ ID NO: 153388 - DNA, 25 bp, Probe Sequence
acactcatgagtggcatatttatgc

SEQ ID NO: 153389 - DNA, 25 bp, Probe Sequence
acacatatatgggctatctggacta

SEQ ID NO: 153390 - DNA, 25 bp, Probe Sequence
acactgatatgaagcagttcaactt

SEQ ID NO: 153391 - DNA, 25 bp, Probe Sequence
acagctgggcacaacttcagagcat

SEQ ID NO: 153392 - DNA, 25 bp, Probe Sequence
acactggcactggacttcaagcgaa

SEQ ID NO: 153393 - DNA, 25 bp, Probe Sequence
acactgtgcattgcattatggacag

SEQ ID NO: 153394 - DNA, 25 bp, Probe Sequence
acacagcagcgtggcttcagggagt

SEQ ID NO: 153395 - DNA, 25 bp, Probe Sequence
acactgcgctctggggtggtcagtg

SEQ ID NO: 153396 - DNA, 25 bp, Probe Sequence
acagctgccttgtgtgggactgaga

SEQ ID NO: 153397 - DNA, 25 bp, Probe Sequence
acagctgccctgtgtgggactgagt

SEQ ID NO: 153398 - DNA, 25 bp, Probe Sequence
acagccaccagctgggatgagctag

SEQ ID NO: 153399 - DNA, 25 bp, Probe Sequence
acaccaccagcttccagagattaaa

SEQ ID NO: 153400 - DNA, 25 bp, Probe Sequence
acaaaatcagtctacaaataaatgc

SEQ ID NO: 153401 - DNA, 25 bp, Probe Sequence
acacccaagtcatcaagacaccatc

SEQ ID NO: 153402 - DNA, 25 bp, Probe Sequence
acacccaagtgggcactgtgacctc

SEQ ID NO: 153403 - DNA, 25 bp, Probe Sequence
acacccaaggaggaacacctgctgc

SEQ ID NO: 153404 - DNA, 25 bp, Probe Sequence
acaccctagctgaaggacatccagt

SEQ ID NO: 153405 - DNA, 25 bp, Probe Sequence
acacccaagtataggatgattgttc

SEQ ID NO: 153406 - DNA, 25 bp, Probe Sequence
acagcgcccatgcaggtgctgtttt

SEQ ID NO: 153407 - DNA, 25 bp, Probe Sequence
acagcgcaacagcagcctgcagctg

SEQ ID NO: 153408 - DNA, 25 bp, Probe Sequence
acagctgcaagcaacaggcactgcc

SEQ ID NO: 153409 - DNA, 25 bp, Probe Sequence
acaccaagctacagatgctcaaagg

SEQ ID NO: 153410 - DNA, 25 bp, Probe Sequence
acagccaaacacagcatccaatatg

SEQ ID NO: 153411 - DNA, 25 bp, Probe Sequence
acaccacagagactatctacaactg

SEQ ID NO: 153412 - DNA, 25 bp, Probe Sequence
acacctcaagtgctgctaaacttac

SEQ ID NO: 153413 - DNA, 25 bp, Probe Sequence
acacatctaagtcaaaatttcccaa

SEQ ID NO: 153414 - DNA, 25 bp, Probe Sequence
acacttaaatgcaaacatcattttt

SEQ ID NO: 153415 - DNA, 25 bp, Probe Sequence
acacttaaatctaccctcttagcaa

SEQ ID NO: 153416 - DNA, 25 bp, Probe Sequence
acacctgaaaaagatctctgattga

SEQ ID NO: 153417 - DNA, 25 bp, Probe Sequence
acacaggcactctaaaatcaggatt

SEQ ID NO: 153418 - DNA, 25 bp, Probe Sequence
acaaggcctgcatttagaagattct

SEQ ID NO: 153419 - DNA, 25 bp, Probe Sequence
aaaggccccaagcaatgatctcctt

SEQ ID NO: 153420 - DNA, 25 bp, Probe Sequence
aaacccctcagacagtttgcttatt

SEQ ID NO: 153421 - DNA, 25 bp, Probe Sequence
aaaatttgtaagcgttagcggcatt

SEQ ID NO: 153422 - DNA, 25 bp, Probe Sequence
aaatttatgacatgaggttactcct

SEQ ID NO: 153423 - DNA, 25 bp, Probe Sequence
aaattactacattaaggtacgagca

SEQ ID NO: 153424 - DNA, 25 bp, Probe Sequence
acaagtactcattaaaggaaattga

SEQ ID NO: 153425 - DNA, 25 bp, Probe Sequence
aaagactccgtacattccaattatt

SEQ ID NO: 153426 - DNA, 25 bp, Probe Sequence
aaatgagtttaacagtacaatttct

SEQ ID NO: 153427 - DNA, 25 bp, Probe Sequence
aaagttttgaagtgctactataata

SEQ ID NO: 153428 - DNA, 25 bp, Probe Sequence
aaattaacttatgtggactgtaaat

SEQ ID NO: 153429 - DNA, 25 bp, Probe Sequence
aatttctaccgaacttaatggaatg

SEQ ID NO: 153430 - DNA, 25 bp, Probe Sequence
aatttcccgggattcgagtgtggtg

SEQ ID NO: 153431 - DNA, 25 bp, Probe Sequence
aaaggccccgagactggagtgtgtt

SEQ ID NO: 153432 - DNA, 25 bp, Probe Sequence
aaaccctgcctatcctgaatggttt

SEQ ID NO: 153433 - DNA, 25 bp, Probe Sequence
acaacgtgtccattatcctgaagtt

SEQ ID NO: 153434 - DNA, 25 bp, Probe Sequence
acaagcggtgactatctccgtgtgt

SEQ ID NO: 153435 - DNA, 25 bp, Probe Sequence
acaactgggcttatcactgggaaaa

SEQ ID NO: 153436 - DNA, 25 bp, Probe Sequence
acaacgagccttgagccagggagac

SEQ ID NO: 153437 - DNA, 25 bp, Probe Sequence
acactagttttgtgccagccgtgat

SEQ ID NO: 153438 - DNA, 25 bp, Probe Sequence
acactgagttacagctgtcagccct

SEQ ID NO: 153439 - DNA, 25 bp, Probe Sequence
acacgtgaaggcagtgctcacctct

SEQ ID NO: 153440 - DNA, 25 bp, Probe Sequence
acacagtgaacactttggcctgccc

SEQ ID NO: 153441 - DNA, 25 bp, Probe Sequence
acacaggagccactcaaagtctccc

SEQ ID NO: 153442 - DNA, 25 bp, Probe Sequence
aacaagagactccactgcatgttcc

SEQ ID NO: 153443 - DNA, 25 bp, Probe Sequence
acaaagatgcctcgcagcgagcgta

SEQ ID NO: 153444 - DNA, 25 bp, Probe Sequence
acacagtggcctcatgcagagggaa

SEQ ID NO: 153445 - DNA, 25 bp, Probe Sequence
acactgtcccttgcaaggtgacagg

SEQ ID NO: 153446 - DNA, 25 bp, Probe Sequence
aaattccacttgcaccgtagggcat

SEQ ID NO: 153447 - DNA, 25 bp, Probe Sequence
aaatctcccttcaggcggaggttgc

SEQ ID NO: 153448 - DNA, 25 bp, Probe Sequence
aaatcccttccatgtcgaagaaccg

SEQ ID NO: 153449 - DNA, 25 bp, Probe Sequence
acaaggcctctggcatttgtgggaa

SEQ ID NO: 153450 - DNA, 25 bp, Probe Sequence
acaagggcctgcatcatctttggca

SEQ ID NO: 153451 - DNA, 25 bp, Probe Sequence
acaagggaccagttccactgagaag

SEQ ID NO: 153452 - DNA, 25 bp, Probe Sequence
aaagaggaacagctctttggacact

SEQ ID NO: 153453 - DNA, 25 bp, Probe Sequence
aaaattagtcgccttcgtcgagagt

SEQ ID NO: 153454 - DNA, 25 bp, Probe Sequence
aaaactgggagagctcccggcattc

SEQ ID NO: 153455 - DNA, 25 bp, Probe Sequence
acaaactaggaggcgtccttgccct

SEQ ID NO: 153456 - DNA, 25 bp, Probe Sequence
acaacactggacttgggctctgtgc

SEQ ID NO: 153457 - DNA, 25 bp, Probe Sequence
acaacttccaaaaggcatctgattt

SEQ ID NO: 153458 - DNA, 25 bp, Probe Sequence
acaacttccaaaaggcatctgattt

SEQ ID NO: 153459 - DNA, 25 bp, Probe Sequence
acaatgcatctaataacgagctggt

SEQ ID NO: 153460 - DNA, 25 bp, Probe Sequence
acaatgcatctaataacgagctggt

SEQ ID NO: 153461 - DNA, 25 bp, Probe Sequence
acaatgcatctaataacgagctggt

SEQ ID NO: 153462 - DNA, 25 bp, Probe Sequence
acacacaaagaattgctgactgatg

SEQ ID NO: 153463 - DNA, 25 bp, Probe Sequence
acaacagaaggaactgccattgcca

SEQ ID NO: 153464 - DNA, 25 bp, Probe Sequence
acaacacgccggactgactctggcg

SEQ ID NO: 153465 - DNA, 25 bp, Probe Sequence
acaacacgccggactgactctggcg

SEQ ID NO: 153466 - DNA, 25 bp, Probe Sequence
acacacctctcccagttgttgggat

SEQ ID NO: 153467 - DNA, 25 bp, Probe Sequence
acaaccttccaagatgcctggcaaa

SEQ ID NO: 153468 - DNA, 25 bp, Probe Sequence
acaaaatacctaagctccttcacca

SEQ ID NO: 153469 - DNA, 25 bp, Probe Sequence
acaccaaatcattcaatgcttttat

SEQ ID NO: 153470 - DNA, 25 bp, Probe Sequence
acactccatatctcaatgtcttgat

SEQ ID NO: 153471 - DNA, 25 bp, Probe Sequence
acacctctgccaacagatgctgttg

SEQ ID NO: 153472 - DNA, 25 bp, Probe Sequence
acaccgctgcactcaagcttgggtg

SEQ ID NO: 153473 - DNA, 25 bp, Probe Sequence
acaccattgagattaagtctgaggc

SEQ ID NO: 153474 - DNA, 25 bp, Probe Sequence
acacctatgcagttgtactcagatg

SEQ ID NO: 153475 - DNA, 25 bp, Probe Sequence
acaacaacaagcttaccagagtacc

SEQ ID NO: 153476 - DNA, 25 bp, Probe Sequence
acaacaacaagcttaccagagtacc

SEQ ID NO: 153477 - DNA, 25 bp, Probe Sequence
acaacaacaagcttaccagagtacc

SEQ ID NO: 153478 - DNA, 25 bp, Probe Sequence
acaccagccatacttatctctctgt

SEQ ID NO: 153479 - DNA, 25 bp, Probe Sequence
acacaggccattacaattcttctct

SEQ ID NO: 153480 - DNA, 25 bp, Probe Sequence
acacatgtccatcagaatttccttc

SEQ ID NO: 153481 - DNA, 25 bp, Probe Sequence
acaatggccagctatgaacctcacc

SEQ ID NO: 153482 - DNA, 25 bp, Probe Sequence
acaagtggcgttcagccacccgaga

SEQ ID NO: 153483 - DNA, 25 bp, Probe Sequence
acaatgacaggtttagacaccccag

SEQ ID NO: 153484 - DNA, 25 bp, Probe Sequence
acaagcagacctttaaccctacaga

SEQ ID NO: 153485 - DNA, 25 bp, Probe Sequence
acaccaacctcaataaggtctcaaa

SEQ ID NO: 153486 - DNA, 25 bp, Probe Sequence
acaccacagcccagaacgtgctgct

SEQ ID NO: 153487 - DNA, 25 bp, Probe Sequence
acactatacctattattcggcgcat

SEQ ID NO: 153488 - DNA, 25 bp, Probe Sequence
aaaataccgaatttgcagtggatct

SEQ ID NO: 153489 - DNA, 25 bp, Probe Sequence
acaaaaccaggttagattgagacaa

SEQ ID NO: 153490 - DNA, 25 bp, Probe Sequence
acaaaaactggtgtaattggcaaat

SEQ ID NO: 153491 - DNA, 25 bp, Probe Sequence
acacaaaaactggtgtaattggcaa

SEQ ID NO: 153492 - DNA, 25 bp, Probe Sequence
acacacaaacctggtgtaaattggc

SEQ ID NO: 153493 - DNA, 25 bp, Probe Sequence
acaccaaaacatggcattataatct

SEQ ID NO: 153494 - DNA, 25 bp, Probe Sequence
acaccatcagaattcaatattcacc

SEQ ID NO: 153495 - DNA, 25 bp, Probe Sequence
acaaatagagaactaaatcacagta

SEQ ID NO: 153496 - DNA, 25 bp, Probe Sequence
acaacaatagaagaaatcccagaga

SEQ ID NO: 153497 - DNA, 25 bp, Probe Sequence
acaaatttcaaccccatctacagaa

SEQ ID NO: 153498 - DNA, 25 bp, Probe Sequence
aaatttttatcgtcgtatactgagt

SEQ ID NO: 153499 - DNA, 25 bp, Probe Sequence
acactttttgatacagcgtctcttg

SEQ ID NO: 153500 - DNA, 25 bp, Probe Sequence
acactatttgtaacagccaactctg

SEQ ID NO: 153501 - DNA, 25 bp, Probe Sequence
acacgattatgtgcgcgtcaacagg

SEQ ID NO: 153502 - DNA, 25 bp, Probe Sequence
acaccatattgaagcctgtgcccag

SEQ ID NO: 153503 - DNA, 25 bp, Probe Sequence
acacacatatcttggggactctgca

SEQ ID NO: 153504 - DNA, 25 bp, Probe Sequence
acagcctatctttgtgtgacatgtg

SEQ ID NO: 153505 - DNA, 25 bp, Probe Sequence
acagcctcctatgtgtaattgtgta

SEQ ID NO: 153506 - DNA, 25 bp, Probe Sequence
acacctccatatatacacgtgtgta

SEQ ID NO: 153507 - DNA, 25 bp, Probe Sequence
acacctctctcatgtacccagagga

SEQ ID NO: 153508 - DNA, 25 bp, Probe Sequence
acacctctctcatgtacccagagga

SEQ ID NO: 153509 - DNA, 25 bp, Probe Sequence
acacctatgtatttacgtcatggga

SEQ ID NO: 153510 - DNA, 25 bp, Probe Sequence
acagcctcagttttacagttctttg

SEQ ID NO: 153511 - DNA, 25 bp, Probe Sequence
acaccatactgttaagagtcctttt

SEQ ID NO: 153512 - DNA, 25 bp, Probe Sequence
acagccacctatagaagagtccatc

SEQ ID NO: 153513 - DNA, 25 bp, Probe Sequence
acaccaggctcaacaaagctgtctg

SEQ ID NO: 153514 - DNA, 25 bp, Probe Sequence
acacaggcggtcaagaagcagatcg

SEQ ID NO: 153515 - DNA, 25 bp, Probe Sequence
acaagcgctggcgtaagcatggggt

SEQ ID NO: 153516 - DNA, 25 bp, Probe Sequence
acacacagtacagacagcatggata

SEQ ID NO: 153517 - DNA, 25 bp, Probe Sequence
acaccatctataacacaaggacaag

SEQ ID NO: 153518 - DNA, 25 bp, Probe Sequence
acaactcgatatcccaaggtcaaac

SEQ ID NO: 153519 - DNA, 25 bp, Probe Sequence
acaactctcatttccttagtaagcc

SEQ ID NO: 153520 - DNA, 25 bp, Probe Sequence
acaactgttcctcaaagctaagctt

SEQ ID NO: 153521 - DNA, 25 bp, Probe Sequence
acaccttttccagacagtacatcct

SEQ ID NO: 153522 - DNA, 25 bp, Probe Sequence
acacctttttcatacaaggcccagg

SEQ ID NO: 153523 - DNA, 25 bp, Probe Sequence
cacgagttttccgccaaggacatcg

SEQ ID NO: 153524 - DNA, 25 bp, Probe Sequence
acacgtttcttgcacacgggaatgc

SEQ ID NO: 153525 - DNA, 25 bp, Probe Sequence
acacctcttattcacctgccgaagc

SEQ ID NO: 153526 - DNA, 25 bp, Probe Sequence
acaaacttggtggtcctgcaccaaa

SEQ ID NO: 153527 - DNA, 25 bp, Probe Sequence
acaagaccaggtgtgtcggcacctc

SEQ ID NO: 153528 - DNA, 25 bp, Probe Sequence
acaagttaaggtatctggtatctgc

SEQ ID NO: 153529 - DNA, 25 bp, Probe Sequence
acaagcttacaggtaggtagaacat

SEQ ID NO: 153530 - DNA, 25 bp, Probe Sequence
aaaatatatccctggtagttttgtg

SEQ ID NO: 153531 - DNA, 25 bp, Probe Sequence
aaatatttcaagtggtttagttgct

SEQ ID NO: 153532 - DNA, 25 bp, Probe Sequence
aaatcttaaatctgtgttttctgga

SEQ ID NO: 153533 - DNA, 25 bp, Probe Sequence
acactcttaactcctgactttttat

SEQ ID NO: 153534 - DNA, 25 bp, Probe Sequence
acacactggaacaactggtttattc

SEQ ID NO: 153535 - DNA, 25 bp, Probe Sequence
acacactggtacttagagtttctgt

SEQ ID NO: 153536 - DNA, 25 bp, Probe Sequence
acaccatggggcttggataccggtt

SEQ ID NO: 153537 - DNA, 25 bp, Probe Sequence
acacgcagaagtctggtgtctccag

SEQ ID NO: 153538 - DNA, 25 bp, Probe Sequence
acaccaccatgcagctggtgtcccg

SEQ ID NO: 153539 - DNA, 25 bp, Probe Sequence
acacatctccattgactgtggtccc

SEQ ID NO: 153540 - DNA, 25 bp, Probe Sequence
acacctcctagatgtcagtatcagc

SEQ ID NO: 153541 - DNA, 25 bp, Probe Sequence
acacccctacaatattatcatttgc

SEQ ID NO: 153542 - DNA, 25 bp, Probe Sequence
acaacctccaagttcgttcatattc

SEQ ID NO: 153543 - DNA, 25 bp, Probe Sequence
acacttcagctcaactgtcgttttg

SEQ ID NO: 153544 - DNA, 25 bp, Probe Sequence
aactctactagatgtggtttttctg

SEQ ID NO: 153545 - DNA, 25 bp, Probe Sequence
aattaaatgcactcggtactttaga

SEQ ID NO: 153546 - DNA, 25 bp, Probe Sequence
ggtaaaattcaaaactacacttgag

SEQ ID NO: 153547 - DNA, 25 bp, Probe Sequence
cagttagaaaagtgcttaacctggc

SEQ ID NO: 153548 - DNA, 25 bp, Probe Sequence
cgcaacagtaaatccttacaccttc

SEQ ID NO: 153549 - DNA, 25 bp, Probe Sequence
acaagagttaatgccctaccctctg

SEQ ID NO: 153550 - DNA, 25 bp, Probe Sequence
acaagagaataggcctttaccgtca

SEQ ID NO: 153551 - DNA, 25 bp, Probe Sequence
acaagaagatcgagttccacctgcc

SEQ ID NO: 153552 - DNA, 25 bp, Probe Sequence
acaacacagtcgtgagttccctggg

SEQ ID NO: 153553 - DNA, 25 bp, Probe Sequence
acaacagaccctggggtctgcttga

SEQ ID NO: 153554 - DNA, 25 bp, Probe Sequence
acaaagacctatcctggtggagctg

SEQ ID NO: 153555 - DNA, 25 bp, Probe Sequence
cagtaaaattaactctgtgggtggg

SEQ ID NO: 153556 - DNA, 25 bp, Probe Sequence
acaaaaaattagctgggcgtggtgg

SEQ ID NO: 153557 - DNA, 25 bp, Probe Sequence
acacataaagatacacgtgggggtc

SEQ ID NO: 153558 - DNA, 25 bp, Probe Sequence
acacatgaatggaatcgcagctggg

SEQ ID NO: 153559 - DNA, 25 bp, Probe Sequence
acacaatgcattctccctggatgag

SEQ ID NO: 153560 - DNA, 25 bp, Probe Sequence
acacagagatggcgcccaggatgac

SEQ ID NO: 153561 - DNA, 25 bp, Probe Sequence
acacagagagcgagacgcggagtcc

SEQ ID NO: 153562 - DNA, 25 bp, Probe Sequence
acaatcagagcgaggccgggtctca

SEQ ID NO: 153563 - DNA, 25 bp, Probe Sequence
acaatgagacctactgccggtcctt

SEQ ID NO: 153564 - DNA, 25 bp, Probe Sequence
acactgagtcctctgtcatgtgtcc

SEQ ID NO: 153565 - DNA, 25 bp, Probe Sequence
acacatagtcgtcattcttgctgcc

SEQ ID NO: 153566 - DNA, 25 bp, Probe Sequence
acacaagatctgccttttattcatc

SEQ ID NO: 153567 - DNA, 25 bp, Probe Sequence
acacataagcagttttcattcatat

SEQ ID NO: 153568 - DNA, 25 bp, Probe Sequence
acacacataatagtctatcctcatt

SEQ ID NO: 153569 - DNA, 25 bp, Probe Sequence
acaccatgtctagtggcacactagt

SEQ ID NO: 153570 - DNA, 25 bp, Probe Sequence
acaccttctgagaccaaaatgtcaa

SEQ ID NO: 153571 - DNA, 25 bp, Probe Sequence
acacctgtctaattcacttactaac

SEQ ID NO: 153572 - DNA, 25 bp, Probe Sequence
acacagctctgtaaactaccactca

SEQ ID NO: 153573 - DNA, 25 bp, Probe Sequence
acacatggtttgttcaagcacactt

SEQ ID NO: 153574 - DNA, 25 bp, Probe Sequence
acactcctgtgtctcaaacatgctt

SEQ ID NO: 153575 - DNA, 25 bp, Probe Sequence
acactcctgtgtctcaaacatgctt

SEQ ID NO: 153576 - DNA, 25 bp, Probe Sequence
acacttggtgtggataaacatgcca

SEQ ID NO: 153577 - DNA, 25 bp, Probe Sequence
acaccatcgtgtgcaacagcaagga

SEQ ID NO: 153578 - DNA, 25 bp, Probe Sequence
acacccctgctacaacagcagcgat

SEQ ID NO: 153579 - DNA, 25 bp, Probe Sequence
acaccatccacgtccacaagagatg

SEQ ID NO: 153580 - DNA, 25 bp, Probe Sequence
acactctggacttcagccaacagga

SEQ ID NO: 153581 - DNA, 25 bp, Probe Sequence
acacttggcacttgttctagagaag

SEQ ID NO: 153582 - DNA, 25 bp, Probe Sequence
acactgctactttgtgagtaaagaa

SEQ ID NO: 153583 - DNA, 25 bp, Probe Sequence
acactgtccttactgcttatgcagg

SEQ ID NO: 153584 - DNA, 25 bp, Probe Sequence
acacatgaacatcgactttgacagt

SEQ ID NO: 153585 - DNA, 25 bp, Probe Sequence
acacagtacagacagcatggatatt

SEQ ID NO: 153586 - DNA, 25 bp, Probe Sequence
acaagtgaaggccatcaaagaattg

SEQ ID NO: 153587 - DNA, 25 bp, Probe Sequence
acacagtgacctgtgaaacagagga

SEQ ID NO: 153588 - DNA, 25 bp, Probe Sequence
acacaggcctgggtaaccatggtga

SEQ ID NO: 153589 - DNA, 25 bp, Probe Sequence
acacagctcctagacaagtagagtg

SEQ ID NO: 153590 - DNA, 25 bp, Probe Sequence
acacagctttatgatatcaaagact

SEQ ID NO: 153591 - DNA, 25 bp, Probe Sequence
acacactggtatctgtaaagcactc

SEQ ID NO: 153592 - DNA, 25 bp, Probe Sequence
aaatatggtatgaggtcgccacttc

SEQ ID NO: 153593 - DNA, 25 bp, Probe Sequence
acacttgggatttttctcctctgtc

SEQ ID NO: 153594 - DNA, 25 bp, Probe Sequence
acacttgggatttttctcctctgtc

SEQ ID NO: 153595 - DNA, 25 bp, Probe Sequence
acacttagccgctgtctcgccgtgt

SEQ ID NO: 153596 - DNA, 25 bp, Probe Sequence
acacctaacgcacgtgctggaaggc

SEQ ID NO: 153597 - DNA, 25 bp, Probe Sequence
acacctcagctgacagcgtgggcaa

SEQ ID NO: 153598 - DNA, 25 bp, Probe Sequence
acacccaggccatgaaggagatgca

SEQ ID NO: 153599 - DNA, 25 bp, Probe Sequence
acacccagcacggaggtgtgcagcc

SEQ ID NO: 153600 - DNA, 25 bp, Probe Sequence
acacccagccagaattttgacttct

SEQ ID NO: 153601 - DNA, 25 bp, Probe Sequence
acaccctgcgagaagtcactgttac

SEQ ID NO: 153602 - DNA, 25 bp, Probe Sequence
acactcctgccagagtgacagtgta

SEQ ID NO: 153603 - DNA, 25 bp, Probe Sequence
acaccctcacattagtgtgctgtgt

SEQ ID NO: 153604 - DNA, 25 bp, Probe Sequence
acaccttctacaatgagctgcgtgt

SEQ ID NO: 153605 - DNA, 25 bp, Probe Sequence
acaacattgctgccgatactgctgc

SEQ ID NO: 153606 - DNA, 25 bp, Probe Sequence
acaacttcagggtgtctatccagga

SEQ ID NO: 153607 - DNA, 25 bp, Probe Sequence
aaatcttcaaggtgaccatgcccca

SEQ ID NO: 153608 - DNA, 25 bp, Probe Sequence
acaatttcaacacaggggacagcta

SEQ ID NO: 153609 - DNA, 25 bp, Probe Sequence
acaaagacaaccactgggatcagct

SEQ ID NO: 153610 - DNA, 25 bp, Probe Sequence
acacaggaacaactgccggtgatac

SEQ ID NO: 153611 - DNA, 25 bp, Probe Sequence
acactggctcagtagtgcctttgca

SEQ ID NO: 153612 - DNA, 25 bp, Probe Sequence
acactttgcgagggcttttgctggc

SEQ ID NO: 153613 - DNA, 25 bp, Probe Sequence
acactctgttaggtcattcttgcat

SEQ ID NO: 153614 - DNA, 25 bp, Probe Sequence
acacgtgtgtatcagtttggtaata

SEQ ID NO: 153615 - DNA, 25 bp, Probe Sequence
acacttgtgttcattgtggatgtta

SEQ ID NO: 153616 - DNA, 25 bp, Probe Sequence
acacggatgagtttttagatcttct

SEQ ID NO: 153617 - DNA, 25 bp, Probe Sequence
acacctagatgtttaatatcatttc

SEQ ID NO: 153618 - DNA, 25 bp, Probe Sequence
acacctacttagagcattatcatta

SEQ ID NO: 153619 - DNA, 25 bp, Probe Sequence
acactcgaaaagagcacttcacaca

SEQ ID NO: 153620 - DNA, 25 bp, Probe Sequence
acacccaaacacaaacttcaagtct

SEQ ID NO: 153621 - DNA, 25 bp, Probe Sequence
acacccagtacagacatatccacaa

SEQ ID NO: 153622 - DNA, 25 bp, Probe Sequence
acaacagcgtaaatattagcccaca

SEQ ID NO: 153623 - DNA, 25 bp, Probe Sequence
acaaacagtaaaataggtcacagac

SEQ ID NO: 153624 - DNA, 25 bp, Probe Sequence
acaaaaataattatgccccatgacc

SEQ ID NO: 153625 - DNA, 25 bp, Probe Sequence
acaaaacgaactatggcactaacca

SEQ ID NO: 153626 - DNA, 25 bp, Probe Sequence
acaaagcctagagcctggcactcaa

SEQ ID NO: 153627 - DNA, 25 bp, Probe Sequence
acacggctcaagtctacatggagct

SEQ ID NO: 153628 - DNA, 25 bp, Probe Sequence
acacggctaaattccatccagctgt

SEQ ID NO: 153629 - DNA, 25 bp, Probe Sequence
acactggtacagtagtcacctgtga

SEQ ID NO: 153630 - DNA, 25 bp, Probe Sequence
acacggcatacgtgcatctcatctc

SEQ ID NO: 153631 - DNA, 25 bp, Probe Sequence
acactgttactcagatctacacaat

SEQ ID NO: 153632 - DNA, 25 bp, Probe Sequence
acacatttactcatctgaatgaaca

SEQ ID NO: 153633 - DNA, 25 bp, Probe Sequence
acactcttacacctgttatggaaaa

SEQ ID NO: 153634 - DNA, 25 bp, Probe Sequence
acacatctatccctcataaattgga

SEQ ID NO: 153635 - DNA, 25 bp, Probe Sequence
acacttcaccctttgaaaggagtag

SEQ ID NO: 153636 - DNA, 25 bp, Probe Sequence
acacttgcccctcagaatagtactg

SEQ ID NO: 153637 - DNA, 25 bp, Probe Sequence
acacttatccttcatgtaattgtct

SEQ ID NO: 153638 - DNA, 25 bp, Probe Sequence
acacccattatttatgcagacatgt

SEQ ID NO: 153639 - DNA, 25 bp, Probe Sequence
acacttcattttgtgcaggtgatga

SEQ ID NO: 153640 - DNA, 25 bp, Probe Sequence
acactgcctttttatgctttcaaaa

SEQ ID NO: 153641 - DNA, 25 bp, Probe Sequence
acactgcctaaaagggtctcaagac

SEQ ID NO: 153642 - DNA, 25 bp, Probe Sequence
acacctgccaagtggagcatccaag

SEQ ID NO: 153643 - DNA, 25 bp, Probe Sequence
acacactgctactttgtgagtaaag

SEQ ID NO: 153644 - DNA, 25 bp, Probe Sequence
acacgcattgatttttgcctggaat

SEQ ID NO: 153645 - DNA, 25 bp, Probe Sequence
acaaattgcacagttagccgcgcac

SEQ ID NO: 153646 - DNA, 25 bp, Probe Sequence
acaaatcgcagagctgaggcacact

SEQ ID NO: 153647 - DNA, 25 bp, Probe Sequence
acaacatccagaaagagtccaccct

SEQ ID NO: 153648 - DNA, 25 bp, Probe Sequence
acacatattagctgtgatcatccac

SEQ ID NO: 153649 - DNA, 25 bp, Probe Sequence
acactgattgatccaggacatccat

SEQ ID NO: 153650 - DNA, 25 bp, Probe Sequence
acactcattgataaggatataccct

SEQ ID NO: 153651 - DNA, 25 bp, Probe Sequence
acacaccatatataaaacagccttt

SEQ ID NO: 153652 - DNA, 25 bp, Probe Sequence
acactttataaagagaactgctttc

SEQ ID NO: 153653 - DNA, 25 bp, Probe Sequence
aaatttaagtatgcagttctctttt

SEQ ID NO: 153654 - DNA, 25 bp, Probe Sequence
acaaaaagatgtctcaggtttgttt

SEQ ID NO: 153655 - DNA, 25 bp, Probe Sequence
acaaccggatgtcttgattgattta

SEQ ID NO: 153656 - DNA, 25 bp, Probe Sequence
acaaccggatgtcttgattgattta

SEQ ID NO: 153657 - DNA, 25 bp, Probe Sequence
acaacgcgccagacgtgtgagtttc

SEQ ID NO: 153658 - DNA, 25 bp, Probe Sequence
acacccgcgctgagattgacttggt

SEQ ID NO: 153659 - DNA, 25 bp, Probe Sequence
acaccctggtgacctgtgacaaagg

SEQ ID NO: 153660 - DNA, 25 bp, Probe Sequence
acaaccgaatccctggacactaagc

SEQ ID NO: 153661 - DNA, 25 bp, Probe Sequence
acaactgggccaagggtcactacac

SEQ ID NO: 153662 - DNA, 25 bp, Probe Sequence
acacatataggtgagggtctccaca

SEQ ID NO: 153663 - DNA, 25 bp, Probe Sequence
acactgagcaccaggtggtctcctc

SEQ ID NO: 153664 - DNA, 25 bp, Probe Sequence
acactgagcaccaggtggtctcctc

SEQ ID NO: 153665 - DNA, 25 bp, Probe Sequence
acactgagcaccaggtggtctcctc

SEQ ID NO: 153666 - DNA, 25 bp, Probe Sequence
acactagccagtggttgtggacaac

SEQ ID NO: 153667 - DNA, 25 bp, Probe Sequence
acactgaccgggcttttcagagcct

SEQ ID NO: 153668 - DNA, 25 bp, Probe Sequence
acacgcacgggtgtttctgtgtgct

SEQ ID NO: 153669 - DNA, 25 bp, Probe Sequence
acacaaccggatgtcttgattgatt

SEQ ID NO: 153670 - DNA, 25 bp, Probe Sequence
acaaattgggatctgtcttggcatt

SEQ ID NO: 153671 - DNA, 25 bp, Probe Sequence
acacatttttacgatgccttggaat

SEQ ID NO: 153672 - DNA, 25 bp, Probe Sequence
acacattaccttgtgtttgcaagat

SEQ ID NO: 153673 - DNA, 25 bp, Probe Sequence
aaatcaaatttctgttccacagata

SEQ ID NO: 153674 - DNA, 25 bp, Probe Sequence
aaacccttggagtcattcccagata

SEQ ID NO: 153675 - DNA, 25 bp, Probe Sequence
aaatcccgatggcacgatgaacctc

SEQ ID NO: 153676 - DNA, 25 bp, Probe Sequence
aaatccttagcagcccaaacttcag

SEQ ID NO: 153677 - DNA, 25 bp, Probe Sequence
aaacttctacccagcaaatggtgac

SEQ ID NO: 153678 - DNA, 25 bp, Probe Sequence
acaagattgtcctgaagaagtggta

SEQ ID NO: 153679 - DNA, 25 bp, Probe Sequence
acactttgcttcttaaaattgatat

SEQ ID NO: 153680 - DNA, 25 bp, Probe Sequence
acactttctccactctatatttgta

SEQ ID NO: 153681 - DNA, 25 bp, Probe Sequence
acactctctgtggcactgccatatt

SEQ ID NO: 153682 - DNA, 25 bp, Probe Sequence
acactctctgtggcactgccatatt

SEQ ID NO: 153683 - DNA, 25 bp, Probe Sequence
acacagcctctggcataggatatgc

SEQ ID NO: 153684 - DNA, 25 bp, Probe Sequence
acacatggtctgtcaatgagagcat

SEQ ID NO: 153685 - DNA, 25 bp, Probe Sequence
acacatgtgacttcaaggaagagca

SEQ ID NO: 153686 - DNA, 25 bp, Probe Sequence
acactggacttctggactacatata

SEQ ID NO: 153687 - DNA, 25 bp, Probe Sequence
acacttacatacttggaccaaaaag

SEQ ID NO: 153688 - DNA, 25 bp, Probe Sequence
acacaaatatatgtgtaccaaatca

SEQ ID NO: 153689 - DNA, 25 bp, Probe Sequence
acactgattatatcgtccccgacat

SEQ ID NO: 153690 - DNA, 25 bp, Probe Sequence
acacggcgatgaacgtcttacaact

SEQ ID NO: 153691 - DNA, 25 bp, Probe Sequence
acaatggggaaagcttacagactgt

SEQ ID NO: 153692 - DNA, 25 bp, Probe Sequence
acacatggggttggggtcaggactg

SEQ ID NO: 153693 - DNA, 25 bp, Probe Sequence
acactggttttgccggtagagcagc

SEQ ID NO: 153694 - DNA, 25 bp, Probe Sequence
acactggtgtttctgcgagaatgga

SEQ ID NO: 153695 - DNA, 25 bp, Probe Sequence
acacttttaggaacagaaatggact

SEQ ID NO: 153696 - DNA, 25 bp, Probe Sequence
aaattcttacagtacaaacaggact

SEQ ID NO: 153697 - DNA, 25 bp, Probe Sequence
acaattttacttccaaacaagaatg

SEQ ID NO: 153698 - DNA, 25 bp, Probe Sequence
acaattttactctcaaatagtcaaa

SEQ ID NO: 153699 - DNA, 25 bp, Probe Sequence
aaattagctacccaaatatggagaa

SEQ ID NO: 153700 - DNA, 25 bp, Probe Sequence
acaatgtacccgtaatttgtaacat

SEQ ID NO: 153701 - DNA, 25 bp, Probe Sequence
caaaggccccttgttagctggccat

SEQ ID NO: 153702 - DNA, 25 bp, Probe Sequence
aaaggctaccgtggttactcctatg

SEQ ID NO: 153703 - DNA, 25 bp, Probe Sequence
aagaggctggcagaagttaccctgg

SEQ ID NO: 153704 - DNA, 25 bp, Probe Sequence
acaagagctggagacgttccgggag

SEQ ID NO: 153705 - DNA, 25 bp, Probe Sequence
acaaggtgatggcacgtttcgtgag

SEQ ID NO: 153706 - DNA, 25 bp, Probe Sequence
acaagggacgggccaatttctcagg

SEQ ID NO: 153707 - DNA, 25 bp, Probe Sequence
acaagggaacactgaatctttcaag

SEQ ID NO: 153708 - DNA, 25 bp, Probe Sequence
aaactagaacgctcttcttttagtg

SEQ ID NO: 153709 - DNA, 25 bp, Probe Sequence
aaagttattcgctcgattttttctg

SEQ ID NO: 153710 - DNA, 25 bp, Probe Sequence
acaagatagagtttagcgattttta

SEQ ID NO: 153711 - DNA, 25 bp, Probe Sequence
acaaacaagttaagggcaagattct

SEQ ID NO: 153712 - DNA, 25 bp, Probe Sequence
acaaacaagttaagggcaagattct

SEQ ID NO: 153713 - DNA, 25 bp, Probe Sequence
acacaatcaggatgacgctggccaa

SEQ ID NO: 153714 - DNA, 25 bp, Probe Sequence
acaacaggtgtaggtataggaggtc

SEQ ID NO: 153715 - DNA, 25 bp, Probe Sequence
acacaagtgtgtcattaaggaattc

SEQ ID NO: 153716 - DNA, 25 bp, Probe Sequence
acacagaatgttcttggtgagaagg

SEQ ID NO: 153717 - DNA, 25 bp, Probe Sequence
acaagtgttcgtttgggtgcaaagt

SEQ ID NO: 153718 - DNA, 25 bp, Probe Sequence
acaagtgcttcgtggaggtcaatga

SEQ ID NO: 153719 - DNA, 25 bp, Probe Sequence
acaagtgccctctagggcagccagg

SEQ ID NO: 153720 - DNA, 25 bp, Probe Sequence
acactgtgtccttatggcttcactg

SEQ ID NO: 153721 - DNA, 25 bp, Probe Sequence
acacattggactagcttgctctcct

SEQ ID NO: 153722 - DNA, 25 bp, Probe Sequence
acacatctagcagtcagttcttgtt

SEQ ID NO: 153723 - DNA, 25 bp, Probe Sequence
acacttgtgaaattctcttgtctaa

SEQ ID NO: 153724 - DNA, 25 bp, Probe Sequence
acactgttgagttttctgtacataa

SEQ ID NO: 153725 - DNA, 25 bp, Probe Sequence
acactgttgagttttctgtacataa

SEQ ID NO: 153726 - DNA, 25 bp, Probe Sequence
acactctatgatgaaagctgttcta

SEQ ID NO: 153727 - DNA, 25 bp, Probe Sequence
acaaaatcataaaagctgtttcact

SEQ ID NO: 153728 - DNA, 25 bp, Probe Sequence
acaaaatgtcacttgaattggtcct

SEQ ID NO: 153729 - DNA, 25 bp, Probe Sequence
acaaacgacagcctcaagtctcctt

SEQ ID NO: 153730 - DNA, 25 bp, Probe Sequence
aaatttgaatgaccaagttctcttc

SEQ ID NO: 153731 - DNA, 25 bp, Probe Sequence
aaattcataagacttaatttgtaca

SEQ ID NO: 153732 - DNA, 25 bp, Probe Sequence
aaattctaagaaggcaactgcgtaa

SEQ ID NO: 153733 - DNA, 25 bp, Probe Sequence
aataccggagatcatgcaagctggt

SEQ ID NO: 153734 - DNA, 25 bp, Probe Sequence
aacaccgcggaccgaatcaggcgga

SEQ ID NO: 153735 - DNA, 25 bp, Probe Sequence
acacacctgagggggagacggcgtt

SEQ ID NO: 153736 - DNA, 25 bp, Probe Sequence
acaactgcgggatgaggctcgggac

SEQ ID NO: 153737 - DNA, 25 bp, Probe Sequence
acaaatgcaggaatttggctgagga

SEQ ID NO: 153738 - DNA, 25 bp, Probe Sequence
acaacatgctggtttctgtagggta

SEQ ID NO: 153739 - DNA, 25 bp, Probe Sequence
aagcaatccatgctttgtttaggga

SEQ ID NO: 153740 - DNA, 25 bp, Probe Sequence
aactgcagtcagtgactggcagtgg

SEQ ID NO: 153741 - DNA, 25 bp, Probe Sequence
acacagagacagtacctgtaatgag

SEQ ID NO: 153742 - DNA, 25 bp, Probe Sequence
aaatcagagaagtccagttagagta

SEQ ID NO: 153743 - DNA, 25 bp, Probe Sequence
acaagcaagaagaccatttgaccat

SEQ ID NO: 153744 - DNA, 25 bp, Probe Sequence
acacaggaaacacgctagtgaccat

SEQ ID NO: 153745 - DNA, 25 bp, Probe Sequence
acacaggaaacagctatgaccatta

SEQ ID NO: 153746 - DNA, 25 bp, Probe Sequence
acacaggaaacagctatgaccatta

SEQ ID NO: 153747 - DNA, 25 bp, Probe Sequence
acacaggaaacagctatgaccactt

SEQ ID NO: 153748 - DNA, 25 bp, Probe Sequence
acacaggtaacaggctatgaccctt

SEQ ID NO: 153749 - DNA, 25 bp, Probe Sequence
acacaggtactctcatattcaactt

SEQ ID NO: 153750 - DNA, 25 bp, Probe Sequence
acaaggacactctgacattcggctt

SEQ ID NO: 153751 - DNA, 25 bp, Probe Sequence
acaacaggaagctccagagcggctc

SEQ ID NO: 153752 - DNA, 25 bp, Probe Sequence
acaacaacattgctgagggggctct

SEQ ID NO: 153753 - DNA, 25 bp, Probe Sequence
acaacaaatacccagatgctgtggc

SEQ ID NO: 153754 - DNA, 25 bp, Probe Sequence
acaacgagaccctggcttgaggagc

SEQ ID NO: 153755 - DNA, 25 bp, Probe Sequence
acaactgcatgatacttactgggga

SEQ ID NO: 153756 - DNA, 25 bp, Probe Sequence
acaaccatgaaattgatcaccggga

SEQ ID NO: 153757 - DNA, 25 bp, Probe Sequence
acacaaataataatatccttcgtta

SEQ ID NO: 153758 - DNA, 25 bp, Probe Sequence
caagaagtatatttaacgtcggtag

SEQ ID NO: 153759 - DNA, 25 bp, Probe Sequence
acaaatttcatctcaacgtctgtaa

SEQ ID NO: 153760 - DNA, 25 bp, Probe Sequence
acaagttcttcagacaggtgtggag

SEQ ID NO: 153761 - DNA, 25 bp, Probe Sequence
acaaccctgcattcccagaggttag

SEQ ID NO: 153762 - DNA, 25 bp, Probe Sequence
acaaccccagtttcatcatgggtag

SEQ ID NO: 153763 - DNA, 25 bp, Probe Sequence
acaactcttcaggttccacatggta

SEQ ID NO: 153764 - DNA, 25 bp, Probe Sequence
acaagcgctctgcgtttacaggctt

SEQ ID NO: 153765 - DNA, 25 bp, Probe Sequence
acacatcgcctctggttaaatctct

SEQ ID NO: 153766 - DNA, 25 bp, Probe Sequence
acacaagcagtctttttctacagcc

SEQ ID NO: 153767 - DNA, 25 bp, Probe Sequence
acacaaacatccatttctacaagtc

SEQ ID NO: 153768 - DNA, 25 bp, Probe Sequence
acaacaacaacaaattcacggaatc

SEQ ID NO: 153769 - DNA, 25 bp, Probe Sequence
acaaaacaagcacaggccaaggagt

SEQ ID NO: 153770 - DNA, 25 bp, Probe Sequence
gacatttacaggaggccccggagaa

SEQ ID NO: 153771 - DNA, 25 bp, Probe Sequence
acaattaagagcaccccatctggga

SEQ ID NO: 153772 - DNA, 25 bp, Probe Sequence
aactataggcctttttcttgggatg

SEQ ID NO: 153773 - DNA, 25 bp, Probe Sequence
aagtaagtgccgaggcctgtgggct

SEQ ID NO: 153774 - DNA, 25 bp, Probe Sequence
aaataagggcccagcacggtagctc

SEQ ID NO: 153775 - DNA, 25 bp, Probe Sequence
aaatagagttccggagctgggttgc

SEQ ID NO: 153776 - DNA, 25 bp, Probe Sequence
acaaaggtagcggccacatggtttt

SEQ ID NO: 153777 - DNA, 25 bp, Probe Sequence
acaaatgttggccccagattctttt

SEQ ID NO: 153778 - DNA, 25 bp, Probe Sequence
acaactttgagaccagagacacttc

SEQ ID NO: 153779 - DNA, 25 bp, Probe Sequence
acaatcttgggaacagggttactgt

SEQ ID NO: 153780 - DNA, 25 bp, Probe Sequence
acaaatatggggcagtggcttactg

SEQ ID NO: 153781 - DNA, 25 bp, Probe Sequence
acacattgcaggggccagtgtcatt

SEQ ID NO: 153782 - DNA, 25 bp, Probe Sequence
acacatctcggacagcatgctctgt

SEQ ID NO: 153783 - DNA, 25 bp, Probe Sequence
acacattctgaacagctgttgtggt

SEQ ID NO: 153784 - DNA, 25 bp, Probe Sequence
acacagctggacacagagcttggtg

SEQ ID NO: 153785 - DNA, 25 bp, Probe Sequence
acacagctggacacagagcttggtg

SEQ ID NO: 153786 - DNA, 25 bp, Probe Sequence
acactggctgagcggatgcatctgg

SEQ ID NO: 153787 - DNA, 25 bp, Probe Sequence
acaaggctgatggagagtcgtgttc

SEQ ID NO: 153788 - DNA, 25 bp, Probe Sequence
acacatcagtgtaaattcaggcttc

SEQ ID NO: 153789 - DNA, 25 bp, Probe Sequence
acactggtgctttcatcatcagagg

SEQ ID NO: 153790 - DNA, 25 bp, Probe Sequence
acactgcagtctggctacacacaga

SEQ ID NO: 153791 - DNA, 25 bp, Probe Sequence
acacacgtttcttgcacacgggaat

SEQ ID NO: 153792 - DNA, 25 bp, Probe Sequence
acacactttatcatccactcgtgat

SEQ ID NO: 153793 - DNA, 25 bp, Probe Sequence
acactcatttttttagtcgtcatgg

SEQ ID NO: 153794 - DNA, 25 bp, Probe Sequence
acacagattttttacgtccttcaga

SEQ ID NO: 153795 - DNA, 25 bp, Probe Sequence
acacatatgtttattgcggcactac

SEQ ID NO: 153796 - DNA, 25 bp, Probe Sequence
acacaattgataatcctgcccatcc

SEQ ID NO: 153797 - DNA, 25 bp, Probe Sequence
acaactgtgtgattcactgccaccg

SEQ ID NO: 153798 - DNA, 25 bp, Probe Sequence
acaactgtgtgattcactgccaccg

SEQ ID NO: 153799 - DNA, 25 bp, Probe Sequence
acaactgtgtgattcactgccaccg

SEQ ID NO: 153800 - DNA, 25 bp, Probe Sequence
acaactctggcatacggcccagatc

SEQ ID NO: 153801 - DNA, 25 bp, Probe Sequence
acaattgcaagatgactggctttac

SEQ ID NO: 153802 - DNA, 25 bp, Probe Sequence
aaatataagcctgcggccttaactc

SEQ ID NO: 153803 - DNA, 25 bp, Probe Sequence
aaataatcagccgtggggccaattt

SEQ ID NO: 153804 - DNA, 25 bp, Probe Sequence
acacatacacctctggtgacctatt

SEQ ID NO: 153805 - DNA, 25 bp, Probe Sequence
acacatccccttagaggacctgagt

SEQ ID NO: 153806 - DNA, 25 bp, Probe Sequence
acaacagccgcttctggaacggcag

SEQ ID NO: 153807 - DNA, 25 bp, Probe Sequence
acaacagcaacgtcttgaacaggcg

SEQ ID NO: 153808 - DNA, 25 bp, Probe Sequence
acaacagcaacgtcttgaacaggcg

SEQ ID NO: 153809 - DNA, 25 bp, Probe Sequence
acacagctgcactggcaagaaaatg

SEQ ID NO: 153810 - DNA, 25 bp, Probe Sequence
acacagagcccccattcaaaatggg

SEQ ID NO: 153811 - DNA, 25 bp, Probe Sequence
acaaaacccgctacagacaagcttt

SEQ ID NO: 153812 - DNA, 25 bp, Probe Sequence
acaaattcacccacgagacacttga

SEQ ID NO: 153813 - DNA, 25 bp, Probe Sequence
acaaattcttaactctgacacaatt

SEQ ID NO: 153814 - DNA, 25 bp, Probe Sequence
acaaattctcagatggcgaccgtgt

SEQ ID NO: 153815 - DNA, 25 bp, Probe Sequence
acaaaagctgctgtggtggctccag

SEQ ID NO: 153816 - DNA, 25 bp, Probe Sequence
acaaaagctgctgtggtggctccag

SEQ ID NO: 153817 - DNA, 25 bp, Probe Sequence
acaaccagtgtgctgcaggctgcac

SEQ ID NO: 153818 - DNA, 25 bp, Probe Sequence
acacatccaggaaagaggccagtag

SEQ ID NO: 153819 - DNA, 25 bp, Probe Sequence
acacatccaggaaagaggccagtag

SEQ ID NO: 153820 - DNA, 25 bp, Probe Sequence
acacatccgcagtacagggaagtgt

SEQ ID NO: 153821 - DNA, 25 bp, Probe Sequence
acactgcttcgatcctggacaggat

SEQ ID NO: 153822 - DNA, 25 bp, Probe Sequence
acaagttcgaacaggccatggatct

SEQ ID NO: 153823 - DNA, 25 bp, Probe Sequence
acaaataccagctagggccagtgac

SEQ ID NO: 153824 - DNA, 25 bp, Probe Sequence
acaacaacctgtgtggtatgtacca

SEQ ID NO: 153825 - DNA, 25 bp, Probe Sequence
acaaaacactgtgctgtctatccct

SEQ ID NO: 153826 - DNA, 25 bp, Probe Sequence
acaaacctgtgtatgcttatgcctg

SEQ ID NO: 153827 - DNA, 25 bp, Probe Sequence
acaagcagccgttctctgctattcc

SEQ ID NO: 153828 - DNA, 25 bp, Probe Sequence
acacatgggtgtttctattatcctt

SEQ ID NO: 153829 - DNA, 25 bp, Probe Sequence
acacagggtttgcatttatcagtct

SEQ ID NO: 153830 - DNA, 25 bp, Probe Sequence
acacagtggttacatttcacatttc

SEQ ID NO: 153831 - DNA, 25 bp, Probe Sequence
acaaatggttagcattaattttgtg

SEQ ID NO: 153832 - DNA, 25 bp, Probe Sequence
acaaggcctgggcttgaaatttgct

SEQ ID NO: 153833 - DNA, 25 bp, Probe Sequence
acaacaccatgctggttattttggc

SEQ ID NO: 153834 - DNA, 25 bp, Probe Sequence
acaagactccatctcgtttttgtgt

SEQ ID NO: 153835 - DNA, 25 bp, Probe Sequence
acaaagcactatcattttcatttgg

SEQ ID NO: 153836 - DNA, 25 bp, Probe Sequence
acacagtgcattgccctttgttggg

SEQ ID NO: 153837 - DNA, 25 bp, Probe Sequence
acacagtaattggtcacttgttaag

SEQ ID NO: 153838 - DNA, 25 bp, Probe Sequence
aacaatctcttggttccctaaagca

SEQ ID NO: 153839 - DNA, 25 bp, Probe Sequence
acacaattcattctttgcagctaat

SEQ ID NO: 153840 - DNA, 25 bp, Probe Sequence
acacatatgtgcttctcagttgcag

SEQ ID NO: 153841 - DNA, 25 bp, Probe Sequence
acaatgaggcctccaatctgcaggt

SEQ ID NO: 153842 - DNA, 25 bp, Probe Sequence
acaaagtccgcaccatgctggttag

SEQ ID NO: 153843 - DNA, 25 bp, Probe Sequence
acacacagacccacatgtgggtggg

SEQ ID NO: 153844 - DNA, 25 bp, Probe Sequence
acacacaccccatcgcgggtgtgcc

SEQ ID NO: 153845 - DNA, 25 bp, Probe Sequence
acacacaggaccactcagtggggcc

SEQ ID NO: 153846 - DNA, 25 bp, Probe Sequence
acacacaggaggcttctgtggcttc

SEQ ID NO: 153847 - DNA, 25 bp, Probe Sequence
acacatggggcgctgtgggcgccgt

SEQ ID NO: 153848 - DNA, 25 bp, Probe Sequence
acacaggggcagtcgttgagccttt

SEQ ID NO: 153849 - DNA, 25 bp, Probe Sequence
acacaagaggcttccctagtttaca

SEQ ID NO: 153850 - DNA, 25 bp, Probe Sequence
acaacagaggcttcagaccattttc

SEQ ID NO: 153851 - DNA, 25 bp, Probe Sequence
acaaccagggaaacagcttatgacc

SEQ ID NO: 153852 - DNA, 25 bp, Probe Sequence
acaaccactgggatcagctggtgtc

SEQ ID NO: 153853 - DNA, 25 bp, Probe Sequence
acaaccaagggtacacgcaggcatg

SEQ ID NO: 153854 - DNA, 25 bp, Probe Sequence
acaaatctgaagctcctcgcaggag

SEQ ID NO: 153855 - DNA, 25 bp, Probe Sequence
acaaaacagcagctccctgtggagc

SEQ ID NO: 153856 - DNA, 25 bp, Probe Sequence
acaagaagagggtcctgctgggaga

SEQ ID NO: 153857 - DNA, 25 bp, Probe Sequence
acaaaaggattcttgctggtgtaga

SEQ ID NO: 153858 - DNA, 25 bp, Probe Sequence
acaaatacgttttctcactaatgac

SEQ ID NO: 153859 - DNA, 25 bp, Probe Sequence
aaattagagtttgtcacttattcca

SEQ ID NO: 153860 - DNA, 25 bp, Probe Sequence
aaattaccatgcacttactttgtac

SEQ ID NO: 153861 - DNA, 25 bp, Probe Sequence
acaagtttcagcggttcaactttat

SEQ ID NO: 153862 - DNA, 25 bp, Probe Sequence
acacattttcattggtatattattt

SEQ ID NO: 153863 - DNA, 25 bp, Probe Sequence
acacacttgttacctatgatatggt

SEQ ID NO: 153864 - DNA, 25 bp, Probe Sequence
acacatattttctctgtaaggcaca

SEQ ID NO: 153865 - DNA, 25 bp, Probe Sequence
acaacccttcccttaaggacatcat

SEQ ID NO: 153866 - DNA, 25 bp, Probe Sequence
acaacccaggttggtcaaggccatt

SEQ ID NO: 153867 - DNA, 25 bp, Probe Sequence
acaaccggtttctcagaagctgatt

SEQ ID NO: 153868 - DNA, 25 bp, Probe Sequence
acaacactggtgtgacctgagggca

SEQ ID NO: 153869 - DNA, 25 bp, Probe Sequence
acacacagtttgagactccaagcca

SEQ ID NO: 153870 - DNA, 25 bp, Probe Sequence
acacaatacttcagacacacaacaa

SEQ ID NO: 153871 - DNA, 25 bp, Probe Sequence
acaacaactttccaagacatagtac

SEQ ID NO: 153872 - DNA, 25 bp, Probe Sequence
acaaaagtgttgtcttcactggcta

SEQ ID NO: 153873 - DNA, 25 bp, Probe Sequence
acaaaatggtagccacatccggtgt

SEQ ID NO: 153874 - DNA, 25 bp, Probe Sequence
acaagcacaagttgaccccggaata

SEQ ID NO: 153875 - DNA, 25 bp, Probe Sequence
acaaggaggatgaaacgccggaaca

SEQ ID NO: 153876 - DNA, 25 bp, Probe Sequence
aaaggaacttacagccaatgaacaa

SEQ ID NO: 153877 - DNA, 25 bp, Probe Sequence
aaaggaatcttagagcgtggaaaag

SEQ ID NO: 153878 - DNA, 25 bp, Probe Sequence
acaaggccaccttggacgtggatga

SEQ ID NO: 153879 - DNA, 25 bp, Probe Sequence
acaagggcaagttccaggtccatga

SEQ ID NO: 153880 - DNA, 25 bp, Probe Sequence
acaaggccaagcaaaagttccaggt

SEQ ID NO: 153881 - DNA, 25 bp, Probe Sequence
acaaggcctgcagaatttcccagag

SEQ ID NO: 153882 - DNA, 25 bp, Probe Sequence
acaagatgatccgcaatcccaacag

SEQ ID NO: 153883 - DNA, 25 bp, Probe Sequence
acaagtcatccacaatcaaaataca

SEQ ID NO: 153884 - DNA, 25 bp, Probe Sequence
acaagtttgctacgaacaaaacgca

SEQ ID NO: 153885 - DNA, 25 bp, Probe Sequence
acaactttccaagacatagtacgat

SEQ ID NO: 153886 - DNA, 25 bp, Probe Sequence
aaatggtatcaagaactttatcagt

SEQ ID NO: 153887 - DNA, 25 bp, Probe Sequence
aaataaaacccaatcatagtaagtg

SEQ ID NO: 153888 - DNA, 25 bp, Probe Sequence
aatttaaaactcaattcctcaattg

SEQ ID NO: 153889 - DNA, 25 bp, Probe Sequence
aaattagggacaaagcctccacctg

SEQ ID NO: 153890 - DNA, 25 bp, Probe Sequence
acaattaggtacaaatggaatccca

SEQ ID NO: 153891 - DNA, 25 bp, Probe Sequence
acacaggggttggactggactacca

SEQ ID NO: 153892 - DNA, 25 bp, Probe Sequence
acacagggagctagaacccctgctc

SEQ ID NO: 153893 - DNA, 25 bp, Probe Sequence
acacaactggtcataattcctgtct

SEQ ID NO: 153894 - DNA, 25 bp, Probe Sequence
acacaagcggctctatgagtctatt

SEQ ID NO: 153895 - DNA, 25 bp, Probe Sequence
acaagagtggtggatttggctcatt

SEQ ID NO: 153896 - DNA, 25 bp, Probe Sequence
acacagaggtgtcagtcttggcttt

SEQ ID NO: 153897 - DNA, 25 bp, Probe Sequence
acacatgcaggacctaactcgtttt

SEQ ID NO: 153898 - DNA, 25 bp, Probe Sequence
acaatgaatgggcaaccagtgttgg

SEQ ID NO: 153899 - DNA, 25 bp, Probe Sequence
aaataatctgggacgacaggttcat

SEQ ID NO: 153900 - DNA, 25 bp, Probe Sequence
acaaacatcttaatctgcaccttcc

SEQ ID NO: 153901 - DNA, 25 bp, Probe Sequence
acaaaccagtacttgccttttgctg

SEQ ID NO: 153902 - DNA, 25 bp, Probe Sequence
acaaatacagtgtcattgttttgtg

SEQ ID NO: 153903 - DNA, 25 bp, Probe Sequence
aataaagcaggctggtaccggtccg

SEQ ID NO: 153904 - DNA, 25 bp, Probe Sequence
aaataagcaggctggtaccggtccg

SEQ ID NO: 153905 - DNA, 25 bp, Probe Sequence
acaaaagcaggctggtaccggtccg

SEQ ID NO: 153906 - DNA, 25 bp, Probe Sequence
acaaaaaggctacctaccacgtgct

SEQ ID NO: 153907 - DNA, 25 bp, Probe Sequence
acaaaacagacttcactaacacaga

SEQ ID NO: 153908 - DNA, 25 bp, Probe Sequence
acacatacaaacacacaataataaa

SEQ ID NO: 153909 - DNA, 25 bp, Probe Sequence
acacatgcaggaatctccacacaaa

SEQ ID NO: 153910 - DNA, 25 bp, Probe Sequence
acacacaggtctaccagaaagaaca

SEQ ID NO: 153911 - DNA, 25 bp, Probe Sequence
acacagaggtgctgaccatcaagaa

SEQ ID NO: 153912 - DNA, 25 bp, Probe Sequence
acacaggctatctgaacacggtgac

SEQ ID NO: 153913 - DNA, 25 bp, Probe Sequence
acaagacttcagctacctggcttgc

SEQ ID NO: 153914 - DNA, 25 bp, Probe Sequence
acacagatcttcctgtcagcgtttt

SEQ ID NO: 153915 - DNA, 25 bp, Probe Sequence
acacatgcttgtcggaacgctttct

SEQ ID NO: 153916 - DNA, 25 bp, Probe Sequence
acacagctgagtccgacaaccattg

SEQ ID NO: 153917 - DNA, 25 bp, Probe Sequence
acaacatgcattccgagaagctgct

SEQ ID NO: 153918 - DNA, 25 bp, Probe Sequence
acacaagacccaagtagctgctacc

SEQ ID NO: 153919 - DNA, 25 bp, Probe Sequence
acacatctggaaggtgatactgtac

SEQ ID NO: 153920 - DNA, 25 bp, Probe Sequence
acaacaaacatggtatatcctcact

SEQ ID NO: 153921 - DNA, 25 bp, Probe Sequence
acacaccagcactttatacacttct

SEQ ID NO: 153922 - DNA, 25 bp, Probe Sequence
acaaccatccaggtgacatacctcc

SEQ ID NO: 153923 - DNA, 25 bp, Probe Sequence
acacagcacagccacgagatcatac

SEQ ID NO: 153924 - DNA, 25 bp, Probe Sequence
acaacaatgcccaagactaccagtg

SEQ ID NO: 153925 - DNA, 25 bp, Probe Sequence
acaactcaactgggactatctagtc

SEQ ID NO: 153926 - DNA, 25 bp, Probe Sequence
acacttcaaagtcatcttgccagcc

SEQ ID NO: 153927 - DNA, 25 bp, Probe Sequence
acacattgaatgcgctttattgccc

SEQ ID NO: 153928 - DNA, 25 bp, Probe Sequence
acacttgattgagctctttactgcc

SEQ ID NO: 153929 - DNA, 25 bp, Probe Sequence
acacttgttacctatgatatggttc

SEQ ID NO: 153930 - DNA, 25 bp, Probe Sequence
acacttgcttcactagaatatgcca

SEQ ID NO: 153931 - DNA, 25 bp, Probe Sequence
acacaatgcctgcttgcatattgga

SEQ ID NO: 153932 - DNA, 25 bp, Probe Sequence
acacaacagctgcattcatccgggt

SEQ ID NO: 153933 - DNA, 25 bp, Probe Sequence
acacaccacgagaatctcccagagt

SEQ ID NO: 153934 - DNA, 25 bp, Probe Sequence
acaactcatctggattgtccaccaa

SEQ ID NO: 153935 - DNA, 25 bp, Probe Sequence
acaactcaatctaagtcagtccact

SEQ ID NO: 153936 - DNA, 25 bp, Probe Sequence
acaactgctattggttcttccacac

SEQ ID NO: 153937 - DNA, 25 bp, Probe Sequence
acaaatgctttcttctgttcgactc

SEQ ID NO: 153938 - DNA, 25 bp, Probe Sequence
acaaatcttctgttttaccatcaag

SEQ ID NO: 153939 - DNA, 25 bp, Probe Sequence
acaaatttccctaaatcctgagact

SEQ ID NO: 153940 - DNA, 25 bp, Probe Sequence
aaagatttctactggatcacttgtc

SEQ ID NO: 153941 - DNA, 25 bp, Probe Sequence
acaaatcactctttctggttctttc

SEQ ID NO: 153942 - DNA, 25 bp, Probe Sequence
acacactcatccatttgtgcttttg

SEQ ID NO: 153943 - DNA, 25 bp, Probe Sequence
acacatccattcatcatggtgtggt

SEQ ID NO: 153944 - DNA, 25 bp, Probe Sequence
acacatctcaggccctgtgtgaggg

SEQ ID NO: 153945 - DNA, 25 bp, Probe Sequence
acacagctcgggctgtcagagggcc

SEQ ID NO: 153946 - DNA, 25 bp, Probe Sequence
acaagctggggggtaggctgtgccc

SEQ ID NO: 153947 - DNA, 25 bp, Probe Sequence
acaactgtgaggttagaagtggttc

SEQ ID NO: 153948 - DNA, 25 bp, Probe Sequence
acaacttgaccaaaaatttgtcaca

SEQ ID NO: 153949 - DNA, 25 bp, Probe Sequence
acaacttgaccaaaaatttgtcaca

SEQ ID NO: 153950 - DNA, 25 bp, Probe Sequence
acaacttctgccagagaaatttgca

SEQ ID NO: 153951 - DNA, 25 bp, Probe Sequence
acaacttctccttagacactttgga

SEQ ID NO: 153952 - DNA, 25 bp, Probe Sequence
acaacttctagtttaacgcattgct

SEQ ID NO: 153953 - DNA, 25 bp, Probe Sequence
acacatcttctgttaaacccattgg

SEQ ID NO: 153954 - DNA, 25 bp, Probe Sequence
acaacccagttgtataactcaatgg

SEQ ID NO: 153955 - DNA, 25 bp, Probe Sequence
acacagccaagctttttgactccac

SEQ ID NO: 153956 - DNA, 25 bp, Probe Sequence
acacacaaagcacattgggccaact

SEQ ID NO: 153957 - DNA, 25 bp, Probe Sequence
acacatgcaaaataaatggcacaga

SEQ ID NO: 153958 - DNA, 25 bp, Probe Sequence
acaagcccgtaaagcatggccggcc

SEQ ID NO: 153959 - DNA, 25 bp, Probe Sequence
acaagggaacctacatcccagtgcc

SEQ ID NO: 153960 - DNA, 25 bp, Probe Sequence
acaaggatagatgctggcccagggc

SEQ ID NO: 153961 - DNA, 25 bp, Probe Sequence
aatcaggcaattcaggtccggtcct

SEQ ID NO: 153962 - DNA, 25 bp, Probe Sequence
aactgccagttggagaacggttcct

SEQ ID NO: 153963 - DNA, 25 bp, Probe Sequence
acacacacagttgacaacagggttc

SEQ ID NO: 153964 - DNA, 25 bp, Probe Sequence
acacactcaactcaggacgggttgt

SEQ ID NO: 153965 - DNA, 25 bp, Probe Sequence
acacaccacatgcagaagacttggt

SEQ ID NO: 153966 - DNA, 25 bp, Probe Sequence
acacaagatgcggaaatgatctctg

SEQ ID NO: 153967 - DNA, 25 bp, Probe Sequence
acacaacatctgtcacttgtcctga

SEQ ID NO: 153968 - DNA, 25 bp, Probe Sequence
acacatgtacccatatgtccatcac

SEQ ID NO: 153969 - DNA, 25 bp, Probe Sequence
acaaggattacttcgtgcctcagct

SEQ ID NO: 153970 - DNA, 25 bp, Probe Sequence
acaaggtgtcaattctgctctacag

SEQ ID NO: 153971 - DNA, 25 bp, Probe Sequence
acaagtagaagagttcctgcagcga

SEQ ID NO: 153972 - DNA, 25 bp, Probe Sequence
acaaatagaagcttcttgctcctgt

SEQ ID NO: 153973 - DNA, 25 bp, Probe Sequence
acaaattgaagcctcagatgtcttt

SEQ ID NO: 153974 - DNA, 25 bp, Probe Sequence
acaagaggactcttcgagacattga

SEQ ID NO: 153975 - DNA, 25 bp, Probe Sequence
acaaggctcacttgtgctacaagac

SEQ ID NO: 153976 - DNA, 25 bp, Probe Sequence
acaagctatcagggctgctaaggaa

SEQ ID NO: 153977 - DNA, 25 bp, Probe Sequence
acaagactcgtgatgcaaagctgaa

SEQ ID NO: 153978 - DNA, 25 bp, Probe Sequence
acaaagcattgtgctgagacactgc

SEQ ID NO: 153979 - DNA, 25 bp, Probe Sequence
acacagagtttggtatgatatttaa

SEQ ID NO: 153980 - DNA, 25 bp, Probe Sequence
acacagtgtattctagatcatctaa

SEQ ID NO: 153981 - DNA, 25 bp, Probe Sequence
acaaatggtatttatgtcactcaaa

SEQ ID NO: 153982 - DNA, 25 bp, Probe Sequence
acacagactgtattctttatgatca

SEQ ID NO: 153983 - DNA, 25 bp, Probe Sequence
acacagcccagtttgttcatgtcag

SEQ ID NO: 153984 - DNA, 25 bp, Probe Sequence
acacagaactgtatgcatccatttg

SEQ ID NO: 153985 - DNA, 25 bp, Probe Sequence
acaaaacatatttcagacatctgtg

SEQ ID NO: 153986 - DNA, 25 bp, Probe Sequence
acaaatctaagcgacagacatctgg

SEQ ID NO: 153987 - DNA, 25 bp, Probe Sequence
acaagtctatagaaccacttcccca

SEQ ID NO: 153988 - DNA, 25 bp, Probe Sequence
aaagtgttcagcagacgaatccccc

SEQ ID NO: 153989 - DNA, 25 bp, Probe Sequence
aaatggttctaacagcaacccctgc

SEQ ID NO: 153990 - DNA, 25 bp, Probe Sequence
aaaggaactcctcaagaaccacgct

SEQ ID NO: 153991 - DNA, 25 bp, Probe Sequence
aaatggaaatccagaaacccagatg

SEQ ID NO: 153992 - DNA, 25 bp, Probe Sequence
aaaggaggcctaatgaaaacaactg

SEQ ID NO: 153993 - DNA, 25 bp, Probe Sequence
acaagaatccctatggattccacct

SEQ ID NO: 153994 - DNA, 25 bp, Probe Sequence
acaagagatacctgtggtctctgca

SEQ ID NO: 153995 - DNA, 25 bp, Probe Sequence
acacagaggaccagtggatctcagg

SEQ ID NO: 153996 - DNA, 25 bp, Probe Sequence
acaagcacgaccatggatgatggat

SEQ ID NO: 153997 - DNA, 25 bp, Probe Sequence
acaaagccactgactgagatggagt

SEQ ID NO: 153998 - DNA, 25 bp, Probe Sequence
acaaacccgagggagctgctgctgc

SEQ ID NO: 153999 - DNA, 25 bp, Probe Sequence
acaagatgcccttgggagctgtgag

SEQ ID NO: 154000 - DNA, 25 bp, Probe Sequence
aaatactgcctatgccagactcaga

SEQ ID NO: 154001 - DNA, 25 bp, Probe Sequence
acaaacgatatatctcatggctcga

SEQ ID NO: 154002 - DNA, 25 bp, Probe Sequence
acaacacgtggatctgcatggtttg

SEQ ID NO: 154003 - DNA, 25 bp, Probe Sequence
acaaacggagtactgagtcttctgt

SEQ ID NO: 154004 - DNA, 25 bp, Probe Sequence
aaatatcgcggtatgggttctctcg

SEQ ID NO: 154005 - DNA, 25 bp, Probe Sequence
aaattgcactgttttgggagttcct

SEQ ID NO: 154006 - DNA, 25 bp, Probe Sequence
aaagtcatttgcagtgggagttagc

SEQ ID NO: 154007 - DNA, 25 bp, Probe Sequence
aaagacatgttgagtttggaaactt

SEQ ID NO: 154008 - DNA, 25 bp, Probe Sequence
aaaactgtttagctcttcattactt

SEQ ID NO: 154009 - DNA, 25 bp, Probe Sequence
acaaacattttatatctgttccttt

SEQ ID NO: 154010 - DNA, 25 bp, Probe Sequence
acaaatttttcagatagtgccctaa

SEQ ID NO: 154011 - DNA, 25 bp, Probe Sequence
aaccattttctagaaggctaccatg

SEQ ID NO: 154012 - DNA, 25 bp, Probe Sequence
aaagcttttcctgtaggctagtagg

SEQ ID NO: 154013 - DNA, 25 bp, Probe Sequence
acaacttttgaccacttgcgctaat

SEQ ID NO: 154014 - DNA, 25 bp, Probe Sequence
acaacttaggagctaggcctctgct

SEQ ID NO: 154015 - DNA, 25 bp, Probe Sequence
aaactttgtaggcaccttctgcttc

SEQ ID NO: 154016 - DNA, 25 bp, Probe Sequence
acaaccatagaaaggcctctttgtt

SEQ ID NO: 154017 - DNA, 25 bp, Probe Sequence
acaagacggacaagggtatttatgt

SEQ ID NO: 154018 - DNA, 25 bp, Probe Sequence
acaacagatctgcaggggtatgttt

SEQ ID NO: 154019 - DNA, 25 bp, Probe Sequence
acaaagtcatggtgagtgttgagtc

SEQ ID NO: 154020 - DNA, 25 bp, Probe Sequence
acaacaggctgactgggtgttagtg

SEQ ID NO: 154021 - DNA, 25 bp, Probe Sequence
acaaccagcatgctatggtgttctt

SEQ ID NO: 154022 - DNA, 25 bp, Probe Sequence
acaaaagcactttgagtggcactgt

SEQ ID NO: 154023 - DNA, 25 bp, Probe Sequence
acaagaagcgtgagacgccaccatt

SEQ ID NO: 154024 - DNA, 25 bp, Probe Sequence
acaaaggtgtgttgagcccattcat

SEQ ID NO: 154025 - DNA, 25 bp, Probe Sequence
acaaatgggtcttcagccttacccg

SEQ ID NO: 154026 - DNA, 25 bp, Probe Sequence
acaaatggtcattgatgtccttcac

SEQ ID NO: 154027 - DNA, 25 bp, Probe Sequence
acaaatgatatcagattccagttat

SEQ ID NO: 154028 - DNA, 25 bp, Probe Sequence
acaagaaacagactcaccacttttt

SEQ ID NO: 154029 - DNA, 25 bp, Probe Sequence
acacagagccaggaatatagccttt

SEQ ID NO: 154030 - DNA, 25 bp, Probe Sequence
acaatgaggcatgggctaaggattt

SEQ ID NO: 154031 - DNA, 25 bp, Probe Sequence
acaattgtgcattcttagggttttt

SEQ ID NO: 154032 - DNA, 25 bp, Probe Sequence
acaatattgtctgttggggtttcca

SEQ ID NO: 154033 - DNA, 25 bp, Probe Sequence
acaacatgttctgtgtgggcttcct

SEQ ID NO: 154034 - DNA, 25 bp, Probe Sequence
acaacatgttctgtgtgggcttcct

SEQ ID NO: 154035 - DNA, 25 bp, Probe Sequence
acaaaggtgccatgatgggctgttc

SEQ ID NO: 154036 - DNA, 25 bp, Probe Sequence
acaaagaggtcatgctggatgctgc

SEQ ID NO: 154037 - DNA, 25 bp, Probe Sequence
acaacactggctgagcggatgcatc

SEQ ID NO: 154038 - DNA, 25 bp, Probe Sequence
acaaactgagtcaaccagcttccta

SEQ ID NO: 154039 - DNA, 25 bp, Probe Sequence
acaacacagcgaaaccgtatctcta

SEQ ID NO: 154040 - DNA, 25 bp, Probe Sequence
acaactgcacgaacgacatgttctt

SEQ ID NO: 154041 - DNA, 25 bp, Probe Sequence
acaatctcataagcgagttccttgc

SEQ ID NO: 154042 - DNA, 25 bp, Probe Sequence
acaacagctacggtggttacggcgg

SEQ ID NO: 154043 - DNA, 25 bp, Probe Sequence
acaacaccgctgaggagtacgtctg

SEQ ID NO: 154044 - DNA, 25 bp, Probe Sequence
acaaccgcagcgaggagtttctcat

SEQ ID NO: 154045 - DNA, 25 bp, Probe Sequence
acaaccgcaggtcgaattgttcgtg

SEQ ID NO: 154046 - DNA, 25 bp, Probe Sequence
acaagccgcaaaggcagcaggctac

SEQ ID NO: 154047 - DNA, 25 bp, Probe Sequence
acaagcccatccgagctctggatga

SEQ ID NO: 154048 - DNA, 25 bp, Probe Sequence
acaagctcatcatccgacacttagc

SEQ ID NO: 154049 - DNA, 25 bp, Probe Sequence
acaagtcacaaattgaagcattaat

SEQ ID NO: 154050 - DNA, 25 bp, Probe Sequence
acaagctacagttgtccagatcact

SEQ ID NO: 154051 - DNA, 25 bp, Probe Sequence
acaaatacatgagcatccgatctga

SEQ ID NO: 154052 - DNA, 25 bp, Probe Sequence
acaaatacatctgccctcatggaag

SEQ ID NO: 154053 - DNA, 25 bp, Probe Sequence
acacaaaatgcaattccttgtatag

SEQ ID NO: 154054 - DNA, 25 bp, Probe Sequence
acacagaaattagtcttttatgaga

SEQ ID NO: 154055 - DNA, 25 bp, Probe Sequence
acaacacatgtaaatgccttttgat

SEQ ID NO: 154056 - DNA, 25 bp, Probe Sequence
acacacacaaacatgagctattatt

SEQ ID NO: 154057 - DNA, 25 bp, Probe Sequence
acaacacacaccggagcctgttggt

SEQ ID NO: 154058 - DNA, 25 bp, Probe Sequence
aaatactgcccatggcctgtttttc

SEQ ID NO: 154059 - DNA, 25 bp, Probe Sequence
acaatacgggcgtggctttgttcca

SEQ ID NO: 154060 - DNA, 25 bp, Probe Sequence
aaattgggtctatgattttttgcca

SEQ ID NO: 154061 - DNA, 25 bp, Probe Sequence
aaatttgtaccacatggtaattcta

SEQ ID NO: 154062 - DNA, 25 bp, Probe Sequence
aaattatttcaaaggcaaagattgt

SEQ ID NO: 154063 - DNA, 25 bp, Probe Sequence
aaatgatttgattaaacctagacgc

SEQ ID NO: 154064 - DNA, 25 bp, Probe Sequence
aaatatttgtatccccttacactgc

SEQ ID NO: 154065 - DNA, 25 bp, Probe Sequence
aaattttttggcacttgccattcca

SEQ ID NO: 154066 - DNA, 25 bp, Probe Sequence
aaatatttttacacgcagcctgagc

SEQ ID NO: 154067 - DNA, 25 bp, Probe Sequence
aaatattaaatagactggggactct

SEQ ID NO: 154068 - DNA, 25 bp, Probe Sequence
aaattttaattctagctgggtgcgg

SEQ ID NO: 154069 - DNA, 25 bp, Probe Sequence
aaatctcttaaaccagtaggtgctt

SEQ ID NO: 154070 - DNA, 25 bp, Probe Sequence
aaatacctggactacagacgagtgc

SEQ ID NO: 154071 - DNA, 25 bp, Probe Sequence
acaatacttcagacacacaacaagg

SEQ ID NO: 154072 - DNA, 25 bp, Probe Sequence
acaacagcctcaagatcatcagcaa

SEQ ID NO: 154073 - DNA, 25 bp, Probe Sequence
acaacaggttggtcatcaggatggc

SEQ ID NO: 154074 - DNA, 25 bp, Probe Sequence
acaaaaatttgccacgcatgatggc

SEQ ID NO: 154075 - DNA, 25 bp, Probe Sequence
acaaacagatttgtcagctgtcagg

SEQ ID NO: 154076 - DNA, 25 bp, Probe Sequence
acaaactgatttctcacggcgtgtc

SEQ ID NO: 154077 - DNA, 25 bp, Probe Sequence
acaacattgtttctcacacttgttg

SEQ ID NO: 154078 - DNA, 25 bp, Probe Sequence
acaacattatattttcaccccttgg

SEQ ID NO: 154079 - DNA, 25 bp, Probe Sequence
acacacagtatataatggcctcctt

SEQ ID NO: 154080 - DNA, 25 bp, Probe Sequence
acacactttatgtaagactatcgca

SEQ ID NO: 154081 - DNA, 25 bp, Probe Sequence
acacacatttattcagatactcccc

SEQ ID NO: 154082 - DNA, 25 bp, Probe Sequence
acacactatttgtaacagccaactc

SEQ ID NO: 154083 - DNA, 25 bp, Probe Sequence
acaattctacatcaacaggaatctg

SEQ ID NO: 154084 - DNA, 25 bp, Probe Sequence
aacttcgactcctctgagaaggacg

SEQ ID NO: 154085 - DNA, 25 bp, Probe Sequence
aactacccctcagctgaaagtggtg

SEQ ID NO: 154086 - DNA, 25 bp, Probe Sequence
aaaaccttgctagccaaagcggtag

SEQ ID NO: 154087 - DNA, 25 bp, Probe Sequence
aagatacctttctccaaaatggatc

SEQ ID NO: 154088 - DNA, 25 bp, Probe Sequence
acaagagcctattccctataaaggg

SEQ ID NO: 154089 - DNA, 25 bp, Probe Sequence
acaagagcaaaagtccatatcaata

SEQ ID NO: 154090 - DNA, 25 bp, Probe Sequence
acaagtgagaacatacattaacaaa

SEQ ID NO: 154091 - DNA, 25 bp, Probe Sequence
acaaatggaatcccaatctatctaa

SEQ ID NO: 154092 - DNA, 25 bp, Probe Sequence
acaaactgaacgacattctcctcat

SEQ ID NO: 154093 - DNA, 25 bp, Probe Sequence
acaaagctgagagcatcttgccctt

SEQ ID NO: 154094 - DNA, 25 bp, Probe Sequence
acaacaggatcagcagtgtgcccgc

SEQ ID NO: 154095 - DNA, 25 bp, Probe Sequence
acaacaggatcagcagtgtgcccgc

SEQ ID NO: 154096 - DNA, 25 bp, Probe Sequence
acaactggctgcgagtggtgccacg

SEQ ID NO: 154097 - DNA, 25 bp, Probe Sequence
acacacttcactgtggatctgatgg

SEQ ID NO: 154098 - DNA, 25 bp, Probe Sequence
acaacctcaccaacgtggagggcag

SEQ ID NO: 154099 - DNA, 25 bp, Probe Sequence
acaagccctctcacagtggaatgga

SEQ ID NO: 154100 - DNA, 25 bp, Probe Sequence
acaagcacaccctgagcaagaagga

SEQ ID NO: 154101 - DNA, 25 bp, Probe Sequence
acaaaatactctccagaaagccaag

SEQ ID NO: 154102 - DNA, 25 bp, Probe Sequence
acaacaaagccagcaacgacatgta

SEQ ID NO: 154103 - DNA, 25 bp, Probe Sequence
acaaaagcagccgatccaccagctg

SEQ ID NO: 154104 - DNA, 25 bp, Probe Sequence
acaaggacacctacaacaagctgaa

SEQ ID NO: 154105 - DNA, 25 bp, Probe Sequence
acaagagcagtcctaaacaatcaca

SEQ ID NO: 154106 - DNA, 25 bp, Probe Sequence
acaagaaacctataacttcacactc

SEQ ID NO: 154107 - DNA, 25 bp, Probe Sequence
acaagaaccttataactttcacact

SEQ ID NO: 154108 - DNA, 25 bp, Probe Sequence
acaatcaacctgtaagtattttcga

SEQ ID NO: 154109 - DNA, 25 bp, Probe Sequence
acaagctacctgactactttatctt

SEQ ID NO: 154110 - DNA, 25 bp, Probe Sequence
acaactgtccttagactgatgagca

SEQ ID NO: 154111 - DNA, 25 bp, Probe Sequence
acaaattcaagttgactgagtcgac

SEQ ID NO: 154112 - DNA, 25 bp, Probe Sequence
acaaatgtgaagttatgcatgatgt

SEQ ID NO: 154113 - DNA, 25 bp, Probe Sequence
acaaatgtgaagttatgcatgatgt

SEQ ID NO: 154114 - DNA, 25 bp, Probe Sequence
acaaagatgaagtctcaccttccag

SEQ ID NO: 154115 - DNA, 25 bp, Probe Sequence
acaaaatgcaagttactccttacct

SEQ ID NO: 154116 - DNA, 25 bp, Probe Sequence
acaaaatcatgaggctcactcctct

SEQ ID NO: 154117 - DNA, 25 bp, Probe Sequence
acaacttcagctggcacgtcagttg

SEQ ID NO: 154118 - DNA, 25 bp, Probe Sequence
acaagcttcaatagccgattcgatc

SEQ ID NO: 154119 - DNA, 25 bp, Probe Sequence
acaagcccatatagatcgttacaac

SEQ ID NO: 154120 - DNA, 25 bp, Probe Sequence
acaacgccatcaagttccttaacaa

SEQ ID NO: 154121 - DNA, 25 bp, Probe Sequence
acaactgcagaagtgttcctttaga

SEQ ID NO: 154122 - DNA, 25 bp, Probe Sequence
acaagagaaactcctagtttagaca

SEQ ID NO: 154123 - DNA, 25 bp, Probe Sequence
acaatgaaacctcatcagcttcttc

SEQ ID NO: 154124 - DNA, 25 bp, Probe Sequence
acaagaagacctgtgacgtcctcaa

SEQ ID NO: 154125 - DNA, 25 bp, Probe Sequence
aaatatagccggagacgtccttata

SEQ ID NO: 154126 - DNA, 25 bp, Probe Sequence
acaactacctagagactgtttcgtg

SEQ ID NO: 154127 - DNA, 25 bp, Probe Sequence
aaacattcctagtgatcatgtagta

SEQ ID NO: 154128 - DNA, 25 bp, Probe Sequence
aaatctacctctggtgatttagcca

SEQ ID NO: 154129 - DNA, 25 bp, Probe Sequence
aaatatagacctgtgaaaagacgtc

SEQ ID NO: 154130 - DNA, 25 bp, Probe Sequence
aaatcaagacaagcttaaagccctc

SEQ ID NO: 154131 - DNA, 25 bp, Probe Sequence
acaatcaaaacacactactacctct

SEQ ID NO: 154132 - DNA, 25 bp, Probe Sequence
acaacataaaaccctcattcacacg

SEQ ID NO: 154133 - DNA, 25 bp, Probe Sequence
acaaaaacccagcctcattcagata

SEQ ID NO: 154134 - DNA, 25 bp, Probe Sequence
acaaaatgaccatctcacaaaaacg

SEQ ID NO: 154135 - DNA, 25 bp, Probe Sequence
acaaatgtgatctgaccacaaagaa

SEQ ID NO: 154136 - DNA, 25 bp, Probe Sequence
acaagattgtcctagccagtaataa

SEQ ID NO: 154137 - DNA, 25 bp, Probe Sequence
acaacatttctcttccggaataacg

SEQ ID NO: 154138 - DNA, 25 bp, Probe Sequence
acaaatttcttttctatgaataata

SEQ ID NO: 154139 - DNA, 25 bp, Probe Sequence
acacaatatgtgtttcttctgacat

SEQ ID NO: 154140 - DNA, 25 bp, Probe Sequence
acaaattggacttgttcaactgctg

SEQ ID NO: 154141 - DNA, 25 bp, Probe Sequence
aaattcaccaattgcagttacgctg

SEQ ID NO: 154142 - DNA, 25 bp, Probe Sequence
aaagtgcaccgactagttgcttgcc

SEQ ID NO: 154143 - DNA, 25 bp, Probe Sequence
acaagatcccagactggttcttgaa

SEQ ID NO: 154144 - DNA, 25 bp, Probe Sequence
aaatatccagagagcctttgacata

SEQ ID NO: 154145 - DNA, 25 bp, Probe Sequence
aaataccagctagggccagtgacag

SEQ ID NO: 154146 - DNA, 25 bp, Probe Sequence
acaaagctcatgtggatccctgaca

SEQ ID NO: 154147 - DNA, 25 bp, Probe Sequence
acaaacatctatccagaccctagta

SEQ ID NO: 154148 - DNA, 25 bp, Probe Sequence
acaaaactatcctatgccttcaaat

SEQ ID NO: 154149 - DNA, 25 bp, Probe Sequence
acaacacactttcagtcatgtctag

SEQ ID NO: 154150 - DNA, 25 bp, Probe Sequence
acaacagagcttttctgtcatccta

SEQ ID NO: 154151 - DNA, 25 bp, Probe Sequence
acaacaagcttggaggtctgccatc

SEQ ID NO: 154152 - DNA, 25 bp, Probe Sequence
acaacaaggtcatggctgctgtcag

SEQ ID NO: 154153 - DNA, 25 bp, Probe Sequence
acaagctgggtatgtgcttgaagga

SEQ ID NO: 154154 - DNA, 25 bp, Probe Sequence
acaactgtagtctcatttgcagtgg

SEQ ID NO: 154155 - DNA, 25 bp, Probe Sequence
acaacttgaataccttgatccagcg

SEQ ID NO: 154156 - DNA, 25 bp, Probe Sequence
acaatgcttttacctttgatcccag

SEQ ID NO: 154157 - DNA, 25 bp, Probe Sequence
acaatcttgcagtaacactttcccc

SEQ ID NO: 154158 - DNA, 25 bp, Probe Sequence
acaacatgtcccaacattacatccc

SEQ ID NO: 154159 - DNA, 25 bp, Probe Sequence
acaactgtgttcactagcaacctca

SEQ ID NO: 154160 - DNA, 25 bp, Probe Sequence
acaactgtgttcactagcaacctca

SEQ ID NO: 154161 - DNA, 25 bp, Probe Sequence
acaacccattcagcccaatgtagca

SEQ ID NO: 154162 - DNA, 25 bp, Probe Sequence
acaatccggataaacacgcctagat

SEQ ID NO: 154163 - DNA, 25 bp, Probe Sequence
aaacctgtgaatggaccccaagcag

SEQ ID NO: 154164 - DNA, 25 bp, Probe Sequence
aaaacgatttccaccagcaacagaa

SEQ ID NO: 154165 - DNA, 25 bp, Probe Sequence
aaatacagtcttcttgccaaaatga

SEQ ID NO: 154166 - DNA, 25 bp, Probe Sequence
aaatatgtacttctggtcaaactaa

SEQ ID NO: 154167 - DNA, 25 bp, Probe Sequence
acaacttcactttgggccaaacatt

SEQ ID NO: 154168 - DNA, 25 bp, Probe Sequence
acaacatgatgcctcttgtagccat

SEQ ID NO: 154169 - DNA, 25 bp, Probe Sequence
acaaatctgtctacatgaagtttac

SEQ ID NO: 154170 - DNA, 25 bp, Probe Sequence
acaacatctgccacaagtgttccct

SEQ ID NO: 154171 - DNA, 25 bp, Probe Sequence
aaacctacacaaagagttcccatct

SEQ ID NO: 154172 - DNA, 25 bp, Probe Sequence
aaactaacacttgggttctatgctc

SEQ ID NO: 154173 - DNA, 25 bp, Probe Sequence
acaacgtaacttggttttcatgtgt

SEQ ID NO: 154174 - DNA, 25 bp, Probe Sequence
acaacttgtacttgtttcatctggt

SEQ ID NO: 154175 - DNA, 25 bp, Probe Sequence
acaactttggtcatgtatctctgca

SEQ ID NO: 154176 - DNA, 25 bp, Probe Sequence
acaaccctgttgagtatttgctgtt

SEQ ID NO: 154177 - DNA, 25 bp, Probe Sequence
acaaccacttagatcttcttgtatt

SEQ ID NO: 154178 - DNA, 25 bp, Probe Sequence
acaaccctttagtcgctatagaaat

SEQ ID NO: 154179 - DNA, 25 bp, Probe Sequence
aaatcccctggaccttatataacat

SEQ ID NO: 154180 - DNA, 25 bp, Probe Sequence
aaatccccggttattgatgtactag

SEQ ID NO: 154181 - DNA, 25 bp, Probe Sequence
aaatacccagtgctcagttttgaaa

SEQ ID NO: 154182 - DNA, 25 bp, Probe Sequence
aactacctaccgtgtgtattctctt

SEQ ID NO: 154183 - DNA, 25 bp, Probe Sequence
aaattccccccatgtaattattgtg

SEQ ID NO: 154184 - DNA, 25 bp, Probe Sequence
aaataccattccaaattactattgt

SEQ ID NO: 154185 - DNA, 25 bp, Probe Sequence
acaataaagtccccatctgattttt

SEQ ID NO: 154186 - DNA, 25 bp, Probe Sequence
acaataaagtccccatctgattttt

SEQ ID NO: 154187 - DNA, 25 bp, Probe Sequence
acaataaagtccccatctgattttt

SEQ ID NO: 154188 - DNA, 25 bp, Probe Sequence
aaattgtagctctgctttaagttct

SEQ ID NO: 154189 - DNA, 25 bp, Probe Sequence
aaatcgccatcctgttgtgaagttc

SEQ ID NO: 154190 - DNA, 25 bp, Probe Sequence
acaacagccatcgaggacttataat

SEQ ID NO: 154191 - DNA, 25 bp, Probe Sequence
acaacagccatcgaggacttataat

SEQ ID NO: 154192 - DNA, 25 bp, Probe Sequence
acaacagccatcgaggacttataat

SEQ ID NO: 154193 - DNA, 25 bp, Probe Sequence
acaaaccattgcttatgctgttata

SEQ ID NO: 154194 - DNA, 25 bp, Probe Sequence
acaaactattgtaggcatctgtaaa

SEQ ID NO: 154195 - DNA, 25 bp, Probe Sequence
acaacttttttgccgctggagagga

SEQ ID NO: 154196 - DNA, 25 bp, Probe Sequence
aaatttgttttgacggatgattgga

SEQ ID NO: 154197 - DNA, 25 bp, Probe Sequence
acaattctcttcagttagtgtaaac

SEQ ID NO: 154198 - DNA, 25 bp, Probe Sequence
aaattatgcaacacttagaaggaga

SEQ ID NO: 154199 - DNA, 25 bp, Probe Sequence
aaattgagcaatgaccgcatcaggg

SEQ ID NO: 154200 - DNA, 25 bp, Probe Sequence
acaagctgcacattacacctctagc

SEQ ID NO: 154201 - DNA, 25 bp, Probe Sequence
acaaccagacgatagctgctagctt

SEQ ID NO: 154202 - DNA, 25 bp, Probe Sequence
aaatctcagtctacaaccttgctgc

SEQ ID NO: 154203 - DNA, 25 bp, Probe Sequence
acaagaatgtgcccaaccttcacgt

SEQ ID NO: 154204 - DNA, 25 bp, Probe Sequence
acaagaatgtgcccaaccttcatgt

SEQ ID NO: 154205 - DNA, 25 bp, Probe Sequence
acaacatagtgactacacaatgtat

SEQ ID NO: 154206 - DNA, 25 bp, Probe Sequence
acaaaactcatctgacacatgtatt

SEQ ID NO: 154207 - DNA, 25 bp, Probe Sequence
acaactactctctgagcagctgttc

SEQ ID NO: 154208 - DNA, 25 bp, Probe Sequence
acaactatctggctcacatgtttca

SEQ ID NO: 154209 - DNA, 25 bp, Probe Sequence
acaactttcaagacactgtaaccac

SEQ ID NO: 154210 - DNA, 25 bp, Probe Sequence
acaactctgctagacctgcaaaaca

SEQ ID NO: 154211 - DNA, 25 bp, Probe Sequence
acaaccatgcatttagttcagaatt

SEQ ID NO: 154212 - DNA, 25 bp, Probe Sequence
acaaaatgctgattcagttcaaaat

SEQ ID NO: 154213 - DNA, 25 bp, Probe Sequence
acaacagattatacggcatgaatga

SEQ ID NO: 154214 - DNA, 25 bp, Probe Sequence
acaacattgttgtcaacgacatcac

SEQ ID NO: 154215 - DNA, 25 bp, Probe Sequence
acaacatagttgtacagaacataga

SEQ ID NO: 154216 - DNA, 25 bp, Probe Sequence
acaacagcgatgtaaaacgcaaatg

SEQ ID NO: 154217 - DNA, 25 bp, Probe Sequence
acaatctggaggaacaatccaaggt

SEQ ID NO: 154218 - DNA, 25 bp, Probe Sequence
acaatctgggtggccactcaggcaa

SEQ ID NO: 154219 - DNA, 25 bp, Probe Sequence
aaattgggctgggactgggcacagt

SEQ ID NO: 154220 - DNA, 25 bp, Probe Sequence
acaacgcaagttggattggggcagt

SEQ ID NO: 154221 - DNA, 25 bp, Probe Sequence
acaaccttgagaggactggaatggt

SEQ ID NO: 154222 - DNA, 25 bp, Probe Sequence
acaagaactggaagcctaagtgtta

SEQ ID NO: 154223 - DNA, 25 bp, Probe Sequence
acaagaagcaggggcctctgagtgc

SEQ ID NO: 154224 - DNA, 25 bp, Probe Sequence
acaagcaaagagccaaatcatgaat

SEQ ID NO: 154225 - DNA, 25 bp, Probe Sequence
acaacattaggcctcaatctgaact

SEQ ID NO: 154226 - DNA, 25 bp, Probe Sequence
acaaaatcttgcataagctgaacta

SEQ ID NO: 154227 - DNA, 25 bp, Probe Sequence
acaaaatcttgacccagctgaacat

SEQ ID NO: 154228 - DNA, 25 bp, Probe Sequence
acaaaccttcagaccagccaagaaa

SEQ ID NO: 154229 - DNA, 25 bp, Probe Sequence
acaaccctctgactcaacaaagtaa

SEQ ID NO: 154230 - DNA, 25 bp, Probe Sequence
acaacggactgattcaccgcaagac

SEQ ID NO: 154231 - DNA, 25 bp, Probe Sequence
acaatcggaatgagcccacacagcc

SEQ ID NO: 154232 - DNA, 25 bp, Probe Sequence
acaattgaggatttccacaacacgt

SEQ ID NO: 154233 - DNA, 25 bp, Probe Sequence
acaataagcgtttctgcagtcccgt

SEQ ID NO: 154234 - DNA, 25 bp, Probe Sequence
acaagaaggtcatcgcagtgaaggt

SEQ ID NO: 154235 - DNA, 25 bp, Probe Sequence
aaacgaggtactgcaggaagaaagc

SEQ ID NO: 154236 - DNA, 25 bp, Probe Sequence
acaaacaggtgtacaagggagaaga

SEQ ID NO: 154237 - DNA, 25 bp, Probe Sequence
acaaccagtttgacacagagatgct

SEQ ID NO: 154238 - DNA, 25 bp, Probe Sequence
acaaccaatcagaaccataagctac

SEQ ID NO: 154239 - DNA, 25 bp, Probe Sequence
acaacccacaaatctgaagctcctc

SEQ ID NO: 154240 - DNA, 25 bp, Probe Sequence
acaaccctaaagttcaggcatctct

SEQ ID NO: 154241 - DNA, 25 bp, Probe Sequence
acaaccctaaagttcaggcatctct

SEQ ID NO: 154242 - DNA, 25 bp, Probe Sequence
acaagctcttaatattctgtttatt

SEQ ID NO: 154243 - DNA, 25 bp, Probe Sequence
acaagatgcggaaatgatctctgta

SEQ ID NO: 154244 - DNA, 25 bp, Probe Sequence
acaagatgtcaagagcatcactgtt

SEQ ID NO: 154245 - DNA, 25 bp, Probe Sequence
aaagcattgcaagactacttttggc

SEQ ID NO: 154246 - DNA, 25 bp, Probe Sequence
aaagcaggcaaatggagtcgttggg

SEQ ID NO: 154247 - DNA, 25 bp, Probe Sequence
aaagaggcagagcgggccgaacggg

SEQ ID NO: 154248 - DNA, 25 bp, Probe Sequence
aaagaggaaactgcagcccaacggg

SEQ ID NO: 154249 - DNA, 25 bp, Probe Sequence
acaagagtgaaactccgtctcaaaa

SEQ ID NO: 154250 - DNA, 25 bp, Probe Sequence
acaatgtggcaacctcttttgcata

SEQ ID NO: 154251 - DNA, 25 bp, Probe Sequence
aaatctgtcacagccttcttcaagt

SEQ ID NO: 154252 - DNA, 25 bp, Probe Sequence
aaattgtcctgaactttgttaagtg

SEQ ID NO: 154253 - DNA, 25 bp, Probe Sequence
aaattgctccttataagcttatagg

SEQ ID NO: 154254 - DNA, 25 bp, Probe Sequence
acaagttagttttcaagcagttaag

SEQ ID NO: 154255 - DNA, 25 bp, Probe Sequence
acaattcagttcttacttagtataa

SEQ ID NO: 154256 - DNA, 25 bp, Probe Sequence
aaattcacttcagaatctcaagtca

SEQ ID NO: 154257 - DNA, 25 bp, Probe Sequence
aaatccctaggacacacagagccac

SEQ ID NO: 154258 - DNA, 25 bp, Probe Sequence
acaatccactacctgaggaacggcc

SEQ ID NO: 154259 - DNA, 25 bp, Probe Sequence
acaatccttgacctcagtgaaagca

SEQ ID NO: 154260 - DNA, 25 bp, Probe Sequence
acaaccattgcaatacagccaaaga

SEQ ID NO: 154261 - DNA, 25 bp, Probe Sequence
acaaacaatgccacgcttatagaaa

SEQ ID NO: 154262 - DNA, 25 bp, Probe Sequence
acaatacgatggaacgttctatgaa

SEQ ID NO: 154263 - DNA, 25 bp, Probe Sequence
aaaacgtggacatcttcaataagga

SEQ ID NO: 154264 - DNA, 25 bp, Probe Sequence
tataaaattaactcttcaaaagccg

SEQ ID NO: 154265 - DNA, 25 bp, Probe Sequence
aagagaaccaacgcttgccaaatcc

SEQ ID NO: 154266 - DNA, 25 bp, Probe Sequence
acaaaatccagcatccattcctaat

SEQ ID NO: 154267 - DNA, 25 bp, Probe Sequence
acaaggactcagacttacgcctagt

SEQ ID NO: 154268 - DNA, 25 bp, Probe Sequence
acaacatgaacgactgctactccaa

SEQ ID NO: 154269 - DNA, 25 bp, Probe Sequence
acaactgataccagccgctgcaaaa

SEQ ID NO: 154270 - DNA, 25 bp, Probe Sequence
aaattgcaacccccagcataaatgg

SEQ ID NO: 154271 - DNA, 25 bp, Probe Sequence
aaatcttacccacctctaaagatat

SEQ ID NO: 154272 - DNA, 25 bp, Probe Sequence
aaatttggcccccacatgtaaatgt

SEQ ID NO: 154273 - DNA, 25 bp, Probe Sequence
aaattgaggccctgcagttagtttg

SEQ ID NO: 154274 - DNA, 25 bp, Probe Sequence
aaattgaaccactgaattaattttg

SEQ ID NO: 154275 - DNA, 25 bp, Probe Sequence
acaattacctttcatttatactttg

SEQ ID NO: 154276 - DNA, 25 bp, Probe Sequence
acaagagtccttaacatttataatt

SEQ ID NO: 154277 - DNA, 25 bp, Probe Sequence
acaagattccctaacagtgtctaat

SEQ ID NO: 154278 - DNA, 25 bp, Probe Sequence
acaacatctgcacataaagtgtaaa

SEQ ID NO: 154279 - DNA, 25 bp, Probe Sequence
acaatactcataatgtgaagtgtta

SEQ ID NO: 154280 - DNA, 25 bp, Probe Sequence
acaacacgaattgcacagtcatcaa

SEQ ID NO: 154281 - DNA, 25 bp, Probe Sequence
acaacgctgcatatacaggtaccat

SEQ ID NO: 154282 - DNA, 25 bp, Probe Sequence
acaactggcatttatcgactacctg

SEQ ID NO: 154283 - DNA, 25 bp, Probe Sequence
acaacttcttaaatgaggatgcctg

SEQ ID NO: 154284 - DNA, 25 bp, Probe Sequence
acaactctggcttttgagatgactt

SEQ ID NO: 154285 - DNA, 25 bp, Probe Sequence
acaactcgagctttgaggcttcctc

SEQ ID NO: 154286 - DNA, 25 bp, Probe Sequence
acaacataagcttctgactcttacc

SEQ ID NO: 154287 - DNA, 25 bp, Probe Sequence
acaattaagttggatcctttcctgc

SEQ ID NO: 154288 - DNA, 25 bp, Probe Sequence
acaatctttggggttttctcctcat

SEQ ID NO: 154289 - DNA, 25 bp, Probe Sequence
acaagctttctcgagcttttgtccg

SEQ ID NO: 154290 - DNA, 25 bp, Probe Sequence
acaagcttattgaagctattatgct

SEQ ID NO: 154291 - DNA, 25 bp, Probe Sequence
acaagcttgttggggagttcctgga

SEQ ID NO: 154292 - DNA, 25 bp, Probe Sequence
acaatgtagttcagccagtttcgga

SEQ ID NO: 154293 - DNA, 25 bp, Probe Sequence
acaattatttctcctctgtttgcag

SEQ ID NO: 154294 - DNA, 25 bp, Probe Sequence
acaattatttctcctctgtttgcag

SEQ ID NO: 154295 - DNA, 25 bp, Probe Sequence
acaagtcattctacctctttgtgcc

SEQ ID NO: 154296 - DNA, 25 bp, Probe Sequence
acaagtctttgaaatggtgctatgg

SEQ ID NO: 154297 - DNA, 25 bp, Probe Sequence
acaagcctttgagagtgagcatact

SEQ ID NO: 154298 - DNA, 25 bp, Probe Sequence
acaatcctgtattcaaggcgcttct

SEQ ID NO: 154299 - DNA, 25 bp, Probe Sequence
acaagcttgttctcaggctttgata

SEQ ID NO: 154300 - DNA, 25 bp, Probe Sequence
acaacatcttgttggcagcctttga

SEQ ID NO: 154301 - DNA, 25 bp, Probe Sequence
acaacaccagttacactcattgata

SEQ ID NO: 154302 - DNA, 25 bp, Probe Sequence
acaacacctttagatcacatgacaa

SEQ ID NO: 154303 - DNA, 25 bp, Probe Sequence
acaagaacttcgagactcatgcaca

SEQ ID NO: 154304 - DNA, 25 bp, Probe Sequence
acaaaatcccagggaccagcaacaa

SEQ ID NO: 154305 - DNA, 25 bp, Probe Sequence
acaaaatctcctggctttacagaca

SEQ ID NO: 154306 - DNA, 25 bp, Probe Sequence
acaagcaaacttactattagaagaa

SEQ ID NO: 154307 - DNA, 25 bp, Probe Sequence
acaaaattcttagtaatgagtatga

SEQ ID NO: 154308 - DNA, 25 bp, Probe Sequence
aaatattaggtaggtatggttgcag

SEQ ID NO: 154309 - DNA, 25 bp, Probe Sequence
aaattttgatgctggttggtgtgaa

SEQ ID NO: 154310 - DNA, 25 bp, Probe Sequence
aaattgtctagctcctttggatgca

SEQ ID NO: 154311 - DNA, 25 bp, Probe Sequence
aaataatctagaaccagtgtgagcg

SEQ ID NO: 154312 - DNA, 25 bp, Probe Sequence
aaatccactaaaaagttccatgtag

SEQ ID NO: 154313 - DNA, 25 bp, Probe Sequence
aaatccttggtaagggctccgtgca

SEQ ID NO: 154314 - DNA, 25 bp, Probe Sequence
aaatcacttaaatggagatccagtc

SEQ ID NO: 154315 - DNA, 25 bp, Probe Sequence
aataatttaccatcctgaaagtcca

SEQ ID NO: 154316 - DNA, 25 bp, Probe Sequence
aaagactaagactcgcggcaggttc

SEQ ID NO: 154317 - DNA, 25 bp, Probe Sequence
acaagagtacaaaacagcaggcttt

SEQ ID NO: 154318 - DNA, 25 bp, Probe Sequence
acaagctgtactaaacacacgattg

SEQ ID NO: 154319 - DNA, 25 bp, Probe Sequence
acaacttaaacattcatcagctgaa

SEQ ID NO: 154320 - DNA, 25 bp, Probe Sequence
aaatctctagaacaacatcaaaaaa

SEQ ID NO: 154321 - DNA, 25 bp, Probe Sequence
aaattcctgaactggacaaacagca

SEQ ID NO: 154322 - DNA, 25 bp, Probe Sequence
aaatacctcacactgggataaccca

SEQ ID NO: 154323 - DNA, 25 bp, Probe Sequence
aaatccaaacaatgctgtaacttat

SEQ ID NO: 154324 - DNA, 25 bp, Probe Sequence
aaagaaatagactggcaaccttatt

SEQ ID NO: 154325 - DNA, 25 bp, Probe Sequence
acaatggaaaactaagcacctattt

SEQ ID NO: 154326 - DNA, 25 bp, Probe Sequence
acaagaaaaacagtggcagcccatg

SEQ ID NO: 154327 - DNA, 25 bp, Probe Sequence
acaacagaaaaaactgccactgcat

SEQ ID NO: 154328 - DNA, 25 bp, Probe Sequence
acaacaccaaccacgaggctgatga

SEQ ID NO: 154329 - DNA, 25 bp, Probe Sequence
acaacggttactgcgatggcagatc

SEQ ID NO: 154330 - DNA, 25 bp, Probe Sequence
aaaggtttgactggcctccagattc

SEQ ID NO: 154331 - DNA, 25 bp, Probe Sequence
aaagaatattccgggcacgcagtcc

SEQ ID NO: 154332 - DNA, 25 bp, Probe Sequence
aaatacattttggtgtgactaggcc

SEQ ID NO: 154333 - DNA, 25 bp, Probe Sequence
aaatagcatttttaggttagccagt

SEQ ID NO: 154334 - DNA, 25 bp, Probe Sequence
aaataatatgttcagggccctagtt

SEQ ID NO: 154335 - DNA, 25 bp, Probe Sequence
aaattacaatctcactaacgctagt

SEQ ID NO: 154336 - DNA, 25 bp, Probe Sequence
aaattataatctcatttcaatttat

SEQ ID NO: 154337 - DNA, 25 bp, Probe Sequence
aaatatatggacctgatttcagcct

SEQ ID NO: 154338 - DNA, 25 bp, Probe Sequence
acaattactgacctatgctctaaaa

SEQ ID NO: 154339 - DNA, 25 bp, Probe Sequence
acaatgagactgacctttctcagga

SEQ ID NO: 154340 - DNA, 25 bp, Probe Sequence
acaatcaggatgacgctggccaatg

SEQ ID NO: 154341 - DNA, 25 bp, Probe Sequence
acaagcaggatgacgctggctgatg

SEQ ID NO: 154342 - DNA, 25 bp, Probe Sequence
acaagcaggatgacgctggctgatg

SEQ ID NO: 154343 - DNA, 25 bp, Probe Sequence
acaaggaatgtctgctctggggggc

SEQ ID NO: 154344 - DNA, 25 bp, Probe Sequence
acaatggacgtagcgcggcgtgtgg

SEQ ID NO: 154345 - DNA, 25 bp, Probe Sequence
acaaggaaaatgcccctcgtgtgac

SEQ ID NO: 154346 - DNA, 25 bp, Probe Sequence
aaaggaaaagccatttttgcctcag

SEQ ID NO: 154347 - DNA, 25 bp, Probe Sequence
aaattaactaatctttttgcctcag

SEQ ID NO: 154348 - DNA, 25 bp, Probe Sequence
aaagtcaactggtgtttcttgttca

SEQ ID NO: 154349 - DNA, 25 bp, Probe Sequence
aaacaagaatggtggtggctttaca

SEQ ID NO: 154350 - DNA, 25 bp, Probe Sequence
aaatgacaagtatatggggcaatta

SEQ ID NO: 154351 - DNA, 25 bp, Probe Sequence
acaatccaagtgtatcatatggcca

SEQ ID NO: 154352 - DNA, 25 bp, Probe Sequence
acaacaggcaggtactgctgccagg

SEQ ID NO: 154353 - DNA, 25 bp, Probe Sequence
acaatgagctgcgtgtggctcccga

SEQ ID NO: 154354 - DNA, 25 bp, Probe Sequence
acaagactgctctagattggcccat

SEQ ID NO: 154355 - DNA, 25 bp, Probe Sequence
aaacgtctcaggtggcctctgaaac

SEQ ID NO: 154356 - DNA, 25 bp, Probe Sequence
acaatttataagtgtcccatggggc

SEQ ID NO: 154357 - DNA, 25 bp, Probe Sequence
acaatttccaaaactgtccagggcg

SEQ ID NO: 154358 - DNA, 25 bp, Probe Sequence
aaatactctaacagctgtccagtgt

SEQ ID NO: 154359 - DNA, 25 bp, Probe Sequence
aaataggcctagagagtcacatgtc

SEQ ID NO: 154360 - DNA, 25 bp, Probe Sequence
aaattacctatgaaaggccaggcac

SEQ ID NO: 154361 - DNA, 25 bp, Probe Sequence
aaattacctaggctgtactgccaca

SEQ ID NO: 154362 - DNA, 25 bp, Probe Sequence
aaattttgttggatgtactccagga

SEQ ID NO: 154363 - DNA, 25 bp, Probe Sequence
acaatttgtgggccatttaattcag

SEQ ID NO: 154364 - DNA, 25 bp, Probe Sequence
aaatcttagcggaaattatatattt

SEQ ID NO: 154365 - DNA, 25 bp, Probe Sequence
aaataatgtaagaagcttttcactt

SEQ ID NO: 154366 - DNA, 25 bp, Probe Sequence
acaataattaactcttcctctcttc

SEQ ID NO: 154367 - DNA, 25 bp, Probe Sequence
acaacatagtaataccctctctcta

SEQ ID NO: 154368 - DNA, 25 bp, Probe Sequence
aaatataaaatatccaccctctagg

SEQ ID NO: 154369 - DNA, 25 bp, Probe Sequence
aaatacataaaccatgccttccctg

SEQ ID NO: 154370 - DNA, 25 bp, Probe Sequence
aaatagcgtatacgagccttcacgc

SEQ ID NO: 154371 - DNA, 25 bp, Probe Sequence
aaattgcgtcaatagctcagtcctg

SEQ ID NO: 154372 - DNA, 25 bp, Probe Sequence
acaactggccacagagatagtcctg

SEQ ID NO: 154373 - DNA, 25 bp, Probe Sequence
acaacggcagagggagtgagcaggg

SEQ ID NO: 154374 - DNA, 25 bp, Probe Sequence
acaacggcaggaggggacgctggcc

SEQ ID NO: 154375 - DNA, 25 bp, Probe Sequence
acaacgagctgccggggctggatga

SEQ ID NO: 154376 - DNA, 25 bp, Probe Sequence
acaacttgctggctggcctgagagg

SEQ ID NO: 154377 - DNA, 25 bp, Probe Sequence
acaaccggctgcaggacgagagggc

SEQ ID NO: 154378 - DNA, 25 bp, Probe Sequence
acaaccgcagtcggtgaggtgaccc

SEQ ID NO: 154379 - DNA, 25 bp, Probe Sequence
acaaccagcagttcctggcaggcac

SEQ ID NO: 154380 - DNA, 25 bp, Probe Sequence
acaactcacaggactggcgagacag

SEQ ID NO: 154381 - DNA, 25 bp, Probe Sequence
acaaggccaggagttcgagaccatc

SEQ ID NO: 154382 - DNA, 25 bp, Probe Sequence
acaagaaccagactatcgagcgcct

SEQ ID NO: 154383 - DNA, 25 bp, Probe Sequence
acaactgagtcaactgcagcggccc

SEQ ID NO: 154384 - DNA, 25 bp, Probe Sequence
acaatctctaatttgcatgggcacc

SEQ ID NO: 154385 - DNA, 25 bp, Probe Sequence
acaatttacattagcatcccacaaa

SEQ ID NO: 154386 - DNA, 25 bp, Probe Sequence
acaagtttagtggcttcacgcagaa

SEQ ID NO: 154387 - DNA, 25 bp, Probe Sequence
acaagtgtttatggaaacctgattt

SEQ ID NO: 154388 - DNA, 25 bp, Probe Sequence
acaaggccattaagaaattcgtcat

SEQ ID NO: 154389 - DNA, 25 bp, Probe Sequence
acaacccaatcaacaagtgggctaa

SEQ ID NO: 154390 - DNA, 25 bp, Probe Sequence
acaaccaaatctgtcaagggcaaaa

SEQ ID NO: 154391 - DNA, 25 bp, Probe Sequence
aaactgaataccataggggaaatga

SEQ ID NO: 154392 - DNA, 25 bp, Probe Sequence
acaacgtaactcaatcaggaggaag

SEQ ID NO: 154393 - DNA, 25 bp, Probe Sequence
aaagccgaagtcagcgggagcagga

SEQ ID NO: 154394 - DNA, 25 bp, Probe Sequence
aaatcctaaggatccagcggcagtg

SEQ ID NO: 154395 - DNA, 25 bp, Probe Sequence
aaatccttaccattccacaaagttg

SEQ ID NO: 154396 - DNA, 25 bp, Probe Sequence
aaatcattaacctccctgttgttga

SEQ ID NO: 154397 - DNA, 25 bp, Probe Sequence
aaatcagttgacttaaccctttgct

SEQ ID NO: 154398 - DNA, 25 bp, Probe Sequence
acaagattttcttacctctcagttg

SEQ ID NO: 154399 - DNA, 25 bp, Probe Sequence
acaatgcattctgttacctatttga

SEQ ID NO: 154400 - DNA, 25 bp, Probe Sequence
acaatccccctttttgatgatctga

SEQ ID NO: 154401 - DNA, 25 bp, Probe Sequence
acaacttcacctattcatgagtatt

SEQ ID NO: 154402 - DNA, 25 bp, Probe Sequence
acaacttcagcttctttaacacaat

SEQ ID NO: 154403 - DNA, 25 bp, Probe Sequence
acaagcctcctagttctgaaaagtt

SEQ ID NO: 154404 - DNA, 25 bp, Probe Sequence
acaagatccttattttcaaggagtt

SEQ ID NO: 154405 - DNA, 25 bp, Probe Sequence
acaagagacaacttttctagcgttt

SEQ ID NO: 154406 - DNA, 25 bp, Probe Sequence
acaagaacagactttccagctgctg

SEQ ID NO: 154407 - DNA, 25 bp, Probe Sequence
acaagaaataccgtgccctgaggtt

SEQ ID NO: 154408 - DNA, 25 bp, Probe Sequence
acaagaaatacttgtggccgggcgc

SEQ ID NO: 154409 - DNA, 25 bp, Probe Sequence
aaataaagagtaaagccagaggcca

SEQ ID NO: 154410 - DNA, 25 bp, Probe Sequence
aaataaggatgtgttctctgagacc

SEQ ID NO: 154411 - DNA, 25 bp, Probe Sequence
aaataaagtgctgtcggctgggcgt

SEQ ID NO: 154412 - DNA, 25 bp, Probe Sequence
aaataatggtcattcgggctgggcg

SEQ ID NO: 154413 - DNA, 25 bp, Probe Sequence
aaataatggtcattcgggctgggcg

SEQ ID NO: 154414 - DNA, 25 bp, Probe Sequence
aaagactagtgcttcccagtacttg

SEQ ID NO: 154415 - DNA, 25 bp, Probe Sequence
acaagaatggtggtggctttacatt

SEQ ID NO: 154416 - DNA, 25 bp, Probe Sequence
acaagatttgtgctggtgatactca

SEQ ID NO: 154417 - DNA, 25 bp, Probe Sequence
acaagatcttggtcagtgtctactc

SEQ ID NO: 154418 - DNA, 25 bp, Probe Sequence
acaagttgtgggactgcatgctact

SEQ ID NO: 154419 - DNA, 25 bp, Probe Sequence
aaattctggcctgctgtgtacatct

SEQ ID NO: 154420 - DNA, 25 bp, Probe Sequence
aaattctcatgcttcaatgtataat

SEQ ID NO: 154421 - DNA, 25 bp, Probe Sequence
aaattcttagtaatgagtatgagga

SEQ ID NO: 154422 - DNA, 25 bp, Probe Sequence
aaagatcagtagatgagattggggg

SEQ ID NO: 154423 - DNA, 25 bp, Probe Sequence
aaattagtccagccactgtggaggg

SEQ ID NO: 154424 - DNA, 25 bp, Probe Sequence
aaatcattgatggagtgcctgtgga

SEQ ID NO: 154425 - DNA, 25 bp, Probe Sequence
aaatcattgatgctgctttgcgggc

SEQ ID NO: 154426 - DNA, 25 bp, Probe Sequence
aaatcattgatgctgctttgcgggc

SEQ ID NO: 154427 - DNA, 25 bp, Probe Sequence
acaatcatgtcatctgcaaacaggg

SEQ ID NO: 154428 - DNA, 25 bp, Probe Sequence
aaatcagtgctgctgcatgacactc

SEQ ID NO: 154429 - DNA, 25 bp, Probe Sequence
aaatagatgctgctgtctacctcag

SEQ ID NO: 154430 - DNA, 25 bp, Probe Sequence
aaataggctcttaccacttgcaaat

SEQ ID NO: 154431 - DNA, 25 bp, Probe Sequence
aaatatgactttacccttgactttg

SEQ ID NO: 154432 - DNA, 25 bp, Probe Sequence
aaatttctttaccccagattatcag

SEQ ID NO: 154433 - DNA, 25 bp, Probe Sequence
aaattttttccacgatggatacata

SEQ ID NO: 154434 - DNA, 25 bp, Probe Sequence
aaatacctttcttagtgccatacaa

SEQ ID NO: 154435 - DNA, 25 bp, Probe Sequence
acaataactactgtgttcctggcaa

SEQ ID NO: 154436 - DNA, 25 bp, Probe Sequence
aaatcaactcactgttcagtgctga

SEQ ID NO: 154437 - DNA, 25 bp, Probe Sequence
aaatatacggtaatcacatggcaga

SEQ ID NO: 154438 - DNA, 25 bp, Probe Sequence
aaatttctgaggagtgcatcgcaca

SEQ ID NO: 154439 - DNA, 25 bp, Probe Sequence
aaattcataaccaagagatccacat

SEQ ID NO: 154440 - DNA, 25 bp, Probe Sequence
acaataaaacctcatgacctcatca

SEQ ID NO: 154441 - DNA, 25 bp, Probe Sequence
aaaaaaaagccctctctgcaatctc

SEQ ID NO: 154442 - DNA, 25 bp, Probe Sequence
aaaaaaggaccacagtcatactcca

SEQ ID NO: 154443 - DNA, 25 bp, Probe Sequence
aaaaaagctggattaagactattca

SEQ ID NO: 154444 - DNA, 25 bp, Probe Sequence
aactaaagccgttccaggattatca

SEQ ID NO: 154445 - DNA, 25 bp, Probe Sequence
aaatacagatgcattatccagaact

SEQ ID NO: 154446 - DNA, 25 bp, Probe Sequence
acaatcacagataactatgcaaaaa

SEQ ID NO: 154447 - DNA, 25 bp, Probe Sequence
acaatgtcagtacctagccgaatat

SEQ ID NO: 154448 - DNA, 25 bp, Probe Sequence
acaatgggtcccaatatcagaaaca

SEQ ID NO: 154449 - DNA, 25 bp, Probe Sequence
aaataggcatgcttttgaagaaaat

SEQ ID NO: 154450 - DNA, 25 bp, Probe Sequence
acaatattgatctcctaagacaatt

SEQ ID NO: 154451 - DNA, 25 bp, Probe Sequence
acaatattgtcttcctgcgagaata

SEQ ID NO: 154452 - DNA, 25 bp, Probe Sequence
acaagcatttcatcttgggaagtgc

SEQ ID NO: 154453 - DNA, 25 bp, Probe Sequence
acaagttcccctggctgaggattgc

SEQ ID NO: 154454 - DNA, 25 bp, Probe Sequence
acaagattgtcagcggcgaggccga

SEQ ID NO: 154455 - DNA, 25 bp, Probe Sequence
acaagaagtgcagtcggggctacga

SEQ ID NO: 154456 - DNA, 25 bp, Probe Sequence
aaaggagtgtctgcagacctgccga

SEQ ID NO: 154457 - DNA, 25 bp, Probe Sequence
acaatacaggtcagagacaatggct

SEQ ID NO: 154458 - DNA, 25 bp, Probe Sequence
aaataacagatcacaggaatgtatc

SEQ ID NO: 154459 - DNA, 25 bp, Probe Sequence
acaaggacaatcactgcatggaggt

SEQ ID NO: 154460 - DNA, 25 bp, Probe Sequence
acaaggtcgtaaatgcatgctagaa

SEQ ID NO: 154461 - DNA, 25 bp, Probe Sequence
acaatggagccagaggcgtgagaat

SEQ ID NO: 154462 - DNA, 25 bp, Probe Sequence
aaatcaggccaggtgtggtggttca

SEQ ID NO: 154463 - DNA, 25 bp, Probe Sequence
aaatcaacgtggcctttgagttcag

SEQ ID NO: 154464 - DNA, 25 bp, Probe Sequence
aaatcccggatgactttgtggccga

SEQ ID NO: 154465 - DNA, 25 bp, Probe Sequence
aaatcccggatgactttgtggccga

SEQ ID NO: 154466 - DNA, 25 bp, Probe Sequence
aaagtctcagtttcttgcttgggga

SEQ ID NO: 154467 - DNA, 25 bp, Probe Sequence
acaagcctcagtaactgatgcaatc

SEQ ID NO: 154468 - DNA, 25 bp, Probe Sequence
acaagcactgttgactctgcatatt

SEQ ID NO: 154469 - DNA, 25 bp, Probe Sequence
acaagacgtcttgcactcatgagct

SEQ ID NO: 154470 - DNA, 25 bp, Probe Sequence
acaagtggtttggttcagcagttcc

SEQ ID NO: 154471 - DNA, 25 bp, Probe Sequence
acaagcggccttatgtacatttccc

SEQ ID NO: 154472 - DNA, 25 bp, Probe Sequence
acaagcggctctatgagtctattat

SEQ ID NO: 154473 - DNA, 25 bp, Probe Sequence
acaatagcccatatacctatgtatt

SEQ ID NO: 154474 - DNA, 25 bp, Probe Sequence
acaatacactgttaccttttgactg

SEQ ID NO: 154475 - DNA, 25 bp, Probe Sequence
acaattacttgctaactattaactg

SEQ ID NO: 154476 - DNA, 25 bp, Probe Sequence
aaattcccgcaaactataaagagca

SEQ ID NO: 154477 - DNA, 25 bp, Probe Sequence
tgtaaattatggagcacaatgtaag

SEQ ID NO: 154478 - DNA, 25 bp, Probe Sequence
aaattcctacagattttcaatgcag

SEQ ID NO: 154479 - DNA, 25 bp, Probe Sequence
aaattgccccaaatactgacattga

SEQ ID NO: 154480 - DNA, 25 bp, Probe Sequence
aaattcacaccttataagtcattgg

SEQ ID NO: 154481 - DNA, 25 bp, Probe Sequence
aaattgcacaaatatgacggcatat

SEQ ID NO: 154482 - DNA, 25 bp, Probe Sequence
aaatacaaaattagccaggcttggt

SEQ ID NO: 154483 - DNA, 25 bp, Probe Sequence
aaatacaaattagtccgagcatggt

SEQ ID NO: 154484 - DNA, 25 bp, Probe Sequence
aaatacgaatgttaccaggcatggc

SEQ ID NO: 154485 - DNA, 25 bp, Probe Sequence
aaatagggcatggcttgcccctgtg

SEQ ID NO: 154486 - DNA, 25 bp, Probe Sequence
aaatagggcatggcttgcccctgtg

SEQ ID NO: 154487 - DNA, 25 bp, Probe Sequence
aaatagcaggtacttctaccattaa

SEQ ID NO: 154488 - DNA, 25 bp, Probe Sequence
aaatagcagttcatgccttccttcc

SEQ ID NO: 154489 - DNA, 25 bp, Probe Sequence
aaataatctagcatgtcttccttcc

SEQ ID NO: 154490 - DNA, 25 bp, Probe Sequence
aaataattagtgttatagtcttaag

SEQ ID NO: 154491 - DNA, 25 bp, Probe Sequence
aaatacttggggatcattctctgaa

SEQ ID NO: 154492 - DNA, 25 bp, Probe Sequence
aaatacgtgattattctttcagaat

SEQ ID NO: 154493 - DNA, 25 bp, Probe Sequence
aaatagcttcttgtcaccttaaact

SEQ ID NO: 154494 - DNA, 25 bp, Probe Sequence
aaatgacttcttgtccagtgcaaaa

SEQ ID NO: 154495 - DNA, 25 bp, Probe Sequence
aaatagatcgttatgccagtgaaaa

SEQ ID NO: 154496 - DNA, 25 bp, Probe Sequence
aaatagatgtcttttatagtggaaa

SEQ ID NO: 154497 - DNA, 25 bp, Probe Sequence
aaatcgtttcttatcttggcatttt

SEQ ID NO: 154498 - DNA, 25 bp, Probe Sequence
aaattatcttctattctgtttttct

SEQ ID NO: 154499 - DNA, 25 bp, Probe Sequence
acaatgtatttgcagttttctcttt

SEQ ID NO: 154500 - DNA, 25 bp, Probe Sequence
acaattctattgtgctttatatttt

SEQ ID NO: 154501 - DNA, 25 bp, Probe Sequence
acaatcctgttacatagatatttta

SEQ ID NO: 154502 - DNA, 25 bp, Probe Sequence
aaattctttatgattaattgtataa

SEQ ID NO: 154503 - DNA, 25 bp, Probe Sequence
aaattttaatccaaatttgtctatg

SEQ ID NO: 154504 - DNA, 25 bp, Probe Sequence
aaatttatggaaaaaggtggctgtg

SEQ ID NO: 154505 - DNA, 25 bp, Probe Sequence
aaattttgtctttaagcagagagtt

SEQ ID NO: 154506 - DNA, 25 bp, Probe Sequence
aaatcacgtgtgaggagaagatggt

SEQ ID NO: 154507 - DNA, 25 bp, Probe Sequence
aaatcactttgcctgggatatgagc

SEQ ID NO: 154508 - DNA, 25 bp, Probe Sequence
aaatcaattgtccatagataatatg

SEQ ID NO: 154509 - DNA, 25 bp, Probe Sequence
aaatcaagtgttcaaattatctaac

SEQ ID NO: 154510 - DNA, 25 bp, Probe Sequence
aaataagtattttagcatccactat

SEQ ID NO: 154511 - DNA, 25 bp, Probe Sequence
aaatagattataaaaccagcccttg

SEQ ID NO: 154512 - DNA, 25 bp, Probe Sequence
aaatagatttaagactctccaataa

SEQ ID NO: 154513 - DNA, 25 bp, Probe Sequence
aaaggtcttttatattggcctgaga

SEQ ID NO: 154514 - DNA, 25 bp, Probe Sequence
aaaggtcattttttggtattctcag

SEQ ID NO: 154515 - DNA, 25 bp, Probe Sequence
aaaaccataaactctgttactcagg

SEQ ID NO: 154516 - DNA, 25 bp, Probe Sequence
aaatcctaaaagtggttgactctgg

SEQ ID NO: 154517 - DNA, 25 bp, Probe Sequence
aaattttcagaatgtggttgaccat

SEQ ID NO: 154518 - DNA, 25 bp, Probe Sequence
aaatcttccacaaacctttgagcta

SEQ ID NO: 154519 - DNA, 25 bp, Probe Sequence
acaagtttgacaagaacttctcagc

SEQ ID NO: 154520 - DNA, 25 bp, Probe Sequence
acaagtgtaatctcaccataataca

SEQ ID NO: 154521 - DNA, 25 bp, Probe Sequence
acaatgtctcgtgttccaaatccat

SEQ ID NO: 154522 - DNA, 25 bp, Probe Sequence
acaagcccgtatgtgtcaacaccta

SEQ ID NO: 154523 - DNA, 25 bp, Probe Sequence
acaagcaccttatctatcacagacc

SEQ ID NO: 154524 - DNA, 25 bp, Probe Sequence
aactgcacattaagattacctaccg

SEQ ID NO: 154525 - DNA, 25 bp, Probe Sequence
aaatacttaagctttcctatgcata

SEQ ID NO: 154526 - DNA, 25 bp, Probe Sequence
aaataaaaagccctcctcagattgg

SEQ ID NO: 154527 - DNA, 25 bp, Probe Sequence
aagttagttacctcctagatacaat

SEQ ID NO: 154528 - DNA, 25 bp, Probe Sequence
aagttatttacctcacagaacctgt

SEQ ID NO: 154529 - DNA, 25 bp, Probe Sequence
aaattgtttcctataagcattcctt

SEQ ID NO: 154530 - DNA, 25 bp, Probe Sequence
aaatatgaattgtgaccccatccct

SEQ ID NO: 154531 - DNA, 25 bp, Probe Sequence
aaatatatgtgtcaaccaccatttc

SEQ ID NO: 154532 - DNA, 25 bp, Probe Sequence
acaatgagaccaatatagcccaatt

SEQ ID NO: 154533 - DNA, 25 bp, Probe Sequence
acaagcagatccgaagtatccttct

SEQ ID NO: 154534 - DNA, 25 bp, Probe Sequence
acaagagttctgggctatccttttc

SEQ ID NO: 154535 - DNA, 25 bp, Probe Sequence
acaatagtactgtgcctctttcttc

SEQ ID NO: 154536 - DNA, 25 bp, Probe Sequence
aaataatactgattgcctccctagt

SEQ ID NO: 154537 - DNA, 25 bp, Probe Sequence
aaatgccaatgttctggcccgttat

SEQ ID NO: 154538 - DNA, 25 bp, Probe Sequence
aaatgccaatgttctggcccgttat

SEQ ID NO: 154539 - DNA, 25 bp, Probe Sequence
aaaccaatgtccagctactcttttg

SEQ ID NO: 154540 - DNA, 25 bp, Probe Sequence
aaataccttacatcatagtttttgt

SEQ ID NO: 154541 - DNA, 25 bp, Probe Sequence
aaattgccttggtccatgacctttt

SEQ ID NO: 154542 - DNA, 25 bp, Probe Sequence
aaattcacttgggttacctgccttg

SEQ ID NO: 154543 - DNA, 25 bp, Probe Sequence
aaatcatcacggtctttagccatgc

SEQ ID NO: 154544 - DNA, 25 bp, Probe Sequence
aaattcagtggatttcttgctccga

SEQ ID NO: 154545 - DNA, 25 bp, Probe Sequence
aaatatcagtgggctctcttaccag

SEQ ID NO: 154546 - DNA, 25 bp, Probe Sequence
aaatatcctacttctggtagccatt

SEQ ID NO: 154547 - DNA, 25 bp, Probe Sequence
aaattacattcttctgatgtaacat

SEQ ID NO: 154548 - DNA, 25 bp, Probe Sequence
acaattacatttcctgcaccaacaa

SEQ ID NO: 154549 - DNA, 25 bp, Probe Sequence
acaagtgctagcttcactgaccaaa

SEQ ID NO: 154550 - DNA, 25 bp, Probe Sequence
acaatggcattctcagctgcacagc

SEQ ID NO: 154551 - DNA, 25 bp, Probe Sequence
acaaggcattgctgcgcagatttgc

SEQ ID NO: 154552 - DNA, 25 bp, Probe Sequence
acaaggcattcatgggaattgttgt

SEQ ID NO: 154553 - DNA, 25 bp, Probe Sequence
aaatgttatgcatggggtttttaag

SEQ ID NO: 154554 - DNA, 25 bp, Probe Sequence
aaatgggtcacaggatggcctttta

SEQ ID NO: 154555 - DNA, 25 bp, Probe Sequence
aaatcagggaaggtggtcataatat

SEQ ID NO: 154556 - DNA, 25 bp, Probe Sequence
aaatagtcaaatgtggtctcaatcc

SEQ ID NO: 154557 - DNA, 25 bp, Probe Sequence
aaattgaaatatgcgcctgtaatcc

SEQ ID NO: 154558 - DNA, 25 bp, Probe Sequence
aaattcacactttgccacttaactc

SEQ ID NO: 154559 - DNA, 25 bp, Probe Sequence
aaattcagacttttgacattatcct

SEQ ID NO: 154560 - DNA, 25 bp, Probe Sequence
aaatccatactttaaaggtaatcat

SEQ ID NO: 154561 - DNA, 25 bp, Probe Sequence
aaattcatagcccaacaaggtaatt

SEQ ID NO: 154562 - DNA, 25 bp, Probe Sequence
aaatctcaagccaaactcaaagaat

SEQ ID NO: 154563 - DNA, 25 bp, Probe Sequence
aaatcacaacgtaactcaatcagga

SEQ ID NO: 154564 - DNA, 25 bp, Probe Sequence
aaatgccaaagtgatcttacagaac

SEQ ID NO: 154565 - DNA, 25 bp, Probe Sequence
aaatgtcaaaggtgtttcaagccag

SEQ ID NO: 154566 - DNA, 25 bp, Probe Sequence
aaattcacttgttactttcagacca

SEQ ID NO: 154567 - DNA, 25 bp, Probe Sequence
acaattcttctgtcaagcttactac

SEQ ID NO: 154568 - DNA, 25 bp, Probe Sequence
aaattcattctgtaggttgttctgc

SEQ ID NO: 154569 - DNA, 25 bp, Probe Sequence
aaattcttgccatgagaggttgatg

SEQ ID NO: 154570 - DNA, 25 bp, Probe Sequence
acaattcaggaatcaagggctgtgg

SEQ ID NO: 154571 - DNA, 25 bp, Probe Sequence
acaagtcagaactaaaggagctgct

SEQ ID NO: 154572 - DNA, 25 bp, Probe Sequence
acaagtgcaggtggagtcccagctc

SEQ ID NO: 154573 - DNA, 25 bp, Probe Sequence
acaaggcaaacttgtcacgcatgcc

SEQ ID NO: 154574 - DNA, 25 bp, Probe Sequence
acaagagccattattgcaccagcct

SEQ ID NO: 154575 - DNA, 25 bp, Probe Sequence
acaagatccctagatgatacacact

SEQ ID NO: 154576 - DNA, 25 bp, Probe Sequence
acaagtgccgcaaattgtacctttt

SEQ ID NO: 154577 - DNA, 25 bp, Probe Sequence
acaagttctgcgccattaactcatt

SEQ ID NO: 154578 - DNA, 25 bp, Probe Sequence
acaatatttgtgtcataagacatct

SEQ ID NO: 154579 - DNA, 25 bp, Probe Sequence
acaatttgctcttcaaacctcctgt

SEQ ID NO: 154580 - DNA, 25 bp, Probe Sequence
aaattggctctatttgggtcctgac

SEQ ID NO: 154581 - DNA, 25 bp, Probe Sequence
aaatctactcctttgggcgagtgcc

SEQ ID NO: 154582 - DNA, 25 bp, Probe Sequence
aaattagccaggcttgggggcgcac

SEQ ID NO: 154583 - DNA, 25 bp, Probe Sequence
aaattagccgggcatggtggtgcat

SEQ ID NO: 154584 - DNA, 25 bp, Probe Sequence
aaattagccgggcatggtggcacat

SEQ ID NO: 154585 - DNA, 25 bp, Probe Sequence
aaattaggtagtcgtggtggcgtgt

SEQ ID NO: 154586 - DNA, 25 bp, Probe Sequence
aaattagctgggtgtggtggcgggc

SEQ ID NO: 154587 - DNA, 25 bp, Probe Sequence
aaattagctgggcgttgtggcgcgc

SEQ ID NO: 154588 - DNA, 25 bp, Probe Sequence
aaatctgagagaaccgtcctggggc

SEQ ID NO: 154589 - DNA, 25 bp, Probe Sequence
aaacgagtccacatgacctgggtgc

SEQ ID NO: 154590 - DNA, 25 bp, Probe Sequence
aaattggttgccctgaccgaagctt

SEQ ID NO: 154591 - DNA, 25 bp, Probe Sequence
aaattgcgttgataaacacacaggt

SEQ ID NO: 154592 - DNA, 25 bp, Probe Sequence
aaatcgcctgctacaaaaacaaggt

SEQ ID NO: 154593 - DNA, 25 bp, Probe Sequence
aaatcccgatgcaatcttaaagagg

SEQ ID NO: 154594 - DNA, 25 bp, Probe Sequence
acaatgcccacatcatcttaagaag

SEQ ID NO: 154595 - DNA, 25 bp, Probe Sequence
acaaggtacaaaatcttgcataagc

SEQ ID NO: 154596 - DNA, 25 bp, Probe Sequence
acaaggctcagataaggcagctaag

SEQ ID NO: 154597 - DNA, 25 bp, Probe Sequence
acaagggataaagtggagcggatgc

SEQ ID NO: 154598 - DNA, 25 bp, Probe Sequence
acaaggtgcataccatgataggggt

SEQ ID NO: 154599 - DNA, 25 bp, Probe Sequence
aaatgcagcatctgcgatgtgagga

SEQ ID NO: 154600 - DNA, 25 bp, Probe Sequence
acaatccaatgccgagtggctgact

SEQ ID NO: 154601 - DNA, 25 bp, Probe Sequence
acaatccagactcagggcagaactt

SEQ ID NO: 154602 - DNA, 25 bp, Probe Sequence
aaatcccaatccaagtcaaactttg

SEQ ID NO: 154603 - DNA, 25 bp, Probe Sequence
aaatccagcagggcggtcaaatctt

SEQ ID NO: 154604 - DNA, 25 bp, Probe Sequence
aaattcagcgtcgacctcatgagtt

SEQ ID NO: 154605 - DNA, 25 bp, Probe Sequence
acaatgtcacagaccgctctcatat

SEQ ID NO: 154606 - DNA, 25 bp, Probe Sequence
acaatgtcactgacggatcctgcca

SEQ ID NO: 154607 - DNA, 25 bp, Probe Sequence
acaaggatctgacagtgctctgcca

SEQ ID NO: 154608 - DNA, 25 bp, Probe Sequence
acaagtttgccaagtgcctcatgac

SEQ ID NO: 154609 - DNA, 25 bp, Probe Sequence
acaagatataccctgggctgctgcc

SEQ ID NO: 154610 - DNA, 25 bp, Probe Sequence
acaagattgacagcttctgctgtgg

SEQ ID NO: 154611 - DNA, 25 bp, Probe Sequence
acaagattgaattccgtctctgtgt

SEQ ID NO: 154612 - DNA, 25 bp, Probe Sequence
acaagatggttgccgggtcatgtta

SEQ ID NO: 154613 - DNA, 25 bp, Probe Sequence
acaatgtgttctccttattctgttg

SEQ ID NO: 154614 - DNA, 25 bp, Probe Sequence
acaaggatatctgctgtcaatgatt

SEQ ID NO: 154615 - DNA, 25 bp, Probe Sequence
acaatgcaatttactgtacagttag

SEQ ID NO: 154616 - DNA, 25 bp, Probe Sequence
acaatgccactgtccatgaacaggt

SEQ ID NO: 154617 - DNA, 25 bp, Probe Sequence
acaagtgtctgttcatgccaaagta

SEQ ID NO: 154618 - DNA, 25 bp, Probe Sequence
acaagtgtggctttcagctccagta

SEQ ID NO: 154619 - DNA, 25 bp, Probe Sequence
acaatgtgggcttcaatgtcaagaa

SEQ ID NO: 154620 - DNA, 25 bp, Probe Sequence
aaattggtgttctttgcagaagatg

SEQ ID NO: 154621 - DNA, 25 bp, Probe Sequence
acaatttggattttgatcatgacaa

SEQ ID NO: 154622 - DNA, 25 bp, Probe Sequence
acaatcaatgtttttatctgataat

SEQ ID NO: 154623 - DNA, 25 bp, Probe Sequence
acaatgctaagtggtatccgaggtt

SEQ ID NO: 154624 - DNA, 25 bp, Probe Sequence
acaagtcttgtgctcatgactgggt

SEQ ID NO: 154625 - DNA, 25 bp, Probe Sequence
acaagttctgtgccaacacctgtgt

SEQ ID NO: 154626 - DNA, 25 bp, Probe Sequence
acaagattgtgcccaatgtcctctt

SEQ ID NO: 154627 - DNA, 25 bp, Probe Sequence
acaatgcatttcctcagtgatcact

SEQ ID NO: 154628 - DNA, 25 bp, Probe Sequence
acaatgcttatgcttggtacaagct

SEQ ID NO: 154629 - DNA, 25 bp, Probe Sequence
acaatgttcacacaggaaacagcta

SEQ ID NO: 154630 - DNA, 25 bp, Probe Sequence
acaaggtgcccctagaagacacaga

SEQ ID NO: 154631 - DNA, 25 bp, Probe Sequence
aacagggcccctgggattagccagg

SEQ ID NO: 154632 - DNA, 25 bp, Probe Sequence
aaatggcccgccgggcattatgccc

SEQ ID NO: 154633 - DNA, 25 bp, Probe Sequence
aaatgttccccagggtgatatgctg

SEQ ID NO: 154634 - DNA, 25 bp, Probe Sequence
aaatcttccttgtgaggattatggg

SEQ ID NO: 154635 - DNA, 25 bp, Probe Sequence
aaattgtactgttggaggtgtttgt

SEQ ID NO: 154636 - DNA, 25 bp, Probe Sequence
tactagggcctgaggggtgtccgtt

SEQ ID NO: 154637 - DNA, 25 bp, Probe Sequence
acaaggacgctggtgtggctggtcg

SEQ ID NO: 154638 - DNA, 25 bp, Probe Sequence
acaaggttgctgttgtgcagtgtgc

SEQ ID NO: 154639 - DNA, 25 bp, Probe Sequence
acaatgagtgtctctgctggtgctt

SEQ ID NO: 154640 - DNA, 25 bp, Probe Sequence
acaatgacgtgacgctgctgaagct

SEQ ID NO: 154641 - DNA, 25 bp, Probe Sequence
acaatgtctggaaggctgagctgta

SEQ ID NO: 154642 - DNA, 25 bp, Probe Sequence
aacttgggaagacagctgtgaccat

SEQ ID NO: 154643 - DNA, 25 bp, Probe Sequence
aaattgggaaggtgctattgctgct

SEQ ID NO: 154644 - DNA, 25 bp, Probe Sequence
aaatatgccaagaggtgcaatgtgg

SEQ ID NO: 154645 - DNA, 25 bp, Probe Sequence
aaattcacatggccgggtgtcatgg

SEQ ID NO: 154646 - DNA, 25 bp, Probe Sequence
aaatgaagtggctgggttcagtgat

SEQ ID NO: 154647 - DNA, 25 bp, Probe Sequence
aaatgaaatgactggggttctatta

SEQ ID NO: 154648 - DNA, 25 bp, Probe Sequence
aaatcaaatttcctgggtgtgtcct

SEQ ID NO: 154649 - DNA, 25 bp, Probe Sequence
aaatccatatcttttggtctggtgc

SEQ ID NO: 154650 - DNA, 25 bp, Probe Sequence
aaatccttcatcctttgaggggaag

SEQ ID NO: 154651 - DNA, 25 bp, Probe Sequence
aaatctcttcccgatctaggagaac

SEQ ID NO: 154652 - DNA, 25 bp, Probe Sequence
aaatccttaaccctagcgatggctt

SEQ ID NO: 154653 - DNA, 25 bp, Probe Sequence
aaattttgaattggttgctagcact

SEQ ID NO: 154654 - DNA, 25 bp, Probe Sequence
aaattattaatctgttgctgactct

SEQ ID NO: 154655 - DNA, 25 bp, Probe Sequence
aaatattgtaactgttcatctttgt

SEQ ID NO: 154656 - DNA, 25 bp, Probe Sequence
aaatcatttcaggtggttacagttt

SEQ ID NO: 154657 - DNA, 25 bp, Probe Sequence
acaatacctcaggctaattactgtt

SEQ ID NO: 154658 - DNA, 25 bp, Probe Sequence
acaatacctcaggctaattactgtt

SEQ ID NO: 154659 - DNA, 25 bp, Probe Sequence
aaattccacaggagcaaatctttcc

SEQ ID NO: 154660 - DNA, 25 bp, Probe Sequence
aaattcccgatttgtagcactttgt

SEQ ID NO: 154661 - DNA, 25 bp, Probe Sequence
aaatacctggttttccttatcatgc

SEQ ID NO: 154662 - DNA, 25 bp, Probe Sequence
aaataccttgtaacgtcttctctgc

SEQ ID NO: 154663 - DNA, 25 bp, Probe Sequence
aaataccatttatggttctctccgc

SEQ ID NO: 154664 - DNA, 25 bp, Probe Sequence
aaataaatttatgttgtcctgtgcc

SEQ ID NO: 154665 - DNA, 25 bp, Probe Sequence
aaataacattcctctcacttgtacc

SEQ ID NO: 154666 - DNA, 25 bp, Probe Sequence
aaatcaaatgcaaccccatcttgtt

SEQ ID NO: 154667 - DNA, 25 bp, Probe Sequence
aaatatacaatgaccacccttcttc

SEQ ID NO: 154668 - DNA, 25 bp, Probe Sequence
aaatgaaaagtctcccatgtctact

SEQ ID NO: 154669 - DNA, 25 bp, Probe Sequence
aaatcaaaatctctccactttcagc

SEQ ID NO: 154670 - DNA, 25 bp, Probe Sequence
aaatataacacttctactcttcacc

SEQ ID NO: 154671 - DNA, 25 bp, Probe Sequence
aaattatagcagtcctgggcttcat

SEQ ID NO: 154672 - DNA, 25 bp, Probe Sequence
aaatctgactgctgatgtgggcttc

SEQ ID NO: 154673 - DNA, 25 bp, Probe Sequence
aaatcagctcgaaagcatgtactta

SEQ ID NO: 154674 - DNA, 25 bp, Probe Sequence
aaatacatggatctggtcatgttga

SEQ ID NO: 154675 - DNA, 25 bp, Probe Sequence
aaatccatggccaggaatgactatg

SEQ ID NO: 154676 - DNA, 25 bp, Probe Sequence
aaatttggccttaagaactgtgtct

SEQ ID NO: 154677 - DNA, 25 bp, Probe Sequence
aaatttggccttaagaactgtgtct

SEQ ID NO: 154678 - DNA, 25 bp, Probe Sequence
aaatctgggcatttttagaatgtga

SEQ ID NO: 154679 - DNA, 25 bp, Probe Sequence
aaatatagccacctgttaacatgta

SEQ ID NO: 154680 - DNA, 25 bp, Probe Sequence
aaataaccggatatatacatagcat

SEQ ID NO: 154681 - DNA, 25 bp, Probe Sequence
acaataccttatttttatctgacat

SEQ ID NO: 154682 - DNA, 25 bp, Probe Sequence
aaatgccaggttttttatggtcatt

SEQ ID NO: 154683 - DNA, 25 bp, Probe Sequence
acaatgccagcatttggattttttt

SEQ ID NO: 154684 - DNA, 25 bp, Probe Sequence
acaatgccagcatttggatttcttt

SEQ ID NO: 154685 - DNA, 25 bp, Probe Sequence
acaatgccagcatggactttgcaga

SEQ ID NO: 154686 - DNA, 25 bp, Probe Sequence
acaatgctaaagtagctgtgctagg

SEQ ID NO: 154687 - DNA, 25 bp, Probe Sequence
acaatctcacaagatggtctgagac

SEQ ID NO: 154688 - DNA, 25 bp, Probe Sequence
acaatctcacagaagtccactaaag

SEQ ID NO: 154689 - DNA, 25 bp, Probe Sequence
acaatagcatcgagaaaatcaacgg

SEQ ID NO: 154690 - DNA, 25 bp, Probe Sequence
catcaaaactgtgggtataaactgt

SEQ ID NO: 154691 - DNA, 25 bp, Probe Sequence
aaataacttcggacttatactgatc

SEQ ID NO: 154692 - DNA, 25 bp, Probe Sequence
aaataatcttcacttctgttaagaa

SEQ ID NO: 154693 - DNA, 25 bp, Probe Sequence
aaatcatattgccgttctttaaaag

SEQ ID NO: 154694 - DNA, 25 bp, Probe Sequence
aaccaatatgcctaccttccaaagg

SEQ ID NO: 154695 - DNA, 25 bp, Probe Sequence
caactccagaccgaccttcggaagg

SEQ ID NO: 154696 - DNA, 25 bp, Probe Sequence
caactccagaccgaccttcggaagg

SEQ ID NO: 154697 - DNA, 25 bp, Probe Sequence
aaatcaccgcctgcagttcggtaga

SEQ ID NO: 154698 - DNA, 25 bp, Probe Sequence
aaatacccttcttgatattggtgtt

SEQ ID NO: 154699 - DNA, 25 bp, Probe Sequence
aaattcctttctgaagtgtctcttc

SEQ ID NO: 154700 - DNA, 25 bp, Probe Sequence
aaatccttgttcactgaagtctttc

SEQ ID NO: 154701 - DNA, 25 bp, Probe Sequence
aaatcctgtgttaggaaactgctag

SEQ ID NO: 154702 - DNA, 25 bp, Probe Sequence
aaatatttttggtaccactgcttga

SEQ ID NO: 154703 - DNA, 25 bp, Probe Sequence
aaatattttcttcaatacgtgctga

SEQ ID NO: 154704 - DNA, 25 bp, Probe Sequence
aaatatttaccactaagacttctga

SEQ ID NO: 154705 - DNA, 25 bp, Probe Sequence
aaatatttgagccattactgaattc

SEQ ID NO: 154706 - DNA, 25 bp, Probe Sequence
aaattttagccttatcttaatctgt

SEQ ID NO: 154707 - DNA, 25 bp, Probe Sequence
aaatttacacctttgaatgttctat

SEQ ID NO: 154708 - DNA, 25 bp, Probe Sequence
aaattgctaagacagtagatgttaa

SEQ ID NO: 154709 - DNA, 25 bp, Probe Sequence
aaatattatagaccagctactttat

SEQ ID NO: 154710 - DNA, 25 bp, Probe Sequence
acaatattaaaattcaccacttcag

SEQ ID NO: 154711 - DNA, 25 bp, Probe Sequence
aaatcatttcagtatcatctccatc

SEQ ID NO: 154712 - DNA, 25 bp, Probe Sequence
acaatgccttgttgtattcctgcct

SEQ ID NO: 154713 - DNA, 25 bp, Probe Sequence
acaatcgtttcatcattcggcgtgc

SEQ ID NO: 154714 - DNA, 25 bp, Probe Sequence
acaatttttcgctccatgatgcgtt

SEQ ID NO: 154715 - DNA, 25 bp, Probe Sequence
acaatttttgcctatgctgcagcca

SEQ ID NO: 154716 - DNA, 25 bp, Probe Sequence
acaatcttattccgagcattccagt

SEQ ID NO: 154717 - DNA, 25 bp, Probe Sequence
aaatatgtattaggagagaccatct

SEQ ID NO: 154718 - DNA, 25 bp, Probe Sequence
aaatatattctaacagtacgcactg

SEQ ID NO: 154719 - DNA, 25 bp, Probe Sequence
aaatatattgcctagagactcagtt

SEQ ID NO: 154720 - DNA, 25 bp, Probe Sequence
aaatttcatggaaggaccacatttt

SEQ ID NO: 154721 - DNA, 25 bp, Probe Sequence
aaattctcatgatcgatatcccatt

SEQ ID NO: 154722 - DNA, 25 bp, Probe Sequence
acaattccaaaccactgctactgtc

SEQ ID NO: 154723 - DNA, 25 bp, Probe Sequence
aaataccaaacttcagcaactgtta

SEQ ID NO: 154724 - DNA, 25 bp, Probe Sequence
aaaccctaagtctcaactgcataat

SEQ ID NO: 154725 - DNA, 25 bp, Probe Sequence
aaatggccatactgcccaaggtaat

SEQ ID NO: 154726 - DNA, 25 bp, Probe Sequence
aaagtcctttagcccaaagtcagtg

SEQ ID NO: 154727 - DNA, 25 bp, Probe Sequence
aaaagcattttctctctaagtcctg

SEQ ID NO: 154728 - DNA, 25 bp, Probe Sequence
aaatatattttctctgcaaagtcca

SEQ ID NO: 154729 - DNA, 25 bp, Probe Sequence
aaatatgttctcaaaccaatcacac

SEQ ID NO: 154730 - DNA, 25 bp, Probe Sequence
aaattgcttcacaaatttgtaccac

SEQ ID NO: 154731 - DNA, 25 bp, Probe Sequence
aaattgttgccgatgtctatatcca

SEQ ID NO: 154732 - DNA, 25 bp, Probe Sequence
aaattttgcgctcggtgcgatactg

SEQ ID NO: 154733 - DNA, 25 bp, Probe Sequence
aaattttgcgctcggtgcgatactg

SEQ ID NO: 154734 - DNA, 25 bp, Probe Sequence
acaattactgtcaggtgtcatcact

SEQ ID NO: 154735 - DNA, 25 bp, Probe Sequence
acaattatctatttggtctcatttc

SEQ ID NO: 154736 - DNA, 25 bp, Probe Sequence
acaatcttgacatttgaaccatgtt

SEQ ID NO: 154737 - DNA, 25 bp, Probe Sequence
acaatcttcccatgcacaagatgat

SEQ ID NO: 154738 - DNA, 25 bp, Probe Sequence
aaattctcccaggagcaagaggagc

SEQ ID NO: 154739 - DNA, 25 bp, Probe Sequence
acaattcatacctcggaaggcatcg

SEQ ID NO: 154740 - DNA, 25 bp, Probe Sequence
aaatacaaaaactagccaggcatgg

SEQ ID NO: 154741 - DNA, 25 bp, Probe Sequence
aaatctcaaaacagagctcagctgc

SEQ ID NO: 154742 - DNA, 25 bp, Probe Sequence
aaatcataaccaacatggctgcagt

SEQ ID NO: 154743 - DNA, 25 bp, Probe Sequence
aaattcagtctaacatagctgagag

SEQ ID NO: 154744 - DNA, 25 bp, Probe Sequence
aaattacactatacaaccatatgat

SEQ ID NO: 154745 - DNA, 25 bp, Probe Sequence
acaatgtagacttccaaaatggtta

SEQ ID NO: 154746 - DNA, 25 bp, Probe Sequence
acaatgctttctacctgaaatgtgt

SEQ ID NO: 154747 - DNA, 25 bp, Probe Sequence
acaatgcttctttcctgtatattct

SEQ ID NO: 154748 - DNA, 25 bp, Probe Sequence
aaatgcctcctgtccatgtgaaggt

SEQ ID NO: 154749 - DNA, 25 bp, Probe Sequence
aaatcactcgctcaattgaataatt

SEQ ID NO: 154750 - DNA, 25 bp, Probe Sequence
acaatcactcctcggcttaattggt

SEQ ID NO: 154751 - DNA, 25 bp, Probe Sequence
aaatcctattggcatctagtaggta

SEQ ID NO: 154752 - DNA, 25 bp, Probe Sequence
aaatgctgcgttcctaatttagtaa

SEQ ID NO: 154753 - DNA, 25 bp, Probe Sequence
aaatagctgtgtactactaattaat

SEQ ID NO: 154754 - DNA, 25 bp, Probe Sequence
aaatattatgtcatactaacttgtg

SEQ ID NO: 154755 - DNA, 25 bp, Probe Sequence
aaatttcatccattattagcctggg

SEQ ID NO: 154756 - DNA, 25 bp, Probe Sequence
acaatttcacacaggtacagctatg

SEQ ID NO: 154757 - DNA, 25 bp, Probe Sequence
aaatactcaacttggtccctatctt

SEQ ID NO: 154758 - DNA, 25 bp, Probe Sequence
aaatacacaacttttagcacataaa

SEQ ID NO: 154759 - DNA, 25 bp, Probe Sequence
aaattacagtattattcctcaaaat

SEQ ID NO: 154760 - DNA, 25 bp, Probe Sequence
aaattacagtggttgatgccttaca

SEQ ID NO: 154761 - DNA, 25 bp, Probe Sequence
aaattacagtggttgatgccttaca

SEQ ID NO: 154762 - DNA, 25 bp, Probe Sequence
aaattacctgtcttgactgccatgt

SEQ ID NO: 154763 - DNA, 25 bp, Probe Sequence
aaattacctgtcttgactgccatgt

SEQ ID NO: 154764 - DNA, 25 bp, Probe Sequence
aaattacctgtcttgactgccatgt

SEQ ID NO: 154765 - DNA, 25 bp, Probe Sequence
aaattacctgtcttgactgccatgt

SEQ ID NO: 154766 - DNA, 25 bp, Probe Sequence
aaattacctgtcttgactgccatgt

SEQ ID NO: 154767 - DNA, 25 bp, Probe Sequence
aaatttgtctgtgtactcaagcaat

SEQ ID NO: 154768 - DNA, 25 bp, Probe Sequence
aaatctatacgagatactccagcca

SEQ ID NO: 154769 - DNA, 25 bp, Probe Sequence
acaatccatcctttgaagaccacca

SEQ ID NO: 154770 - DNA, 25 bp, Probe Sequence
aaatctgatcctttgaggctctaaa

SEQ ID NO: 154771 - DNA, 25 bp, Probe Sequence
aaatatcacttttggctgcattaaa

SEQ ID NO: 154772 - DNA, 25 bp, Probe Sequence
aaatattgtgttgtgcagcattaaa

SEQ ID NO: 154773 - DNA, 25 bp, Probe Sequence
aaattgctgtccgtcttcattaaat

SEQ ID NO: 154774 - DNA, 25 bp, Probe Sequence
aaattgtgatctctctcttcattct

SEQ ID NO: 154775 - DNA, 25 bp, Probe Sequence
acaattgtctctcacagtgtatgtg

SEQ ID NO: 154776 - DNA, 25 bp, Probe Sequence
acaatcttgtatttgcagtgaatta

SEQ ID NO: 154777 - DNA, 25 bp, Probe Sequence
aaatctcagtgagtgatggtcagaa

SEQ ID NO: 154778 - DNA, 25 bp, Probe Sequence
aaattgttgcagtatggtgcatacc

SEQ ID NO: 154779 - DNA, 25 bp, Probe Sequence
aaattgctttgatcgcgcatgacaa

SEQ ID NO: 154780 - DNA, 25 bp, Probe Sequence
aaattgctattatctgtgctattaa

SEQ ID NO: 154781 - DNA, 25 bp, Probe Sequence
aaatagcatgtctatccttctttga

SEQ ID NO: 154782 - DNA, 25 bp, Probe Sequence
aaatcagcagtatggtctctttcag

SEQ ID NO: 154783 - DNA, 25 bp, Probe Sequence
aaatccctaagggctctgctgtgta

SEQ ID NO: 154784 - DNA, 25 bp, Probe Sequence
aaatacactgaaagactcttggcaa

SEQ ID NO: 154785 - DNA, 25 bp, Probe Sequence
aaatgaattagagacctctggggaa

SEQ ID NO: 154786 - DNA, 25 bp, Probe Sequence
aaatgaaaacacacctctataaaat

SEQ ID NO: 154787 - DNA, 25 bp, Probe Sequence
aaataataacctacctacatagtat

SEQ ID NO: 154788 - DNA, 25 bp, Probe Sequence
aaattctatcaccttactactaata

SEQ ID NO: 154789 - DNA, 25 bp, Probe Sequence
aaattttctggcaatgcctgattaa

SEQ ID NO: 154790 - DNA, 25 bp, Probe Sequence
aaattatctgatgtgatgcctgttg

SEQ ID NO: 154791 - DNA, 25 bp, Probe Sequence
aaattgtgctgttcgtagtttgtat

SEQ ID NO: 154792 - DNA, 25 bp, Probe Sequence
aaatcctgtgaagttattattggtt

SEQ ID NO: 154793 - DNA, 25 bp, Probe Sequence
aaatcctggcagatcttgccttgtc

SEQ ID NO: 154794 - DNA, 25 bp, Probe Sequence
aaatatctgtacttcttcgatcttc

SEQ ID NO: 154795 - DNA, 25 bp, Probe Sequence
aaatttgtgcacactcaagtcctgc

SEQ ID NO: 154796 - DNA, 25 bp, Probe Sequence
aaattttcacgacctactcatctga

SEQ ID NO: 154797 - DNA, 25 bp, Probe Sequence
aaatcagctctcataactaagttaa

SEQ ID NO: 154798 - DNA, 25 bp, Probe Sequence
aaattgttcctgaatacaagcctat

SEQ ID NO: 154799 - DNA, 25 bp, Probe Sequence
aaatttctccagcctcacaatggtc

SEQ ID NO: 154800 - DNA, 25 bp, Probe Sequence
aaatctgtccattcctacctggaca

SEQ ID NO: 154801 - DNA, 25 bp, Probe Sequence
aaatctgtcacaacaggacttggtt

SEQ ID NO: 154802 - DNA, 25 bp, Probe Sequence
aaattgtgtcaatttcacattgttt

SEQ ID NO: 154803 - DNA, 25 bp, Probe Sequence
aaattatgtaaaccacactatcatt

SEQ ID NO: 154804 - DNA, 25 bp, Probe Sequence
aaattgttaaacttgcagcttggta

SEQ ID NO: 154805 - DNA, 25 bp, Probe Sequence
aaatgcttaatatcgtgcctaggtt

SEQ ID NO: 154806 - DNA, 25 bp, Probe Sequence
aaattatgcgtctggtgccttggtt

SEQ ID NO: 154807 - DNA, 25 bp, Probe Sequence
aaatgagggtttctgatctgtactt

SEQ ID NO: 154808 - DNA, 25 bp, Probe Sequence
acaatagggtttacgacctcgatgt

SEQ ID NO: 154809 - DNA, 25 bp, Probe Sequence
aaatgcgggcaaaactgttccgatt

SEQ ID NO: 154810 - DNA, 25 bp, Probe Sequence
aaatgctggaaccagacttctgggg

SEQ ID NO: 154811 - DNA, 25 bp, Probe Sequence
aaatctggaactgcctctgttgtgt

SEQ ID NO: 154812 - DNA, 25 bp, Probe Sequence
acaatttgacacccttcattcattt

SEQ ID NO: 154813 - DNA, 25 bp, Probe Sequence
aaattttagctgctttatcatcttt

SEQ ID NO: 154814 - DNA, 25 bp, Probe Sequence
aaatattatttgcttggctatcttg

SEQ ID NO: 154815 - DNA, 25 bp, Probe Sequence
aaattttcttgatttgagttgattg

SEQ ID NO: 154816 - DNA, 25 bp, Probe Sequence
aaatatttgctttttggatcataaa

SEQ ID NO: 154817 - DNA, 25 bp, Probe Sequence
aaattacagcttttatggatgatta

SEQ ID NO: 154818 - DNA, 25 bp, Probe Sequence
aaattacagcttttatggatgatta

SEQ ID NO: 154819 - DNA, 25 bp, Probe Sequence
aaattccacattgaagttgtgtgca

SEQ ID NO: 154820 - DNA, 25 bp, Probe Sequence
aaatcagcctcacaagagtgttaca

SEQ ID NO: 154821 - DNA, 25 bp, Probe Sequence
aaattctcagatcaaatgtgcctta

SEQ ID NO: 154822 - DNA, 25 bp, Probe Sequence
aaattcagcgatcagcattggaact

SEQ ID NO: 154823 - DNA, 25 bp, Probe Sequence
aaattcaagctgggcctggactttc

SEQ ID NO: 154824 - DNA, 25 bp, Probe Sequence
aaattcaagctgggcctggactttc

SEQ ID NO: 154825 - DNA, 25 bp, Probe Sequence
aaattcaagctgggcctggactttc

SEQ ID NO: 154826 - DNA, 25 bp, Probe Sequence
aaatgccacgtggtcactgtgcact

SEQ ID NO: 154827 - DNA, 25 bp, Probe Sequence
aaatccagccattacctgctgactg

SEQ ID NO: 154828 - DNA, 25 bp, Probe Sequence
aaatccgcagcaaactgccgtgctg

SEQ ID NO: 154829 - DNA, 25 bp, Probe Sequence
aaatcgcagagctgaggcacactgg

SEQ ID NO: 154830 - DNA, 25 bp, Probe Sequence
aaattgtgcacttgaggagctcaga

SEQ ID NO: 154831 - DNA, 25 bp, Probe Sequence
aaatttcactcatggatgttaggaa

SEQ ID NO: 154832 - DNA, 25 bp, Probe Sequence
aaatttgttgcactggtttgaagat

SEQ ID NO: 154833 - DNA, 25 bp, Probe Sequence
aaatttgttctctgtcctgaatgtg

SEQ ID NO: 154834 - DNA, 25 bp, Probe Sequence
aaatttgttctctgtcctgaatgtg

SEQ ID NO: 154835 - DNA, 25 bp, Probe Sequence
aaattgtttccttgtactgatataa

SEQ ID NO: 154836 - DNA, 25 bp, Probe Sequence
aaattgtgcagttctggtacataaa

SEQ ID NO: 154837 - DNA, 25 bp, Probe Sequence
aaattggcgtttgtcatcagaatca

SEQ ID NO: 154838 - DNA, 25 bp, Probe Sequence
aaattgaggtgaccgtcatcagccc

SEQ ID NO: 154839 - DNA, 25 bp, Probe Sequence
aaatcgggtactagttgcagctctc

SEQ ID NO: 154840 - DNA, 25 bp, Probe Sequence
aaattgggctctaggtctctgtccc

SEQ ID NO: 154841 - DNA, 25 bp, Probe Sequence
aaattggactctctgctttgtcctg

SEQ ID NO: 154842 - DNA, 25 bp, Probe Sequence
aaattactcactctctgttattctg

SEQ ID NO: 154843 - DNA, 25 bp, Probe Sequence
aaattactactccatgcttttcttc

SEQ ID NO: 154844 - DNA, 25 bp, Probe Sequence
aaattagcacaccatggttattttt

SEQ ID NO: 154845 - DNA, 25 bp, Probe Sequence
aaattatgccatagcaagattgctt

SEQ ID NO: 154846 - DNA, 25 bp, Probe Sequence
aaattcagctcagggcaatgtgtat

SEQ ID NO: 154847 - DNA, 25 bp, Probe Sequence
aaattatggagcacaatgtaagaca

SEQ ID NO: 154848 - DNA, 25 bp, Probe Sequence
aaatgtagaggggccaataaacatg

SEQ ID NO: 154849 - DNA, 25 bp, Probe Sequence
aaatccactggacctccaaaatctg

SEQ ID NO: 154850 - DNA, 25 bp, Probe Sequence
aaattactgatgttcttgcaaaatc

SEQ ID NO: 154851 - DNA, 25 bp, Probe Sequence
acaattatctgatcttgacaagacc

SEQ ID NO: 154852 - DNA, 25 bp, Probe Sequence
aaattgatgctattaggacaaaaag

SEQ ID NO: 154853 - DNA, 25 bp, Probe Sequence
aaatattgccaaacgacacaggaaa

SEQ ID NO: 154854 - DNA, 25 bp, Probe Sequence
aaattctgctcaaatagtacggaca

SEQ ID NO: 154855 - DNA, 25 bp, Probe Sequence
aaattgcttgcaaaagtggcacaga

SEQ ID NO: 154856 - DNA, 25 bp, Probe Sequence
aaattctatcatcctcagtgggcaa

SEQ ID NO: 154857 - DNA, 25 bp, Probe Sequence
aaatgacattgccctcgtggagatc

SEQ ID NO: 154858 - DNA, 25 bp, Probe Sequence
aaattcatatgtccctcgtgaggct

SEQ ID NO: 154859 - DNA, 25 bp, Probe Sequence
aaattcttgatgatatctgtgtggc

SEQ ID NO: 154860 - DNA, 25 bp, Probe Sequence
aaatcatgttggagatctctattgt

SEQ ID NO: 154861 - DNA, 25 bp, Probe Sequence
aaatactgtggttgcctctatgtgc

SEQ ID NO: 154862 - DNA, 25 bp, Probe Sequence
aaatcaaggacttcctgctcacagc

SEQ ID NO: 154863 - DNA, 25 bp, Probe Sequence
aaatgctgagaagacttctggcagc

SEQ ID NO: 154864 - DNA, 25 bp, Probe Sequence
aaattagaatgatcatcctgcgcaa

SEQ ID NO: 154865 - DNA, 25 bp, Probe Sequence
aaattcaattagtctcctgctgctt

SEQ ID NO: 154866 - DNA, 25 bp, Probe Sequence
aaattactattgtataccagcttaa

SEQ ID NO: 154867 - DNA, 25 bp, Probe Sequence
aaattcctctttaaccagcagttca

SEQ ID NO: 154868 - DNA, 25 bp, Probe Sequence
aaatattcctttagaagatcactct

SEQ ID NO: 154869 - DNA, 25 bp, Probe Sequence
aaatcagtagtttgggcagtgcctt

SEQ ID NO: 154870 - DNA, 25 bp, Probe Sequence
aaatagtggttgtggaacagtagaa

SEQ ID NO: 154871 - DNA, 25 bp, Probe Sequence
aaatatgctgtgtgccggatacaag

SEQ ID NO: 154872 - DNA, 25 bp, Probe Sequence
aaattctggtggccgcattgacagg

SEQ ID NO: 154873 - DNA, 25 bp, Probe Sequence
aaatatgctggtctacatggaaaga

SEQ ID NO: 154874 - DNA, 25 bp, Probe Sequence
aaatggggctttccagggaatgaag

SEQ ID NO: 154875 - DNA, 25 bp, Probe Sequence
aaaggggtgtatgagggcctgaaat

SEQ ID NO: 154876 - DNA, 25 bp, Probe Sequence
aattgtagggtagagagacgctggg

SEQ ID NO: 154877 - DNA, 25 bp, Probe Sequence
aaattgtagggtagagagacgctgg

SEQ ID NO: 154878 - DNA, 25 bp, Probe Sequence
aaatcagctgggcgtggtgttgcat

SEQ ID NO: 154879 - DNA, 25 bp, Probe Sequence
aaatacctggagcagatgcagattt

SEQ ID NO: 154880 - DNA, 25 bp, Probe Sequence
aaattcctgagaagcagtaacttta

SEQ ID NO: 154881 - DNA, 25 bp, Probe Sequence
aaatatcttgaaattgtacaccaaa

SEQ ID NO: 154882 - DNA, 25 bp, Probe Sequence
aaatttatatattctctatcccaaa

SEQ ID NO: 154883 - DNA, 25 bp, Probe Sequence
aaattctccataatgtagattcata

SEQ ID NO: 154884 - DNA, 25 bp, Probe Sequence
aaattcacacatacggagtctgcaa

SEQ ID NO: 154885 - DNA, 25 bp, Probe Sequence
aaattacacaacccagcaacaacaa

SEQ ID NO: 154886 - DNA, 25 bp, Probe Sequence
aaattacacaacccagcaacaacaa

SEQ ID NO: 154887 - DNA, 25 bp, Probe Sequence
aaagttccaagtctgccaaaagatg

SEQ ID NO: 154888 - DNA, 25 bp, Probe Sequence
aaagttacctgtttgccatagaaat

SEQ ID NO: 154889 - DNA, 25 bp, Probe Sequence
aaagtgtactttttcaacaagcacg

SEQ ID NO: 154890 - DNA, 25 bp, Probe Sequence
aaattctagccatttgtcacacaac

SEQ ID NO: 154891 - DNA, 25 bp, Probe Sequence
aaatttgcagcctttaccactacaa

SEQ ID NO: 154892 - DNA, 25 bp, Probe Sequence
aaagtttgccttcacagcatttcag

SEQ ID NO: 154893 - DNA, 25 bp, Probe Sequence
aaattattggcttaaatctgtgtaa

SEQ ID NO: 154894 - DNA, 25 bp, Probe Sequence
aaatttttcacttagtctgagaaat

SEQ ID NO: 154895 - DNA, 25 bp, Probe Sequence
aaatcacttgatgtaacctggaaac

SEQ ID NO: 154896 - DNA, 25 bp, Probe Sequence
aaatacttgatggcagcttctgtgg

SEQ ID NO: 154897 - DNA, 25 bp, Probe Sequence
aaatatctctgacggcttcgatggc

SEQ ID NO: 154898 - DNA, 25 bp, Probe Sequence
aaatttgctgaatgcttgctacgag

SEQ ID NO: 154899 - DNA, 25 bp, Probe Sequence
aaatttggatattcttgctaaacca

SEQ ID NO: 154900 - DNA, 25 bp, Probe Sequence
aaatttggtgagtactcctgacaac

SEQ ID NO: 154901 - DNA, 25 bp, Probe Sequence
aaattcttaggatcacctgaccttt

SEQ ID NO: 154902 - DNA, 25 bp, Probe Sequence
aaattttagcgtgctcactgacctg

SEQ ID NO: 154903 - DNA, 25 bp, Probe Sequence
aaataattatgccccatgaccaagt

SEQ ID NO: 154904 - DNA, 25 bp, Probe Sequence
aaataagactatccacaacccagct

SEQ ID NO: 154905 - DNA, 25 bp, Probe Sequence
aaataaccaatctacaatctccctt

SEQ ID NO: 154906 - DNA, 25 bp, Probe Sequence
aagaagctacaatgtaaccccgcct

SEQ ID NO: 154907 - DNA, 25 bp, Probe Sequence
aaatatgttcaatctaaacacgaaa

SEQ ID NO: 154908 - DNA, 25 bp, Probe Sequence
aaatgataaccatacacaacactaa

SEQ ID NO: 154909 - DNA, 25 bp, Probe Sequence
aaatatagaccagactttggccagt

SEQ ID NO: 154910 - DNA, 25 bp, Probe Sequence
aaagtagaagaccctgattgcccgt

SEQ ID NO: 154911 - DNA, 25 bp, Probe Sequence
aaatctagggacctttatgtcctat

SEQ ID NO: 154912 - DNA, 25 bp, Probe Sequence
aaatctggggaattaaatgttcata

SEQ ID NO: 154913 - DNA, 25 bp, Probe Sequence
aaatttgcgaacttaggtgaaatat

SEQ ID NO: 154914 - DNA, 25 bp, Probe Sequence
aaatttgtatgagctcggtatatat

SEQ ID NO: 154915 - DNA, 25 bp, Probe Sequence
aaatttggagcatttccgattactt

SEQ ID NO: 154916 - DNA, 25 bp, Probe Sequence
aaatttggagtgtcagcagctatag

SEQ ID NO: 154917 - DNA, 25 bp, Probe Sequence
aaataggagatttagcagctttgtc

SEQ ID NO: 154918 - DNA, 25 bp, Probe Sequence
aaatcagaaaccttcctatatgtct

SEQ ID NO: 154919 - DNA, 25 bp, Probe Sequence
aaatcatgaggctcactcctctttc

SEQ ID NO: 154920 - DNA, 25 bp, Probe Sequence
aaactgatggctcacagactgcacc

SEQ ID NO: 154921 - DNA, 25 bp, Probe Sequence
aaatctgtctccccagaagacacag

SEQ ID NO: 154922 - DNA, 25 bp, Probe Sequence
aaattgcctgccccggcagagatta

SEQ ID NO: 154923 - DNA, 25 bp, Probe Sequence
aaatagccagccctggtggcatgct

SEQ ID NO: 154924 - DNA, 25 bp, Probe Sequence
aaatatgaagccatgtctcactgtt

SEQ ID NO: 154925 - DNA, 25 bp, Probe Sequence
aaatctgaagggatctcgtgtttgc

SEQ ID NO: 154926 - DNA, 25 bp, Probe Sequence
aaatctgaagaggcttctcctgttt

SEQ ID NO: 154927 - DNA, 25 bp, Probe Sequence
aaatctgctggaatggttgttgttt

SEQ ID NO: 154928 - DNA, 25 bp, Probe Sequence
aaatctctagcctctttgtgttttt

SEQ ID NO: 154929 - DNA, 25 bp, Probe Sequence
aaatgttgagcctttttggcctggc

SEQ ID NO: 154930 - DNA, 25 bp, Probe Sequence
aaagatacagatcttttcccctggc

SEQ ID NO: 154931 - DNA, 25 bp, Probe Sequence
aaattacaacattgtttctcacact

SEQ ID NO: 154932 - DNA, 25 bp, Probe Sequence
aaattctcagtcttgtctattcacc

SEQ ID NO: 154933 - DNA, 25 bp, Probe Sequence
aaattctgccattttcatttcactt

SEQ ID NO: 154934 - DNA, 25 bp, Probe Sequence
aaattcttatttcactcatccttta

SEQ ID NO: 154935 - DNA, 25 bp, Probe Sequence
aaattcattatgatcaacagacctc

SEQ ID NO: 154936 - DNA, 25 bp, Probe Sequence
aaattctgctatttgacacagcttt

SEQ ID NO: 154937 - DNA, 25 bp, Probe Sequence
aaattctgatcattttccaggctgt

SEQ ID NO: 154938 - DNA, 25 bp, Probe Sequence
aaatttgaacaggatccagcacgta

SEQ ID NO: 154939 - DNA, 25 bp, Probe Sequence
aaatatatgaaagtcccagatggtt

SEQ ID NO: 154940 - DNA, 25 bp, Probe Sequence
aaatcacactagctcaccagcagtg

SEQ ID NO: 154941 - DNA, 25 bp, Probe Sequence
aaatagactagaccaagcagaagaa

SEQ ID NO: 154942 - DNA, 25 bp, Probe Sequence
aaatgagcctcaactaaaacctcac

SEQ ID NO: 154943 - DNA, 25 bp, Probe Sequence
aaatagccacagtccttaagccaca

SEQ ID NO: 154944 - DNA, 25 bp, Probe Sequence
aaatgatccgcgtcccgaatgctga

SEQ ID NO: 154945 - DNA, 25 bp, Probe Sequence
aaatcatttctatccagagatctga

SEQ ID NO: 154946 - DNA, 25 bp, Probe Sequence
aaatctcgtctcgaccaagagctga

SEQ ID NO: 154947 - DNA, 25 bp, Probe Sequence
aaattcttgtgcgcacacttgatga

SEQ ID NO: 154948 - DNA, 25 bp, Probe Sequence
aaattcttgtgcgcacacttgatga

SEQ ID NO: 154949 - DNA, 25 bp, Probe Sequence
aaatattattgcttgctacttggac

SEQ ID NO: 154950 - DNA, 25 bp, Probe Sequence
aaattatcatcagctccagtcggag

SEQ ID NO: 154951 - DNA, 25 bp, Probe Sequence
aaattagtcgccttcgtcgagagtg

SEQ ID NO: 154952 - DNA, 25 bp, Probe Sequence
aaagtagttgattacgagggagtca

SEQ ID NO: 154953 - DNA, 25 bp, Probe Sequence
aaatttcattcaagactgggaagtc

SEQ ID NO: 154954 - DNA, 25 bp, Probe Sequence
aaataatctgtaggttgggcacagt

SEQ ID NO: 154955 - DNA, 25 bp, Probe Sequence
aaatagcgtatctggtgcaggccgt

SEQ ID NO: 154956 - DNA, 25 bp, Probe Sequence
aaatgggctgtctagtatgcgggag

SEQ ID NO: 154957 - DNA, 25 bp, Probe Sequence
aaagggacaaagatgctgctaaggc

SEQ ID NO: 154958 - DNA, 25 bp, Probe Sequence
aaagagtgccagtcagcagtcatgc

SEQ ID NO: 154959 - DNA, 25 bp, Probe Sequence
aaatacgcacagtccaggatgcact

SEQ ID NO: 154960 - DNA, 25 bp, Probe Sequence
aaatccctgcaacgtggatgcacct

SEQ ID NO: 154961 - DNA, 25 bp, Probe Sequence
aaatcctgacaactggagagaacta

SEQ ID NO: 154962 - DNA, 25 bp, Probe Sequence
aaattaactcactgtgacaagctca

SEQ ID NO: 154963 - DNA, 25 bp, Probe Sequence
aaataaaccaattggcactctgtat

SEQ ID NO: 154964 - DNA, 25 bp, Probe Sequence
aaataaattcacagggcttgcaaac

SEQ ID NO: 154965 - DNA, 25 bp, Probe Sequence
aaatcaaaaccaacagcgatctcaa

SEQ ID NO: 154966 - DNA, 25 bp, Probe Sequence
aaatccaaaccagtacaactatatt

SEQ ID NO: 154967 - DNA, 25 bp, Probe Sequence
aaatccaaaccagataagcagctta

SEQ ID NO: 154968 - DNA, 25 bp, Probe Sequence
aaatttataccattctcaagagtta

SEQ ID NO: 154969 - DNA, 25 bp, Probe Sequence
aaatttcatacgtagtgcaaagctt

SEQ ID NO: 154970 - DNA, 25 bp, Probe Sequence
aaatttgcatataaatgtccacagc

SEQ ID NO: 154971 - DNA, 25 bp, Probe Sequence
aaataatcatctagtatgtgccaag

SEQ ID NO: 154972 - DNA, 25 bp, Probe Sequence
aaataatatctcgtattctcatact

SEQ ID NO: 154973 - DNA, 25 bp, Probe Sequence
aaatatactgctactaataataata

SEQ ID NO: 154974 - DNA, 25 bp, Probe Sequence
aaatttcctatattataataatcat

SEQ ID NO: 154975 - DNA, 25 bp, Probe Sequence
aaatattcccgattttagcagctct

SEQ ID NO: 154976 - DNA, 25 bp, Probe Sequence
aaagtccacacgttattatggccga

SEQ ID NO: 154977 - DNA, 25 bp, Probe Sequence
aaagaacagcctttttaggccacag

SEQ ID NO: 154978 - DNA, 25 bp, Probe Sequence
aaaaatggccctcttcaagcctggt

SEQ ID NO: 154979 - DNA, 25 bp, Probe Sequence
aaatagtgagccctgttaaacaaga

SEQ ID NO: 154980 - DNA, 25 bp, Probe Sequence
aaatgggagccctccagacataagg

SEQ ID NO: 154981 - DNA, 25 bp, Probe Sequence
aaatgggagccctccagacataagg

SEQ ID NO: 154982 - DNA, 25 bp, Probe Sequence
aaatggtagccacatccggtgtaaa

SEQ ID NO: 154983 - DNA, 25 bp, Probe Sequence
aaatagatgacctttttgcagtgta

SEQ ID NO: 154984 - DNA, 25 bp, Probe Sequence
aaatagagagcccacgttgtgtatc

SEQ ID NO: 154985 - DNA, 25 bp, Probe Sequence
aaatcatggggcacagatatgttcc

SEQ ID NO: 154986 - DNA, 25 bp, Probe Sequence
aaatctgtgagggtctgacttgctc

SEQ ID NO: 154987 - DNA, 25 bp, Probe Sequence
aaatcaggtgatggtctgtctcttc

SEQ ID NO: 154988 - DNA, 25 bp, Probe Sequence
aaatatggcctcaatatgtgccgcc

SEQ ID NO: 154989 - DNA, 25 bp, Probe Sequence
aaatcaagcctgtcacattgccgac

SEQ ID NO: 154990 - DNA, 25 bp, Probe Sequence
aaatccagaatctcctgcctgatga

SEQ ID NO: 154991 - DNA, 25 bp, Probe Sequence
aaatcgaccttttcatccatgatga

SEQ ID NO: 154992 - DNA, 25 bp, Probe Sequence
aaatcacagctaaatacccatcaga

SEQ ID NO: 154993 - DNA, 25 bp, Probe Sequence
aaatgcaaccagcaggcctgcaaga

SEQ ID NO: 154994 - DNA, 25 bp, Probe Sequence
aaatgcaacacggatgataccatcg

SEQ ID NO: 154995 - DNA, 25 bp, Probe Sequence
aaagcaaacggtttctcctgtggat

SEQ ID NO: 154996 - DNA, 25 bp, Probe Sequence
aaagaacaagctcaggcgcggggac

SEQ ID NO: 154997 - DNA, 25 bp, Probe Sequence
aaagcagaaaatgagacccgagtac

SEQ ID NO: 154998 - DNA, 25 bp, Probe Sequence
aaagcgaaactgagaatccgggcaa

SEQ ID NO: 154999 - DNA, 25 bp, Probe Sequence
aaaagtccacttgtaccagtgacaa

SEQ ID NO: 155000 - DNA, 25 bp, Probe Sequence
aaatagtccaccagtgattctgtaa

SEQ ID NO: 155001 - DNA, 25 bp, Probe Sequence
aaatttccagaaatttttgctcaga

SEQ ID NO: 155002 - DNA, 25 bp, Probe Sequence
aaattatgccgttacttttcatatt

SEQ ID NO: 155003 - DNA, 25 bp, Probe Sequence
aaattattctgtagacactttcaat

SEQ ID NO: 155004 - DNA, 25 bp, Probe Sequence
aaattatcttgctgaatccttctaa

SEQ ID NO: 155005 - DNA, 25 bp, Probe Sequence
aaatattgcttgactcaaccctcta

SEQ ID NO: 155006 - DNA, 25 bp, Probe Sequence
aaatttcagtgaacacacccctata

SEQ ID NO: 155007 - DNA, 25 bp, Probe Sequence
aaatttagttgttctccccaatgtg

SEQ ID NO: 155008 - DNA, 25 bp, Probe Sequence
aaatagtagtttcatgccctcacat

SEQ ID NO: 155009 - DNA, 25 bp, Probe Sequence
aaatttaatcttcatccctctggaa

SEQ ID NO: 155010 - DNA, 25 bp, Probe Sequence
aaatatgggatctttacctcttgta

SEQ ID NO: 155011 - DNA, 25 bp, Probe Sequence
aaatagggtgcagtgtacactgctc

SEQ ID NO: 155012 - DNA, 25 bp, Probe Sequence
aaatcagggtgccatggaactcatc

SEQ ID NO: 155013 - DNA, 25 bp, Probe Sequence
aaatctgagagtcagagagacctcc

SEQ ID NO: 155014 - DNA, 25 bp, Probe Sequence
aaatctggaggttacggccaagcca

SEQ ID NO: 155015 - DNA, 25 bp, Probe Sequence
aaatctaagtttggtgcgaacgcca

SEQ ID NO: 155016 - DNA, 25 bp, Probe Sequence
aaatctaagccttggccagggccga

SEQ ID NO: 155017 - DNA, 25 bp, Probe Sequence
aaatctaagctgcacatgggggccc

SEQ ID NO: 155018 - DNA, 25 bp, Probe Sequence
aaattaggctggtatggtgacacac

SEQ ID NO: 155019 - DNA, 25 bp, Probe Sequence
aaattagctgggcatggtggcgcac

SEQ ID NO: 155020 - DNA, 25 bp, Probe Sequence
aaattagccgagcatggtggcgcat

SEQ ID NO: 155021 - DNA, 25 bp, Probe Sequence
aaattagccgagcatggtggcgcat

SEQ ID NO: 155022 - DNA, 25 bp, Probe Sequence
aaattagccaggcatggtgccgcat

SEQ ID NO: 155023 - DNA, 25 bp, Probe Sequence
aaatttgccacgcatgatggcacac

SEQ ID NO: 155024 - DNA, 25 bp, Probe Sequence
aaatcttgctcatgcttttcaacca

SEQ ID NO: 155025 - DNA, 25 bp, Probe Sequence
aaatatgatctatcttttagttaat

SEQ ID NO: 155026 - DNA, 25 bp, Probe Sequence
aaatagattgtctgaattagtcaca

SEQ ID NO: 155027 - DNA, 25 bp, Probe Sequence
aaatcataatttcaactagatcaag

SEQ ID NO: 155028 - DNA, 25 bp, Probe Sequence
aaattagatatccatacatcttaaa

SEQ ID NO: 155029 - DNA, 25 bp, Probe Sequence
aaatcttgcataagctgaactaaaa

SEQ ID NO: 155030 - DNA, 25 bp, Probe Sequence
aaatctggattactacagccaaata

SEQ ID NO: 155031 - DNA, 25 bp, Probe Sequence
aaatctggcttgttacaggcgagaa

SEQ ID NO: 155032 - DNA, 25 bp, Probe Sequence
aaatcgtgcgtgacattaaggagaa

SEQ ID NO: 155033 - DNA, 25 bp, Probe Sequence
aaatctgtgattgcttacaggagga

SEQ ID NO: 155034 - DNA, 25 bp, Probe Sequence
aaatttgatcgccttaactactgta

SEQ ID NO: 155035 - DNA, 25 bp, Probe Sequence
aaatatgaacaccttacaccctgtg

SEQ ID NO: 155036 - DNA, 25 bp, Probe Sequence
aaatcatgttccattagcccaggtg

SEQ ID NO: 155037 - DNA, 25 bp, Probe Sequence
aaataattccttggactgcctggtg

SEQ ID NO: 155038 - DNA, 25 bp, Probe Sequence
aaatacttcctaggtggtgctgggt

SEQ ID NO: 155039 - DNA, 25 bp, Probe Sequence
aaaagtacctatgtgagggctgggc

SEQ ID NO: 155040 - DNA, 25 bp, Probe Sequence
aaaaaagccaatatcaggactgagg

SEQ ID NO: 155041 - DNA, 25 bp, Probe Sequence
aaataatactgattttactacaggg

SEQ ID NO: 155042 - DNA, 25 bp, Probe Sequence
aaagactacattttggaaccagtgg

SEQ ID NO: 155043 - DNA, 25 bp, Probe Sequence
aaaggaactatgtctggaaggctgt

SEQ ID NO: 155044 - DNA, 25 bp, Probe Sequence
aaatgcggagcttgaattactgtgg

SEQ ID NO: 155045 - DNA, 25 bp, Probe Sequence
aaatcagggccgctgctacaatggc

SEQ ID NO: 155046 - DNA, 25 bp, Probe Sequence
aaataaggcctacttcacaaagcgc

SEQ ID NO: 155047 - DNA, 25 bp, Probe Sequence
aaatacaggcactagatgatcaatg

SEQ ID NO: 155048 - DNA, 25 bp, Probe Sequence
aaatatagtgcattctgaggatagc

SEQ ID NO: 155049 - DNA, 25 bp, Probe Sequence
aaatataagcattcgcaaggagtgg

SEQ ID NO: 155050 - DNA, 25 bp, Probe Sequence
aaatacagaattagccaggcatggt

SEQ ID NO: 155051 - DNA, 25 bp, Probe Sequence
aaatagatagatactccagcctggg

SEQ ID NO: 155052 - DNA, 25 bp, Probe Sequence
aaattataatgcatctccccagagt

SEQ ID NO: 155053 - DNA, 25 bp, Probe Sequence
aaattataatgcatctccccagagt

SEQ ID NO: 155054 - DNA, 25 bp, Probe Sequence
aaatctaaagttgctccatacaatg

SEQ ID NO: 155055 - DNA, 25 bp, Probe Sequence
aaatcataaagccttcatcactccc

SEQ ID NO: 155056 - DNA, 25 bp, Probe Sequence
aaatacatgaagcttcatgcactta

SEQ ID NO: 155057 - DNA, 25 bp, Probe Sequence
aaatatcaacaagttctgcgccatt

SEQ ID NO: 155058 - DNA, 25 bp, Probe Sequence
aaatagctctcatagtctgctccat

SEQ ID NO: 155059 - DNA, 25 bp, Probe Sequence
aaatactatatgtatctcatgtaca

SEQ ID NO: 155060 - DNA, 25 bp, Probe Sequence
aaatagcgtattgtatatacgcctc

SEQ ID NO: 155061 - DNA, 25 bp, Probe Sequence
aaatcggataggagtgtcaggcctc

SEQ ID NO: 155062 - DNA, 25 bp, Probe Sequence
aaatcagtgctgggggtggtgggcg

SEQ ID NO: 155063 - DNA, 25 bp, Probe Sequence
aaataggctgggtgtggtggctcac

SEQ ID NO: 155064 - DNA, 25 bp, Probe Sequence
aaatagtgagatggacttggggcct

SEQ ID NO: 155065 - DNA, 25 bp, Probe Sequence
aaataagagaaagtcacaggccctc

SEQ ID NO: 155066 - DNA, 25 bp, Probe Sequence
aaatggggaagagacgcccctgcta

SEQ ID NO: 155067 - DNA, 25 bp, Probe Sequence
aaatgggagggcattccatcccttc

SEQ ID NO: 155068 - DNA, 25 bp, Probe Sequence
aaaggacagcgagctactgaccttc

SEQ ID NO: 155069 - DNA, 25 bp, Probe Sequence
aaaggactaggacatctgaggtttt

SEQ ID NO: 155070 - DNA, 25 bp, Probe Sequence
aaatctacttgataatgtaccttta

SEQ ID NO: 155071 - DNA, 25 bp, Probe Sequence
aaatctgccttggaaatgggcttta

SEQ ID NO: 155072 - DNA, 25 bp, Probe Sequence
aaatctcccttgcaatgtgagttta

SEQ ID NO: 155073 - DNA, 25 bp, Probe Sequence
aaatatacttctcatgctgtagttt

SEQ ID NO: 155074 - DNA, 25 bp, Probe Sequence
aaataacctcttttatgactcatgt

SEQ ID NO: 155075 - DNA, 25 bp, Probe Sequence
aaataactatgcttttaggccaggc

SEQ ID NO: 155076 - DNA, 25 bp, Probe Sequence
aaatacacattgttctgaagtgcac

SEQ ID NO: 155077 - DNA, 25 bp, Probe Sequence
aaatctgcaatgatgccaaggtgcc

SEQ ID NO: 155078 - DNA, 25 bp, Probe Sequence
aaatcagcctttccaagaggcctca

SEQ ID NO: 155079 - DNA, 25 bp, Probe Sequence
aaatctgcacctaaccaaggtccct

SEQ ID NO: 155080 - DNA, 25 bp, Probe Sequence
aagcggaccttccgcaagttcacct

SEQ ID NO: 155081 - DNA, 25 bp, Probe Sequence
ctacggaacttattcacgtaactga

SEQ ID NO: 155082 - DNA, 25 bp, Probe Sequence
aaccgaactgttgccgttattacat

SEQ ID NO: 155083 - DNA, 25 bp, Probe Sequence
aaatgcaaatggctaccgttttaca

SEQ ID NO: 155084 - DNA, 25 bp, Probe Sequence
aaatcctgacttcaccacttattac

SEQ ID NO: 155085 - DNA, 25 bp, Probe Sequence
aaataagcactcctagcccaatatt

SEQ ID NO: 155086 - DNA, 25 bp, Probe Sequence
aaatagagaactaaatcacagtact

SEQ ID NO: 155087 - DNA, 25 bp, Probe Sequence
aaatgagcaagaatcagacatcaca

SEQ ID NO: 155088 - DNA, 25 bp, Probe Sequence
aaatgagcaagagattgcattgcag

SEQ ID NO: 155089 - DNA, 25 bp, Probe Sequence
aaatcacagcaatctctgattctgt

SEQ ID NO: 155090 - DNA, 25 bp, Probe Sequence
aaatcatcatcaaagcttgcttagt

SEQ ID NO: 155091 - DNA, 25 bp, Probe Sequence
aaatataaaagctctgaagtcacca

SEQ ID NO: 155092 - DNA, 25 bp, Probe Sequence
aaagtacaaactagatgggacatcc

SEQ ID NO: 155093 - DNA, 25 bp, Probe Sequence
aaagatgacatcaccggggaaccct

SEQ ID NO: 155094 - DNA, 25 bp, Probe Sequence
aaatgctacatttccaaggtgaaga

SEQ ID NO: 155095 - DNA, 25 bp, Probe Sequence
aaatgcccaggcttgatgggataaa

SEQ ID NO: 155096 - DNA, 25 bp, Probe Sequence
aaatagcacaagtggctggtgataa

SEQ ID NO: 155097 - DNA, 25 bp, Probe Sequence
aaataccaagcccagctggagaaac

SEQ ID NO: 155098 - DNA, 25 bp, Probe Sequence
aaatattaatcctgcatgctggaca

SEQ ID NO: 155099 - DNA, 25 bp, Probe Sequence
aaatattagatccatttctgcagaa

SEQ ID NO: 155100 - DNA, 25 bp, Probe Sequence
aaatatgtcaaaattgtggagaagt

SEQ ID NO: 155101 - DNA, 25 bp, Probe Sequence
aaatcatgccagtatttttaaaggc

SEQ ID NO: 155102 - DNA, 25 bp, Probe Sequence
aaatctgtatatttttcttaaggag

SEQ ID NO: 155103 - DNA, 25 bp, Probe Sequence
aaatcatctttttcattctttagga

SEQ ID NO: 155104 - DNA, 25 bp, Probe Sequence
aaatcatctttttcattctttagga

SEQ ID NO: 155105 - DNA, 25 bp, Probe Sequence
aaatatcttttatgtcctctagata

SEQ ID NO: 155106 - DNA, 25 bp, Probe Sequence
aaatatttcctcagtactttgcaga

SEQ ID NO: 155107 - DNA, 25 bp, Probe Sequence
aaatattccttcacatatctttata

SEQ ID NO: 155108 - DNA, 25 bp, Probe Sequence
aaatattcatctaccattactgtta

SEQ ID NO: 155109 - DNA, 25 bp, Probe Sequence
aaatagcaatctgcacattgacctt

SEQ ID NO: 155110 - DNA, 25 bp, Probe Sequence
aaatagaagcttcttgctcctgttt

SEQ ID NO: 155111 - DNA, 25 bp, Probe Sequence
aaatacaacattctccatctgcttt

SEQ ID NO: 155112 - DNA, 25 bp, Probe Sequence
aaatatccatgatttctccctgtat

SEQ ID NO: 155113 - DNA, 25 bp, Probe Sequence
aaatattcatagttcactcacagaa

SEQ ID NO: 155114 - DNA, 25 bp, Probe Sequence
aaataccagcagttactcatggaat

SEQ ID NO: 155115 - DNA, 25 bp, Probe Sequence
aaataccagctgttacttatcctaa

SEQ ID NO: 155116 - DNA, 25 bp, Probe Sequence
aaatatctgcagggtcctttccatt

SEQ ID NO: 155117 - DNA, 25 bp, Probe Sequence
aaatatctcagtcctggctttctct

SEQ ID NO: 155118 - DNA, 25 bp, Probe Sequence
aaatagccactatagctacttcctt

SEQ ID NO: 155119 - DNA, 25 bp, Probe Sequence
aaatgatccaccaaagcaaagccct

SEQ ID NO: 155120 - DNA, 25 bp, Probe Sequence
aaatgcccaccatagaacgactgtc

SEQ ID NO: 155121 - DNA, 25 bp, Probe Sequence
aaatgcacctcctgcaagaaaagct

SEQ ID NO: 155122 - DNA, 25 bp, Probe Sequence
aaataccattcaaaatgaggcacag

SEQ ID NO: 155123 - DNA, 25 bp, Probe Sequence
aaatatgtaatcaacaattggcgta

SEQ ID NO: 155124 - DNA, 25 bp, Probe Sequence
aaatattgccacactattttgtgat

SEQ ID NO: 155125 - DNA, 25 bp, Probe Sequence
aaatatgtcactggagctttgttgg

SEQ ID NO: 155126 - DNA, 25 bp, Probe Sequence
aaatagtactggtcatttctctctg

SEQ ID NO: 155127 - DNA, 25 bp, Probe Sequence
aaatattaagtagtctagatctcag

SEQ ID NO: 155128 - DNA, 25 bp, Probe Sequence
aaatgtctagaaaattagtctgaga

SEQ ID NO: 155129 - DNA, 25 bp, Probe Sequence
aaatgtttgcaaatgtcgatgttga

SEQ ID NO: 155130 - DNA, 25 bp, Probe Sequence
aaatatattgaaatcatgctgctga

SEQ ID NO: 155131 - DNA, 25 bp, Probe Sequence
aaatagattgacatcagcctgatta

SEQ ID NO: 155132 - DNA, 25 bp, Probe Sequence
aaataatttgctacagcagcgataa

SEQ ID NO: 155133 - DNA, 25 bp, Probe Sequence
aaatatcactctgccagcacataaa

SEQ ID NO: 155134 - DNA, 25 bp, Probe Sequence
aaatcaccttgaaatatataaacca

SEQ ID NO: 155135 - DNA, 25 bp, Probe Sequence
aaagcagctttacaacaaataccca

SEQ ID NO: 155136 - DNA, 25 bp, Probe Sequence
aaatggtattctcacccagtaggcc

SEQ ID NO: 155137 - DNA, 25 bp, Probe Sequence
aaatgtgctattgagattccagtgg

SEQ ID NO: 155138 - DNA, 25 bp, Probe Sequence
aaatacagcattgaggcttcatttg

SEQ ID NO: 155139 - DNA, 25 bp, Probe Sequence
aaatccagcttctaagttcagttct

SEQ ID NO: 155140 - DNA, 25 bp, Probe Sequence
aaatcacttctgtttgttcagtttt

SEQ ID NO: 155141 - DNA, 25 bp, Probe Sequence
aaatcagttattttcttcagcttta

SEQ ID NO: 155142 - DNA, 25 bp, Probe Sequence
aaatcttatagtattatcagcttag

SEQ ID NO: 155143 - DNA, 25 bp, Probe Sequence
aaatcttcctttatatcaagtcaga

SEQ ID NO: 155144 - DNA, 25 bp, Probe Sequence
aaatcttcctattttcaagctgaaa

SEQ ID NO: 155145 - DNA, 25 bp, Probe Sequence
aaatactcatcgtctttgagactga

SEQ ID NO: 155146 - DNA, 25 bp, Probe Sequence
aaatatctatcttttcatcatgtct

SEQ ID NO: 155147 - DNA, 25 bp, Probe Sequence
aaatatcctttcaaatcatgttctt

SEQ ID NO: 155148 - DNA, 25 bp, Probe Sequence
aaatacttttgtaagcagctgttta

SEQ ID NO: 155149 - DNA, 25 bp, Probe Sequence
aactactattaacagcctttgccaa

SEQ ID NO: 155150 - DNA, 25 bp, Probe Sequence
aaatagtaaaagcacctgtctcata

SEQ ID NO: 155151 - DNA, 25 bp, Probe Sequence
aaaggctcgaaagactggacttatt

SEQ ID NO: 155152 - DNA, 25 bp, Probe Sequence
aaaggtggaacataggcagtttttg

SEQ ID NO: 155153 - DNA, 25 bp, Probe Sequence
aaatggatgctgtctcagaaggagt

SEQ ID NO: 155154 - DNA, 25 bp, Probe Sequence
aaatgctgtctactgaaagggtttc

SEQ ID NO: 155155 - DNA, 25 bp, Probe Sequence
aaatgtcctaggggtagtgttctca

SEQ ID NO: 155156 - DNA, 25 bp, Probe Sequence
aaatgtacgaactgtatgttactag

SEQ ID NO: 155157 - DNA, 25 bp, Probe Sequence
aaatgtatggacagtttttccggca

SEQ ID NO: 155158 - DNA, 25 bp, Probe Sequence
aaatgttgtccaggttctattgcca

SEQ ID NO: 155159 - DNA, 25 bp, Probe Sequence
aaatgttgtccaggttctattgcca

SEQ ID NO: 155160 - DNA, 25 bp, Probe Sequence
aaatgcttgtattgccttaagtcaa

SEQ ID NO: 155161 - DNA, 25 bp, Probe Sequence
aaatcctgtcaacctagaagcatac

SEQ ID NO: 155162 - DNA, 25 bp, Probe Sequence
aaatcagctttattctaagcaaatc

SEQ ID NO: 155163 - DNA, 25 bp, Probe Sequence
aaatacattgaactctaacatagat

SEQ ID NO: 155164 - DNA, 25 bp, Probe Sequence
aaatccaagcaacttcataatcaga

SEQ ID NO: 155165 - DNA, 25 bp, Probe Sequence
aaatccagcatccattcctaataaa

SEQ ID NO: 155166 - DNA, 25 bp, Probe Sequence
aaatctatattcacccaaataatca

SEQ ID NO: 155167 - DNA, 25 bp, Probe Sequence
aaatcttagtcctcataaaccacag

SEQ ID NO: 155168 - DNA, 25 bp, Probe Sequence
aaatcctctgtaatcacaaacccca

SEQ ID NO: 155169 - DNA, 25 bp, Probe Sequence
aaatcattctgttaaccaccattcc

SEQ ID NO: 155170 - DNA, 25 bp, Probe Sequence
aaataattgttaatgcaactgctta

SEQ ID NO: 155171 - DNA, 25 bp, Probe Sequence
aaatctcattctagctgtaactctt

SEQ ID NO: 155172 - DNA, 25 bp, Probe Sequence
aaatccatgtctcttaatgctttta

SEQ ID NO: 155173 - DNA, 25 bp, Probe Sequence
aaatacatgactatctgacctttta

SEQ ID NO: 155174 - DNA, 25 bp, Probe Sequence
aaatactctcatatagtcacacttt

SEQ ID NO: 155175 - DNA, 25 bp, Probe Sequence
aaatagcttgtgctcagactcctct

SEQ ID NO: 155176 - DNA, 25 bp, Probe Sequence
aaatagcttgtgctcagactcctct

SEQ ID NO: 155177 - DNA, 25 bp, Probe Sequence
aaatctattgctgtcagataccctt

SEQ ID NO: 155178 - DNA, 25 bp, Probe Sequence
aaatcattttggacagcttcttttg

SEQ ID NO: 155179 - DNA, 25 bp, Probe Sequence
aaatcattttggacagcttcttttg

SEQ ID NO: 155180 - DNA, 25 bp, Probe Sequence
aaataattcaggccactgtctcctt

SEQ ID NO: 155181 - DNA, 25 bp, Probe Sequence
aaatgtactgggcattgtcctggtc

SEQ ID NO: 155182 - DNA, 25 bp, Probe Sequence
aaatgaactgggaatctccactccg

SEQ ID NO: 155183 - DNA, 25 bp, Probe Sequence
aaatgaactgggaatctccactccg

SEQ ID NO: 155184 - DNA, 25 bp, Probe Sequence
aaatgcaacgggactctccaaaatg

SEQ ID NO: 155185 - DNA, 25 bp, Probe Sequence
aaatcaaccttgcttcatatcaaat

SEQ ID NO: 155186 - DNA, 25 bp, Probe Sequence
aaatcaaccttgcttcatatcaaat

SEQ ID NO: 155187 - DNA, 25 bp, Probe Sequence
aaatcagtcctgaagttgcaacaaa

SEQ ID NO: 155188 - DNA, 25 bp, Probe Sequence
aaatcagtgtattagtcataaaaca

SEQ ID NO: 155189 - DNA, 25 bp, Probe Sequence
aaatatgttgattcatggctataat

SEQ ID NO: 155190 - DNA, 25 bp, Probe Sequence
aaatgcatgctattaatggaagaat

SEQ ID NO: 155191 - DNA, 25 bp, Probe Sequence
aaatgtgtagatgagcagagcaaga

SEQ ID NO: 155192 - DNA, 25 bp, Probe Sequence
aaatcttgatatccagaagcacatg

SEQ ID NO: 155193 - DNA, 25 bp, Probe Sequence
aaatcattgatgaccacagagctgg

SEQ ID NO: 155194 - DNA, 25 bp, Probe Sequence
aaatctctgagattccaactctgat

SEQ ID NO: 155195 - DNA, 25 bp, Probe Sequence
aaatcttcacaatcacacatctgac

SEQ ID NO: 155196 - DNA, 25 bp, Probe Sequence
aaatctactggattcagatatttga

SEQ ID NO: 155197 - DNA, 25 bp, Probe Sequence
aaatgtcgactatatgagattgtat

SEQ ID NO: 155198 - DNA, 25 bp, Probe Sequence
aaatgtctatctttgcgcatgggtt

SEQ ID NO: 155199 - DNA, 25 bp, Probe Sequence
aaatactcagcttaggcatttttac

SEQ ID NO: 155200 - DNA, 25 bp, Probe Sequence
aaatcttccagttacattgtcttac

SEQ ID NO: 155201 - DNA, 25 bp, Probe Sequence
aaataatccatttttggctttcatc

SEQ ID NO: 155202 - DNA, 25 bp, Probe Sequence
aaataaccagtcttttgtgtccagc

SEQ ID NO: 155203 - DNA, 25 bp, Probe Sequence
aaatcaaaaaattttgctctgcaaa

SEQ ID NO: 155204 - DNA, 25 bp, Probe Sequence
aaataaatctaaattgtgtcgtaat

SEQ ID NO: 155205 - DNA, 25 bp, Probe Sequence
aaataaatcgacagtgtctcagaac

SEQ ID NO: 155206 - DNA, 25 bp, Probe Sequence
aaataagtctactgtgtgctacaca

SEQ ID NO: 155207 - DNA, 25 bp, Probe Sequence
aaatcctgctctatcgtgatgctaa

SEQ ID NO: 155208 - DNA, 25 bp, Probe Sequence
aaatccagatctataattgcgcaat

SEQ ID NO: 155209 - DNA, 25 bp, Probe Sequence
aaatccgattgaatataaatgccta

SEQ ID NO: 155210 - DNA, 25 bp, Probe Sequence
aaatccagtggttcataactcccaa

SEQ ID NO: 155211 - DNA, 25 bp, Probe Sequence
aaaggcagtcgtacatactacgtaa

SEQ ID NO: 155212 - DNA, 25 bp, Probe Sequence
aaagggctagtgggattactgctaa

SEQ ID NO: 155213 - DNA, 25 bp, Probe Sequence
aaatgtttgttgtgttaagctgcca

SEQ ID NO: 155214 - DNA, 25 bp, Probe Sequence
aaatgcttcagtacttgtgaaacac

SEQ ID NO: 155215 - DNA, 25 bp, Probe Sequence
aaatgcttgactactgtccaaattc

SEQ ID NO: 155216 - DNA, 25 bp, Probe Sequence
aaatcttcatggaattcacaaagta

SEQ ID NO: 155217 - DNA, 25 bp, Probe Sequence
aaatcaatcattacattcaccacat

SEQ ID NO: 155218 - DNA, 25 bp, Probe Sequence
aaatgcttcattagtttcccctagc

SEQ ID NO: 155219 - DNA, 25 bp, Probe Sequence
aaatgcttcttttgttgccacagta

SEQ ID NO: 155220 - DNA, 25 bp, Probe Sequence
aaatcttgtgacatattcgatatta

SEQ ID NO: 155221 - DNA, 25 bp, Probe Sequence
aaatgtgggagctatgaatcagtat

SEQ ID NO: 155222 - DNA, 25 bp, Probe Sequence
aaaggtgcgggagtatgagttaaga

SEQ ID NO: 155223 - DNA, 25 bp, Probe Sequence
aaaggaggggcagccgtgcttatat

SEQ ID NO: 155224 - DNA, 25 bp, Probe Sequence
aacagggggtgagctcagactttga

SEQ ID NO: 155225 - DNA, 25 bp, Probe Sequence
aaatgggcctgggactttttgtgag

SEQ ID NO: 155226 - DNA, 25 bp, Probe Sequence
aaaggcggctgtgcgctaagtggca

SEQ ID NO: 155227 - DNA, 25 bp, Probe Sequence
aaaggggcgtcggacaagtgcagct

SEQ ID NO: 155228 - DNA, 25 bp, Probe Sequence
aacgggtgcgcaaggacatcgacga

SEQ ID NO: 155229 - DNA, 25 bp, Probe Sequence
aacagggctggcatggaatggtacc

SEQ ID NO: 155230 - DNA, 25 bp, Probe Sequence
cataaggtcatgcctttaagtaacc

SEQ ID NO: 155231 - DNA, 25 bp, Probe Sequence
aaatgtgccactgtgtcaagttaca

SEQ ID NO: 155232 - DNA, 25 bp, Probe Sequence
aaatgtccagcaactgcctactgtt

SEQ ID NO: 155233 - DNA, 25 bp, Probe Sequence
aaatgttgctaagtcctggtatgat

SEQ ID NO: 155234 - DNA, 25 bp, Probe Sequence
aaaatgtgtacgtgggccagcatgg

SEQ ID NO: 155235 - DNA, 25 bp, Probe Sequence
aaagtttgactatctgactccaagg

SEQ ID NO: 155236 - DNA, 25 bp, Probe Sequence
aaagtactgaaattcaatgtgacag

SEQ ID NO: 155237 - DNA, 25 bp, Probe Sequence
aaatgcttctgatgctttagataag

SEQ ID NO: 155238 - DNA, 25 bp, Probe Sequence
aaatgctaccttgcttcagaaggtt

SEQ ID NO: 155239 - DNA, 25 bp, Probe Sequence
aaatgtgacactgtctatcagtacg

SEQ ID NO: 155240 - DNA, 25 bp, Probe Sequence
aaatcagtcacttttatcagaatct

SEQ ID NO: 155241 - DNA, 25 bp, Probe Sequence
aaatcagtcacttttatcagaatct

SEQ ID NO: 155242 - DNA, 25 bp, Probe Sequence
aaatagctttatttatgctgaattg

SEQ ID NO: 155243 - DNA, 25 bp, Probe Sequence
aaatagcttcttactctgttttgtt

SEQ ID NO: 155244 - DNA, 25 bp, Probe Sequence
aaatgaatgcatgcttcttttttgt

SEQ ID NO: 155245 - DNA, 25 bp, Probe Sequence
aaatgccatggtgtgttcccaatta

SEQ ID NO: 155246 - DNA, 25 bp, Probe Sequence
aaagcaaggtgctgtctctaactta

SEQ ID NO: 155247 - DNA, 25 bp, Probe Sequence
aaatgaggacttggtacttactgga

SEQ ID NO: 155248 - DNA, 25 bp, Probe Sequence
aaatgagtacttgattcttcagaaa

SEQ ID NO: 155249 - DNA, 25 bp, Probe Sequence
aaatcaatgtcttgaatcctttgaa

SEQ ID NO: 155250 - DNA, 25 bp, Probe Sequence
aaatcaagtctaaacattgcattta

SEQ ID NO: 155251 - DNA, 25 bp, Probe Sequence
aaatcggtcttcaaagatctgttga

SEQ ID NO: 155252 - DNA, 25 bp, Probe Sequence
aaatagcgtcttaacacacttcctc

SEQ ID NO: 155253 - DNA, 25 bp, Probe Sequence
aaatgaggtacttacacactgtgca

SEQ ID NO: 155254 - DNA, 25 bp, Probe Sequence
aaatcacggactttccaatgtcgta

SEQ ID NO: 155255 - DNA, 25 bp, Probe Sequence
aaatcctgggtgtccgcaatgttgc

SEQ ID NO: 155256 - DNA, 25 bp, Probe Sequence
aaatcctggtgatacacacagtgta

SEQ ID NO: 155257 - DNA, 25 bp, Probe Sequence
aaatcacaggtaaacccatgtttct

SEQ ID NO: 155258 - DNA, 25 bp, Probe Sequence
aaatccatttaattcctatgacttt

SEQ ID NO: 155259 - DNA, 25 bp, Probe Sequence
aaatctatttcatttactaaatatt

SEQ ID NO: 155260 - DNA, 25 bp, Probe Sequence
aaatctttctattatatctaaatta

SEQ ID NO: 155261 - DNA, 25 bp, Probe Sequence
aaatcatttgtttcacctaaagctc

SEQ ID NO: 155262 - DNA, 25 bp, Probe Sequence
aaatgccttttgtagccacaaacca

SEQ ID NO: 155263 - DNA, 25 bp, Probe Sequence
aaatgtttcattgacccaagtaatt

SEQ ID NO: 155264 - DNA, 25 bp, Probe Sequence
aaatcttatcttgcagcactatcag

SEQ ID NO: 155265 - DNA, 25 bp, Probe Sequence
aaagtttctctcggagttcacacct

SEQ ID NO: 155266 - DNA, 25 bp, Probe Sequence
aaatgttttgttgaagtatatggct

SEQ ID NO: 155267 - DNA, 25 bp, Probe Sequence
aaatgtctttaatgcaatatactgg

SEQ ID NO: 155268 - DNA, 25 bp, Probe Sequence
aaatgatgtttatggccaggcacgg

SEQ ID NO: 155269 - DNA, 25 bp, Probe Sequence
aaatgagctcatcctgggctggtac

SEQ ID NO: 155270 - DNA, 25 bp, Probe Sequence
aaatgggcggtaggcgtgtacggtg

SEQ ID NO: 155271 - DNA, 25 bp, Probe Sequence
aaatgggcggtaggcgtgtacggtg

SEQ ID NO: 155272 - DNA, 25 bp, Probe Sequence
aaatgggcggtaggcgtgtacggtg

SEQ ID NO: 155273 - DNA, 25 bp, Probe Sequence
aaatgggcggtaggcgtgtacggtg

SEQ ID NO: 155274 - DNA, 25 bp, Probe Sequence
aaatgggcggtaggcgtgtacggtg

SEQ ID NO: 155275 - DNA, 25 bp, Probe Sequence
aaatgggcggtaggcgtgtacggtg

SEQ ID NO: 155276 - DNA, 25 bp, Probe Sequence
aaatgggcggtaggcgtgtacggtg

SEQ ID NO: 155277 - DNA, 25 bp, Probe Sequence
aaatgggcggtaggcgtgtacggtg

SEQ ID NO: 155278 - DNA, 25 bp, Probe Sequence
aaatgggcggtaggcgtgtacggtg

SEQ ID NO: 155279 - DNA, 25 bp, Probe Sequence
aaatgggcggtaggcgtgtacggtg

SEQ ID NO: 155280 - DNA, 25 bp, Probe Sequence
aaatgggctggtaggcgtgtacggt

SEQ ID NO: 155281 - DNA, 25 bp, Probe Sequence
aaatgtgagcgaattgggccttgtg

SEQ ID NO: 155282 - DNA, 25 bp, Probe Sequence
aaatgtgccacaagttggcaatggt

SEQ ID NO: 155283 - DNA, 25 bp, Probe Sequence
aaatgtgcagaaagattccaaagga

SEQ ID NO: 155284 - DNA, 25 bp, Probe Sequence
aaatgggaaatcagccaaaggactg

SEQ ID NO: 155285 - DNA, 25 bp, Probe Sequence
aaatccaaaatgagccttttattga

SEQ ID NO: 155286 - DNA, 25 bp, Probe Sequence
aaatccaaattcatgctgttttttt

SEQ ID NO: 155287 - DNA, 25 bp, Probe Sequence
aaatcccatctgcatttgatttttt

SEQ ID NO: 155288 - DNA, 25 bp, Probe Sequence
aaatcaccttcgttgaatcttaaat

SEQ ID NO: 155289 - DNA, 25 bp, Probe Sequence
aaatctgcatcttccactattttca

SEQ ID NO: 155290 - DNA, 25 bp, Probe Sequence
aaatcctcccacatttcttggatgc

SEQ ID NO: 155291 - DNA, 25 bp, Probe Sequence
aaatgcacctcccagtttgctgggt

SEQ ID NO: 155292 - DNA, 25 bp, Probe Sequence
aaatgtattcactagatttctacgt

SEQ ID NO: 155293 - DNA, 25 bp, Probe Sequence
aaatgtcctcattcagatctcatcc

SEQ ID NO: 155294 - DNA, 25 bp, Probe Sequence
aaatctcactcagtgctgttgctcc

SEQ ID NO: 155295 - DNA, 25 bp, Probe Sequence
aaatctcagatgctcctgtcatctc

SEQ ID NO: 155296 - DNA, 25 bp, Probe Sequence
aaatccagcatcccaagatcattct

SEQ ID NO: 155297 - DNA, 25 bp, Probe Sequence
aaatccagaccctgatgctatttac

SEQ ID NO: 155298 - DNA, 25 bp, Probe Sequence
aaatcccagccctagtagcaattaa

SEQ ID NO: 155299 - DNA, 25 bp, Probe Sequence
aaatctaagccatgaatatgcttta

SEQ ID NO: 155300 - DNA, 25 bp, Probe Sequence
aaatctcaagtagcatcaatcttat

SEQ ID NO: 155301 - DNA, 25 bp, Probe Sequence
aaatgtaacttgaagcagctgcttt

SEQ ID NO: 155302 - DNA, 25 bp, Probe Sequence
aaatgacagatttgaccagttttgg

SEQ ID NO: 155303 - DNA, 25 bp, Probe Sequence
aaatcaacatgtggaccagagtgtt

SEQ ID NO: 155304 - DNA, 25 bp, Probe Sequence
aaatgaattgctggtcaaaatgcta

SEQ ID NO: 155305 - DNA, 25 bp, Probe Sequence
aaatgataaatcccctaatgccaag

SEQ ID NO: 155306 - DNA, 25 bp, Probe Sequence
aaatgaaccatgatcccaatccaag

SEQ ID NO: 155307 - DNA, 25 bp, Probe Sequence
aaatcatgacttatcccattttcaa

SEQ ID NO: 155308 - DNA, 25 bp, Probe Sequence
aaatcatggaccactccatttctcc

SEQ ID NO: 155309 - DNA, 25 bp, Probe Sequence
aaatctggacacagcctactttact

SEQ ID NO: 155310 - DNA, 25 bp, Probe Sequence
aaatgctggtgctggtcagactttt

SEQ ID NO: 155311 - DNA, 25 bp, Probe Sequence
aaatcgcagtgatagttgactttgg

SEQ ID NO: 155312 - DNA, 25 bp, Probe Sequence
aaatggcagtgctttgttcacttaa

SEQ ID NO: 155313 - DNA, 25 bp, Probe Sequence
aaatgagcaccatttgtaataatga

SEQ ID NO: 155314 - DNA, 25 bp, Probe Sequence
aaatcaactcacatctagatatagt

SEQ ID NO: 155315 - DNA, 25 bp, Probe Sequence
aaatcaacctcttctaaactgactt

SEQ ID NO: 155316 - DNA, 25 bp, Probe Sequence
aaataagctctccccaaacttgctt

SEQ ID NO: 155317 - DNA, 25 bp, Probe Sequence
aaaatacaccgataaacctgtctat

SEQ ID NO: 155318 - DNA, 25 bp, Probe Sequence
cagaaaacccggtgacgccgatgct

SEQ ID NO: 155319 - DNA, 25 bp, Probe Sequence
aaataaccctgttcgaggcccatat

SEQ ID NO: 155320 - DNA, 25 bp, Probe Sequence
aaatgacccttttcaggatgtctca

SEQ ID NO: 155321 - DNA, 25 bp, Probe Sequence
aaatgacccttttcaggatgtctca

SEQ ID NO: 155322 - DNA, 25 bp, Probe Sequence
aaatgacagggcatctgagttttgc

SEQ ID NO: 155323 - DNA, 25 bp, Probe Sequence
aaatgcacatggaaattcaggtggt

SEQ ID NO: 155324 - DNA, 25 bp, Probe Sequence
aaatcaccctgactgtggggtgcat

SEQ ID NO: 155325 - DNA, 25 bp, Probe Sequence
aaatcatccagcgggcggaggagct

SEQ ID NO: 155326 - DNA, 25 bp, Probe Sequence
aaatctgcatcagcggcacagtgaa

SEQ ID NO: 155327 - DNA, 25 bp, Probe Sequence
aaatcagccaatccaccagctgaga

SEQ ID NO: 155328 - DNA, 25 bp, Probe Sequence
aaatcagaatcatcccatcagataa

SEQ ID NO: 155329 - DNA, 25 bp, Probe Sequence
aaatcagactactttcattgagaaa

SEQ ID NO: 155330 - DNA, 25 bp, Probe Sequence
aaatcaaacatcattcatagaaagc

SEQ ID NO: 155331 - DNA, 25 bp, Probe Sequence
aaatcacagccacttgacaagaaag

SEQ ID NO: 155332 - DNA, 25 bp, Probe Sequence
aaatccatgcacaatcaacaaaacc

SEQ ID NO: 155333 - DNA, 25 bp, Probe Sequence
aaatcctgcaccagcaacaacactt

SEQ ID NO: 155334 - DNA, 25 bp, Probe Sequence
aaatcctgcaccagcaacacttgta

SEQ ID NO: 155335 - DNA, 25 bp, Probe Sequence
aaatcctgcaccagcaacacttgta

SEQ ID NO: 155336 - DNA, 25 bp, Probe Sequence
aaatctctcctcttcaaaatatgct

SEQ ID NO: 155337 - DNA, 25 bp, Probe Sequence
aaatctctccatctgcattagtatt

SEQ ID NO: 155338 - DNA, 25 bp, Probe Sequence
aaatctccctaaactatgtgatctt

SEQ ID NO: 155339 - DNA, 25 bp, Probe Sequence
aaatcagcgacttacagctttagct

SEQ ID NO: 155340 - DNA, 25 bp, Probe Sequence
aaatcagaggtgaaaattgtacatt

SEQ ID NO: 155341 - DNA, 25 bp, Probe Sequence
aaatcatcagggagactttccattt

SEQ ID NO: 155342 - DNA, 25 bp, Probe Sequence
aaatccactggctgggctttcatta

SEQ ID NO: 155343 - DNA, 25 bp, Probe Sequence
aaatccttgcacgaggaattcttct

SEQ ID NO: 155344 - DNA, 25 bp, Probe Sequence
aaatctctctacttgaatttctcct

SEQ ID NO: 155345 - DNA, 25 bp, Probe Sequence
aaatcttgctccacaaggatctcac

SEQ ID NO: 155346 - DNA, 25 bp, Probe Sequence
aaatgcctctcacttcaaaatgccc

SEQ ID NO: 155347 - DNA, 25 bp, Probe Sequence
aaatcctcatagaaatgcataattc

SEQ ID NO: 155348 - DNA, 25 bp, Probe Sequence
aaatcactcaaaaatcagattcact

SEQ ID NO: 155349 - DNA, 25 bp, Probe Sequence
aaatcaatcatatatgcacaattca

SEQ ID NO: 155350 - DNA, 25 bp, Probe Sequence
aaatccatttcactatcatattcat

SEQ ID NO: 155351 - DNA, 25 bp, Probe Sequence
aaatcgttgtcacatcagtgactgg

SEQ ID NO: 155352 - DNA, 25 bp, Probe Sequence
aaatcgtcttcagatggagcttgtg

SEQ ID NO: 155353 - DNA, 25 bp, Probe Sequence
aaatctgtcttgggggatgtagaga

SEQ ID NO: 155354 - DNA, 25 bp, Probe Sequence
aaatctgctttgtggtgacctgatg

SEQ ID NO: 155355 - DNA, 25 bp, Probe Sequence
aaatctgcatttaagggagactctg

SEQ ID NO: 155356 - DNA, 25 bp, Probe Sequence
aaatcctatctagagtcatactcgt

SEQ ID NO: 155357 - DNA, 25 bp, Probe Sequence
aaatcatttgtaacagtccactctg

SEQ ID NO: 155358 - DNA, 25 bp, Probe Sequence
aaatctgcctagaaaacctctcgct

SEQ ID NO: 155359 - DNA, 25 bp, Probe Sequence
aaatgttctgaaagacccgctcttc

SEQ ID NO: 155360 - DNA, 25 bp, Probe Sequence
aaagttccctgagggcacgtcttgc

SEQ ID NO: 155361 - DNA, 25 bp, Probe Sequence
aaagttgaactgtctggcaagtttc

SEQ ID NO: 155362 - DNA, 25 bp, Probe Sequence
aaatgtatgtccaacttccactttt

SEQ ID NO: 155363 - DNA, 25 bp, Probe Sequence
aaatgcttccacagctaacgttgtt

SEQ ID NO: 155364 - DNA, 25 bp, Probe Sequence
aaatctcctctttgtaacaggtcat

SEQ ID NO: 155365 - DNA, 25 bp, Probe Sequence
aaatcactattttggtcaaagtcaa

SEQ ID NO: 155366 - DNA, 25 bp, Probe Sequence
aaatcagattctttggtcaagagtc

SEQ ID NO: 155367 - DNA, 25 bp, Probe Sequence
aaatcagattctttggtcaagagtc

SEQ ID NO: 155368 - DNA, 25 bp, Probe Sequence
aaatgctgcttcatggggaagaatc

SEQ ID NO: 155369 - DNA, 25 bp, Probe Sequence
aaatgatgtcatgtggtggtccaac

SEQ ID NO: 155370 - DNA, 25 bp, Probe Sequence
aaatgacttggtctgatttattcac

SEQ ID NO: 155371 - DNA, 25 bp, Probe Sequence
aaatgcctgggtaaggatgctttca

SEQ ID NO: 155372 - DNA, 25 bp, Probe Sequence
aaatgtggccctgaggatgccgtct

SEQ ID NO: 155373 - DNA, 25 bp, Probe Sequence
aaatgggccacgggcctgggatgct

SEQ ID NO: 155374 - DNA, 25 bp, Probe Sequence
aaatcagtggcaaggtgccgggcgc

SEQ ID NO: 155375 - DNA, 25 bp, Probe Sequence
aaagctgggcagacgatcacgactc

SEQ ID NO: 155376 - DNA, 25 bp, Probe Sequence
aaatgctggaaacatcactgcgtac

SEQ ID NO: 155377 - DNA, 25 bp, Probe Sequence
aaatgatggacctccagcgagtccg

SEQ ID NO: 155378 - DNA, 25 bp, Probe Sequence
aaagagccaggctcgggagtgcctg

SEQ ID NO: 155379 - DNA, 25 bp, Probe Sequence
aaatgaccaaagttgggagatcact

SEQ ID NO: 155380 - DNA, 25 bp, Probe Sequence
aaatcactaaagcctgacagtgtcc

SEQ ID NO: 155381 - DNA, 25 bp, Probe Sequence
aaatccttagatctggcatgttagc

SEQ ID NO: 155382 - DNA, 25 bp, Probe Sequence
aaatcttaagatcaacatgtcagtg

SEQ ID NO: 155383 - DNA, 25 bp, Probe Sequence
aaatcccatcaacaaaatgctgtga

SEQ ID NO: 155384 - DNA, 25 bp, Probe Sequence
aaatcctctccagctataacagtag

SEQ ID NO: 155385 - DNA, 25 bp, Probe Sequence
aaatgcctgctgggccttaagcttt

SEQ ID NO: 155386 - DNA, 25 bp, Probe Sequence
aaatgcctgagggcagctgccaggg

SEQ ID NO: 155387 - DNA, 25 bp, Probe Sequence
aaatgactgaggccacccagttgat

SEQ ID NO: 155388 - DNA, 25 bp, Probe Sequence
aaatgatgtagtccctcaacttggc

SEQ ID NO: 155389 - DNA, 25 bp, Probe Sequence
aaatgagctagttctttagtagtta

SEQ ID NO: 155390 - DNA, 25 bp, Probe Sequence
aaatgcctagtgtctattttattaa

SEQ ID NO: 155391 - DNA, 25 bp, Probe Sequence
aaatcctcagtatagcttgcaatta

SEQ ID NO: 155392 - DNA, 25 bp, Probe Sequence
aaatcccatgatcaagctgtccgaa

SEQ ID NO: 155393 - DNA, 25 bp, Probe Sequence
aaatgcttagcaaacagcggcacga

SEQ ID NO: 155394 - DNA, 25 bp, Probe Sequence
aaatgttcagattaactccatctac

SEQ ID NO: 155395 - DNA, 25 bp, Probe Sequence
aaatgcttcagatgaggctccacct

SEQ ID NO: 155396 - DNA, 25 bp, Probe Sequence
aaatgtctaggctaagtatgcacct

SEQ ID NO: 155397 - DNA, 25 bp, Probe Sequence
aaatcttcaggtacagctggcattt

SEQ ID NO: 155398 - DNA, 25 bp, Probe Sequence
aaatcttcagatgcaatggttttgt

SEQ ID NO: 155399 - DNA, 25 bp, Probe Sequence
aaatgcaacttggatatgtttttat

SEQ ID NO: 155400 - DNA, 25 bp, Probe Sequence
aaatgctgtcttgctttagctatta

SEQ ID NO: 155401 - DNA, 25 bp, Probe Sequence
aaatgctgtcttgctttagctatta

SEQ ID NO: 155402 - DNA, 25 bp, Probe Sequence
aaatgctgtcttgctttagctatta

SEQ ID NO: 155403 - DNA, 25 bp, Probe Sequence
aaatgctgtcttgctttagctatta

SEQ ID NO: 155404 - DNA, 25 bp, Probe Sequence
aaatcttcatattctctgtagcctt

SEQ ID NO: 155405 - DNA, 25 bp, Probe Sequence
aaatctatgatcaacttattccatt

SEQ ID NO: 155406 - DNA, 25 bp, Probe Sequence
aaatcttattaccaactccttgtga

SEQ ID NO: 155407 - DNA, 25 bp, Probe Sequence
aaacgtattcagcaaccacttagtg

SEQ ID NO: 155408 - DNA, 25 bp, Probe Sequence
aaatccatcttggtgagaagcctta

SEQ ID NO: 155409 - DNA, 25 bp, Probe Sequence
aaatccactttcagacactttaaag

SEQ ID NO: 155410 - DNA, 25 bp, Probe Sequence
aaatgacctttaatgacactacatt

SEQ ID NO: 155411 - DNA, 25 bp, Probe Sequence
aaatgcagctttttctgaacttcaa

SEQ ID NO: 155412 - DNA, 25 bp, Probe Sequence
aaatgcagctttttctgaacttcaa

SEQ ID NO: 155413 - DNA, 25 bp, Probe Sequence
aaatctgttctaacatgtaattgca

SEQ ID NO: 155414 - DNA, 25 bp, Probe Sequence
aaatctgttctaacatgtaattgca

SEQ ID NO: 155415 - DNA, 25 bp, Probe Sequence
aaatcagctgtcagacgtcgattgc

SEQ ID NO: 155416 - DNA, 25 bp, Probe Sequence
aaatgctgctgtcagacgattgttc

SEQ ID NO: 155417 - DNA, 25 bp, Probe Sequence
aaagctgctgtgctatatgatgctg

SEQ ID NO: 155418 - DNA, 25 bp, Probe Sequence
aaatcctgcatgtaatatatctgct

SEQ ID NO: 155419 - DNA, 25 bp, Probe Sequence
aaatcgccaagaatatgatgctttg

SEQ ID NO: 155420 - DNA, 25 bp, Probe Sequence
aaatcagctacgaaagtctgtgtac

SEQ ID NO: 155421 - DNA, 25 bp, Probe Sequence
aaatcatgccaaagccagttgtctt

SEQ ID NO: 155422 - DNA, 25 bp, Probe Sequence
aaagcacctgaacagtttatcgacc

SEQ ID NO: 155423 - DNA, 25 bp, Probe Sequence
aaagcttgtaagcagtctttggggc

SEQ ID NO: 155424 - DNA, 25 bp, Probe Sequence
aaagcctaaatgctagttgtgggaa

SEQ ID NO: 155425 - DNA, 25 bp, Probe Sequence
aaatgaccaaagatgacctgtggta

SEQ ID NO: 155426 - DNA, 25 bp, Probe Sequence
aaatgaccaaagatgacctgtggta

SEQ ID NO: 155427 - DNA, 25 bp, Probe Sequence
aaatcccactggatgccacttggaa

SEQ ID NO: 155428 - DNA, 25 bp, Probe Sequence
aaatcgtccgcgatgacatgctgtg

SEQ ID NO: 155429 - DNA, 25 bp, Probe Sequence
aaatcagtgcgagcttagcgctgtg

SEQ ID NO: 155430 - DNA, 25 bp, Probe Sequence
aaaggctgcgaggttgtggtgtctg

SEQ ID NO: 155431 - DNA, 25 bp, Probe Sequence
aaatggccagagttgtgtgtggttt

SEQ ID NO: 155432 - DNA, 25 bp, Probe Sequence
aaatgagccatccatcggggagttt

SEQ ID NO: 155433 - DNA, 25 bp, Probe Sequence
aaatgagcgtcactatggggccttg

SEQ ID NO: 155434 - DNA, 25 bp, Probe Sequence
aaatgattctcacaagcaaccctga

SEQ ID NO: 155435 - DNA, 25 bp, Probe Sequence
aaatgcactccagaagaaaatctca

SEQ ID NO: 155436 - DNA, 25 bp, Probe Sequence
aaatgagtatccatcaggaaatcta

SEQ ID NO: 155437 - DNA, 25 bp, Probe Sequence
aaaggtttattccagagaagccagg

SEQ ID NO: 155438 - DNA, 25 bp, Probe Sequence
aaatgtgtttttcctgagagacaag

SEQ ID NO: 155439 - DNA, 25 bp, Probe Sequence
aaatgcagtatttcagcctgattgt

SEQ ID NO: 155440 - DNA, 25 bp, Probe Sequence
aaatgagcatataacccagacttga

SEQ ID NO: 155441 - DNA, 25 bp, Probe Sequence
aaatgaatcatcaaagctcacacca

SEQ ID NO: 155442 - DNA, 25 bp, Probe Sequence
aaatgaactgataactctagccaca

SEQ ID NO: 155443 - DNA, 25 bp, Probe Sequence
aaatgtattgtgaatttctcagaca

SEQ ID NO: 155444 - DNA, 25 bp, Probe Sequence
aaatgttctgtcaaatgtgtctcac

SEQ ID NO: 155445 - DNA, 25 bp, Probe Sequence
aaatgtttgtcactcttactgcaca

SEQ ID NO: 155446 - DNA, 25 bp, Probe Sequence
aaatgtctatgttttctactccaat

SEQ ID NO: 155447 - DNA, 25 bp, Probe Sequence
aaatcttgtgttaacttgcctccat

SEQ ID NO: 155448 - DNA, 25 bp, Probe Sequence
aaatgctgtgaattactcttcctcc

SEQ ID NO: 155449 - DNA, 25 bp, Probe Sequence
aaatggtgaattgctctgggttaga

SEQ ID NO: 155450 - DNA, 25 bp, Probe Sequence
aaatggggctggtcttcaggcttga

SEQ ID NO: 155451 - DNA, 25 bp, Probe Sequence
aaatgcggactgatgttagactttg

SEQ ID NO: 155452 - DNA, 25 bp, Probe Sequence
aaatgcgagttttgttgatgattct

SEQ ID NO: 155453 - DNA, 25 bp, Probe Sequence
aaatgaaggtctggtgtatatgttt

SEQ ID NO: 155454 - DNA, 25 bp, Probe Sequence
aaatgcaatggttctctgttgtgtg

SEQ ID NO: 155455 - DNA, 25 bp, Probe Sequence
aaatgaatggaaatcgtcttggacg

SEQ ID NO: 155456 - DNA, 25 bp, Probe Sequence
aaatgtacagaaatctattttataa

SEQ ID NO: 155457 - DNA, 25 bp, Probe Sequence
aaatgctgacaatccagagttaata

SEQ ID NO: 155458 - DNA, 25 bp, Probe Sequence
aaatgcaggaagttcagagttctag

SEQ ID NO: 155459 - DNA, 25 bp, Probe Sequence
aaatgcacgcaagccattatctctc

SEQ ID NO: 155460 - DNA, 25 bp, Probe Sequence
aaatgccacagatgcgtgttgctcc

SEQ ID NO: 155461 - DNA, 25 bp, Probe Sequence
aaatgtaaaaagatctcacccacca

SEQ ID NO: 155462 - DNA, 25 bp, Probe Sequence
aaatggagaaaccctctgactagtc

SEQ ID NO: 155463 - DNA, 25 bp, Probe Sequence
aaatggaaaagccagccggcagtga

SEQ ID NO: 155464 - DNA, 25 bp, Probe Sequence
aaaggacaacatgcagccaggcaca

SEQ ID NO: 155465 - DNA, 25 bp, Probe Sequence
aaatcggccaagaagctcagaagca

SEQ ID NO: 155466 - DNA, 25 bp, Probe Sequence
aaatggagctcgaggccatgagcag

SEQ ID NO: 155467 - DNA, 25 bp, Probe Sequence
aaaggcagccaggcgtgagcagcag

SEQ ID NO: 155468 - DNA, 25 bp, Probe Sequence
aaatgtcagacaacatgggcaaaat

SEQ ID NO: 155469 - DNA, 25 bp, Probe Sequence
aaagtagacatgacaagtgaacagc

SEQ ID NO: 155470 - DNA, 25 bp, Probe Sequence
aaagctagcctgcaggtggagggga

SEQ ID NO: 155471 - DNA, 25 bp, Probe Sequence
aaaggaggcaaacgtgggctgggca

SEQ ID NO: 155472 - DNA, 25 bp, Probe Sequence
aaaggcagggcccaggccctggagc

SEQ ID NO: 155473 - DNA, 25 bp, Probe Sequence
aaaggcggaccgagacagtgcagaa

SEQ ID NO: 155474 - DNA, 25 bp, Probe Sequence
aacggtgtgaacaggtcaagaataa

SEQ ID NO: 155475 - DNA, 25 bp, Probe Sequence
aagggtgcaaagtgattaaggctct

SEQ ID NO: 155476 - DNA, 25 bp, Probe Sequence
aaagggtagctagattgaaagctct

SEQ ID NO: 155477 - DNA, 25 bp, Probe Sequence
aaagggttatcaggatcggccacca

SEQ ID NO: 155478 - DNA, 25 bp, Probe Sequence
aaaggagtttcagccttgccatgtc

SEQ ID NO: 155479 - DNA, 25 bp, Probe Sequence
aaatctgacttttacatttggcgtc

SEQ ID NO: 155480 - DNA, 25 bp, Probe Sequence
aaatctgactgctttactttgatgt

SEQ ID NO: 155481 - DNA, 25 bp, Probe Sequence
aaatctacatgtttactatttctca

SEQ ID NO: 155482 - DNA, 25 bp, Probe Sequence
aaatctcaatgtatcagcttttttt

SEQ ID NO: 155483 - DNA, 25 bp, Probe Sequence
aaatgccaaacactagctctgtatt

SEQ ID NO: 155484 - DNA, 25 bp, Probe Sequence
aaatgctcacaattgtgcattctta

SEQ ID NO: 155485 - DNA, 25 bp, Probe Sequence
aaatgctcaagacttcattatttgc

SEQ ID NO: 155486 - DNA, 25 bp, Probe Sequence
aaagctatatggctatttggatgac

SEQ ID NO: 155487 - DNA, 25 bp, Probe Sequence
aaatgccaaggcattctgtggaatg

SEQ ID NO: 155488 - DNA, 25 bp, Probe Sequence
aaatctcagtacatctataggaagt

SEQ ID NO: 155489 - DNA, 25 bp, Probe Sequence
aaagtcattaatctaaggaactgat

SEQ ID NO: 155490 - DNA, 25 bp, Probe Sequence
aaatctctgtaaaaacgtgtagtgt

SEQ ID NO: 155491 - DNA, 25 bp, Probe Sequence
aaatctagtattaaccgcattatga

SEQ ID NO: 155492 - DNA, 25 bp, Probe Sequence
aaatgctagtataaacaaacaaatt

SEQ ID NO: 155493 - DNA, 25 bp, Probe Sequence
aaaggcagacataggctcaaaaaaa

SEQ ID NO: 155494 - DNA, 25 bp, Probe Sequence
aaatgtcgacattactctgaaggga

SEQ ID NO: 155495 - DNA, 25 bp, Probe Sequence
aaatgcacgacaccctgggaggggt

SEQ ID NO: 155496 - DNA, 25 bp, Probe Sequence
aaatgcgtgaacccgggaggcggag

SEQ ID NO: 155497 - DNA, 25 bp, Probe Sequence
aaatgggataagacacagaggggga

SEQ ID NO: 155498 - DNA, 25 bp, Probe Sequence
aaagggtaacttcaggtgtgcagcc

SEQ ID NO: 155499 - DNA, 25 bp, Probe Sequence
aaagatttaatctgccaagggccga

SEQ ID NO: 155500 - DNA, 25 bp, Probe Sequence
aaagacctaatggagctccaggccc

SEQ ID NO: 155501 - DNA, 25 bp, Probe Sequence
aaaggtgataatgtgcctcaggtta

SEQ ID NO: 155502 - DNA, 25 bp, Probe Sequence
aaatgtggatttgtgctcttgtatt

SEQ ID NO: 155503 - DNA, 25 bp, Probe Sequence
aaatgtcgatgattgttgccaggct

SEQ ID NO: 155504 - DNA, 25 bp, Probe Sequence
aaatggcctgcattttggagatgct

SEQ ID NO: 155505 - DNA, 25 bp, Probe Sequence
aaatgtcctgtctcatggaagcact

SEQ ID NO: 155506 - DNA, 25 bp, Probe Sequence
aaatgcacacctttattcagaactt

SEQ ID NO: 155507 - DNA, 25 bp, Probe Sequence
aacagcaacgcttcggtcagggtat

SEQ ID NO: 155508 - DNA, 25 bp, Probe Sequence
aaagatgactgatgtggtagggtaa

SEQ ID NO: 155509 - DNA, 25 bp, Probe Sequence
aaagcagaagcacgtcagttaggat

SEQ ID NO: 155510 - DNA, 25 bp, Probe Sequence
aaaggaagtcagaagcttaagtgac

SEQ ID NO: 155511 - DNA, 25 bp, Probe Sequence
aaatgtgaagtgctagctgaaggat

SEQ ID NO: 155512 - DNA, 25 bp, Probe Sequence
aaatggagagtgtagcctgagggct

SEQ ID NO: 155513 - DNA, 25 bp, Probe Sequence
aaatggagagtgtagcctgagggct

SEQ ID NO: 155514 - DNA, 25 bp, Probe Sequence
aaatggagagtgtagcctgagggct

SEQ ID NO: 155515 - DNA, 25 bp, Probe Sequence
aaatgggagggtccggagcagctgt

SEQ ID NO: 155516 - DNA, 25 bp, Probe Sequence
aaatgagctgggtgtggtggcgcgt

SEQ ID NO: 155517 - DNA, 25 bp, Probe Sequence
aaatgcagttgaggccgggtgcggt

SEQ ID NO: 155518 - DNA, 25 bp, Probe Sequence
aaatgctattagtccgtcgtgcttg

SEQ ID NO: 155519 - DNA, 25 bp, Probe Sequence
aaatgcttctagtattgtttcccca

SEQ ID NO: 155520 - DNA, 25 bp, Probe Sequence
aaatctaaacattctttcccaccat

SEQ ID NO: 155521 - DNA, 25 bp, Probe Sequence
aaatcccagaattttgttccaccat

SEQ ID NO: 155522 - DNA, 25 bp, Probe Sequence
aaatcgacagaattgaatgtatcca

SEQ ID NO: 155523 - DNA, 25 bp, Probe Sequence
aaatcgaccaaatttgactctgcaa

SEQ ID NO: 155524 - DNA, 25 bp, Probe Sequence
aaatctgaaaaagctactccacatc

SEQ ID NO: 155525 - DNA, 25 bp, Probe Sequence
aaatgctaaaattcttattgcaaat

SEQ ID NO: 155526 - DNA, 25 bp, Probe Sequence
aaatgtagcaaatcagtactgtaaa

SEQ ID NO: 155527 - DNA, 25 bp, Probe Sequence
aaatggagacggtcatccctgtaga

SEQ ID NO: 155528 - DNA, 25 bp, Probe Sequence
aaagggatcggagccatcatcgcgc

SEQ ID NO: 155529 - DNA, 25 bp, Probe Sequence
aaagaggggaagtacatcattgaac

SEQ ID NO: 155530 - DNA, 25 bp, Probe Sequence
aaatgggtggtaggacagcttctga

SEQ ID NO: 155531 - DNA, 25 bp, Probe Sequence
aaaggcgtggtcacagacctgctca

SEQ ID NO: 155532 - DNA, 25 bp, Probe Sequence
aaaggtttctcagagacacagctga

SEQ ID NO: 155533 - DNA, 25 bp, Probe Sequence
aaatctgtatctcaaacccacatga

SEQ ID NO: 155534 - DNA, 25 bp, Probe Sequence
aaagcctactgttaaccagaagcct

SEQ ID NO: 155535 - DNA, 25 bp, Probe Sequence
aaagacccgggagcgagaagccaag

SEQ ID NO: 155536 - DNA, 25 bp, Probe Sequence
aaagacccgggagcgagaagccaag

SEQ ID NO: 155537 - DNA, 25 bp, Probe Sequence
aaagtagccctgaaggtggatacca

SEQ ID NO: 155538 - DNA, 25 bp, Probe Sequence
aaagtgaggcttctgggtgcatacc

SEQ ID NO: 155539 - DNA, 25 bp, Probe Sequence
aaagtgaggcctcttggtatccttt

SEQ ID NO: 155540 - DNA, 25 bp, Probe Sequence
aaagtgaggccgggagcctgagcct

SEQ ID NO: 155541 - DNA, 25 bp, Probe Sequence
aaagtgatgcatgccaaaccaaact

SEQ ID NO: 155542 - DNA, 25 bp, Probe Sequence
aaagaagggccagacccataccttg

SEQ ID NO: 155543 - DNA, 25 bp, Probe Sequence
aaagaaccaacaaagacctatcctg

SEQ ID NO: 155544 - DNA, 25 bp, Probe Sequence
aagaaattcaaacaactcctccatt

SEQ ID NO: 155545 - DNA, 25 bp, Probe Sequence
aaagatttcgaacaatcacctccag

SEQ ID NO: 155546 - DNA, 25 bp, Probe Sequence
aaagcaaagtgcaagcgagtaccta

SEQ ID NO: 155547 - DNA, 25 bp, Probe Sequence
aaatgcaagttactccttacctatc

SEQ ID NO: 155548 - DNA, 25 bp, Probe Sequence
aaatgcaaataccttcatatcccct

SEQ ID NO: 155549 - DNA, 25 bp, Probe Sequence
aaatgaaggacctcaaagcacctga

SEQ ID NO: 155550 - DNA, 25 bp, Probe Sequence
aaagtggaggactccaaccctcaga

SEQ ID NO: 155551 - DNA, 25 bp, Probe Sequence
aaagttgaggggtgctgaaaccaga

SEQ ID NO: 155552 - DNA, 25 bp, Probe Sequence
aaggggaggtcctgtggtagcttga

SEQ ID NO: 155553 - DNA, 25 bp, Probe Sequence
aaagggagagccacctggtacttgt

SEQ ID NO: 155554 - DNA, 25 bp, Probe Sequence
aaagggaacccagctctaatacatt

SEQ ID NO: 155555 - DNA, 25 bp, Probe Sequence
aaagaggaggccgaagctcggtcgc

SEQ ID NO: 155556 - DNA, 25 bp, Probe Sequence
aatatgggggcctgcctaggttggt

SEQ ID NO: 155557 - DNA, 25 bp, Probe Sequence
aactgagggggatcccaggtctggg

SEQ ID NO: 155558 - DNA, 25 bp, Probe Sequence
aaaggaggggatccccaaggctctg

SEQ ID NO: 155559 - DNA, 25 bp, Probe Sequence
aaatggattcccatcccaaagtctg

SEQ ID NO: 155560 - DNA, 25 bp, Probe Sequence
aaatggatcccagctgtacaatagg

SEQ ID NO: 155561 - DNA, 25 bp, Probe Sequence
aaagtgatacccagtagcagaaatg

SEQ ID NO: 155562 - DNA, 25 bp, Probe Sequence
aaatggaatcccaatctatctaaat

SEQ ID NO: 155563 - DNA, 25 bp, Probe Sequence
aaatgtgatacccatagcttccatg

SEQ ID NO: 155564 - DNA, 25 bp, Probe Sequence
aaatgctcagaggtctgtgctacct

SEQ ID NO: 155565 - DNA, 25 bp, Probe Sequence
aaatgctcagagttctttatgtatt

SEQ ID NO: 155566 - DNA, 25 bp, Probe Sequence
aaatgctggtgctgcttttgtacat

SEQ ID NO: 155567 - DNA, 25 bp, Probe Sequence
aaatgctggtgctgcttttgtacat

SEQ ID NO: 155568 - DNA, 25 bp, Probe Sequence
aaatgctggacatctttgtgcacca

SEQ ID NO: 155569 - DNA, 25 bp, Probe Sequence
aaatgcagagccaacttttctgtat

SEQ ID NO: 155570 - DNA, 25 bp, Probe Sequence
aaatgcaagcgccctgaactttttt

SEQ ID NO: 155571 - DNA, 25 bp, Probe Sequence
aaatgctcaccacttagcctgtttt

SEQ ID NO: 155572 - DNA, 25 bp, Probe Sequence
aaagtcaatagtcaacagtttttat

SEQ ID NO: 155573 - DNA, 25 bp, Probe Sequence
aaaggagaagttcaagtttcagata

SEQ ID NO: 155574 - DNA, 25 bp, Probe Sequence
aaaggagatatgagccaagttttga

SEQ ID NO: 155575 - DNA, 25 bp, Probe Sequence
aaaggtgcatcgtgaccaaattgtt

SEQ ID NO: 155576 - DNA, 25 bp, Probe Sequence
aaaggttactcttccaatctggatt

SEQ ID NO: 155577 - DNA, 25 bp, Probe Sequence
aaagtggtcacctacaggatcgtat

SEQ ID NO: 155578 - DNA, 25 bp, Probe Sequence
aaaggagtgatgaaactggagtaat

SEQ ID NO: 155579 - DNA, 25 bp, Probe Sequence
aaatggagatgagcctctgaggaaa

SEQ ID NO: 155580 - DNA, 25 bp, Probe Sequence
aaatggacatgatttcctacaatta

SEQ ID NO: 155581 - DNA, 25 bp, Probe Sequence
aaatgctgacataacaccaaacttc

SEQ ID NO: 155582 - DNA, 25 bp, Probe Sequence
aaatggacataggactcaaagtttc

SEQ ID NO: 155583 - DNA, 25 bp, Probe Sequence
aaagtccaaggagcaaaatttgcct

SEQ ID NO: 155584 - DNA, 25 bp, Probe Sequence
aaatgtccactgcagcactgaatat

SEQ ID NO: 155585 - DNA, 25 bp, Probe Sequence
aaatgtctactgttcacgaaatcct

SEQ ID NO: 155586 - DNA, 25 bp, Probe Sequence
aaatgctctagtttcaagatagtta

SEQ ID NO: 155587 - DNA, 25 bp, Probe Sequence
aaatgctctatttacaaatttacat

SEQ ID NO: 155588 - DNA, 25 bp, Probe Sequence
aaatgttcatctgacataccttaat

SEQ ID NO: 155589 - DNA, 25 bp, Probe Sequence
aaatgctttcatgacaaggcccagt

SEQ ID NO: 155590 - DNA, 25 bp, Probe Sequence
aaatgcttcaatgaacactggaggt

SEQ ID NO: 155591 - DNA, 25 bp, Probe Sequence
aaatgctctctgtcttagcaggaga

SEQ ID NO: 155592 - DNA, 25 bp, Probe Sequence
aaatccttgcatacttctgtgacac

SEQ ID NO: 155593 - DNA, 25 bp, Probe Sequence
aaatcctgtctttgactgaggcatc

SEQ ID NO: 155594 - DNA, 25 bp, Probe Sequence
aaatgtctgttatgcaatgctggag

SEQ ID NO: 155595 - DNA, 25 bp, Probe Sequence
aaatgtctggctgagttgctggaag

SEQ ID NO: 155596 - DNA, 25 bp, Probe Sequence
aaaggctgcagatcagtggtctgaa

SEQ ID NO: 155597 - DNA, 25 bp, Probe Sequence
aaagactgcatgcccaagagactgg

SEQ ID NO: 155598 - DNA, 25 bp, Probe Sequence
aaaggctgagctgcaggggctttca

SEQ ID NO: 155599 - DNA, 25 bp, Probe Sequence
aaaggctgagctgcaggggctttca

SEQ ID NO: 155600 - DNA, 25 bp, Probe Sequence
aaagggacgacgggagctgcatgaa

SEQ ID NO: 155601 - DNA, 25 bp, Probe Sequence
aaatgtggcagccactgtgggccag

SEQ ID NO: 155602 - DNA, 25 bp, Probe Sequence
aaatgaacacattgcaggggccagt

SEQ ID NO: 155603 - DNA, 25 bp, Probe Sequence
aaagaaacttcgtatggcctgtcct

SEQ ID NO: 155604 - DNA, 25 bp, Probe Sequence
aaaggtgagtttgagctgccttccc

SEQ ID NO: 155605 - DNA, 25 bp, Probe Sequence
aaatgtgctgatgtgtccaatccct

SEQ ID NO: 155606 - DNA, 25 bp, Probe Sequence
aaatgtgcatgagatgtttgctaaa

SEQ ID NO: 155607 - DNA, 25 bp, Probe Sequence
aaatgatgaaacttatggctacaaa

SEQ ID NO: 155608 - DNA, 25 bp, Probe Sequence
aaatgagataatgaccgtacataga

SEQ ID NO: 155609 - DNA, 25 bp, Probe Sequence
aaatgaactcacccacgatatcatc

SEQ ID NO: 155610 - DNA, 25 bp, Probe Sequence
aaatgaaatgcttccacagctaacg

SEQ ID NO: 155611 - DNA, 25 bp, Probe Sequence
aaatgcacacattgttacagctaga

SEQ ID NO: 155612 - DNA, 25 bp, Probe Sequence
aaatgcccatttcgaagatatacaa

SEQ ID NO: 155613 - DNA, 25 bp, Probe Sequence
aaatgcctcataaatgatagtacaa

SEQ ID NO: 155614 - DNA, 25 bp, Probe Sequence
aaatgcacgcttttgtcatgtcaaa

SEQ ID NO: 155615 - DNA, 25 bp, Probe Sequence
aaagggcatccattgatttcaagac

SEQ ID NO: 155616 - DNA, 25 bp, Probe Sequence
aaagttggcctctatcctaatgact

SEQ ID NO: 155617 - DNA, 25 bp, Probe Sequence
aaagattacctgtctcttgactgca

SEQ ID NO: 155618 - DNA, 25 bp, Probe Sequence
aaaggctacgtcttccagatggaga

SEQ ID NO: 155619 - DNA, 25 bp, Probe Sequence
aaaggctacgtgactcctgtgaagg

SEQ ID NO: 155620 - DNA, 25 bp, Probe Sequence
aaaggctacgtgactcctgtgaagg

SEQ ID NO: 155621 - DNA, 25 bp, Probe Sequence
aaaggctactattcatcctctgtga

SEQ ID NO: 155622 - DNA, 25 bp, Probe Sequence
aaatgactacttacagcacatatta

SEQ ID NO: 155623 - DNA, 25 bp, Probe Sequence
aaatccatgagcattcagaattatt

SEQ ID NO: 155624 - DNA, 25 bp, Probe Sequence
aaatgcagcatccacttcataatta

SEQ ID NO: 155625 - DNA, 25 bp, Probe Sequence
aaatggaggatggtgctcatcttga

SEQ ID NO: 155626 - DNA, 25 bp, Probe Sequence
aaatgagatgattcgtctgaactga

SEQ ID NO: 155627 - DNA, 25 bp, Probe Sequence
aaatgcagatactgtcttgagcaga

SEQ ID NO: 155628 - DNA, 25 bp, Probe Sequence
aaatgagcaggcactccttggagca

SEQ ID NO: 155629 - DNA, 25 bp, Probe Sequence
aaaggcgtctgacagtcctgagaat

SEQ ID NO: 155630 - DNA, 25 bp, Probe Sequence
aaaggcagtatccaagtccttcacc

SEQ ID NO: 155631 - DNA, 25 bp, Probe Sequence
aaagatactgcatgggtcatttccc

SEQ ID NO: 155632 - DNA, 25 bp, Probe Sequence
aaagatactcatcagtacatattta

SEQ ID NO: 155633 - DNA, 25 bp, Probe Sequence
aaagaagcctggttactgatttgta

SEQ ID NO: 155634 - DNA, 25 bp, Probe Sequence
aaagaattgctgatggtcggattgc

SEQ ID NO: 155635 - DNA, 25 bp, Probe Sequence
aaatggttctactgcatcctttggc

SEQ ID NO: 155636 - DNA, 25 bp, Probe Sequence
aaatggtagacctgtaattgtggga

SEQ ID NO: 155637 - DNA, 25 bp, Probe Sequence
aaaggtcagcatgttctaattggga

SEQ ID NO: 155638 - DNA, 25 bp, Probe Sequence
aaaggtcagcatgttctaattggga

SEQ ID NO: 155639 - DNA, 25 bp, Probe Sequence
aaaggatatgctaacttatttgggc

SEQ ID NO: 155640 - DNA, 25 bp, Probe Sequence
aaaggatgtgctgacttttttcctt

SEQ ID NO: 155641 - DNA, 25 bp, Probe Sequence
aaaggattctgcctctttagtcctc

SEQ ID NO: 155642 - DNA, 25 bp, Probe Sequence
aaatggttcgctattcacttgaccc

SEQ ID NO: 155643 - DNA, 25 bp, Probe Sequence
aaatgagatcccatttgactccctc

SEQ ID NO: 155644 - DNA, 25 bp, Probe Sequence
aaatgagtctgagtgtaatagccca

SEQ ID NO: 155645 - DNA, 25 bp, Probe Sequence
aaagttgatagtatatccaccacct

SEQ ID NO: 155646 - DNA, 25 bp, Probe Sequence
aaagaaaatgttccagccaggcgcg

SEQ ID NO: 155647 - DNA, 25 bp, Probe Sequence
aaagtagaagtatacctgcccaggt

SEQ ID NO: 155648 - DNA, 25 bp, Probe Sequence
aaaggagccaaattcacctgcaggg

SEQ ID NO: 155649 - DNA, 25 bp, Probe Sequence
aaatggatgcctcatcagaacatgc

SEQ ID NO: 155650 - DNA, 25 bp, Probe Sequence
aaatggatgcccagaggactcccaa

SEQ ID NO: 155651 - DNA, 25 bp, Probe Sequence
aaaggagcattgaggaggcccaaga

SEQ ID NO: 155652 - DNA, 25 bp, Probe Sequence
aaaggagcattgtagcaggggaagg

SEQ ID NO: 155653 - DNA, 25 bp, Probe Sequence
aaaggtattctacactggacagatg

SEQ ID NO: 155654 - DNA, 25 bp, Probe Sequence
aaagggtccgagcacaagccaagaa

SEQ ID NO: 155655 - DNA, 25 bp, Probe Sequence
aaaggaactgctcgtagaaggaaga

SEQ ID NO: 155656 - DNA, 25 bp, Probe Sequence
aaaggaggttttcgatcagcccaga

SEQ ID NO: 155657 - DNA, 25 bp, Probe Sequence
aaaggcgtgtttgactgcaggaaga

SEQ ID NO: 155658 - DNA, 25 bp, Probe Sequence
aaagtctgttttcaatcctggtaat

SEQ ID NO: 155659 - DNA, 25 bp, Probe Sequence
aaagtctggcttggagagtctctgg

SEQ ID NO: 155660 - DNA, 25 bp, Probe Sequence
aaagtctccagtggaagctcatgga

SEQ ID NO: 155661 - DNA, 25 bp, Probe Sequence
aaatgtcatctcaagtcaagtcact

SEQ ID NO: 155662 - DNA, 25 bp, Probe Sequence
aaatgtgtgctcaagctaataagtt

SEQ ID NO: 155663 - DNA, 25 bp, Probe Sequence
aaatgtgtcataagtcctataaatg

SEQ ID NO: 155664 - DNA, 25 bp, Probe Sequence
aaatgtgtttccactatacttggga

SEQ ID NO: 155665 - DNA, 25 bp, Probe Sequence
aaagtgttttgaagattagttggat

SEQ ID NO: 155666 - DNA, 25 bp, Probe Sequence
aaatgcttgttttagattgaggtta

SEQ ID NO: 155667 - DNA, 25 bp, Probe Sequence
aaatgcttttgttcagttctgtata

SEQ ID NO: 155668 - DNA, 25 bp, Probe Sequence
aaatgcttttgttcagttctgtata

SEQ ID NO: 155669 - DNA, 25 bp, Probe Sequence
aaatgttaatggtagctttgataac

SEQ ID NO: 155670 - DNA, 25 bp, Probe Sequence
aaatgattagtgtactgtttgaaac

SEQ ID NO: 155671 - DNA, 25 bp, Probe Sequence
aaagattgagtctatttgggaaatt

SEQ ID NO: 155672 - DNA, 25 bp, Probe Sequence
aaagttgattcgtccattggtattt

SEQ ID NO: 155673 - DNA, 25 bp, Probe Sequence
aaagtatgcaacactcagtttattt

SEQ ID NO: 155674 - DNA, 25 bp, Probe Sequence
aaagttctacatttcatgctcttag

SEQ ID NO: 155675 - DNA, 25 bp, Probe Sequence
aaaggttatcattggtcgttgagtt

SEQ ID NO: 155676 - DNA, 25 bp, Probe Sequence
aaagtttgcatgtctggtcaggctg

SEQ ID NO: 155677 - DNA, 25 bp, Probe Sequence
aaagtttcagtgaggcagggcacag

SEQ ID NO: 155678 - DNA, 25 bp, Probe Sequence
aaagaatagttcaggcagggtgcag

SEQ ID NO: 155679 - DNA, 25 bp, Probe Sequence
aaaggacagttcacaatctagtaat

SEQ ID NO: 155680 - DNA, 25 bp, Probe Sequence
aaaggcccaatcagaagccgcgatt

SEQ ID NO: 155681 - DNA, 25 bp, Probe Sequence
aaagtgcctctaaagaaaccagctt

SEQ ID NO: 155682 - DNA, 25 bp, Probe Sequence
aaaggactgcctcaaacagcggttt

SEQ ID NO: 155683 - DNA, 25 bp, Probe Sequence
aaatggaagccacaagcagcccagc

SEQ ID NO: 155684 - DNA, 25 bp, Probe Sequence
aaatgagaaccatactgcacccatc

SEQ ID NO: 155685 - DNA, 25 bp, Probe Sequence
aaatgaggaccatcactgtatggaa

SEQ ID NO: 155686 - DNA, 25 bp, Probe Sequence
aaatgggcagccacacgatgggcca

SEQ ID NO: 155687 - DNA, 25 bp, Probe Sequence
aaatgggcagccacacgatgggcca

SEQ ID NO: 155688 - DNA, 25 bp, Probe Sequence
aaatgggagctggtcacacagggcc

SEQ ID NO: 155689 - DNA, 25 bp, Probe Sequence
aaatggaagtgtctgccagctgggc

SEQ ID NO: 155690 - DNA, 25 bp, Probe Sequence
aaagtaagcttgttcgcctggagcc

SEQ ID NO: 155691 - DNA, 25 bp, Probe Sequence
aaatgataaatttccctctggagta

SEQ ID NO: 155692 - DNA, 25 bp, Probe Sequence
aaatgctaaagttcgcctattgcgg

SEQ ID NO: 155693 - DNA, 25 bp, Probe Sequence
aaatgaagtaggctgccatattcag

SEQ ID NO: 155694 - DNA, 25 bp, Probe Sequence
aaagaagtgatcgagctgcctgtta

SEQ ID NO: 155695 - DNA, 25 bp, Probe Sequence
aaatgaatattccctctcgatgctg

SEQ ID NO: 155696 - DNA, 25 bp, Probe Sequence
aaagaatgattcagtcttgacggtg

SEQ ID NO: 155697 - DNA, 25 bp, Probe Sequence
aaagaatctaaaccttacatgtgta

SEQ ID NO: 155698 - DNA, 25 bp, Probe Sequence
aaagtagtttgaccctcacagttca

SEQ ID NO: 155699 - DNA, 25 bp, Probe Sequence
aaagggttgggacctcacatgccca

SEQ ID NO: 155700 - DNA, 25 bp, Probe Sequence
aaaggagtgaagcggccagcacgcc

SEQ ID NO: 155701 - DNA, 25 bp, Probe Sequence
aaatggcggagaccgtggctgacac

SEQ ID NO: 155702 - DNA, 25 bp, Probe Sequence
aaatggcggagaccgtggctgacac

SEQ ID NO: 155703 - DNA, 25 bp, Probe Sequence
aaatggcggatgacgccggtgcagc

SEQ ID NO: 155704 - DNA, 25 bp, Probe Sequence
aaatggggagcaaggctctgccagc

SEQ ID NO: 155705 - DNA, 25 bp, Probe Sequence
aaatgtggggagcgcttcaggcaga

SEQ ID NO: 155706 - DNA, 25 bp, Probe Sequence
aaaggagggagctactctcaggctg

SEQ ID NO: 155707 - DNA, 25 bp, Probe Sequence
aaaggagggagctactctcaggctg

SEQ ID NO: 155708 - DNA, 25 bp, Probe Sequence
aaaggagggagctactctcaggctg

SEQ ID NO: 155709 - DNA, 25 bp, Probe Sequence
aaaggagtgtgcagacttgtggccc

SEQ ID NO: 155710 - DNA, 25 bp, Probe Sequence
aaatgaatctgtgtaattgggccca

SEQ ID NO: 155711 - DNA, 25 bp, Probe Sequence
aaatgatggtgtctcaggtggtctt

SEQ ID NO: 155712 - DNA, 25 bp, Probe Sequence
aaagtagctgtgctaggggcctctg

SEQ ID NO: 155713 - DNA, 25 bp, Probe Sequence
aaaggcagcaggctaccggacggca

SEQ ID NO: 155714 - DNA, 25 bp, Probe Sequence
aaatgagcaacgcatccggatgacg

SEQ ID NO: 155715 - DNA, 25 bp, Probe Sequence
aaagcgctgagggagctcggtacgc

SEQ ID NO: 155716 - DNA, 25 bp, Probe Sequence
aagacgccgatctcacggatacagc

SEQ ID NO: 155717 - DNA, 25 bp, Probe Sequence
aaaggatcgccatccggatcacggc

SEQ ID NO: 155718 - DNA, 25 bp, Probe Sequence
aaaggacgcctttcaggcattagct

SEQ ID NO: 155719 - DNA, 25 bp, Probe Sequence
aaaggacgcctttcaggcattagct

SEQ ID NO: 155720 - DNA, 25 bp, Probe Sequence
aaaggtcaggcttaagacatttcta

SEQ ID NO: 155721 - DNA, 25 bp, Probe Sequence
aaaggtaggtgtccatgcagatttt

SEQ ID NO: 155722 - DNA, 25 bp, Probe Sequence
aaatgctatagcctgtcacaacttt

SEQ ID NO: 155723 - DNA, 25 bp, Probe Sequence
aaatgtgatagtctcagaaacattt

SEQ ID NO: 155724 - DNA, 25 bp, Probe Sequence
aaagatgaaaggcaggcctatttca

SEQ ID NO: 155725 - DNA, 25 bp, Probe Sequence
aaatgagaaaccgtcgccgtatcca

SEQ ID NO: 155726 - DNA, 25 bp, Probe Sequence
aaagagtaatgccaatctgccgttc

SEQ ID NO: 155727 - DNA, 25 bp, Probe Sequence
aaaggcataagtcattccaatcagc

SEQ ID NO: 155728 - DNA, 25 bp, Probe Sequence
aaaggcatcataggtttctgaaaga

SEQ ID NO: 155729 - DNA, 25 bp, Probe Sequence
aaatggacatagcgtctgtgaagag

SEQ ID NO: 155730 - DNA, 25 bp, Probe Sequence
aaatggatcctctgattggacaggc

SEQ ID NO: 155731 - DNA, 25 bp, Probe Sequence
aaagtacactccgagcggtcaggct

SEQ ID NO: 155732 - DNA, 25 bp, Probe Sequence
aaagtacactccgagcggtcaggct

SEQ ID NO: 155733 - DNA, 25 bp, Probe Sequence
aaagtacactccgagcggtcaggct

SEQ ID NO: 155734 - DNA, 25 bp, Probe Sequence
aaagataacgccacgtgtgatggcc

SEQ ID NO: 155735 - DNA, 25 bp, Probe Sequence
aaagattaagccatgcatgtctaag

SEQ ID NO: 155736 - DNA, 25 bp, Probe Sequence
aaagactacgccaagctctgaaggg

SEQ ID NO: 155737 - DNA, 25 bp, Probe Sequence
aaatgatctatacaagctccaagga

SEQ ID NO: 155738 - DNA, 25 bp, Probe Sequence
aaatgtttagatttgccacatacca

SEQ ID NO: 155739 - DNA, 25 bp, Probe Sequence
aaatgctattaatgtcgtcactcac

SEQ ID NO: 155740 - DNA, 25 bp, Probe Sequence
aaatgctatttgtagtcttgatata

SEQ ID NO: 155741 - DNA, 25 bp, Probe Sequence
aaatgctagctctaaattgtgtaca

SEQ ID NO: 155742 - DNA, 25 bp, Probe Sequence
aaatgcaccttatatgtttaaacaa

SEQ ID NO: 155743 - DNA, 25 bp, Probe Sequence
aaatgacactttctgctttacagaa

SEQ ID NO: 155744 - DNA, 25 bp, Probe Sequence
aaatgaaaatctctgcttaatggaa

SEQ ID NO: 155745 - DNA, 25 bp, Probe Sequence
aaatggagacttgtgttatcttgaa

SEQ ID NO: 155746 - DNA, 25 bp, Probe Sequence
aaaggctgacttgtatgttatgtga

SEQ ID NO: 155747 - DNA, 25 bp, Probe Sequence
aaaggcttctagttagctgctttaa

SEQ ID NO: 155748 - DNA, 25 bp, Probe Sequence
aaaggcttttgcaatatgtgcgtta

SEQ ID NO: 155749 - DNA, 25 bp, Probe Sequence
aaatgcagttttttagtagctctag

SEQ ID NO: 155750 - DNA, 25 bp, Probe Sequence
aaatgcttctttctcagtttattgg

SEQ ID NO: 155751 - DNA, 25 bp, Probe Sequence
aaatgtctccaacatggttaatgtg

SEQ ID NO: 155752 - DNA, 25 bp, Probe Sequence
aaatgacccccatttgtgtgacttc

SEQ ID NO: 155753 - DNA, 25 bp, Probe Sequence
aaatgtccactgaatttgttaattt

SEQ ID NO: 155754 - DNA, 25 bp, Probe Sequence
aaatgtcatgaagtcatttttcatt

SEQ ID NO: 155755 - DNA, 25 bp, Probe Sequence
aaatgtcatatctctgatgtctttt

SEQ ID NO: 155756 - DNA, 25 bp, Probe Sequence
aaatgtcatgattggagatgtcctt

SEQ ID NO: 155757 - DNA, 25 bp, Probe Sequence
aaaggatgatacgagagacattgtg

SEQ ID NO: 155758 - DNA, 25 bp, Probe Sequence
aaaggcagatccaagctaatatgag

SEQ ID NO: 155759 - DNA, 25 bp, Probe Sequence
aaaggcatgctccagacataaatag

SEQ ID NO: 155760 - DNA, 25 bp, Probe Sequence
aaatggctcatgtagataaggtagg

SEQ ID NO: 155761 - DNA, 25 bp, Probe Sequence
aaatggctgatttataagcagtact

SEQ ID NO: 155762 - DNA, 25 bp, Probe Sequence
aaatgatgtttttcaatgcattttt

SEQ ID NO: 155763 - DNA, 25 bp, Probe Sequence
aaatggtttgtcctgatgcttttgt

SEQ ID NO: 155764 - DNA, 25 bp, Probe Sequence
aaatggtttgtcctgatgcttttgt

SEQ ID NO: 155765 - DNA, 25 bp, Probe Sequence
aaatgagcctttgtgcgtctctgtt

SEQ ID NO: 155766 - DNA, 25 bp, Probe Sequence
aaaggactcagtgtcctctctgagt

SEQ ID NO: 155767 - DNA, 25 bp, Probe Sequence
aaaggtataggcttgccttgctgag

SEQ ID NO: 155768 - DNA, 25 bp, Probe Sequence
aaatggctaaagttgactatgcaat

SEQ ID NO: 155769 - DNA, 25 bp, Probe Sequence
aaaggcttggcgtcaggcttgaata

SEQ ID NO: 155770 - DNA, 25 bp, Probe Sequence
aaaggagtgggcaaggcagatattg

SEQ ID NO: 155771 - DNA, 25 bp, Probe Sequence
aaagtgactgcccggtcagatcagc

SEQ ID NO: 155772 - DNA, 25 bp, Probe Sequence
aaagtcgttccgatagacacgtcaa

SEQ ID NO: 155773 - DNA, 25 bp, Probe Sequence
aaagtctttcctacagaagaaacag

SEQ ID NO: 155774 - DNA, 25 bp, Probe Sequence
aaagtctgacaccaacaaacaaaca

SEQ ID NO: 155775 - DNA, 25 bp, Probe Sequence
aaatgtgtaactcattcaaccataa

SEQ ID NO: 155776 - DNA, 25 bp, Probe Sequence
aaagtgcgaattcagtcaacactga

SEQ ID NO: 155777 - DNA, 25 bp, Probe Sequence
aaaggccagatgaagacctacctgt

SEQ ID NO: 155778 - DNA, 25 bp, Probe Sequence
aaatgtccacagaaacagtaaatgt

SEQ ID NO: 155779 - DNA, 25 bp, Probe Sequence
aaaggccgaggatgctgctaaactt

SEQ ID NO: 155780 - DNA, 25 bp, Probe Sequence
aaagaccaagactgctctagtttga

SEQ ID NO: 155781 - DNA, 25 bp, Probe Sequence
aaagtggaaaggtcattttgttgca

SEQ ID NO: 155782 - DNA, 25 bp, Probe Sequence
aaactagacatcttaattggtgaaa

SEQ ID NO: 155783 - DNA, 25 bp, Probe Sequence
aaatgtaaattttatgaagctgata

SEQ ID NO: 155784 - DNA, 25 bp, Probe Sequence
aaatgataaattttctgttgtgcat

SEQ ID NO: 155785 - DNA, 25 bp, Probe Sequence
aaatgcacataattaactggttcca

SEQ ID NO: 155786 - DNA, 25 bp, Probe Sequence
aaatgactgaattcaatcaagcttt

SEQ ID NO: 155787 - DNA, 25 bp, Probe Sequence
aaatgtctgagatatatagtgtttc

SEQ ID NO: 155788 - DNA, 25 bp, Probe Sequence
aaatgatgataatcttacttttgca

SEQ ID NO: 155789 - DNA, 25 bp, Probe Sequence
aaatgttaaccttacctatctctct

SEQ ID NO: 155790 - DNA, 25 bp, Probe Sequence
aaagttcaagccagaagtttcttca

SEQ ID NO: 155791 - DNA, 25 bp, Probe Sequence
aacagttacactgcagggtttcgcc

SEQ ID NO: 155792 - DNA, 25 bp, Probe Sequence
aaatgttaacaccgggagctctcca

SEQ ID NO: 155793 - DNA, 25 bp, Probe Sequence
aaatgattaaccctggaggctgcct

SEQ ID NO: 155794 - DNA, 25 bp, Probe Sequence
aaatgtataaccttgcgaggtacag

SEQ ID NO: 155795 - DNA, 25 bp, Probe Sequence
aaatgattacctctggtgttgacag

SEQ ID NO: 155796 - DNA, 25 bp, Probe Sequence
aaagcattatcctgtggcgttgcct

SEQ ID NO: 155797 - DNA, 25 bp, Probe Sequence
aaacttgagtctattgccttgcctt

SEQ ID NO: 155798 - DNA, 25 bp, Probe Sequence
aaatgtggaattgactgcctatgcc

SEQ ID NO: 155799 - DNA, 25 bp, Probe Sequence
aaatgggagcaaggccttctctcca

SEQ ID NO: 155800 - DNA, 25 bp, Probe Sequence
aaaggaatgacatcctggctcctca

SEQ ID NO: 155801 - DNA, 25 bp, Probe Sequence
aaaggaataaagcctgcgtggcagg

SEQ ID NO: 155802 - DNA, 25 bp, Probe Sequence
aaatggcagttactggctgggcgca

SEQ ID NO: 155803 - DNA, 25 bp, Probe Sequence
aaatggcagttactggctgggcgca

SEQ ID NO: 155804 - DNA, 25 bp, Probe Sequence
aaatgaagttacaggctagcacaat

SEQ ID NO: 155805 - DNA, 25 bp, Probe Sequence
aaatgtacgtacactgaaccagaac

SEQ ID NO: 155806 - DNA, 25 bp, Probe Sequence
aaatggactctagttcaaaccagaa

SEQ ID NO: 155807 - DNA, 25 bp, Probe Sequence
aaagtgacctagaccaacaccattt

SEQ ID NO: 155808 - DNA, 25 bp, Probe Sequence
aaagctatttgagcccacggaatgt

SEQ ID NO: 155809 - DNA, 25 bp, Probe Sequence
aaatgttttgcctgccaattgaatg

SEQ ID NO: 155810 - DNA, 25 bp, Probe Sequence
aaatgtctattgccgtaaattgtta

SEQ ID NO: 155811 - DNA, 25 bp, Probe Sequence
aaatgagcatacatcttaaatcttt

SEQ ID NO: 155812 - DNA, 25 bp, Probe Sequence
aaatgatgcatattgttacactact

SEQ ID NO: 155813 - DNA, 25 bp, Probe Sequence
aaatgtatgattgctcagcccctca

SEQ ID NO: 155814 - DNA, 25 bp, Probe Sequence
aaatgtaaagcttagcacccatcat

SEQ ID NO: 155815 - DNA, 25 bp, Probe Sequence
aaatgtttcccatgatcgctcattc

SEQ ID NO: 155816 - DNA, 25 bp, Probe Sequence
aaatgtttcccatgatcgctcattc

SEQ ID NO: 155817 - DNA, 25 bp, Probe Sequence
aaatgtgttagcctcagacactact

SEQ ID NO: 155818 - DNA, 25 bp, Probe Sequence
aaagtgattcagcaccatccagaca

SEQ ID NO: 155819 - DNA, 25 bp, Probe Sequence
aaatgtggatagcagcagattcaaa

SEQ ID NO: 155820 - DNA, 25 bp, Probe Sequence
aaatgtgtgacatggcacaccaaga

SEQ ID NO: 155821 - DNA, 25 bp, Probe Sequence
aaatgtggcacatatacaccatgga

SEQ ID NO: 155822 - DNA, 25 bp, Probe Sequence
aaatgtacaagaccacaccggatgt

SEQ ID NO: 155823 - DNA, 25 bp, Probe Sequence
aaatgtccagaaaacccagaagatg

SEQ ID NO: 155824 - DNA, 25 bp, Probe Sequence
aaatgaccgtatgtcaccaagagat

SEQ ID NO: 155825 - DNA, 25 bp, Probe Sequence
aaatgttctttcttgcagccaaaga

SEQ ID NO: 155826 - DNA, 25 bp, Probe Sequence
aaagttcctatttcagcataaagag

SEQ ID NO: 155827 - DNA, 25 bp, Probe Sequence
aaagttcctatttcagcataaagag

SEQ ID NO: 155828 - DNA, 25 bp, Probe Sequence
aaagtggccgttgatgagaataaag

SEQ ID NO: 155829 - DNA, 25 bp, Probe Sequence
aaagggccagtgatgtgacaagaga

SEQ ID NO: 155830 - DNA, 25 bp, Probe Sequence
aaatgaggccgggactgctacagag

SEQ ID NO: 155831 - DNA, 25 bp, Probe Sequence
aaacatggaatgccagacgctgggg

SEQ ID NO: 155832 - DNA, 25 bp, Probe Sequence
aaaggacaaggctacgatggctatg

SEQ ID NO: 155833 - DNA, 25 bp, Probe Sequence
aaaggatcaagactccagatctgca

SEQ ID NO: 155834 - DNA, 25 bp, Probe Sequence
aaatgttctagaatcctattgctaa

SEQ ID NO: 155835 - DNA, 25 bp, Probe Sequence
aaatggttatgttctcacattgtca

SEQ ID NO: 155836 - DNA, 25 bp, Probe Sequence
aaatgagctacatcctcattgttca

SEQ ID NO: 155837 - DNA, 25 bp, Probe Sequence
aaatgagccaattcttctgtatatt

SEQ ID NO: 155838 - DNA, 25 bp, Probe Sequence
aaacaggccatgttccactatttcc

SEQ ID NO: 155839 - DNA, 25 bp, Probe Sequence
aaagggccagtgtcgttattatcct

SEQ ID NO: 155840 - DNA, 25 bp, Probe Sequence
aaaggcccagtgtctgttggtgtag

SEQ ID NO: 155841 - DNA, 25 bp, Probe Sequence
aaatgtttacatagcttctggtgat

SEQ ID NO: 155842 - DNA, 25 bp, Probe Sequence
aaatgttttctgtcttctgttaagt

SEQ ID NO: 155843 - DNA, 25 bp, Probe Sequence
aacatggttttggctatggcttgac

SEQ ID NO: 155844 - DNA, 25 bp, Probe Sequence
aaagtgttcagttgttggcttcagc

SEQ ID NO: 155845 - DNA, 25 bp, Probe Sequence
aaatgtgctgtagatctttgcctca

SEQ ID NO: 155846 - DNA, 25 bp, Probe Sequence
aaatggtgggattcattggcccata

SEQ ID NO: 155847 - DNA, 25 bp, Probe Sequence
aaatgggtaatgtcatgtagccacc

SEQ ID NO: 155848 - DNA, 25 bp, Probe Sequence
aaatggcgtggtccatgtcatcacc

SEQ ID NO: 155849 - DNA, 25 bp, Probe Sequence
aaatgggggtcccttactgcattat

SEQ ID NO: 155850 - DNA, 25 bp, Probe Sequence
aaatgggggtcccttactgcattat

SEQ ID NO: 155851 - DNA, 25 bp, Probe Sequence
aaaggtttgctcagtatatctatct

SEQ ID NO: 155852 - DNA, 25 bp, Probe Sequence
aaatgttttatttgtaagattctat

SEQ ID NO: 155853 - DNA, 25 bp, Probe Sequence
aaatgtcatttttaccaactgtgta

SEQ ID NO: 155854 - DNA, 25 bp, Probe Sequence
aaaggcttttggcagcaaagtgtca

SEQ ID NO: 155855 - DNA, 25 bp, Probe Sequence
aaatggtcttttcagccacagtctt

SEQ ID NO: 155856 - DNA, 25 bp, Probe Sequence
aaatgtgatgctgtttccccatgtt

SEQ ID NO: 155857 - DNA, 25 bp, Probe Sequence
aaatgtagccttaatacccttcaca

SEQ ID NO: 155858 - DNA, 25 bp, Probe Sequence
aaatgattccttttatccatcttct

SEQ ID NO: 155859 - DNA, 25 bp, Probe Sequence
aaagtgaccctatttcagctttctc

SEQ ID NO: 155860 - DNA, 25 bp, Probe Sequence
aaagcgtgccgaagttagttgtctt

SEQ ID NO: 155861 - DNA, 25 bp, Probe Sequence
aaaggtggccatacctggtttgtga

SEQ ID NO: 155862 - DNA, 25 bp, Probe Sequence
aaaggtcggaggactggctcttgta

SEQ ID NO: 155863 - DNA, 25 bp, Probe Sequence
aaatggcacctatactggcttttag

SEQ ID NO: 155864 - DNA, 25 bp, Probe Sequence
aaatggaggctatcagcctgtgatt

SEQ ID NO: 155865 - DNA, 25 bp, Probe Sequence
aaatggggcttacactatgatgttt

SEQ ID NO: 155866 - DNA, 25 bp, Probe Sequence
aaagggtctgtataatcattttcta

SEQ ID NO: 155867 - DNA, 25 bp, Probe Sequence
aaagggtatcttaaatgcaatctct

SEQ ID NO: 155868 - DNA, 25 bp, Probe Sequence
aaatgtggtttgttactgtagcact

SEQ ID NO: 155869 - DNA, 25 bp, Probe Sequence
aaatgtggcctttctgaatgttatc

SEQ ID NO: 155870 - DNA, 25 bp, Probe Sequence
aaatgatggagctccgaatgtgctt

SEQ ID NO: 155871 - DNA, 25 bp, Probe Sequence
aaatgtgggataacgcgatgactgt

SEQ ID NO: 155872 - DNA, 25 bp, Probe Sequence
aaatgtgggaagacgctgacctctg

SEQ ID NO: 155873 - DNA, 25 bp, Probe Sequence
aaatggggacaaactggctctctgg

SEQ ID NO: 155874 - DNA, 25 bp, Probe Sequence
aaagtgggaccaatctgctctgtca

SEQ ID NO: 155875 - DNA, 25 bp, Probe Sequence
aaagtactgaccaacatatctcatg

SEQ ID NO: 155876 - DNA, 25 bp, Probe Sequence
aaagtcgttcctccaacatagtgtg

SEQ ID NO: 155877 - DNA, 25 bp, Probe Sequence
aaaggcagctctcctgaaagcttct

SEQ ID NO: 155878 - DNA, 25 bp, Probe Sequence
aaaggcagctctcctgaaagcttct

SEQ ID NO: 155879 - DNA, 25 bp, Probe Sequence
aaatggcagcctcttagtgctattc

SEQ ID NO: 155880 - DNA, 25 bp, Probe Sequence
aaatggcccatgataagtgttctgt

SEQ ID NO: 155881 - DNA, 25 bp, Probe Sequence
aaagtcctcagaagctttttcttgg

SEQ ID NO: 155882 - DNA, 25 bp, Probe Sequence
aaatgatacttctctttttttgctg

SEQ ID NO: 155883 - DNA, 25 bp, Probe Sequence
aaagaagctgttctattcgttctcg

SEQ ID NO: 155884 - DNA, 25 bp, Probe Sequence
aaagacggtgctatatccagttcct

SEQ ID NO: 155885 - DNA, 25 bp, Probe Sequence
aaagccggtgcagatactcatggtc

SEQ ID NO: 155886 - DNA, 25 bp, Probe Sequence
aacgagtggtcagcacatttagtaa

SEQ ID NO: 155887 - DNA, 25 bp, Probe Sequence
aaaggaggctgaccctattcgtatc

SEQ ID NO: 155888 - DNA, 25 bp, Probe Sequence
aaatgtagccttctcatgattcaaa

SEQ ID NO: 155889 - DNA, 25 bp, Probe Sequence
aaatggagtgctgtacagatttaag

SEQ ID NO: 155890 - DNA, 25 bp, Probe Sequence
aaatggcaggattcaaagttgtaca

SEQ ID NO: 155891 - DNA, 25 bp, Probe Sequence
aaatgtgctgtaaaactattgtaga

SEQ ID NO: 155892 - DNA, 25 bp, Probe Sequence
aaaggcgagacaatacacattccaa

SEQ ID NO: 155893 - DNA, 25 bp, Probe Sequence
aaagactgtgtctgccctttagaag

SEQ ID NO: 155894 - DNA, 25 bp, Probe Sequence
aaaggcatggtctttctcctttacg

SEQ ID NO: 155895 - DNA, 25 bp, Probe Sequence
aaaggcatggtctttctcctttacg

SEQ ID NO: 155896 - DNA, 25 bp, Probe Sequence
aaaggcttgatctgttttcaaacta

SEQ ID NO: 155897 - DNA, 25 bp, Probe Sequence
aaatggatataatgttaacaaatgt

SEQ ID NO: 155898 - DNA, 25 bp, Probe Sequence
aaatggtattactttgatgatagca

SEQ ID NO: 155899 - DNA, 25 bp, Probe Sequence
aaatgtgtacattccctgtgcaaca

SEQ ID NO: 155900 - DNA, 25 bp, Probe Sequence
aaagggttaccccatgcaatcacac

SEQ ID NO: 155901 - DNA, 25 bp, Probe Sequence
aaaggttttaaccgcacatgcacac

SEQ ID NO: 155902 - DNA, 25 bp, Probe Sequence
aaagttatgttatcagtgcctgcac

SEQ ID NO: 155903 - DNA, 25 bp, Probe Sequence
aaagtggtgttctaagtctgcgtcc

SEQ ID NO: 155904 - DNA, 25 bp, Probe Sequence
aaaggttggtcttcaggttgtggca

SEQ ID NO: 155905 - DNA, 25 bp, Probe Sequence
aaagggtcatgtgaaggtggtgcgc

SEQ ID NO: 155906 - DNA, 25 bp, Probe Sequence
aaagggtatgtgggaagatgacagt

SEQ ID NO: 155907 - DNA, 25 bp, Probe Sequence
aaagggattgtgggtcagtcacaac

SEQ ID NO: 155908 - DNA, 25 bp, Probe Sequence
aacaggtgtttgatttgtcaccgtt

SEQ ID NO: 155909 - DNA, 25 bp, Probe Sequence
aaaggtgctttaaggttgccctctg

SEQ ID NO: 155910 - DNA, 25 bp, Probe Sequence
aaatgtgtcttttggttcctcactt

SEQ ID NO: 155911 - DNA, 25 bp, Probe Sequence
aaatgtcagtgttttggtgcacctt

SEQ ID NO: 155912 - DNA, 25 bp, Probe Sequence
aaatgtgacttatgctggtgccctc

SEQ ID NO: 155913 - DNA, 25 bp, Probe Sequence
aaagctgtcttttcttggaacatct

SEQ ID NO: 155914 - DNA, 25 bp, Probe Sequence
aaatgggctgggccttggtggatct

SEQ ID NO: 155915 - DNA, 25 bp, Probe Sequence
aaatgggctgggccttggtggatct

SEQ ID NO: 155916 - DNA, 25 bp, Probe Sequence
aaagggctcggcagttggatgctct

SEQ ID NO: 155917 - DNA, 25 bp, Probe Sequence
aaaggacagggttctaggagctcct

SEQ ID NO: 155918 - DNA, 25 bp, Probe Sequence
aaatggaaagtttccagtacactga

SEQ ID NO: 155919 - DNA, 25 bp, Probe Sequence
aaagatgcaaagcttgccctgatca

SEQ ID NO: 155920 - DNA, 25 bp, Probe Sequence
aaagctggaagatggccctaaattc

SEQ ID NO: 155921 - DNA, 25 bp, Probe Sequence
aaagctggaagatggccctaaattc

SEQ ID NO: 155922 - DNA, 25 bp, Probe Sequence
aaagggctgagatttccccgaactg

SEQ ID NO: 155923 - DNA, 25 bp, Probe Sequence
aaagacgtgtgatttccttccagac

SEQ ID NO: 155924 - DNA, 25 bp, Probe Sequence
aaagactttcttactcttcgcagtc

SEQ ID NO: 155925 - DNA, 25 bp, Probe Sequence
aaagacctgtgcttttgcatttgca

SEQ ID NO: 155926 - DNA, 25 bp, Probe Sequence
aaagactcattgcttaattctaaga

SEQ ID NO: 155927 - DNA, 25 bp, Probe Sequence
aaagtgccttcggctactttatcac

SEQ ID NO: 155928 - DNA, 25 bp, Probe Sequence
aaaggcctatgcacaatttatagca

SEQ ID NO: 155929 - DNA, 25 bp, Probe Sequence
aaagtgccttctgagctgtctaaaa

SEQ ID NO: 155930 - DNA, 25 bp, Probe Sequence
aaagtcgctctcatgggtacaaaat

SEQ ID NO: 155931 - DNA, 25 bp, Probe Sequence
aaatgtcccacatgtggaagaacct

SEQ ID NO: 155932 - DNA, 25 bp, Probe Sequence
aaagtttgacaccttgatacccact

SEQ ID NO: 155933 - DNA, 25 bp, Probe Sequence
aaagtctatgacagtgtaactctac

SEQ ID NO: 155934 - DNA, 25 bp, Probe Sequence
aaagacatagacgggcaaattggat

SEQ ID NO: 155935 - DNA, 25 bp, Probe Sequence
aaagcactacaggcccatgaattac

SEQ ID NO: 155936 - DNA, 25 bp, Probe Sequence
aaagaagagcaggctgctgctgaga

SEQ ID NO: 155937 - DNA, 25 bp, Probe Sequence
aaagacagagagggccaaatttact

SEQ ID NO: 155938 - DNA, 25 bp, Probe Sequence
aaagacaaggctgcaaacatttaca

SEQ ID NO: 155939 - DNA, 25 bp, Probe Sequence
aaactgaagtctgaaatttggtcaa

SEQ ID NO: 155940 - DNA, 25 bp, Probe Sequence
aaaggagcagtcgcacagacctttc

SEQ ID NO: 155941 - DNA, 25 bp, Probe Sequence
aaaggagcagtcgcacagacctttc

SEQ ID NO: 155942 - DNA, 25 bp, Probe Sequence
aaaggagcagtcgcacagacctttc

SEQ ID NO: 155943 - DNA, 25 bp, Probe Sequence
aaaggcgcctgtgcaagagagatat

SEQ ID NO: 155944 - DNA, 25 bp, Probe Sequence
aaaggaactgttcagcaggctgatg

SEQ ID NO: 155945 - DNA, 25 bp, Probe Sequence
aaaggcaagttttcaagtgctctca

SEQ ID NO: 155946 - DNA, 25 bp, Probe Sequence
aaaaagcgttattcaagcactccag

SEQ ID NO: 155947 - DNA, 25 bp, Probe Sequence
aaaaggcgtctatccagacctactg

SEQ ID NO: 155948 - DNA, 25 bp, Probe Sequence
aaagggctaatatccagaatctaca

SEQ ID NO: 155949 - DNA, 25 bp, Probe Sequence
aaagggctaatatccagaatctaca

SEQ ID NO: 155950 - DNA, 25 bp, Probe Sequence
aaagggctaatatccagaatctaca

SEQ ID NO: 155951 - DNA, 25 bp, Probe Sequence
aaagggctaatggcccaaacattat

SEQ ID NO: 155952 - DNA, 25 bp, Probe Sequence
aaagtactgactgctcgccaaaaaa

SEQ ID NO: 155953 - DNA, 25 bp, Probe Sequence
aaagataacatctctcccaaacttc

SEQ ID NO: 155954 - DNA, 25 bp, Probe Sequence
aaagaaaatcccctcagaaggctgt

SEQ ID NO: 155955 - DNA, 25 bp, Probe Sequence
aaagcaaaaccgccacagaactaga

SEQ ID NO: 155956 - DNA, 25 bp, Probe Sequence
aaagaacccgccgagcagtcaaatt

SEQ ID NO: 155957 - DNA, 25 bp, Probe Sequence
aaagaaccactgtcaagtaatcctt

SEQ ID NO: 155958 - DNA, 25 bp, Probe Sequence
aaagtagccctggccaggaacggtg

SEQ ID NO: 155959 - DNA, 25 bp, Probe Sequence
aacgtcccttgtcaggagacggctc

SEQ ID NO: 155960 - DNA, 25 bp, Probe Sequence
aaagtctgcctgtttagtaagtggc

SEQ ID NO: 155961 - DNA, 25 bp, Probe Sequence
aaagtcggtatttcacggcgtatgc

SEQ ID NO: 155962 - DNA, 25 bp, Probe Sequence
aaagtgccctataagccgggcatgg

SEQ ID NO: 155963 - DNA, 25 bp, Probe Sequence
aaagtgccccgggagggtgcatgga

SEQ ID NO: 155964 - DNA, 25 bp, Probe Sequence
aaaggctcaccacaagtggtgtgaa

SEQ ID NO: 155965 - DNA, 25 bp, Probe Sequence
aaatggctaaccacagcagagggca

SEQ ID NO: 155966 - DNA, 25 bp, Probe Sequence
aaatggagacacaagcaccgaggag

SEQ ID NO: 155967 - DNA, 25 bp, Probe Sequence
aaagctacaatcatgccacgggggc

SEQ ID NO: 155968 - DNA, 25 bp, Probe Sequence
aacaggaaatgagcccggaacgcag

SEQ ID NO: 155969 - DNA, 25 bp, Probe Sequence
aaagcagaaagagccacgaggggtg

SEQ ID NO: 155970 - DNA, 25 bp, Probe Sequence
aaaggagaaagagcactaccaggtg

SEQ ID NO: 155971 - DNA, 25 bp, Probe Sequence
aaaggaaactgaccctcagcagctg

SEQ ID NO: 155972 - DNA, 25 bp, Probe Sequence
aaaggcaaactgtcactcttcatcg

SEQ ID NO: 155973 - DNA, 25 bp, Probe Sequence
aaagcggtgacttcacctcatggag

SEQ ID NO: 155974 - DNA, 25 bp, Probe Sequence
aaagaggtgccttcagctggtgggc

SEQ ID NO: 155975 - DNA, 25 bp, Probe Sequence
aaagtgttgtcttcactggctacag

SEQ ID NO: 155976 - DNA, 25 bp, Probe Sequence
aaagtgttctgattccttcaactgg

SEQ ID NO: 155977 - DNA, 25 bp, Probe Sequence
aaaggatgactttcgcttaactctt

SEQ ID NO: 155978 - DNA, 25 bp, Probe Sequence
aaagggacacgagcattaacatttg

SEQ ID NO: 155979 - DNA, 25 bp, Probe Sequence
aaagcggggtgactcatttcccttg

SEQ ID NO: 155980 - DNA, 25 bp, Probe Sequence
aaatggacggggcagcttcacaagg

SEQ ID NO: 155981 - DNA, 25 bp, Probe Sequence
aaaggacctggcggtgcttcatatc

SEQ ID NO: 155982 - DNA, 25 bp, Probe Sequence
aaaggagcttcctttgttcatccat

SEQ ID NO: 155983 - DNA, 25 bp, Probe Sequence
aaaggtgttctagctgtttgcatca

SEQ ID NO: 155984 - DNA, 25 bp, Probe Sequence
aaaggcatttcaatgcaccttccca

SEQ ID NO: 155985 - DNA, 25 bp, Probe Sequence
aaatggtcattgatgtccttcaccc

SEQ ID NO: 155986 - DNA, 25 bp, Probe Sequence
aaatggtcattgatgtccttcaccc

SEQ ID NO: 155987 - DNA, 25 bp, Probe Sequence
aaaggtcattgactcatcatctgtc

SEQ ID NO: 155988 - DNA, 25 bp, Probe Sequence
aaaggattatcacacctgtagcaat

SEQ ID NO: 155989 - DNA, 25 bp, Probe Sequence
aaatgtgtctaatacactgatatga

SEQ ID NO: 155990 - DNA, 25 bp, Probe Sequence
aaagtgcttatataggtatgtggta

SEQ ID NO: 155991 - DNA, 25 bp, Probe Sequence
aaagctgtacatttgtgggagttga

SEQ ID NO: 155992 - DNA, 25 bp, Probe Sequence
aaaggatacataatgggccactgaa

SEQ ID NO: 155993 - DNA, 25 bp, Probe Sequence
aaatggatcttttatggccctatga

SEQ ID NO: 155994 - DNA, 25 bp, Probe Sequence
aaatggtcttctcatgactccttgt

SEQ ID NO: 155995 - DNA, 25 bp, Probe Sequence
aaagagggttcctctccttgtgtgt

SEQ ID NO: 155996 - DNA, 25 bp, Probe Sequence
aaagatggaactccaccctttgctt

SEQ ID NO: 155997 - DNA, 25 bp, Probe Sequence
aaagatggaactccaccctttgctt

SEQ ID NO: 155998 - DNA, 25 bp, Probe Sequence
aaagcaggcccgagccgcctggata

SEQ ID NO: 155999 - DNA, 25 bp, Probe Sequence
aaagcaggtcatcaagccaacgttc

SEQ ID NO: 156000 - DNA, 25 bp, Probe Sequence
aaagatggtcacacaaacagtttcc

SEQ ID NO: 156001 - DNA, 25 bp, Probe Sequence
aaagtttacaagcacacggttctca

SEQ ID NO: 156002 - DNA, 25 bp, Probe Sequence
aaagtcctgtggttaacgccttcat

SEQ ID NO: 156003 - DNA, 25 bp, Probe Sequence
aaagtcgcattattttcccattcta

SEQ ID NO: 156004 - DNA, 25 bp, Probe Sequence
aaagatgtattggttttacttgcaa

SEQ ID NO: 156005 - DNA, 25 bp, Probe Sequence
aaagagttatgcggatttaatgtga

SEQ ID NO: 156006 - DNA, 25 bp, Probe Sequence
aaaggatttggcatgctgtaaaaca

SEQ ID NO: 156007 - DNA, 25 bp, Probe Sequence
aaaggttctcaggtgttgccaaata

SEQ ID NO: 156008 - DNA, 25 bp, Probe Sequence
aaaggatttgcagcttgcggcggaa

SEQ ID NO: 156009 - DNA, 25 bp, Probe Sequence
aaaggcattggatctatcttggata

SEQ ID NO: 156010 - DNA, 25 bp, Probe Sequence
aaagcagtagtttgtgttgggatta

SEQ ID NO: 156011 - DNA, 25 bp, Probe Sequence
aaaggtagtgcttgttcgcggatct

SEQ ID NO: 156012 - DNA, 25 bp, Probe Sequence
aaacgctgagtgtgttcggggagga

SEQ ID NO: 156013 - DNA, 25 bp, Probe Sequence
aaagcctggagaagtgggccggagg

SEQ ID NO: 156014 - DNA, 25 bp, Probe Sequence
aaagctgtggaataaggcccagtgc

SEQ ID NO: 156015 - DNA, 25 bp, Probe Sequence
aaagtcagaaaccagaggcaccagt

SEQ ID NO: 156016 - DNA, 25 bp, Probe Sequence
aaagtcaaagaccagggcatgtgtg

SEQ ID NO: 156017 - DNA, 25 bp, Probe Sequence
aaaggaaaatggtctggtgctgtgt

SEQ ID NO: 156018 - DNA, 25 bp, Probe Sequence
aaagcggagaacgctggtgggcctg

SEQ ID NO: 156019 - DNA, 25 bp, Probe Sequence
aaaccaatgacaccctatgttacca

SEQ ID NO: 156020 - DNA, 25 bp, Probe Sequence
caacctgacgaaaaaggtgttgcca

SEQ ID NO: 156021 - DNA, 25 bp, Probe Sequence
cgaccggctcaacaaggttatcagt

SEQ ID NO: 156022 - DNA, 25 bp, Probe Sequence
cataccgcgtcgccaaaaatttact

SEQ ID NO: 156023 - DNA, 25 bp, Probe Sequence
caaacgggccctcaaatttatcaag

SEQ ID NO: 156024 - DNA, 25 bp, Probe Sequence
aaactcgtacggcaagtatttcaag

SEQ ID NO: 156025 - DNA, 25 bp, Probe Sequence
aaagctttacgctgaattattccac

SEQ ID NO: 156026 - DNA, 25 bp, Probe Sequence
aaagtatttacaccaagcttgtcca

SEQ ID NO: 156027 - DNA, 25 bp, Probe Sequence
aaaggttgattcgcatagattctcc

SEQ ID NO: 156028 - DNA, 25 bp, Probe Sequence
aaagagtttatctgcaagttttgcg

SEQ ID NO: 156029 - DNA, 25 bp, Probe Sequence
aaagtctttgaattgccagttctgt

SEQ ID NO: 156030 - DNA, 25 bp, Probe Sequence
aaagtcctggagcatcagctgcttc

SEQ ID NO: 156031 - DNA, 25 bp, Probe Sequence
aaagtcgaggtattgctggcattca

SEQ ID NO: 156032 - DNA, 25 bp, Probe Sequence
aaagtccaggagttgtggctcatgc

SEQ ID NO: 156033 - DNA, 25 bp, Probe Sequence
aaagtcaaggagcatggaatcccgg

SEQ ID NO: 156034 - DNA, 25 bp, Probe Sequence
aaagtcaaggacatctcagaggtgg

SEQ ID NO: 156035 - DNA, 25 bp, Probe Sequence
aaagtcacaggtcacacgaggggcc

SEQ ID NO: 156036 - DNA, 25 bp, Probe Sequence
aaactcaagggcaagaggagggtga

SEQ ID NO: 156037 - DNA, 25 bp, Probe Sequence
aaagccactgctgcaaatttgggtg

SEQ ID NO: 156038 - DNA, 25 bp, Probe Sequence
aaaggatgtttacagtgctgggtgt

SEQ ID NO: 156039 - DNA, 25 bp, Probe Sequence
aaaggagctttaggacgggcgcagt

SEQ ID NO: 156040 - DNA, 25 bp, Probe Sequence
aaaggtctgttaggaccagaagcag

SEQ ID NO: 156041 - DNA, 25 bp, Probe Sequence
aaaggcatcttctaccgcaagaagc

SEQ ID NO: 156042 - DNA, 25 bp, Probe Sequence
aaaggtagatgaatccacaaagatg

SEQ ID NO: 156043 - DNA, 25 bp, Probe Sequence
aaaggattatatgccatgaccaagg

SEQ ID NO: 156044 - DNA, 25 bp, Probe Sequence
aaagtgagtatgcggctgcacccgg

SEQ ID NO: 156045 - DNA, 25 bp, Probe Sequence
aaaggttcgggaggctgacctagtg

SEQ ID NO: 156046 - DNA, 25 bp, Probe Sequence
aaaggtctgggggagtgcacatcaa

SEQ ID NO: 156047 - DNA, 25 bp, Probe Sequence
aaagaggtgtggtcgaggctcctga

SEQ ID NO: 156048 - DNA, 25 bp, Probe Sequence
aaagagactgtctggcagttgccta

SEQ ID NO: 156049 - DNA, 25 bp, Probe Sequence
aaagatgacctctctggtgctgaca

SEQ ID NO: 156050 - DNA, 25 bp, Probe Sequence
aaagatgacctctctggtgctgaca

SEQ ID NO: 156051 - DNA, 25 bp, Probe Sequence
aaagatgacctctctggtgctgaca

SEQ ID NO: 156052 - DNA, 25 bp, Probe Sequence
aaagatgacctctctggtgctgaca

SEQ ID NO: 156053 - DNA, 25 bp, Probe Sequence
aaagcaggccaggtgcggtggctca

SEQ ID NO: 156054 - DNA, 25 bp, Probe Sequence
aaaggctgacagattctgtggccaa

SEQ ID NO: 156055 - DNA, 25 bp, Probe Sequence
aaaggatgagcaacttgttcccaaa

SEQ ID NO: 156056 - DNA, 25 bp, Probe Sequence
aaatggcagacaatttttcgctcca

SEQ ID NO: 156057 - DNA, 25 bp, Probe Sequence
aaaggccaaaatatctagctgcaca

SEQ ID NO: 156058 - DNA, 25 bp, Probe Sequence
aaagtgctcacgttaccttgacaca

SEQ ID NO: 156059 - DNA, 25 bp, Probe Sequence
aaacttcaagtctacctgtcaacgg

SEQ ID NO: 156060 - DNA, 25 bp, Probe Sequence
aaaattcaaggctgtttccaaggca

SEQ ID NO: 156061 - DNA, 25 bp, Probe Sequence
aaagtttattgctgtttgctaaagc

SEQ ID NO: 156062 - DNA, 25 bp, Probe Sequence
aaagattttctcagtggtctagaaa

SEQ ID NO: 156063 - DNA, 25 bp, Probe Sequence
aaagtttcgctcattttgcttatat

SEQ ID NO: 156064 - DNA, 25 bp, Probe Sequence
aaagtcaaccataatttattgtata

SEQ ID NO: 156065 - DNA, 25 bp, Probe Sequence
aaagactaccagctctgtctttcta

SEQ ID NO: 156066 - DNA, 25 bp, Probe Sequence
aaagtgtacctggatgcttctgggc

SEQ ID NO: 156067 - DNA, 25 bp, Probe Sequence
aaagatgtccaaggatcatctccgg

SEQ ID NO: 156068 - DNA, 25 bp, Probe Sequence
aaagagtgcaaatgcacctcctgca

SEQ ID NO: 156069 - DNA, 25 bp, Probe Sequence
aaagagtgcaaatgcacctcctgca

SEQ ID NO: 156070 - DNA, 25 bp, Probe Sequence
aaagagtgaatgtaggccaggcgcg

SEQ ID NO: 156071 - DNA, 25 bp, Probe Sequence
aaagagtgaatgtcatgggactgcc

SEQ ID NO: 156072 - DNA, 25 bp, Probe Sequence
aaagagtgagagatggtattcccag

SEQ ID NO: 156073 - DNA, 25 bp, Probe Sequence
aaaggctacagcagagtgatttcag

SEQ ID NO: 156074 - DNA, 25 bp, Probe Sequence
aaatggaatacttggctatattcaa

SEQ ID NO: 156075 - DNA, 25 bp, Probe Sequence
aaaggattaattttcattcatcaac

SEQ ID NO: 156076 - DNA, 25 bp, Probe Sequence
aaaggatttaagttgcactgacaaa

SEQ ID NO: 156077 - DNA, 25 bp, Probe Sequence
aaatggcaatttagattcactgatg

SEQ ID NO: 156078 - DNA, 25 bp, Probe Sequence
aaaggcaactgcatggtacattgtt

SEQ ID NO: 156079 - DNA, 25 bp, Probe Sequence
aaagtgcaagcgagtacctatggta

SEQ ID NO: 156080 - DNA, 25 bp, Probe Sequence
aaatggcaagagatcatatcctcag

SEQ ID NO: 156081 - DNA, 25 bp, Probe Sequence
aaatggcagatgattgcccccagat

SEQ ID NO: 156082 - DNA, 25 bp, Probe Sequence
aaagtgcagatgacaggccaggcca

SEQ ID NO: 156083 - DNA, 25 bp, Probe Sequence
aaagtgggatggtcacaggcacaga

SEQ ID NO: 156084 - DNA, 25 bp, Probe Sequence
aaaggggatgtattctgctccaaga

SEQ ID NO: 156085 - DNA, 25 bp, Probe Sequence
aaagtggtgctgagtattcactaga

SEQ ID NO: 156086 - DNA, 25 bp, Probe Sequence
aaagctggagtctgtcctcctaaga

SEQ ID NO: 156087 - DNA, 25 bp, Probe Sequence
aaagctagaagctctctcggtgaag

SEQ ID NO: 156088 - DNA, 25 bp, Probe Sequence
aaagctaaagaacttctgcacgcaa

SEQ ID NO: 156089 - DNA, 25 bp, Probe Sequence
aaaggcaaagattgttagatcagat

SEQ ID NO: 156090 - DNA, 25 bp, Probe Sequence
aaaggaaagtagaacagctgcagta

SEQ ID NO: 156091 - DNA, 25 bp, Probe Sequence
aaagggtagaggaattgctgactag

SEQ ID NO: 156092 - DNA, 25 bp, Probe Sequence
aaagaggggaccatttgcactgagt

SEQ ID NO: 156093 - DNA, 25 bp, Probe Sequence
aaagaggggtccgtcttagtcatgt

SEQ ID NO: 156094 - DNA, 25 bp, Probe Sequence
aaagaggagcagtcctatgctttta

SEQ ID NO: 156095 - DNA, 25 bp, Probe Sequence
aaaggcaagcaattctggtttatat

SEQ ID NO: 156096 - DNA, 25 bp, Probe Sequence
aaaggaactgacagcagtgcttaca

SEQ ID NO: 156097 - DNA, 25 bp, Probe Sequence
aaagcaaattcgaagcagagttaag

SEQ ID NO: 156098 - DNA, 25 bp, Probe Sequence
aaagcaactacagctgatggttcca

SEQ ID NO: 156099 - DNA, 25 bp, Probe Sequence
aaagcaacgaacattcactctctca

SEQ ID NO: 156100 - DNA, 25 bp, Probe Sequence
aaagaaccatgtattaaccacactt

SEQ ID NO: 156101 - DNA, 25 bp, Probe Sequence
aaagaagaattgcctgtaatcccct

SEQ ID NO: 156102 - DNA, 25 bp, Probe Sequence
aaagtgcaaatactttcatccccct

SEQ ID NO: 156103 - DNA, 25 bp, Probe Sequence
aaagtcgccaagtgatcactccacc

SEQ ID NO: 156104 - DNA, 25 bp, Probe Sequence
aaagtcagccgtgaattccacagcc

SEQ ID NO: 156105 - DNA, 25 bp, Probe Sequence
aaaggaggcgtgcaatatctgccag

SEQ ID NO: 156106 - DNA, 25 bp, Probe Sequence
aaaggacctggaattactgcaatgg

SEQ ID NO: 156107 - DNA, 25 bp, Probe Sequence
aaaggaccagtaaataatgatctta

SEQ ID NO: 156108 - DNA, 25 bp, Probe Sequence
aaaggatgccaaatctgtcaagatc

SEQ ID NO: 156109 - DNA, 25 bp, Probe Sequence
aaaggctgcccaatctctgagaagc

SEQ ID NO: 156110 - DNA, 25 bp, Probe Sequence
aaaggcagccacacgttacaggaga

SEQ ID NO: 156111 - DNA, 25 bp, Probe Sequence
aaagcagagcgactcggttaaggga

SEQ ID NO: 156112 - DNA, 25 bp, Probe Sequence
aaagagaggagcttgggctcacaga

SEQ ID NO: 156113 - DNA, 25 bp, Probe Sequence
aaagagaaactttgtgctacatgac

SEQ ID NO: 156114 - DNA, 25 bp, Probe Sequence
aaagagaacctttctgtgacattgg

SEQ ID NO: 156115 - DNA, 25 bp, Probe Sequence
aaaggaattgttttgctgtcacttt

SEQ ID NO: 156116 - DNA, 25 bp, Probe Sequence
aaaggaatttattttgagccacgct

SEQ ID NO: 156117 - DNA, 25 bp, Probe Sequence
aaaggaatttattttgagccacgct

SEQ ID NO: 156118 - DNA, 25 bp, Probe Sequence
aaaggactttgatttgtggcacaaa

SEQ ID NO: 156119 - DNA, 25 bp, Probe Sequence
aaaggatctgtttgcttagctgtca

SEQ ID NO: 156120 - DNA, 25 bp, Probe Sequence
aaaggccgtttcagtcttcaatctg

SEQ ID NO: 156121 - DNA, 25 bp, Probe Sequence
aaaccttgtttcactgtcacatatg

SEQ ID NO: 156122 - DNA, 25 bp, Probe Sequence
aaagaaactttccacatgtcctagt

SEQ ID NO: 156123 - DNA, 25 bp, Probe Sequence
aaagtaaatttcaatatgtcagtat

SEQ ID NO: 156124 - DNA, 25 bp, Probe Sequence
aaagcgcagaatggccaaagggtca

SEQ ID NO: 156125 - DNA, 25 bp, Probe Sequence
aaaggaaccgcccagtgcaggtatt

SEQ ID NO: 156126 - DNA, 25 bp, Probe Sequence
aaagagagtcgcatctcagtgcagg

SEQ ID NO: 156127 - DNA, 25 bp, Probe Sequence
aaagagttcagtttcaatgcatgga

SEQ ID NO: 156128 - DNA, 25 bp, Probe Sequence
aaagttttgttgaaagcgctattga

SEQ ID NO: 156129 - DNA, 25 bp, Probe Sequence
aaagtattattaaaagcctcatttg

SEQ ID NO: 156130 - DNA, 25 bp, Probe Sequence
aaagatactattcaaaacatattat

SEQ ID NO: 156131 - DNA, 25 bp, Probe Sequence
aaagaagctcttctaacatataaga

SEQ ID NO: 156132 - DNA, 25 bp, Probe Sequence
aaagtctctcttctgaacctggagc

SEQ ID NO: 156133 - DNA, 25 bp, Probe Sequence
aaagacctttctgaacaggggcagt

SEQ ID NO: 156134 - DNA, 25 bp, Probe Sequence
aaagtcttccatccaaaaggggcag

SEQ ID NO: 156135 - DNA, 25 bp, Probe Sequence
aacagattgtttgcaaaggggaggc

SEQ ID NO: 156136 - DNA, 25 bp, Probe Sequence
aaagttgcttttttaggctacagtg

SEQ ID NO: 156137 - DNA, 25 bp, Probe Sequence
aaagttgcttttttaggctacagtg

SEQ ID NO: 156138 - DNA, 25 bp, Probe Sequence
aaagttcttattactgggcggactg

SEQ ID NO: 156139 - DNA, 25 bp, Probe Sequence
aaagtattctacttggggctgggct

SEQ ID NO: 156140 - DNA, 25 bp, Probe Sequence
aaagctggttacggggactgtcctg

SEQ ID NO: 156141 - DNA, 25 bp, Probe Sequence
aaagggctggacttgaggatctgaa

SEQ ID NO: 156142 - DNA, 25 bp, Probe Sequence
aaagatgcctggacctggggctaga

SEQ ID NO: 156143 - DNA, 25 bp, Probe Sequence
aaagatgcctggacctggggctaga

SEQ ID NO: 156144 - DNA, 25 bp, Probe Sequence
aataacctgctagctaggcagtaat

SEQ ID NO: 156145 - DNA, 25 bp, Probe Sequence
aaagcagcccttggccagaagtcaa

SEQ ID NO: 156146 - DNA, 25 bp, Probe Sequence
aaagatgccttgtcgtgcagaaaca

SEQ ID NO: 156147 - DNA, 25 bp, Probe Sequence
aaagcagtgtttcatgagttacaag

SEQ ID NO: 156148 - DNA, 25 bp, Probe Sequence
aaagggcattccttgagctgtacgg

SEQ ID NO: 156149 - DNA, 25 bp, Probe Sequence
aaaggacattcgtggcttagctgct

SEQ ID NO: 156150 - DNA, 25 bp, Probe Sequence
aaaccacagactttggcctcagaga

SEQ ID NO: 156151 - DNA, 25 bp, Probe Sequence
aaagcaactgacaactggcccttgt

SEQ ID NO: 156152 - DNA, 25 bp, Probe Sequence
aaagctttaggagagcaccttcatg

SEQ ID NO: 156153 - DNA, 25 bp, Probe Sequence
aaagctttaggcaccagcctgcaac

SEQ ID NO: 156154 - DNA, 25 bp, Probe Sequence
aaaggcttggaaatctcagcgcccc

SEQ ID NO: 156155 - DNA, 25 bp, Probe Sequence
aaagcagttggcaattccacccttt

SEQ ID NO: 156156 - DNA, 25 bp, Probe Sequence
aaaggatcttgacttgctcacctat

SEQ ID NO: 156157 - DNA, 25 bp, Probe Sequence
aaagtgtctctgccttgagtcatct

SEQ ID NO: 156158 - DNA, 25 bp, Probe Sequence
aaagtgactctgtatttgtcttaga

SEQ ID NO: 156159 - DNA, 25 bp, Probe Sequence
aaagagcacctgtacttttcaagcc

SEQ ID NO: 156160 - DNA, 25 bp, Probe Sequence
aaagaaacccacttgttcacagcat

SEQ ID NO: 156161 - DNA, 25 bp, Probe Sequence
aaaggaccccagctgtttcatatgg

SEQ ID NO: 156162 - DNA, 25 bp, Probe Sequence
aaaggaaagccacttccttgaatgg

SEQ ID NO: 156163 - DNA, 25 bp, Probe Sequence
aaagcttataacttccaattaatgg

SEQ ID NO: 156164 - DNA, 25 bp, Probe Sequence
aaagttgcaaactgctcacaccaag

SEQ ID NO: 156165 - DNA, 25 bp, Probe Sequence
aaagttgaagatgctcaccccaagt

SEQ ID NO: 156166 - DNA, 25 bp, Probe Sequence
aaagtaaagatgtccacccatgcca

SEQ ID NO: 156167 - DNA, 25 bp, Probe Sequence
aaagaggaagattctcaccactgaa

SEQ ID NO: 156168 - DNA, 25 bp, Probe Sequence
aaagaggtgcagtcactcacacctg

SEQ ID NO: 156169 - DNA, 25 bp, Probe Sequence
aaaggtggagtactagagcctggcc

SEQ ID NO: 156170 - DNA, 25 bp, Probe Sequence
aaaggtggaatcctagcccatgctt

SEQ ID NO: 156171 - DNA, 25 bp, Probe Sequence
aaagtgtggctgcaaacccagctct

SEQ ID NO: 156172 - DNA, 25 bp, Probe Sequence
aaagcttggtgctaaaccacaatat

SEQ ID NO: 156173 - DNA, 25 bp, Probe Sequence
aaagctgttgtgaaaacggacattc

SEQ ID NO: 156174 - DNA, 25 bp, Probe Sequence
aaagacctgagaaaacgagcctgtt

SEQ ID NO: 156175 - DNA, 25 bp, Probe Sequence
aaagtcactggaaataggacaagtt

SEQ ID NO: 156176 - DNA, 25 bp, Probe Sequence
aaacgcctgccaagaagaccagacc

SEQ ID NO: 156177 - DNA, 25 bp, Probe Sequence
aaaggcactgccaagacattcaaac

SEQ ID NO: 156178 - DNA, 25 bp, Probe Sequence
aaagtaccatcaaagcgacagcaca

SEQ ID NO: 156179 - DNA, 25 bp, Probe Sequence
aaagcacagcccaaacagacaacat

SEQ ID NO: 156180 - DNA, 25 bp, Probe Sequence
aaagagagcagccgaacaacaaagg

SEQ ID NO: 156181 - DNA, 25 bp, Probe Sequence
aaagaacgttgtacacacaaacctg

SEQ ID NO: 156182 - DNA, 25 bp, Probe Sequence
aaagacacttaaagccaccaaccag

SEQ ID NO: 156183 - DNA, 25 bp, Probe Sequence
aaagacttagaaatagactagacca

SEQ ID NO: 156184 - DNA, 25 bp, Probe Sequence
aaagactttatgactagtacaccaa

SEQ ID NO: 156185 - DNA, 25 bp, Probe Sequence
aaagatgccttaatccattccttga

SEQ ID NO: 156186 - DNA, 25 bp, Probe Sequence
aaagaccttgacatattcctgagat

SEQ ID NO: 156187 - DNA, 25 bp, Probe Sequence
aaagaagtgtcacctcattccaggc

SEQ ID NO: 156188 - DNA, 25 bp, Probe Sequence
aaagatggcggctaccttactagct

SEQ ID NO: 156189 - DNA, 25 bp, Probe Sequence
aaagtggcggaaaagctagaagctc

SEQ ID NO: 156190 - DNA, 25 bp, Probe Sequence
aaagtggggtacaagctgcatgggc

SEQ ID NO: 156191 - DNA, 25 bp, Probe Sequence
aaagggagggcccctcatgtgtgct

SEQ ID NO: 156192 - DNA, 25 bp, Probe Sequence
aaagggaaaccacctgattgtctct

SEQ ID NO: 156193 - DNA, 25 bp, Probe Sequence
aaagaagaagatgctactctttcct

SEQ ID NO: 156194 - DNA, 25 bp, Probe Sequence
aaaggacagagagacccatattcgg

SEQ ID NO: 156195 - DNA, 25 bp, Probe Sequence
aacaggaaggggatctatttctagt

SEQ ID NO: 156196 - DNA, 25 bp, Probe Sequence
aaaggaaagggcaccatcttcatgg

SEQ ID NO: 156197 - DNA, 25 bp, Probe Sequence
aaaggggagcagggtcccttcatcg

SEQ ID NO: 156198 - DNA, 25 bp, Probe Sequence
aaagggtcacgtggtcccatgttgc

SEQ ID NO: 156199 - DNA, 25 bp, Probe Sequence
aaagggtcacgtggtcccatgttgc

SEQ ID NO: 156200 - DNA, 25 bp, Probe Sequence
aaagggtcacgtggtcccatgttgc

SEQ ID NO: 156201 - DNA, 25 bp, Probe Sequence
aaagtgaacctgagtgcccagtctc

SEQ ID NO: 156202 - DNA, 25 bp, Probe Sequence
aaagacaggccgtgtgagccagtcc

SEQ ID NO: 156203 - DNA, 25 bp, Probe Sequence
aaagacaggaaacgctggaagtcgt

SEQ ID NO: 156204 - DNA, 25 bp, Probe Sequence
aaagtcacagcttagctgggcacag

SEQ ID NO: 156205 - DNA, 25 bp, Probe Sequence
aaagatgccctaagtgttgaagaag

SEQ ID NO: 156206 - DNA, 25 bp, Probe Sequence
aaagtgcgccaaattttgagatgca

SEQ ID NO: 156207 - DNA, 25 bp, Probe Sequence
aaagtctggctaatgctcttgtgta

SEQ ID NO: 156208 - DNA, 25 bp, Probe Sequence
aaagtatgcgatgtgcccttggatc

SEQ ID NO: 156209 - DNA, 25 bp, Probe Sequence
aaagcttctatggttgacattgtat

SEQ ID NO: 156210 - DNA, 25 bp, Probe Sequence
aaagtatgcttgttaattttattca

SEQ ID NO: 156211 - DNA, 25 bp, Probe Sequence
aaagctttatgctaattttatttca

SEQ ID NO: 156212 - DNA, 25 bp, Probe Sequence
aaagatattatccctctgttttata

SEQ ID NO: 156213 - DNA, 25 bp, Probe Sequence
aaagtatcatcaagggtttaatatt

SEQ ID NO: 156214 - DNA, 25 bp, Probe Sequence
aaagatgataaaccttagaaacatt

SEQ ID NO: 156215 - DNA, 25 bp, Probe Sequence
aaagttgaacccaggatcagatcag

SEQ ID NO: 156216 - DNA, 25 bp, Probe Sequence
aaagtgcgcgatgccgggatcaaag

SEQ ID NO: 156217 - DNA, 25 bp, Probe Sequence
aaagagcaggaggttgtggacaaag

SEQ ID NO: 156218 - DNA, 25 bp, Probe Sequence
aaagagctgcagagtatttataaaa

SEQ ID NO: 156219 - DNA, 25 bp, Probe Sequence
aaagatgcatcatctcttcctcaca

SEQ ID NO: 156220 - DNA, 25 bp, Probe Sequence
aaagagctataccatccactacagt

SEQ ID NO: 156221 - DNA, 25 bp, Probe Sequence
aaagtgctatgagacccaacctctc

SEQ ID NO: 156222 - DNA, 25 bp, Probe Sequence
aaagttcatgaccaaccgactactt

SEQ ID NO: 156223 - DNA, 25 bp, Probe Sequence
aaaggtcacaagacacacagaaatt

SEQ ID NO: 156224 - DNA, 25 bp, Probe Sequence
aaagtttccagtacactgaaacata

SEQ ID NO: 156225 - DNA, 25 bp, Probe Sequence
aaagtacccagctgcctgtgaaatg

SEQ ID NO: 156226 - DNA, 25 bp, Probe Sequence
aaaggatcccagtgactgattagaa

SEQ ID NO: 156227 - DNA, 25 bp, Probe Sequence
aaactactccagtggctgactgaat

SEQ ID NO: 156228 - DNA, 25 bp, Probe Sequence
aaactacatcactcgtctgggatct

SEQ ID NO: 156229 - DNA, 25 bp, Probe Sequence
aaagtattgcacttcgcctggaact

SEQ ID NO: 156230 - DNA, 25 bp, Probe Sequence
aaagtctctgaagacctgatgaccc

SEQ ID NO: 156231 - DNA, 25 bp, Probe Sequence
aaagactgtcattcataccattcac

SEQ ID NO: 156232 - DNA, 25 bp, Probe Sequence
aaagttgctcattatggactgctac

SEQ ID NO: 156233 - DNA, 25 bp, Probe Sequence
aaagctcttgcaatcaagtctgtga

SEQ ID NO: 156234 - DNA, 25 bp, Probe Sequence
aaagtctatccacatgtgctctgca

SEQ ID NO: 156235 - DNA, 25 bp, Probe Sequence
aaagattgtcccatatcctcagttc

SEQ ID NO: 156236 - DNA, 25 bp, Probe Sequence
aaagatgtgtgaaatgttctctgca

SEQ ID NO: 156237 - DNA, 25 bp, Probe Sequence
aaagatttcatattgcttcctcctc

SEQ ID NO: 156238 - DNA, 25 bp, Probe Sequence
aaagatttcagattgcattcatgct

SEQ ID NO: 156239 - DNA, 25 bp, Probe Sequence
aaagattgtcgctatgctttgtatg

SEQ ID NO: 156240 - DNA, 25 bp, Probe Sequence
aaagcatatgtcgatggttgagata

SEQ ID NO: 156241 - DNA, 25 bp, Probe Sequence
aaagaatctcacagccagggatatg

SEQ ID NO: 156242 - DNA, 25 bp, Probe Sequence
aaaggttccattcagtgcagcatat

SEQ ID NO: 156243 - DNA, 25 bp, Probe Sequence
aaaggtgacgattctcactcacctc

SEQ ID NO: 156244 - DNA, 25 bp, Probe Sequence
aaaggtgactgtggcactccaagcc

SEQ ID NO: 156245 - DNA, 25 bp, Probe Sequence
aaaggtgtctgtgagcatctaccac

SEQ ID NO: 156246 - DNA, 25 bp, Probe Sequence
aaagcgttattcaagcactccagac

SEQ ID NO: 156247 - DNA, 25 bp, Probe Sequence
aaagagttctctaaccatccattct

SEQ ID NO: 156248 - DNA, 25 bp, Probe Sequence
aaagaattcttaacttcacaagtgt

SEQ ID NO: 156249 - DNA, 25 bp, Probe Sequence
aaagtcaatgaatagattaaagttt

SEQ ID NO: 156250 - DNA, 25 bp, Probe Sequence
aaagcgctatacagaactaaagttc

SEQ ID NO: 156251 - DNA, 25 bp, Probe Sequence
aaagcagtcattccttagtaaagtt

SEQ ID NO: 156252 - DNA, 25 bp, Probe Sequence
aaagaccattgatgctaggaagaaa

SEQ ID NO: 156253 - DNA, 25 bp, Probe Sequence
aaaggtatggaggcttcatgaagaa

SEQ ID NO: 156254 - DNA, 25 bp, Probe Sequence
aaagattctggggctgtcttatgaa

SEQ ID NO: 156255 - DNA, 25 bp, Probe Sequence
aaagtatcaccggcttgtgtatgaa

SEQ ID NO: 156256 - DNA, 25 bp, Probe Sequence
aaagttactgctgctctattattaa

SEQ ID NO: 156257 - DNA, 25 bp, Probe Sequence
aaaggtcaatcagcctcatgacttt

SEQ ID NO: 156258 - DNA, 25 bp, Probe Sequence
aaaggtgtgtactctctaaattggt

SEQ ID NO: 156259 - DNA, 25 bp, Probe Sequence
aaagtctgatgtactccctagaatt

SEQ ID NO: 156260 - DNA, 25 bp, Probe Sequence
aaaggtgtcttccacgctatagtct

SEQ ID NO: 156261 - DNA, 25 bp, Probe Sequence
aaagcagcaggatccagagctatag

SEQ ID NO: 156262 - DNA, 25 bp, Probe Sequence
aaagagcattattctcatgtcataa

SEQ ID NO: 156263 - DNA, 25 bp, Probe Sequence
aaaggattcatgtcctgcatacata

SEQ ID NO: 156264 - DNA, 25 bp, Probe Sequence
aaagggctgcattctgtgatcacaa

SEQ ID NO: 156265 - DNA, 25 bp, Probe Sequence
aaagaggcagctttctgtgacaact

SEQ ID NO: 156266 - DNA, 25 bp, Probe Sequence
aaagagcagcttagtcattccaggc

SEQ ID NO: 156267 - DNA, 25 bp, Probe Sequence
aaagtatctctaaatacaggattat

SEQ ID NO: 156268 - DNA, 25 bp, Probe Sequence
aaagtagtgcttaaacctgatttct

SEQ ID NO: 156269 - DNA, 25 bp, Probe Sequence
aaactagtctctgtagcctttcact

SEQ ID NO: 156270 - DNA, 25 bp, Probe Sequence
aaagcaagttagttacctcctagat

SEQ ID NO: 156271 - DNA, 25 bp, Probe Sequence
aaagaacatttgataccatggtata

SEQ ID NO: 156272 - DNA, 25 bp, Probe Sequence
aaagcaactttttacagatgtggca

SEQ ID NO: 156273 - DNA, 25 bp, Probe Sequence
aaagaactttaggcatcctctggaa

SEQ ID NO: 156274 - DNA, 25 bp, Probe Sequence
aaagtgaatgcctggacctctggcc

SEQ ID NO: 156275 - DNA, 25 bp, Probe Sequence
aaagggcatgcctgtgacagctcgt

SEQ ID NO: 156276 - DNA, 25 bp, Probe Sequence
aaagggctgacacctgagcctggat

SEQ ID NO: 156277 - DNA, 25 bp, Probe Sequence
aaagggctcatgagctggggaatgc

SEQ ID NO: 156278 - DNA, 25 bp, Probe Sequence
aaagcgtgttgcagcgccgaagcat

SEQ ID NO: 156279 - DNA, 25 bp, Probe Sequence
aaaggtcttgcagtggcttttcatg

SEQ ID NO: 156280 - DNA, 25 bp, Probe Sequence
aaaggtcattcagtggtgcacccac

SEQ ID NO: 156281 - DNA, 25 bp, Probe Sequence
aaaggtcacacgtaatagcctccct

SEQ ID NO: 156282 - DNA, 25 bp, Probe Sequence
aaaggtcatacttgaaatcctgcca

SEQ ID NO: 156283 - DNA, 25 bp, Probe Sequence
aaagattcattcagaactcccacct

SEQ ID NO: 156284 - DNA, 25 bp, Probe Sequence
aaagaatattctacagacacccctg

SEQ ID NO: 156285 - DNA, 25 bp, Probe Sequence
aaagaagaaaaagcagccacctgga

SEQ ID NO: 156286 - DNA, 25 bp, Probe Sequence
aaagtacaaaaatcagccaagcgtg

SEQ ID NO: 156287 - DNA, 25 bp, Probe Sequence
aaagatcaacagaagaacccagtgg

SEQ ID NO: 156288 - DNA, 25 bp, Probe Sequence
aaagatgacctaggaaacacgctgg

SEQ ID NO: 156289 - DNA, 25 bp, Probe Sequence
aaagcagtcctgagaaaatcctggt

SEQ ID NO: 156290 - DNA, 25 bp, Probe Sequence
aaagttgattgcagaaggacctggg

SEQ ID NO: 156291 - DNA, 25 bp, Probe Sequence
aaactataccatggagggggagagg

SEQ ID NO: 156292 - DNA, 25 bp, Probe Sequence
aaacggagccagcggctgaggaggg

SEQ ID NO: 156293 - DNA, 25 bp, Probe Sequence
aaagctggtgccgttgagaaggggg

SEQ ID NO: 156294 - DNA, 25 bp, Probe Sequence
aaacgtagcggttggataggaacag

SEQ ID NO: 156295 - DNA, 25 bp, Probe Sequence
aaacgctggtgtctgaatcaggggc

SEQ ID NO: 156296 - DNA, 25 bp, Probe Sequence
aaagctgtgcagtttggaaccggtg

SEQ ID NO: 156297 - DNA, 25 bp, Probe Sequence
aaactggcgagtggcagatatctgc

SEQ ID NO: 156298 - DNA, 25 bp, Probe Sequence
aaagtgcccagagcatagatgcatg

SEQ ID NO: 156299 - DNA, 25 bp, Probe Sequence
aaagtgacttgagcatctgaagatt

SEQ ID NO: 156300 - DNA, 25 bp, Probe Sequence
aaagatgcacttgtattgaatgaat

SEQ ID NO: 156301 - DNA, 25 bp, Probe Sequence
aaagatgttttttctaatgcgcatg

SEQ ID NO: 156302 - DNA, 25 bp, Probe Sequence
aaagagttcccatctcaaggcacac

SEQ ID NO: 156303 - DNA, 25 bp, Probe Sequence
aaagatttcccattgcatacaggtt

SEQ ID NO: 156304 - DNA, 25 bp, Probe Sequence
aaagtgtgtttctatgtgacaattt

SEQ ID NO: 156305 - DNA, 25 bp, Probe Sequence
aaagcactggtagttgtacaatatc

SEQ ID NO: 156306 - DNA, 25 bp, Probe Sequence
aaagaagcttcattgagctataatt

SEQ ID NO: 156307 - DNA, 25 bp, Probe Sequence
aaagattttgcatttgccaacatct

SEQ ID NO: 156308 - DNA, 25 bp, Probe Sequence
aaagcatatttcttggccttgctcc

SEQ ID NO: 156309 - DNA, 25 bp, Probe Sequence
aaagatttactatgcacgtgataca

SEQ ID NO: 156310 - DNA, 25 bp, Probe Sequence
aaagttggaccatcacttgtgcacc

SEQ ID NO: 156311 - DNA, 25 bp, Probe Sequence
aaagctgtgtgaacccaggtgtccc

SEQ ID NO: 156312 - DNA, 25 bp, Probe Sequence
aaaggtgtagatgtgaagttcagca

SEQ ID NO: 156313 - DNA, 25 bp, Probe Sequence
aaaggtgttcatgcaggagttcaaa

SEQ ID NO: 156314 - DNA, 25 bp, Probe Sequence
aaagttgctgtgaaagctgaattaa

SEQ ID NO: 156315 - DNA, 25 bp, Probe Sequence
aaagctctcgctgaaggcaagaaag

SEQ ID NO: 156316 - DNA, 25 bp, Probe Sequence
aaagttcaattctaggccaggaacg

SEQ ID NO: 156317 - DNA, 25 bp, Probe Sequence
aaagtataattttcctgcatgaaaa

SEQ ID NO: 156318 - DNA, 25 bp, Probe Sequence
aaagtcaaatattacctgcagggat

SEQ ID NO: 156319 - DNA, 25 bp, Probe Sequence
aaagtagactgattacactgaggtg

SEQ ID NO: 156320 - DNA, 25 bp, Probe Sequence
aaagtaaccatctaaagagcttgtg

SEQ ID NO: 156321 - DNA, 25 bp, Probe Sequence
aaagatgcaacctcaaacaccaatg

SEQ ID NO: 156322 - DNA, 25 bp, Probe Sequence
aaagggagcatcttctaacccatcg

SEQ ID NO: 156323 - DNA, 25 bp, Probe Sequence
aaagcggcaaaagatatcccatcaa

SEQ ID NO: 156324 - DNA, 25 bp, Probe Sequence
aaactctcctaagaatctcctgaga

SEQ ID NO: 156325 - DNA, 25 bp, Probe Sequence
aaaactggtcaagaagctggccaag

SEQ ID NO: 156326 - DNA, 25 bp, Probe Sequence
aaagggtctcaagacagtgccctgt

SEQ ID NO: 156327 - DNA, 25 bp, Probe Sequence
aaagggttgtagcactgtcctcagt

SEQ ID NO: 156328 - DNA, 25 bp, Probe Sequence
aaagtagttctattgacattcctca

SEQ ID NO: 156329 - DNA, 25 bp, Probe Sequence
aaagtaatttacagttgcccatgat

SEQ ID NO: 156330 - DNA, 25 bp, Probe Sequence
aaagtgaaatgttatggtctcccct

SEQ ID NO: 156331 - DNA, 25 bp, Probe Sequence
aaagctaaatgtttcccatgatcgc

SEQ ID NO: 156332 - DNA, 25 bp, Probe Sequence
aaagtaatgatggctgatccctatt

SEQ ID NO: 156333 - DNA, 25 bp, Probe Sequence
aaagtcaattgccttcctatatatc

SEQ ID NO: 156334 - DNA, 25 bp, Probe Sequence
aaagtcagaatcgcctcagcatttc

SEQ ID NO: 156335 - DNA, 25 bp, Probe Sequence
aaagaacagctcgcgcttcatttcc

SEQ ID NO: 156336 - DNA, 25 bp, Probe Sequence
aaagaaggtacagtgctccacctct

SEQ ID NO: 156337 - DNA, 25 bp, Probe Sequence
aaagacatgtgcgagaggcttacct

SEQ ID NO: 156338 - DNA, 25 bp, Probe Sequence
aaagaagtgcatggggctatagagg

SEQ ID NO: 156339 - DNA, 25 bp, Probe Sequence
aaagcaagtgctgtcagcaatatcc

SEQ ID NO: 156340 - DNA, 25 bp, Probe Sequence
aaagaatgccgagcagcacttccag

SEQ ID NO: 156341 - DNA, 25 bp, Probe Sequence
aaagaagccgattccagttcctgta

SEQ ID NO: 156342 - DNA, 25 bp, Probe Sequence
aaagataccagcagtagtcgcctct

SEQ ID NO: 156343 - DNA, 25 bp, Probe Sequence
aaagtactcaaagcctggccatcat

SEQ ID NO: 156344 - DNA, 25 bp, Probe Sequence
aaagacccatacatcacaggccatt

SEQ ID NO: 156345 - DNA, 25 bp, Probe Sequence
aaagaccaacaaatctcaagcccta

SEQ ID NO: 156346 - DNA, 25 bp, Probe Sequence
aaacatgaaaaaatcccagccctag

SEQ ID NO: 156347 - DNA, 25 bp, Probe Sequence
aaagagcaaccagtatcacttccct

SEQ ID NO: 156348 - DNA, 25 bp, Probe Sequence
aaagcaagcccctatactgggccct

SEQ ID NO: 156349 - DNA, 25 bp, Probe Sequence
aaagaagctactttagctgccaccc

SEQ ID NO: 156350 - DNA, 25 bp, Probe Sequence
aaagaatcatgatctatacgcaacc

SEQ ID NO: 156351 - DNA, 25 bp, Probe Sequence
aaagaatcagatcgtcacactctac

SEQ ID NO: 156352 - DNA, 25 bp, Probe Sequence
aaagacagcagtaacctctgcagac

SEQ ID NO: 156353 - DNA, 25 bp, Probe Sequence
aaacctgcgaaagctgtcaactttt

SEQ ID NO: 156354 - DNA, 25 bp, Probe Sequence
aaacgctgcggcaagccgtcaagat

SEQ ID NO: 156355 - DNA, 25 bp, Probe Sequence
aaagaagcctgcaaccagtgcaaga

SEQ ID NO: 156356 - DNA, 25 bp, Probe Sequence
aaaaatcctgcaatggaaaagttag

SEQ ID NO: 156357 - DNA, 25 bp, Probe Sequence
aaagatactcgaatggaaacagatt

SEQ ID NO: 156358 - DNA, 25 bp, Probe Sequence
aaagagtcttgcaatggaagtcaaa

SEQ ID NO: 156359 - DNA, 25 bp, Probe Sequence
aaagcaggctggttggcataatatg

SEQ ID NO: 156360 - DNA, 25 bp, Probe Sequence
aaagcagaagagttggacacatcgt

SEQ ID NO: 156361 - DNA, 25 bp, Probe Sequence
aaagcttcagagcctgaaaacatct

SEQ ID NO: 156362 - DNA, 25 bp, Probe Sequence
aaagaccacagctgaaggcatcatc

SEQ ID NO: 156363 - DNA, 25 bp, Probe Sequence
aaagcactcaactgacaggttttac

SEQ ID NO: 156364 - DNA, 25 bp, Probe Sequence
aaagccatgcaagggatcgggttac

SEQ ID NO: 156365 - DNA, 25 bp, Probe Sequence
aaagcagtctgaggtattgggtata

SEQ ID NO: 156366 - DNA, 25 bp, Probe Sequence
aaagcactctatgtgaggcggctat

SEQ ID NO: 156367 - DNA, 25 bp, Probe Sequence
aaagcaatgattgaggtcagtgata

SEQ ID NO: 156368 - DNA, 25 bp, Probe Sequence
aaagagcatagtgaagactggcaga

SEQ ID NO: 156369 - DNA, 25 bp, Probe Sequence
aaagaactgctgtacagagctagta

SEQ ID NO: 156370 - DNA, 25 bp, Probe Sequence
aaagtatcatctttcaggcatgaat

SEQ ID NO: 156371 - DNA, 25 bp, Probe Sequence
aaagtactcatgtccagatgatggt

SEQ ID NO: 156372 - DNA, 25 bp, Probe Sequence
aaagtagcatcttgccgggttgtgg

SEQ ID NO: 156373 - DNA, 25 bp, Probe Sequence
aaagtagcatcttgctagacctaga

SEQ ID NO: 156374 - DNA, 25 bp, Probe Sequence
aaagatcaactcttccaactgagaa

SEQ ID NO: 156375 - DNA, 25 bp, Probe Sequence
aaagatcaactctgaagcaccagaa

SEQ ID NO: 156376 - DNA, 25 bp, Probe Sequence
aaagtcaaatgccaaacactagctc

SEQ ID NO: 156377 - DNA, 25 bp, Probe Sequence
aaagtgcatttgcctaggacttctc

SEQ ID NO: 156378 - DNA, 25 bp, Probe Sequence
aaagtgctttattgcagagagttat

SEQ ID NO: 156379 - DNA, 25 bp, Probe Sequence
aaagtttaaagctatggcatcatat

SEQ ID NO: 156380 - DNA, 25 bp, Probe Sequence
aaagattctcattgaaatgtctgaa

SEQ ID NO: 156381 - DNA, 25 bp, Probe Sequence
aaagatccatcatcaccttcaaggt

SEQ ID NO: 156382 - DNA, 25 bp, Probe Sequence
aaagtcctagcttcttacagagagg

SEQ ID NO: 156383 - DNA, 25 bp, Probe Sequence
aaagcaccaaattcatgtacagcat

SEQ ID NO: 156384 - DNA, 25 bp, Probe Sequence
aaagcactttatgagctgacacagt

SEQ ID NO: 156385 - DNA, 25 bp, Probe Sequence
aaagcagcttttgatgatacaattg

SEQ ID NO: 156386 - DNA, 25 bp, Probe Sequence
aaactgcgtttgcagagccacattc

SEQ ID NO: 156387 - DNA, 25 bp, Probe Sequence
aaagctggtttacagactgcagaca

SEQ ID NO: 156388 - DNA, 25 bp, Probe Sequence
aaagtgtttatcttcagcaccaaat

SEQ ID NO: 156389 - DNA, 25 bp, Probe Sequence
aaagtctaattcttcgcttcacaat

SEQ ID NO: 156390 - DNA, 25 bp, Probe Sequence
aaagtgccaattttcatgatgtgac

SEQ ID NO: 156391 - DNA, 25 bp, Probe Sequence
aaagtctcatcattctgttggctaa

SEQ ID NO: 156392 - DNA, 25 bp, Probe Sequence
aaacgcactcattcagtttgctact

SEQ ID NO: 156393 - DNA, 25 bp, Probe Sequence
aaagtctgtatgcaggtgtgcctgt

SEQ ID NO: 156394 - DNA, 25 bp, Probe Sequence
aaagtctttaagatgcatccatgtt

SEQ ID NO: 156395 - DNA, 25 bp, Probe Sequence
aaagtctacaacatagcagatctgt

SEQ ID NO: 156396 - DNA, 25 bp, Probe Sequence
aaagtcagccaggcatgtagcaggc

SEQ ID NO: 156397 - DNA, 25 bp, Probe Sequence
aaagtaccggattgagctgtcaccc

SEQ ID NO: 156398 - DNA, 25 bp, Probe Sequence
aaagtcccgagcaatgaagtcatcc

SEQ ID NO: 156399 - DNA, 25 bp, Probe Sequence
aaactgcagtgccggtcaggtatcc

SEQ ID NO: 156400 - DNA, 25 bp, Probe Sequence
aaacgagtggccgggagcatctgcc

SEQ ID NO: 156401 - DNA, 25 bp, Probe Sequence
aaagacaggtgggaagagctctcct

SEQ ID NO: 156402 - DNA, 25 bp, Probe Sequence
aaagttggtgtgctggagctacctc

SEQ ID NO: 156403 - DNA, 25 bp, Probe Sequence
aaagtcttggtctgtgagtcactct

SEQ ID NO: 156404 - DNA, 25 bp, Probe Sequence
aaagttgtggtctgatcagttaatt

SEQ ID NO: 156405 - DNA, 25 bp, Probe Sequence
aaagttgtggagtgcatcgatcata

SEQ ID NO: 156406 - DNA, 25 bp, Probe Sequence
aaagttgtggagtgcatcgatcata

SEQ ID NO: 156407 - DNA, 25 bp, Probe Sequence
aaagccttggagcgtctgaatgaaa

SEQ ID NO: 156408 - DNA, 25 bp, Probe Sequence
aaaagtttgggggcagattctgaat

SEQ ID NO: 156409 - DNA, 25 bp, Probe Sequence
aaaaacttcggagcagatacgacaa

SEQ ID NO: 156410 - DNA, 25 bp, Probe Sequence
aacaccacccgcagtgaaacgaaat

SEQ ID NO: 156411 - DNA, 25 bp, Probe Sequence
aaagccaaacagaggaagaaacatt

SEQ ID NO: 156412 - DNA, 25 bp, Probe Sequence
aaacccagaagatggaaatggccca

SEQ ID NO: 156413 - DNA, 25 bp, Probe Sequence
aaacccgagggacagcagattccac

SEQ ID NO: 156414 - DNA, 25 bp, Probe Sequence
aaagcacggaggggaagacatttct

SEQ ID NO: 156415 - DNA, 25 bp, Probe Sequence
aaagaccagcagaggcataaggttc

SEQ ID NO: 156416 - DNA, 25 bp, Probe Sequence
aaagtctcagaaacacataaagatt

SEQ ID NO: 156417 - DNA, 25 bp, Probe Sequence
aaagttcagagaaagcttcatcaaa

SEQ ID NO: 156418 - DNA, 25 bp, Probe Sequence
aaagtctcaataaaggcttgctctt

SEQ ID NO: 156419 - DNA, 25 bp, Probe Sequence
aaagtcaaataagcctctctgttga

SEQ ID NO: 156420 - DNA, 25 bp, Probe Sequence
aaacaaagcaaagaatcctttatat

SEQ ID NO: 156421 - DNA, 25 bp, Probe Sequence
aaacttatgaaatacccttcttgat

SEQ ID NO: 156422 - DNA, 25 bp, Probe Sequence
aaaccaaaacactctggttcagtgt

SEQ ID NO: 156423 - DNA, 25 bp, Probe Sequence
aacacccaaaaagctgttggatgat

SEQ ID NO: 156424 - DNA, 25 bp, Probe Sequence
aaaacccatacatccaggtggaata

SEQ ID NO: 156425 - DNA, 25 bp, Probe Sequence
aaacctggaacatgacattgttaat

SEQ ID NO: 156426 - DNA, 25 bp, Probe Sequence
aaaccagtgaacacctttgtgcacg

SEQ ID NO: 156427 - DNA, 25 bp, Probe Sequence
aaaccctgaccattccattattgag

SEQ ID NO: 156428 - DNA, 25 bp, Probe Sequence
aaaccctacctatcctgaatggtct

SEQ ID NO: 156429 - DNA, 25 bp, Probe Sequence
aaaccaaactttctgtggttgtctg

SEQ ID NO: 156430 - DNA, 25 bp, Probe Sequence
aaaccaaatcgcatggatttctttt

SEQ ID NO: 156431 - DNA, 25 bp, Probe Sequence
aaagtaacacagtggacttcctatt

SEQ ID NO: 156432 - DNA, 25 bp, Probe Sequence
aaagtattccaacgtgatattcctt

SEQ ID NO: 156433 - DNA, 25 bp, Probe Sequence
aaagtctactaacctgcattttcct

SEQ ID NO: 156434 - DNA, 25 bp, Probe Sequence
aaagccatacttctagcaattctcc

SEQ ID NO: 156435 - DNA, 25 bp, Probe Sequence
aaagacattcttgtggctttcctgg

SEQ ID NO: 156436 - DNA, 25 bp, Probe Sequence
aaagcttctttgtggcttacactgg

SEQ ID NO: 156437 - DNA, 25 bp, Probe Sequence
aaagaatcttttggtttctcactgc

SEQ ID NO: 156438 - DNA, 25 bp, Probe Sequence
aaagtatcttcatacttcctcatcc

SEQ ID NO: 156439 - DNA, 25 bp, Probe Sequence
aaagtctgcttatgagttttctgag

SEQ ID NO: 156440 - DNA, 25 bp, Probe Sequence
aaagatcagctaaacctgggttggg

SEQ ID NO: 156441 - DNA, 25 bp, Probe Sequence
aaagatcagctttaggctgggcatg

SEQ ID NO: 156442 - DNA, 25 bp, Probe Sequence
aaagtacttatagtcctagcatagt

SEQ ID NO: 156443 - DNA, 25 bp, Probe Sequence
aaagttgcacttttgttacaatgct

SEQ ID NO: 156444 - DNA, 25 bp, Probe Sequence
aaagtagacccttgcatatactatt

SEQ ID NO: 156445 - DNA, 25 bp, Probe Sequence
aaagataactagtactaatcattgt

SEQ ID NO: 156446 - DNA, 25 bp, Probe Sequence
aaagatgaactgagaccttctgagt

SEQ ID NO: 156447 - DNA, 25 bp, Probe Sequence
aaagtaattgtcaccatcactatgt

SEQ ID NO: 156448 - DNA, 25 bp, Probe Sequence
aaagctcaattgtttggtctctggt

SEQ ID NO: 156449 - DNA, 25 bp, Probe Sequence
aaagctcaattgtttggtctctggt

SEQ ID NO: 156450 - DNA, 25 bp, Probe Sequence
aaagtcttatgatttcctcacaggt

SEQ ID NO: 156451 - DNA, 25 bp, Probe Sequence
aaactctgaagattccccatgcatg

SEQ ID NO: 156452 - DNA, 25 bp, Probe Sequence
aaagccatgaagaaagccacaaaga

SEQ ID NO: 156453 - DNA, 25 bp, Probe Sequence
aaagcagtgaagcaaaggcaaatta

SEQ ID NO: 156454 - DNA, 25 bp, Probe Sequence
aaagcttgtctgcaaaggaatttaa

SEQ ID NO: 156455 - DNA, 25 bp, Probe Sequence
aaagcttctctgctccagttatttt

SEQ ID NO: 156456 - DNA, 25 bp, Probe Sequence
aaagatgcctcgcagcgagcgtatc

SEQ ID NO: 156457 - DNA, 25 bp, Probe Sequence
aaagcatccatgcaagctgagaaat

SEQ ID NO: 156458 - DNA, 25 bp, Probe Sequence
aaagcccagccatcatgacaaatcc

SEQ ID NO: 156459 - DNA, 25 bp, Probe Sequence
aaacactatgacacagaccagtccg

SEQ ID NO: 156460 - DNA, 25 bp, Probe Sequence
aaagaaggacgcagagccagccaca

SEQ ID NO: 156461 - DNA, 25 bp, Probe Sequence
aaagaactactttgcagccaggcac

SEQ ID NO: 156462 - DNA, 25 bp, Probe Sequence
aaagcacgtatgcttcaggggcctt

SEQ ID NO: 156463 - DNA, 25 bp, Probe Sequence
aaaacgataggttaggagactgtat

SEQ ID NO: 156464 - DNA, 25 bp, Probe Sequence
aaagactctgaggtttggagaggtg

SEQ ID NO: 156465 - DNA, 25 bp, Probe Sequence
aaagatgtcctttttgtgagaggga

SEQ ID NO: 156466 - DNA, 25 bp, Probe Sequence
aaagatgtccttttctgagaagaat

SEQ ID NO: 156467 - DNA, 25 bp, Probe Sequence
aaagaggctctttcagtgcagcaaa

SEQ ID NO: 156468 - DNA, 25 bp, Probe Sequence
aacacaggcatgctcataaggaaag

SEQ ID NO: 156469 - DNA, 25 bp, Probe Sequence
aaacggaggcgaaaggaacagagtg

SEQ ID NO: 156470 - DNA, 25 bp, Probe Sequence
aaagcgtcagggaagaacaaacact

SEQ ID NO: 156471 - DNA, 25 bp, Probe Sequence
aaacccaggtgagacagcaccctct

SEQ ID NO: 156472 - DNA, 25 bp, Probe Sequence
aaaccttggtaccatagccaaatct

SEQ ID NO: 156473 - DNA, 25 bp, Probe Sequence
aaaccttgagtattcatgacctaca

SEQ ID NO: 156474 - DNA, 25 bp, Probe Sequence
aaacctttacctagatcagccatca

SEQ ID NO: 156475 - DNA, 25 bp, Probe Sequence
aaaccctatacctgtcatgagtgcg

SEQ ID NO: 156476 - DNA, 25 bp, Probe Sequence
aaacccaaagccagacatagagcgg

SEQ ID NO: 156477 - DNA, 25 bp, Probe Sequence
aaaccccagacgccatgaaagctgc

SEQ ID NO: 156478 - DNA, 25 bp, Probe Sequence
aaaccccatgtcatgaggaggtact

SEQ ID NO: 156479 - DNA, 25 bp, Probe Sequence
aaaccccagatttcagtgaactaat

SEQ ID NO: 156480 - DNA, 25 bp, Probe Sequence
aaacttatcagtacttggaacagaa

SEQ ID NO: 156481 - DNA, 25 bp, Probe Sequence
aaagctgtgtttatatggaagaaag

SEQ ID NO: 156482 - DNA, 25 bp, Probe Sequence
aaactggtcaagaagctggccaaga

SEQ ID NO: 156483 - DNA, 25 bp, Probe Sequence
aagcttgagtacagtgtcccctata

SEQ ID NO: 156484 - DNA, 25 bp, Probe Sequence
aaaatgagtatcagtggctccctag

SEQ ID NO: 156485 - DNA, 25 bp, Probe Sequence
aaagaagtagctgtgttctcccagc

SEQ ID NO: 156486 - DNA, 25 bp, Probe Sequence
aaagacagtcctatgtgtctcaccc

SEQ ID NO: 156487 - DNA, 25 bp, Probe Sequence
aaagacggcctgattcttacaagcc

SEQ ID NO: 156488 - DNA, 25 bp, Probe Sequence
aaaagggagcatcttctaacccatc

SEQ ID NO: 156489 - DNA, 25 bp, Probe Sequence
aaaagccaactctgtagacaccttc

SEQ ID NO: 156490 - DNA, 25 bp, Probe Sequence
aaagaccaatttgtaggacacattt

SEQ ID NO: 156491 - DNA, 25 bp, Probe Sequence
aaagacaaagtatatcatgggaata

SEQ ID NO: 156492 - DNA, 25 bp, Probe Sequence
aaagtacaggtatatctcggagata

SEQ ID NO: 156493 - DNA, 25 bp, Probe Sequence
aaagattcaggtttactcacgtcat

SEQ ID NO: 156494 - DNA, 25 bp, Probe Sequence
aaagattcaagtttcctaagctcag

SEQ ID NO: 156495 - DNA, 25 bp, Probe Sequence
aaagataatttgctcctgacagtca

SEQ ID NO: 156496 - DNA, 25 bp, Probe Sequence
aaagaaatcttgcttcagaccatca

SEQ ID NO: 156497 - DNA, 25 bp, Probe Sequence
aaaccactctttgatcatggctctc

SEQ ID NO: 156498 - DNA, 25 bp, Probe Sequence
aaacgcctagtttatactgcttgct

SEQ ID NO: 156499 - DNA, 25 bp, Probe Sequence
aaactttaactacacatgcttggaa

SEQ ID NO: 156500 - DNA, 25 bp, Probe Sequence
aaactttaactacacatgcttggaa

SEQ ID NO: 156501 - DNA, 25 bp, Probe Sequence
aaactttaactacacatgccttggg

SEQ ID NO: 156502 - DNA, 25 bp, Probe Sequence
aaagttgattaggaccacagatttg

SEQ ID NO: 156503 - DNA, 25 bp, Probe Sequence
aaagttgattcttgaggatagatgt

SEQ ID NO: 156504 - DNA, 25 bp, Probe Sequence
aaagttcacatttagagaagagctt

SEQ ID NO: 156505 - DNA, 25 bp, Probe Sequence
aaagctgacatctttaaaagccttc

SEQ ID NO: 156506 - DNA, 25 bp, Probe Sequence
aaagctgttcattgtaacaaaattc

SEQ ID NO: 156507 - DNA, 25 bp, Probe Sequence
aaagcttacacactcaaccattctt

SEQ ID NO: 156508 - DNA, 25 bp, Probe Sequence
aaagaatgacgacatccgcatcctc

SEQ ID NO: 156509 - DNA, 25 bp, Probe Sequence
aaagaagaagatccgcacgtcaccc

SEQ ID NO: 156510 - DNA, 25 bp, Probe Sequence
aaagatctgcaaatacctggctctc

SEQ ID NO: 156511 - DNA, 25 bp, Probe Sequence
aaagatatggttggcttgcagctcc

SEQ ID NO: 156512 - DNA, 25 bp, Probe Sequence
aaagaaggcaatcgactgcctccgc

SEQ ID NO: 156513 - DNA, 25 bp, Probe Sequence
aaagctcaggacctgactaccctga

SEQ ID NO: 156514 - DNA, 25 bp, Probe Sequence
aaagctcaggacctgactaccctga

SEQ ID NO: 156515 - DNA, 25 bp, Probe Sequence
aaagcgcgagtccgcttcaacttga

SEQ ID NO: 156516 - DNA, 25 bp, Probe Sequence
aaaccaggtttcacaacttctgcca

SEQ ID NO: 156517 - DNA, 25 bp, Probe Sequence
aaaccatttttcactagcgacagcc

SEQ ID NO: 156518 - DNA, 25 bp, Probe Sequence
aaagcccttttcagtttgtgcactg

SEQ ID NO: 156519 - DNA, 25 bp, Probe Sequence
aaagcccttttcagtttgtgcactg

SEQ ID NO: 156520 - DNA, 25 bp, Probe Sequence
aaagcccttttcagtttgtgcactg

SEQ ID NO: 156521 - DNA, 25 bp, Probe Sequence
aaagcccttttcagtttgtgcactg

SEQ ID NO: 156522 - DNA, 25 bp, Probe Sequence
aaagttgttgagccttgcttcttcc

SEQ ID NO: 156523 - DNA, 25 bp, Probe Sequence
aaagcttggtggccaagcagtctgt

SEQ ID NO: 156524 - DNA, 25 bp, Probe Sequence
aaactctgaggcctgaagttctgtg

SEQ ID NO: 156525 - DNA, 25 bp, Probe Sequence
aaacttgggtcacctgatctgctgt

SEQ ID NO: 156526 - DNA, 25 bp, Probe Sequence
aaactatccagtgccatgtctgctg

SEQ ID NO: 156527 - DNA, 25 bp, Probe Sequence
aaagctgatagccagacacgttctg

SEQ ID NO: 156528 - DNA, 25 bp, Probe Sequence
aaagctatggcatcatataatttgc

SEQ ID NO: 156529 - DNA, 25 bp, Probe Sequence
aaagttgacatacattatattcatg

SEQ ID NO: 156530 - DNA, 25 bp, Probe Sequence
aaagttacaagctaagattccagaa

SEQ ID NO: 156531 - DNA, 25 bp, Probe Sequence
aaacctagctagtaaatattgatga

SEQ ID NO: 156532 - DNA, 25 bp, Probe Sequence
aaaccaagccgttatgatctgcaat

SEQ ID NO: 156533 - DNA, 25 bp, Probe Sequence
aaaccaaacaatttgctcccattca

SEQ ID NO: 156534 - DNA, 25 bp, Probe Sequence
aacaccaaaacctctgtcagaacac

SEQ ID NO: 156535 - DNA, 25 bp, Probe Sequence
aacaccaaaacgcttggcaattata

SEQ ID NO: 156536 - DNA, 25 bp, Probe Sequence
aaacctaaacctctctgaacttgca

SEQ ID NO: 156537 - DNA, 25 bp, Probe Sequence
aaagcctagaatgcagtttcacagt

SEQ ID NO: 156538 - DNA, 25 bp, Probe Sequence
aaagcacccacatttgtttcaatgc

SEQ ID NO: 156539 - DNA, 25 bp, Probe Sequence
aaagagcccatattatatctgaaac

SEQ ID NO: 156540 - DNA, 25 bp, Probe Sequence
aaagacccttttataatgcacatat

SEQ ID NO: 156541 - DNA, 25 bp, Probe Sequence
aaaatcccttaatctatgtgcaccg

SEQ ID NO: 156542 - DNA, 25 bp, Probe Sequence
aaagactccgtgtaactgtgtgaac

SEQ ID NO: 156543 - DNA, 25 bp, Probe Sequence
aaagactccgtgtaactgtgtgaac

SEQ ID NO: 156544 - DNA, 25 bp, Probe Sequence
aaagccttatagtaactgtgtaatt

SEQ ID NO: 156545 - DNA, 25 bp, Probe Sequence
aaagacttcatagggtcactggaat

SEQ ID NO: 156546 - DNA, 25 bp, Probe Sequence
aaagtttcttggtctcagcttcatt

SEQ ID NO: 156547 - DNA, 25 bp, Probe Sequence
aaagttatcttacgctatttctgtt

SEQ ID NO: 156548 - DNA, 25 bp, Probe Sequence
aaagcagtcatcttcagcgttttcc

SEQ ID NO: 156549 - DNA, 25 bp, Probe Sequence
aaagcaaactggtgtgtattctcat

SEQ ID NO: 156550 - DNA, 25 bp, Probe Sequence
aaagctgcacctagaaggtatttca

SEQ ID NO: 156551 - DNA, 25 bp, Probe Sequence
aaagctgaatgttaaggtgtatgta

SEQ ID NO: 156552 - DNA, 25 bp, Probe Sequence
aaactgagagtagagtgcttagttg

SEQ ID NO: 156553 - DNA, 25 bp, Probe Sequence
aaactagtgacagcttgtggctttt

SEQ ID NO: 156554 - DNA, 25 bp, Probe Sequence
aaacggtgaaatctctagcctcttt

SEQ ID NO: 156555 - DNA, 25 bp, Probe Sequence
aagacggggattgtgagcggcttcg

SEQ ID NO: 156556 - DNA, 25 bp, Probe Sequence
aaacggcttttgatgaggccattgc

SEQ ID NO: 156557 - DNA, 25 bp, Probe Sequence
aaagagactggttgtcgggacattc

SEQ ID NO: 156558 - DNA, 25 bp, Probe Sequence
aaagcccatgggcccagagagaatt

SEQ ID NO: 156559 - DNA, 25 bp, Probe Sequence
aaagcagcaaggacatccggatgaa

SEQ ID NO: 156560 - DNA, 25 bp, Probe Sequence
aaagagagaagaatccagggaacag

SEQ ID NO: 156561 - DNA, 25 bp, Probe Sequence
aaagagcagaactaccagcggtggc

SEQ ID NO: 156562 - DNA, 25 bp, Probe Sequence
aaagagcaacttaggctgggtgcag

SEQ ID NO: 156563 - DNA, 25 bp, Probe Sequence
aaagccaactctcgtttggcctgga

SEQ ID NO: 156564 - DNA, 25 bp, Probe Sequence
aacagcaaaggccttgttggggaga

SEQ ID NO: 156565 - DNA, 25 bp, Probe Sequence
aaagcaacaggcctttctcaggtgt

SEQ ID NO: 156566 - DNA, 25 bp, Probe Sequence
aaagctacagaggttaatgtattgt

SEQ ID NO: 156567 - DNA, 25 bp, Probe Sequence
aaaccaagcgcacgatccagtttgt

SEQ ID NO: 156568 - DNA, 25 bp, Probe Sequence
aaagaccatcctcacgagctatagt

SEQ ID NO: 156569 - DNA, 25 bp, Probe Sequence
aaagatcccctctgtagagatcatg

SEQ ID NO: 156570 - DNA, 25 bp, Probe Sequence
aaagttgcccctgtaatacataagt

SEQ ID NO: 156571 - DNA, 25 bp, Probe Sequence
aaagcttccccggtaatgtcaatca

SEQ ID NO: 156572 - DNA, 25 bp, Probe Sequence
aaagcttgacctggggcaattacat

SEQ ID NO: 156573 - DNA, 25 bp, Probe Sequence
aaactgtaccttttgcgatttcaca

SEQ ID NO: 156574 - DNA, 25 bp, Probe Sequence
aaacaaacctcttctgggatctcct

SEQ ID NO: 156575 - DNA, 25 bp, Probe Sequence
aaacaaagcgttctgcgcgtcttca

SEQ ID NO: 156576 - DNA, 25 bp, Probe Sequence
aaaccaggagttcatgccatttgtc

SEQ ID NO: 156577 - DNA, 25 bp, Probe Sequence
aaaccaagttggaagctattcggat

SEQ ID NO: 156578 - DNA, 25 bp, Probe Sequence
aaagctcaagttcaagtttctgtat

SEQ ID NO: 156579 - DNA, 25 bp, Probe Sequence
aaagcaccactacaatgtccatttt

SEQ ID NO: 156580 - DNA, 25 bp, Probe Sequence
aaagcaatattcacaactggcattt

SEQ ID NO: 156581 - DNA, 25 bp, Probe Sequence
aaacaggcattctcacagctgggtt

SEQ ID NO: 156582 - DNA, 25 bp, Probe Sequence
aaagagcttctttcacagtgttgat

SEQ ID NO: 156583 - DNA, 25 bp, Probe Sequence
aaagagcttctttcacagtgttgat

SEQ ID NO: 156584 - DNA, 25 bp, Probe Sequence
aaacatgtactggcacaatttgtga

SEQ ID NO: 156585 - DNA, 25 bp, Probe Sequence
aaacatggcactgttgcctatcaga

SEQ ID NO: 156586 - DNA, 25 bp, Probe Sequence
aaagcatgacattcgttcacaatag

SEQ ID NO: 156587 - DNA, 25 bp, Probe Sequence
aaagcatgacattcgaccctagact

SEQ ID NO: 156588 - DNA, 25 bp, Probe Sequence
aaagcaatgcagtaccccatagact

SEQ ID NO: 156589 - DNA, 25 bp, Probe Sequence
aaagcaatgcagtaccccatagact

SEQ ID NO: 156590 - DNA, 25 bp, Probe Sequence
aaagaggcagcattccagccaagat

SEQ ID NO: 156591 - DNA, 25 bp, Probe Sequence
aaagatgacagactacgccaagaag

SEQ ID NO: 156592 - DNA, 25 bp, Probe Sequence
aaaaaagactcagccaagacaagga

SEQ ID NO: 156593 - DNA, 25 bp, Probe Sequence
aaaaaagcacctgctgcaccgtaag

SEQ ID NO: 156594 - DNA, 25 bp, Probe Sequence
aaaaccaagcgcacgatccagtttg

SEQ ID NO: 156595 - DNA, 25 bp, Probe Sequence
aaaacacaaggcaggatgccccttt

SEQ ID NO: 156596 - DNA, 25 bp, Probe Sequence
aaagaccagggcatgtgtggctcct

SEQ ID NO: 156597 - DNA, 25 bp, Probe Sequence
aaagagccacgaggggtggacccag

SEQ ID NO: 156598 - DNA, 25 bp, Probe Sequence
aaacattcctgagaagtggacccca

SEQ ID NO: 156599 - DNA, 25 bp, Probe Sequence
aaactgctgccttcgaagtgtgcga

SEQ ID NO: 156600 - DNA, 25 bp, Probe Sequence
aaactgctgccttcgaagtgtgcga

SEQ ID NO: 156601 - DNA, 25 bp, Probe Sequence
aaacgctcactccgaattagcggtg

SEQ ID NO: 156602 - DNA, 25 bp, Probe Sequence
aaagcccccaggaactactgagtgg

SEQ ID NO: 156603 - DNA, 25 bp, Probe Sequence
aaagccaaactcttcaggactgcgt

SEQ ID NO: 156604 - DNA, 25 bp, Probe Sequence
aaagccagttccctacgaggagtgt

SEQ ID NO: 156605 - DNA, 25 bp, Probe Sequence
aaagccagttccctacgaggagtgt

SEQ ID NO: 156606 - DNA, 25 bp, Probe Sequence
aaagcccttgacctactggaaggat

SEQ ID NO: 156607 - DNA, 25 bp, Probe Sequence
aaaccagccaacctatgttacacgt

SEQ ID NO: 156608 - DNA, 25 bp, Probe Sequence
aaacctctcaacatatttccagtct

SEQ ID NO: 156609 - DNA, 25 bp, Probe Sequence
aaacctccaaatttttcagcagaag

SEQ ID NO: 156610 - DNA, 25 bp, Probe Sequence
aaaccccactactcttcatgggagc

SEQ ID NO: 156611 - DNA, 25 bp, Probe Sequence
aaacctgtaaacttcattctgtggg

SEQ ID NO: 156612 - DNA, 25 bp, Probe Sequence
aaacctgttttcgctgtgtgtggcg

SEQ ID NO: 156613 - DNA, 25 bp, Probe Sequence
aaaccattgtttcctgtggcagggg

SEQ ID NO: 156614 - DNA, 25 bp, Probe Sequence
aaagccatgattgtcctggtgcagt

SEQ ID NO: 156615 - DNA, 25 bp, Probe Sequence
aaacctacttcaggccagatgcagt

SEQ ID NO: 156616 - DNA, 25 bp, Probe Sequence
aaacctacacgagcaccgtgatttc

SEQ ID NO: 156617 - DNA, 25 bp, Probe Sequence
aaacctgaaggagcatttggaagtc

SEQ ID NO: 156618 - DNA, 25 bp, Probe Sequence
aaaccaagggatatttcatgaaggc

SEQ ID NO: 156619 - DNA, 25 bp, Probe Sequence
aaacgcccggatctcagtcaaaggc

SEQ ID NO: 156620 - DNA, 25 bp, Probe Sequence
aacagggtcttgatttcgcttaggc

SEQ ID NO: 156621 - DNA, 25 bp, Probe Sequence
aaagctggtcatatggttccttctg

SEQ ID NO: 156622 - DNA, 25 bp, Probe Sequence
aaagcaggactcattctggctcctt

SEQ ID NO: 156623 - DNA, 25 bp, Probe Sequence
aaagaccactttgaggctcttgctc

SEQ ID NO: 156624 - DNA, 25 bp, Probe Sequence
aaaaccctgatctgggattttcaga

SEQ ID NO: 156625 - DNA, 25 bp, Probe Sequence
aaagaacttgatttgcatggatttt

SEQ ID NO: 156626 - DNA, 25 bp, Probe Sequence
aaaacctgctggttgcgcagatacc

SEQ ID NO: 156627 - DNA, 25 bp, Probe Sequence
aaaagcctggatctgcagcagaatg

SEQ ID NO: 156628 - DNA, 25 bp, Probe Sequence
aaagccctgtcaaagcaagagatgg

SEQ ID NO: 156629 - DNA, 25 bp, Probe Sequence
aaagccctgtcaaagcaagagatgg

SEQ ID NO: 156630 - DNA, 25 bp, Probe Sequence
aaagccgatcataattcatagagta

SEQ ID NO: 156631 - DNA, 25 bp, Probe Sequence
aaagcgctattgaatattgcaatct

SEQ ID NO: 156632 - DNA, 25 bp, Probe Sequence
aaagatgctattagaatttctgtat

SEQ ID NO: 156633 - DNA, 25 bp, Probe Sequence
aaagatggtctatattctctttatt

SEQ ID NO: 156634 - DNA, 25 bp, Probe Sequence
aaagcaaggatttcatattttctat

SEQ ID NO: 156635 - DNA, 25 bp, Probe Sequence
aaagcatggagagtggcatcttctt

SEQ ID NO: 156636 - DNA, 25 bp, Probe Sequence
aaactggacctgtattatcctgaat

SEQ ID NO: 156637 - DNA, 25 bp, Probe Sequence
aaactggacggaaccacctcaatgc

SEQ ID NO: 156638 - DNA, 25 bp, Probe Sequence
aaactgggaaacaaacgatatatct

SEQ ID NO: 156639 - DNA, 25 bp, Probe Sequence
aaacttgtgaagtggaaatgttcta

SEQ ID NO: 156640 - DNA, 25 bp, Probe Sequence
aaagctctgtagaattaaaatgttc

SEQ ID NO: 156641 - DNA, 25 bp, Probe Sequence
aaagctatgtgaccttacaccagtc

SEQ ID NO: 156642 - DNA, 25 bp, Probe Sequence
aaagcttgtggccaatggaacagta

SEQ ID NO: 156643 - DNA, 25 bp, Probe Sequence
aaagaattgagccacattgaacaca

SEQ ID NO: 156644 - DNA, 25 bp, Probe Sequence
aaagaaaggcgcttggcatcacaca

SEQ ID NO: 156645 - DNA, 25 bp, Probe Sequence
aaagaaaacagagtgtccatctaaa

SEQ ID NO: 156646 - DNA, 25 bp, Probe Sequence
aaagcgataaaggctaccgtagcaa

SEQ ID NO: 156647 - DNA, 25 bp, Probe Sequence
aaaccagatcgagctacctaagaac

SEQ ID NO: 156648 - DNA, 25 bp, Probe Sequence
aaactccacgatcttcctgaagaag

SEQ ID NO: 156649 - DNA, 25 bp, Probe Sequence
aaacttattgctgttcccacaaagg

SEQ ID NO: 156650 - DNA, 25 bp, Probe Sequence
aaagccatttgtgtaatctccaaaa

SEQ ID NO: 156651 - DNA, 25 bp, Probe Sequence
aaaccattgctgcggaacacgaaga

SEQ ID NO: 156652 - DNA, 25 bp, Probe Sequence
tctgaatattagatgctctgagaaa

SEQ ID NO: 156653 - DNA, 25 bp, Probe Sequence
aaacttgtgcaagcagaaggaggat

SEQ ID NO: 156654 - DNA, 25 bp, Probe Sequence
aaagctccgcaacaagatagcaggt

SEQ ID NO: 156655 - DNA, 25 bp, Probe Sequence
aagcccggaagtacatgaacgcagt

SEQ ID NO: 156656 - DNA, 25 bp, Probe Sequence
aaaccggaagtgatgaaccagcctt

SEQ ID NO: 156657 - DNA, 25 bp, Probe Sequence
aaaccagaaagtgtattgccaactt

SEQ ID NO: 156658 - DNA, 25 bp, Probe Sequence
taaactttaagtgtcgagggaccat

SEQ ID NO: 156659 - DNA, 25 bp, Probe Sequence
aaactttaagacgctggggcatctt

SEQ ID NO: 156660 - DNA, 25 bp, Probe Sequence
caaactttacaagaagggctcacat

SEQ ID NO: 156661 - DNA, 25 bp, Probe Sequence
aaaccaagacaatatcagggtgaca

SEQ ID NO: 156662 - DNA, 25 bp, Probe Sequence
aaacctgagcacgtttgccgtggac

SEQ ID NO: 156663 - DNA, 25 bp, Probe Sequence
aaacctgaactttcttcgttgcata

SEQ ID NO: 156664 - DNA, 25 bp, Probe Sequence
aaaccccattagtctagccttgtag

SEQ ID NO: 156665 - DNA, 25 bp, Probe Sequence
aaaccccatccctaaaatattgctg

SEQ ID NO: 156666 - DNA, 25 bp, Probe Sequence
aaaccgacgtagcaaattatggtgt

SEQ ID NO: 156667 - DNA, 25 bp, Probe Sequence
gataaattggggagaactttggttg

SEQ ID NO: 156668 - DNA, 25 bp, Probe Sequence
aaagactgggagcaaactagggaat

SEQ ID NO: 156669 - DNA, 25 bp, Probe Sequence
aaacctgggaggagccatgatctgg

SEQ ID NO: 156670 - DNA, 25 bp, Probe Sequence
ggaaccaaggaaggggatacaggct

SEQ ID NO: 156671 - DNA, 25 bp, Probe Sequence
aaaccaaggaacagtgatccacttt

SEQ ID NO: 156672 - DNA, 25 bp, Probe Sequence
aaaccaaggaacagtgatccacttt

SEQ ID NO: 156673 - DNA, 25 bp, Probe Sequence
aaacccagggccaagtatgctactg

SEQ ID NO: 156674 - DNA, 25 bp, Probe Sequence
aaactccatggggccaaatctgcct

SEQ ID NO: 156675 - DNA, 25 bp, Probe Sequence
aaagccacggagcccatactgggct

SEQ ID NO: 156676 - DNA, 25 bp, Probe Sequence
aaactccgtgagatatttgggcttt

SEQ ID NO: 156677 - DNA, 25 bp, Probe Sequence
aaaccctggcgacagttgagacctt

SEQ ID NO: 156678 - DNA, 25 bp, Probe Sequence
aaaccctggcgacagttgagacctt

SEQ ID NO: 156679 - DNA, 25 bp, Probe Sequence
aaaccatcgatgacctagaagagac

SEQ ID NO: 156680 - DNA, 25 bp, Probe Sequence
aaacgaatgctgattaaatgtgctg

SEQ ID NO: 156681 - DNA, 25 bp, Probe Sequence
aaagagaagcaagccagacatggtg

SEQ ID NO: 156682 - DNA, 25 bp, Probe Sequence
aaagagagaggaccgcagacgcctg

SEQ ID NO: 156683 - DNA, 25 bp, Probe Sequence
aaagaatattgagccaaagcccagg

SEQ ID NO: 156684 - DNA, 25 bp, Probe Sequence
caaaagattcgagaagacctcccga

SEQ ID NO: 156685 - DNA, 25 bp, Probe Sequence
aaagaattcgagtgggcctccaggc

SEQ ID NO: 156686 - DNA, 25 bp, Probe Sequence
aaagaagtggagcgtgtcctgaagg

SEQ ID NO: 156687 - DNA, 25 bp, Probe Sequence
aaagaagtaacttgtgtctcatgaa

SEQ ID NO: 156688 - DNA, 25 bp, Probe Sequence
aaagcaagtcatagttctgcccata

SEQ ID NO: 156689 - DNA, 25 bp, Probe Sequence
aaagccagtgatctctctgactttc

SEQ ID NO: 156690 - DNA, 25 bp, Probe Sequence
aaacagactgtcgcttgattttaaa

SEQ ID NO: 156691 - DNA, 25 bp, Probe Sequence
aaagcaggcttgcccagtacattta

SEQ ID NO: 156692 - DNA, 25 bp, Probe Sequence
aaagcaggtagctctgacactttca

SEQ ID NO: 156693 - DNA, 25 bp, Probe Sequence
aaagagttcagacttatcaccattc

SEQ ID NO: 156694 - DNA, 25 bp, Probe Sequence
aaagaactcaactttccagcatcct

SEQ ID NO: 156695 - DNA, 25 bp, Probe Sequence
aaagaactctaatgtccagctgctc

SEQ ID NO: 156696 - DNA, 25 bp, Probe Sequence
aaacaagctaattcctctatgccac

SEQ ID NO: 156697 - DNA, 25 bp, Probe Sequence
aaacaagctaattcctctatgccac

SEQ ID NO: 156698 - DNA, 25 bp, Probe Sequence
aaagcagatgcaagtatccctcacc

SEQ ID NO: 156699 - DNA, 25 bp, Probe Sequence
aaagcagagcagtatcaacccctca

SEQ ID NO: 156700 - DNA, 25 bp, Probe Sequence
aaagcagaggtttacaggtcagaaa

SEQ ID NO: 156701 - DNA, 25 bp, Probe Sequence
aaagaaccctcttgattgacagaaa

SEQ ID NO: 156702 - DNA, 25 bp, Probe Sequence
aaagacattccaatatttgcaaaaa

SEQ ID NO: 156703 - DNA, 25 bp, Probe Sequence
aaagcacttctcgtttctgctaatc

SEQ ID NO: 156704 - DNA, 25 bp, Probe Sequence
aaacttttcctagatgcaaatgctg

SEQ ID NO: 156705 - DNA, 25 bp, Probe Sequence
aaacttttctttgcatcaaggtata

SEQ ID NO: 156706 - DNA, 25 bp, Probe Sequence
aaagctttttattgtattgtactat

SEQ ID NO: 156707 - DNA, 25 bp, Probe Sequence
aaagcatttgttaacgtcctattat

SEQ ID NO: 156708 - DNA, 25 bp, Probe Sequence
aaagctctctgatgagcacctcctt

SEQ ID NO: 156709 - DNA, 25 bp, Probe Sequence
aaagctcatttgggcacagccctaa

SEQ ID NO: 156710 - DNA, 25 bp, Probe Sequence
aaagacaagtgaatggcaatcctaa

SEQ ID NO: 156711 - DNA, 25 bp, Probe Sequence
aaagaaactgcaagtgccataggca

SEQ ID NO: 156712 - DNA, 25 bp, Probe Sequence
aaagaatcaccaactgtaaacatga

SEQ ID NO: 156713 - DNA, 25 bp, Probe Sequence
aaagaatcctcaggctctacaatct

SEQ ID NO: 156714 - DNA, 25 bp, Probe Sequence
aaagactttcagccctcaagatcta

SEQ ID NO: 156715 - DNA, 25 bp, Probe Sequence
aaagcactgtttccctcatgtgtgc

SEQ ID NO: 156716 - DNA, 25 bp, Probe Sequence
aaagctccattgtgcctgcaatggc

SEQ ID NO: 156717 - DNA, 25 bp, Probe Sequence
aaagctcctgttactcatattagtt

SEQ ID NO: 156718 - DNA, 25 bp, Probe Sequence
aaagccatctgatttctcatttgag

SEQ ID NO: 156719 - DNA, 25 bp, Probe Sequence
aaagccatggacttctatgatccag

SEQ ID NO: 156720 - DNA, 25 bp, Probe Sequence
caaaccggcacggtctgatccggaa

SEQ ID NO: 156721 - DNA, 25 bp, Probe Sequence
aaactgctggcagaactacctggac

SEQ ID NO: 156722 - DNA, 25 bp, Probe Sequence
aaacgctgaactatgctaatctgga

SEQ ID NO: 156723 - DNA, 25 bp, Probe Sequence
aaagcgtgaatttgttattaagcat

SEQ ID NO: 156724 - DNA, 25 bp, Probe Sequence
aaagctgctaactcctgatctaact

SEQ ID NO: 156725 - DNA, 25 bp, Probe Sequence
aaagctgctacagacctgtttctcc

SEQ ID NO: 156726 - DNA, 25 bp, Probe Sequence
aaagcttaccaagcatcttccacca

SEQ ID NO: 156727 - DNA, 25 bp, Probe Sequence
aaactcaaagcaagctcttctcctc

SEQ ID NO: 156728 - DNA, 25 bp, Probe Sequence
aaactcaaagcaagctcttctcctc

SEQ ID NO: 156729 - DNA, 25 bp, Probe Sequence
aaagacaataccacttgcatcattt

SEQ ID NO: 156730 - DNA, 25 bp, Probe Sequence
aaagaaaagatgcactttgctttaa

SEQ ID NO: 156731 - DNA, 25 bp, Probe Sequence
aaagcagaaaatcacctgttatcta

SEQ ID NO: 156732 - DNA, 25 bp, Probe Sequence
aaagccaacaagcaccagattaaac

SEQ ID NO: 156733 - DNA, 25 bp, Probe Sequence
aaagccaaaagttgcctttcgagag

SEQ ID NO: 156734 - DNA, 25 bp, Probe Sequence
aatggcgacagactgttccgttcca

SEQ ID NO: 156735 - DNA, 25 bp, Probe Sequence
aaagcagcaagatgttcaaactcca

SEQ ID NO: 156736 - DNA, 25 bp, Probe Sequence
aaagcagcaacatggtttgactcca

SEQ ID NO: 156737 - DNA, 25 bp, Probe Sequence
aaagcagcccaagctgtgaactcac

SEQ ID NO: 156738 - DNA, 25 bp, Probe Sequence
aaagcacaagaagcgtgagacgcca

SEQ ID NO: 156739 - DNA, 25 bp, Probe Sequence
aaagccaataaagtgatacacccga

SEQ ID NO: 156740 - DNA, 25 bp, Probe Sequence
aacaccaagaagattaaccctgaga

SEQ ID NO: 156741 - DNA, 25 bp, Probe Sequence
aaacccagtggttcaaacatcctga

SEQ ID NO: 156742 - DNA, 25 bp, Probe Sequence
aaaccacagtttgcaagaccaggag

SEQ ID NO: 156743 - DNA, 25 bp, Probe Sequence
aaaccagagttctagaaacagagtg

SEQ ID NO: 156744 - DNA, 25 bp, Probe Sequence
ctacccgagtttagtaacagtgcag

SEQ ID NO: 156745 - DNA, 25 bp, Probe Sequence
aaactcggctgtattaatcacgcga

SEQ ID NO: 156746 - DNA, 25 bp, Probe Sequence
aaagccctcatgtttgtgataaccg

SEQ ID NO: 156747 - DNA, 25 bp, Probe Sequence
aaagcggctctagctctgataacac

SEQ ID NO: 156748 - DNA, 25 bp, Probe Sequence
aaagcagcagctaacagctctgtga

SEQ ID NO: 156749 - DNA, 25 bp, Probe Sequence
aaagcagcagttccgctttatctat

SEQ ID NO: 156750 - DNA, 25 bp, Probe Sequence
aaagaagttgccattctctgcagtt

SEQ ID NO: 156751 - DNA, 25 bp, Probe Sequence
aaagaagattccaactctctcactc

SEQ ID NO: 156752 - DNA, 25 bp, Probe Sequence
aaagaatttctacctgatccagcat

SEQ ID NO: 156753 - DNA, 25 bp, Probe Sequence
aaagaatttgtacttaatggcatgg

SEQ ID NO: 156754 - DNA, 25 bp, Probe Sequence
aaagcaaatatcacttttggctgca

SEQ ID NO: 156755 - DNA, 25 bp, Probe Sequence
aaagctgccaagatttttggcgagt

SEQ ID NO: 156756 - DNA, 25 bp, Probe Sequence
aaagcatgcacttgttatttggaaa

SEQ ID NO: 156757 - DNA, 25 bp, Probe Sequence
aaagcagactgatttgtttctaaga

SEQ ID NO: 156758 - DNA, 25 bp, Probe Sequence
aaagcagccgaccatctttcaaaac

SEQ ID NO: 156759 - DNA, 25 bp, Probe Sequence
aaagcagccgaccatctttcaaaac

SEQ ID NO: 156760 - DNA, 25 bp, Probe Sequence
aaagcgaatatccctctataaaact

SEQ ID NO: 156761 - DNA, 25 bp, Probe Sequence
aaagccacataccctattacagaga

SEQ ID NO: 156762 - DNA, 25 bp, Probe Sequence
aaagccacttccttgaatggaggat

SEQ ID NO: 156763 - DNA, 25 bp, Probe Sequence
aaagccgcctggctgagatggggtg

SEQ ID NO: 156764 - DNA, 25 bp, Probe Sequence
aaagcggctgctcgaacagattgcg

SEQ ID NO: 156765 - DNA, 25 bp, Probe Sequence
aaagcgtgccaatcaacatgctggt

SEQ ID NO: 156766 - DNA, 25 bp, Probe Sequence
aaagcagtctcggaaacacagagcc

SEQ ID NO: 156767 - DNA, 25 bp, Probe Sequence
aaagacaccatcggaacagcagcgc

SEQ ID NO: 156768 - DNA, 25 bp, Probe Sequence
aaagcaactccatcagaactcgcaa

SEQ ID NO: 156769 - DNA, 25 bp, Probe Sequence
aaagcaacttttccaacatacaatt

SEQ ID NO: 156770 - DNA, 25 bp, Probe Sequence
aaagctacttaatcaccaccgatgc

SEQ ID NO: 156771 - DNA, 25 bp, Probe Sequence
aaacgcatttaatactaactgcagt

SEQ ID NO: 156772 - DNA, 25 bp, Probe Sequence
aaaccattttcctatgttaggagtg

SEQ ID NO: 156773 - DNA, 25 bp, Probe Sequence
aaacctttcatctggtcagggagtg

SEQ ID NO: 156774 - DNA, 25 bp, Probe Sequence
aaagctgtttatccgttccatgggt

SEQ ID NO: 156775 - DNA, 25 bp, Probe Sequence
aaacctgtctatcttatgccagaag

SEQ ID NO: 156776 - DNA, 25 bp, Probe Sequence
aaacctccacattcttaggcggagg

SEQ ID NO: 156777 - DNA, 25 bp, Probe Sequence
aaagccccaatcttagcaagtgcgg

SEQ ID NO: 156778 - DNA, 25 bp, Probe Sequence
aaagccgagtacttacaactctggt

SEQ ID NO: 156779 - DNA, 25 bp, Probe Sequence
aaacccgctacagacaagctttctg

SEQ ID NO: 156780 - DNA, 25 bp, Probe Sequence
aaaacaccaaacagccgcttgtctc

SEQ ID NO: 156781 - DNA, 25 bp, Probe Sequence
aaaccactaaataggccgggtgcag

SEQ ID NO: 156782 - DNA, 25 bp, Probe Sequence
aaagccctacagttgggctgttata

SEQ ID NO: 156783 - DNA, 25 bp, Probe Sequence
aaagccacaggtgttgattgttata

SEQ ID NO: 156784 - DNA, 25 bp, Probe Sequence
aaagctccatggactggtgaggatt

SEQ ID NO: 156785 - DNA, 25 bp, Probe Sequence
aaagcagacatgtgtgctgtgggac

SEQ ID NO: 156786 - DNA, 25 bp, Probe Sequence
aaagccaagtgtggtggtgtgcacc

SEQ ID NO: 156787 - DNA, 25 bp, Probe Sequence
aaagcactatgtctgggttgaccta

SEQ ID NO: 156788 - DNA, 25 bp, Probe Sequence
aaacgtatgtgcgtgtgtttatact

SEQ ID NO: 156789 - DNA, 25 bp, Probe Sequence
aaagcagatatgatgttttctgttt

SEQ ID NO: 156790 - DNA, 25 bp, Probe Sequence
aaagcattctgtgtttactctttgc

SEQ ID NO: 156791 - DNA, 25 bp, Probe Sequence
aaagcattcatgtttctccacagct

SEQ ID NO: 156792 - DNA, 25 bp, Probe Sequence
aaagcacagatggatagctcccagt

SEQ ID NO: 156793 - DNA, 25 bp, Probe Sequence
aaagcacagatggatagctcccagt

SEQ ID NO: 156794 - DNA, 25 bp, Probe Sequence
aaacaggtccagtatcccagtcatt

SEQ ID NO: 156795 - DNA, 25 bp, Probe Sequence
aaactgagtccagctgcctaattct

SEQ ID NO: 156796 - DNA, 25 bp, Probe Sequence
aaagctgaatccttccatttcttct

SEQ ID NO: 156797 - DNA, 25 bp, Probe Sequence
aaagctgacactgtctctttttcct

SEQ ID NO: 156798 - DNA, 25 bp, Probe Sequence
aaagctcacaccaaatttttctatc

SEQ ID NO: 156799 - DNA, 25 bp, Probe Sequence
aaagcataactagatttttctatct

SEQ ID NO: 156800 - DNA, 25 bp, Probe Sequence
aaagcaaaccagaatcttatttata

SEQ ID NO: 156801 - DNA, 25 bp, Probe Sequence
aaagctattaacaagcaatatatta

SEQ ID NO: 156802 - DNA, 25 bp, Probe Sequence
aaagcttccaacacagctagcattc

SEQ ID NO: 156803 - DNA, 25 bp, Probe Sequence
aaacttcgcaaaatgcctagatatt

SEQ ID NO: 156804 - DNA, 25 bp, Probe Sequence
aaactcctaggactcttgaacatct

SEQ ID NO: 156805 - DNA, 25 bp, Probe Sequence
aaactgcaggatggactcttgcaca

SEQ ID NO: 156806 - DNA, 25 bp, Probe Sequence
aaacggtatccactgcattgccaga

SEQ ID NO: 156807 - DNA, 25 bp, Probe Sequence
aaagctctgaattcaggtcccagtt

SEQ ID NO: 156808 - DNA, 25 bp, Probe Sequence
aaagctctgaattcaggtcccagtt

SEQ ID NO: 156809 - DNA, 25 bp, Probe Sequence
aaagcagctgaattcggggacgttt

SEQ ID NO: 156810 - DNA, 25 bp, Probe Sequence
aaagccagcggggagggactgattt

SEQ ID NO: 156811 - DNA, 25 bp, Probe Sequence
aaagcctgcggtgtgcggatgatgt

SEQ ID NO: 156812 - DNA, 25 bp, Probe Sequence
aaagcaccgggaggagtgagatgtg

SEQ ID NO: 156813 - DNA, 25 bp, Probe Sequence
aacagtcactggaaagagtgccagt

SEQ ID NO: 156814 - DNA, 25 bp, Probe Sequence
aaagcatcctggcaaagctgccacc

SEQ ID NO: 156815 - DNA, 25 bp, Probe Sequence
aaagcctcatggtaaactcaaactg

SEQ ID NO: 156816 - DNA, 25 bp, Probe Sequence
aaagcaaattcttcaagcaaaacga

SEQ ID NO: 156817 - DNA, 25 bp, Probe Sequence
aaagctaattctagagcatcaagaa

SEQ ID NO: 156818 - DNA, 25 bp, Probe Sequence
aaactgacatctagaggaataaatc

SEQ ID NO: 156819 - DNA, 25 bp, Probe Sequence
aaagctagcttacctcaaagaatct

SEQ ID NO: 156820 - DNA, 25 bp, Probe Sequence
aacaggaggaacctgcaaccagacc

SEQ ID NO: 156821 - DNA, 25 bp, Probe Sequence
aaaagcggaagcttctaccacacct

SEQ ID NO: 156822 - DNA, 25 bp, Probe Sequence
aaacagctggaagatggacgcaccc

SEQ ID NO: 156823 - DNA, 25 bp, Probe Sequence
aaagcaccatgaaaagagaccccac

SEQ ID NO: 156824 - DNA, 25 bp, Probe Sequence
aaagcacctggagatcaaccctgac

SEQ ID NO: 156825 - DNA, 25 bp, Probe Sequence
aaagaagttagccaaatcccagcac

SEQ ID NO: 156826 - DNA, 25 bp, Probe Sequence
aacactaggtgagaagtcagccagc

SEQ ID NO: 156827 - DNA, 25 bp, Probe Sequence
aaacaagggaccaagtgcacacatt

SEQ ID NO: 156828 - DNA, 25 bp, Probe Sequence
aaaccaggtgatacatctgtggaac

SEQ ID NO: 156829 - DNA, 25 bp, Probe Sequence
gagaaaaagtttatctggaaccacg

SEQ ID NO: 156830 - DNA, 25 bp, Probe Sequence
aaactgaattttatctgctatacca

SEQ ID NO: 156831 - DNA, 25 bp, Probe Sequence
aaacataatttcacaattattcctt

SEQ ID NO: 156832 - DNA, 25 bp, Probe Sequence
aaaaaaaactgtctctgtcacctgt

SEQ ID NO: 156833 - DNA, 25 bp, Probe Sequence
aaaatggaaagtttccagtacactg

SEQ ID NO: 156834 - DNA, 25 bp, Probe Sequence
aaactctaaagtcagccaaaacaga

SEQ ID NO: 156835 - DNA, 25 bp, Probe Sequence
aaagccaacaaacaggcaagtcctg

SEQ ID NO: 156836 - DNA, 25 bp, Probe Sequence
aaaccaaccacaccttgaagcagac

SEQ ID NO: 156837 - DNA, 25 bp, Probe Sequence
aaagcaaaccttaatctgcaaagac

SEQ ID NO: 156838 - DNA, 25 bp, Probe Sequence
aaagcaagatcatttacccaaggat

SEQ ID NO: 156839 - DNA, 25 bp, Probe Sequence
aaagccacaaatcaccacagagcct

SEQ ID NO: 156840 - DNA, 25 bp, Probe Sequence
aaagcaaccagacattaaggtccaa

SEQ ID NO: 156841 - DNA, 25 bp, Probe Sequence
aaaaatcgaatcactgaaggcccat

SEQ ID NO: 156842 - DNA, 25 bp, Probe Sequence
aaacctgcctacacatgggcagccc

SEQ ID NO: 156843 - DNA, 25 bp, Probe Sequence
aaagccccagcaggctaggtgcagc

SEQ ID NO: 156844 - DNA, 25 bp, Probe Sequence
aaagctgcccagtccatggggacag

SEQ ID NO: 156845 - DNA, 25 bp, Probe Sequence
aaagctgcgaaacctgtgggatcag

SEQ ID NO: 156846 - DNA, 25 bp, Probe Sequence
aacagctgaagatctcgcttggtca

SEQ ID NO: 156847 - DNA, 25 bp, Probe Sequence
aaactgggacctgatctatgatacg

SEQ ID NO: 156848 - DNA, 25 bp, Probe Sequence
aaactgggaggcttatctcactgag

SEQ ID NO: 156849 - DNA, 25 bp, Probe Sequence
aaactggtgtgtattctcatgtggt

SEQ ID NO: 156850 - DNA, 25 bp, Probe Sequence
aaagcatgagttcttgttcttcagt

SEQ ID NO: 156851 - DNA, 25 bp, Probe Sequence
aaagctcagtatcatggtttgacag

SEQ ID NO: 156852 - DNA, 25 bp, Probe Sequence
aaagctcagcttagatgtgttagaa

SEQ ID NO: 156853 - DNA, 25 bp, Probe Sequence
aaagctcatttcatgctctgcaaaa

SEQ ID NO: 156854 - DNA, 25 bp, Probe Sequence
aaagcacctgctatgttcaatataa

SEQ ID NO: 156855 - DNA, 25 bp, Probe Sequence
aaagctccgattatctcaaaataag

SEQ ID NO: 156856 - DNA, 25 bp, Probe Sequence
aaaccggcattgtattccaaagacg

SEQ ID NO: 156857 - DNA, 25 bp, Probe Sequence
aaactagtgagtggattgccgaaga

SEQ ID NO: 156858 - DNA, 25 bp, Probe Sequence
aaaccaataagccttgccaacagtc

SEQ ID NO: 156859 - DNA, 25 bp, Probe Sequence
aaacccaaaggcttggaaatctcag

SEQ ID NO: 156860 - DNA, 25 bp, Probe Sequence
aaaccatgcaaagcaacgactactt

SEQ ID NO: 156861 - DNA, 25 bp, Probe Sequence
aaaccacaaccaaaaggatctgctg

SEQ ID NO: 156862 - DNA, 25 bp, Probe Sequence
aaccctaacgaacaggacgctgact

SEQ ID NO: 156863 - DNA, 25 bp, Probe Sequence
aacctccacacagaatcgggggact

SEQ ID NO: 156864 - DNA, 25 bp, Probe Sequence
caccactccccagaaccaagtggat

SEQ ID NO: 156865 - DNA, 25 bp, Probe Sequence
aaacttgcccaccagaccaagggca

SEQ ID NO: 156866 - DNA, 25 bp, Probe Sequence
aaactagccaaatgtacaagaccac

SEQ ID NO: 156867 - DNA, 25 bp, Probe Sequence
aacagtataaaatgcgtgaacccgg

SEQ ID NO: 156868 - DNA, 25 bp, Probe Sequence
aaacagtataaaatgcgtgaacccg

SEQ ID NO: 156869 - DNA, 25 bp, Probe Sequence
aaagcatttatatcatcctcaaccc

SEQ ID NO: 156870 - DNA, 25 bp, Probe Sequence
aaagctttcataaataccagcagca

SEQ ID NO: 156871 - DNA, 25 bp, Probe Sequence
aaagctttcaatatgctcaacgcat

SEQ ID NO: 156872 - DNA, 25 bp, Probe Sequence
aaagcttttatgagctcatctagca

SEQ ID NO: 156873 - DNA, 25 bp, Probe Sequence
aaagcattatttctgccctagagtt

SEQ ID NO: 156874 - DNA, 25 bp, Probe Sequence
aaagctgatatcaaggggcctgaag

SEQ ID NO: 156875 - DNA, 25 bp, Probe Sequence
aaagctgttctcatgaagggaagag

SEQ ID NO: 156876 - DNA, 25 bp, Probe Sequence
aaactgtattatgagataggcaaac

SEQ ID NO: 156877 - DNA, 25 bp, Probe Sequence
aaacctgtccagtgtgcaagcaaaa

SEQ ID NO: 156878 - DNA, 25 bp, Probe Sequence
aataccttccatgtggagaaaaaca

SEQ ID NO: 156879 - DNA, 25 bp, Probe Sequence
aaagcacttccagcagcaggagcaa

SEQ ID NO: 156880 - DNA, 25 bp, Probe Sequence
aaaccttccacccagtgctgaattt

SEQ ID NO: 156881 - DNA, 25 bp, Probe Sequence
aaaccttccacccagtgctgaattt

SEQ ID NO: 156882 - DNA, 25 bp, Probe Sequence
aaagcacttgtcttaagcctacagt

SEQ ID NO: 156883 - DNA, 25 bp, Probe Sequence
aaagcagtcctcttattcctaaggt

SEQ ID NO: 156884 - DNA, 25 bp, Probe Sequence
aaacgttcctggatccgaacactgc

SEQ ID NO: 156885 - DNA, 25 bp, Probe Sequence
aaaagtacccgtactcagtactcag

SEQ ID NO: 156886 - DNA, 25 bp, Probe Sequence
aaaagataccaacattcagaaattc

SEQ ID NO: 156887 - DNA, 25 bp, Probe Sequence
aaaccacctaaatatgaaagattca

SEQ ID NO: 156888 - DNA, 25 bp, Probe Sequence
aaacaaccatgtcatttcagaagtt

SEQ ID NO: 156889 - DNA, 25 bp, Probe Sequence
aaagcccatcatggtattctaaggt

SEQ ID NO: 156890 - DNA, 25 bp, Probe Sequence
aaacccagtggatggctgaaggtgt

SEQ ID NO: 156891 - DNA, 25 bp, Probe Sequence
aaaccagcttggtgtagacagtctg

SEQ ID NO: 156892 - DNA, 25 bp, Probe Sequence
aaacccttgtacctggatcatatca

SEQ ID NO: 156893 - DNA, 25 bp, Probe Sequence
aaagcctacattccctgcttataca

SEQ ID NO: 156894 - DNA, 25 bp, Probe Sequence
aaacctacttcaacagcttattaga

SEQ ID NO: 156895 - DNA, 25 bp, Probe Sequence
aaacttgaatccccatgttcttaga

SEQ ID NO: 156896 - DNA, 25 bp, Probe Sequence
aaacttcaacactctttatgataac

SEQ ID NO: 156897 - DNA, 25 bp, Probe Sequence
aaagcctatttctcatttatattaa

SEQ ID NO: 156898 - DNA, 25 bp, Probe Sequence
aaagcctttatcccttgacatttat

SEQ ID NO: 156899 - DNA, 25 bp, Probe Sequence
aaagcattttcccttgctgtatttt

SEQ ID NO: 156900 - DNA, 25 bp, Probe Sequence
aaactttatcccatcgctttgatta

SEQ ID NO: 156901 - DNA, 25 bp, Probe Sequence
aaactattgagtccaggctttctga

SEQ ID NO: 156902 - DNA, 25 bp, Probe Sequence
aaagcttgtgtacagtgctcaccta

SEQ ID NO: 156903 - DNA, 25 bp, Probe Sequence
aaacttgagccacatgatgatcagg

SEQ ID NO: 156904 - DNA, 25 bp, Probe Sequence
aaagcatggtcttgccagtggctgg

SEQ ID NO: 156905 - DNA, 25 bp, Probe Sequence
aaagctaattgtgtggcctggttgg

SEQ ID NO: 156906 - DNA, 25 bp, Probe Sequence
aaagctatatttgatcgactgtgta

SEQ ID NO: 156907 - DNA, 25 bp, Probe Sequence
aaagctagcttttggtatctggtat

SEQ ID NO: 156908 - DNA, 25 bp, Probe Sequence
aaagctggtttatcatcctggtatt

SEQ ID NO: 156909 - DNA, 25 bp, Probe Sequence
aaagcatttctttacatggaggttt

SEQ ID NO: 156910 - DNA, 25 bp, Probe Sequence
aaagcatttatttgcagctgcaagg

SEQ ID NO: 156911 - DNA, 25 bp, Probe Sequence
aaagcagtcttatcctgacaggagc

SEQ ID NO: 156912 - DNA, 25 bp, Probe Sequence
aaagcatgtcctttccaactggaaa

SEQ ID NO: 156913 - DNA, 25 bp, Probe Sequence
aaagcatgtcctttccaactggaaa

SEQ ID NO: 156914 - DNA, 25 bp, Probe Sequence
aaacggctgtctgccaactggtaga

SEQ ID NO: 156915 - DNA, 25 bp, Probe Sequence
aaacgagctttggcagacactgaga

SEQ ID NO: 156916 - DNA, 25 bp, Probe Sequence
aaagcagagcttgatcgccagtgga

SEQ ID NO: 156917 - DNA, 25 bp, Probe Sequence
aaagccagctctttgttcagttgac

SEQ ID NO: 156918 - DNA, 25 bp, Probe Sequence
aaagcctcattactgtagagttcag

SEQ ID NO: 156919 - DNA, 25 bp, Probe Sequence
aaagcccaatcctatatgtttatgg

SEQ ID NO: 156920 - DNA, 25 bp, Probe Sequence
aaacccaattcagtctcttctaagc

SEQ ID NO: 156921 - DNA, 25 bp, Probe Sequence
aaacccaattcagtctcttctaagc

SEQ ID NO: 156922 - DNA, 25 bp, Probe Sequence
aaaactaataatgcacccttatggt

SEQ ID NO: 156923 - DNA, 25 bp, Probe Sequence
aatacctaagaagcaccttaagatt

SEQ ID NO: 156924 - DNA, 25 bp, Probe Sequence
aaacttcaacaataccctcaggttg

SEQ ID NO: 156925 - DNA, 25 bp, Probe Sequence
aaagctctaaaaaaccatctcatgg

SEQ ID NO: 156926 - DNA, 25 bp, Probe Sequence
aaagctctcaaatgtgaccatgtga

SEQ ID NO: 156927 - DNA, 25 bp, Probe Sequence
aaagcatctgcatgtgaacaccatc

SEQ ID NO: 156928 - DNA, 25 bp, Probe Sequence
aaagcatctgcatgtgaacaccatc

SEQ ID NO: 156929 - DNA, 25 bp, Probe Sequence
aaagcatctcactgcaagtcacata

SEQ ID NO: 156930 - DNA, 25 bp, Probe Sequence
aaagcttactgggatgtcaggaaat

SEQ ID NO: 156931 - DNA, 25 bp, Probe Sequence
aaagcatgtttggcttggaggaaac

SEQ ID NO: 156932 - DNA, 25 bp, Probe Sequence
aaacgtgttgtgtgagcatggaaaa

SEQ ID NO: 156933 - DNA, 25 bp, Probe Sequence
aaacgtgggctgggcaatggcctca

SEQ ID NO: 156934 - DNA, 25 bp, Probe Sequence
aaacaggcagttggccagagagcct

SEQ ID NO: 156935 - DNA, 25 bp, Probe Sequence
aaacggatgtctccattgatctgcc

SEQ ID NO: 156936 - DNA, 25 bp, Probe Sequence
aaacgtggaatgcatgtgactgtaa

SEQ ID NO: 156937 - DNA, 25 bp, Probe Sequence
aaactggagtaatgaagctgctgaa

SEQ ID NO: 156938 - DNA, 25 bp, Probe Sequence
aaactggtgtaattggcaaataact

SEQ ID NO: 156939 - DNA, 25 bp, Probe Sequence
aaactggtggattttcaagatgcaa

SEQ ID NO: 156940 - DNA, 25 bp, Probe Sequence
aaactgtgtgttctccatggtcata

SEQ ID NO: 156941 - DNA, 25 bp, Probe Sequence
aaactgtgtgcttctactagtgtgt

SEQ ID NO: 156942 - DNA, 25 bp, Probe Sequence
aaacgctgtgtccattctcagcatg

SEQ ID NO: 156943 - DNA, 25 bp, Probe Sequence
aagaccgtgtcctgacagacatact

SEQ ID NO: 156944 - DNA, 25 bp, Probe Sequence
aaaccatggcacgagaacaactacg

SEQ ID NO: 156945 - DNA, 25 bp, Probe Sequence
aaacaatacctatcataactacgta

SEQ ID NO: 156946 - DNA, 25 bp, Probe Sequence
aaacctttcatatgaaactgtcctg

SEQ ID NO: 156947 - DNA, 25 bp, Probe Sequence
aaaccatcattctcagcaaactatc

SEQ ID NO: 156948 - DNA, 25 bp, Probe Sequence
aaactctcttccatcaaggcatatc

SEQ ID NO: 156949 - DNA, 25 bp, Probe Sequence
aaacttctgtgcacaaagtgctccc

SEQ ID NO: 156950 - DNA, 25 bp, Probe Sequence
aaagctgacccaacaagagctctct

SEQ ID NO: 156951 - DNA, 25 bp, Probe Sequence
aaagctgtctgggccaagacgtcaa

SEQ ID NO: 156952 - DNA, 25 bp, Probe Sequence
aaagctgtctgggccaagacgtcaa

SEQ ID NO: 156953 - DNA, 25 bp, Probe Sequence
aaagctgtctgggccaaaggaataa

SEQ ID NO: 156954 - DNA, 25 bp, Probe Sequence
aaagcattctgagcatataaaggaa

SEQ ID NO: 156955 - DNA, 25 bp, Probe Sequence
aaagccatctcaagtaaaaggaata

SEQ ID NO: 156956 - DNA, 25 bp, Probe Sequence
aaagccaccaaatgaagggattcta

SEQ ID NO: 156957 - DNA, 25 bp, Probe Sequence
aaactcatgccccagaaagggatgt

SEQ ID NO: 156958 - DNA, 25 bp, Probe Sequence
aaaccgctccatagagaagagtaac

SEQ ID NO: 156959 - DNA, 25 bp, Probe Sequence
aaagctcaacccaaaagaaagacag

SEQ ID NO: 156960 - DNA, 25 bp, Probe Sequence
aaactcaagcaggccaaaaccaata

SEQ ID NO: 156961 - DNA, 25 bp, Probe Sequence
aaaccatcatcaacaccaagatcaa

SEQ ID NO: 156962 - DNA, 25 bp, Probe Sequence
aaacctcgagacaacaaacaagcag

SEQ ID NO: 156963 - DNA, 25 bp, Probe Sequence
aaacctaggaaatagcaatctgcac

SEQ ID NO: 156964 - DNA, 25 bp, Probe Sequence
aaacttcaaaaatagcttccagcct

SEQ ID NO: 156965 - DNA, 25 bp, Probe Sequence
aaactgtaataatttagccctcatt

SEQ ID NO: 156966 - DNA, 25 bp, Probe Sequence
aaagcatctgtttaattcaaccttt

SEQ ID NO: 156967 - DNA, 25 bp, Probe Sequence
aaagctcatgatgtaatgttttttt

SEQ ID NO: 156968 - DNA, 25 bp, Probe Sequence
aaagcttaatgtatgtttctatttt

SEQ ID NO: 156969 - DNA, 25 bp, Probe Sequence
aaagctgtcacaatcaatgttttta

SEQ ID NO: 156970 - DNA, 25 bp, Probe Sequence
aaagctgcctatttatctctgtttt

SEQ ID NO: 156971 - DNA, 25 bp, Probe Sequence
aaagctcactcatgttcttattgca

SEQ ID NO: 156972 - DNA, 25 bp, Probe Sequence
aaagcatcaccactcattttgacca

SEQ ID NO: 156973 - DNA, 25 bp, Probe Sequence
aaaacaccctcatgttcatacacct

SEQ ID NO: 156974 - DNA, 25 bp, Probe Sequence
aaaaatatcaccagtcctactcact

SEQ ID NO: 156975 - DNA, 25 bp, Probe Sequence
aacaaaccactgtgtcgaactccca

SEQ ID NO: 156976 - DNA, 25 bp, Probe Sequence
aacaaaccactgtgtcgaactccca

SEQ ID NO: 156977 - DNA, 25 bp, Probe Sequence
aaaaaggccttagctggacctgcgt

SEQ ID NO: 156978 - DNA, 25 bp, Probe Sequence
aaaaaggccttagctggacctgcgt

SEQ ID NO: 156979 - DNA, 25 bp, Probe Sequence
aaaaatcctgttaagctgggcgttg

SEQ ID NO: 156980 - DNA, 25 bp, Probe Sequence
aagaaaccaggtgaggtgcggtata

SEQ ID NO: 156981 - DNA, 25 bp, Probe Sequence
aaaagaccgggtgtggtggctcaca

SEQ ID NO: 156982 - DNA, 25 bp, Probe Sequence
aaaccagtcgggtgtggcgtcttat

SEQ ID NO: 156983 - DNA, 25 bp, Probe Sequence
aaacgatttgggcctctgtcagttt

SEQ ID NO: 156984 - DNA, 25 bp, Probe Sequence
aaaccaacggtgccaccgcagtctt

SEQ ID NO: 156985 - DNA, 25 bp, Probe Sequence
aagacaaacggatgcacccgtcttt

SEQ ID NO: 156986 - DNA, 25 bp, Probe Sequence
aaaaaattagcacaccatggttatt

SEQ ID NO: 156987 - DNA, 25 bp, Probe Sequence
aaacaaaagccacaaacagttcatc

SEQ ID NO: 156988 - DNA, 25 bp, Probe Sequence
aaaagaaacacgcacttagtctcta

SEQ ID NO: 156989 - DNA, 25 bp, Probe Sequence
aaaaagcaacccccatgtatgccta

SEQ ID NO: 156990 - DNA, 25 bp, Probe Sequence
aaagccagcataaaccctgtgaccg

SEQ ID NO: 156991 - DNA, 25 bp, Probe Sequence
aaaacagatgcaattcccggacgtc

SEQ ID NO: 156992 - DNA, 25 bp, Probe Sequence
aaaccatctggatcacctaacagtc

SEQ ID NO: 156993 - DNA, 25 bp, Probe Sequence
aaagccatttgctagccaaaaggta

SEQ ID NO: 156994 - DNA, 25 bp, Probe Sequence
aaagcctgtttaccaaggagcttga

SEQ ID NO: 156995 - DNA, 25 bp, Probe Sequence
aaactattttggtaagtgcagcttg

SEQ ID NO: 156996 - DNA, 25 bp, Probe Sequence
aaacctattgatcggaagtcagtcc

SEQ ID NO: 156997 - DNA, 25 bp, Probe Sequence
aaacctattgatcggaagtcagtcc

SEQ ID NO: 156998 - DNA, 25 bp, Probe Sequence
aaaccaagatgaagagacgagctgt

SEQ ID NO: 156999 - DNA, 25 bp, Probe Sequence
aaagccacaggccagaaagcagcgc

SEQ ID NO: 157000 - DNA, 25 bp, Probe Sequence
aaagccacaggccagaaagcagcgc

SEQ ID NO: 157001 - DNA, 25 bp, Probe Sequence
aaagcctagagcctggcactcaagc

SEQ ID NO: 157002 - DNA, 25 bp, Probe Sequence
aaagccatagacttgtgcaaaacaa

SEQ ID NO: 157003 - DNA, 25 bp, Probe Sequence
aaagcctgctgatcttaagaagaga

SEQ ID NO: 157004 - DNA, 25 bp, Probe Sequence
aaacctgtattaataggcaaatatt

SEQ ID NO: 157005 - DNA, 25 bp, Probe Sequence
aaagccatggatcagaaatgtcaat

SEQ ID NO: 157006 - DNA, 25 bp, Probe Sequence
aaagcgccagtgaagaaatctatac

SEQ ID NO: 157007 - DNA, 25 bp, Probe Sequence
aaagcgccagtgaagaaatctatac

SEQ ID NO: 157008 - DNA, 25 bp, Probe Sequence
aaagccacaatgagaatgatgcaca

SEQ ID NO: 157009 - DNA, 25 bp, Probe Sequence
aaagccacaagaatcaatgatgttt

SEQ ID NO: 157010 - DNA, 25 bp, Probe Sequence
aaagccacattgaccaagagttgtc

SEQ ID NO: 157011 - DNA, 25 bp, Probe Sequence
aaagccacattacaagctgccatcc

SEQ ID NO: 157012 - DNA, 25 bp, Probe Sequence
aaagccacattacaagctgccatcc

SEQ ID NO: 157013 - DNA, 25 bp, Probe Sequence
aaagccacattacaagctgccatcc

SEQ ID NO: 157014 - DNA, 25 bp, Probe Sequence
aaaccaactgctgaacgcacagccc

SEQ ID NO: 157015 - DNA, 25 bp, Probe Sequence
aaaccaactgctgaacgcacagccc

SEQ ID NO: 157016 - DNA, 25 bp, Probe Sequence
aaaccaagtcggaacagcagataac

SEQ ID NO: 157017 - DNA, 25 bp, Probe Sequence
aaactgataatcggaagacatataa

SEQ ID NO: 157018 - DNA, 25 bp, Probe Sequence
aaaccatcaatggacaacttgaaaa

SEQ ID NO: 157019 - DNA, 25 bp, Probe Sequence
aaaccatcaagaacaatttcaagac

SEQ ID NO: 157020 - DNA, 25 bp, Probe Sequence
aactcccaagcaaagtaagcaaggc

SEQ ID NO: 157021 - DNA, 25 bp, Probe Sequence
aaacccatgcagaggtacactcggc

SEQ ID NO: 157022 - DNA, 25 bp, Probe Sequence
aaactttgacttggccaacatctgt

SEQ ID NO: 157023 - DNA, 25 bp, Probe Sequence
aaacctttttcattcaacattgtag

SEQ ID NO: 157024 - DNA, 25 bp, Probe Sequence
aaaccttttttcagcagatatggag

SEQ ID NO: 157025 - DNA, 25 bp, Probe Sequence
aaaccttttatgacaggggctgcag

SEQ ID NO: 157026 - DNA, 25 bp, Probe Sequence
aaagctctgtattgagaagggtcat

SEQ ID NO: 157027 - DNA, 25 bp, Probe Sequence
aaactgtacatatgacatggcttat

SEQ ID NO: 157028 - DNA, 25 bp, Probe Sequence
aaactgtgcaattgtgtgcatgttt

SEQ ID NO: 157029 - DNA, 25 bp, Probe Sequence
aaactgccattactgtgatgtttct

SEQ ID NO: 157030 - DNA, 25 bp, Probe Sequence
aaactgcacattacatttttggtga

SEQ ID NO: 157031 - DNA, 25 bp, Probe Sequence
aaaccacatattaacttcatggctg

SEQ ID NO: 157032 - DNA, 25 bp, Probe Sequence
aaaccatcatttagactcacacgct

SEQ ID NO: 157033 - DNA, 25 bp, Probe Sequence
aaactcatcggaaacatggcactgt

SEQ ID NO: 157034 - DNA, 25 bp, Probe Sequence
aaaccacatgacacaagcagagctt

SEQ ID NO: 157035 - DNA, 25 bp, Probe Sequence
aaacccagacattcgagctggcaat

SEQ ID NO: 157036 - DNA, 25 bp, Probe Sequence
aaagcccaacacttgacagtcatat

SEQ ID NO: 157037 - DNA, 25 bp, Probe Sequence
aaacagctatgaccattaggcctat

SEQ ID NO: 157038 - DNA, 25 bp, Probe Sequence
aaagccatgagatcttgggcaagtc

SEQ ID NO: 157039 - DNA, 25 bp, Probe Sequence
aacaccatggggcttggataccggt

SEQ ID NO: 157040 - DNA, 25 bp, Probe Sequence
aacacctggggctgcgggaacagcc

SEQ ID NO: 157041 - DNA, 25 bp, Probe Sequence
aacacctggggctgcgggaacagcc

SEQ ID NO: 157042 - DNA, 25 bp, Probe Sequence
aaacctggagagtgccttcgagtgc

SEQ ID NO: 157043 - DNA, 25 bp, Probe Sequence
aaaacaagaatgcaccttccactgc

SEQ ID NO: 157044 - DNA, 25 bp, Probe Sequence
aacacaaggcggggatgcttccacg

SEQ ID NO: 157045 - DNA, 25 bp, Probe Sequence
aaaactgggaggcttatctcactga

SEQ ID NO: 157046 - DNA, 25 bp, Probe Sequence
caaaaagggagggcgttgacaccat

SEQ ID NO: 157047 - DNA, 25 bp, Probe Sequence
caggaaaggggctccggaaaatcat

SEQ ID NO: 157048 - DNA, 25 bp, Probe Sequence
aacaagacggcctggggatacaact

SEQ ID NO: 157049 - DNA, 25 bp, Probe Sequence
aacacaaaggccagtgggaacgaat

SEQ ID NO: 157050 - DNA, 25 bp, Probe Sequence
aacacccaggccaagttggtatcca

SEQ ID NO: 157051 - DNA, 25 bp, Probe Sequence
aaactccgcaggggctgtgaatccc

SEQ ID NO: 157052 - DNA, 25 bp, Probe Sequence
aaagcctgccgggagctagaactca

SEQ ID NO: 157053 - DNA, 25 bp, Probe Sequence
aaagccttcagtcatgctatgggat

SEQ ID NO: 157054 - DNA, 25 bp, Probe Sequence
aaaccatataatcatcttagcagat

SEQ ID NO: 157055 - DNA, 25 bp, Probe Sequence
aaactctgagagactacttatgaat

SEQ ID NO: 157056 - DNA, 25 bp, Probe Sequence
aaagcctgaatgatgagcctatgtc

SEQ ID NO: 157057 - DNA, 25 bp, Probe Sequence
aaaccaacatgcattgcctttcaat

SEQ ID NO: 157058 - DNA, 25 bp, Probe Sequence
aaaccaacaatgatgcctagtgagt

SEQ ID NO: 157059 - DNA, 25 bp, Probe Sequence
aaacctatcaaaagacatcactgac

SEQ ID NO: 157060 - DNA, 25 bp, Probe Sequence
aaacctatacacaaccaagtgaaag

SEQ ID NO: 157061 - DNA, 25 bp, Probe Sequence
aaaccttacgtgtcctgaggaagag

SEQ ID NO: 157062 - DNA, 25 bp, Probe Sequence
aaaatcttcactgacctagggacac

SEQ ID NO: 157063 - DNA, 25 bp, Probe Sequence
aaaccagtgaccaactctagggaca

SEQ ID NO: 157064 - DNA, 25 bp, Probe Sequence
aaaccagtgaccaactctagggaca

SEQ ID NO: 157065 - DNA, 25 bp, Probe Sequence
aaaccacccccaatcattggaagat

SEQ ID NO: 157066 - DNA, 25 bp, Probe Sequence
aaaccccagccaactcattgggttg

SEQ ID NO: 157067 - DNA, 25 bp, Probe Sequence
aaacttccactgtttctatggctgg

SEQ ID NO: 157068 - DNA, 25 bp, Probe Sequence
aaactttgcctgatgttctagcaga

SEQ ID NO: 157069 - DNA, 25 bp, Probe Sequence
aaaccttcctatatgtctgacaata

SEQ ID NO: 157070 - DNA, 25 bp, Probe Sequence
aaagcctacctactgatgtcatgac

SEQ ID NO: 157071 - DNA, 25 bp, Probe Sequence
aaactctagctctaaatgctagctc

SEQ ID NO: 157072 - DNA, 25 bp, Probe Sequence
aaagcccagctgcaaatgatggacc

SEQ ID NO: 157073 - DNA, 25 bp, Probe Sequence
aaagcccagcttcagattggacgcg

SEQ ID NO: 157074 - DNA, 25 bp, Probe Sequence
aaacccaattgatgttgaatcctgg

SEQ ID NO: 157075 - DNA, 25 bp, Probe Sequence
aaaactgtattgtcacttaatccca

SEQ ID NO: 157076 - DNA, 25 bp, Probe Sequence
aaactagtgtattcacttaccctag

SEQ ID NO: 157077 - DNA, 25 bp, Probe Sequence
aaactctgtgtcagcatctttgccc

SEQ ID NO: 157078 - DNA, 25 bp, Probe Sequence
aaacagctctggagtcttgttcctg

SEQ ID NO: 157079 - DNA, 25 bp, Probe Sequence
aaagccagtggcagtgtatgctcat

SEQ ID NO: 157080 - DNA, 25 bp, Probe Sequence
aaaccagtacaactatattgcatag

SEQ ID NO: 157081 - DNA, 25 bp, Probe Sequence
aaaccagccacttctgaatacaata

SEQ ID NO: 157082 - DNA, 25 bp, Probe Sequence
aaactcacaccgacagcatcaaaat

SEQ ID NO: 157083 - DNA, 25 bp, Probe Sequence
aaacctcactgagagcgcaaaatgc

SEQ ID NO: 157084 - DNA, 25 bp, Probe Sequence
aaaccagactgggaggcatgacaag

SEQ ID NO: 157085 - DNA, 25 bp, Probe Sequence
aaactcagtatttaggcatactaga

SEQ ID NO: 157086 - DNA, 25 bp, Probe Sequence
aaacgacatttatggcaaccctatc

SEQ ID NO: 157087 - DNA, 25 bp, Probe Sequence
aaaccacattaatctgtatcccatt

SEQ ID NO: 157088 - DNA, 25 bp, Probe Sequence
aaaccatgatgtttacatttcacaa

SEQ ID NO: 157089 - DNA, 25 bp, Probe Sequence
aaaccaggtggttcaactgctgcaa

SEQ ID NO: 157090 - DNA, 25 bp, Probe Sequence
aaaccaggagttgagagctgatgga

SEQ ID NO: 157091 - DNA, 25 bp, Probe Sequence
aaagccgtaggataacatattcaaa

SEQ ID NO: 157092 - DNA, 25 bp, Probe Sequence
aaaactgtgcatctcaaactttaaa

SEQ ID NO: 157093 - DNA, 25 bp, Probe Sequence
aaacagctgtctctaacttatttta

SEQ ID NO: 157094 - DNA, 25 bp, Probe Sequence
aaacttactgaatacttactatgta

SEQ ID NO: 157095 - DNA, 25 bp, Probe Sequence
aaactacaaagattagctcaattat

SEQ ID NO: 157096 - DNA, 25 bp, Probe Sequence
aaacttaacagatactcagatgtgc

SEQ ID NO: 157097 - DNA, 25 bp, Probe Sequence
aaacgcttccgcaaagctcagtgtc

SEQ ID NO: 157098 - DNA, 25 bp, Probe Sequence
aaaccattcaccgagagcctatatc

SEQ ID NO: 157099 - DNA, 25 bp, Probe Sequence
aaaccagtaaaggcgcctgtgcaag

SEQ ID NO: 157100 - DNA, 25 bp, Probe Sequence
aaaccagtgtaaggcagtgctggct

SEQ ID NO: 157101 - DNA, 25 bp, Probe Sequence
aaacgcagatggtcaaagtgatgag

SEQ ID NO: 157102 - DNA, 25 bp, Probe Sequence
aaaccatgatgcatctatacaatgg

SEQ ID NO: 157103 - DNA, 25 bp, Probe Sequence
aaactcatgtctgtgtcccatggtc

SEQ ID NO: 157104 - DNA, 25 bp, Probe Sequence
aaactactcactagtcccatggaag

SEQ ID NO: 157105 - DNA, 25 bp, Probe Sequence
aaactaccttcaactccatcatgaa

SEQ ID NO: 157106 - DNA, 25 bp, Probe Sequence
aaactacactacactgttatagtta

SEQ ID NO: 157107 - DNA, 25 bp, Probe Sequence
aaacggagtactgagtcttctgtaa

SEQ ID NO: 157108 - DNA, 25 bp, Probe Sequence
aaacgtagttctgaatccatggaaa

SEQ ID NO: 157109 - DNA, 25 bp, Probe Sequence
aaaccacctttgcaacgcggaatat

SEQ ID NO: 157110 - DNA, 25 bp, Probe Sequence
aaacccacattccaagacttggtat

SEQ ID NO: 157111 - DNA, 25 bp, Probe Sequence
aaacccaacaagagacttggcattc

SEQ ID NO: 157112 - DNA, 25 bp, Probe Sequence
aaaccacaacaacctgacagagtct

SEQ ID NO: 157113 - DNA, 25 bp, Probe Sequence
aaaccatagacaagccttatagagt

SEQ ID NO: 157114 - DNA, 25 bp, Probe Sequence
aaagccagacaagcctgactctgag

SEQ ID NO: 157115 - DNA, 25 bp, Probe Sequence
aaagccagacaagcctgactctgag

SEQ ID NO: 157116 - DNA, 25 bp, Probe Sequence
aaaccagacagaaccaactccaatt

SEQ ID NO: 157117 - DNA, 25 bp, Probe Sequence
aacacctgtcagagaaacgtgatat

SEQ ID NO: 157118 - DNA, 25 bp, Probe Sequence
aaacctgccgacttagtgcggtgat

SEQ ID NO: 157119 - DNA, 25 bp, Probe Sequence
aaacttggctacttagtggaggagg

SEQ ID NO: 157120 - DNA, 25 bp, Probe Sequence
aaacgtcgtcagttcgaggatgaga

SEQ ID NO: 157121 - DNA, 25 bp, Probe Sequence
aaacccttcagtcagcacgtgagaa

SEQ ID NO: 157122 - DNA, 25 bp, Probe Sequence
aaaccatctgtgctggggctttgat

SEQ ID NO: 157123 - DNA, 25 bp, Probe Sequence
aaaaacggctgtcaggtttgatctc

SEQ ID NO: 157124 - DNA, 25 bp, Probe Sequence
aaacaacgcggtcatgtttacctct

SEQ ID NO: 157125 - DNA, 25 bp, Probe Sequence
aaaaacggtgtcatatttagtcaga

SEQ ID NO: 157126 - DNA, 25 bp, Probe Sequence
aaaatgccaggttttttatggtcat

SEQ ID NO: 157127 - DNA, 25 bp, Probe Sequence
aaaatccaggtattcatgtatagtc

SEQ ID NO: 157128 - DNA, 25 bp, Probe Sequence
aaaaccaccttttgaagcagcaact

SEQ ID NO: 157129 - DNA, 25 bp, Probe Sequence
aaaccacacctaaaatagaccactg

SEQ ID NO: 157130 - DNA, 25 bp, Probe Sequence
aaacgtcacgctgaatatatgacca

SEQ ID NO: 157131 - DNA, 25 bp, Probe Sequence
aaacgtcctgaggttcatgaccacc

SEQ ID NO: 157132 - DNA, 25 bp, Probe Sequence
aaacgtcctgaggttcatgaccacc

SEQ ID NO: 157133 - DNA, 25 bp, Probe Sequence
aaacgtcctgaggttcatgaccacc

SEQ ID NO: 157134 - DNA, 25 bp, Probe Sequence
aaacgtcctgaggttcatgaccacc

SEQ ID NO: 157135 - DNA, 25 bp, Probe Sequence
aaacggctgtcaggtttgatctcag

SEQ ID NO: 157136 - DNA, 25 bp, Probe Sequence
aaaccgttgctggatctgctgtttg

SEQ ID NO: 157137 - DNA, 25 bp, Probe Sequence
aaacctttgtggctgtggttggctg

SEQ ID NO: 157138 - DNA, 25 bp, Probe Sequence
aaattccgtctgattctaatagaga

SEQ ID NO: 157139 - DNA, 25 bp, Probe Sequence
aaacctctaggggtgacagatctct

SEQ ID NO: 157140 - DNA, 25 bp, Probe Sequence
aaacttgtaagggttcagactctgt

SEQ ID NO: 157141 - DNA, 25 bp, Probe Sequence
aaacgctgtcaggggttcagcctct

SEQ ID NO: 157142 - DNA, 25 bp, Probe Sequence
aaacgttcttagtattcatcctcca

SEQ ID NO: 157143 - DNA, 25 bp, Probe Sequence
aaacttacctacaatattcatttca

SEQ ID NO: 157144 - DNA, 25 bp, Probe Sequence
aaactgtacacataattatcatgtt

SEQ ID NO: 157145 - DNA, 25 bp, Probe Sequence
aaacttgtcaaggagcttatttctg

SEQ ID NO: 157146 - DNA, 25 bp, Probe Sequence
aaacttcgccatgatcgtgtcttct

SEQ ID NO: 157147 - DNA, 25 bp, Probe Sequence
aaacctgtcaatgatacagtcccta

SEQ ID NO: 157148 - DNA, 25 bp, Probe Sequence
aaacttgtagtacagagatccagat

SEQ ID NO: 157149 - DNA, 25 bp, Probe Sequence
aaaccatttgtagatagtccagcat

SEQ ID NO: 157150 - DNA, 25 bp, Probe Sequence
aaactcttcttgtcagtgaatccag

SEQ ID NO: 157151 - DNA, 25 bp, Probe Sequence
aaactctatttgacctgacagccat

SEQ ID NO: 157152 - DNA, 25 bp, Probe Sequence
aaactaagttgtgtgccagtgctca

SEQ ID NO: 157153 - DNA, 25 bp, Probe Sequence
aaaccagaattaggtcaagttcata

SEQ ID NO: 157154 - DNA, 25 bp, Probe Sequence
aaaccagatatatagccaagtctaa

SEQ ID NO: 157155 - DNA, 25 bp, Probe Sequence
aaaccatatcaatcaccaagacaag

SEQ ID NO: 157156 - DNA, 25 bp, Probe Sequence
aaaccacgcaaacccaagaggcaga

SEQ ID NO: 157157 - DNA, 25 bp, Probe Sequence
aaactccagcttgcccaataaggat

SEQ ID NO: 157158 - DNA, 25 bp, Probe Sequence
aaacctcgttggcctcttaaggatg

SEQ ID NO: 157159 - DNA, 25 bp, Probe Sequence
aaaccctttgtcttcttaatgattg

SEQ ID NO: 157160 - DNA, 25 bp, Probe Sequence
aaaccttttctcaacttgtgctgtt

SEQ ID NO: 157161 - DNA, 25 bp, Probe Sequence
aaacctctttgtagtgcttggctac

SEQ ID NO: 157162 - DNA, 25 bp, Probe Sequence
aaaccattgtgactattgttggtca

SEQ ID NO: 157163 - DNA, 25 bp, Probe Sequence
aaactcatatgggaattgtttctag

SEQ ID NO: 157164 - DNA, 25 bp, Probe Sequence
aaactaacagaacttcatttccaga

SEQ ID NO: 157165 - DNA, 25 bp, Probe Sequence
aaactatccgattcataatttggaa

SEQ ID NO: 157166 - DNA, 25 bp, Probe Sequence
aaactaacgaaaaggcctgcatgaa

SEQ ID NO: 157167 - DNA, 25 bp, Probe Sequence
aaaccaaccagcaagcccttgatga

SEQ ID NO: 157168 - DNA, 25 bp, Probe Sequence
aaacctaccagcacctattgagcaa

SEQ ID NO: 157169 - DNA, 25 bp, Probe Sequence
aaacagtacctgctctcaaattgaa

SEQ ID NO: 157170 - DNA, 25 bp, Probe Sequence
aaaccaacagcgatctcaagcttaa

SEQ ID NO: 157171 - DNA, 25 bp, Probe Sequence
aaagccaaacatatatatactatta

SEQ ID NO: 157172 - DNA, 25 bp, Probe Sequence
aaaacagtcaccatttactaccaat

SEQ ID NO: 157173 - DNA, 25 bp, Probe Sequence
aaaccgcatcccaggttctgttaat

SEQ ID NO: 157174 - DNA, 25 bp, Probe Sequence
aaacctgtacacagtgtttattgtg

SEQ ID NO: 157175 - DNA, 25 bp, Probe Sequence
aaacctgtacacagtgtttattgtg

SEQ ID NO: 157176 - DNA, 25 bp, Probe Sequence
aaactctgaaaatgtggtctcaggg

SEQ ID NO: 157177 - DNA, 25 bp, Probe Sequence
aaacctgccaaatatgatgacatca

SEQ ID NO: 157178 - DNA, 25 bp, Probe Sequence
aaaccttcaagctgtgtaatattcc

SEQ ID NO: 157179 - DNA, 25 bp, Probe Sequence
aaactcttaaatttgattattccat

SEQ ID NO: 157180 - DNA, 25 bp, Probe Sequence
aaactgcttagattttgttgatgac

SEQ ID NO: 157181 - DNA, 25 bp, Probe Sequence
aaacgcgtcagaatcgcctggagac

SEQ ID NO: 157182 - DNA, 25 bp, Probe Sequence
aaaccgcatagagaacgtggcagca

SEQ ID NO: 157183 - DNA, 25 bp, Probe Sequence
aaaccgatcaaccacagagtgggag

SEQ ID NO: 157184 - DNA, 25 bp, Probe Sequence
aaacctgacttctagatgactgtgg

SEQ ID NO: 157185 - DNA, 25 bp, Probe Sequence
aaacctagcttcagtgattgatgcc

SEQ ID NO: 157186 - DNA, 25 bp, Probe Sequence
aaacgaaaatcatgtctttcctgta

SEQ ID NO: 157187 - DNA, 25 bp, Probe Sequence
aaacggaatctctgtctgtgacctt

SEQ ID NO: 157188 - DNA, 25 bp, Probe Sequence
aaaccagattctttgtggatactat

SEQ ID NO: 157189 - DNA, 25 bp, Probe Sequence
aaaccagaatcttatttatattgtt

SEQ ID NO: 157190 - DNA, 25 bp, Probe Sequence
aaactaggattctacagtgatttgt

SEQ ID NO: 157191 - DNA, 25 bp, Probe Sequence
aacactggcgagtccaaggttttct

SEQ ID NO: 157192 - DNA, 25 bp, Probe Sequence
aaactgcgggaatactgtctcttct

SEQ ID NO: 157193 - DNA, 25 bp, Probe Sequence
aaacagtggtgattaccggcatttt

SEQ ID NO: 157194 - DNA, 25 bp, Probe Sequence
aaaagtgctttatgccggcttttct

SEQ ID NO: 157195 - DNA, 25 bp, Probe Sequence
aaaagatcttcatggccccaaatcc

SEQ ID NO: 157196 - DNA, 25 bp, Probe Sequence
aagaggtcttacagcaacccaacgt

SEQ ID NO: 157197 - DNA, 25 bp, Probe Sequence
aaacccttgagcacaacagcaaata

SEQ ID NO: 157198 - DNA, 25 bp, Probe Sequence
aaacgcaaatgatttaacgagtaca

SEQ ID NO: 157199 - DNA, 25 bp, Probe Sequence
caataagaaaactaccctggaacag

SEQ ID NO: 157200 - DNA, 25 bp, Probe Sequence
aaaacaatagaggacgtcgacagaa

SEQ ID NO: 157201 - DNA, 25 bp, Probe Sequence
aaaccaaactggactctcgtgcaga

SEQ ID NO: 157202 - DNA, 25 bp, Probe Sequence
aaaccatatggggactatagtgcaa

SEQ ID NO: 157203 - DNA, 25 bp, Probe Sequence
aaacacaagcggctctatgagtcta

SEQ ID NO: 157204 - DNA, 25 bp, Probe Sequence
aaacctgagcagtgtctatgtatta

SEQ ID NO: 157205 - DNA, 25 bp, Probe Sequence
aaaccatgaatgtgtgctgactttt

SEQ ID NO: 157206 - DNA, 25 bp, Probe Sequence
aaacctggaatgtatcgactttctt

SEQ ID NO: 157207 - DNA, 25 bp, Probe Sequence
aaacctaaatttgaatgctgctctt

SEQ ID NO: 157208 - DNA, 25 bp, Probe Sequence
aaaccttgaattactagtgccatct

SEQ ID NO: 157209 - DNA, 25 bp, Probe Sequence
aaacccaacttgatcatgatgtatc

SEQ ID NO: 157210 - DNA, 25 bp, Probe Sequence
aaacctacagctaaccgtgaacact

SEQ ID NO: 157211 - DNA, 25 bp, Probe Sequence
aaacctccattaagccattaacatt

SEQ ID NO: 157212 - DNA, 25 bp, Probe Sequence
aaaccttcagtatctcatgataact

SEQ ID NO: 157213 - DNA, 25 bp, Probe Sequence
aaacctacagtatgacgatggcagc

SEQ ID NO: 157214 - DNA, 25 bp, Probe Sequence
aaaactagagttcatcctggcagct

SEQ ID NO: 157215 - DNA, 25 bp, Probe Sequence
aaaattgaatttctcgttcatgttt

SEQ ID NO: 157216 - DNA, 25 bp, Probe Sequence
aaactctgcacttattttgatttga

SEQ ID NO: 157217 - DNA, 25 bp, Probe Sequence
aaaccaactctaatattgcttcttg

SEQ ID NO: 157218 - DNA, 25 bp, Probe Sequence
aaaccacattcttgacaactatttg

SEQ ID NO: 157219 - DNA, 25 bp, Probe Sequence
aaaccgtgtcattacagtagtttgt

SEQ ID NO: 157220 - DNA, 25 bp, Probe Sequence
aaactcagtatacacagccgctatt

SEQ ID NO: 157221 - DNA, 25 bp, Probe Sequence
aaaccagtcttccaccggatatgta

SEQ ID NO: 157222 - DNA, 25 bp, Probe Sequence
aaactcggttccatttgtaatcagt

SEQ ID NO: 157223 - DNA, 25 bp, Probe Sequence
aaactgaggcttctcttatgaaaca

SEQ ID NO: 157224 - DNA, 25 bp, Probe Sequence
aaaatgggtgttttgaagaaatcat

SEQ ID NO: 157225 - DNA, 25 bp, Probe Sequence
aaacatttggttttgtacagacatt

SEQ ID NO: 157226 - DNA, 25 bp, Probe Sequence
aaacactctggcattgacttcaaac

SEQ ID NO: 157227 - DNA, 25 bp, Probe Sequence
aaacaatgagttttagcttgaaagt

SEQ ID NO: 157228 - DNA, 25 bp, Probe Sequence
aaacaaggtttccccatgaagcagg

SEQ ID NO: 157229 - DNA, 25 bp, Probe Sequence
aaacataagataattcacactggag

SEQ ID NO: 157230 - DNA, 25 bp, Probe Sequence
aaaatactgaatatcctgtggactt

SEQ ID NO: 157231 - DNA, 25 bp, Probe Sequence
aaaaagcgcaaactggagtccactg

SEQ ID NO: 157232 - DNA, 25 bp, Probe Sequence
aaaaactgtaagtgaggccctcagc

SEQ ID NO: 157233 - DNA, 25 bp, Probe Sequence
aaaaacaggacagcgggcctcatcg

SEQ ID NO: 157234 - DNA, 25 bp, Probe Sequence
aaaaactgagatgtagcccctctcc

SEQ ID NO: 157235 - DNA, 25 bp, Probe Sequence
aaaaacaaatcgcagccagcttttc

SEQ ID NO: 157236 - DNA, 25 bp, Probe Sequence
aaaataccaatgcaactactctaca

SEQ ID NO: 157237 - DNA, 25 bp, Probe Sequence
aaaattcctagctcacatagcccaa

SEQ ID NO: 157238 - DNA, 25 bp, Probe Sequence
aaaatccccagagccaaggcagaag

SEQ ID NO: 157239 - DNA, 25 bp, Probe Sequence
aacaaccccggacaaatcagcgatg

SEQ ID NO: 157240 - DNA, 25 bp, Probe Sequence
aaacgcccctggcaaacatcaggta

SEQ ID NO: 157241 - DNA, 25 bp, Probe Sequence
aaactgcccacttggcagtacatca

SEQ ID NO: 157242 - DNA, 25 bp, Probe Sequence
aaacacccacctgcatgtaatacac

SEQ ID NO: 157243 - DNA, 25 bp, Probe Sequence
aaaccacctaatgctcttatggcac

SEQ ID NO: 157244 - DNA, 25 bp, Probe Sequence
aaactcccctatgcacttgaagatg

SEQ ID NO: 157245 - DNA, 25 bp, Probe Sequence
aaacatcctcctgccacttaggagg

SEQ ID NO: 157246 - DNA, 25 bp, Probe Sequence
aacactctccctgtcttaaagtcag

SEQ ID NO: 157247 - DNA, 25 bp, Probe Sequence
aaactccatcctttataaatagtca

SEQ ID NO: 157248 - DNA, 25 bp, Probe Sequence
aaactcctgtcttgctagacaaggt

SEQ ID NO: 157249 - DNA, 25 bp, Probe Sequence
aaactactgttaggaacagcagtgt

SEQ ID NO: 157250 - DNA, 25 bp, Probe Sequence
aaaccagctgtccaggaacatgatt

SEQ ID NO: 157251 - DNA, 25 bp, Probe Sequence
aaacctgttcgcttctatcatgatt

SEQ ID NO: 157252 - DNA, 25 bp, Probe Sequence
aaacctgttcgcttctatcatgatt

SEQ ID NO: 157253 - DNA, 25 bp, Probe Sequence
aaaccagctttctttgcagagaagc

SEQ ID NO: 157254 - DNA, 25 bp, Probe Sequence
aaaccgagaccatttgcaggaggtg

SEQ ID NO: 157255 - DNA, 25 bp, Probe Sequence
aaaccggaacaagcagtgaatgtgg

SEQ ID NO: 157256 - DNA, 25 bp, Probe Sequence
aaaccagggagatcgagtactagaa

SEQ ID NO: 157257 - DNA, 25 bp, Probe Sequence
aataccaccggaactggtcgaatga

SEQ ID NO: 157258 - DNA, 25 bp, Probe Sequence
aaaccccatggtcttcttgacatga

SEQ ID NO: 157259 - DNA, 25 bp, Probe Sequence
aaacggagcggggttctggatcatg

SEQ ID NO: 157260 - DNA, 25 bp, Probe Sequence
aaacggagtggcctgctccgttgtg

SEQ ID NO: 157261 - DNA, 25 bp, Probe Sequence
aaactacatggactctgtccctggt

SEQ ID NO: 157262 - DNA, 25 bp, Probe Sequence
aaactactcggatgtgtcctttctg

SEQ ID NO: 157263 - DNA, 25 bp, Probe Sequence
aaacagacctaatgctccttgttcc

SEQ ID NO: 157264 - DNA, 25 bp, Probe Sequence
aaacagcccttagcacttttatact

SEQ ID NO: 157265 - DNA, 25 bp, Probe Sequence
aaacacacctgtctaattcacttac

SEQ ID NO: 157266 - DNA, 25 bp, Probe Sequence
aaacacctattttgattgatcagtt

SEQ ID NO: 157267 - DNA, 25 bp, Probe Sequence
aaaccctgcttttgtgtaaatgctg

SEQ ID NO: 157268 - DNA, 25 bp, Probe Sequence
aaaccccagtgttttacatatctgt

SEQ ID NO: 157269 - DNA, 25 bp, Probe Sequence
aacacctccctatggtaccatttat

SEQ ID NO: 157270 - DNA, 25 bp, Probe Sequence
taaacttccttgtggtattaccttg

SEQ ID NO: 157271 - DNA, 25 bp, Probe Sequence
aaacatgtctttcttgaattaactt

SEQ ID NO: 157272 - DNA, 25 bp, Probe Sequence
aaaacatgcatattcacattaatta

SEQ ID NO: 157273 - DNA, 25 bp, Probe Sequence
aaaaatgctgtgcacagctgcctat

SEQ ID NO: 157274 - DNA, 25 bp, Probe Sequence
aaaagcgcattgaacagtcctgggc

SEQ ID NO: 157275 - DNA, 25 bp, Probe Sequence
aaacaggagtgaactccctctgtcc

SEQ ID NO: 157276 - DNA, 25 bp, Probe Sequence
aaacaggagtgaactccctctgtcc

SEQ ID NO: 157277 - DNA, 25 bp, Probe Sequence
aaaaagagtatgacgcctgtaatcc

SEQ ID NO: 157278 - DNA, 25 bp, Probe Sequence
aaaaatggattaatgccactatttc

SEQ ID NO: 157279 - DNA, 25 bp, Probe Sequence
aaaaattgcattagagcacggagtc

SEQ ID NO: 157280 - DNA, 25 bp, Probe Sequence
aaaaatctgccacctgcacaggtat

SEQ ID NO: 157281 - DNA, 25 bp, Probe Sequence
aaacaaaccatgactgaggcaggca

SEQ ID NO: 157282 - DNA, 25 bp, Probe Sequence
aaaaatacccattggctatgccact

SEQ ID NO: 157283 - DNA, 25 bp, Probe Sequence
aaaaaacctttgcatatgagctgca

SEQ ID NO: 157284 - DNA, 25 bp, Probe Sequence
aaacaaacgatatatctcatggctc

SEQ ID NO: 157285 - DNA, 25 bp, Probe Sequence
aaactcaactcggcaatccaagcac

SEQ ID NO: 157286 - DNA, 25 bp, Probe Sequence
aaactaatccgggacagcccagacg

SEQ ID NO: 157287 - DNA, 25 bp, Probe Sequence
aaacatattcctgggctgatccaca

SEQ ID NO: 157288 - DNA, 25 bp, Probe Sequence
aaaactattgctgcagtcattcaga

SEQ ID NO: 157289 - DNA, 25 bp, Probe Sequence
aaaaagttgcagctgttttgttgac

SEQ ID NO: 157290 - DNA, 25 bp, Probe Sequence
aaaagagttggcgtttcctgttctg

SEQ ID NO: 157291 - DNA, 25 bp, Probe Sequence
aaactgcagtagactttaccatttc

SEQ ID NO: 157292 - DNA, 25 bp, Probe Sequence
aaactgcagtcatcttggacctttt

SEQ ID NO: 157293 - DNA, 25 bp, Probe Sequence
aaactcgaaaataaggccaggtgtg

SEQ ID NO: 157294 - DNA, 25 bp, Probe Sequence
aagaccgcaaaaagatcctcgaacg

SEQ ID NO: 157295 - DNA, 25 bp, Probe Sequence
aaacctgcacaatcagtccctaact

SEQ ID NO: 157296 - DNA, 25 bp, Probe Sequence
aaacctgtcaattctgttccttttg

SEQ ID NO: 157297 - DNA, 25 bp, Probe Sequence
aaaccttatctatgtatccattgtg

SEQ ID NO: 157298 - DNA, 25 bp, Probe Sequence
aaaccttacaatgtatagacttgtt

SEQ ID NO: 157299 - DNA, 25 bp, Probe Sequence
aaacaattacttcataaggttattg

SEQ ID NO: 157300 - DNA, 25 bp, Probe Sequence
aaaaattaactctttagttcatctg

SEQ ID NO: 157301 - DNA, 25 bp, Probe Sequence
aaaactacctctgttgaggctcact

SEQ ID NO: 157302 - DNA, 25 bp, Probe Sequence
aaaaccatggtcactaggtgttcgc

SEQ ID NO: 157303 - DNA, 25 bp, Probe Sequence
aaaagtcctctctcaagtgtattcc

SEQ ID NO: 157304 - DNA, 25 bp, Probe Sequence
aaacaccacctctcacaatttaggc

SEQ ID NO: 157305 - DNA, 25 bp, Probe Sequence
aaaaaccagcccatcctttgaggct

SEQ ID NO: 157306 - DNA, 25 bp, Probe Sequence
aataaatgcggagaccctcgtgggc

SEQ ID NO: 157307 - DNA, 25 bp, Probe Sequence
aaaaactggcaggattcacttatgg

SEQ ID NO: 157308 - DNA, 25 bp, Probe Sequence
aaaaatggggccttagcttctggct

SEQ ID NO: 157309 - DNA, 25 bp, Probe Sequence
aaacatgagggagcgtgggtagcct

SEQ ID NO: 157310 - DNA, 25 bp, Probe Sequence
aaactggggatcatgctagttagca

SEQ ID NO: 157311 - DNA, 25 bp, Probe Sequence
aaacagggaaccgtctctatagata

SEQ ID NO: 157312 - DNA, 25 bp, Probe Sequence
aaacgagtggtcagcacatttagta

SEQ ID NO: 157313 - DNA, 25 bp, Probe Sequence
aaacttatggtcagagcacttactc

SEQ ID NO: 157314 - DNA, 25 bp, Probe Sequence
aaacttcattttggaatcttatgta

SEQ ID NO: 157315 - DNA, 25 bp, Probe Sequence
aaactatctttagatttagagatac

SEQ ID NO: 157316 - DNA, 25 bp, Probe Sequence
aaacctctcttagatctggaaccaa

SEQ ID NO: 157317 - DNA, 25 bp, Probe Sequence
aaacctatttcctgatgggactatt

SEQ ID NO: 157318 - DNA, 25 bp, Probe Sequence
aaacctatgttcgtaatgagagatt

SEQ ID NO: 157319 - DNA, 25 bp, Probe Sequence
aaaacatatgttccttatgtgtgat

SEQ ID NO: 157320 - DNA, 25 bp, Probe Sequence
aaaccgatggaggctgccagtgcca

SEQ ID NO: 157321 - DNA, 25 bp, Probe Sequence
aaaaccattcaggccaagtgaccct

SEQ ID NO: 157322 - DNA, 25 bp, Probe Sequence
aaaattctgtcgaggagtgttccat

SEQ ID NO: 157323 - DNA, 25 bp, Probe Sequence
aaaatccattccaggtagctcggca

SEQ ID NO: 157324 - DNA, 25 bp, Probe Sequence
aaaactgcctccacttacctggagg

SEQ ID NO: 157325 - DNA, 25 bp, Probe Sequence
aaaaggccgcctatgattgaatgga

SEQ ID NO: 157326 - DNA, 25 bp, Probe Sequence
aaaaggccagctgatccactaaaac

SEQ ID NO: 157327 - DNA, 25 bp, Probe Sequence
aaaagaggcagcattccagccaaga

SEQ ID NO: 157328 - DNA, 25 bp, Probe Sequence
aaacaagtgagaacatacattaaca

SEQ ID NO: 157329 - DNA, 25 bp, Probe Sequence
aaacacagttgaaagacttagaaat

SEQ ID NO: 157330 - DNA, 25 bp, Probe Sequence
aaaaccatatggggactatagtgca

SEQ ID NO: 157331 - DNA, 25 bp, Probe Sequence
aaaacttcgagggcattaaggcaat

SEQ ID NO: 157332 - DNA, 25 bp, Probe Sequence
aaaagccccaggctgaaaggactgg

SEQ ID NO: 157333 - DNA, 25 bp, Probe Sequence
aaaactccaaaagccaagtgactat

SEQ ID NO: 157334 - DNA, 25 bp, Probe Sequence
aaaagaccaaaatactaatcactag

SEQ ID NO: 157335 - DNA, 25 bp, Probe Sequence
aaaagacggaaatgtcaaatcctgg

SEQ ID NO: 157336 - DNA, 25 bp, Probe Sequence
aaaaagctagaagcattccccttgg

SEQ ID NO: 157337 - DNA, 25 bp, Probe Sequence
aaaaatgagagtacacccccttctg

SEQ ID NO: 157338 - DNA, 25 bp, Probe Sequence
aaacagtggttcaaacctcaccatc

SEQ ID NO: 157339 - DNA, 25 bp, Probe Sequence
aaacttgctttagagcccagcaaat

SEQ ID NO: 157340 - DNA, 25 bp, Probe Sequence
aaactttttccattcataaatacat

SEQ ID NO: 157341 - DNA, 25 bp, Probe Sequence
aaaccctgtctctactaataataca

SEQ ID NO: 157342 - DNA, 25 bp, Probe Sequence
aaaccctgtctctactaaagataca

SEQ ID NO: 157343 - DNA, 25 bp, Probe Sequence
aaaccctgtctctactaaagatata

SEQ ID NO: 157344 - DNA, 25 bp, Probe Sequence
aaacttgctgcctgactaaagatta

SEQ ID NO: 157345 - DNA, 25 bp, Probe Sequence
aaactattcatctgacaaaattcta

SEQ ID NO: 157346 - DNA, 25 bp, Probe Sequence
aaactcattgcagcagataactttt

SEQ ID NO: 157347 - DNA, 25 bp, Probe Sequence
aaactgctgttcaagaaacctcttc

SEQ ID NO: 157348 - DNA, 25 bp, Probe Sequence
aaactgcattctagaagcacacctc

SEQ ID NO: 157349 - DNA, 25 bp, Probe Sequence
aaactctatcataaggaactgccag

SEQ ID NO: 157350 - DNA, 25 bp, Probe Sequence
aaactctatcataaggaactgccag

SEQ ID NO: 157351 - DNA, 25 bp, Probe Sequence
aaacagcttctgacaggtccttcag

SEQ ID NO: 157352 - DNA, 25 bp, Probe Sequence
aaaccctctgactagtccatgtcaa

SEQ ID NO: 157353 - DNA, 25 bp, Probe Sequence
aaacacagttggtcagcccagtgca

SEQ ID NO: 157354 - DNA, 25 bp, Probe Sequence
aaacatagtggaggccgcagcagtc

SEQ ID NO: 157355 - DNA, 25 bp, Probe Sequence
aaacatgttgtggcctatcacagtt

SEQ ID NO: 157356 - DNA, 25 bp, Probe Sequence
aaactgaatatcccatcatcctatt

SEQ ID NO: 157357 - DNA, 25 bp, Probe Sequence
aaactgattatcactcatcaatggc

SEQ ID NO: 157358 - DNA, 25 bp, Probe Sequence
aacacggctacgtctcacaaagcca

SEQ ID NO: 157359 - DNA, 25 bp, Probe Sequence
aaacgcgcacacaactctagagagt

SEQ ID NO: 157360 - DNA, 25 bp, Probe Sequence
aaactgggcagtttctaaggatact

SEQ ID NO: 157361 - DNA, 25 bp, Probe Sequence
aaactggaggctttcttaggcagaa

SEQ ID NO: 157362 - DNA, 25 bp, Probe Sequence
aaactggcaggattcacttatgggt

SEQ ID NO: 157363 - DNA, 25 bp, Probe Sequence
aaacttgctctcaaacttcagggtt

SEQ ID NO: 157364 - DNA, 25 bp, Probe Sequence
aaacttgtctcataaattggcactg

SEQ ID NO: 157365 - DNA, 25 bp, Probe Sequence
aaacatgttgcctcgattttgcact

SEQ ID NO: 157366 - DNA, 25 bp, Probe Sequence
aaacatgttgactcttgttcctgct

SEQ ID NO: 157367 - DNA, 25 bp, Probe Sequence
aaactatgcttcttttttcttctgt

SEQ ID NO: 157368 - DNA, 25 bp, Probe Sequence
aaacttgctcttatcttctcaaatt

SEQ ID NO: 157369 - DNA, 25 bp, Probe Sequence
aaacttgtttatgctgtatctactc

SEQ ID NO: 157370 - DNA, 25 bp, Probe Sequence
aaactatcttattgacttattattt

SEQ ID NO: 157371 - DNA, 25 bp, Probe Sequence
aaacgctaatattgattttcctgat

SEQ ID NO: 157372 - DNA, 25 bp, Probe Sequence
aaacgaatgcatgtttgtgtcacga

SEQ ID NO: 157373 - DNA, 25 bp, Probe Sequence
aaaagtatgcagattatttgcccaa

SEQ ID NO: 157374 - DNA, 25 bp, Probe Sequence
aaaaatggcaagagatcatatcctc

SEQ ID NO: 157375 - DNA, 25 bp, Probe Sequence
aaaacattgaagacgtcattgccca

SEQ ID NO: 157376 - DNA, 25 bp, Probe Sequence
aaacactctgacctggtcacagcca

SEQ ID NO: 157377 - DNA, 25 bp, Probe Sequence
aacacgcgcttcggaatagcagcca

SEQ ID NO: 157378 - DNA, 25 bp, Probe Sequence
aacaccagtatagaatagacaggga

SEQ ID NO: 157379 - DNA, 25 bp, Probe Sequence
aaacaccagtatagaatagacaggg

SEQ ID NO: 157380 - DNA, 25 bp, Probe Sequence
aaaaacagtatccgtagctatcagg

SEQ ID NO: 157381 - DNA, 25 bp, Probe Sequence
aaaaggagcttcagtattgtggggc

SEQ ID NO: 157382 - DNA, 25 bp, Probe Sequence
aaacgccagcattttgttagaggag

SEQ ID NO: 157383 - DNA, 25 bp, Probe Sequence
aaacccagtttaactctgaggagca

SEQ ID NO: 157384 - DNA, 25 bp, Probe Sequence
aaacatggcattataatcttagggg

SEQ ID NO: 157385 - DNA, 25 bp, Probe Sequence
aaacattcatgtacccactatcagg

SEQ ID NO: 157386 - DNA, 25 bp, Probe Sequence
aaacatactttgacacctactgtgt

SEQ ID NO: 157387 - DNA, 25 bp, Probe Sequence
aaactaatcttggcatcctatcact

SEQ ID NO: 157388 - DNA, 25 bp, Probe Sequence
aaacataatcttctgccttctcatg

SEQ ID NO: 157389 - DNA, 25 bp, Probe Sequence
aaaaagaatctgctcagttccatat

SEQ ID NO: 157390 - DNA, 25 bp, Probe Sequence
aaactgttattgctcgttcctcaga

SEQ ID NO: 157391 - DNA, 25 bp, Probe Sequence
aaactttattagaggatgccataga

SEQ ID NO: 157392 - DNA, 25 bp, Probe Sequence
aaacgtgtatgtattagtgtgctag

SEQ ID NO: 157393 - DNA, 25 bp, Probe Sequence
aaacgtattttctgatgtggcttta

SEQ ID NO: 157394 - DNA, 25 bp, Probe Sequence
aaacgttttatatgtgtgggtatgt

SEQ ID NO: 157395 - DNA, 25 bp, Probe Sequence
aaacgttggttgtgtgtgtgtgtgt

SEQ ID NO: 157396 - DNA, 25 bp, Probe Sequence
aaacgttggttgtgtgtgtgtgtgt

SEQ ID NO: 157397 - DNA, 25 bp, Probe Sequence
aaacgggagtgtgcagtcagggcct

SEQ ID NO: 157398 - DNA, 25 bp, Probe Sequence
aagacggaagggacgtggcggctgc

SEQ ID NO: 157399 - DNA, 25 bp, Probe Sequence
aaacgagcaacagaggtggcctcat

SEQ ID NO: 157400 - DNA, 25 bp, Probe Sequence
aaacgagctctgtggagtccgtgat

SEQ ID NO: 157401 - DNA, 25 bp, Probe Sequence
aaacgagctctgtggagtccgtgat

SEQ ID NO: 157402 - DNA, 25 bp, Probe Sequence
aaacgagacgggtgcatctgcgtga

SEQ ID NO: 157403 - DNA, 25 bp, Probe Sequence
aaactgcacctacggatgcactggg

SEQ ID NO: 157404 - DNA, 25 bp, Probe Sequence
aaacgacgtgtttgagcagctggcg

SEQ ID NO: 157405 - DNA, 25 bp, Probe Sequence
aaacacacagtacagacagcatgga

SEQ ID NO: 157406 - DNA, 25 bp, Probe Sequence
aaaaccatggcacgagaacaactac

SEQ ID NO: 157407 - DNA, 25 bp, Probe Sequence
aaaacctgtcctcaacaagctgacc

SEQ ID NO: 157408 - DNA, 25 bp, Probe Sequence
aaacttcttactcatcacaaagacc

SEQ ID NO: 157409 - DNA, 25 bp, Probe Sequence
aaacttcttgtcagacataaagcca

SEQ ID NO: 157410 - DNA, 25 bp, Probe Sequence
aaacttcttctctgaagggaggtgg

SEQ ID NO: 157411 - DNA, 25 bp, Probe Sequence
aaactcctctgatgtggttgggggg

SEQ ID NO: 157412 - DNA, 25 bp, Probe Sequence
aaacgcctgcaatggtgactcaggg

SEQ ID NO: 157413 - DNA, 25 bp, Probe Sequence
aaacacctataagtgtactcgacag

SEQ ID NO: 157414 - DNA, 25 bp, Probe Sequence
aaacaacctcaaggtttctggcatt

SEQ ID NO: 157415 - DNA, 25 bp, Probe Sequence
aaacaaccccagtttcatcatgggt

SEQ ID NO: 157416 - DNA, 25 bp, Probe Sequence
aaacaggtcttattttcatcggagt

SEQ ID NO: 157417 - DNA, 25 bp, Probe Sequence
aacacggcactttcttaagctggtt

SEQ ID NO: 157418 - DNA, 25 bp, Probe Sequence
aacccaccttacatacaggattgtg

SEQ ID NO: 157419 - DNA, 25 bp, Probe Sequence
aacccactcatgggggcaaggtctt

SEQ ID NO: 157420 - DNA, 25 bp, Probe Sequence
caacccccaagtcggttggatcact

SEQ ID NO: 157421 - DNA, 25 bp, Probe Sequence
aacccctcagacagtttgcttattt

SEQ ID NO: 157422 - DNA, 25 bp, Probe Sequence
aacttcctgaactgggtggtgattt

SEQ ID NO: 157423 - DNA, 25 bp, Probe Sequence
aactgtatcggggcggggtgtgtgt

SEQ ID NO: 157424 - DNA, 25 bp, Probe Sequence
aaaataagggcccagcacggtagct

SEQ ID NO: 157425 - DNA, 25 bp, Probe Sequence
aaaactaggtgctgcagcctgggac

SEQ ID NO: 157426 - DNA, 25 bp, Probe Sequence
aaaaattagcctggccctgtggcat

SEQ ID NO: 157427 - DNA, 25 bp, Probe Sequence
aaaaattgggctgggactgggcaca

SEQ ID NO: 157428 - DNA, 25 bp, Probe Sequence
aaaaatagccaggtgtggggtgcat

SEQ ID NO: 157429 - DNA, 25 bp, Probe Sequence
aaaaattcacatggccgggtgtcat

SEQ ID NO: 157430 - DNA, 25 bp, Probe Sequence
aaacaaaatgcaggccgagcgcggt

SEQ ID NO: 157431 - DNA, 25 bp, Probe Sequence
aaacaagcagcctgccgggcaggga

SEQ ID NO: 157432 - DNA, 25 bp, Probe Sequence
aaactataccataacccaaggctga

SEQ ID NO: 157433 - DNA, 25 bp, Probe Sequence
aaacatggacaaatattcaaaactg

SEQ ID NO: 157434 - DNA, 25 bp, Probe Sequence
aaactgggccttttctaagtctgtg

SEQ ID NO: 157435 - DNA, 25 bp, Probe Sequence
aaactagctcacctatttaatttgt

SEQ ID NO: 157436 - DNA, 25 bp, Probe Sequence
aaactcacatccatattacaccttt

SEQ ID NO: 157437 - DNA, 25 bp, Probe Sequence
aaactgaagctttaatcaacttatt

SEQ ID NO: 157438 - DNA, 25 bp, Probe Sequence
aaacacaaatcttcatatatactta

SEQ ID NO: 157439 - DNA, 25 bp, Probe Sequence
aaacaccatcattaagaataattga

SEQ ID NO: 157440 - DNA, 25 bp, Probe Sequence
aaacaccttgaaacagaaattcata

SEQ ID NO: 157441 - DNA, 25 bp, Probe Sequence
aaacaggccaaaagcagggtgtatt

SEQ ID NO: 157442 - DNA, 25 bp, Probe Sequence
aaacaggctgcagaacatggaggtc

SEQ ID NO: 157443 - DNA, 25 bp, Probe Sequence
aaaagctgtagctaggcatggcagc

SEQ ID NO: 157444 - DNA, 25 bp, Probe Sequence
aaacattgaagacgtcattgcccag

SEQ ID NO: 157445 - DNA, 25 bp, Probe Sequence
aaacattgaagacgtcattgcccag

SEQ ID NO: 157446 - DNA, 25 bp, Probe Sequence
aaacggaagatgcctgtgtgccgcc

SEQ ID NO: 157447 - DNA, 25 bp, Probe Sequence
gagtacgagaaaagggtccgagcac

SEQ ID NO: 157448 - DNA, 25 bp, Probe Sequence
aaacaagaaaatagggccaggcaca

SEQ ID NO: 157449 - DNA, 25 bp, Probe Sequence
aaaaaaagatgctctgagtccagac

SEQ ID NO: 157450 - DNA, 25 bp, Probe Sequence
aaacaagaagagtctcagatatctg

SEQ ID NO: 157451 - DNA, 25 bp, Probe Sequence
aaaatgatgaagttgcaaatggcag

SEQ ID NO: 157452 - DNA, 25 bp, Probe Sequence
aaaatggtagttagatctggaggtc

SEQ ID NO: 157453 - DNA, 25 bp, Probe Sequence
aaaatctgtaggaaactgaatggtt

SEQ ID NO: 157454 - DNA, 25 bp, Probe Sequence
aaaatcttagttaaccaatgacaat

SEQ ID NO: 157455 - DNA, 25 bp, Probe Sequence
aaaaataattatgccccatgaccaa

SEQ ID NO: 157456 - DNA, 25 bp, Probe Sequence
aaaagacacttcaagctaccaacca

SEQ ID NO: 157457 - DNA, 25 bp, Probe Sequence
aaacacacattggtactaaaactat

SEQ ID NO: 157458 - DNA, 25 bp, Probe Sequence
aaacagcaatgatcttccaataaaa

SEQ ID NO: 157459 - DNA, 25 bp, Probe Sequence
aaacattaaacattgccaacgcaaa

SEQ ID NO: 157460 - DNA, 25 bp, Probe Sequence
aaactgatcaaagagccaggctcgg

SEQ ID NO: 157461 - DNA, 25 bp, Probe Sequence
aaactgccagaagagccagctcttc

SEQ ID NO: 157462 - DNA, 25 bp, Probe Sequence
aaactcagagaagacaatggctata

SEQ ID NO: 157463 - DNA, 25 bp, Probe Sequence
aaaaaggtatgcccacaggtgaagc

SEQ ID NO: 157464 - DNA, 25 bp, Probe Sequence
aaacagggatacctcacagcttggc

SEQ ID NO: 157465 - DNA, 25 bp, Probe Sequence
aaacaaataagccatcacgcctgcc

SEQ ID NO: 157466 - DNA, 25 bp, Probe Sequence
aaaaacttggcattcatcccagcag

SEQ ID NO: 157467 - DNA, 25 bp, Probe Sequence
aaaattcttggctgtcccaaggatt

SEQ ID NO: 157468 - DNA, 25 bp, Probe Sequence
aaaattcttggctttattgtactgg

SEQ ID NO: 157469 - DNA, 25 bp, Probe Sequence
aaaatatatttatcttcttcacggg

SEQ ID NO: 157470 - DNA, 25 bp, Probe Sequence
aaaatatatttatcttcttcacggg

SEQ ID NO: 157471 - DNA, 25 bp, Probe Sequence
aaacatttttttttctgtcacactg

SEQ ID NO: 157472 - DNA, 25 bp, Probe Sequence
aaaattttgttggatgtactccagg

SEQ ID NO: 157473 - DNA, 25 bp, Probe Sequence
aaacaaatatcatggaggtccctgg

SEQ ID NO: 157474 - DNA, 25 bp, Probe Sequence
aaacataatacatggctgggtgcgg

SEQ ID NO: 157475 - DNA, 25 bp, Probe Sequence
aaacaaaaatggatctgggtggcca

SEQ ID NO: 157476 - DNA, 25 bp, Probe Sequence
aaaaagcaacagtcctctgcaggga

SEQ ID NO: 157477 - DNA, 25 bp, Probe Sequence
caacaaacaatacacccaggtaaca

SEQ ID NO: 157478 - DNA, 25 bp, Probe Sequence
caactaaaatgtcttaccagtaaag

SEQ ID NO: 157479 - DNA, 25 bp, Probe Sequence
aacaaactgattcttgggaggccaa

SEQ ID NO: 157480 - DNA, 25 bp, Probe Sequence
aaaaacttgtgatctggggaacaga

SEQ ID NO: 157481 - DNA, 25 bp, Probe Sequence
aaaaccttctagtgggacaagatgt

SEQ ID NO: 157482 - DNA, 25 bp, Probe Sequence
aacaaagctattaaagggacagaat

SEQ ID NO: 157483 - DNA, 25 bp, Probe Sequence
aaaagagtagtgtatagggaagagt

SEQ ID NO: 157484 - DNA, 25 bp, Probe Sequence
aaaatgagtcagtttggggtcagtg

SEQ ID NO: 157485 - DNA, 25 bp, Probe Sequence
aaacggtttctcctgtggatagtgg

SEQ ID NO: 157486 - DNA, 25 bp, Probe Sequence
aaacgtgtgctcccagttggattgg

SEQ ID NO: 157487 - DNA, 25 bp, Probe Sequence
aaactgtgatgtttctgtctggatc

SEQ ID NO: 157488 - DNA, 25 bp, Probe Sequence
aaacttgcatgtgtctggggcagcc

SEQ ID NO: 157489 - DNA, 25 bp, Probe Sequence
aaactgtgatctgcggcggcacagc

SEQ ID NO: 157490 - DNA, 25 bp, Probe Sequence
aaacagatgcatgccagggtgactc

SEQ ID NO: 157491 - DNA, 25 bp, Probe Sequence
aaacagagctgtccgtggcacagtg

SEQ ID NO: 157492 - DNA, 25 bp, Probe Sequence
aaacagagctgtccgtggcacagtg

SEQ ID NO: 157493 - DNA, 25 bp, Probe Sequence
aaaatgacattactgcatggcaaga

SEQ ID NO: 157494 - DNA, 25 bp, Probe Sequence
aaactatgctttacatggcaatcaa

SEQ ID NO: 157495 - DNA, 25 bp, Probe Sequence
aaactttgtgctacatgacgacaaa

SEQ ID NO: 157496 - DNA, 25 bp, Probe Sequence
aaacataaacaaatgtccagcaaac

SEQ ID NO: 157497 - DNA, 25 bp, Probe Sequence
aaacaggaaaaaatgccactatcca

SEQ ID NO: 157498 - DNA, 25 bp, Probe Sequence
aaacaggcaaaaagggcagctagct

SEQ ID NO: 157499 - DNA, 25 bp, Probe Sequence
aaacaggcaaaccaaacagcacact

SEQ ID NO: 157500 - DNA, 25 bp, Probe Sequence
aaacaggcaaaccaaacagcacact

SEQ ID NO: 157501 - DNA, 25 bp, Probe Sequence
aaaagtgaggcccatgatcccaaca

SEQ ID NO: 157502 - DNA, 25 bp, Probe Sequence
aaaagtgaggcccatgatcccaaca

SEQ ID NO: 157503 - DNA, 25 bp, Probe Sequence
aacttgttctggcaaaccagaccct

SEQ ID NO: 157504 - DNA, 25 bp, Probe Sequence
aaaagctccaggcagaaaagaccct

SEQ ID NO: 157505 - DNA, 25 bp, Probe Sequence
aaaatgtctaggctaagtatgcacc

SEQ ID NO: 157506 - DNA, 25 bp, Probe Sequence
aaactgtaactgcattagaaaccat

SEQ ID NO: 157507 - DNA, 25 bp, Probe Sequence
aaacttcaacgcaattgcaacagca

SEQ ID NO: 157508 - DNA, 25 bp, Probe Sequence
aaacttgtcacgcatgccacacaag

SEQ ID NO: 157509 - DNA, 25 bp, Probe Sequence
aaacttgtctggctcccaggaacag

SEQ ID NO: 157510 - DNA, 25 bp, Probe Sequence
aaacttggtggtcctgcaccaaact

SEQ ID NO: 157511 - DNA, 25 bp, Probe Sequence
aaaacttctggtcctccaaagattg

SEQ ID NO: 157512 - DNA, 25 bp, Probe Sequence
aaaaatccatgagtgttccaaaata

SEQ ID NO: 157513 - DNA, 25 bp, Probe Sequence
aaacatatctcttatcttacgaaaa

SEQ ID NO: 157514 - DNA, 25 bp, Probe Sequence
aaactatttcaaatgcataccacaa

SEQ ID NO: 157515 - DNA, 25 bp, Probe Sequence
aacacctactatgtgatcctataat

SEQ ID NO: 157516 - DNA, 25 bp, Probe Sequence
aacaccttctatgtaggcatctaca

SEQ ID NO: 157517 - DNA, 25 bp, Probe Sequence
aaaacttcttgtcagacataaagcc

SEQ ID NO: 157518 - DNA, 25 bp, Probe Sequence
aaaaatccaggatgagatcagaagg

SEQ ID NO: 157519 - DNA, 25 bp, Probe Sequence
aaaaagccccagcaggctaggtgca

SEQ ID NO: 157520 - DNA, 25 bp, Probe Sequence
aaaacagtgccttctagagccgggc

SEQ ID NO: 157521 - DNA, 25 bp, Probe Sequence
aaacagtgccttctagagccgggct

SEQ ID NO: 157522 - DNA, 25 bp, Probe Sequence
aaaagtcctggcagaggccgggtgc

SEQ ID NO: 157523 - DNA, 25 bp, Probe Sequence
caaaagtccgtcagaccacagttac

SEQ ID NO: 157524 - DNA, 25 bp, Probe Sequence
aaaagtccgtcagaccacagttaca

SEQ ID NO: 157525 - DNA, 25 bp, Probe Sequence
aaaacccgctacagacaagctttct

SEQ ID NO: 157526 - DNA, 25 bp, Probe Sequence
aaaacaacttacatccacgtcttct

SEQ ID NO: 157527 - DNA, 25 bp, Probe Sequence
aaaagccactagactcttcactgtt

SEQ ID NO: 157528 - DNA, 25 bp, Probe Sequence
aaaaccgtatgagggaactgtgtag

SEQ ID NO: 157529 - DNA, 25 bp, Probe Sequence
aaaaccgtatgagggaactgtgtag

SEQ ID NO: 157530 - DNA, 25 bp, Probe Sequence
aaacaccgcgtgattggaagtggat

SEQ ID NO: 157531 - DNA, 25 bp, Probe Sequence
aaaaactccttgattgaatgtagaa

SEQ ID NO: 157532 - DNA, 25 bp, Probe Sequence
aaaacaagtcttctcgatttataat

SEQ ID NO: 157533 - DNA, 25 bp, Probe Sequence
aaacaccaacccaggaattctcaat

SEQ ID NO: 157534 - DNA, 25 bp, Probe Sequence
aaaatccaaaccagtacaactatat

SEQ ID NO: 157535 - DNA, 25 bp, Probe Sequence
aaaactacaaccattatctttgatt

SEQ ID NO: 157536 - DNA, 25 bp, Probe Sequence
aaacagcttcatgcctttgtaagtt

SEQ ID NO: 157537 - DNA, 25 bp, Probe Sequence
aaacactttgtggcatttagaaatc

SEQ ID NO: 157538 - DNA, 25 bp, Probe Sequence
aaactttctctgggttgataatata

SEQ ID NO: 157539 - DNA, 25 bp, Probe Sequence
aaactatcggctccctgtataataa

SEQ ID NO: 157540 - DNA, 25 bp, Probe Sequence
aaacatgatcaagtccttctatact

SEQ ID NO: 157541 - DNA, 25 bp, Probe Sequence
aaactatgacattccttctgcagac

SEQ ID NO: 157542 - DNA, 25 bp, Probe Sequence
aaaaaatctcactgcttcggacatg

SEQ ID NO: 157543 - DNA, 25 bp, Probe Sequence
aaaaatcattactctttttctcagt

SEQ ID NO: 157544 - DNA, 25 bp, Probe Sequence
aaaaatttaccaccgatgattccat

SEQ ID NO: 157545 - DNA, 25 bp, Probe Sequence
aaaacaatcttattccgagcattcc

SEQ ID NO: 157546 - DNA, 25 bp, Probe Sequence
aaacatcacctttacctgagaggcc

SEQ ID NO: 157547 - DNA, 25 bp, Probe Sequence
aaacatcacctttacctgagaggcc

SEQ ID NO: 157548 - DNA, 25 bp, Probe Sequence
aaacatcacctttacctgagaggcc

SEQ ID NO: 157549 - DNA, 25 bp, Probe Sequence
aaacatcacctttacctgagaggcc

SEQ ID NO: 157550 - DNA, 25 bp, Probe Sequence
aaacacacactaattcctggcaggc

SEQ ID NO: 157551 - DNA, 25 bp, Probe Sequence
aaacagcatccggcgcagccggaag

SEQ ID NO: 157552 - DNA, 25 bp, Probe Sequence
aacatcaacgggcaccaggccaagt

SEQ ID NO: 157553 - DNA, 25 bp, Probe Sequence
aacagaaacgtcaaacgtcaaatgt

SEQ ID NO: 157554 - DNA, 25 bp, Probe Sequence
aaaaatgtccacaacacagtaattg

SEQ ID NO: 157555 - DNA, 25 bp, Probe Sequence
aaaaattccacattgaagttgtgtg

SEQ ID NO: 157556 - DNA, 25 bp, Probe Sequence
aaaaatgcccacttgaggcctctgt

SEQ ID NO: 157557 - DNA, 25 bp, Probe Sequence
aaacaaagcccattgagctccctgt

SEQ ID NO: 157558 - DNA, 25 bp, Probe Sequence
aaacacttcaccgtggctcagaatg

SEQ ID NO: 157559 - DNA, 25 bp, Probe Sequence
aaacatctaatgtgctccataaata

SEQ ID NO: 157560 - DNA, 25 bp, Probe Sequence
aaacatatgcaaacagccctaaata

SEQ ID NO: 157561 - DNA, 25 bp, Probe Sequence
aaacatacacaaaggcccaatcaga

SEQ ID NO: 157562 - DNA, 25 bp, Probe Sequence
aaaaatccatttggcaccaataagt

SEQ ID NO: 157563 - DNA, 25 bp, Probe Sequence
aaaaataatttttccacatgcatga

SEQ ID NO: 157564 - DNA, 25 bp, Probe Sequence
aacaaatcaaagattccttgagggc

SEQ ID NO: 157565 - DNA, 25 bp, Probe Sequence
aaaactggcaggattcacttatggg

SEQ ID NO: 157566 - DNA, 25 bp, Probe Sequence
aaaacagccagtcggtacttagcca

SEQ ID NO: 157567 - DNA, 25 bp, Probe Sequence
aaaactacaatgcaggcacttacca

SEQ ID NO: 157568 - DNA, 25 bp, Probe Sequence
aaaaatctcttgaaggcagttactg

SEQ ID NO: 157569 - DNA, 25 bp, Probe Sequence
aaaaccttgtgtaagaggctgactt

SEQ ID NO: 157570 - DNA, 25 bp, Probe Sequence
aaaacaattctgagaggaaatgtat

SEQ ID NO: 157571 - DNA, 25 bp, Probe Sequence
aaaagcagttgctcgaagaactcga

SEQ ID NO: 157572 - DNA, 25 bp, Probe Sequence
aaaagcgttattcaagcactccaga

SEQ ID NO: 157573 - DNA, 25 bp, Probe Sequence
aaacaggttatcaaattcttccaag

SEQ ID NO: 157574 - DNA, 25 bp, Probe Sequence
aaacaagcttatgcagttcttaagg

SEQ ID NO: 157575 - DNA, 25 bp, Probe Sequence
aaacacagcttcacaatggccatga

SEQ ID NO: 157576 - DNA, 25 bp, Probe Sequence
aaacacagcttcacaatggccatga

SEQ ID NO: 157577 - DNA, 25 bp, Probe Sequence
aaacagatgcttaccctggaagagc

SEQ ID NO: 157578 - DNA, 25 bp, Probe Sequence
aaacagagctcaaacctcggtcagc

SEQ ID NO: 157579 - DNA, 25 bp, Probe Sequence
aaacagtgctgcacatcatccaggt

SEQ ID NO: 157580 - DNA, 25 bp, Probe Sequence
aaacagttgcacagcatctcagctc

SEQ ID NO: 157581 - DNA, 25 bp, Probe Sequence
aaaatgtggatcggagtagtgctca

SEQ ID NO: 157582 - DNA, 25 bp, Probe Sequence
aaaaatgtgctctaatctaggccag

SEQ ID NO: 157583 - DNA, 25 bp, Probe Sequence
aacaacttccaaactgaagctatct

SEQ ID NO: 157584 - DNA, 25 bp, Probe Sequence
aaaacttgtaaattggatctatcct

SEQ ID NO: 157585 - DNA, 25 bp, Probe Sequence
aaacatgctctgtaaagggtcttcc

SEQ ID NO: 157586 - DNA, 25 bp, Probe Sequence
aaacattctaattaaaggctttgca

SEQ ID NO: 157587 - DNA, 25 bp, Probe Sequence
aaacattctaattaaaggctttgca

SEQ ID NO: 157588 - DNA, 25 bp, Probe Sequence
aaacacaccaagaaacagcctttgc

SEQ ID NO: 157589 - DNA, 25 bp, Probe Sequence
aaaacaccacaaaacagacttcact

SEQ ID NO: 157590 - DNA, 25 bp, Probe Sequence
aaacaacccacaaatctgaagctcc

SEQ ID NO: 157591 - DNA, 25 bp, Probe Sequence
aaacaaaaccatcacagcatatcat

SEQ ID NO: 157592 - DNA, 25 bp, Probe Sequence
aaactttactatcagcagcttaaga

SEQ ID NO: 157593 - DNA, 25 bp, Probe Sequence
aaactacatacttggacatctgtaa

SEQ ID NO: 157594 - DNA, 25 bp, Probe Sequence
aaactcactcacaaacaacataaat

SEQ ID NO: 157595 - DNA, 25 bp, Probe Sequence
aacaaaccctaatacaggagatatg

SEQ ID NO: 157596 - DNA, 25 bp, Probe Sequence
aacaaacccttggcaacactagaag

SEQ ID NO: 157597 - DNA, 25 bp, Probe Sequence
aacacaatccgttgcaaacccaaag

SEQ ID NO: 157598 - DNA, 25 bp, Probe Sequence
aacacaatccgttgcaaacccaaag

SEQ ID NO: 157599 - DNA, 25 bp, Probe Sequence
aaacatatccagtacaatttaaata

SEQ ID NO: 157600 - DNA, 25 bp, Probe Sequence
aaaatctcaagtcaactgtaaagca

SEQ ID NO: 157601 - DNA, 25 bp, Probe Sequence
aaaacatcaagctgtatttgtatac

SEQ ID NO: 157602 - DNA, 25 bp, Probe Sequence
aaaaatgctcagagtacttttatgc

SEQ ID NO: 157603 - DNA, 25 bp, Probe Sequence
aaaacttactgaatacttactatgt

SEQ ID NO: 157604 - DNA, 25 bp, Probe Sequence
aaacaattttatatgcctcactggt

SEQ ID NO: 157605 - DNA, 25 bp, Probe Sequence
aaacacaaatttattcctcatggaa

SEQ ID NO: 157606 - DNA, 25 bp, Probe Sequence
aaacactaatgttaattgcccaatt

SEQ ID NO: 157607 - DNA, 25 bp, Probe Sequence
aaacagtagttcaatttgcttaatt

SEQ ID NO: 157608 - DNA, 25 bp, Probe Sequence
aaacatccacttaagttctttgatt

SEQ ID NO: 157609 - DNA, 25 bp, Probe Sequence
aaactaaatataatcttttgtgttg

SEQ ID NO: 157610 - DNA, 25 bp, Probe Sequence
aaactcaattgtttctctgtctttt

SEQ ID NO: 157611 - DNA, 25 bp, Probe Sequence
aaacaaatggtatttatgtcactca

SEQ ID NO: 157612 - DNA, 25 bp, Probe Sequence
aaaaatatggttctcttcactcgcc

SEQ ID NO: 157613 - DNA, 25 bp, Probe Sequence
aaaaacattgaagacgtcattgccc

SEQ ID NO: 157614 - DNA, 25 bp, Probe Sequence
aaaaaacattgaagacgtcattgcc

SEQ ID NO: 157615 - DNA, 25 bp, Probe Sequence
aaaaagaatctaaaccttacatgtg

SEQ ID NO: 157616 - DNA, 25 bp, Probe Sequence
aaaacaaccttattccttacatctg

SEQ ID NO: 157617 - DNA, 25 bp, Probe Sequence
aaaagaatcttttggtttctcactg

SEQ ID NO: 157618 - DNA, 25 bp, Probe Sequence
aaaagcaccaagaggttttcagatg

SEQ ID NO: 157619 - DNA, 25 bp, Probe Sequence
aaaaaacgggagctatttcacagag

SEQ ID NO: 157620 - DNA, 25 bp, Probe Sequence
aaacacaacggggtgttctctccag

SEQ ID NO: 157621 - DNA, 25 bp, Probe Sequence
aaacaaaagccggagttgcattcta

SEQ ID NO: 157622 - DNA, 25 bp, Probe Sequence
aaaatcaacgtggcctttgagttca

SEQ ID NO: 157623 - DNA, 25 bp, Probe Sequence
aaaagcaaatgtggccttctcagta

SEQ ID NO: 157624 - DNA, 25 bp, Probe Sequence
aaaaaattggtgcattgtctgtcat

SEQ ID NO: 157625 - DNA, 25 bp, Probe Sequence
aaaaagggcggccattgcactgtcc

SEQ ID NO: 157626 - DNA, 25 bp, Probe Sequence
aaaaaggcgcagaccacagccgtac

SEQ ID NO: 157627 - DNA, 25 bp, Probe Sequence
aaaacaggccgggcacagtggctca

SEQ ID NO: 157628 - DNA, 25 bp, Probe Sequence
aaaacagaagcaccaacagtggata

SEQ ID NO: 157629 - DNA, 25 bp, Probe Sequence
aaaagcagaagcaacctcggtggag

SEQ ID NO: 157630 - DNA, 25 bp, Probe Sequence
aacaaaaatccaccctcgtagatgc

SEQ ID NO: 157631 - DNA, 25 bp, Probe Sequence
aacaaaaggccagtcaccgtggctc

SEQ ID NO: 157632 - DNA, 25 bp, Probe Sequence
aaaaacggccaggtgcggtggctca

SEQ ID NO: 157633 - DNA, 25 bp, Probe Sequence
aaactttggccgggcgtgatggctc

SEQ ID NO: 157634 - DNA, 25 bp, Probe Sequence
aaacaattgttctgggtgatttcta

SEQ ID NO: 157635 - DNA, 25 bp, Probe Sequence
aaaaatattttgtgcggaattcgat

SEQ ID NO: 157636 - DNA, 25 bp, Probe Sequence
aaaacattttcctgcttgtcttaga

SEQ ID NO: 157637 - DNA, 25 bp, Probe Sequence
aaacatgcactttactagcagttct

SEQ ID NO: 157638 - DNA, 25 bp, Probe Sequence
aaacatgcacttatccaatgatccc

SEQ ID NO: 157639 - DNA, 25 bp, Probe Sequence
aaaagcagctgtacgtcggattccc

SEQ ID NO: 157640 - DNA, 25 bp, Probe Sequence
aaacagcagcagccgttctggaatc

SEQ ID NO: 157641 - DNA, 25 bp, Probe Sequence
aaaacagctagactttgtgaatgat

SEQ ID NO: 157642 - DNA, 25 bp, Probe Sequence
aaaactgcaagtattggctatttgt

SEQ ID NO: 157643 - DNA, 25 bp, Probe Sequence
aaaaggaagtcagaagcttaagtga

SEQ ID NO: 157644 - DNA, 25 bp, Probe Sequence
aaacacgaatgtgaaatttatatgt

SEQ ID NO: 157645 - DNA, 25 bp, Probe Sequence
aaaacaagctgtgagaatttctagt

SEQ ID NO: 157646 - DNA, 25 bp, Probe Sequence
aaaaatagcttcagcaacattatga

SEQ ID NO: 157647 - DNA, 25 bp, Probe Sequence
aaaaatgcgttcttccacattgata

SEQ ID NO: 157648 - DNA, 25 bp, Probe Sequence
aaaaagcacttgccccactgtaaat

SEQ ID NO: 157649 - DNA, 25 bp, Probe Sequence
aaaaaccttgtttcactgtcacata

SEQ ID NO: 157650 - DNA, 25 bp, Probe Sequence
aaaacatcctggaatatccctcagc

SEQ ID NO: 157651 - DNA, 25 bp, Probe Sequence
aaaacaccatggcagtatcctccag

SEQ ID NO: 157652 - DNA, 25 bp, Probe Sequence
aaaacacaacaacgatacccagcac

SEQ ID NO: 157653 - DNA, 25 bp, Probe Sequence
aaaatgacaaaccttcagaccagcc

SEQ ID NO: 157654 - DNA, 25 bp, Probe Sequence
aaaataaaaagcctcagtgacccat

SEQ ID NO: 157655 - DNA, 25 bp, Probe Sequence
aaacataaatccgcaagtcaccaca

SEQ ID NO: 157656 - DNA, 25 bp, Probe Sequence
aaacacaaatccactggacctccaa

SEQ ID NO: 157657 - DNA, 25 bp, Probe Sequence
aaacaccaactgatgtagaccaaaa

SEQ ID NO: 157658 - DNA, 25 bp, Probe Sequence
aaacaccaagcagccaagacacaag

SEQ ID NO: 157659 - DNA, 25 bp, Probe Sequence
aaacaccaaatggcggatgacgccg

SEQ ID NO: 157660 - DNA, 25 bp, Probe Sequence
aaaaccgcaacctgtatcagcgttg

SEQ ID NO: 157661 - DNA, 25 bp, Probe Sequence
aaaacccaggccttgacattgttat

SEQ ID NO: 157662 - DNA, 25 bp, Probe Sequence
aaacagcctcagttttacagttctt

SEQ ID NO: 157663 - DNA, 25 bp, Probe Sequence
aaaaactatttgtctgtagttgctt

SEQ ID NO: 157664 - DNA, 25 bp, Probe Sequence
aaaacctataatgcctcagtgctgc

SEQ ID NO: 157665 - DNA, 25 bp, Probe Sequence
aaaactgcatcacagtcccattctc

SEQ ID NO: 157666 - DNA, 25 bp, Probe Sequence
aaaacgtaacttgcaatttgccagt

SEQ ID NO: 157667 - DNA, 25 bp, Probe Sequence
aaaacagataggatgccttttccag

SEQ ID NO: 157668 - DNA, 25 bp, Probe Sequence
aaacagtgatagacttgccatttta

SEQ ID NO: 157669 - DNA, 25 bp, Probe Sequence
aaaagtgttgtcttcactggctaca

SEQ ID NO: 157670 - DNA, 25 bp, Probe Sequence
aaaaatatcttctcacgcctgtaat

SEQ ID NO: 157671 - DNA, 25 bp, Probe Sequence
aaaagtgcttaacctggcctgtaat

SEQ ID NO: 157672 - DNA, 25 bp, Probe Sequence
aaacagggtcagacactgcccagct

SEQ ID NO: 157673 - DNA, 25 bp, Probe Sequence
aaacaggaaagcagctggcccttct

SEQ ID NO: 157674 - DNA, 25 bp, Probe Sequence
aaaagtaaagcactgtggtctttgc

SEQ ID NO: 157675 - DNA, 25 bp, Probe Sequence
aaaagctcaatactcatgtggcctt

SEQ ID NO: 157676 - DNA, 25 bp, Probe Sequence
aaaaatgatctacttggctgccttc

SEQ ID NO: 157677 - DNA, 25 bp, Probe Sequence
aaaagatgattctgggtctttccct

SEQ ID NO: 157678 - DNA, 25 bp, Probe Sequence
aacaacagtcgctgggtttatccca

SEQ ID NO: 157679 - DNA, 25 bp, Probe Sequence
aaaacggctgtcaggtttgatctca

SEQ ID NO: 157680 - DNA, 25 bp, Probe Sequence
aaaagcggatggtggttcctgctgc

SEQ ID NO: 157681 - DNA, 25 bp, Probe Sequence
aaaaaagggcggccattgcactgtc

SEQ ID NO: 157682 - DNA, 25 bp, Probe Sequence
aaaagatttgcctcctgatgcactt

SEQ ID NO: 157683 - DNA, 25 bp, Probe Sequence
aaaaatttggagtgtcagcagctat

SEQ ID NO: 157684 - DNA, 25 bp, Probe Sequence
aaaaaggtgaaggtgccgagctata

SEQ ID NO: 157685 - DNA, 25 bp, Probe Sequence
gagaaaaggatataccgggcttaat

SEQ ID NO: 157686 - DNA, 25 bp, Probe Sequence
aaaacaggttacacgggattatgat

SEQ ID NO: 157687 - DNA, 25 bp, Probe Sequence
aaaaaggtcctcacaggtgtctcca

SEQ ID NO: 157688 - DNA, 25 bp, Probe Sequence
aaccaagttcccactggtgatgcct

SEQ ID NO: 157689 - DNA, 25 bp, Probe Sequence
aaccaagttcccactggtgatgcct

SEQ ID NO: 157690 - DNA, 25 bp, Probe Sequence
aacgcaagttcccagttggagctcc

SEQ ID NO: 157691 - DNA, 25 bp, Probe Sequence
aaacaaaatgcccatgttggtcctc

SEQ ID NO: 157692 - DNA, 25 bp, Probe Sequence
aacactacctggaagttgtgccttc

SEQ ID NO: 157693 - DNA, 25 bp, Probe Sequence
aacatgcattccgagaagctgctgt

SEQ ID NO: 157694 - DNA, 25 bp, Probe Sequence
aaacattgacaaatactgctctgaa

SEQ ID NO: 157695 - DNA, 25 bp, Probe Sequence
aaacaatacaaatctgcatcttaca

SEQ ID NO: 157696 - DNA, 25 bp, Probe Sequence
aaaacatgatcaagtccttctatac

SEQ ID NO: 157697 - DNA, 25 bp, Probe Sequence
aaaactcaccttctacttatctatt

SEQ ID NO: 157698 - DNA, 25 bp, Probe Sequence
aacaagtccctgattttgtcacctt

SEQ ID NO: 157699 - DNA, 25 bp, Probe Sequence
aaacacccactgtgttttgctcact

SEQ ID NO: 157700 - DNA, 25 bp, Probe Sequence
aaaaccacactcagtctttgttcaa

SEQ ID NO: 157701 - DNA, 25 bp, Probe Sequence
aaaagaacagccactcttatgtaaa

SEQ ID NO: 157702 - DNA, 25 bp, Probe Sequence
aagaagaattcctcctccggaatca

SEQ ID NO: 157703 - DNA, 25 bp, Probe Sequence
aaaaaatcccagccctagtagcaat

SEQ ID NO: 157704 - DNA, 25 bp, Probe Sequence
aaaaaacggcagccctgggcggctg

SEQ ID NO: 157705 - DNA, 25 bp, Probe Sequence
aaaagggggcagcccttgggagctg

SEQ ID NO: 157706 - DNA, 25 bp, Probe Sequence
aaacagctggggtagcctctggaat

SEQ ID NO: 157707 - DNA, 25 bp, Probe Sequence
aaaactgggagattttctgcagaaa

SEQ ID NO: 157708 - DNA, 25 bp, Probe Sequence
aaacactgacctcttgtctcaaaaa

SEQ ID NO: 157709 - DNA, 25 bp, Probe Sequence
aaacatctggctaaattcttacaaa

SEQ ID NO: 157710 - DNA, 25 bp, Probe Sequence
aaacatctactgaatttctgtaatt

SEQ ID NO: 157711 - DNA, 25 bp, Probe Sequence
aaacatcaagctgtatttgtatacc

SEQ ID NO: 157712 - DNA, 25 bp, Probe Sequence
aaacactagctctgtattaatcccc

SEQ ID NO: 157713 - DNA, 25 bp, Probe Sequence
aaaatgctggttaggttgagtcttc

SEQ ID NO: 157714 - DNA, 25 bp, Probe Sequence
aaaatttgattaattggacctcatc

SEQ ID NO: 157715 - DNA, 25 bp, Probe Sequence
aaaatcctgttaagctgggcgttgt

SEQ ID NO: 157716 - DNA, 25 bp, Probe Sequence
aaaacctgtttgaatcttggttctg

SEQ ID NO: 157717 - DNA, 25 bp, Probe Sequence
aaacagggtcttgatttcgcttagg

SEQ ID NO: 157718 - DNA, 25 bp, Probe Sequence
aaacagagttttagtattgctatta

SEQ ID NO: 157719 - DNA, 25 bp, Probe Sequence
aaacatagcctatttttgtgcttaa

SEQ ID NO: 157720 - DNA, 25 bp, Probe Sequence
aataaccccattctttgcttgaaca

SEQ ID NO: 157721 - DNA, 25 bp, Probe Sequence
aaaagcaccgattcctcaagcttga

SEQ ID NO: 157722 - DNA, 25 bp, Probe Sequence
aaaagcactctgaatcaagatgagt

SEQ ID NO: 157723 - DNA, 25 bp, Probe Sequence
aaacacagtgtattctagatcatct

SEQ ID NO: 157724 - DNA, 25 bp, Probe Sequence
aaacacattttttagatcatctttg

SEQ ID NO: 157725 - DNA, 25 bp, Probe Sequence
aaacattcttaatatgtcatcttgt

SEQ ID NO: 157726 - DNA, 25 bp, Probe Sequence
aaacatctttgcaatatttactttt

SEQ ID NO: 157727 - DNA, 25 bp, Probe Sequence
aaaacgttgcgattataagtgtgag

SEQ ID NO: 157728 - DNA, 25 bp, Probe Sequence
aaaacggctggttatcaggcagtga

SEQ ID NO: 157729 - DNA, 25 bp, Probe Sequence
aaaaagcctgggtagagtgatctga

SEQ ID NO: 157730 - DNA, 25 bp, Probe Sequence
aaacagtcactggaaagagtgccag

SEQ ID NO: 157731 - DNA, 25 bp, Probe Sequence
aaaactgcacggtgacattcacaat

SEQ ID NO: 157732 - DNA, 25 bp, Probe Sequence
aaaactgctcgccagaacactacga

SEQ ID NO: 157733 - DNA, 25 bp, Probe Sequence
aaaacacggatgaaacctactgcat

SEQ ID NO: 157734 - DNA, 25 bp, Probe Sequence
aacaatccggataaacacgcctaga

SEQ ID NO: 157735 - DNA, 25 bp, Probe Sequence
aaaaactgccagaagagccagctct

SEQ ID NO: 157736 - DNA, 25 bp, Probe Sequence
aaaaactgcccaaggatctctctca

SEQ ID NO: 157737 - DNA, 25 bp, Probe Sequence
aaaacactacacagggctgctgtca

SEQ ID NO: 157738 - DNA, 25 bp, Probe Sequence
aaaaacatacacaatgtgtctttct

SEQ ID NO: 157739 - DNA, 25 bp, Probe Sequence
aaacaggcccacaaattctgatact

SEQ ID NO: 157740 - DNA, 25 bp, Probe Sequence
aaaaatgcggactgatgttagactt

SEQ ID NO: 157741 - DNA, 25 bp, Probe Sequence
aaaacatcttactgatgcttacttc

SEQ ID NO: 157742 - DNA, 25 bp, Probe Sequence
aaaaatcttcacttggtttcagcca

SEQ ID NO: 157743 - DNA, 25 bp, Probe Sequence
aaaaattcttttctctacagcaaat

SEQ ID NO: 157744 - DNA, 25 bp, Probe Sequence
aaaaattcttttctctacagcaaat

SEQ ID NO: 157745 - DNA, 25 bp, Probe Sequence
aaacagattctgattcccttcaaaa

SEQ ID NO: 157746 - DNA, 25 bp, Probe Sequence
aaacagattttgtttctcgcacaaa

SEQ ID NO: 157747 - DNA, 25 bp, Probe Sequence
aaacagattttgtttctcgcacaaa

SEQ ID NO: 157748 - DNA, 25 bp, Probe Sequence
aaacagtcttgtagttcctcaaaca

SEQ ID NO: 157749 - DNA, 25 bp, Probe Sequence
aaacatgtcatgtaggttgtctaaa

SEQ ID NO: 157750 - DNA, 25 bp, Probe Sequence
aaacagtgcaacagtcttctgattg

SEQ ID NO: 157751 - DNA, 25 bp, Probe Sequence
aaacagcacaaaagcactttgagtg

SEQ ID NO: 157752 - DNA, 25 bp, Probe Sequence
aaaaatcacattctctgttcagctg

SEQ ID NO: 157753 - DNA, 25 bp, Probe Sequence
aaacagtacttccttgactcacatg

SEQ ID NO: 157754 - DNA, 25 bp, Probe Sequence
aaacagtacttccttgactcacatg

SEQ ID NO: 157755 - DNA, 25 bp, Probe Sequence
aaacatgcttctttattactctgct

SEQ ID NO: 157756 - DNA, 25 bp, Probe Sequence
aaacatgttgctttgctttcttgtg

SEQ ID NO: 157757 - DNA, 25 bp, Probe Sequence
aaacacattctgagctatgctttgt

SEQ ID NO: 157758 - DNA, 25 bp, Probe Sequence
aaacagatttctgctcacttcatgg

SEQ ID NO: 157759 - DNA, 25 bp, Probe Sequence
aaacagacttcaaccacacacatgg

SEQ ID NO: 157760 - DNA, 25 bp, Probe Sequence
aaacaatataaagctgcagaacagt

SEQ ID NO: 157761 - DNA, 25 bp, Probe Sequence
aaaaatctacatgcctaaatacttt

SEQ ID NO: 157762 - DNA, 25 bp, Probe Sequence
aaaacctgacggctatgattactat

SEQ ID NO: 157763 - DNA, 25 bp, Probe Sequence
aaaaccgttggctctgattcagatt

SEQ ID NO: 157764 - DNA, 25 bp, Probe Sequence
aaaatccagtttcattgatctcctt

SEQ ID NO: 157765 - DNA, 25 bp, Probe Sequence
aaaaccagtgttcatgtatacatgt

SEQ ID NO: 157766 - DNA, 25 bp, Probe Sequence
aaaacacagtgtattctagatcatc

SEQ ID NO: 157767 - DNA, 25 bp, Probe Sequence
aaacacagactgtattctttatgat

SEQ ID NO: 157768 - DNA, 25 bp, Probe Sequence
aaaaagcctgcattgtgtattaaac

SEQ ID NO: 157769 - DNA, 25 bp, Probe Sequence
aaaaccagccaacctatgttacacg

SEQ ID NO: 157770 - DNA, 25 bp, Probe Sequence
aaaaatcccagccctagtagcaatt

SEQ ID NO: 157771 - DNA, 25 bp, Probe Sequence
aaaactcaaccacctctgatgaaga

SEQ ID NO: 157772 - DNA, 25 bp, Probe Sequence
aacaaccgacactcctacaagattt

SEQ ID NO: 157773 - DNA, 25 bp, Probe Sequence
aaaagccagaaagcctactagacaa

SEQ ID NO: 157774 - DNA, 25 bp, Probe Sequence
aaaatccagcatccattcctaataa

SEQ ID NO: 157775 - DNA, 25 bp, Probe Sequence
aaaacatccttcaccatgcaattaa

SEQ ID NO: 157776 - DNA, 25 bp, Probe Sequence
aacaaccaccacaacttgaatttgt

SEQ ID NO: 157777 - DNA, 25 bp, Probe Sequence
aaaagccatccacaagtcatacctg

SEQ ID NO: 157778 - DNA, 25 bp, Probe Sequence
aagaacgtccgccagaggaactctt

SEQ ID NO: 157779 - DNA, 25 bp, Probe Sequence
aaaatactcagtgcagggaactctt

SEQ ID NO: 157780 - DNA, 25 bp, Probe Sequence
aaacaggctcaggccaaagacctcc

SEQ ID NO: 157781 - DNA, 25 bp, Probe Sequence
aaacagatgccagtgcacaaatctt

SEQ ID NO: 157782 - DNA, 25 bp, Probe Sequence
aaacagttgcattcacaatattatt

SEQ ID NO: 157783 - DNA, 25 bp, Probe Sequence
aaacagcctgctacagacgttcttt

SEQ ID NO: 157784 - DNA, 25 bp, Probe Sequence
caaattccagccaaacgttccttgt

SEQ ID NO: 157785 - DNA, 25 bp, Probe Sequence
aagactccaccaagaacgtccttag

SEQ ID NO: 157786 - DNA, 25 bp, Probe Sequence
aataatccgccagaacgaccagaaa

SEQ ID NO: 157787 - DNA, 25 bp, Probe Sequence
aaaaagctggcagccacgttcaaaa

SEQ ID NO: 157788 - DNA, 25 bp, Probe Sequence
aaaaatgctgacaatccagagttaa

SEQ ID NO: 157789 - DNA, 25 bp, Probe Sequence
aaaatcagctgggcatcctggtgca

SEQ ID NO: 157790 - DNA, 25 bp, Probe Sequence
aaaagccatgattgtcctggtgcag

SEQ ID NO: 157791 - DNA, 25 bp, Probe Sequence
aaaagccagattcctcagcagatga

SEQ ID NO: 157792 - DNA, 25 bp, Probe Sequence
aaaagaatgaatcccaacagtccct

SEQ ID NO: 157793 - DNA, 25 bp, Probe Sequence
aacaagaatgaaagctcaaaaccca

SEQ ID NO: 157794 - DNA, 25 bp, Probe Sequence
aacaagcaagaagaccatttgacca

SEQ ID NO: 157795 - DNA, 25 bp, Probe Sequence
aaaaaagccatggacttctatgatc

SEQ ID NO: 157796 - DNA, 25 bp, Probe Sequence
aaaaaactcctgtcttgctagacaa

SEQ ID NO: 157797 - DNA, 25 bp, Probe Sequence
aaaaactcctgtcttgctagacaag

SEQ ID NO: 157798 - DNA, 25 bp, Probe Sequence
aaaaattacattcttctgatgtaac

SEQ ID NO: 157799 - DNA, 25 bp, Probe Sequence
aaaacatttgttgttctgttaactg

SEQ ID NO: 157800 - DNA, 25 bp, Probe Sequence
aaaacatttgttgttctgttaactg

SEQ ID NO: 157801 - DNA, 25 bp, Probe Sequence
aaaatgattagtgtactgtttgaaa

SEQ ID NO: 157802 - DNA, 25 bp, Probe Sequence
aaaatgatataaaatccttttggtg

SEQ ID NO: 157803 - DNA, 25 bp, Probe Sequence
aaaaaattaaatactgtctgtgaga

SEQ ID NO: 157804 - DNA, 25 bp, Probe Sequence
aaacaatattaaaccgcccaagcag

SEQ ID NO: 157805 - DNA, 25 bp, Probe Sequence
aaaacatttgaagcgcccgagggca

SEQ ID NO: 157806 - DNA, 25 bp, Probe Sequence
aaaaatcactgaaacccaagaggca

SEQ ID NO: 157807 - DNA, 25 bp, Probe Sequence
aaaaatcactgaaacccaagaggca

SEQ ID NO: 157808 - DNA, 25 bp, Probe Sequence
aaaacaaccatgcacacaaaggaga

SEQ ID NO: 157809 - DNA, 25 bp, Probe Sequence
aaacaaacctgatgaaacagatgaa

SEQ ID NO: 157810 - DNA, 25 bp, Probe Sequence
aaacaaccaccatgtcgagcaaaaa

SEQ ID NO: 157811 - DNA, 25 bp, Probe Sequence
aaaaagcctccatcttggcaagata

SEQ ID NO: 157812 - DNA, 25 bp, Probe Sequence
aaaaagccctgttcttcagaaggtg

SEQ ID NO: 157813 - DNA, 25 bp, Probe Sequence
aaaaagttctgcatcttataatggt

SEQ ID NO: 157814 - DNA, 25 bp, Probe Sequence
aaaaatttgctgaatgcttgctacg

SEQ ID NO: 157815 - DNA, 25 bp, Probe Sequence
aaacaatgcttgtatatgcttgaac

SEQ ID NO: 157816 - DNA, 25 bp, Probe Sequence
aaacacatttaattgctgtcagatt

SEQ ID NO: 157817 - DNA, 25 bp, Probe Sequence
aaacacatttaattgctgtcagatt

SEQ ID NO: 157818 - DNA, 25 bp, Probe Sequence
aacacactgcataaatttgcctggt

SEQ ID NO: 157819 - DNA, 25 bp, Probe Sequence
aaacagcagctaattctggcccgtg

SEQ ID NO: 157820 - DNA, 25 bp, Probe Sequence
aaaagcagctaactggccaggcgtg

SEQ ID NO: 157821 - DNA, 25 bp, Probe Sequence
aaaagctgttacccgagatggtgag

SEQ ID NO: 157822 - DNA, 25 bp, Probe Sequence
aaaagctgttaccggctgtgtgctg

SEQ ID NO: 157823 - DNA, 25 bp, Probe Sequence
aaaactgtctttgggcagtgagtaa

SEQ ID NO: 157824 - DNA, 25 bp, Probe Sequence
aaaagagtttgcaggtgtggaaagg

SEQ ID NO: 157825 - DNA, 25 bp, Probe Sequence
aaaagaggctccgggttgacaaatg

SEQ ID NO: 157826 - DNA, 25 bp, Probe Sequence
aaaaatggcatcacctgtcaaaaat

SEQ ID NO: 157827 - DNA, 25 bp, Probe Sequence
aaaacaggcatcaccctcaagagct

SEQ ID NO: 157828 - DNA, 25 bp, Probe Sequence
aaaaaggctacctaccacgtgctat

SEQ ID NO: 157829 - DNA, 25 bp, Probe Sequence
aaaaatggcgaccaagacaccttga

SEQ ID NO: 157830 - DNA, 25 bp, Probe Sequence
aaaaatggagcagtaatgcagcatc

SEQ ID NO: 157831 - DNA, 25 bp, Probe Sequence
aaaaaggagacttcatgtgccccca

SEQ ID NO: 157832 - DNA, 25 bp, Probe Sequence
aaaaggtgatccaagcaggcccctt

SEQ ID NO: 157833 - DNA, 25 bp, Probe Sequence
aaaaggtgtccagtgcaagccaagt

SEQ ID NO: 157834 - DNA, 25 bp, Probe Sequence
aaaatgttgttcttcaaccagcaac

SEQ ID NO: 157835 - DNA, 25 bp, Probe Sequence
aaacaactctatgtgcaaccacctc

SEQ ID NO: 157836 - DNA, 25 bp, Probe Sequence
aaacacctttgatgaacgagcccac

SEQ ID NO: 157837 - DNA, 25 bp, Probe Sequence
aacaaggttaaagccgagccagcca

SEQ ID NO: 157838 - DNA, 25 bp, Probe Sequence
aacaaggaatgagacccccaatgcc

SEQ ID NO: 157839 - DNA, 25 bp, Probe Sequence
aaaaggaagagctgctccctgcaca

SEQ ID NO: 157840 - DNA, 25 bp, Probe Sequence
aaaagtaaatgttctctttgccatt

SEQ ID NO: 157841 - DNA, 25 bp, Probe Sequence
aaaaatacaatttctcactttgcat

SEQ ID NO: 157842 - DNA, 25 bp, Probe Sequence
aaaaaattattatcagaatctgcac

SEQ ID NO: 157843 - DNA, 25 bp, Probe Sequence
aaacaaactttcagatcaatcagct

SEQ ID NO: 157844 - DNA, 25 bp, Probe Sequence
aaacaatcgtttttgagcagatagc

SEQ ID NO: 157845 - DNA, 25 bp, Probe Sequence
aaacaatcgtttttgagcagatagc

SEQ ID NO: 157846 - DNA, 25 bp, Probe Sequence
aaacactgctgttctttaaatgcgt

SEQ ID NO: 157847 - DNA, 25 bp, Probe Sequence
aaacactctattttacaaggctgta

SEQ ID NO: 157848 - DNA, 25 bp, Probe Sequence
aaacacattttgtaactggtataag

SEQ ID NO: 157849 - DNA, 25 bp, Probe Sequence
aaacacatctagtataactgaataa

SEQ ID NO: 157850 - DNA, 25 bp, Probe Sequence
aaacacacttgttacctatgatatg

SEQ ID NO: 157851 - DNA, 25 bp, Probe Sequence
aaacacgctagtgaccattaggcct

SEQ ID NO: 157852 - DNA, 25 bp, Probe Sequence
aaaagtgctatgagacccaacctct

SEQ ID NO: 157853 - DNA, 25 bp, Probe Sequence
aaaactctaattgtccattcttgct

SEQ ID NO: 157854 - DNA, 25 bp, Probe Sequence
aaaaccttatttcacattccacatc

SEQ ID NO: 157855 - DNA, 25 bp, Probe Sequence
aaaaccttgtttcactgtcacatat

SEQ ID NO: 157856 - DNA, 25 bp, Probe Sequence
aaaagccttatagtaactgtgtaat

SEQ ID NO: 157857 - DNA, 25 bp, Probe Sequence
aaaacttgtattcataatgtgtata

SEQ ID NO: 157858 - DNA, 25 bp, Probe Sequence
aaaacatatgtagagaaatgcttta

SEQ ID NO: 157859 - DNA, 25 bp, Probe Sequence
aaacaattctgagaggaaatgtata

SEQ ID NO: 157860 - DNA, 25 bp, Probe Sequence
aaacaatggctgtaagtatttgaaa

SEQ ID NO: 157861 - DNA, 25 bp, Probe Sequence
aaacaatcttgggaaacattgaaca

SEQ ID NO: 157862 - DNA, 25 bp, Probe Sequence
aaacaagccaatgcaaacaggcaaa

SEQ ID NO: 157863 - DNA, 25 bp, Probe Sequence
aaaatgaggcagtgaccgaggaatt

SEQ ID NO: 157864 - DNA, 25 bp, Probe Sequence
aaaagaatggtatccttgagaatct

SEQ ID NO: 157865 - DNA, 25 bp, Probe Sequence
aaaaatttgatagccatggggatat

SEQ ID NO: 157866 - DNA, 25 bp, Probe Sequence
aaacaatctgtatcggctgggcgca

SEQ ID NO: 157867 - DNA, 25 bp, Probe Sequence
aaaacatggtcattctgatctgggg

SEQ ID NO: 157868 - DNA, 25 bp, Probe Sequence
aaacacatttcatatactgcaggta

SEQ ID NO: 157869 - DNA, 25 bp, Probe Sequence
aaaaatgtacagatgactcagtgaa

SEQ ID NO: 157870 - DNA, 25 bp, Probe Sequence
aaaaagtcaggaaagtcagagaatc

SEQ ID NO: 157871 - DNA, 25 bp, Probe Sequence
aaaaatgacaagtatatggggcaat

SEQ ID NO: 157872 - DNA, 25 bp, Probe Sequence
aaaaatcaagcctttggagccacag

SEQ ID NO: 157873 - DNA, 25 bp, Probe Sequence
aaaagactcaaggtgggagccaaga

SEQ ID NO: 157874 - DNA, 25 bp, Probe Sequence
aaaagcccaaggggaagcaatgcaa

SEQ ID NO: 157875 - DNA, 25 bp, Probe Sequence
aaaactccaggcatcgaaaacaaga

SEQ ID NO: 157876 - DNA, 25 bp, Probe Sequence
aaaacaccagtatagaatagacagg

SEQ ID NO: 157877 - DNA, 25 bp, Probe Sequence
aaaataccatttgagagaaacacca

SEQ ID NO: 157878 - DNA, 25 bp, Probe Sequence
aaaagacttttccagagatcatcga

SEQ ID NO: 157879 - DNA, 25 bp, Probe Sequence
aaaagatcactatttgaggtacaat

SEQ ID NO: 157880 - DNA, 25 bp, Probe Sequence
aaaaatcaccacatgcttggaccat

SEQ ID NO: 157881 - DNA, 25 bp, Probe Sequence
aataacaaccacacattgggccagg

SEQ ID NO: 157882 - DNA, 25 bp, Probe Sequence
aaaacaatgcctgccttttgccagg

SEQ ID NO: 157883 - DNA, 25 bp, Probe Sequence
aaaatcaccacggtctttagccatg

SEQ ID NO: 157884 - DNA, 25 bp, Probe Sequence
aaaatcaccacggtctttagccatg

SEQ ID NO: 157885 - DNA, 25 bp, Probe Sequence
aaaagcacccacgcattatcagagg

SEQ ID NO: 157886 - DNA, 25 bp, Probe Sequence
aaaacactcacacacactacaagag

SEQ ID NO: 157887 - DNA, 25 bp, Probe Sequence
aaacaattgaacccatgtacataga

SEQ ID NO: 157888 - DNA, 25 bp, Probe Sequence
aaaaattgttgccgatgtctatatc

SEQ ID NO: 157889 - DNA, 25 bp, Probe Sequence
aaaaattcttgcatatattatcatc

SEQ ID NO: 157890 - DNA, 25 bp, Probe Sequence
aaaacttctcagatcaatcgtgcat

SEQ ID NO: 157891 - DNA, 25 bp, Probe Sequence
aaaacctttctttcatggatgctat

SEQ ID NO: 157892 - DNA, 25 bp, Probe Sequence
aaaaccaactgcatcttgttctgtg

SEQ ID NO: 157893 - DNA, 25 bp, Probe Sequence
aaaaagcaagtcatagcagttcagt

SEQ ID NO: 157894 - DNA, 25 bp, Probe Sequence
aaaaagctgggcacaagttcatatg

SEQ ID NO: 157895 - DNA, 25 bp, Probe Sequence
aaaacagctgggagcagtgggagct

SEQ ID NO: 157896 - DNA, 25 bp, Probe Sequence
aaaaccatgggttctgggtatgcat

SEQ ID NO: 157897 - DNA, 25 bp, Probe Sequence
aaaactcagggatttggttctcatc

SEQ ID NO: 157898 - DNA, 25 bp, Probe Sequence
aaaacgggagtttggcctctcatct

SEQ ID NO: 157899 - DNA, 25 bp, Probe Sequence
aaaaacggagtttggcctctcatct

SEQ ID NO: 157900 - DNA, 25 bp, Probe Sequence
aaaatatctaggtttgtcctcattt

SEQ ID NO: 157901 - DNA, 25 bp, Probe Sequence
aaaattcttaggcttctctttgcga

SEQ ID NO: 157902 - DNA, 25 bp, Probe Sequence
aaaacactcttacatattccttgga

SEQ ID NO: 157903 - DNA, 25 bp, Probe Sequence
aaaagaccttgacatattcctgaga

SEQ ID NO: 157904 - DNA, 25 bp, Probe Sequence
aaaaacctgtatatcatctccgtga

SEQ ID NO: 157905 - DNA, 25 bp, Probe Sequence
aaaatcacctgttatctactcccag

SEQ ID NO: 157906 - DNA, 25 bp, Probe Sequence
aaaaagcctgtatttaactcatatg

SEQ ID NO: 157907 - DNA, 25 bp, Probe Sequence
aaaaagcctgtatttaactcatatg

SEQ ID NO: 157908 - DNA, 25 bp, Probe Sequence
aaaagtccttgatttagcactattt

SEQ ID NO: 157909 - DNA, 25 bp, Probe Sequence
aaaatggcagcctcttagtgctatt

SEQ ID NO: 157910 - DNA, 25 bp, Probe Sequence
aaaaatggcagcctcttagtgctat

SEQ ID NO: 157911 - DNA, 25 bp, Probe Sequence
aaaagtgcccagagcatagatgcat

SEQ ID NO: 157912 - DNA, 25 bp, Probe Sequence
aaaaggcactgctaagacattcaag

SEQ ID NO: 157913 - DNA, 25 bp, Probe Sequence
aacaaggcactatacatttttgggg

SEQ ID NO: 157914 - DNA, 25 bp, Probe Sequence
aaaacgactaattcatcttttcctg

SEQ ID NO: 157915 - DNA, 25 bp, Probe Sequence
aacaaggactaatccaatacctctt

SEQ ID NO: 157916 - DNA, 25 bp, Probe Sequence
aaaaggagcttttgccactgactcg

SEQ ID NO: 157917 - DNA, 25 bp, Probe Sequence
aaaatgaagcctaagccctggtcta

SEQ ID NO: 157918 - DNA, 25 bp, Probe Sequence
aaaagaatgcctatgcccttctgag

SEQ ID NO: 157919 - DNA, 25 bp, Probe Sequence
aaaaaatggtgttgccgcgccatct

SEQ ID NO: 157920 - DNA, 25 bp, Probe Sequence
aaaaagattggttgcctctgccttt

SEQ ID NO: 157921 - DNA, 25 bp, Probe Sequence
aaaacagattcttacgtctcttact

SEQ ID NO: 157922 - DNA, 25 bp, Probe Sequence
aaaaaattatagtttctctggcctg

SEQ ID NO: 157923 - DNA, 25 bp, Probe Sequence
aaaaaatcttagccaatccgcacct

SEQ ID NO: 157924 - DNA, 25 bp, Probe Sequence
aaaaaatcttagccaatccgcacct

SEQ ID NO: 157925 - DNA, 25 bp, Probe Sequence
aaaactacttcagaatccagcagct

SEQ ID NO: 157926 - DNA, 25 bp, Probe Sequence
aaaacaactcccattctcagagcat

SEQ ID NO: 157927 - DNA, 25 bp, Probe Sequence
aacaaaagcatgtcctttccaactg

SEQ ID NO: 157928 - DNA, 25 bp, Probe Sequence
aacaaaagcatgtcctttccaactg

SEQ ID NO: 157929 - DNA, 25 bp, Probe Sequence
aaaatatgaacaccttacaccctgt

SEQ ID NO: 157930 - DNA, 25 bp, Probe Sequence
aaaaaacaactgttgacaccttgct

SEQ ID NO: 157931 - DNA, 25 bp, Probe Sequence
aaaaaaatacgatcactcagtgtgt

SEQ ID NO: 157932 - DNA, 25 bp, Probe Sequence
aaaacaacatagaaacaccatcaga

SEQ ID NO: 157933 - DNA, 25 bp, Probe Sequence
aaaaagcctcagtgacccatgagaa

SEQ ID NO: 157934 - DNA, 25 bp, Probe Sequence
aaaacagaccacttgactctctgta

SEQ ID NO: 157935 - DNA, 25 bp, Probe Sequence
aaaaccattctgatatctgctcatg

SEQ ID NO: 157936 - DNA, 25 bp, Probe Sequence
aaaactcatacgtgattgcagccgg

SEQ ID NO: 157937 - DNA, 25 bp, Probe Sequence
aaaaattacagtggttgatgcctta

SEQ ID NO: 157938 - DNA, 25 bp, Probe Sequence
aaaacttaagtgcttcatgcctctc

SEQ ID NO: 157939 - DNA, 25 bp, Probe Sequence
aaaacttacctcattagcagcatcc

SEQ ID NO: 157940 - DNA, 25 bp, Probe Sequence
aaaaacatacttacatttcagacat

SEQ ID NO: 157941 - DNA, 25 bp, Probe Sequence
aaaaatctatctgaatttggaattc

SEQ ID NO: 157942 - DNA, 25 bp, Probe Sequence
aaaaatcgctctccgatcttgtaat

SEQ ID NO: 157943 - DNA, 25 bp, Probe Sequence
aaaagatcgcgccggattattgctg

SEQ ID NO: 157944 - DNA, 25 bp, Probe Sequence
aaaatctcgagaaggtccaggctga

SEQ ID NO: 157945 - DNA, 25 bp, Probe Sequence
aaaacactgtgacgagttcagtgct

SEQ ID NO: 157946 - DNA, 25 bp, Probe Sequence
aaaacaggtgcacgaggccttcggt

SEQ ID NO: 157947 - DNA, 25 bp, Probe Sequence
aaaatcagtgtctggggcttggcca

SEQ ID NO: 157948 - DNA, 25 bp, Probe Sequence
aaaagcgtgatcttgctgggtcggc

SEQ ID NO: 157949 - DNA, 25 bp, Probe Sequence
aaaacgttaccaatgtgtgcagcct

SEQ ID NO: 157950 - DNA, 25 bp, Probe Sequence
aaaaagggatccagtgcgcagcaca

SEQ ID NO: 157951 - DNA, 25 bp, Probe Sequence
aaaaagggcatctgttcagctccat

SEQ ID NO: 157952 - DNA, 25 bp, Probe Sequence
aaaagagtacaatattcatgtccta

SEQ ID NO: 157953 - DNA, 25 bp, Probe Sequence
aaaaattatagtttctctggcctga

SEQ ID NO: 157954 - DNA, 25 bp, Probe Sequence
aaaactctcattatttgtgtggcta

SEQ ID NO: 157955 - DNA, 25 bp, Probe Sequence
aaaaaactcttctattggtggatga

SEQ ID NO: 157956 - DNA, 25 bp, Probe Sequence
aaaaaacttgtgtacatgtgtttgg

SEQ ID NO: 157957 - DNA, 25 bp, Probe Sequence
aaaacataattttaatggctatatt

SEQ ID NO: 157958 - DNA, 25 bp, Probe Sequence
aaaacaacattgctacacatgctaa

SEQ ID NO: 157959 - DNA, 25 bp, Probe Sequence
aaaacagatattgtaccatgtacct

SEQ ID NO: 157960 - DNA, 25 bp, Probe Sequence
aaaaagcttttcaacatcattattt

SEQ ID NO: 157961 - DNA, 25 bp, Probe Sequence
aaaaactcttgtattactatgtgat

SEQ ID NO: 157962 - DNA, 25 bp, Probe Sequence
aaaaacccttgattatactctgttg

SEQ ID NO: 157963 - DNA, 25 bp, Probe Sequence
aaaaacctttgcatatgagctgcag

SEQ ID NO: 157964 - DNA, 25 bp, Probe Sequence
aaaaagccatgattgtcctggtgca

SEQ ID NO: 157965 - DNA, 25 bp, Probe Sequence
aaaagcagcgattcttcctttcaga

SEQ ID NO: 157966 - DNA, 25 bp, Probe Sequence
aaaacaggatcatatactgtatata

SEQ ID NO: 157967 - DNA, 25 bp, Probe Sequence
aaaaatggtatgtacagccaaatat

SEQ ID NO: 157968 - DNA, 25 bp, Probe Sequence
aaaaatgagcatcaacaacatagtt

SEQ ID NO: 157969 - DNA, 25 bp, Probe Sequence
aaaaatgtcatctcaagtcaagtca

SEQ ID NO: 157970 - DNA, 25 bp, Probe Sequence
aaaaaggccaggtgctatagctcac

SEQ ID NO: 157971 - DNA, 25 bp, Probe Sequence
aaaaagctccagcccagaaagcacc

SEQ ID NO: 157972 - DNA, 25 bp, Probe Sequence
aaaaagctccagcccagaaagcacc

SEQ ID NO: 157973 - DNA, 25 bp, Probe Sequence
aaaagcctccaagaatgaatgactc

SEQ ID NO: 157974 - DNA, 25 bp, Probe Sequence
aaaactgtcaaacactgtcgacttt

SEQ ID NO: 157975 - DNA, 25 bp, Probe Sequence
aaaattgtccattacacttcgtttg

SEQ ID NO: 157976 - DNA, 25 bp, Probe Sequence
aaaaatgtccattgaaccctgcttc

SEQ ID NO: 157977 - DNA, 25 bp, Probe Sequence
aaaaatggtcttcacgcttgcttcc

SEQ ID NO: 157978 - DNA, 25 bp, Probe Sequence
aaaatggtggtttatccttgtatct

SEQ ID NO: 157979 - DNA, 25 bp, Probe Sequence
aacaaagttgttgagccttgcttct

SEQ ID NO: 157980 - DNA, 25 bp, Probe Sequence
aaaagttttcttatcttctgtgctt

SEQ ID NO: 157981 - DNA, 25 bp, Probe Sequence
aacaatgttttatgtactccttttg

SEQ ID NO: 157982 - DNA, 25 bp, Probe Sequence
aaaattatttaagcaggccctgaag

SEQ ID NO: 157983 - DNA, 25 bp, Probe Sequence
aaaatatttactgtagtccaataag

SEQ ID NO: 157984 - DNA, 25 bp, Probe Sequence
aaaacattctcggcagtgactccaa

SEQ ID NO: 157985 - DNA, 25 bp, Probe Sequence
aaaagagcatcactgccagctagcc

SEQ ID NO: 157986 - DNA, 25 bp, Probe Sequence
aaaacacacagtacagacagcatgg

SEQ ID NO: 157987 - DNA, 25 bp, Probe Sequence
aaaacagcagatatcaatctcgctt

SEQ ID NO: 157988 - DNA, 25 bp, Probe Sequence
aaaaaatcatttcatctctgtctgc

SEQ ID NO: 157989 - DNA, 25 bp, Probe Sequence
aaaaacgatacgccatctgttctgc

SEQ ID NO: 157990 - DNA, 25 bp, Probe Sequence
aaaaatccttctaatctgctatgct

SEQ ID NO: 157991 - DNA, 25 bp, Probe Sequence
aaaattgctattaaactcctgctta

SEQ ID NO: 157992 - DNA, 25 bp, Probe Sequence
aaaatgattgactatgcccatccct

SEQ ID NO: 157993 - DNA, 25 bp, Probe Sequence
aaaatgcctgacaactgcacttcca

SEQ ID NO: 157994 - DNA, 25 bp, Probe Sequence
aaaaacatgatcaagtccttctata

SEQ ID NO: 157995 - DNA, 25 bp, Probe Sequence
aaaagcacttcatgtctctatcttg

SEQ ID NO: 157996 - DNA, 25 bp, Probe Sequence
aaaagcactacaggcccatgaatta

SEQ ID NO: 157997 - DNA, 25 bp, Probe Sequence
aaaaccaagctggcccaagtgtcct

SEQ ID NO: 157998 - DNA, 25 bp, Probe Sequence
aaaacataaccagccattggctatt

SEQ ID NO: 157999 - DNA, 25 bp, Probe Sequence
aaaaaatagccagccctggtggcat

SEQ ID NO: 158000 - DNA, 25 bp, Probe Sequence
aacaaaaggacaaccacagagggat

SEQ ID NO: 158001 - DNA, 25 bp, Probe Sequence
aaaaagactgtcaaccaggtgtggt

SEQ ID NO: 158002 - DNA, 25 bp, Probe Sequence
aaaaagatcttcagccaggcctttc

SEQ ID NO: 158003 - DNA, 25 bp, Probe Sequence
aaaaatgtctagtgccagtcctttg

SEQ ID NO: 158004 - DNA, 25 bp, Probe Sequence
aaaattttaggcgcagctctcacct

SEQ ID NO: 158005 - DNA, 25 bp, Probe Sequence
aaaatattttgggtgatactttcat

SEQ ID NO: 158006 - DNA, 25 bp, Probe Sequence
aaaatttcattcacgaatctcttat

SEQ ID NO: 158007 - DNA, 25 bp, Probe Sequence
aaaacatttgtcatgggattaattc

SEQ ID NO: 158008 - DNA, 25 bp, Probe Sequence
aaaatcattttcgtgctttcaaatt

SEQ ID NO: 158009 - DNA, 25 bp, Probe Sequence
aaaacgtttaacaattggcatatat

SEQ ID NO: 158010 - DNA, 25 bp, Probe Sequence
aaaacagtctattcggtaagcaaca

SEQ ID NO: 158011 - DNA, 25 bp, Probe Sequence
aaaacaatcttgtcatacttgaaaa

SEQ ID NO: 158012 - DNA, 25 bp, Probe Sequence
aaaacaatcttgtcatacttgaaaa

SEQ ID NO: 158013 - DNA, 25 bp, Probe Sequence
aaaactgacatttactcttgacaaa

SEQ ID NO: 158014 - DNA, 25 bp, Probe Sequence
aaaactgacatttactcttgacaaa

SEQ ID NO: 158015 - DNA, 25 bp, Probe Sequence
aaaactgaattcaaatcataggaaa

SEQ ID NO: 158016 - DNA, 25 bp, Probe Sequence
aaaagtagcttgctgtcaaagaaac

SEQ ID NO: 158017 - DNA, 25 bp, Probe Sequence
aaaatgctagtataaacaaacaaat

SEQ ID NO: 158018 - DNA, 25 bp, Probe Sequence
aaaactggctgatgaggaaatgaca

SEQ ID NO: 158019 - DNA, 25 bp, Probe Sequence
aaaattgagccttgggacgtgccca

SEQ ID NO: 158020 - DNA, 25 bp, Probe Sequence
aaaatctggcttgttacaggcgaga

SEQ ID NO: 158021 - DNA, 25 bp, Probe Sequence
aaaactacttaattcctgtgggcag

SEQ ID NO: 158022 - DNA, 25 bp, Probe Sequence
aaaatctctttttttctggaggctg

SEQ ID NO: 158023 - DNA, 25 bp, Probe Sequence
aaaaccgcattttatttagcagagt

SEQ ID NO: 158024 - DNA, 25 bp, Probe Sequence
aaaacggtattaattcttggatgat

SEQ ID NO: 158025 - DNA, 25 bp, Probe Sequence
aaaatctggtagagctctttggcaa

SEQ ID NO: 158026 - DNA, 25 bp, Probe Sequence
aaaattttgtgactccttcaggaag

SEQ ID NO: 158027 - DNA, 25 bp, Probe Sequence
aaaatattctctttcaaatcaagaa

SEQ ID NO: 158028 - DNA, 25 bp, Probe Sequence
aaaatgtgtactttccaggataaat

SEQ ID NO: 158029 - DNA, 25 bp, Probe Sequence
aaaattgtagtagcgatggccaaag

SEQ ID NO: 158030 - DNA, 25 bp, Probe Sequence
aaaagatgtaaattggcaaccacaa

SEQ ID NO: 158031 - DNA, 25 bp, Probe Sequence
aaaagtgtatgtatggatactcaga

SEQ ID NO: 158032 - DNA, 25 bp, Probe Sequence
aaaagtttgatatcagtgcactgaa

SEQ ID NO: 158033 - DNA, 25 bp, Probe Sequence
aaaagttcgttatggactgatccct

SEQ ID NO: 158034 - DNA, 25 bp, Probe Sequence
aaaagttacttaggcagtgctgtcc

SEQ ID NO: 158035 - DNA, 25 bp, Probe Sequence
aaaagtgctcctgaaggaagtgcca

SEQ ID NO: 158036 - DNA, 25 bp, Probe Sequence
aaaaggacacagaccaggacggccg

SEQ ID NO: 158037 - DNA, 25 bp, Probe Sequence
aaaaagcacaagaagcgtgagacgc

SEQ ID NO: 158038 - DNA, 25 bp, Probe Sequence
aaaaacaatcaggtggtgcaggcca

SEQ ID NO: 158039 - DNA, 25 bp, Probe Sequence
aaaaacagaagggatgtgcagggtg

SEQ ID NO: 158040 - DNA, 25 bp, Probe Sequence
aaaaacgagggctacatgcgccgcg

SEQ ID NO: 158041 - DNA, 25 bp, Probe Sequence
aaaaacgtgctgaagatccgccggc

SEQ ID NO: 158042 - DNA, 25 bp, Probe Sequence
aaaagacaagcgaaacctgccgcag

SEQ ID NO: 158043 - DNA, 25 bp, Probe Sequence
aaaaacaatctgtatcggctgggcg

SEQ ID NO: 158044 - DNA, 25 bp, Probe Sequence
aaaacagacctttctcagctggctg

SEQ ID NO: 158045 - DNA, 25 bp, Probe Sequence
aaaaccacctggtctgcatgtatgc

SEQ ID NO: 158046 - DNA, 25 bp, Probe Sequence
aaaaacctgctgttctcagtgcact

SEQ ID NO: 158047 - DNA, 25 bp, Probe Sequence
aaaactcctgtcttgctagacaagg

SEQ ID NO: 158048 - DNA, 25 bp, Probe Sequence
aaaactgcttctctgctctgagaag

SEQ ID NO: 158049 - DNA, 25 bp, Probe Sequence
aaaactcttctattggtggatgaga

SEQ ID NO: 158050 - DNA, 25 bp, Probe Sequence
aaaagataatcaagtgtgggagagg

SEQ ID NO: 158051 - DNA, 25 bp, Probe Sequence
aaaaacctagagctgggcatgatgg

SEQ ID NO: 158052 - DNA, 25 bp, Probe Sequence
aaaaaaatgaggctgggcgtggtgg

SEQ ID NO: 158053 - DNA, 25 bp, Probe Sequence
aaaattacggtgattggccaggtgc

SEQ ID NO: 158054 - DNA, 25 bp, Probe Sequence
aacaattacttacctggcccaggag

SEQ ID NO: 158055 - DNA, 25 bp, Probe Sequence
aacacaatccattacacggttcggg

SEQ ID NO: 158056 - DNA, 25 bp, Probe Sequence
aactaaccaaacaggtgcggtgtgc

SEQ ID NO: 158057 - DNA, 25 bp, Probe Sequence
aacttcaagcactccaggggttgtg

SEQ ID NO: 158058 - DNA, 25 bp, Probe Sequence
aacttccaccgatgaggcaggtagg

SEQ ID NO: 158059 - DNA, 25 bp, Probe Sequence
aactaccgcctgcatgtggatggtg

SEQ ID NO: 158060 - DNA, 25 bp, Probe Sequence
aacttcggggcagtgggcatggtgt

SEQ ID NO: 158061 - DNA, 25 bp, Probe Sequence
aacttcggggcagtgggcatggtgt

SEQ ID NO: 158062 - DNA, 25 bp, Probe Sequence
aacacatgcggaccaagaggggctt

SEQ ID NO: 158063 - DNA, 25 bp, Probe Sequence
aacagatctggagaatcgaaggttc

SEQ ID NO: 158064 - DNA, 25 bp, Probe Sequence
aaaatattaggtaggtatggttgca

SEQ ID NO: 158065 - DNA, 25 bp, Probe Sequence
aaaataatctgggacgacaggttca

SEQ ID NO: 158066 - DNA, 25 bp, Probe Sequence
aaaatgaactactctaagttatgag

SEQ ID NO: 158067 - DNA, 25 bp, Probe Sequence
aaaagacaatactaagtggtgttga

SEQ ID NO: 158068 - DNA, 25 bp, Probe Sequence
aaaatacaaaatcagctgggcgtgg

SEQ ID NO: 158069 - DNA, 25 bp, Probe Sequence
aaaaaacagactccaggtgaggctg

SEQ ID NO: 158070 - DNA, 25 bp, Probe Sequence
aaaacaacacaggtcaggtatgagt

SEQ ID NO: 158071 - DNA, 25 bp, Probe Sequence
aaaataagcactttccagtagatgt

SEQ ID NO: 158072 - DNA, 25 bp, Probe Sequence
aaaaaaactgttcccataggtgcag

SEQ ID NO: 158073 - DNA, 25 bp, Probe Sequence
aaaaaaacctttgcatatgagctgc

SEQ ID NO: 158074 - DNA, 25 bp, Probe Sequence
aaaaacagctcttttatcttcctgc

SEQ ID NO: 158075 - DNA, 25 bp, Probe Sequence
aaaaactgcctgactaacttccatg

SEQ ID NO: 158076 - DNA, 25 bp, Probe Sequence
aaaaactatctgacaaactttctga

SEQ ID NO: 158077 - DNA, 25 bp, Probe Sequence
aaaacatctcttgcaccaaatcctg

SEQ ID NO: 158078 - DNA, 25 bp, Probe Sequence
aaaacacttactaccaacacagctg

SEQ ID NO: 158079 - DNA, 25 bp, Probe Sequence
aagaacctaaagaccaagcatttgg

SEQ ID NO: 158080 - DNA, 25 bp, Probe Sequence
aaaacacaaagaggctagagatttc

SEQ ID NO: 158081 - DNA, 25 bp, Probe Sequence
aaaacaccaaatggcggatgacgcc

SEQ ID NO: 158082 - DNA, 25 bp, Probe Sequence
aaaaaacaggatgggccgccagcca

SEQ ID NO: 158083 - DNA, 25 bp, Probe Sequence
aaaaaacaggatgggccgccagcca

SEQ ID NO: 158084 - DNA, 25 bp, Probe Sequence
aaaaaacaggatgggccgccagcca

SEQ ID NO: 158085 - DNA, 25 bp, Probe Sequence
aaaaaacaggatgggccgccagcca

SEQ ID NO: 158086 - DNA, 25 bp, Probe Sequence
aaaaacaagtctcgggccaggcaca

SEQ ID NO: 158087 - DNA, 25 bp, Probe Sequence
aaaaacaggatgggccaccagccac

SEQ ID NO: 158088 - DNA, 25 bp, Probe Sequence
aaaaacaggatgggccaccagccac

SEQ ID NO: 158089 - DNA, 25 bp, Probe Sequence
aaaaacaggatgggccaccagccac

SEQ ID NO: 158090 - DNA, 25 bp, Probe Sequence
aaaacaccagaagtgccaccagcac

SEQ ID NO: 158091 - DNA, 25 bp, Probe Sequence
aaaacattgcgatttgaggctcagc

SEQ ID NO: 158092 - DNA, 25 bp, Probe Sequence
aaaacttggcattcatcccagcagc

SEQ ID NO: 158093 - DNA, 25 bp, Probe Sequence
aaaacatagagatcacaccgcaaag

SEQ ID NO: 158094 - DNA, 25 bp, Probe Sequence
aaaagacagcagtaacctctgcaga

SEQ ID NO: 158095 - DNA, 25 bp, Probe Sequence
aaaatgcaacgggactctccaaaat

SEQ ID NO: 158096 - DNA, 25 bp, Probe Sequence
aaaagcgaagtgcatctcccataaa

SEQ ID NO: 158097 - DNA, 25 bp, Probe Sequence
aaaacttcagattgttcaacatgag

SEQ ID NO: 158098 - DNA, 25 bp, Probe Sequence
aaaactacagatacttgcaacaatg

SEQ ID NO: 158099 - DNA, 25 bp, Probe Sequence
aaaagcaacagtcctctgcagggac

SEQ ID NO: 158100 - DNA, 25 bp, Probe Sequence
aaaagcaaactccaccatggtgcca

SEQ ID NO: 158101 - DNA, 25 bp, Probe Sequence
aaaattacctgggcctggtgcacag

SEQ ID NO: 158102 - DNA, 25 bp, Probe Sequence
aaaattaccccagcatggtggcgct

SEQ ID NO: 158103 - DNA, 25 bp, Probe Sequence
aaaattagcctggcacgatggtggg

SEQ ID NO: 158104 - DNA, 25 bp, Probe Sequence
aaaattttcatgtcactggtggtgg

SEQ ID NO: 158105 - DNA, 25 bp, Probe Sequence
aacagttctttgtcagtttcaagga

SEQ ID NO: 158106 - DNA, 25 bp, Probe Sequence
aacagttctttgtcagtttcaagga

SEQ ID NO: 158107 - DNA, 25 bp, Probe Sequence
aaaatcattgtcaggtttgaagaga

SEQ ID NO: 158108 - DNA, 25 bp, Probe Sequence
aaaactatctttagatttagagata

SEQ ID NO: 158109 - DNA, 25 bp, Probe Sequence
aacagactgtcgcttgattttaaaa

SEQ ID NO: 158110 - DNA, 25 bp, Probe Sequence
aaaacttcctttatcatctagcagc

SEQ ID NO: 158111 - DNA, 25 bp, Probe Sequence
aaaacaacctatttgctgatctagt

SEQ ID NO: 158112 - DNA, 25 bp, Probe Sequence
aaaatcaatccatattgttagggaa

SEQ ID NO: 158113 - DNA, 25 bp, Probe Sequence
aaaagaatactgcttgtttcggaat

SEQ ID NO: 158114 - DNA, 25 bp, Probe Sequence
aaaaaatactgatgttcctagtgaa

SEQ ID NO: 158115 - DNA, 25 bp, Probe Sequence
aataaagttggatccatcccctcaa

SEQ ID NO: 158116 - DNA, 25 bp, Probe Sequence
aaaagatattggcttcactccctaa

SEQ ID NO: 158117 - DNA, 25 bp, Probe Sequence
aaaacattatattactgcctttcta

SEQ ID NO: 158118 - DNA, 25 bp, Probe Sequence
aaaagcttacatgattcctaactaa

SEQ ID NO: 158119 - DNA, 25 bp, Probe Sequence
aaaatgtctactgttcacgaaatcc

SEQ ID NO: 158120 - DNA, 25 bp, Probe Sequence
aaaagataatttgctcctgacagtc

SEQ ID NO: 158121 - DNA, 25 bp, Probe Sequence
aaaaggaactatgtctggaaggctg

SEQ ID NO: 158122 - DNA, 25 bp, Probe Sequence
aaaagaaagataagttggccaggct

SEQ ID NO: 158123 - DNA, 25 bp, Probe Sequence
aaaagctccatgagagttggcacag

SEQ ID NO: 158124 - DNA, 25 bp, Probe Sequence
aaaactgccactgcatgtatgggtg

SEQ ID NO: 158125 - DNA, 25 bp, Probe Sequence
aaaagtcagccaggcatgtagcagg

SEQ ID NO: 158126 - DNA, 25 bp, Probe Sequence
aaaagcagcacatggctgggcgcag

SEQ ID NO: 158127 - DNA, 25 bp, Probe Sequence
aaaagaagcattcgctacgcgggcc

SEQ ID NO: 158128 - DNA, 25 bp, Probe Sequence
aaaaggacctgggagctggcagcct

SEQ ID NO: 158129 - DNA, 25 bp, Probe Sequence
aaaagaaggctgtgatgtcgctgtc

SEQ ID NO: 158130 - DNA, 25 bp, Probe Sequence
aaaagacaaggctatgatgctgctt

SEQ ID NO: 158131 - DNA, 25 bp, Probe Sequence
aacaagcacgaccatggatgatgga

SEQ ID NO: 158132 - DNA, 25 bp, Probe Sequence
aaaagcagcttgtagagattgagaa

SEQ ID NO: 158133 - DNA, 25 bp, Probe Sequence
aaaactatgtgctatcacatgtgaa

SEQ ID NO: 158134 - DNA, 25 bp, Probe Sequence
aaaatctatctgtacgcactggaag

SEQ ID NO: 158135 - DNA, 25 bp, Probe Sequence
aaaagctgacattgacccagacata

SEQ ID NO: 158136 - DNA, 25 bp, Probe Sequence
aaaatgctgaacgagaacaagaatc

SEQ ID NO: 158137 - DNA, 25 bp, Probe Sequence
aaaagcggagcggaagaagcacagc

SEQ ID NO: 158138 - DNA, 25 bp, Probe Sequence
aaaagcagtctcggaaacacagagc

SEQ ID NO: 158139 - DNA, 25 bp, Probe Sequence
aaaacactgtctgcatatccataag

SEQ ID NO: 158140 - DNA, 25 bp, Probe Sequence
aaaacactggcatatgaccatgcaa

SEQ ID NO: 158141 - DNA, 25 bp, Probe Sequence
aaaacatctcgaatggatcactgta

SEQ ID NO: 158142 - DNA, 25 bp, Probe Sequence
aacaacttccggcagcagatggaga

SEQ ID NO: 158143 - DNA, 25 bp, Probe Sequence
aacagactctacatgtaggatggta

SEQ ID NO: 158144 - DNA, 25 bp, Probe Sequence
aacagattatacggcatgaatgaag

SEQ ID NO: 158145 - DNA, 25 bp, Probe Sequence
aacatgttccgctcataataacagt

SEQ ID NO: 158146 - DNA, 25 bp, Probe Sequence
aacagttccctccatgactagtaat

SEQ ID NO: 158147 - DNA, 25 bp, Probe Sequence
aacacttccgctgctgcggcagcat

SEQ ID NO: 158148 - DNA, 25 bp, Probe Sequence
aacacatgtggggctccagagactc

SEQ ID NO: 158149 - DNA, 25 bp, Probe Sequence
aacacaagtgatcctgacatgagac

SEQ ID NO: 158150 - DNA, 25 bp, Probe Sequence
aacaaagtctgcctgaattccgcct

SEQ ID NO: 158151 - DNA, 25 bp, Probe Sequence
aacaatagatctatccttgccagcc

SEQ ID NO: 158152 - DNA, 25 bp, Probe Sequence
aaaatgaatctactggctaccacaa

SEQ ID NO: 158153 - DNA, 25 bp, Probe Sequence
aaaataattatgccccatgaccaag

SEQ ID NO: 158154 - DNA, 25 bp, Probe Sequence
aaaacacatttaccagcatactcca

SEQ ID NO: 158155 - DNA, 25 bp, Probe Sequence
aaaactctgttaaagatcacaccac

SEQ ID NO: 158156 - DNA, 25 bp, Probe Sequence
aaaactatattaagagatcacctca

SEQ ID NO: 158157 - DNA, 25 bp, Probe Sequence
aaaacatcatcaaaaaggacattca

SEQ ID NO: 158158 - DNA, 25 bp, Probe Sequence
aaaacatcatcaaaaaggacattca

SEQ ID NO: 158159 - DNA, 25 bp, Probe Sequence
aaaattcatccagacaggcactaat

SEQ ID NO: 158160 - DNA, 25 bp, Probe Sequence
aaaatgctacaaggccaggcccggt

SEQ ID NO: 158161 - DNA, 25 bp, Probe Sequence
aaaatgtctcaagtgcaatgccccc

SEQ ID NO: 158162 - DNA, 25 bp, Probe Sequence
aaaagatactatgactgccacctgc

SEQ ID NO: 158163 - DNA, 25 bp, Probe Sequence
aaaagcttccatgacagcatcaccc

SEQ ID NO: 158164 - DNA, 25 bp, Probe Sequence
aaaattagcctggtggctcacgcct

SEQ ID NO: 158165 - DNA, 25 bp, Probe Sequence
aaaatatccgctgtgcttcacttct

SEQ ID NO: 158166 - DNA, 25 bp, Probe Sequence
aaaagactctgtgtattcatcttcc

SEQ ID NO: 158167 - DNA, 25 bp, Probe Sequence
aaaagcactttgagtggcactgttc

SEQ ID NO: 158168 - DNA, 25 bp, Probe Sequence
aaaagctctttgttgtggatcatgt

SEQ ID NO: 158169 - DNA, 25 bp, Probe Sequence
aaaagccatttgtgtaatctccaaa

SEQ ID NO: 158170 - DNA, 25 bp, Probe Sequence
aaaaggaattatctggatgtgtaaa

SEQ ID NO: 158171 - DNA, 25 bp, Probe Sequence
aaaactgaactattatgtattgtaa

SEQ ID NO: 158172 - DNA, 25 bp, Probe Sequence
aaaacatagacttctttatatcttt

SEQ ID NO: 158173 - DNA, 25 bp, Probe Sequence
aaaacatagacttctttatatcttt

SEQ ID NO: 158174 - DNA, 25 bp, Probe Sequence
aaaacatagacttctttatatcttt

SEQ ID NO: 158175 - DNA, 25 bp, Probe Sequence
aaaactccataccttcgaatctcat

SEQ ID NO: 158176 - DNA, 25 bp, Probe Sequence
aaaattcctggtcgtgctaactgtg

SEQ ID NO: 158177 - DNA, 25 bp, Probe Sequence
aaaatattgtgcctggtgtcaactt

SEQ ID NO: 158178 - DNA, 25 bp, Probe Sequence
aaaattgttgccgatgtctatatcc

SEQ ID NO: 158179 - DNA, 25 bp, Probe Sequence
aaaacatgctgcaaccatggtatac

SEQ ID NO: 158180 - DNA, 25 bp, Probe Sequence
aacaacaggggctcctgttccatac

SEQ ID NO: 158181 - DNA, 25 bp, Probe Sequence
aaaacgagaagcacctgttccaact

SEQ ID NO: 158182 - DNA, 25 bp, Probe Sequence
aaaactcagtaaagcctgtctctcc

SEQ ID NO: 158183 - DNA, 25 bp, Probe Sequence
aacgactgatgaaaacgcccatgcg

SEQ ID NO: 158184 - DNA, 25 bp, Probe Sequence
aaaactgcaatgtgcgcgcacctgc

SEQ ID NO: 158185 - DNA, 25 bp, Probe Sequence
aaaactgccatctggcatcttcctt

SEQ ID NO: 158186 - DNA, 25 bp, Probe Sequence
aaaactgagcactcttctgtgcact

SEQ ID NO: 158187 - DNA, 25 bp, Probe Sequence
aaaagcccagcaagtactgatactg

SEQ ID NO: 158188 - DNA, 25 bp, Probe Sequence
aaaagcaacagaagtccgacagtga

SEQ ID NO: 158189 - DNA, 25 bp, Probe Sequence
aaaatgcaaatgaacaccccgatga

SEQ ID NO: 158190 - DNA, 25 bp, Probe Sequence
aaaagcaagtgaacaccctgacagg

SEQ ID NO: 158191 - DNA, 25 bp, Probe Sequence
aaaagaatctaaaccttacatgtgt

SEQ ID NO: 158192 - DNA, 25 bp, Probe Sequence
aaaacatactaatgtgcttagaggt

SEQ ID NO: 158193 - DNA, 25 bp, Probe Sequence
aaaacatggcattataatcttaggg

SEQ ID NO: 158194 - DNA, 25 bp, Probe Sequence
aaaactgcacattacatttttggtg

SEQ ID NO: 158195 - DNA, 25 bp, Probe Sequence
aaaactgcagtatctgagcttcggt

SEQ ID NO: 158196 - DNA, 25 bp, Probe Sequence
aaaactggctagcctgagctgctgg

SEQ ID NO: 158197 - DNA, 25 bp, Probe Sequence
aaaactgtgacacctgagtcttatt

SEQ ID NO: 158198 - DNA, 25 bp, Probe Sequence
aaaacttgcattctggcataatttt

SEQ ID NO: 158199 - DNA, 25 bp, Probe Sequence
aaaattcctttagcatacattgact

SEQ ID NO: 158200 - DNA, 25 bp, Probe Sequence
aaaattccttttccaaatcatgttg

SEQ ID NO: 158201 - DNA, 25 bp, Probe Sequence
caaagggcttttcccattgaataga

SEQ ID NO: 158202 - DNA, 25 bp, Probe Sequence
caaaatagccagttataaaatgggg

SEQ ID NO: 158203 - DNA, 25 bp, Probe Sequence
aaaatatgacagattcaacacagct

SEQ ID NO: 158204 - DNA, 25 bp, Probe Sequence
aacacacaagctgactcagaaccat

SEQ ID NO: 158205 - DNA, 25 bp, Probe Sequence
aacacactcaatgaccagaccttgg

SEQ ID NO: 158206 - DNA, 25 bp, Probe Sequence
aaaactctcagctccaaatcttatg

SEQ ID NO: 158207 - DNA, 25 bp, Probe Sequence
aaaacctttgtctataatgcttctg

SEQ ID NO: 158208 - DNA, 25 bp, Probe Sequence
aaaacctctccttcataaaatgcat

SEQ ID NO: 158209 - DNA, 25 bp, Probe Sequence
aaaacgattccgaaacataatatca

SEQ ID NO: 158210 - DNA, 25 bp, Probe Sequence
aacaaagttccagagctacaaaagt

SEQ ID NO: 158211 - DNA, 25 bp, Probe Sequence
aacagaagatacctttctccaaaat

SEQ ID NO: 158212 - DNA, 25 bp, Probe Sequence
aacaaagttcagtattgaccataac

SEQ ID NO: 158213 - DNA, 25 bp, Probe Sequence
aaaattttgcaccactggtcatagc

SEQ ID NO: 158214 - DNA, 25 bp, Probe Sequence
aaaattatacccatgactgacagct

SEQ ID NO: 158215 - DNA, 25 bp, Probe Sequence
aacaatgtaaccatctgaaagcaac

SEQ ID NO: 158216 - DNA, 25 bp, Probe Sequence
aacatagtgaattctcctaaagtac

SEQ ID NO: 158217 - DNA, 25 bp, Probe Sequence
aaaagatgataaaccttagaaacat

SEQ ID NO: 158218 - DNA, 25 bp, Probe Sequence
aaaagatatcacaactctatggaaa

SEQ ID NO: 158219 - DNA, 25 bp, Probe Sequence
aaaacttcatgccagctctagagga

SEQ ID NO: 158220 - DNA, 25 bp, Probe Sequence
aaaacttcatgccagctctagagga

SEQ ID NO: 158221 - DNA, 25 bp, Probe Sequence
aaaacttctgtgcatcgaagagcat

SEQ ID NO: 158222 - DNA, 25 bp, Probe Sequence
aaaacttcattctcgtgagtcattt

SEQ ID NO: 158223 - DNA, 25 bp, Probe Sequence
aaaactctcgattgccgtttcaatt

SEQ ID NO: 158224 - DNA, 25 bp, Probe Sequence
aaaacgctctgagacgtttgccatg

SEQ ID NO: 158225 - DNA, 25 bp, Probe Sequence
aaaactgggataactgatttctatg

SEQ ID NO: 158226 - DNA, 25 bp, Probe Sequence
aaaactggtcaaatgacttgaatag

SEQ ID NO: 158227 - DNA, 25 bp, Probe Sequence
aaaacggatacatactggaaccctg

SEQ ID NO: 158228 - DNA, 25 bp, Probe Sequence
aacaaagacaaatacagaaaccaag

SEQ ID NO: 158229 - DNA, 25 bp, Probe Sequence
aaaatagcccactaatccaaactct

SEQ ID NO: 158230 - DNA, 25 bp, Probe Sequence
aaaattgccccagactctgcaacaa

SEQ ID NO: 158231 - DNA, 25 bp, Probe Sequence
aaaaggatcccgaacattgctcaca

SEQ ID NO: 158232 - DNA, 25 bp, Probe Sequence
aaaaccataccactaatatcatact

SEQ ID NO: 158233 - DNA, 25 bp, Probe Sequence
aaaagcacagacaaccacaacaaat

SEQ ID NO: 158234 - DNA, 25 bp, Probe Sequence
aaaaccatcatcaccagaacaaaac

SEQ ID NO: 158235 - DNA, 25 bp, Probe Sequence
aacaaccaaggagaaacacaacaca

SEQ ID NO: 158236 - DNA, 25 bp, Probe Sequence
aaaactgcaagagaaactacataag

SEQ ID NO: 158237 - DNA, 25 bp, Probe Sequence
aaaactctgagagactacttatgaa

SEQ ID NO: 158238 - DNA, 25 bp, Probe Sequence
aaaactcggcatgaacctgatgaat

SEQ ID NO: 158239 - DNA, 25 bp, Probe Sequence
aaaactctgtgaaaacggatctgat

SEQ ID NO: 158240 - DNA, 25 bp, Probe Sequence
aaaactcttgatatgacctgttatt

SEQ ID NO: 158241 - DNA, 25 bp, Probe Sequence
aaaactgctttcatacttagatgtt

SEQ ID NO: 158242 - DNA, 25 bp, Probe Sequence
aaaattgctgttatacattaccgtt

SEQ ID NO: 158243 - DNA, 25 bp, Probe Sequence
aacaatctttgtatacttttgggat

SEQ ID NO: 158244 - DNA, 25 bp, Probe Sequence
aaaatatattgtcatatgttttctg

SEQ ID NO: 158245 - DNA, 25 bp, Probe Sequence
aaaactcagtctctttcattatcat

SEQ ID NO: 158246 - DNA, 25 bp, Probe Sequence
aaaagtcaattgccttcctatatat

SEQ ID NO: 158247 - DNA, 25 bp, Probe Sequence
aacacaatgaagcacttcacttttt

SEQ ID NO: 158248 - DNA, 25 bp, Probe Sequence
aaaatcatgaggctcactcctcttt

SEQ ID NO: 158249 - DNA, 25 bp, Probe Sequence
aaaatgatgggctcctcctaatagg

SEQ ID NO: 158250 - DNA, 25 bp, Probe Sequence
aaaatgatacacacctttcacaagg

SEQ ID NO: 158251 - DNA, 25 bp, Probe Sequence
aaaatgtacaagtcctttcagtgat

SEQ ID NO: 158252 - DNA, 25 bp, Probe Sequence
aaaatgagaacgtttcttcatgtga

SEQ ID NO: 158253 - DNA, 25 bp, Probe Sequence
aaaagggatccagtttccagctgca

SEQ ID NO: 158254 - DNA, 25 bp, Probe Sequence
aaaagggcagggcatctcctgtgca

SEQ ID NO: 158255 - DNA, 25 bp, Probe Sequence
aaaaggtataggcttgccttgctga

SEQ ID NO: 158256 - DNA, 25 bp, Probe Sequence
aaaagggaatgttttggcacctgat

SEQ ID NO: 158257 - DNA, 25 bp, Probe Sequence
aaaaccagaagtttctacattctct

SEQ ID NO: 158258 - DNA, 25 bp, Probe Sequence
aaaaccgaatcttcaggtcttcctg

SEQ ID NO: 158259 - DNA, 25 bp, Probe Sequence
aacaaaaggtcccaggtcattcttg

SEQ ID NO: 158260 - DNA, 25 bp, Probe Sequence
aacaacgtggatggccacctctatg

SEQ ID NO: 158261 - DNA, 25 bp, Probe Sequence
aaaactgccagaagagccagctctt

SEQ ID NO: 158262 - DNA, 25 bp, Probe Sequence
aacacagctgcagaaggaagttggc

SEQ ID NO: 158263 - DNA, 25 bp, Probe Sequence
aaaactgataatcggaagacatata

SEQ ID NO: 158264 - DNA, 25 bp, Probe Sequence
aaaactgatcttaagagcagactta

SEQ ID NO: 158265 - DNA, 25 bp, Probe Sequence
aaaattatctctagcatcaggtgct

SEQ ID NO: 158266 - DNA, 25 bp, Probe Sequence
aaaagctgaatctgcacaggcttca

SEQ ID NO: 158267 - DNA, 25 bp, Probe Sequence
aaaagccaacattcctctgcttcat

SEQ ID NO: 158268 - DNA, 25 bp, Probe Sequence
aaaagacgtcaatatctgctcacat

SEQ ID NO: 158269 - DNA, 25 bp, Probe Sequence
aaaagaagtcactattgtatgaaga

SEQ ID NO: 158270 - DNA, 25 bp, Probe Sequence
aaaatatatgcacctaatgttagag

SEQ ID NO: 158271 - DNA, 25 bp, Probe Sequence
aaaattatagccagcactttgagag

SEQ ID NO: 158272 - DNA, 25 bp, Probe Sequence
aaaatcttggccagagctccttgcc

SEQ ID NO: 158273 - DNA, 25 bp, Probe Sequence
aaaattattactaagcccttgctct

SEQ ID NO: 158274 - DNA, 25 bp, Probe Sequence
aaaattttactcaacccatgattca

SEQ ID NO: 158275 - DNA, 25 bp, Probe Sequence
aaaatcatttgatatagcctaattc

SEQ ID NO: 158276 - DNA, 25 bp, Probe Sequence
aaaatcagtgtattagtcataaaac

SEQ ID NO: 158277 - DNA, 25 bp, Probe Sequence
aaaatcaggctaatcatgtggtcca

SEQ ID NO: 158278 - DNA, 25 bp, Probe Sequence
aaaatggcctcaatattggagcgcc

SEQ ID NO: 158279 - DNA, 25 bp, Probe Sequence
aaaaggccatcacctatgagaagct

SEQ ID NO: 158280 - DNA, 25 bp, Probe Sequence
aaaagcctccatcttggcaagatat

SEQ ID NO: 158281 - DNA, 25 bp, Probe Sequence
aaaacctacacctgtgctattacca

SEQ ID NO: 158282 - DNA, 25 bp, Probe Sequence
aaaagcctgcaaccagatgttttac

SEQ ID NO: 158283 - DNA, 25 bp, Probe Sequence
aaaacctgcacacgaatgtttacat

SEQ ID NO: 158284 - DNA, 25 bp, Probe Sequence
aaaaccgcagagcatctttgtagta

SEQ ID NO: 158285 - DNA, 25 bp, Probe Sequence
aaaagcctgaggaacatatctgtct

SEQ ID NO: 158286 - DNA, 25 bp, Probe Sequence
aaaaccgcaatgagatactatctca

SEQ ID NO: 158287 - DNA, 25 bp, Probe Sequence
aaaattcacaagctaacttccacta

SEQ ID NO: 158288 - DNA, 25 bp, Probe Sequence
aaaatcccaaagtgccttctgagct

SEQ ID NO: 158289 - DNA, 25 bp, Probe Sequence
aaaacccagaaagcatccatcatga

SEQ ID NO: 158290 - DNA, 25 bp, Probe Sequence
aaaaccaagagatatatgtcgcata

SEQ ID NO: 158291 - DNA, 25 bp, Probe Sequence
aaaagccagagaacttattcctact

SEQ ID NO: 158292 - DNA, 25 bp, Probe Sequence
aaaatggcagacaatttttcgctcc

SEQ ID NO: 158293 - DNA, 25 bp, Probe Sequence
aaaatgagctacatcctcattgttc

SEQ ID NO: 158294 - DNA, 25 bp, Probe Sequence
aaaatactacagcactctgtgttaa

SEQ ID NO: 158295 - DNA, 25 bp, Probe Sequence
aaaaccaacatgcattgcctttcaa

SEQ ID NO: 158296 - DNA, 25 bp, Probe Sequence
aaaaccaagcagccttggcacctca

SEQ ID NO: 158297 - DNA, 25 bp, Probe Sequence
aaaagcacaagaagcgtgagacgcc

SEQ ID NO: 158298 - DNA, 25 bp, Probe Sequence
aaaagcacaagaagcgtgagacgcc

SEQ ID NO: 158299 - DNA, 25 bp, Probe Sequence
aacaccaaatggcggatgacgccgg

SEQ ID NO: 158300 - DNA, 25 bp, Probe Sequence
aacaccggatggtgccaaccatcgg

SEQ ID NO: 158301 - DNA, 25 bp, Probe Sequence
aaaagcagggttggcctcagccctg

SEQ ID NO: 158302 - DNA, 25 bp, Probe Sequence
aaaagactggtcttcccagcacttt

SEQ ID NO: 158303 - DNA, 25 bp, Probe Sequence
aaaagccatcttttccacattttct

SEQ ID NO: 158304 - DNA, 25 bp, Probe Sequence
aaaatcctctttacacactctgtta

SEQ ID NO: 158305 - DNA, 25 bp, Probe Sequence
aaaatcttccagttacattgtctta

SEQ ID NO: 158306 - DNA, 25 bp, Probe Sequence
aaaagcatgttatttactttctaga

SEQ ID NO: 158307 - DNA, 25 bp, Probe Sequence
aaaagttttgtaatcatgagttaga

SEQ ID NO: 158308 - DNA, 25 bp, Probe Sequence
aaaagttacattgtgcttggtagat

SEQ ID NO: 158309 - DNA, 25 bp, Probe Sequence
aacaacctatttgctgatctagtaa

SEQ ID NO: 158310 - DNA, 25 bp, Probe Sequence
aaaaggcgatcttcctgtttgtgga

SEQ ID NO: 158311 - DNA, 25 bp, Probe Sequence
aaaagtagcatcttgccgggttgtg

SEQ ID NO: 158312 - DNA, 25 bp, Probe Sequence
aaaagtaaacatgcggctgggtgtg

SEQ ID NO: 158313 - DNA, 25 bp, Probe Sequence
aaaagtcaaatattacctgcaggga

SEQ ID NO: 158314 - DNA, 25 bp, Probe Sequence
aaaagtaaaacttgctgctgatgaa

SEQ ID NO: 158315 - DNA, 25 bp, Probe Sequence
aacacagcgaactctacttgtagca

SEQ ID NO: 158316 - DNA, 25 bp, Probe Sequence
aacacagcggacattgaatatcttg

SEQ ID NO: 158317 - DNA, 25 bp, Probe Sequence
aaaagccgacttaatgacttctgaa

SEQ ID NO: 158318 - DNA, 25 bp, Probe Sequence
aaaacggctttattgagctatcatt

SEQ ID NO: 158319 - DNA, 25 bp, Probe Sequence
aacaacaagcttggaggtctgccat

SEQ ID NO: 158320 - DNA, 25 bp, Probe Sequence
aacaagaatgtctgagggcatgtaa

SEQ ID NO: 158321 - DNA, 25 bp, Probe Sequence
aacaagattgtttgggattggaagt

SEQ ID NO: 158322 - DNA, 25 bp, Probe Sequence
aacacaatatagagggttggagttg

SEQ ID NO: 158323 - DNA, 25 bp, Probe Sequence
aacaaagataaatagctgggtctta

SEQ ID NO: 158324 - DNA, 25 bp, Probe Sequence
aacacacctttatggctggggctct

SEQ ID NO: 158325 - DNA, 25 bp, Probe Sequence
aaaaccaattgatcacagggagcct

SEQ ID NO: 158326 - DNA, 25 bp, Probe Sequence
aaaacgaattgttctgctcgggcgt

SEQ ID NO: 158327 - DNA, 25 bp, Probe Sequence
aaaataagcttcatctccgggctgt

SEQ ID NO: 158328 - DNA, 25 bp, Probe Sequence
aacaaaatgcccatgttggtcctct

SEQ ID NO: 158329 - DNA, 25 bp, Probe Sequence
aacagcaaatccaaagtttcttctc

SEQ ID NO: 158330 - DNA, 25 bp, Probe Sequence
aacagcaaatccaaagtttcttctc

SEQ ID NO: 158331 - DNA, 25 bp, Probe Sequence
aacagcaaatccaaagtttcttctc

SEQ ID NO: 158332 - DNA, 25 bp, Probe Sequence
aacagaatgatcctggagctttgct

SEQ ID NO: 158333 - DNA, 25 bp, Probe Sequence
aacagctatgagccatagcctattt

SEQ ID NO: 158334 - DNA, 25 bp, Probe Sequence
aacacgatactgtcatctgctttat

SEQ ID NO: 158335 - DNA, 25 bp, Probe Sequence
aaaagcatactctatgtgatttatt

SEQ ID NO: 158336 - DNA, 25 bp, Probe Sequence
aaaagatcaccttgtattctctgtt

SEQ ID NO: 158337 - DNA, 25 bp, Probe Sequence
aaaaggccgcatgatctttctggct

SEQ ID NO: 158338 - DNA, 25 bp, Probe Sequence
aaaagttctgcatcttataatggta

SEQ ID NO: 158339 - DNA, 25 bp, Probe Sequence
aaaagcagtctgattctaaaggaaa

SEQ ID NO: 158340 - DNA, 25 bp, Probe Sequence
aacaccgtttctgcataaaggaaca

SEQ ID NO: 158341 - DNA, 25 bp, Probe Sequence
aaaaggtcacctgcaagaacgggca

SEQ ID NO: 158342 - DNA, 25 bp, Probe Sequence
aactaggacacagaaaacactggga

SEQ ID NO: 158343 - DNA, 25 bp, Probe Sequence
aacgttgtacacacaaacctggtgt

SEQ ID NO: 158344 - DNA, 25 bp, Probe Sequence
aacttatggcccaatcttacctgtt

SEQ ID NO: 158345 - DNA, 25 bp, Probe Sequence
aacaatgtgaccgatatgttcccgg

SEQ ID NO: 158346 - DNA, 25 bp, Probe Sequence
aaaatggctccatttttccacagcg

SEQ ID NO: 158347 - DNA, 25 bp, Probe Sequence
aaaagcattcatgtttctccacagc

SEQ ID NO: 158348 - DNA, 25 bp, Probe Sequence
aaaagtccatgagtttcttgctcaa

SEQ ID NO: 158349 - DNA, 25 bp, Probe Sequence
aaaattagctcagtgctttttgcct

SEQ ID NO: 158350 - DNA, 25 bp, Probe Sequence
aaaattagtagcatttctttctctc

SEQ ID NO: 158351 - DNA, 25 bp, Probe Sequence
aaaattcgggcttttatgatgtgcc

SEQ ID NO: 158352 - DNA, 25 bp, Probe Sequence
aaaatgggtggttttcattggatgc

SEQ ID NO: 158353 - DNA, 25 bp, Probe Sequence
aaaagccgtgagtcaggcctgggtg

SEQ ID NO: 158354 - DNA, 25 bp, Probe Sequence
aaaagccgtgagtcaggcctgggtt

SEQ ID NO: 158355 - DNA, 25 bp, Probe Sequence
aaaagccgtgagtcaggcctgggtt

SEQ ID NO: 158356 - DNA, 25 bp, Probe Sequence
aaaagccggagttgcattctagttt

SEQ ID NO: 158357 - DNA, 25 bp, Probe Sequence
aaaaccttgatatcattctgtgtat

SEQ ID NO: 158358 - DNA, 25 bp, Probe Sequence
aaaagcctgccttatcttctttgat

SEQ ID NO: 158359 - DNA, 25 bp, Probe Sequence
aaaagcccagccgctgtctgatttt

SEQ ID NO: 158360 - DNA, 25 bp, Probe Sequence
aaaagcctgcatgcctgttcaattc

SEQ ID NO: 158361 - DNA, 25 bp, Probe Sequence
aaaaccatgcactctggaatttgtt

SEQ ID NO: 158362 - DNA, 25 bp, Probe Sequence
aaaagccatgagtactggtaattgt

SEQ ID NO: 158363 - DNA, 25 bp, Probe Sequence
aaaagcctggagatggtgactcttt

SEQ ID NO: 158364 - DNA, 25 bp, Probe Sequence
aaaagcctgtgaaaggtgtcttctt

SEQ ID NO: 158365 - DNA, 25 bp, Probe Sequence
aaaagcctgtgaaaggtgtcttctt

SEQ ID NO: 158366 - DNA, 25 bp, Probe Sequence
aaaaccaggaaatccatgtctctta

SEQ ID NO: 158367 - DNA, 25 bp, Probe Sequence
aaaatccacgaatgaaatgtctgtt

SEQ ID NO: 158368 - DNA, 25 bp, Probe Sequence
aaaattcaccgagaagtgtgtgtgt

SEQ ID NO: 158369 - DNA, 25 bp, Probe Sequence
aacaactgccggtgatactggtagt

SEQ ID NO: 158370 - DNA, 25 bp, Probe Sequence
aaaatatgccgttggatcagcttgc

SEQ ID NO: 158371 - DNA, 25 bp, Probe Sequence
aaaattcctgttggtcctgagactt

SEQ ID NO: 158372 - DNA, 25 bp, Probe Sequence
aaaatgccctttggtcactgtaaat

SEQ ID NO: 158373 - DNA, 25 bp, Probe Sequence
aaaagtcatttgtcaatcacttaca

SEQ ID NO: 158374 - DNA, 25 bp, Probe Sequence
aaaagtatttcacagcactaatgct

SEQ ID NO: 158375 - DNA, 25 bp, Probe Sequence
aaaagctttcctcagcactttgttt

SEQ ID NO: 158376 - DNA, 25 bp, Probe Sequence
aacaatggttcagcttgcaattttt

SEQ ID NO: 158377 - DNA, 25 bp, Probe Sequence
aaaatggaccacagtgacttatttg

SEQ ID NO: 158378 - DNA, 25 bp, Probe Sequence
aaaattgactacagcggtcagtata

SEQ ID NO: 158379 - DNA, 25 bp, Probe Sequence
aaaattgactacagcggtcagtata

SEQ ID NO: 158380 - DNA, 25 bp, Probe Sequence
aaaatagcttccagcctatcagctc

SEQ ID NO: 158381 - DNA, 25 bp, Probe Sequence
aaaatggagctcgaggccatgagca

SEQ ID NO: 158382 - DNA, 25 bp, Probe Sequence
aaaagatgctctgagtccagacagg

SEQ ID NO: 158383 - DNA, 25 bp, Probe Sequence
aaaagcactctgagtcaagatgagt

SEQ ID NO: 158384 - DNA, 25 bp, Probe Sequence
aaaagcactctgagtcaagatgagt

SEQ ID NO: 158385 - DNA, 25 bp, Probe Sequence
aaaatcacactagctcaccagcagt

SEQ ID NO: 158386 - DNA, 25 bp, Probe Sequence
aaaatccaagatgctcactcctgag

SEQ ID NO: 158387 - DNA, 25 bp, Probe Sequence
aaaatggcaagagatcatatcctca

SEQ ID NO: 158388 - DNA, 25 bp, Probe Sequence
aaaagagcaagagagctctcctggg

SEQ ID NO: 158389 - DNA, 25 bp, Probe Sequence
aacaagacaaatgctgttcagggaa

SEQ ID NO: 158390 - DNA, 25 bp, Probe Sequence
aaaaggagcgagacgtgatcacgag

SEQ ID NO: 158391 - DNA, 25 bp, Probe Sequence
aaaaggatggagcctggaccctggt

SEQ ID NO: 158392 - DNA, 25 bp, Probe Sequence
aaaagaaggcagcctaggccctggg

SEQ ID NO: 158393 - DNA, 25 bp, Probe Sequence
aaaagttggatgactacgcctctgc

SEQ ID NO: 158394 - DNA, 25 bp, Probe Sequence
aaaagttggatgactacgcctctgc

SEQ ID NO: 158395 - DNA, 25 bp, Probe Sequence
aacacgtagagttcagacccttctg

SEQ ID NO: 158396 - DNA, 25 bp, Probe Sequence
aacaggataagtggtagcccattat

SEQ ID NO: 158397 - DNA, 25 bp, Probe Sequence
aacacagaagttgtcaccactttat

SEQ ID NO: 158398 - DNA, 25 bp, Probe Sequence
aaaagaaaatgcactctaacttatg

SEQ ID NO: 158399 - DNA, 25 bp, Probe Sequence
aaaagaaagctgcgttaatgtttgc

SEQ ID NO: 158400 - DNA, 25 bp, Probe Sequence
aaaagacagagcctgtttactcatt

SEQ ID NO: 158401 - DNA, 25 bp, Probe Sequence
aaccagggggctattgtctctttat

SEQ ID NO: 158402 - DNA, 25 bp, Probe Sequence
aactagaaggctgtttgaacttttg

SEQ ID NO: 158403 - DNA, 25 bp, Probe Sequence
aactaaaactgagaggctacttcct

SEQ ID NO: 158404 - DNA, 25 bp, Probe Sequence
aactaccacgtgtgtattttccgct

SEQ ID NO: 158405 - DNA, 25 bp, Probe Sequence
aacactccaatgatagttttcccgt

SEQ ID NO: 158406 - DNA, 25 bp, Probe Sequence
aacaaggcttgaatctgtattaccc

SEQ ID NO: 158407 - DNA, 25 bp, Probe Sequence
aacaattttaatgctatttccccag

SEQ ID NO: 158408 - DNA, 25 bp, Probe Sequence
aaaattttagctgctttatcatctt

SEQ ID NO: 158409 - DNA, 25 bp, Probe Sequence
aacaagtttgcactgccttacatcc

SEQ ID NO: 158410 - DNA, 25 bp, Probe Sequence
aacagagggaagttcttaacgcagg

SEQ ID NO: 158411 - DNA, 25 bp, Probe Sequence
aacaggccgaagtggctaaccaaga

SEQ ID NO: 158412 - DNA, 25 bp, Probe Sequence
aacatgtgccctcaggccaaaaaaa

SEQ ID NO: 158413 - DNA, 25 bp, Probe Sequence
aacactgacctcttgtctcaaaaaa

SEQ ID NO: 158414 - DNA, 25 bp, Probe Sequence
aacaataccaatctgcccaaaatat

SEQ ID NO: 158415 - DNA, 25 bp, Probe Sequence
aacaatacctatcataactacgtat

SEQ ID NO: 158416 - DNA, 25 bp, Probe Sequence
aaaatacccaccaaaagcactctat

SEQ ID NO: 158417 - DNA, 25 bp, Probe Sequence
aaaataccagctgatgaaggcatct

SEQ ID NO: 158418 - DNA, 25 bp, Probe Sequence
aaaataccagctgatgaaggcatct

SEQ ID NO: 158419 - DNA, 25 bp, Probe Sequence
aaaagaccacagctgaaggcatcat

SEQ ID NO: 158420 - DNA, 25 bp, Probe Sequence
aacagctgaccaacgtgaagatact

SEQ ID NO: 158421 - DNA, 25 bp, Probe Sequence
aacagctgaccaacgtgaagatact

SEQ ID NO: 158422 - DNA, 25 bp, Probe Sequence
aacatgtcccgctgtgtagaacttt

SEQ ID NO: 158423 - DNA, 25 bp, Probe Sequence
aacagccaactctggaagacatttg

SEQ ID NO: 158424 - DNA, 25 bp, Probe Sequence
aaaatcacaccttagaagtcatcgg

SEQ ID NO: 158425 - DNA, 25 bp, Probe Sequence
aaaatcacctcattcttcatttcag

SEQ ID NO: 158426 - DNA, 25 bp, Probe Sequence
aaaatctcattctacctgcagttta

SEQ ID NO: 158427 - DNA, 25 bp, Probe Sequence
aacaattccacttccggtacatatc

SEQ ID NO: 158428 - DNA, 25 bp, Probe Sequence
aaaaggcaccattgacgtgtcaaag

SEQ ID NO: 158429 - DNA, 25 bp, Probe Sequence
aaaatgtgcatattggagcagaaca

SEQ ID NO: 158430 - DNA, 25 bp, Probe Sequence
aaaatggcaacatggcaggcatctc

SEQ ID NO: 158431 - DNA, 25 bp, Probe Sequence
aacaatggaaaactaagcacctatt

SEQ ID NO: 158432 - DNA, 25 bp, Probe Sequence
aacagctaaaagagcacacccgtct

SEQ ID NO: 158433 - DNA, 25 bp, Probe Sequence
aacacacagaagggagaccccgcct

SEQ ID NO: 158434 - DNA, 25 bp, Probe Sequence
aacacagcaagggtgatgggaaagc

SEQ ID NO: 158435 - DNA, 25 bp, Probe Sequence
aacacaaccgaggagcgtatacagt

SEQ ID NO: 158436 - DNA, 25 bp, Probe Sequence
aacaaaacgcagcgcatggtaccag

SEQ ID NO: 158437 - DNA, 25 bp, Probe Sequence
aacaaaaacctgccattttcacctg

SEQ ID NO: 158438 - DNA, 25 bp, Probe Sequence
aacaacaagtgtgccttctgtaccc

SEQ ID NO: 158439 - DNA, 25 bp, Probe Sequence
aaaagcatagctgccctttgctgtc

SEQ ID NO: 158440 - DNA, 25 bp, Probe Sequence
aaaagattgtgagctgcctcgttcc

SEQ ID NO: 158441 - DNA, 25 bp, Probe Sequence
aaaagtatgtagttcgctgtgtgtc

SEQ ID NO: 158442 - DNA, 25 bp, Probe Sequence
aaaagatttgaactcctgctggaat

SEQ ID NO: 158443 - DNA, 25 bp, Probe Sequence
aaaagatttgaactcctgctggaat

SEQ ID NO: 158444 - DNA, 25 bp, Probe Sequence
aaaatattgaacttcccatggatac

SEQ ID NO: 158445 - DNA, 25 bp, Probe Sequence
aaaatacgaatgttaccaggcatgg

SEQ ID NO: 158446 - DNA, 25 bp, Probe Sequence
aaaatgaggtacttacacactgtgc

SEQ ID NO: 158447 - DNA, 25 bp, Probe Sequence
aaaagcacctatttagcacacatgg

SEQ ID NO: 158448 - DNA, 25 bp, Probe Sequence
aaaagagccctctcagcaagcatgt

SEQ ID NO: 158449 - DNA, 25 bp, Probe Sequence
aaaagagccttcccattgaattgaa

SEQ ID NO: 158450 - DNA, 25 bp, Probe Sequence
aaaagaggtacccattggcgctcaa

SEQ ID NO: 158451 - DNA, 25 bp, Probe Sequence
aacaaaggatatcgtcaatgggctg

SEQ ID NO: 158452 - DNA, 25 bp, Probe Sequence
aacaaacgatatatctcatggctcg

SEQ ID NO: 158453 - DNA, 25 bp, Probe Sequence
aacaccaggctgtgtttgctgctct

SEQ ID NO: 158454 - DNA, 25 bp, Probe Sequence
aacaccgtgtggaagttcaccttga

SEQ ID NO: 158455 - DNA, 25 bp, Probe Sequence
aacacacgtggacatttccacttgt

SEQ ID NO: 158456 - DNA, 25 bp, Probe Sequence
aacaccaggtgtaattacctgtttg

SEQ ID NO: 158457 - DNA, 25 bp, Probe Sequence
aacaagccgtatcttcaccagtgtt

SEQ ID NO: 158458 - DNA, 25 bp, Probe Sequence
aacaaggccgacttgtcacgcatgt

SEQ ID NO: 158459 - DNA, 25 bp, Probe Sequence
aaaaggcttggctatggccctgtgt

SEQ ID NO: 158460 - DNA, 25 bp, Probe Sequence
aaaaggcttggctatggccctgtgt

SEQ ID NO: 158461 - DNA, 25 bp, Probe Sequence
aacaagcctgatttaggcactgctt

SEQ ID NO: 158462 - DNA, 25 bp, Probe Sequence
aacacagtgtattctagatcatcta

SEQ ID NO: 158463 - DNA, 25 bp, Probe Sequence
aaaatgctgacaatccagagttaat

SEQ ID NO: 158464 - DNA, 25 bp, Probe Sequence
aaaatgtacttgttgatctctgaat

SEQ ID NO: 158465 - DNA, 25 bp, Probe Sequence
aaaagtgagctttgaactgtagata

SEQ ID NO: 158466 - DNA, 25 bp, Probe Sequence
aaaatcattgctttgaagcagttgt

SEQ ID NO: 158467 - DNA, 25 bp, Probe Sequence
aaaagtagtattgcagacattgctg

SEQ ID NO: 158468 - DNA, 25 bp, Probe Sequence
aaaagatgagtatgcctgccgtgtg

SEQ ID NO: 158469 - DNA, 25 bp, Probe Sequence
aaaaggcagtgaggcacccgtgcct

SEQ ID NO: 158470 - DNA, 25 bp, Probe Sequence
aaaatgtgctattgagattccagtg

SEQ ID NO: 158471 - DNA, 25 bp, Probe Sequence
aaaagtgtgatccaagctgtcccaa

SEQ ID NO: 158472 - DNA, 25 bp, Probe Sequence
aaaagtgtggcccacagaccaagag

SEQ ID NO: 158473 - DNA, 25 bp, Probe Sequence
aaaattgtcgtcaacatacctgccg

SEQ ID NO: 158474 - DNA, 25 bp, Probe Sequence
aaaatttcagtgaacacacccctat

SEQ ID NO: 158475 - DNA, 25 bp, Probe Sequence
aaaatcagttgtagacaccaccctc

SEQ ID NO: 158476 - DNA, 25 bp, Probe Sequence
aaaatgagtttgtcaacgccctctc

SEQ ID NO: 158477 - DNA, 25 bp, Probe Sequence
aaaagtgatattgaacatgcgcgtc

SEQ ID NO: 158478 - DNA, 25 bp, Probe Sequence
aaaaggtacatgcactctgctggcc

SEQ ID NO: 158479 - DNA, 25 bp, Probe Sequence
aacaagggagctcactcagtgggtt

SEQ ID NO: 158480 - DNA, 25 bp, Probe Sequence
aaaatggtggagcaacagtatggtt

SEQ ID NO: 158481 - DNA, 25 bp, Probe Sequence
aaaatggtcaagtcatcaaggggat

SEQ ID NO: 158482 - DNA, 25 bp, Probe Sequence
aaaagttcacagtcaaatggggagg

SEQ ID NO: 158483 - DNA, 25 bp, Probe Sequence
aaaagttcgaggctcaggcaggccg

SEQ ID NO: 158484 - DNA, 25 bp, Probe Sequence
aagaccttcgggtcaaggcagaggc

SEQ ID NO: 158485 - DNA, 25 bp, Probe Sequence
aagcagcctcatcaggtaacggccc

SEQ ID NO: 158486 - DNA, 25 bp, Probe Sequence
aacagccgcttctggaacggcagcc

SEQ ID NO: 158487 - DNA, 25 bp, Probe Sequence
aacagccttaatctgcttggtagac

SEQ ID NO: 158488 - DNA, 25 bp, Probe Sequence
aacacccgcaagaagccggtagtct

SEQ ID NO: 158489 - DNA, 25 bp, Probe Sequence
aacactcctgaacagtcatgttttt

SEQ ID NO: 158490 - DNA, 25 bp, Probe Sequence
aacacttctaatgagtcaagtccta

SEQ ID NO: 158491 - DNA, 25 bp, Probe Sequence
aaaattgctaagacagtagatgtta

SEQ ID NO: 158492 - DNA, 25 bp, Probe Sequence
aaaatttggagtgtcagcagctata

SEQ ID NO: 158493 - DNA, 25 bp, Probe Sequence
aaaagggtagcggtatcatgtatat

SEQ ID NO: 158494 - DNA, 25 bp, Probe Sequence
aaaaggctttgcacatttctatatg

SEQ ID NO: 158495 - DNA, 25 bp, Probe Sequence
aaaagtttgctctgcatttttgatg

SEQ ID NO: 158496 - DNA, 25 bp, Probe Sequence
aaaagttatctctgggtattgcata

SEQ ID NO: 158497 - DNA, 25 bp, Probe Sequence
aaaagtttcacctagtttatcatat

SEQ ID NO: 158498 - DNA, 25 bp, Probe Sequence
aaaagggcggccaatgatttaatat

SEQ ID NO: 158499 - DNA, 25 bp, Probe Sequence
aaaagaccagactaatatattaata

SEQ ID NO: 158500 - DNA, 25 bp, Probe Sequence
aacaaagcccaagatatagtcaaga

SEQ ID NO: 158501 - DNA, 25 bp, Probe Sequence
aactgaacccaagctaacagaagga

SEQ ID NO: 158502 - DNA, 25 bp, Probe Sequence
aacagacgggaagcgtacgaagcgg

SEQ ID NO: 158503 - DNA, 25 bp, Probe Sequence
aacataagtggttcctaacgagagc

SEQ ID NO: 158504 - DNA, 25 bp, Probe Sequence
aaaagactgggtgttgactgcagct

SEQ ID NO: 158505 - DNA, 25 bp, Probe Sequence
aaaagtgcgctggtgtttacaacta

SEQ ID NO: 158506 - DNA, 25 bp, Probe Sequence
aacacagtgactggtatttaatgct

SEQ ID NO: 158507 - DNA, 25 bp, Probe Sequence
aacaagtcacatcgttacatggatg

SEQ ID NO: 158508 - DNA, 25 bp, Probe Sequence
aacacttcatcagtgcttagcatat

SEQ ID NO: 158509 - DNA, 25 bp, Probe Sequence
aacaagctagcagtgagtgagctgt

SEQ ID NO: 158510 - DNA, 25 bp, Probe Sequence
aacatggtacaccttgactgtccct

SEQ ID NO: 158511 - DNA, 25 bp, Probe Sequence
aaaagttcatcacgtgactgttaat

SEQ ID NO: 158512 - DNA, 25 bp, Probe Sequence
aaaatgtctcaatggtgctataata

SEQ ID NO: 158513 - DNA, 25 bp, Probe Sequence
aaaattccaatcctggtcatcaaca

SEQ ID NO: 158514 - DNA, 25 bp, Probe Sequence
aaaatcccagccctagtagcaatta

SEQ ID NO: 158515 - DNA, 25 bp, Probe Sequence
aaaatgcaccacataagtcaaacaa

SEQ ID NO: 158516 - DNA, 25 bp, Probe Sequence
aaaagatcccagtcacagtaacgag

SEQ ID NO: 158517 - DNA, 25 bp, Probe Sequence
aacaagacctcaaaaggacacaggc

SEQ ID NO: 158518 - DNA, 25 bp, Probe Sequence
aaaatacctagcacagtagcatgca

SEQ ID NO: 158519 - DNA, 25 bp, Probe Sequence
aaaataccaacagtgattatgctca

SEQ ID NO: 158520 - DNA, 25 bp, Probe Sequence
aaaatcactaacattatattgcaat

SEQ ID NO: 158521 - DNA, 25 bp, Probe Sequence
aaaatcactaacattatattgcaat

SEQ ID NO: 158522 - DNA, 25 bp, Probe Sequence
aaaatcactaacattatattgcaat

SEQ ID NO: 158523 - DNA, 25 bp, Probe Sequence
aaaatcctagctcagaatcttcaca

SEQ ID NO: 158524 - DNA, 25 bp, Probe Sequence
aacaatcctgaaccaggcctgtcac

SEQ ID NO: 158525 - DNA, 25 bp, Probe Sequence
aacaactctgtacaagacacatcca

SEQ ID NO: 158526 - DNA, 25 bp, Probe Sequence
aacaggcgagtacaacagcatcatc

SEQ ID NO: 158527 - DNA, 25 bp, Probe Sequence
aacagcactgactagggaaatgatc

SEQ ID NO: 158528 - DNA, 25 bp, Probe Sequence
aacaactgtacatgctcaaggatca

SEQ ID NO: 158529 - DNA, 25 bp, Probe Sequence
aacaagtgtgttcgtcacaggattt

SEQ ID NO: 158530 - DNA, 25 bp, Probe Sequence
aaaaggttgtgctatccagattttt

SEQ ID NO: 158531 - DNA, 25 bp, Probe Sequence
aacaaagccttatccagcattattt

SEQ ID NO: 158532 - DNA, 25 bp, Probe Sequence
aacaaatctctgacacccaatttcc

SEQ ID NO: 158533 - DNA, 25 bp, Probe Sequence
aacaccatcttcatatccaaggtag

SEQ ID NO: 158534 - DNA, 25 bp, Probe Sequence
aaaatctcttaaatcttcaggtaca

SEQ ID NO: 158535 - DNA, 25 bp, Probe Sequence
aaaatctcagtacatctataggaag

SEQ ID NO: 158536 - DNA, 25 bp, Probe Sequence
aaaatctaggtgaaccattgtaagt

SEQ ID NO: 158537 - DNA, 25 bp, Probe Sequence
aaaatgcaaggctttctcttaaatt

SEQ ID NO: 158538 - DNA, 25 bp, Probe Sequence
aaaatgccatggtgtgttcccaatt

SEQ ID NO: 158539 - DNA, 25 bp, Probe Sequence
aaaatctcatgaatggtgtttacag

SEQ ID NO: 158540 - DNA, 25 bp, Probe Sequence
aaaatgcctacacgctctttaaaat

SEQ ID NO: 158541 - DNA, 25 bp, Probe Sequence
aaaatgactcatcacttcccaaaag

SEQ ID NO: 158542 - DNA, 25 bp, Probe Sequence
aaaatacacttcatatctcctaata

SEQ ID NO: 158543 - DNA, 25 bp, Probe Sequence
aaaatgcacactgcgggttattgat

SEQ ID NO: 158544 - DNA, 25 bp, Probe Sequence
aacaatcagtcatcatgggtgtttt

SEQ ID NO: 158545 - DNA, 25 bp, Probe Sequence
aaaagttcttcagtggtgatttctg

SEQ ID NO: 158546 - DNA, 25 bp, Probe Sequence
aaaagttcattatgttgtttctcta

SEQ ID NO: 158547 - DNA, 25 bp, Probe Sequence
aaaagtctcatgtagatttatttcc

SEQ ID NO: 158548 - DNA, 25 bp, Probe Sequence
aaaatgtccaggtctctgctgaatt

SEQ ID NO: 158549 - DNA, 25 bp, Probe Sequence
aacaagttctagtcactctgatctt

SEQ ID NO: 158550 - DNA, 25 bp, Probe Sequence
aaaagtactgaccaacatatctcat

SEQ ID NO: 158551 - DNA, 25 bp, Probe Sequence
aaaaggacgacccagcaacatgctt

SEQ ID NO: 158552 - DNA, 25 bp, Probe Sequence
aaaatgaactcacccacgatatcat

SEQ ID NO: 158553 - DNA, 25 bp, Probe Sequence
aacaagagatctcgaaccctgtcta

SEQ ID NO: 158554 - DNA, 25 bp, Probe Sequence
aaaatgagacaggctacccttcggg

SEQ ID NO: 158555 - DNA, 25 bp, Probe Sequence
aacactgaaatcctagccctgtaag

SEQ ID NO: 158556 - DNA, 25 bp, Probe Sequence
aacagggctaccaatccctttagct

SEQ ID NO: 158557 - DNA, 25 bp, Probe Sequence
aacagtaggcttatcgcctttgcac

SEQ ID NO: 158558 - DNA, 25 bp, Probe Sequence
aaaatagtgttgacatccctgcctg

SEQ ID NO: 158559 - DNA, 25 bp, Probe Sequence
aacaccaatattaacacgctgcctg

SEQ ID NO: 158560 - DNA, 25 bp, Probe Sequence
aacccaaactgcaagtggtactgtt

SEQ ID NO: 158561 - DNA, 25 bp, Probe Sequence
aacccacctacaatggcgttatgtt

SEQ ID NO: 158562 - DNA, 25 bp, Probe Sequence
aaccctcactagcaggactggtggt

SEQ ID NO: 158563 - DNA, 25 bp, Probe Sequence
aacactttcttgaaggtcaggggct

SEQ ID NO: 158564 - DNA, 25 bp, Probe Sequence
aacactcctccttaggcctggaggc

SEQ ID NO: 158565 - DNA, 25 bp, Probe Sequence
aacacctgcctcacaggttgctatg

SEQ ID NO: 158566 - DNA, 25 bp, Probe Sequence
aacaaacctacacgttgtgcacatg

SEQ ID NO: 158567 - DNA, 25 bp, Probe Sequence
aacaaaccatacctgttctctgtgc

SEQ ID NO: 158568 - DNA, 25 bp, Probe Sequence
aaaatataataccatcttctctgtt

SEQ ID NO: 158569 - DNA, 25 bp, Probe Sequence
aaaataaaatctaactctcatttga

SEQ ID NO: 158570 - DNA, 25 bp, Probe Sequence
aaaataactcatcatggcaccttta

SEQ ID NO: 158571 - DNA, 25 bp, Probe Sequence
aaaatattcgatgagcacccattat

SEQ ID NO: 158572 - DNA, 25 bp, Probe Sequence
aaaatatatccaatgtccctttgat

SEQ ID NO: 158573 - DNA, 25 bp, Probe Sequence
aaaatgcacccaactagctctatgt

SEQ ID NO: 158574 - DNA, 25 bp, Probe Sequence
aacaagcatacctatctgactcctt

SEQ ID NO: 158575 - DNA, 25 bp, Probe Sequence
aaaatgatagatgtggattctctta

SEQ ID NO: 158576 - DNA, 25 bp, Probe Sequence
aaaatgctacatgtgaataatcagt

SEQ ID NO: 158577 - DNA, 25 bp, Probe Sequence
aaaatcttgacccagctgaacatgt

SEQ ID NO: 158578 - DNA, 25 bp, Probe Sequence
aaaatagtccaccagtgattctgta

SEQ ID NO: 158579 - DNA, 25 bp, Probe Sequence
aaaatattcatctgcagtttttata

SEQ ID NO: 158580 - DNA, 25 bp, Probe Sequence
aaaattgtgctgttcgtagtttgta

SEQ ID NO: 158581 - DNA, 25 bp, Probe Sequence
aaaattgctctgtgtatatctcttg

SEQ ID NO: 158582 - DNA, 25 bp, Probe Sequence
aacaattttacgtcatgtccctgga

SEQ ID NO: 158583 - DNA, 25 bp, Probe Sequence
aacaatctcctagaagtgcctgtgg

SEQ ID NO: 158584 - DNA, 25 bp, Probe Sequence
aacaacgcgtacggagcgctcgatg

SEQ ID NO: 158585 - DNA, 25 bp, Probe Sequence
aacacaccgttagagatcactgagc

SEQ ID NO: 158586 - DNA, 25 bp, Probe Sequence
aagccgcctggaatgtcttcacggc

SEQ ID NO: 158587 - DNA, 25 bp, Probe Sequence
aacactgtatgatggttgtacgtcc

SEQ ID NO: 158588 - DNA, 25 bp, Probe Sequence
aacacgtggatctgcatggtttgcc

SEQ ID NO: 158589 - DNA, 25 bp, Probe Sequence
aacacgaatgtctctgtagcttcct

SEQ ID NO: 158590 - DNA, 25 bp, Probe Sequence
aacacgcaaggctgtgagactacct

SEQ ID NO: 158591 - DNA, 25 bp, Probe Sequence
aacacgtactattaagattggcctt

SEQ ID NO: 158592 - DNA, 25 bp, Probe Sequence
aacactttttaaagggtgcattgat

SEQ ID NO: 158593 - DNA, 25 bp, Probe Sequence
aacagcctgttaataaaggctttgt

SEQ ID NO: 158594 - DNA, 25 bp, Probe Sequence
aacagtattccataagcagcctttt

SEQ ID NO: 158595 - DNA, 25 bp, Probe Sequence
aacaagtattcattacagtaattta

SEQ ID NO: 158596 - DNA, 25 bp, Probe Sequence
aacaaggtgtttcaggagcgcatta

SEQ ID NO: 158597 - DNA, 25 bp, Probe Sequence
aaaagggcagttcatgctcatgtca

SEQ ID NO: 158598 - DNA, 25 bp, Probe Sequence
aaaatggtgcagattggctgattca

SEQ ID NO: 158599 - DNA, 25 bp, Probe Sequence
aaaatggctcaatttgtgttgataa

SEQ ID NO: 158600 - DNA, 25 bp, Probe Sequence
aaaaggctaagtaatatgtgaatat

SEQ ID NO: 158601 - DNA, 25 bp, Probe Sequence
aaaaggccaaatcccatgtcatcat

SEQ ID NO: 158602 - DNA, 25 bp, Probe Sequence
aacaattccaaaccactgctactgt

SEQ ID NO: 158603 - DNA, 25 bp, Probe Sequence
aacaacaccaaatcattcaatgctt

SEQ ID NO: 158604 - DNA, 25 bp, Probe Sequence
aacacgagccctaatatcttactta

SEQ ID NO: 158605 - DNA, 25 bp, Probe Sequence
aacagggtgactaaagtcaaccata

SEQ ID NO: 158606 - DNA, 25 bp, Probe Sequence
aacaggttaccaaatgaaatgtcat

SEQ ID NO: 158607 - DNA, 25 bp, Probe Sequence
aacagacttttcagtggaaatcata

SEQ ID NO: 158608 - DNA, 25 bp, Probe Sequence
aacagactcgtgggacttcagaaca

SEQ ID NO: 158609 - DNA, 25 bp, Probe Sequence
aacaccattgagggagctgggagac

SEQ ID NO: 158610 - DNA, 25 bp, Probe Sequence
aacacggatgataccatcggggacc

SEQ ID NO: 158611 - DNA, 25 bp, Probe Sequence
aacagggttctagcgatgggactgc

SEQ ID NO: 158612 - DNA, 25 bp, Probe Sequence
aacacagggttagcaggtggtcacc

SEQ ID NO: 158613 - DNA, 25 bp, Probe Sequence
aacacagaggagaaccgccggctgt

SEQ ID NO: 158614 - DNA, 25 bp, Probe Sequence
aacaagcaggtgaacaagaccaggt

SEQ ID NO: 158615 - DNA, 25 bp, Probe Sequence
aacaagattgtatgaaccgcatggt

SEQ ID NO: 158616 - DNA, 25 bp, Probe Sequence
aacagaattgtttactctccaaatt

SEQ ID NO: 158617 - DNA, 25 bp, Probe Sequence
aacaaatgtttggaccccaagtgct

SEQ ID NO: 158618 - DNA, 25 bp, Probe Sequence
aaaatattatgccccaccaaggctg

SEQ ID NO: 158619 - DNA, 25 bp, Probe Sequence
aaaatgtatatcttcagcccaacct

SEQ ID NO: 158620 - DNA, 25 bp, Probe Sequence
aaaatgtatatcccactggaccctg

SEQ ID NO: 158621 - DNA, 25 bp, Probe Sequence
aacaattatataccctggtcccatc

SEQ ID NO: 158622 - DNA, 25 bp, Probe Sequence
aacaatgcttaacccatgagctcca

SEQ ID NO: 158623 - DNA, 25 bp, Probe Sequence
aaaatctgccagttctgctgactca

SEQ ID NO: 158624 - DNA, 25 bp, Probe Sequence
aaaatccagatgtgcagacagctga

SEQ ID NO: 158625 - DNA, 25 bp, Probe Sequence
aacaataagatcagcaacatccctg

SEQ ID NO: 158626 - DNA, 25 bp, Probe Sequence
aacaaactacaagacatcccatata

SEQ ID NO: 158627 - DNA, 25 bp, Probe Sequence
aacaaactgaacgacattctcctca

SEQ ID NO: 158628 - DNA, 25 bp, Probe Sequence
aaaatcctgcatacttcatttcctg

SEQ ID NO: 158629 - DNA, 25 bp, Probe Sequence
aaaattctgatcattattcttcatg

SEQ ID NO: 158630 - DNA, 25 bp, Probe Sequence
aaaatacatgactatctgacctttt

SEQ ID NO: 158631 - DNA, 25 bp, Probe Sequence
aaaatgatatactactattgcttgt

SEQ ID NO: 158632 - DNA, 25 bp, Probe Sequence
aaaatgataatctctatatagtcta

SEQ ID NO: 158633 - DNA, 25 bp, Probe Sequence
aaaatatctatcttttcatcatgtc

SEQ ID NO: 158634 - DNA, 25 bp, Probe Sequence
aaaattctcatcctatccatattac

SEQ ID NO: 158635 - DNA, 25 bp, Probe Sequence
aacactcatagttttgccaattacc

SEQ ID NO: 158636 - DNA, 25 bp, Probe Sequence
aaaatcattttaaccattgctactg

SEQ ID NO: 158637 - DNA, 25 bp, Probe Sequence
aaaatgtgtttctcctgagctagga

SEQ ID NO: 158638 - DNA, 25 bp, Probe Sequence
aaaatggctttctcagccaggcgtg

SEQ ID NO: 158639 - DNA, 25 bp, Probe Sequence
aaaatactttctacctacagcgtgc

SEQ ID NO: 158640 - DNA, 25 bp, Probe Sequence
aacaagacttttcctgcaatagcct

SEQ ID NO: 158641 - DNA, 25 bp, Probe Sequence
aaaatagagttttctgcagtatgct

SEQ ID NO: 158642 - DNA, 25 bp, Probe Sequence
aacaattggtctcctccagtacaaa

SEQ ID NO: 158643 - DNA, 25 bp, Probe Sequence
aaaatttctcatcttcgtacttgat

SEQ ID NO: 158644 - DNA, 25 bp, Probe Sequence
aacaatttcttatctcagtttgaga

SEQ ID NO: 158645 - DNA, 25 bp, Probe Sequence
aaaattgtcctgtattatgttgaaa

SEQ ID NO: 158646 - DNA, 25 bp, Probe Sequence
aaaatgtgtttctcttgtatgaatt

SEQ ID NO: 158647 - DNA, 25 bp, Probe Sequence
aacaatgtttctaaattgtcttatt

SEQ ID NO: 158648 - DNA, 25 bp, Probe Sequence
aacaatatctctgtagttggatcaa

SEQ ID NO: 158649 - DNA, 25 bp, Probe Sequence
aacaatatctctgtagttggatcaa

SEQ ID NO: 158650 - DNA, 25 bp, Probe Sequence
aacaatatctctgtagttggatcaa

SEQ ID NO: 158651 - DNA, 25 bp, Probe Sequence
aacaatatctctgtagttggatcaa

SEQ ID NO: 158652 - DNA, 25 bp, Probe Sequence
aacaacacttgacaggctgttgcac

SEQ ID NO: 158653 - DNA, 25 bp, Probe Sequence
aacagtaatattcaggctattctgg

SEQ ID NO: 158654 - DNA, 25 bp, Probe Sequence
aacggagtactgagtcttctgtaac

SEQ ID NO: 158655 - DNA, 25 bp, Probe Sequence
aagtggtatccgaggttcttaatat

SEQ ID NO: 158656 - DNA, 25 bp, Probe Sequence
aagtcctaccagtggaagatgctca

SEQ ID NO: 158657 - DNA, 25 bp, Probe Sequence
aactcactaccttgtggtagtccaa

SEQ ID NO: 158658 - DNA, 25 bp, Probe Sequence
aactatattccctggatcgagaaca

SEQ ID NO: 158659 - DNA, 25 bp, Probe Sequence
aaaatcattcatccaagaaccagaa

SEQ ID NO: 158660 - DNA, 25 bp, Probe Sequence
aaaatcttgcataagctgaactaaa

SEQ ID NO: 158661 - DNA, 25 bp, Probe Sequence
aaaatgcttgatattaattaatgaa

SEQ ID NO: 158662 - DNA, 25 bp, Probe Sequence
aaaatgcttttgttcagttctggat

SEQ ID NO: 158663 - DNA, 25 bp, Probe Sequence
aaaatttgtagcttatgtcttggct

SEQ ID NO: 158664 - DNA, 25 bp, Probe Sequence
aaaattcttgatgatatctgtgtgg

SEQ ID NO: 158665 - DNA, 25 bp, Probe Sequence
aaaattcttagtaatgagtatgagg

SEQ ID NO: 158666 - DNA, 25 bp, Probe Sequence
aaaatgtttgttttggatgaagcag

SEQ ID NO: 158667 - DNA, 25 bp, Probe Sequence
aacaattattgttcaaagatgagaa

SEQ ID NO: 158668 - DNA, 25 bp, Probe Sequence
aaaatgatcttccacaaaaaataca

SEQ ID NO: 158669 - DNA, 25 bp, Probe Sequence
aaaatattatgccacggaaatatat

SEQ ID NO: 158670 - DNA, 25 bp, Probe Sequence
aaaatataatcgtgtgtgtatacat

SEQ ID NO: 158671 - DNA, 25 bp, Probe Sequence
aaaattacattcttctgatgtaaca

SEQ ID NO: 158672 - DNA, 25 bp, Probe Sequence
aaaatgttcacctgcagatgttctg

SEQ ID NO: 158673 - DNA, 25 bp, Probe Sequence
aaaattccacattgaagttgtgtgc

SEQ ID NO: 158674 - DNA, 25 bp, Probe Sequence
aagtactccaactcttgtggtgcca

SEQ ID NO: 158675 - DNA, 25 bp, Probe Sequence
aagactttcaaatctttggctgcct

SEQ ID NO: 158676 - DNA, 25 bp, Probe Sequence
aacagtttctactctaggagatcct

SEQ ID NO: 158677 - DNA, 25 bp, Probe Sequence
aacaatttcaacacaggggacagct

SEQ ID NO: 158678 - DNA, 25 bp, Probe Sequence
aacacctaaacccaagagggcagct

SEQ ID NO: 158679 - DNA, 25 bp, Probe Sequence
aacagcacacaagtctaaggggggt

SEQ ID NO: 158680 - DNA, 25 bp, Probe Sequence
aacatacaaaaatcagccgggcgtg

SEQ ID NO: 158681 - DNA, 25 bp, Probe Sequence
tacaaaaaattagccgggtgcggtg

SEQ ID NO: 158682 - DNA, 25 bp, Probe Sequence
aaaataaattagccatggaggatgc

SEQ ID NO: 158683 - DNA, 25 bp, Probe Sequence
aaaataacatagttcatgctgaaga

SEQ ID NO: 158684 - DNA, 25 bp, Probe Sequence
aaaatacatatgcagtctagtcaga

SEQ ID NO: 158685 - DNA, 25 bp, Probe Sequence
aaaatttgcatatggctacatcgag

SEQ ID NO: 158686 - DNA, 25 bp, Probe Sequence
aaaatttgctgaatgcttgctacga

SEQ ID NO: 158687 - DNA, 25 bp, Probe Sequence
aaaattgcagtgatctggtgactgg

SEQ ID NO: 158688 - DNA, 25 bp, Probe Sequence
aaaattagctggtcatggtgtgtac

SEQ ID NO: 158689 - DNA, 25 bp, Probe Sequence
aaaattcacatggccgggtgtcatg

SEQ ID NO: 158690 - DNA, 25 bp, Probe Sequence
aaaattagctgggcgtggtgttggg

SEQ ID NO: 158691 - DNA, 25 bp, Probe Sequence
aaaattagctgggcgtgctggcaca

SEQ ID NO: 158692 - DNA, 25 bp, Probe Sequence
aaaattggccaggcgcagtggcaca

SEQ ID NO: 158693 - DNA, 25 bp, Probe Sequence
aaaattagccaggcacctgcagtcc

SEQ ID NO: 158694 - DNA, 25 bp, Probe Sequence
aacagcattcagcacaacactcgct

SEQ ID NO: 158695 - DNA, 25 bp, Probe Sequence
aacagcattcagcacaacactcgct

SEQ ID NO: 158696 - DNA, 25 bp, Probe Sequence
aacacttcaaggtgcagctcgtgga

SEQ ID NO: 158697 - DNA, 25 bp, Probe Sequence
aacaccaacatcgatgggcggtgga

SEQ ID NO: 158698 - DNA, 25 bp, Probe Sequence
aacggaaccgacagctggagcgaga

SEQ ID NO: 158699 - DNA, 25 bp, Probe Sequence
aacatggcaaccgactggggagggg

SEQ ID NO: 158700 - DNA, 25 bp, Probe Sequence
aactgagcttcagacagggggtggg

SEQ ID NO: 158701 - DNA, 25 bp, Probe Sequence
aacaactctgaggacataggggatg

SEQ ID NO: 158702 - DNA, 25 bp, Probe Sequence
aacaactctgaggacataggggatg

SEQ ID NO: 158703 - DNA, 25 bp, Probe Sequence
aacaacttcagtgactgtggtgtat

SEQ ID NO: 158704 - DNA, 25 bp, Probe Sequence
aacacatttcatatactgcaggtaa

SEQ ID NO: 158705 - DNA, 25 bp, Probe Sequence
aacacataccacaaaccggtaactg

SEQ ID NO: 158706 - DNA, 25 bp, Probe Sequence
aacacaggaacaactgccggtgata

SEQ ID NO: 158707 - DNA, 25 bp, Probe Sequence
aacacaagacagaccccaggttaat

SEQ ID NO: 158708 - DNA, 25 bp, Probe Sequence
aacacagaccagacctactggtgtg

SEQ ID NO: 158709 - DNA, 25 bp, Probe Sequence
aacacaaccattctcatttgtctgt

SEQ ID NO: 158710 - DNA, 25 bp, Probe Sequence
aacactaaactgcttgtagatcttc

SEQ ID NO: 158711 - DNA, 25 bp, Probe Sequence
catacttgaaatctttccgagtttc

SEQ ID NO: 158712 - DNA, 25 bp, Probe Sequence
aacttactctttcatccgatgttta

SEQ ID NO: 158713 - DNA, 25 bp, Probe Sequence
aactaacttcttcaactatggactt

SEQ ID NO: 158714 - DNA, 25 bp, Probe Sequence
aactcaaatgtcgcaaacgtgtttt

SEQ ID NO: 158715 - DNA, 25 bp, Probe Sequence
aactgcgactgaaacaaacaggttc

SEQ ID NO: 158716 - DNA, 25 bp, Probe Sequence
aactcaccttaataaagacttagat

SEQ ID NO: 158717 - DNA, 25 bp, Probe Sequence
caccttcctgtttgacaacgacttc

SEQ ID NO: 158718 - DNA, 25 bp, Probe Sequence
aagcttcctggatagcctacacttc

SEQ ID NO: 158719 - DNA, 25 bp, Probe Sequence
aacatctccatgggacctttcaggt

SEQ ID NO: 158720 - DNA, 25 bp, Probe Sequence
aacactccctattcgtataagcaat

SEQ ID NO: 158721 - DNA, 25 bp, Probe Sequence
aacaagcgcctattggtgagggaag

SEQ ID NO: 158722 - DNA, 25 bp, Probe Sequence
aacaacatgacaatcaggtggagga

SEQ ID NO: 158723 - DNA, 25 bp, Probe Sequence
aacacaccaagttcgtgcgggacat

SEQ ID NO: 158724 - DNA, 25 bp, Probe Sequence
aacaactaagttttcaggacagcac

SEQ ID NO: 158725 - DNA, 25 bp, Probe Sequence
aacatgactaagatgcccaaccacc

SEQ ID NO: 158726 - DNA, 25 bp, Probe Sequence
aacacagctaaaatcagcctaacat

SEQ ID NO: 158727 - DNA, 25 bp, Probe Sequence
aacacacaaactaagcctacatttt

SEQ ID NO: 158728 - DNA, 25 bp, Probe Sequence
aacacacaaaaacccatatttctga

SEQ ID NO: 158729 - DNA, 25 bp, Probe Sequence
aacaactctgtaactgaattttctg

SEQ ID NO: 158730 - DNA, 25 bp, Probe Sequence
aactatttgcacacgacagatttct

SEQ ID NO: 158731 - DNA, 25 bp, Probe Sequence
aaaattgaagcaactacaacttctc

SEQ ID NO: 158732 - DNA, 25 bp, Probe Sequence
aaaataggcagaattccattcctcc

SEQ ID NO: 158733 - DNA, 25 bp, Probe Sequence
aaaataagcaatcttctattctcat

SEQ ID NO: 158734 - DNA, 25 bp, Probe Sequence
aaaataaagctggtctgcctctcca

SEQ ID NO: 158735 - DNA, 25 bp, Probe Sequence
aaaataaagtgtgcgatcttcaaaa

SEQ ID NO: 158736 - DNA, 25 bp, Probe Sequence
aaaattaaggtgtgactctgctgac

SEQ ID NO: 158737 - DNA, 25 bp, Probe Sequence
aaaattacagtggttgatgccttac

SEQ ID NO: 158738 - DNA, 25 bp, Probe Sequence
aaaattcacactcattatcccacat

SEQ ID NO: 158739 - DNA, 25 bp, Probe Sequence
aacacccacctgcatgtaatacaca

SEQ ID NO: 158740 - DNA, 25 bp, Probe Sequence
aactcctgacctcaggtgatccacc

SEQ ID NO: 158741 - DNA, 25 bp, Probe Sequence
aacttcgagcccacgtgattgacaa

SEQ ID NO: 158742 - DNA, 25 bp, Probe Sequence
aatatgtcggacaccagggtacaca

SEQ ID NO: 158743 - DNA, 25 bp, Probe Sequence
aatgactggggttctattagtaact

SEQ ID NO: 158744 - DNA, 25 bp, Probe Sequence
taaactgggggatattatgaagggc

SEQ ID NO: 158745 - DNA, 25 bp, Probe Sequence
aacaagctgggtatgtgcttgaagg

SEQ ID NO: 158746 - DNA, 25 bp, Probe Sequence
aacagttccgtaagctctttattgg

SEQ ID NO: 158747 - DNA, 25 bp, Probe Sequence
aacagcttgtcagagacttcctatg

SEQ ID NO: 158748 - DNA, 25 bp, Probe Sequence
aacgatttcccgtcttgactgagtt

SEQ ID NO: 158749 - DNA, 25 bp, Probe Sequence
aaggcttagcccagttgcctagttc

SEQ ID NO: 158750 - DNA, 25 bp, Probe Sequence
gaacctgtacccagttcttcaggct

SEQ ID NO: 158751 - DNA, 25 bp, Probe Sequence
aactcgtacggcaagtatttcaagt

SEQ ID NO: 158752 - DNA, 25 bp, Probe Sequence
aactggaaaggaagatgctttagga

SEQ ID NO: 158753 - DNA, 25 bp, Probe Sequence
aacagcgaacggtcagtcaaggatc

SEQ ID NO: 158754 - DNA, 25 bp, Probe Sequence
taaactaagggtgtcaagccccatt

SEQ ID NO: 158755 - DNA, 25 bp, Probe Sequence
aaaataagagaaagtcacaggccct

SEQ ID NO: 158756 - DNA, 25 bp, Probe Sequence
aacaagaaaaatatcaccagtccta

SEQ ID NO: 158757 - DNA, 25 bp, Probe Sequence
aacacttacatacattaccagtatc

SEQ ID NO: 158758 - DNA, 25 bp, Probe Sequence
aacacttcaaagtcatcttgccagc

SEQ ID NO: 158759 - DNA, 25 bp, Probe Sequence
aacactgcagagtgaactacagcag

SEQ ID NO: 158760 - DNA, 25 bp, Probe Sequence
aacaatggggaaagcttacagactg

SEQ ID NO: 158761 - DNA, 25 bp, Probe Sequence
aacagttggagattagtttgcaaat

SEQ ID NO: 158762 - DNA, 25 bp, Probe Sequence
aaaatatggagcttgcgattgagga

SEQ ID NO: 158763 - DNA, 25 bp, Probe Sequence
aaaatatccacaagctggagcagga

SEQ ID NO: 158764 - DNA, 25 bp, Probe Sequence
aacagcaatcacaaggcgggcggcg

SEQ ID NO: 158765 - DNA, 25 bp, Probe Sequence
aacaaaatgcaggccgagcgcggtg

SEQ ID NO: 158766 - DNA, 25 bp, Probe Sequence
aacaaagatgcctcgcagcgagcgt

SEQ ID NO: 158767 - DNA, 25 bp, Probe Sequence
aacaaagcacctaagatgcgccgcc

SEQ ID NO: 158768 - DNA, 25 bp, Probe Sequence
aacacaagcatcttgatactgctgc

SEQ ID NO: 158769 - DNA, 25 bp, Probe Sequence
aacagcacagacagcgagcgctgga

SEQ ID NO: 158770 - DNA, 25 bp, Probe Sequence
aacacacagtacagacagcatggat

SEQ ID NO: 158771 - DNA, 25 bp, Probe Sequence
aacaatggttgcatctgcagatggt

SEQ ID NO: 158772 - DNA, 25 bp, Probe Sequence
aacactggattcagtgcaggtttgg

SEQ ID NO: 158773 - DNA, 25 bp, Probe Sequence
aacactggcatctgttgaaatttgg

SEQ ID NO: 158774 - DNA, 25 bp, Probe Sequence
aacacatcgatctgggtatcaaata

SEQ ID NO: 158775 - DNA, 25 bp, Probe Sequence
aacaacggctcccggatcaaaggct

SEQ ID NO: 158776 - DNA, 25 bp, Probe Sequence
aacagtcggtgggaaacaaaagcat

SEQ ID NO: 158777 - DNA, 25 bp, Probe Sequence
aacagtcggtgggaaacaaaagcat

SEQ ID NO: 158778 - DNA, 25 bp, Probe Sequence
aacagagcgggaaataagcctaaga

SEQ ID NO: 158779 - DNA, 25 bp, Probe Sequence
aacagacacgggtgaatgctgctaa

SEQ ID NO: 158780 - DNA, 25 bp, Probe Sequence
aacacacaccagttgcgaagtcctt

SEQ ID NO: 158781 - DNA, 25 bp, Probe Sequence
aacagacctgcagctgagggtcctg

SEQ ID NO: 158782 - DNA, 25 bp, Probe Sequence
aacagcagcctgcagctggattacg

SEQ ID NO: 158783 - DNA, 25 bp, Probe Sequence
aacaacagctggactgctgtacatc

SEQ ID NO: 158784 - DNA, 25 bp, Probe Sequence
aacaatggcctgctgttcacatgga

SEQ ID NO: 158785 - DNA, 25 bp, Probe Sequence
aacacagacctgtagtctacttgag

SEQ ID NO: 158786 - DNA, 25 bp, Probe Sequence
aacaatgacctatttatgatcttaa

SEQ ID NO: 158787 - DNA, 25 bp, Probe Sequence
aacaataccgtatcatgtggaatga

SEQ ID NO: 158788 - DNA, 25 bp, Probe Sequence
aaaatacttgcagacatacagaatg

SEQ ID NO: 158789 - DNA, 25 bp, Probe Sequence
aacaatatttgtgtcataagacatc

SEQ ID NO: 158790 - DNA, 25 bp, Probe Sequence
aacacactttgatatctattccaaa

SEQ ID NO: 158791 - DNA, 25 bp, Probe Sequence
aacagcagcatatgtacctcttcca

SEQ ID NO: 158792 - DNA, 25 bp, Probe Sequence
aacacagaaattccaccatctcaga

SEQ ID NO: 158793 - DNA, 25 bp, Probe Sequence
aacagtgatgacagcaacctctacc

SEQ ID NO: 158794 - DNA, 25 bp, Probe Sequence
aacacgggcaagtgcttctgcacca

SEQ ID NO: 158795 - DNA, 25 bp, Probe Sequence
aacacggcaacactgggtggcatcc

SEQ ID NO: 158796 - DNA, 25 bp, Probe Sequence
aacagcaaaaactggaggcatccaa

SEQ ID NO: 158797 - DNA, 25 bp, Probe Sequence
aaaattccagcctgggcagcatcct

SEQ ID NO: 158798 - DNA, 25 bp, Probe Sequence
aaaatattaccatgagccatcacac

SEQ ID NO: 158799 - DNA, 25 bp, Probe Sequence
aacaatttcacacagggaacagcta

SEQ ID NO: 158800 - DNA, 25 bp, Probe Sequence
aacaattcctcagggggaccagctt

SEQ ID NO: 158801 - DNA, 25 bp, Probe Sequence
aaaattttcacgacctactcatctg

SEQ ID NO: 158802 - DNA, 25 bp, Probe Sequence
aaaattacatctggtctcttccttc

SEQ ID NO: 158803 - DNA, 25 bp, Probe Sequence
aacaataacactgtctcctttctct

SEQ ID NO: 158804 - DNA, 25 bp, Probe Sequence
aacaaaacttctttccattgtcctg

SEQ ID NO: 158805 - DNA, 25 bp, Probe Sequence
aacaaagacattcttcccacttctt

SEQ ID NO: 158806 - DNA, 25 bp, Probe Sequence
aactaggtattgcattgctatccgt

SEQ ID NO: 158807 - DNA, 25 bp, Probe Sequence
aacccagaatttcttatccagccaa

SEQ ID NO: 158808 - DNA, 25 bp, Probe Sequence
aacttcggacttatactgatcccaa

SEQ ID NO: 158809 - DNA, 25 bp, Probe Sequence
gaacagttgaactcttaaatcctca

SEQ ID NO: 158810 - DNA, 25 bp, Probe Sequence
aacagtctcaaaaccaagaatccca

SEQ ID NO: 158811 - DNA, 25 bp, Probe Sequence
aacagccatacatgtctgcaatgaa

SEQ ID NO: 158812 - DNA, 25 bp, Probe Sequence
aacagccatcgaggacttataatgt

SEQ ID NO: 158813 - DNA, 25 bp, Probe Sequence
aacagcctcttagcattcagattgt

SEQ ID NO: 158814 - DNA, 25 bp, Probe Sequence
aacacatcatctgaggttgagtttt

SEQ ID NO: 158815 - DNA, 25 bp, Probe Sequence
aacacatgctctgatgcgaaggggc

SEQ ID NO: 158816 - DNA, 25 bp, Probe Sequence
aacagcagctgcagcagccatggcc

SEQ ID NO: 158817 - DNA, 25 bp, Probe Sequence
aacaaccatcgagcatgtgtcaatg

SEQ ID NO: 158818 - DNA, 25 bp, Probe Sequence
aacacagagagcgagacgcggagtc

SEQ ID NO: 158819 - DNA, 25 bp, Probe Sequence
aacacaaagggaccctgtgctccat

SEQ ID NO: 158820 - DNA, 25 bp, Probe Sequence
aacagcaatagtcatgcccttgtcc

SEQ ID NO: 158821 - DNA, 25 bp, Probe Sequence
aacagcaggggcgatatcctctgac

SEQ ID NO: 158822 - DNA, 25 bp, Probe Sequence
aacacagacagtggtgatgcaccgc

SEQ ID NO: 158823 - DNA, 25 bp, Probe Sequence
aacacgctagacaagatgatccgca

SEQ ID NO: 158824 - DNA, 25 bp, Probe Sequence
aacacgctagtgaccattaggccta

SEQ ID NO: 158825 - DNA, 25 bp, Probe Sequence
aacaccattgctactgaaaacacaa

SEQ ID NO: 158826 - DNA, 25 bp, Probe Sequence
aacagctctggctctagcaaaagga

SEQ ID NO: 158827 - DNA, 25 bp, Probe Sequence
aacagctgctttattggaaatgagg

SEQ ID NO: 158828 - DNA, 25 bp, Probe Sequence
aacaggctactgaattcaaccaatg

SEQ ID NO: 158829 - DNA, 25 bp, Probe Sequence
aacaggtagactttcaactattgtt

SEQ ID NO: 158830 - DNA, 25 bp, Probe Sequence
aacagagatagaatttctcaccttt

SEQ ID NO: 158831 - DNA, 25 bp, Probe Sequence
aacaatacagcagaccatctccggt

SEQ ID NO: 158832 - DNA, 25 bp, Probe Sequence
aacaatacagcagaccatctccggt

SEQ ID NO: 158833 - DNA, 25 bp, Probe Sequence
aacaaagctcaggacaacactcgga

SEQ ID NO: 158834 - DNA, 25 bp, Probe Sequence
aacaacagatgctgcgcaccatctc

SEQ ID NO: 158835 - DNA, 25 bp, Probe Sequence
aacagtcgatctcgagctggctgct

SEQ ID NO: 158836 - DNA, 25 bp, Probe Sequence
aacagcacgtcctactggctggttg

SEQ ID NO: 158837 - DNA, 25 bp, Probe Sequence
aacacacctcaaattggctgagttg

SEQ ID NO: 158838 - DNA, 25 bp, Probe Sequence
aacacacccaagtataggatgattg

SEQ ID NO: 158839 - DNA, 25 bp, Probe Sequence
aacagagcactttttgaggcaattg

SEQ ID NO: 158840 - DNA, 25 bp, Probe Sequence
aacagacagctatctaaaccattgc

SEQ ID NO: 158841 - DNA, 25 bp, Probe Sequence
aaggaagttttacaccatctacaat

SEQ ID NO: 158842 - DNA, 25 bp, Probe Sequence
aagccgaagttatggaccgctagca

SEQ ID NO: 158843 - DNA, 25 bp, Probe Sequence
aaccaaacctgatgcagaccctgga

SEQ ID NO: 158844 - DNA, 25 bp, Probe Sequence
aacaaaagccaatcagacctctgtg

SEQ ID NO: 158845 - DNA, 25 bp, Probe Sequence
aacaagaaactgtccaaatgctttg

SEQ ID NO: 158846 - DNA, 25 bp, Probe Sequence
aagaaatatacctcaagtattttga

SEQ ID NO: 158847 - DNA, 25 bp, Probe Sequence
aaaattatacctagcaacatattat

SEQ ID NO: 158848 - DNA, 25 bp, Probe Sequence
aacaatttatccattcaatcattta

SEQ ID NO: 158849 - DNA, 25 bp, Probe Sequence
aacaatgtgtgatctttattttgaa

SEQ ID NO: 158850 - DNA, 25 bp, Probe Sequence
aacacatgagttattttcctggaaa

SEQ ID NO: 158851 - DNA, 25 bp, Probe Sequence
aacactaatcataagtttcctggca

SEQ ID NO: 158852 - DNA, 25 bp, Probe Sequence
aacaagaatataacatttcaataga

SEQ ID NO: 158853 - DNA, 25 bp, Probe Sequence
aacaatcacaattacactgtactac

SEQ ID NO: 158854 - DNA, 25 bp, Probe Sequence
aacaatctgaacttcctgtgacctg

SEQ ID NO: 158855 - DNA, 25 bp, Probe Sequence
aacaaatcactctttctggttcttt

SEQ ID NO: 158856 - DNA, 25 bp, Probe Sequence
aacacaaactcacattggttccagg

SEQ ID NO: 158857 - DNA, 25 bp, Probe Sequence
aacacaacctcaccttgatcagagt

SEQ ID NO: 158858 - DNA, 25 bp, Probe Sequence
aacacaacctcaccttgatcagagt

SEQ ID NO: 158859 - DNA, 25 bp, Probe Sequence
aacatcaacctggactctgcggatg

SEQ ID NO: 158860 - DNA, 25 bp, Probe Sequence
aacaaagcacatgctgcccagtggc

SEQ ID NO: 158861 - DNA, 25 bp, Probe Sequence
aacaaagcgctgatccaagttgctc

SEQ ID NO: 158862 - DNA, 25 bp, Probe Sequence
aacaacgtgtgcaccggtgtgctca

SEQ ID NO: 158863 - DNA, 25 bp, Probe Sequence
aacacattgtgtgtcctctgttctt

SEQ ID NO: 158864 - DNA, 25 bp, Probe Sequence
aacacaagggccctccttgtcattg

SEQ ID NO: 158865 - DNA, 25 bp, Probe Sequence
aacaccaggatgcatgctccttgtc

SEQ ID NO: 158866 - DNA, 25 bp, Probe Sequence
aacaacaggatgcatctacctttcc

SEQ ID NO: 158867 - DNA, 25 bp, Probe Sequence
aacatccagaaaattaccaagtcta

SEQ ID NO: 158868 - DNA, 25 bp, Probe Sequence
aacacaacacaaatttccacgaaat

SEQ ID NO: 158869 - DNA, 25 bp, Probe Sequence
aacacagatacctttacaagcgaga

SEQ ID NO: 158870 - DNA, 25 bp, Probe Sequence
aagcagcagccagccttaaagtagt

SEQ ID NO: 158871 - DNA, 25 bp, Probe Sequence
aacaccatctattttgaaagctatt

SEQ ID NO: 158872 - DNA, 25 bp, Probe Sequence
aacacggcttaattagaagaatgaa

SEQ ID NO: 158873 - DNA, 25 bp, Probe Sequence
aacactgaccataactagaaaggaa

SEQ ID NO: 158874 - DNA, 25 bp, Probe Sequence
aacaatgaccaagccgagaatcgaa

SEQ ID NO: 158875 - DNA, 25 bp, Probe Sequence
aacactgattaaagcctggaaagaa

SEQ ID NO: 158876 - DNA, 25 bp, Probe Sequence
aacacagttgaaagacttagaaata

SEQ ID NO: 158877 - DNA, 25 bp, Probe Sequence
aaaattcatgaataccatagagaaa

SEQ ID NO: 158878 - DNA, 25 bp, Probe Sequence
aaaattcatagttaccaatgcaata

SEQ ID NO: 158879 - DNA, 25 bp, Probe Sequence
aacaaagcatcagttctaaacaata

SEQ ID NO: 158880 - DNA, 25 bp, Probe Sequence
aacagcaatgatcttccaataaaag

SEQ ID NO: 158881 - DNA, 25 bp, Probe Sequence
aacagtcaacatttcccttaatagc

SEQ ID NO: 158882 - DNA, 25 bp, Probe Sequence
aacaatacactgttaccttttgact

SEQ ID NO: 158883 - DNA, 25 bp, Probe Sequence
aacaggacattattccctctttcct

SEQ ID NO: 158884 - DNA, 25 bp, Probe Sequence
aacaagtaatgaaccagccttattc

SEQ ID NO: 158885 - DNA, 25 bp, Probe Sequence
aacaagtgcctgtttcagctgcttt

SEQ ID NO: 158886 - DNA, 25 bp, Probe Sequence
aacacagtgggaatatcacttttga

SEQ ID NO: 158887 - DNA, 25 bp, Probe Sequence
aacacagtggtgatccctataagga

SEQ ID NO: 158888 - DNA, 25 bp, Probe Sequence
aacacggcgatgaacgtcttacaac

SEQ ID NO: 158889 - DNA, 25 bp, Probe Sequence
aacacgcaccatccactgtgtttat

SEQ ID NO: 158890 - DNA, 25 bp, Probe Sequence
aacacacactaggctctttgtgtat

SEQ ID NO: 158891 - DNA, 25 bp, Probe Sequence
aacacagactgtattctttatgatc

SEQ ID NO: 158892 - DNA, 25 bp, Probe Sequence
aacacaagtggacatgatttcgaag

SEQ ID NO: 158893 - DNA, 25 bp, Probe Sequence
aacaaatggggcccacatcctggag

SEQ ID NO: 158894 - DNA, 25 bp, Probe Sequence
aacagaaggggtaacctgcatggtg

SEQ ID NO: 158895 - DNA, 25 bp, Probe Sequence
aacaaacggagtactgagtcttctg

SEQ ID NO: 158896 - DNA, 25 bp, Probe Sequence
aacaaatcaagagtactgtgactgg

SEQ ID NO: 158897 - DNA, 25 bp, Probe Sequence
aacaaaaggctgacaatgtgactgt

SEQ ID NO: 158898 - DNA, 25 bp, Probe Sequence
aacacaagcggctctatgagtctat

SEQ ID NO: 158899 - DNA, 25 bp, Probe Sequence
aacacagagccaggaatatagcctt

SEQ ID NO: 158900 - DNA, 25 bp, Probe Sequence
aacactgatcacgggaacagccggc

SEQ ID NO: 158901 - DNA, 25 bp, Probe Sequence
aacacatgatcccagagaacgctct

SEQ ID NO: 158902 - DNA, 25 bp, Probe Sequence
aacaatcatgccagtgaatctcatt

SEQ ID NO: 158903 - DNA, 25 bp, Probe Sequence
aacactcatacttgaaatctttccg

SEQ ID NO: 158904 - DNA, 25 bp, Probe Sequence
aacaatgcatcgtaaaacctttcag

SEQ ID NO: 158905 - DNA, 25 bp, Probe Sequence
aacaatgcatcgtaaaaccttcaga

SEQ ID NO: 158906 - DNA, 25 bp, Probe Sequence
aacaatgcatcgtaaaaccttcaga

SEQ ID NO: 158907 - DNA, 25 bp, Probe Sequence
aacaatgcatcgtaaaaccttcaga

SEQ ID NO: 158908 - DNA, 25 bp, Probe Sequence
aacaatgcatcgtaaaaccttcaga

SEQ ID NO: 158909 - DNA, 25 bp, Probe Sequence
aacaatgcatcgtaaaaccttcaga

SEQ ID NO: 158910 - DNA, 25 bp, Probe Sequence
aacaatgcatcgtaaaaccttcaga

SEQ ID NO: 158911 - DNA, 25 bp, Probe Sequence
aacaatcattatacggactcttcag

SEQ ID NO: 158912 - DNA, 25 bp, Probe Sequence
aacaatcttattccgagcattccag

SEQ ID NO: 158913 - DNA, 25 bp, Probe Sequence
aacatatttcagcattggctctaca

SEQ ID NO: 158914 - DNA, 25 bp, Probe Sequence
aaaattgtgcataatgctttggaaa

SEQ ID NO: 158915 - DNA, 25 bp, Probe Sequence
aacactgaggcaattggattaagaa

SEQ ID NO: 158916 - DNA, 25 bp, Probe Sequence
aacactggctttgagatttagagtc

SEQ ID NO: 158917 - DNA, 25 bp, Probe Sequence
aacacaggctttgatcttggggact

SEQ ID NO: 158918 - DNA, 25 bp, Probe Sequence
aacagaggccgtgttgggggatgct

SEQ ID NO: 158919 - DNA, 25 bp, Probe Sequence
aacaagtgcaccactcgggaggact

SEQ ID NO: 158920 - DNA, 25 bp, Probe Sequence
aactgatcacccacatgggggagat

SEQ ID NO: 158921 - DNA, 25 bp, Probe Sequence
aacagacacacctgcacagttggaa

SEQ ID NO: 158922 - DNA, 25 bp, Probe Sequence
aacagaccacttgactctctgtaaa

SEQ ID NO: 158923 - DNA, 25 bp, Probe Sequence
aacagactccgtggactctgttctt

SEQ ID NO: 158924 - DNA, 25 bp, Probe Sequence
aacacacacagaatgggctggtttc

SEQ ID NO: 158925 - DNA, 25 bp, Probe Sequence
aacagatataaatggctggttttta

SEQ ID NO: 158926 - DNA, 25 bp, Probe Sequence
aacaataccatatagcttgcttttt

SEQ ID NO: 158927 - DNA, 25 bp, Probe Sequence
aacacaactgaatacctctttggat

SEQ ID NO: 158928 - DNA, 25 bp, Probe Sequence
aacagaactagttaatttcgtgtat

SEQ ID NO: 158929 - DNA, 25 bp, Probe Sequence
aacacacactaatatttccctgata

SEQ ID NO: 158930 - DNA, 25 bp, Probe Sequence
aacacaaaaatatattaggctgact

SEQ ID NO: 158931 - DNA, 25 bp, Probe Sequence
aacaaacaagtaattctagggcagt

SEQ ID NO: 158932 - DNA, 25 bp, Probe Sequence
aacaatcagtagtgttctgaagtca

SEQ ID NO: 158933 - DNA, 25 bp, Probe Sequence
aacagtagtataggcttcgaggtca

SEQ ID NO: 158934 - DNA, 25 bp, Probe Sequence
aacagtgggtggtgtcagcaggtca

SEQ ID NO: 158935 - DNA, 25 bp, Probe Sequence
aacagtgggtggtgtcagcaggtca

SEQ ID NO: 158936 - DNA, 25 bp, Probe Sequence
aacagagggcggtggagaggccctg

SEQ ID NO: 158937 - DNA, 25 bp, Probe Sequence
aacagggggtgctgtagaccggctg

SEQ ID NO: 158938 - DNA, 25 bp, Probe Sequence
aacagcccctggatgctaacagggg

SEQ ID NO: 158939 - DNA, 25 bp, Probe Sequence
aacaaacggctgtctgccaactggt

SEQ ID NO: 158940 - DNA, 25 bp, Probe Sequence
aacacaactggctttcaaaagtgtc

SEQ ID NO: 158941 - DNA, 25 bp, Probe Sequence
aacacacattggtactaaaactatg

SEQ ID NO: 158942 - DNA, 25 bp, Probe Sequence
aacaacactctttttgaaactgatg

SEQ ID NO: 158943 - DNA, 25 bp, Probe Sequence
aacaacttcttaaagataagcctga

SEQ ID NO: 158944 - DNA, 25 bp, Probe Sequence
aacaacttcttaaagataagcctga

SEQ ID NO: 158945 - DNA, 25 bp, Probe Sequence
aacaagtattctctaaacacctgac

SEQ ID NO: 158946 - DNA, 25 bp, Probe Sequence
aacacagatttaaaactagccttca

SEQ ID NO: 158947 - DNA, 25 bp, Probe Sequence
aacagagtttttacctgaactggca

SEQ ID NO: 158948 - DNA, 25 bp, Probe Sequence
aacaaccttattccttacatctggc

SEQ ID NO: 158949 - DNA, 25 bp, Probe Sequence
aacacagctttatgtcttactttcc

SEQ ID NO: 158950 - DNA, 25 bp, Probe Sequence
aacacgtgtaaactcctgggttgct

SEQ ID NO: 158951 - DNA, 25 bp, Probe Sequence
aacactgtaaaagtgcccgcgtctt

SEQ ID NO: 158952 - DNA, 25 bp, Probe Sequence
aacacctagaagacgctatccgatc

SEQ ID NO: 158953 - DNA, 25 bp, Probe Sequence
aacgtctcaacaatctgatatcgga

SEQ ID NO: 158954 - DNA, 25 bp, Probe Sequence
aacttctaaccgcaatagtgactct

SEQ ID NO: 158955 - DNA, 25 bp, Probe Sequence
aactcattagactggaacttgaact

SEQ ID NO: 158956 - DNA, 25 bp, Probe Sequence
aacaatgtcagattttaactatgaa

SEQ ID NO: 158957 - DNA, 25 bp, Probe Sequence
aacaatgctgatttttgaattcatg

SEQ ID NO: 158958 - DNA, 25 bp, Probe Sequence
aacaagtagtgtttggttgcatgga

SEQ ID NO: 158959 - DNA, 25 bp, Probe Sequence
aacaagaatggtggtggctttacat

SEQ ID NO: 158960 - DNA, 25 bp, Probe Sequence
aacaaataatgtggtctgctttata

SEQ ID NO: 158961 - DNA, 25 bp, Probe Sequence
aacaatcaacatgagctagctttta

SEQ ID NO: 158962 - DNA, 25 bp, Probe Sequence
aacactggaatgcatatactacttt

SEQ ID NO: 158963 - DNA, 25 bp, Probe Sequence
aacactggactgtataccaggatga

SEQ ID NO: 158964 - DNA, 25 bp, Probe Sequence
aacaaggccttttccatggatgagc

SEQ ID NO: 158965 - DNA, 25 bp, Probe Sequence
aacagagagagctttacatcatgga

SEQ ID NO: 158966 - DNA, 25 bp, Probe Sequence
aacagagcaaactccatattggggg

SEQ ID NO: 158967 - DNA, 25 bp, Probe Sequence
aacagcacaaaagcactttgagtgg

SEQ ID NO: 158968 - DNA, 25 bp, Probe Sequence
aacagaatgaaatcatcttctagat

SEQ ID NO: 158969 - DNA, 25 bp, Probe Sequence
aacactgctgaatttcatttgtaat

SEQ ID NO: 158970 - DNA, 25 bp, Probe Sequence
aacacacttgttacctatgatatgg

SEQ ID NO: 158971 - DNA, 25 bp, Probe Sequence
aacacacttgttacctatgatatgg

SEQ ID NO: 158972 - DNA, 25 bp, Probe Sequence
aacacacttgttacctatgatatgg

SEQ ID NO: 158973 - DNA, 25 bp, Probe Sequence
aacaatctgttttggctttatgtgc

SEQ ID NO: 158974 - DNA, 25 bp, Probe Sequence
aacaatggaatatgccttctctgct

SEQ ID NO: 158975 - DNA, 25 bp, Probe Sequence
aacagagggaatttcattatcgtat

SEQ ID NO: 158976 - DNA, 25 bp, Probe Sequence
aacggtggacagtgctgaaccttat

SEQ ID NO: 158977 - DNA, 25 bp, Probe Sequence
aacagtgtgtaccattccgacgtta

SEQ ID NO: 158978 - DNA, 25 bp, Probe Sequence
aactggtttcctccaccaagaatga

SEQ ID NO: 158979 - DNA, 25 bp, Probe Sequence
aacaatggtacctacaacatcaaag

SEQ ID NO: 158980 - DNA, 25 bp, Probe Sequence
aacacagtccccttcaacgaagatg

SEQ ID NO: 158981 - DNA, 25 bp, Probe Sequence
aacacctgtacctcgactacaatag

SEQ ID NO: 158982 - DNA, 25 bp, Probe Sequence
aactccctgaactatacttaataag

SEQ ID NO: 158983 - DNA, 25 bp, Probe Sequence
aacacacctcaacaaccgaagaaga

SEQ ID NO: 158984 - DNA, 25 bp, Probe Sequence
aacacacctcaacaaccgaagaaga

SEQ ID NO: 158985 - DNA, 25 bp, Probe Sequence
aacacagcccaaaaaccgcagagca

SEQ ID NO: 158986 - DNA, 25 bp, Probe Sequence
aacaggccgagaagaacgtggagaa

SEQ ID NO: 158987 - DNA, 25 bp, Probe Sequence
aacagctcacagaaagaaattggat

SEQ ID NO: 158988 - DNA, 25 bp, Probe Sequence
aacagcccagtattcctttgtatcc

SEQ ID NO: 158989 - DNA, 25 bp, Probe Sequence
aacagccaatggtatgttttgattg

SEQ ID NO: 158990 - DNA, 25 bp, Probe Sequence
aacaccaagcacgtatttatttata

SEQ ID NO: 158991 - DNA, 25 bp, Probe Sequence
aacacagcaagatcctgtctttgta

SEQ ID NO: 158992 - DNA, 25 bp, Probe Sequence
aacactgcataacccgtttctttga

SEQ ID NO: 158993 - DNA, 25 bp, Probe Sequence
aacagtgcagattccacgttcttgt

SEQ ID NO: 158994 - DNA, 25 bp, Probe Sequence
aacagacgataacggctctctcttt

SEQ ID NO: 158995 - DNA, 25 bp, Probe Sequence
aacatgaccgaaatgagcttcctga

SEQ ID NO: 158996 - DNA, 25 bp, Probe Sequence
aacatccgcgttagagctgatttac

SEQ ID NO: 158997 - DNA, 25 bp, Probe Sequence
aacacagcctgtcagagctcatcga

SEQ ID NO: 158998 - DNA, 25 bp, Probe Sequence
aacaagcgtgtgccaagctctactc

SEQ ID NO: 158999 - DNA, 25 bp, Probe Sequence
aacatcacgttgcataccttaaata

SEQ ID NO: 159000 - DNA, 25 bp, Probe Sequence
aacacacgattgaatatatctctac

SEQ ID NO: 159001 - DNA, 25 bp, Probe Sequence
aacactgccatgacattataactca

SEQ ID NO: 159002 - DNA, 25 bp, Probe Sequence
aacaagcccttgataattaaacagc

SEQ ID NO: 159003 - DNA, 25 bp, Probe Sequence
aacggcctatttaatatgttacaag

SEQ ID NO: 159004 - DNA, 25 bp, Probe Sequence
aacagtcctttcaatcagtggtcca

SEQ ID NO: 159005 - DNA, 25 bp, Probe Sequence
aacagttgcatttcagagagttctc

SEQ ID NO: 159006 - DNA, 25 bp, Probe Sequence
aacagcttttaacagtgagtttcgt

SEQ ID NO: 159007 - DNA, 25 bp, Probe Sequence
aacacattctttctaagcagttttg

SEQ ID NO: 159008 - DNA, 25 bp, Probe Sequence
aacacttcgttcgcagagcttttca

SEQ ID NO: 159009 - DNA, 25 bp, Probe Sequence
aacactcaccatataaacttgcatt

SEQ ID NO: 159010 - DNA, 25 bp, Probe Sequence
aacacacaccaaacagtactgctac

SEQ ID NO: 159011 - DNA, 25 bp, Probe Sequence
aacagctcggccaagcagaactgct

SEQ ID NO: 159012 - DNA, 25 bp, Probe Sequence
aacagcacttgcttgcggaactctt

SEQ ID NO: 159013 - DNA, 25 bp, Probe Sequence
aacagcctgatgtttgggacctttt

SEQ ID NO: 159014 - DNA, 25 bp, Probe Sequence
aacactatgggtggggcactccttt

SEQ ID NO: 159015 - DNA, 25 bp, Probe Sequence
aatttagggagcaggcctccaggga

SEQ ID NO: 159016 - DNA, 25 bp, Probe Sequence
aacttcaggaacaggcccgagtact

SEQ ID NO: 159017 - DNA, 25 bp, Probe Sequence
aacttcaggtacagcagagataaaa

SEQ ID NO: 159018 - DNA, 25 bp, Probe Sequence
aacactcagcttttcgcaacataat

SEQ ID NO: 159019 - DNA, 25 bp, Probe Sequence
aacagtcagcagcatctggccaatg

SEQ ID NO: 159020 - DNA, 25 bp, Probe Sequence
aacactgcagctcagatgtctcagg

SEQ ID NO: 159021 - DNA, 25 bp, Probe Sequence
aacactgcatgttctcactcataag

SEQ ID NO: 159022 - DNA, 25 bp, Probe Sequence
aacaagcatgtctctctgccaagat

SEQ ID NO: 159023 - DNA, 25 bp, Probe Sequence
aacaagccactcatctctacagaga

SEQ ID NO: 159024 - DNA, 25 bp, Probe Sequence
aacatcagacctgtcttccaaggag

SEQ ID NO: 159025 - DNA, 25 bp, Probe Sequence
aacatcaacaaactgattcttggga

SEQ ID NO: 159026 - DNA, 25 bp, Probe Sequence
aacacaagcaaaccttctcaggagg

SEQ ID NO: 159027 - DNA, 25 bp, Probe Sequence
aacataagaaccctttatgtaccat

SEQ ID NO: 159028 - DNA, 25 bp, Probe Sequence
aacagagagaagccactttattccc

SEQ ID NO: 159029 - DNA, 25 bp, Probe Sequence
aacagattgagacccggtatccaaa

SEQ ID NO: 159030 - DNA, 25 bp, Probe Sequence
aacacattcagctgctgggtgtcca

SEQ ID NO: 159031 - DNA, 25 bp, Probe Sequence
aacacagctcgcaacttatggctcc

SEQ ID NO: 159032 - DNA, 25 bp, Probe Sequence
aacaagcttggaggtctgccatcat

SEQ ID NO: 159033 - DNA, 25 bp, Probe Sequence
aacagtctggatgctggtgccacta

SEQ ID NO: 159034 - DNA, 25 bp, Probe Sequence
aacagtctggatgctggtgccacta

SEQ ID NO: 159035 - DNA, 25 bp, Probe Sequence
aacagtttgtcctgaccacacatat

SEQ ID NO: 159036 - DNA, 25 bp, Probe Sequence
aacaggaagtcctccataatcatta

SEQ ID NO: 159037 - DNA, 25 bp, Probe Sequence
aacaaaaatctctcatttacttcac

SEQ ID NO: 159038 - DNA, 25 bp, Probe Sequence
aactgaaaattctcttgtccattgg

SEQ ID NO: 159039 - DNA, 25 bp, Probe Sequence
aacggaagtacttggttccatctga

SEQ ID NO: 159040 - DNA, 25 bp, Probe Sequence
aactggaaaacatatgttccttatg

SEQ ID NO: 159041 - DNA, 25 bp, Probe Sequence
aactaaaacagacatgggctttgat

SEQ ID NO: 159042 - DNA, 25 bp, Probe Sequence
aacttataacatcttattgttggta

SEQ ID NO: 159043 - DNA, 25 bp, Probe Sequence
aactttcaacagtgtctcttggctc

SEQ ID NO: 159044 - DNA, 25 bp, Probe Sequence
aactttttcagtagcatttagacct

SEQ ID NO: 159045 - DNA, 25 bp, Probe Sequence
aacatatttctattgcagcttttac

SEQ ID NO: 159046 - DNA, 25 bp, Probe Sequence
aacacattgccttatgactattaga

SEQ ID NO: 159047 - DNA, 25 bp, Probe Sequence
aacactttctgattactcatgataa

SEQ ID NO: 159048 - DNA, 25 bp, Probe Sequence
aacacaaatatatcactcttacatt

SEQ ID NO: 159049 - DNA, 25 bp, Probe Sequence
aacactcttgaatagacttccactt

SEQ ID NO: 159050 - DNA, 25 bp, Probe Sequence
aacacttggatttacaccagtcttt

SEQ ID NO: 159051 - DNA, 25 bp, Probe Sequence
aacactggtttatctcaactcatct

SEQ ID NO: 159052 - DNA, 25 bp, Probe Sequence
aacatttgtatcacctagaaatttc

SEQ ID NO: 159053 - DNA, 25 bp, Probe Sequence
aacacaggattcaccacagtacttc

SEQ ID NO: 159054 - DNA, 25 bp, Probe Sequence
aacacaggattcaccacagtacttc

SEQ ID NO: 159055 - DNA, 25 bp, Probe Sequence
aacactgagaaagcccaatcctata

SEQ ID NO: 159056 - DNA, 25 bp, Probe Sequence
aactcagaaaacgaaccttgctaca

SEQ ID NO: 159057 - DNA, 25 bp, Probe Sequence
aacacaaaatacctaagctccttca

SEQ ID NO: 159058 - DNA, 25 bp, Probe Sequence
aacaaacactgagaaagcccaatcc

SEQ ID NO: 159059 - DNA, 25 bp, Probe Sequence
aactcgagcctataacagacctacc

SEQ ID NO: 159060 - DNA, 25 bp, Probe Sequence
aacaccgcctaatgaagaactctcc

SEQ ID NO: 159061 - DNA, 25 bp, Probe Sequence
aacacctgactctaggacatgcaac

SEQ ID NO: 159062 - DNA, 25 bp, Probe Sequence
aacacctgcaccttgagataatcct

SEQ ID NO: 159063 - DNA, 25 bp, Probe Sequence
aacactcgctccaatgtgattttct

SEQ ID NO: 159064 - DNA, 25 bp, Probe Sequence
aacactcgctccaatgtgattttct

SEQ ID NO: 159065 - DNA, 25 bp, Probe Sequence
aacacatccaacaatcaagtttcta

SEQ ID NO: 159066 - DNA, 25 bp, Probe Sequence
aacaccaccaaaaagttacagcaca

SEQ ID NO: 159067 - DNA, 25 bp, Probe Sequence
aacacacccaaaaagatgacagact

SEQ ID NO: 159068 - DNA, 25 bp, Probe Sequence
aacacaccaaaacagatcatgccaa

SEQ ID NO: 159069 - DNA, 25 bp, Probe Sequence
aacaacaagaaatagctgcagctgc

SEQ ID NO: 159070 - DNA, 25 bp, Probe Sequence
aacacgcatagaaattcctgctgac

SEQ ID NO: 159071 - DNA, 25 bp, Probe Sequence
aacaccatgaatctactcctgatcc

SEQ ID NO: 159072 - DNA, 25 bp, Probe Sequence
aactccaaatgcatcggcactgacc

SEQ ID NO: 159073 - DNA, 25 bp, Probe Sequence
aacatacaatagaacaggcactaga

SEQ ID NO: 159074 - DNA, 25 bp, Probe Sequence
aactgatcaaagagccaggctcggg

SEQ ID NO: 159075 - DNA, 25 bp, Probe Sequence
aacgtaacaccagcattgtgtgtgc

SEQ ID NO: 159076 - DNA, 25 bp, Probe Sequence
aacagtacacatgtcattttgtgat

SEQ ID NO: 159077 - DNA, 25 bp, Probe Sequence
aacactacatccacattattgactt

SEQ ID NO: 159078 - DNA, 25 bp, Probe Sequence
aacactagctctgtattaatcccca

SEQ ID NO: 159079 - DNA, 25 bp, Probe Sequence
aacagactcattgtttgttctccca

SEQ ID NO: 159080 - DNA, 25 bp, Probe Sequence
aacagccatactttttgtctctatc

SEQ ID NO: 159081 - DNA, 25 bp, Probe Sequence
aacacaattctaatctcttctctta

SEQ ID NO: 159082 - DNA, 25 bp, Probe Sequence
aacagaatcccagcaccattctata

SEQ ID NO: 159083 - DNA, 25 bp, Probe Sequence
aacaaaagccacaaacagttcatca

SEQ ID NO: 159084 - DNA, 25 bp, Probe Sequence
aacagaaacaatggctacagttcca

SEQ ID NO: 159085 - DNA, 25 bp, Probe Sequence
aacaaagactttccacagaatgcca

SEQ ID NO: 159086 - DNA, 25 bp, Probe Sequence
aacaaagaccaccgcaatgacatca

SEQ ID NO: 159087 - DNA, 25 bp, Probe Sequence
aacagacacactacaagttgaatca

SEQ ID NO: 159088 - DNA, 25 bp, Probe Sequence
aacagaagtctgaacaattggataa

SEQ ID NO: 159089 - DNA, 25 bp, Probe Sequence
aacaaactgtgaatcttctggataa

SEQ ID NO: 159090 - DNA, 25 bp, Probe Sequence
aacacacatgggattctctggtcac

SEQ ID NO: 159091 - DNA, 25 bp, Probe Sequence
aacacattggaattgatgtcggtca

SEQ ID NO: 159092 - DNA, 25 bp, Probe Sequence
aacactcatatgcttatggcttgga

SEQ ID NO: 159093 - DNA, 25 bp, Probe Sequence
aacactaatgttaattgcccaattg

SEQ ID NO: 159094 - DNA, 25 bp, Probe Sequence
aacactaatgttaattgcccaattg

SEQ ID NO: 159095 - DNA, 25 bp, Probe Sequence
aacatcaaagttatatcaccagcaa

SEQ ID NO: 159096 - DNA, 25 bp, Probe Sequence
aacagagtagtaagtcatcccacac

SEQ ID NO: 159097 - DNA, 25 bp, Probe Sequence
aacagagtcagctggtcgacaacag

SEQ ID NO: 159098 - DNA, 25 bp, Probe Sequence
aacagatgttctgggtgcgagcccg

SEQ ID NO: 159099 - DNA, 25 bp, Probe Sequence
aacagcatgttctgtgtgggcttcc

SEQ ID NO: 159100 - DNA, 25 bp, Probe Sequence
aacagcatgttctgtgtgggcttcc

SEQ ID NO: 159101 - DNA, 25 bp, Probe Sequence
aacagcatgggctgccatgggccat

SEQ ID NO: 159102 - DNA, 25 bp, Probe Sequence
aacactgtgagccgcagatgtgact

SEQ ID NO: 159103 - DNA, 25 bp, Probe Sequence
aacacggcagcacagctgtccaaga

SEQ ID NO: 159104 - DNA, 25 bp, Probe Sequence
aacagctattcataggtacaatgat

SEQ ID NO: 159105 - DNA, 25 bp, Probe Sequence
aacacttaaacagtataaaatgcgt

SEQ ID NO: 159106 - DNA, 25 bp, Probe Sequence
aacacttagaattgcccacagttgg

SEQ ID NO: 159107 - DNA, 25 bp, Probe Sequence
aacacttgagtgtcagaccacagac

SEQ ID NO: 159108 - DNA, 25 bp, Probe Sequence
aacactatgcttaggactccagaga

SEQ ID NO: 159109 - DNA, 25 bp, Probe Sequence
aacactatgcttaggcgctatcacc

SEQ ID NO: 159110 - DNA, 25 bp, Probe Sequence
aacacagtgctgtctggcggcacca

SEQ ID NO: 159111 - DNA, 25 bp, Probe Sequence
aacacagtgctgtctggcggcacca

SEQ ID NO: 159112 - DNA, 25 bp, Probe Sequence
aacacatgctgatctgtggccagcc

SEQ ID NO: 159113 - DNA, 25 bp, Probe Sequence
aacagtgctgagtggcggcagcctc

SEQ ID NO: 159114 - DNA, 25 bp, Probe Sequence
aacaggcagttggccagagagcctg

SEQ ID NO: 159115 - DNA, 25 bp, Probe Sequence
aacgggtatggcagaatctagcatg

SEQ ID NO: 159116 - DNA, 25 bp, Probe Sequence
aacgggtggagcagtttgccagggc

SEQ ID NO: 159117 - DNA, 25 bp, Probe Sequence
aacggcagtggacacttctgtggcg

SEQ ID NO: 159118 - DNA, 25 bp, Probe Sequence
aacggcagtggacacttctgtggcg

SEQ ID NO: 159119 - DNA, 25 bp, Probe Sequence
aactgggtgaagaagaacggggctg

SEQ ID NO: 159120 - DNA, 25 bp, Probe Sequence
aacaggactgaaaagtaccaggaga

SEQ ID NO: 159121 - DNA, 25 bp, Probe Sequence
caaacgtaacagcagaaccaccaga

SEQ ID NO: 159122 - DNA, 25 bp, Probe Sequence
aataactaagagccgaactgaagga

SEQ ID NO: 159123 - DNA, 25 bp, Probe Sequence
aacagactaagaggaaacaaagcgt

SEQ ID NO: 159124 - DNA, 25 bp, Probe Sequence
aacagtctattcggtaagcaacagg

SEQ ID NO: 159125 - DNA, 25 bp, Probe Sequence
aacacctcttaagtctagcacactg

SEQ ID NO: 159126 - DNA, 25 bp, Probe Sequence
aacacttcatgttagcctacagaga

SEQ ID NO: 159127 - DNA, 25 bp, Probe Sequence
aacactttgggagactgagatgagg

SEQ ID NO: 159128 - DNA, 25 bp, Probe Sequence
aacacttctgcagcacatatctagt

SEQ ID NO: 159129 - DNA, 25 bp, Probe Sequence
aacagattctactacaattcagtca

SEQ ID NO: 159130 - DNA, 25 bp, Probe Sequence
aacagacttcaaccacacacatgga

SEQ ID NO: 159131 - DNA, 25 bp, Probe Sequence
aacaaatgtccagcaaacatatgaa

SEQ ID NO: 159132 - DNA, 25 bp, Probe Sequence
aacaggatggccatcaaattcaaaa

SEQ ID NO: 159133 - DNA, 25 bp, Probe Sequence
aacaggactcctgcagaagtcaact

SEQ ID NO: 159134 - DNA, 25 bp, Probe Sequence
aacagcagattactgacagacaatc

SEQ ID NO: 159135 - DNA, 25 bp, Probe Sequence
aacacaatgtttccaactctctaac

SEQ ID NO: 159136 - DNA, 25 bp, Probe Sequence
aacacagagtttgaactataatact

SEQ ID NO: 159137 - DNA, 25 bp, Probe Sequence
aacagcaggctttggaagtgataaa

SEQ ID NO: 159138 - DNA, 25 bp, Probe Sequence
aacagcagtgccagtcaaaatacag

SEQ ID NO: 159139 - DNA, 25 bp, Probe Sequence
aacacagtcgtgaacaaacacaagg

SEQ ID NO: 159140 - DNA, 25 bp, Probe Sequence
aatcgcctgctacaaaaacaaggtc

SEQ ID NO: 159141 - DNA, 25 bp, Probe Sequence
cactctggacaataaaaacgaatgt

SEQ ID NO: 159142 - DNA, 25 bp, Probe Sequence
caccatacaccttatcaaaacggat

SEQ ID NO: 159143 - DNA, 25 bp, Probe Sequence
aagctgaccgtctttgaaagcgaca

SEQ ID NO: 159144 - DNA, 25 bp, Probe Sequence
aacagatgccgtttataaagagttg

SEQ ID NO: 159145 - DNA, 25 bp, Probe Sequence
aacacatccctgtttaaaagtatgt

SEQ ID NO: 159146 - DNA, 25 bp, Probe Sequence
aacatttccagacttaacattttgg

SEQ ID NO: 159147 - DNA, 25 bp, Probe Sequence
aacagtataatccagctcagtattt

SEQ ID NO: 159148 - DNA, 25 bp, Probe Sequence
aacagtatcaacactggcttctccc

SEQ ID NO: 159149 - DNA, 25 bp, Probe Sequence
aacactgtggacattgacttcccgc

SEQ ID NO: 159150 - DNA, 25 bp, Probe Sequence
aacaccgctgaggagtacgtctgcc

SEQ ID NO: 159151 - DNA, 25 bp, Probe Sequence
aacactggctgagcggatgcatctg

SEQ ID NO: 159152 - DNA, 25 bp, Probe Sequence
aacatctcgcaagcgctgctgtaac

SEQ ID NO: 159153 - DNA, 25 bp, Probe Sequence
aacacatgaaaccctgagtcacgca

SEQ ID NO: 159154 - DNA, 25 bp, Probe Sequence
aacataaatccgcaagtcaccacac

SEQ ID NO: 159155 - DNA, 25 bp, Probe Sequence
aacttaatcacagaggtgacatccc

SEQ ID NO: 159156 - DNA, 25 bp, Probe Sequence
aactgtacccaccaggatgtccatt

SEQ ID NO: 159157 - DNA, 25 bp, Probe Sequence
aacttgagcaccgtcatggcttaat

SEQ ID NO: 159158 - DNA, 25 bp, Probe Sequence
aacactgaactcatgttcttgatga

SEQ ID NO: 159159 - DNA, 25 bp, Probe Sequence
aacactagaggcatttcttatcaaa

SEQ ID NO: 159160 - DNA, 25 bp, Probe Sequence
aacactagaggcatttcttatcaaa

SEQ ID NO: 159161 - DNA, 25 bp, Probe Sequence
aacactagaggcatttcttatcaaa

SEQ ID NO: 159162 - DNA, 25 bp, Probe Sequence
aacactgtggacgtctttgttcaga

SEQ ID NO: 159163 - DNA, 25 bp, Probe Sequence
aacaccgggctggctttgagtggaa

SEQ ID NO: 159164 - DNA, 25 bp, Probe Sequence
aacacagcggtcgacatttcagaaa

SEQ ID NO: 159165 - DNA, 25 bp, Probe Sequence
aacagctgctggacagacacattag

SEQ ID NO: 159166 - DNA, 25 bp, Probe Sequence
aacagctgctggacagacacattag

SEQ ID NO: 159167 - DNA, 25 bp, Probe Sequence
aacagccatggaagacagagatagt

SEQ ID NO: 159168 - DNA, 25 bp, Probe Sequence
aacaccatggattcacagacattct

SEQ ID NO: 159169 - DNA, 25 bp, Probe Sequence
aacacgcatgttcacagactgcttt

SEQ ID NO: 159170 - DNA, 25 bp, Probe Sequence
aacacagatctttacaactttatgt

SEQ ID NO: 159171 - DNA, 25 bp, Probe Sequence
aacacgatattgtactaacatctta

SEQ ID NO: 159172 - DNA, 25 bp, Probe Sequence
aacacacagatttgagctcagccct

SEQ ID NO: 159173 - DNA, 25 bp, Probe Sequence
aacacctgtgtgtgtcaccagtata

SEQ ID NO: 159174 - DNA, 25 bp, Probe Sequence
aactacgtggtggtcctcagtgacg

SEQ ID NO: 159175 - DNA, 25 bp, Probe Sequence
aacttggtggtcctgcaccaaacta

SEQ ID NO: 159176 - DNA, 25 bp, Probe Sequence
aacacatggtagagtctccaacctg

SEQ ID NO: 159177 - DNA, 25 bp, Probe Sequence
aacaggctctagcgttcgaacgcac

SEQ ID NO: 159178 - DNA, 25 bp, Probe Sequence
aacagagcctgcaggtgatcgagtc

SEQ ID NO: 159179 - DNA, 25 bp, Probe Sequence
aacatggcccattggcatatctgca

SEQ ID NO: 159180 - DNA, 25 bp, Probe Sequence
aacagagcctcttatgatatccttg

SEQ ID NO: 159181 - DNA, 25 bp, Probe Sequence
aacacagccctcgtgggcacattgt

SEQ ID NO: 159182 - DNA, 25 bp, Probe Sequence
aacactcctctcagggatcatatcc

SEQ ID NO: 159183 - DNA, 25 bp, Probe Sequence
aacatgctctgtaaagggtcttcct

SEQ ID NO: 159184 - DNA, 25 bp, Probe Sequence
aacagcctggataagtttgccttct

SEQ ID NO: 159185 - DNA, 25 bp, Probe Sequence
aacacctgaaatttcgtatttctca

SEQ ID NO: 159186 - DNA, 25 bp, Probe Sequence
aacactccacattcttcagtttttc

SEQ ID NO: 159187 - DNA, 25 bp, Probe Sequence
aacattataaacatcactggttccc

SEQ ID NO: 159188 - DNA, 25 bp, Probe Sequence
aacaccatacccatcattggttccc

SEQ ID NO: 159189 - DNA, 25 bp, Probe Sequence
aacacccacctcagattgatatgtt

SEQ ID NO: 159190 - DNA, 25 bp, Probe Sequence
aacactggaccattggatcgatatt

SEQ ID NO: 159191 - DNA, 25 bp, Probe Sequence
aacagctatgaccattaggcctatt

SEQ ID NO: 159192 - DNA, 25 bp, Probe Sequence
aacagctatgaccattaggcctatt

SEQ ID NO: 159193 - DNA, 25 bp, Probe Sequence
aacagctatgaccattaggcctatt

SEQ ID NO: 159194 - DNA, 25 bp, Probe Sequence
aacagctatgaccattaggcctatt

SEQ ID NO: 159195 - DNA, 25 bp, Probe Sequence
aacagctatgaccattaggcctatt

SEQ ID NO: 159196 - DNA, 25 bp, Probe Sequence
aacagctatgaccattaggcctatt

SEQ ID NO: 159197 - DNA, 25 bp, Probe Sequence
aacagctatgaccattaggcctatt

SEQ ID NO: 159198 - DNA, 25 bp, Probe Sequence
aacagctatgaccattaggcctatt

SEQ ID NO: 159199 - DNA, 25 bp, Probe Sequence
aacagctatgaccattaggcctatt

SEQ ID NO: 159200 - DNA, 25 bp, Probe Sequence
aacagctatgaccattaggcctatt

SEQ ID NO: 159201 - DNA, 25 bp, Probe Sequence
aacagctatgaccattaggcctatt

SEQ ID NO: 159202 - DNA, 25 bp, Probe Sequence
aacagctatgaccattaggcctatt

SEQ ID NO: 159203 - DNA, 25 bp, Probe Sequence
aacagctatgaccattaggcctatt

SEQ ID NO: 159204 - DNA, 25 bp, Probe Sequence
aacagctatgaccattaggcctatt

SEQ ID NO: 159205 - DNA, 25 bp, Probe Sequence
aacagctatgaccattaggcctatt

SEQ ID NO: 159206 - DNA, 25 bp, Probe Sequence
aacagctatgaccattaggcctatt

SEQ ID NO: 159207 - DNA, 25 bp, Probe Sequence
aacagctatgaccattaggcctatt

SEQ ID NO: 159208 - DNA, 25 bp, Probe Sequence
aacagctatgaccattaggcctatt

SEQ ID NO: 159209 - DNA, 25 bp, Probe Sequence
aacagctatgaccattaggcctatt

SEQ ID NO: 159210 - DNA, 25 bp, Probe Sequence
aacagctatgaccattaggcctatt

SEQ ID NO: 159211 - DNA, 25 bp, Probe Sequence
aacagctatgaccattaggcctatt

SEQ ID NO: 159212 - DNA, 25 bp, Probe Sequence
aacagctatgaccattaggcctatt

SEQ ID NO: 159213 - DNA, 25 bp, Probe Sequence
aacagctatgaccattaggcctatt

SEQ ID NO: 159214 - DNA, 25 bp, Probe Sequence
aacagctatgaccattaggcctatt

SEQ ID NO: 159215 - DNA, 25 bp, Probe Sequence
aacatgtttccagtggccagtatgt

SEQ ID NO: 159216 - DNA, 25 bp, Probe Sequence
aacagtttctggtgcaggatcagtt

SEQ ID NO: 159217 - DNA, 25 bp, Probe Sequence
aacagttcctttacatgtgtagtat

SEQ ID NO: 159218 - DNA, 25 bp, Probe Sequence
aacagctttgcttttcacgtgatta

SEQ ID NO: 159219 - DNA, 25 bp, Probe Sequence
aacagctttgcttttcacgtgatta

SEQ ID NO: 159220 - DNA, 25 bp, Probe Sequence
aacagtcatattactttgctggatt

SEQ ID NO: 159221 - DNA, 25 bp, Probe Sequence
aacagtacacatccattcatcatgg

SEQ ID NO: 159222 - DNA, 25 bp, Probe Sequence
aacagtagagctctatgcactccgg

SEQ ID NO: 159223 - DNA, 25 bp, Probe Sequence
aacagtgaacttttgcatctcaaga

SEQ ID NO: 159224 - DNA, 25 bp, Probe Sequence
aacagtgagggttgctgcgtccatg

SEQ ID NO: 159225 - DNA, 25 bp, Probe Sequence
aacaggggcaatggtgcgcctgctg

SEQ ID NO: 159226 - DNA, 25 bp, Probe Sequence
aacaggaggcattctgtggccagcc

SEQ ID NO: 159227 - DNA, 25 bp, Probe Sequence
aacagagtaggctttgccactgccg

SEQ ID NO: 159228 - DNA, 25 bp, Probe Sequence
aacgtgtcagtggtggacctgacct

SEQ ID NO: 159229 - DNA, 25 bp, Probe Sequence
aacagtatactccagaagccgatcc

SEQ ID NO: 159230 - DNA, 25 bp, Probe Sequence
aacactttcccatgagtgtgatcca

SEQ ID NO: 159231 - DNA, 25 bp, Probe Sequence
aacacatcttccctagagggttcct

SEQ ID NO: 159232 - DNA, 25 bp, Probe Sequence
aactctgttactcaggaggtttcta

SEQ ID NO: 159233 - DNA, 25 bp, Probe Sequence
aacttgtctacaaccagggattgat

SEQ ID NO: 159234 - DNA, 25 bp, Probe Sequence
aacattgatcatcttcacgtgggct

SEQ ID NO: 159235 - DNA, 25 bp, Probe Sequence
aatcatgtggcggtgtccgtggagg

SEQ ID NO: 159236 - DNA, 25 bp, Probe Sequence
aacagagagctgcttgctcggctgt

SEQ ID NO: 159237 - DNA, 25 bp, Probe Sequence
aacagtccttgttgtctggatgatg

SEQ ID NO: 159238 - DNA, 25 bp, Probe Sequence
aacagttgcttaatgtatggggctt

SEQ ID NO: 159239 - DNA, 25 bp, Probe Sequence
aacagttgctaaatgtaggacatct

SEQ ID NO: 159240 - DNA, 25 bp, Probe Sequence
aacattatctatattagtacacatt

SEQ ID NO: 159241 - DNA, 25 bp, Probe Sequence
aacttacatacaaatattacctcat

SEQ ID NO: 159242 - DNA, 25 bp, Probe Sequence
aacatgtcactagagtatttttatg

SEQ ID NO: 159243 - DNA, 25 bp, Probe Sequence
aacagccctagcagtttatattgca

SEQ ID NO: 159244 - DNA, 25 bp, Probe Sequence
aacagccccagatattgttgaatat

SEQ ID NO: 159245 - DNA, 25 bp, Probe Sequence
aacaccttcacatggctctaaatat

SEQ ID NO: 159246 - DNA, 25 bp, Probe Sequence
aacacctctcaatggttgtgcacaa

SEQ ID NO: 159247 - DNA, 25 bp, Probe Sequence
aacacttcttgattggctttgcaga

SEQ ID NO: 159248 - DNA, 25 bp, Probe Sequence
aacacattgttatttctgtaggacc

SEQ ID NO: 159249 - DNA, 25 bp, Probe Sequence
aactagagttcatcctggcagctca

SEQ ID NO: 159250 - DNA, 25 bp, Probe Sequence
aacatcatagttttccggcagatta

SEQ ID NO: 159251 - DNA, 25 bp, Probe Sequence
aacatatggtgctgacctggccagt

SEQ ID NO: 159252 - DNA, 25 bp, Probe Sequence
aacacatagtctacagcctggaagt

SEQ ID NO: 159253 - DNA, 25 bp, Probe Sequence
aacacatactgtcagactgggtctg

SEQ ID NO: 159254 - DNA, 25 bp, Probe Sequence
aacacatttgtgcgactggcagaca

SEQ ID NO: 159255 - DNA, 25 bp, Probe Sequence
aacacattgttatagctacatggag

SEQ ID NO: 159256 - DNA, 25 bp, Probe Sequence
aacactcttacatattccttggaac

SEQ ID NO: 159257 - DNA, 25 bp, Probe Sequence
aacactcttacacctgttatggaaa

SEQ ID NO: 159258 - DNA, 25 bp, Probe Sequence
aacacttgaagccatctaaagtaaa

SEQ ID NO: 159259 - DNA, 25 bp, Probe Sequence
aacatgctttgatcatctatgacga

SEQ ID NO: 159260 - DNA, 25 bp, Probe Sequence
aacagatcttatcactgtgactggc

SEQ ID NO: 159261 - DNA, 25 bp, Probe Sequence
aacagatctagcacactgctgcacc

SEQ ID NO: 159262 - DNA, 25 bp, Probe Sequence
aacagtgcgcaggacacattcctca

SEQ ID NO: 159263 - DNA, 25 bp, Probe Sequence
aacagatgccagtgcacaaatctta

SEQ ID NO: 159264 - DNA, 25 bp, Probe Sequence
aacactgacttagcatatagcttaa

SEQ ID NO: 159265 - DNA, 25 bp, Probe Sequence
aacactgattaactgcaagtcttca

SEQ ID NO: 159266 - DNA, 25 bp, Probe Sequence
aacacttctgaactatattttgaca

SEQ ID NO: 159267 - DNA, 25 bp, Probe Sequence
aacttttcacagctatgtttgcagc

SEQ ID NO: 159268 - DNA, 25 bp, Probe Sequence
aacttgattgaacgtgagattgccc

SEQ ID NO: 159269 - DNA, 25 bp, Probe Sequence
aacatagcattaaggtggacagcca

SEQ ID NO: 159270 - DNA, 25 bp, Probe Sequence
aacatagcattaaggtggacagcca

SEQ ID NO: 159271 - DNA, 25 bp, Probe Sequence
aacatacttacatttcagacatatc

SEQ ID NO: 159272 - DNA, 25 bp, Probe Sequence
aacatacttacatttcagacatatc

SEQ ID NO: 159273 - DNA, 25 bp, Probe Sequence
aacagatcataatcttgacacatct

SEQ ID NO: 159274 - DNA, 25 bp, Probe Sequence
aacagctcaggatctcttagcattt

SEQ ID NO: 159275 - DNA, 25 bp, Probe Sequence
aacactcagtggaatcttccagcta

SEQ ID NO: 159276 - DNA, 25 bp, Probe Sequence
aacaccagcagttaataccactagt

SEQ ID NO: 159277 - DNA, 25 bp, Probe Sequence
aacactacagtttatatcttcaggt

SEQ ID NO: 159278 - DNA, 25 bp, Probe Sequence
aacactacgttttctgctatggtct

SEQ ID NO: 159279 - DNA, 25 bp, Probe Sequence
aacactaggatttatctgcagtgtt

SEQ ID NO: 159280 - DNA, 25 bp, Probe Sequence
aacacgaggatgatatcgctgtagt

SEQ ID NO: 159281 - DNA, 25 bp, Probe Sequence
aacagcttggatttattcttacttt

SEQ ID NO: 159282 - DNA, 25 bp, Probe Sequence
aacactttagttatattcactggtt

SEQ ID NO: 159283 - DNA, 25 bp, Probe Sequence
aacacttaagttattttatcagcac

SEQ ID NO: 159284 - DNA, 25 bp, Probe Sequence
aacacttaagttactcttctgaaat

SEQ ID NO: 159285 - DNA, 25 bp, Probe Sequence
aagacttaactagacttctgaactt

SEQ ID NO: 159286 - DNA, 25 bp, Probe Sequence
aactttaactatgcctatcgccctt

SEQ ID NO: 159287 - DNA, 25 bp, Probe Sequence
aacatgattaacatccctgatccta

SEQ ID NO: 159288 - DNA, 25 bp, Probe Sequence
aacatgcatctcactctgggtgtct

SEQ ID NO: 159289 - DNA, 25 bp, Probe Sequence
aacagctgcatttcttggttgttct

SEQ ID NO: 159290 - DNA, 25 bp, Probe Sequence
aacactcatttcactgtgctgattc

SEQ ID NO: 159291 - DNA, 25 bp, Probe Sequence
aacactaattatgggagcagattct

SEQ ID NO: 159292 - DNA, 25 bp, Probe Sequence
aacatcgatattacttacagatttg

SEQ ID NO: 159293 - DNA, 25 bp, Probe Sequence
aactggtattttatcctttgattct

SEQ ID NO: 159294 - DNA, 25 bp, Probe Sequence
aacttgttcgtgggtcatcgggaat

SEQ ID NO: 159295 - DNA, 25 bp, Probe Sequence
aactattacagtgcatgttagggag

SEQ ID NO: 159296 - DNA, 25 bp, Probe Sequence
aactttgccagcattgatgaacgga

SEQ ID NO: 159297 - DNA, 25 bp, Probe Sequence
aactatattcactttaaagcccagt

SEQ ID NO: 159298 - DNA, 25 bp, Probe Sequence
aacatctattgagtgcttaaaaaca

SEQ ID NO: 159299 - DNA, 25 bp, Probe Sequence
aacatcccagactttaaaattcagt

SEQ ID NO: 159300 - DNA, 25 bp, Probe Sequence
aacttctgcaaatgaaaaatgtatt

SEQ ID NO: 159301 - DNA, 25 bp, Probe Sequence
aacatcttgttacataaatatggtt

SEQ ID NO: 159302 - DNA, 25 bp, Probe Sequence
aacactgatttggacaatattgtgg

SEQ ID NO: 159303 - DNA, 25 bp, Probe Sequence
aacactggcttggattgccctttgt

SEQ ID NO: 159304 - DNA, 25 bp, Probe Sequence
aacactgtgctgttaagcatccatt

SEQ ID NO: 159305 - DNA, 25 bp, Probe Sequence
aacagctgtttatagctactgtgac

SEQ ID NO: 159306 - DNA, 25 bp, Probe Sequence
aacagctgtttatagctactgtgac

SEQ ID NO: 159307 - DNA, 25 bp, Probe Sequence
aacagagttcttagagtgacttaca

SEQ ID NO: 159308 - DNA, 25 bp, Probe Sequence
aacagagtggtgatagcgcctaagc

SEQ ID NO: 159309 - DNA, 25 bp, Probe Sequence
aacagtgggtgccaactcatgctaa

SEQ ID NO: 159310 - DNA, 25 bp, Probe Sequence
aagctggggcagcaaaggctaagtt

SEQ ID NO: 159311 - DNA, 25 bp, Probe Sequence
aacagctggccacgaaagccgccag

SEQ ID NO: 159312 - DNA, 25 bp, Probe Sequence
aacttagccgcagagatcctgcctg

SEQ ID NO: 159313 - DNA, 25 bp, Probe Sequence
aacattcgccgaggaaggtccggag

SEQ ID NO: 159314 - DNA, 25 bp, Probe Sequence
aacagccctctgagcaaggggtggc

SEQ ID NO: 159315 - DNA, 25 bp, Probe Sequence
aaccttccgtcgtgagggagcactt

SEQ ID NO: 159316 - DNA, 25 bp, Probe Sequence
aactttggcaggcctggagggagca

SEQ ID NO: 159317 - DNA, 25 bp, Probe Sequence
aactcaaggaggcccggggcagagg

SEQ ID NO: 159318 - DNA, 25 bp, Probe Sequence
aactacaaggggcaggtcctgaggc

SEQ ID NO: 159319 - DNA, 25 bp, Probe Sequence
aacagaaagcagtggaggtgggggt

SEQ ID NO: 159320 - DNA, 25 bp, Probe Sequence
aacagcaaacagatggggattgtga

SEQ ID NO: 159321 - DNA, 25 bp, Probe Sequence
aacagacacacgatgttgtcaagga

SEQ ID NO: 159322 - DNA, 25 bp, Probe Sequence
aacagtccacataggtctgcaaagg

SEQ ID NO: 159323 - DNA, 25 bp, Probe Sequence
aactgtcagctcagcgttgactgag

SEQ ID NO: 159324 - DNA, 25 bp, Probe Sequence
aactacagtcctatgtactgaagga

SEQ ID NO: 159325 - DNA, 25 bp, Probe Sequence
aactttgcctcaattgtgactggag

SEQ ID NO: 159326 - DNA, 25 bp, Probe Sequence
aacatttacacaagatggacattac

SEQ ID NO: 159327 - DNA, 25 bp, Probe Sequence
aacagcctaacaaagacacttgcct

SEQ ID NO: 159328 - DNA, 25 bp, Probe Sequence
aacatcctgaaataccacattggtg

SEQ ID NO: 159329 - DNA, 25 bp, Probe Sequence
aactggcggaaacccagaggcattg

SEQ ID NO: 159330 - DNA, 25 bp, Probe Sequence
aacattgggaacagccaaatcagcg

SEQ ID NO: 159331 - DNA, 25 bp, Probe Sequence
caacgttggaacggccatcagcaag

SEQ ID NO: 159332 - DNA, 25 bp, Probe Sequence
aacagatttgaaggagccgctgaaa

SEQ ID NO: 159333 - DNA, 25 bp, Probe Sequence
aacagcttcaggtgcagaccgagaa

SEQ ID NO: 159334 - DNA, 25 bp, Probe Sequence
aacagctacgaggaacaccggcaag

SEQ ID NO: 159335 - DNA, 25 bp, Probe Sequence
aacaccaaagaaacatccaagcaat

SEQ ID NO: 159336 - DNA, 25 bp, Probe Sequence
aacactgcaaaatttcccatggaga

SEQ ID NO: 159337 - DNA, 25 bp, Probe Sequence
aacagatggaagtttttgcattggt

SEQ ID NO: 159338 - DNA, 25 bp, Probe Sequence
aacgtcgaagttctggaggggaatg

SEQ ID NO: 159339 - DNA, 25 bp, Probe Sequence
aacccgacagggaggagtagatgaa

SEQ ID NO: 159340 - DNA, 25 bp, Probe Sequence
aacttcgaagccatagggtggagaa

SEQ ID NO: 159341 - DNA, 25 bp, Probe Sequence
aactgttgaaccaattgggtggatt

SEQ ID NO: 159342 - DNA, 25 bp, Probe Sequence
aactaggacactaactgggttccat

SEQ ID NO: 159343 - DNA, 25 bp, Probe Sequence
aacgaagacactcagccggagttgt

SEQ ID NO: 159344 - DNA, 25 bp, Probe Sequence
aacatgaaactctgagcttaggggt

SEQ ID NO: 159345 - DNA, 25 bp, Probe Sequence
aacattaatgcctacctaagtggga

SEQ ID NO: 159346 - DNA, 25 bp, Probe Sequence
aacatagatctgactgccttaaggg

SEQ ID NO: 159347 - DNA, 25 bp, Probe Sequence
aacacgtctcctgctaaagtctgag

SEQ ID NO: 159348 - DNA, 25 bp, Probe Sequence
aacactgtaactgctgaaatggcat

SEQ ID NO: 159349 - DNA, 25 bp, Probe Sequence
aacactgggacttcaacatcataga

SEQ ID NO: 159350 - DNA, 25 bp, Probe Sequence
aacggcgtgcattatcaacatcata

SEQ ID NO: 159351 - DNA, 25 bp, Probe Sequence
aacagagctgtttataccacatgat

SEQ ID NO: 159352 - DNA, 25 bp, Probe Sequence
aacagagagttatcttaatttttat

SEQ ID NO: 159353 - DNA, 25 bp, Probe Sequence
aacggaattggagccattttgcttt

SEQ ID NO: 159354 - DNA, 25 bp, Probe Sequence
aactccactttacccatattttatg

SEQ ID NO: 159355 - DNA, 25 bp, Probe Sequence
aacttctctgtgtaacctcatttgg

SEQ ID NO: 159356 - DNA, 25 bp, Probe Sequence
aacatgtccgtggacacctgtgcct

SEQ ID NO: 159357 - DNA, 25 bp, Probe Sequence
aacatctgccaggagactgagcggc

SEQ ID NO: 159358 - DNA, 25 bp, Probe Sequence
aacagtgctctggtgacatgataaa

SEQ ID NO: 159359 - DNA, 25 bp, Probe Sequence
aacagatcttgcgtatgctggagaa

SEQ ID NO: 159360 - DNA, 25 bp, Probe Sequence
aactatcaagcagagtgaagataca

SEQ ID NO: 159361 - DNA, 25 bp, Probe Sequence
aactgtcccggagacaatgacatct

SEQ ID NO: 159362 - DNA, 25 bp, Probe Sequence
aacgattccgaaacataatatcaat

SEQ ID NO: 159363 - DNA, 25 bp, Probe Sequence
aactgattccaaaccctaataagat

SEQ ID NO: 159364 - DNA, 25 bp, Probe Sequence
aactataccataacccaaggctgaa

SEQ ID NO: 159365 - DNA, 25 bp, Probe Sequence
aactataacaccacccgcagtgaaa

SEQ ID NO: 159366 - DNA, 25 bp, Probe Sequence
aacttgaacccagacttatgtaact

SEQ ID NO: 159367 - DNA, 25 bp, Probe Sequence
aacttgacccaaaaatttgtcacag

SEQ ID NO: 159368 - DNA, 25 bp, Probe Sequence
aacttcccacaaaacattgcgattt

SEQ ID NO: 159369 - DNA, 25 bp, Probe Sequence
aacttccgaacacagaagctgtctt

SEQ ID NO: 159370 - DNA, 25 bp, Probe Sequence
aacttaggaagcccacaaggttctg

SEQ ID NO: 159371 - DNA, 25 bp, Probe Sequence
aacttggaacactcactatggttaa

SEQ ID NO: 159372 - DNA, 25 bp, Probe Sequence
aactctataacctcagctttttaat

SEQ ID NO: 159373 - DNA, 25 bp, Probe Sequence
aactcttcaggttccacatggtata

SEQ ID NO: 159374 - DNA, 25 bp, Probe Sequence
aacttctagtttgcactgccttgga

SEQ ID NO: 159375 - DNA, 25 bp, Probe Sequence
aactttaaattcaagctgctttgga

SEQ ID NO: 159376 - DNA, 25 bp, Probe Sequence
aactaaaatttctcatcttcgtact

SEQ ID NO: 159377 - DNA, 25 bp, Probe Sequence
aactaaaatgctcaccacttagcct

SEQ ID NO: 159378 - DNA, 25 bp, Probe Sequence
aactaattactgctcaacaaatcct

SEQ ID NO: 159379 - DNA, 25 bp, Probe Sequence
aacattcctaggctgaaatttccac

SEQ ID NO: 159380 - DNA, 25 bp, Probe Sequence
aatttgccagggcttcgtctaacac

SEQ ID NO: 159381 - DNA, 25 bp, Probe Sequence
aatttcaagctacatttggaaaatc

SEQ ID NO: 159382 - DNA, 25 bp, Probe Sequence
aactctagagcttgaattttaaggg

SEQ ID NO: 159383 - DNA, 25 bp, Probe Sequence
aacttgaagtggttgtgttgtaggg

SEQ ID NO: 159384 - DNA, 25 bp, Probe Sequence
aacatttctgtttctggctatgata

SEQ ID NO: 159385 - DNA, 25 bp, Probe Sequence
aacattctctgatgagcccttggag

SEQ ID NO: 159386 - DNA, 25 bp, Probe Sequence
aactgtccgtgaactccttagagaa

SEQ ID NO: 159387 - DNA, 25 bp, Probe Sequence
aacagtacctgctctcaaattgaaa

SEQ ID NO: 159388 - DNA, 25 bp, Probe Sequence
aacatccactggacccaaattcaga

SEQ ID NO: 159389 - DNA, 25 bp, Probe Sequence
aacatcacctgggctgccagtttct

SEQ ID NO: 159390 - DNA, 25 bp, Probe Sequence
caacatggcctcagtcgactttgat

SEQ ID NO: 159391 - DNA, 25 bp, Probe Sequence
aactggtttcgctgtcattcatgat

SEQ ID NO: 159392 - DNA, 25 bp, Probe Sequence
aactgttttggctgggcctacttca

SEQ ID NO: 159393 - DNA, 25 bp, Probe Sequence
aacttggactagtgtaactccttca

SEQ ID NO: 159394 - DNA, 25 bp, Probe Sequence
aactgatgtttcaatttacccctct

SEQ ID NO: 159395 - DNA, 25 bp, Probe Sequence
aactttaatgctgtctagcctcctg

SEQ ID NO: 159396 - DNA, 25 bp, Probe Sequence
aactattaactgagtagccacaatt

SEQ ID NO: 159397 - DNA, 25 bp, Probe Sequence
aacatatgtgcaattgaagttccag

SEQ ID NO: 159398 - DNA, 25 bp, Probe Sequence
aacattgctcacggcaactcttcag

SEQ ID NO: 159399 - DNA, 25 bp, Probe Sequence
aacagtctcatcagtgatctttcaa

SEQ ID NO: 159400 - DNA, 25 bp, Probe Sequence
aacagtatactcatgaattgctaag

SEQ ID NO: 159401 - DNA, 25 bp, Probe Sequence
aacatcaaactcatgggagataagg

SEQ ID NO: 159402 - DNA, 25 bp, Probe Sequence
aacagataactcatcctaaacagag

SEQ ID NO: 159403 - DNA, 25 bp, Probe Sequence
aacagatgaactatccacagaagga

SEQ ID NO: 159404 - DNA, 25 bp, Probe Sequence
aacagagcaagtcactctcgattgg

SEQ ID NO: 159405 - DNA, 25 bp, Probe Sequence
aacagagcgcaaatgtcctcagatt

SEQ ID NO: 159406 - DNA, 25 bp, Probe Sequence
aacagctgcaagctgtccagcagct

SEQ ID NO: 159407 - DNA, 25 bp, Probe Sequence
aacagctgcatcattgaccgcacag

SEQ ID NO: 159408 - DNA, 25 bp, Probe Sequence
aacatgccatctatagttgccagcc

SEQ ID NO: 159409 - DNA, 25 bp, Probe Sequence
aacagcctttctggctgaccacatg

SEQ ID NO: 159410 - DNA, 25 bp, Probe Sequence
aacagcctttttaggccacagtgac

SEQ ID NO: 159411 - DNA, 25 bp, Probe Sequence
aacaggtgtttttccacaagtgccg

SEQ ID NO: 159412 - DNA, 25 bp, Probe Sequence
aaccggcattgtattccaaagacga

SEQ ID NO: 159413 - DNA, 25 bp, Probe Sequence
aaccgctgaggtatggataggaacg

SEQ ID NO: 159414 - DNA, 25 bp, Probe Sequence
aacatgggggctatgctggggaaag

SEQ ID NO: 159415 - DNA, 25 bp, Probe Sequence
aacagctgggagaaactgggaaaca

SEQ ID NO: 159416 - DNA, 25 bp, Probe Sequence
aacagctctttggacactaggaaaa

SEQ ID NO: 159417 - DNA, 25 bp, Probe Sequence
aacagtgctttggaggctctggaaa

SEQ ID NO: 159418 - DNA, 25 bp, Probe Sequence
aacagagcatttgcagacaggtcaa

SEQ ID NO: 159419 - DNA, 25 bp, Probe Sequence
aacagaggtgctgcgaggtgctcac

SEQ ID NO: 159420 - DNA, 25 bp, Probe Sequence
aacagaaggtgcgagttgctcccga

SEQ ID NO: 159421 - DNA, 25 bp, Probe Sequence
aacagtagtggccagtggacatacg

SEQ ID NO: 159422 - DNA, 25 bp, Probe Sequence
aacatgttgggatgggaaactggag

SEQ ID NO: 159423 - DNA, 25 bp, Probe Sequence
aacagtatgggaaagaactcctgaa

SEQ ID NO: 159424 - DNA, 25 bp, Probe Sequence
aacagatgacggagataatccctaa

SEQ ID NO: 159425 - DNA, 25 bp, Probe Sequence
aacagtatccaaagttataccataa

SEQ ID NO: 159426 - DNA, 25 bp, Probe Sequence
aacagttatcagaggctaaaacaga

SEQ ID NO: 159427 - DNA, 25 bp, Probe Sequence
aacagtttcattgtctaacacactt

SEQ ID NO: 159428 - DNA, 25 bp, Probe Sequence
aacagcttttatggttgaactcact

SEQ ID NO: 159429 - DNA, 25 bp, Probe Sequence
aacagctatgttgctatctatacca

SEQ ID NO: 159430 - DNA, 25 bp, Probe Sequence
aacatgatgagtacctctccactcg

SEQ ID NO: 159431 - DNA, 25 bp, Probe Sequence
aacaggaaattcctctcagctctgc

SEQ ID NO: 159432 - DNA, 25 bp, Probe Sequence
aacgggaagctcactggcatggcct

SEQ ID NO: 159433 - DNA, 25 bp, Probe Sequence
aagcggagaacgctggtgggcctgt

SEQ ID NO: 159434 - DNA, 25 bp, Probe Sequence
aactggaaggaacggatgggcctct

SEQ ID NO: 159435 - DNA, 25 bp, Probe Sequence
aacttgaaagtacagcaggcccctc

SEQ ID NO: 159436 - DNA, 25 bp, Probe Sequence
aacttgtaaatacaccacctcactc

SEQ ID NO: 159437 - DNA, 25 bp, Probe Sequence
aacctgtaaaatcaacacaagttat

SEQ ID NO: 159438 - DNA, 25 bp, Probe Sequence
aaccatatcaatcaccaagacaagt

SEQ ID NO: 159439 - DNA, 25 bp, Probe Sequence
aacagatgtcttcatgtaaaccaga

SEQ ID NO: 159440 - DNA, 25 bp, Probe Sequence
aacgagctgctaaagtcctaccagt

SEQ ID NO: 159441 - DNA, 25 bp, Probe Sequence
aacagcaagctgaggacctacctgc

SEQ ID NO: 159442 - DNA, 25 bp, Probe Sequence
aacagaaggtcatgacccacgtcag

SEQ ID NO: 159443 - DNA, 25 bp, Probe Sequence
aactaagcaatatgtcctcctgtcc

SEQ ID NO: 159444 - DNA, 25 bp, Probe Sequence
aactaagctaaggactctcacagat

SEQ ID NO: 159445 - DNA, 25 bp, Probe Sequence
aactacgtacatcgaattggcagag

SEQ ID NO: 159446 - DNA, 25 bp, Probe Sequence
aacttcgtactttctatgagaagcg

SEQ ID NO: 159447 - DNA, 25 bp, Probe Sequence
aacttagagtttttctgaacctgat

SEQ ID NO: 159448 - DNA, 25 bp, Probe Sequence
aacattaaggtttatgggatactca

SEQ ID NO: 159449 - DNA, 25 bp, Probe Sequence
aacattaagctgatgtgggagagac

SEQ ID NO: 159450 - DNA, 25 bp, Probe Sequence
aacagtaatgtgagtgctagcaaat

SEQ ID NO: 159451 - DNA, 25 bp, Probe Sequence
aacatctgcatttggttctagcaac

SEQ ID NO: 159452 - DNA, 25 bp, Probe Sequence
aacatccagcctgttcaagaaccta

SEQ ID NO: 159453 - DNA, 25 bp, Probe Sequence
aacattgcccctgtaggcagacact

SEQ ID NO: 159454 - DNA, 25 bp, Probe Sequence
aacatcctgatcatcctaggcaaac

SEQ ID NO: 159455 - DNA, 25 bp, Probe Sequence
aacatgctagataatccagtgtcag

SEQ ID NO: 159456 - DNA, 25 bp, Probe Sequence
aacatgaagagttatgccggcttcc

SEQ ID NO: 159457 - DNA, 25 bp, Probe Sequence
aacatgaaggacttgacctgccgct

SEQ ID NO: 159458 - DNA, 25 bp, Probe Sequence
aacagataggaatgacctatggctt

SEQ ID NO: 159459 - DNA, 25 bp, Probe Sequence
aacagagagagacagtccctggccc

SEQ ID NO: 159460 - DNA, 25 bp, Probe Sequence
aacagagcgagagagatgccagggg

SEQ ID NO: 159461 - DNA, 25 bp, Probe Sequence
aacagagggagctactctcaggctg

SEQ ID NO: 159462 - DNA, 25 bp, Probe Sequence
aacatcaggagatacttcaccctca

SEQ ID NO: 159463 - DNA, 25 bp, Probe Sequence
aacatagggataatggcaagccact

SEQ ID NO: 159464 - DNA, 25 bp, Probe Sequence
aacagggacaataggagatcacagt

SEQ ID NO: 159465 - DNA, 25 bp, Probe Sequence
aacaggtggctcagcaggaagcaga

SEQ ID NO: 159466 - DNA, 25 bp, Probe Sequence
aacaggattcctgagctgaaatgca

SEQ ID NO: 159467 - DNA, 25 bp, Probe Sequence
aacagggcatccaattctacactca

SEQ ID NO: 159468 - DNA, 25 bp, Probe Sequence
aacagagtgttcgattctgccctat

SEQ ID NO: 159469 - DNA, 25 bp, Probe Sequence
aacagagtgttcgattctgccctat

SEQ ID NO: 159470 - DNA, 25 bp, Probe Sequence
aacagattggcacctttgcctctgt

SEQ ID NO: 159471 - DNA, 25 bp, Probe Sequence
aacagattgcgagcacattacttgc

SEQ ID NO: 159472 - DNA, 25 bp, Probe Sequence
aacagttgctgactcacattagtgc

SEQ ID NO: 159473 - DNA, 25 bp, Probe Sequence
aacagtcttcagccacagttgtgat

SEQ ID NO: 159474 - DNA, 25 bp, Probe Sequence
aacagacgctcagcagacatgtgga

SEQ ID NO: 159475 - DNA, 25 bp, Probe Sequence
aacagaagctcaccagaacaagcta

SEQ ID NO: 159476 - DNA, 25 bp, Probe Sequence
aacagaatcaagaagcatcatcaga

SEQ ID NO: 159477 - DNA, 25 bp, Probe Sequence
aacagatcattattatatataggta

SEQ ID NO: 159478 - DNA, 25 bp, Probe Sequence
aacagatcttctatcagtagcagta

SEQ ID NO: 159479 - DNA, 25 bp, Probe Sequence
aacatgatgttaatctaggaacttc

SEQ ID NO: 159480 - DNA, 25 bp, Probe Sequence
aacagtgattatgctcagtacccct

SEQ ID NO: 159481 - DNA, 25 bp, Probe Sequence
aacagagaaagaccattccccctgc

SEQ ID NO: 159482 - DNA, 25 bp, Probe Sequence
aacatagaccaaatatcccccaata

SEQ ID NO: 159483 - DNA, 25 bp, Probe Sequence
aacatgaaaaaatcccagccctagt

SEQ ID NO: 159484 - DNA, 25 bp, Probe Sequence
aacaggtaaaaagcctcacccagat

SEQ ID NO: 159485 - DNA, 25 bp, Probe Sequence
aacaggtcaagaataacacttcaaa

SEQ ID NO: 159486 - DNA, 25 bp, Probe Sequence
aacatgtgtgcatcttgaacaattt

SEQ ID NO: 159487 - DNA, 25 bp, Probe Sequence
aacattgtgcctttactacttcttt

SEQ ID NO: 159488 - DNA, 25 bp, Probe Sequence
aacattgtgcctttactacttcttt

SEQ ID NO: 159489 - DNA, 25 bp, Probe Sequence
aacagtggttatagactctttcttt

SEQ ID NO: 159490 - DNA, 25 bp, Probe Sequence
aacagtgtttaaagtctcagtttct

SEQ ID NO: 159491 - DNA, 25 bp, Probe Sequence
aacagtgtaaaagcattcatgtttc

SEQ ID NO: 159492 - DNA, 25 bp, Probe Sequence
aacgttaccaatgtgtgcagcctct

SEQ ID NO: 159493 - DNA, 25 bp, Probe Sequence
aacagtttcctatttggctgcattc

SEQ ID NO: 159494 - DNA, 25 bp, Probe Sequence
aacgtatcccatgttggtgtcctgg

SEQ ID NO: 159495 - DNA, 25 bp, Probe Sequence
aaccattcccatgttgttaactatt

SEQ ID NO: 159496 - DNA, 25 bp, Probe Sequence
aaccattacctgactttagagcttt

SEQ ID NO: 159497 - DNA, 25 bp, Probe Sequence
aactctaacactatgcttaggcgct

SEQ ID NO: 159498 - DNA, 25 bp, Probe Sequence
aacttagatattaacttagtggata

SEQ ID NO: 159499 - DNA, 25 bp, Probe Sequence
aacatgtagtttaatcttaatgtgt

SEQ ID NO: 159500 - DNA, 25 bp, Probe Sequence
aacagtagtaccacgtgtagcattt

SEQ ID NO: 159501 - DNA, 25 bp, Probe Sequence
aacagtagtaccacgtgtagcattt

SEQ ID NO: 159502 - DNA, 25 bp, Probe Sequence
aacagtagtaccacgtgtagcattt

SEQ ID NO: 159503 - DNA, 25 bp, Probe Sequence
aacagtagtaccacgtgtagcattt

SEQ ID NO: 159504 - DNA, 25 bp, Probe Sequence
aacagataggaacttcagagcttat

SEQ ID NO: 159505 - DNA, 25 bp, Probe Sequence
aacttagcagagctgacaggtttct

SEQ ID NO: 159506 - DNA, 25 bp, Probe Sequence
aacatctacaaggtggagggcggct

SEQ ID NO: 159507 - DNA, 25 bp, Probe Sequence
aacagtatccaggtgatgcgggcgc

SEQ ID NO: 159508 - DNA, 25 bp, Probe Sequence
aacagacaccacctgtcaaagctgc

SEQ ID NO: 159509 - DNA, 25 bp, Probe Sequence
aacatccagcactgtaagaagctgt

SEQ ID NO: 159510 - DNA, 25 bp, Probe Sequence
aagttcagacttcaaatagtggcaa

SEQ ID NO: 159511 - DNA, 25 bp, Probe Sequence
aacagtaggcttcatgagtagctga

SEQ ID NO: 159512 - DNA, 25 bp, Probe Sequence
aacagtgtgatggtcccagctacta

SEQ ID NO: 159513 - DNA, 25 bp, Probe Sequence
aacagtggtggctcaagctacggcc

SEQ ID NO: 159514 - DNA, 25 bp, Probe Sequence
aacgggtgcagcacaccaacatggc

SEQ ID NO: 159515 - DNA, 25 bp, Probe Sequence
aactgagttagttaccaacaggaca

SEQ ID NO: 159516 - DNA, 25 bp, Probe Sequence
aactgagatgtgctaacctaaaaaa

SEQ ID NO: 159517 - DNA, 25 bp, Probe Sequence
aacaggaggccttgacctagtatag

SEQ ID NO: 159518 - DNA, 25 bp, Probe Sequence
aacagcaggtgacaggcctagctat

SEQ ID NO: 159519 - DNA, 25 bp, Probe Sequence
aacagggtgaaaccccatctctact

SEQ ID NO: 159520 - DNA, 25 bp, Probe Sequence
aacatggagaaaccccgtgtctact

SEQ ID NO: 159521 - DNA, 25 bp, Probe Sequence
aacatggagaaaccccgtgtctact

SEQ ID NO: 159522 - DNA, 25 bp, Probe Sequence
aacatagtgaaactccgtctctacc

SEQ ID NO: 159523 - DNA, 25 bp, Probe Sequence
aacatagtaataccctctctctaca

SEQ ID NO: 159524 - DNA, 25 bp, Probe Sequence
aacagggaaagcttgctacattata

SEQ ID NO: 159525 - DNA, 25 bp, Probe Sequence
aacagggaaccgtctctatagatag

SEQ ID NO: 159526 - DNA, 25 bp, Probe Sequence
aacagggtatgctgcctctgtaaat

SEQ ID NO: 159527 - DNA, 25 bp, Probe Sequence
aacagtgccatacatttctaaaatc

SEQ ID NO: 159528 - DNA, 25 bp, Probe Sequence
aacttgcctgaaatttctgagtatg

SEQ ID NO: 159529 - DNA, 25 bp, Probe Sequence
aacatctgactgtgattttctaatg

SEQ ID NO: 159530 - DNA, 25 bp, Probe Sequence
aacatctgactgtgattttctaatg

SEQ ID NO: 159531 - DNA, 25 bp, Probe Sequence
aacatctgggtggttagcattcaag

SEQ ID NO: 159532 - DNA, 25 bp, Probe Sequence
aacagtgggtggtatcagcagctca

SEQ ID NO: 159533 - DNA, 25 bp, Probe Sequence
aacagtgggtggtatcagcagctca

SEQ ID NO: 159534 - DNA, 25 bp, Probe Sequence
aacagtatcagtcgtctgggctcat

SEQ ID NO: 159535 - DNA, 25 bp, Probe Sequence
aacatgaaaatcctcgtggccttgg

SEQ ID NO: 159536 - DNA, 25 bp, Probe Sequence
aacatgaacacttcttgtagctcac

SEQ ID NO: 159537 - DNA, 25 bp, Probe Sequence
aacatcaatcaaccagtttgccctg

SEQ ID NO: 159538 - DNA, 25 bp, Probe Sequence
aactaatgacatccagtgtctccaa

SEQ ID NO: 159539 - DNA, 25 bp, Probe Sequence
aacatcagtatcagcagcgtcgcca

SEQ ID NO: 159540 - DNA, 25 bp, Probe Sequence
aactcatgctaacgcagcagttgca

SEQ ID NO: 159541 - DNA, 25 bp, Probe Sequence
aactctcgattgccgtttcaattgt

SEQ ID NO: 159542 - DNA, 25 bp, Probe Sequence
aactctggtttcccttatatcttga

SEQ ID NO: 159543 - DNA, 25 bp, Probe Sequence
aacttacttccattctgtttcggat

SEQ ID NO: 159544 - DNA, 25 bp, Probe Sequence
aactttgttccctggattcataaat

SEQ ID NO: 159545 - DNA, 25 bp, Probe Sequence
aactctggctttcataagtagtaaa

SEQ ID NO: 159546 - DNA, 25 bp, Probe Sequence
aacttggctagttcaaagatagact

SEQ ID NO: 159547 - DNA, 25 bp, Probe Sequence
aacatttctagataccatctaacac

SEQ ID NO: 159548 - DNA, 25 bp, Probe Sequence
aacttttatctcacactcttacagc

SEQ ID NO: 159549 - DNA, 25 bp, Probe Sequence
aactttgtatgtattttgtatggca

SEQ ID NO: 159550 - DNA, 25 bp, Probe Sequence
aacttttttggtgtctcagatgagt

SEQ ID NO: 159551 - DNA, 25 bp, Probe Sequence
aacttattaaagtgctctgagtgat

SEQ ID NO: 159552 - DNA, 25 bp, Probe Sequence
aactttgtcacaatgcctctttgga

SEQ ID NO: 159553 - DNA, 25 bp, Probe Sequence
aactataggcaaatcgtgtttgcag

SEQ ID NO: 159554 - DNA, 25 bp, Probe Sequence
aactcaacaaactgtgtcatcacgc

SEQ ID NO: 159555 - DNA, 25 bp, Probe Sequence
aactgaactaggaattgttagcggg

SEQ ID NO: 159556 - DNA, 25 bp, Probe Sequence
aactaagtacgtatgttcatctaca

SEQ ID NO: 159557 - DNA, 25 bp, Probe Sequence
aactaaaccttctcttatcaacatc

SEQ ID NO: 159558 - DNA, 25 bp, Probe Sequence
aactagaacgctcttcttttagtgt

SEQ ID NO: 159559 - DNA, 25 bp, Probe Sequence
aacatggcccacacgttgtatttgg

SEQ ID NO: 159560 - DNA, 25 bp, Probe Sequence
aacagagccaacaacagtattttaa

SEQ ID NO: 159561 - DNA, 25 bp, Probe Sequence
aacaggcccagattcaacttttcta

SEQ ID NO: 159562 - DNA, 25 bp, Probe Sequence
aacgggcgcagagcccattgtgtcc

SEQ ID NO: 159563 - DNA, 25 bp, Probe Sequence
aacagttccaggaacgcctgcttct

SEQ ID NO: 159564 - DNA, 25 bp, Probe Sequence
aacagttccaggaacgcctgcttct

SEQ ID NO: 159565 - DNA, 25 bp, Probe Sequence
aacttttcaggaacttctgtgttgt

SEQ ID NO: 159566 - DNA, 25 bp, Probe Sequence
aacttaccatagtatttttgtattg

SEQ ID NO: 159567 - DNA, 25 bp, Probe Sequence
aacatactccatagtcttttcctgt

SEQ ID NO: 159568 - DNA, 25 bp, Probe Sequence
aacattgtttagactatttggtgtc

SEQ ID NO: 159569 - DNA, 25 bp, Probe Sequence
aactctttttctaattggggcacag

SEQ ID NO: 159570 - DNA, 25 bp, Probe Sequence
aacatcctgtgtcttttggagtacg

SEQ ID NO: 159571 - DNA, 25 bp, Probe Sequence
aacatcctgtgtcttttggagtacg

SEQ ID NO: 159572 - DNA, 25 bp, Probe Sequence
aacatactgtgtcaggtatactgtt

SEQ ID NO: 159573 - DNA, 25 bp, Probe Sequence
aacaggctgactgggtgttagtgga

SEQ ID NO: 159574 - DNA, 25 bp, Probe Sequence
aacagagctgtggttggtgtggtgg

SEQ ID NO: 159575 - DNA, 25 bp, Probe Sequence
aacagggtcggtggtgagggctggg

SEQ ID NO: 159576 - DNA, 25 bp, Probe Sequence
aacggctccggcatgtgcaaggccg

SEQ ID NO: 159577 - DNA, 25 bp, Probe Sequence
aactgttttcagatccaagtgctca

SEQ ID NO: 159578 - DNA, 25 bp, Probe Sequence
aactacttcctgaaccgggatgctc

SEQ ID NO: 159579 - DNA, 25 bp, Probe Sequence
aactacttcgccattgcggagaatg

SEQ ID NO: 159580 - DNA, 25 bp, Probe Sequence
aacatactttgttttgcctagagag

SEQ ID NO: 159581 - DNA, 25 bp, Probe Sequence
aactacgtattcattgtctacctgc

SEQ ID NO: 159582 - DNA, 25 bp, Probe Sequence
aactgaccagttgttgataaccact

SEQ ID NO: 159583 - DNA, 25 bp, Probe Sequence
aacttgtcaattgttcacataccca

SEQ ID NO: 159584 - DNA, 25 bp, Probe Sequence
aactaatctatttaacctatcctca

SEQ ID NO: 159585 - DNA, 25 bp, Probe Sequence
aacagatgtcttgaaacacttttca

SEQ ID NO: 159586 - DNA, 25 bp, Probe Sequence
aacatcttttgttactcacattttc

SEQ ID NO: 159587 - DNA, 25 bp, Probe Sequence
aacatatctttgatacttctttgtg

SEQ ID NO: 159588 - DNA, 25 bp, Probe Sequence
aacttgctttatgccttcttattgc

SEQ ID NO: 159589 - DNA, 25 bp, Probe Sequence
aacttattcttcgtctttttgcttg

SEQ ID NO: 159590 - DNA, 25 bp, Probe Sequence
aacttcagatctaactttggctaca

SEQ ID NO: 159591 - DNA, 25 bp, Probe Sequence
aacatttgcaccacttgtggctttt

SEQ ID NO: 159592 - DNA, 25 bp, Probe Sequence
aacatcattgcagcacctttactcc

SEQ ID NO: 159593 - DNA, 25 bp, Probe Sequence
aacatttcacaccggttaccgctat

SEQ ID NO: 159594 - DNA, 25 bp, Probe Sequence
aacattgtaacattggtttcccgag

SEQ ID NO: 159595 - DNA, 25 bp, Probe Sequence
aacattgcttaatttttttgctctt

SEQ ID NO: 159596 - DNA, 25 bp, Probe Sequence
aactttgcatgttcttgttttgtta

SEQ ID NO: 159597 - DNA, 25 bp, Probe Sequence
aactatccaggatttggtgagttta

SEQ ID NO: 159598 - DNA, 25 bp, Probe Sequence
aactcattcctgattggctttctct

SEQ ID NO: 159599 - DNA, 25 bp, Probe Sequence
aacataaccagccattggctattta

SEQ ID NO: 159600 - DNA, 25 bp, Probe Sequence
aactgtcgccagttgtgcactttta

SEQ ID NO: 159601 - DNA, 25 bp, Probe Sequence
aatcagtcgaggtggacagtttggc

SEQ ID NO: 159602 - DNA, 25 bp, Probe Sequence
aacctgtgggtttgactggtctggc

SEQ ID NO: 159603 - DNA, 25 bp, Probe Sequence
aacatgtggagtgtaccgtggggcc

SEQ ID NO: 159604 - DNA, 25 bp, Probe Sequence
aacaggtgcgtcggaccgagaagaa

SEQ ID NO: 159605 - DNA, 25 bp, Probe Sequence
aacaggatgagttctggtggatgaa

SEQ ID NO: 159606 - DNA, 25 bp, Probe Sequence
aacataatgatgccaatgggtggaa

SEQ ID NO: 159607 - DNA, 25 bp, Probe Sequence
aacttctgaacatggtgtggaatag

SEQ ID NO: 159608 - DNA, 25 bp, Probe Sequence
aacatttcatccgtgtgtatgtgta

SEQ ID NO: 159609 - DNA, 25 bp, Probe Sequence
aacagttgctgttcttacatctgta

SEQ ID NO: 159610 - DNA, 25 bp, Probe Sequence
aacatgttgctttgctttcttgtgg

SEQ ID NO: 159611 - DNA, 25 bp, Probe Sequence
aacatgttgctttgctttcttgtgg

SEQ ID NO: 159612 - DNA, 25 bp, Probe Sequence
aacagtccattactctatcttcagc

SEQ ID NO: 159613 - DNA, 25 bp, Probe Sequence
aacagtggaacaactcatgcttcat

SEQ ID NO: 159614 - DNA, 25 bp, Probe Sequence
aacaggttgacaactcagccctgct

SEQ ID NO: 159615 - DNA, 25 bp, Probe Sequence
aacagtgttctaactcatccctgat

SEQ ID NO: 159616 - DNA, 25 bp, Probe Sequence
aacgttttcagattcatctccaatt

SEQ ID NO: 159617 - DNA, 25 bp, Probe Sequence
aacattttcccactcattctgaatt

SEQ ID NO: 159618 - DNA, 25 bp, Probe Sequence
aacttacatccacgtcttctgaaat

SEQ ID NO: 159619 - DNA, 25 bp, Probe Sequence
aacattttcctgcttgtcttagaag

SEQ ID NO: 159620 - DNA, 25 bp, Probe Sequence
aacattttcagtcctatgatttgga

SEQ ID NO: 159621 - DNA, 25 bp, Probe Sequence
aacattttaggtttctcttgcagat

SEQ ID NO: 159622 - DNA, 25 bp, Probe Sequence
aactttttgtgttgcatcaaacaga

SEQ ID NO: 159623 - DNA, 25 bp, Probe Sequence
aactcccttggtttcaatgatcagg

SEQ ID NO: 159624 - DNA, 25 bp, Probe Sequence
aacagtccatgttgtatataataca

SEQ ID NO: 159625 - DNA, 25 bp, Probe Sequence
aacagtcttgtgtgacagatgaaaa

SEQ ID NO: 159626 - DNA, 25 bp, Probe Sequence
aacagattgtgtgcccaatgagaat

SEQ ID NO: 159627 - DNA, 25 bp, Probe Sequence
aacatgtattgtgctgtatatgaat

SEQ ID NO: 159628 - DNA, 25 bp, Probe Sequence
aacatgatcaagtccttctatactg

SEQ ID NO: 159629 - DNA, 25 bp, Probe Sequence
aactgcaaaaccaatctgtatcatg

SEQ ID NO: 159630 - DNA, 25 bp, Probe Sequence
aactgatagaaggctagtgtgacta

SEQ ID NO: 159631 - DNA, 25 bp, Probe Sequence
aactgatgagtatctaggatgccat

SEQ ID NO: 159632 - DNA, 25 bp, Probe Sequence
aactgcaggttgtgagccaccatgc

SEQ ID NO: 159633 - DNA, 25 bp, Probe Sequence
aactaggattataatgctgcctcat

SEQ ID NO: 159634 - DNA, 25 bp, Probe Sequence
aacataagatgttaattgccttcct

SEQ ID NO: 159635 - DNA, 25 bp, Probe Sequence
aacatacaatgattcaggtccctca

SEQ ID NO: 159636 - DNA, 25 bp, Probe Sequence
aactcatcaagttcaaatgctactc

SEQ ID NO: 159637 - DNA, 25 bp, Probe Sequence
aacttcctttcatattagcatcatc

SEQ ID NO: 159638 - DNA, 25 bp, Probe Sequence
aacatatcagcatccaattttgcac

SEQ ID NO: 159639 - DNA, 25 bp, Probe Sequence
aacatatctcatgaatattcgtgca

SEQ ID NO: 159640 - DNA, 25 bp, Probe Sequence
aacatatccacaacattggcttgat

SEQ ID NO: 159641 - DNA, 25 bp, Probe Sequence
aacatacattcatctgatcagcatt

SEQ ID NO: 159642 - DNA, 25 bp, Probe Sequence
aacatcctatcatctgaaggctcat

SEQ ID NO: 159643 - DNA, 25 bp, Probe Sequence
aacatgcctctcgcaaaggatctcc

SEQ ID NO: 159644 - DNA, 25 bp, Probe Sequence
aacatgcctcttgcaaagggtctcc

SEQ ID NO: 159645 - DNA, 25 bp, Probe Sequence
aacatgtctttctaaaattgtctat

SEQ ID NO: 159646 - DNA, 25 bp, Probe Sequence
aacatttcattctccaatcttttac

SEQ ID NO: 159647 - DNA, 25 bp, Probe Sequence
aacagtatctttgctaatcttacta

SEQ ID NO: 159648 - DNA, 25 bp, Probe Sequence
aacaggactttgtccagactctcct

SEQ ID NO: 159649 - DNA, 25 bp, Probe Sequence
aacagtatcttgtataatggcttga

SEQ ID NO: 159650 - DNA, 25 bp, Probe Sequence
aacagtttcatttaacgcttgctca

SEQ ID NO: 159651 - DNA, 25 bp, Probe Sequence
aacttattcaattgagacctttagc

SEQ ID NO: 159652 - DNA, 25 bp, Probe Sequence
aacttactatcattgagtcctttct

SEQ ID NO: 159653 - DNA, 25 bp, Probe Sequence
aactatatcacttcataggcctctt

SEQ ID NO: 159654 - DNA, 25 bp, Probe Sequence
aactaaccaagcttggcctctgact

SEQ ID NO: 159655 - DNA, 25 bp, Probe Sequence
aactttccctgttcagagcatcaga

SEQ ID NO: 159656 - DNA, 25 bp, Probe Sequence
aacatattgcttatagaacatcaga

SEQ ID NO: 159657 - DNA, 25 bp, Probe Sequence
aacatgacatgtgacttggaaagag

SEQ ID NO: 159658 - DNA, 25 bp, Probe Sequence
aacagtgcatctcacatggagaagg

SEQ ID NO: 159659 - DNA, 25 bp, Probe Sequence
aacatggtgctgtgcatgaggaggg

SEQ ID NO: 159660 - DNA, 25 bp, Probe Sequence
aacatggtgctgagctagccaggac

SEQ ID NO: 159661 - DNA, 25 bp, Probe Sequence
aacagtgtgcaaatggcagctagag

SEQ ID NO: 159662 - DNA, 25 bp, Probe Sequence
aactgtgtcgtgagcagctgccaac

SEQ ID NO: 159663 - DNA, 25 bp, Probe Sequence
aacttgtcacgcatgccacacaaga

SEQ ID NO: 159664 - DNA, 25 bp, Probe Sequence
aacatgctgacataggcttaacaga

SEQ ID NO: 159665 - DNA, 25 bp, Probe Sequence
aacaggagcggctacttcagagcac

SEQ ID NO: 159666 - DNA, 25 bp, Probe Sequence
aacaggggcgccgtaaagcccatgc

SEQ ID NO: 159667 - DNA, 25 bp, Probe Sequence
aactggtggagcagtcaagagccaa

SEQ ID NO: 159668 - DNA, 25 bp, Probe Sequence
aactcagcagagaaattcgagacca

SEQ ID NO: 159669 - DNA, 25 bp, Probe Sequence
aacatcatgctacactttacactaa

SEQ ID NO: 159670 - DNA, 25 bp, Probe Sequence
aacatcatgctacactttacactaa

SEQ ID NO: 159671 - DNA, 25 bp, Probe Sequence
aacattttgccgcagtacactatac

SEQ ID NO: 159672 - DNA, 25 bp, Probe Sequence
aactctttccacagtggcacttgcc

SEQ ID NO: 159673 - DNA, 25 bp, Probe Sequence
aacttgtattagggtagccattcac

SEQ ID NO: 159674 - DNA, 25 bp, Probe Sequence
aacttgtagtacagagatccagata

SEQ ID NO: 159675 - DNA, 25 bp, Probe Sequence
aacttcaatttcaagagaccctgaa

SEQ ID NO: 159676 - DNA, 25 bp, Probe Sequence
aacttctatcccagagaggccaaag

SEQ ID NO: 159677 - DNA, 25 bp, Probe Sequence
aactttcccacatagtggccaagat

SEQ ID NO: 159678 - DNA, 25 bp, Probe Sequence
aactttgaaccttatgtaccgagca

SEQ ID NO: 159679 - DNA, 25 bp, Probe Sequence
aacttaaaactgtatgacacccaga

SEQ ID NO: 159680 - DNA, 25 bp, Probe Sequence
aactccaaataatctgaaactagaa

SEQ ID NO: 159681 - DNA, 25 bp, Probe Sequence
aacttccacatatttttcaactgca

SEQ ID NO: 159682 - DNA, 25 bp, Probe Sequence
aacattcttctattttgccaggctg

SEQ ID NO: 159683 - DNA, 25 bp, Probe Sequence
aacatgccttcttggtgggcaggga

SEQ ID NO: 159684 - DNA, 25 bp, Probe Sequence
aacatgcttcatcgtcggtccgggc

SEQ ID NO: 159685 - DNA, 25 bp, Probe Sequence
aacatcttattgttggtaatagtgc

SEQ ID NO: 159686 - DNA, 25 bp, Probe Sequence
aacatttatatgtagcctttactgt

SEQ ID NO: 159687 - DNA, 25 bp, Probe Sequence
aacatctctatatccagatttaatg

SEQ ID NO: 159688 - DNA, 25 bp, Probe Sequence
aacattgctatattgaacaacaact

SEQ ID NO: 159689 - DNA, 25 bp, Probe Sequence
aacttctatttgacctgcaaccttc

SEQ ID NO: 159690 - DNA, 25 bp, Probe Sequence
aactatttattgttcgaatcacttt

SEQ ID NO: 159691 - DNA, 25 bp, Probe Sequence
aacatattttggaatcagaatgagc

SEQ ID NO: 159692 - DNA, 25 bp, Probe Sequence
aacatgctgtttatgacacaatgac

SEQ ID NO: 159693 - DNA, 25 bp, Probe Sequence
aactcatgcttaaacccaagatcct

SEQ ID NO: 159694 - DNA, 25 bp, Probe Sequence
aactacatcacaacacttctaagcc

SEQ ID NO: 159695 - DNA, 25 bp, Probe Sequence
aactactcatttccttcctagtaat

SEQ ID NO: 159696 - DNA, 25 bp, Probe Sequence
aacatatctcttatcttacgaaaaa

SEQ ID NO: 159697 - DNA, 25 bp, Probe Sequence
aacatttttgttattggcaagggca

SEQ ID NO: 159698 - DNA, 25 bp, Probe Sequence
aacattttcttaagtatagaccagg

SEQ ID NO: 159699 - DNA, 25 bp, Probe Sequence
aacatttccattaagcaagagccca

SEQ ID NO: 159700 - DNA, 25 bp, Probe Sequence
aactttgccatatctgcaggagagc

SEQ ID NO: 159701 - DNA, 25 bp, Probe Sequence
aactcttctattggtggatgagatc

SEQ ID NO: 159702 - DNA, 25 bp, Probe Sequence
aactgtctgctaagattggtactgc

SEQ ID NO: 159703 - DNA, 25 bp, Probe Sequence
aacttggctaggtatggtgtctcac

SEQ ID NO: 159704 - DNA, 25 bp, Probe Sequence
aactagccaagtctggtgttccctc

SEQ ID NO: 159705 - DNA, 25 bp, Probe Sequence
aagctagcccagagggtgggagcct

SEQ ID NO: 159706 - DNA, 25 bp, Probe Sequence
aactaacaaacggagtactgagtct

SEQ ID NO: 159707 - DNA, 25 bp, Probe Sequence
aactaggaagaatatgccctggttc

SEQ ID NO: 159708 - DNA, 25 bp, Probe Sequence
aacttggcaaacttagttctggtga

SEQ ID NO: 159709 - DNA, 25 bp, Probe Sequence
aacattaaattctagacatttgtct

SEQ ID NO: 159710 - DNA, 25 bp, Probe Sequence
aacttcaacatttggacagaatact

SEQ ID NO: 159711 - DNA, 25 bp, Probe Sequence
aacttctacagttatagactccact

SEQ ID NO: 159712 - DNA, 25 bp, Probe Sequence
aactactgacaacgaaggccgcgct

SEQ ID NO: 159713 - DNA, 25 bp, Probe Sequence
aacttctacagaagccaagctccct

SEQ ID NO: 159714 - DNA, 25 bp, Probe Sequence
aacttaacagatactcagatgtgcc

SEQ ID NO: 159715 - DNA, 25 bp, Probe Sequence
aacattgaactgaacaaattaccta

SEQ ID NO: 159716 - DNA, 25 bp, Probe Sequence
aacatctacctgaagatctttccca

SEQ ID NO: 159717 - DNA, 25 bp, Probe Sequence
aacataaactcatgtctgtgtccca

SEQ ID NO: 159718 - DNA, 25 bp, Probe Sequence
aacattaaaaagttctgcatcttat

SEQ ID NO: 159719 - DNA, 25 bp, Probe Sequence
aacttcaagaatttgctgccatgct

SEQ ID NO: 159720 - DNA, 25 bp, Probe Sequence
aacatctcactgcaattctatcagt

SEQ ID NO: 159721 - DNA, 25 bp, Probe Sequence
aacatggcacatgtatacatacgta

SEQ ID NO: 159722 - DNA, 25 bp, Probe Sequence
aacatgatgacaagtactcgccgct

SEQ ID NO: 159723 - DNA, 25 bp, Probe Sequence
aacatgaatcaagcaatccagcctc

SEQ ID NO: 159724 - DNA, 25 bp, Probe Sequence
aacttcacacagcaacacatgccat

SEQ ID NO: 159725 - DNA, 25 bp, Probe Sequence
caacgtcatccataacctggctacg

SEQ ID NO: 159726 - DNA, 25 bp, Probe Sequence
aactgtatccaaacacctgtggagg

SEQ ID NO: 159727 - DNA, 25 bp, Probe Sequence
aactttccacatgtcctagtgaact

SEQ ID NO: 159728 - DNA, 25 bp, Probe Sequence
aactaccagcaatctccttgtaact

SEQ ID NO: 159729 - DNA, 25 bp, Probe Sequence
aactaccgatattgcagtctgtgtc

SEQ ID NO: 159730 - DNA, 25 bp, Probe Sequence
aacatatgaatgacattgctgtcgt

SEQ ID NO: 159731 - DNA, 25 bp, Probe Sequence
aacatatgagtgcatgtgtcatttt

SEQ ID NO: 159732 - DNA, 25 bp, Probe Sequence
aacttatgtggactgtaaatgtttt

SEQ ID NO: 159733 - DNA, 25 bp, Probe Sequence
aactgctctgggactgtaatttgcc

SEQ ID NO: 159734 - DNA, 25 bp, Probe Sequence
aactctatggaagtgcaggccctcc

SEQ ID NO: 159735 - DNA, 25 bp, Probe Sequence
aactattgcgacagcatggacttct

SEQ ID NO: 159736 - DNA, 25 bp, Probe Sequence
aacttggctgccacatgtgattctg

SEQ ID NO: 159737 - DNA, 25 bp, Probe Sequence
aacatgttgcatgtggcttactctg

SEQ ID NO: 159738 - DNA, 25 bp, Probe Sequence
aacatttgtcgtggttaccagtgca

SEQ ID NO: 159739 - DNA, 25 bp, Probe Sequence
cagccttggctggactttaccaggc

SEQ ID NO: 159740 - DNA, 25 bp, Probe Sequence
aactctgtgctgggcatttggccgg

SEQ ID NO: 159741 - DNA, 25 bp, Probe Sequence
aagctgtggcaggagcatctacaca

SEQ ID NO: 159742 - DNA, 25 bp, Probe Sequence
aacttgatgcagaagaaacacaaac

SEQ ID NO: 159743 - DNA, 25 bp, Probe Sequence
aacttataggagatacacaaaatgt

SEQ ID NO: 159744 - DNA, 25 bp, Probe Sequence
aactttggtaactcaaatagtgtag

SEQ ID NO: 159745 - DNA, 25 bp, Probe Sequence
aactttggtaactgcatacttgttg

SEQ ID NO: 159746 - DNA, 25 bp, Probe Sequence
aactttgttgaacttgtagctaatt

SEQ ID NO: 159747 - DNA, 25 bp, Probe Sequence
aacatttttactctgcatagccaac

SEQ ID NO: 159748 - DNA, 25 bp, Probe Sequence
aactttatattccctgtagcaacat

SEQ ID NO: 159749 - DNA, 25 bp, Probe Sequence
aactttctatttagctgtcactagc

SEQ ID NO: 159750 - DNA, 25 bp, Probe Sequence
aacattgctcgacagatgcggcacc

SEQ ID NO: 159751 - DNA, 25 bp, Probe Sequence
aactactgcgagggtgagtgcccga

SEQ ID NO: 159752 - DNA, 25 bp, Probe Sequence
aactttgagagccgtgaggcctgtg

SEQ ID NO: 159753 - DNA, 25 bp, Probe Sequence
aacatgagggagcgtgggtagcctc

SEQ ID NO: 159754 - DNA, 25 bp, Probe Sequence
aacatgcaggggcgtgttgagtgcc

SEQ ID NO: 159755 - DNA, 25 bp, Probe Sequence
aacgtgagggtgggtccagtgtgcc

SEQ ID NO: 159756 - DNA, 25 bp, Probe Sequence
aacgtgagggtgggtccagtgtgcc

SEQ ID NO: 159757 - DNA, 25 bp, Probe Sequence
aacatgtgaggggtgaaccttggcc

SEQ ID NO: 159758 - DNA, 25 bp, Probe Sequence
aacatggagcttgggttcaccagcc

SEQ ID NO: 159759 - DNA, 25 bp, Probe Sequence
aacaggcaaagcagttcacgcacca

SEQ ID NO: 159760 - DNA, 25 bp, Probe Sequence
aacaggacaagcactacggatacaa

SEQ ID NO: 159761 - DNA, 25 bp, Probe Sequence
aacataccagacattgacagcgaac

SEQ ID NO: 159762 - DNA, 25 bp, Probe Sequence
aacataacttcaggtacagcagaga

SEQ ID NO: 159763 - DNA, 25 bp, Probe Sequence
aactaccttcaactccatcatgaag

SEQ ID NO: 159764 - DNA, 25 bp, Probe Sequence
aacattccatccaatagcaacagaa

SEQ ID NO: 159765 - DNA, 25 bp, Probe Sequence
aacatctggatcgtgaagccaggag

SEQ ID NO: 159766 - DNA, 25 bp, Probe Sequence
aacatcatttcagtggaccaggtga

SEQ ID NO: 159767 - DNA, 25 bp, Probe Sequence
aacatcatattcagcccatcacgct

SEQ ID NO: 159768 - DNA, 25 bp, Probe Sequence
aacatctcttgaagccaaactccac

SEQ ID NO: 159769 - DNA, 25 bp, Probe Sequence
aacatctgctgtaagaaacagttct

SEQ ID NO: 159770 - DNA, 25 bp, Probe Sequence
aacatgggtcatttaaagtcctgta

SEQ ID NO: 159771 - DNA, 25 bp, Probe Sequence
aacattgcctctgctcaagaatcct

SEQ ID NO: 159772 - DNA, 25 bp, Probe Sequence
aacatgctgaccgctcaagagattc

SEQ ID NO: 159773 - DNA, 25 bp, Probe Sequence
aacatgcagatctacagcgccagag

SEQ ID NO: 159774 - DNA, 25 bp, Probe Sequence
aacatgcaggtgtcaccagagagaa

SEQ ID NO: 159775 - DNA, 25 bp, Probe Sequence
aacatgtggcatgcaatgaagagaa

SEQ ID NO: 159776 - DNA, 25 bp, Probe Sequence
aacttggatgccagcaaagaaaatg

SEQ ID NO: 159777 - DNA, 25 bp, Probe Sequence
aacattgttgggccatttaaaatgt

SEQ ID NO: 159778 - DNA, 25 bp, Probe Sequence
aacatcagtgggcacatttacaacc

SEQ ID NO: 159779 - DNA, 25 bp, Probe Sequence
aactcaacggctacatagaaaaatc

SEQ ID NO: 159780 - DNA, 25 bp, Probe Sequence
aactcacaagctggaaagaaactat

SEQ ID NO: 159781 - DNA, 25 bp, Probe Sequence
aactccaaccatgcagaaaagccta

SEQ ID NO: 159782 - DNA, 25 bp, Probe Sequence
aactacgacgcggagaacaaactga

SEQ ID NO: 159783 - DNA, 25 bp, Probe Sequence
aactactgaatgctataaataccaa

SEQ ID NO: 159784 - DNA, 25 bp, Probe Sequence
aactttcctggttaacattcagcaa

SEQ ID NO: 159785 - DNA, 25 bp, Probe Sequence
aacttatagtgttcttgaagtcaga

SEQ ID NO: 159786 - DNA, 25 bp, Probe Sequence
aacttatagctctcatatggcccag

SEQ ID NO: 159787 - DNA, 25 bp, Probe Sequence
aactttgagtcatgaacctccctgg

SEQ ID NO: 159788 - DNA, 25 bp, Probe Sequence
aacttccagtgcaaggacgtcctgc

SEQ ID NO: 159789 - DNA, 25 bp, Probe Sequence
aactacgcagacatgctcatcagtc

SEQ ID NO: 159790 - DNA, 25 bp, Probe Sequence
aacatcacagcaagctctatctctg

SEQ ID NO: 159791 - DNA, 25 bp, Probe Sequence
aacatctgcagatgcattcatcatg

SEQ ID NO: 159792 - DNA, 25 bp, Probe Sequence
aacatgtgcagaccctatatgcctg

SEQ ID NO: 159793 - DNA, 25 bp, Probe Sequence
aacatggagacggcgagactgcgtc

SEQ ID NO: 159794 - DNA, 25 bp, Probe Sequence
aactggaaccattggcagctgcacg

SEQ ID NO: 159795 - DNA, 25 bp, Probe Sequence
aactggagtccactgagagccgcag

SEQ ID NO: 159796 - DNA, 25 bp, Probe Sequence
aactgtagaccaggcgagggcacgg

SEQ ID NO: 159797 - DNA, 25 bp, Probe Sequence
aactttcactgctgggactatcggc

SEQ ID NO: 159798 - DNA, 25 bp, Probe Sequence
aactttgactctaagagtttctggc

SEQ ID NO: 159799 - DNA, 25 bp, Probe Sequence
aactgtttgtctctggtttctgaat

SEQ ID NO: 159800 - DNA, 25 bp, Probe Sequence
aactatttgatttctagtcttctgt

SEQ ID NO: 159801 - DNA, 25 bp, Probe Sequence
aacattttgaatgtatccattggat

SEQ ID NO: 159802 - DNA, 25 bp, Probe Sequence
aacattttgtaccttctgctggaac

SEQ ID NO: 159803 - DNA, 25 bp, Probe Sequence
aactatttgtggctgtgctgcttga

SEQ ID NO: 159804 - DNA, 25 bp, Probe Sequence
aactaccttgtgcagattctaaatc

SEQ ID NO: 159805 - DNA, 25 bp, Probe Sequence
aactatacttgaacagttccaactg

SEQ ID NO: 159806 - DNA, 25 bp, Probe Sequence
aagcgaatgcttcaagatttccttg

SEQ ID NO: 159807 - DNA, 25 bp, Probe Sequence
aacatattcgttaaattgctcctta

SEQ ID NO: 159808 - DNA, 25 bp, Probe Sequence
aacataactgttagcatatttctta

SEQ ID NO: 159809 - DNA, 25 bp, Probe Sequence
aacatccctggaattactctgctta

SEQ ID NO: 159810 - DNA, 25 bp, Probe Sequence
aacatagcacaacgagctaccgttt

SEQ ID NO: 159811 - DNA, 25 bp, Probe Sequence
aacatacacagatgccttgcacgtt

SEQ ID NO: 159812 - DNA, 25 bp, Probe Sequence
aacatacactgagctgcttctgcgc

SEQ ID NO: 159813 - DNA, 25 bp, Probe Sequence
aacatacaggagtctgtctctgcta

SEQ ID NO: 159814 - DNA, 25 bp, Probe Sequence
aacattgcaaagttgtctagctaga

SEQ ID NO: 159815 - DNA, 25 bp, Probe Sequence
aacttgaaaattctcctgaagcaga

SEQ ID NO: 159816 - DNA, 25 bp, Probe Sequence
aacatcagaagactttccggacaga

SEQ ID NO: 159817 - DNA, 25 bp, Probe Sequence
aacatgaacagatttcttgaataaa

SEQ ID NO: 159818 - DNA, 25 bp, Probe Sequence
aacatgatgcctcttgtagccatat

SEQ ID NO: 159819 - DNA, 25 bp, Probe Sequence
aactagcctcattagtagagcagta

SEQ ID NO: 159820 - DNA, 25 bp, Probe Sequence
aactcacaaattatggtgcagtaat

SEQ ID NO: 159821 - DNA, 25 bp, Probe Sequence
aactccgtaccaagggttatgatgg

SEQ ID NO: 159822 - DNA, 25 bp, Probe Sequence
aactacgtacctgggtgcctatatc

SEQ ID NO: 159823 - DNA, 25 bp, Probe Sequence
aactacgagttttaggccaaatctg

SEQ ID NO: 159824 - DNA, 25 bp, Probe Sequence
aaccaagacctttagggatttcatg

SEQ ID NO: 159825 - DNA, 25 bp, Probe Sequence
aaccactggtctgtagggatttttg

SEQ ID NO: 159826 - DNA, 25 bp, Probe Sequence
aacatactggttttctggagatttc

SEQ ID NO: 159827 - DNA, 25 bp, Probe Sequence
aacatttgaacttagctgtaattct

SEQ ID NO: 159828 - DNA, 25 bp, Probe Sequence
aacatccgcaacaaagaattcaact

SEQ ID NO: 159829 - DNA, 25 bp, Probe Sequence
aacatccagtaatagaatctcatcc

SEQ ID NO: 159830 - DNA, 25 bp, Probe Sequence
aacatccggagatggatttttccaa

SEQ ID NO: 159831 - DNA, 25 bp, Probe Sequence
aacccagggatccatttttggtcat

SEQ ID NO: 159832 - DNA, 25 bp, Probe Sequence
aaccctaagaccattcgcatggcca

SEQ ID NO: 159833 - DNA, 25 bp, Probe Sequence
aaccctaaaccacaagatggcaaag

SEQ ID NO: 159834 - DNA, 25 bp, Probe Sequence
aactttagaacctctgagttcaagg

SEQ ID NO: 159835 - DNA, 25 bp, Probe Sequence
aactttagatgatcatttggttcca

SEQ ID NO: 159836 - DNA, 25 bp, Probe Sequence
aacatttaatcatcaagagggacca

SEQ ID NO: 159837 - DNA, 25 bp, Probe Sequence
aacattgtacctaaagatggcacag

SEQ ID NO: 159838 - DNA, 25 bp, Probe Sequence
aactggtgaccgactactggcaatg

SEQ ID NO: 159839 - DNA, 25 bp, Probe Sequence
aactggtgaccgactactggcaatg

SEQ ID NO: 159840 - DNA, 25 bp, Probe Sequence
aacttggtctgggtattgatgaaga

SEQ ID NO: 159841 - DNA, 25 bp, Probe Sequence
aactgttctgcgggttggagaaaat

SEQ ID NO: 159842 - DNA, 25 bp, Probe Sequence
aactttgctatgggtccctgaaaca

SEQ ID NO: 159843 - DNA, 25 bp, Probe Sequence
aactattgtagatgtcactggattt

SEQ ID NO: 159844 - DNA, 25 bp, Probe Sequence
aactgatattagctcatcactggtc

SEQ ID NO: 159845 - DNA, 25 bp, Probe Sequence
aactgcatataatactgcctgcaac

SEQ ID NO: 159846 - DNA, 25 bp, Probe Sequence
aacatcttaatgcacagccacaagt

SEQ ID NO: 159847 - DNA, 25 bp, Probe Sequence
aacattattatgtacatctatcctt

SEQ ID NO: 159848 - DNA, 25 bp, Probe Sequence
aacattcatatctaggcagtatttt

SEQ ID NO: 159849 - DNA, 25 bp, Probe Sequence
aacatgctcacatacacagatcttt

SEQ ID NO: 159850 - DNA, 25 bp, Probe Sequence
aacatgccaaatttagtctgatctg

SEQ ID NO: 159851 - DNA, 25 bp, Probe Sequence
aacatctgcaacattatgtatcata

SEQ ID NO: 159852 - DNA, 25 bp, Probe Sequence
aacttgaactctcagtctcttgctg

SEQ ID NO: 159853 - DNA, 25 bp, Probe Sequence
aacttaagctcctgtgcctatagtg

SEQ ID NO: 159854 - DNA, 25 bp, Probe Sequence
aactttgagtccttggcttgactat

SEQ ID NO: 159855 - DNA, 25 bp, Probe Sequence
aactttggtagctcagtgtgcatct

SEQ ID NO: 159856 - DNA, 25 bp, Probe Sequence
aacatttctgtatttgaagtgctta

SEQ ID NO: 159857 - DNA, 25 bp, Probe Sequence
aacattttgcctatgagagttttgc

SEQ ID NO: 159858 - DNA, 25 bp, Probe Sequence
aacttcttgctgaaatggatggttt

SEQ ID NO: 159859 - DNA, 25 bp, Probe Sequence
aacattcttcgatctctgggattta

SEQ ID NO: 159860 - DNA, 25 bp, Probe Sequence
aacatttgttgaggcgcatgggttc

SEQ ID NO: 159861 - DNA, 25 bp, Probe Sequence
aacattattctcaagcacatgcaga

SEQ ID NO: 159862 - DNA, 25 bp, Probe Sequence
aacataattctgaagctacaggaag

SEQ ID NO: 159863 - DNA, 25 bp, Probe Sequence
aacttattctactccgatgatcggc

SEQ ID NO: 159864 - DNA, 25 bp, Probe Sequence
aacttcaattaccgacgcagacgcc

SEQ ID NO: 159865 - DNA, 25 bp, Probe Sequence
aactgaaatgtagcgccgggcgcgg

SEQ ID NO: 159866 - DNA, 25 bp, Probe Sequence
aatcgaacagtcgctgaacggcgtg

SEQ ID NO: 159867 - DNA, 25 bp, Probe Sequence
aacgggcagtgcgggaacagtgggc

SEQ ID NO: 159868 - DNA, 25 bp, Probe Sequence
aacggtgcgagctctgaagatgcat

SEQ ID NO: 159869 - DNA, 25 bp, Probe Sequence
aacttgtgcccttgtatagtgtccc

SEQ ID NO: 159870 - DNA, 25 bp, Probe Sequence
aactcttgacctgtatgcagctgtt

SEQ ID NO: 159871 - DNA, 25 bp, Probe Sequence
aacatttacactgacagccactatg

SEQ ID NO: 159872 - DNA, 25 bp, Probe Sequence
aacattttgaccaaccgcagcaatg

SEQ ID NO: 159873 - DNA, 25 bp, Probe Sequence
aactatgactgacgtccccagaagt

SEQ ID NO: 159874 - DNA, 25 bp, Probe Sequence
aactcattctggctgcaaactactt

SEQ ID NO: 159875 - DNA, 25 bp, Probe Sequence
aacttcatctggaagcctacggtgt

SEQ ID NO: 159876 - DNA, 25 bp, Probe Sequence
aacttatctgagtcacttgaaactt

SEQ ID NO: 159877 - DNA, 25 bp, Probe Sequence
aacttccagagatcttaatggctat

SEQ ID NO: 159878 - DNA, 25 bp, Probe Sequence
aacttctcagaaactgttaccatta

SEQ ID NO: 159879 - DNA, 25 bp, Probe Sequence
aacttccaaaacttcatactctaag

SEQ ID NO: 159880 - DNA, 25 bp, Probe Sequence
aacttcccaggatttaattcatcaa

SEQ ID NO: 159881 - DNA, 25 bp, Probe Sequence
aacttcccaggatttaattcatcaa

SEQ ID NO: 159882 - DNA, 25 bp, Probe Sequence
aacttcccagaggcattagataatg

SEQ ID NO: 159883 - DNA, 25 bp, Probe Sequence
aactacccagcaacctgagaagcac

SEQ ID NO: 159884 - DNA, 25 bp, Probe Sequence
aaccatcccggggtggaagcactga

SEQ ID NO: 159885 - DNA, 25 bp, Probe Sequence
caaccttttggtcatggggactgat

SEQ ID NO: 159886 - DNA, 25 bp, Probe Sequence
aaccttggtggcacagtgagaacct

SEQ ID NO: 159887 - DNA, 25 bp, Probe Sequence
aactcttaaccaatcatctaaagga

SEQ ID NO: 159888 - DNA, 25 bp, Probe Sequence
aacatttagaaatcagtcataagag

SEQ ID NO: 159889 - DNA, 25 bp, Probe Sequence
aacatctttgaacttgcaggcctag

SEQ ID NO: 159890 - DNA, 25 bp, Probe Sequence
aacatctttgcaactgactggtatt

SEQ ID NO: 159891 - DNA, 25 bp, Probe Sequence
aactacatggcagctgacggtgact

SEQ ID NO: 159892 - DNA, 25 bp, Probe Sequence
aactatgaggcgggcaaggatgact

SEQ ID NO: 159893 - DNA, 25 bp, Probe Sequence
aactcatagtggagaggaatcctac

SEQ ID NO: 159894 - DNA, 25 bp, Probe Sequence
aactctgcgtggactatggacagtc

SEQ ID NO: 159895 - DNA, 25 bp, Probe Sequence
aactatctgaagacttggacatgta

SEQ ID NO: 159896 - DNA, 25 bp, Probe Sequence
aacttcgaaggcttaatgatgtcac

SEQ ID NO: 159897 - DNA, 25 bp, Probe Sequence
aacattggatgaagccatccagatt

SEQ ID NO: 159898 - DNA, 25 bp, Probe Sequence
aacattgggagcctcatctgcaatg

SEQ ID NO: 159899 - DNA, 25 bp, Probe Sequence
aactatgcggacacgctcatcagcc

SEQ ID NO: 159900 - DNA, 25 bp, Probe Sequence
aactatccagtcaactttcagcttt

SEQ ID NO: 159901 - DNA, 25 bp, Probe Sequence
aactacctgatggacgattcgttta

SEQ ID NO: 159902 - DNA, 25 bp, Probe Sequence
aactcaccataagcaataacattaa

SEQ ID NO: 159903 - DNA, 25 bp, Probe Sequence
aacataactcaagcaaaatcttcac

SEQ ID NO: 159904 - DNA, 25 bp, Probe Sequence
aactaattcaaagaaggcttccaag

SEQ ID NO: 159905 - DNA, 25 bp, Probe Sequence
aactaagacacaaataacctttgca

SEQ ID NO: 159906 - DNA, 25 bp, Probe Sequence
aactaagacacaaataacctttgca

SEQ ID NO: 159907 - DNA, 25 bp, Probe Sequence
aactcgagaccttttcaacttggct

SEQ ID NO: 159908 - DNA, 25 bp, Probe Sequence
aactatggactttttaagcctaatg

SEQ ID NO: 159909 - DNA, 25 bp, Probe Sequence
aactgagtgaaattattaaggcatg

SEQ ID NO: 159910 - DNA, 25 bp, Probe Sequence
aactaggccagatatcaaagatgct

SEQ ID NO: 159911 - DNA, 25 bp, Probe Sequence
aactgataccagccgctgcaaaatc

SEQ ID NO: 159912 - DNA, 25 bp, Probe Sequence
aactgacatggctaactgcaagaat

SEQ ID NO: 159913 - DNA, 25 bp, Probe Sequence
aacttgcagctgtgacttataatgg

SEQ ID NO: 159914 - DNA, 25 bp, Probe Sequence
aactctgcagcttcaactgtacttc

SEQ ID NO: 159915 - DNA, 25 bp, Probe Sequence
aactggagattaacgtactgtggct

SEQ ID NO: 159916 - DNA, 25 bp, Probe Sequence
aacggagtgtccgggtgcagtggct

SEQ ID NO: 159917 - DNA, 25 bp, Probe Sequence
aacggatgtgtctgaacatttagtg

SEQ ID NO: 159918 - DNA, 25 bp, Probe Sequence
aactaaggtgtctaccatgattatt

SEQ ID NO: 159919 - DNA, 25 bp, Probe Sequence
aacatttgctgttcaaacatgtttt

SEQ ID NO: 159920 - DNA, 25 bp, Probe Sequence
aactttctatatgaaattcaatact

SEQ ID NO: 159921 - DNA, 25 bp, Probe Sequence
aacttagcttttgatgtctccaagt

SEQ ID NO: 159922 - DNA, 25 bp, Probe Sequence
aacttagcattttctgcatctccac

SEQ ID NO: 159923 - DNA, 25 bp, Probe Sequence
aacatttcaacttgctatcctctaa

SEQ ID NO: 159924 - DNA, 25 bp, Probe Sequence
aacatttcaacttgctatcctctaa

SEQ ID NO: 159925 - DNA, 25 bp, Probe Sequence
aacttccaactatttatcatctata

SEQ ID NO: 159926 - DNA, 25 bp, Probe Sequence
aactacctaggctttactcttgagt

SEQ ID NO: 159927 - DNA, 25 bp, Probe Sequence
aactcactctaggtttatattgtat

SEQ ID NO: 159928 - DNA, 25 bp, Probe Sequence
aactcacatctagatatagtacagt

SEQ ID NO: 159929 - DNA, 25 bp, Probe Sequence
aactcagatcttgctgagaccagga

SEQ ID NO: 159930 - DNA, 25 bp, Probe Sequence
aactcaatcattgtggaccttttgg

SEQ ID NO: 159931 - DNA, 25 bp, Probe Sequence
aactacaatttgttgccctatatgt

SEQ ID NO: 159932 - DNA, 25 bp, Probe Sequence
aactaattttgtactctcagaatgt

SEQ ID NO: 159933 - DNA, 25 bp, Probe Sequence
aactagaggtttttgctgcagaggg

SEQ ID NO: 159934 - DNA, 25 bp, Probe Sequence
aactagaggtttttgctgcagaggg

SEQ ID NO: 159935 - DNA, 25 bp, Probe Sequence
aactgagaggctacttcctggggcc

SEQ ID NO: 159936 - DNA, 25 bp, Probe Sequence
aactacaacttctccttagacactt

SEQ ID NO: 159937 - DNA, 25 bp, Probe Sequence
aagctccccttatccaacagagttt

SEQ ID NO: 159938 - DNA, 25 bp, Probe Sequence
aactccgtgcttaaccaaagaagct

SEQ ID NO: 159939 - DNA, 25 bp, Probe Sequence
aacttcttgtcagacataaagccat

SEQ ID NO: 159940 - DNA, 25 bp, Probe Sequence
aacattatcttcccacataccagga

SEQ ID NO: 159941 - DNA, 25 bp, Probe Sequence
aacatttcttgtaggcatcaccatg

SEQ ID NO: 159942 - DNA, 25 bp, Probe Sequence
aacttgctgctgcttagatcactgc

SEQ ID NO: 159943 - DNA, 25 bp, Probe Sequence
aacgtggctgtcagaatcactcctc

SEQ ID NO: 159944 - DNA, 25 bp, Probe Sequence
aacgggtgtatttgcacctcgtcca

SEQ ID NO: 159945 - DNA, 25 bp, Probe Sequence
aacggtgtataaagaagttctccat

SEQ ID NO: 159946 - DNA, 25 bp, Probe Sequence
aactggtgtaattggcaaataactc

SEQ ID NO: 159947 - DNA, 25 bp, Probe Sequence
aactggggcatggatggctacataa

SEQ ID NO: 159948 - DNA, 25 bp, Probe Sequence
aactggggcatggatggctacataa

SEQ ID NO: 159949 - DNA, 25 bp, Probe Sequence
aactggggcatggatggctacataa

SEQ ID NO: 159950 - DNA, 25 bp, Probe Sequence
aacttggcactggctggtgacatcc

SEQ ID NO: 159951 - DNA, 25 bp, Probe Sequence
aactattcactgtcgagatggctaa

SEQ ID NO: 159952 - DNA, 25 bp, Probe Sequence
aactgaatcatttgtgcacgtgtat

SEQ ID NO: 159953 - DNA, 25 bp, Probe Sequence
aacttcacttgacgcacgttagctc

SEQ ID NO: 159954 - DNA, 25 bp, Probe Sequence
aacttcatttggcttgtgtgcatct

SEQ ID NO: 159955 - DNA, 25 bp, Probe Sequence
aagcttatctggagtctcatggact

SEQ ID NO: 159956 - DNA, 25 bp, Probe Sequence
aactaagatggctgttcagtgacta

SEQ ID NO: 159957 - DNA, 25 bp, Probe Sequence
aactcaagacgaagcttatttctga

SEQ ID NO: 159958 - DNA, 25 bp, Probe Sequence
aactcaaacagaagtgtctggctgg

SEQ ID NO: 159959 - DNA, 25 bp, Probe Sequence
caactaagaccaagtcctcgctgga

SEQ ID NO: 159960 - DNA, 25 bp, Probe Sequence
ctaagaaactacctaccgtgtgtat

SEQ ID NO: 159961 - DNA, 25 bp, Probe Sequence
aactgaaactcagctagccagaatg

SEQ ID NO: 159962 - DNA, 25 bp, Probe Sequence
aactacaatcttcccatgcacaaga

SEQ ID NO: 159963 - DNA, 25 bp, Probe Sequence
aactacatactgcccagttcaagag

SEQ ID NO: 159964 - DNA, 25 bp, Probe Sequence
aactgaataccactctgtaattgca

SEQ ID NO: 159965 - DNA, 25 bp, Probe Sequence
aactacaaccagcatgctatggtgt

SEQ ID NO: 159966 - DNA, 25 bp, Probe Sequence
aatctcctgaaaggagccaggtgca

SEQ ID NO: 159967 - DNA, 25 bp, Probe Sequence
aactcctaaattgcatcagtgatcc

SEQ ID NO: 159968 - DNA, 25 bp, Probe Sequence
aactcgaaatattccacgagctcgt

SEQ ID NO: 159969 - DNA, 25 bp, Probe Sequence
aacttgaattaatccacacatcagt

SEQ ID NO: 159970 - DNA, 25 bp, Probe Sequence
aacttcactgtatcctcaatgcatg

SEQ ID NO: 159971 - DNA, 25 bp, Probe Sequence
aacattgactgttaccattgaatga

SEQ ID NO: 159972 - DNA, 25 bp, Probe Sequence
aagctgttttgctccttaagaaact

SEQ ID NO: 159973 - DNA, 25 bp, Probe Sequence
aactgttttatatcttaagagtgcc

SEQ ID NO: 159974 - DNA, 25 bp, Probe Sequence
aacttgtttaattcctcagtgggtg

SEQ ID NO: 159975 - DNA, 25 bp, Probe Sequence
aacttgttacaaattacagtagtat

SEQ ID NO: 159976 - DNA, 25 bp, Probe Sequence
aacttttaaagagtttctcaggatg

SEQ ID NO: 159977 - DNA, 25 bp, Probe Sequence
aactccttaaactgtatctagaggt

SEQ ID NO: 159978 - DNA, 25 bp, Probe Sequence
aactcagttatcgctgtttccaatc

SEQ ID NO: 159979 - DNA, 25 bp, Probe Sequence
aactctgggatctcatttcccagtt

SEQ ID NO: 159980 - DNA, 25 bp, Probe Sequence
aactcaaccacatatttgggccttt

SEQ ID NO: 159981 - DNA, 25 bp, Probe Sequence
aactcagagacaaggactttggttt

SEQ ID NO: 159982 - DNA, 25 bp, Probe Sequence
aactcagagacaaggactttggttt

SEQ ID NO: 159983 - DNA, 25 bp, Probe Sequence
aactcaagattcctcctttgtgttg

SEQ ID NO: 159984 - DNA, 25 bp, Probe Sequence
aactcaagtgtcacctccttggaga

SEQ ID NO: 159985 - DNA, 25 bp, Probe Sequence
aactgcagctttcagcaacgttgga

SEQ ID NO: 159986 - DNA, 25 bp, Probe Sequence
aacttcatttgatgctaaataggag

SEQ ID NO: 159987 - DNA, 25 bp, Probe Sequence
aacattgctgttacatctgaaataa

SEQ ID NO: 159988 - DNA, 25 bp, Probe Sequence
aacattgcatgttatcactcatagg

SEQ ID NO: 159989 - DNA, 25 bp, Probe Sequence
aactatcatgtttaacagaggacta

SEQ ID NO: 159990 - DNA, 25 bp, Probe Sequence
aactaagtctgctcagtgaaatgct

SEQ ID NO: 159991 - DNA, 25 bp, Probe Sequence
aactaggctctctagcctgattttc

SEQ ID NO: 159992 - DNA, 25 bp, Probe Sequence
aactagtgcttctggcgatgacatt

SEQ ID NO: 159993 - DNA, 25 bp, Probe Sequence
aactgccctgtctggcagtcagctt

SEQ ID NO: 159994 - DNA, 25 bp, Probe Sequence
aactgccctgtctggcagtcagctt

SEQ ID NO: 159995 - DNA, 25 bp, Probe Sequence
aacttcgagctctacgatggcctta

SEQ ID NO: 159996 - DNA, 25 bp, Probe Sequence
aacttcgagctctacgatggcctta

SEQ ID NO: 159997 - DNA, 25 bp, Probe Sequence
aacttgctcagttacaagactgatt

SEQ ID NO: 159998 - DNA, 25 bp, Probe Sequence
aacttctagctaaaattgtatcatt

SEQ ID NO: 159999 - DNA, 25 bp, Probe Sequence
aacttccacattatacatttgatgt

SEQ ID NO: 160000 - DNA, 25 bp, Probe Sequence
aactctcctttgatattatgtggct

SEQ ID NO: 160001 - DNA, 25 bp, Probe Sequence
aacttcccttttttgatgtagatgc

SEQ ID NO: 160002 - DNA, 25 bp, Probe Sequence
aactacttcttatttagatggacat

SEQ ID NO: 160003 - DNA, 25 bp, Probe Sequence
aacttattttatttccatcatgtca

SEQ ID NO: 160004 - DNA, 25 bp, Probe Sequence
aacttgctgctttttttcatattga

SEQ ID NO: 160005 - DNA, 25 bp, Probe Sequence
aacattctgctttcttagtcttacc

SEQ ID NO: 160006 - DNA, 25 bp, Probe Sequence
aacattcttatagttacatctggaa

SEQ ID NO: 160007 - DNA, 25 bp, Probe Sequence
aactctctcttacttactgggaaca

SEQ ID NO: 160008 - DNA, 25 bp, Probe Sequence
aactatctttagatttagagataca

SEQ ID NO: 160009 - DNA, 25 bp, Probe Sequence
aactatttgttaacttgtgaatacg

SEQ ID NO: 160010 - DNA, 25 bp, Probe Sequence
aacttttatctcactatgttgtaag

SEQ ID NO: 160011 - DNA, 25 bp, Probe Sequence
aactcttatttatgctgagctttaa

SEQ ID NO: 160012 - DNA, 25 bp, Probe Sequence
aacttatcattccagtatgcatctt

SEQ ID NO: 160013 - DNA, 25 bp, Probe Sequence
aacttgataagtcattgcactattt

SEQ ID NO: 160014 - DNA, 25 bp, Probe Sequence
aacgcattagttgtctgccttttcc

SEQ ID NO: 160015 - DNA, 25 bp, Probe Sequence
aactgaatagttggttcctgaaatc

SEQ ID NO: 160016 - DNA, 25 bp, Probe Sequence
aactacataagtcttcacaggaaca

SEQ ID NO: 160017 - DNA, 25 bp, Probe Sequence
aactacataatttctaccagggcca

SEQ ID NO: 160018 - DNA, 25 bp, Probe Sequence
aacttcatcaagattcccgtggtcc

SEQ ID NO: 160019 - DNA, 25 bp, Probe Sequence
aacttctcaaagttccagcggatgt

SEQ ID NO: 160020 - DNA, 25 bp, Probe Sequence
aacttgcagcaaagccattcgggtt

SEQ ID NO: 160021 - DNA, 25 bp, Probe Sequence
aactcatgagattgggcattctttg

SEQ ID NO: 160022 - DNA, 25 bp, Probe Sequence
aactattgttgtggcttcttgtgta

SEQ ID NO: 160023 - DNA, 25 bp, Probe Sequence
aacttctgattagctctcagtcttc

SEQ ID NO: 160024 - DNA, 25 bp, Probe Sequence
aacttcatatgtgtcatcacagctt

SEQ ID NO: 160025 - DNA, 25 bp, Probe Sequence
aacttcataatcacatgtcatattg

SEQ ID NO: 160026 - DNA, 25 bp, Probe Sequence
aactgaataactgcagtgacttgat

SEQ ID NO: 160027 - DNA, 25 bp, Probe Sequence
aactcaatatagagcaatgtttgta

SEQ ID NO: 160028 - DNA, 25 bp, Probe Sequence
aactgaaattgtggaagcactttag

SEQ ID NO: 160029 - DNA, 25 bp, Probe Sequence
aactgaattttatctacatgtatag

SEQ ID NO: 160030 - DNA, 25 bp, Probe Sequence
aactttttacaagacagctgatatc

SEQ ID NO: 160031 - DNA, 25 bp, Probe Sequence
aactgttcctcaaagctaagctttc

SEQ ID NO: 160032 - DNA, 25 bp, Probe Sequence
aactgttcaattctgtaatgtgctt

SEQ ID NO: 160033 - DNA, 25 bp, Probe Sequence
aactgttaattctgtcacagcctgt

SEQ ID NO: 160034 - DNA, 25 bp, Probe Sequence
aactagcttatttggtcacacatct

SEQ ID NO: 160035 - DNA, 25 bp, Probe Sequence
aactagcatctatattccacactta

SEQ ID NO: 160036 - DNA, 25 bp, Probe Sequence
aactatgcatctgttgtctgctcct

SEQ ID NO: 160037 - DNA, 25 bp, Probe Sequence
aactatgctgccatggtattccact

SEQ ID NO: 160038 - DNA, 25 bp, Probe Sequence
aacttctgactttcatataaacata

SEQ ID NO: 160039 - DNA, 25 bp, Probe Sequence
aactgggtcccaatgatcaatacaa

SEQ ID NO: 160040 - DNA, 25 bp, Probe Sequence
aactagagttccaagcacctacatt

SEQ ID NO: 160041 - DNA, 25 bp, Probe Sequence
aacttggtattgagcacgtattttg

SEQ ID NO: 160042 - DNA, 25 bp, Probe Sequence
aacttggatgttaacactgtttact

SEQ ID NO: 160043 - DNA, 25 bp, Probe Sequence
aacttggcagttttatctgcttcaa

SEQ ID NO: 160044 - DNA, 25 bp, Probe Sequence
aacttgacacttacctccagtagaa

SEQ ID NO: 160045 - DNA, 25 bp, Probe Sequence
aacttgacacttacctccagtagaa

SEQ ID NO: 160046 - DNA, 25 bp, Probe Sequence
aacttgacacttacctccagtagaa

SEQ ID NO: 160047 - DNA, 25 bp, Probe Sequence
aacttggacttgtcctcagcagctg

SEQ ID NO: 160048 - DNA, 25 bp, Probe Sequence
aactgggacgtgtgcgcagacatgg

SEQ ID NO: 160049 - DNA, 25 bp, Probe Sequence
cagacgggaagcgtacgaagcgggt

SEQ ID NO: 160050 - DNA, 25 bp, Probe Sequence
aacgcggaaggatcataacggagcc

SEQ ID NO: 160051 - DNA, 25 bp, Probe Sequence
aagccggaggcagctttaaccagcc

SEQ ID NO: 160052 - DNA, 25 bp, Probe Sequence
aactgtgtggggctgttattccacc

SEQ ID NO: 160053 - DNA, 25 bp, Probe Sequence
aacgttgaagaggtccttccacact

SEQ ID NO: 160054 - DNA, 25 bp, Probe Sequence
aacgttcattggttcctttgatagc

SEQ ID NO: 160055 - DNA, 25 bp, Probe Sequence
aacgtgccagtacatctacgtatag

SEQ ID NO: 160056 - DNA, 25 bp, Probe Sequence
aactggaatgttcatctaggttctc

SEQ ID NO: 160057 - DNA, 25 bp, Probe Sequence
aagcggtagttccattagccagtgt

SEQ ID NO: 160058 - DNA, 25 bp, Probe Sequence
aacgtattgatgtgttcagccctgt

SEQ ID NO: 160059 - DNA, 25 bp, Probe Sequence
aacttcagtctgtagggcttcctgt

SEQ ID NO: 160060 - DNA, 25 bp, Probe Sequence
aacttcgtgatgtggctgttttgtt

SEQ ID NO: 160061 - DNA, 25 bp, Probe Sequence
aactatggctgttgaggttctcatt

SEQ ID NO: 160062 - DNA, 25 bp, Probe Sequence
aactcagggatttggttctcatcaa

SEQ ID NO: 160063 - DNA, 25 bp, Probe Sequence
aactagttggagtgttccacacaga

SEQ ID NO: 160064 - DNA, 25 bp, Probe Sequence
aactaaatgtagttgtcacactaaa

SEQ ID NO: 160065 - DNA, 25 bp, Probe Sequence
aactaattgtactatttgacatgaa

SEQ ID NO: 160066 - DNA, 25 bp, Probe Sequence
aactgatgatttacgatttatctgg

SEQ ID NO: 160067 - DNA, 25 bp, Probe Sequence
aactgcaagtgctacatgatatttc

SEQ ID NO: 160068 - DNA, 25 bp, Probe Sequence
aactgccagctctgaactgagtcca

SEQ ID NO: 160069 - DNA, 25 bp, Probe Sequence
aactggcatctgtgagagcctgtcc

SEQ ID NO: 160070 - DNA, 25 bp, Probe Sequence
aacttctcagatcaatcgtgcatcc

SEQ ID NO: 160071 - DNA, 25 bp, Probe Sequence
aacttgctcaacgacatcgtgattc

SEQ ID NO: 160072 - DNA, 25 bp, Probe Sequence
aactgagtcacagagttggactctt

SEQ ID NO: 160073 - DNA, 25 bp, Probe Sequence
aactagatcaagacatgttaacctt

SEQ ID NO: 160074 - DNA, 25 bp, Probe Sequence
aactatgcagcaagtatctataatc

SEQ ID NO: 160075 - DNA, 25 bp, Probe Sequence
aactctggcatacggcccagatctc

SEQ ID NO: 160076 - DNA, 25 bp, Probe Sequence
aactctacatcagggcatgccagag

SEQ ID NO: 160077 - DNA, 25 bp, Probe Sequence
aactgtacatccacaggcaaaaaaa

SEQ ID NO: 160078 - DNA, 25 bp, Probe Sequence
aactctcctgatcaagacccaaaaa

SEQ ID NO: 160079 - DNA, 25 bp, Probe Sequence
aactttgctatgaaacccacagtag

SEQ ID NO: 160080 - DNA, 25 bp, Probe Sequence
aacttcagttgttgacctcctgtac

SEQ ID NO: 160081 - DNA, 25 bp, Probe Sequence
aacttcagttgttgacctcctgtac

SEQ ID NO: 160082 - DNA, 25 bp, Probe Sequence
aacttagattcttgagccacacttc

SEQ ID NO: 160083 - DNA, 25 bp, Probe Sequence
aacttcgagactcatgcacaagctt

SEQ ID NO: 160084 - DNA, 25 bp, Probe Sequence
aacttcaggcagcatatgcacaagt

SEQ ID NO: 160085 - DNA, 25 bp, Probe Sequence
aactgtaggcagctcatgttgagaa

SEQ ID NO: 160086 - DNA, 25 bp, Probe Sequence
aactgaagctgagatctttagtacg

SEQ ID NO: 160087 - DNA, 25 bp, Probe Sequence
aactttgctcaggacatttgaggtc

SEQ ID NO: 160088 - DNA, 25 bp, Probe Sequence
aactttagaggaggatctgatggat

SEQ ID NO: 160089 - DNA, 25 bp, Probe Sequence
aactctttagccagtcgtgacatca

SEQ ID NO: 160090 - DNA, 25 bp, Probe Sequence
aactcagctgtacagttcgtacact

SEQ ID NO: 160091 - DNA, 25 bp, Probe Sequence
aactatgtgatcttattctcgaaac

SEQ ID NO: 160092 - DNA, 25 bp, Probe Sequence
aactatctatctatgctttgcaaag

SEQ ID NO: 160093 - DNA, 25 bp, Probe Sequence
aactcatcaatgtgcctttgcataa

SEQ ID NO: 160094 - DNA, 25 bp, Probe Sequence
aactcatcgattgatttacggcgct

SEQ ID NO: 160095 - DNA, 25 bp, Probe Sequence
aacgccgtgtggtacggggctgttg

SEQ ID NO: 160096 - DNA, 25 bp, Probe Sequence
aacgctggttagcaccgcaggtgta

SEQ ID NO: 160097 - DNA, 25 bp, Probe Sequence
aaccggatatgaagccccgagtctc

SEQ ID NO: 160098 - DNA, 25 bp, Probe Sequence
aactctgcagaaaatgtcctccctt

SEQ ID NO: 160099 - DNA, 25 bp, Probe Sequence
aactgtgggcaaagtgcctgcctct

SEQ ID NO: 160100 - DNA, 25 bp, Probe Sequence
aacttctggaaagtgtggcctctgc

SEQ ID NO: 160101 - DNA, 25 bp, Probe Sequence
aacggaggcaggttggagccgctgc

SEQ ID NO: 160102 - DNA, 25 bp, Probe Sequence
aacggggcaggcaaggtcactgctc

SEQ ID NO: 160103 - DNA, 25 bp, Probe Sequence
aacgggcagaagttggtcaccacag

SEQ ID NO: 160104 - DNA, 25 bp, Probe Sequence
aactgggaaatctatggagaccaag

SEQ ID NO: 160105 - DNA, 25 bp, Probe Sequence
aactagcagatttgtatggttccaa

SEQ ID NO: 160106 - DNA, 25 bp, Probe Sequence
aactagcagatttgtatggttccaa

SEQ ID NO: 160107 - DNA, 25 bp, Probe Sequence
aactgggttccatgtgattgccctt

SEQ ID NO: 160108 - DNA, 25 bp, Probe Sequence
aactttgatttctaatgtcacactt

SEQ ID NO: 160109 - DNA, 25 bp, Probe Sequence
aactcttgtatttatgatatagctt

SEQ ID NO: 160110 - DNA, 25 bp, Probe Sequence
aactgcttgcattctgtatttcgtg

SEQ ID NO: 160111 - DNA, 25 bp, Probe Sequence
aactcttctacagattgttgttgac

SEQ ID NO: 160112 - DNA, 25 bp, Probe Sequence
aactgcctccaagaagctggttgac

SEQ ID NO: 160113 - DNA, 25 bp, Probe Sequence
aactactgccagtgcaagctggtgg

SEQ ID NO: 160114 - DNA, 25 bp, Probe Sequence
aactccaccagctgcatgacggtgt

SEQ ID NO: 160115 - DNA, 25 bp, Probe Sequence
aactctacagtgacagcatacgtga

SEQ ID NO: 160116 - DNA, 25 bp, Probe Sequence
aactcctagctgactcagcatagat

SEQ ID NO: 160117 - DNA, 25 bp, Probe Sequence
aactcgttcttgaagcacagatttc

SEQ ID NO: 160118 - DNA, 25 bp, Probe Sequence
aacgtggtcttggacacaaccatgc

SEQ ID NO: 160119 - DNA, 25 bp, Probe Sequence
aacgggtcgagatgccgacctcagc

SEQ ID NO: 160120 - DNA, 25 bp, Probe Sequence
aacgggtcgagatgccgacctcagc

SEQ ID NO: 160121 - DNA, 25 bp, Probe Sequence
aacggaggcaaatccatgagccaca

SEQ ID NO: 160122 - DNA, 25 bp, Probe Sequence
aacctgatagataatcccattgcct

SEQ ID NO: 160123 - DNA, 25 bp, Probe Sequence
aactgctaagaatgaccactgcccc

SEQ ID NO: 160124 - DNA, 25 bp, Probe Sequence
aactgctaagaatgaccactgcccc

SEQ ID NO: 160125 - DNA, 25 bp, Probe Sequence
aactgtagaaagccacacactacta

SEQ ID NO: 160126 - DNA, 25 bp, Probe Sequence
aactggaggaaggcaccacttttgg

SEQ ID NO: 160127 - DNA, 25 bp, Probe Sequence
aactgtgggaagatgaactttgtca

SEQ ID NO: 160128 - DNA, 25 bp, Probe Sequence
aactgtgggaagatgaactttgtca

SEQ ID NO: 160129 - DNA, 25 bp, Probe Sequence
aactgggaccaaccaaagtgtgtca

SEQ ID NO: 160130 - DNA, 25 bp, Probe Sequence
aactgggcaccattacaggaagatt

SEQ ID NO: 160131 - DNA, 25 bp, Probe Sequence
aactggtgcgtccatcaaggatttc

SEQ ID NO: 160132 - DNA, 25 bp, Probe Sequence
aactaaggctcattcatcaggttaa

SEQ ID NO: 160133 - DNA, 25 bp, Probe Sequence
aacttcacctattcatgagtattat

SEQ ID NO: 160134 - DNA, 25 bp, Probe Sequence
aacgcacagcccatctgctgtatta

SEQ ID NO: 160135 - DNA, 25 bp, Probe Sequence
aacgcacagcccatctgctgtatta

SEQ ID NO: 160136 - DNA, 25 bp, Probe Sequence
aactccaggctcctttgaattacac

SEQ ID NO: 160137 - DNA, 25 bp, Probe Sequence
aacttcagagcttattggaaatatc

SEQ ID NO: 160138 - DNA, 25 bp, Probe Sequence
aactttgagttgatggaatagattc

SEQ ID NO: 160139 - DNA, 25 bp, Probe Sequence
aactgttgggtattctacaacttca

SEQ ID NO: 160140 - DNA, 25 bp, Probe Sequence
aactgggggctctgtatatagctat

SEQ ID NO: 160141 - DNA, 25 bp, Probe Sequence
aacggatgggcctctagtgacagat

SEQ ID NO: 160142 - DNA, 25 bp, Probe Sequence
aactggaggggctctagtgctaaat

SEQ ID NO: 160143 - DNA, 25 bp, Probe Sequence
aactgtgaggtggtccttgggaatt

SEQ ID NO: 160144 - DNA, 25 bp, Probe Sequence
aacgagacgggtgcatctgcgtgaa

SEQ ID NO: 160145 - DNA, 25 bp, Probe Sequence
aactggacaggcggccctggatgtt

SEQ ID NO: 160146 - DNA, 25 bp, Probe Sequence
aactgaacagtggcacagcaaggtg

SEQ ID NO: 160147 - DNA, 25 bp, Probe Sequence
aactcaagcgggtctcagagcagtt

SEQ ID NO: 160148 - DNA, 25 bp, Probe Sequence
aacttaggctcataatagcagttta

SEQ ID NO: 160149 - DNA, 25 bp, Probe Sequence
aacttcaccttccattaagtgttca

SEQ ID NO: 160150 - DNA, 25 bp, Probe Sequence
aactctacgctctggttaatgtaat

SEQ ID NO: 160151 - DNA, 25 bp, Probe Sequence
aactctgacttgctggaaaagttga

SEQ ID NO: 160152 - DNA, 25 bp, Probe Sequence
aactctgaatggctctaaccaggga

SEQ ID NO: 160153 - DNA, 25 bp, Probe Sequence
aactctggatgggattgcaaaatga

SEQ ID NO: 160154 - DNA, 25 bp, Probe Sequence
aactctgttgaggcattttactaac

SEQ ID NO: 160155 - DNA, 25 bp, Probe Sequence
aactgtgttggttgtttgagttgcc

SEQ ID NO: 160156 - DNA, 25 bp, Probe Sequence
aactatgtctggaaggctgtggtcc

SEQ ID NO: 160157 - DNA, 25 bp, Probe Sequence
aactcagttctgcaggtctgtgtgc

SEQ ID NO: 160158 - DNA, 25 bp, Probe Sequence
aacgagtgtgatgaggccgaggctg

SEQ ID NO: 160159 - DNA, 25 bp, Probe Sequence
aactgagaaagcaggccgggcatgg

SEQ ID NO: 160160 - DNA, 25 bp, Probe Sequence
aacggagaacctggccttggatgga

SEQ ID NO: 160161 - DNA, 25 bp, Probe Sequence
aactgaaatagcctccctttagaat

SEQ ID NO: 160162 - DNA, 25 bp, Probe Sequence
aacctaaaccctgtttcacaatctg

SEQ ID NO: 160163 - DNA, 25 bp, Probe Sequence
aacctacagacccttttgtataatg

SEQ ID NO: 160164 - DNA, 25 bp, Probe Sequence
aacctggcaaaatcttgttaatgtc

SEQ ID NO: 160165 - DNA, 25 bp, Probe Sequence
aacctggcaaaatcttgttaatgtc

SEQ ID NO: 160166 - DNA, 25 bp, Probe Sequence
aactttcaacattgtcattttttct

SEQ ID NO: 160167 - DNA, 25 bp, Probe Sequence
aactattcaacatctctggccatgt

SEQ ID NO: 160168 - DNA, 25 bp, Probe Sequence
aactttcagagatttcttcagcgtt

SEQ ID NO: 160169 - DNA, 25 bp, Probe Sequence
aactgttcctgactttatactattt

SEQ ID NO: 160170 - DNA, 25 bp, Probe Sequence
aactgttcctgactttatactattt

SEQ ID NO: 160171 - DNA, 25 bp, Probe Sequence
aactgttccaggattgctccaggtt

SEQ ID NO: 160172 - DNA, 25 bp, Probe Sequence
aacggctgtcaggtttgatctcagt

SEQ ID NO: 160173 - DNA, 25 bp, Probe Sequence
aactggagctacatttgcccatatc

SEQ ID NO: 160174 - DNA, 25 bp, Probe Sequence
aactgaagctatctgtctggtcacc

SEQ ID NO: 160175 - DNA, 25 bp, Probe Sequence
aactactgcaatatgtcggacacca

SEQ ID NO: 160176 - DNA, 25 bp, Probe Sequence
aactaatgattctgactgtaacaca

SEQ ID NO: 160177 - DNA, 25 bp, Probe Sequence
aactgcaatgagaggaggtaaatat

SEQ ID NO: 160178 - DNA, 25 bp, Probe Sequence
aagctgagctgtgggagggtaaata

SEQ ID NO: 160179 - DNA, 25 bp, Probe Sequence
aagcgaacatctgggtggttagcat

SEQ ID NO: 160180 - DNA, 25 bp, Probe Sequence
aactatctcattgagggtatagctt

SEQ ID NO: 160181 - DNA, 25 bp, Probe Sequence
aactattttccactcaaatcctgag

SEQ ID NO: 160182 - DNA, 25 bp, Probe Sequence
aactcttttgcccaaagactctgga

SEQ ID NO: 160183 - DNA, 25 bp, Probe Sequence
aactttgttgccaaaaggttgtgct

SEQ ID NO: 160184 - DNA, 25 bp, Probe Sequence
aactttgtgagtaataatgtcaggt

SEQ ID NO: 160185 - DNA, 25 bp, Probe Sequence
aactgcttttgtacctagctaggct

SEQ ID NO: 160186 - DNA, 25 bp, Probe Sequence
aactctttaggccactgtgctttgc

SEQ ID NO: 160187 - DNA, 25 bp, Probe Sequence
aactttgtatggtagcttcatgttg

SEQ ID NO: 160188 - DNA, 25 bp, Probe Sequence
aactttgtaggatgccttcactgaa

SEQ ID NO: 160189 - DNA, 25 bp, Probe Sequence
aactctttgtataacctacctgaat

SEQ ID NO: 160190 - DNA, 25 bp, Probe Sequence
aactcgtggaatatcctgacctgac

SEQ ID NO: 160191 - DNA, 25 bp, Probe Sequence
aactggtggaatttgcttatactgc

SEQ ID NO: 160192 - DNA, 25 bp, Probe Sequence
aacgctgtcaagacattgcttcaac

SEQ ID NO: 160193 - DNA, 25 bp, Probe Sequence
aactctccaagtaattctgatacca

SEQ ID NO: 160194 - DNA, 25 bp, Probe Sequence
aactagctaagcattattattcaac

SEQ ID NO: 160195 - DNA, 25 bp, Probe Sequence
aactagcaacacatattacactaca

SEQ ID NO: 160196 - DNA, 25 bp, Probe Sequence
aactagcaactcttatttctttcct

SEQ ID NO: 160197 - DNA, 25 bp, Probe Sequence
aactgacaactctttgtagtcctcc

SEQ ID NO: 160198 - DNA, 25 bp, Probe Sequence
aactgacaatggctatgtatccctt

SEQ ID NO: 160199 - DNA, 25 bp, Probe Sequence
aacggcaaagaattatatagactat

SEQ ID NO: 160200 - DNA, 25 bp, Probe Sequence
aactggcaggattcacttatgggta

SEQ ID NO: 160201 - DNA, 25 bp, Probe Sequence
aactgtgaggttagaagtggttctg

SEQ ID NO: 160202 - DNA, 25 bp, Probe Sequence
aactgtgggcaataatatggcattt

SEQ ID NO: 160203 - DNA, 25 bp, Probe Sequence
aactctgttccagcctatggcttta

SEQ ID NO: 160204 - DNA, 25 bp, Probe Sequence
aactgtatataagctttggggtaat

SEQ ID NO: 160205 - DNA, 25 bp, Probe Sequence
aactgattaaacctttgtggctgtg

SEQ ID NO: 160206 - DNA, 25 bp, Probe Sequence
aactgattaaacctttgtggctgtg

SEQ ID NO: 160207 - DNA, 25 bp, Probe Sequence
aactttattactcttgttctgtgta

SEQ ID NO: 160208 - DNA, 25 bp, Probe Sequence
aactactatttacttcatttcggat

SEQ ID NO: 160209 - DNA, 25 bp, Probe Sequence
aactcctagttataattttgatgca

SEQ ID NO: 160210 - DNA, 25 bp, Probe Sequence
aactcacataggtaggtatctttat

SEQ ID NO: 160211 - DNA, 25 bp, Probe Sequence
aactgtctacgttggctgactttag

SEQ ID NO: 160212 - DNA, 25 bp, Probe Sequence
aacgactttgtcctgctacagtgat

SEQ ID NO: 160213 - DNA, 25 bp, Probe Sequence
aacggtgttgcatcgatacaggcag

SEQ ID NO: 160214 - DNA, 25 bp, Probe Sequence
aacggttctggaaatggcagcgcgg

SEQ ID NO: 160215 - DNA, 25 bp, Probe Sequence
aactgttctggggaagacgctgctc

SEQ ID NO: 160216 - DNA, 25 bp, Probe Sequence
aactggttccatcaagactgtgcac

SEQ ID NO: 160217 - DNA, 25 bp, Probe Sequence
aacgacttcctccaggagtatggca

SEQ ID NO: 160218 - DNA, 25 bp, Probe Sequence
aacggctgtctgccaactggtagag

SEQ ID NO: 160219 - DNA, 25 bp, Probe Sequence
aacgagctggctaaaatggtaaaca

SEQ ID NO: 160220 - DNA, 25 bp, Probe Sequence
aaccaggcgcttcaaggaaaccaat

SEQ ID NO: 160221 - DNA, 25 bp, Probe Sequence
aaccaggcgcttcaaggaaaccaca

SEQ ID NO: 160222 - DNA, 25 bp, Probe Sequence
aactatgatccccagaaggacaagc

SEQ ID NO: 160223 - DNA, 25 bp, Probe Sequence
aactattctcctaaaagcctccatc

SEQ ID NO: 160224 - DNA, 25 bp, Probe Sequence
aactcatttcctatgtaactgcatt

SEQ ID NO: 160225 - DNA, 25 bp, Probe Sequence
aactctttgaaactgtatcaccttt

SEQ ID NO: 160226 - DNA, 25 bp, Probe Sequence
aactctttattttctatcattcttt

SEQ ID NO: 160227 - DNA, 25 bp, Probe Sequence
aactctttattttctatcattcttt

SEQ ID NO: 160228 - DNA, 25 bp, Probe Sequence
aactaattagtcgtattctgctact

SEQ ID NO: 160229 - DNA, 25 bp, Probe Sequence
aactttgtcaacatctttgcaactg

SEQ ID NO: 160230 - DNA, 25 bp, Probe Sequence
aaccttaccacgttactgcatactg

SEQ ID NO: 160231 - DNA, 25 bp, Probe Sequence
aactggccactccaaatttgcaaca

SEQ ID NO: 160232 - DNA, 25 bp, Probe Sequence
aactggtcaggattcagatttccca

SEQ ID NO: 160233 - DNA, 25 bp, Probe Sequence
aacggctcaggattcgtggtggctg

SEQ ID NO: 160234 - DNA, 25 bp, Probe Sequence
aacgctagcaggaatcaggcgattg

SEQ ID NO: 160235 - DNA, 25 bp, Probe Sequence
aactgtagcgtgaacgtgaactgtg

SEQ ID NO: 160236 - DNA, 25 bp, Probe Sequence
aactaactttatgtgcacctgtgta

SEQ ID NO: 160237 - DNA, 25 bp, Probe Sequence
aactacctctgttgaggctcactat

SEQ ID NO: 160238 - DNA, 25 bp, Probe Sequence
aactgacctctggacgcagaacttc

SEQ ID NO: 160239 - DNA, 25 bp, Probe Sequence
aactacaaggcctgcagaatttccc

SEQ ID NO: 160240 - DNA, 25 bp, Probe Sequence
aaccgcggatcctgcagaaactcgc

SEQ ID NO: 160241 - DNA, 25 bp, Probe Sequence
aaccgcgactccttcgaggaggtgc

SEQ ID NO: 160242 - DNA, 25 bp, Probe Sequence
aaccctggtccagctgagggtgctg

SEQ ID NO: 160243 - DNA, 25 bp, Probe Sequence
aaccgtcagatcgcctggaggacgc

SEQ ID NO: 160244 - DNA, 25 bp, Probe Sequence
aacgcgtcagaatcgcctggagacg

SEQ ID NO: 160245 - DNA, 25 bp, Probe Sequence
aactaccaacagtgtctgagaagag

SEQ ID NO: 160246 - DNA, 25 bp, Probe Sequence
aactcaccctcactgtgtgttaaag

SEQ ID NO: 160247 - DNA, 25 bp, Probe Sequence
aaccccccagcactgaggaagaacg

SEQ ID NO: 160248 - DNA, 25 bp, Probe Sequence
aaccccctgcgaaaggaggatgagg

SEQ ID NO: 160249 - DNA, 25 bp, Probe Sequence
aacgcccctggcaaacatcaggtat

SEQ ID NO: 160250 - DNA, 25 bp, Probe Sequence
aactccacctgagttacaaagacag

SEQ ID NO: 160251 - DNA, 25 bp, Probe Sequence
aactctgcacacacttactaggaca

SEQ ID NO: 160252 - DNA, 25 bp, Probe Sequence
aactcagaacacagctcctagacaa

SEQ ID NO: 160253 - DNA, 25 bp, Probe Sequence
aactgcaaatatttctaattagata

SEQ ID NO: 160254 - DNA, 25 bp, Probe Sequence
aactgattatgcttatgtacttact

SEQ ID NO: 160255 - DNA, 25 bp, Probe Sequence
aactgagctcacctatctcacttaa

SEQ ID NO: 160256 - DNA, 25 bp, Probe Sequence
aactattcatcgattcctgctgaaa

SEQ ID NO: 160257 - DNA, 25 bp, Probe Sequence
aactcctgatcgtttctgtagaaag

SEQ ID NO: 160258 - DNA, 25 bp, Probe Sequence
aactcttcttgcttttgcattataa

SEQ ID NO: 160259 - DNA, 25 bp, Probe Sequence
aactcttttgctttctgcttttatt

SEQ ID NO: 160260 - DNA, 25 bp, Probe Sequence
aactcacatttgatattctcttata

SEQ ID NO: 160261 - DNA, 25 bp, Probe Sequence
aactcaggatgtgtttacagtcatt

SEQ ID NO: 160262 - DNA, 25 bp, Probe Sequence
aactcaggcagtggatttcatcaac

SEQ ID NO: 160263 - DNA, 25 bp, Probe Sequence
aactagtagctggtacataatcact

SEQ ID NO: 160264 - DNA, 25 bp, Probe Sequence
aactgagttgtcctacatgcaagta

SEQ ID NO: 160265 - DNA, 25 bp, Probe Sequence
aactgcgtatgtcctaagctggagt

SEQ ID NO: 160266 - DNA, 25 bp, Probe Sequence
aaccagtaccacatacccagtaggt

SEQ ID NO: 160267 - DNA, 25 bp, Probe Sequence
aaccaggaaccatgtgccaagttgc

SEQ ID NO: 160268 - DNA, 25 bp, Probe Sequence
aacgcaggcaaagacaccaacggct

SEQ ID NO: 160269 - DNA, 25 bp, Probe Sequence
aactgggcaacccatgatccacatc

SEQ ID NO: 160270 - DNA, 25 bp, Probe Sequence
aactggatccatcggatcatcccca

SEQ ID NO: 160271 - DNA, 25 bp, Probe Sequence
aactaatacagacttatctcctcac

SEQ ID NO: 160272 - DNA, 25 bp, Probe Sequence
aactgtaaggacacactactcagct

SEQ ID NO: 160273 - DNA, 25 bp, Probe Sequence
aactgaattgatttagcccactcct

SEQ ID NO: 160274 - DNA, 25 bp, Probe Sequence
aactcagtgtttaaggcacaccctg

SEQ ID NO: 160275 - DNA, 25 bp, Probe Sequence
aactcttcttgtcagtgaatccagt

SEQ ID NO: 160276 - DNA, 25 bp, Probe Sequence
aactctggctttcagtggaggcatt

SEQ ID NO: 160277 - DNA, 25 bp, Probe Sequence
aactctgtcctaggcagggagcgta

SEQ ID NO: 160278 - DNA, 25 bp, Probe Sequence
aactcatgaccatcatcggtggctg

SEQ ID NO: 160279 - DNA, 25 bp, Probe Sequence
aactgagagctcaacatgggtagtc

SEQ ID NO: 160280 - DNA, 25 bp, Probe Sequence
aactgaggtgatgcatgtaattgtg

SEQ ID NO: 160281 - DNA, 25 bp, Probe Sequence
aactcactctgggctgtaacgtggc

SEQ ID NO: 160282 - DNA, 25 bp, Probe Sequence
aactcactgtgctcctaaaggcagc

SEQ ID NO: 160283 - DNA, 25 bp, Probe Sequence
aactgacttagtgctcacaagcccc

SEQ ID NO: 160284 - DNA, 25 bp, Probe Sequence
aactgagcttactgctcacaccact

SEQ ID NO: 160285 - DNA, 25 bp, Probe Sequence
aactcagtaaaaatcaactcacatc

SEQ ID NO: 160286 - DNA, 25 bp, Probe Sequence
aactgcaagctgaagaccaaccaca

SEQ ID NO: 160287 - DNA, 25 bp, Probe Sequence
aactcagacgaacgctagagagcca

SEQ ID NO: 160288 - DNA, 25 bp, Probe Sequence
aacggacagactccaagagctgcca

SEQ ID NO: 160289 - DNA, 25 bp, Probe Sequence
aacgaacagactcaggcgatgtgct

SEQ ID NO: 160290 - DNA, 25 bp, Probe Sequence
aacgaactgaactaggcctggtgga

SEQ ID NO: 160291 - DNA, 25 bp, Probe Sequence
aacgaactgaactaggcctggtgga

SEQ ID NO: 160292 - DNA, 25 bp, Probe Sequence
aactaacgaaaaggcctgcatgaaa

SEQ ID NO: 160293 - DNA, 25 bp, Probe Sequence
aactctgcatagacaaaggccttaa

SEQ ID NO: 160294 - DNA, 25 bp, Probe Sequence
aactgcacttgatttgggccttgaa

SEQ ID NO: 160295 - DNA, 25 bp, Probe Sequence
aagccctgtgctttgggggagtaag

SEQ ID NO: 160296 - DNA, 25 bp, Probe Sequence
aactactgcgtatggcgggacaacc

SEQ ID NO: 160297 - DNA, 25 bp, Probe Sequence
aactactgcgtatggcgggacaacc

SEQ ID NO: 160298 - DNA, 25 bp, Probe Sequence
aactactgcgtatggcgggacaacc

SEQ ID NO: 160299 - DNA, 25 bp, Probe Sequence
aactaagagttggccatggagataa

SEQ ID NO: 160300 - DNA, 25 bp, Probe Sequence
aactcgtggtgttgccatggcgata

SEQ ID NO: 160301 - DNA, 25 bp, Probe Sequence
aactctgtgagtgatgtgacccttc

SEQ ID NO: 160302 - DNA, 25 bp, Probe Sequence
aactcataatatggatgtccccaac

SEQ ID NO: 160303 - DNA, 25 bp, Probe Sequence
aactgcaatttggttccaccacatc

SEQ ID NO: 160304 - DNA, 25 bp, Probe Sequence
aacgcaatttatgccaaacctgcaa

SEQ ID NO: 160305 - DNA, 25 bp, Probe Sequence
aactcagtgccattaacaaacccaa

SEQ ID NO: 160306 - DNA, 25 bp, Probe Sequence
aactgcagtccttcaaagatgacca

SEQ ID NO: 160307 - DNA, 25 bp, Probe Sequence
aactctgtacaagacacatccatga

SEQ ID NO: 160308 - DNA, 25 bp, Probe Sequence
aactctgctagataccacatctcta

SEQ ID NO: 160309 - DNA, 25 bp, Probe Sequence
aactcatggagatggcagctgttta

SEQ ID NO: 160310 - DNA, 25 bp, Probe Sequence
aaccggtgaggtgcgatggctcagc

SEQ ID NO: 160311 - DNA, 25 bp, Probe Sequence
aacccttgggcttaagcctcacttg

SEQ ID NO: 160312 - DNA, 25 bp, Probe Sequence
aactccttgtggtgaaggttctaag

SEQ ID NO: 160313 - DNA, 25 bp, Probe Sequence
aagtcgattaggttaggagttcata

SEQ ID NO: 160314 - DNA, 25 bp, Probe Sequence
aactgcaagttgcttattgtttcaa

SEQ ID NO: 160315 - DNA, 25 bp, Probe Sequence
aactactcttgacatgattgttcat

SEQ ID NO: 160316 - DNA, 25 bp, Probe Sequence
aactaccggacgcagctgtatgaca

SEQ ID NO: 160317 - DNA, 25 bp, Probe Sequence
aactacacggttcatgaactgacat

SEQ ID NO: 160318 - DNA, 25 bp, Probe Sequence
aactccagggtaccacaacagacaa

SEQ ID NO: 160319 - DNA, 25 bp, Probe Sequence
aactctacggaaatccacggatcaa

SEQ ID NO: 160320 - DNA, 25 bp, Probe Sequence
aactcatacgtgattgcagccgggc

SEQ ID NO: 160321 - DNA, 25 bp, Probe Sequence
aactgcatcaggcgtggcaggcggt

SEQ ID NO: 160322 - DNA, 25 bp, Probe Sequence
aactgcaaggcggcagcgaggctgg

SEQ ID NO: 160323 - DNA, 25 bp, Probe Sequence
aactgcgaggagtgcgacgtgagtc

SEQ ID NO: 160324 - DNA, 25 bp, Probe Sequence
aactcgacaatatggccagctaatg

SEQ ID NO: 160325 - DNA, 25 bp, Probe Sequence
aactccaagaatctgcactgaaatg

SEQ ID NO: 160326 - DNA, 25 bp, Probe Sequence
aactctcagaaatcctgatgacgtc

SEQ ID NO: 160327 - DNA, 25 bp, Probe Sequence
aactcatcgacaggaccgagtccct

SEQ ID NO: 160328 - DNA, 25 bp, Probe Sequence
aactccagtgaggactaggctccct

SEQ ID NO: 160329 - DNA, 25 bp, Probe Sequence
aactcacattggttccaggtctcaa

SEQ ID NO: 160330 - DNA, 25 bp, Probe Sequence
aactctgcatttttacagcgtagca

SEQ ID NO: 160331 - DNA, 25 bp, Probe Sequence
aactctgtttcaataagccagacac

SEQ ID NO: 160332 - DNA, 25 bp, Probe Sequence
aactcagtgaatctactccagagcc

SEQ ID NO: 160333 - DNA, 25 bp, Probe Sequence
aactcaatagatttatctcaggctg

SEQ ID NO: 160334 - DNA, 25 bp, Probe Sequence
aactcaatcaaattattaggcacaa

SEQ ID NO: 160335 - DNA, 25 bp, Probe Sequence
aactccattataccatgtagccata

SEQ ID NO: 160336 - DNA, 25 bp, Probe Sequence
aactctgattaactattcctatagc

SEQ ID NO: 160337 - DNA, 25 bp, Probe Sequence
aactctgtttaaatgctcagttcag

SEQ ID NO: 160338 - DNA, 25 bp, Probe Sequence
aactctagctctaaatgctagctct

SEQ ID NO: 160339 - DNA, 25 bp, Probe Sequence
aactctactggcagattggcattga

SEQ ID NO: 160340 - DNA, 25 bp, Probe Sequence
aactgcttctagagatgggattgtg

SEQ ID NO: 160341 - DNA, 25 bp, Probe Sequence
aactcgctcaagctgtcatgtacgg

SEQ ID NO: 160342 - DNA, 25 bp, Probe Sequence
aactcgctcaagctgtcatgtacgg

SEQ ID NO: 160343 - DNA, 25 bp, Probe Sequence
aactggccacagagatagtcctgga

SEQ ID NO: 160344 - DNA, 25 bp, Probe Sequence
aactggccacagagatagtcctgga

SEQ ID NO: 160345 - DNA, 25 bp, Probe Sequence
aactggccacagagatagtcctgga

SEQ ID NO: 160346 - DNA, 25 bp, Probe Sequence
aactgggcaactcaagattctggct

SEQ ID NO: 160347 - DNA, 25 bp, Probe Sequence
aactgggaagctcaacaacgtattt

SEQ ID NO: 160348 - DNA, 25 bp, Probe Sequence
aactgccgacttcaaaagtgttctt

SEQ ID NO: 160349 - DNA, 25 bp, Probe Sequence
aactcctggattcacacactggtat

SEQ ID NO: 160350 - DNA, 25 bp, Probe Sequence
aactcctgagaatgacagccagttg

SEQ ID NO: 160351 - DNA, 25 bp, Probe Sequence
aactgcctggagatactcagagtgt

SEQ ID NO: 160352 - DNA, 25 bp, Probe Sequence
aactcctggcaattcctgttgttaa

SEQ ID NO: 160353 - DNA, 25 bp, Probe Sequence
aacgtctgagccttcaatgttgaat

SEQ ID NO: 160354 - DNA, 25 bp, Probe Sequence
aactgttgcacttgtcaactttcaa

SEQ ID NO: 160355 - DNA, 25 bp, Probe Sequence
aactaacactggaccattggatcga

SEQ ID NO: 160356 - DNA, 25 bp, Probe Sequence
aactaaacaggaaagtcgcattatt

SEQ ID NO: 160357 - DNA, 25 bp, Probe Sequence
aacccagtactaaagtcgctctcat

SEQ ID NO: 160358 - DNA, 25 bp, Probe Sequence
aactccccagataaagtctgctctc

SEQ ID NO: 160359 - DNA, 25 bp, Probe Sequence
aatccctgccgttagcgactgcgac

SEQ ID NO: 160360 - DNA, 25 bp, Probe Sequence
aacgcctcactgaaacatggctgtg

SEQ ID NO: 160361 - DNA, 25 bp, Probe Sequence
aactcagatcctacaacacgcaagt

SEQ ID NO: 160362 - DNA, 25 bp, Probe Sequence
aactcagcaccttatatctcgaagt

SEQ ID NO: 160363 - DNA, 25 bp, Probe Sequence
aactgagcagtctcataccatggag

SEQ ID NO: 160364 - DNA, 25 bp, Probe Sequence
aactcacagaagcaacacagctggg

SEQ ID NO: 160365 - DNA, 25 bp, Probe Sequence
aactccagcacagaagcctgcgagg

SEQ ID NO: 160366 - DNA, 25 bp, Probe Sequence
aactcagcaaagtatatctgtggaa

SEQ ID NO: 160367 - DNA, 25 bp, Probe Sequence
aactcacacggtaatttgtgcagtt

SEQ ID NO: 160368 - DNA, 25 bp, Probe Sequence
aactcaagaccttgttttgctgtct

SEQ ID NO: 160369 - DNA, 25 bp, Probe Sequence
aactcgaggactgtatttgtgacta

SEQ ID NO: 160370 - DNA, 25 bp, Probe Sequence
aactctttggctgtgatatttacta

SEQ ID NO: 160371 - DNA, 25 bp, Probe Sequence
aactctggggtgaaatcatttcctc

SEQ ID NO: 160372 - DNA, 25 bp, Probe Sequence
aactcatggtgtggctaatctacat

SEQ ID NO: 160373 - DNA, 25 bp, Probe Sequence
aactcatggcgttgaaaccacacag

SEQ ID NO: 160374 - DNA, 25 bp, Probe Sequence
aactcggctgtattaatcacgcgat

SEQ ID NO: 160375 - DNA, 25 bp, Probe Sequence
aactcggctgtattaatcacgcgat

SEQ ID NO: 160376 - DNA, 25 bp, Probe Sequence
aatctgggcttcttattaccggata

SEQ ID NO: 160377 - DNA, 25 bp, Probe Sequence
aaccgtgctctctaatttatcggca

SEQ ID NO: 160378 - DNA, 25 bp, Probe Sequence
aagcttgtcctccatatttatacct

SEQ ID NO: 160379 - DNA, 25 bp, Probe Sequence
aacggacctgcaatactcttatccc

SEQ ID NO: 160380 - DNA, 25 bp, Probe Sequence
aactgtacacataattatcatgttg

SEQ ID NO: 160381 - DNA, 25 bp, Probe Sequence
aactctgacacaattggatgctgtg

SEQ ID NO: 160382 - DNA, 25 bp, Probe Sequence
aacccagcacaagggctgctggccc

SEQ ID NO: 160383 - DNA, 25 bp, Probe Sequence
aactcactgcctaggaggctggcca

SEQ ID NO: 160384 - DNA, 25 bp, Probe Sequence
aactcactgctcaagaagacatgga

SEQ ID NO: 160385 - DNA, 25 bp, Probe Sequence
aaccttccaagatgcctggcaaaac

SEQ ID NO: 160386 - DNA, 25 bp, Probe Sequence
aacccttaggacctctgaatcaaga

SEQ ID NO: 160387 - DNA, 25 bp, Probe Sequence
aactccttaatttgctctaatagat

SEQ ID NO: 160388 - DNA, 25 bp, Probe Sequence
aactcactgtgacaagctcaaaatt

SEQ ID NO: 160389 - DNA, 25 bp, Probe Sequence
aactcactctgactatgtcaaacac

SEQ ID NO: 160390 - DNA, 25 bp, Probe Sequence
aactcttggacatttcagatacatg

SEQ ID NO: 160391 - DNA, 25 bp, Probe Sequence
aactcatgctggactgttggcagaa

SEQ ID NO: 160392 - DNA, 25 bp, Probe Sequence
aactctgcgagtctgatgtgtgtca

SEQ ID NO: 160393 - DNA, 25 bp, Probe Sequence
aactctcagaggctagtgttcaaca

SEQ ID NO: 160394 - DNA, 25 bp, Probe Sequence
caaagtagggcgtgtggtttccctg

SEQ ID NO: 160395 - DNA, 25 bp, Probe Sequence
caaagtagggcgtgtggtttccctg

SEQ ID NO: 160396 - DNA, 25 bp, Probe Sequence
caacgaagggcgtggggtgcccagc

SEQ ID NO: 160397 - DNA, 25 bp, Probe Sequence
aacgaagggcgtggggtgcccagct

SEQ ID NO: 160398 - DNA, 25 bp, Probe Sequence
aagcgcgaggagcgggcgcggaagc

SEQ ID NO: 160399 - DNA, 25 bp, Probe Sequence
aagcgtccggcatggcggagagaac

SEQ ID NO: 160400 - DNA, 25 bp, Probe Sequence
aagcgccctctctggggagaaggga

SEQ ID NO: 160401 - DNA, 25 bp, Probe Sequence
aagcccctctcaggggccagaactc

SEQ ID NO: 160402 - DNA, 25 bp, Probe Sequence
aactgcttcctgtagggcaagaact

SEQ ID NO: 160403 - DNA, 25 bp, Probe Sequence
aacgctatgacgcagctgtgatatg

SEQ ID NO: 160404 - DNA, 25 bp, Probe Sequence
aactgtatgacacccagaatatggg

SEQ ID NO: 160405 - DNA, 25 bp, Probe Sequence
aactgctgaccacgccgaatccgga

SEQ ID NO: 160406 - DNA, 25 bp, Probe Sequence
aactgctcacagaacggatcatgtc

SEQ ID NO: 160407 - DNA, 25 bp, Probe Sequence
aactgcctcatgtacaagatgtgtt

SEQ ID NO: 160408 - DNA, 25 bp, Probe Sequence
aactgctggtataatcagattgttt

SEQ ID NO: 160409 - DNA, 25 bp, Probe Sequence
aactgggataactgatttctatggc

SEQ ID NO: 160410 - DNA, 25 bp, Probe Sequence
aactgggaaacaaacgatatatctc

SEQ ID NO: 160411 - DNA, 25 bp, Probe Sequence
aacgggcagaattgaaggaaatcct

SEQ ID NO: 160412 - DNA, 25 bp, Probe Sequence
aacgggctaatccacggaattgcct

SEQ ID NO: 160413 - DNA, 25 bp, Probe Sequence
aactgtgtgctaactgcaataaatt

SEQ ID NO: 160414 - DNA, 25 bp, Probe Sequence
aacgctggacatgatcaagaagatt

SEQ ID NO: 160415 - DNA, 25 bp, Probe Sequence
aactgtggaatggatcacgtagaca

SEQ ID NO: 160416 - DNA, 25 bp, Probe Sequence
aactcttgagctggaacctcagcaa

SEQ ID NO: 160417 - DNA, 25 bp, Probe Sequence
aactctctgtcttggcacaacagaa

SEQ ID NO: 160418 - DNA, 25 bp, Probe Sequence
aactgctctggaaggcatcaataaa

SEQ ID NO: 160419 - DNA, 25 bp, Probe Sequence
aactgctcgcagtaccaaaacaggc

SEQ ID NO: 160420 - DNA, 25 bp, Probe Sequence
aactgtgcctagactcaaaaaatgc

SEQ ID NO: 160421 - DNA, 25 bp, Probe Sequence
aagctggcccaggtacaagtacaaa

SEQ ID NO: 160422 - DNA, 25 bp, Probe Sequence
aactcgcctccgagaagcatccaaa

SEQ ID NO: 160423 - DNA, 25 bp, Probe Sequence
aactccgtctctaccaatatacaaa

SEQ ID NO: 160424 - DNA, 25 bp, Probe Sequence
aactccgtctcaagcatattaacag

SEQ ID NO: 160425 - DNA, 25 bp, Probe Sequence
aactccagtctcttgaaaacacggg

SEQ ID NO: 160426 - DNA, 25 bp, Probe Sequence
aaccctgtctgtagagggccctggt

SEQ ID NO: 160427 - DNA, 25 bp, Probe Sequence
aacggctccatgctgcagagagctt

SEQ ID NO: 160428 - DNA, 25 bp, Probe Sequence
aacgggtgctggcaagcatgtgccc

SEQ ID NO: 160429 - DNA, 25 bp, Probe Sequence
aactgtggtggagattgctggctac

SEQ ID NO: 160430 - DNA, 25 bp, Probe Sequence
aactgctgggaatatccgtgccagg

SEQ ID NO: 160431 - DNA, 25 bp, Probe Sequence
aactggaggcgatccagctggacgg

SEQ ID NO: 160432 - DNA, 25 bp, Probe Sequence
aactgtgagccgtccaagtcagaag

SEQ ID NO: 160433 - DNA, 25 bp, Probe Sequence
aactgtcagtcgaacaagtcatgaa

SEQ ID NO: 160434 - DNA, 25 bp, Probe Sequence
aacgacagtctgcacgagtcggcgc

SEQ ID NO: 160435 - DNA, 25 bp, Probe Sequence
aacgacagtctgcacgagtcggcgc

SEQ ID NO: 160436 - DNA, 25 bp, Probe Sequence
aactgaagccttttgagaccctgct

SEQ ID NO: 160437 - DNA, 25 bp, Probe Sequence
aactgaagcagtttttgccctattt

SEQ ID NO: 160438 - DNA, 25 bp, Probe Sequence
aactggacttctaaagcacctttct

SEQ ID NO: 160439 - DNA, 25 bp, Probe Sequence
aactggactgtgtgcaacgcttttt

SEQ ID NO: 160440 - DNA, 25 bp, Probe Sequence
aacggactgtgaatccgctctttgt

SEQ ID NO: 160441 - DNA, 25 bp, Probe Sequence
aacgtgtcgtgaatgtttcttcagt

SEQ ID NO: 160442 - DNA, 25 bp, Probe Sequence
aactggacagttagcttttcaatta

SEQ ID NO: 160443 - DNA, 25 bp, Probe Sequence
aactggcaggtatctttgtaactat

SEQ ID NO: 160444 - DNA, 25 bp, Probe Sequence
aactgacaggtgtgtatatgtaatt

SEQ ID NO: 160445 - DNA, 25 bp, Probe Sequence
aactgaagatattcgttcgtacatg

SEQ ID NO: 160446 - DNA, 25 bp, Probe Sequence
aactgacagatatgttcttgcttct

SEQ ID NO: 160447 - DNA, 25 bp, Probe Sequence
aactcccataagtttctgctgcttc

SEQ ID NO: 160448 - DNA, 25 bp, Probe Sequence
aacccaagtagctttgtggcttcgt

SEQ ID NO: 160449 - DNA, 25 bp, Probe Sequence
aagccaaagaagattggggggtatg

SEQ ID NO: 160450 - DNA, 25 bp, Probe Sequence
aacgcaaatgagtatttcggagcat

SEQ ID NO: 160451 - DNA, 25 bp, Probe Sequence
aactgcaaaggaatccccgagcagc

SEQ ID NO: 160452 - DNA, 25 bp, Probe Sequence
aactgtgaaaaatgccacgagagct

SEQ ID NO: 160453 - DNA, 25 bp, Probe Sequence
aacgatagataattcccaaggagct

SEQ ID NO: 160454 - DNA, 25 bp, Probe Sequence
aactcatcactatcttccgagaaga

SEQ ID NO: 160455 - DNA, 25 bp, Probe Sequence
aactccacgatcttcctgaagaaga

SEQ ID NO: 160456 - DNA, 25 bp, Probe Sequence
aactgctccagtttcctgatcaaga

SEQ ID NO: 160457 - DNA, 25 bp, Probe Sequence
aactccctcatgttgttggcaacag

SEQ ID NO: 160458 - DNA, 25 bp, Probe Sequence
aactctcaatattttagatgcaaag

SEQ ID NO: 160459 - DNA, 25 bp, Probe Sequence
aactccagatatcctaaagctcaat

SEQ ID NO: 160460 - DNA, 25 bp, Probe Sequence
aactccagatatcctaaagctcaat

SEQ ID NO: 160461 - DNA, 25 bp, Probe Sequence
aactgtcagtatctatagaccaggt

SEQ ID NO: 160462 - DNA, 25 bp, Probe Sequence
aactcctgtcttgctagacaaggtt

SEQ ID NO: 160463 - DNA, 25 bp, Probe Sequence
aactcctgatctaactgatgaaaat

SEQ ID NO: 160464 - DNA, 25 bp, Probe Sequence
aactcattgctggaattgtgaaatt

SEQ ID NO: 160465 - DNA, 25 bp, Probe Sequence
aactcattggaaacgtgcatacatt

SEQ ID NO: 160466 - DNA, 25 bp, Probe Sequence
aactcatcatggcacctttagcagt

SEQ ID NO: 160467 - DNA, 25 bp, Probe Sequence
aactctagggattcatgattctggt

SEQ ID NO: 160468 - DNA, 25 bp, Probe Sequence
aactctcgcgagagcgtatctgcgt

SEQ ID NO: 160469 - DNA, 25 bp, Probe Sequence
aactcctgcgccaaggacagtgggt

SEQ ID NO: 160470 - DNA, 25 bp, Probe Sequence
aactgctcgtagaaggaagaaggtg

SEQ ID NO: 160471 - DNA, 25 bp, Probe Sequence
aactgtcaccaacagaaagatggag

SEQ ID NO: 160472 - DNA, 25 bp, Probe Sequence
aactgtcactaaggaaaatatcaac

SEQ ID NO: 160473 - DNA, 25 bp, Probe Sequence
aactgtacataaaaacaaggcacta

SEQ ID NO: 160474 - DNA, 25 bp, Probe Sequence
aactgtctgacataaaaaggactcg

SEQ ID NO: 160475 - DNA, 25 bp, Probe Sequence
aactgttcccaattaatgggagctc

SEQ ID NO: 160476 - DNA, 25 bp, Probe Sequence
aactgaggccatgattaagagggac

SEQ ID NO: 160477 - DNA, 25 bp, Probe Sequence
aactgtgcccacatgtactgaggga

SEQ ID NO: 160478 - DNA, 25 bp, Probe Sequence
aacctgcctatcagtcctgaggaag

SEQ ID NO: 160479 - DNA, 25 bp, Probe Sequence
aactgtgtctggcgttctcaagaat

SEQ ID NO: 160480 - DNA, 25 bp, Probe Sequence
aactgtgtctggcgttctcaagaat

SEQ ID NO: 160481 - DNA, 25 bp, Probe Sequence
aactgttgtacactggttcaatgaa

SEQ ID NO: 160482 - DNA, 25 bp, Probe Sequence
aactgcattgtaacttggccagatg

SEQ ID NO: 160483 - DNA, 25 bp, Probe Sequence
aactgcttatattttgccagtgcat

SEQ ID NO: 160484 - DNA, 25 bp, Probe Sequence
aactgattagtattcaggcactgag

SEQ ID NO: 160485 - DNA, 25 bp, Probe Sequence
aactgctctcagtatagattaccag

SEQ ID NO: 160486 - DNA, 25 bp, Probe Sequence
aactcctgcccaggatttcactgtc

SEQ ID NO: 160487 - DNA, 25 bp, Probe Sequence
aactccacaccatagtatgcattgt

SEQ ID NO: 160488 - DNA, 25 bp, Probe Sequence
aactgccctctcaaatgttgctagg

SEQ ID NO: 160489 - DNA, 25 bp, Probe Sequence
aactgcccacttgcagtacatcaag

SEQ ID NO: 160490 - DNA, 25 bp, Probe Sequence
aactgcccacttggcagtacatcaa

SEQ ID NO: 160491 - DNA, 25 bp, Probe Sequence
aactgcaacatctgggatgccatga

SEQ ID NO: 160492 - DNA, 25 bp, Probe Sequence
aactgagtcatcttgctgagtggat

SEQ ID NO: 160493 - DNA, 25 bp, Probe Sequence
aactgagttgctagcatgtctgtgt

SEQ ID NO: 160494 - DNA, 25 bp, Probe Sequence
aactgtcattgtgcatctctgaggt

SEQ ID NO: 160495 - DNA, 25 bp, Probe Sequence
aactggattctggcattgagactga

SEQ ID NO: 160496 - DNA, 25 bp, Probe Sequence
aagctgtgtctgagatctggatctg

SEQ ID NO: 160497 - DNA, 25 bp, Probe Sequence
aactctgtctcaacatctgtgttgg

SEQ ID NO: 160498 - DNA, 25 bp, Probe Sequence
aactgctgttagttctggtgtgtaa

SEQ ID NO: 160499 - DNA, 25 bp, Probe Sequence
aagctggattgatacggggaaaaca

SEQ ID NO: 160500 - DNA, 25 bp, Probe Sequence
aactgaattctttcatgggagaaca

SEQ ID NO: 160501 - DNA, 25 bp, Probe Sequence
aactgatttctcacggcgtgtcacc

SEQ ID NO: 160502 - DNA, 25 bp, Probe Sequence
aacgtggtttgcctgaggctgtaac

SEQ ID NO: 160503 - DNA, 25 bp, Probe Sequence
aagcaggagtctacagtgatggttc

SEQ ID NO: 160504 - DNA, 25 bp, Probe Sequence
aagctgggcggaaggaggtgtgcgt

SEQ ID NO: 160505 - DNA, 25 bp, Probe Sequence
aacgaggatgagagggccattgccg

SEQ ID NO: 160506 - DNA, 25 bp, Probe Sequence
aactgcggtagaggtggccacattg

SEQ ID NO: 160507 - DNA, 25 bp, Probe Sequence
aactgcggatggcgcttgagcaccg

SEQ ID NO: 160508 - DNA, 25 bp, Probe Sequence
aactctggagtcctctgagagagcc

SEQ ID NO: 160509 - DNA, 25 bp, Probe Sequence
aactctggagaagttgaggcatact

SEQ ID NO: 160510 - DNA, 25 bp, Probe Sequence
aactcgccaaactgcaggcacaagt

SEQ ID NO: 160511 - DNA, 25 bp, Probe Sequence
aaccatgcctaagtacaggcggatt

SEQ ID NO: 160512 - DNA, 25 bp, Probe Sequence
aaccacttgggaaagactggcttag

SEQ ID NO: 160513 - DNA, 25 bp, Probe Sequence
aacgtgcttgaggacaacattggct

SEQ ID NO: 160514 - DNA, 25 bp, Probe Sequence
aacgtgctcaaggtcaccaaggctg

SEQ ID NO: 160515 - DNA, 25 bp, Probe Sequence
aacgtgctcaaggtcaccaaggctg

SEQ ID NO: 160516 - DNA, 25 bp, Probe Sequence
aactggctagaagtgcccaacgtgg

SEQ ID NO: 160517 - DNA, 25 bp, Probe Sequence
aactgaccaatatccgcaacgtgga

SEQ ID NO: 160518 - DNA, 25 bp, Probe Sequence
aagctgaccgtatacacaaccttga

SEQ ID NO: 160519 - DNA, 25 bp, Probe Sequence
gaaggcccaggacaaaattcttagt

SEQ ID NO: 160520 - DNA, 25 bp, Probe Sequence
gaaggcccaggacaaaattcttagt

SEQ ID NO: 160521 - DNA, 25 bp, Probe Sequence
aacctgccgcaacagaaattgtttt

SEQ ID NO: 160522 - DNA, 25 bp, Probe Sequence
aatcctccggtgcaggagaattttg

SEQ ID NO: 160523 - DNA, 25 bp, Probe Sequence
caacccttgggatggaaaatcacta

SEQ ID NO: 160524 - DNA, 25 bp, Probe Sequence
aacgccaggggagagaggaaactca

SEQ ID NO: 160525 - DNA, 25 bp, Probe Sequence
aactccgggccacaggaggaaatag

SEQ ID NO: 160526 - DNA, 25 bp, Probe Sequence
aacccacggccacagtatacataaa

SEQ ID NO: 160527 - DNA, 25 bp, Probe Sequence
aactcgacgtcctgaggtataatac

SEQ ID NO: 160528 - DNA, 25 bp, Probe Sequence
aacctacactcttcggtgcttagag

SEQ ID NO: 160529 - DNA, 25 bp, Probe Sequence
aaccgagaccttggaatgttccatt

SEQ ID NO: 160530 - DNA, 25 bp, Probe Sequence
aacctggacctgagcaagttctgca

SEQ ID NO: 160531 - DNA, 25 bp, Probe Sequence
aacgtgaccgtgagcgagatgccgc

SEQ ID NO: 160532 - DNA, 25 bp, Probe Sequence
aacgtgcatgctttgtcctagagaa

SEQ ID NO: 160533 - DNA, 25 bp, Probe Sequence
aacctatgcaagttcttagaaatat

SEQ ID NO: 160534 - DNA, 25 bp, Probe Sequence
aactctgagagactacttatgaata

SEQ ID NO: 160535 - DNA, 25 bp, Probe Sequence
aactgctgaagttactatcagagca

SEQ ID NO: 160536 - DNA, 25 bp, Probe Sequence
aagctctgaggcacgtcatgcaggt

SEQ ID NO: 160537 - DNA, 25 bp, Probe Sequence
aactgctggtggagtcatgactgtc

SEQ ID NO: 160538 - DNA, 25 bp, Probe Sequence
aacgggaggcattggcttctgtccc

SEQ ID NO: 160539 - DNA, 25 bp, Probe Sequence
aacggccgagcttgtgattctgagc

SEQ ID NO: 160540 - DNA, 25 bp, Probe Sequence
aacgtgcacagtcaatgagttggag

SEQ ID NO: 160541 - DNA, 25 bp, Probe Sequence
aacgtgccattgataaatgctggaa

SEQ ID NO: 160542 - DNA, 25 bp, Probe Sequence
aactgtgccatcattgccaatggga

SEQ ID NO: 160543 - DNA, 25 bp, Probe Sequence
aactgtcaccactgctaagggactc

SEQ ID NO: 160544 - DNA, 25 bp, Probe Sequence
aacgtcatccactgtaagagccttc

SEQ ID NO: 160545 - DNA, 25 bp, Probe Sequence
aactgaggactctgatgaagacttt

SEQ ID NO: 160546 - DNA, 25 bp, Probe Sequence
aactgaggactctgatgaagacttt

SEQ ID NO: 160547 - DNA, 25 bp, Probe Sequence
aacgcagtcagatttgaaaactttg

SEQ ID NO: 160548 - DNA, 25 bp, Probe Sequence
aacgagaaagactgcaaacatgttg

SEQ ID NO: 160549 - DNA, 25 bp, Probe Sequence
aactgaataagcagagcatcaaatt

SEQ ID NO: 160550 - DNA, 25 bp, Probe Sequence
aacgagtatcaacatgagcatagac

SEQ ID NO: 160551 - DNA, 25 bp, Probe Sequence
aactggagagctacgggcatgcaga

SEQ ID NO: 160552 - DNA, 25 bp, Probe Sequence
aactggacatcatcgtggcagctgc

SEQ ID NO: 160553 - DNA, 25 bp, Probe Sequence
aactgccagcatttctgtggagggt

SEQ ID NO: 160554 - DNA, 25 bp, Probe Sequence
aacgccatgaccctgtggatgggag

SEQ ID NO: 160555 - DNA, 25 bp, Probe Sequence
aacgctgcatgatctgtgtgactga

SEQ ID NO: 160556 - DNA, 25 bp, Probe Sequence
aacgctgcatgcgagtgctgtacta

SEQ ID NO: 160557 - DNA, 25 bp, Probe Sequence
aactcgctgctgttgcactaatagt

SEQ ID NO: 160558 - DNA, 25 bp, Probe Sequence
aagcgtgctgcttctgcaaaagatt

SEQ ID NO: 160559 - DNA, 25 bp, Probe Sequence
aagctgctgcgcacacacaattatc

SEQ ID NO: 160560 - DNA, 25 bp, Probe Sequence
aactgtcactcttcatcgatgatac

SEQ ID NO: 160561 - DNA, 25 bp, Probe Sequence
aactgctcctcttcaattgattctt

SEQ ID NO: 160562 - DNA, 25 bp, Probe Sequence
aactcccatcaccagcagagttgct

SEQ ID NO: 160563 - DNA, 25 bp, Probe Sequence
aactcccatcaccagcagagttgct

SEQ ID NO: 160564 - DNA, 25 bp, Probe Sequence
aactccaaactgttgagactgcttt

SEQ ID NO: 160565 - DNA, 25 bp, Probe Sequence
aactccatctaccttttcatgttat

SEQ ID NO: 160566 - DNA, 25 bp, Probe Sequence
aagcccctgaagttcagtgctagta

SEQ ID NO: 160567 - DNA, 25 bp, Probe Sequence
aacgccactgaactgtatgctggaa

SEQ ID NO: 160568 - DNA, 25 bp, Probe Sequence
aactccatcatgaagtgtgacgtgg

SEQ ID NO: 160569 - DNA, 25 bp, Probe Sequence
aactccatcatgaagtgtgacgtgg

SEQ ID NO: 160570 - DNA, 25 bp, Probe Sequence
aactccatcttagtgtatagcctgg

SEQ ID NO: 160571 - DNA, 25 bp, Probe Sequence
aactgactctgttattgatcccttc

SEQ ID NO: 160572 - DNA, 25 bp, Probe Sequence
aactgactttgtttacctgcttgca

SEQ ID NO: 160573 - DNA, 25 bp, Probe Sequence
aactccgtctgtctactgtgtgaga

SEQ ID NO: 160574 - DNA, 25 bp, Probe Sequence
aactccaggctcagaactgtgaaga

SEQ ID NO: 160575 - DNA, 25 bp, Probe Sequence
aaccccgtctcgtactggatatacg

SEQ ID NO: 160576 - DNA, 25 bp, Probe Sequence
aacccctgcttgggaagggaagctg

SEQ ID NO: 160577 - DNA, 25 bp, Probe Sequence
aacccctgagggccaaacagcagag

SEQ ID NO: 160578 - DNA, 25 bp, Probe Sequence
aacccctgagggccaaacagcagag

SEQ ID NO: 160579 - DNA, 25 bp, Probe Sequence
aacccctgagggccaaacagcagag

SEQ ID NO: 160580 - DNA, 25 bp, Probe Sequence
aacccacaaggtcaattcacaactg

SEQ ID NO: 160581 - DNA, 25 bp, Probe Sequence
aacccaaagattccaaatttcacat

SEQ ID NO: 160582 - DNA, 25 bp, Probe Sequence
aacctagttattatatatttccatt

SEQ ID NO: 160583 - DNA, 25 bp, Probe Sequence
aagaaccttactattatcctccaat

SEQ ID NO: 160584 - DNA, 25 bp, Probe Sequence
aaccaacttgttgcttaatgcccaa

SEQ ID NO: 160585 - DNA, 25 bp, Probe Sequence
aaccatcactggttgcacttatgat

SEQ ID NO: 160586 - DNA, 25 bp, Probe Sequence
aaccaggcatggtactgcacaactg

SEQ ID NO: 160587 - DNA, 25 bp, Probe Sequence
aacggagcatacagtgagcacatct

SEQ ID NO: 160588 - DNA, 25 bp, Probe Sequence
aacgtgagatcctgttgagcatcaa

SEQ ID NO: 160589 - DNA, 25 bp, Probe Sequence
aactgtgaatcttctggataatgaa

SEQ ID NO: 160590 - DNA, 25 bp, Probe Sequence
aactgctggatgaatctgaaaagac

SEQ ID NO: 160591 - DNA, 25 bp, Probe Sequence
aacctgagattatattaaagcctta

SEQ ID NO: 160592 - DNA, 25 bp, Probe Sequence
aacgtgagtctttttagcattcctt

SEQ ID NO: 160593 - DNA, 25 bp, Probe Sequence
aacgtcagttcgtgttgacgccgtc

SEQ ID NO: 160594 - DNA, 25 bp, Probe Sequence
aacgtgcagttcgtgtttgacgccg

SEQ ID NO: 160595 - DNA, 25 bp, Probe Sequence
aactgtagtgtgtctgctgttacct

SEQ ID NO: 160596 - DNA, 25 bp, Probe Sequence
aactgacgatgccctggtgtacagc

SEQ ID NO: 160597 - DNA, 25 bp, Probe Sequence
aacgcaaatgccttgagtttcacgg

SEQ ID NO: 160598 - DNA, 25 bp, Probe Sequence
cacacacaaaatgtaattccggtta

SEQ ID NO: 160599 - DNA, 25 bp, Probe Sequence
aactccaaatctaaagtcaaggctt

SEQ ID NO: 160600 - DNA, 25 bp, Probe Sequence
aacccatgtcctcacttcaaggtta

SEQ ID NO: 160601 - DNA, 25 bp, Probe Sequence
aactccatgtctctgagcattagat

SEQ ID NO: 160602 - DNA, 25 bp, Probe Sequence
aaccaattctccagcattaggactt

SEQ ID NO: 160603 - DNA, 25 bp, Probe Sequence
aagccttcccgcaatgtttggactt

SEQ ID NO: 160604 - DNA, 25 bp, Probe Sequence
gaaccattaaccttaattggaccat

SEQ ID NO: 160605 - DNA, 25 bp, Probe Sequence
aaccgtgaacacttaatgttgaaag

SEQ ID NO: 160606 - DNA, 25 bp, Probe Sequence
aactggtatacattccaaactgata

SEQ ID NO: 160607 - DNA, 25 bp, Probe Sequence
aactggtttcaaagcacagagctca

SEQ ID NO: 160608 - DNA, 25 bp, Probe Sequence
aactggattgacaaaatcatgaggc

SEQ ID NO: 160609 - DNA, 25 bp, Probe Sequence
aactggcttacagcaatgatggaga

SEQ ID NO: 160610 - DNA, 25 bp, Probe Sequence
aactggattatcaccttagcaactt

SEQ ID NO: 160611 - DNA, 25 bp, Probe Sequence
aactggtttgactctgtccaactct

SEQ ID NO: 160612 - DNA, 25 bp, Probe Sequence
aactgtgtttaatctccaaagccat

SEQ ID NO: 160613 - DNA, 25 bp, Probe Sequence
aagctctgttaagacctcaaagtaa

SEQ ID NO: 160614 - DNA, 25 bp, Probe Sequence
aagcctttaaccagtcttcaatcct

SEQ ID NO: 160615 - DNA, 25 bp, Probe Sequence
aagccgttaaacagagagttatctt

SEQ ID NO: 160616 - DNA, 25 bp, Probe Sequence
aaccgtgtacatctaagagccctct

SEQ ID NO: 160617 - DNA, 25 bp, Probe Sequence
aaccgggacagcgaagagcccttct

SEQ ID NO: 160618 - DNA, 25 bp, Probe Sequence
aactgcgggacaggaagtggccgta

SEQ ID NO: 160619 - DNA, 25 bp, Probe Sequence
aagcatgaggagaaccaccggcctt

SEQ ID NO: 160620 - DNA, 25 bp, Probe Sequence
aactggggtaacccctgatctctct

SEQ ID NO: 160621 - DNA, 25 bp, Probe Sequence
aactgttagaaacctccacattctt

SEQ ID NO: 160622 - DNA, 25 bp, Probe Sequence
aacgtagtgaaaccccatctgtata

SEQ ID NO: 160623 - DNA, 25 bp, Probe Sequence
aaccctggtggtccaccattggata

SEQ ID NO: 160624 - DNA, 25 bp, Probe Sequence
aaccctgtttcacaatctgtgcgga

SEQ ID NO: 160625 - DNA, 25 bp, Probe Sequence
aaccctgcctatcctgaatggtttg

SEQ ID NO: 160626 - DNA, 25 bp, Probe Sequence
aaccgccacagaactagaggtcttc

SEQ ID NO: 160627 - DNA, 25 bp, Probe Sequence
aactgccacctaaccatgaggactt

SEQ ID NO: 160628 - DNA, 25 bp, Probe Sequence
aagctgccacccaaggggaagcttc

SEQ ID NO: 160629 - DNA, 25 bp, Probe Sequence
aactgacctcactggaggctacgtc

SEQ ID NO: 160630 - DNA, 25 bp, Probe Sequence
aactgcagcccaacggggctgcctt

SEQ ID NO: 160631 - DNA, 25 bp, Probe Sequence
aactgcagcgcgagctggaggacgc

SEQ ID NO: 160632 - DNA, 25 bp, Probe Sequence
aactgcagcacgttagagcaaaaca

SEQ ID NO: 160633 - DNA, 25 bp, Probe Sequence
aacgagcctgtttcagaggaacatc

SEQ ID NO: 160634 - DNA, 25 bp, Probe Sequence
aacgactggtcaacgaggtcacctt

SEQ ID NO: 160635 - DNA, 25 bp, Probe Sequence
aactgtgtgattaaaaggtatactt

SEQ ID NO: 160636 - DNA, 25 bp, Probe Sequence
aactggaatcttcataggtcatatt

SEQ ID NO: 160637 - DNA, 25 bp, Probe Sequence
aactgaaactctcatatgttactgg

SEQ ID NO: 160638 - DNA, 25 bp, Probe Sequence
aaccacagttctgatacttcacgtt

SEQ ID NO: 160639 - DNA, 25 bp, Probe Sequence
aaccaagttttatattctgcaatgc

SEQ ID NO: 160640 - DNA, 25 bp, Probe Sequence
aaccctttgtatatttctgactgct

SEQ ID NO: 160641 - DNA, 25 bp, Probe Sequence
aacctttcttatattatctgaagat

SEQ ID NO: 160642 - DNA, 25 bp, Probe Sequence
aaccactctgttacatttaccgaat

SEQ ID NO: 160643 - DNA, 25 bp, Probe Sequence
aacccttgtttatcgccatgcaaat

SEQ ID NO: 160644 - DNA, 25 bp, Probe Sequence
aacgtctttagatgaccaagcaaaa

SEQ ID NO: 160645 - DNA, 25 bp, Probe Sequence
aaccgtttagtgaccaaagcaaatg

SEQ ID NO: 160646 - DNA, 25 bp, Probe Sequence
aaccgtgaagaggacttccgcaaag

SEQ ID NO: 160647 - DNA, 25 bp, Probe Sequence
aactggtagcaaatacttcccatat

SEQ ID NO: 160648 - DNA, 25 bp, Probe Sequence
aactggttgtcttatttcttctcat

SEQ ID NO: 160649 - DNA, 25 bp, Probe Sequence
aactgtgctagttgacactacttta

SEQ ID NO: 160650 - DNA, 25 bp, Probe Sequence
aacggatgatcttgagcactatttc

SEQ ID NO: 160651 - DNA, 25 bp, Probe Sequence
aactggatatcggagacgagtcatg

SEQ ID NO: 160652 - DNA, 25 bp, Probe Sequence
aagcggtatcctgattagtctaaca

SEQ ID NO: 160653 - DNA, 25 bp, Probe Sequence
aacggtcagcttgttggtgccaaga

SEQ ID NO: 160654 - DNA, 25 bp, Probe Sequence
aacgtctacattaatgtggagccaa

SEQ ID NO: 160655 - DNA, 25 bp, Probe Sequence
aacgatccatcttttaacagccgaa

SEQ ID NO: 160656 - DNA, 25 bp, Probe Sequence
aacgctccatctttttacagtggca

SEQ ID NO: 160657 - DNA, 25 bp, Probe Sequence
aacggctctctcttttataggtgta

SEQ ID NO: 160658 - DNA, 25 bp, Probe Sequence
aacggccattgagctttgggcctga

SEQ ID NO: 160659 - DNA, 25 bp, Probe Sequence
aacgagccttgagccagggagacaa

SEQ ID NO: 160660 - DNA, 25 bp, Probe Sequence
aacgattcttactcagtgtgatgta

SEQ ID NO: 160661 - DNA, 25 bp, Probe Sequence
aacgtctcatcttcccatagtaaag

SEQ ID NO: 160662 - DNA, 25 bp, Probe Sequence
aactgtctctttaaaagtgagaaga

SEQ ID NO: 160663 - DNA, 25 bp, Probe Sequence
aactggcctgatctaacaatgaaaa

SEQ ID NO: 160664 - DNA, 25 bp, Probe Sequence
aatctacaatggtctcaaaattaaa

SEQ ID NO: 160665 - DNA, 25 bp, Probe Sequence
aactgcaagatgggataaatactta

SEQ ID NO: 160666 - DNA, 25 bp, Probe Sequence
aactgacagatgttaaagctttctg

SEQ ID NO: 160667 - DNA, 25 bp, Probe Sequence
aactgcaagcagttaactctcttaa

SEQ ID NO: 160668 - DNA, 25 bp, Probe Sequence
aactgaacgcaaatcagccacttta

SEQ ID NO: 160669 - DNA, 25 bp, Probe Sequence
aacgttcagccattagcactcattt

SEQ ID NO: 160670 - DNA, 25 bp, Probe Sequence
aactgtatcacctttgccaagtaag

SEQ ID NO: 160671 - DNA, 25 bp, Probe Sequence
aactgcttccctatatagactagag

SEQ ID NO: 160672 - DNA, 25 bp, Probe Sequence
aactgcttctttaattcatccataa

SEQ ID NO: 160673 - DNA, 25 bp, Probe Sequence
aactgtactttgtaccctcacatac

SEQ ID NO: 160674 - DNA, 25 bp, Probe Sequence
aacgtattgttgtattcctccagtg

SEQ ID NO: 160675 - DNA, 25 bp, Probe Sequence
aactgatgctctgtgaattcttcct

SEQ ID NO: 160676 - DNA, 25 bp, Probe Sequence
aagctcatctccttgaattcagccc

SEQ ID NO: 160677 - DNA, 25 bp, Probe Sequence
aagcatgccttcgagatcatacacc

SEQ ID NO: 160678 - DNA, 25 bp, Probe Sequence
aactgcatctcttcagtgcaacagt

SEQ ID NO: 160679 - DNA, 25 bp, Probe Sequence
aactgcagctgtgcagcagacgcct

SEQ ID NO: 160680 - DNA, 25 bp, Probe Sequence
aactgcagctgtgcagcagacgcct

SEQ ID NO: 160681 - DNA, 25 bp, Probe Sequence
aactgcagcgcaggcacagtgacgt

SEQ ID NO: 160682 - DNA, 25 bp, Probe Sequence
aactgcactgcatctcactgcagtc

SEQ ID NO: 160683 - DNA, 25 bp, Probe Sequence
aacgtagcatgtggcatcgcagtct

SEQ ID NO: 160684 - DNA, 25 bp, Probe Sequence
aacgtaggcgtctgtgtttcgcaaa

SEQ ID NO: 160685 - DNA, 25 bp, Probe Sequence
aacgtggagcgtcttatattctgaa

SEQ ID NO: 160686 - DNA, 25 bp, Probe Sequence
aaccatggacgtcagaagactaaag

SEQ ID NO: 160687 - DNA, 25 bp, Probe Sequence
aaccatggcacgagaacaactacgt

SEQ ID NO: 160688 - DNA, 25 bp, Probe Sequence
aacctggaaaggaacacactcatcg

SEQ ID NO: 160689 - DNA, 25 bp, Probe Sequence
aaccgcgagaagatgacccagatca

SEQ ID NO: 160690 - DNA, 25 bp, Probe Sequence
aacggagaggtgaatccccagtacg

SEQ ID NO: 160691 - DNA, 25 bp, Probe Sequence
aacgaggatgggaacaactgagtca

SEQ ID NO: 160692 - DNA, 25 bp, Probe Sequence
aacgatggcaggcattcctctgagt

SEQ ID NO: 160693 - DNA, 25 bp, Probe Sequence
aactgggaggcttatctcactgagt

SEQ ID NO: 160694 - DNA, 25 bp, Probe Sequence
aactggcgggtattctggtcattga

SEQ ID NO: 160695 - DNA, 25 bp, Probe Sequence
aactggagaggattcttttgcattg

SEQ ID NO: 160696 - DNA, 25 bp, Probe Sequence
aacgctggaagtcgtttggcttgtg

SEQ ID NO: 160697 - DNA, 25 bp, Probe Sequence
aacctggaaaagctgttgctgctat

SEQ ID NO: 160698 - DNA, 25 bp, Probe Sequence
aacctagaaggtatgtgtgattatt

SEQ ID NO: 160699 - DNA, 25 bp, Probe Sequence
aacgtgaaggggatggcgagctgca

SEQ ID NO: 160700 - DNA, 25 bp, Probe Sequence
aacctgcatagccggtgggtgagga

SEQ ID NO: 160701 - DNA, 25 bp, Probe Sequence
aagcaacgaggagggctcggaggag

SEQ ID NO: 160702 - DNA, 25 bp, Probe Sequence
aagccaagtggaggtgactggtgga

SEQ ID NO: 160703 - DNA, 25 bp, Probe Sequence
aaccaactcagaaattcgtgggaat

SEQ ID NO: 160704 - DNA, 25 bp, Probe Sequence
aactgacaccaaagaatttgtgaga

SEQ ID NO: 160705 - DNA, 25 bp, Probe Sequence
aactgagagtagagtgcttagttga

SEQ ID NO: 160706 - DNA, 25 bp, Probe Sequence
aacgcagagcaagggctgtgttttg

SEQ ID NO: 160707 - DNA, 25 bp, Probe Sequence
aacgtggcagagggcgctttaactt

SEQ ID NO: 160708 - DNA, 25 bp, Probe Sequence
aacgctgagttgtgccttgtagaat

SEQ ID NO: 160709 - DNA, 25 bp, Probe Sequence
aactgtcatattgctgtcttgtata

SEQ ID NO: 160710 - DNA, 25 bp, Probe Sequence
aactgtctaatattgccatgtgaat

SEQ ID NO: 160711 - DNA, 25 bp, Probe Sequence
aactgtgtaatttgttcaagataat

SEQ ID NO: 160712 - DNA, 25 bp, Probe Sequence
aactgtgatttttctgaacacaata

SEQ ID NO: 160713 - DNA, 25 bp, Probe Sequence
aactgatgactattatcttcataca

SEQ ID NO: 160714 - DNA, 25 bp, Probe Sequence
aagctgaaatatggccagactatca

SEQ ID NO: 160715 - DNA, 25 bp, Probe Sequence
aactgataatcggaagacatataaa

SEQ ID NO: 160716 - DNA, 25 bp, Probe Sequence
aacctagagcggtgacatgaaaata

SEQ ID NO: 160717 - DNA, 25 bp, Probe Sequence
aacctagggctgcaattcaaccatg

SEQ ID NO: 160718 - DNA, 25 bp, Probe Sequence
aacctatgggctgcccaacacactg

SEQ ID NO: 160719 - DNA, 25 bp, Probe Sequence
aacctagtggtggctcctcaaagaa

SEQ ID NO: 160720 - DNA, 25 bp, Probe Sequence
aacctgctatcttggttccaaaaca

SEQ ID NO: 160721 - DNA, 25 bp, Probe Sequence
aacctgactctcagttccaatatcc

SEQ ID NO: 160722 - DNA, 25 bp, Probe Sequence
aacccaatgctgcagttcctgatga

SEQ ID NO: 160723 - DNA, 25 bp, Probe Sequence
aacccagcatcaggcagaccttagg

SEQ ID NO: 160724 - DNA, 25 bp, Probe Sequence
aacccgctacagacaagctttctgg

SEQ ID NO: 160725 - DNA, 25 bp, Probe Sequence
aaccggctacaccaagttgacttgg

SEQ ID NO: 160726 - DNA, 25 bp, Probe Sequence
aacggtgccacagaactgatccttg

SEQ ID NO: 160727 - DNA, 25 bp, Probe Sequence
aactggttccatgtactgtgaactt

SEQ ID NO: 160728 - DNA, 25 bp, Probe Sequence
aagtagtccaccttcatttaactct

SEQ ID NO: 160729 - DNA, 25 bp, Probe Sequence
aagcagagtccagctttttaaagat

SEQ ID NO: 160730 - DNA, 25 bp, Probe Sequence
aactgagtagcatgctttattaagc

SEQ ID NO: 160731 - DNA, 25 bp, Probe Sequence
aactgacagcagtgcttacatcaaa

SEQ ID NO: 160732 - DNA, 25 bp, Probe Sequence
aagcatccagaccacaaatgcagga

SEQ ID NO: 160733 - DNA, 25 bp, Probe Sequence
aactgacatcagaatcaaagagaga

SEQ ID NO: 160734 - DNA, 25 bp, Probe Sequence
aactgttccatataagagagactaa

SEQ ID NO: 160735 - DNA, 25 bp, Probe Sequence
aacctggtcatgtgacaagaaccca

SEQ ID NO: 160736 - DNA, 25 bp, Probe Sequence
aacctctggatcgagaaagtgaccc

SEQ ID NO: 160737 - DNA, 25 bp, Probe Sequence
aactgtctgtcttagaattcccctc

SEQ ID NO: 160738 - DNA, 25 bp, Probe Sequence
aactggtgtgagtcaaatgccccct

SEQ ID NO: 160739 - DNA, 25 bp, Probe Sequence
aactggtgtgagtcaaatgccccct

SEQ ID NO: 160740 - DNA, 25 bp, Probe Sequence
aactgtggtgtgtaaactactctta

SEQ ID NO: 160741 - DNA, 25 bp, Probe Sequence
aactgtcgtcaataaggatgtcttc

SEQ ID NO: 160742 - DNA, 25 bp, Probe Sequence
aactgttgtaactatgaaatgctta

SEQ ID NO: 160743 - DNA, 25 bp, Probe Sequence
aactgtatgtctataggacatccta

SEQ ID NO: 160744 - DNA, 25 bp, Probe Sequence
aacgtcagttcagtagtggtctcaa

SEQ ID NO: 160745 - DNA, 25 bp, Probe Sequence
aacggagttcaaaggctgctggcca

SEQ ID NO: 160746 - DNA, 25 bp, Probe Sequence
aacggacattcagatagcgctccct

SEQ ID NO: 160747 - DNA, 25 bp, Probe Sequence
aatcctgacacttcacaatgcttcc

SEQ ID NO: 160748 - DNA, 25 bp, Probe Sequence
aaccatgaggcttctcattctcacc

SEQ ID NO: 160749 - DNA, 25 bp, Probe Sequence
aacgctgggcttcaacatcaagacc

SEQ ID NO: 160750 - DNA, 25 bp, Probe Sequence
aacgtgatggcaacaaactcataga

SEQ ID NO: 160751 - DNA, 25 bp, Probe Sequence
aacccaggcaaccagactgcagatt

SEQ ID NO: 160752 - DNA, 25 bp, Probe Sequence
aacccatgccatgccaaactatatt

SEQ ID NO: 160753 - DNA, 25 bp, Probe Sequence
aaccagagagtgtgaaactagtttc

SEQ ID NO: 160754 - DNA, 25 bp, Probe Sequence
aagcgaaagtggtatcatcctaggt

SEQ ID NO: 160755 - DNA, 25 bp, Probe Sequence
aagcctttgctactccatcagtagg

SEQ ID NO: 160756 - DNA, 25 bp, Probe Sequence
aacctttctactgctgagctgtggc

SEQ ID NO: 160757 - DNA, 25 bp, Probe Sequence
aacctgttttcgctgtgtgtggcgg

SEQ ID NO: 160758 - DNA, 25 bp, Probe Sequence
aacgttttatccttgtgggtcagat

SEQ ID NO: 160759 - DNA, 25 bp, Probe Sequence
aacgctttgaagtacttgggccagg

SEQ ID NO: 160760 - DNA, 25 bp, Probe Sequence
aagcgtttaaatgctatttgtagtc

SEQ ID NO: 160761 - DNA, 25 bp, Probe Sequence
aactggtcataattcctgtctgtgt

SEQ ID NO: 160762 - DNA, 25 bp, Probe Sequence
aactgggcataatgacattttcttt

SEQ ID NO: 160763 - DNA, 25 bp, Probe Sequence
aactggagctatgacactttttatt

SEQ ID NO: 160764 - DNA, 25 bp, Probe Sequence
aactggaacatagctttcctgattt

SEQ ID NO: 160765 - DNA, 25 bp, Probe Sequence
aatcctataccagctttttgtttgt

SEQ ID NO: 160766 - DNA, 25 bp, Probe Sequence
aaccatctgaaagcaacttttttgg

SEQ ID NO: 160767 - DNA, 25 bp, Probe Sequence
aacgtcttacaactcagttgttttg

SEQ ID NO: 160768 - DNA, 25 bp, Probe Sequence
aactgtgtgtacaccagggatctgt

SEQ ID NO: 160769 - DNA, 25 bp, Probe Sequence
aactggtgtagctgcaaggattgag

SEQ ID NO: 160770 - DNA, 25 bp, Probe Sequence
aactgtgtgttctccatggtcatag

SEQ ID NO: 160771 - DNA, 25 bp, Probe Sequence
aacctgttttccgggcatcatagta

SEQ ID NO: 160772 - DNA, 25 bp, Probe Sequence
aacccattttgtgccacatgcaagt

SEQ ID NO: 160773 - DNA, 25 bp, Probe Sequence
aaccgattggtgacatctccatgct

SEQ ID NO: 160774 - DNA, 25 bp, Probe Sequence
aactggtttgtgtatcatatcatat

SEQ ID NO: 160775 - DNA, 25 bp, Probe Sequence
aactgtactgtttgccattattaca

SEQ ID NO: 160776 - DNA, 25 bp, Probe Sequence
aactgataagttgccttatgtcacc

SEQ ID NO: 160777 - DNA, 25 bp, Probe Sequence
aactgtaagtgtgtcatgtggctct

SEQ ID NO: 160778 - DNA, 25 bp, Probe Sequence
aactggaagttgacagcttggctgc

SEQ ID NO: 160779 - DNA, 25 bp, Probe Sequence
aactggaagttggcacttagcaggc

SEQ ID NO: 160780 - DNA, 25 bp, Probe Sequence
aacgaacagcctgacacatacgcac

SEQ ID NO: 160781 - DNA, 25 bp, Probe Sequence
aactggagcccttgcaaaaacacgg

SEQ ID NO: 160782 - DNA, 25 bp, Probe Sequence
aactggcaggaaatgcatcaaaaga

SEQ ID NO: 160783 - DNA, 25 bp, Probe Sequence
aactgtgggctttgctgaaggatga

SEQ ID NO: 160784 - DNA, 25 bp, Probe Sequence
aacgtagagcgcgtgctgaagagtg

SEQ ID NO: 160785 - DNA, 25 bp, Probe Sequence
aacctacttcaggccagatgcagtg

SEQ ID NO: 160786 - DNA, 25 bp, Probe Sequence
aacctacccagcaaagaagcatagc

SEQ ID NO: 160787 - DNA, 25 bp, Probe Sequence
aacccacacctctggaagatacctt

SEQ ID NO: 160788 - DNA, 25 bp, Probe Sequence
aagcctaagccctggtctaaacgct

SEQ ID NO: 160789 - DNA, 25 bp, Probe Sequence
aacccagagccctggaacaaactgg

SEQ ID NO: 160790 - DNA, 25 bp, Probe Sequence
aaccaccagccgttaaaaatgagtg

SEQ ID NO: 160791 - DNA, 25 bp, Probe Sequence
aaccgttcacgattcaataaatatt

SEQ ID NO: 160792 - DNA, 25 bp, Probe Sequence
aaccttatgacttacgtaatcgata

SEQ ID NO: 160793 - DNA, 25 bp, Probe Sequence
aacgctcttgaaacaagtaatgact

SEQ ID NO: 160794 - DNA, 25 bp, Probe Sequence
aaccacttgagaaggcattaagccc

SEQ ID NO: 160795 - DNA, 25 bp, Probe Sequence
aacgtttcagagatgcattttggcc

SEQ ID NO: 160796 - DNA, 25 bp, Probe Sequence
aacgcttgtagaactcactctgggc

SEQ ID NO: 160797 - DNA, 25 bp, Probe Sequence
aacctgtgtatgcttatgcctgggc

SEQ ID NO: 160798 - DNA, 25 bp, Probe Sequence
aacctgatggaccagtacagcgagg

SEQ ID NO: 160799 - DNA, 25 bp, Probe Sequence
aaccaatatatcgtgtatccgaaaa

SEQ ID NO: 160800 - DNA, 25 bp, Probe Sequence
aacccataatccagctgaacaaaga

SEQ ID NO: 160801 - DNA, 25 bp, Probe Sequence
aaccgcaaagccatcgtggaaagag

SEQ ID NO: 160802 - DNA, 25 bp, Probe Sequence
aatctcccaagtgctctgggaaggc

SEQ ID NO: 160803 - DNA, 25 bp, Probe Sequence
aaccccttatatattggaagtgcca

SEQ ID NO: 160804 - DNA, 25 bp, Probe Sequence
aaccccaggaagatttcaaggcagg

SEQ ID NO: 160805 - DNA, 25 bp, Probe Sequence
aacgactcgaaaattgtccaagaag

SEQ ID NO: 160806 - DNA, 25 bp, Probe Sequence
aaccactccaaaatcgtcgcagggg

SEQ ID NO: 160807 - DNA, 25 bp, Probe Sequence
aaccttccctgaataggccaggtgc

SEQ ID NO: 160808 - DNA, 25 bp, Probe Sequence
aacgtgtccattatcctgaagttgc

SEQ ID NO: 160809 - DNA, 25 bp, Probe Sequence
aacgtgatacagctttctggaaatc

SEQ ID NO: 160810 - DNA, 25 bp, Probe Sequence
aagccgtacacctgtctgaaatgtg

SEQ ID NO: 160811 - DNA, 25 bp, Probe Sequence
aacctgttcctattggtgcagagag

SEQ ID NO: 160812 - DNA, 25 bp, Probe Sequence
aaccattgtgactattgttggtcaa

SEQ ID NO: 160813 - DNA, 25 bp, Probe Sequence
aaccctgagatatctggtgaacaga

SEQ ID NO: 160814 - DNA, 25 bp, Probe Sequence
aaccactggctgatcgggacagaca

SEQ ID NO: 160815 - DNA, 25 bp, Probe Sequence
aacccgcctcacaagtgcgaagtct

SEQ ID NO: 160816 - DNA, 25 bp, Probe Sequence
aaccatgcctccattgggaagtcta

SEQ ID NO: 160817 - DNA, 25 bp, Probe Sequence
aacctaccacttgtggaagtgctta

SEQ ID NO: 160818 - DNA, 25 bp, Probe Sequence
aacccacagtccattgtgaagtgtg

SEQ ID NO: 160819 - DNA, 25 bp, Probe Sequence
aacgctcactccgaattagcggtgt

SEQ ID NO: 160820 - DNA, 25 bp, Probe Sequence
aacgctcactccgaattagcggtgt

SEQ ID NO: 160821 - DNA, 25 bp, Probe Sequence
aagcttcaaggcaaaaatcgttgtc

SEQ ID NO: 160822 - DNA, 25 bp, Probe Sequence
aacctcaaggagtacaacctggtct

SEQ ID NO: 160823 - DNA, 25 bp, Probe Sequence
aacctcaatgggtccaggcagcggt

SEQ ID NO: 160824 - DNA, 25 bp, Probe Sequence
aaccgccattgtcatcatggcccgt

SEQ ID NO: 160825 - DNA, 25 bp, Probe Sequence
aaccctgcatgacttgatcatggct

SEQ ID NO: 160826 - DNA, 25 bp, Probe Sequence
aaccctggcacaggtcatgtctgca

SEQ ID NO: 160827 - DNA, 25 bp, Probe Sequence
aaccgtggtcaggatcatttgctct

SEQ ID NO: 160828 - DNA, 25 bp, Probe Sequence
aagacattggaacactatacctatt

SEQ ID NO: 160829 - DNA, 25 bp, Probe Sequence
aaccatgtggttaacttacacttat

SEQ ID NO: 160830 - DNA, 25 bp, Probe Sequence
aaccttgcctcatagcttaaagtat

SEQ ID NO: 160831 - DNA, 25 bp, Probe Sequence
aacctacacctgtgctattaccaca

SEQ ID NO: 160832 - DNA, 25 bp, Probe Sequence
aaccccacctacaagatgtacgaag

SEQ ID NO: 160833 - DNA, 25 bp, Probe Sequence
aaccacccctaagcatgttacaagc

SEQ ID NO: 160834 - DNA, 25 bp, Probe Sequence
aaccccgtgttagagcattagcaga

SEQ ID NO: 160835 - DNA, 25 bp, Probe Sequence
aaccccagtgttttacatatctgtt

SEQ ID NO: 160836 - DNA, 25 bp, Probe Sequence
aaccaccatggaccagaagtctctc

SEQ ID NO: 160837 - DNA, 25 bp, Probe Sequence
aacgcaggcaaacctgaggtcctca

SEQ ID NO: 160838 - DNA, 25 bp, Probe Sequence
aacgagcaaaagacttctctcccaa

SEQ ID NO: 160839 - DNA, 25 bp, Probe Sequence
aactgtgcaatttgttctttctcca

SEQ ID NO: 160840 - DNA, 25 bp, Probe Sequence
aacctgaagtatatttccatccata

SEQ ID NO: 160841 - DNA, 25 bp, Probe Sequence
aacctaattacttttgtgcctctca

SEQ ID NO: 160842 - DNA, 25 bp, Probe Sequence
aacctgaatttttagatagctcctc

SEQ ID NO: 160843 - DNA, 25 bp, Probe Sequence
aaccgtgatttaaacatagctccga

SEQ ID NO: 160844 - DNA, 25 bp, Probe Sequence
aacccgatggtaatcaatgccaccc

SEQ ID NO: 160845 - DNA, 25 bp, Probe Sequence
aacccaaggtcatcattgtccaggc

SEQ ID NO: 160846 - DNA, 25 bp, Probe Sequence
aacccaaggtgataatcatccaggc

SEQ ID NO: 160847 - DNA, 25 bp, Probe Sequence
aacccaccttgtgaatctctatggt

SEQ ID NO: 160848 - DNA, 25 bp, Probe Sequence
aaccacccggggctgctgctgatgg

SEQ ID NO: 160849 - DNA, 25 bp, Probe Sequence
aaccctacatgatggggctctgtgc

SEQ ID NO: 160850 - DNA, 25 bp, Probe Sequence
aaccctctgagttgcagtaccatta

SEQ ID NO: 160851 - DNA, 25 bp, Probe Sequence
aaccgctgcttgaaagatactgact

SEQ ID NO: 160852 - DNA, 25 bp, Probe Sequence
aagcggctgctcgaacagattgcga

SEQ ID NO: 160853 - DNA, 25 bp, Probe Sequence
aacgagctgcatggggagaagctgg

SEQ ID NO: 160854 - DNA, 25 bp, Probe Sequence
aacgactacgtgaagaatggaacta

SEQ ID NO: 160855 - DNA, 25 bp, Probe Sequence
aagctgacattgccaaaaaggatac

SEQ ID NO: 160856 - DNA, 25 bp, Probe Sequence
aagcattattaccaaagagtcaaaa

SEQ ID NO: 160857 - DNA, 25 bp, Probe Sequence
aaccatgatcttgaaagtgccaaaa

SEQ ID NO: 160858 - DNA, 25 bp, Probe Sequence
aacgcagacttcgacaagttgagaa

SEQ ID NO: 160859 - DNA, 25 bp, Probe Sequence
aacgcgagcgtttaagagagagaat

SEQ ID NO: 160860 - DNA, 25 bp, Probe Sequence
aacctgcagcgagagagaagaggac

SEQ ID NO: 160861 - DNA, 25 bp, Probe Sequence
aacctactccattgataacgaggcc

SEQ ID NO: 160862 - DNA, 25 bp, Probe Sequence
aacctattccaactgttcatcggct

SEQ ID NO: 160863 - DNA, 25 bp, Probe Sequence
aacctttgcaaaccttcaagctgtg

SEQ ID NO: 160864 - DNA, 25 bp, Probe Sequence
aacgtcttgaaacttaaactctgtg

SEQ ID NO: 160865 - DNA, 25 bp, Probe Sequence
aaccatttaatgtgtacaattctgt

SEQ ID NO: 160866 - DNA, 25 bp, Probe Sequence
aagccaataaagtgatacacccgaa

SEQ ID NO: 160867 - DNA, 25 bp, Probe Sequence
aaccttggctgatggaaatcccgta

SEQ ID NO: 160868 - DNA, 25 bp, Probe Sequence
aagccattacgtatgaactcatccg

SEQ ID NO: 160869 - DNA, 25 bp, Probe Sequence
aaccttactggaatcaagccctgca

SEQ ID NO: 160870 - DNA, 25 bp, Probe Sequence
aaccaggtggagatcaagcccgaga

SEQ ID NO: 160871 - DNA, 25 bp, Probe Sequence
aacgcagggtaaacgggctgtgtga

SEQ ID NO: 160872 - DNA, 25 bp, Probe Sequence
aatcgcggtgcgacgaaggagtagg

SEQ ID NO: 160873 - DNA, 25 bp, Probe Sequence
aacgcaagggtacagaagtgcaggt

SEQ ID NO: 160874 - DNA, 25 bp, Probe Sequence
aaccaatgggttctgaagcttgtcc

SEQ ID NO: 160875 - DNA, 25 bp, Probe Sequence
aacgcaaggcgttattccagttcat

SEQ ID NO: 160876 - DNA, 25 bp, Probe Sequence
aaccacattgtgcaaaccttctctc

SEQ ID NO: 160877 - DNA, 25 bp, Probe Sequence
aacccatagccaatagagttttctc

SEQ ID NO: 160878 - DNA, 25 bp, Probe Sequence
aacccaaccatacagtgctaatctt

SEQ ID NO: 160879 - DNA, 25 bp, Probe Sequence
aacgtaactcaaccagtatatattt

SEQ ID NO: 160880 - DNA, 25 bp, Probe Sequence
aacctagatgtatacagctctgagt

SEQ ID NO: 160881 - DNA, 25 bp, Probe Sequence
aacctgaaaatcaagcagtatgaga

SEQ ID NO: 160882 - DNA, 25 bp, Probe Sequence
aaccatgtatattcaccactaggac

SEQ ID NO: 160883 - DNA, 25 bp, Probe Sequence
aaccctgaaaactacatcaccatgg

SEQ ID NO: 160884 - DNA, 25 bp, Probe Sequence
aaccctcagaagacttcagccacta

SEQ ID NO: 160885 - DNA, 25 bp, Probe Sequence
aaccctagacatgctacagaaaaca

SEQ ID NO: 160886 - DNA, 25 bp, Probe Sequence
aaccctgaggctgcagtcgcagaag

SEQ ID NO: 160887 - DNA, 25 bp, Probe Sequence
aacgctcagaaggtagcctcagagg

SEQ ID NO: 160888 - DNA, 25 bp, Probe Sequence
aacggcagaatgcctaccgtgctgc

SEQ ID NO: 160889 - DNA, 25 bp, Probe Sequence
aacgcgaaattctatcccgtgacca

SEQ ID NO: 160890 - DNA, 25 bp, Probe Sequence
aaccagaacttcgcctggagaacag

SEQ ID NO: 160891 - DNA, 25 bp, Probe Sequence
aagccaacactagacctttgaaaag

SEQ ID NO: 160892 - DNA, 25 bp, Probe Sequence
aagccaagacatttgacctttgaca

SEQ ID NO: 160893 - DNA, 25 bp, Probe Sequence
aagccaaaagcagtgggccttcaac

SEQ ID NO: 160894 - DNA, 25 bp, Probe Sequence
aatccaaaagactcaccttgcaaaa

SEQ ID NO: 160895 - DNA, 25 bp, Probe Sequence
aacccttagaagccaccatagagaa

SEQ ID NO: 160896 - DNA, 25 bp, Probe Sequence
aacccttacaaattcgaagaatgtg

SEQ ID NO: 160897 - DNA, 25 bp, Probe Sequence
aacctctttaaatcttcagaatgat

SEQ ID NO: 160898 - DNA, 25 bp, Probe Sequence
aacccatttgaggttcttcagatag

SEQ ID NO: 160899 - DNA, 25 bp, Probe Sequence
aacccatctcggcttttgcagatga

SEQ ID NO: 160900 - DNA, 25 bp, Probe Sequence
aaccgacctgaggtttcagagcgca

SEQ ID NO: 160901 - DNA, 25 bp, Probe Sequence
aaccagcacctgcgtctggatgact

SEQ ID NO: 160902 - DNA, 25 bp, Probe Sequence
aaccgaagcagctgatcagaatggc

SEQ ID NO: 160903 - DNA, 25 bp, Probe Sequence
aacgcagaaggctgaaggagcatga

SEQ ID NO: 160904 - DNA, 25 bp, Probe Sequence
aaccagtatcgctcatagatcagca

SEQ ID NO: 160905 - DNA, 25 bp, Probe Sequence
aaccatgcagaggcccagagacatg

SEQ ID NO: 160906 - DNA, 25 bp, Probe Sequence
aacgagcaagcagtcagcacagcct

SEQ ID NO: 160907 - DNA, 25 bp, Probe Sequence
aacgagcgaagatgagcacccaaaa

SEQ ID NO: 160908 - DNA, 25 bp, Probe Sequence
aacggacaatggtcagaaccaccaa

SEQ ID NO: 160909 - DNA, 25 bp, Probe Sequence
aacggatacatactggaaccctgaa

SEQ ID NO: 160910 - DNA, 25 bp, Probe Sequence
aacggaacgagacaagaatcagagc

SEQ ID NO: 160911 - DNA, 25 bp, Probe Sequence
aactggcccaagtcggaaacagagc

SEQ ID NO: 160912 - DNA, 25 bp, Probe Sequence
aagcggcttcaatctggaagaactg

SEQ ID NO: 160913 - DNA, 25 bp, Probe Sequence
aagcagtgttcacacgggagccagc

SEQ ID NO: 160914 - DNA, 25 bp, Probe Sequence
aagcttgacgcaccaagcggaactg

SEQ ID NO: 160915 - DNA, 25 bp, Probe Sequence
aaccatgacctgaaacctcagcgtg

SEQ ID NO: 160916 - DNA, 25 bp, Probe Sequence
aacctgcacctaaagtctcagctgc

SEQ ID NO: 160917 - DNA, 25 bp, Probe Sequence
aaccgcctcatgcaggtgtggtgcg

SEQ ID NO: 160918 - DNA, 25 bp, Probe Sequence
aactggcagccattgggtgtggggg

SEQ ID NO: 160919 - DNA, 25 bp, Probe Sequence
aacgcatctgcagatgccgggggcg

SEQ ID NO: 160920 - DNA, 25 bp, Probe Sequence
aagccactagaaccaaggcccagct

SEQ ID NO: 160921 - DNA, 25 bp, Probe Sequence
aagctactgaagtgcagttcccgcc

SEQ ID NO: 160922 - DNA, 25 bp, Probe Sequence
aagctactgaagtgcagttcccgcc

SEQ ID NO: 160923 - DNA, 25 bp, Probe Sequence
aagtcagtgaagatggaaccaaagc

SEQ ID NO: 160924 - DNA, 25 bp, Probe Sequence
aatccaagtgaataaaccaagagct

SEQ ID NO: 160925 - DNA, 25 bp, Probe Sequence
aaccatggctgaagaacaaccgcag

SEQ ID NO: 160926 - DNA, 25 bp, Probe Sequence
aacgatatctaaagcttaccagcaa

SEQ ID NO: 160927 - DNA, 25 bp, Probe Sequence
aacgagactacaagcaaaccagtgc

SEQ ID NO: 160928 - DNA, 25 bp, Probe Sequence
aactggactctcgtgcagaaaatgt

SEQ ID NO: 160929 - DNA, 25 bp, Probe Sequence
aactggactgtcctctacagaagga

SEQ ID NO: 160930 - DNA, 25 bp, Probe Sequence
aactggactgacctaaacgtggaat

SEQ ID NO: 160931 - DNA, 25 bp, Probe Sequence
aagttacagtcaatgggccgtggaa

SEQ ID NO: 160932 - DNA, 25 bp, Probe Sequence
aagcgttcagtgatgtggggtgaaa

SEQ ID NO: 160933 - DNA, 25 bp, Probe Sequence
aatggttagcagaagggagaaaaga

SEQ ID NO: 160934 - DNA, 25 bp, Probe Sequence
aatagtgtacagttggggagtacat

SEQ ID NO: 160935 - DNA, 25 bp, Probe Sequence
aatagcctagtctggggagtcttcc

SEQ ID NO: 160936 - DNA, 25 bp, Probe Sequence
aagagcactggtgtgggggttccac

SEQ ID NO: 160937 - DNA, 25 bp, Probe Sequence
aagagcactggtgtgggggttccac

SEQ ID NO: 160938 - DNA, 25 bp, Probe Sequence
aagacctggtgtcccagggcttcac

SEQ ID NO: 160939 - DNA, 25 bp, Probe Sequence
aacccatgggatcagagccagttcc

SEQ ID NO: 160940 - DNA, 25 bp, Probe Sequence
aaccaaggtggctatggcggttcca

SEQ ID NO: 160941 - DNA, 25 bp, Probe Sequence
aaccaaggtggctatggcggttcca

SEQ ID NO: 160942 - DNA, 25 bp, Probe Sequence
aaccaaggttgctcaggagattcct

SEQ ID NO: 160943 - DNA, 25 bp, Probe Sequence
caacgcaacgtctaactggacttcc

SEQ ID NO: 160944 - DNA, 25 bp, Probe Sequence
aaccaacctcagaagaggcaccttc

SEQ ID NO: 160945 - DNA, 25 bp, Probe Sequence
aaccgatcaaagaagaccagtttct

SEQ ID NO: 160946 - DNA, 25 bp, Probe Sequence
aacgcttcaaagaggcaaataactt

SEQ ID NO: 160947 - DNA, 25 bp, Probe Sequence
aaccattagaaagggctcattaagc

SEQ ID NO: 160948 - DNA, 25 bp, Probe Sequence
aaccccagcaaagcgctgttcgagg

SEQ ID NO: 160949 - DNA, 25 bp, Probe Sequence
aacccaagagggcagctgttgcagc

SEQ ID NO: 160950 - DNA, 25 bp, Probe Sequence
aacccaagaggtccaaggctgcagt

SEQ ID NO: 160951 - DNA, 25 bp, Probe Sequence
aagcctataggaatgggaggtactt

SEQ ID NO: 160952 - DNA, 25 bp, Probe Sequence
aaggctaaggaagagtgtttcactc

SEQ ID NO: 160953 - DNA, 25 bp, Probe Sequence
aacgtttggtgaatatgctgtttcc

SEQ ID NO: 160954 - DNA, 25 bp, Probe Sequence
aacgtgccggagattgctgtgtacc

SEQ ID NO: 160955 - DNA, 25 bp, Probe Sequence
aacgttctggcagctaatgtccacc

SEQ ID NO: 160956 - DNA, 25 bp, Probe Sequence
aaccaattggatgcatatatgtcga

SEQ ID NO: 160957 - DNA, 25 bp, Probe Sequence
aaccatatggggactatagtgcaac

SEQ ID NO: 160958 - DNA, 25 bp, Probe Sequence
aacctctgtggtccgtaggagccac

SEQ ID NO: 160959 - DNA, 25 bp, Probe Sequence
aaccgcgtggccctgaagggcaaca

SEQ ID NO: 160960 - DNA, 25 bp, Probe Sequence
aaccggtgcgtcctgaggagagaac

SEQ ID NO: 160961 - DNA, 25 bp, Probe Sequence
aacctggtgctcaggagcgaaggac

SEQ ID NO: 160962 - DNA, 25 bp, Probe Sequence
aacctctgcgccatgagagccaagt

SEQ ID NO: 160963 - DNA, 25 bp, Probe Sequence
aacccatcttgcaggacgacattga

SEQ ID NO: 160964 - DNA, 25 bp, Probe Sequence
aacccttggtcacatgtgacatgtc

SEQ ID NO: 160965 - DNA, 25 bp, Probe Sequence
aaccgcttcatgccactgaatacgt

SEQ ID NO: 160966 - DNA, 25 bp, Probe Sequence
aacgtcattcagccctagaagcatg

SEQ ID NO: 160967 - DNA, 25 bp, Probe Sequence
aacgtcagttgatgctggaacatga

SEQ ID NO: 160968 - DNA, 25 bp, Probe Sequence
aacccaattcattctgtaacatatt

SEQ ID NO: 160969 - DNA, 25 bp, Probe Sequence
aagcccatatagatcgttacaaccg

SEQ ID NO: 160970 - DNA, 25 bp, Probe Sequence
aacctcgatattgagcgtccaacct

SEQ ID NO: 160971 - DNA, 25 bp, Probe Sequence
aacgcccatgatagtagcttcaaac

SEQ ID NO: 160972 - DNA, 25 bp, Probe Sequence
aaccccaaagaattatgcacataga

SEQ ID NO: 160973 - DNA, 25 bp, Probe Sequence
aaccgacaaagatcatatccatgtg

SEQ ID NO: 160974 - DNA, 25 bp, Probe Sequence
aaccgtcgagattacaatgctctag

SEQ ID NO: 160975 - DNA, 25 bp, Probe Sequence
aaccgtcgagattacaatgctctag

SEQ ID NO: 160976 - DNA, 25 bp, Probe Sequence
aacgtgtctctttaaagctgctatg

SEQ ID NO: 160977 - DNA, 25 bp, Probe Sequence
aacgcttttctgtacagagtcttac

SEQ ID NO: 160978 - DNA, 25 bp, Probe Sequence
aacgcttcttatgtagagtttttat

SEQ ID NO: 160979 - DNA, 25 bp, Probe Sequence
aacgttctatgaatttcgtacttat

SEQ ID NO: 160980 - DNA, 25 bp, Probe Sequence
aacctattagtttgctcctcactat

SEQ ID NO: 160981 - DNA, 25 bp, Probe Sequence
aacctaaaggcttggcgtcaggctt

SEQ ID NO: 160982 - DNA, 25 bp, Probe Sequence
aaccattacagcctaaataaagctt

SEQ ID NO: 160983 - DNA, 25 bp, Probe Sequence
aacccaacaggttcaaacacagcca

SEQ ID NO: 160984 - DNA, 25 bp, Probe Sequence
aacccacacacaaagcaaaaactca

SEQ ID NO: 160985 - DNA, 25 bp, Probe Sequence
aacctcagcaacaaacaatacaccc

SEQ ID NO: 160986 - DNA, 25 bp, Probe Sequence
aacccatacataagaaacagcctcc

SEQ ID NO: 160987 - DNA, 25 bp, Probe Sequence
aaccttgataagtaaacagcagctg

SEQ ID NO: 160988 - DNA, 25 bp, Probe Sequence
aacctcctagagaagcacaactgtc

SEQ ID NO: 160989 - DNA, 25 bp, Probe Sequence
aaccgccttattagccagattgtgt

SEQ ID NO: 160990 - DNA, 25 bp, Probe Sequence
aaccctgtatttcccttatgatgtc

SEQ ID NO: 160991 - DNA, 25 bp, Probe Sequence
aaccctatgtatgcaccattaatat

SEQ ID NO: 160992 - DNA, 25 bp, Probe Sequence
aaccctatctagtcaactgggcata

SEQ ID NO: 160993 - DNA, 25 bp, Probe Sequence
aaccctatctagtcaactgggcata

SEQ ID NO: 160994 - DNA, 25 bp, Probe Sequence
aaccctacgagtgcaatggctgtga

SEQ ID NO: 160995 - DNA, 25 bp, Probe Sequence
aacccaacggatggtctgtgctggc

SEQ ID NO: 160996 - DNA, 25 bp, Probe Sequence
aaccgcaatagtgactctgtgcttg

SEQ ID NO: 160997 - DNA, 25 bp, Probe Sequence
aacccataagatgatctgtgccggc

SEQ ID NO: 160998 - DNA, 25 bp, Probe Sequence
aacccataagtcaatttgctattca

SEQ ID NO: 160999 - DNA, 25 bp, Probe Sequence
aacccagacttaatcttgaatgata

SEQ ID NO: 161000 - DNA, 25 bp, Probe Sequence
aacccagacttaatcttgaatgata

SEQ ID NO: 161001 - DNA, 25 bp, Probe Sequence
aaccgcagactacatctttagagga

SEQ ID NO: 161002 - DNA, 25 bp, Probe Sequence
aaccggcagccagccactaagagta

SEQ ID NO: 161003 - DNA, 25 bp, Probe Sequence
aacccagagcagctccacgtgagag

SEQ ID NO: 161004 - DNA, 25 bp, Probe Sequence
aagcccagatcactgtgggctggag

SEQ ID NO: 161005 - DNA, 25 bp, Probe Sequence
aacccagagcgtcaggtggactctc

SEQ ID NO: 161006 - DNA, 25 bp, Probe Sequence
aagcccaaggagacaggtggaatcc

SEQ ID NO: 161007 - DNA, 25 bp, Probe Sequence
aacccagggagtctgtgttcaccaa

SEQ ID NO: 161008 - DNA, 25 bp, Probe Sequence
aaccttggagttcatatttcacaaa

SEQ ID NO: 161009 - DNA, 25 bp, Probe Sequence
aacctggagagcatcctctcttacc

SEQ ID NO: 161010 - DNA, 25 bp, Probe Sequence
aacctgtgtgctgtacttttacact

SEQ ID NO: 161011 - DNA, 25 bp, Probe Sequence
aacctggtgctggatattttcaaat

SEQ ID NO: 161012 - DNA, 25 bp, Probe Sequence
aacctgggctgcgacatggatttcg

SEQ ID NO: 161013 - DNA, 25 bp, Probe Sequence
aaccggcggatgctgctgctcttcg

SEQ ID NO: 161014 - DNA, 25 bp, Probe Sequence
aaccaggctgggtcaggctcttaat

SEQ ID NO: 161015 - DNA, 25 bp, Probe Sequence
aaccaggattaccagttcttcacat

SEQ ID NO: 161016 - DNA, 25 bp, Probe Sequence
aaccctactgcagtgagttttccaa

SEQ ID NO: 161017 - DNA, 25 bp, Probe Sequence
aacctatactgatagcctttctcca

SEQ ID NO: 161018 - DNA, 25 bp, Probe Sequence
aaccagcaaagatacctgcttcttc

SEQ ID NO: 161019 - DNA, 25 bp, Probe Sequence
aaccagcaacagtcaacatttccct

SEQ ID NO: 161020 - DNA, 25 bp, Probe Sequence
caatcaacaaactgacaaaccctta

SEQ ID NO: 161021 - DNA, 25 bp, Probe Sequence
caaacaaaacatctcaagtccccaa

SEQ ID NO: 161022 - DNA, 25 bp, Probe Sequence
aaccaacttcagctgcaagctgccc

SEQ ID NO: 161023 - DNA, 25 bp, Probe Sequence
aacctaggtagcagcaatgtcccag

SEQ ID NO: 161024 - DNA, 25 bp, Probe Sequence
aaccccttgagctgccaggctcaag

SEQ ID NO: 161025 - DNA, 25 bp, Probe Sequence
aagaccttggtctgccgattaaaag

SEQ ID NO: 161026 - DNA, 25 bp, Probe Sequence
taaaccctggtacatcgtatataaa

SEQ ID NO: 161027 - DNA, 25 bp, Probe Sequence
taaactccggaagcaagtcagttaa

SEQ ID NO: 161028 - DNA, 25 bp, Probe Sequence
aaccttttccagacaagtcagctta

SEQ ID NO: 161029 - DNA, 25 bp, Probe Sequence
aaccttctgttcaatgacaacactg

SEQ ID NO: 161030 - DNA, 25 bp, Probe Sequence
aacctctgtttcatgctaaccagac

SEQ ID NO: 161031 - DNA, 25 bp, Probe Sequence
aacccagattttcctgcaacacaga

SEQ ID NO: 161032 - DNA, 25 bp, Probe Sequence
aacccatgacactatgaagcaacca

SEQ ID NO: 161033 - DNA, 25 bp, Probe Sequence
aacgcgcagacctaaactgatccta

SEQ ID NO: 161034 - DNA, 25 bp, Probe Sequence
aacgcagcgacgtgagggtcctgat

SEQ ID NO: 161035 - DNA, 25 bp, Probe Sequence
aacgaggaatgaggggcttcacgag

SEQ ID NO: 161036 - DNA, 25 bp, Probe Sequence
aagctaggaaggggagtccataagg

SEQ ID NO: 161037 - DNA, 25 bp, Probe Sequence
aagctgcggggaagggtcctgagca

SEQ ID NO: 161038 - DNA, 25 bp, Probe Sequence
aagcctgaagaactggttgactaca

SEQ ID NO: 161039 - DNA, 25 bp, Probe Sequence
aacccatacatccaggtggaataca

SEQ ID NO: 161040 - DNA, 25 bp, Probe Sequence
aacctgatacgccaaacaaatacac

SEQ ID NO: 161041 - DNA, 25 bp, Probe Sequence
aacctgaatccagaagacattgacc

SEQ ID NO: 161042 - DNA, 25 bp, Probe Sequence
aagttcaaacagagagcacttggtc

SEQ ID NO: 161043 - DNA, 25 bp, Probe Sequence
aaggctccgaatccgaatctcggtc

SEQ ID NO: 161044 - DNA, 25 bp, Probe Sequence
aaggctccgaatccgaatctcggtc

SEQ ID NO: 161045 - DNA, 25 bp, Probe Sequence
aacccagtaatgcgatgcttgggtc

SEQ ID NO: 161046 - DNA, 25 bp, Probe Sequence
aacccagtaactcgtcatttgattt

SEQ ID NO: 161047 - DNA, 25 bp, Probe Sequence
aacccagctttcatcttttgtctgt

SEQ ID NO: 161048 - DNA, 25 bp, Probe Sequence
aacccagcaattttctatgattttt

SEQ ID NO: 161049 - DNA, 25 bp, Probe Sequence
aacccaaaagtttgcagatttgctt

SEQ ID NO: 161050 - DNA, 25 bp, Probe Sequence
aagcctcctaagggggtcattctct

SEQ ID NO: 161051 - DNA, 25 bp, Probe Sequence
aagcctcctaagggggtcattctct

SEQ ID NO: 161052 - DNA, 25 bp, Probe Sequence
aagccgcctaatgtcttttgttcaa

SEQ ID NO: 161053 - DNA, 25 bp, Probe Sequence
aagcggctctatgagtctattattg

SEQ ID NO: 161054 - DNA, 25 bp, Probe Sequence
aacgaatcattctaatcactgtatt

SEQ ID NO: 161055 - DNA, 25 bp, Probe Sequence
aacgcaatcttctgagcacaatatg

SEQ ID NO: 161056 - DNA, 25 bp, Probe Sequence
aacgcacatttctgacacagtaggg

SEQ ID NO: 161057 - DNA, 25 bp, Probe Sequence
aaccaccattccaacaggtcgagga

SEQ ID NO: 161058 - DNA, 25 bp, Probe Sequence
aagctttctaccaaagggagatcga

SEQ ID NO: 161059 - DNA, 25 bp, Probe Sequence
aagcttccttccagtgtctggtaac

SEQ ID NO: 161060 - DNA, 25 bp, Probe Sequence
aagcttcccctgaatctgtcgggaa

SEQ ID NO: 161061 - DNA, 25 bp, Probe Sequence
aagctctaggtcctacctcagaaaa

SEQ ID NO: 161062 - DNA, 25 bp, Probe Sequence
aacctcactgatcgtcaagtcaaaa

SEQ ID NO: 161063 - DNA, 25 bp, Probe Sequence
aacccagtgtcactagatgtcacac

SEQ ID NO: 161064 - DNA, 25 bp, Probe Sequence
aaccacatgtgtgtgggacacccag

SEQ ID NO: 161065 - DNA, 25 bp, Probe Sequence
aacgccatgattgctgctggacttg

SEQ ID NO: 161066 - DNA, 25 bp, Probe Sequence
aacccatgattgtcagggaggtgcc

SEQ ID NO: 161067 - DNA, 25 bp, Probe Sequence
aagctccatgctggtcactagggtg

SEQ ID NO: 161068 - DNA, 25 bp, Probe Sequence
aagctcatgcgcagtcaatcggcat

SEQ ID NO: 161069 - DNA, 25 bp, Probe Sequence
aagctgatgcaaattaccagtctgc

SEQ ID NO: 161070 - DNA, 25 bp, Probe Sequence
aagcttcagctttagctgcagctgc

SEQ ID NO: 161071 - DNA, 25 bp, Probe Sequence
aacctcagcctggaggcacttttcc

SEQ ID NO: 161072 - DNA, 25 bp, Probe Sequence
aacctgcagtcgggtgaggtgaccc

SEQ ID NO: 161073 - DNA, 25 bp, Probe Sequence
aagccacaccccagaggtgacagct

SEQ ID NO: 161074 - DNA, 25 bp, Probe Sequence
aagccacaccccagaggtgacagct

SEQ ID NO: 161075 - DNA, 25 bp, Probe Sequence
aagcccacggactaataggccagtt

SEQ ID NO: 161076 - DNA, 25 bp, Probe Sequence
aaccaaagagaataagcgtctacta

SEQ ID NO: 161077 - DNA, 25 bp, Probe Sequence
aacgctagagagccaaatatgttct

SEQ ID NO: 161078 - DNA, 25 bp, Probe Sequence
aacctgacatggacaagcattgttt

SEQ ID NO: 161079 - DNA, 25 bp, Probe Sequence
aacctgcaggagtattgtatttttg

SEQ ID NO: 161080 - DNA, 25 bp, Probe Sequence
aagccctgcggatttgattcgattc

SEQ ID NO: 161081 - DNA, 25 bp, Probe Sequence
aaccctgcgtggcatcaatagcttc

SEQ ID NO: 161082 - DNA, 25 bp, Probe Sequence
aaccctgagtggacacagcacatgt

SEQ ID NO: 161083 - DNA, 25 bp, Probe Sequence
aaccctgattgacgcacagcagtgg

SEQ ID NO: 161084 - DNA, 25 bp, Probe Sequence
aacgacgtgtttgagcagctggcgt

SEQ ID NO: 161085 - DNA, 25 bp, Probe Sequence
aacgaccatgtgattgacgcgacgc

SEQ ID NO: 161086 - DNA, 25 bp, Probe Sequence
aatcgatggagtcctttacctgcgc

SEQ ID NO: 161087 - DNA, 25 bp, Probe Sequence
aagttgagacgtgattaccgggttg

SEQ ID NO: 161088 - DNA, 25 bp, Probe Sequence
aagtacaagagtgtttctggaggtc

SEQ ID NO: 161089 - DNA, 25 bp, Probe Sequence
aagagatcaaagagttcgccgcggg

SEQ ID NO: 161090 - DNA, 25 bp, Probe Sequence
aagaagcaaagtggacggccgggcg

SEQ ID NO: 161091 - DNA, 25 bp, Probe Sequence
aagaaagaagtcacgccaatggctc

SEQ ID NO: 161092 - DNA, 25 bp, Probe Sequence
aagtacgacgacaacgtcaaggcct

SEQ ID NO: 161093 - DNA, 25 bp, Probe Sequence
aagctcatcaacgactacgtgaaga

SEQ ID NO: 161094 - DNA, 25 bp, Probe Sequence
aacctacagctaaccgtgaacactt

SEQ ID NO: 161095 - DNA, 25 bp, Probe Sequence
aacctacgtcaagattaacaatgct

SEQ ID NO: 161096 - DNA, 25 bp, Probe Sequence
aaccccgtgcatatatggtcaacag

SEQ ID NO: 161097 - DNA, 25 bp, Probe Sequence
aaccgttgctccaaatagataccgt

SEQ ID NO: 161098 - DNA, 25 bp, Probe Sequence
aaccctgagaccaagaagacccgtg

SEQ ID NO: 161099 - DNA, 25 bp, Probe Sequence
aagctccaggcagaaaagaccctgc

SEQ ID NO: 161100 - DNA, 25 bp, Probe Sequence
aaccagcccctgaaaagaagcctgc

SEQ ID NO: 161101 - DNA, 25 bp, Probe Sequence
aaccagcccctgaaaagaagcctgc

SEQ ID NO: 161102 - DNA, 25 bp, Probe Sequence
aaccacctcaatgcaaagattctac

SEQ ID NO: 161103 - DNA, 25 bp, Probe Sequence
aacccagtacaggaatctagtcaca

SEQ ID NO: 161104 - DNA, 25 bp, Probe Sequence
aacccctacatcccattaacaagat

SEQ ID NO: 161105 - DNA, 25 bp, Probe Sequence
aacctctcaatcccagattttcaaa

SEQ ID NO: 161106 - DNA, 25 bp, Probe Sequence
aacctccaagtgtcatgatttaaaa

SEQ ID NO: 161107 - DNA, 25 bp, Probe Sequence
aacctcacaagtctgacagtggaga

SEQ ID NO: 161108 - DNA, 25 bp, Probe Sequence
aacctctcaagtgtgaaggagactc

SEQ ID NO: 161109 - DNA, 25 bp, Probe Sequence
aaccttcaagctgtgtaatattcca

SEQ ID NO: 161110 - DNA, 25 bp, Probe Sequence
aaccttcgaatggttggaattccag

SEQ ID NO: 161111 - DNA, 25 bp, Probe Sequence
aagccttccactgttagagatttga

SEQ ID NO: 161112 - DNA, 25 bp, Probe Sequence
aaccttccccagaaacaacagtgat

SEQ ID NO: 161113 - DNA, 25 bp, Probe Sequence
aagccccccaagaaagcgaatgaga

SEQ ID NO: 161114 - DNA, 25 bp, Probe Sequence
aagcccccaaagggcagcagataaa

SEQ ID NO: 161115 - DNA, 25 bp, Probe Sequence
aatcccctcaaagccagggcaagat

SEQ ID NO: 161116 - DNA, 25 bp, Probe Sequence
aagccacgttaagtccaaggagaag

SEQ ID NO: 161117 - DNA, 25 bp, Probe Sequence
aagccctgtcgaagcttcgggaaga

SEQ ID NO: 161118 - DNA, 25 bp, Probe Sequence
aagccctgtcgaagcttcgggaaga

SEQ ID NO: 161119 - DNA, 25 bp, Probe Sequence
aacccctcgcaagtttgtggagcac

SEQ ID NO: 161120 - DNA, 25 bp, Probe Sequence
aaccttgctagccaaagcggtagca

SEQ ID NO: 161121 - DNA, 25 bp, Probe Sequence
aaccctatagactaaaggcaggcat

SEQ ID NO: 161122 - DNA, 25 bp, Probe Sequence
aaccacaatatgtatagcacatgga

SEQ ID NO: 161123 - DNA, 25 bp, Probe Sequence
aacccaatgtgatatcacagctatg

SEQ ID NO: 161124 - DNA, 25 bp, Probe Sequence
aacctcaggtatcttcagcttgtgg

SEQ ID NO: 161125 - DNA, 25 bp, Probe Sequence
aacccaggacacatgctagtgatgg

SEQ ID NO: 161126 - DNA, 25 bp, Probe Sequence
aacccaagcaacatttgtatggatt

SEQ ID NO: 161127 - DNA, 25 bp, Probe Sequence
aaccacatcagatctcttgctggtg

SEQ ID NO: 161128 - DNA, 25 bp, Probe Sequence
aacccacagtgtgctctggatgcat

SEQ ID NO: 161129 - DNA, 25 bp, Probe Sequence
aacccaacattccttggtgagacca

SEQ ID NO: 161130 - DNA, 25 bp, Probe Sequence
aagcactagagcagccttggggact

SEQ ID NO: 161131 - DNA, 25 bp, Probe Sequence
aacctgtcacttgttgggagcatga

SEQ ID NO: 161132 - DNA, 25 bp, Probe Sequence
aacctgtgagttttgtggggacaca

SEQ ID NO: 161133 - DNA, 25 bp, Probe Sequence
aaccttatagattgttggctttcac

SEQ ID NO: 161134 - DNA, 25 bp, Probe Sequence
aacctgttaatcctgtcttttgcat

SEQ ID NO: 161135 - DNA, 25 bp, Probe Sequence
aacctatctactcgttgttgaaatt

SEQ ID NO: 161136 - DNA, 25 bp, Probe Sequence
aacctagattctatagttgtattat

SEQ ID NO: 161137 - DNA, 25 bp, Probe Sequence
aatgccttcgttatcgttattgtac

SEQ ID NO: 161138 - DNA, 25 bp, Probe Sequence
aagttctttttgagtacattccaca

SEQ ID NO: 161139 - DNA, 25 bp, Probe Sequence
aaccatcttcttctggtgatcttcc

SEQ ID NO: 161140 - DNA, 25 bp, Probe Sequence
aaccttctgcttgtggtgcattatt

SEQ ID NO: 161141 - DNA, 25 bp, Probe Sequence
aagcctgactgtcctatgggcttct

SEQ ID NO: 161142 - DNA, 25 bp, Probe Sequence
aagcgctggcgtaagcatggggtct

SEQ ID NO: 161143 - DNA, 25 bp, Probe Sequence
aagcgccgagatgacgggctttctg

SEQ ID NO: 161144 - DNA, 25 bp, Probe Sequence
aaccggtgaatctgggcttatggga

SEQ ID NO: 161145 - DNA, 25 bp, Probe Sequence
aatccgtcatgagtcgggagcttcg

SEQ ID NO: 161146 - DNA, 25 bp, Probe Sequence
aaccctagattccttgagcatgtgg

SEQ ID NO: 161147 - DNA, 25 bp, Probe Sequence
aaccttgaaacattatgctcagtga

SEQ ID NO: 161148 - DNA, 25 bp, Probe Sequence
aaccagtacaactatattgcataga

SEQ ID NO: 161149 - DNA, 25 bp, Probe Sequence
aaccatttacactttagtatgaatg

SEQ ID NO: 161150 - DNA, 25 bp, Probe Sequence
aacctttgaccatttttatgtccat

SEQ ID NO: 161151 - DNA, 25 bp, Probe Sequence
aacctttgaccatttttgatgtcca

SEQ ID NO: 161152 - DNA, 25 bp, Probe Sequence
aaccctggacgatttgattatggct

SEQ ID NO: 161153 - DNA, 25 bp, Probe Sequence
aaccctggacgatttgattatggct

SEQ ID NO: 161154 - DNA, 25 bp, Probe Sequence
aacccaggactatttattccagctt

SEQ ID NO: 161155 - DNA, 25 bp, Probe Sequence
aacccagttcagtttatctccagtt

SEQ ID NO: 161156 - DNA, 25 bp, Probe Sequence
aacccatttatactctactctcagt

SEQ ID NO: 161157 - DNA, 25 bp, Probe Sequence
aagctccttgtaagtaaatccatga

SEQ ID NO: 161158 - DNA, 25 bp, Probe Sequence
aagccctcatgtttgtgataaccgt

SEQ ID NO: 161159 - DNA, 25 bp, Probe Sequence
aagccctcgaattgatggactccgg

SEQ ID NO: 161160 - DNA, 25 bp, Probe Sequence
aaccatctctagagaggacatccct

SEQ ID NO: 161161 - DNA, 25 bp, Probe Sequence
aacctgcttagtattgacactctct

SEQ ID NO: 161162 - DNA, 25 bp, Probe Sequence
aaccagcttggtgtagacagtctga

SEQ ID NO: 161163 - DNA, 25 bp, Probe Sequence
aacccatgggcttccatgacgtcaa

SEQ ID NO: 161164 - DNA, 25 bp, Probe Sequence
aacccattggtatacacagaatatt

SEQ ID NO: 161165 - DNA, 25 bp, Probe Sequence
aaccctcggatacgatagaaaatgt

SEQ ID NO: 161166 - DNA, 25 bp, Probe Sequence
aaccccaggtacccatgaatgtgag

SEQ ID NO: 161167 - DNA, 25 bp, Probe Sequence
aaccccagcaggtcctagaggtgga

SEQ ID NO: 161168 - DNA, 25 bp, Probe Sequence
aaccgccgcaggtgcaagatctggt

SEQ ID NO: 161169 - DNA, 25 bp, Probe Sequence
aacgcgttcgcagttgcagcgattg

SEQ ID NO: 161170 - DNA, 25 bp, Probe Sequence
aagcgctgatccaagttgctctgta

SEQ ID NO: 161171 - DNA, 25 bp, Probe Sequence
aacgctgctccctattttggaatgc

SEQ ID NO: 161172 - DNA, 25 bp, Probe Sequence
aagcgttacgcatctttgctgaagt

SEQ ID NO: 161173 - DNA, 25 bp, Probe Sequence
aagcgttgaccattccaagcaaata

SEQ ID NO: 161174 - DNA, 25 bp, Probe Sequence
aagctttgacactggaatgagttga

SEQ ID NO: 161175 - DNA, 25 bp, Probe Sequence
aagcatagttacagtagaagttgtt

SEQ ID NO: 161176 - DNA, 25 bp, Probe Sequence
aagcttgtaagcagtctttggggct

SEQ ID NO: 161177 - DNA, 25 bp, Probe Sequence
aagctggatctccaatgttttgggg

SEQ ID NO: 161178 - DNA, 25 bp, Probe Sequence
aagcgtgacttgaagtgttgcatgg

SEQ ID NO: 161179 - DNA, 25 bp, Probe Sequence
aagctctccatggatgaggtggtga

SEQ ID NO: 161180 - DNA, 25 bp, Probe Sequence
aagcctccatcttggcaagatatga

SEQ ID NO: 161181 - DNA, 25 bp, Probe Sequence
aacctgatgccttggcacaagcgtc

SEQ ID NO: 161182 - DNA, 25 bp, Probe Sequence
aacccatcacaatgacacagagctc

SEQ ID NO: 161183 - DNA, 25 bp, Probe Sequence
aaccaaacaaaaccagagtcatctg

SEQ ID NO: 161184 - DNA, 25 bp, Probe Sequence
aaccaaacaaaaccagagtcatctg

SEQ ID NO: 161185 - DNA, 25 bp, Probe Sequence
aaccataaccataaccagattccct

SEQ ID NO: 161186 - DNA, 25 bp, Probe Sequence
aaccgaaagcatgagccaagctccc

SEQ ID NO: 161187 - DNA, 25 bp, Probe Sequence
aaccaataagccttgccaacagtcc

SEQ ID NO: 161188 - DNA, 25 bp, Probe Sequence
aaccagtagaggttgatcatgatca

SEQ ID NO: 161189 - DNA, 25 bp, Probe Sequence
aacctgcgggagtcgcagcagctcc

SEQ ID NO: 161190 - DNA, 25 bp, Probe Sequence
aacctgcaaagatctgtcctcagcc

SEQ ID NO: 161191 - DNA, 25 bp, Probe Sequence
aacctgataaattcatagcccaaca

SEQ ID NO: 161192 - DNA, 25 bp, Probe Sequence
aaccagcattaaacaagacagaaga

SEQ ID NO: 161193 - DNA, 25 bp, Probe Sequence
aacctctgcaaaatcatgaaagaca

SEQ ID NO: 161194 - DNA, 25 bp, Probe Sequence
aacctgctggcattgtatactagaa

SEQ ID NO: 161195 - DNA, 25 bp, Probe Sequence
aaccctggcaattatagctactccc

SEQ ID NO: 161196 - DNA, 25 bp, Probe Sequence
aaccttgtaattaagatactgtatc

SEQ ID NO: 161197 - DNA, 25 bp, Probe Sequence
aagcttccttaaaatatactgctac

SEQ ID NO: 161198 - DNA, 25 bp, Probe Sequence
aacctcctgtaacttctatctgttc

SEQ ID NO: 161199 - DNA, 25 bp, Probe Sequence
aacctcatctgttagctttaccttt

SEQ ID NO: 161200 - DNA, 25 bp, Probe Sequence
aaccaactgttggcttcattttctt

SEQ ID NO: 161201 - DNA, 25 bp, Probe Sequence
aaccacccttggaaatatgtgatta

SEQ ID NO: 161202 - DNA, 25 bp, Probe Sequence
aacccgtgagctctaattggattcc

SEQ ID NO: 161203 - DNA, 25 bp, Probe Sequence
aacctattgactgtattctgtgtat

SEQ ID NO: 161204 - DNA, 25 bp, Probe Sequence
aacccattgatctgcgttttgtcac

SEQ ID NO: 161205 - DNA, 25 bp, Probe Sequence
aacccattgatctgcactactatgc

SEQ ID NO: 161206 - DNA, 25 bp, Probe Sequence
aacccactgatgccacaggagcttg

SEQ ID NO: 161207 - DNA, 25 bp, Probe Sequence
aacccactgcatgcagaaacttgga

SEQ ID NO: 161208 - DNA, 25 bp, Probe Sequence
aacccagttgcccatcaacagtgga

SEQ ID NO: 161209 - DNA, 25 bp, Probe Sequence
aacccacttccattaaacttgacag

SEQ ID NO: 161210 - DNA, 25 bp, Probe Sequence
aaccacactttttacataattgcga

SEQ ID NO: 161211 - DNA, 25 bp, Probe Sequence
aaccccttttggtcaagttgcagct

SEQ ID NO: 161212 - DNA, 25 bp, Probe Sequence
aaccccatctgctgggggtgtcact

SEQ ID NO: 161213 - DNA, 25 bp, Probe Sequence
aaccccatctgctgggggtgtcact

SEQ ID NO: 161214 - DNA, 25 bp, Probe Sequence
aaccccatctgctgggggtgtcact

SEQ ID NO: 161215 - DNA, 25 bp, Probe Sequence
aacccgcctgcagtggaaagtgtat

SEQ ID NO: 161216 - DNA, 25 bp, Probe Sequence
aacccttctgttcaaagcttttgca

SEQ ID NO: 161217 - DNA, 25 bp, Probe Sequence
aaccgttcgtcgagaactcagtctg

SEQ ID NO: 161218 - DNA, 25 bp, Probe Sequence
aagcctttggatttaaagcctgttg

SEQ ID NO: 161219 - DNA, 25 bp, Probe Sequence
aagcctttggatttaaagcctgttg

SEQ ID NO: 161220 - DNA, 25 bp, Probe Sequence
aacctctttcattctagaaacttct

SEQ ID NO: 161221 - DNA, 25 bp, Probe Sequence
aaccactttgcctctgaaacttaat

SEQ ID NO: 161222 - DNA, 25 bp, Probe Sequence
aaccactttgcctctgaaacttaat

SEQ ID NO: 161223 - DNA, 25 bp, Probe Sequence
aacctactgggctactaatacttct

SEQ ID NO: 161224 - DNA, 25 bp, Probe Sequence
aaccatactgggtacatcaaagttg

SEQ ID NO: 161225 - DNA, 25 bp, Probe Sequence
gaaaaggctttatatcaaagtttga

SEQ ID NO: 161226 - DNA, 25 bp, Probe Sequence
aagaacctttaatcagagaagtaat

SEQ ID NO: 161227 - DNA, 25 bp, Probe Sequence
aaccactatttttcaaggaagtatg

SEQ ID NO: 161228 - DNA, 25 bp, Probe Sequence
aacccccattctacagaggaggaag

SEQ ID NO: 161229 - DNA, 25 bp, Probe Sequence
aaccccctcttcaagaggcaggctc

SEQ ID NO: 161230 - DNA, 25 bp, Probe Sequence
aacctggccttgaacgagtgcgggc

SEQ ID NO: 161231 - DNA, 25 bp, Probe Sequence
aaccttgcctggtacagtatggggg

SEQ ID NO: 161232 - DNA, 25 bp, Probe Sequence
aaccgtgcttctttcatgtcaggcg

SEQ ID NO: 161233 - DNA, 25 bp, Probe Sequence
aaccctgcttcttctgttgaacagg

SEQ ID NO: 161234 - DNA, 25 bp, Probe Sequence
aaccctatctgctgctgatttacag

SEQ ID NO: 161235 - DNA, 25 bp, Probe Sequence
aacccatattcagattttgatcagg

SEQ ID NO: 161236 - DNA, 25 bp, Probe Sequence
aacccatgcattctcttttcagagt

SEQ ID NO: 161237 - DNA, 25 bp, Probe Sequence
aacccatttcagaccaatgccagag

SEQ ID NO: 161238 - DNA, 25 bp, Probe Sequence
aacccatgacaattcctcatgccga

SEQ ID NO: 161239 - DNA, 25 bp, Probe Sequence
aaccctagcatgtatactctgccac

SEQ ID NO: 161240 - DNA, 25 bp, Probe Sequence
aaccctatatgcttactgtgcacct

SEQ ID NO: 161241 - DNA, 25 bp, Probe Sequence
aagccttatagtaactgtgtaattt

SEQ ID NO: 161242 - DNA, 25 bp, Probe Sequence
aagaacttaatttcagtataaactg

SEQ ID NO: 161243 - DNA, 25 bp, Probe Sequence
aacccattaatatcgtggctaactg

SEQ ID NO: 161244 - DNA, 25 bp, Probe Sequence
aacccattaatatcgtggctaactg

SEQ ID NO: 161245 - DNA, 25 bp, Probe Sequence
aaccactttctctgcagtggaaagg

SEQ ID NO: 161246 - DNA, 25 bp, Probe Sequence
aaccctacctcaaagcacaaaagtg

SEQ ID NO: 161247 - DNA, 25 bp, Probe Sequence
aagcttcttcccaaagccagaaact

SEQ ID NO: 161248 - DNA, 25 bp, Probe Sequence
aagcgaattcctagacacctggaac

SEQ ID NO: 161249 - DNA, 25 bp, Probe Sequence
aagctgtttttctcacatgtgaaca

SEQ ID NO: 161250 - DNA, 25 bp, Probe Sequence
aagccttcttaccacactggcatat

SEQ ID NO: 161251 - DNA, 25 bp, Probe Sequence
aaccatgtctaagcaccatagaata

SEQ ID NO: 161252 - DNA, 25 bp, Probe Sequence
aacctttaactctgtatcagtcaag

SEQ ID NO: 161253 - DNA, 25 bp, Probe Sequence
aaccagttcagactttgtactctca

SEQ ID NO: 161254 - DNA, 25 bp, Probe Sequence
aaccctctcggctttatgatgctta

SEQ ID NO: 161255 - DNA, 25 bp, Probe Sequence
aacctccgaggctatggcatggcat

SEQ ID NO: 161256 - DNA, 25 bp, Probe Sequence
aagccccagcaggctaggtgcagca

SEQ ID NO: 161257 - DNA, 25 bp, Probe Sequence
aaccactgcagcgactagggacact

SEQ ID NO: 161258 - DNA, 25 bp, Probe Sequence
aagccctgaggatagtagtcacttt

SEQ ID NO: 161259 - DNA, 25 bp, Probe Sequence
aaccttgagtgatactaatcatgta

SEQ ID NO: 161260 - DNA, 25 bp, Probe Sequence
aagccttggtaaaataatcagtgtt

SEQ ID NO: 161261 - DNA, 25 bp, Probe Sequence
aagccttggtaaaataatcagtgtt

SEQ ID NO: 161262 - DNA, 25 bp, Probe Sequence
aagccgtagtaagaaatggatcata

SEQ ID NO: 161263 - DNA, 25 bp, Probe Sequence
aaccagtcagtaactatattgttaa

SEQ ID NO: 161264 - DNA, 25 bp, Probe Sequence
aaccgcatggtgcttgcagttttaa

SEQ ID NO: 161265 - DNA, 25 bp, Probe Sequence
aaccataggttttgcagtgtaggaa

SEQ ID NO: 161266 - DNA, 25 bp, Probe Sequence
aacctcagggtctgcggtacgaagt

SEQ ID NO: 161267 - DNA, 25 bp, Probe Sequence
aaccagagggttgctggtcctgcac

SEQ ID NO: 161268 - DNA, 25 bp, Probe Sequence
aaccgagatatttagtggtggctgc

SEQ ID NO: 161269 - DNA, 25 bp, Probe Sequence
aagctcaacgttctggagtggctgc

SEQ ID NO: 161270 - DNA, 25 bp, Probe Sequence
aagcctacagtatcagatcaatggg

SEQ ID NO: 161271 - DNA, 25 bp, Probe Sequence
aaccatagttcatcgaaatgcagct

SEQ ID NO: 161272 - DNA, 25 bp, Probe Sequence
aaccatagttcatcgaaatgcagct

SEQ ID NO: 161273 - DNA, 25 bp, Probe Sequence
aaccaggatgtattccagattactg

SEQ ID NO: 161274 - DNA, 25 bp, Probe Sequence
aacctgtgattattctcgcatgata

SEQ ID NO: 161275 - DNA, 25 bp, Probe Sequence
aaccatatgcctagtctctgaaact

SEQ ID NO: 161276 - DNA, 25 bp, Probe Sequence
aagccatcattgaatgctgcattga

SEQ ID NO: 161277 - DNA, 25 bp, Probe Sequence
aagccattcatgaaggatctgcttc

SEQ ID NO: 161278 - DNA, 25 bp, Probe Sequence
aaccatctgccttgagacctttaaa

SEQ ID NO: 161279 - DNA, 25 bp, Probe Sequence
aaccctggtacatcgtatataaaat

SEQ ID NO: 161280 - DNA, 25 bp, Probe Sequence
aacccttgtctctatctgtacataa

SEQ ID NO: 161281 - DNA, 25 bp, Probe Sequence
aaccacttgtcttggctgtagattc

SEQ ID NO: 161282 - DNA, 25 bp, Probe Sequence
aaccttattctgtgtgtagacattg

SEQ ID NO: 161283 - DNA, 25 bp, Probe Sequence
aaccttattcttgtacattcattca

SEQ ID NO: 161284 - DNA, 25 bp, Probe Sequence
aaccttataactttcacactcatag

SEQ ID NO: 161285 - DNA, 25 bp, Probe Sequence
aacctttacctagatcagccatcag

SEQ ID NO: 161286 - DNA, 25 bp, Probe Sequence
aaccatttatccaagattctactaa

SEQ ID NO: 161287 - DNA, 25 bp, Probe Sequence
aagccatgttattctgcctttttaa

SEQ ID NO: 161288 - DNA, 25 bp, Probe Sequence
aaccactattccatgcttttaagta

SEQ ID NO: 161289 - DNA, 25 bp, Probe Sequence
aaccaattctggaagtgtctatgaa

SEQ ID NO: 161290 - DNA, 25 bp, Probe Sequence
aagccagcatttgtattttgcatca

SEQ ID NO: 161291 - DNA, 25 bp, Probe Sequence
aagcactgttaccaatttagcatat

SEQ ID NO: 161292 - DNA, 25 bp, Probe Sequence
aagccttaatctcatttgggtactc

SEQ ID NO: 161293 - DNA, 25 bp, Probe Sequence
aacctcgaatctcatgttcaggaaa

SEQ ID NO: 161294 - DNA, 25 bp, Probe Sequence
aacctcgacatccgcagtggggatg

SEQ ID NO: 161295 - DNA, 25 bp, Probe Sequence
aagccacttccttgaatggaggatg

SEQ ID NO: 161296 - DNA, 25 bp, Probe Sequence
aaccaggttctacagggaggctgca

SEQ ID NO: 161297 - DNA, 25 bp, Probe Sequence
aatcgtgagtttttgagctagggaa

SEQ ID NO: 161298 - DNA, 25 bp, Probe Sequence
aaccacctttgcaacgcggaatatc

SEQ ID NO: 161299 - DNA, 25 bp, Probe Sequence
aacccggtatctactcaaaatacag

SEQ ID NO: 161300 - DNA, 25 bp, Probe Sequence
aacctccctattcctcagagaaaca

SEQ ID NO: 161301 - DNA, 25 bp, Probe Sequence
aatacccactaacaaagaacaagca

SEQ ID NO: 161302 - DNA, 25 bp, Probe Sequence
aatgaacccaaacatagacttgcaa

SEQ ID NO: 161303 - DNA, 25 bp, Probe Sequence
aagcaaccccctaaaacattcatat

SEQ ID NO: 161304 - DNA, 25 bp, Probe Sequence
aagccaacctacaatactacgccta

SEQ ID NO: 161305 - DNA, 25 bp, Probe Sequence
cgtccaacctatactaacctgaata

SEQ ID NO: 161306 - DNA, 25 bp, Probe Sequence
aaccaaccatattaacacctagcaa

SEQ ID NO: 161307 - DNA, 25 bp, Probe Sequence
aaccaaggatcaatgaaatgcacat

SEQ ID NO: 161308 - DNA, 25 bp, Probe Sequence
aaccagatgacacatgaaagcagct

SEQ ID NO: 161309 - DNA, 25 bp, Probe Sequence
aaccattacttactgcaagcagcta

SEQ ID NO: 161310 - DNA, 25 bp, Probe Sequence
aaccaatcatttttatacattgaca

SEQ ID NO: 161311 - DNA, 25 bp, Probe Sequence
aagcagcttctttacgaacattaac

SEQ ID NO: 161312 - DNA, 25 bp, Probe Sequence
aagcagttggtagaagacttggatc

SEQ ID NO: 161313 - DNA, 25 bp, Probe Sequence
aagctgttgtctacaaaacctactt

SEQ ID NO: 161314 - DNA, 25 bp, Probe Sequence
aagcctcctccaataaagctctatc

SEQ ID NO: 161315 - DNA, 25 bp, Probe Sequence
aagcttgcgttgattaagtccctgc

SEQ ID NO: 161316 - DNA, 25 bp, Probe Sequence
aagctgatcatgttttgctacagtt

SEQ ID NO: 161317 - DNA, 25 bp, Probe Sequence
aagtgctcagcatctgtgcttagca

SEQ ID NO: 161318 - DNA, 25 bp, Probe Sequence
aacctcagcatgttgcagtcatcct

SEQ ID NO: 161319 - DNA, 25 bp, Probe Sequence
aacctcagcatgttgcagtcatcct

SEQ ID NO: 161320 - DNA, 25 bp, Probe Sequence
aacctcagcatgttgcagtcatcct

SEQ ID NO: 161321 - DNA, 25 bp, Probe Sequence
aacctcagcatgttgcagtcatcct

SEQ ID NO: 161322 - DNA, 25 bp, Probe Sequence
aagccaagcatgatgagctgaccta

SEQ ID NO: 161323 - DNA, 25 bp, Probe Sequence
aagccagagctgtctagtttcattc

SEQ ID NO: 161324 - DNA, 25 bp, Probe Sequence
aacctggggctgcattgtattctca

SEQ ID NO: 161325 - DNA, 25 bp, Probe Sequence
aagccggatggtacgtatattgtca

SEQ ID NO: 161326 - DNA, 25 bp, Probe Sequence
aagccactggggacgagacaggtgc

SEQ ID NO: 161327 - DNA, 25 bp, Probe Sequence
aagctcactggcatggccttccgtg

SEQ ID NO: 161328 - DNA, 25 bp, Probe Sequence
aagctcactggcatggccttccgtg

SEQ ID NO: 161329 - DNA, 25 bp, Probe Sequence
aagctgcagcagaacaggccatctc

SEQ ID NO: 161330 - DNA, 25 bp, Probe Sequence
aagctgcagcagaacaggccatctc

SEQ ID NO: 161331 - DNA, 25 bp, Probe Sequence
aagctgaagctattcgaatcctggc

SEQ ID NO: 161332 - DNA, 25 bp, Probe Sequence
aagctgcatagttgtactgtgcctg

SEQ ID NO: 161333 - DNA, 25 bp, Probe Sequence
aagctgtagtagccctttctgtgtg

SEQ ID NO: 161334 - DNA, 25 bp, Probe Sequence
aagctgtgagtttgtgtgtttgtaa

SEQ ID NO: 161335 - DNA, 25 bp, Probe Sequence
aagctggtgaccttggcatgtcttg

SEQ ID NO: 161336 - DNA, 25 bp, Probe Sequence
aagctgctggaaggctgcctggtgg

SEQ ID NO: 161337 - DNA, 25 bp, Probe Sequence
aacctggtgctccatccatgggagc

SEQ ID NO: 161338 - DNA, 25 bp, Probe Sequence
aacctgctgcacggatacatgggaa

SEQ ID NO: 161339 - DNA, 25 bp, Probe Sequence
aaccactgcactactgactcaggaa

SEQ ID NO: 161340 - DNA, 25 bp, Probe Sequence
aaccagtgcgtgggccacagggagg

SEQ ID NO: 161341 - DNA, 25 bp, Probe Sequence
aaccaagcctgcaaccatagggaga

SEQ ID NO: 161342 - DNA, 25 bp, Probe Sequence
aaccaagctctctcagaattgaaga

SEQ ID NO: 161343 - DNA, 25 bp, Probe Sequence
aaccaatgtgacaagtgctttaatg

SEQ ID NO: 161344 - DNA, 25 bp, Probe Sequence
aaccacataccaagcactattatat

SEQ ID NO: 161345 - DNA, 25 bp, Probe Sequence
aagcctgcaaccagatgttttacta

SEQ ID NO: 161346 - DNA, 25 bp, Probe Sequence
aagcctattcgcaggatttctcatt

SEQ ID NO: 161347 - DNA, 25 bp, Probe Sequence
aatcgtttccaagcattatcgtatc

SEQ ID NO: 161348 - DNA, 25 bp, Probe Sequence
aagccttactaagcatatgatagtt

SEQ ID NO: 161349 - DNA, 25 bp, Probe Sequence
aagccagttctgttttatgaaatat

SEQ ID NO: 161350 - DNA, 25 bp, Probe Sequence
aagccatttgtgtaatctccaaaag

SEQ ID NO: 161351 - DNA, 25 bp, Probe Sequence
aaccttattatattctccatagagg

SEQ ID NO: 161352 - DNA, 25 bp, Probe Sequence
aagcccttactagaccaatgggact

SEQ ID NO: 161353 - DNA, 25 bp, Probe Sequence
aagaccaccctagacaacatagtga

SEQ ID NO: 161354 - DNA, 25 bp, Probe Sequence
aagactcaccttgcaaaaaaagata

SEQ ID NO: 161355 - DNA, 25 bp, Probe Sequence
aagcctccctcagagacaaagtcac

SEQ ID NO: 161356 - DNA, 25 bp, Probe Sequence
aagccttccggcgcataaagtcagc

SEQ ID NO: 161357 - DNA, 25 bp, Probe Sequence
aacctcattggccagctcataaaat

SEQ ID NO: 161358 - DNA, 25 bp, Probe Sequence
aacctttggccacttgctgagatat

SEQ ID NO: 161359 - DNA, 25 bp, Probe Sequence
aagccttggtctcctgtggaatgat

SEQ ID NO: 161360 - DNA, 25 bp, Probe Sequence
aaccttgtttcactgtcacatatga

SEQ ID NO: 161361 - DNA, 25 bp, Probe Sequence
aagcctagatcttcagtatcataaa

SEQ ID NO: 161362 - DNA, 25 bp, Probe Sequence
aagcctcagtaactgatgcaatcaa

SEQ ID NO: 161363 - DNA, 25 bp, Probe Sequence
aacctcccaagctatgagtacctct

SEQ ID NO: 161364 - DNA, 25 bp, Probe Sequence
aacctggacaactcagtgcacctgt

SEQ ID NO: 161365 - DNA, 25 bp, Probe Sequence
aaccgagaccatttgcaggaggtgg

SEQ ID NO: 161366 - DNA, 25 bp, Probe Sequence
aaccagacacctgtgtgcctgaagg

SEQ ID NO: 161367 - DNA, 25 bp, Probe Sequence
aaccacactcagtctttgttcaatg

SEQ ID NO: 161368 - DNA, 25 bp, Probe Sequence
aagctaccaatgactttcttcacag

SEQ ID NO: 161369 - DNA, 25 bp, Probe Sequence
aagcgatcaagatctcgatcaccca

SEQ ID NO: 161370 - DNA, 25 bp, Probe Sequence
aaccatagaccaattatctacagag

SEQ ID NO: 161371 - DNA, 25 bp, Probe Sequence
aaccataaccatactaccatcaata

SEQ ID NO: 161372 - DNA, 25 bp, Probe Sequence
aacctatacacaaccaagtgaaagg

SEQ ID NO: 161373 - DNA, 25 bp, Probe Sequence
aaccatgatcccaatccaagtgaat

SEQ ID NO: 161374 - DNA, 25 bp, Probe Sequence
aaccatttgacagtgccaaggactt

SEQ ID NO: 161375 - DNA, 25 bp, Probe Sequence
aacctgctctacagcaaagacaccg

SEQ ID NO: 161376 - DNA, 25 bp, Probe Sequence
aacctgctctacagcaaagacaccg

SEQ ID NO: 161377 - DNA, 25 bp, Probe Sequence
aagcgtgttatatcaacgacgtctg

SEQ ID NO: 161378 - DNA, 25 bp, Probe Sequence
aagcttattgtagtaacagactctt

SEQ ID NO: 161379 - DNA, 25 bp, Probe Sequence
aagcgtttctcgaaagctgttctat

SEQ ID NO: 161380 - DNA, 25 bp, Probe Sequence
aagctgtggactcacaaattttacc

SEQ ID NO: 161381 - DNA, 25 bp, Probe Sequence
aagctgttagcaggataatatttta

SEQ ID NO: 161382 - DNA, 25 bp, Probe Sequence
aagcagtaaccttaatttcctatgt

SEQ ID NO: 161383 - DNA, 25 bp, Probe Sequence
aagcaggaaacctgattgccctcat

SEQ ID NO: 161384 - DNA, 25 bp, Probe Sequence
aaccagaaacacagtcatctcccat

SEQ ID NO: 161385 - DNA, 25 bp, Probe Sequence
aaccagcagaacattcttctcttca

SEQ ID NO: 161386 - DNA, 25 bp, Probe Sequence
aaccagagattgtctttcctgttgg

SEQ ID NO: 161387 - DNA, 25 bp, Probe Sequence
aaccatgacaagctcattcctttgc

SEQ ID NO: 161388 - DNA, 25 bp, Probe Sequence
aacctagcacccgagattctatgtg

SEQ ID NO: 161389 - DNA, 25 bp, Probe Sequence
aacctgcatagcccaaatccaagtg

SEQ ID NO: 161390 - DNA, 25 bp, Probe Sequence
aaccactggctgtcagaacaagaag

SEQ ID NO: 161391 - DNA, 25 bp, Probe Sequence
aaccactaatgggcaagcaatacaa

SEQ ID NO: 161392 - DNA, 25 bp, Probe Sequence
aaccaggaatggaaaccatagagcc

SEQ ID NO: 161393 - DNA, 25 bp, Probe Sequence
aaccacaaggtgcataccatgatag

SEQ ID NO: 161394 - DNA, 25 bp, Probe Sequence
aatcttctgggtccagacctgcttg

SEQ ID NO: 161395 - DNA, 25 bp, Probe Sequence
aagcttctggttcagatctgtgcct

SEQ ID NO: 161396 - DNA, 25 bp, Probe Sequence
aagcgtgtggagtccgtgtggcttt

SEQ ID NO: 161397 - DNA, 25 bp, Probe Sequence
aagcgattctgaacccttcagtcct

SEQ ID NO: 161398 - DNA, 25 bp, Probe Sequence
aagcgattctgaacccttcagtcct

SEQ ID NO: 161399 - DNA, 25 bp, Probe Sequence
aagcgattctgaacccttcagtcct

SEQ ID NO: 161400 - DNA, 25 bp, Probe Sequence
aagcgattctgaacccttcagtcct

SEQ ID NO: 161401 - DNA, 25 bp, Probe Sequence
aagaagcagctaaacctcctttctc

SEQ ID NO: 161402 - DNA, 25 bp, Probe Sequence
aagtagacactttctcgtttgttct

SEQ ID NO: 161403 - DNA, 25 bp, Probe Sequence
aagctacaacttggcctgtgccttt

SEQ ID NO: 161404 - DNA, 25 bp, Probe Sequence
aaccaaatactgcccatggcctgtt

SEQ ID NO: 161405 - DNA, 25 bp, Probe Sequence
aagccaacaacagtcgctgggttta

SEQ ID NO: 161406 - DNA, 25 bp, Probe Sequence
aagccacctactgccaggaattgga

SEQ ID NO: 161407 - DNA, 25 bp, Probe Sequence
aagccacctaaatcagtttaggagg

SEQ ID NO: 161408 - DNA, 25 bp, Probe Sequence
aaccaccattaatcagctttggggc

SEQ ID NO: 161409 - DNA, 25 bp, Probe Sequence
aaccagctttaaaggctgtgttgct

SEQ ID NO: 161410 - DNA, 25 bp, Probe Sequence
aaccagcattctaattagatttact

SEQ ID NO: 161411 - DNA, 25 bp, Probe Sequence
aaccacatcaggattgccatttcac

SEQ ID NO: 161412 - DNA, 25 bp, Probe Sequence
aaccaatttgtggtgcacactgtac

SEQ ID NO: 161413 - DNA, 25 bp, Probe Sequence
aaccaaatctgggtgtcagaggcca

SEQ ID NO: 161414 - DNA, 25 bp, Probe Sequence
aaccaaatgttctttcttgcagcca

SEQ ID NO: 161415 - DNA, 25 bp, Probe Sequence
aaccaaactggactctcgtgcagaa

SEQ ID NO: 161416 - DNA, 25 bp, Probe Sequence
aagccaaggcttagcctccatgaag

SEQ ID NO: 161417 - DNA, 25 bp, Probe Sequence
aagccagatgacgtgatccttaaag

SEQ ID NO: 161418 - DNA, 25 bp, Probe Sequence
aagccaacatcccacttgagaaggc

SEQ ID NO: 161419 - DNA, 25 bp, Probe Sequence
aagaagacgacgcccatagaagccg

SEQ ID NO: 161420 - DNA, 25 bp, Probe Sequence
aatgtagaggggccaataaacatga

SEQ ID NO: 161421 - DNA, 25 bp, Probe Sequence
aagctgtggtggggatgaacaactg

SEQ ID NO: 161422 - DNA, 25 bp, Probe Sequence
aagccggtgcgctgctgaaaacgat

SEQ ID NO: 161423 - DNA, 25 bp, Probe Sequence
aaccaatgtggccgtggtacggatg

SEQ ID NO: 161424 - DNA, 25 bp, Probe Sequence
aaccagactgggaggcatgacaagt

SEQ ID NO: 161425 - DNA, 25 bp, Probe Sequence
aagccgtcagggaaggaagcaacat

SEQ ID NO: 161426 - DNA, 25 bp, Probe Sequence
aagccttgggacaatgagaccaata

SEQ ID NO: 161427 - DNA, 25 bp, Probe Sequence
aacctgggtatctggatatcaaagg

SEQ ID NO: 161428 - DNA, 25 bp, Probe Sequence
aagcctgggtcatggaacaaaatag

SEQ ID NO: 161429 - DNA, 25 bp, Probe Sequence
aagccagggaatttacaataacatt

SEQ ID NO: 161430 - DNA, 25 bp, Probe Sequence
aaccagggacattcacctgtgttca

SEQ ID NO: 161431 - DNA, 25 bp, Probe Sequence
aaccatgtcaaataccctgttcaga

SEQ ID NO: 161432 - DNA, 25 bp, Probe Sequence
aaccagtatagtgagggtgttcaga

SEQ ID NO: 161433 - DNA, 25 bp, Probe Sequence
aaccagtcacacgggagcgtttggg

SEQ ID NO: 161434 - DNA, 25 bp, Probe Sequence
aaccagagcgaggccaagcagtctt

SEQ ID NO: 161435 - DNA, 25 bp, Probe Sequence
aaccaagtgcaggtcaacactggtg

SEQ ID NO: 161436 - DNA, 25 bp, Probe Sequence
aaccatgagaatttgcaacagggga

SEQ ID NO: 161437 - DNA, 25 bp, Probe Sequence
aagctctgcaaaactgaacaggacc

SEQ ID NO: 161438 - DNA, 25 bp, Probe Sequence
aagccgcaaaggcagcaggctaccg

SEQ ID NO: 161439 - DNA, 25 bp, Probe Sequence
aagcgaaagcggcaggatcgacgcg

SEQ ID NO: 161440 - DNA, 25 bp, Probe Sequence
aagctccatgacacattggactacg

SEQ ID NO: 161441 - DNA, 25 bp, Probe Sequence
aagccctcacatcagtggatgctta

SEQ ID NO: 161442 - DNA, 25 bp, Probe Sequence
aagccccacatccaggtgagactgg

SEQ ID NO: 161443 - DNA, 25 bp, Probe Sequence
aagcattccccttggaaactggcac

SEQ ID NO: 161444 - DNA, 25 bp, Probe Sequence
aagttatcccttgctactttactga

SEQ ID NO: 161445 - DNA, 25 bp, Probe Sequence
aagctaagcccttctaactttgagt

SEQ ID NO: 161446 - DNA, 25 bp, Probe Sequence
aagctgaacctatttactttctgac

SEQ ID NO: 161447 - DNA, 25 bp, Probe Sequence
aagctgaaactggtctactgtgtct

SEQ ID NO: 161448 - DNA, 25 bp, Probe Sequence
aagcagagaactctcggctacctag

SEQ ID NO: 161449 - DNA, 25 bp, Probe Sequence
aagcctgaacccgggtgatggctga

SEQ ID NO: 161450 - DNA, 25 bp, Probe Sequence
aacctaccagttggccatgatgtct

SEQ ID NO: 161451 - DNA, 25 bp, Probe Sequence
aaccagcaggagttcgtcagagctc

SEQ ID NO: 161452 - DNA, 25 bp, Probe Sequence
aaccagcaggagttcgtcagagctc

SEQ ID NO: 161453 - DNA, 25 bp, Probe Sequence
aagccacaggaattccttatgtgtg

SEQ ID NO: 161454 - DNA, 25 bp, Probe Sequence
aacctcagccactttcttgagagtg

SEQ ID NO: 161455 - DNA, 25 bp, Probe Sequence
aacctcagccactttcttgagagtg

SEQ ID NO: 161456 - DNA, 25 bp, Probe Sequence
aacctctaacttactgataagatgt

SEQ ID NO: 161457 - DNA, 25 bp, Probe Sequence
aaccttattttactacacgcattgt

SEQ ID NO: 161458 - DNA, 25 bp, Probe Sequence
aacctcttttgtagtgacacagtgg

SEQ ID NO: 161459 - DNA, 25 bp, Probe Sequence
aacctcttttgcatagttgcgtagg

SEQ ID NO: 161460 - DNA, 25 bp, Probe Sequence
aagctatttttcataatctctgggg

SEQ ID NO: 161461 - DNA, 25 bp, Probe Sequence
aagcctttggtcataatcgctgaag

SEQ ID NO: 161462 - DNA, 25 bp, Probe Sequence
aagcctttcctttagaagccagatg

SEQ ID NO: 161463 - DNA, 25 bp, Probe Sequence
aagctttagtttccagagagctggt

SEQ ID NO: 161464 - DNA, 25 bp, Probe Sequence
aagctgttgaatcagacagtgcagg

SEQ ID NO: 161465 - DNA, 25 bp, Probe Sequence
aagctggctgaccggaagctgtgtg

SEQ ID NO: 161466 - DNA, 25 bp, Probe Sequence
ctggccatcagcccaacaagacagc

SEQ ID NO: 161467 - DNA, 25 bp, Probe Sequence
caagttggcctatacccggcaaatt

SEQ ID NO: 161468 - DNA, 25 bp, Probe Sequence
cacgatttcctaaagtacctggcaa

SEQ ID NO: 161469 - DNA, 25 bp, Probe Sequence
aagctttgcccaaacaatccatgga

SEQ ID NO: 161470 - DNA, 25 bp, Probe Sequence
aacctccacagcaaacgattatgtg

SEQ ID NO: 161471 - DNA, 25 bp, Probe Sequence
aacctctccatggaacatgcatttt

SEQ ID NO: 161472 - DNA, 25 bp, Probe Sequence
aaccttccatgtcaagattcagcta

SEQ ID NO: 161473 - DNA, 25 bp, Probe Sequence
aaccatcggttctatatatctagct

SEQ ID NO: 161474 - DNA, 25 bp, Probe Sequence
aaccatctctttttatattatgccg

SEQ ID NO: 161475 - DNA, 25 bp, Probe Sequence
aaccactctttgatcatggctctct

SEQ ID NO: 161476 - DNA, 25 bp, Probe Sequence
aacctcattctgaataatgtccctc

SEQ ID NO: 161477 - DNA, 25 bp, Probe Sequence
aagcctctcatagaaattgcctcca

SEQ ID NO: 161478 - DNA, 25 bp, Probe Sequence
aaccttcagagattgacacgctgtc

SEQ ID NO: 161479 - DNA, 25 bp, Probe Sequence
aaccttgagtattgcagttgctgct

SEQ ID NO: 161480 - DNA, 25 bp, Probe Sequence
aagcctgtggctatcgaggcatgct

SEQ ID NO: 161481 - DNA, 25 bp, Probe Sequence
aagcctgtggctatcgaggcatgct

SEQ ID NO: 161482 - DNA, 25 bp, Probe Sequence
aagctcggagcctttcagtagcttg

SEQ ID NO: 161483 - DNA, 25 bp, Probe Sequence
aatgccgagtggctgactgtactta

SEQ ID NO: 161484 - DNA, 25 bp, Probe Sequence
aagcccagtgggcaaatccttttga

SEQ ID NO: 161485 - DNA, 25 bp, Probe Sequence
aacctatggggaatgatattttttg

SEQ ID NO: 161486 - DNA, 25 bp, Probe Sequence
aagctcttcgggagaatctttattt

SEQ ID NO: 161487 - DNA, 25 bp, Probe Sequence
aagctcttcctgcaggtattttcca

SEQ ID NO: 161488 - DNA, 25 bp, Probe Sequence
aagactatctgcagaagtaatttgc

SEQ ID NO: 161489 - DNA, 25 bp, Probe Sequence
aagccttcagcgaacgtgaaatgtg

SEQ ID NO: 161490 - DNA, 25 bp, Probe Sequence
aagctgagtcagctacgggcaagcg

SEQ ID NO: 161491 - DNA, 25 bp, Probe Sequence
aagctgagtcagctacgggcaagcg

SEQ ID NO: 161492 - DNA, 25 bp, Probe Sequence
aagcagagctcgttttagtgaaccg

SEQ ID NO: 161493 - DNA, 25 bp, Probe Sequence
aagctgacatcacgtgggagttacc

SEQ ID NO: 161494 - DNA, 25 bp, Probe Sequence
aagcgagcacaactgggagacctcc

SEQ ID NO: 161495 - DNA, 25 bp, Probe Sequence
aagccagatctacgagataacccca

SEQ ID NO: 161496 - DNA, 25 bp, Probe Sequence
aagccagactagcatgtaaaatcat

SEQ ID NO: 161497 - DNA, 25 bp, Probe Sequence
aagccgagccagccaaaatagaagc

SEQ ID NO: 161498 - DNA, 25 bp, Probe Sequence
aagccgcggatgcaaaaagctgccc

SEQ ID NO: 161499 - DNA, 25 bp, Probe Sequence
aacctaattgtaaaacagtcaccat

SEQ ID NO: 161500 - DNA, 25 bp, Probe Sequence
aacctcaattgctattgacacaatc

SEQ ID NO: 161501 - DNA, 25 bp, Probe Sequence
aagcctcatttgaatgtgtgaattc

SEQ ID NO: 161502 - DNA, 25 bp, Probe Sequence
aagcctcatttgaatgtgtgaattc

SEQ ID NO: 161503 - DNA, 25 bp, Probe Sequence
aagcctcatttgaatgtgtgaattc

SEQ ID NO: 161504 - DNA, 25 bp, Probe Sequence
aagccaagtttgatgcagaactctt

SEQ ID NO: 161505 - DNA, 25 bp, Probe Sequence
aagcctagtctaacactgaactcat

SEQ ID NO: 161506 - DNA, 25 bp, Probe Sequence
aagcctgacctttcaaatccatgat

SEQ ID NO: 161507 - DNA, 25 bp, Probe Sequence
aagcctatctgagttcaaacccttg

SEQ ID NO: 161508 - DNA, 25 bp, Probe Sequence
aaccagtctgaagtatcatacccat

SEQ ID NO: 161509 - DNA, 25 bp, Probe Sequence
aaccatgtcttgatttaccttgata

SEQ ID NO: 161510 - DNA, 25 bp, Probe Sequence
aagcctgactgtgtaaacgttgaag

SEQ ID NO: 161511 - DNA, 25 bp, Probe Sequence
aagccagcaaatgatataacgtctc

SEQ ID NO: 161512 - DNA, 25 bp, Probe Sequence
aagccagcaattgttaaagtctatg

SEQ ID NO: 161513 - DNA, 25 bp, Probe Sequence
aagccaagtgtttcttcaagattag

SEQ ID NO: 161514 - DNA, 25 bp, Probe Sequence
aaccacactgatgccttgataatta

SEQ ID NO: 161515 - DNA, 25 bp, Probe Sequence
aaccaacaaatcattgatactcttg

SEQ ID NO: 161516 - DNA, 25 bp, Probe Sequence
aaccatactaccatcaatactcatc

SEQ ID NO: 161517 - DNA, 25 bp, Probe Sequence
aacctacacaaaccagtacttgcct

SEQ ID NO: 161518 - DNA, 25 bp, Probe Sequence
aagttcaccaaaaagctgacttact

SEQ ID NO: 161519 - DNA, 25 bp, Probe Sequence
aagcactaccagacaaagcgtatta

SEQ ID NO: 161520 - DNA, 25 bp, Probe Sequence
aagctcatgttctacacagacttgt

SEQ ID NO: 161521 - DNA, 25 bp, Probe Sequence
aagccatttaaaaatctatattctt

SEQ ID NO: 161522 - DNA, 25 bp, Probe Sequence
aagctctttaaatcaccatcttccc

SEQ ID NO: 161523 - DNA, 25 bp, Probe Sequence
aaccatataataaatcacctcttcc

SEQ ID NO: 161524 - DNA, 25 bp, Probe Sequence
aaccatatggatcaaaccacaatgc

SEQ ID NO: 161525 - DNA, 25 bp, Probe Sequence
aaccaagagagtaagagctcacaca

SEQ ID NO: 161526 - DNA, 25 bp, Probe Sequence
aaccagagcgaggctgggtctcaca

SEQ ID NO: 161527 - DNA, 25 bp, Probe Sequence
aaccaaacactgcatgttctcactc

SEQ ID NO: 161528 - DNA, 25 bp, Probe Sequence
aagccaagaacttgtgtgtccccca

SEQ ID NO: 161529 - DNA, 25 bp, Probe Sequence
aagccaccatacaggctatacacga

SEQ ID NO: 161530 - DNA, 25 bp, Probe Sequence
aagctgaaatacaagccttacattg

SEQ ID NO: 161531 - DNA, 25 bp, Probe Sequence
aagctgagaaacattcttacaacta

SEQ ID NO: 161532 - DNA, 25 bp, Probe Sequence
aagctaaagaacttctgcacgcaaa

SEQ ID NO: 161533 - DNA, 25 bp, Probe Sequence
aagctagtgatcaacagtggcaatg

SEQ ID NO: 161534 - DNA, 25 bp, Probe Sequence
aagctgcacatgactacatagtaag

SEQ ID NO: 161535 - DNA, 25 bp, Probe Sequence
aagctgcaagcagtgaccatgcgca

SEQ ID NO: 161536 - DNA, 25 bp, Probe Sequence
aaccaacacatactgtcagactggg

SEQ ID NO: 161537 - DNA, 25 bp, Probe Sequence
aagcctatcacgcgtgaatcggtgt

SEQ ID NO: 161538 - DNA, 25 bp, Probe Sequence
aagccatgaacgagtattcagctct

SEQ ID NO: 161539 - DNA, 25 bp, Probe Sequence
aagccatgcatacaactttggtcat

SEQ ID NO: 161540 - DNA, 25 bp, Probe Sequence
aagcctgcgaggaagcctatggaat

SEQ ID NO: 161541 - DNA, 25 bp, Probe Sequence
aagcctgagaagagcctggccaagg

SEQ ID NO: 161542 - DNA, 25 bp, Probe Sequence
aaccaatgattgaagcctgcccatc

SEQ ID NO: 161543 - DNA, 25 bp, Probe Sequence
aaccagcagatattcctgcgggaca

SEQ ID NO: 161544 - DNA, 25 bp, Probe Sequence
aagctagctgaatctgctcagggta

SEQ ID NO: 161545 - DNA, 25 bp, Probe Sequence
aagctacaaacaatgccacgcttat

SEQ ID NO: 161546 - DNA, 25 bp, Probe Sequence
aagcagttaacagtgccaccggtgt

SEQ ID NO: 161547 - DNA, 25 bp, Probe Sequence
aagcagttaacagtgccaccggtgt

SEQ ID NO: 161548 - DNA, 25 bp, Probe Sequence
aagcttgtcacaaacccttggagtc

SEQ ID NO: 161549 - DNA, 25 bp, Probe Sequence
aagttgacatctgacgacgtgaagg

SEQ ID NO: 161550 - DNA, 25 bp, Probe Sequence
aagggagcagccacgttaggaagag

SEQ ID NO: 161551 - DNA, 25 bp, Probe Sequence
aagaaggcaactgcgtaaccagtgg

SEQ ID NO: 161552 - DNA, 25 bp, Probe Sequence
aagaatggccccaggaacttgtctg

SEQ ID NO: 161553 - DNA, 25 bp, Probe Sequence
aagagctgaccctcaaatacggagc

SEQ ID NO: 161554 - DNA, 25 bp, Probe Sequence
aagcctgatcccaatccattaggga

SEQ ID NO: 161555 - DNA, 25 bp, Probe Sequence
aagctttcccgatgttcagcatggt

SEQ ID NO: 161556 - DNA, 25 bp, Probe Sequence
aagctgtttcaatggtgtagtggac

SEQ ID NO: 161557 - DNA, 25 bp, Probe Sequence
aagctattgccaaaggtgtgggcat

SEQ ID NO: 161558 - DNA, 25 bp, Probe Sequence
aagctaggcagaagaggattcccag

SEQ ID NO: 161559 - DNA, 25 bp, Probe Sequence
aagcgtgtatgctgggatacccatt

SEQ ID NO: 161560 - DNA, 25 bp, Probe Sequence
aagcttgttggggagttcctggaag

SEQ ID NO: 161561 - DNA, 25 bp, Probe Sequence
aagctatgttcaaaggtatccttca

SEQ ID NO: 161562 - DNA, 25 bp, Probe Sequence
aaccagtctcagcaagacatcctac

SEQ ID NO: 161563 - DNA, 25 bp, Probe Sequence
aaccttgctgcccaaatcagccaag

SEQ ID NO: 161564 - DNA, 25 bp, Probe Sequence
aagcctatgcttgtagtcacagcta

SEQ ID NO: 161565 - DNA, 25 bp, Probe Sequence
aagcctcatcttctagcataaagtc

SEQ ID NO: 161566 - DNA, 25 bp, Probe Sequence
aagcctgctacacttacaacaacta

SEQ ID NO: 161567 - DNA, 25 bp, Probe Sequence
aagcctgatctcctgtaaaaacatc

SEQ ID NO: 161568 - DNA, 25 bp, Probe Sequence
aagcgagactctctaaagcaaattc

SEQ ID NO: 161569 - DNA, 25 bp, Probe Sequence
aagcttaagccataaaatagattag

SEQ ID NO: 161570 - DNA, 25 bp, Probe Sequence
aagcattgaaactaccaaaataaag

SEQ ID NO: 161571 - DNA, 25 bp, Probe Sequence
aagcatttattttcaaacactaagg

SEQ ID NO: 161572 - DNA, 25 bp, Probe Sequence
aagcatttacttttttgaccacgag

SEQ ID NO: 161573 - DNA, 25 bp, Probe Sequence
aagcatcaccactcattttgaccat

SEQ ID NO: 161574 - DNA, 25 bp, Probe Sequence
aagcagatccaatcactttgtttcc

SEQ ID NO: 161575 - DNA, 25 bp, Probe Sequence
caacaacgaaggacttttctccctg

SEQ ID NO: 161576 - DNA, 25 bp, Probe Sequence
aagaatcggaggcctacaagtccct

SEQ ID NO: 161577 - DNA, 25 bp, Probe Sequence
aagaagcgtgagacgccaccattcc

SEQ ID NO: 161578 - DNA, 25 bp, Probe Sequence
aagcagaagttgccgccctaacttc

SEQ ID NO: 161579 - DNA, 25 bp, Probe Sequence
aagaaaggcttgcacctgtacggca

SEQ ID NO: 161580 - DNA, 25 bp, Probe Sequence
aagaaacgttttcatgcttctggcc

SEQ ID NO: 161581 - DNA, 25 bp, Probe Sequence
aagcagaacgtggtacccaccgtgc

SEQ ID NO: 161582 - DNA, 25 bp, Probe Sequence
aagcagaacgtggtacccaccgtgc

SEQ ID NO: 161583 - DNA, 25 bp, Probe Sequence
aagcggaagtttgccacacgtgtgg

SEQ ID NO: 161584 - DNA, 25 bp, Probe Sequence
aaccaatagagattcccaaagtgag

SEQ ID NO: 161585 - DNA, 25 bp, Probe Sequence
aagcctaagagagagcctccaggag

SEQ ID NO: 161586 - DNA, 25 bp, Probe Sequence
aagcccaaagaaaccttgagagcag

SEQ ID NO: 161587 - DNA, 25 bp, Probe Sequence
aagtccaagggagagtgtgagtggg

SEQ ID NO: 161588 - DNA, 25 bp, Probe Sequence
aagactcaggggttacctccatgtg

SEQ ID NO: 161589 - DNA, 25 bp, Probe Sequence
aagacccagggagaacccactgctt

SEQ ID NO: 161590 - DNA, 25 bp, Probe Sequence
aagacaaaggaacgtatccctctgt

SEQ ID NO: 161591 - DNA, 25 bp, Probe Sequence
aaccacacagactaggttctgcctt

SEQ ID NO: 161592 - DNA, 25 bp, Probe Sequence
aaccatgccagatgaccttctgacc

SEQ ID NO: 161593 - DNA, 25 bp, Probe Sequence
aaccatccacatgacctttgtgcct

SEQ ID NO: 161594 - DNA, 25 bp, Probe Sequence
aaccagcacacagggctatttctcc

SEQ ID NO: 161595 - DNA, 25 bp, Probe Sequence
aagccagatcactgagtatttctct

SEQ ID NO: 161596 - DNA, 25 bp, Probe Sequence
aaccatgcactctggaatttgttgt

SEQ ID NO: 161597 - DNA, 25 bp, Probe Sequence
aagctcagctcctgcgatatgtgtg

SEQ ID NO: 161598 - DNA, 25 bp, Probe Sequence
aagccagctgttactaagccatgtg

SEQ ID NO: 161599 - DNA, 25 bp, Probe Sequence
aaccagtgatgcctcaaagacagtg

SEQ ID NO: 161600 - DNA, 25 bp, Probe Sequence
aagccagtgagcctctaatgctact

SEQ ID NO: 161601 - DNA, 25 bp, Probe Sequence
aagcctgagaggctggagcccatgg

SEQ ID NO: 161602 - DNA, 25 bp, Probe Sequence
aagccaagtgactatggaaccaggc

SEQ ID NO: 161603 - DNA, 25 bp, Probe Sequence
aagctaaatgataaaaacacatgga

SEQ ID NO: 161604 - DNA, 25 bp, Probe Sequence
aagcttaatttgctagtcaaggaaa

SEQ ID NO: 161605 - DNA, 25 bp, Probe Sequence
aagccaatctttgcatagctaatgg

SEQ ID NO: 161606 - DNA, 25 bp, Probe Sequence
aagcccatctttgtgtgcttgcatc

SEQ ID NO: 161607 - DNA, 25 bp, Probe Sequence
aagccactcataatgttgtcatttg

SEQ ID NO: 161608 - DNA, 25 bp, Probe Sequence
aagccattgttttgtgccattcagg

SEQ ID NO: 161609 - DNA, 25 bp, Probe Sequence
aagctctttattggtggcttaagct

SEQ ID NO: 161610 - DNA, 25 bp, Probe Sequence
aagcagtttgaaggcatacttttgc

SEQ ID NO: 161611 - DNA, 25 bp, Probe Sequence
caaatgtttacccaaacacttctca

SEQ ID NO: 161612 - DNA, 25 bp, Probe Sequence
cacaattttatagcacaaactttaa

SEQ ID NO: 161613 - DNA, 25 bp, Probe Sequence
caccctttatcacaaacccttgtag

SEQ ID NO: 161614 - DNA, 25 bp, Probe Sequence
caaccttttcagtaaagccctctgt

SEQ ID NO: 161615 - DNA, 25 bp, Probe Sequence
aagccttttggccataaccagtctc

SEQ ID NO: 161616 - DNA, 25 bp, Probe Sequence
aagccattttagctaaactgtcatt

SEQ ID NO: 161617 - DNA, 25 bp, Probe Sequence
aagccatgttttattgtatctgttt

SEQ ID NO: 161618 - DNA, 25 bp, Probe Sequence
aagccgtatgatgatgttcccgatt

SEQ ID NO: 161619 - DNA, 25 bp, Probe Sequence
aagcttctagaggctcatggccctg

SEQ ID NO: 161620 - DNA, 25 bp, Probe Sequence
aagcgttgacagcttggaagcgttt

SEQ ID NO: 161621 - DNA, 25 bp, Probe Sequence
aagcctttcagacgagtaagacttc

SEQ ID NO: 161622 - DNA, 25 bp, Probe Sequence
aagccttcaatcagggcaagatctt

SEQ ID NO: 161623 - DNA, 25 bp, Probe Sequence
aagactaagtcaaggtcaagaccta

SEQ ID NO: 161624 - DNA, 25 bp, Probe Sequence
aagcttctactcctgcagtaagcac

SEQ ID NO: 161625 - DNA, 25 bp, Probe Sequence
aagcgttattcaagcactccagact

SEQ ID NO: 161626 - DNA, 25 bp, Probe Sequence
aagcatttatttgcagctgcaaggg

SEQ ID NO: 161627 - DNA, 25 bp, Probe Sequence
aagctggtcattatcacggctgggg

SEQ ID NO: 161628 - DNA, 25 bp, Probe Sequence
aagcgagtattttccggcattcaac

SEQ ID NO: 161629 - DNA, 25 bp, Probe Sequence
aagcgagcagaggctccacaggctt

SEQ ID NO: 161630 - DNA, 25 bp, Probe Sequence
aagccaagacctggagcgagctgga

SEQ ID NO: 161631 - DNA, 25 bp, Probe Sequence
aagccctaccacaagaagcggaagt

SEQ ID NO: 161632 - DNA, 25 bp, Probe Sequence
aagccctaccacaagaagcggaagt

SEQ ID NO: 161633 - DNA, 25 bp, Probe Sequence
aagccctaccacaagaagcggaagt

SEQ ID NO: 161634 - DNA, 25 bp, Probe Sequence
aagccctacatctaagccagagaga

SEQ ID NO: 161635 - DNA, 25 bp, Probe Sequence
aaccaatacatcacatcagcagaat

SEQ ID NO: 161636 - DNA, 25 bp, Probe Sequence
aaccactgcttcaaatctcgatttc

SEQ ID NO: 161637 - DNA, 25 bp, Probe Sequence
aagccactttgcaacacttgacttc

SEQ ID NO: 161638 - DNA, 25 bp, Probe Sequence
aagctcttcagtggaccttgagcta

SEQ ID NO: 161639 - DNA, 25 bp, Probe Sequence
aagctcgtagttggatcttgggagc

SEQ ID NO: 161640 - DNA, 25 bp, Probe Sequence
aagccagtagtaacacctgaagcaa

SEQ ID NO: 161641 - DNA, 25 bp, Probe Sequence
aagctcggataggagacctggacaa

SEQ ID NO: 161642 - DNA, 25 bp, Probe Sequence
aagccgccatcagaagcgtggagct

SEQ ID NO: 161643 - DNA, 25 bp, Probe Sequence
aagcccctggaaatgcgtgtgacct

SEQ ID NO: 161644 - DNA, 25 bp, Probe Sequence
aaccacctgggtagatttgacatcc

SEQ ID NO: 161645 - DNA, 25 bp, Probe Sequence
aaccaattgggtggatttgattcta

SEQ ID NO: 161646 - DNA, 25 bp, Probe Sequence
aagccttctggggcgaattacggag

SEQ ID NO: 161647 - DNA, 25 bp, Probe Sequence
aagcctcggggggcagtgattctgg

SEQ ID NO: 161648 - DNA, 25 bp, Probe Sequence
aagcctcggggggcagtgattctgg

SEQ ID NO: 161649 - DNA, 25 bp, Probe Sequence
aagccacgcgtggtttgtgttggtg

SEQ ID NO: 161650 - DNA, 25 bp, Probe Sequence
aagccaaggtggatgtgtttcgtga

SEQ ID NO: 161651 - DNA, 25 bp, Probe Sequence
aagccaaagtagaagcagttgtcag

SEQ ID NO: 161652 - DNA, 25 bp, Probe Sequence
aaccaaagctcagatggggtcagaa

SEQ ID NO: 161653 - DNA, 25 bp, Probe Sequence
aaccaggactctgaggtgctaagat

SEQ ID NO: 161654 - DNA, 25 bp, Probe Sequence
aagcacggaatatagggttagatgt

SEQ ID NO: 161655 - DNA, 25 bp, Probe Sequence
aagccgctgaagaaaagtttacaat

SEQ ID NO: 161656 - DNA, 25 bp, Probe Sequence
aaccactaaagctagatgtttacct

SEQ ID NO: 161657 - DNA, 25 bp, Probe Sequence
aaccaaaagaatttgtgtttgtctg

SEQ ID NO: 161658 - DNA, 25 bp, Probe Sequence
aagtcgagaaaaaccgttggctctg

SEQ ID NO: 161659 - DNA, 25 bp, Probe Sequence
caagccaaaaacaaccgaatccctg

SEQ ID NO: 161660 - DNA, 25 bp, Probe Sequence
aaccaactataaaagcgtcaccgtg

SEQ ID NO: 161661 - DNA, 25 bp, Probe Sequence
aagccttcattattacacgttccag

SEQ ID NO: 161662 - DNA, 25 bp, Probe Sequence
aagcctctctgttgaaacggtccag

SEQ ID NO: 161663 - DNA, 25 bp, Probe Sequence
aagctatcttgttaagaaggtcgtg

SEQ ID NO: 161664 - DNA, 25 bp, Probe Sequence
aagcgacctcgatatgaagattcag

SEQ ID NO: 161665 - DNA, 25 bp, Probe Sequence
aagaatgcccgacagagacttctgg

SEQ ID NO: 161666 - DNA, 25 bp, Probe Sequence
aagcaaccccaaaagagttgatgtg

SEQ ID NO: 161667 - DNA, 25 bp, Probe Sequence
aataacctgcaataggcgggtgggt

SEQ ID NO: 161668 - DNA, 25 bp, Probe Sequence
aagacgcctgtctaatggggggaga

SEQ ID NO: 161669 - DNA, 25 bp, Probe Sequence
aagcatggccttgtggagcgggcga

SEQ ID NO: 161670 - DNA, 25 bp, Probe Sequence
aagcctgagtgtgtgtacgtgcgcg

SEQ ID NO: 161671 - DNA, 25 bp, Probe Sequence
aagccacgtgtcagtacagagaaac

SEQ ID NO: 161672 - DNA, 25 bp, Probe Sequence
aagccagagtggagacacagaacca

SEQ ID NO: 161673 - DNA, 25 bp, Probe Sequence
aagccagaggaaaacctatcctcag

SEQ ID NO: 161674 - DNA, 25 bp, Probe Sequence
aagccaggaagaacaactttgtagt

SEQ ID NO: 161675 - DNA, 25 bp, Probe Sequence
aagctggggagataactgtggtcaa

SEQ ID NO: 161676 - DNA, 25 bp, Probe Sequence
aagctggtggaagctatcaggacca

SEQ ID NO: 161677 - DNA, 25 bp, Probe Sequence
aagcaggtactggcgcttagaacca

SEQ ID NO: 161678 - DNA, 25 bp, Probe Sequence
aagatggtacttcccaagcaagccc

SEQ ID NO: 161679 - DNA, 25 bp, Probe Sequence
aagaagtcaactcccaaatagccct

SEQ ID NO: 161680 - DNA, 25 bp, Probe Sequence
aagaagcatccctcaagtaagccct

SEQ ID NO: 161681 - DNA, 25 bp, Probe Sequence
aagatggccccaaactaaagccact

SEQ ID NO: 161682 - DNA, 25 bp, Probe Sequence
aagattcctgaagagctaaaaccgt

SEQ ID NO: 161683 - DNA, 25 bp, Probe Sequence
aagagcccgaacagctgaggaagct

SEQ ID NO: 161684 - DNA, 25 bp, Probe Sequence
aaggcaccgaacagcgttgaattaa

SEQ ID NO: 161685 - DNA, 25 bp, Probe Sequence
aagcctccaaacatcacctaattaa

SEQ ID NO: 161686 - DNA, 25 bp, Probe Sequence
aagccatacaaaactacctggtaga

SEQ ID NO: 161687 - DNA, 25 bp, Probe Sequence
aagcctcagaactctattaggtgca

SEQ ID NO: 161688 - DNA, 25 bp, Probe Sequence
aagcttgtgaactctgtccagaaga

SEQ ID NO: 161689 - DNA, 25 bp, Probe Sequence
aaggtcggaaacgccagacttctat

SEQ ID NO: 161690 - DNA, 25 bp, Probe Sequence
aagaccggaaagatttgcattttat

SEQ ID NO: 161691 - DNA, 25 bp, Probe Sequence
aagccctggcaggcaggtgtttatt

SEQ ID NO: 161692 - DNA, 25 bp, Probe Sequence
aagcctttgctagggtgtcttgtgc

SEQ ID NO: 161693 - DNA, 25 bp, Probe Sequence
aagcacctccatattatgacttggt

SEQ ID NO: 161694 - DNA, 25 bp, Probe Sequence
aagcacctgtctcatacaatagggt

SEQ ID NO: 161695 - DNA, 25 bp, Probe Sequence
aagcaccgattcctcaagcttgaag

SEQ ID NO: 161696 - DNA, 25 bp, Probe Sequence
aagccttattcttcaactaaaagat

SEQ ID NO: 161697 - DNA, 25 bp, Probe Sequence
aagccttcacttgtcagtatcataa

SEQ ID NO: 161698 - DNA, 25 bp, Probe Sequence
aagcttctccttttcagacagatta

SEQ ID NO: 161699 - DNA, 25 bp, Probe Sequence
aagcttcatgcacttaaagaagtat

SEQ ID NO: 161700 - DNA, 25 bp, Probe Sequence
aagcctgctgatcttaagaagagaa

SEQ ID NO: 161701 - DNA, 25 bp, Probe Sequence
aagcccatgtggttaaacaaagtca

SEQ ID NO: 161702 - DNA, 25 bp, Probe Sequence
aagccgcagctgctatagatagcac

SEQ ID NO: 161703 - DNA, 25 bp, Probe Sequence
aagcctctctggaatggcacagcat

SEQ ID NO: 161704 - DNA, 25 bp, Probe Sequence
aagccatgcacatgcataggcaagg

SEQ ID NO: 161705 - DNA, 25 bp, Probe Sequence
aagccagccggcagtgaagagtgac

SEQ ID NO: 161706 - DNA, 25 bp, Probe Sequence
aagacacgggcatatcataggctga

SEQ ID NO: 161707 - DNA, 25 bp, Probe Sequence
aagacaagtgaatggcaatcctaaa

SEQ ID NO: 161708 - DNA, 25 bp, Probe Sequence
aagcatcgaggctataggacgcagc

SEQ ID NO: 161709 - DNA, 25 bp, Probe Sequence
aagcccaggcaaatggaacccatca

SEQ ID NO: 161710 - DNA, 25 bp, Probe Sequence
aagcctctggctattaacataccct

SEQ ID NO: 161711 - DNA, 25 bp, Probe Sequence
aagctttcctcagctgagagctacc

SEQ ID NO: 161712 - DNA, 25 bp, Probe Sequence
aagctagttcttctggagctcaact

SEQ ID NO: 161713 - DNA, 25 bp, Probe Sequence
aagccttttgtcagaagtcacatct

SEQ ID NO: 161714 - DNA, 25 bp, Probe Sequence
aagcctattgtgaacgacagggatt

SEQ ID NO: 161715 - DNA, 25 bp, Probe Sequence
aagcccagatggaacaagggatgtt

SEQ ID NO: 161716 - DNA, 25 bp, Probe Sequence
aagcctacatgacacagttggattt

SEQ ID NO: 161717 - DNA, 25 bp, Probe Sequence
aagctctcctggtaatgtttgtggt

SEQ ID NO: 161718 - DNA, 25 bp, Probe Sequence
aagcctcctgtaaatggaagttact

SEQ ID NO: 161719 - DNA, 25 bp, Probe Sequence
aagcctcctataacaaagggtggtg

SEQ ID NO: 161720 - DNA, 25 bp, Probe Sequence
aagcctccaatgaacagtatgcggg

SEQ ID NO: 161721 - DNA, 25 bp, Probe Sequence
aagcctgcttgtagccagtgatgcc

SEQ ID NO: 161722 - DNA, 25 bp, Probe Sequence
aagccatcgtggaaagagctgccca

SEQ ID NO: 161723 - DNA, 25 bp, Probe Sequence
aagacatcgggtttgaggggccgtg

SEQ ID NO: 161724 - DNA, 25 bp, Probe Sequence
aatagtcaaggtttgggccacacaa

SEQ ID NO: 161725 - DNA, 25 bp, Probe Sequence
aagcaggggtgtttgaaccaaccat

SEQ ID NO: 161726 - DNA, 25 bp, Probe Sequence
aagaacgttgtacacacaaacctgg

SEQ ID NO: 161727 - DNA, 25 bp, Probe Sequence
aagatagtgaagtacccccaagtgg

SEQ ID NO: 161728 - DNA, 25 bp, Probe Sequence
aagctagtaggcaagacccctcagt

SEQ ID NO: 161729 - DNA, 25 bp, Probe Sequence
aagctagtaagctacctacatctga

SEQ ID NO: 161730 - DNA, 25 bp, Probe Sequence
aagctagatcagcattctctaactt

SEQ ID NO: 161731 - DNA, 25 bp, Probe Sequence
aagaagacggattatctagagaata

SEQ ID NO: 161732 - DNA, 25 bp, Probe Sequence
aagaagctccgagactacggcatcc

SEQ ID NO: 161733 - DNA, 25 bp, Probe Sequence
aagacatgccctcacttaagtctac

SEQ ID NO: 161734 - DNA, 25 bp, Probe Sequence
aagaacagcctttttaggccacagt

SEQ ID NO: 161735 - DNA, 25 bp, Probe Sequence
aagaacagcctttttaggccacagt

SEQ ID NO: 161736 - DNA, 25 bp, Probe Sequence
aagaacagcctttttaggccacagt

SEQ ID NO: 161737 - DNA, 25 bp, Probe Sequence
aagaacagcctttttaggccacagt

SEQ ID NO: 161738 - DNA, 25 bp, Probe Sequence
aagctaagcccttactagaccaatg

SEQ ID NO: 161739 - DNA, 25 bp, Probe Sequence
aagctcaacccaaaagaaagacagg

SEQ ID NO: 161740 - DNA, 25 bp, Probe Sequence
aaccaacctaacaagaattaagcag

SEQ ID NO: 161741 - DNA, 25 bp, Probe Sequence
aaccaatcacaaccataaagctaca

SEQ ID NO: 161742 - DNA, 25 bp, Probe Sequence
aatccaactaacctcaaacaaatga

SEQ ID NO: 161743 - DNA, 25 bp, Probe Sequence
aagccaacatagtagtcttaaatta

SEQ ID NO: 161744 - DNA, 25 bp, Probe Sequence
aagccgtcaagatgatttggcagat

SEQ ID NO: 161745 - DNA, 25 bp, Probe Sequence
aagcctcctagggttctgagcagaa

SEQ ID NO: 161746 - DNA, 25 bp, Probe Sequence
aagcgtcgggtgtttatcattgaga

SEQ ID NO: 161747 - DNA, 25 bp, Probe Sequence
aagcccgggctgcagttgcaggtaa

SEQ ID NO: 161748 - DNA, 25 bp, Probe Sequence
aagcactccaggggttgtgggtttg

SEQ ID NO: 161749 - DNA, 25 bp, Probe Sequence
aatccattacacggttcgggtatat

SEQ ID NO: 161750 - DNA, 25 bp, Probe Sequence
aagccatcttcacctttacggtatt

SEQ ID NO: 161751 - DNA, 25 bp, Probe Sequence
aagccatgtggcccttatgggtggt

SEQ ID NO: 161752 - DNA, 25 bp, Probe Sequence
aagccatctgggcagtcaggggcaa

SEQ ID NO: 161753 - DNA, 25 bp, Probe Sequence
aagacagtcgagaagccagggggag

SEQ ID NO: 161754 - DNA, 25 bp, Probe Sequence
aagccaggcaagctgcaaagacgga

SEQ ID NO: 161755 - DNA, 25 bp, Probe Sequence
aagaaggacagacgcaaggaagaaa

SEQ ID NO: 161756 - DNA, 25 bp, Probe Sequence
aagcaatccaagatgcttggcaaga

SEQ ID NO: 161757 - DNA, 25 bp, Probe Sequence
aagcctctcctgatgcatttgtaaa

SEQ ID NO: 161758 - DNA, 25 bp, Probe Sequence
aagacttctggcagcaacgtaaaaa

SEQ ID NO: 161759 - DNA, 25 bp, Probe Sequence
aagccgttagacacacaggaaaaat

SEQ ID NO: 161760 - DNA, 25 bp, Probe Sequence
aagccttgctagtcattaacagaaa

SEQ ID NO: 161761 - DNA, 25 bp, Probe Sequence
aagctgcttcttattaatcatacaa

SEQ ID NO: 161762 - DNA, 25 bp, Probe Sequence
aagctgtacaatcgtttcatcattc

SEQ ID NO: 161763 - DNA, 25 bp, Probe Sequence
aagctgaatacaagtctttatatag

SEQ ID NO: 161764 - DNA, 25 bp, Probe Sequence
aagctgaatacaagtctttatatag

SEQ ID NO: 161765 - DNA, 25 bp, Probe Sequence
aagctgaatacaagtctttatatag

SEQ ID NO: 161766 - DNA, 25 bp, Probe Sequence
aagcttctgtgatgctctttatgaa

SEQ ID NO: 161767 - DNA, 25 bp, Probe Sequence
aagcccggatagacttattgccaaa

SEQ ID NO: 161768 - DNA, 25 bp, Probe Sequence
aagcctaggctaatcttgttccaaa

SEQ ID NO: 161769 - DNA, 25 bp, Probe Sequence
aagactggacttattactcccaaag

SEQ ID NO: 161770 - DNA, 25 bp, Probe Sequence
aagactgattttatgaacccaaaag

SEQ ID NO: 161771 - DNA, 25 bp, Probe Sequence
aagcctttgtctctgagacctctta

SEQ ID NO: 161772 - DNA, 25 bp, Probe Sequence
aagcttgtctgtagcgggttttgtg

SEQ ID NO: 161773 - DNA, 25 bp, Probe Sequence
aagcttgttgatagtgtagttttct

SEQ ID NO: 161774 - DNA, 25 bp, Probe Sequence
aagcttgcttttctggtatgttcta

SEQ ID NO: 161775 - DNA, 25 bp, Probe Sequence
aagcttgcttttctggtatgttcta

SEQ ID NO: 161776 - DNA, 25 bp, Probe Sequence
aagcttgcttttctggtatgttcta

SEQ ID NO: 161777 - DNA, 25 bp, Probe Sequence
aagcgagtacctatggtatgttctc

SEQ ID NO: 161778 - DNA, 25 bp, Probe Sequence
aagctaggacacctgtggtatcttt

SEQ ID NO: 161779 - DNA, 25 bp, Probe Sequence
aagctagaacagttttggcttctta

SEQ ID NO: 161780 - DNA, 25 bp, Probe Sequence
aagctgtgagaatttctagtgattt

SEQ ID NO: 161781 - DNA, 25 bp, Probe Sequence
aagcatggagaatcatcttgatgtc

SEQ ID NO: 161782 - DNA, 25 bp, Probe Sequence
aagctcgatagcaacacgtgatagc

SEQ ID NO: 161783 - DNA, 25 bp, Probe Sequence
aagcctgcaagtccagggcacaggc

SEQ ID NO: 161784 - DNA, 25 bp, Probe Sequence
aagcccagtgtgcggctacatgtct

SEQ ID NO: 161785 - DNA, 25 bp, Probe Sequence
aagcccatgtaaggagctgagttct

SEQ ID NO: 161786 - DNA, 25 bp, Probe Sequence
aagccactgatcaaggtcatagaaa

SEQ ID NO: 161787 - DNA, 25 bp, Probe Sequence
aagcatgcactctaaagtatcagat

SEQ ID NO: 161788 - DNA, 25 bp, Probe Sequence
aagctgcctccaaaatctgcatcag

SEQ ID NO: 161789 - DNA, 25 bp, Probe Sequence
aagcgcacttgctgatattgcacag

SEQ ID NO: 161790 - DNA, 25 bp, Probe Sequence
aagcgatatttattatctgcaaggt

SEQ ID NO: 161791 - DNA, 25 bp, Probe Sequence
aagcgagatggtagttctgcctggt

SEQ ID NO: 161792 - DNA, 25 bp, Probe Sequence
aagctggtggtatctaccaagtcct

SEQ ID NO: 161793 - DNA, 25 bp, Probe Sequence
aagctttctgtaactactagtgtcc

SEQ ID NO: 161794 - DNA, 25 bp, Probe Sequence
aagccttcagtaaatgttcattacc

SEQ ID NO: 161795 - DNA, 25 bp, Probe Sequence
aagccgccagtacttgtcatatgta

SEQ ID NO: 161796 - DNA, 25 bp, Probe Sequence
aagcctggcagatgcctggcatata

SEQ ID NO: 161797 - DNA, 25 bp, Probe Sequence
aagcctccatgatgttccagtactt

SEQ ID NO: 161798 - DNA, 25 bp, Probe Sequence
aagcctccatgatgttccagtactt

SEQ ID NO: 161799 - DNA, 25 bp, Probe Sequence
aagcctcagagtacttcgagtctcc

SEQ ID NO: 161800 - DNA, 25 bp, Probe Sequence
aagccacaatgtacttccaactctt

SEQ ID NO: 161801 - DNA, 25 bp, Probe Sequence
aagccacaagttatgctaagtcagc

SEQ ID NO: 161802 - DNA, 25 bp, Probe Sequence
aagctaaagtcttgatgccatcaaa

SEQ ID NO: 161803 - DNA, 25 bp, Probe Sequence
aagctacacagactggattcagaga

SEQ ID NO: 161804 - DNA, 25 bp, Probe Sequence
aagctcaccagaacaagctagaaga

SEQ ID NO: 161805 - DNA, 25 bp, Probe Sequence
aagctcagccagaaactgcgggaac

SEQ ID NO: 161806 - DNA, 25 bp, Probe Sequence
aagcctgacagaatactcaggttag

SEQ ID NO: 161807 - DNA, 25 bp, Probe Sequence
aagcagctgaaactcaatcaggttt

SEQ ID NO: 161808 - DNA, 25 bp, Probe Sequence
aagcatgtatcaaatactcagtgta

SEQ ID NO: 161809 - DNA, 25 bp, Probe Sequence
aagctctatataaatgctcagagtt

SEQ ID NO: 161810 - DNA, 25 bp, Probe Sequence
aagccttttcgactgcaggatcatc

SEQ ID NO: 161811 - DNA, 25 bp, Probe Sequence
aagcctttttgactgtgtacatctg

SEQ ID NO: 161812 - DNA, 25 bp, Probe Sequence
aagcactatgtctgggttgacctag

SEQ ID NO: 161813 - DNA, 25 bp, Probe Sequence
aagccattgtcttcggaaaccttgg

SEQ ID NO: 161814 - DNA, 25 bp, Probe Sequence
aagctatatactttggttacctatg

SEQ ID NO: 161815 - DNA, 25 bp, Probe Sequence
aagccatccactatgcgttgaactg

SEQ ID NO: 161816 - DNA, 25 bp, Probe Sequence
aagcagtcccttaatattgaggctg

SEQ ID NO: 161817 - DNA, 25 bp, Probe Sequence
aagagtcctcttgaagaggccttaa

SEQ ID NO: 161818 - DNA, 25 bp, Probe Sequence
aagaacaccatggagcaggcagtca

SEQ ID NO: 161819 - DNA, 25 bp, Probe Sequence
aagcagatgacctcacaggagtgat

SEQ ID NO: 161820 - DNA, 25 bp, Probe Sequence
aagcagtgaccatgcgcagggttct

SEQ ID NO: 161821 - DNA, 25 bp, Probe Sequence
aagcggagccaacatgccagtggcc

SEQ ID NO: 161822 - DNA, 25 bp, Probe Sequence
aagcggcaggaataccactgctcct

SEQ ID NO: 161823 - DNA, 25 bp, Probe Sequence
aagcccaggagattaccagttatac

SEQ ID NO: 161824 - DNA, 25 bp, Probe Sequence
aagcaccaagcagagaccacattaa

SEQ ID NO: 161825 - DNA, 25 bp, Probe Sequence
aagctggatagagtcatggcccatt

SEQ ID NO: 161826 - DNA, 25 bp, Probe Sequence
aagcggatgagagagagcccacaga

SEQ ID NO: 161827 - DNA, 25 bp, Probe Sequence
aagcaggtagccagagagcgccatc

SEQ ID NO: 161828 - DNA, 25 bp, Probe Sequence
aagacgatgcagggtgagggccccc

SEQ ID NO: 161829 - DNA, 25 bp, Probe Sequence
aagccgatggaattcagggcctgct

SEQ ID NO: 161830 - DNA, 25 bp, Probe Sequence
aagccgattacattatcagccctat

SEQ ID NO: 161831 - DNA, 25 bp, Probe Sequence
aagccgcactcagttatggcttcta

SEQ ID NO: 161832 - DNA, 25 bp, Probe Sequence
aagccatcgccaaatatgacttcaa

SEQ ID NO: 161833 - DNA, 25 bp, Probe Sequence
aagccaggcagaaattaccatctct

SEQ ID NO: 161834 - DNA, 25 bp, Probe Sequence
aagccataaatattcttccccatcc

SEQ ID NO: 161835 - DNA, 25 bp, Probe Sequence
aagcctcactattacttgaactttc

SEQ ID NO: 161836 - DNA, 25 bp, Probe Sequence
aagctacctgactactttatctttt

SEQ ID NO: 161837 - DNA, 25 bp, Probe Sequence
aagccctggataatgctttactttc

SEQ ID NO: 161838 - DNA, 25 bp, Probe Sequence
aagccggagttgcattctagtttct

SEQ ID NO: 161839 - DNA, 25 bp, Probe Sequence
aagcgaaagtggcattataggtgtt

SEQ ID NO: 161840 - DNA, 25 bp, Probe Sequence
taaaaaggggtcactatggagttca

SEQ ID NO: 161841 - DNA, 25 bp, Probe Sequence
aagcataaggacgcccttgtggaat

SEQ ID NO: 161842 - DNA, 25 bp, Probe Sequence
aatcagaagggcaccatcttggggc

SEQ ID NO: 161843 - DNA, 25 bp, Probe Sequence
aagcaactgggcaccattacaggaa

SEQ ID NO: 161844 - DNA, 25 bp, Probe Sequence
aagcaactagagcttcttagtggat

SEQ ID NO: 161845 - DNA, 25 bp, Probe Sequence
aagcaagaaggcgatagcttttaga

SEQ ID NO: 161846 - DNA, 25 bp, Probe Sequence
aagcacattgggccaactatttagt

SEQ ID NO: 161847 - DNA, 25 bp, Probe Sequence
aagcactcctagcccaatatttatt

SEQ ID NO: 161848 - DNA, 25 bp, Probe Sequence
aagcatcccataagcctattattta

SEQ ID NO: 161849 - DNA, 25 bp, Probe Sequence
aagcacactctaacttacaggatta

SEQ ID NO: 161850 - DNA, 25 bp, Probe Sequence
aagcaacctaccttccaggttacat

SEQ ID NO: 161851 - DNA, 25 bp, Probe Sequence
aagcaaccaacttagccagttttat

SEQ ID NO: 161852 - DNA, 25 bp, Probe Sequence
aagcaagtcaccttagggtggcttt

SEQ ID NO: 161853 - DNA, 25 bp, Probe Sequence
aagcattgggccatagtttgttaat

SEQ ID NO: 161854 - DNA, 25 bp, Probe Sequence
aagagggcctttgatttgattaatt

SEQ ID NO: 161855 - DNA, 25 bp, Probe Sequence
aagagggacggtatttatgaatcag

SEQ ID NO: 161856 - DNA, 25 bp, Probe Sequence
aagaaggaagatttctttatccaag

SEQ ID NO: 161857 - DNA, 25 bp, Probe Sequence
aagaagagtagttcattaagacctg

SEQ ID NO: 161858 - DNA, 25 bp, Probe Sequence
aagcaagcgtaatcttcaggataat

SEQ ID NO: 161859 - DNA, 25 bp, Probe Sequence
aagaatgaaacgccatctcagaaaa

SEQ ID NO: 161860 - DNA, 25 bp, Probe Sequence
aagacaaattcccatccaaaaatag

SEQ ID NO: 161861 - DNA, 25 bp, Probe Sequence
aagcaaatcatccccattaaaaagc

SEQ ID NO: 161862 - DNA, 25 bp, Probe Sequence
aagaaagcaggatcaggcaaaaatg

SEQ ID NO: 161863 - DNA, 25 bp, Probe Sequence
aagcaaagcaaaacagaactagttc

SEQ ID NO: 161864 - DNA, 25 bp, Probe Sequence
aagcagaacaaatcaatccacggat

SEQ ID NO: 161865 - DNA, 25 bp, Probe Sequence
aagcgtacaatattgatctcctaag

SEQ ID NO: 161866 - DNA, 25 bp, Probe Sequence
aagcctacactattgcttgtgtaag

SEQ ID NO: 161867 - DNA, 25 bp, Probe Sequence
aagcccagctccttgttattgagaa

SEQ ID NO: 161868 - DNA, 25 bp, Probe Sequence
aagctggcctcaggtttattggcga

SEQ ID NO: 161869 - DNA, 25 bp, Probe Sequence
aagctgagtctctgatccaatatgt

SEQ ID NO: 161870 - DNA, 25 bp, Probe Sequence
aagctgagtctctgatccaatatgt

SEQ ID NO: 161871 - DNA, 25 bp, Probe Sequence
aagctaatctatgcctcatttgccc

SEQ ID NO: 161872 - DNA, 25 bp, Probe Sequence
aagcatatgtcattccccatatgtg

SEQ ID NO: 161873 - DNA, 25 bp, Probe Sequence
aagctgatatcatcccattgcattc

SEQ ID NO: 161874 - DNA, 25 bp, Probe Sequence
aagcgatgatgaatcttttcttctt

SEQ ID NO: 161875 - DNA, 25 bp, Probe Sequence
aagctgctgatattcattccttatt

SEQ ID NO: 161876 - DNA, 25 bp, Probe Sequence
aagctgctgatattcattccttatt

SEQ ID NO: 161877 - DNA, 25 bp, Probe Sequence
aagctctgatattcattggagtact

SEQ ID NO: 161878 - DNA, 25 bp, Probe Sequence
aagctcgctatgacagggagatgaa

SEQ ID NO: 161879 - DNA, 25 bp, Probe Sequence
aagcctgtgatgacatggtgctgat

SEQ ID NO: 161880 - DNA, 25 bp, Probe Sequence
aagcagcagctaacagctctgtgat

SEQ ID NO: 161881 - DNA, 25 bp, Probe Sequence
aatcccttacacattgatcctaact

SEQ ID NO: 161882 - DNA, 25 bp, Probe Sequence
aagcctttaagcaatcttcaaaact

SEQ ID NO: 161883 - DNA, 25 bp, Probe Sequence
aagcttttgggcactgtgtaccagg

SEQ ID NO: 161884 - DNA, 25 bp, Probe Sequence
aagcttctgggagttctgatttcct

SEQ ID NO: 161885 - DNA, 25 bp, Probe Sequence
aagctatttgagttctcgtctgtcc

SEQ ID NO: 161886 - DNA, 25 bp, Probe Sequence
aagaattctcagtttctccttgacc

SEQ ID NO: 161887 - DNA, 25 bp, Probe Sequence
aagcattaccactcaggcatttgac

SEQ ID NO: 161888 - DNA, 25 bp, Probe Sequence
aagctcataccttgggtgcagaaga

SEQ ID NO: 161889 - DNA, 25 bp, Probe Sequence
aagctcatcacgtattgcacatcag

SEQ ID NO: 161890 - DNA, 25 bp, Probe Sequence
aagctatactagctcacatctgaag

SEQ ID NO: 161891 - DNA, 25 bp, Probe Sequence
aagctagtggacaatcagtgtagtg

SEQ ID NO: 161892 - DNA, 25 bp, Probe Sequence
aagctcatcgtgctactggtatgtg

SEQ ID NO: 161893 - DNA, 25 bp, Probe Sequence
aagcttcagggttatgtctatgttc

SEQ ID NO: 161894 - DNA, 25 bp, Probe Sequence
aagctctgaggtccacagactattt

SEQ ID NO: 161895 - DNA, 25 bp, Probe Sequence
aagcctagcaatccatcagacaatc

SEQ ID NO: 161896 - DNA, 25 bp, Probe Sequence
aagcccatgccatgcaagtgctatc

SEQ ID NO: 161897 - DNA, 25 bp, Probe Sequence
aagcctgcatactaaatgctctcat

SEQ ID NO: 161898 - DNA, 25 bp, Probe Sequence
aagcctgcaactcatctttcattaa

SEQ ID NO: 161899 - DNA, 25 bp, Probe Sequence
aagcctatactaactttgatgctga

SEQ ID NO: 161900 - DNA, 25 bp, Probe Sequence
aagcctgtagtgtccttcattgctg

SEQ ID NO: 161901 - DNA, 25 bp, Probe Sequence
aagctactagcattcctgtattctg

SEQ ID NO: 161902 - DNA, 25 bp, Probe Sequence
aagccctggaatcctgtaatgtaga

SEQ ID NO: 161903 - DNA, 25 bp, Probe Sequence
aagccctgggggcatagaggagatt

SEQ ID NO: 161904 - DNA, 25 bp, Probe Sequence
aagttcaggggcccaggaagagcaa

SEQ ID NO: 161905 - DNA, 25 bp, Probe Sequence
aagttgaggggtgctgaaaccagac

SEQ ID NO: 161906 - DNA, 25 bp, Probe Sequence
aagccgaggcagttgttgaaaccaa

SEQ ID NO: 161907 - DNA, 25 bp, Probe Sequence
aagccgagcggttgatggaagttga

SEQ ID NO: 161908 - DNA, 25 bp, Probe Sequence
aagccgagcggttgatggaagttga

SEQ ID NO: 161909 - DNA, 25 bp, Probe Sequence
aagacaggcggctgggaagtggagg

SEQ ID NO: 161910 - DNA, 25 bp, Probe Sequence
aagcctggcggcccagagagaggtc

SEQ ID NO: 161911 - DNA, 25 bp, Probe Sequence
aagcctgagtgaccatagagagatg

SEQ ID NO: 161912 - DNA, 25 bp, Probe Sequence
aagctgctagtgatattgcaatgac

SEQ ID NO: 161913 - DNA, 25 bp, Probe Sequence
aagctatatggctatttggatgaca

SEQ ID NO: 161914 - DNA, 25 bp, Probe Sequence
aagctgataagctggctgaagagca

SEQ ID NO: 161915 - DNA, 25 bp, Probe Sequence
aagcatatatagctagtgcaggagc

SEQ ID NO: 161916 - DNA, 25 bp, Probe Sequence
aagcagatcaagtccagatgccaag

SEQ ID NO: 161917 - DNA, 25 bp, Probe Sequence
aagcgcagcaggtgcatcgccagca

SEQ ID NO: 161918 - DNA, 25 bp, Probe Sequence
aagcggcaggatcgacgcgcttctg

SEQ ID NO: 161919 - DNA, 25 bp, Probe Sequence
aagcgtcagtgtttccatgttatgg

SEQ ID NO: 161920 - DNA, 25 bp, Probe Sequence
aagctttagtcatctcatttatgag

SEQ ID NO: 161921 - DNA, 25 bp, Probe Sequence
aagcatgttatttactttctagata

SEQ ID NO: 161922 - DNA, 25 bp, Probe Sequence
aagctattcttatgctgtaacagtt

SEQ ID NO: 161923 - DNA, 25 bp, Probe Sequence
aagctcatttcctggtatgacaacg

SEQ ID NO: 161924 - DNA, 25 bp, Probe Sequence
aagcttctcatcagggttgcaaaaa

SEQ ID NO: 161925 - DNA, 25 bp, Probe Sequence
aagctagtctgatggccttaaaaga

SEQ ID NO: 161926 - DNA, 25 bp, Probe Sequence
cgattcctcgacccctgaaaaggat

SEQ ID NO: 161927 - DNA, 25 bp, Probe Sequence
caaggcctagtcccagggaaaacat

SEQ ID NO: 161928 - DNA, 25 bp, Probe Sequence
caagccctttcctgtaaaccacagg

SEQ ID NO: 161929 - DNA, 25 bp, Probe Sequence
aagagtttacgccttacgactacag

SEQ ID NO: 161930 - DNA, 25 bp, Probe Sequence
aagagtttacgccttacgactacag

SEQ ID NO: 161931 - DNA, 25 bp, Probe Sequence
aagagtttacgccttacgactacag

SEQ ID NO: 161932 - DNA, 25 bp, Probe Sequence
aaggttaaccacatagaggcagagc

SEQ ID NO: 161933 - DNA, 25 bp, Probe Sequence
aagctgtttcactagaaaaggcaga

SEQ ID NO: 161934 - DNA, 25 bp, Probe Sequence
aagctgggtatgtgcttgaaggaat

SEQ ID NO: 161935 - DNA, 25 bp, Probe Sequence
aagctgctttctttcttgaaaacta

SEQ ID NO: 161936 - DNA, 25 bp, Probe Sequence
aagctcccctttatgaaatattctc

SEQ ID NO: 161937 - DNA, 25 bp, Probe Sequence
aagctccagactgtttaaaatatac

SEQ ID NO: 161938 - DNA, 25 bp, Probe Sequence
aagttcagtttgattaatagactcc

SEQ ID NO: 161939 - DNA, 25 bp, Probe Sequence
aagttactgtctatttaaaactgca

SEQ ID NO: 161940 - DNA, 25 bp, Probe Sequence
aagggacgttctgtgggcagtagcc

SEQ ID NO: 161941 - DNA, 25 bp, Probe Sequence
aagacaccccctgtaggaatatgcc

SEQ ID NO: 161942 - DNA, 25 bp, Probe Sequence
aagaaatcacccattggctacctgc

SEQ ID NO: 161943 - DNA, 25 bp, Probe Sequence
aagaaatccccgtgactgtctatac

SEQ ID NO: 161944 - DNA, 25 bp, Probe Sequence
aagagcaacccaaaggacgcttaag

SEQ ID NO: 161945 - DNA, 25 bp, Probe Sequence
aagacaaacattcaagccgcttgga

SEQ ID NO: 161946 - DNA, 25 bp, Probe Sequence
aagtcatggatgtctaagcaccgta

SEQ ID NO: 161947 - DNA, 25 bp, Probe Sequence
aagctctgagttttcagcaccagta

SEQ ID NO: 161948 - DNA, 25 bp, Probe Sequence
aagcctgagtgtattgcatctcttg

SEQ ID NO: 161949 - DNA, 25 bp, Probe Sequence
aagctcatacatcttcttctgcttc

SEQ ID NO: 161950 - DNA, 25 bp, Probe Sequence
aagaatactggcagttcactgtgga

SEQ ID NO: 161951 - DNA, 25 bp, Probe Sequence
aagagatttgtctgggctcagtggc

SEQ ID NO: 161952 - DNA, 25 bp, Probe Sequence
aagcgatctcttctgaggatccggc

SEQ ID NO: 161953 - DNA, 25 bp, Probe Sequence
aagcgagcctcttctgataactcag

SEQ ID NO: 161954 - DNA, 25 bp, Probe Sequence
aagaatgcccatctgtgaacacatg

SEQ ID NO: 161955 - DNA, 25 bp, Probe Sequence
aagtgtccgcactgtaaagcagatg

SEQ ID NO: 161956 - DNA, 25 bp, Probe Sequence
aagagcccttcgaagcaaagcgtgc

SEQ ID NO: 161957 - DNA, 25 bp, Probe Sequence
aagactcctagccaggagggcctgc

SEQ ID NO: 161958 - DNA, 25 bp, Probe Sequence
aagaatcagtaggaccaggccaccg

SEQ ID NO: 161959 - DNA, 25 bp, Probe Sequence
aagcacatagcaagctgaactgtcc

SEQ ID NO: 161960 - DNA, 25 bp, Probe Sequence
aagcatttgcatcatgaccttatac

SEQ ID NO: 161961 - DNA, 25 bp, Probe Sequence
aagctatggcatcatataatttgct

SEQ ID NO: 161962 - DNA, 25 bp, Probe Sequence
aagcctggtgtctatgttcgtgttt

SEQ ID NO: 161963 - DNA, 25 bp, Probe Sequence
aagcctggtgtctatgctcgtgttt

SEQ ID NO: 161964 - DNA, 25 bp, Probe Sequence
aagcctggtgtctacacgaaagtct

SEQ ID NO: 161965 - DNA, 25 bp, Probe Sequence
aagcctggagtctacaccaaggtct

SEQ ID NO: 161966 - DNA, 25 bp, Probe Sequence
aagccgtgagtcaggcctgggttgg

SEQ ID NO: 161967 - DNA, 25 bp, Probe Sequence
aagccgtgagtcaggcctgggttgg

SEQ ID NO: 161968 - DNA, 25 bp, Probe Sequence
aagccgtgagtcaggcctgggtgtg

SEQ ID NO: 161969 - DNA, 25 bp, Probe Sequence
aagctgggcagaatggggctcggtg

SEQ ID NO: 161970 - DNA, 25 bp, Probe Sequence
aagctgggcagaatggggctcggtg

SEQ ID NO: 161971 - DNA, 25 bp, Probe Sequence
aagcgggaaaaccctcatgatgctg

SEQ ID NO: 161972 - DNA, 25 bp, Probe Sequence
aagctgtggaataaggcccagtgca

SEQ ID NO: 161973 - DNA, 25 bp, Probe Sequence
aagctggccaagcagggcgagctgc

SEQ ID NO: 161974 - DNA, 25 bp, Probe Sequence
aagcggcgcaaccaggagatgcagc

SEQ ID NO: 161975 - DNA, 25 bp, Probe Sequence
aagcgtcagctgtgggagcagagtg

SEQ ID NO: 161976 - DNA, 25 bp, Probe Sequence
aagcaggcttgcaggatgcaaggtt

SEQ ID NO: 161977 - DNA, 25 bp, Probe Sequence
aagcgtgctgtgctgtgcagtagga

SEQ ID NO: 161978 - DNA, 25 bp, Probe Sequence
aagcggattgctttgcactcaggag

SEQ ID NO: 161979 - DNA, 25 bp, Probe Sequence
aagctggtgccgttgagaagggggt

SEQ ID NO: 161980 - DNA, 25 bp, Probe Sequence
aagccctgccgatcagacatgtggg

SEQ ID NO: 161981 - DNA, 25 bp, Probe Sequence
aagccctgctggtaagagagttgtc

SEQ ID NO: 161982 - DNA, 25 bp, Probe Sequence
aagccctgcaggtgggctgtctgct

SEQ ID NO: 161983 - DNA, 25 bp, Probe Sequence
aagcccaagagctgtcactgcttct

SEQ ID NO: 161984 - DNA, 25 bp, Probe Sequence
aagcccaacacttgacagtcatatt

SEQ ID NO: 161985 - DNA, 25 bp, Probe Sequence
aagctcccactcaacacttattatt

SEQ ID NO: 161986 - DNA, 25 bp, Probe Sequence
aagcttctgagtaacactttctgat

SEQ ID NO: 161987 - DNA, 25 bp, Probe Sequence
aagctcatcatgttaaattttttat

SEQ ID NO: 161988 - DNA, 25 bp, Probe Sequence
aagcttcagtagccaatttgatcat

SEQ ID NO: 161989 - DNA, 25 bp, Probe Sequence
aagcttcaatagccgattcgatcaa

SEQ ID NO: 161990 - DNA, 25 bp, Probe Sequence
aagcttaatatcttctttgacaaag

SEQ ID NO: 161991 - DNA, 25 bp, Probe Sequence
aagacaaatgttgctttaagaagta

SEQ ID NO: 161992 - DNA, 25 bp, Probe Sequence
aagactgtcatttccttataagttt

SEQ ID NO: 161993 - DNA, 25 bp, Probe Sequence
aagctggtctgtggccttaagagaa

SEQ ID NO: 161994 - DNA, 25 bp, Probe Sequence
aagctggtctgtggccttaagagaa

SEQ ID NO: 161995 - DNA, 25 bp, Probe Sequence
aagctgtcctgggctaagaagaggg

SEQ ID NO: 161996 - DNA, 25 bp, Probe Sequence
aagctgaactgtcctaaggcagggg

SEQ ID NO: 161997 - DNA, 25 bp, Probe Sequence
aagcgaacgcagcctttgagagtgg

SEQ ID NO: 161998 - DNA, 25 bp, Probe Sequence
aagcagagagtccttttaggaggga

SEQ ID NO: 161999 - DNA, 25 bp, Probe Sequence
aagcagtgaaagattatgaacagga

SEQ ID NO: 162000 - DNA, 25 bp, Probe Sequence
aagcagctgaagggtgactaaacgg

SEQ ID NO: 162001 - DNA, 25 bp, Probe Sequence
aagcgtatctgcaggattatcacga

SEQ ID NO: 162002 - DNA, 25 bp, Probe Sequence
aagttagccaggcatggtcacgcat

SEQ ID NO: 162003 - DNA, 25 bp, Probe Sequence
aagatggaacgccatgtggcccgtc

SEQ ID NO: 162004 - DNA, 25 bp, Probe Sequence
aagctggaagcactgctgtgtccgc

SEQ ID NO: 162005 - DNA, 25 bp, Probe Sequence
aagctggaagcactgctgtgtccgc

SEQ ID NO: 162006 - DNA, 25 bp, Probe Sequence
aagctagagttgcatcttcccaagt

SEQ ID NO: 162007 - DNA, 25 bp, Probe Sequence
aagctacagaaaccttccaactgct

SEQ ID NO: 162008 - DNA, 25 bp, Probe Sequence
aagcataccatttctttgtcaagtg

SEQ ID NO: 162009 - DNA, 25 bp, Probe Sequence
aagaattattcacttgagccaagcg

SEQ ID NO: 162010 - DNA, 25 bp, Probe Sequence
aagaagatatcccaggcaggcacag

SEQ ID NO: 162011 - DNA, 25 bp, Probe Sequence
aagagaatctcacagctcaggaaat

SEQ ID NO: 162012 - DNA, 25 bp, Probe Sequence
aagcgttctcacaagccagaaattt

SEQ ID NO: 162013 - DNA, 25 bp, Probe Sequence
aagctgcatttctttccaaaatcta

SEQ ID NO: 162014 - DNA, 25 bp, Probe Sequence
aagcgcatcttacttcaaaaaatgg

SEQ ID NO: 162015 - DNA, 25 bp, Probe Sequence
aagcacagaataattccacaacagg

SEQ ID NO: 162016 - DNA, 25 bp, Probe Sequence
aagacagttaccctaagacagagcc

SEQ ID NO: 162017 - DNA, 25 bp, Probe Sequence
aagaagattcctgctacaactatag

SEQ ID NO: 162018 - DNA, 25 bp, Probe Sequence
aatgaataatccgccagaacgacca

SEQ ID NO: 162019 - DNA, 25 bp, Probe Sequence
aagagaaaccccgagacactgtaca

SEQ ID NO: 162020 - DNA, 25 bp, Probe Sequence
aagagaataccaccaagaccaggaa

SEQ ID NO: 162021 - DNA, 25 bp, Probe Sequence
aagagcgaaccagcctgggagtggg

SEQ ID NO: 162022 - DNA, 25 bp, Probe Sequence
aagaaataccgtgccctgaggttgg

SEQ ID NO: 162023 - DNA, 25 bp, Probe Sequence
aagaaagacaggttcctccactttg

SEQ ID NO: 162024 - DNA, 25 bp, Probe Sequence
aatgcaaaacaggttggccgccttg

SEQ ID NO: 162025 - DNA, 25 bp, Probe Sequence
aagcaagagacagcactggcccttg

SEQ ID NO: 162026 - DNA, 25 bp, Probe Sequence
aagcaagagacagcactggcccttg

SEQ ID NO: 162027 - DNA, 25 bp, Probe Sequence
aagcaagagacagcactggcccttg

SEQ ID NO: 162028 - DNA, 25 bp, Probe Sequence
aagaaggccagccaccaacagattg

SEQ ID NO: 162029 - DNA, 25 bp, Probe Sequence
aagaagtgccggtcctgaataaggg

SEQ ID NO: 162030 - DNA, 25 bp, Probe Sequence
aagaagtgtatggtttaaagaagtg

SEQ ID NO: 162031 - DNA, 25 bp, Probe Sequence
aagaatgcagattctgtgtttaagc

SEQ ID NO: 162032 - DNA, 25 bp, Probe Sequence
aagaatggtggtggctttacattgc

SEQ ID NO: 162033 - DNA, 25 bp, Probe Sequence
aagttggactgggttcggtctgacg

SEQ ID NO: 162034 - DNA, 25 bp, Probe Sequence
aagttgaacaggtgctggagtcggc

SEQ ID NO: 162035 - DNA, 25 bp, Probe Sequence
aagaaatatcggcggggtgcagtgg

SEQ ID NO: 162036 - DNA, 25 bp, Probe Sequence
aagaatgcatatttgggctgggtat

SEQ ID NO: 162037 - DNA, 25 bp, Probe Sequence
aagacatgtataagggaggaaaagc

SEQ ID NO: 162038 - DNA, 25 bp, Probe Sequence
aagaatgttgaaggacgtgactact

SEQ ID NO: 162039 - DNA, 25 bp, Probe Sequence
aagaagattcatacgcctctactga

SEQ ID NO: 162040 - DNA, 25 bp, Probe Sequence
aagaaaactaccagtctctacctca

SEQ ID NO: 162041 - DNA, 25 bp, Probe Sequence
aagaaagaaaacaggccgggcacag

SEQ ID NO: 162042 - DNA, 25 bp, Probe Sequence
caaacaaataccagggaagggacag

SEQ ID NO: 162043 - DNA, 25 bp, Probe Sequence
aagaacaatgacctccgggagaaga

SEQ ID NO: 162044 - DNA, 25 bp, Probe Sequence
aagaccattacttctcagtggaaag

SEQ ID NO: 162045 - DNA, 25 bp, Probe Sequence
aagaccttacccagtgagctaaatt

SEQ ID NO: 162046 - DNA, 25 bp, Probe Sequence
aagaactcaaatcaagaagtaagaa

SEQ ID NO: 162047 - DNA, 25 bp, Probe Sequence
caaaactaacaaacggagtactgag

SEQ ID NO: 162048 - DNA, 25 bp, Probe Sequence
aagaaataactaagagccgaactga

SEQ ID NO: 162049 - DNA, 25 bp, Probe Sequence
aagaaaagttttggctggacacagt

SEQ ID NO: 162050 - DNA, 25 bp, Probe Sequence
aagatatacaagattccctaacagt

SEQ ID NO: 162051 - DNA, 25 bp, Probe Sequence
aagtataaatggatccttgacgcat

SEQ ID NO: 162052 - DNA, 25 bp, Probe Sequence
aagctgcaataatgaataattccca

SEQ ID NO: 162053 - DNA, 25 bp, Probe Sequence
aagctgaaccaagatttctgccaga

SEQ ID NO: 162054 - DNA, 25 bp, Probe Sequence
aagctggacaaagtcccactgccag

SEQ ID NO: 162055 - DNA, 25 bp, Probe Sequence
aagctggaacagtccactgaatggg

SEQ ID NO: 162056 - DNA, 25 bp, Probe Sequence
aagctggaacagtccactgaatggg

SEQ ID NO: 162057 - DNA, 25 bp, Probe Sequence
aagcagaagcacgatggcacggtgg

SEQ ID NO: 162058 - DNA, 25 bp, Probe Sequence
aagagagcgactggacaattgtgct

SEQ ID NO: 162059 - DNA, 25 bp, Probe Sequence
aagaggctggctacacaatcgaatg

SEQ ID NO: 162060 - DNA, 25 bp, Probe Sequence
aagtcctgagcgacctacaaagaga

SEQ ID NO: 162061 - DNA, 25 bp, Probe Sequence
aagcaactgtgccccggagaagaga

SEQ ID NO: 162062 - DNA, 25 bp, Probe Sequence
aagaacttggcgagaagctcagcaa

SEQ ID NO: 162063 - DNA, 25 bp, Probe Sequence
aagaagtaggaatgggtgcagcaca

SEQ ID NO: 162064 - DNA, 25 bp, Probe Sequence
aagacttagaaatagactagaccaa

SEQ ID NO: 162065 - DNA, 25 bp, Probe Sequence
aagactatgagaacttcagctgata

SEQ ID NO: 162066 - DNA, 25 bp, Probe Sequence
aagcaggatgggcgatagagatata

SEQ ID NO: 162067 - DNA, 25 bp, Probe Sequence
aagcatggaaggtcctgacagatta

SEQ ID NO: 162068 - DNA, 25 bp, Probe Sequence
aagctgaagcggttcattgctatta

SEQ ID NO: 162069 - DNA, 25 bp, Probe Sequence
aagctgattctggttatctctttaa

SEQ ID NO: 162070 - DNA, 25 bp, Probe Sequence
aagcatatgttacttaccttgttat

SEQ ID NO: 162071 - DNA, 25 bp, Probe Sequence
aagctcaataacttagtcttgtttg

SEQ ID NO: 162072 - DNA, 25 bp, Probe Sequence
aagtcaagatagctatgtggagttt

SEQ ID NO: 162073 - DNA, 25 bp, Probe Sequence
aagctgccagtactgtaccaagtgg

SEQ ID NO: 162074 - DNA, 25 bp, Probe Sequence
aagctgcgttaaattccaagagctg

SEQ ID NO: 162075 - DNA, 25 bp, Probe Sequence
aagctgagtttctgtccaatgagca

SEQ ID NO: 162076 - DNA, 25 bp, Probe Sequence
aagcagggtgtcttgacccatggcc

SEQ ID NO: 162077 - DNA, 25 bp, Probe Sequence
aagcagaactgctgtacctctgacc

SEQ ID NO: 162078 - DNA, 25 bp, Probe Sequence
aagcagactggctgaagctttgccc

SEQ ID NO: 162079 - DNA, 25 bp, Probe Sequence
aagcactgttctggaaccttctctc

SEQ ID NO: 162080 - DNA, 25 bp, Probe Sequence
aagctccgattggagacgcttctcc

SEQ ID NO: 162081 - DNA, 25 bp, Probe Sequence
aagctcaaggtgggagaccctggcc

SEQ ID NO: 162082 - DNA, 25 bp, Probe Sequence
aagtatagcgtggcaacccagctgt

SEQ ID NO: 162083 - DNA, 25 bp, Probe Sequence
aagaatcgggactacccactagcct

SEQ ID NO: 162084 - DNA, 25 bp, Probe Sequence
aagaatctcaggaacggccctgggc

SEQ ID NO: 162085 - DNA, 25 bp, Probe Sequence
aagaaataggccgggcgcggtggct

SEQ ID NO: 162086 - DNA, 25 bp, Probe Sequence
aagaagacggcctggtccagttgga

SEQ ID NO: 162087 - DNA, 25 bp, Probe Sequence
aagaagacaacctcgtccattggga

SEQ ID NO: 162088 - DNA, 25 bp, Probe Sequence
aagaaacatacatccgaagacggtg

SEQ ID NO: 162089 - DNA, 25 bp, Probe Sequence
aagaaactgatcacccacatggggg

SEQ ID NO: 162090 - DNA, 25 bp, Probe Sequence
aagaccagccacactgtcaagtggg

SEQ ID NO: 162091 - DNA, 25 bp, Probe Sequence
aagacggataatttgcctagtggga

SEQ ID NO: 162092 - DNA, 25 bp, Probe Sequence
aagacggataatttgcctagtggga

SEQ ID NO: 162093 - DNA, 25 bp, Probe Sequence
aagacggaactttgtgctgacggct

SEQ ID NO: 162094 - DNA, 25 bp, Probe Sequence
aagaactaactttgcttactgtgag

SEQ ID NO: 162095 - DNA, 25 bp, Probe Sequence
aagaactcttttatttctgtatgtg

SEQ ID NO: 162096 - DNA, 25 bp, Probe Sequence
aatgaggcctttgaaacaggtagtg

SEQ ID NO: 162097 - DNA, 25 bp, Probe Sequence
aagcagacctctactaaacgcaaag

SEQ ID NO: 162098 - DNA, 25 bp, Probe Sequence
aagcaggtcttcatgatcaggtcaa

SEQ ID NO: 162099 - DNA, 25 bp, Probe Sequence
aagcagaggctcgtttagtggaacc

SEQ ID NO: 162100 - DNA, 25 bp, Probe Sequence
aagcagtgtgtcgggaagggatagt

SEQ ID NO: 162101 - DNA, 25 bp, Probe Sequence
aatgcagtcgggagaagggagggag

SEQ ID NO: 162102 - DNA, 25 bp, Probe Sequence
aagaggcgggggtggagcagggagc

SEQ ID NO: 162103 - DNA, 25 bp, Probe Sequence
aagaagggggaatgctgtcgggact

SEQ ID NO: 162104 - DNA, 25 bp, Probe Sequence
aagagggcgggagagctcattgagg

SEQ ID NO: 162105 - DNA, 25 bp, Probe Sequence
aagagggtctggtacccttgcagga

SEQ ID NO: 162106 - DNA, 25 bp, Probe Sequence
aagaaggacttctacgacctggcag

SEQ ID NO: 162107 - DNA, 25 bp, Probe Sequence
aagaaggacttctacgacctggcag

SEQ ID NO: 162108 - DNA, 25 bp, Probe Sequence
aagaatggattgtacctgagcctgg

SEQ ID NO: 162109 - DNA, 25 bp, Probe Sequence
aagaagcgcatcattgactcagccc

SEQ ID NO: 162110 - DNA, 25 bp, Probe Sequence
aagcactgtgccatgtcagcaagtc

SEQ ID NO: 162111 - DNA, 25 bp, Probe Sequence
aagcagctttgagttagaagtatgt

SEQ ID NO: 162112 - DNA, 25 bp, Probe Sequence
aagcagatttatttcctatgtatgt

SEQ ID NO: 162113 - DNA, 25 bp, Probe Sequence
aagcaacttatgtgttcgatcatgt

SEQ ID NO: 162114 - DNA, 25 bp, Probe Sequence
aagaagcttgtgtagctgtcccagg

SEQ ID NO: 162115 - DNA, 25 bp, Probe Sequence
aagcaggcactgctcattaatcctg

SEQ ID NO: 162116 - DNA, 25 bp, Probe Sequence
aagagtgagtcaccttaccttgtta

SEQ ID NO: 162117 - DNA, 25 bp, Probe Sequence
aagactgaaagacgaacctagtcaa

SEQ ID NO: 162118 - DNA, 25 bp, Probe Sequence
aagactggaataagtacctacttct

SEQ ID NO: 162119 - DNA, 25 bp, Probe Sequence
aagacggagtttcaccatgttggcc

SEQ ID NO: 162120 - DNA, 25 bp, Probe Sequence
aagaacggtttcttgcttgcttggt

SEQ ID NO: 162121 - DNA, 25 bp, Probe Sequence
aagaaagcagtttgggcttctcagt

SEQ ID NO: 162122 - DNA, 25 bp, Probe Sequence
aagctacttgtatgggcttctgcgc

SEQ ID NO: 162123 - DNA, 25 bp, Probe Sequence
aagctactttgttgagagtctcatt

SEQ ID NO: 162124 - DNA, 25 bp, Probe Sequence
aagctagtccttgtgaatgccattt

SEQ ID NO: 162125 - DNA, 25 bp, Probe Sequence
aagctactccaaagtaatcttgcat

SEQ ID NO: 162126 - DNA, 25 bp, Probe Sequence
aagcaactgctctaagttttacgga

SEQ ID NO: 162127 - DNA, 25 bp, Probe Sequence
gattggtttctattgctctttactg

SEQ ID NO: 162128 - DNA, 25 bp, Probe Sequence
aagcaggcgtttatttctgcagggc

SEQ ID NO: 162129 - DNA, 25 bp, Probe Sequence
aagcaggagtttctcgacatcgagg

SEQ ID NO: 162130 - DNA, 25 bp, Probe Sequence
aagaaggtggatctccaaccaggcc

SEQ ID NO: 162131 - DNA, 25 bp, Probe Sequence
tggacaaggtggtgttacccaactt

SEQ ID NO: 162132 - DNA, 25 bp, Probe Sequence
aagaaggaggggattcccacctcat

SEQ ID NO: 162133 - DNA, 25 bp, Probe Sequence
aagcaaaggggggattcagtgcatc

SEQ ID NO: 162134 - DNA, 25 bp, Probe Sequence
aagcacgcagtgggtgaactgctta

SEQ ID NO: 162135 - DNA, 25 bp, Probe Sequence
aagcaggcgctcttgtgaattaaaa

SEQ ID NO: 162136 - DNA, 25 bp, Probe Sequence
aagcaggctgtcttgtaaaagccca

SEQ ID NO: 162137 - DNA, 25 bp, Probe Sequence
aagctcacgtcctgagaaagctcaa

SEQ ID NO: 162138 - DNA, 25 bp, Probe Sequence
aagcaccaaccccataaagtgacac

SEQ ID NO: 162139 - DNA, 25 bp, Probe Sequence
aagcactgcaaagacagaacagcga

SEQ ID NO: 162140 - DNA, 25 bp, Probe Sequence
aagagcctatcagagggcacagcca

SEQ ID NO: 162141 - DNA, 25 bp, Probe Sequence
aagcatcgctgaagaactggaactc

SEQ ID NO: 162142 - DNA, 25 bp, Probe Sequence
aagcatcgctgaagaactggaactc

SEQ ID NO: 162143 - DNA, 25 bp, Probe Sequence
aagtgccagggaagctcggatctgc

SEQ ID NO: 162144 - DNA, 25 bp, Probe Sequence
aagctctatggttaccaggctcagc

SEQ ID NO: 162145 - DNA, 25 bp, Probe Sequence
aagctgtatagtttgcacacccatc

SEQ ID NO: 162146 - DNA, 25 bp, Probe Sequence
aagcatgtgttgatctacaccactt

SEQ ID NO: 162147 - DNA, 25 bp, Probe Sequence
aagctattatgcttcaatgctccac

SEQ ID NO: 162148 - DNA, 25 bp, Probe Sequence
aagactttgcctatcccagcaaaac

SEQ ID NO: 162149 - DNA, 25 bp, Probe Sequence
aagaagtatcctcacctcagatgaa

SEQ ID NO: 162150 - DNA, 25 bp, Probe Sequence
aagcatgagttcttgttcttcagtt

SEQ ID NO: 162151 - DNA, 25 bp, Probe Sequence
aagcagaatctgttgtccttaatta

SEQ ID NO: 162152 - DNA, 25 bp, Probe Sequence
aagcagaagcttcgttttagtgaac

SEQ ID NO: 162153 - DNA, 25 bp, Probe Sequence
aagcatcaagcactcttatgttagt

SEQ ID NO: 162154 - DNA, 25 bp, Probe Sequence
aagacaagcaaccatgttaactgta

SEQ ID NO: 162155 - DNA, 25 bp, Probe Sequence
aagcacaaacacttgtagcagttta

SEQ ID NO: 162156 - DNA, 25 bp, Probe Sequence
aagaataacaaagcagcactactga

SEQ ID NO: 162157 - DNA, 25 bp, Probe Sequence
aagaataacacttcaaagtcatctt

SEQ ID NO: 162158 - DNA, 25 bp, Probe Sequence
aagaatgaccagcaaaaggtttact

SEQ ID NO: 162159 - DNA, 25 bp, Probe Sequence
aagaatgggcgtccaaatatggtta

SEQ ID NO: 162160 - DNA, 25 bp, Probe Sequence
aagcaattggtgacctccactgagt

SEQ ID NO: 162161 - DNA, 25 bp, Probe Sequence
aagcaactgttgacttcagcctgtt

SEQ ID NO: 162162 - DNA, 25 bp, Probe Sequence
aagcagacgaggactacagccacga

SEQ ID NO: 162163 - DNA, 25 bp, Probe Sequence
aagctgcacaaggtcattgagccca

SEQ ID NO: 162164 - DNA, 25 bp, Probe Sequence
aagctcaaggagctggtgcccagca

SEQ ID NO: 162165 - DNA, 25 bp, Probe Sequence
aagcacaagaagcgtgagacgccac

SEQ ID NO: 162166 - DNA, 25 bp, Probe Sequence
aagcacagtgaagagttgccccacc

SEQ ID NO: 162167 - DNA, 25 bp, Probe Sequence
aagcagctggaagatgggcgcaccc

SEQ ID NO: 162168 - DNA, 25 bp, Probe Sequence
aagcattcgcaaggagtggaaacca

SEQ ID NO: 162169 - DNA, 25 bp, Probe Sequence
aagcatgggcaacatttacagacca

SEQ ID NO: 162170 - DNA, 25 bp, Probe Sequence
aagagtaggggaatctaagcacaat

SEQ ID NO: 162171 - DNA, 25 bp, Probe Sequence
aagcagtgaatgtggatctaacgaa

SEQ ID NO: 162172 - DNA, 25 bp, Probe Sequence
aagcagcaacagcatcgattaagtg

SEQ ID NO: 162173 - DNA, 25 bp, Probe Sequence
aagcagattgcactgatggacatca

SEQ ID NO: 162174 - DNA, 25 bp, Probe Sequence
aagcagattgcactgatggacatca

SEQ ID NO: 162175 - DNA, 25 bp, Probe Sequence
aagagttgcagcggctgctccaact

SEQ ID NO: 162176 - DNA, 25 bp, Probe Sequence
aagagttgcagcggctgctccaact

SEQ ID NO: 162177 - DNA, 25 bp, Probe Sequence
aagctttagatcctcttcaactacc

SEQ ID NO: 162178 - DNA, 25 bp, Probe Sequence
aagcatttagtgctcagtccctact

SEQ ID NO: 162179 - DNA, 25 bp, Probe Sequence
aagctaacagagctcctccgatact

SEQ ID NO: 162180 - DNA, 25 bp, Probe Sequence
aagctaacatggtcccatgccttcc

SEQ ID NO: 162181 - DNA, 25 bp, Probe Sequence
aagcaaactggatccaggcgcagca

SEQ ID NO: 162182 - DNA, 25 bp, Probe Sequence
aagaaattgctgacaccatggtaca

SEQ ID NO: 162183 - DNA, 25 bp, Probe Sequence
aagcaaattcagatcactcagctct

SEQ ID NO: 162184 - DNA, 25 bp, Probe Sequence
aagcattcatgtttctccacagctt

SEQ ID NO: 162185 - DNA, 25 bp, Probe Sequence
aagcatgttgtgtacccaactgcct

SEQ ID NO: 162186 - DNA, 25 bp, Probe Sequence
aagcattgtttctcaaagctccttg

SEQ ID NO: 162187 - DNA, 25 bp, Probe Sequence
aagattatttgcacgaactggactg

SEQ ID NO: 162188 - DNA, 25 bp, Probe Sequence
aagactagtccataggagctggaag

SEQ ID NO: 162189 - DNA, 25 bp, Probe Sequence
aagactggttacatggaggggattg

SEQ ID NO: 162190 - DNA, 25 bp, Probe Sequence
aagactgggtcctttggagttactg

SEQ ID NO: 162191 - DNA, 25 bp, Probe Sequence
aagagctacttccaagtgtggttac

SEQ ID NO: 162192 - DNA, 25 bp, Probe Sequence
aagaagatcttggacagcgtgggta

SEQ ID NO: 162193 - DNA, 25 bp, Probe Sequence
aagcattatctttgccagttggagt

SEQ ID NO: 162194 - DNA, 25 bp, Probe Sequence
aagcatttatcattcttgttgccac

SEQ ID NO: 162195 - DNA, 25 bp, Probe Sequence
aagcattcatcattactgtggacat

SEQ ID NO: 162196 - DNA, 25 bp, Probe Sequence
aagctttcagcaagagatggtcaca

SEQ ID NO: 162197 - DNA, 25 bp, Probe Sequence
aagcttgtcatcaatggaaatccca

SEQ ID NO: 162198 - DNA, 25 bp, Probe Sequence
aagcatattcttagcaaattccatg

SEQ ID NO: 162199 - DNA, 25 bp, Probe Sequence
aagcagattctctagcagtttccta

SEQ ID NO: 162200 - DNA, 25 bp, Probe Sequence
aagcagcattgccaaataatcccta

SEQ ID NO: 162201 - DNA, 25 bp, Probe Sequence
aagcaagtgctgtcagcaatatcct

SEQ ID NO: 162202 - DNA, 25 bp, Probe Sequence
aagcacgtggtgcaaagcatctcca

SEQ ID NO: 162203 - DNA, 25 bp, Probe Sequence
aagcagccggtgtaaatgttgagcc

SEQ ID NO: 162204 - DNA, 25 bp, Probe Sequence
aagctcctgtgcctatagtggtcac

SEQ ID NO: 162205 - DNA, 25 bp, Probe Sequence
aagactgagtggttggatggcaagc

SEQ ID NO: 162206 - DNA, 25 bp, Probe Sequence
aagaagactgcgttggtggtcaagt

SEQ ID NO: 162207 - DNA, 25 bp, Probe Sequence
aagaaggaccggtatgagatcaatt

SEQ ID NO: 162208 - DNA, 25 bp, Probe Sequence
aagcaaagagccaaatcatgaatga

SEQ ID NO: 162209 - DNA, 25 bp, Probe Sequence
aagcaccagattaaacaggctgtga

SEQ ID NO: 162210 - DNA, 25 bp, Probe Sequence
aagacctgattatacaggcagtgag

SEQ ID NO: 162211 - DNA, 25 bp, Probe Sequence
aagagccgaactgaaggagatagag

SEQ ID NO: 162212 - DNA, 25 bp, Probe Sequence
aagaaggaatctggcatcagggaag

SEQ ID NO: 162213 - DNA, 25 bp, Probe Sequence
aagaactgaagtgctcactactcag

SEQ ID NO: 162214 - DNA, 25 bp, Probe Sequence
aagaagttagtgacccagagctata

SEQ ID NO: 162215 - DNA, 25 bp, Probe Sequence
aagaattgtcagcagcaccagaccc

SEQ ID NO: 162216 - DNA, 25 bp, Probe Sequence
aagaattgtcagcagcaccagaccc

SEQ ID NO: 162217 - DNA, 25 bp, Probe Sequence
aagaactgaatgctgacctgttccg

SEQ ID NO: 162218 - DNA, 25 bp, Probe Sequence
aagaagttaagttgttgctatcgca

SEQ ID NO: 162219 - DNA, 25 bp, Probe Sequence
aagcaagagtatgtctgtttatccc

SEQ ID NO: 162220 - DNA, 25 bp, Probe Sequence
aagcaagtcatagttctgcccatac

SEQ ID NO: 162221 - DNA, 25 bp, Probe Sequence
aagcaattatattgtcctcccctat

SEQ ID NO: 162222 - DNA, 25 bp, Probe Sequence
aagaattaaatgtctgctacaccga

SEQ ID NO: 162223 - DNA, 25 bp, Probe Sequence
aagatttacaggtgcagtcaccgaa

SEQ ID NO: 162224 - DNA, 25 bp, Probe Sequence
aagaataacgtgtcctgctttggca

SEQ ID NO: 162225 - DNA, 25 bp, Probe Sequence
aagactaaagtggccgttgatgaga

SEQ ID NO: 162226 - DNA, 25 bp, Probe Sequence
aagactagccgtgttttctcagact

SEQ ID NO: 162227 - DNA, 25 bp, Probe Sequence
aagaacccgtggagttgcatcttct

SEQ ID NO: 162228 - DNA, 25 bp, Probe Sequence
aagaaccggggtattgactctgaag

SEQ ID NO: 162229 - DNA, 25 bp, Probe Sequence
aagacactcagccggagttgtacca

SEQ ID NO: 162230 - DNA, 25 bp, Probe Sequence
aagacactgaccgggcttttcagag

SEQ ID NO: 162231 - DNA, 25 bp, Probe Sequence
aagagggaagcggccgtgttgcaat

SEQ ID NO: 162232 - DNA, 25 bp, Probe Sequence
aagaaggaacccggtgtgcacagca

SEQ ID NO: 162233 - DNA, 25 bp, Probe Sequence
aagaatggtagtgtggttgctcacg

SEQ ID NO: 162234 - DNA, 25 bp, Probe Sequence
aagaatgcttaaggatgtgattgga

SEQ ID NO: 162235 - DNA, 25 bp, Probe Sequence
aagcattctctaggtttgcatgtag

SEQ ID NO: 162236 - DNA, 25 bp, Probe Sequence
aagcatgtctcatagtcgtctgtat

SEQ ID NO: 162237 - DNA, 25 bp, Probe Sequence
aagcagtgctgatgagctccttcta

SEQ ID NO: 162238 - DNA, 25 bp, Probe Sequence
aagcagatgtatggcctgacattcc

SEQ ID NO: 162239 - DNA, 25 bp, Probe Sequence
aagcatgtgctagtgtctgaaccca

SEQ ID NO: 162240 - DNA, 25 bp, Probe Sequence
aagcaggtgggagtggacaccaggc

SEQ ID NO: 162241 - DNA, 25 bp, Probe Sequence
aagacggtgtatggggaccagagcc

SEQ ID NO: 162242 - DNA, 25 bp, Probe Sequence
aagataagtcttgggtactgggctt

SEQ ID NO: 162243 - DNA, 25 bp, Probe Sequence
aagaaagctcaaaggaccggcgcct

SEQ ID NO: 162244 - DNA, 25 bp, Probe Sequence
aagcaaactacatggactctgtccc

SEQ ID NO: 162245 - DNA, 25 bp, Probe Sequence
aagacataatattcggtgtttacca

SEQ ID NO: 162246 - DNA, 25 bp, Probe Sequence
aagtctccttcgagctttatatcca

SEQ ID NO: 162247 - DNA, 25 bp, Probe Sequence
aagtccgttcacaggtatctagccc

SEQ ID NO: 162248 - DNA, 25 bp, Probe Sequence
gactaccttgtcactactttaggcc

SEQ ID NO: 162249 - DNA, 25 bp, Probe Sequence
aatacctttaaatccctgggcagca

SEQ ID NO: 162250 - DNA, 25 bp, Probe Sequence
aagaaatattaataccacatgggga

SEQ ID NO: 162251 - DNA, 25 bp, Probe Sequence
aagaattatctgtgaaccatacgtg

SEQ ID NO: 162252 - DNA, 25 bp, Probe Sequence
aagactttagcagaacaccagcagt

SEQ ID NO: 162253 - DNA, 25 bp, Probe Sequence
aagaatttatgagatgccagcggca

SEQ ID NO: 162254 - DNA, 25 bp, Probe Sequence
aagcatattgccaagtatctacagg

SEQ ID NO: 162255 - DNA, 25 bp, Probe Sequence
aagcattgtacttttccacatctgc

SEQ ID NO: 162256 - DNA, 25 bp, Probe Sequence
aagcttgttatttgtcatgcaccag

SEQ ID NO: 162257 - DNA, 25 bp, Probe Sequence
aagcttcgtcatcttggactcagta

SEQ ID NO: 162258 - DNA, 25 bp, Probe Sequence
aagcttcagaagtttggcaatagtt

SEQ ID NO: 162259 - DNA, 25 bp, Probe Sequence
aagttaaataccagataagcttttg

SEQ ID NO: 162260 - DNA, 25 bp, Probe Sequence
aagatataaaaccctagaatgctta

SEQ ID NO: 162261 - DNA, 25 bp, Probe Sequence
aagaaacagatattgcctagaactc

SEQ ID NO: 162262 - DNA, 25 bp, Probe Sequence
aagaagaagtcagcttgagcataca

SEQ ID NO: 162263 - DNA, 25 bp, Probe Sequence
aagaagatattaccactgatcacac

SEQ ID NO: 162264 - DNA, 25 bp, Probe Sequence
aagaagtaaaccctgtctgtgcctg

SEQ ID NO: 162265 - DNA, 25 bp, Probe Sequence
aagttgtataactcaggcgtctttg

SEQ ID NO: 162266 - DNA, 25 bp, Probe Sequence
caagttgtatgtaccccgttcaaag

SEQ ID NO: 162267 - DNA, 25 bp, Probe Sequence
aatgatagttttcccgtttacatag

SEQ ID NO: 162268 - DNA, 25 bp, Probe Sequence
aagcataatatttcgcccactaagc

SEQ ID NO: 162269 - DNA, 25 bp, Probe Sequence
aagaaatctcgtggccgagtccagc

SEQ ID NO: 162270 - DNA, 25 bp, Probe Sequence
aagaacatacttggcacggctgccc

SEQ ID NO: 162271 - DNA, 25 bp, Probe Sequence
aagaactactttgcagccaggcacg

SEQ ID NO: 162272 - DNA, 25 bp, Probe Sequence
aagcaacaactctggcaggagatgc

SEQ ID NO: 162273 - DNA, 25 bp, Probe Sequence
aagcacaaccactaccagaagcagc

SEQ ID NO: 162274 - DNA, 25 bp, Probe Sequence
aagcaccttatctatcacagaccag

SEQ ID NO: 162275 - DNA, 25 bp, Probe Sequence
aagaagttatcattcaacattcaac

SEQ ID NO: 162276 - DNA, 25 bp, Probe Sequence
aagaaggttctgaccagcttctgca

SEQ ID NO: 162277 - DNA, 25 bp, Probe Sequence
aatgaagtgtttcgaagcttcgaga

SEQ ID NO: 162278 - DNA, 25 bp, Probe Sequence
aatgaagtgtttcgaagcttcgaga

SEQ ID NO: 162279 - DNA, 25 bp, Probe Sequence
aagaagcagttccagaagttctgag

SEQ ID NO: 162280 - DNA, 25 bp, Probe Sequence
aagaagcagttccagaagttctgag

SEQ ID NO: 162281 - DNA, 25 bp, Probe Sequence
aagaatgccttccaggagcttcagc

SEQ ID NO: 162282 - DNA, 25 bp, Probe Sequence
aagaagcacgtcgacgagttcctgc

SEQ ID NO: 162283 - DNA, 25 bp, Probe Sequence
aagaagcatcgtgtctggcgttgtg

SEQ ID NO: 162284 - DNA, 25 bp, Probe Sequence
aagaatgtcttgctcgtggtttgga

SEQ ID NO: 162285 - DNA, 25 bp, Probe Sequence
aagagatttcagcaggctggtttta

SEQ ID NO: 162286 - DNA, 25 bp, Probe Sequence
aagagttgggttatgtgatttatgc

SEQ ID NO: 162287 - DNA, 25 bp, Probe Sequence
aagagttggctttaaaatgtttgca

SEQ ID NO: 162288 - DNA, 25 bp, Probe Sequence
aagagttggctttaaaatgtttgca

SEQ ID NO: 162289 - DNA, 25 bp, Probe Sequence
aagacttggtataaggtattcctga

SEQ ID NO: 162290 - DNA, 25 bp, Probe Sequence
aagacccagtacagtgtagccgtga

SEQ ID NO: 162291 - DNA, 25 bp, Probe Sequence
aagacaatttcagatggtagccagt

SEQ ID NO: 162292 - DNA, 25 bp, Probe Sequence
aagaaatgttgggctgggtacagtg

SEQ ID NO: 162293 - DNA, 25 bp, Probe Sequence
aagaccatttggtgcaggttaatat

SEQ ID NO: 162294 - DNA, 25 bp, Probe Sequence
aagacctaatgacaggttttacatg

SEQ ID NO: 162295 - DNA, 25 bp, Probe Sequence
aagaggtaggaccagtgcttttttg

SEQ ID NO: 162296 - DNA, 25 bp, Probe Sequence
aagaggagggacaggttcttggtgc

SEQ ID NO: 162297 - DNA, 25 bp, Probe Sequence
aaggaattaagcaggtactggcgct

SEQ ID NO: 162298 - DNA, 25 bp, Probe Sequence
aaggacctcaacagaggaccggctg

SEQ ID NO: 162299 - DNA, 25 bp, Probe Sequence
aaggagcgcctactaaggacgccgt

SEQ ID NO: 162300 - DNA, 25 bp, Probe Sequence
aagaggtccaagaaagctggccgcc

SEQ ID NO: 162301 - DNA, 25 bp, Probe Sequence
aagagtcccatgaaaggtggctcca

SEQ ID NO: 162302 - DNA, 25 bp, Probe Sequence
aagaaccctgccagatggactgctt

SEQ ID NO: 162303 - DNA, 25 bp, Probe Sequence
aagtagccctggccaggaacggtgg

SEQ ID NO: 162304 - DNA, 25 bp, Probe Sequence
aagtactccggcagggagggtgaca

SEQ ID NO: 162305 - DNA, 25 bp, Probe Sequence
aagttcctggagacggtggagttgc

SEQ ID NO: 162306 - DNA, 25 bp, Probe Sequence
aagtcaccagatcacgaggggtccc

SEQ ID NO: 162307 - DNA, 25 bp, Probe Sequence
aagatgcaaaaccagcgtggcggcc

SEQ ID NO: 162308 - DNA, 25 bp, Probe Sequence
aagtctaacatcaggcattgtggcc

SEQ ID NO: 162309 - DNA, 25 bp, Probe Sequence
aagacttcttctggctattgtgggc

SEQ ID NO: 162310 - DNA, 25 bp, Probe Sequence
aagaattgcttccggatgactgacc

SEQ ID NO: 162311 - DNA, 25 bp, Probe Sequence
aagaatggttcaccgaagtgactct

SEQ ID NO: 162312 - DNA, 25 bp, Probe Sequence
aagaagaataatctacgtgactggt

SEQ ID NO: 162313 - DNA, 25 bp, Probe Sequence
aagaagttgaactatgactggagta

SEQ ID NO: 162314 - DNA, 25 bp, Probe Sequence
aaggttattacctaatggagatcca

SEQ ID NO: 162315 - DNA, 25 bp, Probe Sequence
aaggttattacctaatggagatcca

SEQ ID NO: 162316 - DNA, 25 bp, Probe Sequence
aagagtattttcgaagaggagcaac

SEQ ID NO: 162317 - DNA, 25 bp, Probe Sequence
aagaaatttagcagaagaagacagt

SEQ ID NO: 162318 - DNA, 25 bp, Probe Sequence
aagacacctctgtctgggaagagac

SEQ ID NO: 162319 - DNA, 25 bp, Probe Sequence
aagagctccctttgtggggaacttg

SEQ ID NO: 162320 - DNA, 25 bp, Probe Sequence
aagagcttctttcgaaagtttcttg

SEQ ID NO: 162321 - DNA, 25 bp, Probe Sequence
aagcagttgctgttcgaaagcatct

SEQ ID NO: 162322 - DNA, 25 bp, Probe Sequence
aagcagtatctgttatttagctgta

SEQ ID NO: 162323 - DNA, 25 bp, Probe Sequence
aagcagccaaacctttcctgtaaca

SEQ ID NO: 162324 - DNA, 25 bp, Probe Sequence
aagacttagatttcttcctgttcta

SEQ ID NO: 162325 - DNA, 25 bp, Probe Sequence
aagaatctaaaccttacatgtgtaa

SEQ ID NO: 162326 - DNA, 25 bp, Probe Sequence
aagcatttacactctttaagacaaa

SEQ ID NO: 162327 - DNA, 25 bp, Probe Sequence
aagaatcggcaatgtttcaaacaaa

SEQ ID NO: 162328 - DNA, 25 bp, Probe Sequence
aagaatcggcaatgtttcaaacaaa

SEQ ID NO: 162329 - DNA, 25 bp, Probe Sequence
aagacacgagcgaatgatttaaata

SEQ ID NO: 162330 - DNA, 25 bp, Probe Sequence
aagcactcgtctactgttttaatga

SEQ ID NO: 162331 - DNA, 25 bp, Probe Sequence
aagaatttgcatacttacctagtga

SEQ ID NO: 162332 - DNA, 25 bp, Probe Sequence
aagaactgatgcactatatagaacg

SEQ ID NO: 162333 - DNA, 25 bp, Probe Sequence
aagaccagattgctaatgagaaagt

SEQ ID NO: 162334 - DNA, 25 bp, Probe Sequence
aagactgatgttcatgggtaaaata

SEQ ID NO: 162335 - DNA, 25 bp, Probe Sequence
aagagcttttgcacggtagaaggaa

SEQ ID NO: 162336 - DNA, 25 bp, Probe Sequence
aagaacttctgcacgcaaaagaaac

SEQ ID NO: 162337 - DNA, 25 bp, Probe Sequence
aagaactatgatccccagaaggaca

SEQ ID NO: 162338 - DNA, 25 bp, Probe Sequence
aagacacttaccaaggaagatatca

SEQ ID NO: 162339 - DNA, 25 bp, Probe Sequence
aagacacttacctaacaagtactgc

SEQ ID NO: 162340 - DNA, 25 bp, Probe Sequence
aagtctcaaacccaaaagtttgcag

SEQ ID NO: 162341 - DNA, 25 bp, Probe Sequence
aagttactacctgtcaaggtttgtg

SEQ ID NO: 162342 - DNA, 25 bp, Probe Sequence
gaagttactagcaaggacctcgttt

SEQ ID NO: 162343 - DNA, 25 bp, Probe Sequence
aagttcacaatgtggccgaggactt

SEQ ID NO: 162344 - DNA, 25 bp, Probe Sequence
aagacataacagtaacacgatgtac

SEQ ID NO: 162345 - DNA, 25 bp, Probe Sequence
aagagtaaaacatctatatgctata

SEQ ID NO: 162346 - DNA, 25 bp, Probe Sequence
aagcattaaaacaacctgagctatg

SEQ ID NO: 162347 - DNA, 25 bp, Probe Sequence
aagcagacaaaatcaacatggtcat

SEQ ID NO: 162348 - DNA, 25 bp, Probe Sequence
aagcagtcagattctataaatggca

SEQ ID NO: 162349 - DNA, 25 bp, Probe Sequence
aagagctgcagatgccgagaagcca

SEQ ID NO: 162350 - DNA, 25 bp, Probe Sequence
aagcagatcgtagctggggtgaact

SEQ ID NO: 162351 - DNA, 25 bp, Probe Sequence
aagcagtcattctctgggtatataa

SEQ ID NO: 162352 - DNA, 25 bp, Probe Sequence
aagcagtacttggcctgtatataat

SEQ ID NO: 162353 - DNA, 25 bp, Probe Sequence
aagcactacaggcccatgaattact

SEQ ID NO: 162354 - DNA, 25 bp, Probe Sequence
aagcactgttgactctgcatattta

SEQ ID NO: 162355 - DNA, 25 bp, Probe Sequence
aagcactttcagaaggttatgagac

SEQ ID NO: 162356 - DNA, 25 bp, Probe Sequence
aagactttgagatggctttcagtag

SEQ ID NO: 162357 - DNA, 25 bp, Probe Sequence
aagtccattatgggagatttggggc

SEQ ID NO: 162358 - DNA, 25 bp, Probe Sequence
aagcacctgctcgggtgattctggg

SEQ ID NO: 162359 - DNA, 25 bp, Probe Sequence
aagcactttcttctgactgctgtga

SEQ ID NO: 162360 - DNA, 25 bp, Probe Sequence
aagaccttgttcagagtgttcagct

SEQ ID NO: 162361 - DNA, 25 bp, Probe Sequence
aagaccttggtattcaggcaacacc

SEQ ID NO: 162362 - DNA, 25 bp, Probe Sequence
aagcagtctcggaaacacagagcca

SEQ ID NO: 162363 - DNA, 25 bp, Probe Sequence
aagcatccgcggattcagcatgcac

SEQ ID NO: 162364 - DNA, 25 bp, Probe Sequence
aagaacgtgctgggtcacatgcagc

SEQ ID NO: 162365 - DNA, 25 bp, Probe Sequence
aagaagctggcaggggcacgagccg

SEQ ID NO: 162366 - DNA, 25 bp, Probe Sequence
aagaacatgatggcggcgtgcgacc

SEQ ID NO: 162367 - DNA, 25 bp, Probe Sequence
aagaagcatgcggcgcagcggagca

SEQ ID NO: 162368 - DNA, 25 bp, Probe Sequence
aagaagatgcagcctggcaagcaga

SEQ ID NO: 162369 - DNA, 25 bp, Probe Sequence
aagaagtcagcttgagcatacagct

SEQ ID NO: 162370 - DNA, 25 bp, Probe Sequence
aagaagtggccatgcgcaagctggt

SEQ ID NO: 162371 - DNA, 25 bp, Probe Sequence
aagacgtaccagcccatttggtgaa

SEQ ID NO: 162372 - DNA, 25 bp, Probe Sequence
aagaagcaataggcccactgggtga

SEQ ID NO: 162373 - DNA, 25 bp, Probe Sequence
aagacaagaaccagagctatgggat

SEQ ID NO: 162374 - DNA, 25 bp, Probe Sequence
aagacaagacctatagctacctgaa

SEQ ID NO: 162375 - DNA, 25 bp, Probe Sequence
aagaaactcctgatcattggccaaa

SEQ ID NO: 162376 - DNA, 25 bp, Probe Sequence
aagaaattcttaatcacggtgccaa

SEQ ID NO: 162377 - DNA, 25 bp, Probe Sequence
aagaaacactatatcaaagcctcaa

SEQ ID NO: 162378 - DNA, 25 bp, Probe Sequence
aagaatatcctagttagaagtcaaa

SEQ ID NO: 162379 - DNA, 25 bp, Probe Sequence
aagacataccacgtaggagaacagt

SEQ ID NO: 162380 - DNA, 25 bp, Probe Sequence
aagaaactatccgagggaagaatat

SEQ ID NO: 162381 - DNA, 25 bp, Probe Sequence
aagaaatcttagcggaaattatata

SEQ ID NO: 162382 - DNA, 25 bp, Probe Sequence
aagagaacctacaggtgttgaagaa

SEQ ID NO: 162383 - DNA, 25 bp, Probe Sequence
aagaaatccggcatgtggaaaagaa

SEQ ID NO: 162384 - DNA, 25 bp, Probe Sequence
aagaacatcggtctgggcttcaaga

SEQ ID NO: 162385 - DNA, 25 bp, Probe Sequence
aagacacttggtttgttgaccataa

SEQ ID NO: 162386 - DNA, 25 bp, Probe Sequence
aatccacgctggtttgtggaccctc

SEQ ID NO: 162387 - DNA, 25 bp, Probe Sequence
aatccttggagcttctggttcctat

SEQ ID NO: 162388 - DNA, 25 bp, Probe Sequence
aatggctttaaccttggccgctatt

SEQ ID NO: 162389 - DNA, 25 bp, Probe Sequence
aagcatgtttacctgttggcttgct

SEQ ID NO: 162390 - DNA, 25 bp, Probe Sequence
aagcaattcattcgccgcaggttgc

SEQ ID NO: 162391 - DNA, 25 bp, Probe Sequence
aagaatgtatgtgtccaggcgcagt

SEQ ID NO: 162392 - DNA, 25 bp, Probe Sequence
aagacattagctgtctaggcgtgtg

SEQ ID NO: 162393 - DNA, 25 bp, Probe Sequence
aagactgtacaggactaggaatggc

SEQ ID NO: 162394 - DNA, 25 bp, Probe Sequence
aagacttacgggatgcagcaagaca

SEQ ID NO: 162395 - DNA, 25 bp, Probe Sequence
aagacttacgatgcatgtatacaaa

SEQ ID NO: 162396 - DNA, 25 bp, Probe Sequence
aagactttagtgtcagtcaccaaag

SEQ ID NO: 162397 - DNA, 25 bp, Probe Sequence
aagactttgaagtgctcatagaaga

SEQ ID NO: 162398 - DNA, 25 bp, Probe Sequence
aagcacttctacttcaacaagacca

SEQ ID NO: 162399 - DNA, 25 bp, Probe Sequence
aagacttcatagttcccaagaatta

SEQ ID NO: 162400 - DNA, 25 bp, Probe Sequence
aagaccccgtttgatcagttagctt

SEQ ID NO: 162401 - DNA, 25 bp, Probe Sequence
aagacaacggtttgtgtgcacttcc

SEQ ID NO: 162402 - DNA, 25 bp, Probe Sequence
caaacttgggtttgtctaactccag

SEQ ID NO: 162403 - DNA, 25 bp, Probe Sequence
aagacctggggtttattatcactca

SEQ ID NO: 162404 - DNA, 25 bp, Probe Sequence
aagaccagcaggtgcattttacccc

SEQ ID NO: 162405 - DNA, 25 bp, Probe Sequence
aagaagcaaggagctaggaccccca

SEQ ID NO: 162406 - DNA, 25 bp, Probe Sequence
aagcaaggggaccttggcactctca

SEQ ID NO: 162407 - DNA, 25 bp, Probe Sequence
aagacacgttacttgatggcctcta

SEQ ID NO: 162408 - DNA, 25 bp, Probe Sequence
aagacttgttctttacccatggaat

SEQ ID NO: 162409 - DNA, 25 bp, Probe Sequence
aagagcttggtctgtaaggccggat

SEQ ID NO: 162410 - DNA, 25 bp, Probe Sequence
aagacatcggtcagtaatgagcacg

SEQ ID NO: 162411 - DNA, 25 bp, Probe Sequence
aagaatctgagtctaaacagcacag

SEQ ID NO: 162412 - DNA, 25 bp, Probe Sequence
aagcagatgctgttatttacacaca

SEQ ID NO: 162413 - DNA, 25 bp, Probe Sequence
aagcagtcaaacatgctgaccgctc

SEQ ID NO: 162414 - DNA, 25 bp, Probe Sequence
aagcagacagtaattcagtccattc

SEQ ID NO: 162415 - DNA, 25 bp, Probe Sequence
aagaacgtccttagactcttgctca

SEQ ID NO: 162416 - DNA, 25 bp, Probe Sequence
aagagaagccacatctgcgtttgtc

SEQ ID NO: 162417 - DNA, 25 bp, Probe Sequence
aagagggccaattttactgatctgc

SEQ ID NO: 162418 - DNA, 25 bp, Probe Sequence
aagcacgggaggttcggctgatgcg

SEQ ID NO: 162419 - DNA, 25 bp, Probe Sequence
aagagcgtggagactcgcgactggc

SEQ ID NO: 162420 - DNA, 25 bp, Probe Sequence
aagagcgtgagaaactggacgggct

SEQ ID NO: 162421 - DNA, 25 bp, Probe Sequence
aagagctgtaagaggaactgtgggc

SEQ ID NO: 162422 - DNA, 25 bp, Probe Sequence
aagacggtagattggtagattgggc

SEQ ID NO: 162423 - DNA, 25 bp, Probe Sequence
aagacagcagtataggtgaatgtgt

SEQ ID NO: 162424 - DNA, 25 bp, Probe Sequence
aagacagcactctgggtgcgatctg

SEQ ID NO: 162425 - DNA, 25 bp, Probe Sequence
aagcaagactgctggtggccaaggc

SEQ ID NO: 162426 - DNA, 25 bp, Probe Sequence
aagaagcctgcactggtggccaagt

SEQ ID NO: 162427 - DNA, 25 bp, Probe Sequence
aagaagcctgcactggtggccaagt

SEQ ID NO: 162428 - DNA, 25 bp, Probe Sequence
aagaagcagtagtgtctcccagatt

SEQ ID NO: 162429 - DNA, 25 bp, Probe Sequence
aagaagcaaatcatttgcactctat

SEQ ID NO: 162430 - DNA, 25 bp, Probe Sequence
aagaagatttcattttccgcgcatc

SEQ ID NO: 162431 - DNA, 25 bp, Probe Sequence
aagaatgagttattgtcacctgaac

SEQ ID NO: 162432 - DNA, 25 bp, Probe Sequence
aagactggccactggcaccataaca

SEQ ID NO: 162433 - DNA, 25 bp, Probe Sequence
aagacaggcacttttggcgcaaatc

SEQ ID NO: 162434 - DNA, 25 bp, Probe Sequence
aagcaaatcagttgccggcctaacc

SEQ ID NO: 162435 - DNA, 25 bp, Probe Sequence
aagaaaagaacccgccgagcagtca

SEQ ID NO: 162436 - DNA, 25 bp, Probe Sequence
aagagccaaaacctccggaggctgc

SEQ ID NO: 162437 - DNA, 25 bp, Probe Sequence
aagagcttaaacatcctgactgcct

SEQ ID NO: 162438 - DNA, 25 bp, Probe Sequence
aagaccgtcaacatttagtgcctcc

SEQ ID NO: 162439 - DNA, 25 bp, Probe Sequence
aagcacccacatttgtttcaatgcc

SEQ ID NO: 162440 - DNA, 25 bp, Probe Sequence
aagcaccaagctatgttaaatctct

SEQ ID NO: 162441 - DNA, 25 bp, Probe Sequence
aagcactccagacttgattaaatgt

SEQ ID NO: 162442 - DNA, 25 bp, Probe Sequence
aagacccagcagcgaacacaagtcc

SEQ ID NO: 162443 - DNA, 25 bp, Probe Sequence
aagcacccagagctggcagacaaga

SEQ ID NO: 162444 - DNA, 25 bp, Probe Sequence
aagcagcccgcatattaggcgcaga

SEQ ID NO: 162445 - DNA, 25 bp, Probe Sequence
aagcagccacctggatattacagct

SEQ ID NO: 162446 - DNA, 25 bp, Probe Sequence
aagcagcaaccaatgatatatatct

SEQ ID NO: 162447 - DNA, 25 bp, Probe Sequence
aagcacaactctatttcatgctttc

SEQ ID NO: 162448 - DNA, 25 bp, Probe Sequence
aagaataatctacgtgactggttgc

SEQ ID NO: 162449 - DNA, 25 bp, Probe Sequence
aagcagaggttgcagtgagctgggg

SEQ ID NO: 162450 - DNA, 25 bp, Probe Sequence
aagagggtcattggggtcgagctat

SEQ ID NO: 162451 - DNA, 25 bp, Probe Sequence
aagaagttcatgagggaccccattc

SEQ ID NO: 162452 - DNA, 25 bp, Probe Sequence
aagaatgaactaaggtgtctaccat

SEQ ID NO: 162453 - DNA, 25 bp, Probe Sequence
aagaagaggctgagtgcgtccctga

SEQ ID NO: 162454 - DNA, 25 bp, Probe Sequence
aagaagcgtgtatgtagtcaccatt

SEQ ID NO: 162455 - DNA, 25 bp, Probe Sequence
aagaaccctttatgtaccatctgga

SEQ ID NO: 162456 - DNA, 25 bp, Probe Sequence
aagaacttctataaggagcccttgg

SEQ ID NO: 162457 - DNA, 25 bp, Probe Sequence
aatgaacggtaaatggcccgcctgg

SEQ ID NO: 162458 - DNA, 25 bp, Probe Sequence
aagagaaagtcacaggccctcttct

SEQ ID NO: 162459 - DNA, 25 bp, Probe Sequence
aagaaaggatctctggggcttccgg

SEQ ID NO: 162460 - DNA, 25 bp, Probe Sequence
aagacagaggttcaggtcgttccag

SEQ ID NO: 162461 - DNA, 25 bp, Probe Sequence
aagacatgacgttagggactttcct

SEQ ID NO: 162462 - DNA, 25 bp, Probe Sequence
aagaatacagcttgtgaagaattac

SEQ ID NO: 162463 - DNA, 25 bp, Probe Sequence
aagaatgctatcttggaaaattgca

SEQ ID NO: 162464 - DNA, 25 bp, Probe Sequence
aagaatgtgagcatgcagaaaagga

SEQ ID NO: 162465 - DNA, 25 bp, Probe Sequence
caagcctgggcaacaaagcaagacc

SEQ ID NO: 162466 - DNA, 25 bp, Probe Sequence
aagacatgacgccactgaagccagc

SEQ ID NO: 162467 - DNA, 25 bp, Probe Sequence
aagacacagtgctatcatacatccc

SEQ ID NO: 162468 - DNA, 25 bp, Probe Sequence
aagacacgtgcaacagactgcctta

SEQ ID NO: 162469 - DNA, 25 bp, Probe Sequence
aagaccgtgagttgatgccagttat

SEQ ID NO: 162470 - DNA, 25 bp, Probe Sequence
aagacctgcgtattgatgattttag

SEQ ID NO: 162471 - DNA, 25 bp, Probe Sequence
aagatcttgcacaaagaactttcat

SEQ ID NO: 162472 - DNA, 25 bp, Probe Sequence
aagattatgacagattacgccccct

SEQ ID NO: 162473 - DNA, 25 bp, Probe Sequence
aagattgcaccagtgcactccagct

SEQ ID NO: 162474 - DNA, 25 bp, Probe Sequence
aagaacccagagcatccgatggtag

SEQ ID NO: 162475 - DNA, 25 bp, Probe Sequence
aagaactggaagcctaagtgttagg

SEQ ID NO: 162476 - DNA, 25 bp, Probe Sequence
aagaatcagtaagtgtaaggtgtac

SEQ ID NO: 162477 - DNA, 25 bp, Probe Sequence
aagcaatcagtttgagatactaggt

SEQ ID NO: 162478 - DNA, 25 bp, Probe Sequence
aagaactctttgttacatcaggtat

SEQ ID NO: 162479 - DNA, 25 bp, Probe Sequence
aagaagcatctgattaccttgaatt

SEQ ID NO: 162480 - DNA, 25 bp, Probe Sequence
aagaagaccatttgaccatatgaat

SEQ ID NO: 162481 - DNA, 25 bp, Probe Sequence
aagacagccaatagcacccattaaa

SEQ ID NO: 162482 - DNA, 25 bp, Probe Sequence
aagaaggcgatagcttttagaaaga

SEQ ID NO: 162483 - DNA, 25 bp, Probe Sequence
aagaagaggactgatttttataaat

SEQ ID NO: 162484 - DNA, 25 bp, Probe Sequence
aagaaagccctcatgtttgtgataa

SEQ ID NO: 162485 - DNA, 25 bp, Probe Sequence
aagaagtagcttttggttgtattga

SEQ ID NO: 162486 - DNA, 25 bp, Probe Sequence
aagaatgtatctaattttgctttaa

SEQ ID NO: 162487 - DNA, 25 bp, Probe Sequence
aagcaataatttttccgtgtcttat

SEQ ID NO: 162488 - DNA, 25 bp, Probe Sequence
aagaatgaaattgcacacttgtttt

SEQ ID NO: 162489 - DNA, 25 bp, Probe Sequence
aagaaccagattgtatatgttttta

SEQ ID NO: 162490 - DNA, 25 bp, Probe Sequence
aagaagtcgtggctaggtgttgttg

SEQ ID NO: 162491 - DNA, 25 bp, Probe Sequence
aagtgccggttagtcaggtttgttg

SEQ ID NO: 162492 - DNA, 25 bp, Probe Sequence
cacgtcggtatcagccgttttgttc

SEQ ID NO: 162493 - DNA, 25 bp, Probe Sequence
aagaggcagtacaccagtttcttcc

SEQ ID NO: 162494 - DNA, 25 bp, Probe Sequence
aagagactgaacacataggttttat

SEQ ID NO: 162495 - DNA, 25 bp, Probe Sequence
aagaaatgtactccttgtgtctttt

SEQ ID NO: 162496 - DNA, 25 bp, Probe Sequence
aagcaacagtaatctatgtgtttct

SEQ ID NO: 162497 - DNA, 25 bp, Probe Sequence
aagatacggacattttctgtgtttc

SEQ ID NO: 162498 - DNA, 25 bp, Probe Sequence
aagaaattgactctacattgtataa

SEQ ID NO: 162499 - DNA, 25 bp, Probe Sequence
aagcaaatctgtgtctactttaaaa

SEQ ID NO: 162500 - DNA, 25 bp, Probe Sequence
aagacaacttgcaccactaagaaaa

SEQ ID NO: 162501 - DNA, 25 bp, Probe Sequence
aagaaatctacatccaccaaaattg

SEQ ID NO: 162502 - DNA, 25 bp, Probe Sequence
aagaactgcaaatactccaaggata

SEQ ID NO: 162503 - DNA, 25 bp, Probe Sequence
aagttcatcaaattccttaatagga

SEQ ID NO: 162504 - DNA, 25 bp, Probe Sequence
aagaacacactctcctgtattagga

SEQ ID NO: 162505 - DNA, 25 bp, Probe Sequence
aagaaccactcattgtctttgagga

SEQ ID NO: 162506 - DNA, 25 bp, Probe Sequence
aagaaccactcattgtctttgagga

SEQ ID NO: 162507 - DNA, 25 bp, Probe Sequence
aagagtctccactccacttgaaaaa

SEQ ID NO: 162508 - DNA, 25 bp, Probe Sequence
aagagcttggcaggaacacattgaa

SEQ ID NO: 162509 - DNA, 25 bp, Probe Sequence
aagcaattagcttgaacatttagaa

SEQ ID NO: 162510 - DNA, 25 bp, Probe Sequence
aagaattcagctaacgcttccagac

SEQ ID NO: 162511 - DNA, 25 bp, Probe Sequence
aagaattcagctaacgcttccagac

SEQ ID NO: 162512 - DNA, 25 bp, Probe Sequence
aagaaacgtacaagtcccatgacaa

SEQ ID NO: 162513 - DNA, 25 bp, Probe Sequence
aagaaacgataaatattgcactgaa

SEQ ID NO: 162514 - DNA, 25 bp, Probe Sequence
aagaaccgagcaattttctgctaaa

SEQ ID NO: 162515 - DNA, 25 bp, Probe Sequence
aagaaacgtattcttctctcccatg

SEQ ID NO: 162516 - DNA, 25 bp, Probe Sequence
aagaacaagctggattttctccgcc

SEQ ID NO: 162517 - DNA, 25 bp, Probe Sequence
aagaagaattgcctgtaatccccta

SEQ ID NO: 162518 - DNA, 25 bp, Probe Sequence
aagaagcaactaccttagctccact

SEQ ID NO: 162519 - DNA, 25 bp, Probe Sequence
aagcaaaccaacttcatgaccaagc

SEQ ID NO: 162520 - DNA, 25 bp, Probe Sequence
aagaattccaaggattgtcacaatc

SEQ ID NO: 162521 - DNA, 25 bp, Probe Sequence
aagcaattcgacgcctgctacatgt

SEQ ID NO: 162522 - DNA, 25 bp, Probe Sequence
aagaatctccaatgcctgattatct

SEQ ID NO: 162523 - DNA, 25 bp, Probe Sequence
aagagactttagtcactgtcttctt

SEQ ID NO: 162524 - DNA, 25 bp, Probe Sequence
aagaagttctgggtcctttcatcat

SEQ ID NO: 162525 - DNA, 25 bp, Probe Sequence
aagatggttgccgggtcatgttaat

SEQ ID NO: 162526 - DNA, 25 bp, Probe Sequence
aagactttccagggattgactcaaa

SEQ ID NO: 162527 - DNA, 25 bp, Probe Sequence
aagcacatcaacgagctgactatga

SEQ ID NO: 162528 - DNA, 25 bp, Probe Sequence
aagcaatgcaataggctcctcaaag

SEQ ID NO: 162529 - DNA, 25 bp, Probe Sequence
aagaatgggatgctcaccaaagatc

SEQ ID NO: 162530 - DNA, 25 bp, Probe Sequence
aagaccaggtctacagtgatagagc

SEQ ID NO: 162531 - DNA, 25 bp, Probe Sequence
aagaagctggcttgacatgctgtat

SEQ ID NO: 162532 - DNA, 25 bp, Probe Sequence
aagacagaggtcgacatttataact

SEQ ID NO: 162533 - DNA, 25 bp, Probe Sequence
aagacatagagtggcacaatgcata

SEQ ID NO: 162534 - DNA, 25 bp, Probe Sequence
aagcaaatagtgccctcagctactg

SEQ ID NO: 162535 - DNA, 25 bp, Probe Sequence
aagcaagtatgctgctctctctgtt

SEQ ID NO: 162536 - DNA, 25 bp, Probe Sequence
aagcaagtggcttcctttttgagat

SEQ ID NO: 162537 - DNA, 25 bp, Probe Sequence
aagcaagatgtgttccttattgtga

SEQ ID NO: 162538 - DNA, 25 bp, Probe Sequence
aagaagcatgtggtggctctcattt

SEQ ID NO: 162539 - DNA, 25 bp, Probe Sequence
aagaagttgccattctctgcagttt

SEQ ID NO: 162540 - DNA, 25 bp, Probe Sequence
aagaactcctcacttgctgagtttg

SEQ ID NO: 162541 - DNA, 25 bp, Probe Sequence
aagacctgctccgatgatgtagttg

SEQ ID NO: 162542 - DNA, 25 bp, Probe Sequence
aagacattgaccgctgcgtggaggc

SEQ ID NO: 162543 - DNA, 25 bp, Probe Sequence
aagattagcccagtgcggtggcact

SEQ ID NO: 162544 - DNA, 25 bp, Probe Sequence
aagaaacctagtggtggctcctcaa

SEQ ID NO: 162545 - DNA, 25 bp, Probe Sequence
aagaaactccagccggagctcagct

SEQ ID NO: 162546 - DNA, 25 bp, Probe Sequence
aagaaagtccctctgcaattgcata

SEQ ID NO: 162547 - DNA, 25 bp, Probe Sequence
aagacaccccttcagataatgatag

SEQ ID NO: 162548 - DNA, 25 bp, Probe Sequence
aagttgcctaggaaaataatgtaga

SEQ ID NO: 162549 - DNA, 25 bp, Probe Sequence
gacgttggtaactgacaaagtgaaa

SEQ ID NO: 162550 - DNA, 25 bp, Probe Sequence
gaagttttacgctcacaaaataaat

SEQ ID NO: 162551 - DNA, 25 bp, Probe Sequence
aagtcaggtacttcccaaaatacag

SEQ ID NO: 162552 - DNA, 25 bp, Probe Sequence
aagaatggtagcagccacaagtaaa

SEQ ID NO: 162553 - DNA, 25 bp, Probe Sequence
aagaatttgacaactcacaagctgg

SEQ ID NO: 162554 - DNA, 25 bp, Probe Sequence
aagaactgtacaagctgccctagtg

SEQ ID NO: 162555 - DNA, 25 bp, Probe Sequence
aagaacttcgagactcatgcacaag

SEQ ID NO: 162556 - DNA, 25 bp, Probe Sequence
aagaatggggagactcctcaagcag

SEQ ID NO: 162557 - DNA, 25 bp, Probe Sequence
aagaatagggagaccatctgaaaat

SEQ ID NO: 162558 - DNA, 25 bp, Probe Sequence
aagacataggacttaactggaaaat

SEQ ID NO: 162559 - DNA, 25 bp, Probe Sequence
aagaactgtggcctaattggaaagt

SEQ ID NO: 162560 - DNA, 25 bp, Probe Sequence
aagaacgtctcccaatatctgaatt

SEQ ID NO: 162561 - DNA, 25 bp, Probe Sequence
aagaactgtctatgaatttattctg

SEQ ID NO: 162562 - DNA, 25 bp, Probe Sequence
aagaactgctctgggactgtaattt

SEQ ID NO: 162563 - DNA, 25 bp, Probe Sequence
aagaacgtctgagccttcaatgttg

SEQ ID NO: 162564 - DNA, 25 bp, Probe Sequence
caagagatttctcaccttaataggt

SEQ ID NO: 162565 - DNA, 25 bp, Probe Sequence
aatggtcttgttgccggaaatggat

SEQ ID NO: 162566 - DNA, 25 bp, Probe Sequence
aagggcttttcccattgaatagaag

SEQ ID NO: 162567 - DNA, 25 bp, Probe Sequence
aagtccttttcagctaagtgaaggt

SEQ ID NO: 162568 - DNA, 25 bp, Probe Sequence
aaggcccttaatgctacaggacaag

SEQ ID NO: 162569 - DNA, 25 bp, Probe Sequence
aaggcccttaatgctacaggacaag

SEQ ID NO: 162570 - DNA, 25 bp, Probe Sequence
aagggaaaatctctgaaggaaatgg

SEQ ID NO: 162571 - DNA, 25 bp, Probe Sequence
aagttacaagtcacaaaggagaatg

SEQ ID NO: 162572 - DNA, 25 bp, Probe Sequence
aagttagcaaggatatccaggagtt

SEQ ID NO: 162573 - DNA, 25 bp, Probe Sequence
aagacattacagctataccagaact

SEQ ID NO: 162574 - DNA, 25 bp, Probe Sequence
aagaagctaagcctgatctcctgta

SEQ ID NO: 162575 - DNA, 25 bp, Probe Sequence
aagaatctacaccatattccctcaa

SEQ ID NO: 162576 - DNA, 25 bp, Probe Sequence
aagagatcttcattaagtacccaaa

SEQ ID NO: 162577 - DNA, 25 bp, Probe Sequence
aagttcttttgtataagcaaacatg

SEQ ID NO: 162578 - DNA, 25 bp, Probe Sequence
aagtggttatttctcaacaaagcac

SEQ ID NO: 162579 - DNA, 25 bp, Probe Sequence
aagaggggctttcatacaaatagac

SEQ ID NO: 162580 - DNA, 25 bp, Probe Sequence
aagagaacctttctgtgacattgga

SEQ ID NO: 162581 - DNA, 25 bp, Probe Sequence
aagaaaacttgtgttcaatctgtga

SEQ ID NO: 162582 - DNA, 25 bp, Probe Sequence
aagaagaccttttttcagaggatga

SEQ ID NO: 162583 - DNA, 25 bp, Probe Sequence
aagactgaccttgaattcagcctgg

SEQ ID NO: 162584 - DNA, 25 bp, Probe Sequence
aagaagtgccttgagctcttctctg

SEQ ID NO: 162585 - DNA, 25 bp, Probe Sequence
aagacgtgtcatgtacatttgtatc

SEQ ID NO: 162586 - DNA, 25 bp, Probe Sequence
aagacgtcttctagagcctttgatc

SEQ ID NO: 162587 - DNA, 25 bp, Probe Sequence
aagactgacttttatcctgcttcat

SEQ ID NO: 162588 - DNA, 25 bp, Probe Sequence
aagaatcacttttatgatcattcct

SEQ ID NO: 162589 - DNA, 25 bp, Probe Sequence
aagaatcttttggtttctcactgca

SEQ ID NO: 162590 - DNA, 25 bp, Probe Sequence
aagaatcttcttgatagctctccca

SEQ ID NO: 162591 - DNA, 25 bp, Probe Sequence
aagaagcatccaagcttgatccccc

SEQ ID NO: 162592 - DNA, 25 bp, Probe Sequence
aagaagaccaggtctgactccacct

SEQ ID NO: 162593 - DNA, 25 bp, Probe Sequence
aagaatgagccactggtactccaca

SEQ ID NO: 162594 - DNA, 25 bp, Probe Sequence
aagagtgcaggccaggttccttatc

SEQ ID NO: 162595 - DNA, 25 bp, Probe Sequence
aaggtccccagaaatcctatcatgg

SEQ ID NO: 162596 - DNA, 25 bp, Probe Sequence
aagagttcctgaagtaccacatctg

SEQ ID NO: 162597 - DNA, 25 bp, Probe Sequence
aagaaagcctgagtactccacactg

SEQ ID NO: 162598 - DNA, 25 bp, Probe Sequence
aagaaccatgtattaaccacactta

SEQ ID NO: 162599 - DNA, 25 bp, Probe Sequence
aagaaccttataactttcacactca

SEQ ID NO: 162600 - DNA, 25 bp, Probe Sequence
aagaaacctataacttcacactcat

SEQ ID NO: 162601 - DNA, 25 bp, Probe Sequence
aagaatcaactatgacttcctctga

SEQ ID NO: 162602 - DNA, 25 bp, Probe Sequence
aagaatggagcttaaccatgcctcc

SEQ ID NO: 162603 - DNA, 25 bp, Probe Sequence
aagaatgaacaccaaaataccgctc

SEQ ID NO: 162604 - DNA, 25 bp, Probe Sequence
caggaataaacacacctacgctccg

SEQ ID NO: 162605 - DNA, 25 bp, Probe Sequence
aagttacagacacaactgaggcccc

SEQ ID NO: 162606 - DNA, 25 bp, Probe Sequence
aagaaacaccattacctgaggccct

SEQ ID NO: 162607 - DNA, 25 bp, Probe Sequence
aagaagccaaaggacccagagccac

SEQ ID NO: 162608 - DNA, 25 bp, Probe Sequence
aagaagccaaaggacccagagccac

SEQ ID NO: 162609 - DNA, 25 bp, Probe Sequence
aagaaccaaatactgcccatggcct

SEQ ID NO: 162610 - DNA, 25 bp, Probe Sequence
aagaacacaaacgacctgatggagc

SEQ ID NO: 162611 - DNA, 25 bp, Probe Sequence
aagagatcacgagaaagctgaaaca

SEQ ID NO: 162612 - DNA, 25 bp, Probe Sequence
aagaatccaactgatgagtatctag

SEQ ID NO: 162613 - DNA, 25 bp, Probe Sequence
aagaatcccacagggcactattaat

SEQ ID NO: 162614 - DNA, 25 bp, Probe Sequence
aagaacgctagagtggcccatgcat

SEQ ID NO: 162615 - DNA, 25 bp, Probe Sequence
aagaagcatggcactggcacctgat

SEQ ID NO: 162616 - DNA, 25 bp, Probe Sequence
aagacagattctacatgcgcacaaa

SEQ ID NO: 162617 - DNA, 25 bp, Probe Sequence
aagaagtcactgtcagagaaataaa

SEQ ID NO: 162618 - DNA, 25 bp, Probe Sequence
aagagcttcactcaaaaatcacacc

SEQ ID NO: 162619 - DNA, 25 bp, Probe Sequence
aagagcctaaaatacgaacacccag

SEQ ID NO: 162620 - DNA, 25 bp, Probe Sequence
aagagcctaagacagagttacccta

SEQ ID NO: 162621 - DNA, 25 bp, Probe Sequence
caaacccaaaggccagttaccagat

SEQ ID NO: 162622 - DNA, 25 bp, Probe Sequence
aagaccccaaggagatctacacgca

SEQ ID NO: 162623 - DNA, 25 bp, Probe Sequence
aagaccccaaacttgtctaccatat

SEQ ID NO: 162624 - DNA, 25 bp, Probe Sequence
aagacccaaatatcgtcatagccaa

SEQ ID NO: 162625 - DNA, 25 bp, Probe Sequence
aagacatcaagaaaccgatttgctt

SEQ ID NO: 162626 - DNA, 25 bp, Probe Sequence
aagagtccaatccaccgaactctgt

SEQ ID NO: 162627 - DNA, 25 bp, Probe Sequence
aagagaccaatgagaaggactatgt

SEQ ID NO: 162628 - DNA, 25 bp, Probe Sequence
aagagaaaatgattagtgtactgtt

SEQ ID NO: 162629 - DNA, 25 bp, Probe Sequence
aagaaaagatgtccggttctgcctc

SEQ ID NO: 162630 - DNA, 25 bp, Probe Sequence
aagacattcaggactgctggtttgt

SEQ ID NO: 162631 - DNA, 25 bp, Probe Sequence
aagatgttcatgtagtattgaaact

SEQ ID NO: 162632 - DNA, 25 bp, Probe Sequence
aagatgatttgtatcttagacgacc

SEQ ID NO: 162633 - DNA, 25 bp, Probe Sequence
aagatgatttggcagattcagaaga

SEQ ID NO: 162634 - DNA, 25 bp, Probe Sequence
aagacatatgggatatccagatgag

SEQ ID NO: 162635 - DNA, 25 bp, Probe Sequence
aagacatgacgacgttccgcagtgc

SEQ ID NO: 162636 - DNA, 25 bp, Probe Sequence
aagagctggagacgttccgggagga

SEQ ID NO: 162637 - DNA, 25 bp, Probe Sequence
aagagtggaactatccaaaagagac

SEQ ID NO: 162638 - DNA, 25 bp, Probe Sequence
aagacatggacctgacacaaaagga

SEQ ID NO: 162639 - DNA, 25 bp, Probe Sequence
aagactggtctcacaccactaatgg

SEQ ID NO: 162640 - DNA, 25 bp, Probe Sequence
aagactgtgtccactttgggcatga

SEQ ID NO: 162641 - DNA, 25 bp, Probe Sequence
aagaagatcgcgatcttcggcgcca

SEQ ID NO: 162642 - DNA, 25 bp, Probe Sequence
aagacagcagagctgctttccgcct

SEQ ID NO: 162643 - DNA, 25 bp, Probe Sequence
aagacagcagagctgctttccgcct

SEQ ID NO: 162644 - DNA, 25 bp, Probe Sequence
aagacagcagagctgctttccgcct

SEQ ID NO: 162645 - DNA, 25 bp, Probe Sequence
aagaagcagaggaccttccagccac

SEQ ID NO: 162646 - DNA, 25 bp, Probe Sequence
aagaagcagatgtcaccgtgggggc

SEQ ID NO: 162647 - DNA, 25 bp, Probe Sequence
aagaactggtcagttgccggaatcc

SEQ ID NO: 162648 - DNA, 25 bp, Probe Sequence
aagaagctgtcttgtcgacggtctc

SEQ ID NO: 162649 - DNA, 25 bp, Probe Sequence
aagaagctgtcttgtcgacggtctc

SEQ ID NO: 162650 - DNA, 25 bp, Probe Sequence
aagacagcttcgtggaggtatcccc

SEQ ID NO: 162651 - DNA, 25 bp, Probe Sequence
aagaacgtcagttcgtgttgacgcc

SEQ ID NO: 162652 - DNA, 25 bp, Probe Sequence
aagaactgtcagctcagcgttgact

SEQ ID NO: 162653 - DNA, 25 bp, Probe Sequence
aagaagttcagcctcaagcatcagc

SEQ ID NO: 162654 - DNA, 25 bp, Probe Sequence
aagaagctttgcccaaggctgcatt

SEQ ID NO: 162655 - DNA, 25 bp, Probe Sequence
aagaggctttggcccaactgcctct

SEQ ID NO: 162656 - DNA, 25 bp, Probe Sequence
aagaacttggagcccatttctcact

SEQ ID NO: 162657 - DNA, 25 bp, Probe Sequence
aagaaatcgagacccatactgctga

SEQ ID NO: 162658 - DNA, 25 bp, Probe Sequence
aagaaaggcaaaccagagctcagaa

SEQ ID NO: 162659 - DNA, 25 bp, Probe Sequence
aagaagcagacagcccgagagatga

SEQ ID NO: 162660 - DNA, 25 bp, Probe Sequence
aagaaatgacctgccgtgatatcgt

SEQ ID NO: 162661 - DNA, 25 bp, Probe Sequence
aagaaagcccttacaggtcaccttg

SEQ ID NO: 162662 - DNA, 25 bp, Probe Sequence
aagaagcagaccattggggctccca

SEQ ID NO: 162663 - DNA, 25 bp, Probe Sequence
aagaaaatcttcattggcctcatcc

SEQ ID NO: 162664 - DNA, 25 bp, Probe Sequence
aagaagcaattttctgttcctctcc

SEQ ID NO: 162665 - DNA, 25 bp, Probe Sequence
aagacatagacttccatgttccatc

SEQ ID NO: 162666 - DNA, 25 bp, Probe Sequence
aagaaagctctgctatgtgtcagtc

SEQ ID NO: 162667 - DNA, 25 bp, Probe Sequence
aagaaatgtctggctggtctcagct

SEQ ID NO: 162668 - DNA, 25 bp, Probe Sequence
aagaaatgctaccttgcttcagaag

SEQ ID NO: 162669 - DNA, 25 bp, Probe Sequence
aagagatggccacggctgcttccag

SEQ ID NO: 162670 - DNA, 25 bp, Probe Sequence
aagagagggcacggttatcacatgg

SEQ ID NO: 162671 - DNA, 25 bp, Probe Sequence
aagattggaggtgatttacagtgaa

SEQ ID NO: 162672 - DNA, 25 bp, Probe Sequence
aagttgggcttgcccctacatgata

SEQ ID NO: 162673 - DNA, 25 bp, Probe Sequence
aagttcggtgtggtcctggatgaga

SEQ ID NO: 162674 - DNA, 25 bp, Probe Sequence
aagacatttgtgggactctggatgg

SEQ ID NO: 162675 - DNA, 25 bp, Probe Sequence
aagagatttgttgatttggtagagc

SEQ ID NO: 162676 - DNA, 25 bp, Probe Sequence
aagagaatttatggacgttgtagaa

SEQ ID NO: 162677 - DNA, 25 bp, Probe Sequence
aagagaattaatgtgcgtattgagc

SEQ ID NO: 162678 - DNA, 25 bp, Probe Sequence
aagaaagataggcaggtttactgta

SEQ ID NO: 162679 - DNA, 25 bp, Probe Sequence
aagaaaaatggcagcctcttagtgc

SEQ ID NO: 162680 - DNA, 25 bp, Probe Sequence
aagaaacaacaatggactatagagt

SEQ ID NO: 162681 - DNA, 25 bp, Probe Sequence
aagacataataccaaagacttacgg

SEQ ID NO: 162682 - DNA, 25 bp, Probe Sequence
aagtttagaccaaaggacattcgtg

SEQ ID NO: 162683 - DNA, 25 bp, Probe Sequence
aagtttacaccagtgtgggcatcca

SEQ ID NO: 162684 - DNA, 25 bp, Probe Sequence
aagtttaaaacttctgtgcatcgaa

SEQ ID NO: 162685 - DNA, 25 bp, Probe Sequence
aagagctgtaacactgctgcgtatg

SEQ ID NO: 162686 - DNA, 25 bp, Probe Sequence
aagaagatgaacaagcgccagctct

SEQ ID NO: 162687 - DNA, 25 bp, Probe Sequence
aagactgagaaatccacatgcttca

SEQ ID NO: 162688 - DNA, 25 bp, Probe Sequence
aagactgagaaatccacatgcttca

SEQ ID NO: 162689 - DNA, 25 bp, Probe Sequence
aagaaaggacagttcacaatctagt

SEQ ID NO: 162690 - DNA, 25 bp, Probe Sequence
aagaaaatgaattccaaatccctgg

SEQ ID NO: 162691 - DNA, 25 bp, Probe Sequence
aagataaagaaggcatccctcccga

SEQ ID NO: 162692 - DNA, 25 bp, Probe Sequence
aagacaaggaaggcatccctcctga

SEQ ID NO: 162693 - DNA, 25 bp, Probe Sequence
aagaacaacacagtcactcctggcg

SEQ ID NO: 162694 - DNA, 25 bp, Probe Sequence
aagaacaacacagtcactcctggcg

SEQ ID NO: 162695 - DNA, 25 bp, Probe Sequence
aagagaccagtagcagcctcttgcc

SEQ ID NO: 162696 - DNA, 25 bp, Probe Sequence
aagagagccatggctccagccatac

SEQ ID NO: 162697 - DNA, 25 bp, Probe Sequence
aagagtgccagtcagcagtcatgca

SEQ ID NO: 162698 - DNA, 25 bp, Probe Sequence
aagacatctcgaatgagagccagaa

SEQ ID NO: 162699 - DNA, 25 bp, Probe Sequence
aagacttcagagtggcttgatagca

SEQ ID NO: 162700 - DNA, 25 bp, Probe Sequence
aagactctggagatgagttagagca

SEQ ID NO: 162701 - DNA, 25 bp, Probe Sequence
aagacttggatacattacagcagac

SEQ ID NO: 162702 - DNA, 25 bp, Probe Sequence
aagacatccagacgctattaccaac

SEQ ID NO: 162703 - DNA, 25 bp, Probe Sequence
aagacactgaattgcttctaagaat

SEQ ID NO: 162704 - DNA, 25 bp, Probe Sequence
aagacacgagagccttctaatgcca

SEQ ID NO: 162705 - DNA, 25 bp, Probe Sequence
aagaagcaggggcctctgagtgcca

SEQ ID NO: 162706 - DNA, 25 bp, Probe Sequence
aagacattggtggagtctgtatccc

SEQ ID NO: 162707 - DNA, 25 bp, Probe Sequence
aagacattgcaccagatgccattac

SEQ ID NO: 162708 - DNA, 25 bp, Probe Sequence
aagacaatcatcaatgatgcctttt

SEQ ID NO: 162709 - DNA, 25 bp, Probe Sequence
aagacaatataatcatgtgctttta

SEQ ID NO: 162710 - DNA, 25 bp, Probe Sequence
aagacaagacagtatatgtatgttt

SEQ ID NO: 162711 - DNA, 25 bp, Probe Sequence
aagacaatggcgctgcatgtttttc

SEQ ID NO: 162712 - DNA, 25 bp, Probe Sequence
aagaaatggtgctttgctctgtgtt

SEQ ID NO: 162713 - DNA, 25 bp, Probe Sequence
aagagcatcgttccaatgcttgttc

SEQ ID NO: 162714 - DNA, 25 bp, Probe Sequence
aagagcaggtggccaactcagcttt

SEQ ID NO: 162715 - DNA, 25 bp, Probe Sequence
aagacaagccatgcatacaactttg

SEQ ID NO: 162716 - DNA, 25 bp, Probe Sequence
aagacaggccatggcgaaatcccgc

SEQ ID NO: 162717 - DNA, 25 bp, Probe Sequence
aatccattgccatcaaattgccctt

SEQ ID NO: 162718 - DNA, 25 bp, Probe Sequence
aagacattgcttcaacattgccttc

SEQ ID NO: 162719 - DNA, 25 bp, Probe Sequence
aagacattcctggaatcactccttt

SEQ ID NO: 162720 - DNA, 25 bp, Probe Sequence
aagactatccagaaatcccagtggt

SEQ ID NO: 162721 - DNA, 25 bp, Probe Sequence
aagacgaccatgacgagctctagct

SEQ ID NO: 162722 - DNA, 25 bp, Probe Sequence
aagagctacctgagtggcatgcctg

SEQ ID NO: 162723 - DNA, 25 bp, Probe Sequence
aagacaagcctgaccaacatggtga

SEQ ID NO: 162724 - DNA, 25 bp, Probe Sequence
aagacaagttgctcaactggacatt

SEQ ID NO: 162725 - DNA, 25 bp, Probe Sequence
aagaccaaatctgaactgctaatgt

SEQ ID NO: 162726 - DNA, 25 bp, Probe Sequence
aagacaaatgtcaccagcctcaagt

SEQ ID NO: 162727 - DNA, 25 bp, Probe Sequence
aagaggagattcacagcgccaaggc

SEQ ID NO: 162728 - DNA, 25 bp, Probe Sequence
aagaagctgaatcagctgcgcgcaa

SEQ ID NO: 162729 - DNA, 25 bp, Probe Sequence
aagacgtcaatttagctgcatcatg

SEQ ID NO: 162730 - DNA, 25 bp, Probe Sequence
aagacgtcaatttagctgcatcatg

SEQ ID NO: 162731 - DNA, 25 bp, Probe Sequence
aagacatgacaattagaagcatcaa

SEQ ID NO: 162732 - DNA, 25 bp, Probe Sequence
aagagtgagcaactaggactagcct

SEQ ID NO: 162733 - DNA, 25 bp, Probe Sequence
aagacgatgcaggttggtctcctct

SEQ ID NO: 162734 - DNA, 25 bp, Probe Sequence
aatacggttttggtgtcctgctaca

SEQ ID NO: 162735 - DNA, 25 bp, Probe Sequence
aagaaatattttgtacagctgtaca

SEQ ID NO: 162736 - DNA, 25 bp, Probe Sequence
aaggttttcttgagagcctgtagat

SEQ ID NO: 162737 - DNA, 25 bp, Probe Sequence
aagttttccatctcgagggactata

SEQ ID NO: 162738 - DNA, 25 bp, Probe Sequence
aagttgttcgccgcgtggaatgtga

SEQ ID NO: 162739 - DNA, 25 bp, Probe Sequence
aagatctaatctgccgtgggcctgt

SEQ ID NO: 162740 - DNA, 25 bp, Probe Sequence
aagactaatctcagccaaacctgct

SEQ ID NO: 162741 - DNA, 25 bp, Probe Sequence
aagacgttgccttcaaagacctgga

SEQ ID NO: 162742 - DNA, 25 bp, Probe Sequence
aagagagggctttctcaggacctgg

SEQ ID NO: 162743 - DNA, 25 bp, Probe Sequence
aagaggtggtgttcgaggtcgtgga

SEQ ID NO: 162744 - DNA, 25 bp, Probe Sequence
aagagggtatggtctgagatgtgca

SEQ ID NO: 162745 - DNA, 25 bp, Probe Sequence
aagagcagcgcatggacctgagtca

SEQ ID NO: 162746 - DNA, 25 bp, Probe Sequence
aagagacagcaaagagccgcagccg

SEQ ID NO: 162747 - DNA, 25 bp, Probe Sequence
aagagacagcaaagagccgcagccg

SEQ ID NO: 162748 - DNA, 25 bp, Probe Sequence
aagacatcagccaaggccacttcgt

SEQ ID NO: 162749 - DNA, 25 bp, Probe Sequence
aagactggccaagccactgtggctt

SEQ ID NO: 162750 - DNA, 25 bp, Probe Sequence
aagacaggatcaggtgccagcggac

SEQ ID NO: 162751 - DNA, 25 bp, Probe Sequence
aagaaattcagccgccatcatggac

SEQ ID NO: 162752 - DNA, 25 bp, Probe Sequence
aagacagcttggtctggtctgtgca

SEQ ID NO: 162753 - DNA, 25 bp, Probe Sequence
aagagcagagcttacttcattgtct

SEQ ID NO: 162754 - DNA, 25 bp, Probe Sequence
aagaaacattacttttgtctgctaa

SEQ ID NO: 162755 - DNA, 25 bp, Probe Sequence
aagaaacacgcacttagtctctaaa

SEQ ID NO: 162756 - DNA, 25 bp, Probe Sequence
aagagcccatctttgtcagtttaca

SEQ ID NO: 162757 - DNA, 25 bp, Probe Sequence
aagagctccagtttgacattattca

SEQ ID NO: 162758 - DNA, 25 bp, Probe Sequence
aagacccagtttgcattgtgctgct

SEQ ID NO: 162759 - DNA, 25 bp, Probe Sequence
aagaacagagtgttcgattctgccc

SEQ ID NO: 162760 - DNA, 25 bp, Probe Sequence
aagaactactacaaactgcgcacag

SEQ ID NO: 162761 - DNA, 25 bp, Probe Sequence
aagacactgatttcgagcaccgcat

SEQ ID NO: 162762 - DNA, 25 bp, Probe Sequence
aagacagttactcagaacagcatct

SEQ ID NO: 162763 - DNA, 25 bp, Probe Sequence
aagacctgtacgccaacacagtgct

SEQ ID NO: 162764 - DNA, 25 bp, Probe Sequence
aagagccctgaagtgctccgggcat

SEQ ID NO: 162765 - DNA, 25 bp, Probe Sequence
aagatggccaggtgtcttgtggaca

SEQ ID NO: 162766 - DNA, 25 bp, Probe Sequence
aagaaacaggtgttctcggctgagc

SEQ ID NO: 162767 - DNA, 25 bp, Probe Sequence
aagaaagcggagttcgagcggcagc

SEQ ID NO: 162768 - DNA, 25 bp, Probe Sequence
aagaaatgggggtgcatgctggcct

SEQ ID NO: 162769 - DNA, 25 bp, Probe Sequence
aagataaggtggcattcacccccag

SEQ ID NO: 162770 - DNA, 25 bp, Probe Sequence
aagaaagctgggcttgcccactcgc

SEQ ID NO: 162771 - DNA, 25 bp, Probe Sequence
aagaactctggaactatccgtgtca

SEQ ID NO: 162772 - DNA, 25 bp, Probe Sequence
aagacacttggagtcattagtcatt

SEQ ID NO: 162773 - DNA, 25 bp, Probe Sequence
aagaacttgtgcttcatctgcgttt

SEQ ID NO: 162774 - DNA, 25 bp, Probe Sequence
aagaactctctgttcatccattctc

SEQ ID NO: 162775 - DNA, 25 bp, Probe Sequence
aagtattgctgccttcatacaacgc

SEQ ID NO: 162776 - DNA, 25 bp, Probe Sequence
aagtaggctgccatattcagaggca

SEQ ID NO: 162777 - DNA, 25 bp, Probe Sequence
aagtaggcccaaagccacaagattt

SEQ ID NO: 162778 - DNA, 25 bp, Probe Sequence
aagagaggccacttaccaaagttat

SEQ ID NO: 162779 - DNA, 25 bp, Probe Sequence
aagggaacactatagacaagtttgt

SEQ ID NO: 162780 - DNA, 25 bp, Probe Sequence
aagagggaacaacaagccattattt

SEQ ID NO: 162781 - DNA, 25 bp, Probe Sequence
aagatgaggagggagctacagcgtt

SEQ ID NO: 162782 - DNA, 25 bp, Probe Sequence
aagaggtgcagtcactcacacctgc

SEQ ID NO: 162783 - DNA, 25 bp, Probe Sequence
aagaggtgcagtcactcacacctgc

SEQ ID NO: 162784 - DNA, 25 bp, Probe Sequence
aagaggtgcagtcactcacacctgc

SEQ ID NO: 162785 - DNA, 25 bp, Probe Sequence
aagatagtcagctaaccactcgctc

SEQ ID NO: 162786 - DNA, 25 bp, Probe Sequence
aagtagtaggactgccacagctaca

SEQ ID NO: 162787 - DNA, 25 bp, Probe Sequence
aagaaagagatgcaacccacacacc

SEQ ID NO: 162788 - DNA, 25 bp, Probe Sequence
aagagtggaattaactgccctatcc

SEQ ID NO: 162789 - DNA, 25 bp, Probe Sequence
aagaggagctatttccgaatctata

SEQ ID NO: 162790 - DNA, 25 bp, Probe Sequence
aagatgggctttgcggtactactag

SEQ ID NO: 162791 - DNA, 25 bp, Probe Sequence
aagaggacgtcttctctttctacta

SEQ ID NO: 162792 - DNA, 25 bp, Probe Sequence
aagacagacgcctgcttttgcaaat

SEQ ID NO: 162793 - DNA, 25 bp, Probe Sequence
aagactgaccactagttagactaat

SEQ ID NO: 162794 - DNA, 25 bp, Probe Sequence
aagaaaccagcaagcttataataga

SEQ ID NO: 162795 - DNA, 25 bp, Probe Sequence
aagagatcacctcacatccattaag

SEQ ID NO: 162796 - DNA, 25 bp, Probe Sequence
aagagtctcctgacaaaagttactt

SEQ ID NO: 162797 - DNA, 25 bp, Probe Sequence
aagacatgtcacctcaaaaattttg

SEQ ID NO: 162798 - DNA, 25 bp, Probe Sequence
aagatgatctactcagaaattttta

SEQ ID NO: 162799 - DNA, 25 bp, Probe Sequence
aagagattaatttgaaggctgattc

SEQ ID NO: 162800 - DNA, 25 bp, Probe Sequence
aagagattaatttgaaggctgattc

SEQ ID NO: 162801 - DNA, 25 bp, Probe Sequence
aagagacatccagcaggaggccttc

SEQ ID NO: 162802 - DNA, 25 bp, Probe Sequence
aagacaagccaggcacgatggccac

SEQ ID NO: 162803 - DNA, 25 bp, Probe Sequence
aagacacatgtacccatatgtccat

SEQ ID NO: 162804 - DNA, 25 bp, Probe Sequence
aagacacagaagacacacggacata

SEQ ID NO: 162805 - DNA, 25 bp, Probe Sequence
aagacacagaatggcaagctggata

SEQ ID NO: 162806 - DNA, 25 bp, Probe Sequence
aagatccgaacacagcggtcgacat

SEQ ID NO: 162807 - DNA, 25 bp, Probe Sequence
aagatctggaactaatggccccacc

SEQ ID NO: 162808 - DNA, 25 bp, Probe Sequence
aagactgtgtagtaattgtcccaca

SEQ ID NO: 162809 - DNA, 25 bp, Probe Sequence
aagggcgtaatgcacttatccacaa

SEQ ID NO: 162810 - DNA, 25 bp, Probe Sequence
aagagcggaaatccaagaactccta

SEQ ID NO: 162811 - DNA, 25 bp, Probe Sequence
aagagccaaagtgggacacctccta

SEQ ID NO: 162812 - DNA, 25 bp, Probe Sequence
aagagaaagctttataacctcacca

SEQ ID NO: 162813 - DNA, 25 bp, Probe Sequence
aagagagaagctgctgccaacacca

SEQ ID NO: 162814 - DNA, 25 bp, Probe Sequence
aagagcagaagcaccttcagccaca

SEQ ID NO: 162815 - DNA, 25 bp, Probe Sequence
aagagagtcgcatctcagtgcagga

SEQ ID NO: 162816 - DNA, 25 bp, Probe Sequence
aagatggtaatgttcagctagtgag

SEQ ID NO: 162817 - DNA, 25 bp, Probe Sequence
aagaggaagtttgtcgctgatggca

SEQ ID NO: 162818 - DNA, 25 bp, Probe Sequence
aagacaatagtatttctcctttgca

SEQ ID NO: 162819 - DNA, 25 bp, Probe Sequence
aagacagaaggtctgccagcttaca

SEQ ID NO: 162820 - DNA, 25 bp, Probe Sequence
aagtcctacgtgatctgagttcaga

SEQ ID NO: 162821 - DNA, 25 bp, Probe Sequence
aagacctgaagattcctggcttaga

SEQ ID NO: 162822 - DNA, 25 bp, Probe Sequence
aagacctgctaagtctagccttaac

SEQ ID NO: 162823 - DNA, 25 bp, Probe Sequence
aagatactctacacaaatggtaacc

SEQ ID NO: 162824 - DNA, 25 bp, Probe Sequence
aagagcatttacagcagaggttaat

SEQ ID NO: 162825 - DNA, 25 bp, Probe Sequence
aagactgattggagggccctatctt

SEQ ID NO: 162826 - DNA, 25 bp, Probe Sequence
aagacaattctgagggactgttttg

SEQ ID NO: 162827 - DNA, 25 bp, Probe Sequence
aagacactcttgatgtggaggtttc

SEQ ID NO: 162828 - DNA, 25 bp, Probe Sequence
aagacaccttgtcactgaggttctt

SEQ ID NO: 162829 - DNA, 25 bp, Probe Sequence
aagacactgtctcaactgtggtgtt

SEQ ID NO: 162830 - DNA, 25 bp, Probe Sequence
aagactgttatggaaggctgggtta

SEQ ID NO: 162831 - DNA, 25 bp, Probe Sequence
aagactatcttgaaggtgggctgtt

SEQ ID NO: 162832 - DNA, 25 bp, Probe Sequence
aagagttttatagtctgggcacagt

SEQ ID NO: 162833 - DNA, 25 bp, Probe Sequence
aagacttttgacttagaacctgcta

SEQ ID NO: 162834 - DNA, 25 bp, Probe Sequence
aagacttctatgttgatgagaacac

SEQ ID NO: 162835 - DNA, 25 bp, Probe Sequence
aagacttgacagtggaactacatta

SEQ ID NO: 162836 - DNA, 25 bp, Probe Sequence
aagacatcccagtaggagacttgaa

SEQ ID NO: 162837 - DNA, 25 bp, Probe Sequence
aatcccccaggagaacatctttgac

SEQ ID NO: 162838 - DNA, 25 bp, Probe Sequence
aatacgcaccgaataaactctttat

SEQ ID NO: 162839 - DNA, 25 bp, Probe Sequence
aagacacctaacaaaatccttctgt

SEQ ID NO: 162840 - DNA, 25 bp, Probe Sequence
aagacagcctgttacgacatcgatg

SEQ ID NO: 162841 - DNA, 25 bp, Probe Sequence
aagacagcctgtacaccatgtctag

SEQ ID NO: 162842 - DNA, 25 bp, Probe Sequence
aagacgctgatgctcaagctgttga

SEQ ID NO: 162843 - DNA, 25 bp, Probe Sequence
aagacctctctgaagagctgtcatg

SEQ ID NO: 162844 - DNA, 25 bp, Probe Sequence
aagacattctctgaggtgtgtgagg

SEQ ID NO: 162845 - DNA, 25 bp, Probe Sequence
aagacagccctcaaggaagatggtg

SEQ ID NO: 162846 - DNA, 25 bp, Probe Sequence
aagaaatactcatgtgcaataggtg

SEQ ID NO: 162847 - DNA, 25 bp, Probe Sequence
aagagtatccctttcgatgaggctg

SEQ ID NO: 162848 - DNA, 25 bp, Probe Sequence
aagagtatgggatggcagatgggag

SEQ ID NO: 162849 - DNA, 25 bp, Probe Sequence
aagagtaggtcaggccaaggcaggt

SEQ ID NO: 162850 - DNA, 25 bp, Probe Sequence
aagagttatgttagccaggtgcagt

SEQ ID NO: 162851 - DNA, 25 bp, Probe Sequence
aagagactcggagccagtgatcctt

SEQ ID NO: 162852 - DNA, 25 bp, Probe Sequence
aagaaatcagggccaaccacagctt

SEQ ID NO: 162853 - DNA, 25 bp, Probe Sequence
aagaaatcagggcttgcgcctcatt

SEQ ID NO: 162854 - DNA, 25 bp, Probe Sequence
aagagaagagggctgggcgctccat

SEQ ID NO: 162855 - DNA, 25 bp, Probe Sequence
aagagccgcagtgggaggcacgtcg

SEQ ID NO: 162856 - DNA, 25 bp, Probe Sequence
aagacagccatgtgtagtgatggat

SEQ ID NO: 162857 - DNA, 25 bp, Probe Sequence
aagacagcactctgatcatgcagtt

SEQ ID NO: 162858 - DNA, 25 bp, Probe Sequence
aagacagcactctgatcatgcagtt

SEQ ID NO: 162859 - DNA, 25 bp, Probe Sequence
aagactgctctccatagcaaggttc

SEQ ID NO: 162860 - DNA, 25 bp, Probe Sequence
aagagtgctcaacagacagttccca

SEQ ID NO: 162861 - DNA, 25 bp, Probe Sequence
aagagcatctacggtgagcgcttcc

SEQ ID NO: 162862 - DNA, 25 bp, Probe Sequence
aagattccatgcgagtactccttcc

SEQ ID NO: 162863 - DNA, 25 bp, Probe Sequence
aagagatacaatggttcatgcctgt

SEQ ID NO: 162864 - DNA, 25 bp, Probe Sequence
aagacatcacataccttcagcactt

SEQ ID NO: 162865 - DNA, 25 bp, Probe Sequence
aagacaccttcacttagcagttctg

SEQ ID NO: 162866 - DNA, 25 bp, Probe Sequence
aagacaccttaccattgcttatttg

SEQ ID NO: 162867 - DNA, 25 bp, Probe Sequence
aagacatactcattaagtgttattt

SEQ ID NO: 162868 - DNA, 25 bp, Probe Sequence
aagacacctcccgaatgtcttctta

SEQ ID NO: 162869 - DNA, 25 bp, Probe Sequence
aagacacctcccgaatgtcttctta

SEQ ID NO: 162870 - DNA, 25 bp, Probe Sequence
aagacacctcccgagtgtgtctgct

SEQ ID NO: 162871 - DNA, 25 bp, Probe Sequence
aagacacctcctgagtgtctgctca

SEQ ID NO: 162872 - DNA, 25 bp, Probe Sequence
aagacaccttccgagtgtctgctca

SEQ ID NO: 162873 - DNA, 25 bp, Probe Sequence
aagacacctcccgagtgtctggtca

SEQ ID NO: 162874 - DNA, 25 bp, Probe Sequence
aagacacctcccgagtgtctgttca

SEQ ID NO: 162875 - DNA, 25 bp, Probe Sequence
aagacacagcacatccgtcttttca

SEQ ID NO: 162876 - DNA, 25 bp, Probe Sequence
aagactagcctgtcacgtttgtctc

SEQ ID NO: 162877 - DNA, 25 bp, Probe Sequence
aagactctgcctgcttaattgtgct

SEQ ID NO: 162878 - DNA, 25 bp, Probe Sequence
aagatccatgtttctgaccaggagc

SEQ ID NO: 162879 - DNA, 25 bp, Probe Sequence
aagactgaggcttctgcctactgag

SEQ ID NO: 162880 - DNA, 25 bp, Probe Sequence
aagactgtgagcatctgaccacttg

SEQ ID NO: 162881 - DNA, 25 bp, Probe Sequence
aagactgacacttctacatcatttg

SEQ ID NO: 162882 - DNA, 25 bp, Probe Sequence
aagacacatcacacaatcaccttgc

SEQ ID NO: 162883 - DNA, 25 bp, Probe Sequence
aagacacaacataccagaatctctg

SEQ ID NO: 162884 - DNA, 25 bp, Probe Sequence
aagatccaccatatcaaagctttca

SEQ ID NO: 162885 - DNA, 25 bp, Probe Sequence
aagacccttctctagaatttccagc

SEQ ID NO: 162886 - DNA, 25 bp, Probe Sequence
aagaggccttcttaagttccagagt

SEQ ID NO: 162887 - DNA, 25 bp, Probe Sequence
aagactcagttaattgatttccagg

SEQ ID NO: 162888 - DNA, 25 bp, Probe Sequence
aagaccatgtctactaattacaaaa

SEQ ID NO: 162889 - DNA, 25 bp, Probe Sequence
aagactctgtccaaatatacaaagt

SEQ ID NO: 162890 - DNA, 25 bp, Probe Sequence
aagacgtgcttcaaatatccatatt

SEQ ID NO: 162891 - DNA, 25 bp, Probe Sequence
aagactgtcttaattactcatggca

SEQ ID NO: 162892 - DNA, 25 bp, Probe Sequence
aagactgtcttaattactcatggca

SEQ ID NO: 162893 - DNA, 25 bp, Probe Sequence
aagactgtcttaattactcatggca

SEQ ID NO: 162894 - DNA, 25 bp, Probe Sequence
aagttattattttgccctgagcaaa

SEQ ID NO: 162895 - DNA, 25 bp, Probe Sequence
aagtttttgacagccctggctcaag

SEQ ID NO: 162896 - DNA, 25 bp, Probe Sequence
aagtttaagagctcccattgtacag

SEQ ID NO: 162897 - DNA, 25 bp, Probe Sequence
aagatgttacccttccagaggtaca

SEQ ID NO: 162898 - DNA, 25 bp, Probe Sequence
aagagtctacctttccaagttctca

SEQ ID NO: 162899 - DNA, 25 bp, Probe Sequence
aagagtcatacatattccatttgtc

SEQ ID NO: 162900 - DNA, 25 bp, Probe Sequence
aagattaacatctagtttctcgtca

SEQ ID NO: 162901 - DNA, 25 bp, Probe Sequence
aagagtaactacaatcttcccatgc

SEQ ID NO: 162902 - DNA, 25 bp, Probe Sequence
aaggtgctttactgttcacctgcat

SEQ ID NO: 162903 - DNA, 25 bp, Probe Sequence
aagacagctaaacttttcaactgca

SEQ ID NO: 162904 - DNA, 25 bp, Probe Sequence
caaacgtaatttgttatatcagcag

SEQ ID NO: 162905 - DNA, 25 bp, Probe Sequence
aagacgtttattcatgttcaacagg

SEQ ID NO: 162906 - DNA, 25 bp, Probe Sequence
aagatttttactcattcaaggcaag

SEQ ID NO: 162907 - DNA, 25 bp, Probe Sequence
aagattttctcagtggtctagaaaa

SEQ ID NO: 162908 - DNA, 25 bp, Probe Sequence
aagacctttatgttgtcctggcaaa

SEQ ID NO: 162909 - DNA, 25 bp, Probe Sequence
aagagcacatttatcgtacgtcaca

SEQ ID NO: 162910 - DNA, 25 bp, Probe Sequence
aagacctttcattcagaagctgttt

SEQ ID NO: 162911 - DNA, 25 bp, Probe Sequence
aagacgtcttgcactcatgagctgt

SEQ ID NO: 162912 - DNA, 25 bp, Probe Sequence
aagacgtcttgcactcatgagctgt

SEQ ID NO: 162913 - DNA, 25 bp, Probe Sequence
aagactgtctgtcagcgatgacttt

SEQ ID NO: 162914 - DNA, 25 bp, Probe Sequence
aagaggatctgtgtcgtgaatttcg

SEQ ID NO: 162915 - DNA, 25 bp, Probe Sequence
aagagagactcggttctaacttcga

SEQ ID NO: 162916 - DNA, 25 bp, Probe Sequence
aagaggcagctcgagctttaccttc

SEQ ID NO: 162917 - DNA, 25 bp, Probe Sequence
aagtcagcaccgggttatctttctt

SEQ ID NO: 162918 - DNA, 25 bp, Probe Sequence
aagacagagcctgtttactcattta

SEQ ID NO: 162919 - DNA, 25 bp, Probe Sequence
aagacattgcccatttttacttcct

SEQ ID NO: 162920 - DNA, 25 bp, Probe Sequence
aagatttcccaggcttttaccatgg

SEQ ID NO: 162921 - DNA, 25 bp, Probe Sequence
aagttgtgacccattttactctgga

SEQ ID NO: 162922 - DNA, 25 bp, Probe Sequence
aagagattgaacaggtttaccgaca

SEQ ID NO: 162923 - DNA, 25 bp, Probe Sequence
aagagatttgactaggttttccaga

SEQ ID NO: 162924 - DNA, 25 bp, Probe Sequence
cactcgcttttctgatggttaccgc

SEQ ID NO: 162925 - DNA, 25 bp, Probe Sequence
caccgctatgtctggctggtttacg

SEQ ID NO: 162926 - DNA, 25 bp, Probe Sequence
caccgtcgatctacgggatctttcc

SEQ ID NO: 162927 - DNA, 25 bp, Probe Sequence
caaggtcgcctaagggctttattca

SEQ ID NO: 162928 - DNA, 25 bp, Probe Sequence
aagagccagggaatggccttaagtc

SEQ ID NO: 162929 - DNA, 25 bp, Probe Sequence
aagagcacgggcagtggtcttcagt

SEQ ID NO: 162930 - DNA, 25 bp, Probe Sequence
aagagacagggggctgggcgtggtg

SEQ ID NO: 162931 - DNA, 25 bp, Probe Sequence
aagagaatgtttgatggcgccgtgt

SEQ ID NO: 162932 - DNA, 25 bp, Probe Sequence
aagaggagctttgcagggctctgca

SEQ ID NO: 162933 - DNA, 25 bp, Probe Sequence
aagatatgggacctgcagggctctg

SEQ ID NO: 162934 - DNA, 25 bp, Probe Sequence
aagatggcggaggtgcaggtcctgg

SEQ ID NO: 162935 - DNA, 25 bp, Probe Sequence
aagatgggccaggtgcggtggctca

SEQ ID NO: 162936 - DNA, 25 bp, Probe Sequence
aagagaggccaggcgtggtggctca

SEQ ID NO: 162937 - DNA, 25 bp, Probe Sequence
aataagccctcagatggcaggccca

SEQ ID NO: 162938 - DNA, 25 bp, Probe Sequence
aagagtccctcagaggagaggccct

SEQ ID NO: 162939 - DNA, 25 bp, Probe Sequence
aagagcttccctaaggatgacccgt

SEQ ID NO: 162940 - DNA, 25 bp, Probe Sequence
aagactctcccgtggatgacggatg

SEQ ID NO: 162941 - DNA, 25 bp, Probe Sequence
aagtttcgcaacatggagacggcga

SEQ ID NO: 162942 - DNA, 25 bp, Probe Sequence
caagtttttacgtgaatgggctgac

SEQ ID NO: 162943 - DNA, 25 bp, Probe Sequence
aagtttgcctacaaggacgagtatg

SEQ ID NO: 162944 - DNA, 25 bp, Probe Sequence
aagtcttccatccaaaaggggcagg

SEQ ID NO: 162945 - DNA, 25 bp, Probe Sequence
aagtctagcccggacgagggctctt

SEQ ID NO: 162946 - DNA, 25 bp, Probe Sequence
aagtgctatacgccagtctgggcct

SEQ ID NO: 162947 - DNA, 25 bp, Probe Sequence
aagatgctattgtccgtgctggtgg

SEQ ID NO: 162948 - DNA, 25 bp, Probe Sequence
aagagaagtgacggctcctgtgcgt

SEQ ID NO: 162949 - DNA, 25 bp, Probe Sequence
aagagaagtgacggctcctgtgcgt

SEQ ID NO: 162950 - DNA, 25 bp, Probe Sequence
aagagtaatacagcctcatgggggt

SEQ ID NO: 162951 - DNA, 25 bp, Probe Sequence
aagagatgaatggcaagaactgggc

SEQ ID NO: 162952 - DNA, 25 bp, Probe Sequence
aagagatcatatcctcagaccaggt

SEQ ID NO: 162953 - DNA, 25 bp, Probe Sequence
aagagacaagtttatcacagaattt

SEQ ID NO: 162954 - DNA, 25 bp, Probe Sequence
aagagatacttaaacagagcaaatg

SEQ ID NO: 162955 - DNA, 25 bp, Probe Sequence
aagataattctaaacaactaatgca

SEQ ID NO: 162956 - DNA, 25 bp, Probe Sequence
aagattacattttctaactaagcat

SEQ ID NO: 162957 - DNA, 25 bp, Probe Sequence
aagagctcacatctttaacagaaga

SEQ ID NO: 162958 - DNA, 25 bp, Probe Sequence
aagacccttttataatgcacatatt

SEQ ID NO: 162959 - DNA, 25 bp, Probe Sequence
aagactggctttgtaatcataattt

SEQ ID NO: 162960 - DNA, 25 bp, Probe Sequence
aagagttccattgtaatcacccttt

SEQ ID NO: 162961 - DNA, 25 bp, Probe Sequence
aagagaccaactttttcattccctg

SEQ ID NO: 162962 - DNA, 25 bp, Probe Sequence
aagacctaagctgattctctttcct

SEQ ID NO: 162963 - DNA, 25 bp, Probe Sequence
aagaccgagcagggattagctgtgt

SEQ ID NO: 162964 - DNA, 25 bp, Probe Sequence
aagacccagcacgtcattttgagtt

SEQ ID NO: 162965 - DNA, 25 bp, Probe Sequence
aagacgccagaggagctactgcggc

SEQ ID NO: 162966 - DNA, 25 bp, Probe Sequence
aagaccatgtgagtcagtacttcag

SEQ ID NO: 162967 - DNA, 25 bp, Probe Sequence
aagactcattgcttaattctaagac

SEQ ID NO: 162968 - DNA, 25 bp, Probe Sequence
aagacatcttgtgatttcttaatgt

SEQ ID NO: 162969 - DNA, 25 bp, Probe Sequence
aagacattccactattatgcgtaat

SEQ ID NO: 162970 - DNA, 25 bp, Probe Sequence
aagttctgcatcttataatggtaac

SEQ ID NO: 162971 - DNA, 25 bp, Probe Sequence
aagatgtccttcttagtgtgaaaga

SEQ ID NO: 162972 - DNA, 25 bp, Probe Sequence
aagttcctgttaatgagctgaaagt

SEQ ID NO: 162973 - DNA, 25 bp, Probe Sequence
aagatgcttcttgacatgctgcata

SEQ ID NO: 162974 - DNA, 25 bp, Probe Sequence
aagagactcttctacactcaagtat

SEQ ID NO: 162975 - DNA, 25 bp, Probe Sequence
aagataatttgctcctgacagtcat

SEQ ID NO: 162976 - DNA, 25 bp, Probe Sequence
aagatatatattttacgtagtgctg

SEQ ID NO: 162977 - DNA, 25 bp, Probe Sequence
aagactgtttactgcagttgctcag

SEQ ID NO: 162978 - DNA, 25 bp, Probe Sequence
aagacttttcctgcaatagcctggg

SEQ ID NO: 162979 - DNA, 25 bp, Probe Sequence
aagtcttttccatccacagttggtt

SEQ ID NO: 162980 - DNA, 25 bp, Probe Sequence
aagttttaaaacaaccattgcatgt

SEQ ID NO: 162981 - DNA, 25 bp, Probe Sequence
aagtattctatataccaagtttttg

SEQ ID NO: 162982 - DNA, 25 bp, Probe Sequence
aagtattctctaaacacctgactct

SEQ ID NO: 162983 - DNA, 25 bp, Probe Sequence
aagtatttacaccaagcttgtccaa

SEQ ID NO: 162984 - DNA, 25 bp, Probe Sequence
aagattgttgataggaactgtctca

SEQ ID NO: 162985 - DNA, 25 bp, Probe Sequence
aagactgcacagtaggtacagtgta

SEQ ID NO: 162986 - DNA, 25 bp, Probe Sequence
aagatgctgggttggtgcacagtga

SEQ ID NO: 162987 - DNA, 25 bp, Probe Sequence
aagatgggagacctgagcaagctga

SEQ ID NO: 162988 - DNA, 25 bp, Probe Sequence
aagagaaagagctgtgatactgaga

SEQ ID NO: 162989 - DNA, 25 bp, Probe Sequence
aagagcgaaagcaggatctcaaaga

SEQ ID NO: 162990 - DNA, 25 bp, Probe Sequence
aagagctaaagtctgatctgtagat

SEQ ID NO: 162991 - DNA, 25 bp, Probe Sequence
aagagcaaaagtccatatcaataaa

SEQ ID NO: 162992 - DNA, 25 bp, Probe Sequence
aagatcaatagagttctctcatctg

SEQ ID NO: 162993 - DNA, 25 bp, Probe Sequence
aagaccaagattacattctcaatta

SEQ ID NO: 162994 - DNA, 25 bp, Probe Sequence
aagaccttgctgaatgtttccaata

SEQ ID NO: 162995 - DNA, 25 bp, Probe Sequence
aagaccattctcaggatcagcaaat

SEQ ID NO: 162996 - DNA, 25 bp, Probe Sequence
aagaccatcctcacgagctatagtg

SEQ ID NO: 162997 - DNA, 25 bp, Probe Sequence
aagacgttcagcctcatgacttagg

SEQ ID NO: 162998 - DNA, 25 bp, Probe Sequence
aagagtgttgagctagttcctggtg

SEQ ID NO: 162999 - DNA, 25 bp, Probe Sequence
aagattttggttattctgggctgcc

SEQ ID NO: 163000 - DNA, 25 bp, Probe Sequence
aatgcttttgggagctgtgggcgca

SEQ ID NO: 163001 - DNA, 25 bp, Probe Sequence
aagtctttagccagaatgcaggcct

SEQ ID NO: 163002 - DNA, 25 bp, Probe Sequence
aagttcccacctgaagagactctga

SEQ ID NO: 163003 - DNA, 25 bp, Probe Sequence
aagattctcaccactgaagggcgta

SEQ ID NO: 163004 - DNA, 25 bp, Probe Sequence
aagatatctcacgtactgacggtgg

SEQ ID NO: 163005 - DNA, 25 bp, Probe Sequence
aagatattactattcagcagaactg

SEQ ID NO: 163006 - DNA, 25 bp, Probe Sequence
aagtcagtgacttccgggagtggat

SEQ ID NO: 163007 - DNA, 25 bp, Probe Sequence
aagatgactgatgtggtagggtaat

SEQ ID NO: 163008 - DNA, 25 bp, Probe Sequence
aatgcaagcttgttcagggggctga

SEQ ID NO: 163009 - DNA, 25 bp, Probe Sequence
aagaggctaccaaggaagatgctga

SEQ ID NO: 163010 - DNA, 25 bp, Probe Sequence
aagatggcatctgagcgagaaggct

SEQ ID NO: 163011 - DNA, 25 bp, Probe Sequence
aagatgtattgcccgatgcaatgag

SEQ ID NO: 163012 - DNA, 25 bp, Probe Sequence
aagatgctcagtccctggtatgatg

SEQ ID NO: 163013 - DNA, 25 bp, Probe Sequence
aagagcttatcacctttcatggatc

SEQ ID NO: 163014 - DNA, 25 bp, Probe Sequence
aagatgcatccatgtttccagtgtt

SEQ ID NO: 163015 - DNA, 25 bp, Probe Sequence
aagtaacttatttctgcactgtttt

SEQ ID NO: 163016 - DNA, 25 bp, Probe Sequence
aagtatactgtacttccacagttat

SEQ ID NO: 163017 - DNA, 25 bp, Probe Sequence
aagagaagctggtctgtggccttaa

SEQ ID NO: 163018 - DNA, 25 bp, Probe Sequence
aagagaagctggtctgtggccttaa

SEQ ID NO: 163019 - DNA, 25 bp, Probe Sequence
aagtaatgctagcagtggcacttta

SEQ ID NO: 163020 - DNA, 25 bp, Probe Sequence
aagtcaagtcactggtctgtttgca

SEQ ID NO: 163021 - DNA, 25 bp, Probe Sequence
aagagaaatgcctagtgtctatttt

SEQ ID NO: 163022 - DNA, 25 bp, Probe Sequence
aagagaattctctggttttctgtgt

SEQ ID NO: 163023 - DNA, 25 bp, Probe Sequence
aagagacaggtctctgactctcctt

SEQ ID NO: 163024 - DNA, 25 bp, Probe Sequence
aagaccaggatgagctgtcctctct

SEQ ID NO: 163025 - DNA, 25 bp, Probe Sequence
aagaccaggatgagctgtcctctct

SEQ ID NO: 163026 - DNA, 25 bp, Probe Sequence
aagaccaatcacagcttgtgcctca

SEQ ID NO: 163027 - DNA, 25 bp, Probe Sequence
aagactcttgacagttgtgcttctc

SEQ ID NO: 163028 - DNA, 25 bp, Probe Sequence
aagacttcaggtgattgtttgctct

SEQ ID NO: 163029 - DNA, 25 bp, Probe Sequence
aagactccatctcgtttttgtgttt

SEQ ID NO: 163030 - DNA, 25 bp, Probe Sequence
aagactcaatagatttgcttttgat

SEQ ID NO: 163031 - DNA, 25 bp, Probe Sequence
aagagccattaaaatctctttggtt

SEQ ID NO: 163032 - DNA, 25 bp, Probe Sequence
aagacctcccaagctgtatgtactt

SEQ ID NO: 163033 - DNA, 25 bp, Probe Sequence
aagattctcccagatgcttcaggac

SEQ ID NO: 163034 - DNA, 25 bp, Probe Sequence
aagactctaaagaagctgtcaagaa

SEQ ID NO: 163035 - DNA, 25 bp, Probe Sequence
aagactctaaagaagctgtcaagaa

SEQ ID NO: 163036 - DNA, 25 bp, Probe Sequence
aagaccatgaaaatacgcccagttg

SEQ ID NO: 163037 - DNA, 25 bp, Probe Sequence
aagactgttaaatcagccagagttg

SEQ ID NO: 163038 - DNA, 25 bp, Probe Sequence
aagacccaaatcacagcacagcttt

SEQ ID NO: 163039 - DNA, 25 bp, Probe Sequence
aagacccatgatactagaccactaa

SEQ ID NO: 163040 - DNA, 25 bp, Probe Sequence
aagactttatgactagtacaccaaa

SEQ ID NO: 163041 - DNA, 25 bp, Probe Sequence
aagatttcatggctaagacctcaaa

SEQ ID NO: 163042 - DNA, 25 bp, Probe Sequence
aagatctccaagctgaaacttccac

SEQ ID NO: 163043 - DNA, 25 bp, Probe Sequence
aagtccagatccagaaggtgttcac

SEQ ID NO: 163044 - DNA, 25 bp, Probe Sequence
aagtcacccacacgtagtggcttaa

SEQ ID NO: 163045 - DNA, 25 bp, Probe Sequence
aagagccagaaacgtggttcttcaa

SEQ ID NO: 163046 - DNA, 25 bp, Probe Sequence
aaggccagtacatggtggtcaccac

SEQ ID NO: 163047 - DNA, 25 bp, Probe Sequence
aagaccattgtaggttgaaaccagt

SEQ ID NO: 163048 - DNA, 25 bp, Probe Sequence
aaggctcgttttgcaaaaccagtat

SEQ ID NO: 163049 - DNA, 25 bp, Probe Sequence
aagagtctgttactacaataagctt

SEQ ID NO: 163050 - DNA, 25 bp, Probe Sequence
aagagctcatgttattctacacaca

SEQ ID NO: 163051 - DNA, 25 bp, Probe Sequence
aagagctgatgaggttgctgcagcc

SEQ ID NO: 163052 - DNA, 25 bp, Probe Sequence
aagagcgagagactctgcaggcctg

SEQ ID NO: 163053 - DNA, 25 bp, Probe Sequence
aagaggtggactcagagccttcctt

SEQ ID NO: 163054 - DNA, 25 bp, Probe Sequence
aagaggtggcctcatggatcgtggt

SEQ ID NO: 163055 - DNA, 25 bp, Probe Sequence
aagaggtggcctcatggatcgtggt

SEQ ID NO: 163056 - DNA, 25 bp, Probe Sequence
aagaggtgtgcttcagttgggtggc

SEQ ID NO: 163057 - DNA, 25 bp, Probe Sequence
aagaggggtccagtgggtctgagca

SEQ ID NO: 163058 - DNA, 25 bp, Probe Sequence
aagaggagcagctcagtggtgccgg

SEQ ID NO: 163059 - DNA, 25 bp, Probe Sequence
aagatggtcatctcatggggccaga

SEQ ID NO: 163060 - DNA, 25 bp, Probe Sequence
aagaggtcagcattgaggtcacctg

SEQ ID NO: 163061 - DNA, 25 bp, Probe Sequence
aagagtagccaaagaatcaacatga

SEQ ID NO: 163062 - DNA, 25 bp, Probe Sequence
aagagtaaactccaaccatgcagaa

SEQ ID NO: 163063 - DNA, 25 bp, Probe Sequence
aagagcatatatacccacgctgaca

SEQ ID NO: 163064 - DNA, 25 bp, Probe Sequence
aagatcacgtatgacaagctcacag

SEQ ID NO: 163065 - DNA, 25 bp, Probe Sequence
aagatgtcaatcagaaatgtcaatg

SEQ ID NO: 163066 - DNA, 25 bp, Probe Sequence
aagatctcagtcaagtgaactcaca

SEQ ID NO: 163067 - DNA, 25 bp, Probe Sequence
aagagctcccattgtacagcatgct

SEQ ID NO: 163068 - DNA, 25 bp, Probe Sequence
aagagttccatattcagatcactgg

SEQ ID NO: 163069 - DNA, 25 bp, Probe Sequence
aagagcatgatgcctactgatgaac

SEQ ID NO: 163070 - DNA, 25 bp, Probe Sequence
aagagcatagccaacttgatagaaa

SEQ ID NO: 163071 - DNA, 25 bp, Probe Sequence
aagaccacacatttgtgtaaacagt

SEQ ID NO: 163072 - DNA, 25 bp, Probe Sequence
aagtccacacttggctctaataagc

SEQ ID NO: 163073 - DNA, 25 bp, Probe Sequence
aagattgcaaatactgcccgcaaag

SEQ ID NO: 163074 - DNA, 25 bp, Probe Sequence
aagactgaaaatgtcggccagcctg

SEQ ID NO: 163075 - DNA, 25 bp, Probe Sequence
aagtctgaggattttcgtcaacctt

SEQ ID NO: 163076 - DNA, 25 bp, Probe Sequence
aagattgggaactgcccattctccc

SEQ ID NO: 163077 - DNA, 25 bp, Probe Sequence
aagaggcgttacgcgcaagtcgccc

SEQ ID NO: 163078 - DNA, 25 bp, Probe Sequence
aagagggtgaaagcagaagcatctg

SEQ ID NO: 163079 - DNA, 25 bp, Probe Sequence
aagacgagtgaacgtttagcatctg

SEQ ID NO: 163080 - DNA, 25 bp, Probe Sequence
aagactgggacgtctagtccacagg

SEQ ID NO: 163081 - DNA, 25 bp, Probe Sequence
aagatccgcagacgtaaggcccggc

SEQ ID NO: 163082 - DNA, 25 bp, Probe Sequence
aagaccagcagaggcataaggttcg

SEQ ID NO: 163083 - DNA, 25 bp, Probe Sequence
aagaccagagagacaagcattttgc

SEQ ID NO: 163084 - DNA, 25 bp, Probe Sequence
aagaccagtatgactcaagtttgga

SEQ ID NO: 163085 - DNA, 25 bp, Probe Sequence
aagagccagttgcccttatgttgga

SEQ ID NO: 163086 - DNA, 25 bp, Probe Sequence
aagagcacacttctttgctggttgc

SEQ ID NO: 163087 - DNA, 25 bp, Probe Sequence
aagagaatgttccttatctgagttg

SEQ ID NO: 163088 - DNA, 25 bp, Probe Sequence
aagagagttgtcactactagattat

SEQ ID NO: 163089 - DNA, 25 bp, Probe Sequence
aagaggtttcggcagttatccatct

SEQ ID NO: 163090 - DNA, 25 bp, Probe Sequence
aagaggtcttatgaggctttcctca

SEQ ID NO: 163091 - DNA, 25 bp, Probe Sequence
aagaggtgacttgtgttgaccccaa

SEQ ID NO: 163092 - DNA, 25 bp, Probe Sequence
caagcgggacttctggtcccaacat

SEQ ID NO: 163093 - DNA, 25 bp, Probe Sequence
aagttggacctaagtgctccctagt

SEQ ID NO: 163094 - DNA, 25 bp, Probe Sequence
aagattggccctaagaagcccctgc

SEQ ID NO: 163095 - DNA, 25 bp, Probe Sequence
aagatgggttacagaggctcacctg

SEQ ID NO: 163096 - DNA, 25 bp, Probe Sequence
aagaggagatgtgatcaggccccac

SEQ ID NO: 163097 - DNA, 25 bp, Probe Sequence
aagaggagggcactagggccctgcg

SEQ ID NO: 163098 - DNA, 25 bp, Probe Sequence
aagatggcgggaggggtgcgcccgc

SEQ ID NO: 163099 - DNA, 25 bp, Probe Sequence
caagacccggaatgtgcctgttcgg

SEQ ID NO: 163100 - DNA, 25 bp, Probe Sequence
aagacccaggacacggagcttcgtg

SEQ ID NO: 163101 - DNA, 25 bp, Probe Sequence
aagaccctatggaacgggcagaagt

SEQ ID NO: 163102 - DNA, 25 bp, Probe Sequence
aagagttcattgtctactggggtag

SEQ ID NO: 163103 - DNA, 25 bp, Probe Sequence
ctagccttgtctttaccgagggatg

SEQ ID NO: 163104 - DNA, 25 bp, Probe Sequence
aagttggtgtaatcagctggggagt

SEQ ID NO: 163105 - DNA, 25 bp, Probe Sequence
aagtatgaagtataaatctggggaa

SEQ ID NO: 163106 - DNA, 25 bp, Probe Sequence
aagattactgatacaaacacttgta

SEQ ID NO: 163107 - DNA, 25 bp, Probe Sequence
aagttcgatgcagcagataccttta

SEQ ID NO: 163108 - DNA, 25 bp, Probe Sequence
aagttctgctatgagctaactggag

SEQ ID NO: 163109 - DNA, 25 bp, Probe Sequence
aagatctcacctgacaacactgttg

SEQ ID NO: 163110 - DNA, 25 bp, Probe Sequence
aagttcagccattattacttttggt

SEQ ID NO: 163111 - DNA, 25 bp, Probe Sequence
aagattcgcatattatcatgactgt

SEQ ID NO: 163112 - DNA, 25 bp, Probe Sequence
aagatctagcgataatgacgatgag

SEQ ID NO: 163113 - DNA, 25 bp, Probe Sequence
aagatccacagatgagaaactgcag

SEQ ID NO: 163114 - DNA, 25 bp, Probe Sequence
aagacgcaccagcccagaagtgcag

SEQ ID NO: 163115 - DNA, 25 bp, Probe Sequence
aagaccatcctggccaacatggaga

SEQ ID NO: 163116 - DNA, 25 bp, Probe Sequence
aagaccagcctgggcaacataccaa

SEQ ID NO: 163117 - DNA, 25 bp, Probe Sequence
aagaccagcctggacaacatagtaa

SEQ ID NO: 163118 - DNA, 25 bp, Probe Sequence
aagaccagcctggccaacatggtga

SEQ ID NO: 163119 - DNA, 25 bp, Probe Sequence
aagaccaggctgggcaacatggcaa

SEQ ID NO: 163120 - DNA, 25 bp, Probe Sequence
aagtctgaggcagttcattgaggca

SEQ ID NO: 163121 - DNA, 25 bp, Probe Sequence
aagatgagcagggcccttgcggagt

SEQ ID NO: 163122 - DNA, 25 bp, Probe Sequence
aagagagagaccctcactgctgggg

SEQ ID NO: 163123 - DNA, 25 bp, Probe Sequence
aagagtatactcctattggatgaaa

SEQ ID NO: 163124 - DNA, 25 bp, Probe Sequence
aagagaattccctatttatttgaca

SEQ ID NO: 163125 - DNA, 25 bp, Probe Sequence
aagagagaatgtgcttattattttc

SEQ ID NO: 163126 - DNA, 25 bp, Probe Sequence
aagagatcacactcctttattttta

SEQ ID NO: 163127 - DNA, 25 bp, Probe Sequence
aagagtctcaatggagttttctatt

SEQ ID NO: 163128 - DNA, 25 bp, Probe Sequence
aagattctaaggcctagtagtattt

SEQ ID NO: 163129 - DNA, 25 bp, Probe Sequence
aagtaggaagtgctcaattttaatt

SEQ ID NO: 163130 - DNA, 25 bp, Probe Sequence
gaggtctggtttgtaactttccttg

SEQ ID NO: 163131 - DNA, 25 bp, Probe Sequence
aagttgtgtggtatactccttctct

SEQ ID NO: 163132 - DNA, 25 bp, Probe Sequence
aagttgggcttgctattctgtccct

SEQ ID NO: 163133 - DNA, 25 bp, Probe Sequence
aagtttgactatctgactccaagga

SEQ ID NO: 163134 - DNA, 25 bp, Probe Sequence
aagttgtgaaaattgggccagggag

SEQ ID NO: 163135 - DNA, 25 bp, Probe Sequence
aagattctgagacatttcgcctgag

SEQ ID NO: 163136 - DNA, 25 bp, Probe Sequence
aagattctgagacatttcgcctgag

SEQ ID NO: 163137 - DNA, 25 bp, Probe Sequence
caggcaattagacactttggaagat

SEQ ID NO: 163138 - DNA, 25 bp, Probe Sequence
aagagatttggcctccttggaacat

SEQ ID NO: 163139 - DNA, 25 bp, Probe Sequence
aagagacttgacctcctggaaatga

SEQ ID NO: 163140 - DNA, 25 bp, Probe Sequence
aagaggctggacaccctacagatgt

SEQ ID NO: 163141 - DNA, 25 bp, Probe Sequence
aagatgactgaaataacttcaaatt

SEQ ID NO: 163142 - DNA, 25 bp, Probe Sequence
aagagagcgcctatctcattcagaa

SEQ ID NO: 163143 - DNA, 25 bp, Probe Sequence
aagtactgaccaacatatctcatga

SEQ ID NO: 163144 - DNA, 25 bp, Probe Sequence
aagtactactacaatctcacagaag

SEQ ID NO: 163145 - DNA, 25 bp, Probe Sequence
aagatattaccactgatcacacaga

SEQ ID NO: 163146 - DNA, 25 bp, Probe Sequence
aagagaaacacacttaccaaagctc

SEQ ID NO: 163147 - DNA, 25 bp, Probe Sequence
aagatgataaaccttagaaacatta

SEQ ID NO: 163148 - DNA, 25 bp, Probe Sequence
aagatggataacttcaaatcaaaat

SEQ ID NO: 163149 - DNA, 25 bp, Probe Sequence
aagatgtgcaacttccacaaaatca

SEQ ID NO: 163150 - DNA, 25 bp, Probe Sequence
aagagctgaacctgcctatcagtcc

SEQ ID NO: 163151 - DNA, 25 bp, Probe Sequence
aagagaacaccaacacatacgtcca

SEQ ID NO: 163152 - DNA, 25 bp, Probe Sequence
aagtgaacacaagcctcctgtaaat

SEQ ID NO: 163153 - DNA, 25 bp, Probe Sequence
aagagaagagaatgcccagcttaat

SEQ ID NO: 163154 - DNA, 25 bp, Probe Sequence
aagaggctgagttagtcccttagaa

SEQ ID NO: 163155 - DNA, 25 bp, Probe Sequence
gataacgtattcggtaccccagtat

SEQ ID NO: 163156 - DNA, 25 bp, Probe Sequence
aagatttattcaggaatccccattt

SEQ ID NO: 163157 - DNA, 25 bp, Probe Sequence
aagagatatattatttcctcacatt

SEQ ID NO: 163158 - DNA, 25 bp, Probe Sequence
aagagttctgatgtttctccacctt

SEQ ID NO: 163159 - DNA, 25 bp, Probe Sequence
aagagtcttggttcctctactactt

SEQ ID NO: 163160 - DNA, 25 bp, Probe Sequence
aagagtctctgtcaactctctcatt

SEQ ID NO: 163161 - DNA, 25 bp, Probe Sequence
aagagactatctccaatccatctcg

SEQ ID NO: 163162 - DNA, 25 bp, Probe Sequence
aagagactgtctggcagttgcctat

SEQ ID NO: 163163 - DNA, 25 bp, Probe Sequence
aagaggcttctcctgttttatatat

SEQ ID NO: 163164 - DNA, 25 bp, Probe Sequence
aagagctcttctagccctttataaa

SEQ ID NO: 163165 - DNA, 25 bp, Probe Sequence
aagtcagctgactagcagccttaat

SEQ ID NO: 163166 - DNA, 25 bp, Probe Sequence
aagtagcatgagccatgtccctgta

SEQ ID NO: 163167 - DNA, 25 bp, Probe Sequence
aagttgaggagtgcccttcagagcc

SEQ ID NO: 163168 - DNA, 25 bp, Probe Sequence
aagattcaggaattcctctctgggc

SEQ ID NO: 163169 - DNA, 25 bp, Probe Sequence
aagtacaggcggtttgcttctgcct

SEQ ID NO: 163170 - DNA, 25 bp, Probe Sequence
aagtaagacagactcttggccacct

SEQ ID NO: 163171 - DNA, 25 bp, Probe Sequence
aagatgatgaaccgcttcatgccac

SEQ ID NO: 163172 - DNA, 25 bp, Probe Sequence
aagatgagtaggacttctccagcag

SEQ ID NO: 163173 - DNA, 25 bp, Probe Sequence
aagatggtagccattggccacatgc

SEQ ID NO: 163174 - DNA, 25 bp, Probe Sequence
aagagggaacagaggcatcagcatc

SEQ ID NO: 163175 - DNA, 25 bp, Probe Sequence
aagagcaggaacttctgtgtatatc

SEQ ID NO: 163176 - DNA, 25 bp, Probe Sequence
aaggagtggactggagcgtaactgc

SEQ ID NO: 163177 - DNA, 25 bp, Probe Sequence
aagtggtcctctgagcttactatac

SEQ ID NO: 163178 - DNA, 25 bp, Probe Sequence
aagatagtttctgacatgtgcctat

SEQ ID NO: 163179 - DNA, 25 bp, Probe Sequence
aagatcctgtccaagagtagcctgt

SEQ ID NO: 163180 - DNA, 25 bp, Probe Sequence
aagatcttggacagcgtgggtatcg

SEQ ID NO: 163181 - DNA, 25 bp, Probe Sequence
aagattaggaattgggaggttagag

SEQ ID NO: 163182 - DNA, 25 bp, Probe Sequence
aagataaggaagggaagtgtgtgga

SEQ ID NO: 163183 - DNA, 25 bp, Probe Sequence
aagtaagacaatgcgagactggtgg

SEQ ID NO: 163184 - DNA, 25 bp, Probe Sequence
aatgcataaacctgggactggctac

SEQ ID NO: 163185 - DNA, 25 bp, Probe Sequence
aatgtaaagccatgctggaaaataa

SEQ ID NO: 163186 - DNA, 25 bp, Probe Sequence
aagtctacaccataaataattctaa

SEQ ID NO: 163187 - DNA, 25 bp, Probe Sequence
aagttatcccaatccaagatctcca

SEQ ID NO: 163188 - DNA, 25 bp, Probe Sequence
aaaattccttttccaaatcatgttg

SEQ ID NO: 163189 - DNA, 25 bp, Probe Sequence
aagttgaatcatatgcccaaagtac

SEQ ID NO: 163190 - DNA, 25 bp, Probe Sequence
aagatggtgtcaatggcccgaaaca

SEQ ID NO: 163191 - DNA, 25 bp, Probe Sequence
aagtaggtacatggcccagagacca

SEQ ID NO: 163192 - DNA, 25 bp, Probe Sequence
aagtcagtgtaagtccccagggact

SEQ ID NO: 163193 - DNA, 25 bp, Probe Sequence
aagtattctaagctctctgcagggc

SEQ ID NO: 163194 - DNA, 25 bp, Probe Sequence
aagatatgtggactctctcctgagg

SEQ ID NO: 163195 - DNA, 25 bp, Probe Sequence
aagtttggaacttcttagagattgg

SEQ ID NO: 163196 - DNA, 25 bp, Probe Sequence
caacttaggaccaacctgagaaagc

SEQ ID NO: 163197 - DNA, 25 bp, Probe Sequence
caatccattggccctaccttaaaga

SEQ ID NO: 163198 - DNA, 25 bp, Probe Sequence
aatggcactggggcttacttaaagg

SEQ ID NO: 163199 - DNA, 25 bp, Probe Sequence
aatgccgggagagtaattcaaaata

SEQ ID NO: 163200 - DNA, 25 bp, Probe Sequence
aagggtggagactaagctaataaag

SEQ ID NO: 163201 - DNA, 25 bp, Probe Sequence
aagttgtgggactgcatgctactgt

SEQ ID NO: 163202 - DNA, 25 bp, Probe Sequence
aagattgttgggggctacacctgtg

SEQ ID NO: 163203 - DNA, 25 bp, Probe Sequence
aagtttgttcgtggtagcaccttca

SEQ ID NO: 163204 - DNA, 25 bp, Probe Sequence
aagttttgtccaggatggccctgac

SEQ ID NO: 163205 - DNA, 25 bp, Probe Sequence
aagatagtttcactttggtctctga

SEQ ID NO: 163206 - DNA, 25 bp, Probe Sequence
aagatcaatgtttgcttgtacttca

SEQ ID NO: 163207 - DNA, 25 bp, Probe Sequence
aagagctcctattttgtactcctgg

SEQ ID NO: 163208 - DNA, 25 bp, Probe Sequence
aagtcccatacatttggaccatggc

SEQ ID NO: 163209 - DNA, 25 bp, Probe Sequence
aagtgcccaaaatagtcacggtcat

SEQ ID NO: 163210 - DNA, 25 bp, Probe Sequence
aagtagcacaaactgtataacggtt

SEQ ID NO: 163211 - DNA, 25 bp, Probe Sequence
aatttgcccaggtttctgacaggtg

SEQ ID NO: 163212 - DNA, 25 bp, Probe Sequence
aagaggcccaaggatgtcggaggga

SEQ ID NO: 163213 - DNA, 25 bp, Probe Sequence
aagagagccaaagtgttcccaagaa

SEQ ID NO: 163214 - DNA, 25 bp, Probe Sequence
aagaggtccaagaattcccaaagat

SEQ ID NO: 163215 - DNA, 25 bp, Probe Sequence
aaggtggggagcagtactacaagtt

SEQ ID NO: 163216 - DNA, 25 bp, Probe Sequence
aagtgtgctggggcggaatttcaag

SEQ ID NO: 163217 - DNA, 25 bp, Probe Sequence
aagatggcggccgcaaactgacacc

SEQ ID NO: 163218 - DNA, 25 bp, Probe Sequence
aaggtccgtcccatgacataacact

SEQ ID NO: 163219 - DNA, 25 bp, Probe Sequence
aagtgacccagggcctgacaaaaat

SEQ ID NO: 163220 - DNA, 25 bp, Probe Sequence
aagtaaccaagtgcttcagaacagg

SEQ ID NO: 163221 - DNA, 25 bp, Probe Sequence
aagatcaagccattgtactccagcc

SEQ ID NO: 163222 - DNA, 25 bp, Probe Sequence
aagatcaagccattgtactccagcc

SEQ ID NO: 163223 - DNA, 25 bp, Probe Sequence
aagatgaggtattaatcccctccat

SEQ ID NO: 163224 - DNA, 25 bp, Probe Sequence
aagagagcctactgtaaccctcatg

SEQ ID NO: 163225 - DNA, 25 bp, Probe Sequence
aagaggctatactaatgaatccact

SEQ ID NO: 163226 - DNA, 25 bp, Probe Sequence
aagatccccatgtacatgtgaaatt

SEQ ID NO: 163227 - DNA, 25 bp, Probe Sequence
aagatcctttgatatgatagcaata

SEQ ID NO: 163228 - DNA, 25 bp, Probe Sequence
aagtgctctttatgtatctaacaga

SEQ ID NO: 163229 - DNA, 25 bp, Probe Sequence
aagagcttttgatctattcaatcca

SEQ ID NO: 163230 - DNA, 25 bp, Probe Sequence
aagagcttctcagtacatattctac

SEQ ID NO: 163231 - DNA, 25 bp, Probe Sequence
aagatgatctctatcactttgccac

SEQ ID NO: 163232 - DNA, 25 bp, Probe Sequence
aagagtctgtattcctgatatgcct

SEQ ID NO: 163233 - DNA, 25 bp, Probe Sequence
aagagtgctctccatgctctaattt

SEQ ID NO: 163234 - DNA, 25 bp, Probe Sequence
aagattcatacgcctctactgatac

SEQ ID NO: 163235 - DNA, 25 bp, Probe Sequence
aagttaccaggtagcctgaactttg

SEQ ID NO: 163236 - DNA, 25 bp, Probe Sequence
aagtaacatttaagcctcaaccttg

SEQ ID NO: 163237 - DNA, 25 bp, Probe Sequence
aagtgaactttgtgttaccctgcgt

SEQ ID NO: 163238 - DNA, 25 bp, Probe Sequence
aagtattctttgagtttccatattg

SEQ ID NO: 163239 - DNA, 25 bp, Probe Sequence
aagttattcgaaagattgtccagtt

SEQ ID NO: 163240 - DNA, 25 bp, Probe Sequence
aagttttggcaaatccatggccagg

SEQ ID NO: 163241 - DNA, 25 bp, Probe Sequence
aaggttctgccattacaggaccagt

SEQ ID NO: 163242 - DNA, 25 bp, Probe Sequence
aagagttcagacttatcaccattct

SEQ ID NO: 163243 - DNA, 25 bp, Probe Sequence
aagagcttagacttcaaatatatct

SEQ ID NO: 163244 - DNA, 25 bp, Probe Sequence
aatggacaaaaataattatgcccca

SEQ ID NO: 163245 - DNA, 25 bp, Probe Sequence
aatggaaaaccacatttgtgacgca

SEQ ID NO: 163246 - DNA, 25 bp, Probe Sequence
aatggcaacaagacggaattggaac

SEQ ID NO: 163247 - DNA, 25 bp, Probe Sequence
aagatcccagactggttcttgaaca

SEQ ID NO: 163248 - DNA, 25 bp, Probe Sequence
aagatgtccaaccctgttttgactc

SEQ ID NO: 163249 - DNA, 25 bp, Probe Sequence
aagagtccagacttctggcttaaca

SEQ ID NO: 163250 - DNA, 25 bp, Probe Sequence
aagagtctaacctgtctctgcaagc

SEQ ID NO: 163251 - DNA, 25 bp, Probe Sequence
aagatattaacctggtgtgtgtcaa

SEQ ID NO: 163252 - DNA, 25 bp, Probe Sequence
aagatcaaaccctgcttttgtgtaa

SEQ ID NO: 163253 - DNA, 25 bp, Probe Sequence
aagtatccctactgtaatttgtgat

SEQ ID NO: 163254 - DNA, 25 bp, Probe Sequence
aagtatcatctttcaggcatgaatg

SEQ ID NO: 163255 - DNA, 25 bp, Probe Sequence
aagatcaatccatctgccagaatct

SEQ ID NO: 163256 - DNA, 25 bp, Probe Sequence
aagtgcagatcaccttgcacatgaa

SEQ ID NO: 163257 - DNA, 25 bp, Probe Sequence
aagagatgatggttatgcaattaag

SEQ ID NO: 163258 - DNA, 25 bp, Probe Sequence
aagagatctgccttacgatgttcat

SEQ ID NO: 163259 - DNA, 25 bp, Probe Sequence
aagataccctttggattgatcacat

SEQ ID NO: 163260 - DNA, 25 bp, Probe Sequence
aagtacatccaggttgtctaccttc

SEQ ID NO: 163261 - DNA, 25 bp, Probe Sequence
caagtagactatgtttttccacctg

SEQ ID NO: 163262 - DNA, 25 bp, Probe Sequence
aagttactccttacctatcaacaat

SEQ ID NO: 163263 - DNA, 25 bp, Probe Sequence
aagtctatccaaatcatcctaacta

SEQ ID NO: 163264 - DNA, 25 bp, Probe Sequence
aagttgctaaattctccatggacat

SEQ ID NO: 163265 - DNA, 25 bp, Probe Sequence
aagtatgctactgtctccagaacac

SEQ ID NO: 163266 - DNA, 25 bp, Probe Sequence
aagattctattttgactagacatcc

SEQ ID NO: 163267 - DNA, 25 bp, Probe Sequence
aagtttaagtagtgtatcctgcacc

SEQ ID NO: 163268 - DNA, 25 bp, Probe Sequence
aagattacaagttgggttggtgatg

SEQ ID NO: 163269 - DNA, 25 bp, Probe Sequence
aagatttgccaatggtgctttggat

SEQ ID NO: 163270 - DNA, 25 bp, Probe Sequence
aagtagtccattcttgctaatggtt

SEQ ID NO: 163271 - DNA, 25 bp, Probe Sequence
aagtactctgccccttgaaagaagt

SEQ ID NO: 163272 - DNA, 25 bp, Probe Sequence
aatgtattccctccaaaattcaagt

SEQ ID NO: 163273 - DNA, 25 bp, Probe Sequence
aagtcttagttttcagacattaagt

SEQ ID NO: 163274 - DNA, 25 bp, Probe Sequence
aagtttagttataagctaggcacaa

SEQ ID NO: 163275 - DNA, 25 bp, Probe Sequence
aagtttgagtgtaccaggaacagaa

SEQ ID NO: 163276 - DNA, 25 bp, Probe Sequence
aagttatggttagcagagatcacac

SEQ ID NO: 163277 - DNA, 25 bp, Probe Sequence
aagattgctttatccagcagtcaat

SEQ ID NO: 163278 - DNA, 25 bp, Probe Sequence
aagttgttgcattcccaattggtgt

SEQ ID NO: 163279 - DNA, 25 bp, Probe Sequence
aagttatggccatcttagtgggtgt

SEQ ID NO: 163280 - DNA, 25 bp, Probe Sequence
aagttgaggcaatgcttttccctgc

SEQ ID NO: 163281 - DNA, 25 bp, Probe Sequence
aagataaggcatttctttcccggag

SEQ ID NO: 163282 - DNA, 25 bp, Probe Sequence
aagagacagagcatcctgttctcca

SEQ ID NO: 163283 - DNA, 25 bp, Probe Sequence
aagagacagagcatcctgttctcca

SEQ ID NO: 163284 - DNA, 25 bp, Probe Sequence
aagatacagaaacatagctgaggaa

SEQ ID NO: 163285 - DNA, 25 bp, Probe Sequence
aagtgaccgagcccgaggtgagaat

SEQ ID NO: 163286 - DNA, 25 bp, Probe Sequence
aagtagctcggaccgcaagtgcaca

SEQ ID NO: 163287 - DNA, 25 bp, Probe Sequence
aagtagctgggactacaggtgcccg

SEQ ID NO: 163288 - DNA, 25 bp, Probe Sequence
gaaatatcccgacagggttccggtg

SEQ ID NO: 163289 - DNA, 25 bp, Probe Sequence
aagttcccgcatctggagttcagga

SEQ ID NO: 163290 - DNA, 25 bp, Probe Sequence
aagttcccaggagttgatgtttctg

SEQ ID NO: 163291 - DNA, 25 bp, Probe Sequence
aagattaccagatcatcagtttagc

SEQ ID NO: 163292 - DNA, 25 bp, Probe Sequence
aagtataccattgatcagttgtgac

SEQ ID NO: 163293 - DNA, 25 bp, Probe Sequence
aagttgaccattgtgaagtttctgt

SEQ ID NO: 163294 - DNA, 25 bp, Probe Sequence
aaggtgcccaggggacaattcatct

SEQ ID NO: 163295 - DNA, 25 bp, Probe Sequence
aagatgacccgtggaacacttgcct

SEQ ID NO: 163296 - DNA, 25 bp, Probe Sequence
aagaggccgcagagaagactatgtt

SEQ ID NO: 163297 - DNA, 25 bp, Probe Sequence
aagtacccacttaagagctatgtat

SEQ ID NO: 163298 - DNA, 25 bp, Probe Sequence
aagatcccctctgtagagatcatgc

SEQ ID NO: 163299 - DNA, 25 bp, Probe Sequence
aagatcacgtgcctgtgtcaagtcc

SEQ ID NO: 163300 - DNA, 25 bp, Probe Sequence
aagaggctgtgcctgttgagtctcc

SEQ ID NO: 163301 - DNA, 25 bp, Probe Sequence
aagaggcatgactgcttttctcagc

SEQ ID NO: 163302 - DNA, 25 bp, Probe Sequence
aagagtgcaaatgcacctcctgcag

SEQ ID NO: 163303 - DNA, 25 bp, Probe Sequence
aagagtgaagataatctctcctatc

SEQ ID NO: 163304 - DNA, 25 bp, Probe Sequence
aagatggactgtgggctgtccttgc

SEQ ID NO: 163305 - DNA, 25 bp, Probe Sequence
aagaggagctgagcatggtcattct

SEQ ID NO: 163306 - DNA, 25 bp, Probe Sequence
aagagagagtggcatggcatattaa

SEQ ID NO: 163307 - DNA, 25 bp, Probe Sequence
aagagttgctaggattcagagtaaa

SEQ ID NO: 163308 - DNA, 25 bp, Probe Sequence
aagagattctgttattagcaccatg

SEQ ID NO: 163309 - DNA, 25 bp, Probe Sequence
aagagagtcgtgtgggcccaggtat

SEQ ID NO: 163310 - DNA, 25 bp, Probe Sequence
aagagagggctgggcggggaggagc

SEQ ID NO: 163311 - DNA, 25 bp, Probe Sequence
aagttgtggctgttcttgggaaagg

SEQ ID NO: 163312 - DNA, 25 bp, Probe Sequence
aagggctctgtgaacttcggacaag

SEQ ID NO: 163313 - DNA, 25 bp, Probe Sequence
aaggccctccattttggaaagcagg

SEQ ID NO: 163314 - DNA, 25 bp, Probe Sequence
aagtctcccctcttcatgggaaaag

SEQ ID NO: 163315 - DNA, 25 bp, Probe Sequence
aagtaacccatcttgcaggacgaca

SEQ ID NO: 163316 - DNA, 25 bp, Probe Sequence
aagtaaaccgctagcttgttgcacc

SEQ ID NO: 163317 - DNA, 25 bp, Probe Sequence
aagtaaaccgctagcttgttgcacc

SEQ ID NO: 163318 - DNA, 25 bp, Probe Sequence
aagtaaagaccaatgagttatgacc

SEQ ID NO: 163319 - DNA, 25 bp, Probe Sequence
aagttaatgactaatatgtttacaa

SEQ ID NO: 163320 - DNA, 25 bp, Probe Sequence
aagtccaagaatgtacttatacagg

SEQ ID NO: 163321 - DNA, 25 bp, Probe Sequence
aagttaacaatattgtctgttgggg

SEQ ID NO: 163322 - DNA, 25 bp, Probe Sequence
aagtttagcaatatgacattcttgg

SEQ ID NO: 163323 - DNA, 25 bp, Probe Sequence
aagagttatacaattggcttttggc

SEQ ID NO: 163324 - DNA, 25 bp, Probe Sequence
aagaggaaacaaagcgttctgcgcg

SEQ ID NO: 163325 - DNA, 25 bp, Probe Sequence
aagatccaagaaaacgcctcactgc

SEQ ID NO: 163326 - DNA, 25 bp, Probe Sequence
aagatggccaaaacacagcctgccc

SEQ ID NO: 163327 - DNA, 25 bp, Probe Sequence
aagaggtgacaacctcagtctccct

SEQ ID NO: 163328 - DNA, 25 bp, Probe Sequence
aagatggtgacaatccttacccttc

SEQ ID NO: 163329 - DNA, 25 bp, Probe Sequence
aagaggttgcgccgaattcaccttc

SEQ ID NO: 163330 - DNA, 25 bp, Probe Sequence
aagaggaagcaacaaccattgctga

SEQ ID NO: 163331 - DNA, 25 bp, Probe Sequence
aagagggacagatgaatgccgtgga

SEQ ID NO: 163332 - DNA, 25 bp, Probe Sequence
aaggcaaatctgtgaggccggggcc

SEQ ID NO: 163333 - DNA, 25 bp, Probe Sequence
aagtgataacttcgaagccataggg

SEQ ID NO: 163334 - DNA, 25 bp, Probe Sequence
aagtctacagttcaacaccgtttct

SEQ ID NO: 163335 - DNA, 25 bp, Probe Sequence
aagtccacgttgagatgcgcagcct

SEQ ID NO: 163336 - DNA, 25 bp, Probe Sequence
aagataccaattaaatgagagcata

SEQ ID NO: 163337 - DNA, 25 bp, Probe Sequence
aagatactcaacaacagcggactcc

SEQ ID NO: 163338 - DNA, 25 bp, Probe Sequence
aatgaacaacacaaccggaagcggg

SEQ ID NO: 163339 - DNA, 25 bp, Probe Sequence
aagatatcaagaccatcctggccag

SEQ ID NO: 163340 - DNA, 25 bp, Probe Sequence
aagatcatcagcaatgcctcctgca

SEQ ID NO: 163341 - DNA, 25 bp, Probe Sequence
aagatcatcagcaatgcctcctgca

SEQ ID NO: 163342 - DNA, 25 bp, Probe Sequence
aagatcacaggagccactgcactcc

SEQ ID NO: 163343 - DNA, 25 bp, Probe Sequence
aagatagagaatgccctcagctctt

SEQ ID NO: 163344 - DNA, 25 bp, Probe Sequence
aagatctgcaaatacctggctctca

SEQ ID NO: 163345 - DNA, 25 bp, Probe Sequence
aagatccagatcacattaggctcca

SEQ ID NO: 163346 - DNA, 25 bp, Probe Sequence
aagatcgcgccggattattgctgca

SEQ ID NO: 163347 - DNA, 25 bp, Probe Sequence
aagatggacgtactttgtctgacta

SEQ ID NO: 163348 - DNA, 25 bp, Probe Sequence
aagaggacgttcagtctcatttatt

SEQ ID NO: 163349 - DNA, 25 bp, Probe Sequence
aagaggagcagtcctatgcttttat

SEQ ID NO: 163350 - DNA, 25 bp, Probe Sequence
aagaggagtgtctttgtttgcctgg

SEQ ID NO: 163351 - DNA, 25 bp, Probe Sequence
aagaggggtgcagaggctgtggctg

SEQ ID NO: 163352 - DNA, 25 bp, Probe Sequence
aagaggggtcacaaactgctggcct

SEQ ID NO: 163353 - DNA, 25 bp, Probe Sequence
aagagggatttaataagctggcacc

SEQ ID NO: 163354 - DNA, 25 bp, Probe Sequence
aagtgggacattagtaactgcacac

SEQ ID NO: 163355 - DNA, 25 bp, Probe Sequence
aagatctggaatatgaagaccacag

SEQ ID NO: 163356 - DNA, 25 bp, Probe Sequence
aagtgatgggtgagagagaacaagt

SEQ ID NO: 163357 - DNA, 25 bp, Probe Sequence
aagatgctatggctaaaatccaagc

SEQ ID NO: 163358 - DNA, 25 bp, Probe Sequence
aagtaccaggtcaacaacaaacatg

SEQ ID NO: 163359 - DNA, 25 bp, Probe Sequence
aagtccaaattcaagccgattacat

SEQ ID NO: 163360 - DNA, 25 bp, Probe Sequence
aagtctagactttgagccaggtaca

SEQ ID NO: 163361 - DNA, 25 bp, Probe Sequence
aagtcaaacttggcatggagggata

SEQ ID NO: 163362 - DNA, 25 bp, Probe Sequence
aagtcaaacttggcatggagggata

SEQ ID NO: 163363 - DNA, 25 bp, Probe Sequence
aagatacaagtttcaggcagggtct

SEQ ID NO: 163364 - DNA, 25 bp, Probe Sequence
aagatcaaggtctgcaagggaattc

SEQ ID NO: 163365 - DNA, 25 bp, Probe Sequence
aagatggagaggtagcacgggagta

SEQ ID NO: 163366 - DNA, 25 bp, Probe Sequence
aagatggctgggaagccaggccaaa

SEQ ID NO: 163367 - DNA, 25 bp, Probe Sequence
aagatttagaaacgcaggtcataca

SEQ ID NO: 163368 - DNA, 25 bp, Probe Sequence
aagtttaaagctatggcatcatata

SEQ ID NO: 163369 - DNA, 25 bp, Probe Sequence
aagaggtgacaacgttgcagtcatt

SEQ ID NO: 163370 - DNA, 25 bp, Probe Sequence
aagagggcataaaggagcactcaat

SEQ ID NO: 163371 - DNA, 25 bp, Probe Sequence
aagatgtggctggttggacctcgtt

SEQ ID NO: 163372 - DNA, 25 bp, Probe Sequence
aagatgttcttcatggtgtttttaa

SEQ ID NO: 163373 - DNA, 25 bp, Probe Sequence
aagatgttttcattgtttcagttat

SEQ ID NO: 163374 - DNA, 25 bp, Probe Sequence
aagagtctttttattctgcatataa

SEQ ID NO: 163375 - DNA, 25 bp, Probe Sequence
aagagtttcttctcatatccataaa

SEQ ID NO: 163376 - DNA, 25 bp, Probe Sequence
aagttcttcacctctatccaaagaa

SEQ ID NO: 163377 - DNA, 25 bp, Probe Sequence
aagttctgttcgtttatccattgcg

SEQ ID NO: 163378 - DNA, 25 bp, Probe Sequence
aagttctgttaggcctacatcgtgg

SEQ ID NO: 163379 - DNA, 25 bp, Probe Sequence
aagttcgtgcgggacatgattcggg

SEQ ID NO: 163380 - DNA, 25 bp, Probe Sequence
aagtttcctggcacatgtttaggca

SEQ ID NO: 163381 - DNA, 25 bp, Probe Sequence
aagtttttactgccagtattgagaa

SEQ ID NO: 163382 - DNA, 25 bp, Probe Sequence
aagttctgtatagctcgtaatgatg

SEQ ID NO: 163383 - DNA, 25 bp, Probe Sequence
aagtttgttccctatgaaatgtcaa

SEQ ID NO: 163384 - DNA, 25 bp, Probe Sequence
aagtcttcattcagttaccttcaag

SEQ ID NO: 163385 - DNA, 25 bp, Probe Sequence
aagtactcatttgtaagactttctg

SEQ ID NO: 163386 - DNA, 25 bp, Probe Sequence
aagtctctccttcctaataaatgtt

SEQ ID NO: 163387 - DNA, 25 bp, Probe Sequence
aagtttccagtacactgaaacataa

SEQ ID NO: 163388 - DNA, 25 bp, Probe Sequence
aagtgcttccggctccaggaaataa

SEQ ID NO: 163389 - DNA, 25 bp, Probe Sequence
aagtaactcgggcccatggaaacag

SEQ ID NO: 163390 - DNA, 25 bp, Probe Sequence
aagtcatcttggagcgtatggagga

SEQ ID NO: 163391 - DNA, 25 bp, Probe Sequence
aagatcgaatggagctgttagaaat

SEQ ID NO: 163392 - DNA, 25 bp, Probe Sequence
aagatgtgatttaggtttatggtga

SEQ ID NO: 163393 - DNA, 25 bp, Probe Sequence
aagttattagtggtttatcagcaaa

SEQ ID NO: 163394 - DNA, 25 bp, Probe Sequence
aatggttaagatgtacttgactagt

SEQ ID NO: 163395 - DNA, 25 bp, Probe Sequence
taagtgtaaggtgtacttggtatta

SEQ ID NO: 163396 - DNA, 25 bp, Probe Sequence
aagttgaatggttcctcttggtaag

SEQ ID NO: 163397 - DNA, 25 bp, Probe Sequence
aagttaattgttcatcttgcccctt

SEQ ID NO: 163398 - DNA, 25 bp, Probe Sequence
aagttcaacggtcatagctgtccct

SEQ ID NO: 163399 - DNA, 25 bp, Probe Sequence
aagttctgaggctggacatcggccc

SEQ ID NO: 163400 - DNA, 25 bp, Probe Sequence
aagttctgaggctggacatcggccc

SEQ ID NO: 163401 - DNA, 25 bp, Probe Sequence
aagttctgaggctggacatcggccc

SEQ ID NO: 163402 - DNA, 25 bp, Probe Sequence
aagatcctgtgggagatcacccgct

SEQ ID NO: 163403 - DNA, 25 bp, Probe Sequence
aagatcgcctgggagacggccaatc

SEQ ID NO: 163404 - DNA, 25 bp, Probe Sequence
aagatgcgctgcagcagaacccgga

SEQ ID NO: 163405 - DNA, 25 bp, Probe Sequence
aagatgctgctggggagcccaaggc

SEQ ID NO: 163406 - DNA, 25 bp, Probe Sequence
aagaggctgggtggttgcacaggcc

SEQ ID NO: 163407 - DNA, 25 bp, Probe Sequence
aagaggagctggtggctgccagccc

SEQ ID NO: 163408 - DNA, 25 bp, Probe Sequence
aagaggagctggtggctgccagccc

SEQ ID NO: 163409 - DNA, 25 bp, Probe Sequence
aatagggctggatcttatcactgcc

SEQ ID NO: 163410 - DNA, 25 bp, Probe Sequence
aagaggtgcttatgcttagcttgat

SEQ ID NO: 163411 - DNA, 25 bp, Probe Sequence
aagatggtattgtgcccaccagtca

SEQ ID NO: 163412 - DNA, 25 bp, Probe Sequence
aagatgtgtttgaaccgcaccagcc

SEQ ID NO: 163413 - DNA, 25 bp, Probe Sequence
aagatgggtgaccacctgaccaacc

SEQ ID NO: 163414 - DNA, 25 bp, Probe Sequence
aatgtgggtcagctacataagcccc

SEQ ID NO: 163415 - DNA, 25 bp, Probe Sequence
aatgttggccagcttgcaatggatc

SEQ ID NO: 163416 - DNA, 25 bp, Probe Sequence
aagttggagacgttctaggctgcct

SEQ ID NO: 163417 - DNA, 25 bp, Probe Sequence
aagtagaagaccctgcaaggccttc

SEQ ID NO: 163418 - DNA, 25 bp, Probe Sequence
aagatgggtgactggaagacctgtc

SEQ ID NO: 163419 - DNA, 25 bp, Probe Sequence
aagatttagcacggaagagtttgtc

SEQ ID NO: 163420 - DNA, 25 bp, Probe Sequence
aagttgatgtgcggaaaatgttttc

SEQ ID NO: 163421 - DNA, 25 bp, Probe Sequence
aagttagatggtgaaatcatacctc

SEQ ID NO: 163422 - DNA, 25 bp, Probe Sequence
aaggaaggggaacatcacccaccag

SEQ ID NO: 163423 - DNA, 25 bp, Probe Sequence
aagggacggaaacatcagcaccaaa

SEQ ID NO: 163424 - DNA, 25 bp, Probe Sequence
aagtggtaggaagcaacatccaaaa

SEQ ID NO: 163425 - DNA, 25 bp, Probe Sequence
aagtgttagggattccttccaatag

SEQ ID NO: 163426 - DNA, 25 bp, Probe Sequence
aagtgtggggtgatcagccccagat

SEQ ID NO: 163427 - DNA, 25 bp, Probe Sequence
aagttgagggatttcatcacgccag

SEQ ID NO: 163428 - DNA, 25 bp, Probe Sequence
aagttagtctgttgttatagtagag

SEQ ID NO: 163429 - DNA, 25 bp, Probe Sequence
aagatgtgactcaaattctgatagt

SEQ ID NO: 163430 - DNA, 25 bp, Probe Sequence
aagaggactcacaagccttcaatcc

SEQ ID NO: 163431 - DNA, 25 bp, Probe Sequence
aagaggaatctggagtttcagtctc

SEQ ID NO: 163432 - DNA, 25 bp, Probe Sequence
aagaggaacagctctttggacacta

SEQ ID NO: 163433 - DNA, 25 bp, Probe Sequence
aagatgaggaccacttcattacagt

SEQ ID NO: 163434 - DNA, 25 bp, Probe Sequence
aagatggaacccctccaattgatgc

SEQ ID NO: 163435 - DNA, 25 bp, Probe Sequence
aagatgtataagcattccaataata

SEQ ID NO: 163436 - DNA, 25 bp, Probe Sequence
aagttcaaatgcaatgtatagtaat

SEQ ID NO: 163437 - DNA, 25 bp, Probe Sequence
aagatctctaatctgttttgagtct

SEQ ID NO: 163438 - DNA, 25 bp, Probe Sequence
aagatctctgacatggcttggctga

SEQ ID NO: 163439 - DNA, 25 bp, Probe Sequence
aagatcattgctcctcctgagcgca

SEQ ID NO: 163440 - DNA, 25 bp, Probe Sequence
aagatcattgctcctcctgagcgca

SEQ ID NO: 163441 - DNA, 25 bp, Probe Sequence
aagtgcagctgctgcgcctgatgtc

SEQ ID NO: 163442 - DNA, 25 bp, Probe Sequence
aagatgcagcctttccaagtgcggc

SEQ ID NO: 163443 - DNA, 25 bp, Probe Sequence
aagatgagcctctgcaatattctgg

SEQ ID NO: 163444 - DNA, 25 bp, Probe Sequence
aagatgacccagatcatgtttgaga

SEQ ID NO: 163445 - DNA, 25 bp, Probe Sequence
aagatgtgcttagtatatttttgtt

SEQ ID NO: 163446 - DNA, 25 bp, Probe Sequence
aagattgtttgcatacttttgtaat

SEQ ID NO: 163447 - DNA, 25 bp, Probe Sequence
aagttgcttagagtacttctttgac

SEQ ID NO: 163448 - DNA, 25 bp, Probe Sequence
aagatcctctaacacacatattttc

SEQ ID NO: 163449 - DNA, 25 bp, Probe Sequence
aagatccctagatgatacacactca

SEQ ID NO: 163450 - DNA, 25 bp, Probe Sequence
aagatcggcagacagatgaatacca

SEQ ID NO: 163451 - DNA, 25 bp, Probe Sequence
aagataaaattgccataataccatt

SEQ ID NO: 163452 - DNA, 25 bp, Probe Sequence
aagatgaatgagttcctggaaaatt

SEQ ID NO: 163453 - DNA, 25 bp, Probe Sequence
aagatcagtgagttcatctgtaata

SEQ ID NO: 163454 - DNA, 25 bp, Probe Sequence
aagatggtcagctatgaagtaatag

SEQ ID NO: 163455 - DNA, 25 bp, Probe Sequence
aagatggcacagtatgtggtccaga

SEQ ID NO: 163456 - DNA, 25 bp, Probe Sequence
aagatgcagtaattatgttccagat

SEQ ID NO: 163457 - DNA, 25 bp, Probe Sequence
aagatgtaaatgtattctcacatgt

SEQ ID NO: 163458 - DNA, 25 bp, Probe Sequence
aagtcacaatgacattccatagtaa

SEQ ID NO: 163459 - DNA, 25 bp, Probe Sequence
aagtacgtatgttcatctacagtac

SEQ ID NO: 163460 - DNA, 25 bp, Probe Sequence
aagttcagtagttgcttccctaact

SEQ ID NO: 163461 - DNA, 25 bp, Probe Sequence
aagtgtttacacctaagcctaacat

SEQ ID NO: 163462 - DNA, 25 bp, Probe Sequence
aagatgtggtactgaatgtgcctaa

SEQ ID NO: 163463 - DNA, 25 bp, Probe Sequence
aagttgtgccactgaagagcgatac

SEQ ID NO: 163464 - DNA, 25 bp, Probe Sequence
aagttacagcacagccagacgttct

SEQ ID NO: 163465 - DNA, 25 bp, Probe Sequence
aagttactgatcacaggacgttgct

SEQ ID NO: 163466 - DNA, 25 bp, Probe Sequence
aagtcgcatctgaaggcaggggttc

SEQ ID NO: 163467 - DNA, 25 bp, Probe Sequence
aagatgccaagaaacagctgctgtg

SEQ ID NO: 163468 - DNA, 25 bp, Probe Sequence
aagatccgcaagcagcagcaggtgg

SEQ ID NO: 163469 - DNA, 25 bp, Probe Sequence
aagtcagccatgtgagcactggggg

SEQ ID NO: 163470 - DNA, 25 bp, Probe Sequence
aagtcgtctttgacactggttcgtc

SEQ ID NO: 163471 - DNA, 25 bp, Probe Sequence
aagtcagtccttacatagttaccat

SEQ ID NO: 163472 - DNA, 25 bp, Probe Sequence
aagtcactgcttctcaagaaacccc

SEQ ID NO: 163473 - DNA, 25 bp, Probe Sequence
aagtatctgcacaattagaaaagtc

SEQ ID NO: 163474 - DNA, 25 bp, Probe Sequence
aagtcacataaaaatgcaacgctgt

SEQ ID NO: 163475 - DNA, 25 bp, Probe Sequence
aagtcaatcagaaccacaacaggtt

SEQ ID NO: 163476 - DNA, 25 bp, Probe Sequence
aagtcgccagaagacaagagctgta

SEQ ID NO: 163477 - DNA, 25 bp, Probe Sequence
aagtcacctgaaataaagtctcttt

SEQ ID NO: 163478 - DNA, 25 bp, Probe Sequence
aagtccctgctaaaacattccattg

SEQ ID NO: 163479 - DNA, 25 bp, Probe Sequence
aagtacctgtagacaaatttagtca

SEQ ID NO: 163480 - DNA, 25 bp, Probe Sequence
aagtactcatttgcctttgaactga

SEQ ID NO: 163481 - DNA, 25 bp, Probe Sequence
aagtagctattttctcgtataacat

SEQ ID NO: 163482 - DNA, 25 bp, Probe Sequence
aagtagtctagatctcagttaatgc

SEQ ID NO: 163483 - DNA, 25 bp, Probe Sequence
aagtcaatctatcttcagtttttct

SEQ ID NO: 163484 - DNA, 25 bp, Probe Sequence
aagtagtaatctttgccgttctcct

SEQ ID NO: 163485 - DNA, 25 bp, Probe Sequence
aagtataaattcttcctggcctatt

SEQ ID NO: 163486 - DNA, 25 bp, Probe Sequence
aagatctcaaattactactgggata

SEQ ID NO: 163487 - DNA, 25 bp, Probe Sequence
aagtgctaaacatgctgaaggaaag

SEQ ID NO: 163488 - DNA, 25 bp, Probe Sequence
aaggtaaaactgcagggagtcagga

SEQ ID NO: 163489 - DNA, 25 bp, Probe Sequence
aagtgtaaaccgcatggatgggctt

SEQ ID NO: 163490 - DNA, 25 bp, Probe Sequence
aagatgataaaccccatctgctggg

SEQ ID NO: 163491 - DNA, 25 bp, Probe Sequence
aagttattgggctcagtgctgtagg

SEQ ID NO: 163492 - DNA, 25 bp, Probe Sequence
aatggaaatgaggctgaagtggata

SEQ ID NO: 163493 - DNA, 25 bp, Probe Sequence
aatggctgcaagtggaagcggataa

SEQ ID NO: 163494 - DNA, 25 bp, Probe Sequence
aaggaccagatcctgaagggccaag

SEQ ID NO: 163495 - DNA, 25 bp, Probe Sequence
aaggcgcctacctcaaggacaagat

SEQ ID NO: 163496 - DNA, 25 bp, Probe Sequence
aagtcagcctgatgctctaatggaa

SEQ ID NO: 163497 - DNA, 25 bp, Probe Sequence
aagatctcgctgaaagccacatgga

SEQ ID NO: 163498 - DNA, 25 bp, Probe Sequence
aagattcttgatttgcacagatgta

SEQ ID NO: 163499 - DNA, 25 bp, Probe Sequence
aagattgctgtccactgcacagttc

SEQ ID NO: 163500 - DNA, 25 bp, Probe Sequence
aagatgtgctgtacctgacaacttc

SEQ ID NO: 163501 - DNA, 25 bp, Probe Sequence
aagatgtgagcaagactaacaaatc

SEQ ID NO: 163502 - DNA, 25 bp, Probe Sequence
aagatgttgcatggacttaacaatg

SEQ ID NO: 163503 - DNA, 25 bp, Probe Sequence
aagatctctgattgagggacaaatg

SEQ ID NO: 163504 - DNA, 25 bp, Probe Sequence
aagtatctgctatgggactattgct

SEQ ID NO: 163505 - DNA, 25 bp, Probe Sequence
aagtttctccaaatgagctcatctt

SEQ ID NO: 163506 - DNA, 25 bp, Probe Sequence
aagatttttatgaagcagccactgt

SEQ ID NO: 163507 - DNA, 25 bp, Probe Sequence
aagtctctgtcaagtgaaccctgtg

SEQ ID NO: 163508 - DNA, 25 bp, Probe Sequence
aagtctctccaaggtgacaagctgg

SEQ ID NO: 163509 - DNA, 25 bp, Probe Sequence
aagtcttcgagaagttgcaggctga

SEQ ID NO: 163510 - DNA, 25 bp, Probe Sequence
aagttgtctgatttttgcaagagag

SEQ ID NO: 163511 - DNA, 25 bp, Probe Sequence
aagtctgcctgtttagtaagtggca

SEQ ID NO: 163512 - DNA, 25 bp, Probe Sequence
aagtctgccctttttacaatgatga

SEQ ID NO: 163513 - DNA, 25 bp, Probe Sequence
aagtatgtcttgtttgtagccaata

SEQ ID NO: 163514 - DNA, 25 bp, Probe Sequence
aagttgtgtctgattggagcttcat

SEQ ID NO: 163515 - DNA, 25 bp, Probe Sequence
aagtctgattcccttaagctgtctt

SEQ ID NO: 163516 - DNA, 25 bp, Probe Sequence
aagtctcaagctttgtacactggat

SEQ ID NO: 163517 - DNA, 25 bp, Probe Sequence
aagtgctcaactacgtggactggat

SEQ ID NO: 163518 - DNA, 25 bp, Probe Sequence
aagggaagccagcaggatctcagca

SEQ ID NO: 163519 - DNA, 25 bp, Probe Sequence
aagttgaaggacgagacattccaat

SEQ ID NO: 163520 - DNA, 25 bp, Probe Sequence
aagatttcgaacaatcacctccagt

SEQ ID NO: 163521 - DNA, 25 bp, Probe Sequence
aagatttcagattcattccatctcc

SEQ ID NO: 163522 - DNA, 25 bp, Probe Sequence
aagattatgcttttccatatcccca

SEQ ID NO: 163523 - DNA, 25 bp, Probe Sequence
aagtgctgaattttcagaatttccc

SEQ ID NO: 163524 - DNA, 25 bp, Probe Sequence
aagtgtgtcttcctagaattcgaag

SEQ ID NO: 163525 - DNA, 25 bp, Probe Sequence
aagatatatcttctcaaattcctga

SEQ ID NO: 163526 - DNA, 25 bp, Probe Sequence
aagtatagctttgcattaccttaca

SEQ ID NO: 163527 - DNA, 25 bp, Probe Sequence
aagtatgcagcctttattaccaagc

SEQ ID NO: 163528 - DNA, 25 bp, Probe Sequence
aagttgcccctgtaatacataagtt

SEQ ID NO: 163529 - DNA, 25 bp, Probe Sequence
aagttacccatgaagtgataaaatt

SEQ ID NO: 163530 - DNA, 25 bp, Probe Sequence
aagtttgcccttgtgctaaagtgcc

SEQ ID NO: 163531 - DNA, 25 bp, Probe Sequence
aagtttcgccatgctggatgatgaa

SEQ ID NO: 163532 - DNA, 25 bp, Probe Sequence
aagttttgtcttgggcatgatgggc

SEQ ID NO: 163533 - DNA, 25 bp, Probe Sequence
aagtatttaatttggatctggatct

SEQ ID NO: 163534 - DNA, 25 bp, Probe Sequence
aagtattaaatgcactatctgctgt

SEQ ID NO: 163535 - DNA, 25 bp, Probe Sequence
aagtatgtacagtctacttttgaac

SEQ ID NO: 163536 - DNA, 25 bp, Probe Sequence
aagtttacactcactttatagagca

SEQ ID NO: 163537 - DNA, 25 bp, Probe Sequence
aagtttagcaagaacttttcacagc

SEQ ID NO: 163538 - DNA, 25 bp, Probe Sequence
aagattgtaggactgtcttcccaag

SEQ ID NO: 163539 - DNA, 25 bp, Probe Sequence
aagatctgaatggggctttcctgat

SEQ ID NO: 163540 - DNA, 25 bp, Probe Sequence
aagatctttaatactttccatgagt

SEQ ID NO: 163541 - DNA, 25 bp, Probe Sequence
aagatgttctataaatttcctaatt

SEQ ID NO: 163542 - DNA, 25 bp, Probe Sequence
aagttggcatataacttttgaagag

SEQ ID NO: 163543 - DNA, 25 bp, Probe Sequence
aagatatggtacctgcttctctgaa

SEQ ID NO: 163544 - DNA, 25 bp, Probe Sequence
aagtatggaacactccaatcagaaa

SEQ ID NO: 163545 - DNA, 25 bp, Probe Sequence
aagtaggccacaccttgagagaaag

SEQ ID NO: 163546 - DNA, 25 bp, Probe Sequence
aagggctactagactggaagaccag

SEQ ID NO: 163547 - DNA, 25 bp, Probe Sequence
aaggtcatgttgtttgaaggaccaa

SEQ ID NO: 163548 - DNA, 25 bp, Probe Sequence
aaggccattttgatgaaagacctag

SEQ ID NO: 163549 - DNA, 25 bp, Probe Sequence
aagtgacttcctcaggataacctag

SEQ ID NO: 163550 - DNA, 25 bp, Probe Sequence
aagtacttcctgtaaggcaacatct

SEQ ID NO: 163551 - DNA, 25 bp, Probe Sequence
aagatttctttatgtggaacatcta

SEQ ID NO: 163552 - DNA, 25 bp, Probe Sequence
aagatacctgctcatcgtgttgttc

SEQ ID NO: 163553 - DNA, 25 bp, Probe Sequence
aagatactcgctctctgtatctctc

SEQ ID NO: 163554 - DNA, 25 bp, Probe Sequence
aagattcagcgtcttgttactccac

SEQ ID NO: 163555 - DNA, 25 bp, Probe Sequence
aagttactgctgctctattattaac

SEQ ID NO: 163556 - DNA, 25 bp, Probe Sequence
aagtagacacatttcatttgttaat

SEQ ID NO: 163557 - DNA, 25 bp, Probe Sequence
aagttgaaccattatactttatatc

SEQ ID NO: 163558 - DNA, 25 bp, Probe Sequence
aagtaacagcctttcaattcatata

SEQ ID NO: 163559 - DNA, 25 bp, Probe Sequence
aatctaaaccttacatgtgtaaagg

SEQ ID NO: 163560 - DNA, 25 bp, Probe Sequence
aatctaaggagctgccgttatactg

SEQ ID NO: 163561 - DNA, 25 bp, Probe Sequence
aagatgaaaggcaggcctatttcat

SEQ ID NO: 163562 - DNA, 25 bp, Probe Sequence
aagtgaagaggctgagttagtccct

SEQ ID NO: 163563 - DNA, 25 bp, Probe Sequence
aagattatagaggccagttttccct

SEQ ID NO: 163564 - DNA, 25 bp, Probe Sequence
aagtttaacctgcgtgtcatctgcc

SEQ ID NO: 163565 - DNA, 25 bp, Probe Sequence
aagttctgaactggggctgtatttc

SEQ ID NO: 163566 - DNA, 25 bp, Probe Sequence
aagtcctgaccatatgggtcatttg

SEQ ID NO: 163567 - DNA, 25 bp, Probe Sequence
aagtcactcctcaaatggttttctg

SEQ ID NO: 163568 - DNA, 25 bp, Probe Sequence
aagatactgcctgcactggaatgtt

SEQ ID NO: 163569 - DNA, 25 bp, Probe Sequence
aagtagcatcttgccgggttgtggc

SEQ ID NO: 163570 - DNA, 25 bp, Probe Sequence
aagtgaccttccaaggcgtgggaga

SEQ ID NO: 163571 - DNA, 25 bp, Probe Sequence
aagtacctatgtgagggctgggcat

SEQ ID NO: 163572 - DNA, 25 bp, Probe Sequence
aagtacttttgctagtggctggaga

SEQ ID NO: 163573 - DNA, 25 bp, Probe Sequence
aagtaccttggtagggctggcacca

SEQ ID NO: 163574 - DNA, 25 bp, Probe Sequence
aagtcaggcgacggggagggcacgc

SEQ ID NO: 163575 - DNA, 25 bp, Probe Sequence
aagtcttcgaccctgagaaggagag

SEQ ID NO: 163576 - DNA, 25 bp, Probe Sequence
aagtgatgacacccctcgaaggggc

SEQ ID NO: 163577 - DNA, 25 bp, Probe Sequence
aagtgtggacgatctggccactggg

SEQ ID NO: 163578 - DNA, 25 bp, Probe Sequence
aaggttccgaagccgatactggtct

SEQ ID NO: 163579 - DNA, 25 bp, Probe Sequence
aagtttcagtgtcaaatggcggtct

SEQ ID NO: 163580 - DNA, 25 bp, Probe Sequence
aagttttgtcatcaatccaggatgt

SEQ ID NO: 163581 - DNA, 25 bp, Probe Sequence
aagttggtgtccgaaccaggggctg

SEQ ID NO: 163582 - DNA, 25 bp, Probe Sequence
aagtagggtcgaacacagaagtggg

SEQ ID NO: 163583 - DNA, 25 bp, Probe Sequence
aagtagggtcgaacacagaagtggg

SEQ ID NO: 163584 - DNA, 25 bp, Probe Sequence
aagtttggtgcgaacgccattctgg

SEQ ID NO: 163585 - DNA, 25 bp, Probe Sequence
aagttgttggtgacatctgcatcat

SEQ ID NO: 163586 - DNA, 25 bp, Probe Sequence
aagattagggtggcattgcttttat

SEQ ID NO: 163587 - DNA, 25 bp, Probe Sequence
aagtctgggacgacatcttttattt

SEQ ID NO: 163588 - DNA, 25 bp, Probe Sequence
aagattgagttctcactagtgtttt

SEQ ID NO: 163589 - DNA, 25 bp, Probe Sequence
aagattgaattccgtctctgtgttg

SEQ ID NO: 163590 - DNA, 25 bp, Probe Sequence
aagtagacattcagatccagccatt

SEQ ID NO: 163591 - DNA, 25 bp, Probe Sequence
aagataagtttaggccagacatgga

SEQ ID NO: 163592 - DNA, 25 bp, Probe Sequence
aagatacacctttctcacaaataaa

SEQ ID NO: 163593 - DNA, 25 bp, Probe Sequence
aagattaccttaagcaacacatgaa

SEQ ID NO: 163594 - DNA, 25 bp, Probe Sequence
aagattagctagacaccaaaatatc

SEQ ID NO: 163595 - DNA, 25 bp, Probe Sequence
aagtctctctcataccaacagaact

SEQ ID NO: 163596 - DNA, 25 bp, Probe Sequence
aagtgacttatattccaaagaaatt

SEQ ID NO: 163597 - DNA, 25 bp, Probe Sequence
aagtgatatgtattccaaaaaagtc

SEQ ID NO: 163598 - DNA, 25 bp, Probe Sequence
aagtatttattggcagaatcacaaa

SEQ ID NO: 163599 - DNA, 25 bp, Probe Sequence
aagatttcttcttcgttcaagatga

SEQ ID NO: 163600 - DNA, 25 bp, Probe Sequence
aagattcctactccatttgcaagtc

SEQ ID NO: 163601 - DNA, 25 bp, Probe Sequence
aagtcatcgtgaccaatgttacagt

SEQ ID NO: 163602 - DNA, 25 bp, Probe Sequence
aagtccggagtctagagtacagttg

SEQ ID NO: 163603 - DNA, 25 bp, Probe Sequence
aagtgcccagagcatagatgcatga

SEQ ID NO: 163604 - DNA, 25 bp, Probe Sequence
aagtcagccaggcatgtagcaggca

SEQ ID NO: 163605 - DNA, 25 bp, Probe Sequence
aagattccagtgtttgagcatatga

SEQ ID NO: 163606 - DNA, 25 bp, Probe Sequence
aagatactcgtattaagcctattta

SEQ ID NO: 163607 - DNA, 25 bp, Probe Sequence
aagtactatgctttaatgcttcttt

SEQ ID NO: 163608 - DNA, 25 bp, Probe Sequence
aagtatcgagattggattgcctcaa

SEQ ID NO: 163609 - DNA, 25 bp, Probe Sequence
aagttgggattggaatgagcctcag

SEQ ID NO: 163610 - DNA, 25 bp, Probe Sequence
aagtatgatgcgtttttggcctcag

SEQ ID NO: 163611 - DNA, 25 bp, Probe Sequence
aagtatgtgcttttctgtgggggtg

SEQ ID NO: 163612 - DNA, 25 bp, Probe Sequence
aagtatgtgcttttctgtgggggtg

SEQ ID NO: 163613 - DNA, 25 bp, Probe Sequence
aagtatgtgcttttctgtgggggtg

SEQ ID NO: 163614 - DNA, 25 bp, Probe Sequence
aagttatttttggctgggtgtggtg

SEQ ID NO: 163615 - DNA, 25 bp, Probe Sequence
aagtttttttgaggttggatgcagt

SEQ ID NO: 163616 - DNA, 25 bp, Probe Sequence
aagttttttctaacattgtgattgt

SEQ ID NO: 163617 - DNA, 25 bp, Probe Sequence
aagtattggtacttatattgttagt

SEQ ID NO: 163618 - DNA, 25 bp, Probe Sequence
aagtattccaacgtgatattccttg

SEQ ID NO: 163619 - DNA, 25 bp, Probe Sequence
aagtgttctcaactgagtaactttt

SEQ ID NO: 163620 - DNA, 25 bp, Probe Sequence
aagttcttccagctgaagccacttt

SEQ ID NO: 163621 - DNA, 25 bp, Probe Sequence
aagttttgcacacgtgaggtccctt

SEQ ID NO: 163622 - DNA, 25 bp, Probe Sequence
aagtttatgtacctaggaccatcta

SEQ ID NO: 163623 - DNA, 25 bp, Probe Sequence
aagtttagggctcaagatcaatctt

SEQ ID NO: 163624 - DNA, 25 bp, Probe Sequence
aagtctctagtcctgtcaaagcaac

SEQ ID NO: 163625 - DNA, 25 bp, Probe Sequence
aagtctgctagggcattacaatcct

SEQ ID NO: 163626 - DNA, 25 bp, Probe Sequence
aagtgcgcgatgccgggatcaaagt

SEQ ID NO: 163627 - DNA, 25 bp, Probe Sequence
aatggccagatgatgagctgcacat

SEQ ID NO: 163628 - DNA, 25 bp, Probe Sequence
aatggccagatgatgagctgcacat

SEQ ID NO: 163629 - DNA, 25 bp, Probe Sequence
aatggccagatgatgagctgcacat

SEQ ID NO: 163630 - DNA, 25 bp, Probe Sequence
aagtcacatagaagagatgctccag

SEQ ID NO: 163631 - DNA, 25 bp, Probe Sequence
aagtccaagatgagatggcatcaat

SEQ ID NO: 163632 - DNA, 25 bp, Probe Sequence
aagtaaatctgagtgttgtccatca

SEQ ID NO: 163633 - DNA, 25 bp, Probe Sequence
aagtaatccatgtttgtgtcaaatg

SEQ ID NO: 163634 - DNA, 25 bp, Probe Sequence
aagtttgtctgtggtgttatagtgg

SEQ ID NO: 163635 - DNA, 25 bp, Probe Sequence
aagttgttctggcatatttatctgt

SEQ ID NO: 163636 - DNA, 25 bp, Probe Sequence
aagtgttgtcttcactggctacagt

SEQ ID NO: 163637 - DNA, 25 bp, Probe Sequence
aagtgcttggttcaatgcttggccc

SEQ ID NO: 163638 - DNA, 25 bp, Probe Sequence
aatgttgtgggagaagttggcccca

SEQ ID NO: 163639 - DNA, 25 bp, Probe Sequence
aaggtgtggggtgaagtgggccgct

SEQ ID NO: 163640 - DNA, 25 bp, Probe Sequence
aagggaagccgtcaggtgggcgagg

SEQ ID NO: 163641 - DNA, 25 bp, Probe Sequence
aaggtacagccggatacgtggtgcc

SEQ ID NO: 163642 - DNA, 25 bp, Probe Sequence
aagtttccacatggtgacgtggcac

SEQ ID NO: 163643 - DNA, 25 bp, Probe Sequence
aagtattcaataggcagactgcggc

SEQ ID NO: 163644 - DNA, 25 bp, Probe Sequence
aagtagtacatatcgactctggaat

SEQ ID NO: 163645 - DNA, 25 bp, Probe Sequence
aagtacgagaagctacctgtgaaag

SEQ ID NO: 163646 - DNA, 25 bp, Probe Sequence
aaggccgtggagcttggggagaaag

SEQ ID NO: 163647 - DNA, 25 bp, Probe Sequence
aaggaggtcgtggtcttgtggagga

SEQ ID NO: 163648 - DNA, 25 bp, Probe Sequence
aagtagcttcgggtcttgatgcttg

SEQ ID NO: 163649 - DNA, 25 bp, Probe Sequence
aagtggttcaaaatccagatctata

SEQ ID NO: 163650 - DNA, 25 bp, Probe Sequence
aagtgacttgagcatctgaagattt

SEQ ID NO: 163651 - DNA, 25 bp, Probe Sequence
aagtgccttagcatgtgttgcagct

SEQ ID NO: 163652 - DNA, 25 bp, Probe Sequence
aagtgctctcatagttctatcctct

SEQ ID NO: 163653 - DNA, 25 bp, Probe Sequence
aagtttaagcaattcattctctctg

SEQ ID NO: 163654 - DNA, 25 bp, Probe Sequence
aagttaaatgagtacttgattcttc

SEQ ID NO: 163655 - DNA, 25 bp, Probe Sequence
aaggctaactgtgactggatttttc

SEQ ID NO: 163656 - DNA, 25 bp, Probe Sequence
aaggccaggtgaaactgccattctt

SEQ ID NO: 163657 - DNA, 25 bp, Probe Sequence
aagtcccttgacaaatgataattat

SEQ ID NO: 163658 - DNA, 25 bp, Probe Sequence
aagtccacatcttctcagtgtttta

SEQ ID NO: 163659 - DNA, 25 bp, Probe Sequence
aagtcccatgttactgctgtttgct

SEQ ID NO: 163660 - DNA, 25 bp, Probe Sequence
aagtctcatttctgtgttttgcctg

SEQ ID NO: 163661 - DNA, 25 bp, Probe Sequence
aagtcaaattggctgatctttccgt

SEQ ID NO: 163662 - DNA, 25 bp, Probe Sequence
aagtaaattccatacctccatcact

SEQ ID NO: 163663 - DNA, 25 bp, Probe Sequence
aagtaaattttcttctctcctgact

SEQ ID NO: 163664 - DNA, 25 bp, Probe Sequence
aagtcaacaataccattcttcaccc

SEQ ID NO: 163665 - DNA, 25 bp, Probe Sequence
aagttcctgatactttctgttctcc

SEQ ID NO: 163666 - DNA, 25 bp, Probe Sequence
aagttgatcttgtcacttcgtttcc

SEQ ID NO: 163667 - DNA, 25 bp, Probe Sequence
aagatttcttgacctatgccttttc

SEQ ID NO: 163668 - DNA, 25 bp, Probe Sequence
aagattgtgttatgttgcgttttca

SEQ ID NO: 163669 - DNA, 25 bp, Probe Sequence
aagtgttgtacatgtctctggtttc

SEQ ID NO: 163670 - DNA, 25 bp, Probe Sequence
aagtttttgcaacacattgtgtctt

SEQ ID NO: 163671 - DNA, 25 bp, Probe Sequence
aagtttctggcatggagtggtgtca

SEQ ID NO: 163672 - DNA, 25 bp, Probe Sequence
aagtctctctgggcaggtgtagtgg

SEQ ID NO: 163673 - DNA, 25 bp, Probe Sequence
aagtctgctcgaggagtctgtaagg

SEQ ID NO: 163674 - DNA, 25 bp, Probe Sequence
aagtctctggatgtggctgaaggca

SEQ ID NO: 163675 - DNA, 25 bp, Probe Sequence
aagttggtgatgacattgccaaggc

SEQ ID NO: 163676 - DNA, 25 bp, Probe Sequence
aagttgctccatacaatgactagtc

SEQ ID NO: 163677 - DNA, 25 bp, Probe Sequence
aagttctcatgcactatgcactcag

SEQ ID NO: 163678 - DNA, 25 bp, Probe Sequence
aagttcttcgcctgcatcaagagaa

SEQ ID NO: 163679 - DNA, 25 bp, Probe Sequence
aagttcttcgcctgcatcaagagaa

SEQ ID NO: 163680 - DNA, 25 bp, Probe Sequence
aagtcctcattggtggcaacaggaa

SEQ ID NO: 163681 - DNA, 25 bp, Probe Sequence
aagtccttgctgggaaatcgaagat

SEQ ID NO: 163682 - DNA, 25 bp, Probe Sequence
aagtacatatactgaaatctctaga

SEQ ID NO: 163683 - DNA, 25 bp, Probe Sequence
aagtcgcaaagctgggatcccaatc

SEQ ID NO: 163684 - DNA, 25 bp, Probe Sequence
aagtgctccaaggaggtggccaccg

SEQ ID NO: 163685 - DNA, 25 bp, Probe Sequence
aagtcctaatcaggaatgacccgga

SEQ ID NO: 163686 - DNA, 25 bp, Probe Sequence
aaggcttgaatctgtattacccaga

SEQ ID NO: 163687 - DNA, 25 bp, Probe Sequence
aagtgcttggaaaggagtccctcat

SEQ ID NO: 163688 - DNA, 25 bp, Probe Sequence
aagtactgtgacctgagagacaccc

SEQ ID NO: 163689 - DNA, 25 bp, Probe Sequence
aagtcctatcagccatggaaacacc

SEQ ID NO: 163690 - DNA, 25 bp, Probe Sequence
aagtgcctaacctaggtagcagcaa

SEQ ID NO: 163691 - DNA, 25 bp, Probe Sequence
aagtggtatcctgaggtgcggcacc

SEQ ID NO: 163692 - DNA, 25 bp, Probe Sequence
aagtgtttagtgtggatttcagcaa

SEQ ID NO: 163693 - DNA, 25 bp, Probe Sequence
aaggccggatgatctggatttcagt

SEQ ID NO: 163694 - DNA, 25 bp, Probe Sequence
aagttctagtattctggatcaccgt

SEQ ID NO: 163695 - DNA, 25 bp, Probe Sequence
aagtatccagtatatggtgtccagt

SEQ ID NO: 163696 - DNA, 25 bp, Probe Sequence
aagattacatatatagagtgcccat

SEQ ID NO: 163697 - DNA, 25 bp, Probe Sequence
aagttccacattacagtgggccatg

SEQ ID NO: 163698 - DNA, 25 bp, Probe Sequence
aagttgccaactagaggcccagagg

SEQ ID NO: 163699 - DNA, 25 bp, Probe Sequence
aagttagaccattagccccaagatg

SEQ ID NO: 163700 - DNA, 25 bp, Probe Sequence
aagttaggaataggcctcccagagg

SEQ ID NO: 163701 - DNA, 25 bp, Probe Sequence
aagttattatagtgcctcctaaggg

SEQ ID NO: 163702 - DNA, 25 bp, Probe Sequence
aagtttgtatgagtggaccctgcca

SEQ ID NO: 163703 - DNA, 25 bp, Probe Sequence
aagtgtagtgcatgggacccacgaa

SEQ ID NO: 163704 - DNA, 25 bp, Probe Sequence
aaggtggagaaggaactcaccccag

SEQ ID NO: 163705 - DNA, 25 bp, Probe Sequence
aagtgatcaaaggccagacgccccc

SEQ ID NO: 163706 - DNA, 25 bp, Probe Sequence
aagtgattcaatctcaagccccact

SEQ ID NO: 163707 - DNA, 25 bp, Probe Sequence
aagttatcatatccacaagccgaat

SEQ ID NO: 163708 - DNA, 25 bp, Probe Sequence
aagtagatcaaaacttccagagatc

SEQ ID NO: 163709 - DNA, 25 bp, Probe Sequence
aagtagcaacaaactcacagcagaa

SEQ ID NO: 163710 - DNA, 25 bp, Probe Sequence
aagtcaacctgctctacagcaaaga

SEQ ID NO: 163711 - DNA, 25 bp, Probe Sequence
aagtgtgacgtggacatccgcaaag

SEQ ID NO: 163712 - DNA, 25 bp, Probe Sequence
aaggtgacgtctctgggcaaggatt

SEQ ID NO: 163713 - DNA, 25 bp, Probe Sequence
aagtgtacgtataatcttaagtggt

SEQ ID NO: 163714 - DNA, 25 bp, Probe Sequence
aatgtatgtcggatttaaaattctt

SEQ ID NO: 163715 - DNA, 25 bp, Probe Sequence
aagtgcgtggtgcttatgaagtttc

SEQ ID NO: 163716 - DNA, 25 bp, Probe Sequence
aatgatactaggcttgtaggatgtc

SEQ ID NO: 163717 - DNA, 25 bp, Probe Sequence
aagattgatcagcttgtgtatggtt

SEQ ID NO: 163718 - DNA, 25 bp, Probe Sequence
aagattgggtctaggatatggtggg

SEQ ID NO: 163719 - DNA, 25 bp, Probe Sequence
aaggtggccatcaaggtgggcgggc

SEQ ID NO: 163720 - DNA, 25 bp, Probe Sequence
aattgtgggactgtgtggccaggcc

SEQ ID NO: 163721 - DNA, 25 bp, Probe Sequence
aagggaatgactgcttacctggact

SEQ ID NO: 163722 - DNA, 25 bp, Probe Sequence
aatggccgtagcgtttacgtggagg

SEQ ID NO: 163723 - DNA, 25 bp, Probe Sequence
aaggcaagttccgttatcggcgcgt

SEQ ID NO: 163724 - DNA, 25 bp, Probe Sequence
aaggccagctatgacgtgtcggact

SEQ ID NO: 163725 - DNA, 25 bp, Probe Sequence
aaggacagttcacaatctagtaata

SEQ ID NO: 163726 - DNA, 25 bp, Probe Sequence
aaggttatttccttcactgtcaata

SEQ ID NO: 163727 - DNA, 25 bp, Probe Sequence
aaggtttccattggacctgccaatc

SEQ ID NO: 163728 - DNA, 25 bp, Probe Sequence
aagggacccatatagcactgtcacc

SEQ ID NO: 163729 - DNA, 25 bp, Probe Sequence
aaggggccggacgaatgtgtcacct

SEQ ID NO: 163730 - DNA, 25 bp, Probe Sequence
taaggggtcggctaagtgggacatt

SEQ ID NO: 163731 - DNA, 25 bp, Probe Sequence
aagtggagttggtgaatcggttgtt

SEQ ID NO: 163732 - DNA, 25 bp, Probe Sequence
aaggtggttgtgtcaaaccgattgg

SEQ ID NO: 163733 - DNA, 25 bp, Probe Sequence
aaggaggttcagtggacccttggag

SEQ ID NO: 163734 - DNA, 25 bp, Probe Sequence
aagggagattcgggaggccctctgt

SEQ ID NO: 163735 - DNA, 25 bp, Probe Sequence
aaggtgggaggaggcagacgccctg

SEQ ID NO: 163736 - DNA, 25 bp, Probe Sequence
aaggtgggaggaggcagacgccctg

SEQ ID NO: 163737 - DNA, 25 bp, Probe Sequence
aaggggctgaggacgagacccccat

SEQ ID NO: 163738 - DNA, 25 bp, Probe Sequence
aagggagcgaggtggttgttcctgg

SEQ ID NO: 163739 - DNA, 25 bp, Probe Sequence
aaggaccacgggtgttgtaagctgg

SEQ ID NO: 163740 - DNA, 25 bp, Probe Sequence
aagggtcgaaggtggatttagcagt

SEQ ID NO: 163741 - DNA, 25 bp, Probe Sequence
ctagggatcgaacaagctgggtatg

SEQ ID NO: 163742 - DNA, 25 bp, Probe Sequence
aagggactgaactagcctctggtag

SEQ ID NO: 163743 - DNA, 25 bp, Probe Sequence
aagtacaagaaaacgctgctgggag

SEQ ID NO: 163744 - DNA, 25 bp, Probe Sequence
aagttcaagaagacaccgcagagga

SEQ ID NO: 163745 - DNA, 25 bp, Probe Sequence
aagttcaggaatacattctgcatgt

SEQ ID NO: 163746 - DNA, 25 bp, Probe Sequence
aagtctggtacaactgtccttagac

SEQ ID NO: 163747 - DNA, 25 bp, Probe Sequence
aagttgcgttacctgtcactattgt

SEQ ID NO: 163748 - DNA, 25 bp, Probe Sequence
aagttgatgcctacggatcatctat

SEQ ID NO: 163749 - DNA, 25 bp, Probe Sequence
aagtagagcccacagatctgctgca

SEQ ID NO: 163750 - DNA, 25 bp, Probe Sequence
aagtctacaaatgagctcttgcaac

SEQ ID NO: 163751 - DNA, 25 bp, Probe Sequence
aagttactgacatcagcttccacca

SEQ ID NO: 163752 - DNA, 25 bp, Probe Sequence
aagtaacatatttcagcattggctc

SEQ ID NO: 163753 - DNA, 25 bp, Probe Sequence
aagtaattatcccctgagagtcatc

SEQ ID NO: 163754 - DNA, 25 bp, Probe Sequence
aagttatggaccgctagcatctgtc

SEQ ID NO: 163755 - DNA, 25 bp, Probe Sequence
aagttgatgtggggccagccatctt

SEQ ID NO: 163756 - DNA, 25 bp, Probe Sequence
aagtagagatgatgccacacctgtt

SEQ ID NO: 163757 - DNA, 25 bp, Probe Sequence
aagtcagcaggatcaggacacgagg

SEQ ID NO: 163758 - DNA, 25 bp, Probe Sequence
aagttgagtgagttgcagctacgag

SEQ ID NO: 163759 - DNA, 25 bp, Probe Sequence
aagtatgtgtggctgcaggggaggc

SEQ ID NO: 163760 - DNA, 25 bp, Probe Sequence
aagtggcagacgctcggggagagcc

SEQ ID NO: 163761 - DNA, 25 bp, Probe Sequence
aaggggaccgtctggcacaaagact

SEQ ID NO: 163762 - DNA, 25 bp, Probe Sequence
aagggcggccgcaggaagaagaact

SEQ ID NO: 163763 - DNA, 25 bp, Probe Sequence
aagggcctgcccagacaagattttt

SEQ ID NO: 163764 - DNA, 25 bp, Probe Sequence
aaggtgtctaccatgattatttttt

SEQ ID NO: 163765 - DNA, 25 bp, Probe Sequence
aagtttctacagatatagtctttta

SEQ ID NO: 163766 - DNA, 25 bp, Probe Sequence
aagtttgttgctgtcaagatttttt

SEQ ID NO: 163767 - DNA, 25 bp, Probe Sequence
aagtatgtgctggtaaaagtttaat

SEQ ID NO: 163768 - DNA, 25 bp, Probe Sequence
aagttatggttccagaagcttccaa

SEQ ID NO: 163769 - DNA, 25 bp, Probe Sequence
aagttccaggtccatgattgctttc

SEQ ID NO: 163770 - DNA, 25 bp, Probe Sequence
aagttcagcgttgtatgtctctctc

SEQ ID NO: 163771 - DNA, 25 bp, Probe Sequence
aagttcgttgtcatagtgctcacct

SEQ ID NO: 163772 - DNA, 25 bp, Probe Sequence
aagtccgattgtagtggtgctcagt

SEQ ID NO: 163773 - DNA, 25 bp, Probe Sequence
aagtcagtgatttgctggtgctcta

SEQ ID NO: 163774 - DNA, 25 bp, Probe Sequence
aagtcagagtgtctgctggccttgg

SEQ ID NO: 163775 - DNA, 25 bp, Probe Sequence
aagtaaacatgcggctgggtgtggt

SEQ ID NO: 163776 - DNA, 25 bp, Probe Sequence
aagttctagagggcatggaggtggt

SEQ ID NO: 163777 - DNA, 25 bp, Probe Sequence
aagtttgagagcgtgtgtagagtgt

SEQ ID NO: 163778 - DNA, 25 bp, Probe Sequence
aagtaggagcagtggaaatggttcc

SEQ ID NO: 163779 - DNA, 25 bp, Probe Sequence
aagtggctgaagaggcaggatggct

SEQ ID NO: 163780 - DNA, 25 bp, Probe Sequence
aagggttcaggccctggagagctga

SEQ ID NO: 163781 - DNA, 25 bp, Probe Sequence
aaggttactgggcttgctactattt

SEQ ID NO: 163782 - DNA, 25 bp, Probe Sequence
aattttacctagctaccactaggtg

SEQ ID NO: 163783 - DNA, 25 bp, Probe Sequence
caattttacctagctaccactaggt

SEQ ID NO: 163784 - DNA, 25 bp, Probe Sequence
caagtttacctagaccaaaagcctg

SEQ ID NO: 163785 - DNA, 25 bp, Probe Sequence
aagtttacctgtgcaacaaatctgc

SEQ ID NO: 163786 - DNA, 25 bp, Probe Sequence
aagtgtatacacataaagcaggtct

SEQ ID NO: 163787 - DNA, 25 bp, Probe Sequence
aaggcctacttcacaaagcgccttc

SEQ ID NO: 163788 - DNA, 25 bp, Probe Sequence
aaggcctacttcacaaagcgccttc

SEQ ID NO: 163789 - DNA, 25 bp, Probe Sequence
aagtggaacttcaccaagttcctca

SEQ ID NO: 163790 - DNA, 25 bp, Probe Sequence
aaggaaacgatagcctagctttcta

SEQ ID NO: 163791 - DNA, 25 bp, Probe Sequence
aaggaggacgaagccctcctcagct

SEQ ID NO: 163792 - DNA, 25 bp, Probe Sequence
aaggaggacgaagccctcctcagct

SEQ ID NO: 163793 - DNA, 25 bp, Probe Sequence
aagggtaaaaatgcggactgatgtt

SEQ ID NO: 163794 - DNA, 25 bp, Probe Sequence
aattggtaaacatgtcccgctgtgt

SEQ ID NO: 163795 - DNA, 25 bp, Probe Sequence
aagttttatctctgtcctagttggt

SEQ ID NO: 163796 - DNA, 25 bp, Probe Sequence
aagttttgattcttggcgaagtatg

SEQ ID NO: 163797 - DNA, 25 bp, Probe Sequence
aagtctttgtatctctcgactgatt

SEQ ID NO: 163798 - DNA, 25 bp, Probe Sequence
aatgttggtggtctcctttgtgtaa

SEQ ID NO: 163799 - DNA, 25 bp, Probe Sequence
aagggcttggctatcacatttgtgt

SEQ ID NO: 163800 - DNA, 25 bp, Probe Sequence
caaggccaacctgtcccaagtggcc

SEQ ID NO: 163801 - DNA, 25 bp, Probe Sequence
tgaaggtcaaccgcctttttgaggc

SEQ ID NO: 163802 - DNA, 25 bp, Probe Sequence
cacggtagcacttgaccttttcgac

SEQ ID NO: 163803 - DNA, 25 bp, Probe Sequence
aagtggacctatagcctttgcccac

SEQ ID NO: 163804 - DNA, 25 bp, Probe Sequence
aagtagaagccatcacctggcccat

SEQ ID NO: 163805 - DNA, 25 bp, Probe Sequence
aagtatcagattgaccctgacgcct

SEQ ID NO: 163806 - DNA, 25 bp, Probe Sequence
aagtatcagagtaagcctctcccct

SEQ ID NO: 163807 - DNA, 25 bp, Probe Sequence
aagtacagaacaggtctgtccctcc

SEQ ID NO: 163808 - DNA, 25 bp, Probe Sequence
aagtacaaacattatttccaccata

SEQ ID NO: 163809 - DNA, 25 bp, Probe Sequence
aagttaaaccaaatctgccaccatg

SEQ ID NO: 163810 - DNA, 25 bp, Probe Sequence
aagtttaaatgactgtgctgcccct

SEQ ID NO: 163811 - DNA, 25 bp, Probe Sequence
aagtttgacaccttgatacccactt

SEQ ID NO: 163812 - DNA, 25 bp, Probe Sequence
aagtctctgaagacctgatgaccca

SEQ ID NO: 163813 - DNA, 25 bp, Probe Sequence
aagtctctgtacagctgatgaacac

SEQ ID NO: 163814 - DNA, 25 bp, Probe Sequence
aagtctgtgtacatgatgcaaaccg

SEQ ID NO: 163815 - DNA, 25 bp, Probe Sequence
aagtagtgtatcctgcacctacttt

SEQ ID NO: 163816 - DNA, 25 bp, Probe Sequence
aagtgggaatgcaaaagtactttga

SEQ ID NO: 163817 - DNA, 25 bp, Probe Sequence
aagtcgtgagtcaaactgctgcctt

SEQ ID NO: 163818 - DNA, 25 bp, Probe Sequence
aagtctgctcagtgaaatgctgtag

SEQ ID NO: 163819 - DNA, 25 bp, Probe Sequence
aagttatcagatggacagagcttct

SEQ ID NO: 163820 - DNA, 25 bp, Probe Sequence
aagtgccatcagacaagatcagttg

SEQ ID NO: 163821 - DNA, 25 bp, Probe Sequence
aagtcacatccacaactaatgaggg

SEQ ID NO: 163822 - DNA, 25 bp, Probe Sequence
aagtacccagcaagatctcagctaa

SEQ ID NO: 163823 - DNA, 25 bp, Probe Sequence
aagtcaaagcgcaagagccagtcaa

SEQ ID NO: 163824 - DNA, 25 bp, Probe Sequence
aagtccagatgccaagatcctgcct

SEQ ID NO: 163825 - DNA, 25 bp, Probe Sequence
aagtcaaatgccaaacactagctct

SEQ ID NO: 163826 - DNA, 25 bp, Probe Sequence
aagtaacatctaaagcattattgct

SEQ ID NO: 163827 - DNA, 25 bp, Probe Sequence
aagtaatcatctgcaaccatgtgtg

SEQ ID NO: 163828 - DNA, 25 bp, Probe Sequence
aagtactgctatgaattgatgtggt

SEQ ID NO: 163829 - DNA, 25 bp, Probe Sequence
aagtcaccattctgcatttagctgt

SEQ ID NO: 163830 - DNA, 25 bp, Probe Sequence
aagtcagtttctggcaacgatgagt

SEQ ID NO: 163831 - DNA, 25 bp, Probe Sequence
aagtaattttgtgtctgctggtata

SEQ ID NO: 163832 - DNA, 25 bp, Probe Sequence
aagtaattgtttctctcactgttta

SEQ ID NO: 163833 - DNA, 25 bp, Probe Sequence
aagtcaagggttctatattgtgagt

SEQ ID NO: 163834 - DNA, 25 bp, Probe Sequence
aagtcaaggggaagtctgctcgggt

SEQ ID NO: 163835 - DNA, 25 bp, Probe Sequence
aagtgcaaggggtgcttcaaggcca

SEQ ID NO: 163836 - DNA, 25 bp, Probe Sequence
aaggacgatgggttcctcaacggct

SEQ ID NO: 163837 - DNA, 25 bp, Probe Sequence
aagggctgaaagatcctgaaattct

SEQ ID NO: 163838 - DNA, 25 bp, Probe Sequence
aagtcgtgatcataatagctcaaat

SEQ ID NO: 163839 - DNA, 25 bp, Probe Sequence
aagtcagtgttgtacatagcataaa

SEQ ID NO: 163840 - DNA, 25 bp, Probe Sequence
aagtcattgctgtgcacattgataa

SEQ ID NO: 163841 - DNA, 25 bp, Probe Sequence
aagtcattgcttgtgcactatccac

SEQ ID NO: 163842 - DNA, 25 bp, Probe Sequence
aagtcttttctacctatgagcctgt

SEQ ID NO: 163843 - DNA, 25 bp, Probe Sequence
aagtcggtatcttggttgtgctctg

SEQ ID NO: 163844 - DNA, 25 bp, Probe Sequence
aagtcagtttatttgtttcattgtg

SEQ ID NO: 163845 - DNA, 25 bp, Probe Sequence
aagtcgtctatttctttctagttgc

SEQ ID NO: 163846 - DNA, 25 bp, Probe Sequence
aagtgcaaattaactggtcaagtgt

SEQ ID NO: 163847 - DNA, 25 bp, Probe Sequence
aagtcaaatcccatagtgaactagt

SEQ ID NO: 163848 - DNA, 25 bp, Probe Sequence
aagtcaatattccatgtttacagta

SEQ ID NO: 163849 - DNA, 25 bp, Probe Sequence
aatcccttccggtatgttcaggaga

SEQ ID NO: 163850 - DNA, 25 bp, Probe Sequence
aagtgctttccggaagttagatgaa

SEQ ID NO: 163851 - DNA, 25 bp, Probe Sequence
aaggtctacaggtgattctaataca

SEQ ID NO: 163852 - DNA, 25 bp, Probe Sequence
aagtgtggacagacctatttcaaag

SEQ ID NO: 163853 - DNA, 25 bp, Probe Sequence
aatggtaggtaacaattaaatggca

SEQ ID NO: 163854 - DNA, 25 bp, Probe Sequence
aagggcggccaatgatttaatatgt

SEQ ID NO: 163855 - DNA, 25 bp, Probe Sequence
aagtgtggtacagggagttgagact

SEQ ID NO: 163856 - DNA, 25 bp, Probe Sequence
aagtgtcaatatcctggtgttaacc

SEQ ID NO: 163857 - DNA, 25 bp, Probe Sequence
aagtgctacctttgagtgtaaacta

SEQ ID NO: 163858 - DNA, 25 bp, Probe Sequence
aaggataccctggagtttacacaga

SEQ ID NO: 163859 - DNA, 25 bp, Probe Sequence
aatggaaccctggtggtccaccatt

SEQ ID NO: 163860 - DNA, 25 bp, Probe Sequence
aaggaagccctcattaaccatttca

SEQ ID NO: 163861 - DNA, 25 bp, Probe Sequence
aaggggcccacaatgaaacctcatc

SEQ ID NO: 163862 - DNA, 25 bp, Probe Sequence
aagggagccaaacaagccgctccta

SEQ ID NO: 163863 - DNA, 25 bp, Probe Sequence
gaagggcttagcagtaagccccctt

SEQ ID NO: 163864 - DNA, 25 bp, Probe Sequence
aaggctgtttgttatatggaccacc

SEQ ID NO: 163865 - DNA, 25 bp, Probe Sequence
aagtctttgtgctttaatgcactca

SEQ ID NO: 163866 - DNA, 25 bp, Probe Sequence
aagtatcttgattgttagtagtcta

SEQ ID NO: 163867 - DNA, 25 bp, Probe Sequence
aagtcagggatatttaggaggctca

SEQ ID NO: 163868 - DNA, 25 bp, Probe Sequence
aagtcgtgtgcattttctgctgggc

SEQ ID NO: 163869 - DNA, 25 bp, Probe Sequence
aagtctatacagtttgcattgaggc

SEQ ID NO: 163870 - DNA, 25 bp, Probe Sequence
aagtctctgacaaatgtgctgtgtt

SEQ ID NO: 163871 - DNA, 25 bp, Probe Sequence
aagtttgtctatttcatgatatttg

SEQ ID NO: 163872 - DNA, 25 bp, Probe Sequence
aagtgtcttctatctcattgtattt

SEQ ID NO: 163873 - DNA, 25 bp, Probe Sequence
aagtgtattgccaactttgttaagt

SEQ ID NO: 163874 - DNA, 25 bp, Probe Sequence
aagtgtattctgtacataatttaca

SEQ ID NO: 163875 - DNA, 25 bp, Probe Sequence
aagtgtacatatcattaagcattgg

SEQ ID NO: 163876 - DNA, 25 bp, Probe Sequence
aagtatatctatccaataagttgtg

SEQ ID NO: 163877 - DNA, 25 bp, Probe Sequence
aagtaattatagaagcaagaaggcg

SEQ ID NO: 163878 - DNA, 25 bp, Probe Sequence
aagtttgctacgaacaaaacgcagc

SEQ ID NO: 163879 - DNA, 25 bp, Probe Sequence
aagtttgtacaaaaaagcaggctgg

SEQ ID NO: 163880 - DNA, 25 bp, Probe Sequence
aaggttctaataataaagccaggag

SEQ ID NO: 163881 - DNA, 25 bp, Probe Sequence
aagtgtgtaaaccaaatactcgaga

SEQ ID NO: 163882 - DNA, 25 bp, Probe Sequence
aaggggagaattcacatcctgggtg

SEQ ID NO: 163883 - DNA, 25 bp, Probe Sequence
aaggcgaaactgaggctcctggagg

SEQ ID NO: 163884 - DNA, 25 bp, Probe Sequence
aagggaaagtgcaggtgtccgtcct

SEQ ID NO: 163885 - DNA, 25 bp, Probe Sequence
aagggaatcgtggggctggacagac

SEQ ID NO: 163886 - DNA, 25 bp, Probe Sequence
aagggaatctggtgtcatgtgagac

SEQ ID NO: 163887 - DNA, 25 bp, Probe Sequence
aagtggaatcatcatagtttaagga

SEQ ID NO: 163888 - DNA, 25 bp, Probe Sequence
aagtgcacagaaccatttttgcaag

SEQ ID NO: 163889 - DNA, 25 bp, Probe Sequence
aagtcacaacaggcactggttcaga

SEQ ID NO: 163890 - DNA, 25 bp, Probe Sequence
aagtcatgaaatgccttgtttggga

SEQ ID NO: 163891 - DNA, 25 bp, Probe Sequence
aagtcaacctagattggctccgtga

SEQ ID NO: 163892 - DNA, 25 bp, Probe Sequence
aagtcacacttaatttcccttgtat

SEQ ID NO: 163893 - DNA, 25 bp, Probe Sequence
aagtgacacgtaatagtaacctaat

SEQ ID NO: 163894 - DNA, 25 bp, Probe Sequence
aagtggacagaaattctaaccaaga

SEQ ID NO: 163895 - DNA, 25 bp, Probe Sequence
aagtgctacagaaaccataagataa

SEQ ID NO: 163896 - DNA, 25 bp, Probe Sequence
aagtctgccagaaacttttgacagt

SEQ ID NO: 163897 - DNA, 25 bp, Probe Sequence
aagtcagctttcatctttgtggatg

SEQ ID NO: 163898 - DNA, 25 bp, Probe Sequence
aagtacattctcattgttgtccagc

SEQ ID NO: 163899 - DNA, 25 bp, Probe Sequence
aagtacagattcctttctgtgccca

SEQ ID NO: 163900 - DNA, 25 bp, Probe Sequence
aagtaacttcttactgctctcacaa

SEQ ID NO: 163901 - DNA, 25 bp, Probe Sequence
aagtcacagtcaatactctgcctca

SEQ ID NO: 163902 - DNA, 25 bp, Probe Sequence
aagtacactctgtcactttgtcact

SEQ ID NO: 163903 - DNA, 25 bp, Probe Sequence
aagtactttccaatctcagtcactc

SEQ ID NO: 163904 - DNA, 25 bp, Probe Sequence
aagtactttccaatctcagtcactc

SEQ ID NO: 163905 - DNA, 25 bp, Probe Sequence
aagtagttctagtacacatgtccta

SEQ ID NO: 163906 - DNA, 25 bp, Probe Sequence
aagtttgtcagtgaccatcccgagc

SEQ ID NO: 163907 - DNA, 25 bp, Probe Sequence
aagtttgtcgctgatggcatcttca

SEQ ID NO: 163908 - DNA, 25 bp, Probe Sequence
aagtctttcactaaggttctcttgc

SEQ ID NO: 163909 - DNA, 25 bp, Probe Sequence
aagtcacttcctacaaaactattgc

SEQ ID NO: 163910 - DNA, 25 bp, Probe Sequence
aagtctttcctaaatactccatctg

SEQ ID NO: 163911 - DNA, 25 bp, Probe Sequence
aaggctttacttctatttcacgact

SEQ ID NO: 163912 - DNA, 25 bp, Probe Sequence
gaaggttatacctctcattacccac

SEQ ID NO: 163913 - DNA, 25 bp, Probe Sequence
aagggttcggcaatcactgtcaccc

SEQ ID NO: 163914 - DNA, 25 bp, Probe Sequence
aagtgttgtgctggttgacgtagac

SEQ ID NO: 163915 - DNA, 25 bp, Probe Sequence
aagtgtttgcagatttcagtagtca

SEQ ID NO: 163916 - DNA, 25 bp, Probe Sequence
aagtggttgatgtttcttatagcaa

SEQ ID NO: 163917 - DNA, 25 bp, Probe Sequence
aagtcaattgccttcctatatatca

SEQ ID NO: 163918 - DNA, 25 bp, Probe Sequence
aagtcaactgcacgtgttttatatt

SEQ ID NO: 163919 - DNA, 25 bp, Probe Sequence
aagtcaatctgcatgtgcttctttg

SEQ ID NO: 163920 - DNA, 25 bp, Probe Sequence
aagtaaggctatggctctgattcta

SEQ ID NO: 163921 - DNA, 25 bp, Probe Sequence
aagtcaaggctctacttatccgaac

SEQ ID NO: 163922 - DNA, 25 bp, Probe Sequence
aagtcacagatatatttctccaaga

SEQ ID NO: 163923 - DNA, 25 bp, Probe Sequence
aaggaagaatatgaaccccagaccg

SEQ ID NO: 163924 - DNA, 25 bp, Probe Sequence
aaggaacagagtgacctgaccaccc

SEQ ID NO: 163925 - DNA, 25 bp, Probe Sequence
aaggacataagagacctggtcaagt

SEQ ID NO: 163926 - DNA, 25 bp, Probe Sequence
caagggaaaggcaagactgggacgt

SEQ ID NO: 163927 - DNA, 25 bp, Probe Sequence
aagtgtgaaacgtagatgtggtagg

SEQ ID NO: 163928 - DNA, 25 bp, Probe Sequence
aagtgtgaaagggcttgggtgcagt

SEQ ID NO: 163929 - DNA, 25 bp, Probe Sequence
aagtctacagtgagtctgagatggc

SEQ ID NO: 163930 - DNA, 25 bp, Probe Sequence
aagtctaagagtccatgccagaccc

SEQ ID NO: 163931 - DNA, 25 bp, Probe Sequence
aagtccaaagtccaaagtatcatct

SEQ ID NO: 163932 - DNA, 25 bp, Probe Sequence
aagtccagaaacccaatctgccatc

SEQ ID NO: 163933 - DNA, 25 bp, Probe Sequence
aagtgccagagaacaccacatacct

SEQ ID NO: 163934 - DNA, 25 bp, Probe Sequence
aaggtgcaccaaaacactgacattt

SEQ ID NO: 163935 - DNA, 25 bp, Probe Sequence
aagtctcacctttacaggatcattt

SEQ ID NO: 163936 - DNA, 25 bp, Probe Sequence
aagtacaccattggaaagacacgtt

SEQ ID NO: 163937 - DNA, 25 bp, Probe Sequence
aaggacatgacactggaaggtgacg

SEQ ID NO: 163938 - DNA, 25 bp, Probe Sequence
aaggttgagcccagagtggccgagg

SEQ ID NO: 163939 - DNA, 25 bp, Probe Sequence
aagggtgcagacgtctggttcaaag

SEQ ID NO: 163940 - DNA, 25 bp, Probe Sequence
aagggtaaagtctgttcgggccatg

SEQ ID NO: 163941 - DNA, 25 bp, Probe Sequence
aaggtgtaaattctttatgattaat

SEQ ID NO: 163942 - DNA, 25 bp, Probe Sequence
aaggtactctttctctttgagtttg

SEQ ID NO: 163943 - DNA, 25 bp, Probe Sequence
aaggtggcttttgctttatagtttg

SEQ ID NO: 163944 - DNA, 25 bp, Probe Sequence
aaggtgacttttgtatctagatttc

SEQ ID NO: 163945 - DNA, 25 bp, Probe Sequence
aatgggatctgaattaaagctaaag

SEQ ID NO: 163946 - DNA, 25 bp, Probe Sequence
aagggataaacaaagcctaaatgct

SEQ ID NO: 163947 - DNA, 25 bp, Probe Sequence
aaggactaaagtgggctctaagatc

SEQ ID NO: 163948 - DNA, 25 bp, Probe Sequence
aaggaacggatgggcctctagtgac

SEQ ID NO: 163949 - DNA, 25 bp, Probe Sequence
caaggttctgggttccctagaagct

SEQ ID NO: 163950 - DNA, 25 bp, Probe Sequence
aagggtccgacagtaccagatgaag

SEQ ID NO: 163951 - DNA, 25 bp, Probe Sequence
aagggatccgaaaatgtggtgtaga

SEQ ID NO: 163952 - DNA, 25 bp, Probe Sequence
aaggggccgagcagggggatgaagg

SEQ ID NO: 163953 - DNA, 25 bp, Probe Sequence
aagtgggcacgagagggaagaagca

SEQ ID NO: 163954 - DNA, 25 bp, Probe Sequence
aagtggaatggagagggacagtgta

SEQ ID NO: 163955 - DNA, 25 bp, Probe Sequence
aagtgagagaagatgacctaagtgt

SEQ ID NO: 163956 - DNA, 25 bp, Probe Sequence
aagtagaaaatccaagctttgcttg

SEQ ID NO: 163957 - DNA, 25 bp, Probe Sequence
aagtagaaacatgtgccttttatta

SEQ ID NO: 163958 - DNA, 25 bp, Probe Sequence
aagtgcaaaacatgccctttactgt

SEQ ID NO: 163959 - DNA, 25 bp, Probe Sequence
aaggaacagactggccgggttctct

SEQ ID NO: 163960 - DNA, 25 bp, Probe Sequence
aagggaggatctggaatatggttct

SEQ ID NO: 163961 - DNA, 25 bp, Probe Sequence
aaggtgcgctacttgaaggtgtttg

SEQ ID NO: 163962 - DNA, 25 bp, Probe Sequence
aagggcagtaactcgtggtgttgcc

SEQ ID NO: 163963 - DNA, 25 bp, Probe Sequence
aaggaagttttgtgggcttctcctg

SEQ ID NO: 163964 - DNA, 25 bp, Probe Sequence
caaaggaactttctggtcccttcag

SEQ ID NO: 163965 - DNA, 25 bp, Probe Sequence
caaaggaactttctggtcccttcag

SEQ ID NO: 163966 - DNA, 25 bp, Probe Sequence
caaaggaactttctggtcccttcag

SEQ ID NO: 163967 - DNA, 25 bp, Probe Sequence
aagggaagccggcatgtacccttca

SEQ ID NO: 163968 - DNA, 25 bp, Probe Sequence
aagggaactcctggattcacacact

SEQ ID NO: 163969 - DNA, 25 bp, Probe Sequence
aagggaaccagggcatagcactaga

SEQ ID NO: 163970 - DNA, 25 bp, Probe Sequence
aagggaatgcactggcagggatcag

SEQ ID NO: 163971 - DNA, 25 bp, Probe Sequence
aaggagatgatgtggcccggatcag

SEQ ID NO: 163972 - DNA, 25 bp, Probe Sequence
aagggaagtggagcacccctgaggc

SEQ ID NO: 163973 - DNA, 25 bp, Probe Sequence
aagggaaggtgttgcatccccaggg

SEQ ID NO: 163974 - DNA, 25 bp, Probe Sequence
aaggaacacggttctgagcccaaga

SEQ ID NO: 163975 - DNA, 25 bp, Probe Sequence
aagtgaacaccccatgtgacaaaag

SEQ ID NO: 163976 - DNA, 25 bp, Probe Sequence
aagtagaccccactgagaaacaaga

SEQ ID NO: 163977 - DNA, 25 bp, Probe Sequence
aagtaacctggaatgtgaacaccaa

SEQ ID NO: 163978 - DNA, 25 bp, Probe Sequence
aagtacattctggggaaacaacatt

SEQ ID NO: 163979 - DNA, 25 bp, Probe Sequence
aagtaagactggctgataacatgac

SEQ ID NO: 163980 - DNA, 25 bp, Probe Sequence
aagtgaccctgacatgtgacatcta

SEQ ID NO: 163981 - DNA, 25 bp, Probe Sequence
aagtctgcagttccttgctaatctg

SEQ ID NO: 163982 - DNA, 25 bp, Probe Sequence
aagtcatgcatgaggtcagctttct

SEQ ID NO: 163983 - DNA, 25 bp, Probe Sequence
aagtctcagtggcttcatctgtcaa

SEQ ID NO: 163984 - DNA, 25 bp, Probe Sequence
aagtccgtgggcatcatgttgaccg

SEQ ID NO: 163985 - DNA, 25 bp, Probe Sequence
aagtcaggtggtggtcatgtttccc

SEQ ID NO: 163986 - DNA, 25 bp, Probe Sequence
aagtcaagggttcactgcatttctc

SEQ ID NO: 163987 - DNA, 25 bp, Probe Sequence
aagtcaagggttcactgcatttctc

SEQ ID NO: 163988 - DNA, 25 bp, Probe Sequence
aagtcactggtctgtttgcatttga

SEQ ID NO: 163989 - DNA, 25 bp, Probe Sequence
aagtcctggctcttattggttcata

SEQ ID NO: 163990 - DNA, 25 bp, Probe Sequence
aagtgggacttttctgtgttacata

SEQ ID NO: 163991 - DNA, 25 bp, Probe Sequence
aagtgggactagacacggtgtccat

SEQ ID NO: 163992 - DNA, 25 bp, Probe Sequence
aaggtggagtatagaagaatatcct

SEQ ID NO: 163993 - DNA, 25 bp, Probe Sequence
aaggtggtgtaaattaatatggata

SEQ ID NO: 163994 - DNA, 25 bp, Probe Sequence
aagtgggcttcagatttaaggctga

SEQ ID NO: 163995 - DNA, 25 bp, Probe Sequence
aagtgttgcttgtaacaatccaggg

SEQ ID NO: 163996 - DNA, 25 bp, Probe Sequence
aagtactcattgtctatgcacacca

SEQ ID NO: 163997 - DNA, 25 bp, Probe Sequence
aagtaccaggcagtgacagccaccc

SEQ ID NO: 163998 - DNA, 25 bp, Probe Sequence
aagtgctatgggccagaagcccctc

SEQ ID NO: 163999 - DNA, 25 bp, Probe Sequence
aagtctattatgggcaaccaatctt

SEQ ID NO: 164000 - DNA, 25 bp, Probe Sequence
aagtaattctgatgaaccttcatga

SEQ ID NO: 164001 - DNA, 25 bp, Probe Sequence
aagtaaagcttaaacacttggcata

SEQ ID NO: 164002 - DNA, 25 bp, Probe Sequence
aagtcaaactttgcacatatttata

SEQ ID NO: 164003 - DNA, 25 bp, Probe Sequence
aagtgaaactacggatataaatatt

SEQ ID NO: 164004 - DNA, 25 bp, Probe Sequence
gaagaaggtaacgctacaaatattt

SEQ ID NO: 164005 - DNA, 25 bp, Probe Sequence
aagtcatggaaacactggacaatga

SEQ ID NO: 164006 - DNA, 25 bp, Probe Sequence
aagtcagggaatcaagccatgctta

SEQ ID NO: 164007 - DNA, 25 bp, Probe Sequence
aagtgggtaatggtgcccatgatga

SEQ ID NO: 164008 - DNA, 25 bp, Probe Sequence
aagggtgttatgggcccagctttgg

SEQ ID NO: 164009 - DNA, 25 bp, Probe Sequence
aatctgatgttcagaggccccgttt

SEQ ID NO: 164010 - DNA, 25 bp, Probe Sequence
aatcaggtcaaggagagcccctgga

SEQ ID NO: 164011 - DNA, 25 bp, Probe Sequence
aagtggtaactatcaccctggataa

SEQ ID NO: 164012 - DNA, 25 bp, Probe Sequence
aaggttaacagatacagctcggagt

SEQ ID NO: 164013 - DNA, 25 bp, Probe Sequence
aatgcagttaaggatcctgatgcca

SEQ ID NO: 164014 - DNA, 25 bp, Probe Sequence
aaggtcggggtgtctatgcaaagga

SEQ ID NO: 164015 - DNA, 25 bp, Probe Sequence
caaggtcgtgggaaataaaaggcag

SEQ ID NO: 164016 - DNA, 25 bp, Probe Sequence
aagtgggcggtgtccattaaagagc

SEQ ID NO: 164017 - DNA, 25 bp, Probe Sequence
aagtggggcgggcttcatagagact

SEQ ID NO: 164018 - DNA, 25 bp, Probe Sequence
aagtgtggggagctggttgtgggtg

SEQ ID NO: 164019 - DNA, 25 bp, Probe Sequence
aaggtgggccagatcgtgtttgagt

SEQ ID NO: 164020 - DNA, 25 bp, Probe Sequence
aaggtggcttgagttcaggagttca

SEQ ID NO: 164021 - DNA, 25 bp, Probe Sequence
aaggtgctgcttttacagggaagct

SEQ ID NO: 164022 - DNA, 25 bp, Probe Sequence
aagtctctgctttgagtcaaggggc

SEQ ID NO: 164023 - DNA, 25 bp, Probe Sequence
aagtctcttattttcaagctgttct

SEQ ID NO: 164024 - DNA, 25 bp, Probe Sequence
aagtctctgccatttgtaatttttg

SEQ ID NO: 164025 - DNA, 25 bp, Probe Sequence
aagtgtaccactttgattttcttgg

SEQ ID NO: 164026 - DNA, 25 bp, Probe Sequence
aagtctgacgtgtggagtttcggaa

SEQ ID NO: 164027 - DNA, 25 bp, Probe Sequence
aatgaagaactgtggcctaattgga

SEQ ID NO: 164028 - DNA, 25 bp, Probe Sequence
aatccaaaatgtttgcctaaatgag

SEQ ID NO: 164029 - DNA, 25 bp, Probe Sequence
aataggacacgttgctactggaaat

SEQ ID NO: 164030 - DNA, 25 bp, Probe Sequence
aagggtcctgcattttctggaatgt

SEQ ID NO: 164031 - DNA, 25 bp, Probe Sequence
aaggtactggtcttcttggacatta

SEQ ID NO: 164032 - DNA, 25 bp, Probe Sequence
aaggtactggtcttcttggacatta

SEQ ID NO: 164033 - DNA, 25 bp, Probe Sequence
aagtgtaaggtgtacttggtattat

SEQ ID NO: 164034 - DNA, 25 bp, Probe Sequence
aagggcaaggcttatctttgtgtca

SEQ ID NO: 164035 - DNA, 25 bp, Probe Sequence
aagggcaaggcttatctttgtgtca

SEQ ID NO: 164036 - DNA, 25 bp, Probe Sequence
aagggaacggttatcatcattgcaa

SEQ ID NO: 164037 - DNA, 25 bp, Probe Sequence
aatgggcacggggttttcagccaca

SEQ ID NO: 164038 - DNA, 25 bp, Probe Sequence
aagggcatcggggaatttgctccaa

SEQ ID NO: 164039 - DNA, 25 bp, Probe Sequence
aagtgctctcggcggaagtgatcgc

SEQ ID NO: 164040 - DNA, 25 bp, Probe Sequence
aagtcatcgggactggaagcttctt

SEQ ID NO: 164041 - DNA, 25 bp, Probe Sequence
aagtcaccgggatgaacctatcctt

SEQ ID NO: 164042 - DNA, 25 bp, Probe Sequence
aaggaccggtatgagatcaattccc

SEQ ID NO: 164043 - DNA, 25 bp, Probe Sequence
aaggtcctttcagtggtagactcgg

SEQ ID NO: 164044 - DNA, 25 bp, Probe Sequence
aaggaactatgtctggaaggctgtg

SEQ ID NO: 164045 - DNA, 25 bp, Probe Sequence
aagggacttgtagggagaggctcgt

SEQ ID NO: 164046 - DNA, 25 bp, Probe Sequence
aaggtggcctgggcggagggatctt

SEQ ID NO: 164047 - DNA, 25 bp, Probe Sequence
aatggatggtcgtgcggaactgctc

SEQ ID NO: 164048 - DNA, 25 bp, Probe Sequence
aaggaagtcagaagcttaagtgacc

SEQ ID NO: 164049 - DNA, 25 bp, Probe Sequence
aagtggacaaggctctcacaggacc

SEQ ID NO: 164050 - DNA, 25 bp, Probe Sequence
aagtggaaggcgatgcacaacagat

SEQ ID NO: 164051 - DNA, 25 bp, Probe Sequence
aagtggaggaagaagcgaatgcgca

SEQ ID NO: 164052 - DNA, 25 bp, Probe Sequence
aagggcagggtgcagaaaggcaggc

SEQ ID NO: 164053 - DNA, 25 bp, Probe Sequence
aagggagcgaggtcagaggagccgg

SEQ ID NO: 164054 - DNA, 25 bp, Probe Sequence
aaggatcaccagcacatatgcggcc

SEQ ID NO: 164055 - DNA, 25 bp, Probe Sequence
aagtgtcagaacccagatgtgaaca

SEQ ID NO: 164056 - DNA, 25 bp, Probe Sequence
aagtctaggcaccctgaagaacagg

SEQ ID NO: 164057 - DNA, 25 bp, Probe Sequence
aagtgtgagatgcacctgaaattca

SEQ ID NO: 164058 - DNA, 25 bp, Probe Sequence
aagtgtcagctgatgccacaacttc

SEQ ID NO: 164059 - DNA, 25 bp, Probe Sequence
aagtgtcagatcaataacagattaa

SEQ ID NO: 164060 - DNA, 25 bp, Probe Sequence
aagtgtcttcataccaaattaaagg

SEQ ID NO: 164061 - DNA, 25 bp, Probe Sequence
aaggttgcacccacatataaaagga

SEQ ID NO: 164062 - DNA, 25 bp, Probe Sequence
aaggttattgtcacttcaaaacaca

SEQ ID NO: 164063 - DNA, 25 bp, Probe Sequence
aaggaactctccatttagaaacaca

SEQ ID NO: 164064 - DNA, 25 bp, Probe Sequence
aaggggctgcttcatgtacggaaac

SEQ ID NO: 164065 - DNA, 25 bp, Probe Sequence
aaggagtgtgttctaacccaattca

SEQ ID NO: 164066 - DNA, 25 bp, Probe Sequence
cgggaagcttgtcatcaatggaaat

SEQ ID NO: 164067 - DNA, 25 bp, Probe Sequence
aaggaccttcgttaagtgataattg

SEQ ID NO: 164068 - DNA, 25 bp, Probe Sequence
aaggaagtaccaattagttgatttg

SEQ ID NO: 164069 - DNA, 25 bp, Probe Sequence
aaggaaaccaatataatctcatgta

SEQ ID NO: 164070 - DNA, 25 bp, Probe Sequence
aaggtacagaaattttatcttgtca

SEQ ID NO: 164071 - DNA, 25 bp, Probe Sequence
aaggatagcagatggttttcagtta

SEQ ID NO: 164072 - DNA, 25 bp, Probe Sequence
aagtgagaggcatggttagtgtgtg

SEQ ID NO: 164073 - DNA, 25 bp, Probe Sequence
aagtggcagcactggcacgaggaat

SEQ ID NO: 164074 - DNA, 25 bp, Probe Sequence
aaggtgcagacccgcaatgcggagt

SEQ ID NO: 164075 - DNA, 25 bp, Probe Sequence
aatggctattttcgcaatatgtgag

SEQ ID NO: 164076 - DNA, 25 bp, Probe Sequence
aagtcatctatttggacgatgatgt

SEQ ID NO: 164077 - DNA, 25 bp, Probe Sequence
aagtcactaagctcaagtgcttgga

SEQ ID NO: 164078 - DNA, 25 bp, Probe Sequence
aagtcctaggaaagtggttgatgtt

SEQ ID NO: 164079 - DNA, 25 bp, Probe Sequence
aagtcctaggtgtttccatctatgt

SEQ ID NO: 164080 - DNA, 25 bp, Probe Sequence
aagtgagctcgaaagttccttatga

SEQ ID NO: 164081 - DNA, 25 bp, Probe Sequence
aagtgagctacttgagacctttaga

SEQ ID NO: 164082 - DNA, 25 bp, Probe Sequence
aagtcagtagcagtgaagtctttca

SEQ ID NO: 164083 - DNA, 25 bp, Probe Sequence
aagtgccttaagtagactcttcatt

SEQ ID NO: 164084 - DNA, 25 bp, Probe Sequence
aagtgagaccaagaagtctctcttt

SEQ ID NO: 164085 - DNA, 25 bp, Probe Sequence
aagtgacgctcaatctacagtttat

SEQ ID NO: 164086 - DNA, 25 bp, Probe Sequence
aagtgtctgtaggtacgttttatat

SEQ ID NO: 164087 - DNA, 25 bp, Probe Sequence
aagtgcctgaaggacagctatcttt

SEQ ID NO: 164088 - DNA, 25 bp, Probe Sequence
aagtgcaagcgagtacctatggtat

SEQ ID NO: 164089 - DNA, 25 bp, Probe Sequence
aagtgcagatagatggccttgtggt

SEQ ID NO: 164090 - DNA, 25 bp, Probe Sequence
aagtcaaatattacctgcagggatt

SEQ ID NO: 164091 - DNA, 25 bp, Probe Sequence
aagtgcattatatttctcgagagat

SEQ ID NO: 164092 - DNA, 25 bp, Probe Sequence
aagggatatgcagtgtctttagata

SEQ ID NO: 164093 - DNA, 25 bp, Probe Sequence
aagtgccaacaattttctagatatt

SEQ ID NO: 164094 - DNA, 25 bp, Probe Sequence
aagtgacaaatattagatggctgat

SEQ ID NO: 164095 - DNA, 25 bp, Probe Sequence
aaggagcagacattaatatccatgc

SEQ ID NO: 164096 - DNA, 25 bp, Probe Sequence
aagggcagcagataaatctgggaaa

SEQ ID NO: 164097 - DNA, 25 bp, Probe Sequence
aaggggtcaaaatttgctgccaaat

SEQ ID NO: 164098 - DNA, 25 bp, Probe Sequence
aagtgtgcagtataattttctaatt

SEQ ID NO: 164099 - DNA, 25 bp, Probe Sequence
aagtgtgcttgggaattccttaaat

SEQ ID NO: 164100 - DNA, 25 bp, Probe Sequence
aagtctttgagggttcatttgaaag

SEQ ID NO: 164101 - DNA, 25 bp, Probe Sequence
aagtctttagaccttaatgtacata

SEQ ID NO: 164102 - DNA, 25 bp, Probe Sequence
aagtcattttgagtgttggtgttaa

SEQ ID NO: 164103 - DNA, 25 bp, Probe Sequence
aagtcatttctttcttagtgtctga

SEQ ID NO: 164104 - DNA, 25 bp, Probe Sequence
aagtggttgtgttgtagggttgcag

SEQ ID NO: 164105 - DNA, 25 bp, Probe Sequence
aagtggttgtttcccttgcatggga

SEQ ID NO: 164106 - DNA, 25 bp, Probe Sequence
aagtcaggtggaataacatgtgcat

SEQ ID NO: 164107 - DNA, 25 bp, Probe Sequence
aagtcagcttgagcatacagctgcc

SEQ ID NO: 164108 - DNA, 25 bp, Probe Sequence
aagtctcttgaggctcaggcggaga

SEQ ID NO: 164109 - DNA, 25 bp, Probe Sequence
aaggcattgctgctggaggtgtaat

SEQ ID NO: 164110 - DNA, 25 bp, Probe Sequence
aagtgactcatgggcgaggagcata

SEQ ID NO: 164111 - DNA, 25 bp, Probe Sequence
aagtgttgcagggctgtgacacaat

SEQ ID NO: 164112 - DNA, 25 bp, Probe Sequence
aagtgttcaagcatgtctgcaaatt

SEQ ID NO: 164113 - DNA, 25 bp, Probe Sequence
aagtctcacattatgcctgcagaat

SEQ ID NO: 164114 - DNA, 25 bp, Probe Sequence
aagtgctcagagcttggctgaagat

SEQ ID NO: 164115 - DNA, 25 bp, Probe Sequence
aagtgctcgtgctgtgcgaggatct

SEQ ID NO: 164116 - DNA, 25 bp, Probe Sequence
aaggcccgcatggtcatgcagacca

SEQ ID NO: 164117 - DNA, 25 bp, Probe Sequence
aagggccgcatggaagagtcccaga

SEQ ID NO: 164118 - DNA, 25 bp, Probe Sequence
aagggcacatcagagagtttccagt

SEQ ID NO: 164119 - DNA, 25 bp, Probe Sequence
aagtgacaattgtagagtcctcaat

SEQ ID NO: 164120 - DNA, 25 bp, Probe Sequence
aaggagttgcggacaatcctcaata

SEQ ID NO: 164121 - DNA, 25 bp, Probe Sequence
aagtcatttgctctaattctcaatt

SEQ ID NO: 164122 - DNA, 25 bp, Probe Sequence
aagtgcagcattccttaattccttc

SEQ ID NO: 164123 - DNA, 25 bp, Probe Sequence
aagtgacaagtttacattcagcctt

SEQ ID NO: 164124 - DNA, 25 bp, Probe Sequence
aagtgcaaagttattccccatcttc

SEQ ID NO: 164125 - DNA, 25 bp, Probe Sequence
aaggtactctgtggatatccccttg

SEQ ID NO: 164126 - DNA, 25 bp, Probe Sequence
aagtgtactcagagggcaccactgg

SEQ ID NO: 164127 - DNA, 25 bp, Probe Sequence
aaggtcaatgcacagagaccccggg

SEQ ID NO: 164128 - DNA, 25 bp, Probe Sequence
aaggatcataacggagcccggaggg

SEQ ID NO: 164129 - DNA, 25 bp, Probe Sequence
aaggtatagacaaggctgagcaggg

SEQ ID NO: 164130 - DNA, 25 bp, Probe Sequence
aagtgcattgaggatagatgcaggc

SEQ ID NO: 164131 - DNA, 25 bp, Probe Sequence
aagtgctagctgaaggatgagcagc

SEQ ID NO: 164132 - DNA, 25 bp, Probe Sequence
aagtgctcctgaaggaagtgccaaa

SEQ ID NO: 164133 - DNA, 25 bp, Probe Sequence
aagtccctataaccttgcatataag

SEQ ID NO: 164134 - DNA, 25 bp, Probe Sequence
aagtcctctatttgtctgaggaaag

SEQ ID NO: 164135 - DNA, 25 bp, Probe Sequence
aagtcttcatgattctgtcatatta

SEQ ID NO: 164136 - DNA, 25 bp, Probe Sequence
aagtgatccatggagagccaattat

SEQ ID NO: 164137 - DNA, 25 bp, Probe Sequence
aagtgcctgctgcaagcacctattc

SEQ ID NO: 164138 - DNA, 25 bp, Probe Sequence
aagtgactctgaccagcaggcttac

SEQ ID NO: 164139 - DNA, 25 bp, Probe Sequence
aagtgatcttacagaacagtgcctg

SEQ ID NO: 164140 - DNA, 25 bp, Probe Sequence
aagtgatattacagccacctcattc

SEQ ID NO: 164141 - DNA, 25 bp, Probe Sequence
aagtgtatctatgtgctcaaggaac

SEQ ID NO: 164142 - DNA, 25 bp, Probe Sequence
aagtgtgtctaagtgaccatggaga

SEQ ID NO: 164143 - DNA, 25 bp, Probe Sequence
aagggtctaaaggtgcgggagtatg

SEQ ID NO: 164144 - DNA, 25 bp, Probe Sequence
aagtcgtcttcatcctgggggatat

SEQ ID NO: 164145 - DNA, 25 bp, Probe Sequence
aagtcgtttcattcaagttggtgta

SEQ ID NO: 164146 - DNA, 25 bp, Probe Sequence
aagtgcgggtcataagcttgcgttg

SEQ ID NO: 164147 - DNA, 25 bp, Probe Sequence
aagtgcgggtcataagcttgcgttg

SEQ ID NO: 164148 - DNA, 25 bp, Probe Sequence
aagtgtgggctgaagatggttggtt

SEQ ID NO: 164149 - DNA, 25 bp, Probe Sequence
aaggggtgtgattgagtgtttgaag

SEQ ID NO: 164150 - DNA, 25 bp, Probe Sequence
aagggcaggattgagtccttgcaac

SEQ ID NO: 164151 - DNA, 25 bp, Probe Sequence
aagggtggttcattttctctgacct

SEQ ID NO: 164152 - DNA, 25 bp, Probe Sequence
aagtggtctgtgaatttacttacac

SEQ ID NO: 164153 - DNA, 25 bp, Probe Sequence
aagtggtgtcgtgattacttcctca

SEQ ID NO: 164154 - DNA, 25 bp, Probe Sequence
aagtgccagtttgcttagttctcac

SEQ ID NO: 164155 - DNA, 25 bp, Probe Sequence
aagtgccattttgttgtgcaatgta

SEQ ID NO: 164156 - DNA, 25 bp, Probe Sequence
aaggcaaagattgttagatcagata

SEQ ID NO: 164157 - DNA, 25 bp, Probe Sequence
aagtgcagaaataactaagacacaa

SEQ ID NO: 164158 - DNA, 25 bp, Probe Sequence
aagtggtccatcaatttcagacact

SEQ ID NO: 164159 - DNA, 25 bp, Probe Sequence
aaggagctccatttccgagctccta

SEQ ID NO: 164160 - DNA, 25 bp, Probe Sequence
aagtgatgagcctacctctatacct

SEQ ID NO: 164161 - DNA, 25 bp, Probe Sequence
aagtgcaggacatcattgtgaaccc

SEQ ID NO: 164162 - DNA, 25 bp, Probe Sequence
aagtgctggtctcggagttgatccc

SEQ ID NO: 164163 - DNA, 25 bp, Probe Sequence
aagtgtactcgacagattatctctg

SEQ ID NO: 164164 - DNA, 25 bp, Probe Sequence
aagtgtatcatatgccagtacgccc

SEQ ID NO: 164165 - DNA, 25 bp, Probe Sequence
aagtgtatcatatgccagtacgccc

SEQ ID NO: 164166 - DNA, 25 bp, Probe Sequence
aagtgtatcatgtggaatatcctca

SEQ ID NO: 164167 - DNA, 25 bp, Probe Sequence
aaggttctttggaagtactcaatct

SEQ ID NO: 164168 - DNA, 25 bp, Probe Sequence
aagtgtttgtttgttatctcagtcc

SEQ ID NO: 164169 - DNA, 25 bp, Probe Sequence
aaggtttgaatctggtgactgactc

SEQ ID NO: 164170 - DNA, 25 bp, Probe Sequence
aaggattgtttctggtgactgcagc

SEQ ID NO: 164171 - DNA, 25 bp, Probe Sequence
aagtgatttttaatgttctccagca

SEQ ID NO: 164172 - DNA, 25 bp, Probe Sequence
aagtgatataattttgacctgtgta

SEQ ID NO: 164173 - DNA, 25 bp, Probe Sequence
aagtgagatatttttacctgcctaa

SEQ ID NO: 164174 - DNA, 25 bp, Probe Sequence
aagtgattatcttttcttctgttaa

SEQ ID NO: 164175 - DNA, 25 bp, Probe Sequence
aagtgtttgcattttctatttgggg

SEQ ID NO: 164176 - DNA, 25 bp, Probe Sequence
aagtgatttggtttcttttgcccat

SEQ ID NO: 164177 - DNA, 25 bp, Probe Sequence
aagtgctatatggtggtgctgtttg

SEQ ID NO: 164178 - DNA, 25 bp, Probe Sequence
aagtgctatttgtgatggtttgctt

SEQ ID NO: 164179 - DNA, 25 bp, Probe Sequence
aagtgaatttcatatctttctctgt

SEQ ID NO: 164180 - DNA, 25 bp, Probe Sequence
aaggaggtgtcagatttcattcaag

SEQ ID NO: 164181 - DNA, 25 bp, Probe Sequence
aaggcaggttgtccttctattcagg

SEQ ID NO: 164182 - DNA, 25 bp, Probe Sequence
aaggtggactgtgcatgcctcaaag

SEQ ID NO: 164183 - DNA, 25 bp, Probe Sequence
aaggagggagcagctgtccaaaccc

SEQ ID NO: 164184 - DNA, 25 bp, Probe Sequence
aagtgggcgaggctgtgcacaaggc

SEQ ID NO: 164185 - DNA, 25 bp, Probe Sequence
aagtgtggtggtgtggagcatagcc

SEQ ID NO: 164186 - DNA, 25 bp, Probe Sequence
aaggggtcgatttggcaaagccata

SEQ ID NO: 164187 - DNA, 25 bp, Probe Sequence
aaggccgtgcaacatgggaagccca

SEQ ID NO: 164188 - DNA, 25 bp, Probe Sequence
aaggccttgacacagggaacctgca

SEQ ID NO: 164189 - DNA, 25 bp, Probe Sequence
aaggtgtggcttcaggagaacctgc

SEQ ID NO: 164190 - DNA, 25 bp, Probe Sequence
aagtctccctatcaggagttcactg

SEQ ID NO: 164191 - DNA, 25 bp, Probe Sequence
aagtgtcacctccttggagaagcct

SEQ ID NO: 164192 - DNA, 25 bp, Probe Sequence
aaggctccacaccttgttaagccaa

SEQ ID NO: 164193 - DNA, 25 bp, Probe Sequence
aaggtactgaagtgcaacaagctga

SEQ ID NO: 164194 - DNA, 25 bp, Probe Sequence
aaggaagaattgtgcgccaaaataa

SEQ ID NO: 164195 - DNA, 25 bp, Probe Sequence
aaggaaaaggatagacgcgcacaat

SEQ ID NO: 164196 - DNA, 25 bp, Probe Sequence
aaggaacaactgataccagccgctg

SEQ ID NO: 164197 - DNA, 25 bp, Probe Sequence
aaggagagacgtctcagtacccagg

SEQ ID NO: 164198 - DNA, 25 bp, Probe Sequence
aaggaatgggcagctcagtaccgag

SEQ ID NO: 164199 - DNA, 25 bp, Probe Sequence
aaggttggctctggccaggattcca

SEQ ID NO: 164200 - DNA, 25 bp, Probe Sequence
aaggtctgggcattaatgtgttcct

SEQ ID NO: 164201 - DNA, 25 bp, Probe Sequence
aaggtatatgacctgcgttttctgc

SEQ ID NO: 164202 - DNA, 25 bp, Probe Sequence
aaggatgacatccctgtgtttttgc

SEQ ID NO: 164203 - DNA, 25 bp, Probe Sequence
aaggtggtaggctatgcttttgacc

SEQ ID NO: 164204 - DNA, 25 bp, Probe Sequence
aagtgtgagtggtcaatcatctttt

SEQ ID NO: 164205 - DNA, 25 bp, Probe Sequence
aagtcctatgccaaatatcttgtat

SEQ ID NO: 164206 - DNA, 25 bp, Probe Sequence
aagtcctctccaacagaatatgctc

SEQ ID NO: 164207 - DNA, 25 bp, Probe Sequence
aagtctgtgtcctaatgaagattcc

SEQ ID NO: 164208 - DNA, 25 bp, Probe Sequence
aagtctgttccattagaagcaattg

SEQ ID NO: 164209 - DNA, 25 bp, Probe Sequence
aagtctgttctgatggcactgagtt

SEQ ID NO: 164210 - DNA, 25 bp, Probe Sequence
aagtctgttctggcggcattgtggg

SEQ ID NO: 164211 - DNA, 25 bp, Probe Sequence
aagtgatgtttggggcatggtggca

SEQ ID NO: 164212 - DNA, 25 bp, Probe Sequence
aagtgaggtcgcaggagctggtgca

SEQ ID NO: 164213 - DNA, 25 bp, Probe Sequence
aagtgtccccaggggctaggcatgg

SEQ ID NO: 164214 - DNA, 25 bp, Probe Sequence
aatttaccaacagctgaaggatgcc

SEQ ID NO: 164215 - DNA, 25 bp, Probe Sequence
aagggaccaaagttgcagcaggagc

SEQ ID NO: 164216 - DNA, 25 bp, Probe Sequence
aagggagccagaagactgattggag

SEQ ID NO: 164217 - DNA, 25 bp, Probe Sequence
aagggccctgggagatagcatggac

SEQ ID NO: 164218 - DNA, 25 bp, Probe Sequence
aagtggctgctgcgagggaaggacc

SEQ ID NO: 164219 - DNA, 25 bp, Probe Sequence
aagtggcctgaatgaggccaggccc

SEQ ID NO: 164220 - DNA, 25 bp, Probe Sequence
aagtggccagtgtgtacgaagcccc

SEQ ID NO: 164221 - DNA, 25 bp, Probe Sequence
aagtggccagtgtgtacgaagcccc

SEQ ID NO: 164222 - DNA, 25 bp, Probe Sequence
aagtggccagtgctgccactgagcc

SEQ ID NO: 164223 - DNA, 25 bp, Probe Sequence
aagtggccagtgctgccactgagcc

SEQ ID NO: 164224 - DNA, 25 bp, Probe Sequence
aagtgtgacagtgtccagccggttc

SEQ ID NO: 164225 - DNA, 25 bp, Probe Sequence
aaggtgacgacctcatcctggagat

SEQ ID NO: 164226 - DNA, 25 bp, Probe Sequence
aaggtaacccattgccaagtatcat

SEQ ID NO: 164227 - DNA, 25 bp, Probe Sequence
aagtgtgacacccagtccaattgtt

SEQ ID NO: 164228 - DNA, 25 bp, Probe Sequence
aaggtggtcatcaagtccaacttta

SEQ ID NO: 164229 - DNA, 25 bp, Probe Sequence
aaggtagtctttcccaactgactgt

SEQ ID NO: 164230 - DNA, 25 bp, Probe Sequence
aagtggaatctcctccgaaatgaat

SEQ ID NO: 164231 - DNA, 25 bp, Probe Sequence
aagtgtacactgttcctgaatattg

SEQ ID NO: 164232 - DNA, 25 bp, Probe Sequence
aaggtgaacgatactgtgcagattg

SEQ ID NO: 164233 - DNA, 25 bp, Probe Sequence
aagtgtagatgccaatcttcagatt

SEQ ID NO: 164234 - DNA, 25 bp, Probe Sequence
aagtgtagatcattgtattcagaga

SEQ ID NO: 164235 - DNA, 25 bp, Probe Sequence
aagtgaagtagctatggctcagaga

SEQ ID NO: 164236 - DNA, 25 bp, Probe Sequence
aagtgaaggatcttgcagcttgtaa

SEQ ID NO: 164237 - DNA, 25 bp, Probe Sequence
aagggcagtatttcatgtatgtagt

SEQ ID NO: 164238 - DNA, 25 bp, Probe Sequence
aagtgagcattttctagttcatatg

SEQ ID NO: 164239 - DNA, 25 bp, Probe Sequence
aagtgaatctcatcatatttcacat

SEQ ID NO: 164240 - DNA, 25 bp, Probe Sequence
aagtgagagctcatcaaggatagct

SEQ ID NO: 164241 - DNA, 25 bp, Probe Sequence
aagtgcatcatgacctaacgaactc

SEQ ID NO: 164242 - DNA, 25 bp, Probe Sequence
aagtgcagccagctcaatcaattcc

SEQ ID NO: 164243 - DNA, 25 bp, Probe Sequence
aaggtgctcagtccttgcaatgttc

SEQ ID NO: 164244 - DNA, 25 bp, Probe Sequence
aagtgtctcagtgtatatttatata

SEQ ID NO: 164245 - DNA, 25 bp, Probe Sequence
aagtgcacacttgtattgcttttta

SEQ ID NO: 164246 - DNA, 25 bp, Probe Sequence
aagtgaacattacattgccattttt

SEQ ID NO: 164247 - DNA, 25 bp, Probe Sequence
aagtgaaatttgcttgcgctctgcc

SEQ ID NO: 164248 - DNA, 25 bp, Probe Sequence
aagtgaaatgttatggtctcccctc

SEQ ID NO: 164249 - DNA, 25 bp, Probe Sequence
aaggagagactcagggttctcgctt

SEQ ID NO: 164250 - DNA, 25 bp, Probe Sequence
aagggacgtcagtgtttatgccatt

SEQ ID NO: 164251 - DNA, 25 bp, Probe Sequence
aagggacgtcagtgtttatgccatt

SEQ ID NO: 164252 - DNA, 25 bp, Probe Sequence
aagggcagcggatttgttgttgttg

SEQ ID NO: 164253 - DNA, 25 bp, Probe Sequence
aagtgagaaagatctttgtgggcac

SEQ ID NO: 164254 - DNA, 25 bp, Probe Sequence
aaggagacttgatttccagtggaac

SEQ ID NO: 164255 - DNA, 25 bp, Probe Sequence
aaggagttcggtaaagggcatagct

SEQ ID NO: 164256 - DNA, 25 bp, Probe Sequence
aagtgaccaccgtgaagtgcctatg

SEQ ID NO: 164257 - DNA, 25 bp, Probe Sequence
aagtgtcgcaccaaggtttgccttt

SEQ ID NO: 164258 - DNA, 25 bp, Probe Sequence
aagtgggcagctgtggtggtgcctt

SEQ ID NO: 164259 - DNA, 25 bp, Probe Sequence
aagtgggcagctgtggtggtgcctt

SEQ ID NO: 164260 - DNA, 25 bp, Probe Sequence
aagggaattcttgtgtgctgctttc

SEQ ID NO: 164261 - DNA, 25 bp, Probe Sequence
aagggtgttgttgtgtgatcttggc

SEQ ID NO: 164262 - DNA, 25 bp, Probe Sequence
aaggcttgttctaagtggacaaggc

SEQ ID NO: 164263 - DNA, 25 bp, Probe Sequence
aagggtattcttcggcagatcactg

SEQ ID NO: 164264 - DNA, 25 bp, Probe Sequence
aaggatgtgttctctgagacccatg

SEQ ID NO: 164265 - DNA, 25 bp, Probe Sequence
aagggcgtcatatctgacatcctgg

SEQ ID NO: 164266 - DNA, 25 bp, Probe Sequence
aaggggtctgcatgcagcagcactg

SEQ ID NO: 164267 - DNA, 25 bp, Probe Sequence
aatgctgcccatggcataggcacct

SEQ ID NO: 164268 - DNA, 25 bp, Probe Sequence
aagtgcagctctggaaggcagcctt

SEQ ID NO: 164269 - DNA, 25 bp, Probe Sequence
aaggctcttgcgggatggcctgttt

SEQ ID NO: 164270 - DNA, 25 bp, Probe Sequence
aaggactgtctggcaatgacttgta

SEQ ID NO: 164271 - DNA, 25 bp, Probe Sequence
aagtggtctctggaatgagttagat

SEQ ID NO: 164272 - DNA, 25 bp, Probe Sequence
aagtgcgttctttagaccaatgcat

SEQ ID NO: 164273 - DNA, 25 bp, Probe Sequence
aagtgatttcttgagatagaatcta

SEQ ID NO: 164274 - DNA, 25 bp, Probe Sequence
aaggcaggcatccagcataaagaaa

SEQ ID NO: 164275 - DNA, 25 bp, Probe Sequence
aaggcagctaggtcagaaggaaaca

SEQ ID NO: 164276 - DNA, 25 bp, Probe Sequence
aatggctggcggtaaggctggaaag

SEQ ID NO: 164277 - DNA, 25 bp, Probe Sequence
aagggctgggaattgcgcatgtgaa

SEQ ID NO: 164278 - DNA, 25 bp, Probe Sequence
aatggagcggggcgccagtgaatta

SEQ ID NO: 164279 - DNA, 25 bp, Probe Sequence
aaggagagggcgcttccttgagtag

SEQ ID NO: 164280 - DNA, 25 bp, Probe Sequence
aaggaaagaccgttcaccagacttg

SEQ ID NO: 164281 - DNA, 25 bp, Probe Sequence
aaggatggacggaaacctcgacttg

SEQ ID NO: 164282 - DNA, 25 bp, Probe Sequence
aaggaaggccagagagccgcgcagt

SEQ ID NO: 164283 - DNA, 25 bp, Probe Sequence
aaggaaggacagaggggctgaagag

SEQ ID NO: 164284 - DNA, 25 bp, Probe Sequence
aaggagggagtcatggtggccaaga

SEQ ID NO: 164285 - DNA, 25 bp, Probe Sequence
aaggagggagtcatggtggccaaga

SEQ ID NO: 164286 - DNA, 25 bp, Probe Sequence
aagggcaggttgatcagtgagctca

SEQ ID NO: 164287 - DNA, 25 bp, Probe Sequence
aaggggcttaatgcatgtgcctgcc

SEQ ID NO: 164288 - DNA, 25 bp, Probe Sequence
aagtgtgtgtattatctcattgcct

SEQ ID NO: 164289 - DNA, 25 bp, Probe Sequence
aagtgctcgtatttgtattctccat

SEQ ID NO: 164290 - DNA, 25 bp, Probe Sequence
aagtgcacgctattttattatcttg

SEQ ID NO: 164291 - DNA, 25 bp, Probe Sequence
aaggcacgttggagctttcttgcca

SEQ ID NO: 164292 - DNA, 25 bp, Probe Sequence
aaggactaagaagcgtatctttcag

SEQ ID NO: 164293 - DNA, 25 bp, Probe Sequence
tccggaaaaaacattcacttcttgt

SEQ ID NO: 164294 - DNA, 25 bp, Probe Sequence
ccggaaaggactcttgattcttctc

SEQ ID NO: 164295 - DNA, 25 bp, Probe Sequence
aaggaatgggaccttctaatctctc

SEQ ID NO: 164296 - DNA, 25 bp, Probe Sequence
aagggtactgtccatatctttgctc

SEQ ID NO: 164297 - DNA, 25 bp, Probe Sequence
aagggtactgtccatatctttgctc

SEQ ID NO: 164298 - DNA, 25 bp, Probe Sequence
aagtgtgctaatgaatcctatctct

SEQ ID NO: 164299 - DNA, 25 bp, Probe Sequence
aaggatgcaattgaagctcatttta

SEQ ID NO: 164300 - DNA, 25 bp, Probe Sequence
aaggctgaattggcatacccctggt

SEQ ID NO: 164301 - DNA, 25 bp, Probe Sequence
aagtgaaattgctaatgccccggat

SEQ ID NO: 164302 - DNA, 25 bp, Probe Sequence
aaggaaatatagacgcctgccaggg

SEQ ID NO: 164303 - DNA, 25 bp, Probe Sequence
aaggaaaagactcgctcctcatcga

SEQ ID NO: 164304 - DNA, 25 bp, Probe Sequence
aagtggtaatgaatgttcccaggat

SEQ ID NO: 164305 - DNA, 25 bp, Probe Sequence
aagtgtcttagcacttcctcgatgt

SEQ ID NO: 164306 - DNA, 25 bp, Probe Sequence
aagtgtggtaatgttcacctgcagt

SEQ ID NO: 164307 - DNA, 25 bp, Probe Sequence
aaggatgtgaacaaggtcgcctact

SEQ ID NO: 164308 - DNA, 25 bp, Probe Sequence
aaggcagtgaccaaggaggaatttc

SEQ ID NO: 164309 - DNA, 25 bp, Probe Sequence
aagtgtttctcacggatggaattct

SEQ ID NO: 164310 - DNA, 25 bp, Probe Sequence
aagtgtattgtgtgttgtaaatttt

SEQ ID NO: 164311 - DNA, 25 bp, Probe Sequence
aaggcctgtctggtttgtgaacttt

SEQ ID NO: 164312 - DNA, 25 bp, Probe Sequence
aagtgcactggcactgctggggact

SEQ ID NO: 164313 - DNA, 25 bp, Probe Sequence
aagtgacagtgctggtgcgggactc

SEQ ID NO: 164314 - DNA, 25 bp, Probe Sequence
aaggacaggtggcctgggcagatcc

SEQ ID NO: 164315 - DNA, 25 bp, Probe Sequence
aaggagacgctacagcgcgcagatc

SEQ ID NO: 164316 - DNA, 25 bp, Probe Sequence
aagggactctatccattgagcacat

SEQ ID NO: 164317 - DNA, 25 bp, Probe Sequence
aaggtgactcttcaggatgccacgt

SEQ ID NO: 164318 - DNA, 25 bp, Probe Sequence
aagtgtccttgtagatagactgccg

SEQ ID NO: 164319 - DNA, 25 bp, Probe Sequence
aagggcatcattaagtagaccaggt

SEQ ID NO: 164320 - DNA, 25 bp, Probe Sequence
aagtggtcaaatggtagtgctcaag

SEQ ID NO: 164321 - DNA, 25 bp, Probe Sequence
aagtgaatagacagtcagtccgcaa

SEQ ID NO: 164322 - DNA, 25 bp, Probe Sequence
aagtgaaaaaagcatgccacccaaa

SEQ ID NO: 164323 - DNA, 25 bp, Probe Sequence
aaggcaaaagactgagcccccaagg

SEQ ID NO: 164324 - DNA, 25 bp, Probe Sequence
aagggacacaaaggacctcctcaag

SEQ ID NO: 164325 - DNA, 25 bp, Probe Sequence
aagggagcacaatgtgtccccgtgg

SEQ ID NO: 164326 - DNA, 25 bp, Probe Sequence
aagggtgtacttatatccacactgc

SEQ ID NO: 164327 - DNA, 25 bp, Probe Sequence
aagggctgattgatggtgtccacac

SEQ ID NO: 164328 - DNA, 25 bp, Probe Sequence
aagtggtcaaggagctgtggccaca

SEQ ID NO: 164329 - DNA, 25 bp, Probe Sequence
aagggtcaagccaggatgggcccag

SEQ ID NO: 164330 - DNA, 25 bp, Probe Sequence
aaggttcacaccaggagcgatccat

SEQ ID NO: 164331 - DNA, 25 bp, Probe Sequence
aagtgattaaacgtgcagactatgc

SEQ ID NO: 164332 - DNA, 25 bp, Probe Sequence
aaggtctggagaccatgcgtcacgt

SEQ ID NO: 164333 - DNA, 25 bp, Probe Sequence
aaggtcctgtgacagcagtggttgg

SEQ ID NO: 164334 - DNA, 25 bp, Probe Sequence
aagtgtgctttgttggagatggctt

SEQ ID NO: 164335 - DNA, 25 bp, Probe Sequence
aagtgtgcctcttgtttgcatggca

SEQ ID NO: 164336 - DNA, 25 bp, Probe Sequence
aagtggccactcttgtggcaggtgt

SEQ ID NO: 164337 - DNA, 25 bp, Probe Sequence
aagtggtgacttttgagagaggaca

SEQ ID NO: 164338 - DNA, 25 bp, Probe Sequence
aagggagactatttcaaagctactg

SEQ ID NO: 164339 - DNA, 25 bp, Probe Sequence
aagtggacgatgaacgcaaacttcg

SEQ ID NO: 164340 - DNA, 25 bp, Probe Sequence
aagggaaatgatgccaaccccagat

SEQ ID NO: 164341 - DNA, 25 bp, Probe Sequence
aagggacgcttggacaacgggcaag

SEQ ID NO: 164342 - DNA, 25 bp, Probe Sequence
aagggatcgcagggacaccaagcgc

SEQ ID NO: 164343 - DNA, 25 bp, Probe Sequence
aagggagctctggaccctcagagcc

SEQ ID NO: 164344 - DNA, 25 bp, Probe Sequence
aagtggatttgatccccagtctcat

SEQ ID NO: 164345 - DNA, 25 bp, Probe Sequence
aaggtgacatcattcaccccatttt

SEQ ID NO: 164346 - DNA, 25 bp, Probe Sequence
aaggtacaaaatcttgcataagctg

SEQ ID NO: 164347 - DNA, 25 bp, Probe Sequence
aaggaaacaaactctcaaatcatga

SEQ ID NO: 164348 - DNA, 25 bp, Probe Sequence
aagggaacctgatttctcaataaat

SEQ ID NO: 164349 - DNA, 25 bp, Probe Sequence
aagggaaagctgttctgtcaactgt

SEQ ID NO: 164350 - DNA, 25 bp, Probe Sequence
aagggaaagctgttctgtcaactgt

SEQ ID NO: 164351 - DNA, 25 bp, Probe Sequence
aagggaagttgtattagtctgtgac

SEQ ID NO: 164352 - DNA, 25 bp, Probe Sequence
aaggtgtcagctagttttaagtgtg

SEQ ID NO: 164353 - DNA, 25 bp, Probe Sequence
aaggtgtgagttcttgatacgaatg

SEQ ID NO: 164354 - DNA, 25 bp, Probe Sequence
aagggctggtctctgctgaaggttg

SEQ ID NO: 164355 - DNA, 25 bp, Probe Sequence
aaggatgtgggtctctagtgccttg

SEQ ID NO: 164356 - DNA, 25 bp, Probe Sequence
aagggtgagagaattctacgctgta

SEQ ID NO: 164357 - DNA, 25 bp, Probe Sequence
aagggagcaagtatgtcacacttca

SEQ ID NO: 164358 - DNA, 25 bp, Probe Sequence
aaggtgtgcagactttggcagccgt

SEQ ID NO: 164359 - DNA, 25 bp, Probe Sequence
aaggggaagcttcggagcctgtgta

SEQ ID NO: 164360 - DNA, 25 bp, Probe Sequence
caaggggtaatatgggcctgttgtt

SEQ ID NO: 164361 - DNA, 25 bp, Probe Sequence
aagggatattgttaggtcgtggtgt

SEQ ID NO: 164362 - DNA, 25 bp, Probe Sequence
aaggagtgcttttgggtctggttgt

SEQ ID NO: 164363 - DNA, 25 bp, Probe Sequence
aagggcagctgtacagggctaggtt

SEQ ID NO: 164364 - DNA, 25 bp, Probe Sequence
aagggcagttattggacaggtgtta

SEQ ID NO: 164365 - DNA, 25 bp, Probe Sequence
aagggctttaaggcacaggctgttg

SEQ ID NO: 164366 - DNA, 25 bp, Probe Sequence
aagggtagtcagtactggcgctttg

SEQ ID NO: 164367 - DNA, 25 bp, Probe Sequence
aagggtcgtgagaaactggctggtc

SEQ ID NO: 164368 - DNA, 25 bp, Probe Sequence
aagggaatgctggtctagctggcgt

SEQ ID NO: 164369 - DNA, 25 bp, Probe Sequence
aaggagcgaggcactggtgacgtca

SEQ ID NO: 164370 - DNA, 25 bp, Probe Sequence
aaggaggaggttgggggtgactgct

SEQ ID NO: 164371 - DNA, 25 bp, Probe Sequence
aaggtgggtattgggggtggctgtg

SEQ ID NO: 164372 - DNA, 25 bp, Probe Sequence
aagggtagatggggagggtctgtgt

SEQ ID NO: 164373 - DNA, 25 bp, Probe Sequence
aaggatgtcgaggcggggaatggtg

SEQ ID NO: 164374 - DNA, 25 bp, Probe Sequence
aaggcaacagagggcggtggagagg

SEQ ID NO: 164375 - DNA, 25 bp, Probe Sequence
aaggaggatgtgggcagggacgggg

SEQ ID NO: 164376 - DNA, 25 bp, Probe Sequence
aatggccggtaggcgtgtacggtgg

SEQ ID NO: 164377 - DNA, 25 bp, Probe Sequence
aaggcctttgtggaggtcactgagg

SEQ ID NO: 164378 - DNA, 25 bp, Probe Sequence
aaggtcatccctgagctgaacggga

SEQ ID NO: 164379 - DNA, 25 bp, Probe Sequence
aaggtgctccgagatggagccggga

SEQ ID NO: 164380 - DNA, 25 bp, Probe Sequence
taagggctccgtgcagtagttaacc

SEQ ID NO: 164381 - DNA, 25 bp, Probe Sequence
aaggacgacgtggcatctgaggtgt

SEQ ID NO: 164382 - DNA, 25 bp, Probe Sequence
aatggatcaatggtgccacggagca

SEQ ID NO: 164383 - DNA, 25 bp, Probe Sequence
aaggacagactactcagcatgggca

SEQ ID NO: 164384 - DNA, 25 bp, Probe Sequence
aaggatgcaacggatcgctgctgtg

SEQ ID NO: 164385 - DNA, 25 bp, Probe Sequence
aagtgtgagacagctgccttgtgtg

SEQ ID NO: 164386 - DNA, 25 bp, Probe Sequence
aagtggagccgagtgacaccattga

SEQ ID NO: 164387 - DNA, 25 bp, Probe Sequence
aagtggagccgagtgacaccattga

SEQ ID NO: 164388 - DNA, 25 bp, Probe Sequence
aaggtgatcgaattgcacagctcat

SEQ ID NO: 164389 - DNA, 25 bp, Probe Sequence
aaggcatatctgacaatccactcgt

SEQ ID NO: 164390 - DNA, 25 bp, Probe Sequence
aaggcaatctgcttctactctgcct

SEQ ID NO: 164391 - DNA, 25 bp, Probe Sequence
aaggagaatgcacctgccatcatct

SEQ ID NO: 164392 - DNA, 25 bp, Probe Sequence
aaggaaagcaggaccttcatcccag

SEQ ID NO: 164393 - DNA, 25 bp, Probe Sequence
aagggagatgatgcccttacccacc

SEQ ID NO: 164394 - DNA, 25 bp, Probe Sequence
aagggagatgatgcccttacccacc

SEQ ID NO: 164395 - DNA, 25 bp, Probe Sequence
aagggcagaaacggttcacattcca

SEQ ID NO: 164396 - DNA, 25 bp, Probe Sequence
aaggggaggcatcagtgtccttggc

SEQ ID NO: 164397 - DNA, 25 bp, Probe Sequence
aagtgggaggtctgagactcaggag

SEQ ID NO: 164398 - DNA, 25 bp, Probe Sequence
aagtggggagttagatttcagagtc

SEQ ID NO: 164399 - DNA, 25 bp, Probe Sequence
aaggaccgtttcatttcagggagag

SEQ ID NO: 164400 - DNA, 25 bp, Probe Sequence
aagggcccatgctcttagtggggaa

SEQ ID NO: 164401 - DNA, 25 bp, Probe Sequence
aagggtcgactggttgcagttgaaa

SEQ ID NO: 164402 - DNA, 25 bp, Probe Sequence
aagggcattttctttgattctcaaa

SEQ ID NO: 164403 - DNA, 25 bp, Probe Sequence
aagggtctggattctctatttttga

SEQ ID NO: 164404 - DNA, 25 bp, Probe Sequence
aaggttgggatttgctacttcttct

SEQ ID NO: 164405 - DNA, 25 bp, Probe Sequence
aaggtccgaattttcacatttatat

SEQ ID NO: 164406 - DNA, 25 bp, Probe Sequence
aaggtctccatgtgaaacaagcaaa

SEQ ID NO: 164407 - DNA, 25 bp, Probe Sequence
aaggtcaacatctgctgtaagaaac

SEQ ID NO: 164408 - DNA, 25 bp, Probe Sequence
aagtgtcaccattttatgacatgaa

SEQ ID NO: 164409 - DNA, 25 bp, Probe Sequence
aagtgtactttttcaacaagcacga

SEQ ID NO: 164410 - DNA, 25 bp, Probe Sequence
aagtgtccattatttaccttgaaca

SEQ ID NO: 164411 - DNA, 25 bp, Probe Sequence
aagggctgattttctatccatatga

SEQ ID NO: 164412 - DNA, 25 bp, Probe Sequence
aagtggtgttgaagatgcacagcaa

SEQ ID NO: 164413 - DNA, 25 bp, Probe Sequence
aagtgtgtgataaggtctgctgata

SEQ ID NO: 164414 - DNA, 25 bp, Probe Sequence
aaggtggaagaggtgctgcagctgg

SEQ ID NO: 164415 - DNA, 25 bp, Probe Sequence
aagtgtgggagaggatgtagggaaa

SEQ ID NO: 164416 - DNA, 25 bp, Probe Sequence
aagtggctgaggtggtatgtggaga

SEQ ID NO: 164417 - DNA, 25 bp, Probe Sequence
aagtggtggacttgctttgtgaaga

SEQ ID NO: 164418 - DNA, 25 bp, Probe Sequence
aagggtcagagcatgttcgtggaga

SEQ ID NO: 164419 - DNA, 25 bp, Probe Sequence
aagggtgcactgagtgtcgtggctg

SEQ ID NO: 164420 - DNA, 25 bp, Probe Sequence
aaggtgtggtgactgtgccttactg

SEQ ID NO: 164421 - DNA, 25 bp, Probe Sequence
aagtgtgtgaggagcccctcatctg

SEQ ID NO: 164422 - DNA, 25 bp, Probe Sequence
aaggtgtgaagcacccaccatgttc

SEQ ID NO: 164423 - DNA, 25 bp, Probe Sequence
aaggtgtgaagcacccaccatgttc

SEQ ID NO: 164424 - DNA, 25 bp, Probe Sequence
aaggtgtgaagcacccaccatgttc

SEQ ID NO: 164425 - DNA, 25 bp, Probe Sequence
aaggtgtatcagttgctgccaccag

SEQ ID NO: 164426 - DNA, 25 bp, Probe Sequence
aaggtgtatcagttgctgccaccag

SEQ ID NO: 164427 - DNA, 25 bp, Probe Sequence
aagggaatatgattgtctgcacagc

SEQ ID NO: 164428 - DNA, 25 bp, Probe Sequence
aaggaggcgtgcaatatctgccagc

SEQ ID NO: 164429 - DNA, 25 bp, Probe Sequence
aaggagcagcgggaacggagcttcg

SEQ ID NO: 164430 - DNA, 25 bp, Probe Sequence
aaggggcagcgctaacgatgcctcc

SEQ ID NO: 164431 - DNA, 25 bp, Probe Sequence
aagggataggtatcttgcctccttt

SEQ ID NO: 164432 - DNA, 25 bp, Probe Sequence
aatgggacaggtaccttccacttgt

SEQ ID NO: 164433 - DNA, 25 bp, Probe Sequence
aagggaagcagaaccatactatttg

SEQ ID NO: 164434 - DNA, 25 bp, Probe Sequence
aagggggagtcaattattattcatg

SEQ ID NO: 164435 - DNA, 25 bp, Probe Sequence
aagtgggtgtgatttttagattttg

SEQ ID NO: 164436 - DNA, 25 bp, Probe Sequence
aagggagtttttgatagttgtgtgt

SEQ ID NO: 164437 - DNA, 25 bp, Probe Sequence
aatagggtttttcatcttgctgggt

SEQ ID NO: 164438 - DNA, 25 bp, Probe Sequence
caatggggatttgtttcttggcacc

SEQ ID NO: 164439 - DNA, 25 bp, Probe Sequence
aaggtggacatagattttttgcagg

SEQ ID NO: 164440 - DNA, 25 bp, Probe Sequence
aaggggcgaagcaactttatgtcag

SEQ ID NO: 164441 - DNA, 25 bp, Probe Sequence
aagtggatgcaatttccttttgtgc

SEQ ID NO: 164442 - DNA, 25 bp, Probe Sequence
aagtgggagaattccttgctgttag

SEQ ID NO: 164443 - DNA, 25 bp, Probe Sequence
aagggccagataacacttcgctgtg

SEQ ID NO: 164444 - DNA, 25 bp, Probe Sequence
aagggtaatatggactcagccttgc

SEQ ID NO: 164445 - DNA, 25 bp, Probe Sequence
aagggccagatcggggcgcccatgc

SEQ ID NO: 164446 - DNA, 25 bp, Probe Sequence
aaggtacagatagaggcctcacccc

SEQ ID NO: 164447 - DNA, 25 bp, Probe Sequence
aaggtaaaatgccatgatgcctctg

SEQ ID NO: 164448 - DNA, 25 bp, Probe Sequence
aaggcaaaaatcgttgtcacatcag

SEQ ID NO: 164449 - DNA, 25 bp, Probe Sequence
aaggcagaagaaatgcttagcaaac

SEQ ID NO: 164450 - DNA, 25 bp, Probe Sequence
aagggaatacacatacaaacacaca

SEQ ID NO: 164451 - DNA, 25 bp, Probe Sequence
aagggaggactactacaaaagcatt

SEQ ID NO: 164452 - DNA, 25 bp, Probe Sequence
aagggttgacttgaccatacagcta

SEQ ID NO: 164453 - DNA, 25 bp, Probe Sequence
caaggggaacgtgaccattatggat

SEQ ID NO: 164454 - DNA, 25 bp, Probe Sequence
aaggactaatccaatacctcttgga

SEQ ID NO: 164455 - DNA, 25 bp, Probe Sequence
aagggaaatctaaatcgtcttcaga

SEQ ID NO: 164456 - DNA, 25 bp, Probe Sequence
aagggtgaactgatactctgttgca

SEQ ID NO: 164457 - DNA, 25 bp, Probe Sequence
aagtgtgtgaggcaatacatatgtt

SEQ ID NO: 164458 - DNA, 25 bp, Probe Sequence
aagggatgagtgaagaagctggctt

SEQ ID NO: 164459 - DNA, 25 bp, Probe Sequence
aaggcagtgggaagaatgacaggtg

SEQ ID NO: 164460 - DNA, 25 bp, Probe Sequence
aaggacaggctacaatacaggtcag

SEQ ID NO: 164461 - DNA, 25 bp, Probe Sequence
aaggacaggcttcagcatcagcaaa

SEQ ID NO: 164462 - DNA, 25 bp, Probe Sequence
aagggcgactatcagccacacaaat

SEQ ID NO: 164463 - DNA, 25 bp, Probe Sequence
aagggctctcaaaactcaacagtaa

SEQ ID NO: 164464 - DNA, 25 bp, Probe Sequence
aaggcccttatgccaaaacgtatga

SEQ ID NO: 164465 - DNA, 25 bp, Probe Sequence
aaggcttccattgcaaatcgggtgt

SEQ ID NO: 164466 - DNA, 25 bp, Probe Sequence
aaggttctattcataatcagggtaa

SEQ ID NO: 164467 - DNA, 25 bp, Probe Sequence
aaggtatcatactgtttgaggtcta

SEQ ID NO: 164468 - DNA, 25 bp, Probe Sequence
aagggtctgcaagggtctgatggtt

SEQ ID NO: 164469 - DNA, 25 bp, Probe Sequence
aagggatctcgtgtttgctgagtgt

SEQ ID NO: 164470 - DNA, 25 bp, Probe Sequence
aagtggatacagttgatttgtgagt

SEQ ID NO: 164471 - DNA, 25 bp, Probe Sequence
aaggtgctagtgtatgagttgttgt

SEQ ID NO: 164472 - DNA, 25 bp, Probe Sequence
aaggccaaggcaggcagatcagttg

SEQ ID NO: 164473 - DNA, 25 bp, Probe Sequence
aaggccgagggccaggcagaatggc

SEQ ID NO: 164474 - DNA, 25 bp, Probe Sequence
aaggaccagggcacctatgaggatt

SEQ ID NO: 164475 - DNA, 25 bp, Probe Sequence
aaggaccagggcacctatgaggatt

SEQ ID NO: 164476 - DNA, 25 bp, Probe Sequence
aagggtagggctgccgatcagagct

SEQ ID NO: 164477 - DNA, 25 bp, Probe Sequence
aagggcttgcaggacctgaagcaac

SEQ ID NO: 164478 - DNA, 25 bp, Probe Sequence
aagggtgtgatccaagctatccaga

SEQ ID NO: 164479 - DNA, 25 bp, Probe Sequence
aagggtgtgatccaagctatccaga

SEQ ID NO: 164480 - DNA, 25 bp, Probe Sequence
aagggtgtgatccaagctatccaga

SEQ ID NO: 164481 - DNA, 25 bp, Probe Sequence
aagggtgtgatccaagctatccaga

SEQ ID NO: 164482 - DNA, 25 bp, Probe Sequence
aagggtgtgatccaagctatccaga

SEQ ID NO: 164483 - DNA, 25 bp, Probe Sequence
aatgggattcatgaccctctcaggg

SEQ ID NO: 164484 - DNA, 25 bp, Probe Sequence
aaggctgtctgtgattttccagggt

SEQ ID NO: 164485 - DNA, 25 bp, Probe Sequence
gtaggcgtctgtgtttcgcaaaagt

SEQ ID NO: 164486 - DNA, 25 bp, Probe Sequence
aaggcaacattccttacccattagt

SEQ ID NO: 164487 - DNA, 25 bp, Probe Sequence
aaggcaatcattttaagcttagatt

SEQ ID NO: 164488 - DNA, 25 bp, Probe Sequence
aaggccatcttagacagttggtgta

SEQ ID NO: 164489 - DNA, 25 bp, Probe Sequence
aaggtcatccatgacaactttggta

SEQ ID NO: 164490 - DNA, 25 bp, Probe Sequence
aagggtacatgttacacttcacaaa

SEQ ID NO: 164491 - DNA, 25 bp, Probe Sequence
aaggggagagaacacttcaaatatc

SEQ ID NO: 164492 - DNA, 25 bp, Probe Sequence
aaggaggaaaagaccttgacatatt

SEQ ID NO: 164493 - DNA, 25 bp, Probe Sequence
aagtggctcaaaaggccttgacaca

SEQ ID NO: 164494 - DNA, 25 bp, Probe Sequence
aagtggcgcacatagggtgtaactc

SEQ ID NO: 164495 - DNA, 25 bp, Probe Sequence
aaggatgagccccagcgggaaacgc

SEQ ID NO: 164496 - DNA, 25 bp, Probe Sequence
aaggaacctccagggcagttacagg

SEQ ID NO: 164497 - DNA, 25 bp, Probe Sequence
aagggacacctccaggagtctacat

SEQ ID NO: 164498 - DNA, 25 bp, Probe Sequence
aaggccactgttgcaaagtctacat

SEQ ID NO: 164499 - DNA, 25 bp, Probe Sequence
caagtccaagtacaaggcctccatc

SEQ ID NO: 164500 - DNA, 25 bp, Probe Sequence
aaggcactactaatgaacccctact

SEQ ID NO: 164501 - DNA, 25 bp, Probe Sequence
aaggcactaagtttacactcacttt

SEQ ID NO: 164502 - DNA, 25 bp, Probe Sequence
aagggatcaatttcaaaccctgctt

SEQ ID NO: 164503 - DNA, 25 bp, Probe Sequence
aaggtgataacttaagacagctctt

SEQ ID NO: 164504 - DNA, 25 bp, Probe Sequence
aagtggattatattaagcaggtatt

SEQ ID NO: 164505 - DNA, 25 bp, Probe Sequence
aaggagttcacagaagcggtggaag

SEQ ID NO: 164506 - DNA, 25 bp, Probe Sequence
aaggagtagcaagtcagtgggagga

SEQ ID NO: 164507 - DNA, 25 bp, Probe Sequence
aaggtctacaactatgtggactgga

SEQ ID NO: 164508 - DNA, 25 bp, Probe Sequence
aaggtctacaactatgtggactgga

SEQ ID NO: 164509 - DNA, 25 bp, Probe Sequence
aagggctacatctgtgtatactgtc

SEQ ID NO: 164510 - DNA, 25 bp, Probe Sequence
aagtggcatccataggatcatgatt

SEQ ID NO: 164511 - DNA, 25 bp, Probe Sequence
aagtggcatctcatggtggttttaa

SEQ ID NO: 164512 - DNA, 25 bp, Probe Sequence
aagggcatctctattagatctttag

SEQ ID NO: 164513 - DNA, 25 bp, Probe Sequence
aatgcggactgatgttagactttgg

SEQ ID NO: 164514 - DNA, 25 bp, Probe Sequence
aagtggactgcatctaatccatctt

SEQ ID NO: 164515 - DNA, 25 bp, Probe Sequence
aagggatctcatctaatctcatggc

SEQ ID NO: 164516 - DNA, 25 bp, Probe Sequence
caacgtagatgcagtgcaccctggc

SEQ ID NO: 164517 - DNA, 25 bp, Probe Sequence
aaggaagatcaactcatccctgcag

SEQ ID NO: 164518 - DNA, 25 bp, Probe Sequence
aaggacagtatgccattccacagcc

SEQ ID NO: 164519 - DNA, 25 bp, Probe Sequence
aaggtttaggcatcgcaaccgcaaa

SEQ ID NO: 164520 - DNA, 25 bp, Probe Sequence
aatggttgataggcccagaagccca

SEQ ID NO: 164521 - DNA, 25 bp, Probe Sequence
aaggaactacttcagtgcacacaca

SEQ ID NO: 164522 - DNA, 25 bp, Probe Sequence
aaggctaaagttgatctgaacaaaa

SEQ ID NO: 164523 - DNA, 25 bp, Probe Sequence
aaggatgacaaggacaataaaaaga

SEQ ID NO: 164524 - DNA, 25 bp, Probe Sequence
aaggctgagcaacagaaaaaggcgg

SEQ ID NO: 164525 - DNA, 25 bp, Probe Sequence
aaggcgagaagcagaattaaagacc

SEQ ID NO: 164526 - DNA, 25 bp, Probe Sequence
aagggagaagcaaagattccatcag

SEQ ID NO: 164527 - DNA, 25 bp, Probe Sequence
aaggggaagctcagcatgttcgtgc

SEQ ID NO: 164528 - DNA, 25 bp, Probe Sequence
aaggtgaaagctcctggttcagtgc

SEQ ID NO: 164529 - DNA, 25 bp, Probe Sequence
aaggtcaagcctgtgttgccagtgc

SEQ ID NO: 164530 - DNA, 25 bp, Probe Sequence
aaggatcaatggtcttgttgccgga

SEQ ID NO: 164531 - DNA, 25 bp, Probe Sequence
aaggcacactggtttttactgtact

SEQ ID NO: 164532 - DNA, 25 bp, Probe Sequence
aagggcaaggattctctgtacgccc

SEQ ID NO: 164533 - DNA, 25 bp, Probe Sequence
caatggtgaagattacggtaacggc

SEQ ID NO: 164534 - DNA, 25 bp, Probe Sequence
aaggctccagaatcgtgtaccaggc

SEQ ID NO: 164535 - DNA, 25 bp, Probe Sequence
aaggcccaggaggcttagtccagtc

SEQ ID NO: 164536 - DNA, 25 bp, Probe Sequence
aatgccgccatggagagctgtgacc

SEQ ID NO: 164537 - DNA, 25 bp, Probe Sequence
aatgacaatcatgtgtgttaaccca

SEQ ID NO: 164538 - DNA, 25 bp, Probe Sequence
aataaactattactggaaatgccaa

SEQ ID NO: 164539 - DNA, 25 bp, Probe Sequence
aatctaagtttggtgcgaacgccat

SEQ ID NO: 164540 - DNA, 25 bp, Probe Sequence
aatctactttgtctccataagcctg

SEQ ID NO: 164541 - DNA, 25 bp, Probe Sequence
caacttcttttctccttcaggaact

SEQ ID NO: 164542 - DNA, 25 bp, Probe Sequence
caacttcttttctccttcaggaact

SEQ ID NO: 164543 - DNA, 25 bp, Probe Sequence
gaatttgattttatccttccgaact

SEQ ID NO: 164544 - DNA, 25 bp, Probe Sequence
aatcttcatggcagttacttactga

SEQ ID NO: 164545 - DNA, 25 bp, Probe Sequence
aatttaggtcctatcattcctagta

SEQ ID NO: 164546 - DNA, 25 bp, Probe Sequence
aatattgggatcacttttccctgtc

SEQ ID NO: 164547 - DNA, 25 bp, Probe Sequence
aatttgggtaccacacgtacgcaca

SEQ ID NO: 164548 - DNA, 25 bp, Probe Sequence
aatgtaggcggagctacacccactg

SEQ ID NO: 164549 - DNA, 25 bp, Probe Sequence
aaggaagcacgggagaaatccacgt

SEQ ID NO: 164550 - DNA, 25 bp, Probe Sequence
gaatcgaatcaagaactcaatcccc

SEQ ID NO: 164551 - DNA, 25 bp, Probe Sequence
aatggaataacttacctgtcacctt

SEQ ID NO: 164552 - DNA, 25 bp, Probe Sequence
aaggataagagcagccctgacaccc

SEQ ID NO: 164553 - DNA, 25 bp, Probe Sequence
aaggtaggcagatcacctgaggtca

SEQ ID NO: 164554 - DNA, 25 bp, Probe Sequence
aaggagggcagatcacttcaggtca

SEQ ID NO: 164555 - DNA, 25 bp, Probe Sequence
aaggtgggctgatcacttgatccca

SEQ ID NO: 164556 - DNA, 25 bp, Probe Sequence
aaggatgccgcagaccattatctgg

SEQ ID NO: 164557 - DNA, 25 bp, Probe Sequence
aaggtggtgcaggagtatattgatg

SEQ ID NO: 164558 - DNA, 25 bp, Probe Sequence
aaggtcaggggctttatctatgaaa

SEQ ID NO: 164559 - DNA, 25 bp, Probe Sequence
cactgcgaaggcaggttattagaag

SEQ ID NO: 164560 - DNA, 25 bp, Probe Sequence
aaggccgagattattgccgacaagc

SEQ ID NO: 164561 - DNA, 25 bp, Probe Sequence
aaggagaagaccattgcggccaagc

SEQ ID NO: 164562 - DNA, 25 bp, Probe Sequence
aaggagaagaccattgcggccaagc

SEQ ID NO: 164563 - DNA, 25 bp, Probe Sequence
aaggagaaggcctcctggagcagcc

SEQ ID NO: 164564 - DNA, 25 bp, Probe Sequence
aaggagaagagggtgcggaggcagc

SEQ ID NO: 164565 - DNA, 25 bp, Probe Sequence
aagggagcagaggccagctgggggc

SEQ ID NO: 164566 - DNA, 25 bp, Probe Sequence
aagggagcagaggccagctgggggc

SEQ ID NO: 164567 - DNA, 25 bp, Probe Sequence
aaggtggcaggagtgcactggggat

SEQ ID NO: 164568 - DNA, 25 bp, Probe Sequence
aatgtgtggggagcaaaggcagtcc

SEQ ID NO: 164569 - DNA, 25 bp, Probe Sequence
aatggtcgtgccaaaaagggccgcg

SEQ ID NO: 164570 - DNA, 25 bp, Probe Sequence
aaggcgcgagcggaacaagctggct

SEQ ID NO: 164571 - DNA, 25 bp, Probe Sequence
aaggccagcagcagataacaacccc

SEQ ID NO: 164572 - DNA, 25 bp, Probe Sequence
aagggcacctcgaagacaacaacct

SEQ ID NO: 164573 - DNA, 25 bp, Probe Sequence
aatgggacctttgacagcagaccct

SEQ ID NO: 164574 - DNA, 25 bp, Probe Sequence
aagggcacctcagaaacagacacca

SEQ ID NO: 164575 - DNA, 25 bp, Probe Sequence
aaggccaaccgcgagaagatgaccc

SEQ ID NO: 164576 - DNA, 25 bp, Probe Sequence
aaggaggacccaggacaggatccag

SEQ ID NO: 164577 - DNA, 25 bp, Probe Sequence
aaggggacacacggcatcatgtcac

SEQ ID NO: 164578 - DNA, 25 bp, Probe Sequence
aaggtggacaaggcaagcgtccggc

SEQ ID NO: 164579 - DNA, 25 bp, Probe Sequence
aaggtgtatcaagccaagtacgccc

SEQ ID NO: 164580 - DNA, 25 bp, Probe Sequence
aagggtatcatatgcgcaagtacgc

SEQ ID NO: 164581 - DNA, 25 bp, Probe Sequence
aagggatgctcagatggcaggtaaa

SEQ ID NO: 164582 - DNA, 25 bp, Probe Sequence
aagggttctatattgtgagtaaatt

SEQ ID NO: 164583 - DNA, 25 bp, Probe Sequence
aagggtatctatacttagatcagaa

SEQ ID NO: 164584 - DNA, 25 bp, Probe Sequence
aaggcgatcctaatcttcaacaacc

SEQ ID NO: 164585 - DNA, 25 bp, Probe Sequence
aaggactccatttcatcttaaatgc

SEQ ID NO: 164586 - DNA, 25 bp, Probe Sequence
aaggattcagtttgagcctagaatg

SEQ ID NO: 164587 - DNA, 25 bp, Probe Sequence
aaggattctttgtgacactgagacc

SEQ ID NO: 164588 - DNA, 25 bp, Probe Sequence
aaggtcttggtaaagcctgcatggc

SEQ ID NO: 164589 - DNA, 25 bp, Probe Sequence
aaggttgggacaaagccatctgggc

SEQ ID NO: 164590 - DNA, 25 bp, Probe Sequence
aaggtgctgggcatgagaccaaggg

SEQ ID NO: 164591 - DNA, 25 bp, Probe Sequence
aaggaccatggaatgaactaaagcc

SEQ ID NO: 164592 - DNA, 25 bp, Probe Sequence
aaggactcatggacgcaaagaaggg

SEQ ID NO: 164593 - DNA, 25 bp, Probe Sequence
aagggtcagaactacagcaataggt

SEQ ID NO: 164594 - DNA, 25 bp, Probe Sequence
aaggggagagtcggctcaatctggt

SEQ ID NO: 164595 - DNA, 25 bp, Probe Sequence
aaggggaagggagttgtctgccatt

SEQ ID NO: 164596 - DNA, 25 bp, Probe Sequence
aagggagggaggtctgttctatctg

SEQ ID NO: 164597 - DNA, 25 bp, Probe Sequence
aagggagcactgggttgactttcag

SEQ ID NO: 164598 - DNA, 25 bp, Probe Sequence
aaggagaacccagttgacttgcctg

SEQ ID NO: 164599 - DNA, 25 bp, Probe Sequence
aaggctggatacggttgacttcacg

SEQ ID NO: 164600 - DNA, 25 bp, Probe Sequence
aaggctggacaagttcgtcctgcct

SEQ ID NO: 164601 - DNA, 25 bp, Probe Sequence
aaggaagatggtgtcctctgctgcc

SEQ ID NO: 164602 - DNA, 25 bp, Probe Sequence
aatgtgaagctgccatgttgccttt

SEQ ID NO: 164603 - DNA, 25 bp, Probe Sequence
aaggatactgtacttatgatttaaa

SEQ ID NO: 164604 - DNA, 25 bp, Probe Sequence
aaggtttctactgctgtattatcta

SEQ ID NO: 164605 - DNA, 25 bp, Probe Sequence
aagggattccctaatatgtatacta

SEQ ID NO: 164606 - DNA, 25 bp, Probe Sequence
aagggagtcaccttcaatgttacca

SEQ ID NO: 164607 - DNA, 25 bp, Probe Sequence
aagggagcacacagctcttcttaaa

SEQ ID NO: 164608 - DNA, 25 bp, Probe Sequence
aagggagcacacagctcttcttaaa

SEQ ID NO: 164609 - DNA, 25 bp, Probe Sequence
aaggcaatgccacggctttgttcat

SEQ ID NO: 164610 - DNA, 25 bp, Probe Sequence
aaggactggcacaagttctgcctca

SEQ ID NO: 164611 - DNA, 25 bp, Probe Sequence
aaggtgctggcacagatgactccac

SEQ ID NO: 164612 - DNA, 25 bp, Probe Sequence
aatggcatggtcttgaagccccact

SEQ ID NO: 164613 - DNA, 25 bp, Probe Sequence
aaggcaatgatcctaatgtaaacat

SEQ ID NO: 164614 - DNA, 25 bp, Probe Sequence
aaggactatccttgaggcaaaacaa

SEQ ID NO: 164615 - DNA, 25 bp, Probe Sequence
aaggaatttgcttcggaaccacata

SEQ ID NO: 164616 - DNA, 25 bp, Probe Sequence
aaggaactggcactccaaactaagg

SEQ ID NO: 164617 - DNA, 25 bp, Probe Sequence
aaggaagcttggtccacttgcttga

SEQ ID NO: 164618 - DNA, 25 bp, Probe Sequence
aaggcagtcctggaatcacattctt

SEQ ID NO: 164619 - DNA, 25 bp, Probe Sequence
aaggcagtcctggaatcacattctt

SEQ ID NO: 164620 - DNA, 25 bp, Probe Sequence
aagggatcctgattcacacattgta

SEQ ID NO: 164621 - DNA, 25 bp, Probe Sequence
aaggacccgtgtcacatcgtgaata

SEQ ID NO: 164622 - DNA, 25 bp, Probe Sequence
aaggagccaattccaactctgtaaa

SEQ ID NO: 164623 - DNA, 25 bp, Probe Sequence
aagggtatttaatgctctgtcaagc

SEQ ID NO: 164624 - DNA, 25 bp, Probe Sequence
aaggtaatttgttagctctgcccct

SEQ ID NO: 164625 - DNA, 25 bp, Probe Sequence
aaggtgacgattctcactcacctct

SEQ ID NO: 164626 - DNA, 25 bp, Probe Sequence
aaggtgggattcatgtcgaggctag

SEQ ID NO: 164627 - DNA, 25 bp, Probe Sequence
aagggggctacttgtgagagtctaa

SEQ ID NO: 164628 - DNA, 25 bp, Probe Sequence
aaggctgggtaatgtgaaggcccaa

SEQ ID NO: 164629 - DNA, 25 bp, Probe Sequence
aaggtggagtactagagcctggcca

SEQ ID NO: 164630 - DNA, 25 bp, Probe Sequence
aaggtgttgctaaaagtctgaggat

SEQ ID NO: 164631 - DNA, 25 bp, Probe Sequence
aaggtgtattcatatcaggatggga

SEQ ID NO: 164632 - DNA, 25 bp, Probe Sequence
aagggtgttaaagtgctgaggtgaa

SEQ ID NO: 164633 - DNA, 25 bp, Probe Sequence
aagggtgtggcacaggctacgtgtt

SEQ ID NO: 164634 - DNA, 25 bp, Probe Sequence
aaggaattggctcaacttcagttga

SEQ ID NO: 164635 - DNA, 25 bp, Probe Sequence
aaggacactggcaatatccccagct

SEQ ID NO: 164636 - DNA, 25 bp, Probe Sequence
aaggccatatgtgagacccacagct

SEQ ID NO: 164637 - DNA, 25 bp, Probe Sequence
aaggaaatgctgcggccaacatctt

SEQ ID NO: 164638 - DNA, 25 bp, Probe Sequence
aaggaaatgtgaacgtcttctgctt

SEQ ID NO: 164639 - DNA, 25 bp, Probe Sequence
aaggaaatgtgaacgtcttctgctt

SEQ ID NO: 164640 - DNA, 25 bp, Probe Sequence
aaggcaattgtgggctatttttatt

SEQ ID NO: 164641 - DNA, 25 bp, Probe Sequence
aaggattcctagcctattcttactt

SEQ ID NO: 164642 - DNA, 25 bp, Probe Sequence
aatctcaactaacgcctacattaca

SEQ ID NO: 164643 - DNA, 25 bp, Probe Sequence
aatgtcaagttaggcactacttaca

SEQ ID NO: 164644 - DNA, 25 bp, Probe Sequence
aatgccacggtacaatggtttcaga

SEQ ID NO: 164645 - DNA, 25 bp, Probe Sequence
aatggacggattggacaggttggaa

SEQ ID NO: 164646 - DNA, 25 bp, Probe Sequence
aatgaaaggattgcccgattttatc

SEQ ID NO: 164647 - DNA, 25 bp, Probe Sequence
aatggtcagtaagccccatttcctg

SEQ ID NO: 164648 - DNA, 25 bp, Probe Sequence
aatgtatgaaacacccctgttccta

SEQ ID NO: 164649 - DNA, 25 bp, Probe Sequence
aatgtataaactcacctctggtaac

SEQ ID NO: 164650 - DNA, 25 bp, Probe Sequence
aaggaataacctgagactgtgtaat

SEQ ID NO: 164651 - DNA, 25 bp, Probe Sequence
aatggttacccatcagattttaatt

SEQ ID NO: 164652 - DNA, 25 bp, Probe Sequence
aaggttgctcatgaacagaatattc

SEQ ID NO: 164653 - DNA, 25 bp, Probe Sequence
aaggttgcatgccaatgaaaacatt

SEQ ID NO: 164654 - DNA, 25 bp, Probe Sequence
aatagttcagagtgaaaaccttttg

SEQ ID NO: 164655 - DNA, 25 bp, Probe Sequence
aatcatttcaggtggttacagtttt

SEQ ID NO: 164656 - DNA, 25 bp, Probe Sequence
aatgcctgggagtggctataggggt

SEQ ID NO: 164657 - DNA, 25 bp, Probe Sequence
caaactgggaactctagccgtggtc

SEQ ID NO: 164658 - DNA, 25 bp, Probe Sequence
caagcattggtatctacggcctgga

SEQ ID NO: 164659 - DNA, 25 bp, Probe Sequence
aataaggccatgactacgggggcaa

SEQ ID NO: 164660 - DNA, 25 bp, Probe Sequence
aataataccaacaactggagggaga

SEQ ID NO: 164661 - DNA, 25 bp, Probe Sequence
aaggatagccttaacaacggtgaag

SEQ ID NO: 164662 - DNA, 25 bp, Probe Sequence
aaggatatccttaaacagctgttta

SEQ ID NO: 164663 - DNA, 25 bp, Probe Sequence
aaggatatccttaaacagctgttta

SEQ ID NO: 164664 - DNA, 25 bp, Probe Sequence
aaggtgatcctggtaactgttccag

SEQ ID NO: 164665 - DNA, 25 bp, Probe Sequence
aaggacaacatggtgtcctattacc

SEQ ID NO: 164666 - DNA, 25 bp, Probe Sequence
aatccacaaatttgtcccttacctg

SEQ ID NO: 164667 - DNA, 25 bp, Probe Sequence
aatgctaaaattcgtccgggagttg

SEQ ID NO: 164668 - DNA, 25 bp, Probe Sequence
aatgcattttttattcttaagtggt

SEQ ID NO: 164669 - DNA, 25 bp, Probe Sequence
aaggttggattcatgtttaagtggt

SEQ ID NO: 164670 - DNA, 25 bp, Probe Sequence
aatggttggtgttgtgtttaaagtg

SEQ ID NO: 164671 - DNA, 25 bp, Probe Sequence
aaggtataggcttgccttgctgaga

SEQ ID NO: 164672 - DNA, 25 bp, Probe Sequence
aaggtcaaggccttcttggctgatc

SEQ ID NO: 164673 - DNA, 25 bp, Probe Sequence
aaggtcaaggccttcttggctgatc

SEQ ID NO: 164674 - DNA, 25 bp, Probe Sequence
aaggacaaggacactctgacattcg

SEQ ID NO: 164675 - DNA, 25 bp, Probe Sequence
aaggaaagggcaccatcttcatggg

SEQ ID NO: 164676 - DNA, 25 bp, Probe Sequence
aaggacaaggacacatcctctgacc

SEQ ID NO: 164677 - DNA, 25 bp, Probe Sequence
aaggcctaatgaggtcaccctgact

SEQ ID NO: 164678 - DNA, 25 bp, Probe Sequence
aaggctttcagagagaccctgagtc

SEQ ID NO: 164679 - DNA, 25 bp, Probe Sequence
aagggtctcaagacagtgccctgtg

SEQ ID NO: 164680 - DNA, 25 bp, Probe Sequence
aatgcaggggaaacgatgccatttc

SEQ ID NO: 164681 - DNA, 25 bp, Probe Sequence
aatgagggtgactcgacaacctcca

SEQ ID NO: 164682 - DNA, 25 bp, Probe Sequence
aatgtaggatgatctggaaacccca

SEQ ID NO: 164683 - DNA, 25 bp, Probe Sequence
aattaggtacaaatggaatcccaat

SEQ ID NO: 164684 - DNA, 25 bp, Probe Sequence
aattaggattgcccaggagtccaac

SEQ ID NO: 164685 - DNA, 25 bp, Probe Sequence
aaggggatatcaccaccaatcccac

SEQ ID NO: 164686 - DNA, 25 bp, Probe Sequence
aaggggttcgagtgcaagcctcact

SEQ ID NO: 164687 - DNA, 25 bp, Probe Sequence
aaggtggcaatgggacccagctcca

SEQ ID NO: 164688 - DNA, 25 bp, Probe Sequence
aaggtggatgtggtggccgagaccc

SEQ ID NO: 164689 - DNA, 25 bp, Probe Sequence
aaggagagtggagtggcccaccacc

SEQ ID NO: 164690 - DNA, 25 bp, Probe Sequence
aaggagagtggagtggcccaccacc

SEQ ID NO: 164691 - DNA, 25 bp, Probe Sequence
aaggaggtggaagtcacgcgcaccc

SEQ ID NO: 164692 - DNA, 25 bp, Probe Sequence
aatgaacagttgtactcagggccca

SEQ ID NO: 164693 - DNA, 25 bp, Probe Sequence
aaggatcagctccggctaagaggcc

SEQ ID NO: 164694 - DNA, 25 bp, Probe Sequence
aaggtcagccttcctgaggatgggc

SEQ ID NO: 164695 - DNA, 25 bp, Probe Sequence
aaggtcaccattctgcagagcagtg

SEQ ID NO: 164696 - DNA, 25 bp, Probe Sequence
aaggtccttatactgcagatcctct

SEQ ID NO: 164697 - DNA, 25 bp, Probe Sequence
aaggtctctttattggattaatccg

SEQ ID NO: 164698 - DNA, 25 bp, Probe Sequence
aaggaccttatttggcatataaaat

SEQ ID NO: 164699 - DNA, 25 bp, Probe Sequence
aaggatccttattacaggaaaagca

SEQ ID NO: 164700 - DNA, 25 bp, Probe Sequence
aaggtcctgtgcaaatagtgtcaaa

SEQ ID NO: 164701 - DNA, 25 bp, Probe Sequence
aaggttgctgtgctatttgacaaac

SEQ ID NO: 164702 - DNA, 25 bp, Probe Sequence
aaggggctagattatcttccaatag

SEQ ID NO: 164703 - DNA, 25 bp, Probe Sequence
aaggggctgcttttcaaccaagagc

SEQ ID NO: 164704 - DNA, 25 bp, Probe Sequence
aaggtcacctgtttaatgccaagat

SEQ ID NO: 164705 - DNA, 25 bp, Probe Sequence
aaggtctttggtaaagtcacatgtt

SEQ ID NO: 164706 - DNA, 25 bp, Probe Sequence
aaggcgctttggctaagctggtgga

SEQ ID NO: 164707 - DNA, 25 bp, Probe Sequence
aaggcgctttggctaagctggtgga

SEQ ID NO: 164708 - DNA, 25 bp, Probe Sequence
aagggggatgcacttaggtggtgaa

SEQ ID NO: 164709 - DNA, 25 bp, Probe Sequence
aaggatgaggtaggtaggcaggaaa

SEQ ID NO: 164710 - DNA, 25 bp, Probe Sequence
aaggagggcttggtcagcagcatgg

SEQ ID NO: 164711 - DNA, 25 bp, Probe Sequence
aaggagagctgcatgctcaacctgc

SEQ ID NO: 164712 - DNA, 25 bp, Probe Sequence
aaggtgcagctcgtggacaatgtct

SEQ ID NO: 164713 - DNA, 25 bp, Probe Sequence
aaggtgcaatcattggactcatggt

SEQ ID NO: 164714 - DNA, 25 bp, Probe Sequence
aaggccaatcaatgcactgtctgtc

SEQ ID NO: 164715 - DNA, 25 bp, Probe Sequence
aaggatgctaaattccgtctgattc

SEQ ID NO: 164716 - DNA, 25 bp, Probe Sequence
aaggtatacaaatctgtctacatga

SEQ ID NO: 164717 - DNA, 25 bp, Probe Sequence
aaggcttaaagactgcatgcccaag

SEQ ID NO: 164718 - DNA, 25 bp, Probe Sequence
aaggttaataattcatgccaaaaat

SEQ ID NO: 164719 - DNA, 25 bp, Probe Sequence
aaggattaattttcattcatcaacc

SEQ ID NO: 164720 - DNA, 25 bp, Probe Sequence
aaggagtaattgtttttggcaccag

SEQ ID NO: 164721 - DNA, 25 bp, Probe Sequence
aaggcagttactgactttccatcaa

SEQ ID NO: 164722 - DNA, 25 bp, Probe Sequence
aaggcagataaacaggcattccata

SEQ ID NO: 164723 - DNA, 25 bp, Probe Sequence
aaggaccagaaccaggaatactata

SEQ ID NO: 164724 - DNA, 25 bp, Probe Sequence
aaggacggcaagtacgacctataca

SEQ ID NO: 164725 - DNA, 25 bp, Probe Sequence
aaggacagcgagctactgaccttca

SEQ ID NO: 164726 - DNA, 25 bp, Probe Sequence
aaggcaagagatgataagctgttta

SEQ ID NO: 164727 - DNA, 25 bp, Probe Sequence
aaggcagcaaggtcgtagctgtgtt

SEQ ID NO: 164728 - DNA, 25 bp, Probe Sequence
aaggcagcgcatgtatgttggggtt

SEQ ID NO: 164729 - DNA, 25 bp, Probe Sequence
aaggtgatgcatttattctgggtta

SEQ ID NO: 164730 - DNA, 25 bp, Probe Sequence
aaggtggacatcttttggatatctt

SEQ ID NO: 164731 - DNA, 25 bp, Probe Sequence
aaggcggcactacttatgtaaatct

SEQ ID NO: 164732 - DNA, 25 bp, Probe Sequence
aaggagctgcattaattctggaaga

SEQ ID NO: 164733 - DNA, 25 bp, Probe Sequence
aaggatgtgcaaacagctctggctc

SEQ ID NO: 164734 - DNA, 25 bp, Probe Sequence
aaggtgtgcagatcactgcaggtca

SEQ ID NO: 164735 - DNA, 25 bp, Probe Sequence
aaggttgctgttgtgcagtgtgcct

SEQ ID NO: 164736 - DNA, 25 bp, Probe Sequence
aaggttctgtcaagattttcactgt

SEQ ID NO: 164737 - DNA, 25 bp, Probe Sequence
aaggactctggaagattttcattga

SEQ ID NO: 164738 - DNA, 25 bp, Probe Sequence
aaggcattcgatgcgtgtttaatga

SEQ ID NO: 164739 - DNA, 25 bp, Probe Sequence
aaggattcattgacgggcattacaa

SEQ ID NO: 164740 - DNA, 25 bp, Probe Sequence
aatggattttgttgggcaccgaaat

SEQ ID NO: 164741 - DNA, 25 bp, Probe Sequence
aaggatttgcattacgtcactcgaa

SEQ ID NO: 164742 - DNA, 25 bp, Probe Sequence
aaggcatttgttgctatcggggact

SEQ ID NO: 164743 - DNA, 25 bp, Probe Sequence
aaggtttgtaccttctgtgctggat

SEQ ID NO: 164744 - DNA, 25 bp, Probe Sequence
aaggatgcttgtacataatgcgtgc

SEQ ID NO: 164745 - DNA, 25 bp, Probe Sequence
aaggccgctgctaatcagatgcgca

SEQ ID NO: 164746 - DNA, 25 bp, Probe Sequence
aaggtcactgagaataggagagcgt

SEQ ID NO: 164747 - DNA, 25 bp, Probe Sequence
aaggctcctcaggctgcaggaaaga

SEQ ID NO: 164748 - DNA, 25 bp, Probe Sequence
aaggttatcagtgagctgaatggaa

SEQ ID NO: 164749 - DNA, 25 bp, Probe Sequence
aaggctaaaggctatgcgatatgaa

SEQ ID NO: 164750 - DNA, 25 bp, Probe Sequence
aaggtcaaaggcttcgcaaccagga

SEQ ID NO: 164751 - DNA, 25 bp, Probe Sequence
aaggccaaagagcagccagaccctg

SEQ ID NO: 164752 - DNA, 25 bp, Probe Sequence
aaggccagacttaggccagagccca

SEQ ID NO: 164753 - DNA, 25 bp, Probe Sequence
aaggccgtatttacaatgacttaat

SEQ ID NO: 164754 - DNA, 25 bp, Probe Sequence
aaggcctttaataagtcattgaaat

SEQ ID NO: 164755 - DNA, 25 bp, Probe Sequence
aaggtccttagcaaagtctcagaaa

SEQ ID NO: 164756 - DNA, 25 bp, Probe Sequence
aatgggcacttaaagctttcagaat

SEQ ID NO: 164757 - DNA, 25 bp, Probe Sequence
aaggagaatatatatcttgtgaaaa

SEQ ID NO: 164758 - DNA, 25 bp, Probe Sequence
aaggaaatccagaagcataccaaaa

SEQ ID NO: 164759 - DNA, 25 bp, Probe Sequence
aatggaagataaataatatcccaaa

SEQ ID NO: 164760 - DNA, 25 bp, Probe Sequence
aaggaagatatcatcaaattctaca

SEQ ID NO: 164761 - DNA, 25 bp, Probe Sequence
aaggaaactttaatgctgtctagcc

SEQ ID NO: 164762 - DNA, 25 bp, Probe Sequence
aaggaagaatcttcttccccagctt

SEQ ID NO: 164763 - DNA, 25 bp, Probe Sequence
aaggacagaggctgttccctatggc

SEQ ID NO: 164764 - DNA, 25 bp, Probe Sequence
aaggagcatgcaagttgtccccttg

SEQ ID NO: 164765 - DNA, 25 bp, Probe Sequence
aatggcaaaattagtcgccttcgtc

SEQ ID NO: 164766 - DNA, 25 bp, Probe Sequence
aatggaaaactaagcacctattttg

SEQ ID NO: 164767 - DNA, 25 bp, Probe Sequence
aaggaatacacatcttgcctttttt

SEQ ID NO: 164768 - DNA, 25 bp, Probe Sequence
aaggacattcactttatgccctgct

SEQ ID NO: 164769 - DNA, 25 bp, Probe Sequence
aaggaattcgcaagatggcgccgtc

SEQ ID NO: 164770 - DNA, 25 bp, Probe Sequence
aaggaaggcagcaggcgcgcaaatt

SEQ ID NO: 164771 - DNA, 25 bp, Probe Sequence
aaggacagtaagaacccaatgaatg

SEQ ID NO: 164772 - DNA, 25 bp, Probe Sequence
aaggcctacagacacaccgagaagg

SEQ ID NO: 164773 - DNA, 25 bp, Probe Sequence
aaggcctctaatttcacagcacaga

SEQ ID NO: 164774 - DNA, 25 bp, Probe Sequence
aatgtgtttaataccaagaagagta

SEQ ID NO: 164775 - DNA, 25 bp, Probe Sequence
aatgggactaataacacatagggtt

SEQ ID NO: 164776 - DNA, 25 bp, Probe Sequence
aatggagtctaaacacctataagtg

SEQ ID NO: 164777 - DNA, 25 bp, Probe Sequence
aaggacttagacctcacatattaat

SEQ ID NO: 164778 - DNA, 25 bp, Probe Sequence
aaggtttagctccacatcatgcttc

SEQ ID NO: 164779 - DNA, 25 bp, Probe Sequence
aaggagtgttcctaacagctttata

SEQ ID NO: 164780 - DNA, 25 bp, Probe Sequence
aaggagttcaactaatcaggaatta

SEQ ID NO: 164781 - DNA, 25 bp, Probe Sequence
aaggatggtcacacaccagcacttt

SEQ ID NO: 164782 - DNA, 25 bp, Probe Sequence
aaggttaacatgtcactagagtatt

SEQ ID NO: 164783 - DNA, 25 bp, Probe Sequence
aaggtttacagcaactaagtgaatg

SEQ ID NO: 164784 - DNA, 25 bp, Probe Sequence
aaggtttatccaacttgcagtgtat

SEQ ID NO: 164785 - DNA, 25 bp, Probe Sequence
aaggtttatctcaagtctcaattga

SEQ ID NO: 164786 - DNA, 25 bp, Probe Sequence
aatggtacttctacagtctaatcgt

SEQ ID NO: 164787 - DNA, 25 bp, Probe Sequence
aaggtcaagtctaatgttacattcg

SEQ ID NO: 164788 - DNA, 25 bp, Probe Sequence
aaggtcaaactaattctcacatccc

SEQ ID NO: 164789 - DNA, 25 bp, Probe Sequence
aatgtcggacactactttcaaagcc

SEQ ID NO: 164790 - DNA, 25 bp, Probe Sequence
aaggagtgaacatcattcaaagaca

SEQ ID NO: 164791 - DNA, 25 bp, Probe Sequence
aatgtgaaaaatgttgcaaagcctt

SEQ ID NO: 164792 - DNA, 25 bp, Probe Sequence
aaggataatacttttaatatgcact

SEQ ID NO: 164793 - DNA, 25 bp, Probe Sequence
aaggaacatcctttttgacatacat

SEQ ID NO: 164794 - DNA, 25 bp, Probe Sequence
aaggaatcgacttctatacctccat

SEQ ID NO: 164795 - DNA, 25 bp, Probe Sequence
aaggaatccattcatgagaccccat

SEQ ID NO: 164796 - DNA, 25 bp, Probe Sequence
aaggacaccattttggcaagctcta

SEQ ID NO: 164797 - DNA, 25 bp, Probe Sequence
aaggagctcgccaggaagcacctgg

SEQ ID NO: 164798 - DNA, 25 bp, Probe Sequence
aaggagcacgcaacgtagatgcatc

SEQ ID NO: 164799 - DNA, 25 bp, Probe Sequence
aaggcgatgcacaacagattatacg

SEQ ID NO: 164800 - DNA, 25 bp, Probe Sequence
aaggagatgccttggggttcgtgca

SEQ ID NO: 164801 - DNA, 25 bp, Probe Sequence
aaggagatgccttggggttcgtgca

SEQ ID NO: 164802 - DNA, 25 bp, Probe Sequence
aatggagtctgcagatgggttcgcg

SEQ ID NO: 164803 - DNA, 25 bp, Probe Sequence
aaggatggagatcgagggtccccag

SEQ ID NO: 164804 - DNA, 25 bp, Probe Sequence
aatggagggggagtgttctctcaag

SEQ ID NO: 164805 - DNA, 25 bp, Probe Sequence
aaggaatctgtggagcttcctctca

SEQ ID NO: 164806 - DNA, 25 bp, Probe Sequence
aaggaatctgtggagcttcctctca

SEQ ID NO: 164807 - DNA, 25 bp, Probe Sequence
aaggatttgatgcttttctctcagc

SEQ ID NO: 164808 - DNA, 25 bp, Probe Sequence
aaggattcttctatttcaccagctt

SEQ ID NO: 164809 - DNA, 25 bp, Probe Sequence
aaggatgagttctgatgttccccct

SEQ ID NO: 164810 - DNA, 25 bp, Probe Sequence
aaggattcgtcatcattttccctct

SEQ ID NO: 164811 - DNA, 25 bp, Probe Sequence
aaggatgtgctgacttttttccttg

SEQ ID NO: 164812 - DNA, 25 bp, Probe Sequence
aaggatgttcactgtctgttatctg

SEQ ID NO: 164813 - DNA, 25 bp, Probe Sequence
aaggatgttcactgtctgttatctg

SEQ ID NO: 164814 - DNA, 25 bp, Probe Sequence
aaggatgttcactgtctgttatctg

SEQ ID NO: 164815 - DNA, 25 bp, Probe Sequence
aaggatgttcactgtctgttatctg

SEQ ID NO: 164816 - DNA, 25 bp, Probe Sequence
aaggaatatctcggtgccatttgct

SEQ ID NO: 164817 - DNA, 25 bp, Probe Sequence
aaggaatatctcggtgccatttgct

SEQ ID NO: 164818 - DNA, 25 bp, Probe Sequence
aaggaatatctcggtgccatttgct

SEQ ID NO: 164819 - DNA, 25 bp, Probe Sequence
aaggaggagctagattcatatccta

SEQ ID NO: 164820 - DNA, 25 bp, Probe Sequence
aaggagtggctgctctccaaactat

SEQ ID NO: 164821 - DNA, 25 bp, Probe Sequence
aatgggcggatctttgccaatactc

SEQ ID NO: 164822 - DNA, 25 bp, Probe Sequence
aatgaggcgtgcgccgccaatatgc

SEQ ID NO: 164823 - DNA, 25 bp, Probe Sequence
aaggccagtcggactgcgacatagc

SEQ ID NO: 164824 - DNA, 25 bp, Probe Sequence
aaggacagtcttacagcgtcaatgt

SEQ ID NO: 164825 - DNA, 25 bp, Probe Sequence
aaggcatcatctatctcacttcaaa

SEQ ID NO: 164826 - DNA, 25 bp, Probe Sequence
aaggcatttgcaggatgagcctgaa

SEQ ID NO: 164827 - DNA, 25 bp, Probe Sequence
aaggcattcgctcctgagcggaatc

SEQ ID NO: 164828 - DNA, 25 bp, Probe Sequence
aaggcatctgcctaatagggtcccc

SEQ ID NO: 164829 - DNA, 25 bp, Probe Sequence
aaggctgccaatctgagtagtactc

SEQ ID NO: 164830 - DNA, 25 bp, Probe Sequence
aatgagcgccaacagattaaagcca

SEQ ID NO: 164831 - DNA, 25 bp, Probe Sequence
aatggtagcagccacaagtaaagga

SEQ ID NO: 164832 - DNA, 25 bp, Probe Sequence
aaggtcaagataaagtcaaagcgca

SEQ ID NO: 164833 - DNA, 25 bp, Probe Sequence
aaggtcaagacctagttgagaagat

SEQ ID NO: 164834 - DNA, 25 bp, Probe Sequence
aaggaaagtctatgatgggaatgct

SEQ ID NO: 164835 - DNA, 25 bp, Probe Sequence
aatggaaacatcactggggtcactt

SEQ ID NO: 164836 - DNA, 25 bp, Probe Sequence
aaggaaggctcaactcgggcttgcc

SEQ ID NO: 164837 - DNA, 25 bp, Probe Sequence
aaggatcagtttccggaggtctacg

SEQ ID NO: 164838 - DNA, 25 bp, Probe Sequence
aaggatcagggtcagtgtggctctt

SEQ ID NO: 164839 - DNA, 25 bp, Probe Sequence
aaggctagggccgagattagagctc

SEQ ID NO: 164840 - DNA, 25 bp, Probe Sequence
aaggacagcgcagctctattaagct

SEQ ID NO: 164841 - DNA, 25 bp, Probe Sequence
aaggaggcgcagacatctttcctgc

SEQ ID NO: 164842 - DNA, 25 bp, Probe Sequence
aaggttctgcagacattgctcggtg

SEQ ID NO: 164843 - DNA, 25 bp, Probe Sequence
aaggctatctcaatttcatgggtaa

SEQ ID NO: 164844 - DNA, 25 bp, Probe Sequence
aaggcttcttattcgggtgtgagtc

SEQ ID NO: 164845 - DNA, 25 bp, Probe Sequence
aaggcttcttattcgggtgtgagtc

SEQ ID NO: 164846 - DNA, 25 bp, Probe Sequence
aaggcttcttattcgggtgtgagtc

SEQ ID NO: 164847 - DNA, 25 bp, Probe Sequence
aaggcttcttattcgggtgtgagtc

SEQ ID NO: 164848 - DNA, 25 bp, Probe Sequence
aaggaatcctcttctgggttgaatc

SEQ ID NO: 164849 - DNA, 25 bp, Probe Sequence
aatggaacttgctcgggttcaatta

SEQ ID NO: 164850 - DNA, 25 bp, Probe Sequence
aaggaccattgctcaggctgtctat

SEQ ID NO: 164851 - DNA, 25 bp, Probe Sequence
aaggaactgacagcagtgcttacat

SEQ ID NO: 164852 - DNA, 25 bp, Probe Sequence
aaggtagcagcaagccaggtatggt

SEQ ID NO: 164853 - DNA, 25 bp, Probe Sequence
aaggctgaggccgacaagaatgata

SEQ ID NO: 164854 - DNA, 25 bp, Probe Sequence
aaggctgcagtgagtcgtgattgtg

SEQ ID NO: 164855 - DNA, 25 bp, Probe Sequence
aaggatcactgtaggtggttgtgga

SEQ ID NO: 164856 - DNA, 25 bp, Probe Sequence
aaggttcattcgcataggtgtgagc

SEQ ID NO: 164857 - DNA, 25 bp, Probe Sequence
aaggttctgaagcagaggggctcaa

SEQ ID NO: 164858 - DNA, 25 bp, Probe Sequence
aaggttcctgaaagagtccctcaga

SEQ ID NO: 164859 - DNA, 25 bp, Probe Sequence
aaggttactgaaagctctgccttcc

SEQ ID NO: 164860 - DNA, 25 bp, Probe Sequence
aatggttggtgattagattgcctct

SEQ ID NO: 164861 - DNA, 25 bp, Probe Sequence
aatggcttgcttaagacttgcccaa

SEQ ID NO: 164862 - DNA, 25 bp, Probe Sequence
aatggcttactcaaccaagcggcag

SEQ ID NO: 164863 - DNA, 25 bp, Probe Sequence
aaggctgtgtgtgcaccagccacga

SEQ ID NO: 164864 - DNA, 25 bp, Probe Sequence
aaggctagtgtgactacagccaaat

SEQ ID NO: 164865 - DNA, 25 bp, Probe Sequence
aaggagactgtttatcaccaagatc

SEQ ID NO: 164866 - DNA, 25 bp, Probe Sequence
aaggagcactttaattacaactgaa

SEQ ID NO: 164867 - DNA, 25 bp, Probe Sequence
aatgaaacctttacaacacaatgaa

SEQ ID NO: 164868 - DNA, 25 bp, Probe Sequence
aatggaaagtttccagtacactgaa

SEQ ID NO: 164869 - DNA, 25 bp, Probe Sequence
aaggcaaacttgtcacgcatgccac

SEQ ID NO: 164870 - DNA, 25 bp, Probe Sequence
aaggaatactagtgcagcataaccc

SEQ ID NO: 164871 - DNA, 25 bp, Probe Sequence
aaggaacttcaattcactaaggcca

SEQ ID NO: 164872 - DNA, 25 bp, Probe Sequence
aaggaagtgctaaacatgctgaagg

SEQ ID NO: 164873 - DNA, 25 bp, Probe Sequence
aaggacttttgaactagaatgtgta

SEQ ID NO: 164874 - DNA, 25 bp, Probe Sequence
aaggacttgataacctggctacagc

SEQ ID NO: 164875 - DNA, 25 bp, Probe Sequence
aaggagtgatgaaactggagtaatg

SEQ ID NO: 164876 - DNA, 25 bp, Probe Sequence
aaggagctgatgatactggccacgt

SEQ ID NO: 164877 - DNA, 25 bp, Probe Sequence
aaggagctgtctgacatcgctcacc

SEQ ID NO: 164878 - DNA, 25 bp, Probe Sequence
aaggagctgtctgacatcgctcacc

SEQ ID NO: 164879 - DNA, 25 bp, Probe Sequence
aaggagctgtctgacatcgctcacc

SEQ ID NO: 164880 - DNA, 25 bp, Probe Sequence
aaggactgaagccactacataccta

SEQ ID NO: 164881 - DNA, 25 bp, Probe Sequence
aaggactcagtgcataagatgactt

SEQ ID NO: 164882 - DNA, 25 bp, Probe Sequence
aatgaaccgggcatagtagcatgtg

SEQ ID NO: 164883 - DNA, 25 bp, Probe Sequence
aaggaactgccgactaggactgatg

SEQ ID NO: 164884 - DNA, 25 bp, Probe Sequence
aaggaaatgtcagcattgggctggg

SEQ ID NO: 164885 - DNA, 25 bp, Probe Sequence
aaggaagatctcatcagtgcgtttg

SEQ ID NO: 164886 - DNA, 25 bp, Probe Sequence
aaggcaacttattcaggcagtctgg

SEQ ID NO: 164887 - DNA, 25 bp, Probe Sequence
aaggatagcctcagcgtcaacgagt

SEQ ID NO: 164888 - DNA, 25 bp, Probe Sequence
aaggataacacggcgatgaacgtct

SEQ ID NO: 164889 - DNA, 25 bp, Probe Sequence
aaggaaggacagacggacctgtctg

SEQ ID NO: 164890 - DNA, 25 bp, Probe Sequence
aaggaagctggaatttgcccttctg

SEQ ID NO: 164891 - DNA, 25 bp, Probe Sequence
aattgaactagatcttgccgtgctc

SEQ ID NO: 164892 - DNA, 25 bp, Probe Sequence
aaggagttggatgctcgcaggtgcc

SEQ ID NO: 164893 - DNA, 25 bp, Probe Sequence
aatgggatgggggcttcggtgccca

SEQ ID NO: 164894 - DNA, 25 bp, Probe Sequence
aatgggggtagatccatgtcctcca

SEQ ID NO: 164895 - DNA, 25 bp, Probe Sequence
aatggggcttacactatgatgtttg

SEQ ID NO: 164896 - DNA, 25 bp, Probe Sequence
aatctggggatgtacgtatttttgc

SEQ ID NO: 164897 - DNA, 25 bp, Probe Sequence
aatgttgggcattgaggtgtaaatt

SEQ ID NO: 164898 - DNA, 25 bp, Probe Sequence
aaggctgaggcttggccatctagca

SEQ ID NO: 164899 - DNA, 25 bp, Probe Sequence
aaggatgacgatgtgcctctagact

SEQ ID NO: 164900 - DNA, 25 bp, Probe Sequence
aaggcatggcttgctggccaggata

SEQ ID NO: 164901 - DNA, 25 bp, Probe Sequence
aaggctgacttcagtgctgatgcaa

SEQ ID NO: 164902 - DNA, 25 bp, Probe Sequence
aaggagagctccagtatgcatccct

SEQ ID NO: 164903 - DNA, 25 bp, Probe Sequence
aaggagcagtccatctgtgctgcag

SEQ ID NO: 164904 - DNA, 25 bp, Probe Sequence
aaggagatcgccattggccgtctgt

SEQ ID NO: 164905 - DNA, 25 bp, Probe Sequence
aaggagctcaccattggctcgaagc

SEQ ID NO: 164906 - DNA, 25 bp, Probe Sequence
aaggagccctgctatgggcacgttg

SEQ ID NO: 164907 - DNA, 25 bp, Probe Sequence
aaggcagtcctggtggtgcctatgg

SEQ ID NO: 164908 - DNA, 25 bp, Probe Sequence
aaggaggcactactgagcaactatg

SEQ ID NO: 164909 - DNA, 25 bp, Probe Sequence
aaggcagttctacacagactgcagc

SEQ ID NO: 164910 - DNA, 25 bp, Probe Sequence
aaggcaattgctccttaacagcaga

SEQ ID NO: 164911 - DNA, 25 bp, Probe Sequence
aaggcatttctagagaacagattca

SEQ ID NO: 164912 - DNA, 25 bp, Probe Sequence
aaggccttccacaatgaacagttca

SEQ ID NO: 164913 - DNA, 25 bp, Probe Sequence
aaggccttccacaatgaacagttca

SEQ ID NO: 164914 - DNA, 25 bp, Probe Sequence
aatgggtaccagagtaactacactt

SEQ ID NO: 164915 - DNA, 25 bp, Probe Sequence
aatgggtactcagaccaatccagcc

SEQ ID NO: 164916 - DNA, 25 bp, Probe Sequence
aatgggtaacaggcctcaagcaagt

SEQ ID NO: 164917 - DNA, 25 bp, Probe Sequence
aatggaaaaggtgtttcagagcttt

SEQ ID NO: 164918 - DNA, 25 bp, Probe Sequence
aaggaaacagtcgactttcataatt

SEQ ID NO: 164919 - DNA, 25 bp, Probe Sequence
aaggagtactgagacttcttagctt

SEQ ID NO: 164920 - DNA, 25 bp, Probe Sequence
aaggagaaaactactgtttcagtgt

SEQ ID NO: 164921 - DNA, 25 bp, Probe Sequence
aaggagagcagattttctttgggag

SEQ ID NO: 164922 - DNA, 25 bp, Probe Sequence
aatggagaggtcatccggctggatg

SEQ ID NO: 164923 - DNA, 25 bp, Probe Sequence
aaggatgtgggctctcttgatgaga

SEQ ID NO: 164924 - DNA, 25 bp, Probe Sequence
aaggaggcgatatctctgtgtgcga

SEQ ID NO: 164925 - DNA, 25 bp, Probe Sequence
aaggcagcctaatgctctgtgggag

SEQ ID NO: 164926 - DNA, 25 bp, Probe Sequence
aaggcacctgcatgtgtctgtgttc

SEQ ID NO: 164927 - DNA, 25 bp, Probe Sequence
aaggcacctgcatgtgtctgtgttc

SEQ ID NO: 164928 - DNA, 25 bp, Probe Sequence
aaggcacctgcatgtgtctgtgttc

SEQ ID NO: 164929 - DNA, 25 bp, Probe Sequence
aaggcatgcttctgtgtgcttctat

SEQ ID NO: 164930 - DNA, 25 bp, Probe Sequence
aaggcatgttacttcgcttttttgt

SEQ ID NO: 164931 - DNA, 25 bp, Probe Sequence
aaggcagctaacatctccatttttt

SEQ ID NO: 164932 - DNA, 25 bp, Probe Sequence
aaggcaacatacatccataattgtt

SEQ ID NO: 164933 - DNA, 25 bp, Probe Sequence
aaggcaaaatcactggataaattat

SEQ ID NO: 164934 - DNA, 25 bp, Probe Sequence
aaggaatatctcttgatatagaatt

SEQ ID NO: 164935 - DNA, 25 bp, Probe Sequence
aaggaatactttcaagtcatcccaa

SEQ ID NO: 164936 - DNA, 25 bp, Probe Sequence
aaggagaacttcatccgcttctcca

SEQ ID NO: 164937 - DNA, 25 bp, Probe Sequence
aatggaaatcccatcaccatcttcc

SEQ ID NO: 164938 - DNA, 25 bp, Probe Sequence
aatggaaatcccatcaccatcttcc

SEQ ID NO: 164939 - DNA, 25 bp, Probe Sequence
aatggaaaccatagagcccacggca

SEQ ID NO: 164940 - DNA, 25 bp, Probe Sequence
aatgcggaaccacggccgctatggt

SEQ ID NO: 164941 - DNA, 25 bp, Probe Sequence
aatgaggaagcccggacctatgtcc

SEQ ID NO: 164942 - DNA, 25 bp, Probe Sequence
aatgaggccaccatggttctggtct

SEQ ID NO: 164943 - DNA, 25 bp, Probe Sequence
aaggcctacacagtgccttcaggct

SEQ ID NO: 164944 - DNA, 25 bp, Probe Sequence
aaggctggaacacttgctactggat

SEQ ID NO: 164945 - DNA, 25 bp, Probe Sequence
aaggctggacaagttgtggaggtgt

SEQ ID NO: 164946 - DNA, 25 bp, Probe Sequence
aatggctgggtgctggggagttccc

SEQ ID NO: 164947 - DNA, 25 bp, Probe Sequence
aaggctgctggcaaaggggacgtcc

SEQ ID NO: 164948 - DNA, 25 bp, Probe Sequence
aaggctgtcggaagtagggactctt

SEQ ID NO: 164949 - DNA, 25 bp, Probe Sequence
aaggcgtctgacagtcctgagaatt

SEQ ID NO: 164950 - DNA, 25 bp, Probe Sequence
aattctgaagtcaaggcctgggttc

SEQ ID NO: 164951 - DNA, 25 bp, Probe Sequence
aataatgagactgaccctcggcttg

SEQ ID NO: 164952 - DNA, 25 bp, Probe Sequence
cactggaagccagcacccaaggaag

SEQ ID NO: 164953 - DNA, 25 bp, Probe Sequence
cactggaagccagcacccaaggaag

SEQ ID NO: 164954 - DNA, 25 bp, Probe Sequence
aaggaaccaccaagagacagaaaga

SEQ ID NO: 164955 - DNA, 25 bp, Probe Sequence
aaggaactgctcgtagaaggaagaa

SEQ ID NO: 164956 - DNA, 25 bp, Probe Sequence
aaggagcgcttcgatgagagcggca

SEQ ID NO: 164957 - DNA, 25 bp, Probe Sequence
aaggcagagcttgcagtgagccgag

SEQ ID NO: 164958 - DNA, 25 bp, Probe Sequence
aatgagctgcgctatggagtcgccc

SEQ ID NO: 164959 - DNA, 25 bp, Probe Sequence
aataccagctagggccagtgacagt

SEQ ID NO: 164960 - DNA, 25 bp, Probe Sequence
aatagccctagaatacggccaggca

SEQ ID NO: 164961 - DNA, 25 bp, Probe Sequence
aataggccaggcacagtggctcacg

SEQ ID NO: 164962 - DNA, 25 bp, Probe Sequence
aaggcacagagacacgggcatcctt

SEQ ID NO: 164963 - DNA, 25 bp, Probe Sequence
aaggccagcaagattgagacccggg

SEQ ID NO: 164964 - DNA, 25 bp, Probe Sequence
aaggccaggagttcgagaccatcct

SEQ ID NO: 164965 - DNA, 25 bp, Probe Sequence
aaggacagagatttaagccacagac

SEQ ID NO: 164966 - DNA, 25 bp, Probe Sequence
aatggagcgcaacaacgacacgcac

SEQ ID NO: 164967 - DNA, 25 bp, Probe Sequence
aatggagcaacgtgagtgaccgccc

SEQ ID NO: 164968 - DNA, 25 bp, Probe Sequence
aaggcagctactccttggaggagcc

SEQ ID NO: 164969 - DNA, 25 bp, Probe Sequence
aaggagtacaacctggtctgagcgc

SEQ ID NO: 164970 - DNA, 25 bp, Probe Sequence
aaggaataaagcctgcgtggcaggt

SEQ ID NO: 164971 - DNA, 25 bp, Probe Sequence
aaggagacattatttgcctggcctg

SEQ ID NO: 164972 - DNA, 25 bp, Probe Sequence
aaggaatatctgttggctctggttg

SEQ ID NO: 164973 - DNA, 25 bp, Probe Sequence
aaggcatggtctttctcctttatgg

SEQ ID NO: 164974 - DNA, 25 bp, Probe Sequence
aaggctccagctactctaaattatg

SEQ ID NO: 164975 - DNA, 25 bp, Probe Sequence
aaggctgccagcttaatgaatttag

SEQ ID NO: 164976 - DNA, 25 bp, Probe Sequence
aaggctgttcaaaatgagaactcat

SEQ ID NO: 164977 - DNA, 25 bp, Probe Sequence
aaggcttacagtatcagacacgatc

SEQ ID NO: 164978 - DNA, 25 bp, Probe Sequence
aaggctgaatagttccaaatccaga

SEQ ID NO: 164979 - DNA, 25 bp, Probe Sequence
aaggctgggtttgcagcactccaac

SEQ ID NO: 164980 - DNA, 25 bp, Probe Sequence
aatcgggcgtcaaggcgccaaaatc

SEQ ID NO: 164981 - DNA, 25 bp, Probe Sequence
aatgctaggcttctggcccagaaaa

SEQ ID NO: 164982 - DNA, 25 bp, Probe Sequence
aatgtccttaggaccccgatgtaca

SEQ ID NO: 164983 - DNA, 25 bp, Probe Sequence
aatggcgtgtaactcgccgcagtct

SEQ ID NO: 164984 - DNA, 25 bp, Probe Sequence
aaggcgtggagacagctccatccct

SEQ ID NO: 164985 - DNA, 25 bp, Probe Sequence
aatgggggatgatagtcaacaacat

SEQ ID NO: 164986 - DNA, 25 bp, Probe Sequence
aaggcattagagtcaactacacaaa

SEQ ID NO: 164987 - DNA, 25 bp, Probe Sequence
aaggaaaggctcggctactgacaca

SEQ ID NO: 164988 - DNA, 25 bp, Probe Sequence
aaggcgaagagtgggtggctgaagc

SEQ ID NO: 164989 - DNA, 25 bp, Probe Sequence
aaggcgaggacggtgtgtgggtggc

SEQ ID NO: 164990 - DNA, 25 bp, Probe Sequence
aatggcgggcacaggtttggtggct

SEQ ID NO: 164991 - DNA, 25 bp, Probe Sequence
aatggcgtggataccgtttgactca

SEQ ID NO: 164992 - DNA, 25 bp, Probe Sequence
aaggctgggatcatatgtatttcta

SEQ ID NO: 164993 - DNA, 25 bp, Probe Sequence
aattcgggcttttatgatgtgccta

SEQ ID NO: 164994 - DNA, 25 bp, Probe Sequence
aatgggagtttgtttctggcatcct

SEQ ID NO: 164995 - DNA, 25 bp, Probe Sequence
aaggcaggttattagaagagtccca

SEQ ID NO: 164996 - DNA, 25 bp, Probe Sequence
gaagaaggcctttaccaagtactgc

SEQ ID NO: 164997 - DNA, 25 bp, Probe Sequence
aatgtaggccacaaaccacagtagt

SEQ ID NO: 164998 - DNA, 25 bp, Probe Sequence
aatgtactgtaatattcaggtttaa

SEQ ID NO: 164999 - DNA, 25 bp, Probe Sequence
aatggacgttaatactgctttacaa

SEQ ID NO: 165000 - DNA, 25 bp, Probe Sequence
aatgaagtttaatccctttgtgact

SEQ ID NO: 165001 - DNA, 25 bp, Probe Sequence
aataagtttaagagctcccattgta

SEQ ID NO: 165002 - DNA, 25 bp, Probe Sequence
aatgtcagtttaagtagtccttttg

SEQ ID NO: 165003 - DNA, 25 bp, Probe Sequence
aatccctcagtaagtcagtgactag

SEQ ID NO: 165004 - DNA, 25 bp, Probe Sequence
aatccttgagtctccatagagtaac

SEQ ID NO: 165005 - DNA, 25 bp, Probe Sequence
gaatcgttggtagaaatagggacag

SEQ ID NO: 165006 - DNA, 25 bp, Probe Sequence
agatcgcggaatggttatggctgtg

SEQ ID NO: 165007 - DNA, 25 bp, Probe Sequence
aatgaatgaggtctgggctaggtag

SEQ ID NO: 165008 - DNA, 25 bp, Probe Sequence
aataattggttctggcaagtttggc

SEQ ID NO: 165009 - DNA, 25 bp, Probe Sequence
aataattggttctggcaagtttggc

SEQ ID NO: 165010 - DNA, 25 bp, Probe Sequence
caaaattcagatgccccaaacttga

SEQ ID NO: 165011 - DNA, 25 bp, Probe Sequence
aataattagcaagccaaacctgggt

SEQ ID NO: 165012 - DNA, 25 bp, Probe Sequence
aatgaaccatgatcccaatccaagt

SEQ ID NO: 165013 - DNA, 25 bp, Probe Sequence
aatgaagactgatcccaggcctgat

SEQ ID NO: 165014 - DNA, 25 bp, Probe Sequence
aatggcagacgatctcggagacgag

SEQ ID NO: 165015 - DNA, 25 bp, Probe Sequence
aaggcagccagatcatgaggtcagg

SEQ ID NO: 165016 - DNA, 25 bp, Probe Sequence
aatggcggatgacgccggtgcagcg

SEQ ID NO: 165017 - DNA, 25 bp, Probe Sequence
aatggcagcgggacgctggatctgg

SEQ ID NO: 165018 - DNA, 25 bp, Probe Sequence
aaggcagcattggtcacggagttca

SEQ ID NO: 165019 - DNA, 25 bp, Probe Sequence
aaggcaggcagatcacctgaggtca

SEQ ID NO: 165020 - DNA, 25 bp, Probe Sequence
aaggactcagtgtcctctctgagta

SEQ ID NO: 165021 - DNA, 25 bp, Probe Sequence
aaggaccagatcactgatgtgcact

SEQ ID NO: 165022 - DNA, 25 bp, Probe Sequence
aaggcctggatcatgctatgctggt

SEQ ID NO: 165023 - DNA, 25 bp, Probe Sequence
aaggcctggatcatgctatgctggt

SEQ ID NO: 165024 - DNA, 25 bp, Probe Sequence
aaggcactattttgatatgctagtc

SEQ ID NO: 165025 - DNA, 25 bp, Probe Sequence
aaggacatatctacgttgaatgtac

SEQ ID NO: 165026 - DNA, 25 bp, Probe Sequence
aaggaatatctggcgcttgcatctt

SEQ ID NO: 165027 - DNA, 25 bp, Probe Sequence
aaggcatcatttgccagtgcctctg

SEQ ID NO: 165028 - DNA, 25 bp, Probe Sequence
aaggactcatgaccacagtccatgc

SEQ ID NO: 165029 - DNA, 25 bp, Probe Sequence
aatgggccatgatcacgatcctgca

SEQ ID NO: 165030 - DNA, 25 bp, Probe Sequence
aaggcgagatgaaaggttctgccat

SEQ ID NO: 165031 - DNA, 25 bp, Probe Sequence
aatggcaagtgtacgagctgttccc

SEQ ID NO: 165032 - DNA, 25 bp, Probe Sequence
aatggcaagtgtacgagctgttccc

SEQ ID NO: 165033 - DNA, 25 bp, Probe Sequence
aaggccagttaccagattacacatc

SEQ ID NO: 165034 - DNA, 25 bp, Probe Sequence
aataccaggaacaagagctcccacc

SEQ ID NO: 165035 - DNA, 25 bp, Probe Sequence
aataccagctagtggacatctccca

SEQ ID NO: 165036 - DNA, 25 bp, Probe Sequence
aatgtacagtagttagatttcacct

SEQ ID NO: 165037 - DNA, 25 bp, Probe Sequence
aatgtacattacctggtttcctggg

SEQ ID NO: 165038 - DNA, 25 bp, Probe Sequence
aaggcactatacatttttggggaga

SEQ ID NO: 165039 - DNA, 25 bp, Probe Sequence
aaggcagttcctattatgtggtgaa

SEQ ID NO: 165040 - DNA, 25 bp, Probe Sequence
aaggccatctttattttctataact

SEQ ID NO: 165041 - DNA, 25 bp, Probe Sequence
aatggcccaggtgcttcaatttaac

SEQ ID NO: 165042 - DNA, 25 bp, Probe Sequence
aatggctggggtggttcagcttgta

SEQ ID NO: 165043 - DNA, 25 bp, Probe Sequence
aatggtgtgcggttaccagtttata

SEQ ID NO: 165044 - DNA, 25 bp, Probe Sequence
aatgttctggaattataagcaaaaa

SEQ ID NO: 165045 - DNA, 25 bp, Probe Sequence
aatgtgtgggtacttgctaataaac

SEQ ID NO: 165046 - DNA, 25 bp, Probe Sequence
aaggctgtctgtacttgtgaaacat

SEQ ID NO: 165047 - DNA, 25 bp, Probe Sequence
aaggctgtgatgttctaaaaaccca

SEQ ID NO: 165048 - DNA, 25 bp, Probe Sequence
aaggctgtatgaaaataccctcctc

SEQ ID NO: 165049 - DNA, 25 bp, Probe Sequence
aatggttgatgatacttcccacacc

SEQ ID NO: 165050 - DNA, 25 bp, Probe Sequence
aatggcttttggactatcaaaaaca

SEQ ID NO: 165051 - DNA, 25 bp, Probe Sequence
aatggatttaagcctttgagaacaa

SEQ ID NO: 165052 - DNA, 25 bp, Probe Sequence
aatggtttaacatatgtgcaattga

SEQ ID NO: 165053 - DNA, 25 bp, Probe Sequence
aaggaactaacaatttgtatggcag

SEQ ID NO: 165054 - DNA, 25 bp, Probe Sequence
aaggaagtaagaagcacagtagtga

SEQ ID NO: 165055 - DNA, 25 bp, Probe Sequence
aatgtgaaataaaccctgtttgcac

SEQ ID NO: 165056 - DNA, 25 bp, Probe Sequence
aatggatggtttccccagtttactg

SEQ ID NO: 165057 - DNA, 25 bp, Probe Sequence
aatggttgtttagggcagtcttatc

SEQ ID NO: 165058 - DNA, 25 bp, Probe Sequence
aatgattttcagaggccagccattt

SEQ ID NO: 165059 - DNA, 25 bp, Probe Sequence
aatgttttgaggaccctccatactg

SEQ ID NO: 165060 - DNA, 25 bp, Probe Sequence
aatttttggttcatcgtcacctcaa

SEQ ID NO: 165061 - DNA, 25 bp, Probe Sequence
aatgtcttttccatctcgtgactta

SEQ ID NO: 165062 - DNA, 25 bp, Probe Sequence
aatccatttatacttcccaaattat

SEQ ID NO: 165063 - DNA, 25 bp, Probe Sequence
aatggtgcttattttcctaactcca

SEQ ID NO: 165064 - DNA, 25 bp, Probe Sequence
aatggtggctgaatttcccaaccca

SEQ ID NO: 165065 - DNA, 25 bp, Probe Sequence
aatggagactggaccttccagaccc

SEQ ID NO: 165066 - DNA, 25 bp, Probe Sequence
aatggaggtggaacactcaagatcc

SEQ ID NO: 165067 - DNA, 25 bp, Probe Sequence
aaggacagggttctaggagctcctg

SEQ ID NO: 165068 - DNA, 25 bp, Probe Sequence
aaggaagccagtaaaatgaagtcac

SEQ ID NO: 165069 - DNA, 25 bp, Probe Sequence
aatggaaccctgaacaaacactctg

SEQ ID NO: 165070 - DNA, 25 bp, Probe Sequence
aatggataactagaataaccgatgc

SEQ ID NO: 165071 - DNA, 25 bp, Probe Sequence
aaggacaaatcagactactttcatt

SEQ ID NO: 165072 - DNA, 25 bp, Probe Sequence
aatgtccaaaacattcctttcagcc

SEQ ID NO: 165073 - DNA, 25 bp, Probe Sequence
aatgaccctaccatttatttctgcc

SEQ ID NO: 165074 - DNA, 25 bp, Probe Sequence
aatgaacttaccatagtatttttgt

SEQ ID NO: 165075 - DNA, 25 bp, Probe Sequence
aatgagtttacttttgttcctgttg

SEQ ID NO: 165076 - DNA, 25 bp, Probe Sequence
aatggttctattgactttttgcgtc

SEQ ID NO: 165077 - DNA, 25 bp, Probe Sequence
aatggtctgttatatgttgttggag

SEQ ID NO: 165078 - DNA, 25 bp, Probe Sequence
aatggagcgagcagaagttctaaca

SEQ ID NO: 165079 - DNA, 25 bp, Probe Sequence
aatggggtcttgggcatttcacatc

SEQ ID NO: 165080 - DNA, 25 bp, Probe Sequence
aatggggatttagctttgcacttct

SEQ ID NO: 165081 - DNA, 25 bp, Probe Sequence
aatggtggactatccttatgcctct

SEQ ID NO: 165082 - DNA, 25 bp, Probe Sequence
aatggagtaatatccttcaccttca

SEQ ID NO: 165083 - DNA, 25 bp, Probe Sequence
aatggccaacatttggtcagccctt

SEQ ID NO: 165084 - DNA, 25 bp, Probe Sequence
aatggtcaagtacacacagccgtct

SEQ ID NO: 165085 - DNA, 25 bp, Probe Sequence
aatggtcacgagggggaccgtctgt

SEQ ID NO: 165086 - DNA, 25 bp, Probe Sequence
aatgaacagcaaaggggaccaattt

SEQ ID NO: 165087 - DNA, 25 bp, Probe Sequence
aatgtaatgaggtggtactatgatt

SEQ ID NO: 165088 - DNA, 25 bp, Probe Sequence
aatgatggattgaaagggacttact

SEQ ID NO: 165089 - DNA, 25 bp, Probe Sequence
aatatgtgggattagcaacagtaat

SEQ ID NO: 165090 - DNA, 25 bp, Probe Sequence
aatatgggaccatcaccagcttacc

SEQ ID NO: 165091 - DNA, 25 bp, Probe Sequence
aatttggcaccaggcaaacgaataa

SEQ ID NO: 165092 - DNA, 25 bp, Probe Sequence
aatgggtaaccctaaggcatatcaa

SEQ ID NO: 165093 - DNA, 25 bp, Probe Sequence
aatgggtgtacctgagagtctctaa

SEQ ID NO: 165094 - DNA, 25 bp, Probe Sequence
aatgtggtgcacactatagcctcac

SEQ ID NO: 165095 - DNA, 25 bp, Probe Sequence
aatgtggtgcacactatagcctcac

SEQ ID NO: 165096 - DNA, 25 bp, Probe Sequence
aatggtgatggatgtgacacctcat

SEQ ID NO: 165097 - DNA, 25 bp, Probe Sequence
aatggtggcgagttccatcaccagc

SEQ ID NO: 165098 - DNA, 25 bp, Probe Sequence
aatggcaagtggtaccacacctgcg

SEQ ID NO: 165099 - DNA, 25 bp, Probe Sequence
aatgaatattgggtcctcagccctg

SEQ ID NO: 165100 - DNA, 25 bp, Probe Sequence
aatggtagtgtggttgctcacgcaa

SEQ ID NO: 165101 - DNA, 25 bp, Probe Sequence
aatggccagtggtttcatcaatcat

SEQ ID NO: 165102 - DNA, 25 bp, Probe Sequence
aaggcacgtgtggttctcaaatata

SEQ ID NO: 165103 - DNA, 25 bp, Probe Sequence
aaggccgtgttccattcaatggaca

SEQ ID NO: 165104 - DNA, 25 bp, Probe Sequence
aaggctcgtattcctgaggtgggcg

SEQ ID NO: 165105 - DNA, 25 bp, Probe Sequence
aaggctacaattgctggtggtggtg

SEQ ID NO: 165106 - DNA, 25 bp, Probe Sequence
aaggcatcaaaacctggctggtggc

SEQ ID NO: 165107 - DNA, 25 bp, Probe Sequence
aaggctcagtaagaggctggtggag

SEQ ID NO: 165108 - DNA, 25 bp, Probe Sequence
aaggcagttaaggacctggtggtgc

SEQ ID NO: 165109 - DNA, 25 bp, Probe Sequence
aaggcaggtgagcaaccagttggct

SEQ ID NO: 165110 - DNA, 25 bp, Probe Sequence
aaggcagtgttcctcaccaataact

SEQ ID NO: 165111 - DNA, 25 bp, Probe Sequence
aaggcctgcattctggctaaagact

SEQ ID NO: 165112 - DNA, 25 bp, Probe Sequence
aaggcccagatgttagccaaggact

SEQ ID NO: 165113 - DNA, 25 bp, Probe Sequence
aaggctgccagtgtaccgaaagttg

SEQ ID NO: 165114 - DNA, 25 bp, Probe Sequence
aaggctgccagtgtaccgaaagttg

SEQ ID NO: 165115 - DNA, 25 bp, Probe Sequence
aatgtggccgtggtacggatgaagc

SEQ ID NO: 165116 - DNA, 25 bp, Probe Sequence
aatgtggccgaggactttgattgca

SEQ ID NO: 165117 - DNA, 25 bp, Probe Sequence
aatgtctccaggaagcctacagtct

SEQ ID NO: 165118 - DNA, 25 bp, Probe Sequence
aatgtaggggtactccacctctaca

SEQ ID NO: 165119 - DNA, 25 bp, Probe Sequence
aaggctgggtgaagtccccatctaa

SEQ ID NO: 165120 - DNA, 25 bp, Probe Sequence
aaggctgtgggcaaggtcatccctg

SEQ ID NO: 165121 - DNA, 25 bp, Probe Sequence
aatggcgtggccaagcacatcagcc

SEQ ID NO: 165122 - DNA, 25 bp, Probe Sequence
aatggcgtggccaagcacatcagcc

SEQ ID NO: 165123 - DNA, 25 bp, Probe Sequence
aaggctgatctgtctggcatgtcag

SEQ ID NO: 165124 - DNA, 25 bp, Probe Sequence
aatgggatctttctgacacacttag

SEQ ID NO: 165125 - DNA, 25 bp, Probe Sequence
aatggcaagtttatactctgcttag

SEQ ID NO: 165126 - DNA, 25 bp, Probe Sequence
aatgtgactgtctttaacttggctt

SEQ ID NO: 165127 - DNA, 25 bp, Probe Sequence
caaggtcaccaaacaacttggttgt

SEQ ID NO: 165128 - DNA, 25 bp, Probe Sequence
aaggcatcccaaaacaccatatctt

SEQ ID NO: 165129 - DNA, 25 bp, Probe Sequence
aaggctgctgattaaacactatata

SEQ ID NO: 165130 - DNA, 25 bp, Probe Sequence
aaggcctatgcacaatttatagcaa

SEQ ID NO: 165131 - DNA, 25 bp, Probe Sequence
aaggcactgccaagacattcaaaca

SEQ ID NO: 165132 - DNA, 25 bp, Probe Sequence
aatctgcccacttgcagttacatca

SEQ ID NO: 165133 - DNA, 25 bp, Probe Sequence
taatctcgcctcggaagttccaaca

SEQ ID NO: 165134 - DNA, 25 bp, Probe Sequence
aatctacccctatgtcatccaggaa

SEQ ID NO: 165135 - DNA, 25 bp, Probe Sequence
aatctacccctatgtcatccaggaa

SEQ ID NO: 165136 - DNA, 25 bp, Probe Sequence
taagtacccaaatgtactgggcatt

SEQ ID NO: 165137 - DNA, 25 bp, Probe Sequence
aatgtcctcaaagagtactttattt

SEQ ID NO: 165138 - DNA, 25 bp, Probe Sequence
aatgtcacttgaattggtcctattt

SEQ ID NO: 165139 - DNA, 25 bp, Probe Sequence
aatggccttttcaatgacctttctg

SEQ ID NO: 165140 - DNA, 25 bp, Probe Sequence
aatggcttaattctgacactacctt

SEQ ID NO: 165141 - DNA, 25 bp, Probe Sequence
aaggcttaccaagacacaactctga

SEQ ID NO: 165142 - DNA, 25 bp, Probe Sequence
aaggcatgttcccagaaaggtctct

SEQ ID NO: 165143 - DNA, 25 bp, Probe Sequence
aaggccttcatcctacaaggtcatc

SEQ ID NO: 165144 - DNA, 25 bp, Probe Sequence
aaggctgtcattctacagggctcta

SEQ ID NO: 165145 - DNA, 25 bp, Probe Sequence
aaggcattttcccaggagagctctg

SEQ ID NO: 165146 - DNA, 25 bp, Probe Sequence
aaggctcttaccagtgaatcgtgct

SEQ ID NO: 165147 - DNA, 25 bp, Probe Sequence
aatgtccctcactggatgaactgtg

SEQ ID NO: 165148 - DNA, 25 bp, Probe Sequence
aatggtcttcacttggtctgacttg

SEQ ID NO: 165149 - DNA, 25 bp, Probe Sequence
aatgatggcttatttgtcagcgatt

SEQ ID NO: 165150 - DNA, 25 bp, Probe Sequence
aatgggcgtggtatagcgtttgact

SEQ ID NO: 165151 - DNA, 25 bp, Probe Sequence
aatgggcgttggatatcgtttgact

SEQ ID NO: 165152 - DNA, 25 bp, Probe Sequence
aatggacagttgtgtcatcgtgtat

SEQ ID NO: 165153 - DNA, 25 bp, Probe Sequence
aatggccgctagtgactcagtggca

SEQ ID NO: 165154 - DNA, 25 bp, Probe Sequence
aatgtgccagaatccacctgtggcc

SEQ ID NO: 165155 - DNA, 25 bp, Probe Sequence
aatgtgccagaatccacctgtggcc

SEQ ID NO: 165156 - DNA, 25 bp, Probe Sequence
aatgtgccagaatccacctgtggcc

SEQ ID NO: 165157 - DNA, 25 bp, Probe Sequence
aatggctatgtatcccttgatggga

SEQ ID NO: 165158 - DNA, 25 bp, Probe Sequence
aatcgcttgtaacccaggagcgaag

SEQ ID NO: 165159 - DNA, 25 bp, Probe Sequence
aaggctttatttgcaggggagcagg

SEQ ID NO: 165160 - DNA, 25 bp, Probe Sequence
aaggctaaacttcaggggatcagct

SEQ ID NO: 165161 - DNA, 25 bp, Probe Sequence
aaggctagaggcatgggccaggtaa

SEQ ID NO: 165162 - DNA, 25 bp, Probe Sequence
aaggcctgaactaggagacagtgga

SEQ ID NO: 165163 - DNA, 25 bp, Probe Sequence
aaggcctcctttccagtaatgtagg

SEQ ID NO: 165164 - DNA, 25 bp, Probe Sequence
aaggctcccatcagagagtaagaag

SEQ ID NO: 165165 - DNA, 25 bp, Probe Sequence
aaggctgaccagaagagaggcaaga

SEQ ID NO: 165166 - DNA, 25 bp, Probe Sequence
aaggctacaaggtctatgagcaata

SEQ ID NO: 165167 - DNA, 25 bp, Probe Sequence
aaggcatctatgggcattatgagct

SEQ ID NO: 165168 - DNA, 25 bp, Probe Sequence
aaggcaccggccttgatgaggcaat

SEQ ID NO: 165169 - DNA, 25 bp, Probe Sequence
aaggcactctgtacattgtggagca

SEQ ID NO: 165170 - DNA, 25 bp, Probe Sequence
aaggccaagttcagggcagctgttg

SEQ ID NO: 165171 - DNA, 25 bp, Probe Sequence
aaggccaagtacaagccatccgggt

SEQ ID NO: 165172 - DNA, 25 bp, Probe Sequence
aatgctccgagttaatttcctgggc

SEQ ID NO: 165173 - DNA, 25 bp, Probe Sequence
caagatcctggggccattatcctac

SEQ ID NO: 165174 - DNA, 25 bp, Probe Sequence
aatgtcctggtcgcatgtatgcacc

SEQ ID NO: 165175 - DNA, 25 bp, Probe Sequence
aatgtcactctgcccgatgaaaagc

SEQ ID NO: 165176 - DNA, 25 bp, Probe Sequence
aatggcctcatgtggctggaagatc

SEQ ID NO: 165177 - DNA, 25 bp, Probe Sequence
aatggctatattagtgctgcagaac

SEQ ID NO: 165178 - DNA, 25 bp, Probe Sequence
aatgtctatagtggtctagtgacgc

SEQ ID NO: 165179 - DNA, 25 bp, Probe Sequence
aatgttaacctgtctcagatcaagt

SEQ ID NO: 165180 - DNA, 25 bp, Probe Sequence
aatgttaagtcctctatttgtctga

SEQ ID NO: 165181 - DNA, 25 bp, Probe Sequence
aatgtaaatgttttcttctctctcc

SEQ ID NO: 165182 - DNA, 25 bp, Probe Sequence
aatgtaaatgttttcttctctctcc

SEQ ID NO: 165183 - DNA, 25 bp, Probe Sequence
aatgtaatcttgattttacctcata

SEQ ID NO: 165184 - DNA, 25 bp, Probe Sequence
aatgatattctgagttattaatcct

SEQ ID NO: 165185 - DNA, 25 bp, Probe Sequence
aatgatttttagctctaggccactt

SEQ ID NO: 165186 - DNA, 25 bp, Probe Sequence
aatgataaaacacctcacacctcac

SEQ ID NO: 165187 - DNA, 25 bp, Probe Sequence
aatgaaatggcccacagaacctatc

SEQ ID NO: 165188 - DNA, 25 bp, Probe Sequence
aatgaaatcgccaatgccaactccc

SEQ ID NO: 165189 - DNA, 25 bp, Probe Sequence
aatggagttcctgctcaatgtcacc

SEQ ID NO: 165190 - DNA, 25 bp, Probe Sequence
aatgggaactctggccaagactcta

SEQ ID NO: 165191 - DNA, 25 bp, Probe Sequence
aatgtgggagaccccaaatcccagt

SEQ ID NO: 165192 - DNA, 25 bp, Probe Sequence
aatggggagactcctcaagcaggcc

SEQ ID NO: 165193 - DNA, 25 bp, Probe Sequence
aatggtgggagttgccatggcttcc

SEQ ID NO: 165194 - DNA, 25 bp, Probe Sequence
aatgtgcagaggatacgcatggaac

SEQ ID NO: 165195 - DNA, 25 bp, Probe Sequence
aaggcatggtggcacgcactgtagt

SEQ ID NO: 165196 - DNA, 25 bp, Probe Sequence
aaggcatcggtgccacgcatcttca

SEQ ID NO: 165197 - DNA, 25 bp, Probe Sequence
aatggcataggctgacttttgcaga

SEQ ID NO: 165198 - DNA, 25 bp, Probe Sequence
aaggcagcaggctaccggacggcag

SEQ ID NO: 165199 - DNA, 25 bp, Probe Sequence
aatggaagacttctgtcatcaaagt

SEQ ID NO: 165200 - DNA, 25 bp, Probe Sequence
aatgtgaagaggcctttccaagagg

SEQ ID NO: 165201 - DNA, 25 bp, Probe Sequence
aatggcaagagatcatatcctcaga

SEQ ID NO: 165202 - DNA, 25 bp, Probe Sequence
aaggcattgctgcgcagatttgcag

SEQ ID NO: 165203 - DNA, 25 bp, Probe Sequence
aatggcattgtgcccatcgtggagc

SEQ ID NO: 165204 - DNA, 25 bp, Probe Sequence
aatggcattgtgcccatcgtggagc

SEQ ID NO: 165205 - DNA, 25 bp, Probe Sequence
aatggcattgtgcccatcgtggagc

SEQ ID NO: 165206 - DNA, 25 bp, Probe Sequence
aaggctctgctgtcacaaggagagc

SEQ ID NO: 165207 - DNA, 25 bp, Probe Sequence
aatgattctgtgcccaggagcagct

SEQ ID NO: 165208 - DNA, 25 bp, Probe Sequence
aatgatggccggggaagcctgcgtg

SEQ ID NO: 165209 - DNA, 25 bp, Probe Sequence
aatgcgagccgggtgttccaggctc

SEQ ID NO: 165210 - DNA, 25 bp, Probe Sequence
aataggcgcctggcagtgtcaagcc

SEQ ID NO: 165211 - DNA, 25 bp, Probe Sequence
aatgaggagttgagcttcatcccct

SEQ ID NO: 165212 - DNA, 25 bp, Probe Sequence
aatgggttctgaagcttgtccacca

SEQ ID NO: 165213 - DNA, 25 bp, Probe Sequence
aatgggcattgcagacttgttcacc

SEQ ID NO: 165214 - DNA, 25 bp, Probe Sequence
aatgaggtacaagcaggttatccaa

SEQ ID NO: 165215 - DNA, 25 bp, Probe Sequence
aatggtgctaaccacaggtgtccca

SEQ ID NO: 165216 - DNA, 25 bp, Probe Sequence
aatggtgctaaccacaggtgtccca

SEQ ID NO: 165217 - DNA, 25 bp, Probe Sequence
aatgattctctaggacagcaggtaa

SEQ ID NO: 165218 - DNA, 25 bp, Probe Sequence
aatgttttcatgtagcagcaatgca

SEQ ID NO: 165219 - DNA, 25 bp, Probe Sequence
aatgtcctgtctcatggaagcactg

SEQ ID NO: 165220 - DNA, 25 bp, Probe Sequence
aatgtccagttgtatgttcagtctc

SEQ ID NO: 165221 - DNA, 25 bp, Probe Sequence
aatgactggtttagtctgcagtctc

SEQ ID NO: 165222 - DNA, 25 bp, Probe Sequence
aatgtctaggctaagtatgcaccta

SEQ ID NO: 165223 - DNA, 25 bp, Probe Sequence
aaggctatggctctgattctagaag

SEQ ID NO: 165224 - DNA, 25 bp, Probe Sequence
aatggattggtcttgatttgagcaa

SEQ ID NO: 165225 - DNA, 25 bp, Probe Sequence
aatggattgcttctgactccgagtc

SEQ ID NO: 165226 - DNA, 25 bp, Probe Sequence
aatggtattcgacgagtcctggcct

SEQ ID NO: 165227 - DNA, 25 bp, Probe Sequence
aatggatttggaaggactgcgctgc

SEQ ID NO: 165228 - DNA, 25 bp, Probe Sequence
aatgtgtctgtggcaagaaccctgc

SEQ ID NO: 165229 - DNA, 25 bp, Probe Sequence
aatggacaatggtcagaaccaccaa

SEQ ID NO: 165230 - DNA, 25 bp, Probe Sequence
aatggacaatggtcagaaccaccaa

SEQ ID NO: 165231 - DNA, 25 bp, Probe Sequence
aatggcaataggtagagatacaaca

SEQ ID NO: 165232 - DNA, 25 bp, Probe Sequence
aatgtgtataggtcggaaacaacta

SEQ ID NO: 165233 - DNA, 25 bp, Probe Sequence
aatgggtacagtctcaggacaactt

SEQ ID NO: 165234 - DNA, 25 bp, Probe Sequence
aatgggaacaatgacgtgcctacct

SEQ ID NO: 165235 - DNA, 25 bp, Probe Sequence
aatgggggacacacagtacttcctc

SEQ ID NO: 165236 - DNA, 25 bp, Probe Sequence
aatggaaggacagccagatttctcc

SEQ ID NO: 165237 - DNA, 25 bp, Probe Sequence
aatgaataagcatgcctgttttccc

SEQ ID NO: 165238 - DNA, 25 bp, Probe Sequence
aatgtattatcaaccttttccctct

SEQ ID NO: 165239 - DNA, 25 bp, Probe Sequence
aatgttactgtgtcacttttccctc

SEQ ID NO: 165240 - DNA, 25 bp, Probe Sequence
aatgtgaacgtcttctgctttacct

SEQ ID NO: 165241 - DNA, 25 bp, Probe Sequence
aatgtgaacgtcttctgctttacct

SEQ ID NO: 165242 - DNA, 25 bp, Probe Sequence
aatgtgaatcctttccttatggcca

SEQ ID NO: 165243 - DNA, 25 bp, Probe Sequence
aatggttcctattctgtgctattgc

SEQ ID NO: 165244 - DNA, 25 bp, Probe Sequence
aaggcttgccaatctatttatcctc

SEQ ID NO: 165245 - DNA, 25 bp, Probe Sequence
aatggttcccagtttttcatctgca

SEQ ID NO: 165246 - DNA, 25 bp, Probe Sequence
aatgtgttcccgtattttgtagtgg

SEQ ID NO: 165247 - DNA, 25 bp, Probe Sequence
aatgtgttctgccgtcattctatgt

SEQ ID NO: 165248 - DNA, 25 bp, Probe Sequence
aatggctttgcttgaatgtgtagtg

SEQ ID NO: 165249 - DNA, 25 bp, Probe Sequence
aatggctcatgtagataaggtaggc

SEQ ID NO: 165250 - DNA, 25 bp, Probe Sequence
aaggctatgctaatgaggtctcaga

SEQ ID NO: 165251 - DNA, 25 bp, Probe Sequence
aaggctttatcaggtatcatcaaca

SEQ ID NO: 165252 - DNA, 25 bp, Probe Sequence
aaggctgtcttagtgcaaaaaacat

SEQ ID NO: 165253 - DNA, 25 bp, Probe Sequence
aaggctttggcaacagaaaacaatt

SEQ ID NO: 165254 - DNA, 25 bp, Probe Sequence
aaggctgccggcaccaagaagcagt

SEQ ID NO: 165255 - DNA, 25 bp, Probe Sequence
aaggctacagtaaccaaaacagcat

SEQ ID NO: 165256 - DNA, 25 bp, Probe Sequence
aatggaacaacaaccctaccaatat

SEQ ID NO: 165257 - DNA, 25 bp, Probe Sequence
aatggagaagcagcacgtctatcta

SEQ ID NO: 165258 - DNA, 25 bp, Probe Sequence
aatgggaccttctaatctctcatga

SEQ ID NO: 165259 - DNA, 25 bp, Probe Sequence
aatagccagccagtcataatagtag

SEQ ID NO: 165260 - DNA, 25 bp, Probe Sequence
aatgagaggctcactgaaagtctga

SEQ ID NO: 165261 - DNA, 25 bp, Probe Sequence
aatggaggtccttgaagtggctgaa

SEQ ID NO: 165262 - DNA, 25 bp, Probe Sequence
aatgtcgtattttagagtcctacag

SEQ ID NO: 165263 - DNA, 25 bp, Probe Sequence
aatgttactttacagtccgactctc

SEQ ID NO: 165264 - DNA, 25 bp, Probe Sequence
aatgggttttcacagtccagcttca

SEQ ID NO: 165265 - DNA, 25 bp, Probe Sequence
aaggcgttgtcccaggacgagctgt

SEQ ID NO: 165266 - DNA, 25 bp, Probe Sequence
aatgggctctgagctggagacggcg

SEQ ID NO: 165267 - DNA, 25 bp, Probe Sequence
aatgtgctctaatctaggccaggcg

SEQ ID NO: 165268 - DNA, 25 bp, Probe Sequence
aatggcattcaataaagtgcacgtg

SEQ ID NO: 165269 - DNA, 25 bp, Probe Sequence
aatgatgttctataaagttgctgtg

SEQ ID NO: 165270 - DNA, 25 bp, Probe Sequence
aatgttttagtaacagttggctgta

SEQ ID NO: 165271 - DNA, 25 bp, Probe Sequence
aatgcctgttagataaaatcggtta

SEQ ID NO: 165272 - DNA, 25 bp, Probe Sequence
aatgggttaatcctgaattctggtt

SEQ ID NO: 165273 - DNA, 25 bp, Probe Sequence
aatgggtggaatgatgccacctgga

SEQ ID NO: 165274 - DNA, 25 bp, Probe Sequence
aatgcgaagagccatgggaaccatg

SEQ ID NO: 165275 - DNA, 25 bp, Probe Sequence
aatgtggacatccaggacaaccacg

SEQ ID NO: 165276 - DNA, 25 bp, Probe Sequence
aatgtgcgaaaccgaaactgccttt

SEQ ID NO: 165277 - DNA, 25 bp, Probe Sequence
aatgtggagaatgtggcaaagcctt

SEQ ID NO: 165278 - DNA, 25 bp, Probe Sequence
aatggagaatctcattaaagtttat

SEQ ID NO: 165279 - DNA, 25 bp, Probe Sequence
aatggttatcttgctaatattactt

SEQ ID NO: 165280 - DNA, 25 bp, Probe Sequence
aatggcatttctcctaattaatttt

SEQ ID NO: 165281 - DNA, 25 bp, Probe Sequence
aatgtcatatttactaactgttcta

SEQ ID NO: 165282 - DNA, 25 bp, Probe Sequence
aatggctactatatagcaggcattt

SEQ ID NO: 165283 - DNA, 25 bp, Probe Sequence
caataccaaatatacaggtttagta

SEQ ID NO: 165284 - DNA, 25 bp, Probe Sequence
aatgactaaattggccggttgccgt

SEQ ID NO: 165285 - DNA, 25 bp, Probe Sequence
aataatctacgtgactggttgcgcg

SEQ ID NO: 165286 - DNA, 25 bp, Probe Sequence
aatgttctaggtgaccctgggctgt

SEQ ID NO: 165287 - DNA, 25 bp, Probe Sequence
aatgttctaggagcagccgttgtga

SEQ ID NO: 165288 - DNA, 25 bp, Probe Sequence
aatgtttcatagtgccctttgtcag

SEQ ID NO: 165289 - DNA, 25 bp, Probe Sequence
aatgtttcaaaactgggtttctgat

SEQ ID NO: 165290 - DNA, 25 bp, Probe Sequence
aattttcaacaaccgtaactgccag

SEQ ID NO: 165291 - DNA, 25 bp, Probe Sequence
aatgtttccaaatgggaaggacagt

SEQ ID NO: 165292 - DNA, 25 bp, Probe Sequence
aattgtcccacagaagaaagtacct

SEQ ID NO: 165293 - DNA, 25 bp, Probe Sequence
aatctttcccaataaagtgttgcac

SEQ ID NO: 165294 - DNA, 25 bp, Probe Sequence
aatctgttaacattccaaagtgttt

SEQ ID NO: 165295 - DNA, 25 bp, Probe Sequence
cactctctaaatgaccaaagttggg

SEQ ID NO: 165296 - DNA, 25 bp, Probe Sequence
caccttcgagcagcttcgtagcttg

SEQ ID NO: 165297 - DNA, 25 bp, Probe Sequence
caactacgagcaggcccggaagtga

SEQ ID NO: 165298 - DNA, 25 bp, Probe Sequence
aatgccaccatctccgtggaaggaa

SEQ ID NO: 165299 - DNA, 25 bp, Probe Sequence
aatggggctttccagggaatgaaga

SEQ ID NO: 165300 - DNA, 25 bp, Probe Sequence
aatgagccagttatcaaagaagaac

SEQ ID NO: 165301 - DNA, 25 bp, Probe Sequence
aatggctgatttataagcagtactt

SEQ ID NO: 165302 - DNA, 25 bp, Probe Sequence
aatggtgtctctagtgagcacatgt

SEQ ID NO: 165303 - DNA, 25 bp, Probe Sequence
aatggtctcatcaaggtgaacgggc

SEQ ID NO: 165304 - DNA, 25 bp, Probe Sequence
aatggagcatctactgttgtcacgg

SEQ ID NO: 165305 - DNA, 25 bp, Probe Sequence
aatgtatgaccactggggccggagt

SEQ ID NO: 165306 - DNA, 25 bp, Probe Sequence
aatgttaccaggcatggcagtgggc

SEQ ID NO: 165307 - DNA, 25 bp, Probe Sequence
aatcttccttgccctggagtagggg

SEQ ID NO: 165308 - DNA, 25 bp, Probe Sequence
aatttctcttgtatgggtattagcc

SEQ ID NO: 165309 - DNA, 25 bp, Probe Sequence
aaggccttcgatacgggataatcct

SEQ ID NO: 165310 - DNA, 25 bp, Probe Sequence
aaggccttcagatggggtgctcatc

SEQ ID NO: 165311 - DNA, 25 bp, Probe Sequence
aatggcgttatgtttggagttatga

SEQ ID NO: 165312 - DNA, 25 bp, Probe Sequence
aaggcctttgttcttgtgagatgca

SEQ ID NO: 165313 - DNA, 25 bp, Probe Sequence
aaggcctatgagtatggattggggg

SEQ ID NO: 165314 - DNA, 25 bp, Probe Sequence
aaggccaatgcaagtggttcagttg

SEQ ID NO: 165315 - DNA, 25 bp, Probe Sequence
aaggcccatatattgcatttatttg

SEQ ID NO: 165316 - DNA, 25 bp, Probe Sequence
aatggcacctatactggcttttaga

SEQ ID NO: 165317 - DNA, 25 bp, Probe Sequence
aatggcctctacagagttttatgga

SEQ ID NO: 165318 - DNA, 25 bp, Probe Sequence
aatggccctacaagtagcttcctgg

SEQ ID NO: 165319 - DNA, 25 bp, Probe Sequence
aatgagccctacatgaagatccctt

SEQ ID NO: 165320 - DNA, 25 bp, Probe Sequence
aatggtggcttcatgacaacggctt

SEQ ID NO: 165321 - DNA, 25 bp, Probe Sequence
aatgtgtactactgacggggctttt

SEQ ID NO: 165322 - DNA, 25 bp, Probe Sequence
aatgtggtcattaaggtggggccct

SEQ ID NO: 165323 - DNA, 25 bp, Probe Sequence
aatgtgtccattcgagggcggatcc

SEQ ID NO: 165324 - DNA, 25 bp, Probe Sequence
aatgtgtccattcgagggcggatcc

SEQ ID NO: 165325 - DNA, 25 bp, Probe Sequence
aatgcttagcaaacagcggcacgat

SEQ ID NO: 165326 - DNA, 25 bp, Probe Sequence
aatgttggcaatgccaccaatgtga

SEQ ID NO: 165327 - DNA, 25 bp, Probe Sequence
aatgtattgtctgcccagcaatcaa

SEQ ID NO: 165328 - DNA, 25 bp, Probe Sequence
aatgcaatgtggtaccctggaaaca

SEQ ID NO: 165329 - DNA, 25 bp, Probe Sequence
aatgtacgggacccaggggcagcag

SEQ ID NO: 165330 - DNA, 25 bp, Probe Sequence
aatgatacgtggatccaggccggca

SEQ ID NO: 165331 - DNA, 25 bp, Probe Sequence
aatgtagcagctgggtccaggctcg

SEQ ID NO: 165332 - DNA, 25 bp, Probe Sequence
aatggagcagccaagttcagtccca

SEQ ID NO: 165333 - DNA, 25 bp, Probe Sequence
aatggatgcaccaagatatatgacc

SEQ ID NO: 165334 - DNA, 25 bp, Probe Sequence
aatggctcagctcatcatacagacc

SEQ ID NO: 165335 - DNA, 25 bp, Probe Sequence
aaggccctgcaaaaggtgctgctga

SEQ ID NO: 165336 - DNA, 25 bp, Probe Sequence
aatggacttgagaagattggcttga

SEQ ID NO: 165337 - DNA, 25 bp, Probe Sequence
aatgtgactaagaagcctggggagc

SEQ ID NO: 165338 - DNA, 25 bp, Probe Sequence
aaggcccactgtagcctggttacaa

SEQ ID NO: 165339 - DNA, 25 bp, Probe Sequence
aatggtccgtgtttgcattgttaaa

SEQ ID NO: 165340 - DNA, 25 bp, Probe Sequence
aatgttaaggtcatttttagcaatg

SEQ ID NO: 165341 - DNA, 25 bp, Probe Sequence
aatggttaggatataactcatggtg

SEQ ID NO: 165342 - DNA, 25 bp, Probe Sequence
aatggtaaccaattaagcttgagat

SEQ ID NO: 165343 - DNA, 25 bp, Probe Sequence
aatggtaatccttatttctcaaatt

SEQ ID NO: 165344 - DNA, 25 bp, Probe Sequence
aatggttgactgggtttctctgtat

SEQ ID NO: 165345 - DNA, 25 bp, Probe Sequence
aaggcctgtgttatttcttgttctt

SEQ ID NO: 165346 - DNA, 25 bp, Probe Sequence
aatggtgctgggattgtttggttca

SEQ ID NO: 165347 - DNA, 25 bp, Probe Sequence
aatgggaggctgggtgacctggatt

SEQ ID NO: 165348 - DNA, 25 bp, Probe Sequence
aatgggcagcgctggagagcgaggt

SEQ ID NO: 165349 - DNA, 25 bp, Probe Sequence
aatgtgaagtgctagctgaaggatg

SEQ ID NO: 165350 - DNA, 25 bp, Probe Sequence
aatggagagctatgtaacagataca

SEQ ID NO: 165351 - DNA, 25 bp, Probe Sequence
aatggaatgctctggtctatataac

SEQ ID NO: 165352 - DNA, 25 bp, Probe Sequence
aatggcagcctcttagtgctattca

SEQ ID NO: 165353 - DNA, 25 bp, Probe Sequence
aatgtagcccattaccacatgtagc

SEQ ID NO: 165354 - DNA, 25 bp, Probe Sequence
aatggtggccatttcatcaattaaa

SEQ ID NO: 165355 - DNA, 25 bp, Probe Sequence
aatctttgactctttcaactaccca

SEQ ID NO: 165356 - DNA, 25 bp, Probe Sequence
aatgtttactattacagggacctca

SEQ ID NO: 165357 - DNA, 25 bp, Probe Sequence
aatggtgtagcttttctggaaaaca

SEQ ID NO: 165358 - DNA, 25 bp, Probe Sequence
aatgatcctagtaattgcctagaaa

SEQ ID NO: 165359 - DNA, 25 bp, Probe Sequence
aatgacctcaaccattgggaccata

SEQ ID NO: 165360 - DNA, 25 bp, Probe Sequence
aatgaactaaggtgtctaccatgat

SEQ ID NO: 165361 - DNA, 25 bp, Probe Sequence
aatgaccaaagttgggagatcactg

SEQ ID NO: 165362 - DNA, 25 bp, Probe Sequence
aatgtacacaagatgcggaaatgat

SEQ ID NO: 165363 - DNA, 25 bp, Probe Sequence
aatgtaccaagttagatgactttga

SEQ ID NO: 165364 - DNA, 25 bp, Probe Sequence
aatgtagaaatgataatctcttatt

SEQ ID NO: 165365 - DNA, 25 bp, Probe Sequence
aatgtattagatcttcatgcctttg

SEQ ID NO: 165366 - DNA, 25 bp, Probe Sequence
aatgaaccaagtttcgccatgctgg

SEQ ID NO: 165367 - DNA, 25 bp, Probe Sequence
aatggcatcacaggaattcgttttg

SEQ ID NO: 165368 - DNA, 25 bp, Probe Sequence
aatggataccagaattttatttttg

SEQ ID NO: 165369 - DNA, 25 bp, Probe Sequence
aatggaatcccaatctatctaaatt

SEQ ID NO: 165370 - DNA, 25 bp, Probe Sequence
aatgatatcatctcaacttagtatt

SEQ ID NO: 165371 - DNA, 25 bp, Probe Sequence
aatggtgcagagtaacttagtcact

SEQ ID NO: 165372 - DNA, 25 bp, Probe Sequence
aatggtggcatgcacctgtagtccc

SEQ ID NO: 165373 - DNA, 25 bp, Probe Sequence
aatgagtgaggcgcttggtgccctc

SEQ ID NO: 165374 - DNA, 25 bp, Probe Sequence
aatcgatggaagtcttgaggtccct

SEQ ID NO: 165375 - DNA, 25 bp, Probe Sequence
aatggatctagaacttcatcgccct

SEQ ID NO: 165376 - DNA, 25 bp, Probe Sequence
aatggatctagaacttcatcgccct

SEQ ID NO: 165377 - DNA, 25 bp, Probe Sequence
aatggcactgcagtactcattcctt

SEQ ID NO: 165378 - DNA, 25 bp, Probe Sequence
aatggactgatctctttgacaataa

SEQ ID NO: 165379 - DNA, 25 bp, Probe Sequence
aatgtgtttgcaaccttaagtaagg

SEQ ID NO: 165380 - DNA, 25 bp, Probe Sequence
aatggtttgcctgcttaaaaggtat

SEQ ID NO: 165381 - DNA, 25 bp, Probe Sequence
caaggtttccccatgaagcagggtg

SEQ ID NO: 165382 - DNA, 25 bp, Probe Sequence
aaggccttttccatggatgagccgg

SEQ ID NO: 165383 - DNA, 25 bp, Probe Sequence
aaggccttgtatgtgtgccaatgcc

SEQ ID NO: 165384 - DNA, 25 bp, Probe Sequence
aaggccattggctaattgcacgtgt

SEQ ID NO: 165385 - DNA, 25 bp, Probe Sequence
aaggccatcaaggatatacaatgta

SEQ ID NO: 165386 - DNA, 25 bp, Probe Sequence
aaggccatcaaacctattgatcgga

SEQ ID NO: 165387 - DNA, 25 bp, Probe Sequence
aaggccatcaaacctattgatcgga

SEQ ID NO: 165388 - DNA, 25 bp, Probe Sequence
aatggctaaaacaattctgagagga

SEQ ID NO: 165389 - DNA, 25 bp, Probe Sequence
aatggtataaagaatctcccagcca

SEQ ID NO: 165390 - DNA, 25 bp, Probe Sequence
aatgtgtaacctgatgtctcaaccc

SEQ ID NO: 165391 - DNA, 25 bp, Probe Sequence
aatggtaagactcttcaacattgac

SEQ ID NO: 165392 - DNA, 25 bp, Probe Sequence
aatggtaatgaaactctcctatgta

SEQ ID NO: 165393 - DNA, 25 bp, Probe Sequence
aatggctatatgtactccttttaaa

SEQ ID NO: 165394 - DNA, 25 bp, Probe Sequence
aatggcttgcagtaccactttgata

SEQ ID NO: 165395 - DNA, 25 bp, Probe Sequence
aatggttgaatgtaaatcttgaagc

SEQ ID NO: 165396 - DNA, 25 bp, Probe Sequence
aatggtctcaggcaaactatcacag

SEQ ID NO: 165397 - DNA, 25 bp, Probe Sequence
aatggtgccaaatagacttgcctga

SEQ ID NO: 165398 - DNA, 25 bp, Probe Sequence
aatggtgacacctcgatgtggttca

SEQ ID NO: 165399 - DNA, 25 bp, Probe Sequence
aatgggacactattagttgaaagca

SEQ ID NO: 165400 - DNA, 25 bp, Probe Sequence
aatgagggctctaacttggaaaggc

SEQ ID NO: 165401 - DNA, 25 bp, Probe Sequence
aatggggaatattttggacaatgtt

SEQ ID NO: 165402 - DNA, 25 bp, Probe Sequence
aatgtggtggatattgctggccttg

SEQ ID NO: 165403 - DNA, 25 bp, Probe Sequence
aatgtggtggatattgctggccttg

SEQ ID NO: 165404 - DNA, 25 bp, Probe Sequence
aatggcttgtgatatctgatggctt

SEQ ID NO: 165405 - DNA, 25 bp, Probe Sequence
aatggcttgtgatatctgatggctt

SEQ ID NO: 165406 - DNA, 25 bp, Probe Sequence
aatgatgtttatttccatagtttga

SEQ ID NO: 165407 - DNA, 25 bp, Probe Sequence
aatgcctttcagctaccagtttgca

SEQ ID NO: 165408 - DNA, 25 bp, Probe Sequence
aatccttatgcgtatggccagtata

SEQ ID NO: 165409 - DNA, 25 bp, Probe Sequence
aatgccaaatggttacaactaagtt

SEQ ID NO: 165410 - DNA, 25 bp, Probe Sequence
aatccaaaccagtacaactatattg

SEQ ID NO: 165411 - DNA, 25 bp, Probe Sequence
aatcccaaacagtccaagtcttacg

SEQ ID NO: 165412 - DNA, 25 bp, Probe Sequence
aatccccaggttgcataacctaagt

SEQ ID NO: 165413 - DNA, 25 bp, Probe Sequence
aataccctggccactgaaacagaat

SEQ ID NO: 165414 - DNA, 25 bp, Probe Sequence
aatgagtttgacgaactaacagaag

SEQ ID NO: 165415 - DNA, 25 bp, Probe Sequence
aatggcatttgaaccaccaaaaaga

SEQ ID NO: 165416 - DNA, 25 bp, Probe Sequence
aatgtgccttgagagaccactcaga

SEQ ID NO: 165417 - DNA, 25 bp, Probe Sequence
aatgtcacttacacaaactgcaaat

SEQ ID NO: 165418 - DNA, 25 bp, Probe Sequence
aatgctagtataaacaaacaaatta

SEQ ID NO: 165419 - DNA, 25 bp, Probe Sequence
aatgtaatgctaactccaaactttg

SEQ ID NO: 165420 - DNA, 25 bp, Probe Sequence
aatgaaatgcttccacagctaacgt

SEQ ID NO: 165421 - DNA, 25 bp, Probe Sequence
aatgtacatgggccgcaccataatg

SEQ ID NO: 165422 - DNA, 25 bp, Probe Sequence
aatgatgccaaggtgccagccaaag

SEQ ID NO: 165423 - DNA, 25 bp, Probe Sequence
aatgtgcacaaggctccacaccttg

SEQ ID NO: 165424 - DNA, 25 bp, Probe Sequence
aatggagcactactacacagcgttc

SEQ ID NO: 165425 - DNA, 25 bp, Probe Sequence
aatgctggacaataaagcgagtgct

SEQ ID NO: 165426 - DNA, 25 bp, Probe Sequence
aatgtgtgaattccaataccggcta

SEQ ID NO: 165427 - DNA, 25 bp, Probe Sequence
aatgatgtgacacccaattgccggg

SEQ ID NO: 165428 - DNA, 25 bp, Probe Sequence
aatgtgatgcccggaatatctgggg

SEQ ID NO: 165429 - DNA, 25 bp, Probe Sequence
aatgtgtgccggaatatcagcaggc

SEQ ID NO: 165430 - DNA, 25 bp, Probe Sequence
aatgagtgatcaggcaattcggtca

SEQ ID NO: 165431 - DNA, 25 bp, Probe Sequence
aatgatatgtgctggattcttgtca

SEQ ID NO: 165432 - DNA, 25 bp, Probe Sequence
aatggatgtaaagtgttttcatcac

SEQ ID NO: 165433 - DNA, 25 bp, Probe Sequence
aatggcagacaatttttcgctccat

SEQ ID NO: 165434 - DNA, 25 bp, Probe Sequence
aatgtaaccattttgtcagatccat

SEQ ID NO: 165435 - DNA, 25 bp, Probe Sequence
aatgtacctgatttttcatgagcct

SEQ ID NO: 165436 - DNA, 25 bp, Probe Sequence
aatgctagcagtggcactttatagc

SEQ ID NO: 165437 - DNA, 25 bp, Probe Sequence
aatggcacagatgacttctatgcac

SEQ ID NO: 165438 - DNA, 25 bp, Probe Sequence
aatggcatgcattagctcactttca

SEQ ID NO: 165439 - DNA, 25 bp, Probe Sequence
aatggatctcattgaagtttcaggc

SEQ ID NO: 165440 - DNA, 25 bp, Probe Sequence
aatgagatctcttgggcagaatccc

SEQ ID NO: 165441 - DNA, 25 bp, Probe Sequence
aatgagttttggggtcacccagaat

SEQ ID NO: 165442 - DNA, 25 bp, Probe Sequence
aatgagccttttgtgtacacacaga

SEQ ID NO: 165443 - DNA, 25 bp, Probe Sequence
aatggttgttgttttccactgagaa

SEQ ID NO: 165444 - DNA, 25 bp, Probe Sequence
aatgggatttgttttctcggcagat

SEQ ID NO: 165445 - DNA, 25 bp, Probe Sequence
aatgagagatttgctgttccggaaa

SEQ ID NO: 165446 - DNA, 25 bp, Probe Sequence
aatgagaatcttcatgtattctgga

SEQ ID NO: 165447 - DNA, 25 bp, Probe Sequence
aatggaggtctccatcatgttgctg

SEQ ID NO: 165448 - DNA, 25 bp, Probe Sequence
aatggaaggatcctcatttctgccc

SEQ ID NO: 165449 - DNA, 25 bp, Probe Sequence
aatgctcaagacttcattatttgcc

SEQ ID NO: 165450 - DNA, 25 bp, Probe Sequence
aatgcatcctactcgcttaggtctt

SEQ ID NO: 165451 - DNA, 25 bp, Probe Sequence
aatgtctgtacagccaacggtttcc

SEQ ID NO: 165452 - DNA, 25 bp, Probe Sequence
aatgtagttccctactcaggctttc

SEQ ID NO: 165453 - DNA, 25 bp, Probe Sequence
aatgggtcacacaaacttggtggtc

SEQ ID NO: 165454 - DNA, 25 bp, Probe Sequence
aatggagtccacatgtttgggcaga

SEQ ID NO: 165455 - DNA, 25 bp, Probe Sequence
aatggagatccatctgtcctgtgtg

SEQ ID NO: 165456 - DNA, 25 bp, Probe Sequence
aatggagatccatctgtcctgtgtg

SEQ ID NO: 165457 - DNA, 25 bp, Probe Sequence
aatggagatcgatttgatttgttta

SEQ ID NO: 165458 - DNA, 25 bp, Probe Sequence
aatgtgactcgctattattttaatc

SEQ ID NO: 165459 - DNA, 25 bp, Probe Sequence
aatgggccgcgagtttgggaatctg

SEQ ID NO: 165460 - DNA, 25 bp, Probe Sequence
aatgggcgtggattatgcgggtttg

SEQ ID NO: 165461 - DNA, 25 bp, Probe Sequence
aatggttgtgctgtacggcgtttgg

SEQ ID NO: 165462 - DNA, 25 bp, Probe Sequence
aatgtgttgtattttcgacaggttg

SEQ ID NO: 165463 - DNA, 25 bp, Probe Sequence
aatggatctgattatttctacactg

SEQ ID NO: 165464 - DNA, 25 bp, Probe Sequence
aatgtcttgatggtgtcccacctga

SEQ ID NO: 165465 - DNA, 25 bp, Probe Sequence
aatgccttgcaggaatcagcaaaca

SEQ ID NO: 165466 - DNA, 25 bp, Probe Sequence
aatgtgtgtgcccatgatcacaccc

SEQ ID NO: 165467 - DNA, 25 bp, Probe Sequence
aatgagctgttgggtacacctccca

SEQ ID NO: 165468 - DNA, 25 bp, Probe Sequence
aatgacgtatggtccatagtaccca

SEQ ID NO: 165469 - DNA, 25 bp, Probe Sequence
aatggggatgataccaagattccca

SEQ ID NO: 165470 - DNA, 25 bp, Probe Sequence
aatgggcgtgataccgtttgactca

SEQ ID NO: 165471 - DNA, 25 bp, Probe Sequence
aatggggtgaacggtgctggcagtt

SEQ ID NO: 165472 - DNA, 25 bp, Probe Sequence
aatggaggtgtatatggctgggatt

SEQ ID NO: 165473 - DNA, 25 bp, Probe Sequence
aatgaagtgtgttaaggggtcggct

SEQ ID NO: 165474 - DNA, 25 bp, Probe Sequence
aatgggcgtgtatacggtttgactc

SEQ ID NO: 165475 - DNA, 25 bp, Probe Sequence
aatgggcgtgaatagcgttttgact

SEQ ID NO: 165476 - DNA, 25 bp, Probe Sequence
aatggacaagtatcagagttgttag

SEQ ID NO: 165477 - DNA, 25 bp, Probe Sequence
aatggacagaccacgcacgtgattt

SEQ ID NO: 165478 - DNA, 25 bp, Probe Sequence
aatggaaatatcactgagcagttgt

SEQ ID NO: 165479 - DNA, 25 bp, Probe Sequence
aatggtcagctatttttggttgcat

SEQ ID NO: 165480 - DNA, 25 bp, Probe Sequence
aatgttaggattttctgaagtctca

SEQ ID NO: 165481 - DNA, 25 bp, Probe Sequence
aatgtaaagcttgtctgatcgttca

SEQ ID NO: 165482 - DNA, 25 bp, Probe Sequence
aatgctaaagaagcctatcgtagta

SEQ ID NO: 165483 - DNA, 25 bp, Probe Sequence
caagaatcagaagcccaaggggtac

SEQ ID NO: 165484 - DNA, 25 bp, Probe Sequence
caagaagcagaagaccgacgaggat

SEQ ID NO: 165485 - DNA, 25 bp, Probe Sequence
aatgcaaatgaacaccccgatgaga

SEQ ID NO: 165486 - DNA, 25 bp, Probe Sequence
aatccaatgggaactctggccaaga

SEQ ID NO: 165487 - DNA, 25 bp, Probe Sequence
aatccagatctataattgcgcaata

SEQ ID NO: 165488 - DNA, 25 bp, Probe Sequence
aatggacatgaatactatggcgatt

SEQ ID NO: 165489 - DNA, 25 bp, Probe Sequence
aatgagaatgatgcacactgaggcc

SEQ ID NO: 165490 - DNA, 25 bp, Probe Sequence
aatggtcatgctgccgcaggatgat

SEQ ID NO: 165491 - DNA, 25 bp, Probe Sequence
aatgggagccctccagacataagga

SEQ ID NO: 165492 - DNA, 25 bp, Probe Sequence
aatggggctgggcagatatgtgagc

SEQ ID NO: 165493 - DNA, 25 bp, Probe Sequence
aatggatggcaggggagagtgttcc

SEQ ID NO: 165494 - DNA, 25 bp, Probe Sequence
aatggtatgcagaggcacagatgta

SEQ ID NO: 165495 - DNA, 25 bp, Probe Sequence
aatgtgtacgtgggccagcatggtg

SEQ ID NO: 165496 - DNA, 25 bp, Probe Sequence
aatgtgttctgtcactcagctttgc

SEQ ID NO: 165497 - DNA, 25 bp, Probe Sequence
aattgttttgacataggttccctag

SEQ ID NO: 165498 - DNA, 25 bp, Probe Sequence
aatgtgtctttagatagccctgtcc

SEQ ID NO: 165499 - DNA, 25 bp, Probe Sequence
aatgtttgcctgttgaacttctttc

SEQ ID NO: 165500 - DNA, 25 bp, Probe Sequence
aatgatcttacttccaaatctcctt

SEQ ID NO: 165501 - DNA, 25 bp, Probe Sequence
aatgattagtcatccttctcatcct

SEQ ID NO: 165502 - DNA, 25 bp, Probe Sequence
aatgaatagccaggcctgacctcaa

SEQ ID NO: 165503 - DNA, 25 bp, Probe Sequence
aatgcaaggggctgcatgacctacc

SEQ ID NO: 165504 - DNA, 25 bp, Probe Sequence
aatgcagaggtgaggcatgaaattc

SEQ ID NO: 165505 - DNA, 25 bp, Probe Sequence
aatgaaggtttgtctaagctgcctg

SEQ ID NO: 165506 - DNA, 25 bp, Probe Sequence
aatgataggtttttgagatgactta

SEQ ID NO: 165507 - DNA, 25 bp, Probe Sequence
aatgtgatgtgagtttaggaaagtg

SEQ ID NO: 165508 - DNA, 25 bp, Probe Sequence
aatggatcaactctaggatttaggc

SEQ ID NO: 165509 - DNA, 25 bp, Probe Sequence
aatgtgacacctgagacctttagac

SEQ ID NO: 165510 - DNA, 25 bp, Probe Sequence
aatgtgaccctgggactctggatgg

SEQ ID NO: 165511 - DNA, 25 bp, Probe Sequence
aatggtgctttggatactcggatgg

SEQ ID NO: 165512 - DNA, 25 bp, Probe Sequence
aatgggatttctactgccagtgagc

SEQ ID NO: 165513 - DNA, 25 bp, Probe Sequence
aatgagtttcttactcgggagctgg

SEQ ID NO: 165514 - DNA, 25 bp, Probe Sequence
aatgtgggaattactcaggagcagc

SEQ ID NO: 165515 - DNA, 25 bp, Probe Sequence
aatgggagccatttgcaaggatgca

SEQ ID NO: 165516 - DNA, 25 bp, Probe Sequence
aatggtgtgccagagcaggcgctgc

SEQ ID NO: 165517 - DNA, 25 bp, Probe Sequence
aatggtgttgccgcgccatctgcca

SEQ ID NO: 165518 - DNA, 25 bp, Probe Sequence
aatgtatgatgtgagccccatcgcc

SEQ ID NO: 165519 - DNA, 25 bp, Probe Sequence
aatgtgatgttgggcactcagctgc

SEQ ID NO: 165520 - DNA, 25 bp, Probe Sequence
aatggagctcgaggccatgagcaga

SEQ ID NO: 165521 - DNA, 25 bp, Probe Sequence
aatgtgatgcccaaggctggcaagg

SEQ ID NO: 165522 - DNA, 25 bp, Probe Sequence
aatggatgcacattcaagtgtggag

SEQ ID NO: 165523 - DNA, 25 bp, Probe Sequence
aatgtgagcaagttagctggtactt

SEQ ID NO: 165524 - DNA, 25 bp, Probe Sequence
aatgcggcattgctaaggtcctgtg

SEQ ID NO: 165525 - DNA, 25 bp, Probe Sequence
aatgtagagtatttcaggtactggg

SEQ ID NO: 165526 - DNA, 25 bp, Probe Sequence
aatgtatatctctccagctgtactg

SEQ ID NO: 165527 - DNA, 25 bp, Probe Sequence
aatgcaaaacaacagctggactgct

SEQ ID NO: 165528 - DNA, 25 bp, Probe Sequence
aatccaatgccgagtggctgactgt

SEQ ID NO: 165529 - DNA, 25 bp, Probe Sequence
aatctaagcctgcatctggctacct

SEQ ID NO: 165530 - DNA, 25 bp, Probe Sequence
aatccgtgtgcacactgcgtatgtg

SEQ ID NO: 165531 - DNA, 25 bp, Probe Sequence
aatccagtgggtctcattggtgcag

SEQ ID NO: 165532 - DNA, 25 bp, Probe Sequence
aatccagtgggaaatacacatttgc

SEQ ID NO: 165533 - DNA, 25 bp, Probe Sequence
aatgacaggtagacaattacatatt

SEQ ID NO: 165534 - DNA, 25 bp, Probe Sequence
aatggtggactgacaagccaatcat

SEQ ID NO: 165535 - DNA, 25 bp, Probe Sequence
aatgttggcctgtcagagcttgatt

SEQ ID NO: 165536 - DNA, 25 bp, Probe Sequence
aatggtgaccattaagcttgagatg

SEQ ID NO: 165537 - DNA, 25 bp, Probe Sequence
aatgaggaccatcactgtatggaat

SEQ ID NO: 165538 - DNA, 25 bp, Probe Sequence
aatgatggacattcccgagataaga

SEQ ID NO: 165539 - DNA, 25 bp, Probe Sequence
aatgatggacattcagactcctgaa

SEQ ID NO: 165540 - DNA, 25 bp, Probe Sequence
aatgatggagctccgaatgtgctta

SEQ ID NO: 165541 - DNA, 25 bp, Probe Sequence
aatgaggatgctcgctctatggcag

SEQ ID NO: 165542 - DNA, 25 bp, Probe Sequence
aatggagatgagcctctgaggaaac

SEQ ID NO: 165543 - DNA, 25 bp, Probe Sequence
aatgggcagatcactggcgacaaga

SEQ ID NO: 165544 - DNA, 25 bp, Probe Sequence
aatgtggctgtcaactggcctaaat

SEQ ID NO: 165545 - DNA, 25 bp, Probe Sequence
aatgaggcttcatcctttccatatt

SEQ ID NO: 165546 - DNA, 25 bp, Probe Sequence
aatgtggcctttctgaatgttatct

SEQ ID NO: 165547 - DNA, 25 bp, Probe Sequence
aatgggctttatgtgctagatttta

SEQ ID NO: 165548 - DNA, 25 bp, Probe Sequence
aatgggtttccattccaatagagta

SEQ ID NO: 165549 - DNA, 25 bp, Probe Sequence
aatcggtttgacagaaatcatgggc

SEQ ID NO: 165550 - DNA, 25 bp, Probe Sequence
aatgggatttgaattcacatcatat

SEQ ID NO: 165551 - DNA, 25 bp, Probe Sequence
aatgggttagctactgtcatcagtt

SEQ ID NO: 165552 - DNA, 25 bp, Probe Sequence
aatgggctagtcacagttgcagatt

SEQ ID NO: 165553 - DNA, 25 bp, Probe Sequence
aatgggatagtacatgtttctgcta

SEQ ID NO: 165554 - DNA, 25 bp, Probe Sequence
aatgtggtaaagcctcattactgta

SEQ ID NO: 165555 - DNA, 25 bp, Probe Sequence
aatgtggtatatccactttcatgga

SEQ ID NO: 165556 - DNA, 25 bp, Probe Sequence
aatgtgagtctaccatttttaattt

SEQ ID NO: 165557 - DNA, 25 bp, Probe Sequence
aattggtaaatatggttaactatgg

SEQ ID NO: 165558 - DNA, 25 bp, Probe Sequence
aatccgtcaaattcttgtataactt

SEQ ID NO: 165559 - DNA, 25 bp, Probe Sequence
aatgggacaaattgcttttaacatc

SEQ ID NO: 165560 - DNA, 25 bp, Probe Sequence
aatgtgtataatttcctggtaaggc

SEQ ID NO: 165561 - DNA, 25 bp, Probe Sequence
aatgtttactttggtggtgagaaga

SEQ ID NO: 165562 - DNA, 25 bp, Probe Sequence
aatgttgatatttggctgatggttg

SEQ ID NO: 165563 - DNA, 25 bp, Probe Sequence
aatgtaatatacactgattgctggg

SEQ ID NO: 165564 - DNA, 25 bp, Probe Sequence
aatgtgaagcatccggttactgggc

SEQ ID NO: 165565 - DNA, 25 bp, Probe Sequence
aatgctgacaatccagagttaataa

SEQ ID NO: 165566 - DNA, 25 bp, Probe Sequence
aatggatctagcttgatgcttaata

SEQ ID NO: 165567 - DNA, 25 bp, Probe Sequence
aatgagattcaatgtctgagaaatt

SEQ ID NO: 165568 - DNA, 25 bp, Probe Sequence
aatgcagttgaatcatggagaactt

SEQ ID NO: 165569 - DNA, 25 bp, Probe Sequence
aatgcactttgctcagtaatacttg

SEQ ID NO: 165570 - DNA, 25 bp, Probe Sequence
aatgatcaactgctggaaatactta

SEQ ID NO: 165571 - DNA, 25 bp, Probe Sequence
aatgtaattgccagataatcacagt

SEQ ID NO: 165572 - DNA, 25 bp, Probe Sequence
aatgttattctctgataaagagcta

SEQ ID NO: 165573 - DNA, 25 bp, Probe Sequence
aatggtatttcttaaagcaatctat

SEQ ID NO: 165574 - DNA, 25 bp, Probe Sequence
aatggttcccttaatagactcttgt

SEQ ID NO: 165575 - DNA, 25 bp, Probe Sequence
aatggtatcactgttgacccttgtg

SEQ ID NO: 165576 - DNA, 25 bp, Probe Sequence
aatggtgaacattttgtaccttctg

SEQ ID NO: 165577 - DNA, 25 bp, Probe Sequence
aatgttgagcctttttggcctggct

SEQ ID NO: 165578 - DNA, 25 bp, Probe Sequence
aatgattgtcggtttgctcatcctg

SEQ ID NO: 165579 - DNA, 25 bp, Probe Sequence
aatgaagtaggctgccatattcaga

SEQ ID NO: 165580 - DNA, 25 bp, Probe Sequence
aatgaactcacccacgatatcatca

SEQ ID NO: 165581 - DNA, 25 bp, Probe Sequence
aatgagactcattcctcttatactg

SEQ ID NO: 165582 - DNA, 25 bp, Probe Sequence
aatgttgctatatttgcttaacgtg

SEQ ID NO: 165583 - DNA, 25 bp, Probe Sequence
aatgttcccttcttgtagagagatg

SEQ ID NO: 165584 - DNA, 25 bp, Probe Sequence
aatgtccccttgatggggaatccgt

SEQ ID NO: 165585 - DNA, 25 bp, Probe Sequence
aatgtccccttgatggggaatccgt

SEQ ID NO: 165586 - DNA, 25 bp, Probe Sequence
aatgtccccttgatggggaatccgt

SEQ ID NO: 165587 - DNA, 25 bp, Probe Sequence
aatgtcccagtctattcgggagtct

SEQ ID NO: 165588 - DNA, 25 bp, Probe Sequence
aatgttcggtgatccgggactcact

SEQ ID NO: 165589 - DNA, 25 bp, Probe Sequence
aatgttggtgtatccatggggctta

SEQ ID NO: 165590 - DNA, 25 bp, Probe Sequence
aatgtgtagtgcacacgcacgggtg

SEQ ID NO: 165591 - DNA, 25 bp, Probe Sequence
aatgctgtaccacagagccgggtgt

SEQ ID NO: 165592 - DNA, 25 bp, Probe Sequence
aatagtacccactcacagggctgtt

SEQ ID NO: 165593 - DNA, 25 bp, Probe Sequence
ggtaaacggcccactgggcagtaca

SEQ ID NO: 165594 - DNA, 25 bp, Probe Sequence
aataaacggcccaactagtgcttct

SEQ ID NO: 165595 - DNA, 25 bp, Probe Sequence
aatgcagaacgacgccggcgagttc

SEQ ID NO: 165596 - DNA, 25 bp, Probe Sequence
aatacatgccgacgggcgctgaccc

SEQ ID NO: 165597 - DNA, 25 bp, Probe Sequence
aatacatgccgacgggcgctgaccc

SEQ ID NO: 165598 - DNA, 25 bp, Probe Sequence
aatacccgtgcaggcgcggagaagc

SEQ ID NO: 165599 - DNA, 25 bp, Probe Sequence
aatacccagaggccgctgggcaggc

SEQ ID NO: 165600 - DNA, 25 bp, Probe Sequence
aatcccgagagtccggagggctgtg

SEQ ID NO: 165601 - DNA, 25 bp, Probe Sequence
aatcccgaggctgctgagagacggt

SEQ ID NO: 165602 - DNA, 25 bp, Probe Sequence
caagtcccgcggacgaggcatcatg

SEQ ID NO: 165603 - DNA, 25 bp, Probe Sequence
caagtccagcgtgaagggccacagc

SEQ ID NO: 165604 - DNA, 25 bp, Probe Sequence
caagtccagcgtgaagggccacagc

SEQ ID NO: 165605 - DNA, 25 bp, Probe Sequence
aatgcttgaggtgaaggacgcccca

SEQ ID NO: 165606 - DNA, 25 bp, Probe Sequence
aatcttgtcaatgagagggacccga

SEQ ID NO: 165607 - DNA, 25 bp, Probe Sequence
aatgcttgctcaggctcagagggac

SEQ ID NO: 165608 - DNA, 25 bp, Probe Sequence
aatgggatatgggcaggggacgtct

SEQ ID NO: 165609 - DNA, 25 bp, Probe Sequence
aatgggcaatgagtagggtgggagt

SEQ ID NO: 165610 - DNA, 25 bp, Probe Sequence
aatgcgaaaagaatgggtggatgga

SEQ ID NO: 165611 - DNA, 25 bp, Probe Sequence
aatgcagagatgtgttgggtttggt

SEQ ID NO: 165612 - DNA, 25 bp, Probe Sequence
aatgtgctgtgttagtagagtttga

SEQ ID NO: 165613 - DNA, 25 bp, Probe Sequence
aatggtgtgaactacaagattggag

SEQ ID NO: 165614 - DNA, 25 bp, Probe Sequence
aatgtttgcacactgaattgaagaa

SEQ ID NO: 165615 - DNA, 25 bp, Probe Sequence
aatgtttaattgtttggatctgcac

SEQ ID NO: 165616 - DNA, 25 bp, Probe Sequence
aatgttagaaggtcacgtgtgctcc

SEQ ID NO: 165617 - DNA, 25 bp, Probe Sequence
aatgagctgaggtgtacaggcatgc

SEQ ID NO: 165618 - DNA, 25 bp, Probe Sequence
aatgacgtggactttagcatgcaga

SEQ ID NO: 165619 - DNA, 25 bp, Probe Sequence
aatgttgtcaactatgtccagcaga

SEQ ID NO: 165620 - DNA, 25 bp, Probe Sequence
aatgtttccaactccgctgaaatgt

SEQ ID NO: 165621 - DNA, 25 bp, Probe Sequence
aatgttagctaaacccaagataatt

SEQ ID NO: 165622 - DNA, 25 bp, Probe Sequence
aattctggaacaacgcgccagacgt

SEQ ID NO: 165623 - DNA, 25 bp, Probe Sequence
aattgctggaataaacccaacttga

SEQ ID NO: 165624 - DNA, 25 bp, Probe Sequence
aatgtatgtttcaaatctccaagtt

SEQ ID NO: 165625 - DNA, 25 bp, Probe Sequence
aatgttgtttcaaattactaaattg

SEQ ID NO: 165626 - DNA, 25 bp, Probe Sequence
aatgtcgattttcaataatagactt

SEQ ID NO: 165627 - DNA, 25 bp, Probe Sequence
aatgtaattattgcgatcactggtt

SEQ ID NO: 165628 - DNA, 25 bp, Probe Sequence
aatgttttatttgtaagattctata

SEQ ID NO: 165629 - DNA, 25 bp, Probe Sequence
aatgttttttttgaagatgtatgat

SEQ ID NO: 165630 - DNA, 25 bp, Probe Sequence
aatgtcttttttttaatgtgctgtg

SEQ ID NO: 165631 - DNA, 25 bp, Probe Sequence
aatgtctgtttttcataattgctct

SEQ ID NO: 165632 - DNA, 25 bp, Probe Sequence
aatgtccctttgatacttgtgctct

SEQ ID NO: 165633 - DNA, 25 bp, Probe Sequence
aatgtactatttataatcttccaaa

SEQ ID NO: 165634 - DNA, 25 bp, Probe Sequence
aatgttacaattctagatctatcca

SEQ ID NO: 165635 - DNA, 25 bp, Probe Sequence
aatgtatttcctcaagactctgtct

SEQ ID NO: 165636 - DNA, 25 bp, Probe Sequence
aatgtacctggtaacaagcctgtta

SEQ ID NO: 165637 - DNA, 25 bp, Probe Sequence
aatgtgtactgggaataagctttgt

SEQ ID NO: 165638 - DNA, 25 bp, Probe Sequence
aatgtgatagtctcagaaacatttg

SEQ ID NO: 165639 - DNA, 25 bp, Probe Sequence
aatgcaggtattgcgataactgtag

SEQ ID NO: 165640 - DNA, 25 bp, Probe Sequence
aatcctgtgttaggaaactgctagt

SEQ ID NO: 165641 - DNA, 25 bp, Probe Sequence
aatccagccatgtaggaaacctgag

SEQ ID NO: 165642 - DNA, 25 bp, Probe Sequence
aatcgaccagtgtatcgacggctga

SEQ ID NO: 165643 - DNA, 25 bp, Probe Sequence
aatcgatccatgttaccacatagta

SEQ ID NO: 165644 - DNA, 25 bp, Probe Sequence
aatgtgcgatatttgacccttgata

SEQ ID NO: 165645 - DNA, 25 bp, Probe Sequence
aatgttatgtgctggctccttagaa

SEQ ID NO: 165646 - DNA, 25 bp, Probe Sequence
aatgcttggtttcctcctaagaggc

SEQ ID NO: 165647 - DNA, 25 bp, Probe Sequence
aatcgatgctgtttcattcctttgg

SEQ ID NO: 165648 - DNA, 25 bp, Probe Sequence
aatgaatgtgagtaccccttctgtg

SEQ ID NO: 165649 - DNA, 25 bp, Probe Sequence
aatgaatgtgagtaccccttctgtg

SEQ ID NO: 165650 - DNA, 25 bp, Probe Sequence
aatgaatgtgagtaccccttctgtg

SEQ ID NO: 165651 - DNA, 25 bp, Probe Sequence
aatgcattgtcatcatcccgaacgg

SEQ ID NO: 165652 - DNA, 25 bp, Probe Sequence
aatgatatggcagcttctacatacg

SEQ ID NO: 165653 - DNA, 25 bp, Probe Sequence
aatacatggaacttggaatcagccc

SEQ ID NO: 165654 - DNA, 25 bp, Probe Sequence
aatgatttgtagttgtgtgtgcagc

SEQ ID NO: 165655 - DNA, 25 bp, Probe Sequence
aatgttcagtctttgctggatgcag

SEQ ID NO: 165656 - DNA, 25 bp, Probe Sequence
aatgattcagtcttgacggtgaatg

SEQ ID NO: 165657 - DNA, 25 bp, Probe Sequence
aatgaccgtatgtcaccaagagatg

SEQ ID NO: 165658 - DNA, 25 bp, Probe Sequence
aatgacgccataactcctagaatgt

SEQ ID NO: 165659 - DNA, 25 bp, Probe Sequence
aatgatcccagagctcctgacagtt

SEQ ID NO: 165660 - DNA, 25 bp, Probe Sequence
aatgtcctggcagatgctctcaaga

SEQ ID NO: 165661 - DNA, 25 bp, Probe Sequence
aatgggctggcttggtctgccagac

SEQ ID NO: 165662 - DNA, 25 bp, Probe Sequence
aatgggatggtcggatctcacaggc

SEQ ID NO: 165663 - DNA, 25 bp, Probe Sequence
aatgggctagctgtactgacagcag

SEQ ID NO: 165664 - DNA, 25 bp, Probe Sequence
aatgaggtactagtgactgaccata

SEQ ID NO: 165665 - DNA, 25 bp, Probe Sequence
aatgtggattccagaatgattgctt

SEQ ID NO: 165666 - DNA, 25 bp, Probe Sequence
aatgggctatacggagacatctctt

SEQ ID NO: 165667 - DNA, 25 bp, Probe Sequence
aatgttgaatcgccaggatcccttc

SEQ ID NO: 165668 - DNA, 25 bp, Probe Sequence
aatgatggacctccagcgagtccgt

SEQ ID NO: 165669 - DNA, 25 bp, Probe Sequence
aatgcatctacctgagaggctcctg

SEQ ID NO: 165670 - DNA, 25 bp, Probe Sequence
aatgcacagaaccagcagagtctcc

SEQ ID NO: 165671 - DNA, 25 bp, Probe Sequence
aatgcacctttggcagcagtcacat

SEQ ID NO: 165672 - DNA, 25 bp, Probe Sequence
aataccttggcaagcagctccagtc

SEQ ID NO: 165673 - DNA, 25 bp, Probe Sequence
aataaattaaagctccagactgttt

SEQ ID NO: 165674 - DNA, 25 bp, Probe Sequence
aataaattataagactgaccactag

SEQ ID NO: 165675 - DNA, 25 bp, Probe Sequence
aatgtaatctattatgcccgacatc

SEQ ID NO: 165676 - DNA, 25 bp, Probe Sequence
aatgtaatgtactctcctggactga

SEQ ID NO: 165677 - DNA, 25 bp, Probe Sequence
aatgatgagattatttcctgtgtta

SEQ ID NO: 165678 - DNA, 25 bp, Probe Sequence
aatgtgaattatcttttgtgtctat

SEQ ID NO: 165679 - DNA, 25 bp, Probe Sequence
aatgtccagctactcttttgttttt

SEQ ID NO: 165680 - DNA, 25 bp, Probe Sequence
aatgacattgctgtcgttttttatt

SEQ ID NO: 165681 - DNA, 25 bp, Probe Sequence
cactggttgccgaatttacttgtat

SEQ ID NO: 165682 - DNA, 25 bp, Probe Sequence
aatgtcttctgcaaattttctagta

SEQ ID NO: 165683 - DNA, 25 bp, Probe Sequence
aatgtgctattgagattccagtggt

SEQ ID NO: 165684 - DNA, 25 bp, Probe Sequence
aatgtgctattgagattccagtggt

SEQ ID NO: 165685 - DNA, 25 bp, Probe Sequence
aatgtgcttatgaccacttagaagt

SEQ ID NO: 165686 - DNA, 25 bp, Probe Sequence
aatgtcttaatccagcttgcaagtg

SEQ ID NO: 165687 - DNA, 25 bp, Probe Sequence
aatgtctctcagtaagtgtgcggaa

SEQ ID NO: 165688 - DNA, 25 bp, Probe Sequence
aatgtgctccggcagagtgctgaag

SEQ ID NO: 165689 - DNA, 25 bp, Probe Sequence
aatgtctgcctgatgtagtctagaa

SEQ ID NO: 165690 - DNA, 25 bp, Probe Sequence
aatgtcatgttaagcaatttcagaa

SEQ ID NO: 165691 - DNA, 25 bp, Probe Sequence
aatgcacggctaaactattcagagt

SEQ ID NO: 165692 - DNA, 25 bp, Probe Sequence
aatgcacagcgtcaacagatcaaag

SEQ ID NO: 165693 - DNA, 25 bp, Probe Sequence
aatgcccttcaaacatgtaggagaa

SEQ ID NO: 165694 - DNA, 25 bp, Probe Sequence
aatgcaccttcccacattcgaagga

SEQ ID NO: 165695 - DNA, 25 bp, Probe Sequence
aatgacatctgggtctcaatcgata

SEQ ID NO: 165696 - DNA, 25 bp, Probe Sequence
aatgagtttctgtccaagctgcaag

SEQ ID NO: 165697 - DNA, 25 bp, Probe Sequence
aatgattctttgttaacatccgtag

SEQ ID NO: 165698 - DNA, 25 bp, Probe Sequence
aatgttgctttgaaaatctcccttc

SEQ ID NO: 165699 - DNA, 25 bp, Probe Sequence
aatgtgcccttgcaatatttccatt

SEQ ID NO: 165700 - DNA, 25 bp, Probe Sequence
aatccccttggacattctcaatgtt

SEQ ID NO: 165701 - DNA, 25 bp, Probe Sequence
aatcccaggggatgttgcttactct

SEQ ID NO: 165702 - DNA, 25 bp, Probe Sequence
aatcccggtctatcttgtgacattt

SEQ ID NO: 165703 - DNA, 25 bp, Probe Sequence
aatgccaggttttttatggtcattt

SEQ ID NO: 165704 - DNA, 25 bp, Probe Sequence
aatctaggataatgcccaggttctt

SEQ ID NO: 165705 - DNA, 25 bp, Probe Sequence
aatgctaagtggtatccgaggttct

SEQ ID NO: 165706 - DNA, 25 bp, Probe Sequence
aatccgagcggctacaaagcgtttc

SEQ ID NO: 165707 - DNA, 25 bp, Probe Sequence
aatgaagaccctgcaaagcgaccca

SEQ ID NO: 165708 - DNA, 25 bp, Probe Sequence
aatatagacctgtgaaaagacgtca

SEQ ID NO: 165709 - DNA, 25 bp, Probe Sequence
aatgtaaccatctgaaagcaacttt

SEQ ID NO: 165710 - DNA, 25 bp, Probe Sequence
aatgtaacgtataaactcaagcctt

SEQ ID NO: 165711 - DNA, 25 bp, Probe Sequence
gaagttaccctagaactaggcattt

SEQ ID NO: 165712 - DNA, 25 bp, Probe Sequence
aatgttactaatataatttggcttt

SEQ ID NO: 165713 - DNA, 25 bp, Probe Sequence
aatgtatttctaagtaagtctggct

SEQ ID NO: 165714 - DNA, 25 bp, Probe Sequence
cactttctgtgcttaactatttggt

SEQ ID NO: 165715 - DNA, 25 bp, Probe Sequence
caaattcttcgaaagtggttggatt

SEQ ID NO: 165716 - DNA, 25 bp, Probe Sequence
aatgttctacggaaggttctggtgt

SEQ ID NO: 165717 - DNA, 25 bp, Probe Sequence
aatgctgatctactataaggtattc

SEQ ID NO: 165718 - DNA, 25 bp, Probe Sequence
aatgtgttcatcattggcgctacca

SEQ ID NO: 165719 - DNA, 25 bp, Probe Sequence
aatgttctccatagtggctgtacca

SEQ ID NO: 165720 - DNA, 25 bp, Probe Sequence
aatgtttaatctaccatgtccgcgt

SEQ ID NO: 165721 - DNA, 25 bp, Probe Sequence
aatcctctacattagcggtaggtat

SEQ ID NO: 165722 - DNA, 25 bp, Probe Sequence
aatcctaaatatgccaagaggtgca

SEQ ID NO: 165723 - DNA, 25 bp, Probe Sequence
aatgcccaaatatgaaagagagcca

SEQ ID NO: 165724 - DNA, 25 bp, Probe Sequence
aatgtcactgaattggaatcataca

SEQ ID NO: 165725 - DNA, 25 bp, Probe Sequence
aatgctcctaaaaggccaccatctg

SEQ ID NO: 165726 - DNA, 25 bp, Probe Sequence
aatgcaaatatttaggccccatcca

SEQ ID NO: 165727 - DNA, 25 bp, Probe Sequence
aatgatgtatttgtgacaccctatc

SEQ ID NO: 165728 - DNA, 25 bp, Probe Sequence
aatgtgtagaccttagccaccttgg

SEQ ID NO: 165729 - DNA, 25 bp, Probe Sequence
aatgtgttagcctcagacactactg

SEQ ID NO: 165730 - DNA, 25 bp, Probe Sequence
aatgtgtgtgaccttgcagttcttc

SEQ ID NO: 165731 - DNA, 25 bp, Probe Sequence
aatgcatgtgttgctcagtttttcc

SEQ ID NO: 165732 - DNA, 25 bp, Probe Sequence
aatgtgctgttgaccgtgtcttttc

SEQ ID NO: 165733 - DNA, 25 bp, Probe Sequence
aatgttgattctgaagtgctctgta

SEQ ID NO: 165734 - DNA, 25 bp, Probe Sequence
aatgttgtcttccagcaattcttgt

SEQ ID NO: 165735 - DNA, 25 bp, Probe Sequence
aatgtagtagtcaaggcatagcctt

SEQ ID NO: 165736 - DNA, 25 bp, Probe Sequence
aatgtgcagtgggcatcaactcagc

SEQ ID NO: 165737 - DNA, 25 bp, Probe Sequence
aatgtcagatatgatacactgcaca

SEQ ID NO: 165738 - DNA, 25 bp, Probe Sequence
aatgtgcagtattttcagtgtcaaa

SEQ ID NO: 165739 - DNA, 25 bp, Probe Sequence
aatgtcagtgtttctatgattgtaa

SEQ ID NO: 165740 - DNA, 25 bp, Probe Sequence
aatgatcagtttttttttatacact

SEQ ID NO: 165741 - DNA, 25 bp, Probe Sequence
aatgcacacctttttctgaatttac

SEQ ID NO: 165742 - DNA, 25 bp, Probe Sequence
aatgcactcggtactttagataaag

SEQ ID NO: 165743 - DNA, 25 bp, Probe Sequence
aatgattagtgtactgtttgaaaca

SEQ ID NO: 165744 - DNA, 25 bp, Probe Sequence
aatgatatgagtttctccctgccaa

SEQ ID NO: 165745 - DNA, 25 bp, Probe Sequence
aatgattgagaattcttgcctagga

SEQ ID NO: 165746 - DNA, 25 bp, Probe Sequence
aatgtctgactatcactccagagga

SEQ ID NO: 165747 - DNA, 25 bp, Probe Sequence
aatgcttgttcaggcacgccagaag

SEQ ID NO: 165748 - DNA, 25 bp, Probe Sequence
aatgtgttgatgtgcacagctaatg

SEQ ID NO: 165749 - DNA, 25 bp, Probe Sequence
aatgttttgattccctgaggctact

SEQ ID NO: 165750 - DNA, 25 bp, Probe Sequence
aatgtttatatgctttgacctacta

SEQ ID NO: 165751 - DNA, 25 bp, Probe Sequence
aatgtttatatgctttgacctacta

SEQ ID NO: 165752 - DNA, 25 bp, Probe Sequence
aatgtttatatgctttgacctacta

SEQ ID NO: 165753 - DNA, 25 bp, Probe Sequence
aatgttatcttgctattaagtggta

SEQ ID NO: 165754 - DNA, 25 bp, Probe Sequence
aatgcattacttgttttagatcaga

SEQ ID NO: 165755 - DNA, 25 bp, Probe Sequence
aatgcattactttcacttaacacta

SEQ ID NO: 165756 - DNA, 25 bp, Probe Sequence
aatgtctactgttcacgaaatcctg

SEQ ID NO: 165757 - DNA, 25 bp, Probe Sequence
aatgtctactttttcagcagttctg

SEQ ID NO: 165758 - DNA, 25 bp, Probe Sequence
aatctctcgactgaatggactttgc

SEQ ID NO: 165759 - DNA, 25 bp, Probe Sequence
aatgtccgtgcaaagtggtatcctg

SEQ ID NO: 165760 - DNA, 25 bp, Probe Sequence
aatgtcactggcatgcagtcgtctc

SEQ ID NO: 165761 - DNA, 25 bp, Probe Sequence
aatgtcattgcagatcagcatttat

SEQ ID NO: 165762 - DNA, 25 bp, Probe Sequence
aatgtcttcatttcattgtatgatg

SEQ ID NO: 165763 - DNA, 25 bp, Probe Sequence
aatgtcttatatgcattatctttta

SEQ ID NO: 165764 - DNA, 25 bp, Probe Sequence
aatgttctatatcttattagttaat

SEQ ID NO: 165765 - DNA, 25 bp, Probe Sequence
aatgcttccaatcttgctttgtgta

SEQ ID NO: 165766 - DNA, 25 bp, Probe Sequence
aatgtatcacattttctcatcgttg

SEQ ID NO: 165767 - DNA, 25 bp, Probe Sequence
aatgttctgtgagttatctcgtgat

SEQ ID NO: 165768 - DNA, 25 bp, Probe Sequence
aatgtactgtgaggctatcttgaaa

SEQ ID NO: 165769 - DNA, 25 bp, Probe Sequence
aatgtgcactgaatcgtttcatgta

SEQ ID NO: 165770 - DNA, 25 bp, Probe Sequence
aatgctgccgcaatggctgtgggaa

SEQ ID NO: 165771 - DNA, 25 bp, Probe Sequence
aatgcccttcatccaatgggtatct

SEQ ID NO: 165772 - DNA, 25 bp, Probe Sequence
aatgcggtgtagaaatgtttactgt

SEQ ID NO: 165773 - DNA, 25 bp, Probe Sequence
aatgcaagttaaaatgtttcagtga

SEQ ID NO: 165774 - DNA, 25 bp, Probe Sequence
aatgcaagttaaaatgtttcagtga

SEQ ID NO: 165775 - DNA, 25 bp, Probe Sequence
aatccgttgaacagtcgtgctctga

SEQ ID NO: 165776 - DNA, 25 bp, Probe Sequence
aatgcaccttaatggtcagtgttcc

SEQ ID NO: 165777 - DNA, 25 bp, Probe Sequence
aatgactttaaggatcttgtgtatc

SEQ ID NO: 165778 - DNA, 25 bp, Probe Sequence
aatgctttagaaggatctgttaatc

SEQ ID NO: 165779 - DNA, 25 bp, Probe Sequence
aatgtcattgaaagccttattacgc

SEQ ID NO: 165780 - DNA, 25 bp, Probe Sequence
aatgctattcaaagcagttaaactg

SEQ ID NO: 165781 - DNA, 25 bp, Probe Sequence
aatgtcttcataaaccaaggactat

SEQ ID NO: 165782 - DNA, 25 bp, Probe Sequence
aatgtctgtataaataatgagcgtt

SEQ ID NO: 165783 - DNA, 25 bp, Probe Sequence
aatccgataactaagatggctgttc

SEQ ID NO: 165784 - DNA, 25 bp, Probe Sequence
aatgctctttacaatatgctggcta

SEQ ID NO: 165785 - DNA, 25 bp, Probe Sequence
aatgcttttagaatgcaggagccta

SEQ ID NO: 165786 - DNA, 25 bp, Probe Sequence
aatgcttttagaatgcaggagccta

SEQ ID NO: 165787 - DNA, 25 bp, Probe Sequence
aatgtgcttgtagattagagacttc

SEQ ID NO: 165788 - DNA, 25 bp, Probe Sequence
aatgctgtgtgttctgttaagttct

SEQ ID NO: 165789 - DNA, 25 bp, Probe Sequence
aatgagctgatcgttgtttatgttc

SEQ ID NO: 165790 - DNA, 25 bp, Probe Sequence
aatgcagtcccattctttatggcct

SEQ ID NO: 165791 - DNA, 25 bp, Probe Sequence
aatgcaggagcctacttctagctgt

SEQ ID NO: 165792 - DNA, 25 bp, Probe Sequence
aatgcaggagcctacttctagctgt

SEQ ID NO: 165793 - DNA, 25 bp, Probe Sequence
aatgacagagccatcctctgctctt

SEQ ID NO: 165794 - DNA, 25 bp, Probe Sequence
aatccaggcatctatgcggctgcta

SEQ ID NO: 165795 - DNA, 25 bp, Probe Sequence
aatccggcaaacccagtgcagcgga

SEQ ID NO: 165796 - DNA, 25 bp, Probe Sequence
aatccgcagcaaactgccgtgctgg

SEQ ID NO: 165797 - DNA, 25 bp, Probe Sequence
aatccgaaaactttggcaggcctgg

SEQ ID NO: 165798 - DNA, 25 bp, Probe Sequence
aatcccaacactttgggaggcccag

SEQ ID NO: 165799 - DNA, 25 bp, Probe Sequence
aatcccaacactttgggaggcccag

SEQ ID NO: 165800 - DNA, 25 bp, Probe Sequence
aatcccaacactttgggaggccaag

SEQ ID NO: 165801 - DNA, 25 bp, Probe Sequence
aatcgccccttttgaaggtgccatt

SEQ ID NO: 165802 - DNA, 25 bp, Probe Sequence
aatcgccccttttgaaggtgccatt

SEQ ID NO: 165803 - DNA, 25 bp, Probe Sequence
aatgtcccacatgtggaagaacctt

SEQ ID NO: 165804 - DNA, 25 bp, Probe Sequence
aatgctgcttcatggggaagaatcc

SEQ ID NO: 165805 - DNA, 25 bp, Probe Sequence
aatgctgctggatagggaaatgggc

SEQ ID NO: 165806 - DNA, 25 bp, Probe Sequence
aatgctgcagtgtacatgggggtgc

SEQ ID NO: 165807 - DNA, 25 bp, Probe Sequence
aatgacagcttctacgtggagatga

SEQ ID NO: 165808 - DNA, 25 bp, Probe Sequence
aatgacagctagtgcttgggatcgt

SEQ ID NO: 165809 - DNA, 25 bp, Probe Sequence
aatgaccaagggaaggatgcctgtc

SEQ ID NO: 165810 - DNA, 25 bp, Probe Sequence
aatgacccagtgcacggtgctgatg

SEQ ID NO: 165811 - DNA, 25 bp, Probe Sequence
aatgtcacacaggtaacaggctatg

SEQ ID NO: 165812 - DNA, 25 bp, Probe Sequence
aatgtcccagggtagctgagctggc

SEQ ID NO: 165813 - DNA, 25 bp, Probe Sequence
aatgctctccgacatgcagtagatg

SEQ ID NO: 165814 - DNA, 25 bp, Probe Sequence
aatgctctccgacatgcagtagatg

SEQ ID NO: 165815 - DNA, 25 bp, Probe Sequence
aatgcctatcggtagcaagccatgg

SEQ ID NO: 165816 - DNA, 25 bp, Probe Sequence
aatgcctatcggtagcaagccatgg

SEQ ID NO: 165817 - DNA, 25 bp, Probe Sequence
aatgtctctcctgcacaaacatgag

SEQ ID NO: 165818 - DNA, 25 bp, Probe Sequence
aatgtatctcttgcctaaaggacta

SEQ ID NO: 165819 - DNA, 25 bp, Probe Sequence
aatgtattcattcttaatttatgta

SEQ ID NO: 165820 - DNA, 25 bp, Probe Sequence
aatgttactttaaaattgctatgat

SEQ ID NO: 165821 - DNA, 25 bp, Probe Sequence
aatgtaaggttatgtctgtgtatgt

SEQ ID NO: 165822 - DNA, 25 bp, Probe Sequence
aatgttcatggttgtgatgtttttt

SEQ ID NO: 165823 - DNA, 25 bp, Probe Sequence
aatgacttggtctgatttattcact

SEQ ID NO: 165824 - DNA, 25 bp, Probe Sequence
caaccttgacaagagatttctacct

SEQ ID NO: 165825 - DNA, 25 bp, Probe Sequence
caaccttacaagcaaacttactatt

SEQ ID NO: 165826 - DNA, 25 bp, Probe Sequence
aatccttagcagcccaaacttcagc

SEQ ID NO: 165827 - DNA, 25 bp, Probe Sequence
aatcaacgccctccaagactatggt

SEQ ID NO: 165828 - DNA, 25 bp, Probe Sequence
aatcaaacctgccgcaacagaaatt

SEQ ID NO: 165829 - DNA, 25 bp, Probe Sequence
aatgtataccccttactgtaatttg

SEQ ID NO: 165830 - DNA, 25 bp, Probe Sequence
aatgatatgcacgctgaatcctgct

SEQ ID NO: 165831 - DNA, 25 bp, Probe Sequence
aatgattcaccaatttcttgcatta

SEQ ID NO: 165832 - DNA, 25 bp, Probe Sequence
aatgttaaatattccttcacatatc

SEQ ID NO: 165833 - DNA, 25 bp, Probe Sequence
aatgcttcatggaactccattccta

SEQ ID NO: 165834 - DNA, 25 bp, Probe Sequence
aatgttcattgcacatctgcttcca

SEQ ID NO: 165835 - DNA, 25 bp, Probe Sequence
aatgtagcaggcagtctgctcccac

SEQ ID NO: 165836 - DNA, 25 bp, Probe Sequence
aatgaccgattccagctctggggca

SEQ ID NO: 165837 - DNA, 25 bp, Probe Sequence
aatgaccaagttctcttcattgacc

SEQ ID NO: 165838 - DNA, 25 bp, Probe Sequence
caataaaaggttatatcagctgggc

SEQ ID NO: 165839 - DNA, 25 bp, Probe Sequence
aataaaaggttatatcagctgggca

SEQ ID NO: 165840 - DNA, 25 bp, Probe Sequence
aatagacagggagaactcgtcggca

SEQ ID NO: 165841 - DNA, 25 bp, Probe Sequence
taataaccggaggagcctcgggcct

SEQ ID NO: 165842 - DNA, 25 bp, Probe Sequence
aataagccactgggactcggtaggt

SEQ ID NO: 165843 - DNA, 25 bp, Probe Sequence
aatactgcccgcaaagctcgcgcta

SEQ ID NO: 165844 - DNA, 25 bp, Probe Sequence
aatcagcattctacaaagtcaggca

SEQ ID NO: 165845 - DNA, 25 bp, Probe Sequence
aatgatgcttctgctcaggaatggc

SEQ ID NO: 165846 - DNA, 25 bp, Probe Sequence
aatgatgccaatgggtggaatgatg

SEQ ID NO: 165847 - DNA, 25 bp, Probe Sequence
aatgtcatcaatggcggttctcatg

SEQ ID NO: 165848 - DNA, 25 bp, Probe Sequence
aatcccatagcccggtaatgactgg

SEQ ID NO: 165849 - DNA, 25 bp, Probe Sequence
aatgcccaaacccagactaaaggct

SEQ ID NO: 165850 - DNA, 25 bp, Probe Sequence
caagcccatatagatcgttacaacc

SEQ ID NO: 165851 - DNA, 25 bp, Probe Sequence
aatgcaccagtctggctttaaacca

SEQ ID NO: 165852 - DNA, 25 bp, Probe Sequence
aatgcaatcgagcggctgctgtcaa

SEQ ID NO: 165853 - DNA, 25 bp, Probe Sequence
aatgcaatatgatcacctgttatgt

SEQ ID NO: 165854 - DNA, 25 bp, Probe Sequence
aatgacagcaaagcactgtgtggct

SEQ ID NO: 165855 - DNA, 25 bp, Probe Sequence
aatgatgcagcacttctcacagttc

SEQ ID NO: 165856 - DNA, 25 bp, Probe Sequence
aatctagcaccttgcatgctggatc

SEQ ID NO: 165857 - DNA, 25 bp, Probe Sequence
aatctagcaccttgcatgctggatc

SEQ ID NO: 165858 - DNA, 25 bp, Probe Sequence
aattaacttatgtggactgtaaatg

SEQ ID NO: 165859 - DNA, 25 bp, Probe Sequence
aatgtttttatgttagcactgatag

SEQ ID NO: 165860 - DNA, 25 bp, Probe Sequence
aatgttattattggcttgcactttg

SEQ ID NO: 165861 - DNA, 25 bp, Probe Sequence
aatgtttgtttggtctccatgctcg

SEQ ID NO: 165862 - DNA, 25 bp, Probe Sequence
aatgttgtgttcagcctatcatcca

SEQ ID NO: 165863 - DNA, 25 bp, Probe Sequence
aatgtatttttatgcttcatcacac

SEQ ID NO: 165864 - DNA, 25 bp, Probe Sequence
aatgtatgtcatcaacctccataag

SEQ ID NO: 165865 - DNA, 25 bp, Probe Sequence
aatgatagtgcactacaaccttgaa

SEQ ID NO: 165866 - DNA, 25 bp, Probe Sequence
aatgtttcctcctaactatgatcag

SEQ ID NO: 165867 - DNA, 25 bp, Probe Sequence
aatgtttcctcctaactatgatcag

SEQ ID NO: 165868 - DNA, 25 bp, Probe Sequence
aatgttcttcacttgaactaatcaa

SEQ ID NO: 165869 - DNA, 25 bp, Probe Sequence
aatccttctaagggactcatatgaa

SEQ ID NO: 165870 - DNA, 25 bp, Probe Sequence
aatgcctacaggacaaagtgagaaa

SEQ ID NO: 165871 - DNA, 25 bp, Probe Sequence
aatgcctatcaacaaagctacaatc

SEQ ID NO: 165872 - DNA, 25 bp, Probe Sequence
aatgcatctatatacagacagcctc

SEQ ID NO: 165873 - DNA, 25 bp, Probe Sequence
aatgcatgcaaatactccaggccct

SEQ ID NO: 165874 - DNA, 25 bp, Probe Sequence
aatgcatgcaaatactccaggccct

SEQ ID NO: 165875 - DNA, 25 bp, Probe Sequence
aatgccatgaatcaagccagggccg

SEQ ID NO: 165876 - DNA, 25 bp, Probe Sequence
aatgtagatgctcacagtggggtgc

SEQ ID NO: 165877 - DNA, 25 bp, Probe Sequence
aatgaagatctctccttcagtctgc

SEQ ID NO: 165878 - DNA, 25 bp, Probe Sequence
aatgaagatctctccttcagtctgc

SEQ ID NO: 165879 - DNA, 25 bp, Probe Sequence
aatgaagatctctccttcagtctgc

SEQ ID NO: 165880 - DNA, 25 bp, Probe Sequence
aatgaaactctttcattcttctcac

SEQ ID NO: 165881 - DNA, 25 bp, Probe Sequence
aatgaccttggaccattctttccaa

SEQ ID NO: 165882 - DNA, 25 bp, Probe Sequence
aatgacctgccgtgatatcgttaaa

SEQ ID NO: 165883 - DNA, 25 bp, Probe Sequence
aatccctgcctatgaattattacac

SEQ ID NO: 165884 - DNA, 25 bp, Probe Sequence
aatccttctcttgctcatttaagtc

SEQ ID NO: 165885 - DNA, 25 bp, Probe Sequence
aatgttctctttgccattttagatg

SEQ ID NO: 165886 - DNA, 25 bp, Probe Sequence
aatgctcctcttaaccagttgtaac

SEQ ID NO: 165887 - DNA, 25 bp, Probe Sequence
aatgtttcattatcaaattgtcgac

SEQ ID NO: 165888 - DNA, 25 bp, Probe Sequence
aatgatttgattaaacctagacgca

SEQ ID NO: 165889 - DNA, 25 bp, Probe Sequence
aatgcacttttaaggctctaatcac

SEQ ID NO: 165890 - DNA, 25 bp, Probe Sequence
aatgcagctttaaaatggctaacca

SEQ ID NO: 165891 - DNA, 25 bp, Probe Sequence
aatgagttcttaacatgtggaccca

SEQ ID NO: 165892 - DNA, 25 bp, Probe Sequence
aatcctacagtcactgggacccaaa

SEQ ID NO: 165893 - DNA, 25 bp, Probe Sequence
aatcctcaattcaaccaacatccag

SEQ ID NO: 165894 - DNA, 25 bp, Probe Sequence
aattacaaccattcaatgccccgaa

SEQ ID NO: 165895 - DNA, 25 bp, Probe Sequence
aatgacaaaccttcagaccagccaa

SEQ ID NO: 165896 - DNA, 25 bp, Probe Sequence
aatgatacaaccctgaccaagctaa

SEQ ID NO: 165897 - DNA, 25 bp, Probe Sequence
aatgatgccacctggaccaggaata

SEQ ID NO: 165898 - DNA, 25 bp, Probe Sequence
aatgcactcccttagacagggcaat

SEQ ID NO: 165899 - DNA, 25 bp, Probe Sequence
aatgctcaccccagaagagcgtcac

SEQ ID NO: 165900 - DNA, 25 bp, Probe Sequence
aatgcataattcttaaaggcagcta

SEQ ID NO: 165901 - DNA, 25 bp, Probe Sequence
aatgcaagagcctatcagagggcac

SEQ ID NO: 165902 - DNA, 25 bp, Probe Sequence
aatgcaggactgtagaagcggccag

SEQ ID NO: 165903 - DNA, 25 bp, Probe Sequence
aatgcagtgccttcaaagtacgaga

SEQ ID NO: 165904 - DNA, 25 bp, Probe Sequence
aatgagtgctttagtgagtcctcag

SEQ ID NO: 165905 - DNA, 25 bp, Probe Sequence
aatgatgtgtcaatactggcttatg

SEQ ID NO: 165906 - DNA, 25 bp, Probe Sequence
aatgcatgttcctcaggcctatgca

SEQ ID NO: 165907 - DNA, 25 bp, Probe Sequence
aatgatgagtcctctctggtcagac

SEQ ID NO: 165908 - DNA, 25 bp, Probe Sequence
aatgattgtatctttgctagtcaac

SEQ ID NO: 165909 - DNA, 25 bp, Probe Sequence
aatgtttctgcacctgtagagatca

SEQ ID NO: 165910 - DNA, 25 bp, Probe Sequence
aatgctgttcagttagtaaccaagt

SEQ ID NO: 165911 - DNA, 25 bp, Probe Sequence
aatgctgctgtggttcaaccaggca

SEQ ID NO: 165912 - DNA, 25 bp, Probe Sequence
aatgcggagttggagcaccagctgc

SEQ ID NO: 165913 - DNA, 25 bp, Probe Sequence
aatgcggagttggagcaccagctgc

SEQ ID NO: 165914 - DNA, 25 bp, Probe Sequence
aatgcggttgatgaccgaggcctct

SEQ ID NO: 165915 - DNA, 25 bp, Probe Sequence
aatgcaggagtacaccagaagcact

SEQ ID NO: 165916 - DNA, 25 bp, Probe Sequence
aatcaggaacagataaaaccattag

SEQ ID NO: 165917 - DNA, 25 bp, Probe Sequence
aatagtagggcagtaacagttactt

SEQ ID NO: 165918 - DNA, 25 bp, Probe Sequence
aatgcagttgcttactaaaggtttt

SEQ ID NO: 165919 - DNA, 25 bp, Probe Sequence
aatgctttcatatctgcagaacgtt

SEQ ID NO: 165920 - DNA, 25 bp, Probe Sequence
aatgcttgtatatgcttgaactttc

SEQ ID NO: 165921 - DNA, 25 bp, Probe Sequence
aatgttgcttcatgcacaaaattat

SEQ ID NO: 165922 - DNA, 25 bp, Probe Sequence
aatgttcatacccacaacactttct

SEQ ID NO: 165923 - DNA, 25 bp, Probe Sequence
aatgttcacacaggaaacagctatg

SEQ ID NO: 165924 - DNA, 25 bp, Probe Sequence
aatgaagaacaacaactctcagtgg

SEQ ID NO: 165925 - DNA, 25 bp, Probe Sequence
aatgaagaaacaccatcccaagatg

SEQ ID NO: 165926 - DNA, 25 bp, Probe Sequence
aatgaaacagacacacctgcacagt

SEQ ID NO: 165927 - DNA, 25 bp, Probe Sequence
aatgaactcaacagctatcgcctct

SEQ ID NO: 165928 - DNA, 25 bp, Probe Sequence
aatccattcaaacgtgactgtccca

SEQ ID NO: 165929 - DNA, 25 bp, Probe Sequence
aatccattcaaacgtgactgtccca

SEQ ID NO: 165930 - DNA, 25 bp, Probe Sequence
cactcctggaaccttcactaaccag

SEQ ID NO: 165931 - DNA, 25 bp, Probe Sequence
aatcctggaaccatacatcaggata

SEQ ID NO: 165932 - DNA, 25 bp, Probe Sequence
aatccttgaaacataccaattaaca

SEQ ID NO: 165933 - DNA, 25 bp, Probe Sequence
aatccttaaaatacccaagtgcatg

SEQ ID NO: 165934 - DNA, 25 bp, Probe Sequence
aatcgtcatcaaagtacccacagta

SEQ ID NO: 165935 - DNA, 25 bp, Probe Sequence
aatccccaagagtccacgacagaat

SEQ ID NO: 165936 - DNA, 25 bp, Probe Sequence
aatcctcaaacgcaattgcagcaaa

SEQ ID NO: 165937 - DNA, 25 bp, Probe Sequence
aatccatagatttcgaagccacaga

SEQ ID NO: 165938 - DNA, 25 bp, Probe Sequence
aatcccgatttgaaagaccgaactg

SEQ ID NO: 165939 - DNA, 25 bp, Probe Sequence
aatgcttttattcaagacaccaaat

SEQ ID NO: 165940 - DNA, 25 bp, Probe Sequence
aatgttattttggaagacttacgat

SEQ ID NO: 165941 - DNA, 25 bp, Probe Sequence
aatgccatttttgagaactaaccta

SEQ ID NO: 165942 - DNA, 25 bp, Probe Sequence
aatgccatttttgagaactaaccta

SEQ ID NO: 165943 - DNA, 25 bp, Probe Sequence
aatacattttggtgtgactaggcca

SEQ ID NO: 165944 - DNA, 25 bp, Probe Sequence
aatttaattggaattcctgaggaat

SEQ ID NO: 165945 - DNA, 25 bp, Probe Sequence
aatattaatcggttagctgggtgga

SEQ ID NO: 165946 - DNA, 25 bp, Probe Sequence
aatctatatcatcttgggggaggga

SEQ ID NO: 165947 - DNA, 25 bp, Probe Sequence
aatctttcattgctggggtgtggcc

SEQ ID NO: 165948 - DNA, 25 bp, Probe Sequence
aattttccgggcatggtggcccatg

SEQ ID NO: 165949 - DNA, 25 bp, Probe Sequence
aatgcctgtccgatttggctgggaa

SEQ ID NO: 165950 - DNA, 25 bp, Probe Sequence
aatcctgcccggagtggaagctgaa

SEQ ID NO: 165951 - DNA, 25 bp, Probe Sequence
aatccgccttggggagtggaggagg

SEQ ID NO: 165952 - DNA, 25 bp, Probe Sequence
aatccgcttcctgagcgtagggtgc

SEQ ID NO: 165953 - DNA, 25 bp, Probe Sequence
aatgccgcccatttaagtacagtgg

SEQ ID NO: 165954 - DNA, 25 bp, Probe Sequence
aatgcccgacaagtaagtaatataa

SEQ ID NO: 165955 - DNA, 25 bp, Probe Sequence
aatctcagtgacagtaggtggttaa

SEQ ID NO: 165956 - DNA, 25 bp, Probe Sequence
aatgcactggcagggatcaggtgtt

SEQ ID NO: 165957 - DNA, 25 bp, Probe Sequence
aatgccggctggctcagtgatggct

SEQ ID NO: 165958 - DNA, 25 bp, Probe Sequence
aatgcctggtaccagaggatggtga

SEQ ID NO: 165959 - DNA, 25 bp, Probe Sequence
aatgactagtcacctgggggggttg

SEQ ID NO: 165960 - DNA, 25 bp, Probe Sequence
aatgaatatgcgcacctcgtggggt

SEQ ID NO: 165961 - DNA, 25 bp, Probe Sequence
aatgcaataggctcctcaaagggct

SEQ ID NO: 165962 - DNA, 25 bp, Probe Sequence
aatcagtagcactgcacacaccaac

SEQ ID NO: 165963 - DNA, 25 bp, Probe Sequence
aatgagtatcagtggctccctagga

SEQ ID NO: 165964 - DNA, 25 bp, Probe Sequence
aatgaaatgcataaggcccctttgt

SEQ ID NO: 165965 - DNA, 25 bp, Probe Sequence
aatgatattgacactgtccctcttt

SEQ ID NO: 165966 - DNA, 25 bp, Probe Sequence
aatgcaaatgtcacggctactctat

SEQ ID NO: 165967 - DNA, 25 bp, Probe Sequence
aatgcaaggctggccggaagccctt

SEQ ID NO: 165968 - DNA, 25 bp, Probe Sequence
aatgcaaggctggccggaagccctt

SEQ ID NO: 165969 - DNA, 25 bp, Probe Sequence
aatgaaactccccagagagttcttc

SEQ ID NO: 165970 - DNA, 25 bp, Probe Sequence
aatgacaccatcccagaggactatg

SEQ ID NO: 165971 - DNA, 25 bp, Probe Sequence
aatgacccatgtgcagataactatc

SEQ ID NO: 165972 - DNA, 25 bp, Probe Sequence
aatgatgcgcctgacaatcaaccgc

SEQ ID NO: 165973 - DNA, 25 bp, Probe Sequence
aatgagatcctcaagcacatcaacg

SEQ ID NO: 165974 - DNA, 25 bp, Probe Sequence
aatgatatctcttggaataatctgt

SEQ ID NO: 165975 - DNA, 25 bp, Probe Sequence
aatgatatgcgatttgacagaagcg

SEQ ID NO: 165976 - DNA, 25 bp, Probe Sequence
aatgagctcgcatttgtcaatgaca

SEQ ID NO: 165977 - DNA, 25 bp, Probe Sequence
aatgcatggcaactgttaatgtcat

SEQ ID NO: 165978 - DNA, 25 bp, Probe Sequence
aatgatgtacagttttatggttaaa

SEQ ID NO: 165979 - DNA, 25 bp, Probe Sequence
aatgatattgcactttttcacttaa

SEQ ID NO: 165980 - DNA, 25 bp, Probe Sequence
aatgatttactttatggcactagaa

SEQ ID NO: 165981 - DNA, 25 bp, Probe Sequence
aatgctgtttttttgtactggactt

SEQ ID NO: 165982 - DNA, 25 bp, Probe Sequence
aatcgttgtcacatcagtgactggt

SEQ ID NO: 165983 - DNA, 25 bp, Probe Sequence
aatgcgtctgatgtgtcattaagtg

SEQ ID NO: 165984 - DNA, 25 bp, Probe Sequence
aatgcgtctgatgtgtcattaagtg

SEQ ID NO: 165985 - DNA, 25 bp, Probe Sequence
aatgcgaagtagttgctatagcaag

SEQ ID NO: 165986 - DNA, 25 bp, Probe Sequence
aatgctgaatcttaatttagagggt

SEQ ID NO: 165987 - DNA, 25 bp, Probe Sequence
aatgctgaatctgactccacgtcac

SEQ ID NO: 165988 - DNA, 25 bp, Probe Sequence
aatgctaactatacacctcagtgac

SEQ ID NO: 165989 - DNA, 25 bp, Probe Sequence
aatgaataccagactgccatcagtg

SEQ ID NO: 165990 - DNA, 25 bp, Probe Sequence
aatgaaccatgctcatgcactcctt

SEQ ID NO: 165991 - DNA, 25 bp, Probe Sequence
aatgacccacatttcatcatttatc

SEQ ID NO: 165992 - DNA, 25 bp, Probe Sequence
aatgactgcatagtattcactttat

SEQ ID NO: 165993 - DNA, 25 bp, Probe Sequence
aatgaggttctaccactctggaaaa

SEQ ID NO: 165994 - DNA, 25 bp, Probe Sequence
aatgaggtacttacacactgtgcaa

SEQ ID NO: 165995 - DNA, 25 bp, Probe Sequence
aatgagtgttcgatatttgctatag

SEQ ID NO: 165996 - DNA, 25 bp, Probe Sequence
aatgagcgtaggtaatgttctgtga

SEQ ID NO: 165997 - DNA, 25 bp, Probe Sequence
aatgagtgatgggtagaggttggaa

SEQ ID NO: 165998 - DNA, 25 bp, Probe Sequence
aatgaaatgggcagatgtttgggaa

SEQ ID NO: 165999 - DNA, 25 bp, Probe Sequence
aatgcaagatgtggtactgaatgtg

SEQ ID NO: 166000 - DNA, 25 bp, Probe Sequence
aatgaagattaccctcaaatgctag

SEQ ID NO: 166001 - DNA, 25 bp, Probe Sequence
aatgaggttcagtaccataatgttt

SEQ ID NO: 166002 - DNA, 25 bp, Probe Sequence
aatgaggtagactggatcaatgtgg

SEQ ID NO: 166003 - DNA, 25 bp, Probe Sequence
aatgaagatagaacgtgctcacatg

SEQ ID NO: 166004 - DNA, 25 bp, Probe Sequence
aatgaagacagaaggtctgccagct

SEQ ID NO: 166005 - DNA, 25 bp, Probe Sequence
aatgaatccaaagtatcctagctct

SEQ ID NO: 166006 - DNA, 25 bp, Probe Sequence
aatgagcaacacaaattttactctg

SEQ ID NO: 166007 - DNA, 25 bp, Probe Sequence
aatgagctacatcctcattgttcac

SEQ ID NO: 166008 - DNA, 25 bp, Probe Sequence
aatgatgataagcctgctttccctg

SEQ ID NO: 166009 - DNA, 25 bp, Probe Sequence
aatgagtaatgctgtgccttcgctg

SEQ ID NO: 166010 - DNA, 25 bp, Probe Sequence
aatgagtgaatgtgggtgatctgct

SEQ ID NO: 166011 - DNA, 25 bp, Probe Sequence
aatcgtgagagctggggtctccttt

SEQ ID NO: 166012 - DNA, 25 bp, Probe Sequence
aatctgggacgacaggttcatctct

SEQ ID NO: 166013 - DNA, 25 bp, Probe Sequence
aatgcagcaggaaaccatggttctc

SEQ ID NO: 166014 - DNA, 25 bp, Probe Sequence
aatcagatgcgcaacttcctggttc

SEQ ID NO: 166015 - DNA, 25 bp, Probe Sequence
aatcagatgcgcaacttcctggttc

SEQ ID NO: 166016 - DNA, 25 bp, Probe Sequence
aatcagatgcgcaacttcctggttc

SEQ ID NO: 166017 - DNA, 25 bp, Probe Sequence
aatcaatggaacatcccaagaagag

SEQ ID NO: 166018 - DNA, 25 bp, Probe Sequence
aatcctggacggaaacacaaagtgt

SEQ ID NO: 166019 - DNA, 25 bp, Probe Sequence
cagacccgaccgttatccagtcggt

SEQ ID NO: 166020 - DNA, 25 bp, Probe Sequence
caccccgtcttcatagcggtcaagt

SEQ ID NO: 166021 - DNA, 25 bp, Probe Sequence
aatcccttctgtattgccaatcaag

SEQ ID NO: 166022 - DNA, 25 bp, Probe Sequence
aatcccttcctgatagcttggcaga

SEQ ID NO: 166023 - DNA, 25 bp, Probe Sequence
aatcccagccctagtagcaattaag

SEQ ID NO: 166024 - DNA, 25 bp, Probe Sequence
aatgccagccaccttgtaaaactgc

SEQ ID NO: 166025 - DNA, 25 bp, Probe Sequence
aatgccccacaagtgttaccatggc

SEQ ID NO: 166026 - DNA, 25 bp, Probe Sequence
aatgaccacaaagtttgtgcctcag

SEQ ID NO: 166027 - DNA, 25 bp, Probe Sequence
aatgactacatccagttctgcacct

SEQ ID NO: 166028 - DNA, 25 bp, Probe Sequence
aatgagttcatccatttgacaatga

SEQ ID NO: 166029 - DNA, 25 bp, Probe Sequence
aatgactttctcttgtgtcaagctc

SEQ ID NO: 166030 - DNA, 25 bp, Probe Sequence
aatgactttcatattgcaacaatct

SEQ ID NO: 166031 - DNA, 25 bp, Probe Sequence
aatgctcaattccttacaaaatctt

SEQ ID NO: 166032 - DNA, 25 bp, Probe Sequence
aatctacttcacaaacaattacatt

SEQ ID NO: 166033 - DNA, 25 bp, Probe Sequence
aatgcgtccaccaagaccttagcat

SEQ ID NO: 166034 - DNA, 25 bp, Probe Sequence
aatcttccagtgcaaccttagcttc

SEQ ID NO: 166035 - DNA, 25 bp, Probe Sequence
aatctgtccattcctacctggacat

SEQ ID NO: 166036 - DNA, 25 bp, Probe Sequence
aatgagaaatcaccttcgttgaatc

SEQ ID NO: 166037 - DNA, 25 bp, Probe Sequence
aatgaggactgctacttctttacca

SEQ ID NO: 166038 - DNA, 25 bp, Probe Sequence
aatgaggacttaatttgttgaaata

SEQ ID NO: 166039 - DNA, 25 bp, Probe Sequence
aatgcatggaaggtgtttgtaaaat

SEQ ID NO: 166040 - DNA, 25 bp, Probe Sequence
aatctggaagagtttcctgacctac

SEQ ID NO: 166041 - DNA, 25 bp, Probe Sequence
aatcggataggagtgtcaggcctct

SEQ ID NO: 166042 - DNA, 25 bp, Probe Sequence
aatctggatagattgtggggctatt

SEQ ID NO: 166043 - DNA, 25 bp, Probe Sequence
aatgcacgattgcatgtcgtggcaa

SEQ ID NO: 166044 - DNA, 25 bp, Probe Sequence
aatgctgagttgaatgccctggcta

SEQ ID NO: 166045 - DNA, 25 bp, Probe Sequence
aatgcgattgctctttctgcagcat

SEQ ID NO: 166046 - DNA, 25 bp, Probe Sequence
aatgacttgatcatctgcttccttt

SEQ ID NO: 166047 - DNA, 25 bp, Probe Sequence
aatgactatatggatttattctttt

SEQ ID NO: 166048 - DNA, 25 bp, Probe Sequence
aatcccataggaataagctccttgt

SEQ ID NO: 166049 - DNA, 25 bp, Probe Sequence
aatcccacagaaataaaccaccatc

SEQ ID NO: 166050 - DNA, 25 bp, Probe Sequence
aatactaaggactgaagccactaca

SEQ ID NO: 166051 - DNA, 25 bp, Probe Sequence
aataccaggggtgcaaaacttcaga

SEQ ID NO: 166052 - DNA, 25 bp, Probe Sequence
aatgcaacgggactctccaaaatgt

SEQ ID NO: 166053 - DNA, 25 bp, Probe Sequence
aatgacatccagtgtctccaaaatt

SEQ ID NO: 166054 - DNA, 25 bp, Probe Sequence
aatgcaagctagtggcttcaaaata

SEQ ID NO: 166055 - DNA, 25 bp, Probe Sequence
aatgacagatgattttgttcaggaa

SEQ ID NO: 166056 - DNA, 25 bp, Probe Sequence
aatctcagtgagtgatggtcagaat

SEQ ID NO: 166057 - DNA, 25 bp, Probe Sequence
aatccaagttggtgtcatacatttc

SEQ ID NO: 166058 - DNA, 25 bp, Probe Sequence
aatgccaactcttaagtcttttgta

SEQ ID NO: 166059 - DNA, 25 bp, Probe Sequence
aatccattgtcataaccatttttaa

SEQ ID NO: 166060 - DNA, 25 bp, Probe Sequence
aatctaagtgcattaaacatctttg

SEQ ID NO: 166061 - DNA, 25 bp, Probe Sequence
aatctgaaatttgaacctatgtatt

SEQ ID NO: 166062 - DNA, 25 bp, Probe Sequence
aatctgaaaagtcatgaaattctac

SEQ ID NO: 166063 - DNA, 25 bp, Probe Sequence
aatgctaaacctctgtttcatgcta

SEQ ID NO: 166064 - DNA, 25 bp, Probe Sequence
aatctgaaccatgcggttttggcag

SEQ ID NO: 166065 - DNA, 25 bp, Probe Sequence
caagctgaactagcagaaattccag

SEQ ID NO: 166066 - DNA, 25 bp, Probe Sequence
aatctgacccaggcaaacataccgg

SEQ ID NO: 166067 - DNA, 25 bp, Probe Sequence
aatcagaccctgacaaactggccac

SEQ ID NO: 166068 - DNA, 25 bp, Probe Sequence
aatcagaaccagatgacacatgaaa

SEQ ID NO: 166069 - DNA, 25 bp, Probe Sequence
aatagagtcctgtagactatgctga

SEQ ID NO: 166070 - DNA, 25 bp, Probe Sequence
aatgagtttcgctgttatgtgaatt

SEQ ID NO: 166071 - DNA, 25 bp, Probe Sequence
aatgcagtaccctgctttgctttgg

SEQ ID NO: 166072 - DNA, 25 bp, Probe Sequence
aatgcaaatcggtgcctgtgcttga

SEQ ID NO: 166073 - DNA, 25 bp, Probe Sequence
aatgcaacatctcgcaagcgctgct

SEQ ID NO: 166074 - DNA, 25 bp, Probe Sequence
aatgaagtcttgaagactgcacctt

SEQ ID NO: 166075 - DNA, 25 bp, Probe Sequence
aatgagcactttagcaaccacactg

SEQ ID NO: 166076 - DNA, 25 bp, Probe Sequence
aatgacagctgacagcagatcccag

SEQ ID NO: 166077 - DNA, 25 bp, Probe Sequence
aatgacagctagcagatctcttccc

SEQ ID NO: 166078 - DNA, 25 bp, Probe Sequence
aatgagctgcttaactctttccaca

SEQ ID NO: 166079 - DNA, 25 bp, Probe Sequence
aatgactgctgaatgacatatttta

SEQ ID NO: 166080 - DNA, 25 bp, Probe Sequence
aatgactctcaaccactttgtgaat

SEQ ID NO: 166081 - DNA, 25 bp, Probe Sequence
aatgacactctagccattttgatca

SEQ ID NO: 166082 - DNA, 25 bp, Probe Sequence
aatgaacattgaaatcttcctgtat

SEQ ID NO: 166083 - DNA, 25 bp, Probe Sequence
aatgaaactgattccttctttattt

SEQ ID NO: 166084 - DNA, 25 bp, Probe Sequence
aatgaagactacattgacttttcta

SEQ ID NO: 166085 - DNA, 25 bp, Probe Sequence
aatgaagtgacactttgacatttcc

SEQ ID NO: 166086 - DNA, 25 bp, Probe Sequence
aatgaaagccacctattcatttctg

SEQ ID NO: 166087 - DNA, 25 bp, Probe Sequence
aatgcaacagtctcattttcccatg

SEQ ID NO: 166088 - DNA, 25 bp, Probe Sequence
aatgcacaattctgctttgatgcct

SEQ ID NO: 166089 - DNA, 25 bp, Probe Sequence
aatgaatattatccctaatcctccc

SEQ ID NO: 166090 - DNA, 25 bp, Probe Sequence
aatgacagatttccctttagaccca

SEQ ID NO: 166091 - DNA, 25 bp, Probe Sequence
aatgcaagttactccttacctatca

SEQ ID NO: 166092 - DNA, 25 bp, Probe Sequence
aatgcaagttttttagtagctctag

SEQ ID NO: 166093 - DNA, 25 bp, Probe Sequence
aatgcatgtttttttcctggttgga

SEQ ID NO: 166094 - DNA, 25 bp, Probe Sequence
aatgctttccatttacctgactaaa

SEQ ID NO: 166095 - DNA, 25 bp, Probe Sequence
aatcgtttcttttagtgcacttaca

SEQ ID NO: 166096 - DNA, 25 bp, Probe Sequence
aatcctttccttatggccagtggat

SEQ ID NO: 166097 - DNA, 25 bp, Probe Sequence
aatccttttccacataggagtggct

SEQ ID NO: 166098 - DNA, 25 bp, Probe Sequence
aatcctgttatctcttgggaagttt

SEQ ID NO: 166099 - DNA, 25 bp, Probe Sequence
aatccttctgtaactttggtaactg

SEQ ID NO: 166100 - DNA, 25 bp, Probe Sequence
aatcgttctgtctttgtggggttcg

SEQ ID NO: 166101 - DNA, 25 bp, Probe Sequence
caatcgtttatcatttccggggtgc

SEQ ID NO: 166102 - DNA, 25 bp, Probe Sequence
caatccatttgtttctgagccaggg

SEQ ID NO: 166103 - DNA, 25 bp, Probe Sequence
aatgccctcattaaagcagccggtg

SEQ ID NO: 166104 - DNA, 25 bp, Probe Sequence
aatgcactgctacatgaacagcgcc

SEQ ID NO: 166105 - DNA, 25 bp, Probe Sequence
aatgcactccagaagaaaatctcag

SEQ ID NO: 166106 - DNA, 25 bp, Probe Sequence
aatgctccttgcagcaaagatcttg

SEQ ID NO: 166107 - DNA, 25 bp, Probe Sequence
aatgcctcttgacttgggcatcgtg

SEQ ID NO: 166108 - DNA, 25 bp, Probe Sequence
aatgctgtttcactggttatgcggc

SEQ ID NO: 166109 - DNA, 25 bp, Probe Sequence
aatctgttttgagcttggaggcttt

SEQ ID NO: 166110 - DNA, 25 bp, Probe Sequence
caattttgttcagctggtaagttgc

SEQ ID NO: 166111 - DNA, 25 bp, Probe Sequence
aatgcaaagttaggctgggcaaggt

SEQ ID NO: 166112 - DNA, 25 bp, Probe Sequence
aatgcctacctaagtgggatagagg

SEQ ID NO: 166113 - DNA, 25 bp, Probe Sequence
aatcgccatcgcaaccggaaagatg

SEQ ID NO: 166114 - DNA, 25 bp, Probe Sequence
aatcccaggtacttggaaggctgag

SEQ ID NO: 166115 - DNA, 25 bp, Probe Sequence
aatcccagctactcgggaggctgag

SEQ ID NO: 166116 - DNA, 25 bp, Probe Sequence
aatcctagctactcaggaggctgag

SEQ ID NO: 166117 - DNA, 25 bp, Probe Sequence
aatcctagctactcaggaggctgag

SEQ ID NO: 166118 - DNA, 25 bp, Probe Sequence
aatcctagcactttaggaagctgag

SEQ ID NO: 166119 - DNA, 25 bp, Probe Sequence
aatgcactctaacttatgtgaactg

SEQ ID NO: 166120 - DNA, 25 bp, Probe Sequence
aatgcaaataaggatgtgttctctg

SEQ ID NO: 166121 - DNA, 25 bp, Probe Sequence
aatgcacaaaatgattcctctactt

SEQ ID NO: 166122 - DNA, 25 bp, Probe Sequence
aatcacagaggtgacatcccatcac

SEQ ID NO: 166123 - DNA, 25 bp, Probe Sequence
aatcaaggagatgagacccaaggtc

SEQ ID NO: 166124 - DNA, 25 bp, Probe Sequence
aatgcacaaatgggaaaccaaggca

SEQ ID NO: 166125 - DNA, 25 bp, Probe Sequence
aatgcacaaaagtcaaatcagaatg

SEQ ID NO: 166126 - DNA, 25 bp, Probe Sequence
aatgcagcagtaagccgaaaggatg

SEQ ID NO: 166127 - DNA, 25 bp, Probe Sequence
aatgcagcagaaccacgatatgaag

SEQ ID NO: 166128 - DNA, 25 bp, Probe Sequence
aatcaggatcatcctccaagcagtc

SEQ ID NO: 166129 - DNA, 25 bp, Probe Sequence
aatcagtcaagcctgccatgatcac

SEQ ID NO: 166130 - DNA, 25 bp, Probe Sequence
aatcgccacatcctgcgattcaacc

SEQ ID NO: 166131 - DNA, 25 bp, Probe Sequence
aatccacacatcagtaatgtattct

SEQ ID NO: 166132 - DNA, 25 bp, Probe Sequence
aatgacagactgagcaaaattgctt

SEQ ID NO: 166133 - DNA, 25 bp, Probe Sequence
aatgcaataatgggaaaatgtgata

SEQ ID NO: 166134 - DNA, 25 bp, Probe Sequence
aatgaattgctggtcaaaatgctaa

SEQ ID NO: 166135 - DNA, 25 bp, Probe Sequence
aatgcgttttgttgtagatgctaac

SEQ ID NO: 166136 - DNA, 25 bp, Probe Sequence
aatgcatgttttacagtactccaga

SEQ ID NO: 166137 - DNA, 25 bp, Probe Sequence
aatgcatgttttacagtactccaga

SEQ ID NO: 166138 - DNA, 25 bp, Probe Sequence
aatgctctatttacaaatttacata

SEQ ID NO: 166139 - DNA, 25 bp, Probe Sequence
aatgcctgtttagtttttaaagatg

SEQ ID NO: 166140 - DNA, 25 bp, Probe Sequence
aatgaatgaatacctttgttcaata

SEQ ID NO: 166141 - DNA, 25 bp, Probe Sequence
aatgcatatttcttctcagtttaaa

SEQ ID NO: 166142 - DNA, 25 bp, Probe Sequence
aatgcaacatactctcagcacctaa

SEQ ID NO: 166143 - DNA, 25 bp, Probe Sequence
aatgaaatactgccctgaggctagg

SEQ ID NO: 166144 - DNA, 25 bp, Probe Sequence
aatgaagttctgtcactagtgaatg

SEQ ID NO: 166145 - DNA, 25 bp, Probe Sequence
cactcatagctgtagattacgtgaa

SEQ ID NO: 166146 - DNA, 25 bp, Probe Sequence
aatgctactgattgtgtaactgaat

SEQ ID NO: 166147 - DNA, 25 bp, Probe Sequence
aatgacactttggtagcactaatat

SEQ ID NO: 166148 - DNA, 25 bp, Probe Sequence
aatgccctttggtcactgtaaatat

SEQ ID NO: 166149 - DNA, 25 bp, Probe Sequence
aatccttttggaacatatagaatgc

SEQ ID NO: 166150 - DNA, 25 bp, Probe Sequence
aatccttttgatccatccaagacag

SEQ ID NO: 166151 - DNA, 25 bp, Probe Sequence
aatccttttggactcgcataacgtg

SEQ ID NO: 166152 - DNA, 25 bp, Probe Sequence
aatcgctggttgtgcgcttaacgtg

SEQ ID NO: 166153 - DNA, 25 bp, Probe Sequence
aatctgggttacggagtgagactcc

SEQ ID NO: 166154 - DNA, 25 bp, Probe Sequence
aatctggagcccacagacaggttcc

SEQ ID NO: 166155 - DNA, 25 bp, Probe Sequence
aatcgcagagctgaggcacactggt

SEQ ID NO: 166156 - DNA, 25 bp, Probe Sequence
aatgctggcgatgatccacactggg

SEQ ID NO: 166157 - DNA, 25 bp, Probe Sequence
aatgctgagaaatttgccactggag

SEQ ID NO: 166158 - DNA, 25 bp, Probe Sequence
aatgctgagagatatcatccgtgaa

SEQ ID NO: 166159 - DNA, 25 bp, Probe Sequence
aatgcatatcgatcagctctcagcc

SEQ ID NO: 166160 - DNA, 25 bp, Probe Sequence
caatcatatatgcacaattcagtat

SEQ ID NO: 166161 - DNA, 25 bp, Probe Sequence
aatccaatggcaaactattcatcga

SEQ ID NO: 166162 - DNA, 25 bp, Probe Sequence
aatgcgctattgtttcttttcagag

SEQ ID NO: 166163 - DNA, 25 bp, Probe Sequence
aatccttctgatataggcattcaag

SEQ ID NO: 166164 - DNA, 25 bp, Probe Sequence
aatgccttggatcctatgtctgtgc

SEQ ID NO: 166165 - DNA, 25 bp, Probe Sequence
aatgccacagaacctatcggctctt

SEQ ID NO: 166166 - DNA, 25 bp, Probe Sequence
aatgctacactatctcaggttttac

SEQ ID NO: 166167 - DNA, 25 bp, Probe Sequence
aatgctacacttggctcaggctgat

SEQ ID NO: 166168 - DNA, 25 bp, Probe Sequence
aatgctactcataagagctggtttg

SEQ ID NO: 166169 - DNA, 25 bp, Probe Sequence
aatgaactgtgttggttgtttgagt

SEQ ID NO: 166170 - DNA, 25 bp, Probe Sequence
aatgaagtattctgtagcctatatt

SEQ ID NO: 166171 - DNA, 25 bp, Probe Sequence
aatgaagtgttctataacctgatct

SEQ ID NO: 166172 - DNA, 25 bp, Probe Sequence
aatgaagtactctatatatatatat

SEQ ID NO: 166173 - DNA, 25 bp, Probe Sequence
aatgaacccatggaatgatgacttc

SEQ ID NO: 166174 - DNA, 25 bp, Probe Sequence
aatgaagccactgacatgacacctg

SEQ ID NO: 166175 - DNA, 25 bp, Probe Sequence
aatgcatgcccactgaatataaccc

SEQ ID NO: 166176 - DNA, 25 bp, Probe Sequence
aatgcacctcctgcagaaaagctgc

SEQ ID NO: 166177 - DNA, 25 bp, Probe Sequence
aatgcatcctctagaaaaataatta

SEQ ID NO: 166178 - DNA, 25 bp, Probe Sequence
aatcacactctacaaactttacaag

SEQ ID NO: 166179 - DNA, 25 bp, Probe Sequence
aatctaactaactaactcatttatt

SEQ ID NO: 166180 - DNA, 25 bp, Probe Sequence
aatcgaattgtatgagaccttttgt

SEQ ID NO: 166181 - DNA, 25 bp, Probe Sequence
aatcgcgcttcttgaagacctatgt

SEQ ID NO: 166182 - DNA, 25 bp, Probe Sequence
aatgcatggctttgtatcacctttt

SEQ ID NO: 166183 - DNA, 25 bp, Probe Sequence
aatgcagcagcttaatttttctgta

SEQ ID NO: 166184 - DNA, 25 bp, Probe Sequence
aatgcagctttatactttttacttt

SEQ ID NO: 166185 - DNA, 25 bp, Probe Sequence
aatgccttgctatatctgtaattta

SEQ ID NO: 166186 - DNA, 25 bp, Probe Sequence
aatgccaggttccatactacttaaa

SEQ ID NO: 166187 - DNA, 25 bp, Probe Sequence
aatccagttcccaagaagctgtaca

SEQ ID NO: 166188 - DNA, 25 bp, Probe Sequence
aatgcctgtactgtagatgtctgta

SEQ ID NO: 166189 - DNA, 25 bp, Probe Sequence
aatccttattgttcagagttgtttg

SEQ ID NO: 166190 - DNA, 25 bp, Probe Sequence
aatgccttaatttgagctcgtattt

SEQ ID NO: 166191 - DNA, 25 bp, Probe Sequence
aatctgtgatacagggctctgtttt

SEQ ID NO: 166192 - DNA, 25 bp, Probe Sequence
aatgcttgataatggttctgtcttc

SEQ ID NO: 166193 - DNA, 25 bp, Probe Sequence
aatgcaaatacatcaattctatcat

SEQ ID NO: 166194 - DNA, 25 bp, Probe Sequence
aatcatatcatctgaaatattacaa

SEQ ID NO: 166195 - DNA, 25 bp, Probe Sequence
aatctagctctaccacaagttgcac

SEQ ID NO: 166196 - DNA, 25 bp, Probe Sequence
aatcttgctccacaaggatctcacc

SEQ ID NO: 166197 - DNA, 25 bp, Probe Sequence
aatctggcaccacaccttctacaat

SEQ ID NO: 166198 - DNA, 25 bp, Probe Sequence
aatctggccaacaagcgctttgttt

SEQ ID NO: 166199 - DNA, 25 bp, Probe Sequence
aatctgccaaactgagttatggaat

SEQ ID NO: 166200 - DNA, 25 bp, Probe Sequence
aatcctgaattctggttgtaaatct

SEQ ID NO: 166201 - DNA, 25 bp, Probe Sequence
aatgcctagattcttttgtggttgt

SEQ ID NO: 166202 - DNA, 25 bp, Probe Sequence
aatgcattaatcacctgtttgtggt

SEQ ID NO: 166203 - DNA, 25 bp, Probe Sequence
aatgcatatcaactgcagtttttct

SEQ ID NO: 166204 - DNA, 25 bp, Probe Sequence
aatcttcaagctaggttttgcagtt

SEQ ID NO: 166205 - DNA, 25 bp, Probe Sequence
aatgcttaaggatgtgattggatgg

SEQ ID NO: 166206 - DNA, 25 bp, Probe Sequence
aatgctatattgcactgtgaccgag

SEQ ID NO: 166207 - DNA, 25 bp, Probe Sequence
aatgcattaatgcacttagtagcat

SEQ ID NO: 166208 - DNA, 25 bp, Probe Sequence
aatgcatgataatgagttttacatt

SEQ ID NO: 166209 - DNA, 25 bp, Probe Sequence
aatgcagactttacttcttacatgt

SEQ ID NO: 166210 - DNA, 25 bp, Probe Sequence
aatgccctcttcattggcaagcatc

SEQ ID NO: 166211 - DNA, 25 bp, Probe Sequence
aatcctctgcctgctgatggagagt

SEQ ID NO: 166212 - DNA, 25 bp, Probe Sequence
aatccttgaggcttgtgatctgagt

SEQ ID NO: 166213 - DNA, 25 bp, Probe Sequence
aatgaatggaggaatgttctgtgtt

SEQ ID NO: 166214 - DNA, 25 bp, Probe Sequence
aatgcaatggttctctgttgtgtgt

SEQ ID NO: 166215 - DNA, 25 bp, Probe Sequence
aatgctaagcttacttttgatgtgg

SEQ ID NO: 166216 - DNA, 25 bp, Probe Sequence
aatgcaggttgtagctttttgatgg

SEQ ID NO: 166217 - DNA, 25 bp, Probe Sequence
aatgcaggaagttcagagttctagg

SEQ ID NO: 166218 - DNA, 25 bp, Probe Sequence
aatgcagccactataacttgataag

SEQ ID NO: 166219 - DNA, 25 bp, Probe Sequence
aatgcagcatccacttcataattaa

SEQ ID NO: 166220 - DNA, 25 bp, Probe Sequence
aatgcactcgatcttgtcatttttt

SEQ ID NO: 166221 - DNA, 25 bp, Probe Sequence
aatgcacccaactagctctatgttt

SEQ ID NO: 166222 - DNA, 25 bp, Probe Sequence
aatgcatctccccagagtattttgt

SEQ ID NO: 166223 - DNA, 25 bp, Probe Sequence
aatgcatctccccagagtattttgt

SEQ ID NO: 166224 - DNA, 25 bp, Probe Sequence
aatgctcccctataatctgctgagt

SEQ ID NO: 166225 - DNA, 25 bp, Probe Sequence
aatctgcccgtaaaacctgagccat

SEQ ID NO: 166226 - DNA, 25 bp, Probe Sequence
caatcgacggtaaatggcccgcctg

SEQ ID NO: 166227 - DNA, 25 bp, Probe Sequence
caatcgtcggtaaatccggcaccgc

SEQ ID NO: 166228 - DNA, 25 bp, Probe Sequence
aatcgtgggtgaaatgacgttgccg

SEQ ID NO: 166229 - DNA, 25 bp, Probe Sequence
aatcagtgccggcagtactggggct

SEQ ID NO: 166230 - DNA, 25 bp, Probe Sequence
aatactgccctgaggctaggggcgg

SEQ ID NO: 166231 - DNA, 25 bp, Probe Sequence
aatcaattccccgttaatggagcgg

SEQ ID NO: 166232 - DNA, 25 bp, Probe Sequence
caatcagaagccgcgatttcaggcg

SEQ ID NO: 166233 - DNA, 25 bp, Probe Sequence
caatcagttccagcgatgagctgca

SEQ ID NO: 166234 - DNA, 25 bp, Probe Sequence
aatgcagcttagccacgtgaggcat

SEQ ID NO: 166235 - DNA, 25 bp, Probe Sequence
aatgcagatgtagtgatcagggcca

SEQ ID NO: 166236 - DNA, 25 bp, Probe Sequence
aatgcagattcagttctggcggggc

SEQ ID NO: 166237 - DNA, 25 bp, Probe Sequence
aatgcaaaaatgcccggggccaggt

SEQ ID NO: 166238 - DNA, 25 bp, Probe Sequence
gaagcaacataattcaggtccaaat

SEQ ID NO: 166239 - DNA, 25 bp, Probe Sequence
aatcacttgaacccgggaggcggag

SEQ ID NO: 166240 - DNA, 25 bp, Probe Sequence
aatccagtcacagtgcctgggaggg

SEQ ID NO: 166241 - DNA, 25 bp, Probe Sequence
aatctcagtcactctaggactctgc

SEQ ID NO: 166242 - DNA, 25 bp, Probe Sequence
aatctcagtcactctaggactctgc

SEQ ID NO: 166243 - DNA, 25 bp, Probe Sequence
aatcttaacttgaaggagtccttgc

SEQ ID NO: 166244 - DNA, 25 bp, Probe Sequence
aatcagtaagtgtaaggtgtacttg

SEQ ID NO: 166245 - DNA, 25 bp, Probe Sequence
aatcagcttagcccaaaggggttgt

SEQ ID NO: 166246 - DNA, 25 bp, Probe Sequence
aatgcacgacaccctgggaggggtg

SEQ ID NO: 166247 - DNA, 25 bp, Probe Sequence
aatgcgtgaacccgggaggcggagc

SEQ ID NO: 166248 - DNA, 25 bp, Probe Sequence
aatcagtgacacccggaaatgagga

SEQ ID NO: 166249 - DNA, 25 bp, Probe Sequence
aatcagaagcatgcctggtaattgg

SEQ ID NO: 166250 - DNA, 25 bp, Probe Sequence
aatcagatgagaaggcggcggttgc

SEQ ID NO: 166251 - DNA, 25 bp, Probe Sequence
aatcgtgatgatgggtaaggggaaa

SEQ ID NO: 166252 - DNA, 25 bp, Probe Sequence
aatctttgcatagctaatgggtaaa

SEQ ID NO: 166253 - DNA, 25 bp, Probe Sequence
aatctattcataagtctttggtaca

SEQ ID NO: 166254 - DNA, 25 bp, Probe Sequence
aatcttcagcaacgtcagttggtct

SEQ ID NO: 166255 - DNA, 25 bp, Probe Sequence
aatctgtgcggaagtagcttgcctc

SEQ ID NO: 166256 - DNA, 25 bp, Probe Sequence
aatctggttatcatcagtctgcttc

SEQ ID NO: 166257 - DNA, 25 bp, Probe Sequence
aatctgctatatcaaactccttccc

SEQ ID NO: 166258 - DNA, 25 bp, Probe Sequence
aatccttgtcaagatccctacattc

SEQ ID NO: 166259 - DNA, 25 bp, Probe Sequence
aattgcctgtaatcccctaataagt

SEQ ID NO: 166260 - DNA, 25 bp, Probe Sequence
aatactagtgaatcacccacaagga

SEQ ID NO: 166261 - DNA, 25 bp, Probe Sequence
aatttcagtgaacacacccctataa

SEQ ID NO: 166262 - DNA, 25 bp, Probe Sequence
aatcttaggggaccaccatcgtaca

SEQ ID NO: 166263 - DNA, 25 bp, Probe Sequence
gaacccgggtgccctaatcaaatat

SEQ ID NO: 166264 - DNA, 25 bp, Probe Sequence
aatctcttggttccctaaagcactt

SEQ ID NO: 166265 - DNA, 25 bp, Probe Sequence
caactctgttttccggactgttatt

SEQ ID NO: 166266 - DNA, 25 bp, Probe Sequence
gacaaggttctcagggaagttttgg

SEQ ID NO: 166267 - DNA, 25 bp, Probe Sequence
aatctggtattcagggtaatttctg

SEQ ID NO: 166268 - DNA, 25 bp, Probe Sequence
aatcgtgtttgcagggagatttctg

SEQ ID NO: 166269 - DNA, 25 bp, Probe Sequence
aatcctgtattcaaggcgcttcttt

SEQ ID NO: 166270 - DNA, 25 bp, Probe Sequence
aatgccttttagctggctttttaat

SEQ ID NO: 166271 - DNA, 25 bp, Probe Sequence
aatccttgttagactactgatttaa

SEQ ID NO: 166272 - DNA, 25 bp, Probe Sequence
aatcgtagatgtttttgctgttcca

SEQ ID NO: 166273 - DNA, 25 bp, Probe Sequence
aatctaatagtttatcagttttcaa

SEQ ID NO: 166274 - DNA, 25 bp, Probe Sequence
aatctataagtctgccctttttaca

SEQ ID NO: 166275 - DNA, 25 bp, Probe Sequence
aattataagtaatctgacattttaa

SEQ ID NO: 166276 - DNA, 25 bp, Probe Sequence
aatgctaaaataaatcgacagtgtc

SEQ ID NO: 166277 - DNA, 25 bp, Probe Sequence
aatctagagtaaaaccaagctggcc

SEQ ID NO: 166278 - DNA, 25 bp, Probe Sequence
aatctacctacagaaaagtgcccag

SEQ ID NO: 166279 - DNA, 25 bp, Probe Sequence
aattcatcctacggaagtaaccgca

SEQ ID NO: 166280 - DNA, 25 bp, Probe Sequence
aataacccaactaagaagacagcca

SEQ ID NO: 166281 - DNA, 25 bp, Probe Sequence
aatccactgccttccaaagaaacga

SEQ ID NO: 166282 - DNA, 25 bp, Probe Sequence
aatccagcatccattcctaataaaa

SEQ ID NO: 166283 - DNA, 25 bp, Probe Sequence
aatgccatctagaacactcaaaaaa

SEQ ID NO: 166284 - DNA, 25 bp, Probe Sequence
aatccttcctagatccagacaagag

SEQ ID NO: 166285 - DNA, 25 bp, Probe Sequence
aatcgtctctcataataccacacaa

SEQ ID NO: 166286 - DNA, 25 bp, Probe Sequence
aatagaattcaacataacaagctca

SEQ ID NO: 166287 - DNA, 25 bp, Probe Sequence
aataccttcaactgagaaatgtcat

SEQ ID NO: 166288 - DNA, 25 bp, Probe Sequence
aataggtctcaagcctgtattttta

SEQ ID NO: 166289 - DNA, 25 bp, Probe Sequence
aatatggttccatccctaaacttat

SEQ ID NO: 166290 - DNA, 25 bp, Probe Sequence
aattaattccttcatcctaacttct

SEQ ID NO: 166291 - DNA, 25 bp, Probe Sequence
aatccaaatcctggaaccatacatc

SEQ ID NO: 166292 - DNA, 25 bp, Probe Sequence
aatccaagcacctagataccagcac

SEQ ID NO: 166293 - DNA, 25 bp, Probe Sequence
aatgccaagacggagaccacagcct

SEQ ID NO: 166294 - DNA, 25 bp, Probe Sequence
aatgctatctacctgagtgccaagt

SEQ ID NO: 166295 - DNA, 25 bp, Probe Sequence
aatgctgctcattctttctacaatg

SEQ ID NO: 166296 - DNA, 25 bp, Probe Sequence
aatgcttctcttcttacagtagttc

SEQ ID NO: 166297 - DNA, 25 bp, Probe Sequence
aatgcttccacagctaacgttgtta

SEQ ID NO: 166298 - DNA, 25 bp, Probe Sequence
aatgcctcataacctcaatttttaa

SEQ ID NO: 166299 - DNA, 25 bp, Probe Sequence
aatgcttatagggctgatttgttta

SEQ ID NO: 166300 - DNA, 25 bp, Probe Sequence
aatgcagtatgggactatctttttt

SEQ ID NO: 166301 - DNA, 25 bp, Probe Sequence
aatgcagtatatttcttcgttcttt

SEQ ID NO: 166302 - DNA, 25 bp, Probe Sequence
aatgcaggtgcagttttctgttaat

SEQ ID NO: 166303 - DNA, 25 bp, Probe Sequence
aatgcatggctgatctactctgtta

SEQ ID NO: 166304 - DNA, 25 bp, Probe Sequence
aatgctgcctataatcgctacttca

SEQ ID NO: 166305 - DNA, 25 bp, Probe Sequence
aatgctaataaaagtgacgctcaat

SEQ ID NO: 166306 - DNA, 25 bp, Probe Sequence
aatctgaaaaagctactccacatca

SEQ ID NO: 166307 - DNA, 25 bp, Probe Sequence
aatcataacatactgcaacctccat

SEQ ID NO: 166308 - DNA, 25 bp, Probe Sequence
aatgctggaaagacaaccatcctga

SEQ ID NO: 166309 - DNA, 25 bp, Probe Sequence
aatcgtgcaaataaacgctcactcc

SEQ ID NO: 166310 - DNA, 25 bp, Probe Sequence
aatgcccagtaatcacctcaggcac

SEQ ID NO: 166311 - DNA, 25 bp, Probe Sequence
aatgcccagtaaaatttcaggatta

SEQ ID NO: 166312 - DNA, 25 bp, Probe Sequence
aatccaaatacaaatacaccgttag

SEQ ID NO: 166313 - DNA, 25 bp, Probe Sequence
aatcccaataatagtcccacaggga

SEQ ID NO: 166314 - DNA, 25 bp, Probe Sequence
aatacacgagacctccgtacaggga

SEQ ID NO: 166315 - DNA, 25 bp, Probe Sequence
aatctcacagaagtccactaaagtt

SEQ ID NO: 166316 - DNA, 25 bp, Probe Sequence
aatgcatcaaaagccttagaataag

SEQ ID NO: 166317 - DNA, 25 bp, Probe Sequence
aatctgcccagtgccttagatacaa

SEQ ID NO: 166318 - DNA, 25 bp, Probe Sequence
aatcccacagggcactattaatata

SEQ ID NO: 166319 - DNA, 25 bp, Probe Sequence
aatcctaacacttcactaatttata

SEQ ID NO: 166320 - DNA, 25 bp, Probe Sequence
aatcctacacatctcttatcagctt

SEQ ID NO: 166321 - DNA, 25 bp, Probe Sequence
aatcctcaccatatgctgctatgtt

SEQ ID NO: 166322 - DNA, 25 bp, Probe Sequence
aatccatatccatttctgacgttga

SEQ ID NO: 166323 - DNA, 25 bp, Probe Sequence
aatccatacaattctcttcagttag

SEQ ID NO: 166324 - DNA, 25 bp, Probe Sequence
aatgccatacatttcacttgattct

SEQ ID NO: 166325 - DNA, 25 bp, Probe Sequence
aatgccaaacactagctctgtatta

SEQ ID NO: 166326 - DNA, 25 bp, Probe Sequence
aatgctcttatggcacagctgtgta

SEQ ID NO: 166327 - DNA, 25 bp, Probe Sequence
aatcctctcaggacattgtgtagcc

SEQ ID NO: 166328 - DNA, 25 bp, Probe Sequence
aatcctctaatgtaagtctagctac

SEQ ID NO: 166329 - DNA, 25 bp, Probe Sequence
aatgcgcttcaagaatgttgatgat

SEQ ID NO: 166330 - DNA, 25 bp, Probe Sequence
aatgccttatggtaattattgatgt

SEQ ID NO: 166331 - DNA, 25 bp, Probe Sequence
aatgcctttaacttgtttgtgtgtc

SEQ ID NO: 166332 - DNA, 25 bp, Probe Sequence
aatgccctttatattttgagtgatt

SEQ ID NO: 166333 - DNA, 25 bp, Probe Sequence
aatccactgagatgtagtttagtca

SEQ ID NO: 166334 - DNA, 25 bp, Probe Sequence
aatcagccagagttggtgttcaagt

SEQ ID NO: 166335 - DNA, 25 bp, Probe Sequence
aatacctgcagctggtgaattagga

SEQ ID NO: 166336 - DNA, 25 bp, Probe Sequence
gaatacagcatctggagtaaccgta

SEQ ID NO: 166337 - DNA, 25 bp, Probe Sequence
aatacaatattccagccaaccagtt

SEQ ID NO: 166338 - DNA, 25 bp, Probe Sequence
aatccagttaccacatatcacgttt

SEQ ID NO: 166339 - DNA, 25 bp, Probe Sequence
aatacgattttctgttgcaccttgt

SEQ ID NO: 166340 - DNA, 25 bp, Probe Sequence
aatacgattttctgttgcaccttgt

SEQ ID NO: 166341 - DNA, 25 bp, Probe Sequence
aatcagcggttccgtgttcactttt

SEQ ID NO: 166342 - DNA, 25 bp, Probe Sequence
aatgcctggatctgtgttctacttt

SEQ ID NO: 166343 - DNA, 25 bp, Probe Sequence
aatgccatggtgtgttcccaattat

SEQ ID NO: 166344 - DNA, 25 bp, Probe Sequence
aatgcctgggggatttcctggtggt

SEQ ID NO: 166345 - DNA, 25 bp, Probe Sequence
aatgcgaccgagcattttccaggtc

SEQ ID NO: 166346 - DNA, 25 bp, Probe Sequence
aatgccaacctgttttccgggcatc

SEQ ID NO: 166347 - DNA, 25 bp, Probe Sequence
aatccaatcccattcttccagggaa

SEQ ID NO: 166348 - DNA, 25 bp, Probe Sequence
aatccaaccatatttcacaagaggg

SEQ ID NO: 166349 - DNA, 25 bp, Probe Sequence
aatctgcacacacaacgaacagttg

SEQ ID NO: 166350 - DNA, 25 bp, Probe Sequence
aatcccaatctatctaaatttcatc

SEQ ID NO: 166351 - DNA, 25 bp, Probe Sequence
aatctagtttcatctgagaacttct

SEQ ID NO: 166352 - DNA, 25 bp, Probe Sequence
aatctctgttaatcttacctgcttt

SEQ ID NO: 166353 - DNA, 25 bp, Probe Sequence
aatcctcatttatctcttctatgtc

SEQ ID NO: 166354 - DNA, 25 bp, Probe Sequence
aatgctttttagtactttttcatat

SEQ ID NO: 166355 - DNA, 25 bp, Probe Sequence
aatgctcttttttagtatgttcttt

SEQ ID NO: 166356 - DNA, 25 bp, Probe Sequence
aatgctttttgttgatgcccactct

SEQ ID NO: 166357 - DNA, 25 bp, Probe Sequence
aatgcccttctatatgtgctaccat

SEQ ID NO: 166358 - DNA, 25 bp, Probe Sequence
aatgcccaattcttactgttcaggt

SEQ ID NO: 166359 - DNA, 25 bp, Probe Sequence
aatgccacaactacatggtgttcgg

SEQ ID NO: 166360 - DNA, 25 bp, Probe Sequence
aatccctcactttgggtccatgaga

SEQ ID NO: 166361 - DNA, 25 bp, Probe Sequence
aatgccacacacatagaactccaac

SEQ ID NO: 166362 - DNA, 25 bp, Probe Sequence
aatgccacacacatagaactccaac

SEQ ID NO: 166363 - DNA, 25 bp, Probe Sequence
aatgccacacacatagaactccaac

SEQ ID NO: 166364 - DNA, 25 bp, Probe Sequence
aatgccacacacatagaactccaac

SEQ ID NO: 166365 - DNA, 25 bp, Probe Sequence
aataacccaaaggcatgctccagac

SEQ ID NO: 166366 - DNA, 25 bp, Probe Sequence
aataaaccaattggcactctgtatc

SEQ ID NO: 166367 - DNA, 25 bp, Probe Sequence
aataattggcagatgcccactgcct

SEQ ID NO: 166368 - DNA, 25 bp, Probe Sequence
aatcaagcttctgatggctgacccc

SEQ ID NO: 166369 - DNA, 25 bp, Probe Sequence
aatcctctctatgggagctattcca

SEQ ID NO: 166370 - DNA, 25 bp, Probe Sequence
aatctcctctacagatttttgctgc

SEQ ID NO: 166371 - DNA, 25 bp, Probe Sequence
aatgctttgtccatgatgtccttgt

SEQ ID NO: 166372 - DNA, 25 bp, Probe Sequence
aatgctttgtccatgatgtccttgt

SEQ ID NO: 166373 - DNA, 25 bp, Probe Sequence
aatgctgtatggtgtgtgttctctt

SEQ ID NO: 166374 - DNA, 25 bp, Probe Sequence
aatgctataggggtattgctatcat

SEQ ID NO: 166375 - DNA, 25 bp, Probe Sequence
aatctaaggcagttgctatccacat

SEQ ID NO: 166376 - DNA, 25 bp, Probe Sequence
aatctgaaggacttcatctcccgct

SEQ ID NO: 166377 - DNA, 25 bp, Probe Sequence
aatctgaaggacttcatctcccgct

SEQ ID NO: 166378 - DNA, 25 bp, Probe Sequence
aatgctgaagtgtattcattgcctt

SEQ ID NO: 166379 - DNA, 25 bp, Probe Sequence
aatgctgcaagtaatctctttttta

SEQ ID NO: 166380 - DNA, 25 bp, Probe Sequence
aatctgctgagtaatcttccgtttc

SEQ ID NO: 166381 - DNA, 25 bp, Probe Sequence
aatcgatcagatttttccagaattc

SEQ ID NO: 166382 - DNA, 25 bp, Probe Sequence
aatgctgatagtttactggcaacat

SEQ ID NO: 166383 - DNA, 25 bp, Probe Sequence
aatgctgagactttctctggcacga

SEQ ID NO: 166384 - DNA, 25 bp, Probe Sequence
aatctggactgtactcgggagagcc

SEQ ID NO: 166385 - DNA, 25 bp, Probe Sequence
aatctggcttgttacaggcgagaaa

SEQ ID NO: 166386 - DNA, 25 bp, Probe Sequence
aatcgcctgagatacagatgaagat

SEQ ID NO: 166387 - DNA, 25 bp, Probe Sequence
aatctgaggtgataaatgttgtttc

SEQ ID NO: 166388 - DNA, 25 bp, Probe Sequence
aatgctgtgccctaaagtgtatttt

SEQ ID NO: 166389 - DNA, 25 bp, Probe Sequence
aatgctgctccattcagaagtgaag

SEQ ID NO: 166390 - DNA, 25 bp, Probe Sequence
aatgctggtgcattcagatggtgaa

SEQ ID NO: 166391 - DNA, 25 bp, Probe Sequence
aatgcggctgcactggtggaagaag

SEQ ID NO: 166392 - DNA, 25 bp, Probe Sequence
aatgccgatgatttgtgtgaaaaaa

SEQ ID NO: 166393 - DNA, 25 bp, Probe Sequence
aatgctctgtcttgagtcatgagaa

SEQ ID NO: 166394 - DNA, 25 bp, Probe Sequence
aatgctgtgatctcagcttaccaca

SEQ ID NO: 166395 - DNA, 25 bp, Probe Sequence
aatgctgatgacttctttaatgctt

SEQ ID NO: 166396 - DNA, 25 bp, Probe Sequence
caatcgtgcatccttagtgaacttc

SEQ ID NO: 166397 - DNA, 25 bp, Probe Sequence
aatcgtgcatccttagtgaacttct

SEQ ID NO: 166398 - DNA, 25 bp, Probe Sequence
aatctgtatgcctgagtaccatcct

SEQ ID NO: 166399 - DNA, 25 bp, Probe Sequence
aatcttgctgcacggagttgagctc

SEQ ID NO: 166400 - DNA, 25 bp, Probe Sequence
aatctcttgaaggcagttactgact

SEQ ID NO: 166401 - DNA, 25 bp, Probe Sequence
aatctgcctgaagatcattaccaaa

SEQ ID NO: 166402 - DNA, 25 bp, Probe Sequence
aatctgcctgaagatcattaccaaa

SEQ ID NO: 166403 - DNA, 25 bp, Probe Sequence
aatctgcctgaagatcattaccaaa

SEQ ID NO: 166404 - DNA, 25 bp, Probe Sequence
aatctccagcaagcatctcatttaa

SEQ ID NO: 166405 - DNA, 25 bp, Probe Sequence
aatgccctatgagatgcacatatgt

SEQ ID NO: 166406 - DNA, 25 bp, Probe Sequence
aatgcgatgcttgggtcaaatggta

SEQ ID NO: 166407 - DNA, 25 bp, Probe Sequence
aatgctgacttggagctagatgagg

SEQ ID NO: 166408 - DNA, 25 bp, Probe Sequence
aatgctgcatcttggactatccgaa

SEQ ID NO: 166409 - DNA, 25 bp, Probe Sequence
aatgctgtcgggactgagcaggcaa

SEQ ID NO: 166410 - DNA, 25 bp, Probe Sequence
aatgccatcaggaactcagaggtat

SEQ ID NO: 166411 - DNA, 25 bp, Probe Sequence
aatgccaaagaagaactgtaatgct

SEQ ID NO: 166412 - DNA, 25 bp, Probe Sequence
aatccagaagaagctgactccattc

SEQ ID NO: 166413 - DNA, 25 bp, Probe Sequence
aatgccaagaaggcactacctccca

SEQ ID NO: 166414 - DNA, 25 bp, Probe Sequence
aatgccaagataacaaagcgctgat

SEQ ID NO: 166415 - DNA, 25 bp, Probe Sequence
aatccagaatgacaagatgcggact

SEQ ID NO: 166416 - DNA, 25 bp, Probe Sequence
aatccagaaggaaagcagtgtacat

SEQ ID NO: 166417 - DNA, 25 bp, Probe Sequence
aatcctggaataggacaagatcact

SEQ ID NO: 166418 - DNA, 25 bp, Probe Sequence
aatcctgtgacttgtgcttaatact

SEQ ID NO: 166419 - DNA, 25 bp, Probe Sequence
aatgccagtacagacttaggacttc

SEQ ID NO: 166420 - DNA, 25 bp, Probe Sequence
aatccagtcccttctttggatgtcc

SEQ ID NO: 166421 - DNA, 25 bp, Probe Sequence
aatccttccctagagctagtatcct

SEQ ID NO: 166422 - DNA, 25 bp, Probe Sequence
aatccttgccctaagagaaaagata

SEQ ID NO: 166423 - DNA, 25 bp, Probe Sequence
aatccttcctgcttaaggactcaga

SEQ ID NO: 166424 - DNA, 25 bp, Probe Sequence
aatctcttctacttggagactctca

SEQ ID NO: 166425 - DNA, 25 bp, Probe Sequence
aatctcctcgacattggtcataatt

SEQ ID NO: 166426 - DNA, 25 bp, Probe Sequence
aatccattatgactgttgttcttat

SEQ ID NO: 166427 - DNA, 25 bp, Probe Sequence
aatccttctaatctgctatgcttga

SEQ ID NO: 166428 - DNA, 25 bp, Probe Sequence
aatccatctttactgtcaacatctg

SEQ ID NO: 166429 - DNA, 25 bp, Probe Sequence
aatccactatgaatgctgtaacctc

SEQ ID NO: 166430 - DNA, 25 bp, Probe Sequence
aatcccagagaactttcaactcttt

SEQ ID NO: 166431 - DNA, 25 bp, Probe Sequence
aatccagaggttccttgacctcatt

SEQ ID NO: 166432 - DNA, 25 bp, Probe Sequence
aatccagatggcatggttgctctat

SEQ ID NO: 166433 - DNA, 25 bp, Probe Sequence
aatccaaggtcaagatctctaattt

SEQ ID NO: 166434 - DNA, 25 bp, Probe Sequence
aatccacggatcaagagatgtccaa

SEQ ID NO: 166435 - DNA, 25 bp, Probe Sequence
aatctatgggatctacagtgctagc

SEQ ID NO: 166436 - DNA, 25 bp, Probe Sequence
aatcattgcggtctactcagggcac

SEQ ID NO: 166437 - DNA, 25 bp, Probe Sequence
aatccatgctttgtttagggagtga

SEQ ID NO: 166438 - DNA, 25 bp, Probe Sequence
gaatttcttcccattgcgggcagga

SEQ ID NO: 166439 - DNA, 25 bp, Probe Sequence
aattccatttccagactggagggag

SEQ ID NO: 166440 - DNA, 25 bp, Probe Sequence
aatatccctttaagaagcgggccag

SEQ ID NO: 166441 - DNA, 25 bp, Probe Sequence
aatctctcctttaatcaagcttccc

SEQ ID NO: 166442 - DNA, 25 bp, Probe Sequence
aatcctcctgttatactcagtatca

SEQ ID NO: 166443 - DNA, 25 bp, Probe Sequence
aatcctgggattctagtatgcaata

SEQ ID NO: 166444 - DNA, 25 bp, Probe Sequence
aatgccagggcctgctgagttgctt

SEQ ID NO: 166445 - DNA, 25 bp, Probe Sequence
aatgccagacgctggggatgctggt

SEQ ID NO: 166446 - DNA, 25 bp, Probe Sequence
aatccagaaggatgatggcagatgg

SEQ ID NO: 166447 - DNA, 25 bp, Probe Sequence
caatctctgagaagcctgcatggca

SEQ ID NO: 166448 - DNA, 25 bp, Probe Sequence
aatccgcaagaccatcatgcagctg

SEQ ID NO: 166449 - DNA, 25 bp, Probe Sequence
aatcggaacacattcagctgctggg

SEQ ID NO: 166450 - DNA, 25 bp, Probe Sequence
aatcggacttattcacgcagtggcc

SEQ ID NO: 166451 - DNA, 25 bp, Probe Sequence
aatccagcatcttttattgcattgg

SEQ ID NO: 166452 - DNA, 25 bp, Probe Sequence
aatcgagcatcgttgcttcagaatg

SEQ ID NO: 166453 - DNA, 25 bp, Probe Sequence
aatcgcctctcttgctacagaaaga

SEQ ID NO: 166454 - DNA, 25 bp, Probe Sequence
aatcctgctcttttaagaaaaggca

SEQ ID NO: 166455 - DNA, 25 bp, Probe Sequence
aatactggtgtcggacaaagaaaga

SEQ ID NO: 166456 - DNA, 25 bp, Probe Sequence
aatccatgagtgttccaaaatatac

SEQ ID NO: 166457 - DNA, 25 bp, Probe Sequence
aatcctgtcttgttcataaattgac

SEQ ID NO: 166458 - DNA, 25 bp, Probe Sequence
aatccttcggattaaacatggaagt

SEQ ID NO: 166459 - DNA, 25 bp, Probe Sequence
aatctattgggttcattattggaat

SEQ ID NO: 166460 - DNA, 25 bp, Probe Sequence
cagtaattggtcacttgttaagaaa

SEQ ID NO: 166461 - DNA, 25 bp, Probe Sequence
aataatgtggtctgctttataagat

SEQ ID NO: 166462 - DNA, 25 bp, Probe Sequence
aatccggaccaactgtctgctaaga

SEQ ID NO: 166463 - DNA, 25 bp, Probe Sequence
aatgcccagattgtgtttctaagaa

SEQ ID NO: 166464 - DNA, 25 bp, Probe Sequence
aatcctccatgctgttttctacagc

SEQ ID NO: 166465 - DNA, 25 bp, Probe Sequence
aatcatcacctctgtctagttacag

SEQ ID NO: 166466 - DNA, 25 bp, Probe Sequence
aatctagtcctgggcaacttcacat

SEQ ID NO: 166467 - DNA, 25 bp, Probe Sequence
aatctaccctgcagatattctaata

SEQ ID NO: 166468 - DNA, 25 bp, Probe Sequence
aatctatcacccagtcatgtgcact

SEQ ID NO: 166469 - DNA, 25 bp, Probe Sequence
aatcttcagttattgaaggacatgc

SEQ ID NO: 166470 - DNA, 25 bp, Probe Sequence
aatctgttgagtaatccaggaatgt

SEQ ID NO: 166471 - DNA, 25 bp, Probe Sequence
aatgccttgagtttcacggcacttc

SEQ ID NO: 166472 - DNA, 25 bp, Probe Sequence
aatcctgtggatggccacggactcc

SEQ ID NO: 166473 - DNA, 25 bp, Probe Sequence
aatgccgtggattgcacgtggcctc

SEQ ID NO: 166474 - DNA, 25 bp, Probe Sequence
aatgcccgtctcttcatatttgaga

SEQ ID NO: 166475 - DNA, 25 bp, Probe Sequence
aatccctcatctggtgactcatgat

SEQ ID NO: 166476 - DNA, 25 bp, Probe Sequence
aatccctcatctggtgactcatgat

SEQ ID NO: 166477 - DNA, 25 bp, Probe Sequence
aatgccgcacatttgcatactatat

SEQ ID NO: 166478 - DNA, 25 bp, Probe Sequence
aatgccgagatgctgtcaactcaga

SEQ ID NO: 166479 - DNA, 25 bp, Probe Sequence
aatctcaggtggtccacccgagacc

SEQ ID NO: 166480 - DNA, 25 bp, Probe Sequence
aatctcaggcgcagcgcctcgcgaa

SEQ ID NO: 166481 - DNA, 25 bp, Probe Sequence
aatctcaggctggtcgacattccat

SEQ ID NO: 166482 - DNA, 25 bp, Probe Sequence
aatccagattgggctatcttctgca

SEQ ID NO: 166483 - DNA, 25 bp, Probe Sequence
aatcatgcagatttccaatcagtgt

SEQ ID NO: 166484 - DNA, 25 bp, Probe Sequence
aatcagcagatattgggtccggtat

SEQ ID NO: 166485 - DNA, 25 bp, Probe Sequence
aatcatcagatatgcgggtccagtg

SEQ ID NO: 166486 - DNA, 25 bp, Probe Sequence
aatcatctgcaaccatgtgtgtcct

SEQ ID NO: 166487 - DNA, 25 bp, Probe Sequence
aatctgctgaagacactggccagtc

SEQ ID NO: 166488 - DNA, 25 bp, Probe Sequence
aatcctgacagcatatgccagcgcc

SEQ ID NO: 166489 - DNA, 25 bp, Probe Sequence
aatcctacaatttgctcatccatga

SEQ ID NO: 166490 - DNA, 25 bp, Probe Sequence
aatcctccaacttgatgcagaagaa

SEQ ID NO: 166491 - DNA, 25 bp, Probe Sequence
aatcccaaagcccatgctatgtgaa

SEQ ID NO: 166492 - DNA, 25 bp, Probe Sequence
aatccaaaactccagtatatgacga

SEQ ID NO: 166493 - DNA, 25 bp, Probe Sequence
aataagagaactccagatttgcctg

SEQ ID NO: 166494 - DNA, 25 bp, Probe Sequence
aatcctggaaatctgttctccagaa

SEQ ID NO: 166495 - DNA, 25 bp, Probe Sequence
aatctctggagagcctggtgcttca

SEQ ID NO: 166496 - DNA, 25 bp, Probe Sequence
aatctgtcaggttcactggtacata

SEQ ID NO: 166497 - DNA, 25 bp, Probe Sequence
gaacttgggttgagggcactaccag

SEQ ID NO: 166498 - DNA, 25 bp, Probe Sequence
aatttgcctttcaggtcattcccaa

SEQ ID NO: 166499 - DNA, 25 bp, Probe Sequence
aatcttggtttctttgtatccccag

SEQ ID NO: 166500 - DNA, 25 bp, Probe Sequence
aatcttgtgttatacttttctcctg

SEQ ID NO: 166501 - DNA, 25 bp, Probe Sequence
aatcttttttggacttctgctggcc

SEQ ID NO: 166502 - DNA, 25 bp, Probe Sequence
aatcttttttggacttctgctggcc

SEQ ID NO: 166503 - DNA, 25 bp, Probe Sequence
aatcatggctctgcatgactcttcc

SEQ ID NO: 166504 - DNA, 25 bp, Probe Sequence
aatcatgactttaaacttccaccga

SEQ ID NO: 166505 - DNA, 25 bp, Probe Sequence
aataatttttaaggtgtatcacaga

SEQ ID NO: 166506 - DNA, 25 bp, Probe Sequence
aatcttattttcttgacttataaca

SEQ ID NO: 166507 - DNA, 25 bp, Probe Sequence
aatctttctcctggtgactcaaata

SEQ ID NO: 166508 - DNA, 25 bp, Probe Sequence
aatctgctcccactggtattactga

SEQ ID NO: 166509 - DNA, 25 bp, Probe Sequence
aatcccaaagcaatctgagtactga

SEQ ID NO: 166510 - DNA, 25 bp, Probe Sequence
aatcccaaaacatcttactgatgct

SEQ ID NO: 166511 - DNA, 25 bp, Probe Sequence
aatcactataaccatcagttactgg

SEQ ID NO: 166512 - DNA, 25 bp, Probe Sequence
aatgccttgtacctacaacaatgct

SEQ ID NO: 166513 - DNA, 25 bp, Probe Sequence
aatccttatgccaaacaggcatatt

SEQ ID NO: 166514 - DNA, 25 bp, Probe Sequence
aatccaatagtgaaggcgcgatatg

SEQ ID NO: 166515 - DNA, 25 bp, Probe Sequence
aatcaagaactgaggcctgaggctg

SEQ ID NO: 166516 - DNA, 25 bp, Probe Sequence
aatcaaggactttagaatcagaatg

SEQ ID NO: 166517 - DNA, 25 bp, Probe Sequence
aatcagaccactcattgttctactg

SEQ ID NO: 166518 - DNA, 25 bp, Probe Sequence
aatcaacctcagtactgtcactaca

SEQ ID NO: 166519 - DNA, 25 bp, Probe Sequence
aatccaccaacaactgtacatgctc

SEQ ID NO: 166520 - DNA, 25 bp, Probe Sequence
aatccactgagccggtgtacatcta

SEQ ID NO: 166521 - DNA, 25 bp, Probe Sequence
aatccactggcccaagaagcatcta

SEQ ID NO: 166522 - DNA, 25 bp, Probe Sequence
aatccagggggaagagtcatctaag

SEQ ID NO: 166523 - DNA, 25 bp, Probe Sequence
aatccgagtgtttgccaggcttaag

SEQ ID NO: 166524 - DNA, 25 bp, Probe Sequence
aatcctgagttattgctgcatgctt

SEQ ID NO: 166525 - DNA, 25 bp, Probe Sequence
aatcctcatattaatgcacatttac

SEQ ID NO: 166526 - DNA, 25 bp, Probe Sequence
aatctgctgcatactttgacaagga

SEQ ID NO: 166527 - DNA, 25 bp, Probe Sequence
aatctgcactattttggaggacaag

SEQ ID NO: 166528 - DNA, 25 bp, Probe Sequence
aatccagatgtttgttgggacagaa

SEQ ID NO: 166529 - DNA, 25 bp, Probe Sequence
aatccttttatgactggtgcaccaa

SEQ ID NO: 166530 - DNA, 25 bp, Probe Sequence
aatctctaatttgcatgggcaccac

SEQ ID NO: 166531 - DNA, 25 bp, Probe Sequence
aatctcataactttccaagctccac

SEQ ID NO: 166532 - DNA, 25 bp, Probe Sequence
aatcattaccttaaagcatcaccac

SEQ ID NO: 166533 - DNA, 25 bp, Probe Sequence
aatcaacaccttaatatgctgcaac

SEQ ID NO: 166534 - DNA, 25 bp, Probe Sequence
aatctacacttctttgcaccagagt

SEQ ID NO: 166535 - DNA, 25 bp, Probe Sequence
aatctacgtattagtcatcgctatt

SEQ ID NO: 166536 - DNA, 25 bp, Probe Sequence
aatctacgtattagtcatcgctatt

SEQ ID NO: 166537 - DNA, 25 bp, Probe Sequence
aatctgcaccagttatgtaagctaa

SEQ ID NO: 166538 - DNA, 25 bp, Probe Sequence
aatccattcatgtgttgaagggcat

SEQ ID NO: 166539 - DNA, 25 bp, Probe Sequence
aatccagtcactagttggggtttgg

SEQ ID NO: 166540 - DNA, 25 bp, Probe Sequence
aatcctgttaagctgggcgttgtgg

SEQ ID NO: 166541 - DNA, 25 bp, Probe Sequence
aatcggtgtaccttgggcgaattgt

SEQ ID NO: 166542 - DNA, 25 bp, Probe Sequence
aatcgtctgttcgtgggccgaaagt

SEQ ID NO: 166543 - DNA, 25 bp, Probe Sequence
aatcgtgtgattagggagcccagac

SEQ ID NO: 166544 - DNA, 25 bp, Probe Sequence
aatcaggctattcaggcactacgag

SEQ ID NO: 166545 - DNA, 25 bp, Probe Sequence
aatagcgtatacgagccttcacgca

SEQ ID NO: 166546 - DNA, 25 bp, Probe Sequence
aataatgtatcacctctttccagaa

SEQ ID NO: 166547 - DNA, 25 bp, Probe Sequence
aatccattgtcagtatttgtgcata

SEQ ID NO: 166548 - DNA, 25 bp, Probe Sequence
aatccagtgatattagtagtctcca

SEQ ID NO: 166549 - DNA, 25 bp, Probe Sequence
aatcctggctcataatcagtctcct

SEQ ID NO: 166550 - DNA, 25 bp, Probe Sequence
aatccggtgtaggcacagctctcct

SEQ ID NO: 166551 - DNA, 25 bp, Probe Sequence
aatcagcggattcgcttcacactgc

SEQ ID NO: 166552 - DNA, 25 bp, Probe Sequence
aataggaattggtttcacgcctcag

SEQ ID NO: 166553 - DNA, 25 bp, Probe Sequence
aatcaggactttgtcccagacatct

SEQ ID NO: 166554 - DNA, 25 bp, Probe Sequence
aatcaggtatttgtattaaattgat

SEQ ID NO: 166555 - DNA, 25 bp, Probe Sequence
aataagaatttgcatacttacctag

SEQ ID NO: 166556 - DNA, 25 bp, Probe Sequence
aataatttttgctgaattctttaca

SEQ ID NO: 166557 - DNA, 25 bp, Probe Sequence
aatctatttttgtaaacctgttcat

SEQ ID NO: 166558 - DNA, 25 bp, Probe Sequence
aatctctttttatatcacttgtatc

SEQ ID NO: 166559 - DNA, 25 bp, Probe Sequence
aatctaattcaataaactctgtatc

SEQ ID NO: 166560 - DNA, 25 bp, Probe Sequence
aattaatccacatatgaaagtgtac

SEQ ID NO: 166561 - DNA, 25 bp, Probe Sequence
aatctacatccaccaaaattgtgtg

SEQ ID NO: 166562 - DNA, 25 bp, Probe Sequence
aataactgagtgacaaaatggttgt

SEQ ID NO: 166563 - DNA, 25 bp, Probe Sequence
aataattttgccaatattgccaagt

SEQ ID NO: 166564 - DNA, 25 bp, Probe Sequence
aatagtatttgctcaacccagttac

SEQ ID NO: 166565 - DNA, 25 bp, Probe Sequence
aatcaaaatggctgtactcccttac

SEQ ID NO: 166566 - DNA, 25 bp, Probe Sequence
aatcaagtcacgtgattctcccttc

SEQ ID NO: 166567 - DNA, 25 bp, Probe Sequence
aatcaagcccaaatttcttcctcat

SEQ ID NO: 166568 - DNA, 25 bp, Probe Sequence
aatcttggcaaaattttccctctga

SEQ ID NO: 166569 - DNA, 25 bp, Probe Sequence
aatcttagcggaaattatatatttg

SEQ ID NO: 166570 - DNA, 25 bp, Probe Sequence
aatctttgaggtttcatatgatatc

SEQ ID NO: 166571 - DNA, 25 bp, Probe Sequence
aatctgtctagaatcctgctttaca

SEQ ID NO: 166572 - DNA, 25 bp, Probe Sequence
aatcttgtcacaatccacttaaaga

SEQ ID NO: 166573 - DNA, 25 bp, Probe Sequence
aatctttgacaaggcccgccaagct

SEQ ID NO: 166574 - DNA, 25 bp, Probe Sequence
aatccctggattgaagcgcaaagct

SEQ ID NO: 166575 - DNA, 25 bp, Probe Sequence
aatccctggattgaagcgcaaagct

SEQ ID NO: 166576 - DNA, 25 bp, Probe Sequence
aatccctggattgaagcgcaaagct

SEQ ID NO: 166577 - DNA, 25 bp, Probe Sequence
aatccctggattgaagcgcaaagct

SEQ ID NO: 166578 - DNA, 25 bp, Probe Sequence
aatccctggattgaagcgcaaagct

SEQ ID NO: 166579 - DNA, 25 bp, Probe Sequence
aatccctttaaaactgcaacctctg

SEQ ID NO: 166580 - DNA, 25 bp, Probe Sequence
caatccctttaaaactgcaacctct

SEQ ID NO: 166581 - DNA, 25 bp, Probe Sequence
aatcctatttaaagacctgacagct

SEQ ID NO: 166582 - DNA, 25 bp, Probe Sequence
aatcctatttcagtggaccaacatt

SEQ ID NO: 166583 - DNA, 25 bp, Probe Sequence
aatttgatattctttagtgaacttg

SEQ ID NO: 166584 - DNA, 25 bp, Probe Sequence
aatctagaaccagtgtgagcgagtc

SEQ ID NO: 166585 - DNA, 25 bp, Probe Sequence
aatcataaacggcgaggactgcagc

SEQ ID NO: 166586 - DNA, 25 bp, Probe Sequence
aattaaacgagacgggtgcatctgc

SEQ ID NO: 166587 - DNA, 25 bp, Probe Sequence
aattagtccgagcatggtggcctgt

SEQ ID NO: 166588 - DNA, 25 bp, Probe Sequence
aatcaaaccgagcagggctgtgtga

SEQ ID NO: 166589 - DNA, 25 bp, Probe Sequence
aataggactccccagggctgaagct

SEQ ID NO: 166590 - DNA, 25 bp, Probe Sequence
aatccgattcacgtagggaaatgtt

SEQ ID NO: 166591 - DNA, 25 bp, Probe Sequence
aatctcagtacatctataggaagtg

SEQ ID NO: 166592 - DNA, 25 bp, Probe Sequence
aatctcagctactcaggaggctaag

SEQ ID NO: 166593 - DNA, 25 bp, Probe Sequence
aatctcagtacattgggaggccaag

SEQ ID NO: 166594 - DNA, 25 bp, Probe Sequence
aatctcagtacattgggaggccaag

SEQ ID NO: 166595 - DNA, 25 bp, Probe Sequence
aatctcaagcactttgggagtctga

SEQ ID NO: 166596 - DNA, 25 bp, Probe Sequence
aatcacggcaatctgggaggctgag

SEQ ID NO: 166597 - DNA, 25 bp, Probe Sequence
aatcgctggaacctgggaggcagaa

SEQ ID NO: 166598 - DNA, 25 bp, Probe Sequence
aatcgcttgaaccctggaggcagac

SEQ ID NO: 166599 - DNA, 25 bp, Probe Sequence
aatcacttcaacccataaggtggat

SEQ ID NO: 166600 - DNA, 25 bp, Probe Sequence
aatcagtacaatcacacaaggagga

SEQ ID NO: 166601 - DNA, 25 bp, Probe Sequence
aatagtacatgtcaccttaggtagt

SEQ ID NO: 166602 - DNA, 25 bp, Probe Sequence
aatatgagactgggggttaagttgt

SEQ ID NO: 166603 - DNA, 25 bp, Probe Sequence
aatataagcctgcggccttaactct

SEQ ID NO: 166604 - DNA, 25 bp, Probe Sequence
aatactacctggagtcttgtcctct

SEQ ID NO: 166605 - DNA, 25 bp, Probe Sequence
gactactaccgtatagttttctcta

SEQ ID NO: 166606 - DNA, 25 bp, Probe Sequence
aatagctacaccatatttccttctc

SEQ ID NO: 166607 - DNA, 25 bp, Probe Sequence
aatagctacctcatatcaagccctc

SEQ ID NO: 166608 - DNA, 25 bp, Probe Sequence
aatcactcagctcttaaagcaacct

SEQ ID NO: 166609 - DNA, 25 bp, Probe Sequence
aatacttctgctatagcaaaaactt

SEQ ID NO: 166610 - DNA, 25 bp, Probe Sequence
aatcctatctctactcaagaataca

SEQ ID NO: 166611 - DNA, 25 bp, Probe Sequence
aatcactatctttctgataacagaa

SEQ ID NO: 166612 - DNA, 25 bp, Probe Sequence
aatccgcctatgtatgaagctagtt

SEQ ID NO: 166613 - DNA, 25 bp, Probe Sequence
aatccgcctgcagaggacagagctg

SEQ ID NO: 166614 - DNA, 25 bp, Probe Sequence
aatcaccaatgaccagaatcgcctg

SEQ ID NO: 166615 - DNA, 25 bp, Probe Sequence
aatagctcagagttgcaaatatcac

SEQ ID NO: 166616 - DNA, 25 bp, Probe Sequence
caatagcatcgagaaaatcaacgga

SEQ ID NO: 166617 - DNA, 25 bp, Probe Sequence
aatagcatcgagaaaatcaacggaa

SEQ ID NO: 166618 - DNA, 25 bp, Probe Sequence
aatcatgatctatacgcaaccggaa

SEQ ID NO: 166619 - DNA, 25 bp, Probe Sequence
aatctattatcttttgacctggaat

SEQ ID NO: 166620 - DNA, 25 bp, Probe Sequence
aatcacgtcttattttcctgaggtt

SEQ ID NO: 166621 - DNA, 25 bp, Probe Sequence
aatacttttgttaccacaggttcat

SEQ ID NO: 166622 - DNA, 25 bp, Probe Sequence
aataattttctgtgctaagggtcca

SEQ ID NO: 166623 - DNA, 25 bp, Probe Sequence
caatcaagttccaaatgaagaaggt

SEQ ID NO: 166624 - DNA, 25 bp, Probe Sequence
aatctcactgcttcgactaaaaggt

SEQ ID NO: 166625 - DNA, 25 bp, Probe Sequence
aatctcagttaagcacaacagggtg

SEQ ID NO: 166626 - DNA, 25 bp, Probe Sequence
aatctgtttcacacacacacatgcg

SEQ ID NO: 166627 - DNA, 25 bp, Probe Sequence
aatcatgtttacctcctagtgcaac

SEQ ID NO: 166628 - DNA, 25 bp, Probe Sequence
aatcttgcttcagaccatcagttac

SEQ ID NO: 166629 - DNA, 25 bp, Probe Sequence
aatctagtagattagccatctttca

SEQ ID NO: 166630 - DNA, 25 bp, Probe Sequence
aatctttacagattgatattttcag

SEQ ID NO: 166631 - DNA, 25 bp, Probe Sequence
aatcttaacatagtaatctttagct

SEQ ID NO: 166632 - DNA, 25 bp, Probe Sequence
aatcttagactcttatacttcaaac

SEQ ID NO: 166633 - DNA, 25 bp, Probe Sequence
aatcctaatcctaataccaactatc

SEQ ID NO: 166634 - DNA, 25 bp, Probe Sequence
aatcccaatcccaagtcgaaatcac

SEQ ID NO: 166635 - DNA, 25 bp, Probe Sequence
aataccagacgcttgagctggagaa

SEQ ID NO: 166636 - DNA, 25 bp, Probe Sequence
aataactgacgcttgttatgaaaga

SEQ ID NO: 166637 - DNA, 25 bp, Probe Sequence
aataaattgcagtttcattgtgaag

SEQ ID NO: 166638 - DNA, 25 bp, Probe Sequence
aataacatatacattccattgggaa

SEQ ID NO: 166639 - DNA, 25 bp, Probe Sequence
aataccgtatgtgcaccatattgga

SEQ ID NO: 166640 - DNA, 25 bp, Probe Sequence
aatcacccagggtcacacaattgat

SEQ ID NO: 166641 - DNA, 25 bp, Probe Sequence
aatcaccacatatgtgcacccttca

SEQ ID NO: 166642 - DNA, 25 bp, Probe Sequence
aatcagcgaagaatgccaacacctc

SEQ ID NO: 166643 - DNA, 25 bp, Probe Sequence
aatcagcattcctgctgcagaacct

SEQ ID NO: 166644 - DNA, 25 bp, Probe Sequence
aatcatgatcccactgaagacctcg

SEQ ID NO: 166645 - DNA, 25 bp, Probe Sequence
aatcagcatcttgctggacgacccc

SEQ ID NO: 166646 - DNA, 25 bp, Probe Sequence
aatctgattgatgctggatggacct

SEQ ID NO: 166647 - DNA, 25 bp, Probe Sequence
aatcctcagatgccaggggtctgct

SEQ ID NO: 166648 - DNA, 25 bp, Probe Sequence
aatagctggatcgaggagatgccct

SEQ ID NO: 166649 - DNA, 25 bp, Probe Sequence
aatagctggatcgaggagatgccct

SEQ ID NO: 166650 - DNA, 25 bp, Probe Sequence
aatagctggatcgaggagatgccct

SEQ ID NO: 166651 - DNA, 25 bp, Probe Sequence
aatagcaggttatcagatggttctg

SEQ ID NO: 166652 - DNA, 25 bp, Probe Sequence
aataggagtctcacactgactgttg

SEQ ID NO: 166653 - DNA, 25 bp, Probe Sequence
aataggagtccagctattgctgctg

SEQ ID NO: 166654 - DNA, 25 bp, Probe Sequence
aataggagtactggtttttcataat

SEQ ID NO: 166655 - DNA, 25 bp, Probe Sequence
aatagggaatgctgtttttgaggta

SEQ ID NO: 166656 - DNA, 25 bp, Probe Sequence
ggtccggagcagctgttccgggtta

SEQ ID NO: 166657 - DNA, 25 bp, Probe Sequence
aatcctggagcacttgttccgggat

SEQ ID NO: 166658 - DNA, 25 bp, Probe Sequence
caatcctgcggctttggtgacagtg

SEQ ID NO: 166659 - DNA, 25 bp, Probe Sequence
aatcctgcggctttggtgacagtgt

SEQ ID NO: 166660 - DNA, 25 bp, Probe Sequence
aatcccagcactttgaggttggctg

SEQ ID NO: 166661 - DNA, 25 bp, Probe Sequence
aatcccagcaccttgggagggtgag

SEQ ID NO: 166662 - DNA, 25 bp, Probe Sequence
aatcccagcactttgggaggccgag

SEQ ID NO: 166663 - DNA, 25 bp, Probe Sequence
aatcccagcaccttgggaggctaag

SEQ ID NO: 166664 - DNA, 25 bp, Probe Sequence
aatcccagcactttgagattggctg

SEQ ID NO: 166665 - DNA, 25 bp, Probe Sequence
aatcccacacagattattggtgaac

SEQ ID NO: 166666 - DNA, 25 bp, Probe Sequence
aattgccattcgtcctactagtgaa

SEQ ID NO: 166667 - DNA, 25 bp, Probe Sequence
aataccatattgtcaaaatagtcca

SEQ ID NO: 166668 - DNA, 25 bp, Probe Sequence
aatcatgcctatttaatggaacctc

SEQ ID NO: 166669 - DNA, 25 bp, Probe Sequence
aatcaccaaaagcagctgaaactca

SEQ ID NO: 166670 - DNA, 25 bp, Probe Sequence
aataacataaggccactgtaaaatg

SEQ ID NO: 166671 - DNA, 25 bp, Probe Sequence
aataaagcaagggtctgcaccaaaa

SEQ ID NO: 166672 - DNA, 25 bp, Probe Sequence
aataataaatggtgtctctagtgag

SEQ ID NO: 166673 - DNA, 25 bp, Probe Sequence
aattataaatggcacctatactggc

SEQ ID NO: 166674 - DNA, 25 bp, Probe Sequence
aattaaagttgcccctgtaatacat

SEQ ID NO: 166675 - DNA, 25 bp, Probe Sequence
aataaattctatcaccttactacta

SEQ ID NO: 166676 - DNA, 25 bp, Probe Sequence
aataggctttagagcctttcaccta

SEQ ID NO: 166677 - DNA, 25 bp, Probe Sequence
aatcggtattatgtccttctcactt

SEQ ID NO: 166678 - DNA, 25 bp, Probe Sequence
aatcggtattatgtccttctcactt

SEQ ID NO: 166679 - DNA, 25 bp, Probe Sequence
aatcaggtattggcagtttttccat

SEQ ID NO: 166680 - DNA, 25 bp, Probe Sequence
aatcatgctgtgcttgcaggtttgt

SEQ ID NO: 166681 - DNA, 25 bp, Probe Sequence
aatcatcggggtcaggtcagtgtct

SEQ ID NO: 166682 - DNA, 25 bp, Probe Sequence
aatcatggattgctggaggtctttt

SEQ ID NO: 166683 - DNA, 25 bp, Probe Sequence
aatctgtgctgtgggtctgagtcat

SEQ ID NO: 166684 - DNA, 25 bp, Probe Sequence
aatcttgcgatgtgctttgcttgtt

SEQ ID NO: 166685 - DNA, 25 bp, Probe Sequence
aatcgctcaatatattctttgctat

SEQ ID NO: 166686 - DNA, 25 bp, Probe Sequence
aatctatctaaatttcatccattat

SEQ ID NO: 166687 - DNA, 25 bp, Probe Sequence
aatcacctagaatttagacattttc

SEQ ID NO: 166688 - DNA, 25 bp, Probe Sequence
aatacttaaatgtaagatctgtacc

SEQ ID NO: 166689 - DNA, 25 bp, Probe Sequence
aataccataagtcccagaggtcccg

SEQ ID NO: 166690 - DNA, 25 bp, Probe Sequence
aataccaaagtcgcaagaatggctt

SEQ ID NO: 166691 - DNA, 25 bp, Probe Sequence
aataccataagtactataccatgct

SEQ ID NO: 166692 - DNA, 25 bp, Probe Sequence
aatcatcagtatagtttaacacatt

SEQ ID NO: 166693 - DNA, 25 bp, Probe Sequence
aatctagtttttgacacagtgcatg

SEQ ID NO: 166694 - DNA, 25 bp, Probe Sequence
aatctgagtgttgtccatcagtctg

SEQ ID NO: 166695 - DNA, 25 bp, Probe Sequence
aatctggatgtttccttcatacatt

SEQ ID NO: 166696 - DNA, 25 bp, Probe Sequence
aatcggaattcaagcatctcccatt

SEQ ID NO: 166697 - DNA, 25 bp, Probe Sequence
aatcacagaaattatatcccctttg

SEQ ID NO: 166698 - DNA, 25 bp, Probe Sequence
aatagagaagagagactcggttcta

SEQ ID NO: 166699 - DNA, 25 bp, Probe Sequence
gaaaaaagggaatctggtgtcatgt

SEQ ID NO: 166700 - DNA, 25 bp, Probe Sequence
aataaaagggaatctcagtgtctgt

SEQ ID NO: 166701 - DNA, 25 bp, Probe Sequence
aatcaaaagggccagtgtcgttatt

SEQ ID NO: 166702 - DNA, 25 bp, Probe Sequence
aataatatcggccgctgtttgtaca

SEQ ID NO: 166703 - DNA, 25 bp, Probe Sequence
aataatgcacagggcttgagctttc

SEQ ID NO: 166704 - DNA, 25 bp, Probe Sequence
aataagccatgagcttcgttctacg

SEQ ID NO: 166705 - DNA, 25 bp, Probe Sequence
aataaccaatatatcgtgtatccga

SEQ ID NO: 166706 - DNA, 25 bp, Probe Sequence
attgctatttatattcattcagata

SEQ ID NO: 166707 - DNA, 25 bp, Probe Sequence
aataaagcctgaattctgatcaata

SEQ ID NO: 166708 - DNA, 25 bp, Probe Sequence
aatcatttgctcatttttaatttgg

SEQ ID NO: 166709 - DNA, 25 bp, Probe Sequence
aatcttattcacagttgttattgtt

SEQ ID NO: 166710 - DNA, 25 bp, Probe Sequence
aatcactactagaccgtttaatttg

SEQ ID NO: 166711 - DNA, 25 bp, Probe Sequence
aatcccactggatcatgatgtattt

SEQ ID NO: 166712 - DNA, 25 bp, Probe Sequence
aataggaggacatcaatgtattgat

SEQ ID NO: 166713 - DNA, 25 bp, Probe Sequence
aatagcctgtgagtccaagtaaatg

SEQ ID NO: 166714 - DNA, 25 bp, Probe Sequence
aatagccgattcgatcaagtggaag

SEQ ID NO: 166715 - DNA, 25 bp, Probe Sequence
aatcaactggtcgtgatgcctgggg

SEQ ID NO: 166716 - DNA, 25 bp, Probe Sequence
aatcaccttgctgctgattacacgg

SEQ ID NO: 166717 - DNA, 25 bp, Probe Sequence
cttgaccggtcttgttcacataggc

SEQ ID NO: 166718 - DNA, 25 bp, Probe Sequence
cattaccaggtttcattttgggcct

SEQ ID NO: 166719 - DNA, 25 bp, Probe Sequence
aatacagcgttttattaagtagctt

SEQ ID NO: 166720 - DNA, 25 bp, Probe Sequence
aatagaggttattctgtaatggaaa

SEQ ID NO: 166721 - DNA, 25 bp, Probe Sequence
aatagagggcttttgtaaattatgc

SEQ ID NO: 166722 - DNA, 25 bp, Probe Sequence
aataatggggtcttgggcatttcac

SEQ ID NO: 166723 - DNA, 25 bp, Probe Sequence
aataatagggatttgtcagcattta

SEQ ID NO: 166724 - DNA, 25 bp, Probe Sequence
aataagacgacgcctgtggcatttg

SEQ ID NO: 166725 - DNA, 25 bp, Probe Sequence
aatcaatcctaccaatgctgacatt

SEQ ID NO: 166726 - DNA, 25 bp, Probe Sequence
aatcacacctgcatttgctgaactt

SEQ ID NO: 166727 - DNA, 25 bp, Probe Sequence
aataatttgcctttcaggtcattcc

SEQ ID NO: 166728 - DNA, 25 bp, Probe Sequence
aataatttctctctcatgcaaacct

SEQ ID NO: 166729 - DNA, 25 bp, Probe Sequence
aataatttagttccttattctcatt

SEQ ID NO: 166730 - DNA, 25 bp, Probe Sequence
aatacattcttgagtactacttttc

SEQ ID NO: 166731 - DNA, 25 bp, Probe Sequence
aatacttgcttgtgatgacttggat

SEQ ID NO: 166732 - DNA, 25 bp, Probe Sequence
aatcccatcttgatatactatgaat

SEQ ID NO: 166733 - DNA, 25 bp, Probe Sequence
gaatcctccttgagaagtagtactc

SEQ ID NO: 166734 - DNA, 25 bp, Probe Sequence
aatcttccttttttaatgtacatat

SEQ ID NO: 166735 - DNA, 25 bp, Probe Sequence
aatttcaaatttctaggtgctatat

SEQ ID NO: 166736 - DNA, 25 bp, Probe Sequence
aatcttggtcatgttttggtgtgta

SEQ ID NO: 166737 - DNA, 25 bp, Probe Sequence
aatctctgaggaatttgttttcgcc

SEQ ID NO: 166738 - DNA, 25 bp, Probe Sequence
aatcattgggtcattcgtctgtgga

SEQ ID NO: 166739 - DNA, 25 bp, Probe Sequence
aatcgtttcatcattcggcgtgcga

SEQ ID NO: 166740 - DNA, 25 bp, Probe Sequence
aatcgtttcatcattcggcgtgcga

SEQ ID NO: 166741 - DNA, 25 bp, Probe Sequence
aatcgatttctctttagtcgttggt

SEQ ID NO: 166742 - DNA, 25 bp, Probe Sequence
aatagtattatctaacctggttggt

SEQ ID NO: 166743 - DNA, 25 bp, Probe Sequence
aatcagtgtaacttatacatggcct

SEQ ID NO: 166744 - DNA, 25 bp, Probe Sequence
aatcagctttcatctataattcatt

SEQ ID NO: 166745 - DNA, 25 bp, Probe Sequence
aatacatttcagtttagttctgtaa

SEQ ID NO: 166746 - DNA, 25 bp, Probe Sequence
aatcatattccagttcttattgtgt

SEQ ID NO: 166747 - DNA, 25 bp, Probe Sequence
aatcagcactctttattgtttggtg

SEQ ID NO: 166748 - DNA, 25 bp, Probe Sequence
aataattattacattttgactacca

SEQ ID NO: 166749 - DNA, 25 bp, Probe Sequence
aatacactgttaccttttgactgta

SEQ ID NO: 166750 - DNA, 25 bp, Probe Sequence
aatacacagttatcctttcacagtg

SEQ ID NO: 166751 - DNA, 25 bp, Probe Sequence
aatagccagtgctagttctgaccca

SEQ ID NO: 166752 - DNA, 25 bp, Probe Sequence
aatagccttgcatgttgtagttaga

SEQ ID NO: 166753 - DNA, 25 bp, Probe Sequence
aatcttcgtcattgtcttaaagtca

SEQ ID NO: 166754 - DNA, 25 bp, Probe Sequence
aatctctcgctttgttgtcaaacac

SEQ ID NO: 166755 - DNA, 25 bp, Probe Sequence
aatcttcactatcatgtctaaaatt

SEQ ID NO: 166756 - DNA, 25 bp, Probe Sequence
aatcttacacatgtgttgaagacat

SEQ ID NO: 166757 - DNA, 25 bp, Probe Sequence
aatactacaaggtttagacagtcca

SEQ ID NO: 166758 - DNA, 25 bp, Probe Sequence
aataacttcggacttatactgatcc

SEQ ID NO: 166759 - DNA, 25 bp, Probe Sequence
aataagcttcttggttctacttctc

SEQ ID NO: 166760 - DNA, 25 bp, Probe Sequence
caataaaacttggcctccacgatcc

SEQ ID NO: 166761 - DNA, 25 bp, Probe Sequence
caaactaacccagactccaagtctt

SEQ ID NO: 166762 - DNA, 25 bp, Probe Sequence
aattaaaatccagcatcccaagatc

SEQ ID NO: 166763 - DNA, 25 bp, Probe Sequence
aataaatcaagccaggtcctccaag

SEQ ID NO: 166764 - DNA, 25 bp, Probe Sequence
aatagacattagacagggacctgaa

SEQ ID NO: 166765 - DNA, 25 bp, Probe Sequence
aatagcaatcttggctgatgtgcac

SEQ ID NO: 166766 - DNA, 25 bp, Probe Sequence
aatcaaatgcttcctactcagcgtg

SEQ ID NO: 166767 - DNA, 25 bp, Probe Sequence
aatcgatcatgctttcttcaaggtg

SEQ ID NO: 166768 - DNA, 25 bp, Probe Sequence
aatctacagctgctttacaggctgc

SEQ ID NO: 166769 - DNA, 25 bp, Probe Sequence
aatctgcaccttatagactgatgtc

SEQ ID NO: 166770 - DNA, 25 bp, Probe Sequence
aatctagacttaagaggctctgctc

SEQ ID NO: 166771 - DNA, 25 bp, Probe Sequence
aatcatcatactctagaatcttgtc

SEQ ID NO: 166772 - DNA, 25 bp, Probe Sequence
aatctatgactcccaatatcttcta

SEQ ID NO: 166773 - DNA, 25 bp, Probe Sequence
aatcttgtcttgcgttttctaaatc

SEQ ID NO: 166774 - DNA, 25 bp, Probe Sequence
aatctgttttctcatttttatcaaa

SEQ ID NO: 166775 - DNA, 25 bp, Probe Sequence
aatctgttttctcatttttatcaaa

SEQ ID NO: 166776 - DNA, 25 bp, Probe Sequence
aatctgttttggctttatgtgcaaa

SEQ ID NO: 166777 - DNA, 25 bp, Probe Sequence
aatctgttttgagtctttacaaaat

SEQ ID NO: 166778 - DNA, 25 bp, Probe Sequence
aatcgttcatagacttctgtaaaat

SEQ ID NO: 166779 - DNA, 25 bp, Probe Sequence
aatctttctggaattccgagagaat

SEQ ID NO: 166780 - DNA, 25 bp, Probe Sequence
aatcttcttagagttgcagggacaa

SEQ ID NO: 166781 - DNA, 25 bp, Probe Sequence
aatcatattttagctgcacggcatt

SEQ ID NO: 166782 - DNA, 25 bp, Probe Sequence
aatacgttcgcaactcacggatgat

SEQ ID NO: 166783 - DNA, 25 bp, Probe Sequence
aatagcgtgtcgacgctggctgcta

SEQ ID NO: 166784 - DNA, 25 bp, Probe Sequence
aatctcgtctcgaccaagagctgaa

SEQ ID NO: 166785 - DNA, 25 bp, Probe Sequence
aatctgagatctccctccagggaat

SEQ ID NO: 166786 - DNA, 25 bp, Probe Sequence
aatcatgactcagtccccgaggaat

SEQ ID NO: 166787 - DNA, 25 bp, Probe Sequence
aatcacactagctcaccagcagtga

SEQ ID NO: 166788 - DNA, 25 bp, Probe Sequence
aataagcaatgctgaacatcaggaa

SEQ ID NO: 166789 - DNA, 25 bp, Probe Sequence
aatacaaatccgtccttgcagaaac

SEQ ID NO: 166790 - DNA, 25 bp, Probe Sequence
aatacaactctggcacctataacaa

SEQ ID NO: 166791 - DNA, 25 bp, Probe Sequence
aataagatgttcaccatgtaaatgc

SEQ ID NO: 166792 - DNA, 25 bp, Probe Sequence
aatattgcaaccaccagacaaatct

SEQ ID NO: 166793 - DNA, 25 bp, Probe Sequence
aatcaggacctcactcagaaagact

SEQ ID NO: 166794 - DNA, 25 bp, Probe Sequence
aatcaggtagcagtcctaaatggac

SEQ ID NO: 166795 - DNA, 25 bp, Probe Sequence
aatctggtgtcactctctaaatgac

SEQ ID NO: 166796 - DNA, 25 bp, Probe Sequence
aatctgaagctcctcgcaggagaga

SEQ ID NO: 166797 - DNA, 25 bp, Probe Sequence
aatcacaaggtgcatgccatgagag

SEQ ID NO: 166798 - DNA, 25 bp, Probe Sequence
aatctaagcagccactggctgatga

SEQ ID NO: 166799 - DNA, 25 bp, Probe Sequence
aatctgaatagcaactgtctgactt

SEQ ID NO: 166800 - DNA, 25 bp, Probe Sequence
aatctaatatatccttctgttgccc

SEQ ID NO: 166801 - DNA, 25 bp, Probe Sequence
aatcttttgatgcctactactgcgc

SEQ ID NO: 166802 - DNA, 25 bp, Probe Sequence
aatcttttggtttctcactgcatat

SEQ ID NO: 166803 - DNA, 25 bp, Probe Sequence
aatctgaagaggcttctcctgtttt

SEQ ID NO: 166804 - DNA, 25 bp, Probe Sequence
aatcatataatgcagttactagttt

SEQ ID NO: 166805 - DNA, 25 bp, Probe Sequence
aatctataatctccttccagatatc

SEQ ID NO: 166806 - DNA, 25 bp, Probe Sequence
aatctatcaattacagtccgtccac

SEQ ID NO: 166807 - DNA, 25 bp, Probe Sequence
aatcttcctgctaaggccattggac

SEQ ID NO: 166808 - DNA, 25 bp, Probe Sequence
aatctttctccaatgatcctatgag

SEQ ID NO: 166809 - DNA, 25 bp, Probe Sequence
aatctatatgctgcacccacttaat

SEQ ID NO: 166810 - DNA, 25 bp, Probe Sequence
aatcagaatttcaatccacattaga

SEQ ID NO: 166811 - DNA, 25 bp, Probe Sequence
aatctgaatttgcattccatggtgt

SEQ ID NO: 166812 - DNA, 25 bp, Probe Sequence
aatctgagttttacaccatactgtt

SEQ ID NO: 166813 - DNA, 25 bp, Probe Sequence
aatctgaaattactgaacaactcct

SEQ ID NO: 166814 - DNA, 25 bp, Probe Sequence
aatcagttcttacacaatatcccgc

SEQ ID NO: 166815 - DNA, 25 bp, Probe Sequence
aatctggctctcaagaacagatttc

SEQ ID NO: 166816 - DNA, 25 bp, Probe Sequence
aatcagcagctcaagaagaatttct

SEQ ID NO: 166817 - DNA, 25 bp, Probe Sequence
aatcacatgatctgaggaccattca

SEQ ID NO: 166818 - DNA, 25 bp, Probe Sequence
aatactatgcaggcaagacaccata

SEQ ID NO: 166819 - DNA, 25 bp, Probe Sequence
aatcacggtgccaaaattcattttc

SEQ ID NO: 166820 - DNA, 25 bp, Probe Sequence
aatactggtctgcatcaagtttaat

SEQ ID NO: 166821 - DNA, 25 bp, Probe Sequence
aatacagtggatctgaatttattat

SEQ ID NO: 166822 - DNA, 25 bp, Probe Sequence
aatactgtggaaaattgcgttgata

SEQ ID NO: 166823 - DNA, 25 bp, Probe Sequence
aatctttgtgaaatagtggttgtgg

SEQ ID NO: 166824 - DNA, 25 bp, Probe Sequence
aatcttctgttttaccatcaagatg

SEQ ID NO: 166825 - DNA, 25 bp, Probe Sequence
aatcttttctattgacaacaacaaa

SEQ ID NO: 166826 - DNA, 25 bp, Probe Sequence
aatatccttcgttataaccacaatg

SEQ ID NO: 166827 - DNA, 25 bp, Probe Sequence
aatcacccttgtcacaaacaatatt

SEQ ID NO: 166828 - DNA, 25 bp, Probe Sequence
aatcacctcattcttcatttcagat

SEQ ID NO: 166829 - DNA, 25 bp, Probe Sequence
aatactgcacaaacttggttagttc

SEQ ID NO: 166830 - DNA, 25 bp, Probe Sequence
aatcttgcataaacttgtcatgtca

SEQ ID NO: 166831 - DNA, 25 bp, Probe Sequence
aatctgtgtgcatgactatgtgctt

SEQ ID NO: 166832 - DNA, 25 bp, Probe Sequence
aatcatgtgctgccaactgagttat

SEQ ID NO: 166833 - DNA, 25 bp, Probe Sequence
aatagcgatcgctgccaggatatac

SEQ ID NO: 166834 - DNA, 25 bp, Probe Sequence
aatagcgacgcgctggcgttacagc

SEQ ID NO: 166835 - DNA, 25 bp, Probe Sequence
caatagcgacgcgctggcgttacag

SEQ ID NO: 166836 - DNA, 25 bp, Probe Sequence
aatcaggtgcccctgtctgttattc

SEQ ID NO: 166837 - DNA, 25 bp, Probe Sequence
aataggacactcaagacttttgact

SEQ ID NO: 166838 - DNA, 25 bp, Probe Sequence
aatacaacattcaatacttccaggt

SEQ ID NO: 166839 - DNA, 25 bp, Probe Sequence
aatacagacatttctaccctcagtt

SEQ ID NO: 166840 - DNA, 25 bp, Probe Sequence
aatcattacatttctatttcttggt

SEQ ID NO: 166841 - DNA, 25 bp, Probe Sequence
aatctctattgtatattgttctttg

SEQ ID NO: 166842 - DNA, 25 bp, Probe Sequence
aatcttgaagtcatttttgctattg

SEQ ID NO: 166843 - DNA, 25 bp, Probe Sequence
aatctctaagtatttctctgagcgt

SEQ ID NO: 166844 - DNA, 25 bp, Probe Sequence
aatcttagagattgcttatcgaaat

SEQ ID NO: 166845 - DNA, 25 bp, Probe Sequence
aatcattgatgatagcttggaaata

SEQ ID NO: 166846 - DNA, 25 bp, Probe Sequence
aatcatgtcagtctgcttagaaata

SEQ ID NO: 166847 - DNA, 25 bp, Probe Sequence
aatcatgacttacctgctaataaaa

SEQ ID NO: 166848 - DNA, 25 bp, Probe Sequence
aatctgcactttctaaatatcaaaa

SEQ ID NO: 166849 - DNA, 25 bp, Probe Sequence
aatctctcctatctgagaaatccag

SEQ ID NO: 166850 - DNA, 25 bp, Probe Sequence
aatctcaggcttctggtgtatcggt

SEQ ID NO: 166851 - DNA, 25 bp, Probe Sequence
aatcaaggcttgctggagtgtctcc

SEQ ID NO: 166852 - DNA, 25 bp, Probe Sequence
aataaggttggtagtctgtgcctct

SEQ ID NO: 166853 - DNA, 25 bp, Probe Sequence
aataagacattagctgtctaggcgt

SEQ ID NO: 166854 - DNA, 25 bp, Probe Sequence
aataggtgttagtttctcaggagta

SEQ ID NO: 166855 - DNA, 25 bp, Probe Sequence
aatagttttacatattcgtggatat

SEQ ID NO: 166856 - DNA, 25 bp, Probe Sequence
aatagtctttctcaactgttggcta

SEQ ID NO: 166857 - DNA, 25 bp, Probe Sequence
caatcagccatttctgtgaactgtg

SEQ ID NO: 166858 - DNA, 25 bp, Probe Sequence
aatcagctcactggttgtcactgtt

SEQ ID NO: 166859 - DNA, 25 bp, Probe Sequence
aatcatcaacataatgtatcacatt

SEQ ID NO: 166860 - DNA, 25 bp, Probe Sequence
aatcatgagacattagtgacttcgt

SEQ ID NO: 166861 - DNA, 25 bp, Probe Sequence
aatcttgacacatctgatatccagt

SEQ ID NO: 166862 - DNA, 25 bp, Probe Sequence
aatcttggttgagtgaatgaagtac

SEQ ID NO: 166863 - DNA, 25 bp, Probe Sequence
aatcagtggttgcgaaggaatatca

SEQ ID NO: 166864 - DNA, 25 bp, Probe Sequence
aatcagtggtggaagaacggtctca

SEQ ID NO: 166865 - DNA, 25 bp, Probe Sequence
aatcagtggtggaagaacggtctca

SEQ ID NO: 166866 - DNA, 25 bp, Probe Sequence
aatcagtggtggaagaacggtctca

SEQ ID NO: 166867 - DNA, 25 bp, Probe Sequence
aatcagtggtggaagaacggtctca

SEQ ID NO: 166868 - DNA, 25 bp, Probe Sequence
aatcactgagacttaaccgtgtcca

SEQ ID NO: 166869 - DNA, 25 bp, Probe Sequence
aatacattgatctgtcaaacttcca

SEQ ID NO: 166870 - DNA, 25 bp, Probe Sequence
aatcaattaccgccaattcttcaca

SEQ ID NO: 166871 - DNA, 25 bp, Probe Sequence
aatcaattaccgccaattcttcaca

SEQ ID NO: 166872 - DNA, 25 bp, Probe Sequence
aatcaattaccgccaattcttcaca

SEQ ID NO: 166873 - DNA, 25 bp, Probe Sequence
aatagtttccatcatgagtctatca

SEQ ID NO: 166874 - DNA, 25 bp, Probe Sequence
aatagctttctactgaccctaagtc

SEQ ID NO: 166875 - DNA, 25 bp, Probe Sequence
aatacctacatgatgggcccaaact

SEQ ID NO: 166876 - DNA, 25 bp, Probe Sequence
aatacttgcatcacagtggccgaca

SEQ ID NO: 166877 - DNA, 25 bp, Probe Sequence
aatagttgctaccgatagggacttt

SEQ ID NO: 166878 - DNA, 25 bp, Probe Sequence
aatacaccacacctatagggagttt

SEQ ID NO: 166879 - DNA, 25 bp, Probe Sequence
aatcagctaaccctaagctagaggt

SEQ ID NO: 166880 - DNA, 25 bp, Probe Sequence
aatacaacacacccaaatacaggat

SEQ ID NO: 166881 - DNA, 25 bp, Probe Sequence
caatgccaaaaccctaagtactatt

SEQ ID NO: 166882 - DNA, 25 bp, Probe Sequence
caatcacaaaatgactcaacccttt

SEQ ID NO: 166883 - DNA, 25 bp, Probe Sequence
aatagcaaaattatcaagagccttt

SEQ ID NO: 166884 - DNA, 25 bp, Probe Sequence
aatagcccactaatccaaactctaa

SEQ ID NO: 166885 - DNA, 25 bp, Probe Sequence
aataatcagccttgcataaaactta

SEQ ID NO: 166886 - DNA, 25 bp, Probe Sequence
aatacatcacatcagcagaatgaag

SEQ ID NO: 166887 - DNA, 25 bp, Probe Sequence
aatcacatatctcataaggaattag

SEQ ID NO: 166888 - DNA, 25 bp, Probe Sequence
caatgacaatctggagaagggactc

SEQ ID NO: 166889 - DNA, 25 bp, Probe Sequence
aatcaacatgctggtgaaggtgaaa

SEQ ID NO: 166890 - DNA, 25 bp, Probe Sequence
caatcaacatgctggtgaaggtgaa

SEQ ID NO: 166891 - DNA, 25 bp, Probe Sequence
caaaaatctatctgaatttggaatt

SEQ ID NO: 166892 - DNA, 25 bp, Probe Sequence
gaaccaaggagctgacttcggaact

SEQ ID NO: 166893 - DNA, 25 bp, Probe Sequence
aatctacgtgactggttgcgcgtag

SEQ ID NO: 166894 - DNA, 25 bp, Probe Sequence
aatcttttgcactaagtcatgctgt

SEQ ID NO: 166895 - DNA, 25 bp, Probe Sequence
caatcattttgacaacctgtatccc

SEQ ID NO: 166896 - DNA, 25 bp, Probe Sequence
aatctcttctagagcacctgctatc

SEQ ID NO: 166897 - DNA, 25 bp, Probe Sequence
aatctctcatttagacctggcttct

SEQ ID NO: 166898 - DNA, 25 bp, Probe Sequence
caattgctcgctggacaacggcggc

SEQ ID NO: 166899 - DNA, 25 bp, Probe Sequence
aatcttcagcgaaaacaggcggcga

SEQ ID NO: 166900 - DNA, 25 bp, Probe Sequence
aatctaacgtaattagtcatcgcta

SEQ ID NO: 166901 - DNA, 25 bp, Probe Sequence
aattccggaacattttcaagcagat

SEQ ID NO: 166902 - DNA, 25 bp, Probe Sequence
aattcctggactttcaatcaacttt

SEQ ID NO: 166903 - DNA, 25 bp, Probe Sequence
aattctagtacctgaaatcctttca

SEQ ID NO: 166904 - DNA, 25 bp, Probe Sequence
aatatctgaaaccatgtaaatcctg

SEQ ID NO: 166905 - DNA, 25 bp, Probe Sequence
aatatttcataccgtttgatccagt

SEQ ID NO: 166906 - DNA, 25 bp, Probe Sequence
aatatttcttggggtggaccaggcg

SEQ ID NO: 166907 - DNA, 25 bp, Probe Sequence
aatattttggttgtgagctgggagc

SEQ ID NO: 166908 - DNA, 25 bp, Probe Sequence
aatattttttggtagcatctggtag

SEQ ID NO: 166909 - DNA, 25 bp, Probe Sequence
aatcttgctttgtgtatctcattta

SEQ ID NO: 166910 - DNA, 25 bp, Probe Sequence
aatctattgtgtttttcttctgcca

SEQ ID NO: 166911 - DNA, 25 bp, Probe Sequence
aatctattgtgtttttcttctgcca

SEQ ID NO: 166912 - DNA, 25 bp, Probe Sequence
aatctatcttactgtggttctccat

SEQ ID NO: 166913 - DNA, 25 bp, Probe Sequence
aatctactttaggactggatcccat

SEQ ID NO: 166914 - DNA, 25 bp, Probe Sequence
aattaattctcagattcctgcccca

SEQ ID NO: 166915 - DNA, 25 bp, Probe Sequence
aatttgatttcctgggatgcaccca

SEQ ID NO: 166916 - DNA, 25 bp, Probe Sequence
aatcttcactgacctagggacactc

SEQ ID NO: 166917 - DNA, 25 bp, Probe Sequence
aatcttgctctgagatggggaacag

SEQ ID NO: 166918 - DNA, 25 bp, Probe Sequence
aatatactgcgggttggaaagggat

SEQ ID NO: 166919 - DNA, 25 bp, Probe Sequence
aattcactccccagtacaaaggaca

SEQ ID NO: 166920 - DNA, 25 bp, Probe Sequence
aatacacccctcattagttaaggat

SEQ ID NO: 166921 - DNA, 25 bp, Probe Sequence
aataatgtacccatgtagactagca

SEQ ID NO: 166922 - DNA, 25 bp, Probe Sequence
aatcaattactaggtcaagatctag

SEQ ID NO: 166923 - DNA, 25 bp, Probe Sequence
aatacttactatgtatcaggcatct

SEQ ID NO: 166924 - DNA, 25 bp, Probe Sequence
aataataacctggaaagagcactgg

SEQ ID NO: 166925 - DNA, 25 bp, Probe Sequence
aataaaatctccacaaggcatcttg

SEQ ID NO: 166926 - DNA, 25 bp, Probe Sequence
aataaaatcctctttacacactctg

SEQ ID NO: 166927 - DNA, 25 bp, Probe Sequence
aataaagccctaattaattcatctt

SEQ ID NO: 166928 - DNA, 25 bp, Probe Sequence
aataaaccattgtttcttcaattgt

SEQ ID NO: 166929 - DNA, 25 bp, Probe Sequence
aataaactattctctctgtcataaa

SEQ ID NO: 166930 - DNA, 25 bp, Probe Sequence
aatacaactgttcaatggaaataga

SEQ ID NO: 166931 - DNA, 25 bp, Probe Sequence
aatacaactctgcgacagagggaaa

SEQ ID NO: 166932 - DNA, 25 bp, Probe Sequence
aatacaaatctgtgtcagcatttgc

SEQ ID NO: 166933 - DNA, 25 bp, Probe Sequence
aatcactcaactttgaagtcttcaa

SEQ ID NO: 166934 - DNA, 25 bp, Probe Sequence
aatcaccaagatgctgaaattttct

SEQ ID NO: 166935 - DNA, 25 bp, Probe Sequence
aatagtcaattttaaagtttctctg

SEQ ID NO: 166936 - DNA, 25 bp, Probe Sequence
aatagcacagtttggaaacttgtct

SEQ ID NO: 166937 - DNA, 25 bp, Probe Sequence
aatagagatttggaacgacttgttg

SEQ ID NO: 166938 - DNA, 25 bp, Probe Sequence
aataggatctttgaccagcactgtt

SEQ ID NO: 166939 - DNA, 25 bp, Probe Sequence
aatcttgacatttgaaccatgttgt

SEQ ID NO: 166940 - DNA, 25 bp, Probe Sequence
aatcacttcatatatcacgtgctgt

SEQ ID NO: 166941 - DNA, 25 bp, Probe Sequence
aatcacgacttctatgcacgttatt

SEQ ID NO: 166942 - DNA, 25 bp, Probe Sequence
aatagaagcttcttgctcctgttta

SEQ ID NO: 166943 - DNA, 25 bp, Probe Sequence
aatagacaaggacggccattttcac

SEQ ID NO: 166944 - DNA, 25 bp, Probe Sequence
aataggcaaatgtggaattcctcac

SEQ ID NO: 166945 - DNA, 25 bp, Probe Sequence
aataggtacattgaaattccaactt

SEQ ID NO: 166946 - DNA, 25 bp, Probe Sequence
aatatgagtgccatgcatccaattc

SEQ ID NO: 166947 - DNA, 25 bp, Probe Sequence
aatcatgtctacataactttcgtaa

SEQ ID NO: 166948 - DNA, 25 bp, Probe Sequence
aatagtctaccttaattcagcctag

SEQ ID NO: 166949 - DNA, 25 bp, Probe Sequence
aataacatccctgaattcaggcatt

SEQ ID NO: 166950 - DNA, 25 bp, Probe Sequence
aataaatgaactcaatctaaattaa

SEQ ID NO: 166951 - DNA, 25 bp, Probe Sequence
aatcaaaaattttcactacagacta

SEQ ID NO: 166952 - DNA, 25 bp, Probe Sequence
aataatactgattttactacaggga

SEQ ID NO: 166953 - DNA, 25 bp, Probe Sequence
aataaaagtgccatgttacagtcaa

SEQ ID NO: 166954 - DNA, 25 bp, Probe Sequence
aataataattccagcttctacacag

SEQ ID NO: 166955 - DNA, 25 bp, Probe Sequence
aatcactacagttctcagatttaca

SEQ ID NO: 166956 - DNA, 25 bp, Probe Sequence
aatacaacatgtagctgagtttaac

SEQ ID NO: 166957 - DNA, 25 bp, Probe Sequence
aatcacaactcaagcagcattttag

SEQ ID NO: 166958 - DNA, 25 bp, Probe Sequence
aatcagatagccagactgccttctg

SEQ ID NO: 166959 - DNA, 25 bp, Probe Sequence
aatagattgctcaaatcaggttttc

SEQ ID NO: 166960 - DNA, 25 bp, Probe Sequence
aataagtcttattcagtcatcggtg

SEQ ID NO: 166961 - DNA, 25 bp, Probe Sequence
aataatgctttgccagcagtacgtg

SEQ ID NO: 166962 - DNA, 25 bp, Probe Sequence
aatcagttgttggagcactgaccag

SEQ ID NO: 166963 - DNA, 25 bp, Probe Sequence
aatcagtcattcatagcactatatc

SEQ ID NO: 166964 - DNA, 25 bp, Probe Sequence
aatagtgcattcctttttattgtgg

SEQ ID NO: 166965 - DNA, 25 bp, Probe Sequence
aatcacatcactagcacttttattt

SEQ ID NO: 166966 - DNA, 25 bp, Probe Sequence
aatcatctcatcagacctttatcat

SEQ ID NO: 166967 - DNA, 25 bp, Probe Sequence
aatcatcttggccactttaatagtt

SEQ ID NO: 166968 - DNA, 25 bp, Probe Sequence
aatactttgcttgtaaacagatgtg

SEQ ID NO: 166969 - DNA, 25 bp, Probe Sequence
aatactttgcctttttcactgtgta

SEQ ID NO: 166970 - DNA, 25 bp, Probe Sequence
aatcagttcttatctttcatctgtt

SEQ ID NO: 166971 - DNA, 25 bp, Probe Sequence
aatcagactggaaacgggactttct

SEQ ID NO: 166972 - DNA, 25 bp, Probe Sequence
aatagactgagtcagatgggtctga

SEQ ID NO: 166973 - DNA, 25 bp, Probe Sequence
aataaccagtcttttgtgtccagct

SEQ ID NO: 166974 - DNA, 25 bp, Probe Sequence
aatcaacgtggcctttgagttcagt

SEQ ID NO: 166975 - DNA, 25 bp, Probe Sequence
aatacacctgtggttaaatctgcct

SEQ ID NO: 166976 - DNA, 25 bp, Probe Sequence
aatatctgactgaaattaaacgagc

SEQ ID NO: 166977 - DNA, 25 bp, Probe Sequence
aatactttgaattgtaactccatat

SEQ ID NO: 166978 - DNA, 25 bp, Probe Sequence
aatactttggtactcaattgtcagt

SEQ ID NO: 166979 - DNA, 25 bp, Probe Sequence
aataagtctgtttgtcatatttaag

SEQ ID NO: 166980 - DNA, 25 bp, Probe Sequence
aatactgtgctgtgagttgtttcaa

SEQ ID NO: 166981 - DNA, 25 bp, Probe Sequence
aataattgtgggtcttcctatctac

SEQ ID NO: 166982 - DNA, 25 bp, Probe Sequence
aataatatggggtcttgtccttcac

SEQ ID NO: 166983 - DNA, 25 bp, Probe Sequence
aataacgcggagatctgtctcctgc

SEQ ID NO: 166984 - DNA, 25 bp, Probe Sequence
aataactccaagaatctgcactgaa

SEQ ID NO: 166985 - DNA, 25 bp, Probe Sequence
aataccccaagactcccatgaggga

SEQ ID NO: 166986 - DNA, 25 bp, Probe Sequence
aataccccaagactcccatgaggga

SEQ ID NO: 166987 - DNA, 25 bp, Probe Sequence
aatcatgaacctaggccaccatggg

SEQ ID NO: 166988 - DNA, 25 bp, Probe Sequence
aatcacaacgtaactcaatcaggag

SEQ ID NO: 166989 - DNA, 25 bp, Probe Sequence
aatcataatttcaactagatcaaga

SEQ ID NO: 166990 - DNA, 25 bp, Probe Sequence
aatcatctatattcacctaaccata

SEQ ID NO: 166991 - DNA, 25 bp, Probe Sequence
aatcttttgtcaacttcctgattat

SEQ ID NO: 166992 - DNA, 25 bp, Probe Sequence
aatcttttaatgtatttgtttgcaa

SEQ ID NO: 166993 - DNA, 25 bp, Probe Sequence
aatcttattttattcattgacttga

SEQ ID NO: 166994 - DNA, 25 bp, Probe Sequence
aatcacttttctagacatctaccta

SEQ ID NO: 166995 - DNA, 25 bp, Probe Sequence
aatcaccttctaaagatctcacctg

SEQ ID NO: 166996 - DNA, 25 bp, Probe Sequence
aatcacccaatcaaagtccaatctt

SEQ ID NO: 166997 - DNA, 25 bp, Probe Sequence
aatcacaccatttcatacttcaact

SEQ ID NO: 166998 - DNA, 25 bp, Probe Sequence
aatacactgatttattctgttacta

SEQ ID NO: 166999 - DNA, 25 bp, Probe Sequence
aatcatatctttttcctatctatct

SEQ ID NO: 167000 - DNA, 25 bp, Probe Sequence
aatcatatctttttcctatctatct

SEQ ID NO: 167001 - DNA, 25 bp, Probe Sequence
aatcatatctttttcctatctatct

SEQ ID NO: 167002 - DNA, 25 bp, Probe Sequence
aatcatatctttttcctatctatct

SEQ ID NO: 167003 - DNA, 25 bp, Probe Sequence
aatcatatctttttcctatctatct

SEQ ID NO: 167004 - DNA, 25 bp, Probe Sequence
aataatttattcccacatctacatc

SEQ ID NO: 167005 - DNA, 25 bp, Probe Sequence
aatagacttgtgtcttcaccttgct

SEQ ID NO: 167006 - DNA, 25 bp, Probe Sequence
aatagttggctgccaatctccctgc

SEQ ID NO: 167007 - DNA, 25 bp, Probe Sequence
aatagttctgtttactttctgcatg

SEQ ID NO: 167008 - DNA, 25 bp, Probe Sequence
aatcttcctgtatatgttaccaata

SEQ ID NO: 167009 - DNA, 25 bp, Probe Sequence
aattttcattcatcaacctctcaat

SEQ ID NO: 167010 - DNA, 25 bp, Probe Sequence
aataaccatgtcaaataccctgttc

SEQ ID NO: 167011 - DNA, 25 bp, Probe Sequence
aatcacaccatgccatgttttcctt

SEQ ID NO: 167012 - DNA, 25 bp, Probe Sequence
aatacccagctgcttagtatcttgg

SEQ ID NO: 167013 - DNA, 25 bp, Probe Sequence
aataacgagctggttcgtaccaaga

SEQ ID NO: 167014 - DNA, 25 bp, Probe Sequence
aataacggctggagcacgtcctaca

SEQ ID NO: 167015 - DNA, 25 bp, Probe Sequence
aataaggtgagcaggcacggcacgg

SEQ ID NO: 167016 - DNA, 25 bp, Probe Sequence
aatacactgagattaggccgggcac

SEQ ID NO: 167017 - DNA, 25 bp, Probe Sequence
aatacaagatggttgccgggtcatg

SEQ ID NO: 167018 - DNA, 25 bp, Probe Sequence
aatacgaatgttaccaggcatggca

SEQ ID NO: 167019 - DNA, 25 bp, Probe Sequence
aataagcaggatttgctcacagcag

SEQ ID NO: 167020 - DNA, 25 bp, Probe Sequence
aatagtgaggaaatccagcagcaga

SEQ ID NO: 167021 - DNA, 25 bp, Probe Sequence
aataatgttttttgcagcagcatga

SEQ ID NO: 167022 - DNA, 25 bp, Probe Sequence
aataatctcttgttatgcagggagt

SEQ ID NO: 167023 - DNA, 25 bp, Probe Sequence
aataactttgttagcagggaggatt

SEQ ID NO: 167024 - DNA, 25 bp, Probe Sequence
aatatcacttaaatcgaggcagaaa

SEQ ID NO: 167025 - DNA, 25 bp, Probe Sequence
aatattactaaccaagctgcgaaaa

SEQ ID NO: 167026 - DNA, 25 bp, Probe Sequence
aattttccaacataatggattaatg

SEQ ID NO: 167027 - DNA, 25 bp, Probe Sequence
aatttcctcaagccagaaggcttta

SEQ ID NO: 167028 - DNA, 25 bp, Probe Sequence
aatcattgtctctggaggcaatttg

SEQ ID NO: 167029 - DNA, 25 bp, Probe Sequence
aatcttgctctgcttgacaacatct

SEQ ID NO: 167030 - DNA, 25 bp, Probe Sequence
aatcttgatctcctgtctcaacaaa

SEQ ID NO: 167031 - DNA, 25 bp, Probe Sequence
aatcattgcatgtgcatggaaacaa

SEQ ID NO: 167032 - DNA, 25 bp, Probe Sequence
aatcttgcataagctgaactaaaat

SEQ ID NO: 167033 - DNA, 25 bp, Probe Sequence
aataatcataatggctatagcaata

SEQ ID NO: 167034 - DNA, 25 bp, Probe Sequence
aataggcataattgctggcaccatt

SEQ ID NO: 167035 - DNA, 25 bp, Probe Sequence
aataatgataatctgtacctgtgat

SEQ ID NO: 167036 - DNA, 25 bp, Probe Sequence
aatcatttaatatttccctgtctta

SEQ ID NO: 167037 - DNA, 25 bp, Probe Sequence
aatcatattgaatgtttccaacctg

SEQ ID NO: 167038 - DNA, 25 bp, Probe Sequence
cagattttaaggctgtagcttgccg

SEQ ID NO: 167039 - DNA, 25 bp, Probe Sequence
aattgttggcgggtttcatgggcgt

SEQ ID NO: 167040 - DNA, 25 bp, Probe Sequence
caatctttggggttttctcctcagt

SEQ ID NO: 167041 - DNA, 25 bp, Probe Sequence
aatcatgcagtatgttcctttccca

SEQ ID NO: 167042 - DNA, 25 bp, Probe Sequence
aatcatgttgattttgctctttaaa

SEQ ID NO: 167043 - DNA, 25 bp, Probe Sequence
caatctcctagaagtgcctgtggaa

SEQ ID NO: 167044 - DNA, 25 bp, Probe Sequence
aatatgactagtggtcttgatgcta

SEQ ID NO: 167045 - DNA, 25 bp, Probe Sequence
aatcatatttgggctattgtatact

SEQ ID NO: 167046 - DNA, 25 bp, Probe Sequence
caattacttggcctcaggtattcct

SEQ ID NO: 167047 - DNA, 25 bp, Probe Sequence
aatatttgggaccacagtatgtcgc

SEQ ID NO: 167048 - DNA, 25 bp, Probe Sequence
aataatctgggacgacaggttcatc

SEQ ID NO: 167049 - DNA, 25 bp, Probe Sequence
aataatggggcacagatgtgttccc

SEQ ID NO: 167050 - DNA, 25 bp, Probe Sequence
aataatggaagccctgtctgtttgc

SEQ ID NO: 167051 - DNA, 25 bp, Probe Sequence
aataattcaggccactgtctccttt

SEQ ID NO: 167052 - DNA, 25 bp, Probe Sequence
aataattatgccccatgaccaagtg

SEQ ID NO: 167053 - DNA, 25 bp, Probe Sequence
aataagtatcttacagacctcaggg

SEQ ID NO: 167054 - DNA, 25 bp, Probe Sequence
aatcatagtatcctaagcatctgta

SEQ ID NO: 167055 - DNA, 25 bp, Probe Sequence
aatcaagatatctcatggcatatta

SEQ ID NO: 167056 - DNA, 25 bp, Probe Sequence
aatacatgaagcttcatgcacttaa

SEQ ID NO: 167057 - DNA, 25 bp, Probe Sequence
aattcaaagcatggacatttagaag

SEQ ID NO: 167058 - DNA, 25 bp, Probe Sequence
aatcatgcaatgtttcactttagaa

SEQ ID NO: 167059 - DNA, 25 bp, Probe Sequence
aatagactacttactactcagcaat

SEQ ID NO: 167060 - DNA, 25 bp, Probe Sequence
aataaatgccttggtacaagaaaag

SEQ ID NO: 167061 - DNA, 25 bp, Probe Sequence
aataatcacctgaagatacacagaa

SEQ ID NO: 167062 - DNA, 25 bp, Probe Sequence
aatcactatccgagcaatcaccagc

SEQ ID NO: 167063 - DNA, 25 bp, Probe Sequence
aattttcagcgttcatacccagcta

SEQ ID NO: 167064 - DNA, 25 bp, Probe Sequence
aattcaacagagtgatcattccagt

SEQ ID NO: 167065 - DNA, 25 bp, Probe Sequence
aatactcagcagattgtcttcccat

SEQ ID NO: 167066 - DNA, 25 bp, Probe Sequence
aataacaagattttcttacctctca

SEQ ID NO: 167067 - DNA, 25 bp, Probe Sequence
aataaaagtgtgttcatattttcac

SEQ ID NO: 167068 - DNA, 25 bp, Probe Sequence
aatagtaaagtggctctatattttc

SEQ ID NO: 167069 - DNA, 25 bp, Probe Sequence
aataataacttcctgtttcattgta

SEQ ID NO: 167070 - DNA, 25 bp, Probe Sequence
aataagaatcatttgctttgagttt

SEQ ID NO: 167071 - DNA, 25 bp, Probe Sequence
aataagggcatctctattagatctt

SEQ ID NO: 167072 - DNA, 25 bp, Probe Sequence
aatacagggcactacagttcagaca

SEQ ID NO: 167073 - DNA, 25 bp, Probe Sequence
aatacggagcgaagcatgtgatcat

SEQ ID NO: 167074 - DNA, 25 bp, Probe Sequence
aataaggagcgaatcctacatccac

SEQ ID NO: 167075 - DNA, 25 bp, Probe Sequence
aataaggatgtgttctctgagaccc

SEQ ID NO: 167076 - DNA, 25 bp, Probe Sequence
aatatggaatgtctcttggaccccc

SEQ ID NO: 167077 - DNA, 25 bp, Probe Sequence
aataggcaatttaatagtgaaacca

SEQ ID NO: 167078 - DNA, 25 bp, Probe Sequence
aatagcccttctaaacgctaatcca

SEQ ID NO: 167079 - DNA, 25 bp, Probe Sequence
aataacctttgcaaaccttcaagct

SEQ ID NO: 167080 - DNA, 25 bp, Probe Sequence
aataacctttgcaaaccttcaagct

SEQ ID NO: 167081 - DNA, 25 bp, Probe Sequence
aatcaacttttgtatactttatcac

SEQ ID NO: 167082 - DNA, 25 bp, Probe Sequence
aatcaccactacggaacttattcac

SEQ ID NO: 167083 - DNA, 25 bp, Probe Sequence
caacttgacccccaaatttgtcaca

SEQ ID NO: 167084 - DNA, 25 bp, Probe Sequence
caagcatgtaacaaaaaaggtgtaa

SEQ ID NO: 167085 - DNA, 25 bp, Probe Sequence
aatcatggcaactccagagcaggtg

SEQ ID NO: 167086 - DNA, 25 bp, Probe Sequence
aatcagtgccactttgcagcagcaa

SEQ ID NO: 167087 - DNA, 25 bp, Probe Sequence
aatcagtgtcacacatgcagatcac

SEQ ID NO: 167088 - DNA, 25 bp, Probe Sequence
aatcagttatcttaagtcagcattt

SEQ ID NO: 167089 - DNA, 25 bp, Probe Sequence
aatcaggaacatttttgcagcttgt

SEQ ID NO: 167090 - DNA, 25 bp, Probe Sequence
aataggtatgaaatgtctacgtgtt

SEQ ID NO: 167091 - DNA, 25 bp, Probe Sequence
aatcagtacatatattgcgatagtg

SEQ ID NO: 167092 - DNA, 25 bp, Probe Sequence
aatcatgtcctttatccagtagcca

SEQ ID NO: 167093 - DNA, 25 bp, Probe Sequence
aatagctcacgttaggcatgaaaca

SEQ ID NO: 167094 - DNA, 25 bp, Probe Sequence
aataccacagcttagtgtaaatgac

SEQ ID NO: 167095 - DNA, 25 bp, Probe Sequence
aataaaccatgatcttgaaagtgcc

SEQ ID NO: 167096 - DNA, 25 bp, Probe Sequence
aatagagaccattgaagataaagtg

SEQ ID NO: 167097 - DNA, 25 bp, Probe Sequence
aatagactccattccagtaatggta

SEQ ID NO: 167098 - DNA, 25 bp, Probe Sequence
aatagactccttcgtgatctgggga

SEQ ID NO: 167099 - DNA, 25 bp, Probe Sequence
aatagattccttcttctgttcattg

SEQ ID NO: 167100 - DNA, 25 bp, Probe Sequence
aatacaccactacattctgttaatc

SEQ ID NO: 167101 - DNA, 25 bp, Probe Sequence
aatagtccaccagtgattctgtaaa

SEQ ID NO: 167102 - DNA, 25 bp, Probe Sequence
aatacttccctcaattctgtaaatt

SEQ ID NO: 167103 - DNA, 25 bp, Probe Sequence
aatcagcttgtattgtttttaaatt

SEQ ID NO: 167104 - DNA, 25 bp, Probe Sequence
aatacttgtcactgttttaagatct

SEQ ID NO: 167105 - DNA, 25 bp, Probe Sequence
aatatcggccgctgtttgtacagac

SEQ ID NO: 167106 - DNA, 25 bp, Probe Sequence
aataaagccagcggtttgattagaa

SEQ ID NO: 167107 - DNA, 25 bp, Probe Sequence
aataaagctcactgttactcgcaaa

SEQ ID NO: 167108 - DNA, 25 bp, Probe Sequence
aatcaaagctattttttgcagcgat

SEQ ID NO: 167109 - DNA, 25 bp, Probe Sequence
aataatatggcaagctttgtgaggc

SEQ ID NO: 167110 - DNA, 25 bp, Probe Sequence
aatagctgtggcacattgtagaggg

SEQ ID NO: 167111 - DNA, 25 bp, Probe Sequence
aatactggcagttcactgtggacag

SEQ ID NO: 167112 - DNA, 25 bp, Probe Sequence
aatacatgcaatcaatagtcctgga

SEQ ID NO: 167113 - DNA, 25 bp, Probe Sequence
aatatgaatcatctacagcctctgc

SEQ ID NO: 167114 - DNA, 25 bp, Probe Sequence
aatatgaatcatctacagcctctgc

SEQ ID NO: 167115 - DNA, 25 bp, Probe Sequence
aatatgctccattatatcctcatcc

SEQ ID NO: 167116 - DNA, 25 bp, Probe Sequence
aatacatgccaggcttccatgtctg

SEQ ID NO: 167117 - DNA, 25 bp, Probe Sequence
aatcagcagtatggtctctttcagg

SEQ ID NO: 167118 - DNA, 25 bp, Probe Sequence
aatcagctgttgcatcttgcttctg

SEQ ID NO: 167119 - DNA, 25 bp, Probe Sequence
aatcagctgttgcatcttgcttctg

SEQ ID NO: 167120 - DNA, 25 bp, Probe Sequence
aatcagctgttgcatcttgcttctg

SEQ ID NO: 167121 - DNA, 25 bp, Probe Sequence
aatagtgaagcaccctgtgtctgca

SEQ ID NO: 167122 - DNA, 25 bp, Probe Sequence
aatagcaaagcagcctacctggagg

SEQ ID NO: 167123 - DNA, 25 bp, Probe Sequence
aatacaaaaattaaccaggcatggt

SEQ ID NO: 167124 - DNA, 25 bp, Probe Sequence
aataataaaattcaccatagcaata

SEQ ID NO: 167125 - DNA, 25 bp, Probe Sequence
aatcacaaaaactccatgaacaaaa

SEQ ID NO: 167126 - DNA, 25 bp, Probe Sequence
aatagcaaagcatcggactgaacca

SEQ ID NO: 167127 - DNA, 25 bp, Probe Sequence
aatagtgacagagtcaggccacccc

SEQ ID NO: 167128 - DNA, 25 bp, Probe Sequence
aatagtgacagagtcaggccacccc

SEQ ID NO: 167129 - DNA, 25 bp, Probe Sequence
aataggtcaaattgtgtcctccatc

SEQ ID NO: 167130 - DNA, 25 bp, Probe Sequence
aataacgcaaatggcttcctctttc

SEQ ID NO: 167131 - DNA, 25 bp, Probe Sequence
aattcagtgaactcttttctcattc

SEQ ID NO: 167132 - DNA, 25 bp, Probe Sequence
aataagacaatatcttctttcctgc

SEQ ID NO: 167133 - DNA, 25 bp, Probe Sequence
aataaagatattccgtgtcttcacc

SEQ ID NO: 167134 - DNA, 25 bp, Probe Sequence
aataccaaatatacaggtttagtat

SEQ ID NO: 167135 - DNA, 25 bp, Probe Sequence
aatacaagagtagcggggtgtggtg

SEQ ID NO: 167136 - DNA, 25 bp, Probe Sequence
aataaaagtatatgtgggctgggtg

SEQ ID NO: 167137 - DNA, 25 bp, Probe Sequence
aattaaatgtttatggccaggtgcg

SEQ ID NO: 167138 - DNA, 25 bp, Probe Sequence
aattttggtaagacggccaggtgcg

SEQ ID NO: 167139 - DNA, 25 bp, Probe Sequence
aatcacttatttttctggctaggct

SEQ ID NO: 167140 - DNA, 25 bp, Probe Sequence
aatatttcatttgtgggccaggcac

SEQ ID NO: 167141 - DNA, 25 bp, Probe Sequence
aatatggtttatggtgggactagca

SEQ ID NO: 167142 - DNA, 25 bp, Probe Sequence
aatagtgctttaggtcaggccaatg

SEQ ID NO: 167143 - DNA, 25 bp, Probe Sequence
aataatgttaaacagtggctgcagg

SEQ ID NO: 167144 - DNA, 25 bp, Probe Sequence
aatatttaattacattgggagcagt

SEQ ID NO: 167145 - DNA, 25 bp, Probe Sequence
aatttgttctctttacgggacagat

SEQ ID NO: 167146 - DNA, 25 bp, Probe Sequence
aattttttgtgtgatggggacactt

SEQ ID NO: 167147 - DNA, 25 bp, Probe Sequence
aatttttagtgttggaactgcctct

SEQ ID NO: 167148 - DNA, 25 bp, Probe Sequence
aattttctaggctgaaagctgtcta

SEQ ID NO: 167149 - DNA, 25 bp, Probe Sequence
aatacttcaagctcagaaactgtgc

SEQ ID NO: 167150 - DNA, 25 bp, Probe Sequence
aatacttcagacacacaacaaggac

SEQ ID NO: 167151 - DNA, 25 bp, Probe Sequence
caatacttcagacacacaacaagga

SEQ ID NO: 167152 - DNA, 25 bp, Probe Sequence
aatagactagaccaagcagaagaaa

SEQ ID NO: 167153 - DNA, 25 bp, Probe Sequence
aataacatagttcatgctgaagaga

SEQ ID NO: 167154 - DNA, 25 bp, Probe Sequence
aataaatagcatctagtacacaaaa

SEQ ID NO: 167155 - DNA, 25 bp, Probe Sequence
aataaagcctttttacacatctcaa

SEQ ID NO: 167156 - DNA, 25 bp, Probe Sequence
aataagactttcattcacattcaca

SEQ ID NO: 167157 - DNA, 25 bp, Probe Sequence
aataagtcttcatttatgcaacaaa

SEQ ID NO: 167158 - DNA, 25 bp, Probe Sequence
aatcaagttgtctctgtgtacagaa

SEQ ID NO: 167159 - DNA, 25 bp, Probe Sequence
aatcaaatgttctctggatggatac

SEQ ID NO: 167160 - DNA, 25 bp, Probe Sequence
aatcacctgtttgtggtcatgctgg

SEQ ID NO: 167161 - DNA, 25 bp, Probe Sequence
aatcacagcttgtgcctcagatcat

SEQ ID NO: 167162 - DNA, 25 bp, Probe Sequence
aatacagctatctcctgatgagcaa

SEQ ID NO: 167163 - DNA, 25 bp, Probe Sequence
aataatgctgattcctgagataaga

SEQ ID NO: 167164 - DNA, 25 bp, Probe Sequence
aataatgctgattcctgagataaga

SEQ ID NO: 167165 - DNA, 25 bp, Probe Sequence
aataatgctcaagatgcctgataaa

SEQ ID NO: 167166 - DNA, 25 bp, Probe Sequence
aataaatacatgttggtgcagaata

SEQ ID NO: 167167 - DNA, 25 bp, Probe Sequence
aatagaaactgtcatgttgagtcat

SEQ ID NO: 167168 - DNA, 25 bp, Probe Sequence
aatacaaagctgttctgtgtgagaa

SEQ ID NO: 167169 - DNA, 25 bp, Probe Sequence
aataaaactgtcttgtgagctgaaa

SEQ ID NO: 167170 - DNA, 25 bp, Probe Sequence
aataaaactgtcttgtgagctgaaa

SEQ ID NO: 167171 - DNA, 25 bp, Probe Sequence
aataaaactgtcttgtgagctgaaa

SEQ ID NO: 167172 - DNA, 25 bp, Probe Sequence
aataaacatgtgccctcaggccaaa

SEQ ID NO: 167173 - DNA, 25 bp, Probe Sequence
aatagaattggccccatggcttgat

SEQ ID NO: 167174 - DNA, 25 bp, Probe Sequence
aatcaatatttcaagcctagttgct

SEQ ID NO: 167175 - DNA, 25 bp, Probe Sequence
aatagcatctagaaagccatgagtt

SEQ ID NO: 167176 - DNA, 25 bp, Probe Sequence
aatacattgtgaatgactgcatagt

SEQ ID NO: 167177 - DNA, 25 bp, Probe Sequence
aatcacgcgatgttgactgcacagg

SEQ ID NO: 167178 - DNA, 25 bp, Probe Sequence
aatactgcgatgctgagtcgggctc

SEQ ID NO: 167179 - DNA, 25 bp, Probe Sequence
aatagctcagtcctgcagtttgact

SEQ ID NO: 167180 - DNA, 25 bp, Probe Sequence
aatatgcactgtccatcatgtttat

SEQ ID NO: 167181 - DNA, 25 bp, Probe Sequence
aatagcagcttttgtgtcattctcc

SEQ ID NO: 167182 - DNA, 25 bp, Probe Sequence
aatacagccatcgtgggctctacca

SEQ ID NO: 167183 - DNA, 25 bp, Probe Sequence
aatagttacagtcggcatcaaccaa

SEQ ID NO: 167184 - DNA, 25 bp, Probe Sequence
aatactttcaggcctgctctacaaa

SEQ ID NO: 167185 - DNA, 25 bp, Probe Sequence
aatacattctcaggcatgtttgcaa

SEQ ID NO: 167186 - DNA, 25 bp, Probe Sequence
aatagatgtctgttcatgtgttaag

SEQ ID NO: 167187 - DNA, 25 bp, Probe Sequence
aatacagttctgtcatatgttaagc

SEQ ID NO: 167188 - DNA, 25 bp, Probe Sequence
aataacttctgtcatatctcatcct

SEQ ID NO: 167189 - DNA, 25 bp, Probe Sequence
aataatcgtgtccaccattctcact

SEQ ID NO: 167190 - DNA, 25 bp, Probe Sequence
aataaatggtgcctgcttaccatca

SEQ ID NO: 167191 - DNA, 25 bp, Probe Sequence
aataggatggatgtgttctctcaaa

SEQ ID NO: 167192 - DNA, 25 bp, Probe Sequence
aatacgatggaacgttctatgaatt

SEQ ID NO: 167193 - DNA, 25 bp, Probe Sequence
aatacagaaacattggacttgaatt

SEQ ID NO: 167194 - DNA, 25 bp, Probe Sequence
aatacataattctggtttggatcct

SEQ ID NO: 167195 - DNA, 25 bp, Probe Sequence
aatacattgttctaagtctttttca

SEQ ID NO: 167196 - DNA, 25 bp, Probe Sequence
aatactgtgaaataccttttctcac

SEQ ID NO: 167197 - DNA, 25 bp, Probe Sequence
aatactgtgaaataccttttctcac

SEQ ID NO: 167198 - DNA, 25 bp, Probe Sequence
caatttaccaagttgccttttgcca

SEQ ID NO: 167199 - DNA, 25 bp, Probe Sequence
aattttacagtctgccattttgggt

SEQ ID NO: 167200 - DNA, 25 bp, Probe Sequence
aattttggtgctcatgtgttttggg

SEQ ID NO: 167201 - DNA, 25 bp, Probe Sequence
aataggtactgccatatttttctgt

SEQ ID NO: 167202 - DNA, 25 bp, Probe Sequence
aatagtgtatcatgttttccctgtt

SEQ ID NO: 167203 - DNA, 25 bp, Probe Sequence
aatagtgaacttgattcccctgctt

SEQ ID NO: 167204 - DNA, 25 bp, Probe Sequence
aatcaaaactgaaatagcctccctt

SEQ ID NO: 167205 - DNA, 25 bp, Probe Sequence
aatagagaactaaatcacagtactc

SEQ ID NO: 167206 - DNA, 25 bp, Probe Sequence
aataagagaaagtcacaggccctct

SEQ ID NO: 167207 - DNA, 25 bp, Probe Sequence
aataatgatctaaaacggcctattt

SEQ ID NO: 167208 - DNA, 25 bp, Probe Sequence
aatttgctctgctaaaaggctcctt

SEQ ID NO: 167209 - DNA, 25 bp, Probe Sequence
aatttttctggacaatgccagcatt

SEQ ID NO: 167210 - DNA, 25 bp, Probe Sequence
aatttacttgtacaattcattgtta

SEQ ID NO: 167211 - DNA, 25 bp, Probe Sequence
aattgtactgcggactccacgagtt

SEQ ID NO: 167212 - DNA, 25 bp, Probe Sequence
aatagagagccggattcaccgtttg

SEQ ID NO: 167213 - DNA, 25 bp, Probe Sequence
aatatgaacaccttacaccctgtgt

SEQ ID NO: 167214 - DNA, 25 bp, Probe Sequence
aatagaagaagttcaagccttggat

SEQ ID NO: 167215 - DNA, 25 bp, Probe Sequence
aataactgaatttggaggctggagt

SEQ ID NO: 167216 - DNA, 25 bp, Probe Sequence
aatattctatattgggaagcaggag

SEQ ID NO: 167217 - DNA, 25 bp, Probe Sequence
aatactttttgtggaatactagcta

SEQ ID NO: 167218 - DNA, 25 bp, Probe Sequence
aatacttttcccgaaacacacattg

SEQ ID NO: 167219 - DNA, 25 bp, Probe Sequence
aatacttttagttaatccacaatct

SEQ ID NO: 167220 - DNA, 25 bp, Probe Sequence
aatacttttattaactctcaattgc

SEQ ID NO: 167221 - DNA, 25 bp, Probe Sequence
aatatattccttacaaattacttgg

SEQ ID NO: 167222 - DNA, 25 bp, Probe Sequence
aataattacatcacaagacgtcttg

SEQ ID NO: 167223 - DNA, 25 bp, Probe Sequence
aatactgctttacaagaggttctga

SEQ ID NO: 167224 - DNA, 25 bp, Probe Sequence
aatacattttacaaggagtcacttc

SEQ ID NO: 167225 - DNA, 25 bp, Probe Sequence
aatacagtcctcttgaggcactcaa

SEQ ID NO: 167226 - DNA, 25 bp, Probe Sequence
aataagactctaggggctccagata

SEQ ID NO: 167227 - DNA, 25 bp, Probe Sequence
aatcaagaccaaagagcctgtcgat

SEQ ID NO: 167228 - DNA, 25 bp, Probe Sequence
aataaagagaaaagcctgatgcctt

SEQ ID NO: 167229 - DNA, 25 bp, Probe Sequence
aatacaagaaactagccagatgcgg

SEQ ID NO: 167230 - DNA, 25 bp, Probe Sequence
aatacaaaaattagctggtcatggt

SEQ ID NO: 167231 - DNA, 25 bp, Probe Sequence
aatattaaagtgtgctggacatggt

SEQ ID NO: 167232 - DNA, 25 bp, Probe Sequence
aatatttacagatgtggggagatgt

SEQ ID NO: 167233 - DNA, 25 bp, Probe Sequence
aatatgagataatgcagtcgggaga

SEQ ID NO: 167234 - DNA, 25 bp, Probe Sequence
aataggcttttggctcgcagagagg

SEQ ID NO: 167235 - DNA, 25 bp, Probe Sequence
aatactgtttaggccgcaggagagt

SEQ ID NO: 167236 - DNA, 25 bp, Probe Sequence
aatactgtttaggccgcaggagagt

SEQ ID NO: 167237 - DNA, 25 bp, Probe Sequence
aataatgatattatctccaggagaa

SEQ ID NO: 167238 - DNA, 25 bp, Probe Sequence
aatactgattttactacagggagac

SEQ ID NO: 167239 - DNA, 25 bp, Probe Sequence
aatactgattttactacagggagac

SEQ ID NO: 167240 - DNA, 25 bp, Probe Sequence
aatacaattcttatctagtggtatt

SEQ ID NO: 167241 - DNA, 25 bp, Probe Sequence
aataaatttttctggctgtggcatt

SEQ ID NO: 167242 - DNA, 25 bp, Probe Sequence
aataaattattgaccgagttctgta

SEQ ID NO: 167243 - DNA, 25 bp, Probe Sequence
aataatatactgtacaagttttgtt

SEQ ID NO: 167244 - DNA, 25 bp, Probe Sequence
aataattcacgctcacgtcgttctt

SEQ ID NO: 167245 - DNA, 25 bp, Probe Sequence
aatacttcctgaacatcttaggtct

SEQ ID NO: 167246 - DNA, 25 bp, Probe Sequence
aatactcctctgatgcatttagcct

SEQ ID NO: 167247 - DNA, 25 bp, Probe Sequence
aatacttctctcagcagttgatcaa

SEQ ID NO: 167248 - DNA, 25 bp, Probe Sequence
aatacctgctttgcatattcacaca

SEQ ID NO: 167249 - DNA, 25 bp, Probe Sequence
aatactattatagcaaatcacagaa

SEQ ID NO: 167250 - DNA, 25 bp, Probe Sequence
aatagctgcattactgccaactgac

SEQ ID NO: 167251 - DNA, 25 bp, Probe Sequence
aatagtcattccaaatatgagatgc

SEQ ID NO: 167252 - DNA, 25 bp, Probe Sequence
aatacatcatctggccaggcatggt

SEQ ID NO: 167253 - DNA, 25 bp, Probe Sequence
aatacatctgccctcatggaaggtg

SEQ ID NO: 167254 - DNA, 25 bp, Probe Sequence
aattctctgcattgtcagtaaatgt

SEQ ID NO: 167255 - DNA, 25 bp, Probe Sequence
aatttctgctataaaaatcattgca

SEQ ID NO: 167256 - DNA, 25 bp, Probe Sequence
aatttgctacataaacccaggacac

SEQ ID NO: 167257 - DNA, 25 bp, Probe Sequence
aataagcccatttgagccctggata

SEQ ID NO: 167258 - DNA, 25 bp, Probe Sequence
aatacgcccagatttgcctctggat

SEQ ID NO: 167259 - DNA, 25 bp, Probe Sequence
aatacagcttgaagaccccagctgt

SEQ ID NO: 167260 - DNA, 25 bp, Probe Sequence
aataatgttgatttcccaagtgctt

SEQ ID NO: 167261 - DNA, 25 bp, Probe Sequence
aataatggctattttcgcaatatgt

SEQ ID NO: 167262 - DNA, 25 bp, Probe Sequence
aataagagcattcattaaatactga

SEQ ID NO: 167263 - DNA, 25 bp, Probe Sequence
aatatagacattctcacataagccc

SEQ ID NO: 167264 - DNA, 25 bp, Probe Sequence
aatatatatctgctgtccagacagc

SEQ ID NO: 167265 - DNA, 25 bp, Probe Sequence
aatatgcactgtacattccacaagc

SEQ ID NO: 167266 - DNA, 25 bp, Probe Sequence
aatacattgatcaggccatccagga

SEQ ID NO: 167267 - DNA, 25 bp, Probe Sequence
aatacattgtctagtcctttgcgaa

SEQ ID NO: 167268 - DNA, 25 bp, Probe Sequence
aataaagactatctctgttgctcac

SEQ ID NO: 167269 - DNA, 25 bp, Probe Sequence
aataacagcatcaagtcattttccc

SEQ ID NO: 167270 - DNA, 25 bp, Probe Sequence
aataaatgcactttatccactcccc

SEQ ID NO: 167271 - DNA, 25 bp, Probe Sequence
aatataaagctgtaaccctctctcc

SEQ ID NO: 167272 - DNA, 25 bp, Probe Sequence
aattaaactaaagagcttctgcaca

SEQ ID NO: 167273 - DNA, 25 bp, Probe Sequence
aatatttaccactaagacttctgac

SEQ ID NO: 167274 - DNA, 25 bp, Probe Sequence
aatacctaccctagatgatttcatc

SEQ ID NO: 167275 - DNA, 25 bp, Probe Sequence
aatacaccacccacatatgtcatat

SEQ ID NO: 167276 - DNA, 25 bp, Probe Sequence
aatacaacatcatcaatcattttga

SEQ ID NO: 167277 - DNA, 25 bp, Probe Sequence
aatacaacatcatcaatcattttga

SEQ ID NO: 167278 - DNA, 25 bp, Probe Sequence
aatacacactgtgaagcactttggg

SEQ ID NO: 167279 - DNA, 25 bp, Probe Sequence
aatacgcacattcacaccttgtaag

SEQ ID NO: 167280 - DNA, 25 bp, Probe Sequence
aataccaaattaaagctgctgggga

SEQ ID NO: 167281 - DNA, 25 bp, Probe Sequence
aatttcatccattattagcctgggg

SEQ ID NO: 167282 - DNA, 25 bp, Probe Sequence
aatataatcgattttaatttgtggt

SEQ ID NO: 167283 - DNA, 25 bp, Probe Sequence
aataaagcctagatttgcttttgtg

SEQ ID NO: 167284 - DNA, 25 bp, Probe Sequence
aataaatttctgcttgtgcctttag

SEQ ID NO: 167285 - DNA, 25 bp, Probe Sequence
aataaaagacagcttgctttttcaa

SEQ ID NO: 167286 - DNA, 25 bp, Probe Sequence
aataagcatcagtttgttgttttta

SEQ ID NO: 167287 - DNA, 25 bp, Probe Sequence
aatacagtcaatttttgtcatttgt

SEQ ID NO: 167288 - DNA, 25 bp, Probe Sequence
aataatgttctatatagcctttgct

SEQ ID NO: 167289 - DNA, 25 bp, Probe Sequence
aataatgtatctgaaacctcatctt

SEQ ID NO: 167290 - DNA, 25 bp, Probe Sequence
aataagtaccgattccacatcattc

SEQ ID NO: 167291 - DNA, 25 bp, Probe Sequence
aatacagtactcaacttcctttcat

SEQ ID NO: 167292 - DNA, 25 bp, Probe Sequence
aataagtacttagcctcttctgact

SEQ ID NO: 167293 - DNA, 25 bp, Probe Sequence
gaataggacactcaagacttttgac

SEQ ID NO: 167294 - DNA, 25 bp, Probe Sequence
aataggatcatcagcaaacacaaag

SEQ ID NO: 167295 - DNA, 25 bp, Probe Sequence
aatatgctatccaaaatatccagga

SEQ ID NO: 167296 - DNA, 25 bp, Probe Sequence
aatttatcctcaagagtcagctggc

SEQ ID NO: 167297 - DNA, 25 bp, Probe Sequence
aatttatcctcaagagtcagctggc

SEQ ID NO: 167298 - DNA, 25 bp, Probe Sequence
aataacacttcaaagtcatcttgcc

SEQ ID NO: 167299 - DNA, 25 bp, Probe Sequence
aataacagaatcagagtcttatcaa

SEQ ID NO: 167300 - DNA, 25 bp, Probe Sequence
aataaagtaaggcattgtcatcaat

SEQ ID NO: 167301 - DNA, 25 bp, Probe Sequence
aataaacacaaggcaaagtctcaaa

SEQ ID NO: 167302 - DNA, 25 bp, Probe Sequence
aataagacgagaggacgagcgattg

SEQ ID NO: 167303 - DNA, 25 bp, Probe Sequence
aatacaccagaatgttatggttgtg

SEQ ID NO: 167304 - DNA, 25 bp, Probe Sequence
aataccctaatctccaagtcattgg

SEQ ID NO: 167305 - DNA, 25 bp, Probe Sequence
aataccctaatcacattatgatctt

SEQ ID NO: 167306 - DNA, 25 bp, Probe Sequence
aatattattttcaactgtagtcttt

SEQ ID NO: 167307 - DNA, 25 bp, Probe Sequence
aatatatttggtcactcaagccatc

SEQ ID NO: 167308 - DNA, 25 bp, Probe Sequence
aatatactctccggacatgaaccat

SEQ ID NO: 167309 - DNA, 25 bp, Probe Sequence
aattaccataccatccaacaattcc

SEQ ID NO: 167310 - DNA, 25 bp, Probe Sequence
aattacaaacacagttgaaagactt

SEQ ID NO: 167311 - DNA, 25 bp, Probe Sequence
aataaaaatctcccttgcaatgtga

SEQ ID NO: 167312 - DNA, 25 bp, Probe Sequence
aatatataacccgcctgcagtggaa

SEQ ID NO: 167313 - DNA, 25 bp, Probe Sequence
aattaaacaaccaccatgtcgagca

SEQ ID NO: 167314 - DNA, 25 bp, Probe Sequence
aataggaaaacctaccatctcagtg

SEQ ID NO: 167315 - DNA, 25 bp, Probe Sequence
aataggaaacccttgcctcatcagt

SEQ ID NO: 167316 - DNA, 25 bp, Probe Sequence
aatagacaaatacatctgccctcat

SEQ ID NO: 167317 - DNA, 25 bp, Probe Sequence
aatagtctaatgtatgtctgggctt

SEQ ID NO: 167318 - DNA, 25 bp, Probe Sequence
aataacttgtatagattgtggatca

SEQ ID NO: 167319 - DNA, 25 bp, Probe Sequence
aataactttgttactgtgctgtgaa

SEQ ID NO: 167320 - DNA, 25 bp, Probe Sequence
aataactttgttactgtgctgtgaa

SEQ ID NO: 167321 - DNA, 25 bp, Probe Sequence
aatacatcttctttggtgtcatttc

SEQ ID NO: 167322 - DNA, 25 bp, Probe Sequence
aatactcaggctgtttttattctgc

SEQ ID NO: 167323 - DNA, 25 bp, Probe Sequence
aatactcagagcactacttgtttca

SEQ ID NO: 167324 - DNA, 25 bp, Probe Sequence
aatacagctgacattaccatttaat

SEQ ID NO: 167325 - DNA, 25 bp, Probe Sequence
aatacagtgaatacaatcctttgca

SEQ ID NO: 167326 - DNA, 25 bp, Probe Sequence
aatactggttttaccgcttgctgtc

SEQ ID NO: 167327 - DNA, 25 bp, Probe Sequence
aatacttgttatgagcctgcattct

SEQ ID NO: 167328 - DNA, 25 bp, Probe Sequence
aattcttttgatccccgatttgttg

SEQ ID NO: 167329 - DNA, 25 bp, Probe Sequence
aatacgcgggatagccccaaatgtt

SEQ ID NO: 167330 - DNA, 25 bp, Probe Sequence
aataggtgggtaggcccattgattc

SEQ ID NO: 167331 - DNA, 25 bp, Probe Sequence
aatagggtttacgacctcgatgttg

SEQ ID NO: 167332 - DNA, 25 bp, Probe Sequence
aatatagaattttccataacgatgg

SEQ ID NO: 167333 - DNA, 25 bp, Probe Sequence
aatataacttttaacacacactgtg

SEQ ID NO: 167334 - DNA, 25 bp, Probe Sequence
aataaagattttatcagctcatgat

SEQ ID NO: 167335 - DNA, 25 bp, Probe Sequence
aatactaattatccattccttttgg

SEQ ID NO: 167336 - DNA, 25 bp, Probe Sequence
aataccaactatctccctaattgaa

SEQ ID NO: 167337 - DNA, 25 bp, Probe Sequence
aataaacagtacctgctctcaaatt

SEQ ID NO: 167338 - DNA, 25 bp, Probe Sequence
aatagaacggaccttcttcagtctg

SEQ ID NO: 167339 - DNA, 25 bp, Probe Sequence
aataaacgagcctatttctctttgc

SEQ ID NO: 167340 - DNA, 25 bp, Probe Sequence
aatacattcaggcactcattcatct

SEQ ID NO: 167341 - DNA, 25 bp, Probe Sequence
aatacatggagacgacgcaccctcc

SEQ ID NO: 167342 - DNA, 25 bp, Probe Sequence
aatatctgaggaaactgcacttgat

SEQ ID NO: 167343 - DNA, 25 bp, Probe Sequence
aatatctggacaatttccattcatg

SEQ ID NO: 167344 - DNA, 25 bp, Probe Sequence
aatactgtacaatttctgaagatgg

SEQ ID NO: 167345 - DNA, 25 bp, Probe Sequence
aatactgtgaaattgctctgacaaa

SEQ ID NO: 167346 - DNA, 25 bp, Probe Sequence
aatactgtatcatactttcaaagga

SEQ ID NO: 167347 - DNA, 25 bp, Probe Sequence
aatacttagaatgtttgtaatgagt

SEQ ID NO: 167348 - DNA, 25 bp, Probe Sequence
aatactataagtcattttgagtgtt

SEQ ID NO: 167349 - DNA, 25 bp, Probe Sequence
aatatgctcatatgatcaatggatt

SEQ ID NO: 167350 - DNA, 25 bp, Probe Sequence
caatatgctcaacgcattcatgaat

SEQ ID NO: 167351 - DNA, 25 bp, Probe Sequence
aatatgtcaatagtatctcagattg

SEQ ID NO: 167352 - DNA, 25 bp, Probe Sequence
aatatgtcttcaaatcaggatggca

SEQ ID NO: 167353 - DNA, 25 bp, Probe Sequence
aatagcatcgtgtttcagttggcat

SEQ ID NO: 167354 - DNA, 25 bp, Probe Sequence
aatagtgcttgtacaagcttgccaa

SEQ ID NO: 167355 - DNA, 25 bp, Probe Sequence
aatagtgcatcttccactttctaga

SEQ ID NO: 167356 - DNA, 25 bp, Probe Sequence
aatactcagctgtccctttaaaaat

SEQ ID NO: 167357 - DNA, 25 bp, Probe Sequence
aataccatcttctctgttaatacat

SEQ ID NO: 167358 - DNA, 25 bp, Probe Sequence
aataacatctattgagtgcttaaaa

SEQ ID NO: 167359 - DNA, 25 bp, Probe Sequence
aataaattacagtatgtctatatga

SEQ ID NO: 167360 - DNA, 25 bp, Probe Sequence
aataaagtaacactgtgtcatcttc

SEQ ID NO: 167361 - DNA, 25 bp, Probe Sequence
aataaagatctttgtgttcacatat

SEQ ID NO: 167362 - DNA, 25 bp, Probe Sequence
aataaagctccattgtgcctgcaat

SEQ ID NO: 167363 - DNA, 25 bp, Probe Sequence
aataacagtgccagtgccagtgcca

SEQ ID NO: 167364 - DNA, 25 bp, Probe Sequence
aatagcactttcattgccagtgtct

SEQ ID NO: 167365 - DNA, 25 bp, Probe Sequence
aatacagttctgcttatgcacgtat

SEQ ID NO: 167366 - DNA, 25 bp, Probe Sequence
aatactttcatgctaagccaatctt

SEQ ID NO: 167367 - DNA, 25 bp, Probe Sequence
aatattttgctgctagttaactatg

SEQ ID NO: 167368 - DNA, 25 bp, Probe Sequence
aattggctttggagtttacatatac

SEQ ID NO: 167369 - DNA, 25 bp, Probe Sequence
aattggctttggagtttacatatac

SEQ ID NO: 167370 - DNA, 25 bp, Probe Sequence
aattacattgggagcagttcatgat

SEQ ID NO: 167371 - DNA, 25 bp, Probe Sequence
aatttcagatggtagccagtgactc

SEQ ID NO: 167372 - DNA, 25 bp, Probe Sequence
aatttcctgaattgctatgtgtctg

SEQ ID NO: 167373 - DNA, 25 bp, Probe Sequence
aatttaccattagcattagcgccat

SEQ ID NO: 167374 - DNA, 25 bp, Probe Sequence
aattttctattaagttggtgcagta

SEQ ID NO: 167375 - DNA, 25 bp, Probe Sequence
aatattaaatgatttttcttcagtc

SEQ ID NO: 167376 - DNA, 25 bp, Probe Sequence
aatattatttgcttggctatcttgg

SEQ ID NO: 167377 - DNA, 25 bp, Probe Sequence
aattttttgcacatctgaatatcgt

SEQ ID NO: 167378 - DNA, 25 bp, Probe Sequence
aatttttagcctaccatgtgtacaa

SEQ ID NO: 167379 - DNA, 25 bp, Probe Sequence
aatttttaggattacagttatgatt

SEQ ID NO: 167380 - DNA, 25 bp, Probe Sequence
aatatttataaatcctctaatgtaa

SEQ ID NO: 167381 - DNA, 25 bp, Probe Sequence
aatagtgtaaaatgcgcttcaagaa

SEQ ID NO: 167382 - DNA, 25 bp, Probe Sequence
aatactgtaatatacctgtcacaca

SEQ ID NO: 167383 - DNA, 25 bp, Probe Sequence
aatactgtaatgcgcacctttgcta

SEQ ID NO: 167384 - DNA, 25 bp, Probe Sequence
aatactgttagctcagttattggat

SEQ ID NO: 167385 - DNA, 25 bp, Probe Sequence
aatagtcttgactctttgtgtgtga

SEQ ID NO: 167386 - DNA, 25 bp, Probe Sequence
aatatacttgactctaatatgatta

SEQ ID NO: 167387 - DNA, 25 bp, Probe Sequence
aataaatttatgactactgtgatgt

SEQ ID NO: 167388 - DNA, 25 bp, Probe Sequence
aatagtcattctaacgggtatgatt

SEQ ID NO: 167389 - DNA, 25 bp, Probe Sequence
aatagcctacttgtaggtctatatt

SEQ ID NO: 167390 - DNA, 25 bp, Probe Sequence
aataccctaggttatgcgtctatat

SEQ ID NO: 167391 - DNA, 25 bp, Probe Sequence
aatacccattggctatgccacttga

SEQ ID NO: 167392 - DNA, 25 bp, Probe Sequence
aattcccaagtgttgagccaatctg

SEQ ID NO: 167393 - DNA, 25 bp, Probe Sequence
aatttcaaagccttcgctagtctcc

SEQ ID NO: 167394 - DNA, 25 bp, Probe Sequence
caatttcaaatcggataggagtgtc

SEQ ID NO: 167395 - DNA, 25 bp, Probe Sequence
aatttcaaatcggataggagtgtca

SEQ ID NO: 167396 - DNA, 25 bp, Probe Sequence
aatttccattccctggcagtgagga

SEQ ID NO: 167397 - DNA, 25 bp, Probe Sequence
aatatatctatgtgccatggcctgg

SEQ ID NO: 167398 - DNA, 25 bp, Probe Sequence
aatattcctgattccagctccaggg

SEQ ID NO: 167399 - DNA, 25 bp, Probe Sequence
aatactactatttcttccaaggatc

SEQ ID NO: 167400 - DNA, 25 bp, Probe Sequence
aatttagtattttatcaccagaatc

SEQ ID NO: 167401 - DNA, 25 bp, Probe Sequence
aatttagttgttctccccaatgtgt

SEQ ID NO: 167402 - DNA, 25 bp, Probe Sequence
aatattctgtttaggcccactaagg

SEQ ID NO: 167403 - DNA, 25 bp, Probe Sequence
aatatgtgcttcatagttcccttcc

SEQ ID NO: 167404 - DNA, 25 bp, Probe Sequence
aatttgctcctgacagtcatacctg

SEQ ID NO: 167405 - DNA, 25 bp, Probe Sequence
aatacagcctctgcattgacaactg

SEQ ID NO: 167406 - DNA, 25 bp, Probe Sequence
aattcagcgatcagcattggaactg

SEQ ID NO: 167407 - DNA, 25 bp, Probe Sequence
aatacaagactcgtgatgcaaagct

SEQ ID NO: 167408 - DNA, 25 bp, Probe Sequence
aatacatacacccagatgacgagct

SEQ ID NO: 167409 - DNA, 25 bp, Probe Sequence
aatatatcaacccaaaagtgtaatg

SEQ ID NO: 167410 - DNA, 25 bp, Probe Sequence
aatatagaacgccaaactgctctca

SEQ ID NO: 167411 - DNA, 25 bp, Probe Sequence
aatatggatattgactactctgcta

SEQ ID NO: 167412 - DNA, 25 bp, Probe Sequence
aatagcgtattgtatatacgcctca

SEQ ID NO: 167413 - DNA, 25 bp, Probe Sequence
aatacttgatttaatcaccactcaa

SEQ ID NO: 167414 - DNA, 25 bp, Probe Sequence
aatacttgatttaatcaccactcaa

SEQ ID NO: 167415 - DNA, 25 bp, Probe Sequence
aatagtagtttcatgccctcacata

SEQ ID NO: 167416 - DNA, 25 bp, Probe Sequence
aataaagtggccctgctctcaaaaa

SEQ ID NO: 167417 - DNA, 25 bp, Probe Sequence
aattactgagtggcccttaaagagg

SEQ ID NO: 167418 - DNA, 25 bp, Probe Sequence
aatatattaggctgacttaacaaaa

SEQ ID NO: 167419 - DNA, 25 bp, Probe Sequence
aatattttggctaccacaaataaat

SEQ ID NO: 167420 - DNA, 25 bp, Probe Sequence
aatatcggggtcattgccaatgata

SEQ ID NO: 167421 - DNA, 25 bp, Probe Sequence
aatagcctgatgctcatttggaaaa

SEQ ID NO: 167422 - DNA, 25 bp, Probe Sequence
aatactttgcattttgggataataa

SEQ ID NO: 167423 - DNA, 25 bp, Probe Sequence
aatactattgcttcaggcttttata

SEQ ID NO: 167424 - DNA, 25 bp, Probe Sequence
aataaattgatgaccagttgttaaa

SEQ ID NO: 167425 - DNA, 25 bp, Probe Sequence
aataaattgattccagacagcattg

SEQ ID NO: 167426 - DNA, 25 bp, Probe Sequence
aatatagtcgactaagaagcttaga

SEQ ID NO: 167427 - DNA, 25 bp, Probe Sequence
aatatgagggcacatacaaattaca

SEQ ID NO: 167428 - DNA, 25 bp, Probe Sequence
caataagaccatcagaatagaaaca

SEQ ID NO: 167429 - DNA, 25 bp, Probe Sequence
aatagacagcaatcaaacgaagaca

SEQ ID NO: 167430 - DNA, 25 bp, Probe Sequence
aataccagacattataactatagaa

SEQ ID NO: 167431 - DNA, 25 bp, Probe Sequence
aatagtgaacatttctcctaagatt

SEQ ID NO: 167432 - DNA, 25 bp, Probe Sequence
aatatgtccaactcctcatgaaata

SEQ ID NO: 167433 - DNA, 25 bp, Probe Sequence
aattgaccagcagcctatagacaag

SEQ ID NO: 167434 - DNA, 25 bp, Probe Sequence
aattgactgtagtgctgaagccaaa

SEQ ID NO: 167435 - DNA, 25 bp, Probe Sequence
aattcactgatgtacattaagccaa

SEQ ID NO: 167436 - DNA, 25 bp, Probe Sequence
aatacacagagtccatttagcttga

SEQ ID NO: 167437 - DNA, 25 bp, Probe Sequence
aatagacaagtgtaatctcaccata

SEQ ID NO: 167438 - DNA, 25 bp, Probe Sequence
aatagacagggcgattctgcgctcc

SEQ ID NO: 167439 - DNA, 25 bp, Probe Sequence
aatatgggcatggccttgcagcagc

SEQ ID NO: 167440 - DNA, 25 bp, Probe Sequence
aatatggtatgaggtcgccacttct

SEQ ID NO: 167441 - DNA, 25 bp, Probe Sequence
aatatactaggagtgtgccctttta

SEQ ID NO: 167442 - DNA, 25 bp, Probe Sequence
aatacacatcagggtggtttttctt

SEQ ID NO: 167443 - DNA, 25 bp, Probe Sequence
aatattcgcacgtgtatttttttgt

SEQ ID NO: 167444 - DNA, 25 bp, Probe Sequence
aatttagcaatgaggttttccgatt

SEQ ID NO: 167445 - DNA, 25 bp, Probe Sequence
aatattacctgcagggattctccct

SEQ ID NO: 167446 - DNA, 25 bp, Probe Sequence
aatattgagcccagcctatattgcc

SEQ ID NO: 167447 - DNA, 25 bp, Probe Sequence
aattatggcccaagctactaagaca

SEQ ID NO: 167448 - DNA, 25 bp, Probe Sequence
aattcaagtcaaaccactaatgggc

SEQ ID NO: 167449 - DNA, 25 bp, Probe Sequence
aattaattaaattgccaacttggca

SEQ ID NO: 167450 - DNA, 25 bp, Probe Sequence
aattgaattttacccacatctgcga

SEQ ID NO: 167451 - DNA, 25 bp, Probe Sequence
aatagggtctaactcagcaactcgc

SEQ ID NO: 167452 - DNA, 25 bp, Probe Sequence
aatagtactctatctgacagatttg

SEQ ID NO: 167453 - DNA, 25 bp, Probe Sequence
aatatgtgaccttaatgagattttt

SEQ ID NO: 167454 - DNA, 25 bp, Probe Sequence
aatagcgcaccactatataattatt

SEQ ID NO: 167455 - DNA, 25 bp, Probe Sequence
aatactgcattgatatataattatt

SEQ ID NO: 167456 - DNA, 25 bp, Probe Sequence
aatacatatattaagtcacatgata

SEQ ID NO: 167457 - DNA, 25 bp, Probe Sequence
aatatctaggtttgtcctcatttta

SEQ ID NO: 167458 - DNA, 25 bp, Probe Sequence
aatatcgaggtgatgaactcctttg

SEQ ID NO: 167459 - DNA, 25 bp, Probe Sequence
aatacgtgggaatgatcctcagtgt

SEQ ID NO: 167460 - DNA, 25 bp, Probe Sequence
aatttgtgggaattgctccattctg

SEQ ID NO: 167461 - DNA, 25 bp, Probe Sequence
caatctttgtgaaatagtggttgtg

SEQ ID NO: 167462 - DNA, 25 bp, Probe Sequence
caattttttattctgcctagtgcta

SEQ ID NO: 167463 - DNA, 25 bp, Probe Sequence
caattttttattctgcctagtgcta

SEQ ID NO: 167464 - DNA, 25 bp, Probe Sequence
aattttttatatatgccgcattata

SEQ ID NO: 167465 - DNA, 25 bp, Probe Sequence
aatacctttatgttctcccatatat

SEQ ID NO: 167466 - DNA, 25 bp, Probe Sequence
aatacctgttttgtaatcatgatat

SEQ ID NO: 167467 - DNA, 25 bp, Probe Sequence
aatacgtattgtctaaatgcattta

SEQ ID NO: 167468 - DNA, 25 bp, Probe Sequence
aatactgtttgtttaaagcatgcat

SEQ ID NO: 167469 - DNA, 25 bp, Probe Sequence
aatagggtatcatataatacatatt

SEQ ID NO: 167470 - DNA, 25 bp, Probe Sequence
aatagtggtaatttgtataatcaat

SEQ ID NO: 167471 - DNA, 25 bp, Probe Sequence
aatagtcattaagttactgaatata

SEQ ID NO: 167472 - DNA, 25 bp, Probe Sequence
aatagacagcccctttgcaaatata

SEQ ID NO: 167473 - DNA, 25 bp, Probe Sequence
caatttacccctctgctaaataaat

SEQ ID NO: 167474 - DNA, 25 bp, Probe Sequence
aattttcccctgtgttgtgataaat

SEQ ID NO: 167475 - DNA, 25 bp, Probe Sequence
tcaaaggtccccactactggataac

SEQ ID NO: 167476 - DNA, 25 bp, Probe Sequence
caagagaaactcctagtttagacaa

SEQ ID NO: 167477 - DNA, 25 bp, Probe Sequence
aatagactgttcataatttatgtaa

SEQ ID NO: 167478 - DNA, 25 bp, Probe Sequence
aatacaggcttccgattttatgtga

SEQ ID NO: 167479 - DNA, 25 bp, Probe Sequence
aatacagcaatatgtgactttttaa

SEQ ID NO: 167480 - DNA, 25 bp, Probe Sequence
aataccatatagcttgctttttatt

SEQ ID NO: 167481 - DNA, 25 bp, Probe Sequence
aataccattgtatttggtgaagttt

SEQ ID NO: 167482 - DNA, 25 bp, Probe Sequence
aattctaggtatttgatagggtatt

SEQ ID NO: 167483 - DNA, 25 bp, Probe Sequence
aatttaggcactttgtgagggtctt

SEQ ID NO: 167484 - DNA, 25 bp, Probe Sequence
aatattcaggctattctgggtatgt

SEQ ID NO: 167485 - DNA, 25 bp, Probe Sequence
aatatatcgtgtatccgaaaattgc

SEQ ID NO: 167486 - DNA, 25 bp, Probe Sequence
aatagatcgttatgccagtgaaaat

SEQ ID NO: 167487 - DNA, 25 bp, Probe Sequence
aatatggtgttatgccacaaacaga

SEQ ID NO: 167488 - DNA, 25 bp, Probe Sequence
aatttggtttggcctgcactacgat

SEQ ID NO: 167489 - DNA, 25 bp, Probe Sequence
aatttggtttggcctgcactacgat

SEQ ID NO: 167490 - DNA, 25 bp, Probe Sequence
aatttggtcttgttgccgtatccat

SEQ ID NO: 167491 - DNA, 25 bp, Probe Sequence
aatatttgttatcttctttgcctgc

SEQ ID NO: 167492 - DNA, 25 bp, Probe Sequence
aattcctgtaaagctgtttcctctg

SEQ ID NO: 167493 - DNA, 25 bp, Probe Sequence
aattcctttaattttgccttgctgg

SEQ ID NO: 167494 - DNA, 25 bp, Probe Sequence
aatatcttttgaaattggctttgga

SEQ ID NO: 167495 - DNA, 25 bp, Probe Sequence
aatacctttgtaacggctcttagca

SEQ ID NO: 167496 - DNA, 25 bp, Probe Sequence
aatacttttgtaagcagctgtttaa

SEQ ID NO: 167497 - DNA, 25 bp, Probe Sequence
aatacttttgtattgctgcttgcaa

SEQ ID NO: 167498 - DNA, 25 bp, Probe Sequence
aatagtgggtatagtgcctgtgaag

SEQ ID NO: 167499 - DNA, 25 bp, Probe Sequence
aataggagccaatgatgatctgaat

SEQ ID NO: 167500 - DNA, 25 bp, Probe Sequence
aatagttgtaaaaatctgatgatag

SEQ ID NO: 167501 - DNA, 25 bp, Probe Sequence
aatagtgttgtgtgaatgctgtaag

SEQ ID NO: 167502 - DNA, 25 bp, Probe Sequence
aattgatgttgtttaactagaagtt

SEQ ID NO: 167503 - DNA, 25 bp, Probe Sequence
aatagattgttgttatgcaaagaaa

SEQ ID NO: 167504 - DNA, 25 bp, Probe Sequence
aatactggcactttagaacagatta

SEQ ID NO: 167505 - DNA, 25 bp, Probe Sequence
aatatcgactcttgtattacgattc

SEQ ID NO: 167506 - DNA, 25 bp, Probe Sequence
aattggacacttctttgctgttgca

SEQ ID NO: 167507 - DNA, 25 bp, Probe Sequence
aatagggcaagaattcttatgctta

SEQ ID NO: 167508 - DNA, 25 bp, Probe Sequence
aataggacattgatgctggataggt

SEQ ID NO: 167509 - DNA, 25 bp, Probe Sequence
aatagtgactctgtgcttgtctgtt

SEQ ID NO: 167510 - DNA, 25 bp, Probe Sequence
aataggatcaccttcttgttgctat

SEQ ID NO: 167511 - DNA, 25 bp, Probe Sequence
aatattacccattgcgtgcctgtat

SEQ ID NO: 167512 - DNA, 25 bp, Probe Sequence
aatattacctattacgactccatgg

SEQ ID NO: 167513 - DNA, 25 bp, Probe Sequence
aataccacacaagtgactgactcac

SEQ ID NO: 167514 - DNA, 25 bp, Probe Sequence
aatattcagcaatgtccgcatcaac

SEQ ID NO: 167515 - DNA, 25 bp, Probe Sequence
aatagactgccattttccatcaaga

SEQ ID NO: 167516 - DNA, 25 bp, Probe Sequence
aataccctgctctttactcaatggt

SEQ ID NO: 167517 - DNA, 25 bp, Probe Sequence
aatactcccatagtaactccaggat

SEQ ID NO: 167518 - DNA, 25 bp, Probe Sequence
aattttcactacagactaaggtcat

SEQ ID NO: 167519 - DNA, 25 bp, Probe Sequence
aattttaaacaatctgaacttcctg

SEQ ID NO: 167520 - DNA, 25 bp, Probe Sequence
caattttaactcacttcgtttccag

SEQ ID NO: 167521 - DNA, 25 bp, Probe Sequence
aattcttaactatcattatttacct

SEQ ID NO: 167522 - DNA, 25 bp, Probe Sequence
aattttacactagtcagttctttat

SEQ ID NO: 167523 - DNA, 25 bp, Probe Sequence
aatactaactgcagtagttctttca

SEQ ID NO: 167524 - DNA, 25 bp, Probe Sequence
aatattcaagtcctggagtcacgtt

SEQ ID NO: 167525 - DNA, 25 bp, Probe Sequence
aatatcacagcatcacatgggccac

SEQ ID NO: 167526 - DNA, 25 bp, Probe Sequence
caatatagtgctaaagaagccagct

SEQ ID NO: 167527 - DNA, 25 bp, Probe Sequence
aatatagaggatcagaagccatttg

SEQ ID NO: 167528 - DNA, 25 bp, Probe Sequence
aattatagaagcaagaaggcgatag

SEQ ID NO: 167529 - DNA, 25 bp, Probe Sequence
caagtagaatacatgatccggatca

SEQ ID NO: 167530 - DNA, 25 bp, Probe Sequence
aattcaatgattctgactccggcat

SEQ ID NO: 167531 - DNA, 25 bp, Probe Sequence
aattcagattactgtttgctggcta

SEQ ID NO: 167532 - DNA, 25 bp, Probe Sequence
aattggcttatggggttgtggaggc

SEQ ID NO: 167533 - DNA, 25 bp, Probe Sequence
aatttctatagcaccgtgggcagga

SEQ ID NO: 167534 - DNA, 25 bp, Probe Sequence
aatttctttgcaagccgtaagggct

SEQ ID NO: 167535 - DNA, 25 bp, Probe Sequence
aatttcattttagcatgtcaagatg

SEQ ID NO: 167536 - DNA, 25 bp, Probe Sequence
aattgatctctcctaaagtgaagta

SEQ ID NO: 167537 - DNA, 25 bp, Probe Sequence
aattcatacctcggaaggcatcgga

SEQ ID NO: 167538 - DNA, 25 bp, Probe Sequence
aattaactctcccaaggcaagtgaa

SEQ ID NO: 167539 - DNA, 25 bp, Probe Sequence
aattaacttggctaggtatggtgtc

SEQ ID NO: 167540 - DNA, 25 bp, Probe Sequence
aattcactgcttctagtaaggattc

SEQ ID NO: 167541 - DNA, 25 bp, Probe Sequence
aattcctggtcgtgctaactgtggc

SEQ ID NO: 167542 - DNA, 25 bp, Probe Sequence
aattcccgatttgtagcactttgtt

SEQ ID NO: 167543 - DNA, 25 bp, Probe Sequence
aattcccggtattatgagtccactt

SEQ ID NO: 167544 - DNA, 25 bp, Probe Sequence
caattccctggtgcggtaccagtgc

SEQ ID NO: 167545 - DNA, 25 bp, Probe Sequence
aattccctggtgcggtaccagtgca

SEQ ID NO: 167546 - DNA, 25 bp, Probe Sequence
aatacctctggtcagaatccggata

SEQ ID NO: 167547 - DNA, 25 bp, Probe Sequence
aataccctgctgaatgaaatcactg

SEQ ID NO: 167548 - DNA, 25 bp, Probe Sequence
aatagcaaacttaataaacagccac

SEQ ID NO: 167549 - DNA, 25 bp, Probe Sequence
aatagaaacttcatgtacttacaaa

SEQ ID NO: 167550 - DNA, 25 bp, Probe Sequence
aatagaaatcaaggtgttcaataca

SEQ ID NO: 167551 - DNA, 25 bp, Probe Sequence
aatagaaattagcgtaatattgaga

SEQ ID NO: 167552 - DNA, 25 bp, Probe Sequence
aattgagaactacagcttttaagat

SEQ ID NO: 167553 - DNA, 25 bp, Probe Sequence
aattaaatgccactttttcagaggt

SEQ ID NO: 167554 - DNA, 25 bp, Probe Sequence
aattaaatggcacatgggtccaggt

SEQ ID NO: 167555 - DNA, 25 bp, Probe Sequence
aattttctgtgctaagggtccagta

SEQ ID NO: 167556 - DNA, 25 bp, Probe Sequence
aattttgttggatgtactccaggaa

SEQ ID NO: 167557 - DNA, 25 bp, Probe Sequence
aattcctattggagtgcaatcctta

SEQ ID NO: 167558 - DNA, 25 bp, Probe Sequence
aattacccttgtttgttgctgttat

SEQ ID NO: 167559 - DNA, 25 bp, Probe Sequence
aatttgccacatgttgtctgtttta

SEQ ID NO: 167560 - DNA, 25 bp, Probe Sequence
aattgactacagcggtcagtataaa

SEQ ID NO: 167561 - DNA, 25 bp, Probe Sequence
aattcaatacgcgggatagccccaa

SEQ ID NO: 167562 - DNA, 25 bp, Probe Sequence
aattatataccctggtcccatcttt

SEQ ID NO: 167563 - DNA, 25 bp, Probe Sequence
aattaaatactgtggttgcctctat

SEQ ID NO: 167564 - DNA, 25 bp, Probe Sequence
aattacaacattgtttctcacactt

SEQ ID NO: 167565 - DNA, 25 bp, Probe Sequence
aatttaccattgagtatctgtcact

SEQ ID NO: 167566 - DNA, 25 bp, Probe Sequence
aatttatcaaaaccttcagtatctc

SEQ ID NO: 167567 - DNA, 25 bp, Probe Sequence
aattttcaaatccttattgttcaga

SEQ ID NO: 167568 - DNA, 25 bp, Probe Sequence
aatttcaggaacctatgttattgca

SEQ ID NO: 167569 - DNA, 25 bp, Probe Sequence
aatattaggtaggtatggttgcagg

SEQ ID NO: 167570 - DNA, 25 bp, Probe Sequence
aatattagtctaggctatggtcgtg

SEQ ID NO: 167571 - DNA, 25 bp, Probe Sequence
aatattaagtagtctagatctcagt

SEQ ID NO: 167572 - DNA, 25 bp, Probe Sequence
aataccaatgtttctcaagctcgtc

SEQ ID NO: 167573 - DNA, 25 bp, Probe Sequence
aataccagctttagccaactttctg

SEQ ID NO: 167574 - DNA, 25 bp, Probe Sequence
aatatcacctttgagtacatgtttg

SEQ ID NO: 167575 - DNA, 25 bp, Probe Sequence
aatatagcctgtccgtttgctgttt

SEQ ID NO: 167576 - DNA, 25 bp, Probe Sequence
aatagtactgataagttcgtctttc

SEQ ID NO: 167577 - DNA, 25 bp, Probe Sequence
aattgtgactatacaaagcgtctta

SEQ ID NO: 167578 - DNA, 25 bp, Probe Sequence
aatatgctggctaccaaatggtctt

SEQ ID NO: 167579 - DNA, 25 bp, Probe Sequence
aatttggcattatactggctctatc

SEQ ID NO: 167580 - DNA, 25 bp, Probe Sequence
aatattacattcacattgagttgat

SEQ ID NO: 167581 - DNA, 25 bp, Probe Sequence
aatataaactgtacacataattatc

SEQ ID NO: 167582 - DNA, 25 bp, Probe Sequence
aatattaaatggacaccactcaaaa

SEQ ID NO: 167583 - DNA, 25 bp, Probe Sequence
aattttaattccatgcatctcaaca

SEQ ID NO: 167584 - DNA, 25 bp, Probe Sequence
aattagtcgtattctgctactcgaa

SEQ ID NO: 167585 - DNA, 25 bp, Probe Sequence
aattcttcgtttggccaatgagaga

SEQ ID NO: 167586 - DNA, 25 bp, Probe Sequence
aattttcagttgggctcacaacgtt

SEQ ID NO: 167587 - DNA, 25 bp, Probe Sequence
aatttctcagttgttcacatgaact

SEQ ID NO: 167588 - DNA, 25 bp, Probe Sequence
caattgttaagtgttccataaaggt

SEQ ID NO: 167589 - DNA, 25 bp, Probe Sequence
aattgttaatttttcctatattgca

SEQ ID NO: 167590 - DNA, 25 bp, Probe Sequence
aatattttgttttacttatgtggca

SEQ ID NO: 167591 - DNA, 25 bp, Probe Sequence
aatatcatttgactttttatagaaa

SEQ ID NO: 167592 - DNA, 25 bp, Probe Sequence
aatatcatttgactttttatagaaa

SEQ ID NO: 167593 - DNA, 25 bp, Probe Sequence
aatatcatttgactttttatagaaa

SEQ ID NO: 167594 - DNA, 25 bp, Probe Sequence
aatatcatattggcttcattttagt

SEQ ID NO: 167595 - DNA, 25 bp, Probe Sequence
aatattttgcactacagttgctagt

SEQ ID NO: 167596 - DNA, 25 bp, Probe Sequence
aatagtcaggcctatcagtctcaca

SEQ ID NO: 167597 - DNA, 25 bp, Probe Sequence
aatagttgcgcaatacagtgtcaca

SEQ ID NO: 167598 - DNA, 25 bp, Probe Sequence
aattgtgtgctgaaccagtaaacga

SEQ ID NO: 167599 - DNA, 25 bp, Probe Sequence
caatagatgttgacacagcaggaga

SEQ ID NO: 167600 - DNA, 25 bp, Probe Sequence
aatagatgttgacacagcaggagat

SEQ ID NO: 167601 - DNA, 25 bp, Probe Sequence
aatagtgatgttcaccattgatatt

SEQ ID NO: 167602 - DNA, 25 bp, Probe Sequence
aatattgatgtcctaacactgggtc

SEQ ID NO: 167603 - DNA, 25 bp, Probe Sequence
aatatgtattaatcagaggtggctt

SEQ ID NO: 167604 - DNA, 25 bp, Probe Sequence
aatatgtattacccgtctgaagctt

SEQ ID NO: 167605 - DNA, 25 bp, Probe Sequence
aatattattgacctcttcctttatc

SEQ ID NO: 167606 - DNA, 25 bp, Probe Sequence
aatttttgagatcttactgcttgtc

SEQ ID NO: 167607 - DNA, 25 bp, Probe Sequence
aatagctttattccttagatggttc

SEQ ID NO: 167608 - DNA, 25 bp, Probe Sequence
aatagttctgttacttaggctgtta

SEQ ID NO: 167609 - DNA, 25 bp, Probe Sequence
cttggttggttttcaggaggttcag

SEQ ID NO: 167610 - DNA, 25 bp, Probe Sequence
caaagttggctttataggaggagta

SEQ ID NO: 167611 - DNA, 25 bp, Probe Sequence
aatacctttttaatggagagcagat

SEQ ID NO: 167612 - DNA, 25 bp, Probe Sequence
aataccactatgtttagggacagac

SEQ ID NO: 167613 - DNA, 25 bp, Probe Sequence
aatagctcacttcttacaatgtaca

SEQ ID NO: 167614 - DNA, 25 bp, Probe Sequence
aatagctcacttcttacaatgtaca

SEQ ID NO: 167615 - DNA, 25 bp, Probe Sequence
aatagctcacttcttacaatgtaca

SEQ ID NO: 167616 - DNA, 25 bp, Probe Sequence
aataccactgtaattgacagagtaa

SEQ ID NO: 167617 - DNA, 25 bp, Probe Sequence
aattcccgtactgattagtcaacag

SEQ ID NO: 167618 - DNA, 25 bp, Probe Sequence
aatatcagcaggcggctattggtaa

SEQ ID NO: 167619 - DNA, 25 bp, Probe Sequence
cacaccacggtatctactggattat

SEQ ID NO: 167620 - DNA, 25 bp, Probe Sequence
ccgacgggatacctatttgttctgc

SEQ ID NO: 167621 - DNA, 25 bp, Probe Sequence
ctattcggcgtagcttttgtggctc

SEQ ID NO: 167622 - DNA, 25 bp, Probe Sequence
caattcttggtagttctcttgggca

SEQ ID NO: 167623 - DNA, 25 bp, Probe Sequence
aattcttggtagttctcttgggcag

SEQ ID NO: 167624 - DNA, 25 bp, Probe Sequence
aattcttagtaatgagtatgaggag

SEQ ID NO: 167625 - DNA, 25 bp, Probe Sequence
aatttggagtgtcagcagctatagt

SEQ ID NO: 167626 - DNA, 25 bp, Probe Sequence
aattatggaggtcctccatgcagag

SEQ ID NO: 167627 - DNA, 25 bp, Probe Sequence
aattataagcctccaccacagaagt

SEQ ID NO: 167628 - DNA, 25 bp, Probe Sequence
aatattatagccactgacacaatag

SEQ ID NO: 167629 - DNA, 25 bp, Probe Sequence
aattttagtcattcttcacaatcac

SEQ ID NO: 167630 - DNA, 25 bp, Probe Sequence
aatttctgagccattgtactgtctg

SEQ ID NO: 167631 - DNA, 25 bp, Probe Sequence
aattcctggattatacgtgctcttg

SEQ ID NO: 167632 - DNA, 25 bp, Probe Sequence
aattcctgcctttctaaatgtggtg

SEQ ID NO: 167633 - DNA, 25 bp, Probe Sequence
aatagcactcacttccaaaagattg

SEQ ID NO: 167634 - DNA, 25 bp, Probe Sequence
aatatcctgacttctaataacattg

SEQ ID NO: 167635 - DNA, 25 bp, Probe Sequence
aattgcttggattgctacatggacc

SEQ ID NO: 167636 - DNA, 25 bp, Probe Sequence
aattcaggatattgccctgccatcc

SEQ ID NO: 167637 - DNA, 25 bp, Probe Sequence
aattgcgcaatattcaccgtatata

SEQ ID NO: 167638 - DNA, 25 bp, Probe Sequence
aattcactgtactatcaggttcaca

SEQ ID NO: 167639 - DNA, 25 bp, Probe Sequence
aatatactatcttatagggtacata

SEQ ID NO: 167640 - DNA, 25 bp, Probe Sequence
aatatcttattgttcaacttgacat

SEQ ID NO: 167641 - DNA, 25 bp, Probe Sequence
aatatctcgtattctcatacttttc

SEQ ID NO: 167642 - DNA, 25 bp, Probe Sequence
aatatcttgtgttctcatacttttc

SEQ ID NO: 167643 - DNA, 25 bp, Probe Sequence
aatatttgtgtcataagacatcttc

SEQ ID NO: 167644 - DNA, 25 bp, Probe Sequence
aatttatgatgtggatactaacttc

SEQ ID NO: 167645 - DNA, 25 bp, Probe Sequence
aatttttgtctgatcttacgatgcc

SEQ ID NO: 167646 - DNA, 25 bp, Probe Sequence
aattttgtggctactcctgacgaac

SEQ ID NO: 167647 - DNA, 25 bp, Probe Sequence
aattttgtcacagcacctaaaagat

SEQ ID NO: 167648 - DNA, 25 bp, Probe Sequence
aattgcatcggagaaactcctaaat

SEQ ID NO: 167649 - DNA, 25 bp, Probe Sequence
aattcttgagggtcacttcctaact

SEQ ID NO: 167650 - DNA, 25 bp, Probe Sequence
aattaagatgggtctacctctcaat

SEQ ID NO: 167651 - DNA, 25 bp, Probe Sequence
aattgaaggtgtttacgcccgagat

SEQ ID NO: 167652 - DNA, 25 bp, Probe Sequence
aattgaaggtgtttacgcccgagat

SEQ ID NO: 167653 - DNA, 25 bp, Probe Sequence
aattgaaggtgtttacgcccgagat

SEQ ID NO: 167654 - DNA, 25 bp, Probe Sequence
gaattattgggtagggcgggaagat

SEQ ID NO: 167655 - DNA, 25 bp, Probe Sequence
aatttgtgaagttctgggaggccag

SEQ ID NO: 167656 - DNA, 25 bp, Probe Sequence
aatatttattgttgtggtgctggga

SEQ ID NO: 167657 - DNA, 25 bp, Probe Sequence
aatttcttatcaagtgggttggctg

SEQ ID NO: 167658 - DNA, 25 bp, Probe Sequence
aatttgcattactctggtggattgt

SEQ ID NO: 167659 - DNA, 25 bp, Probe Sequence
aatttgattagattctgagggtgga

SEQ ID NO: 167660 - DNA, 25 bp, Probe Sequence
aatttggagcgctttcagggctaag

SEQ ID NO: 167661 - DNA, 25 bp, Probe Sequence
aatttctgggcctgaggtgctcaga

SEQ ID NO: 167662 - DNA, 25 bp, Probe Sequence
aatatcctggtgcgatgatgggcct

SEQ ID NO: 167663 - DNA, 25 bp, Probe Sequence
aattttgggggatgcgctacctgtc

SEQ ID NO: 167664 - DNA, 25 bp, Probe Sequence
aattttatgagggccacgggtctgt

SEQ ID NO: 167665 - DNA, 25 bp, Probe Sequence
aatttctgctgacccacacgggtct

SEQ ID NO: 167666 - DNA, 25 bp, Probe Sequence
aattatgatctacctaccaatcgtg

SEQ ID NO: 167667 - DNA, 25 bp, Probe Sequence
aatatatgaccacgctcacccgcat

SEQ ID NO: 167668 - DNA, 25 bp, Probe Sequence
aatttactcacattcacacgcgatt

SEQ ID NO: 167669 - DNA, 25 bp, Probe Sequence
aatttccctcatcaaagcaatcttt

SEQ ID NO: 167670 - DNA, 25 bp, Probe Sequence
aatttgcagccatccaaacaacatt

SEQ ID NO: 167671 - DNA, 25 bp, Probe Sequence
aattcattcaatgccacagacctga

SEQ ID NO: 167672 - DNA, 25 bp, Probe Sequence
aattcattaacactgccatgacatt

SEQ ID NO: 167673 - DNA, 25 bp, Probe Sequence
aattcaatcaagatcaactctaagt

SEQ ID NO: 167674 - DNA, 25 bp, Probe Sequence
aatataccacatatacacctgatag

SEQ ID NO: 167675 - DNA, 25 bp, Probe Sequence
aatatatgccaaatcttacacgtct

SEQ ID NO: 167676 - DNA, 25 bp, Probe Sequence
aatttgctgaatgcttgctacgagc

SEQ ID NO: 167677 - DNA, 25 bp, Probe Sequence
aattgttgcaaagtagtgaatggca

SEQ ID NO: 167678 - DNA, 25 bp, Probe Sequence
aattttgcccagatgtatacccagt

SEQ ID NO: 167679 - DNA, 25 bp, Probe Sequence
aattttccagatattctacttcagg

SEQ ID NO: 167680 - DNA, 25 bp, Probe Sequence
aatttgtgggccatttaattcaggg

SEQ ID NO: 167681 - DNA, 25 bp, Probe Sequence
aattcccgggatcttaacatcagga

SEQ ID NO: 167682 - DNA, 25 bp, Probe Sequence
aattcccgaagtcctgttcagaagg

SEQ ID NO: 167683 - DNA, 25 bp, Probe Sequence
aattcacactgatctgggttaaaac

SEQ ID NO: 167684 - DNA, 25 bp, Probe Sequence
aattacctaggctgaggttagagag

SEQ ID NO: 167685 - DNA, 25 bp, Probe Sequence
aattgcccaagattacagaggtaag

SEQ ID NO: 167686 - DNA, 25 bp, Probe Sequence
aatatgagcccagaagcagcaggtg

SEQ ID NO: 167687 - DNA, 25 bp, Probe Sequence
aatattcccaaaaggcaggtgcaat

SEQ ID NO: 167688 - DNA, 25 bp, Probe Sequence
aatatcaccaacctaggctgggcgt

SEQ ID NO: 167689 - DNA, 25 bp, Probe Sequence
aattatctgcaacttgattcttggc

SEQ ID NO: 167690 - DNA, 25 bp, Probe Sequence
aatttgtgacagctgcagttgctcc

SEQ ID NO: 167691 - DNA, 25 bp, Probe Sequence
aatttgctgagctggtgtataccgg

SEQ ID NO: 167692 - DNA, 25 bp, Probe Sequence
aattagctgcgcatggtggtaaaat

SEQ ID NO: 167693 - DNA, 25 bp, Probe Sequence
aattcatggcataataggtgttaaa

SEQ ID NO: 167694 - DNA, 25 bp, Probe Sequence
aatatgtagaattgtggttgatgat

SEQ ID NO: 167695 - DNA, 25 bp, Probe Sequence
aatattagatccatttctgcagaac

SEQ ID NO: 167696 - DNA, 25 bp, Probe Sequence
aatatgtgaacagtattcttcaaat

SEQ ID NO: 167697 - DNA, 25 bp, Probe Sequence
aatatgaagcactttctcttaactt

SEQ ID NO: 167698 - DNA, 25 bp, Probe Sequence
aatatgaagccaccaagtctagact

SEQ ID NO: 167699 - DNA, 25 bp, Probe Sequence
aattacagtggttgatgccttacat

SEQ ID NO: 167700 - DNA, 25 bp, Probe Sequence
aattctcactcagtggtggttactg

SEQ ID NO: 167701 - DNA, 25 bp, Probe Sequence
aatttcctttgatgacatgtcctgc

SEQ ID NO: 167702 - DNA, 25 bp, Probe Sequence
aattgggctttaggcactccattcg

SEQ ID NO: 167703 - DNA, 25 bp, Probe Sequence
aattgggctttaggcactccattcg

SEQ ID NO: 167704 - DNA, 25 bp, Probe Sequence
aatatctgagctctttgcactacct

SEQ ID NO: 167705 - DNA, 25 bp, Probe Sequence
aattcagagatgcagtggacaaact

SEQ ID NO: 167706 - DNA, 25 bp, Probe Sequence
aattctaatgggcacataatacaga

SEQ ID NO: 167707 - DNA, 25 bp, Probe Sequence
aattctaatagtcaaattgctggaa

SEQ ID NO: 167708 - DNA, 25 bp, Probe Sequence
aatttataagttttgacccgcagag

SEQ ID NO: 167709 - DNA, 25 bp, Probe Sequence
aatttaactctatgtgtactccaaa

SEQ ID NO: 167710 - DNA, 25 bp, Probe Sequence
aatatttcctctaatttactcagaa

SEQ ID NO: 167711 - DNA, 25 bp, Probe Sequence
aatattctcccaggaaaatctagaa

SEQ ID NO: 167712 - DNA, 25 bp, Probe Sequence
aattccccgaaggcacagattaagt

SEQ ID NO: 167713 - DNA, 25 bp, Probe Sequence
aattcccaccttcgaagattaccag

SEQ ID NO: 167714 - DNA, 25 bp, Probe Sequence
aattgacatttctcgtagactaccc

SEQ ID NO: 167715 - DNA, 25 bp, Probe Sequence
caattactattccctttgacttcag

SEQ ID NO: 167716 - DNA, 25 bp, Probe Sequence
caagtgcctttctgcagtttttcag

SEQ ID NO: 167717 - DNA, 25 bp, Probe Sequence
caattggccatttaagtttagtagt

SEQ ID NO: 167718 - DNA, 25 bp, Probe Sequence
caattggccatttaagtttagtagt

SEQ ID NO: 167719 - DNA, 25 bp, Probe Sequence
caattggccatttaagtttagtagt

SEQ ID NO: 167720 - DNA, 25 bp, Probe Sequence
aattgacaatcagaggtttcctagt

SEQ ID NO: 167721 - DNA, 25 bp, Probe Sequence
aatataccatccatgtgtttttacc

SEQ ID NO: 167722 - DNA, 25 bp, Probe Sequence
aatatgaaactcagtacatttatag

SEQ ID NO: 167723 - DNA, 25 bp, Probe Sequence
aatagagcaagcatgttgaatttaa

SEQ ID NO: 167724 - DNA, 25 bp, Probe Sequence
aatatagacagcacatttctagtca

SEQ ID NO: 167725 - DNA, 25 bp, Probe Sequence
aatattgtcatgaactatatccgta

SEQ ID NO: 167726 - DNA, 25 bp, Probe Sequence
aatattgtcaggaatgatgggcgat

SEQ ID NO: 167727 - DNA, 25 bp, Probe Sequence
aatttgccacgcatgatggcacaca

SEQ ID NO: 167728 - DNA, 25 bp, Probe Sequence
aattttcagccatgtggaccatatt

SEQ ID NO: 167729 - DNA, 25 bp, Probe Sequence
aatttccagcctggtgcgtacattc

SEQ ID NO: 167730 - DNA, 25 bp, Probe Sequence
aatattccacttagggtaatgctgc

SEQ ID NO: 167731 - DNA, 25 bp, Probe Sequence
aattggccctctaggcagtaggcaa

SEQ ID NO: 167732 - DNA, 25 bp, Probe Sequence
aattggcaactgggtgaatctggca

SEQ ID NO: 167733 - DNA, 25 bp, Probe Sequence
aattgacaactctggcatacggccc

SEQ ID NO: 167734 - DNA, 25 bp, Probe Sequence
aattaaattctgggcatttgaggct

SEQ ID NO: 167735 - DNA, 25 bp, Probe Sequence
aattaaaccaggcctgaggagcgat

SEQ ID NO: 167736 - DNA, 25 bp, Probe Sequence
aatttatagccagagtgagggggta

SEQ ID NO: 167737 - DNA, 25 bp, Probe Sequence
aattctaacccagggcatggggttg

SEQ ID NO: 167738 - DNA, 25 bp, Probe Sequence
aattagtactaaggagcgcggtgtt

SEQ ID NO: 167739 - DNA, 25 bp, Probe Sequence
aattatttcaaaggcaaagattgtt

SEQ ID NO: 167740 - DNA, 25 bp, Probe Sequence
aattcattaaactctcaaattttct

SEQ ID NO: 167741 - DNA, 25 bp, Probe Sequence
aattgctataaatcgacaaaatcta

SEQ ID NO: 167742 - DNA, 25 bp, Probe Sequence
aattcttaactctgacacaattgga

SEQ ID NO: 167743 - DNA, 25 bp, Probe Sequence
aattctgtcaactccatcacaaatg

SEQ ID NO: 167744 - DNA, 25 bp, Probe Sequence
aatttgtgaaacctatagacgatgt

SEQ ID NO: 167745 - DNA, 25 bp, Probe Sequence
aattattgcaaacctatacacaacc

SEQ ID NO: 167746 - DNA, 25 bp, Probe Sequence
aattaatgcaaatgtttcaaaactg

SEQ ID NO: 167747 - DNA, 25 bp, Probe Sequence
aattatgagctatcctttcaaacag

SEQ ID NO: 167748 - DNA, 25 bp, Probe Sequence
aatttcaggctacctttgacaaagc

SEQ ID NO: 167749 - DNA, 25 bp, Probe Sequence
aatttgcaggctaccttgacacaga

SEQ ID NO: 167750 - DNA, 25 bp, Probe Sequence
catttacctgtgcgtggcttactac

SEQ ID NO: 167751 - DNA, 25 bp, Probe Sequence
aatttcctggtaaggctaactcctg

SEQ ID NO: 167752 - DNA, 25 bp, Probe Sequence
aatattccatgtttacagtatttcc

SEQ ID NO: 167753 - DNA, 25 bp, Probe Sequence
aatatcccagttacactttttatga

SEQ ID NO: 167754 - DNA, 25 bp, Probe Sequence
aatatccacagtactcactttttcc

SEQ ID NO: 167755 - DNA, 25 bp, Probe Sequence
aatatcctgggattcagctgttgtt

SEQ ID NO: 167756 - DNA, 25 bp, Probe Sequence
aatatagcctgggaagttctgttgc

SEQ ID NO: 167757 - DNA, 25 bp, Probe Sequence
aattagccgggcatgatggtggtgg

SEQ ID NO: 167758 - DNA, 25 bp, Probe Sequence
aatatgtcactggagctttgttggg

SEQ ID NO: 167759 - DNA, 25 bp, Probe Sequence
aatatatgcacttcaggcttgttga

SEQ ID NO: 167760 - DNA, 25 bp, Probe Sequence
aatagtcactcactggctgatacat

SEQ ID NO: 167761 - DNA, 25 bp, Probe Sequence
aatagtcatgcttcatctctaaccc

SEQ ID NO: 167762 - DNA, 25 bp, Probe Sequence
aatattctggaattgctactcctcc

SEQ ID NO: 167763 - DNA, 25 bp, Probe Sequence
aattattacattttgactaccacaa

SEQ ID NO: 167764 - DNA, 25 bp, Probe Sequence
aattttacagactcagctaaacaat

SEQ ID NO: 167765 - DNA, 25 bp, Probe Sequence
aattcttaagaaaccaacatatcac

SEQ ID NO: 167766 - DNA, 25 bp, Probe Sequence
aattttagatgctttcctagcttac

SEQ ID NO: 167767 - DNA, 25 bp, Probe Sequence
aatttggaatgattggcctgttaac

SEQ ID NO: 167768 - DNA, 25 bp, Probe Sequence
aattataaatgtcccttgttacata

SEQ ID NO: 167769 - DNA, 25 bp, Probe Sequence
aatatcattaccatcactttttcat

SEQ ID NO: 167770 - DNA, 25 bp, Probe Sequence
aatatgtatactatctttttatctg

SEQ ID NO: 167771 - DNA, 25 bp, Probe Sequence
aatatgaaaccttttgtgcttctct

SEQ ID NO: 167772 - DNA, 25 bp, Probe Sequence
aatttaagcacttctgttttcgtga

SEQ ID NO: 167773 - DNA, 25 bp, Probe Sequence
aatatttagttttgctttctcgtgg

SEQ ID NO: 167774 - DNA, 25 bp, Probe Sequence
aatatttagtattgatcgtttcttt

SEQ ID NO: 167775 - DNA, 25 bp, Probe Sequence
aattgattaggatgcttggtaggtt

SEQ ID NO: 167776 - DNA, 25 bp, Probe Sequence
aattcttggtgatgtagggcaggga

SEQ ID NO: 167777 - DNA, 25 bp, Probe Sequence
aattcttgattatgtaggtagtggg

SEQ ID NO: 167778 - DNA, 25 bp, Probe Sequence
aattcatcttttcctgatcgtcagg

SEQ ID NO: 167779 - DNA, 25 bp, Probe Sequence
aatatctgctctctgttagatctca

SEQ ID NO: 167780 - DNA, 25 bp, Probe Sequence
aatatgctgtttccattatgacaca

SEQ ID NO: 167781 - DNA, 25 bp, Probe Sequence
aatatgcagcttaggatgctatttt

SEQ ID NO: 167782 - DNA, 25 bp, Probe Sequence
aatatggcttctacacacatgtgtt

SEQ ID NO: 167783 - DNA, 25 bp, Probe Sequence
aattccattcatacatcagcactct

SEQ ID NO: 167784 - DNA, 25 bp, Probe Sequence
aattctgttcacgaacctgtccaac

SEQ ID NO: 167785 - DNA, 25 bp, Probe Sequence
aattctgaacttggtctgcagacca

SEQ ID NO: 167786 - DNA, 25 bp, Probe Sequence
aattcttttgatggcgagaaccaag

SEQ ID NO: 167787 - DNA, 25 bp, Probe Sequence
aatatcttaggttggagatgacaga

SEQ ID NO: 167788 - DNA, 25 bp, Probe Sequence
aattttgagattaagaatgccagga

SEQ ID NO: 167789 - DNA, 25 bp, Probe Sequence
caatttctggattcataatagcaag

SEQ ID NO: 167790 - DNA, 25 bp, Probe Sequence
aattcgctgctgtgaaatcagatgt

SEQ ID NO: 167791 - DNA, 25 bp, Probe Sequence
aattcgcatctggaagctcagcaag

SEQ ID NO: 167792 - DNA, 25 bp, Probe Sequence
aatatcagattgaacctgtgaagaa

SEQ ID NO: 167793 - DNA, 25 bp, Probe Sequence
aattagatttactatatcaagatat

SEQ ID NO: 167794 - DNA, 25 bp, Probe Sequence
aatatgcttgttgtttcacatgata

SEQ ID NO: 167795 - DNA, 25 bp, Probe Sequence
aattcttggtagttgagcagctctg

SEQ ID NO: 167796 - DNA, 25 bp, Probe Sequence
aattattggcctcatgagagctgaa

SEQ ID NO: 167797 - DNA, 25 bp, Probe Sequence
aattattgaccacctgtttgattac

SEQ ID NO: 167798 - DNA, 25 bp, Probe Sequence
aatttatttcatccagtttgttctc

SEQ ID NO: 167799 - DNA, 25 bp, Probe Sequence
aatatctcattactgggttctttta

SEQ ID NO: 167800 - DNA, 25 bp, Probe Sequence
aatatccattgaatcggtagtccca

SEQ ID NO: 167801 - DNA, 25 bp, Probe Sequence
aatatctctgaagctggattgatac

SEQ ID NO: 167802 - DNA, 25 bp, Probe Sequence
aattatgcttatggctggcatggaa

SEQ ID NO: 167803 - DNA, 25 bp, Probe Sequence
aatattgtcttcctgcgagaataga

SEQ ID NO: 167804 - DNA, 25 bp, Probe Sequence
aatatctggtatcctggcacaataa

SEQ ID NO: 167805 - DNA, 25 bp, Probe Sequence
aatattaatattgtgccatatgaca

SEQ ID NO: 167806 - DNA, 25 bp, Probe Sequence
aatttataattatcctgaacagctc

SEQ ID NO: 167807 - DNA, 25 bp, Probe Sequence
aatttagtctaactcctcaaccatc

SEQ ID NO: 167808 - DNA, 25 bp, Probe Sequence
aatatacaggcttagtcagctgccc

SEQ ID NO: 167809 - DNA, 25 bp, Probe Sequence
aatatatatccttagtttgctcaaa

SEQ ID NO: 167810 - DNA, 25 bp, Probe Sequence
aatatctatcttttcatcatgtcta

SEQ ID NO: 167811 - DNA, 25 bp, Probe Sequence
aatatatagtatgtcagatgctgta

SEQ ID NO: 167812 - DNA, 25 bp, Probe Sequence
aatatttgtagcttgctatctgtat

SEQ ID NO: 167813 - DNA, 25 bp, Probe Sequence
aatattgatatatctgttgctacat

SEQ ID NO: 167814 - DNA, 25 bp, Probe Sequence
aatattgatatatgctcaagcagat

SEQ ID NO: 167815 - DNA, 25 bp, Probe Sequence
aattgattgatcagtcagacagcag

SEQ ID NO: 167816 - DNA, 25 bp, Probe Sequence
aattgtgtgatctagacatgcctta

SEQ ID NO: 167817 - DNA, 25 bp, Probe Sequence
caatatggtgcaaatgacattcctg

SEQ ID NO: 167818 - DNA, 25 bp, Probe Sequence
aatatgttcatccagagtgtgtctt

SEQ ID NO: 167819 - DNA, 25 bp, Probe Sequence
aatattgctatgggagttatctttt

SEQ ID NO: 167820 - DNA, 25 bp, Probe Sequence
aatattgcttcttgtgttttactgt

SEQ ID NO: 167821 - DNA, 25 bp, Probe Sequence
aatatgtctcgctagtgatgttttt

SEQ ID NO: 167822 - DNA, 25 bp, Probe Sequence
aattgttccttgtgcatgttaatac

SEQ ID NO: 167823 - DNA, 25 bp, Probe Sequence
aattgttctttcttagttcaaatga

SEQ ID NO: 167824 - DNA, 25 bp, Probe Sequence
aatttgttcatttcaatattaacta

SEQ ID NO: 167825 - DNA, 25 bp, Probe Sequence
aattttgtatgttagattaagcctt

SEQ ID NO: 167826 - DNA, 25 bp, Probe Sequence
aatatagtgtcacagtgttcacagc

SEQ ID NO: 167827 - DNA, 25 bp, Probe Sequence
aattagtgtatccagccttcactcc

SEQ ID NO: 167828 - DNA, 25 bp, Probe Sequence
aattagtgtatccagccttcactcc

SEQ ID NO: 167829 - DNA, 25 bp, Probe Sequence
aatatagtaacaccacttccatcct

SEQ ID NO: 167830 - DNA, 25 bp, Probe Sequence
aattccaagacagactctcgtcctc

SEQ ID NO: 167831 - DNA, 25 bp, Probe Sequence
aattcacacagagccacctagtttg

SEQ ID NO: 167832 - DNA, 25 bp, Probe Sequence
aattcaaatgaacttcctatttttg

SEQ ID NO: 167833 - DNA, 25 bp, Probe Sequence
aatatacaatgaccacccttcttca

SEQ ID NO: 167834 - DNA, 25 bp, Probe Sequence
aatattcaagactatcagcttctct

SEQ ID NO: 167835 - DNA, 25 bp, Probe Sequence
aatatctcttgatatagaattttta

SEQ ID NO: 167836 - DNA, 25 bp, Probe Sequence
caattccttacaaaatcttcattta

SEQ ID NO: 167837 - DNA, 25 bp, Probe Sequence
aattctatcctctaaacttatctgg

SEQ ID NO: 167838 - DNA, 25 bp, Probe Sequence
aattgcgggccttcaagttattggg

SEQ ID NO: 167839 - DNA, 25 bp, Probe Sequence
aatatctggggtccaagggattggt

SEQ ID NO: 167840 - DNA, 25 bp, Probe Sequence
aattttggattctcagggatgggtt

SEQ ID NO: 167841 - DNA, 25 bp, Probe Sequence
aattttaattctagctgggtgcggt

SEQ ID NO: 167842 - DNA, 25 bp, Probe Sequence
aatttaaatatgctctggtctgggg

SEQ ID NO: 167843 - DNA, 25 bp, Probe Sequence
aatttacactagttgctacttggga

SEQ ID NO: 167844 - DNA, 25 bp, Probe Sequence
aattaggtcaagttcatagtttctg

SEQ ID NO: 167845 - DNA, 25 bp, Probe Sequence
aatttgacatccagtcatggttttt

SEQ ID NO: 167846 - DNA, 25 bp, Probe Sequence
aatttgacacccttcattcatttat

SEQ ID NO: 167847 - DNA, 25 bp, Probe Sequence
aattggagaccgttattctaactca

SEQ ID NO: 167848 - DNA, 25 bp, Probe Sequence
aatttgaggcctatagatttagctt

SEQ ID NO: 167849 - DNA, 25 bp, Probe Sequence
aatttcatgggatctaggattactt

SEQ ID NO: 167850 - DNA, 25 bp, Probe Sequence
aatttgcatgggcaccacatttctt

SEQ ID NO: 167851 - DNA, 25 bp, Probe Sequence
aatatcagcagacacccatcagttt

SEQ ID NO: 167852 - DNA, 25 bp, Probe Sequence
aatatatagaaagcaccatgatttg

SEQ ID NO: 167853 - DNA, 25 bp, Probe Sequence
aatattacaacgcggcagcattatg

SEQ ID NO: 167854 - DNA, 25 bp, Probe Sequence
aatttcaacacaggggacagctatg

SEQ ID NO: 167855 - DNA, 25 bp, Probe Sequence
aatattttactgctggtcactcatg

SEQ ID NO: 167856 - DNA, 25 bp, Probe Sequence
aatttgctttccatgagtactcatt

SEQ ID NO: 167857 - DNA, 25 bp, Probe Sequence
aatttgcttattttagttgtattca

SEQ ID NO: 167858 - DNA, 25 bp, Probe Sequence
aattctatattttctggcaagtttc

SEQ ID NO: 167859 - DNA, 25 bp, Probe Sequence
aatatttgattttaggagagtgttt

SEQ ID NO: 167860 - DNA, 25 bp, Probe Sequence
aatatttgattttaggagagtgttt

SEQ ID NO: 167861 - DNA, 25 bp, Probe Sequence
aatatttgattttaggagagtgttt

SEQ ID NO: 167862 - DNA, 25 bp, Probe Sequence
aatttagtgtatcatgcgagttttt

SEQ ID NO: 167863 - DNA, 25 bp, Probe Sequence
aatatctcagttagtgacagatgtt

SEQ ID NO: 167864 - DNA, 25 bp, Probe Sequence
aatatgcatggttggtgagaatcta

SEQ ID NO: 167865 - DNA, 25 bp, Probe Sequence
aatatatgcacttgaaagtattcaa

SEQ ID NO: 167866 - DNA, 25 bp, Probe Sequence
cactcaatgcaattctcaagtctat

SEQ ID NO: 167867 - DNA, 25 bp, Probe Sequence
cactcaaagagtacaacctagccct

SEQ ID NO: 167868 - DNA, 25 bp, Probe Sequence
cacgcataaaggcagtcgtacatac

SEQ ID NO: 167869 - DNA, 25 bp, Probe Sequence
ccgctaaatagctcacgttaggcat

SEQ ID NO: 167870 - DNA, 25 bp, Probe Sequence
aattatcaaggctgccgttcggcct

SEQ ID NO: 167871 - DNA, 25 bp, Probe Sequence
aatttgaagacatccgtgtccctcc

SEQ ID NO: 167872 - DNA, 25 bp, Probe Sequence
aatttgaagattgcacttgcacttt

SEQ ID NO: 167873 - DNA, 25 bp, Probe Sequence
aatttgatcgaatcacctgaatgtt

SEQ ID NO: 167874 - DNA, 25 bp, Probe Sequence
aatttgtcataaccactgctgagtg

SEQ ID NO: 167875 - DNA, 25 bp, Probe Sequence
aattttcatcaaacatcggagtagt

SEQ ID NO: 167876 - DNA, 25 bp, Probe Sequence
aatttctacatgtttgccagttaat

SEQ ID NO: 167877 - DNA, 25 bp, Probe Sequence
aattctttcaacttgcaatttgcaa

SEQ ID NO: 167878 - DNA, 25 bp, Probe Sequence
aattttctgaaactgcataagtgaa

SEQ ID NO: 167879 - DNA, 25 bp, Probe Sequence
aatttttgccagtctcatgggtaga

SEQ ID NO: 167880 - DNA, 25 bp, Probe Sequence
aattagttgagagcgctgggttgac

SEQ ID NO: 167881 - DNA, 25 bp, Probe Sequence
aattatgctaggggctggggctctg

SEQ ID NO: 167882 - DNA, 25 bp, Probe Sequence
aattactgactgtcctagtacattg

SEQ ID NO: 167883 - DNA, 25 bp, Probe Sequence
aatatttatctgtccaatgtgccat

SEQ ID NO: 167884 - DNA, 25 bp, Probe Sequence
aatttttctcagtcactgatatgca

SEQ ID NO: 167885 - DNA, 25 bp, Probe Sequence
aattcatttccacactgatgacaca

SEQ ID NO: 167886 - DNA, 25 bp, Probe Sequence
aattcctgtggacatgctgtgtaaa

SEQ ID NO: 167887 - DNA, 25 bp, Probe Sequence
aattatgttaatctgcagtgtcaaa

SEQ ID NO: 167888 - DNA, 25 bp, Probe Sequence
aatatttttcatcatgcacgaatta

SEQ ID NO: 167889 - DNA, 25 bp, Probe Sequence
aattttgcatacaaatgaggactta

SEQ ID NO: 167890 - DNA, 25 bp, Probe Sequence
aatatttcagactctcatgagatct

SEQ ID NO: 167891 - DNA, 25 bp, Probe Sequence
aatataccaatctcctgaggcttgt

SEQ ID NO: 167892 - DNA, 25 bp, Probe Sequence
aattgccacattttcttatggcatt

SEQ ID NO: 167893 - DNA, 25 bp, Probe Sequence
caatgctccataatttataggtgca

SEQ ID NO: 167894 - DNA, 25 bp, Probe Sequence
aattccatactataaactaggaatg

SEQ ID NO: 167895 - DNA, 25 bp, Probe Sequence
aattcccaatttaaagtattatatg

SEQ ID NO: 167896 - DNA, 25 bp, Probe Sequence
aattgctccaagcttcctgtaaact

SEQ ID NO: 167897 - DNA, 25 bp, Probe Sequence
aattcccataccaaccttgagacat

SEQ ID NO: 167898 - DNA, 25 bp, Probe Sequence
aattctttggcctacctataactgg

SEQ ID NO: 167899 - DNA, 25 bp, Probe Sequence
aattattttgcctattcagctagtt

SEQ ID NO: 167900 - DNA, 25 bp, Probe Sequence
aattttctgtgctatttataatgta

SEQ ID NO: 167901 - DNA, 25 bp, Probe Sequence
aatttctctctgttttatatatgtc

SEQ ID NO: 167902 - DNA, 25 bp, Probe Sequence
aattttcctggtgccaatttcaagt

SEQ ID NO: 167903 - DNA, 25 bp, Probe Sequence
aattttcttcttgccaattttgttg

SEQ ID NO: 167904 - DNA, 25 bp, Probe Sequence
aattttattcctatatagtttattg

SEQ ID NO: 167905 - DNA, 25 bp, Probe Sequence
aattcttttcccaatgtaggtatga

SEQ ID NO: 167906 - DNA, 25 bp, Probe Sequence
aatattagtatcgttatgtccgtta

SEQ ID NO: 167907 - DNA, 25 bp, Probe Sequence
aatttactgtggcttttctgatcta

SEQ ID NO: 167908 - DNA, 25 bp, Probe Sequence
aatttagctaggcatggcggcgcat

SEQ ID NO: 167909 - DNA, 25 bp, Probe Sequence
aattacaggaggcatgggcctctct

SEQ ID NO: 167910 - DNA, 25 bp, Probe Sequence
aattgtagcaagcgatccagacttc

SEQ ID NO: 167911 - DNA, 25 bp, Probe Sequence
aattgtccaaggcaccatatctccg

SEQ ID NO: 167912 - DNA, 25 bp, Probe Sequence
aattgtccaaggcaccatatctccg

SEQ ID NO: 167913 - DNA, 25 bp, Probe Sequence
aattgtccaaggcaccatatctccg

SEQ ID NO: 167914 - DNA, 25 bp, Probe Sequence
aattgtccaaggcaccatatctccg

SEQ ID NO: 167915 - DNA, 25 bp, Probe Sequence
aattcatccataagaagccattctg

SEQ ID NO: 167916 - DNA, 25 bp, Probe Sequence
aattgctatgctaaacagcctttac

SEQ ID NO: 167917 - DNA, 25 bp, Probe Sequence
aattgttctcagaatcccttaacag

SEQ ID NO: 167918 - DNA, 25 bp, Probe Sequence
caattgttcacatacccagtaatga

SEQ ID NO: 167919 - DNA, 25 bp, Probe Sequence
aatttgcctgcattaccggtcgatg

SEQ ID NO: 167920 - DNA, 25 bp, Probe Sequence
aattgccctgaaactggttggtgaa

SEQ ID NO: 167921 - DNA, 25 bp, Probe Sequence
aattccgccaaagtggcttcaaggc

SEQ ID NO: 167922 - DNA, 25 bp, Probe Sequence
aattaatcccaagttgcttcagttg

SEQ ID NO: 167923 - DNA, 25 bp, Probe Sequence
aattttgccaatattgccaagtttt

SEQ ID NO: 167924 - DNA, 25 bp, Probe Sequence
aattttgccaatgatgtacagtttt

SEQ ID NO: 167925 - DNA, 25 bp, Probe Sequence
aattgttcaaagatgttgtttttca

SEQ ID NO: 167926 - DNA, 25 bp, Probe Sequence
aattgtctagggtgttctgtactta

SEQ ID NO: 167927 - DNA, 25 bp, Probe Sequence
aatttctaggggaatctctgtgata

SEQ ID NO: 167928 - DNA, 25 bp, Probe Sequence
aattactaggtcaagatctagcgat

SEQ ID NO: 167929 - DNA, 25 bp, Probe Sequence
aattactgacctatgctctaaaaca

SEQ ID NO: 167930 - DNA, 25 bp, Probe Sequence
aattctgtacttatatctgtaaaat

SEQ ID NO: 167931 - DNA, 25 bp, Probe Sequence
aatatttcacttaaactttgtcact

SEQ ID NO: 167932 - DNA, 25 bp, Probe Sequence
aatatttatttcaagaccctgcttt

SEQ ID NO: 167933 - DNA, 25 bp, Probe Sequence
aatattttcaataattcaaccattt

SEQ ID NO: 167934 - DNA, 25 bp, Probe Sequence
aattctttcacaaggtacaaaatct

SEQ ID NO: 167935 - DNA, 25 bp, Probe Sequence
aattctgtgcccattgaacaataac

SEQ ID NO: 167936 - DNA, 25 bp, Probe Sequence
aattcaatcatttttaacaagccaa

SEQ ID NO: 167937 - DNA, 25 bp, Probe Sequence
aattaacaacgtaaaactgcaagag

SEQ ID NO: 167938 - DNA, 25 bp, Probe Sequence
aattttcaactcagaagcactcaaa

SEQ ID NO: 167939 - DNA, 25 bp, Probe Sequence
aattttcaactcagaagcactcaaa

SEQ ID NO: 167940 - DNA, 25 bp, Probe Sequence
aatttgacaactcacaagctggaaa

SEQ ID NO: 167941 - DNA, 25 bp, Probe Sequence
aatattgccaaacgacacaggaaat

SEQ ID NO: 167942 - DNA, 25 bp, Probe Sequence
aattctcactaacagaagtaacttt

SEQ ID NO: 167943 - DNA, 25 bp, Probe Sequence
aattcacactaaaaccagtacagta

SEQ ID NO: 167944 - DNA, 25 bp, Probe Sequence
aattccattaattaccaagccctca

SEQ ID NO: 167945 - DNA, 25 bp, Probe Sequence
aattctttcagttaccaagctctcc

SEQ ID NO: 167946 - DNA, 25 bp, Probe Sequence
gaattcttgtggctaccaacctatt

SEQ ID NO: 167947 - DNA, 25 bp, Probe Sequence
aatattttacgtggccagatcctca

SEQ ID NO: 167948 - DNA, 25 bp, Probe Sequence
aatttctaccagggccatattagca

SEQ ID NO: 167949 - DNA, 25 bp, Probe Sequence
aatttctagatcccccgattacatt

SEQ ID NO: 167950 - DNA, 25 bp, Probe Sequence
aatttctagatcccccgattacatt

SEQ ID NO: 167951 - DNA, 25 bp, Probe Sequence
aatttctagatcccccgattacatt

SEQ ID NO: 167952 - DNA, 25 bp, Probe Sequence
aattactagacctcagtactgaatc

SEQ ID NO: 167953 - DNA, 25 bp, Probe Sequence
aattactagacctcagtactgaatc

SEQ ID NO: 167954 - DNA, 25 bp, Probe Sequence
aatattctagaagacagtaccattc

SEQ ID NO: 167955 - DNA, 25 bp, Probe Sequence
aatttccagataagacatgtcacca

SEQ ID NO: 167956 - DNA, 25 bp, Probe Sequence
aatattaaaaagactggaagccaga

SEQ ID NO: 167957 - DNA, 25 bp, Probe Sequence
aatattcaactatgagctggggaaa

SEQ ID NO: 167958 - DNA, 25 bp, Probe Sequence
aatttctattgatgtcttggctaaa

SEQ ID NO: 167959 - DNA, 25 bp, Probe Sequence
aatttctgcttgagtatggtgttaa

SEQ ID NO: 167960 - DNA, 25 bp, Probe Sequence
aattatccagtgagtttgtgttcaa

SEQ ID NO: 167961 - DNA, 25 bp, Probe Sequence
aattccgagctgcggttgtgcatga

SEQ ID NO: 167962 - DNA, 25 bp, Probe Sequence
aattcctggctggaccttgtcagaa

SEQ ID NO: 167963 - DNA, 25 bp, Probe Sequence
aattcctggaggacacctgtgtgca

SEQ ID NO: 167964 - DNA, 25 bp, Probe Sequence
aatttcgtgcatcgagacctggctg

SEQ ID NO: 167965 - DNA, 25 bp, Probe Sequence
aattatgcggcttaaagctgtctga

SEQ ID NO: 167966 - DNA, 25 bp, Probe Sequence
aattattgttatacacagctttatg

SEQ ID NO: 167967 - DNA, 25 bp, Probe Sequence
aattatagctgcatatcccttcttt

SEQ ID NO: 167968 - DNA, 25 bp, Probe Sequence
aatttggtcctacctatatgtgtgt

SEQ ID NO: 167969 - DNA, 25 bp, Probe Sequence
aattgtggagttagcctcctgtggt

SEQ ID NO: 167970 - DNA, 25 bp, Probe Sequence
aatttggtgattgggaggcagttgg

SEQ ID NO: 167971 - DNA, 25 bp, Probe Sequence
aattatggtttcatggacactgttg

SEQ ID NO: 167972 - DNA, 25 bp, Probe Sequence
aattaatatttttagactctgtgct

SEQ ID NO: 167973 - DNA, 25 bp, Probe Sequence
aattcagtatttctgcactcttagc

SEQ ID NO: 167974 - DNA, 25 bp, Probe Sequence
catagtaaatagtcttaccttagta

SEQ ID NO: 167975 - DNA, 25 bp, Probe Sequence
aattagcagtagtcctgccctttgt

SEQ ID NO: 167976 - DNA, 25 bp, Probe Sequence
aattaagtagaccaacattttgttg

SEQ ID NO: 167977 - DNA, 25 bp, Probe Sequence
caattaagccgactgagttcctttc

SEQ ID NO: 167978 - DNA, 25 bp, Probe Sequence
caatccaatgccgagtggctgactg

SEQ ID NO: 167979 - DNA, 25 bp, Probe Sequence
caatcatcagatatgcgggtccagt

SEQ ID NO: 167980 - DNA, 25 bp, Probe Sequence
aattcaaacttgagccacatgatga

SEQ ID NO: 167981 - DNA, 25 bp, Probe Sequence
aattcaaaattgagctctaggccca

SEQ ID NO: 167982 - DNA, 25 bp, Probe Sequence
aattcaaaattggatgcatcatctg

SEQ ID NO: 167983 - DNA, 25 bp, Probe Sequence
aattctatgacagtgtacatatatg

SEQ ID NO: 167984 - DNA, 25 bp, Probe Sequence
aattatcatgacttatcactatcaa

SEQ ID NO: 167985 - DNA, 25 bp, Probe Sequence
aatttgcatacttacctagtgaaac

SEQ ID NO: 167986 - DNA, 25 bp, Probe Sequence
aatttgcaaagtacccttgagattg

SEQ ID NO: 167987 - DNA, 25 bp, Probe Sequence
aatttgaacactgtccttaagaagt

SEQ ID NO: 167988 - DNA, 25 bp, Probe Sequence
aatattacagactgtcttggaagat

SEQ ID NO: 167989 - DNA, 25 bp, Probe Sequence
aatttccagcactttaatggccaat

SEQ ID NO: 167990 - DNA, 25 bp, Probe Sequence
aatttgcacatgaatgttaatggaa

SEQ ID NO: 167991 - DNA, 25 bp, Probe Sequence
aatattgcactgaatgtttgtggtt

SEQ ID NO: 167992 - DNA, 25 bp, Probe Sequence
aatattcctgcttgtagttggtgtt

SEQ ID NO: 167993 - DNA, 25 bp, Probe Sequence
caatattcacctgccagactggctt

SEQ ID NO: 167994 - DNA, 25 bp, Probe Sequence
caataagccttcccgcaatgtttgg

SEQ ID NO: 167995 - DNA, 25 bp, Probe Sequence
caatttgtcctggcacgtgttttgg

SEQ ID NO: 167996 - DNA, 25 bp, Probe Sequence
aatttgtgcttggaatgtgttgatg

SEQ ID NO: 167997 - DNA, 25 bp, Probe Sequence
aattttctgcaggatgattgtacag

SEQ ID NO: 167998 - DNA, 25 bp, Probe Sequence
aatttagctgcatcatgggtcaatg

SEQ ID NO: 167999 - DNA, 25 bp, Probe Sequence
aatttagctgcatcatgggtcaatg

SEQ ID NO: 168000 - DNA, 25 bp, Probe Sequence
aattcttcagcatttcggatcaatg

SEQ ID NO: 168001 - DNA, 25 bp, Probe Sequence
aattatatggcatttctggactctc

SEQ ID NO: 168002 - DNA, 25 bp, Probe Sequence
aattagtggaaagtgcagagtctct

SEQ ID NO: 168003 - DNA, 25 bp, Probe Sequence
caatgcaagtggttcagttgaggcc

SEQ ID NO: 168004 - DNA, 25 bp, Probe Sequence
caatgccagtcgggcagcccaggat

SEQ ID NO: 168005 - DNA, 25 bp, Probe Sequence
caataggctggtgacaccagagttc

SEQ ID NO: 168006 - DNA, 25 bp, Probe Sequence
caataagcgggctacaaagtacatt

SEQ ID NO: 168007 - DNA, 25 bp, Probe Sequence
aattagctgttgtgagatatttctc

SEQ ID NO: 168008 - DNA, 25 bp, Probe Sequence
aattgactggatttagatttatcta

SEQ ID NO: 168009 - DNA, 25 bp, Probe Sequence
aattacttgatattccttgtctcca

SEQ ID NO: 168010 - DNA, 25 bp, Probe Sequence
aattacatctgaaggctatatatcc

SEQ ID NO: 168011 - DNA, 25 bp, Probe Sequence
aattaactgatatccagtatggaag

SEQ ID NO: 168012 - DNA, 25 bp, Probe Sequence
aatattcttgattactcggatggaa

SEQ ID NO: 168013 - DNA, 25 bp, Probe Sequence
caatattcttttgacctgattaatc

SEQ ID NO: 168014 - DNA, 25 bp, Probe Sequence
aattatcttgctgaatccttctaaa

SEQ ID NO: 168015 - DNA, 25 bp, Probe Sequence
aattcattttccacgttctagcatt

SEQ ID NO: 168016 - DNA, 25 bp, Probe Sequence
aattattttcactctattcttgctt

SEQ ID NO: 168017 - DNA, 25 bp, Probe Sequence
aattttgttaagttcagccattatt

SEQ ID NO: 168018 - DNA, 25 bp, Probe Sequence
aattttcttcttactagccactatt

SEQ ID NO: 168019 - DNA, 25 bp, Probe Sequence
aatttataacgttctcagtcctttg

SEQ ID NO: 168020 - DNA, 25 bp, Probe Sequence
caatttataacgttctcagtccttt

SEQ ID NO: 168021 - DNA, 25 bp, Probe Sequence
caattcgaaaacaaccgtcctgctg

SEQ ID NO: 168022 - DNA, 25 bp, Probe Sequence
caatttaggaaccacccatttgctg

SEQ ID NO: 168023 - DNA, 25 bp, Probe Sequence
aatttagagcattccacccaatata

SEQ ID NO: 168024 - DNA, 25 bp, Probe Sequence
aattaaatgatgtcctgttcaaaaa

SEQ ID NO: 168025 - DNA, 25 bp, Probe Sequence
aattaattctaccatcttgcaataa

SEQ ID NO: 168026 - DNA, 25 bp, Probe Sequence
aattcatcattgggctcacttctaa

SEQ ID NO: 168027 - DNA, 25 bp, Probe Sequence
aattcaagatgcttcccatttgtgt

SEQ ID NO: 168028 - DNA, 25 bp, Probe Sequence
aattatcatatcttccattcctgtt

SEQ ID NO: 168029 - DNA, 25 bp, Probe Sequence
aattattcatgctctcatatatatt

SEQ ID NO: 168030 - DNA, 25 bp, Probe Sequence
aattatccattttctgatgaatatt

SEQ ID NO: 168031 - DNA, 25 bp, Probe Sequence
aattataatctcatttcaatttata

SEQ ID NO: 168032 - DNA, 25 bp, Probe Sequence
aattggagtcatactgtaaacagtt

SEQ ID NO: 168033 - DNA, 25 bp, Probe Sequence
aatttcaactagatcaagacatgtt

SEQ ID NO: 168034 - DNA, 25 bp, Probe Sequence
aatttaatcttcaagcagtgatcaa

SEQ ID NO: 168035 - DNA, 25 bp, Probe Sequence
aatttcaacgagaaggcgatccata

SEQ ID NO: 168036 - DNA, 25 bp, Probe Sequence
aatttcccagagaagcctcaccatt

SEQ ID NO: 168037 - DNA, 25 bp, Probe Sequence
aatttctgtaatccacctcaagctt

SEQ ID NO: 168038 - DNA, 25 bp, Probe Sequence
aatttcttaattacacaaacatgtg

SEQ ID NO: 168039 - DNA, 25 bp, Probe Sequence
aatttgcctttttaatgaacatgtg

SEQ ID NO: 168040 - DNA, 25 bp, Probe Sequence
aattatttattatgaagaccagtga

SEQ ID NO: 168041 - DNA, 25 bp, Probe Sequence
aattttctcttaatggaactctgta

SEQ ID NO: 168042 - DNA, 25 bp, Probe Sequence
aatttgttcttaatgcagccactat

SEQ ID NO: 168043 - DNA, 25 bp, Probe Sequence
aatttgttagatttggctccattgt

SEQ ID NO: 168044 - DNA, 25 bp, Probe Sequence
aattatttggtgttgagcctctctt

SEQ ID NO: 168045 - DNA, 25 bp, Probe Sequence
aatttgtcttgttggagcctgctct

SEQ ID NO: 168046 - DNA, 25 bp, Probe Sequence
aatttgctgtaggctgtgacgctgt

SEQ ID NO: 168047 - DNA, 25 bp, Probe Sequence
aattatcagtgacatgtgaggcagt

SEQ ID NO: 168048 - DNA, 25 bp, Probe Sequence
aattatcagcttcaattggcgattg

SEQ ID NO: 168049 - DNA, 25 bp, Probe Sequence
aattgtcaattggtcatctggctgt

SEQ ID NO: 168050 - DNA, 25 bp, Probe Sequence
aattgtcaattggtcatctggctgt

SEQ ID NO: 168051 - DNA, 25 bp, Probe Sequence
aatttcatatctttctctgtgcttc

SEQ ID NO: 168052 - DNA, 25 bp, Probe Sequence
aattattgatcatgttgctggcttt

SEQ ID NO: 168053 - DNA, 25 bp, Probe Sequence
aatttagattcactgatgtccttca

SEQ ID NO: 168054 - DNA, 25 bp, Probe Sequence
aatttacattagcatcccacaaaat

SEQ ID NO: 168055 - DNA, 25 bp, Probe Sequence
aattgttttcagacatcaataaaaa

SEQ ID NO: 168056 - DNA, 25 bp, Probe Sequence
aatttgtcgtgcctacaatcaagaa

SEQ ID NO: 168057 - DNA, 25 bp, Probe Sequence
aatttgtctgtgtactcaagcaata

SEQ ID NO: 168058 - DNA, 25 bp, Probe Sequence
aattgtgtttgaccccaaatgactt

SEQ ID NO: 168059 - DNA, 25 bp, Probe Sequence
aattggctctggtttggcaaaattt

SEQ ID NO: 168060 - DNA, 25 bp, Probe Sequence
aatttatatggctgtggaaaaacga

SEQ ID NO: 168061 - DNA, 25 bp, Probe Sequence
aattttatgctgtgtggaatactaa

SEQ ID NO: 168062 - DNA, 25 bp, Probe Sequence
aattattagctgaaatggattcaca

SEQ ID NO: 168063 - DNA, 25 bp, Probe Sequence
aattctcttctgtatcatggcattt

SEQ ID NO: 168064 - DNA, 25 bp, Probe Sequence
aattagcttgtgttcagccacataa

SEQ ID NO: 168065 - DNA, 25 bp, Probe Sequence
aatttgcattatatgtccactaaca

SEQ ID NO: 168066 - DNA, 25 bp, Probe Sequence
aatttgcatctcattttgcctaaat

SEQ ID NO: 168067 - DNA, 25 bp, Probe Sequence
aatttgcattccatggtgttaacat

SEQ ID NO: 168068 - DNA, 25 bp, Probe Sequence
aattccatgtatagttggtgtacac

SEQ ID NO: 168069 - DNA, 25 bp, Probe Sequence
aatttatggcagatgtgtgttactt

SEQ ID NO: 168070 - DNA, 25 bp, Probe Sequence
aatttaagacatttctattatctct

SEQ ID NO: 168071 - DNA, 25 bp, Probe Sequence
aattaaagcaatcattattcatcca

SEQ ID NO: 168072 - DNA, 25 bp, Probe Sequence
aattcacataagcacttaagcacca

SEQ ID NO: 168073 - DNA, 25 bp, Probe Sequence
aattatggagcacaatgtaagacaa

SEQ ID NO: 168074 - DNA, 25 bp, Probe Sequence
aatttgagagaccacagtatgctga

SEQ ID NO: 168075 - DNA, 25 bp, Probe Sequence
aatttcacatgcttacagcttctga

SEQ ID NO: 168076 - DNA, 25 bp, Probe Sequence
caattaattcactaagctgcctagc

SEQ ID NO: 168077 - DNA, 25 bp, Probe Sequence
aattgaaatcagccagcacgccaag

SEQ ID NO: 168078 - DNA, 25 bp, Probe Sequence
aattagagatcaccatgctgtccca

SEQ ID NO: 168079 - DNA, 25 bp, Probe Sequence
aattggcagatgcccactgccttcc

SEQ ID NO: 168080 - DNA, 25 bp, Probe Sequence
aattgagcaatgcagctgctggttg

SEQ ID NO: 168081 - DNA, 25 bp, Probe Sequence
aattatgcacatagatgcgatcatt

SEQ ID NO: 168082 - DNA, 25 bp, Probe Sequence
aatttgcacatgaatcgttcaatgg

SEQ ID NO: 168083 - DNA, 25 bp, Probe Sequence
aattctgccatggtcctagattgtg

SEQ ID NO: 168084 - DNA, 25 bp, Probe Sequence
aattctgtccaagccagcatggtgg

SEQ ID NO: 168085 - DNA, 25 bp, Probe Sequence
aattttccacagttaaggcatgagg

SEQ ID NO: 168086 - DNA, 25 bp, Probe Sequence
aatttactagagccccagaggcagg

SEQ ID NO: 168087 - DNA, 25 bp, Probe Sequence
aatttcatataactgcccaggacgc

SEQ ID NO: 168088 - DNA, 25 bp, Probe Sequence
aattcttaacatagccaagcgcccc

SEQ ID NO: 168089 - DNA, 25 bp, Probe Sequence
aattttcatcacagcgaagaccagc

SEQ ID NO: 168090 - DNA, 25 bp, Probe Sequence
aattttctatcaacgcaaacacctt

SEQ ID NO: 168091 - DNA, 25 bp, Probe Sequence
aattgtatggtcaggccaagcctct

SEQ ID NO: 168092 - DNA, 25 bp, Probe Sequence
aattgtaagtcaagatgggcaactc

SEQ ID NO: 168093 - DNA, 25 bp, Probe Sequence
aatttcacattaatatttgctgaca

SEQ ID NO: 168094 - DNA, 25 bp, Probe Sequence
aatttcaattatagtgtcatgcaga

SEQ ID NO: 168095 - DNA, 25 bp, Probe Sequence
aatttaaaatgctagctgctcaaga

SEQ ID NO: 168096 - DNA, 25 bp, Probe Sequence
aatttagtgtattgactgcctcagt

SEQ ID NO: 168097 - DNA, 25 bp, Probe Sequence
aattctagagctaatacatgccgac

SEQ ID NO: 168098 - DNA, 25 bp, Probe Sequence
aattctagagctaatacatgccgac

SEQ ID NO: 168099 - DNA, 25 bp, Probe Sequence
aatttagtgatcaaactgccattca

SEQ ID NO: 168100 - DNA, 25 bp, Probe Sequence
aattctgggagccagtctgccatgc

SEQ ID NO: 168101 - DNA, 25 bp, Probe Sequence
aattcagcggcagtgtgtccatcat

SEQ ID NO: 168102 - DNA, 25 bp, Probe Sequence
aattcagcctcattgtgtagtatgt

SEQ ID NO: 168103 - DNA, 25 bp, Probe Sequence
aattcagttggattatcattatgtg

SEQ ID NO: 168104 - DNA, 25 bp, Probe Sequence
aattctttatgattaattgtataat

SEQ ID NO: 168105 - DNA, 25 bp, Probe Sequence
aattttttgttgaatctctatactg

SEQ ID NO: 168106 - DNA, 25 bp, Probe Sequence
aatttcatgttgatgatatacacaa

SEQ ID NO: 168107 - DNA, 25 bp, Probe Sequence
aattcttgttggtatatatccagca

SEQ ID NO: 168108 - DNA, 25 bp, Probe Sequence
aattgtttcttattgatagtcagca

SEQ ID NO: 168109 - DNA, 25 bp, Probe Sequence
aatttttttatctaatgatcatcat

SEQ ID NO: 168110 - DNA, 25 bp, Probe Sequence
aatttcagcttctatatattgtatg

SEQ ID NO: 168111 - DNA, 25 bp, Probe Sequence
aatttagatgccttaatagtatata

SEQ ID NO: 168112 - DNA, 25 bp, Probe Sequence
aattttccccatgctactataatca

SEQ ID NO: 168113 - DNA, 25 bp, Probe Sequence
aattgtttccttgtactgatataaa

SEQ ID NO: 168114 - DNA, 25 bp, Probe Sequence
caaggttacctgtagctcctttaag

SEQ ID NO: 168115 - DNA, 25 bp, Probe Sequence
caacgagctaccgtttttattacag

SEQ ID NO: 168116 - DNA, 25 bp, Probe Sequence
aattagtccgcctttcttatatgaa

SEQ ID NO: 168117 - DNA, 25 bp, Probe Sequence
aattcaactgcgttctacttttaga

SEQ ID NO: 168118 - DNA, 25 bp, Probe Sequence
aattgcaattgtgttacttttatta

SEQ ID NO: 168119 - DNA, 25 bp, Probe Sequence
caattgcaattgtgttacttttatt

SEQ ID NO: 168120 - DNA, 25 bp, Probe Sequence
aattcaatagacttttgctggttat

SEQ ID NO: 168121 - DNA, 25 bp, Probe Sequence
aattcaatagacttttgctggttat

SEQ ID NO: 168122 - DNA, 25 bp, Probe Sequence
aattatgttacttgtttggctgttc

SEQ ID NO: 168123 - DNA, 25 bp, Probe Sequence
aattatggtgcactttttcgctatt

SEQ ID NO: 168124 - DNA, 25 bp, Probe Sequence
caattgtgccagcctggtttggtaa

SEQ ID NO: 168125 - DNA, 25 bp, Probe Sequence
aatttctcactttgcatttagtcaa

SEQ ID NO: 168126 - DNA, 25 bp, Probe Sequence
caatacctgcctttcataatcacca

SEQ ID NO: 168127 - DNA, 25 bp, Probe Sequence
caatcactcagctcttaaagcaacc

SEQ ID NO: 168128 - DNA, 25 bp, Probe Sequence
aattctgcctttgacataaatccta

SEQ ID NO: 168129 - DNA, 25 bp, Probe Sequence
aatttagcttttactaattcgcatc

SEQ ID NO: 168130 - DNA, 25 bp, Probe Sequence
aattagagtttgtcacttattccat

SEQ ID NO: 168131 - DNA, 25 bp, Probe Sequence
aattaattttggactttgctcacta

SEQ ID NO: 168132 - DNA, 25 bp, Probe Sequence
aattatgtattttgtcttgggctgc

SEQ ID NO: 168133 - DNA, 25 bp, Probe Sequence
aattatgtattttgtcttgggctgc

SEQ ID NO: 168134 - DNA, 25 bp, Probe Sequence
aattcagtttcttgtgtggggcctt

SEQ ID NO: 168135 - DNA, 25 bp, Probe Sequence
aattgcattttaattggggcagtta

SEQ ID NO: 168136 - DNA, 25 bp, Probe Sequence
caatttgtgtgtgttggggggtact

SEQ ID NO: 168137 - DNA, 25 bp, Probe Sequence
caataatggctcgtctatgtgtgga

SEQ ID NO: 168138 - DNA, 25 bp, Probe Sequence
aattcatcagtcagtggtgtggagg

SEQ ID NO: 168139 - DNA, 25 bp, Probe Sequence
aattcatcctctgctgatgttcaga

SEQ ID NO: 168140 - DNA, 25 bp, Probe Sequence
aattatcttctgactttctaggggt

SEQ ID NO: 168141 - DNA, 25 bp, Probe Sequence
caatagtttcttctcacaggggcag

SEQ ID NO: 168142 - DNA, 25 bp, Probe Sequence
aattttgtcttgtactcagagaagc

SEQ ID NO: 168143 - DNA, 25 bp, Probe Sequence
aatttcactttgtgtgaagcacaca

SEQ ID NO: 168144 - DNA, 25 bp, Probe Sequence
aattccactttgtttagcatttcaa

SEQ ID NO: 168145 - DNA, 25 bp, Probe Sequence
aattcccaattttcaccttatgcaa

SEQ ID NO: 168146 - DNA, 25 bp, Probe Sequence
aattcccacatttctcatttggtaa

SEQ ID NO: 168147 - DNA, 25 bp, Probe Sequence
aattccgagcattacatcattttgt

SEQ ID NO: 168148 - DNA, 25 bp, Probe Sequence
aattcgcaagttccagattctcaat

SEQ ID NO: 168149 - DNA, 25 bp, Probe Sequence
aatttcatgtttcgagtgcttgcaa

SEQ ID NO: 168150 - DNA, 25 bp, Probe Sequence
caatttgattattgaggagtctcag

SEQ ID NO: 168151 - DNA, 25 bp, Probe Sequence
caaggtatcctactacaaccaggcc

SEQ ID NO: 168152 - DNA, 25 bp, Probe Sequence
caatcttcccaatactttcaggcct

SEQ ID NO: 168153 - DNA, 25 bp, Probe Sequence
cacattacccaagccctcatatggc

SEQ ID NO: 168154 - DNA, 25 bp, Probe Sequence
caataacccatacagagccttggcc

SEQ ID NO: 168155 - DNA, 25 bp, Probe Sequence
aattcctccatagcaggctgttggc

SEQ ID NO: 168156 - DNA, 25 bp, Probe Sequence
aattttcacattgatgactatttta

SEQ ID NO: 168157 - DNA, 25 bp, Probe Sequence
caattttcccaattgacctctttct

SEQ ID NO: 168158 - DNA, 25 bp, Probe Sequence
caattttcccaattgacctctttct

SEQ ID NO: 168159 - DNA, 25 bp, Probe Sequence
aatttttctcagaatgaccattttg

SEQ ID NO: 168160 - DNA, 25 bp, Probe Sequence
aattgtttctgcttatacctttact

SEQ ID NO: 168161 - DNA, 25 bp, Probe Sequence
aattttagctgctttatcatcttta

SEQ ID NO: 168162 - DNA, 25 bp, Probe Sequence
aattatgaagtttatcactccttag

SEQ ID NO: 168163 - DNA, 25 bp, Probe Sequence
aattagcggtactccagcactttgg

SEQ ID NO: 168164 - DNA, 25 bp, Probe Sequence
cattttgggttaccgagagcttttg

SEQ ID NO: 168165 - DNA, 25 bp, Probe Sequence
aatttaggattcacgcaagtttcag

SEQ ID NO: 168166 - DNA, 25 bp, Probe Sequence
caatttaggattcacgcaagtttca

SEQ ID NO: 168167 - DNA, 25 bp, Probe Sequence
aattggaggactcaccaggcttgtg

SEQ ID NO: 168168 - DNA, 25 bp, Probe Sequence
caatgtcgtggagaacctcgcgttg

SEQ ID NO: 168169 - DNA, 25 bp, Probe Sequence
caatgtcgtggagaacctcgcgttg

SEQ ID NO: 168170 - DNA, 25 bp, Probe Sequence
caatgtcgtggagaacctcgcgttg

SEQ ID NO: 168171 - DNA, 25 bp, Probe Sequence
caatggcgtaggcttttcggtggag

SEQ ID NO: 168172 - DNA, 25 bp, Probe Sequence
caatggccgtagcgtttacgtggag

SEQ ID NO: 168173 - DNA, 25 bp, Probe Sequence
aattcacgtagtgcttaaaatgctg

SEQ ID NO: 168174 - DNA, 25 bp, Probe Sequence
aattcaatgctagttcttaaagaac

SEQ ID NO: 168175 - DNA, 25 bp, Probe Sequence
aattcatagttaccaatgcaataaa

SEQ ID NO: 168176 - DNA, 25 bp, Probe Sequence
aattcaacataacaagctcattatt

SEQ ID NO: 168177 - DNA, 25 bp, Probe Sequence
aattaacaaggcttgaatctgtatt

SEQ ID NO: 168178 - DNA, 25 bp, Probe Sequence
aattaccgagcctatgaagatgagt

SEQ ID NO: 168179 - DNA, 25 bp, Probe Sequence
aattctcactggggcgaaggagtgg

SEQ ID NO: 168180 - DNA, 25 bp, Probe Sequence
caatcctccggtgcaggagaatttt

SEQ ID NO: 168181 - DNA, 25 bp, Probe Sequence
aattcctcggtgatgaagtattctg

SEQ ID NO: 168182 - DNA, 25 bp, Probe Sequence
aattcccgggatcaggtttcatgct

SEQ ID NO: 168183 - DNA, 25 bp, Probe Sequence
aattcccgggatacaggccggatgc

SEQ ID NO: 168184 - DNA, 25 bp, Probe Sequence
aattcccgggatccaattctggaca

SEQ ID NO: 168185 - DNA, 25 bp, Probe Sequence
aattcccgggatggcagatcacgag

SEQ ID NO: 168186 - DNA, 25 bp, Probe Sequence
aattcactaggttcgaatccagaga

SEQ ID NO: 168187 - DNA, 25 bp, Probe Sequence
aattcagtttgttagtacctatatt

SEQ ID NO: 168188 - DNA, 25 bp, Probe Sequence
aattagcttctgagttacttttatt

SEQ ID NO: 168189 - DNA, 25 bp, Probe Sequence
gaagtagccctagggatcctttttg

SEQ ID NO: 168190 - DNA, 25 bp, Probe Sequence
aattacacctatgggatcaataagc

SEQ ID NO: 168191 - DNA, 25 bp, Probe Sequence
aattaagcctaccgatgttcaccgt

SEQ ID NO: 168192 - DNA, 25 bp, Probe Sequence
aattatagaatatgggatcccgtgt

SEQ ID NO: 168193 - DNA, 25 bp, Probe Sequence
aattttactgattgaggactcctgg

SEQ ID NO: 168194 - DNA, 25 bp, Probe Sequence
aattaaagctgcaagaggactccag

SEQ ID NO: 168195 - DNA, 25 bp, Probe Sequence
aattctaatctcacggatatcctct

SEQ ID NO: 168196 - DNA, 25 bp, Probe Sequence
aattctaattgattcaggattctgt

SEQ ID NO: 168197 - DNA, 25 bp, Probe Sequence
aattctgatattgcacttcttattt

SEQ ID NO: 168198 - DNA, 25 bp, Probe Sequence
aattcagtatataagtgtgctattg

SEQ ID NO: 168199 - DNA, 25 bp, Probe Sequence
aattctgtcactgcagagttattcc

SEQ ID NO: 168200 - DNA, 25 bp, Probe Sequence
aatttatgacatgaggttactccta

SEQ ID NO: 168201 - DNA, 25 bp, Probe Sequence
aattgttatcagtagagtttcccca

SEQ ID NO: 168202 - DNA, 25 bp, Probe Sequence
aattgattgtcattggctttttcca

SEQ ID NO: 168203 - DNA, 25 bp, Probe Sequence
aattatctgtattggctttttgatt

SEQ ID NO: 168204 - DNA, 25 bp, Probe Sequence
aattatggaatatcatctgtcatta

SEQ ID NO: 168205 - DNA, 25 bp, Probe Sequence
aattatagaaagtcatttctcaaaa

SEQ ID NO: 168206 - DNA, 25 bp, Probe Sequence
aattcaagaacatattttctctaaa

SEQ ID NO: 168207 - DNA, 25 bp, Probe Sequence
aattcaagccgattctagttctgcc

SEQ ID NO: 168208 - DNA, 25 bp, Probe Sequence
aattcaagaccattctcaggatcag

SEQ ID NO: 168209 - DNA, 25 bp, Probe Sequence
aatttatacatacctgcagagtcag

SEQ ID NO: 168210 - DNA, 25 bp, Probe Sequence
aattctctcaataactcagtgtagc

SEQ ID NO: 168211 - DNA, 25 bp, Probe Sequence
caatttctcaaagccagtctacctg

SEQ ID NO: 168212 - DNA, 25 bp, Probe Sequence
aattactcaagttcctttcactgtg

SEQ ID NO: 168213 - DNA, 25 bp, Probe Sequence
aattacgtagctgattttgtatgta

SEQ ID NO: 168214 - DNA, 25 bp, Probe Sequence
aattcatcttgagttatcttttatt

SEQ ID NO: 168215 - DNA, 25 bp, Probe Sequence
aatttttgaggtgctttgctatttc

SEQ ID NO: 168216 - DNA, 25 bp, Probe Sequence
aattgctgtaggatcctgttctttc

SEQ ID NO: 168217 - DNA, 25 bp, Probe Sequence
aattgctgtaggatcctgttctttc

SEQ ID NO: 168218 - DNA, 25 bp, Probe Sequence
aattctcaagatctcatttatttct

SEQ ID NO: 168219 - DNA, 25 bp, Probe Sequence
aattctaatctcttctcttatgtat

SEQ ID NO: 168220 - DNA, 25 bp, Probe Sequence
aattcaaagctcgtctgcgctttct

SEQ ID NO: 168221 - DNA, 25 bp, Probe Sequence
aattctatagtgcctgggtctcagc

SEQ ID NO: 168222 - DNA, 25 bp, Probe Sequence
aattctaatgatcttgctaccagca

SEQ ID NO: 168223 - DNA, 25 bp, Probe Sequence
aattcataaatccttttgcactgat

SEQ ID NO: 168224 - DNA, 25 bp, Probe Sequence
aattcatacagtaatttgtgcagtt

SEQ ID NO: 168225 - DNA, 25 bp, Probe Sequence
aattatatcagctgttgtgctcatt

SEQ ID NO: 168226 - DNA, 25 bp, Probe Sequence
aattcattgagcagttagctcattt

SEQ ID NO: 168227 - DNA, 25 bp, Probe Sequence
aattcattatgagttaaccatttta

SEQ ID NO: 168228 - DNA, 25 bp, Probe Sequence
aattcattttctaacaccatgtgtt

SEQ ID NO: 168229 - DNA, 25 bp, Probe Sequence
aattcaagtgttcatcccacagctt

SEQ ID NO: 168230 - DNA, 25 bp, Probe Sequence
aattcaacttcttactctacactta

SEQ ID NO: 168231 - DNA, 25 bp, Probe Sequence
caatttcctgatttaatgtagactt

SEQ ID NO: 168232 - DNA, 25 bp, Probe Sequence
caatttcctgacatccattcacaat

SEQ ID NO: 168233 - DNA, 25 bp, Probe Sequence
caagttactccttacctatcaacaa

SEQ ID NO: 168234 - DNA, 25 bp, Probe Sequence
caattcaacctttacccagaaacat

SEQ ID NO: 168235 - DNA, 25 bp, Probe Sequence
aattccagccatcaaatccaattcc

SEQ ID NO: 168236 - DNA, 25 bp, Probe Sequence
aattctcactctcacaaccaatgag

SEQ ID NO: 168237 - DNA, 25 bp, Probe Sequence
caagtgcgttctttagaccaatgca

SEQ ID NO: 168238 - DNA, 25 bp, Probe Sequence
caatgggctgttgggcgaccaaggc

SEQ ID NO: 168239 - DNA, 25 bp, Probe Sequence
caatgggctgttgggcgaccaaggc

SEQ ID NO: 168240 - DNA, 25 bp, Probe Sequence
gaattggttctgtgacccgggaagc

SEQ ID NO: 168241 - DNA, 25 bp, Probe Sequence
aattgtgttggaagcactggggggg

SEQ ID NO: 168242 - DNA, 25 bp, Probe Sequence
aattgtgttgggagcagggatttgg

SEQ ID NO: 168243 - DNA, 25 bp, Probe Sequence
caatctgtttggctacgccgttgtc

SEQ ID NO: 168244 - DNA, 25 bp, Probe Sequence
caatcctcttaagtattcctgtctc

SEQ ID NO: 168245 - DNA, 25 bp, Probe Sequence
aattctctgtaagcctagttgctga

SEQ ID NO: 168246 - DNA, 25 bp, Probe Sequence
aattctgtcttattgaagagttgct

SEQ ID NO: 168247 - DNA, 25 bp, Probe Sequence
aattctacgctgtaataggtcgctt

SEQ ID NO: 168248 - DNA, 25 bp, Probe Sequence
aattgaacgccaaattgggcctgta

SEQ ID NO: 168249 - DNA, 25 bp, Probe Sequence
caattgaacgccaaattgggcctgt

SEQ ID NO: 168250 - DNA, 25 bp, Probe Sequence
aattaacaaatactattggccaatt

SEQ ID NO: 168251 - DNA, 25 bp, Probe Sequence
aattaccactatttcttgttcatgt

SEQ ID NO: 168252 - DNA, 25 bp, Probe Sequence
aattatcccattttctgatgatttg

SEQ ID NO: 168253 - DNA, 25 bp, Probe Sequence
aattaccgttatacatgaactttgt

SEQ ID NO: 168254 - DNA, 25 bp, Probe Sequence
aattaccgtattagtatcgcctatt

SEQ ID NO: 168255 - DNA, 25 bp, Probe Sequence
aattaccagttgaaattcagcccaa

SEQ ID NO: 168256 - DNA, 25 bp, Probe Sequence
aattaagcagttctactcgatcacc

SEQ ID NO: 168257 - DNA, 25 bp, Probe Sequence
aattccctttgctatactgtgatcc

SEQ ID NO: 168258 - DNA, 25 bp, Probe Sequence
caatgtcaccgtggtgaccttcttc

SEQ ID NO: 168259 - DNA, 25 bp, Probe Sequence
caatggcccgaaacacatattattt

SEQ ID NO: 168260 - DNA, 25 bp, Probe Sequence
caatccctcaaaacaatcttgtcat

SEQ ID NO: 168261 - DNA, 25 bp, Probe Sequence
caatccctcaaaacaatcttgtcat

SEQ ID NO: 168262 - DNA, 25 bp, Probe Sequence
caattgctctaagacagctctttga

SEQ ID NO: 168263 - DNA, 25 bp, Probe Sequence
caatgtggccgaggactttgattgc

SEQ ID NO: 168264 - DNA, 25 bp, Probe Sequence
aattgtgctgaggcaactatggcat

SEQ ID NO: 168265 - DNA, 25 bp, Probe Sequence
aattgcatttccaaagtagcatctt

SEQ ID NO: 168266 - DNA, 25 bp, Probe Sequence
aattatgttccagattgaccatgaa

SEQ ID NO: 168267 - DNA, 25 bp, Probe Sequence
aattagttgcccatgtaacatacag

SEQ ID NO: 168268 - DNA, 25 bp, Probe Sequence
caatttgtgggccatttaattcagg

SEQ ID NO: 168269 - DNA, 25 bp, Probe Sequence
cagatttgtcgtgttacagttatac

SEQ ID NO: 168270 - DNA, 25 bp, Probe Sequence
aattcagtgtgtttctacagtatgt

SEQ ID NO: 168271 - DNA, 25 bp, Probe Sequence
caattcacattttttaagccatttt

SEQ ID NO: 168272 - DNA, 25 bp, Probe Sequence
aattattcttgactataaccttgta

SEQ ID NO: 168273 - DNA, 25 bp, Probe Sequence
aattcttattggccaaatgcctgtt

SEQ ID NO: 168274 - DNA, 25 bp, Probe Sequence
aattctgtttgtgtacacactgctt

SEQ ID NO: 168275 - DNA, 25 bp, Probe Sequence
aattctgaatttgtagacatacttg

SEQ ID NO: 168276 - DNA, 25 bp, Probe Sequence
aattcaaatttattagctctactac

SEQ ID NO: 168277 - DNA, 25 bp, Probe Sequence
aattcacttatttatagccaactga

SEQ ID NO: 168278 - DNA, 25 bp, Probe Sequence
aattagctgactgtgacccaactga

SEQ ID NO: 168279 - DNA, 25 bp, Probe Sequence
caatgtaggggtactccacctctac

SEQ ID NO: 168280 - DNA, 25 bp, Probe Sequence
caatctagagggaatccctgctacc

SEQ ID NO: 168281 - DNA, 25 bp, Probe Sequence
cagtctaaagaattaactcacccgg

SEQ ID NO: 168282 - DNA, 25 bp, Probe Sequence
aattacacagattctcaacgaccca

SEQ ID NO: 168283 - DNA, 25 bp, Probe Sequence
aattgaagatgatttgaccgcccgt

SEQ ID NO: 168284 - DNA, 25 bp, Probe Sequence
aattgaaatatggttcactgccaaa

SEQ ID NO: 168285 - DNA, 25 bp, Probe Sequence
aattatagtacccacacatgcaaaa

SEQ ID NO: 168286 - DNA, 25 bp, Probe Sequence
aattacagatttgcagactatagaa

SEQ ID NO: 168287 - DNA, 25 bp, Probe Sequence
aattctcagaggactcagcctttaa

SEQ ID NO: 168288 - DNA, 25 bp, Probe Sequence
aattctgaaggtggactctatgtat

SEQ ID NO: 168289 - DNA, 25 bp, Probe Sequence
aattcaaaggtatttcatttaggtg

SEQ ID NO: 168290 - DNA, 25 bp, Probe Sequence
aattcctagctgtgttcatttgggg

SEQ ID NO: 168291 - DNA, 25 bp, Probe Sequence
aattcaaaatgctgtcaacggggtg

SEQ ID NO: 168292 - DNA, 25 bp, Probe Sequence
aattaaagctgctggggagagggtg

SEQ ID NO: 168293 - DNA, 25 bp, Probe Sequence
aattaagagacatggccgggcgcag

SEQ ID NO: 168294 - DNA, 25 bp, Probe Sequence
aattgggtgattttggctgggcgca

SEQ ID NO: 168295 - DNA, 25 bp, Probe Sequence
aattatgtggtatcggccaggcgcg

SEQ ID NO: 168296 - DNA, 25 bp, Probe Sequence
aattagtcgccttcgtcgagagtgc

SEQ ID NO: 168297 - DNA, 25 bp, Probe Sequence
aattagcctggcacgatggtgggca

SEQ ID NO: 168298 - DNA, 25 bp, Probe Sequence
aattagccaggcatggtggcacatg

SEQ ID NO: 168299 - DNA, 25 bp, Probe Sequence
aattagctgggcatggtggcgcaca

SEQ ID NO: 168300 - DNA, 25 bp, Probe Sequence
aattagctgggcatggtggcgcact

SEQ ID NO: 168301 - DNA, 25 bp, Probe Sequence
aattagctggtcatggtgtgtacct

SEQ ID NO: 168302 - DNA, 25 bp, Probe Sequence
aattgactgcctatgccaagtccct

SEQ ID NO: 168303 - DNA, 25 bp, Probe Sequence
aattgttctgctctaactgatacct

SEQ ID NO: 168304 - DNA, 25 bp, Probe Sequence
aattgtatgcttctgatacttcagg

SEQ ID NO: 168305 - DNA, 25 bp, Probe Sequence
caatctgaacttcctgtgacctgtg

SEQ ID NO: 168306 - DNA, 25 bp, Probe Sequence
aattacactgtccttactgcttatg

SEQ ID NO: 168307 - DNA, 25 bp, Probe Sequence
aattacctgcacaatatgactcctc

SEQ ID NO: 168308 - DNA, 25 bp, Probe Sequence
aattgagcccacatattacaacttc

SEQ ID NO: 168309 - DNA, 25 bp, Probe Sequence
aattgtgtccacataatccacgctc

SEQ ID NO: 168310 - DNA, 25 bp, Probe Sequence
aattgtgtaacagtgtgtggcagtg

SEQ ID NO: 168311 - DNA, 25 bp, Probe Sequence
aattggtatatggatctgataactg

SEQ ID NO: 168312 - DNA, 25 bp, Probe Sequence
aattgatatacaacatctgcacata

SEQ ID NO: 168313 - DNA, 25 bp, Probe Sequence
caatcacactacacatcacacaaga

SEQ ID NO: 168314 - DNA, 25 bp, Probe Sequence
caatatcactaatcatttgagaaat

SEQ ID NO: 168315 - DNA, 25 bp, Probe Sequence
caatcattcaaattctcttgaaaca

SEQ ID NO: 168316 - DNA, 25 bp, Probe Sequence
caataatctggaattccgatcaaca

SEQ ID NO: 168317 - DNA, 25 bp, Probe Sequence
caatgttgctgccctgttggcatca

SEQ ID NO: 168318 - DNA, 25 bp, Probe Sequence
aattcatgctcaggagctgtgtgcc

SEQ ID NO: 168319 - DNA, 25 bp, Probe Sequence
aattctctgcatgttggtcttttaa

SEQ ID NO: 168320 - DNA, 25 bp, Probe Sequence
aattctccatggatgggctgctttt

SEQ ID NO: 168321 - DNA, 25 bp, Probe Sequence
aattgctccgtcttggaatttttag

SEQ ID NO: 168322 - DNA, 25 bp, Probe Sequence
aattcccggcctggagcatttttga

SEQ ID NO: 168323 - DNA, 25 bp, Probe Sequence
aattcccgggatgacatattattta

SEQ ID NO: 168324 - DNA, 25 bp, Probe Sequence
aattcccgggattgcctatcatata

SEQ ID NO: 168325 - DNA, 25 bp, Probe Sequence
aattcccgggattgagtgagccaag

SEQ ID NO: 168326 - DNA, 25 bp, Probe Sequence
caatacatccgggagacgtaccccg

SEQ ID NO: 168327 - DNA, 25 bp, Probe Sequence
aattgacttgcaaagacctacctcc

SEQ ID NO: 168328 - DNA, 25 bp, Probe Sequence
aattggctgtgaaggatcctccctg

SEQ ID NO: 168329 - DNA, 25 bp, Probe Sequence
aattggctgtgaaggatcctccctg

SEQ ID NO: 168330 - DNA, 25 bp, Probe Sequence
aattccttgctaggtgttctcagat

SEQ ID NO: 168331 - DNA, 25 bp, Probe Sequence
aattctgtattaaggtgtcatagct

SEQ ID NO: 168332 - DNA, 25 bp, Probe Sequence
aattcttttagtgtttagctccatg

SEQ ID NO: 168333 - DNA, 25 bp, Probe Sequence
cactttttactgtgttagagtccat

SEQ ID NO: 168334 - DNA, 25 bp, Probe Sequence
cactttttactctgtgttaccattt

SEQ ID NO: 168335 - DNA, 25 bp, Probe Sequence
caaggacttccctgagtacaccttt

SEQ ID NO: 168336 - DNA, 25 bp, Probe Sequence
caatcagattcctcaggttacctct

SEQ ID NO: 168337 - DNA, 25 bp, Probe Sequence
caatcacaccatgccatgttttcct

SEQ ID NO: 168338 - DNA, 25 bp, Probe Sequence
caatcaacctcagctttctatcatc

SEQ ID NO: 168339 - DNA, 25 bp, Probe Sequence
caataaccatcagcctatctgtact

SEQ ID NO: 168340 - DNA, 25 bp, Probe Sequence
gaattactacacggtcctgtttggg

SEQ ID NO: 168341 - DNA, 25 bp, Probe Sequence
aattggctatccatggactcttgtt

SEQ ID NO: 168342 - DNA, 25 bp, Probe Sequence
aattgtcttgccattacttagtata

SEQ ID NO: 168343 - DNA, 25 bp, Probe Sequence
aattctcttgccgtgttgcaaatgt

SEQ ID NO: 168344 - DNA, 25 bp, Probe Sequence
aattctccatctagtcttgtgaaaa

SEQ ID NO: 168345 - DNA, 25 bp, Probe Sequence
aattccacattgaagttgtgtgcag

SEQ ID NO: 168346 - DNA, 25 bp, Probe Sequence
aattcccaagcttttggagggtgat

SEQ ID NO: 168347 - DNA, 25 bp, Probe Sequence
aattcaccaatgcatttggacaact

SEQ ID NO: 168348 - DNA, 25 bp, Probe Sequence
aattggtcactgcatcttgtatcga

SEQ ID NO: 168349 - DNA, 25 bp, Probe Sequence
aattgttgccgatgtctatatccac

SEQ ID NO: 168350 - DNA, 25 bp, Probe Sequence
aattgtaccgattttgatcttagtt

SEQ ID NO: 168351 - DNA, 25 bp, Probe Sequence
aattcttcctgcttgttcagttaat

SEQ ID NO: 168352 - DNA, 25 bp, Probe Sequence
aattgccttgcttttatcacttaat

SEQ ID NO: 168353 - DNA, 25 bp, Probe Sequence
aattcacattgatcttcatacttaa

SEQ ID NO: 168354 - DNA, 25 bp, Probe Sequence
aattccatcatacatattcatgctt

SEQ ID NO: 168355 - DNA, 25 bp, Probe Sequence
aattccaaatcagtcattatggttt

SEQ ID NO: 168356 - DNA, 25 bp, Probe Sequence
aattcaagtatgctcttttggctgt

SEQ ID NO: 168357 - DNA, 25 bp, Probe Sequence
caatacactgttaccttttgactgt

SEQ ID NO: 168358 - DNA, 25 bp, Probe Sequence
aattacttgctaactattaactgag

SEQ ID NO: 168359 - DNA, 25 bp, Probe Sequence
aattacattcttctgatgtaacatg

SEQ ID NO: 168360 - DNA, 25 bp, Probe Sequence
aattcatctcctcgattttaatctg

SEQ ID NO: 168361 - DNA, 25 bp, Probe Sequence
aattgcagccgtcgttgatgttatt

SEQ ID NO: 168362 - DNA, 25 bp, Probe Sequence
aattgtgccgtgttgccttatatga

SEQ ID NO: 168363 - DNA, 25 bp, Probe Sequence
aattggactgtgtaacttaaataca

SEQ ID NO: 168364 - DNA, 25 bp, Probe Sequence
aattgggctggccacatttcaaatg

SEQ ID NO: 168365 - DNA, 25 bp, Probe Sequence
caatcgggcttgtactgctgaaaag

SEQ ID NO: 168366 - DNA, 25 bp, Probe Sequence
aattggtgttgatggacagagacag

SEQ ID NO: 168367 - DNA, 25 bp, Probe Sequence
caatagtggttatgagaccagacgg

SEQ ID NO: 168368 - DNA, 25 bp, Probe Sequence
aattggttagatgaggccaggcgcg

SEQ ID NO: 168369 - DNA, 25 bp, Probe Sequence
aattacctatgaaaggccaggcaca

SEQ ID NO: 168370 - DNA, 25 bp, Probe Sequence
caagaacgtgagcaagcccaggcac

SEQ ID NO: 168371 - DNA, 25 bp, Probe Sequence
caaggacggatgatgaagtagtaca

SEQ ID NO: 168372 - DNA, 25 bp, Probe Sequence
caatctcggttttcaagtggtacac

SEQ ID NO: 168373 - DNA, 25 bp, Probe Sequence
aattagctggttgaggtggctggca

SEQ ID NO: 168374 - DNA, 25 bp, Probe Sequence
aattagcggggccaggtggcaggca

SEQ ID NO: 168375 - DNA, 25 bp, Probe Sequence
aattctgctaatcccaaggtcagga

SEQ ID NO: 168376 - DNA, 25 bp, Probe Sequence
aattcagctacaacccaaagagaga

SEQ ID NO: 168377 - DNA, 25 bp, Probe Sequence
aattcagtatccacccaaatggcaa

SEQ ID NO: 168378 - DNA, 25 bp, Probe Sequence
aattcagtatccagaccaaatgttg

SEQ ID NO: 168379 - DNA, 25 bp, Probe Sequence
aattcagaaccccaactactgtgtt

SEQ ID NO: 168380 - DNA, 25 bp, Probe Sequence
caaggcagaaccacgacccttgact

SEQ ID NO: 168381 - DNA, 25 bp, Probe Sequence
caaggcagaaccacgacccttgact

SEQ ID NO: 168382 - DNA, 25 bp, Probe Sequence
cttggaggacccagtcctttgtgcc

SEQ ID NO: 168383 - DNA, 25 bp, Probe Sequence
tcttggaggcctctgtaacgttacc

SEQ ID NO: 168384 - DNA, 25 bp, Probe Sequence
cttggaggctttagtcattcccaga

SEQ ID NO: 168385 - DNA, 25 bp, Probe Sequence
cattgaggggtaactcctcccacag

SEQ ID NO: 168386 - DNA, 25 bp, Probe Sequence
caattggtggtaacgcttatcaaca

SEQ ID NO: 168387 - DNA, 25 bp, Probe Sequence
caatgggcggtaggcgtgtacggtg

SEQ ID NO: 168388 - DNA, 25 bp, Probe Sequence
cacttaccaggagcctcagggaacc

SEQ ID NO: 168389 - DNA, 25 bp, Probe Sequence
aattcccgggatgtcaggaggctgc

SEQ ID NO: 168390 - DNA, 25 bp, Probe Sequence
aattcccgggatacactgggtgctg

SEQ ID NO: 168391 - DNA, 25 bp, Probe Sequence
aattcccgggatagcccatgtgtgt

SEQ ID NO: 168392 - DNA, 25 bp, Probe Sequence
aattccagagggccattactggtgc

SEQ ID NO: 168393 - DNA, 25 bp, Probe Sequence
aattccaaggcagtcctggtggtgc

SEQ ID NO: 168394 - DNA, 25 bp, Probe Sequence
aattggccgggtgtggtggcatgca

SEQ ID NO: 168395 - DNA, 25 bp, Probe Sequence
aattggccgggcgtgatggtgggcg

SEQ ID NO: 168396 - DNA, 25 bp, Probe Sequence
aattggccgggcgtgatggtgggcg

SEQ ID NO: 168397 - DNA, 25 bp, Probe Sequence
caatgtcgccaaagcccatggtggt

SEQ ID NO: 168398 - DNA, 25 bp, Probe Sequence
caatcacagacacaggccggatggg

SEQ ID NO: 168399 - DNA, 25 bp, Probe Sequence
caatcacaatgaccattccggtgcc

SEQ ID NO: 168400 - DNA, 25 bp, Probe Sequence
caataattggcagatgcccactgcc

SEQ ID NO: 168401 - DNA, 25 bp, Probe Sequence
caataatgcggtttgacacctccca

SEQ ID NO: 168402 - DNA, 25 bp, Probe Sequence
caataaaggatccgggcccaacacg

SEQ ID NO: 168403 - DNA, 25 bp, Probe Sequence
caattttagaaaggtgccgattcac

SEQ ID NO: 168404 - DNA, 25 bp, Probe Sequence
caagttctaccagatgaccgggcac

SEQ ID NO: 168405 - DNA, 25 bp, Probe Sequence
caaggatctacgattgccctttgcc

SEQ ID NO: 168406 - DNA, 25 bp, Probe Sequence
caaggaaaagtgacccctgctagcc

SEQ ID NO: 168407 - DNA, 25 bp, Probe Sequence
caagttaatggcttcctcgctatag

SEQ ID NO: 168408 - DNA, 25 bp, Probe Sequence
caagatcaaatctctcctggctgta

SEQ ID NO: 168409 - DNA, 25 bp, Probe Sequence
caagtcatgaccgtcacactggcta

SEQ ID NO: 168410 - DNA, 25 bp, Probe Sequence
caatatcatcaccacacgcacttat

SEQ ID NO: 168411 - DNA, 25 bp, Probe Sequence
caataatctcgccaatgctgtcatt

SEQ ID NO: 168412 - DNA, 25 bp, Probe Sequence
aattgattctgcccaattatttttt

SEQ ID NO: 168413 - DNA, 25 bp, Probe Sequence
ggtgctgtttgtagacttaacaccc

SEQ ID NO: 168414 - DNA, 25 bp, Probe Sequence
aattgctgttgatgagttctttctg

SEQ ID NO: 168415 - DNA, 25 bp, Probe Sequence
aattgtgtgcttagggtttgactgg

SEQ ID NO: 168416 - DNA, 25 bp, Probe Sequence
aattctgtttttcgtttgcattgtc

SEQ ID NO: 168417 - DNA, 25 bp, Probe Sequence
aattctatttttggtctcatctgga

SEQ ID NO: 168418 - DNA, 25 bp, Probe Sequence
aattctatttgtatatctcaacaga

SEQ ID NO: 168419 - DNA, 25 bp, Probe Sequence
aattgccttcctatatatcagcaat

SEQ ID NO: 168420 - DNA, 25 bp, Probe Sequence
aattccttctgctatatgtcacaca

SEQ ID NO: 168421 - DNA, 25 bp, Probe Sequence
caattgccttcctatatatcagcaa

SEQ ID NO: 168422 - DNA, 25 bp, Probe Sequence
aattgccttcctaatctagtatccc

SEQ ID NO: 168423 - DNA, 25 bp, Probe Sequence
aattctgttctattcctcagtatcc

SEQ ID NO: 168424 - DNA, 25 bp, Probe Sequence
caatctcttggttccctaaagcact

SEQ ID NO: 168425 - DNA, 25 bp, Probe Sequence
aattctgtatgaacacctggaagca

SEQ ID NO: 168426 - DNA, 25 bp, Probe Sequence
aattctgaatgtttcgtgtgggctt

SEQ ID NO: 168427 - DNA, 25 bp, Probe Sequence
caatctggactgtactcgggagagc

SEQ ID NO: 168428 - DNA, 25 bp, Probe Sequence
caatctggactaccccaagatggca

SEQ ID NO: 168429 - DNA, 25 bp, Probe Sequence
aattggattctctcatcaaggctac

SEQ ID NO: 168430 - DNA, 25 bp, Probe Sequence
aattgaatgtttccatgtacctcac

SEQ ID NO: 168431 - DNA, 25 bp, Probe Sequence
aattgaatgtctacctgtaagcata

SEQ ID NO: 168432 - DNA, 25 bp, Probe Sequence
aattgcatattcactgctgtacagt

SEQ ID NO: 168433 - DNA, 25 bp, Probe Sequence
aattcatatgtccctcgtgaggctg

SEQ ID NO: 168434 - DNA, 25 bp, Probe Sequence
aattgttgcctcggcagctggtgcg

SEQ ID NO: 168435 - DNA, 25 bp, Probe Sequence
aattgtgtggctgaagtggtgactt

SEQ ID NO: 168436 - DNA, 25 bp, Probe Sequence
aattgttttcacttgtattgacttt

SEQ ID NO: 168437 - DNA, 25 bp, Probe Sequence
aattgccttatatttttaatgattt

SEQ ID NO: 168438 - DNA, 25 bp, Probe Sequence
aattccattattaggtaactattct

SEQ ID NO: 168439 - DNA, 25 bp, Probe Sequence
aattcaaccaggcggaacaatatct

SEQ ID NO: 168440 - DNA, 25 bp, Probe Sequence
aattcgggcacgagtgaaagatttc

SEQ ID NO: 168441 - DNA, 25 bp, Probe Sequence
aattctgggctgccaggaaacgatt

SEQ ID NO: 168442 - DNA, 25 bp, Probe Sequence
aattcatgaggcgacaggtcttcaa

SEQ ID NO: 168443 - DNA, 25 bp, Probe Sequence
caattctaggaatctgtcatcagaa

SEQ ID NO: 168444 - DNA, 25 bp, Probe Sequence
aattctactatgtggctctcaacac

SEQ ID NO: 168445 - DNA, 25 bp, Probe Sequence
aattgtgaccatcgaggcttctacc

SEQ ID NO: 168446 - DNA, 25 bp, Probe Sequence
caataagacctacggctgtgtgccc

SEQ ID NO: 168447 - DNA, 25 bp, Probe Sequence
caataaacctcaggttgtgtttact

SEQ ID NO: 168448 - DNA, 25 bp, Probe Sequence
caatagtgactctgtgcttgtctgt

SEQ ID NO: 168449 - DNA, 25 bp, Probe Sequence
caatcacaacactggctgagcggat

SEQ ID NO: 168450 - DNA, 25 bp, Probe Sequence
caatcaccccaaaggtcgcgataat

SEQ ID NO: 168451 - DNA, 25 bp, Probe Sequence
caacctctccaaatggtgggtttga

SEQ ID NO: 168452 - DNA, 25 bp, Probe Sequence
caatgccatcttcaaaccgttttat

SEQ ID NO: 168453 - DNA, 25 bp, Probe Sequence
caatgcgatgtatattaaacttttt

SEQ ID NO: 168454 - DNA, 25 bp, Probe Sequence
caatgcgtctgatgtgtcattaagt

SEQ ID NO: 168455 - DNA, 25 bp, Probe Sequence
caatgcgtctgatgtgtcattaagt

SEQ ID NO: 168456 - DNA, 25 bp, Probe Sequence
caatgctgatttttgaattcatgat

SEQ ID NO: 168457 - DNA, 25 bp, Probe Sequence
caatcttttgacttatgcacatatt

SEQ ID NO: 168458 - DNA, 25 bp, Probe Sequence
caattgtgttacttttattatttgg

SEQ ID NO: 168459 - DNA, 25 bp, Probe Sequence
aattgtgttgattttctttgctttt

SEQ ID NO: 168460 - DNA, 25 bp, Probe Sequence
aattctgttgtaaagttgtctgttt

SEQ ID NO: 168461 - DNA, 25 bp, Probe Sequence
aattctttttattggtgcctatatt

SEQ ID NO: 168462 - DNA, 25 bp, Probe Sequence
aattctctgatcatttagttctatc

SEQ ID NO: 168463 - DNA, 25 bp, Probe Sequence
aattcttgaattcacagtaggatca

SEQ ID NO: 168464 - DNA, 25 bp, Probe Sequence
aattgttagaaagcagataccatca

SEQ ID NO: 168465 - DNA, 25 bp, Probe Sequence
aattgtgtggagtgacggaactgca

SEQ ID NO: 168466 - DNA, 25 bp, Probe Sequence
aattcagtggaatacgtgcacccaa

SEQ ID NO: 168467 - DNA, 25 bp, Probe Sequence
aattgacggaagggctctgcaccca

SEQ ID NO: 168468 - DNA, 25 bp, Probe Sequence
caattacttaagctcctgacactct

SEQ ID NO: 168469 - DNA, 25 bp, Probe Sequence
aattgacatgtgtgcttcctatcct

SEQ ID NO: 168470 - DNA, 25 bp, Probe Sequence
aattgaataatagtgccctctttga

SEQ ID NO: 168471 - DNA, 25 bp, Probe Sequence
aattccaatatgatgactcccttaa

SEQ ID NO: 168472 - DNA, 25 bp, Probe Sequence
aattccaagagcatatcttctttaa

SEQ ID NO: 168473 - DNA, 25 bp, Probe Sequence
aattgttaatgcaaattgtctttat

SEQ ID NO: 168474 - DNA, 25 bp, Probe Sequence
aattgcctagaaatatctttctctt

SEQ ID NO: 168475 - DNA, 25 bp, Probe Sequence
aattgctttgaactagttttgcagt

SEQ ID NO: 168476 - DNA, 25 bp, Probe Sequence
aattgtagtcaacggtcagcttgtt

SEQ ID NO: 168477 - DNA, 25 bp, Probe Sequence
aattgtatggactcagctagctgtt

SEQ ID NO: 168478 - DNA, 25 bp, Probe Sequence
aattctcggatatgaccgctgtgat

SEQ ID NO: 168479 - DNA, 25 bp, Probe Sequence
caattctttgaatgagctggtggat

SEQ ID NO: 168480 - DNA, 25 bp, Probe Sequence
caattcaaaatctggaggtggggat

SEQ ID NO: 168481 - DNA, 25 bp, Probe Sequence
caatggagacccggggggtgggatg

SEQ ID NO: 168482 - DNA, 25 bp, Probe Sequence
caatgggtccaggacctatgggggg

SEQ ID NO: 168483 - DNA, 25 bp, Probe Sequence
gaatagtacacccaccaacgagggg

SEQ ID NO: 168484 - DNA, 25 bp, Probe Sequence
aattcgaatcaccctaacaagccgc

SEQ ID NO: 168485 - DNA, 25 bp, Probe Sequence
aattctagcacccactgaaaaacaa

SEQ ID NO: 168486 - DNA, 25 bp, Probe Sequence
aattctacactcagttaaagaccat

SEQ ID NO: 168487 - DNA, 25 bp, Probe Sequence
aattccaggtgcatttaatcagacc

SEQ ID NO: 168488 - DNA, 25 bp, Probe Sequence
caatctccagggctccaaatctgcc

SEQ ID NO: 168489 - DNA, 25 bp, Probe Sequence
aattccatggcaccgtcaaggctga

SEQ ID NO: 168490 - DNA, 25 bp, Probe Sequence
aattctaggttcacagaggtatgag

SEQ ID NO: 168491 - DNA, 25 bp, Probe Sequence
aattctgaggaccatatgagggtag

SEQ ID NO: 168492 - DNA, 25 bp, Probe Sequence
aattcatagagcacactagggtgtt

SEQ ID NO: 168493 - DNA, 25 bp, Probe Sequence
aattctatgcagatcctggggccga

SEQ ID NO: 168494 - DNA, 25 bp, Probe Sequence
aattcttgaagtctggtgatgctgc

SEQ ID NO: 168495 - DNA, 25 bp, Probe Sequence
aattctgtgctaattttgtggccag

SEQ ID NO: 168496 - DNA, 25 bp, Probe Sequence
aattcttgatgatatctgtgtggca

SEQ ID NO: 168497 - DNA, 25 bp, Probe Sequence
aattgcttcaggcacaggtggaata

SEQ ID NO: 168498 - DNA, 25 bp, Probe Sequence
aattctgtcagtaggggcatggtat

SEQ ID NO: 168499 - DNA, 25 bp, Probe Sequence
aattctggctgatgtgggaactcat

SEQ ID NO: 168500 - DNA, 25 bp, Probe Sequence
aattcatggttggctacgaaatgct

SEQ ID NO: 168501 - DNA, 25 bp, Probe Sequence
aattgctgaattggatacgctgaat

SEQ ID NO: 168502 - DNA, 25 bp, Probe Sequence
aattgctgaattggatacgctgaat

SEQ ID NO: 168503 - DNA, 25 bp, Probe Sequence
gaattcggccatgagccgctacata

SEQ ID NO: 168504 - DNA, 25 bp, Probe Sequence
ctattcggccttcacgcataaaggc

SEQ ID NO: 168505 - DNA, 25 bp, Probe Sequence
caaacaagttctcacctaaagccca

SEQ ID NO: 168506 - DNA, 25 bp, Probe Sequence
cagacctaaactgatcctaaagccc

SEQ ID NO: 168507 - DNA, 25 bp, Probe Sequence
catcacctacaagcccgtaaagcat

SEQ ID NO: 168508 - DNA, 25 bp, Probe Sequence
caatactagacccctcagttaactt

SEQ ID NO: 168509 - DNA, 25 bp, Probe Sequence
gaaactaaagaagacttacctgcgg

SEQ ID NO: 168510 - DNA, 25 bp, Probe Sequence
caaactaaagagcttttgcacggta

SEQ ID NO: 168511 - DNA, 25 bp, Probe Sequence
caaattccgaagcatcttagccgat

SEQ ID NO: 168512 - DNA, 25 bp, Probe Sequence
caaatcggtgtaccttgggcgaatt

SEQ ID NO: 168513 - DNA, 25 bp, Probe Sequence
caattttcattatcttaagtacatt

SEQ ID NO: 168514 - DNA, 25 bp, Probe Sequence
aattccacactctcattaataaatt

SEQ ID NO: 168515 - DNA, 25 bp, Probe Sequence
aattccacttccggtacatatcaaa

SEQ ID NO: 168516 - DNA, 25 bp, Probe Sequence
aattcctcagtgggtgtgacatatt

SEQ ID NO: 168517 - DNA, 25 bp, Probe Sequence
aattgctaagtggaatgcatgaatt

SEQ ID NO: 168518 - DNA, 25 bp, Probe Sequence
aattcgaagatgacgctgatggatt

SEQ ID NO: 168519 - DNA, 25 bp, Probe Sequence
aattgccaaggcagcgggatctcgt

SEQ ID NO: 168520 - DNA, 25 bp, Probe Sequence
caatctccagacctggggtccaagt

SEQ ID NO: 168521 - DNA, 25 bp, Probe Sequence
caatctcctgatctcgtgatctgcc

SEQ ID NO: 168522 - DNA, 25 bp, Probe Sequence
aattgcagtgatctggtgactggaa

SEQ ID NO: 168523 - DNA, 25 bp, Probe Sequence
aattgcagtatcctgagtagcagtt

SEQ ID NO: 168524 - DNA, 25 bp, Probe Sequence
aattcgtacgtggagaagtgggaat

SEQ ID NO: 168525 - DNA, 25 bp, Probe Sequence
caattcgtacgtggagaagtgggaa

SEQ ID NO: 168526 - DNA, 25 bp, Probe Sequence
aattctgctaccgtggggaagtgac

SEQ ID NO: 168527 - DNA, 25 bp, Probe Sequence
aattccatccacttatggaggagga

SEQ ID NO: 168528 - DNA, 25 bp, Probe Sequence
aattctcactatttgtgcgagatgg

SEQ ID NO: 168529 - DNA, 25 bp, Probe Sequence
aattccagcagtctggcgcagtggc

SEQ ID NO: 168530 - DNA, 25 bp, Probe Sequence
aattccatcattttgggaggccaca

SEQ ID NO: 168531 - DNA, 25 bp, Probe Sequence
aattccatcacttttggaggctaag

SEQ ID NO: 168532 - DNA, 25 bp, Probe Sequence
aattcctacttcatggatgtgaaat

SEQ ID NO: 168533 - DNA, 25 bp, Probe Sequence
aattcctgactctgtaagaaaatat

SEQ ID NO: 168534 - DNA, 25 bp, Probe Sequence
cacttacatacttggaccaaaaagt

SEQ ID NO: 168535 - DNA, 25 bp, Probe Sequence
cacttaccaatctcacttaccatag

SEQ ID NO: 168536 - DNA, 25 bp, Probe Sequence
aattctccaactaacttcattaatg

SEQ ID NO: 168537 - DNA, 25 bp, Probe Sequence
aattccgatactagtttgctttgct

SEQ ID NO: 168538 - DNA, 25 bp, Probe Sequence
aattgctagatagtgttttgaaagc

SEQ ID NO: 168539 - DNA, 25 bp, Probe Sequence
caatcgctctgtctcttctaaaagc

SEQ ID NO: 168540 - DNA, 25 bp, Probe Sequence
caatcgctctgtctcttctaaaagc

SEQ ID NO: 168541 - DNA, 25 bp, Probe Sequence
caatccttgcatgctctgtcatgaa

SEQ ID NO: 168542 - DNA, 25 bp, Probe Sequence
caatctgtgagaacttttgaatttt

SEQ ID NO: 168543 - DNA, 25 bp, Probe Sequence
caatttgaacccatttgaggttctt

SEQ ID NO: 168544 - DNA, 25 bp, Probe Sequence
aattgtgggtctatttctagttatt

SEQ ID NO: 168545 - DNA, 25 bp, Probe Sequence
caattttggatgattattctttgta

SEQ ID NO: 168546 - DNA, 25 bp, Probe Sequence
caatttggcggttttatgtctttag

SEQ ID NO: 168547 - DNA, 25 bp, Probe Sequence
caattaagggtcttcatgttcttat

SEQ ID NO: 168548 - DNA, 25 bp, Probe Sequence
caattatgatgagccttcttccctt

SEQ ID NO: 168549 - DNA, 25 bp, Probe Sequence
caattatagaaagtcatttctcaaa

SEQ ID NO: 168550 - DNA, 25 bp, Probe Sequence
aattccgaagcaatcttcctgctaa

SEQ ID NO: 168551 - DNA, 25 bp, Probe Sequence
aattccgaagcaatcttcctgctaa

SEQ ID NO: 168552 - DNA, 25 bp, Probe Sequence
caattacgaagcatctgccaaccca

SEQ ID NO: 168553 - DNA, 25 bp, Probe Sequence
caattacagcaagactgtcagcctc

SEQ ID NO: 168554 - DNA, 25 bp, Probe Sequence
caattcaatcacatcactagcactt

SEQ ID NO: 168555 - DNA, 25 bp, Probe Sequence
caattcatcttcaaagcacaactct

SEQ ID NO: 168556 - DNA, 25 bp, Probe Sequence
aattggctacattgaccataattaa

SEQ ID NO: 168557 - DNA, 25 bp, Probe Sequence
aattggctcagcagatacagaaggt

SEQ ID NO: 168558 - DNA, 25 bp, Probe Sequence
caagggccgactaagagaagttgta

SEQ ID NO: 168559 - DNA, 25 bp, Probe Sequence
caaggtccgagtgctggacccggac

SEQ ID NO: 168560 - DNA, 25 bp, Probe Sequence
caaggaacaggagcggacccagcag

SEQ ID NO: 168561 - DNA, 25 bp, Probe Sequence
caaggaacgtcttggggcttctcga

SEQ ID NO: 168562 - DNA, 25 bp, Probe Sequence
caaggaacgccataggacttccttg

SEQ ID NO: 168563 - DNA, 25 bp, Probe Sequence
caagggaagccatacactttttgta

SEQ ID NO: 168564 - DNA, 25 bp, Probe Sequence
caagctggaagttaagttttcctgg

SEQ ID NO: 168565 - DNA, 25 bp, Probe Sequence
caagggtgactagaaccttcctggg

SEQ ID NO: 168566 - DNA, 25 bp, Probe Sequence
caactggcgggagaacctggaccgg

SEQ ID NO: 168567 - DNA, 25 bp, Probe Sequence
caatctgcagcgagcttacagcctg

SEQ ID NO: 168568 - DNA, 25 bp, Probe Sequence
caatcggaacacattcagctgctgg

SEQ ID NO: 168569 - DNA, 25 bp, Probe Sequence
aattggatatcatgttagctctctt

SEQ ID NO: 168570 - DNA, 25 bp, Probe Sequence
aattgtgcaatttgtagaactttaa

SEQ ID NO: 168571 - DNA, 25 bp, Probe Sequence
aattgtctttattcaggtcttaata

SEQ ID NO: 168572 - DNA, 25 bp, Probe Sequence
aattgtctttagttggacttgccaa

SEQ ID NO: 168573 - DNA, 25 bp, Probe Sequence
caatcattttcctttggacctacaa

SEQ ID NO: 168574 - DNA, 25 bp, Probe Sequence
ctatcaagttctgttaggcctacat

SEQ ID NO: 168575 - DNA, 25 bp, Probe Sequence
caataaacttgctttagagcccagc

SEQ ID NO: 168576 - DNA, 25 bp, Probe Sequence
caattacaccactttagaccctatg

SEQ ID NO: 168577 - DNA, 25 bp, Probe Sequence
caatttcaacacaggggacagctat

SEQ ID NO: 168578 - DNA, 25 bp, Probe Sequence
tattgttaaccgtgatggcacccgc

SEQ ID NO: 168579 - DNA, 25 bp, Probe Sequence
catggttaacctggacaagtaccgg

SEQ ID NO: 168580 - DNA, 25 bp, Probe Sequence
cagaattcatgggcttacaagtact

SEQ ID NO: 168581 - DNA, 25 bp, Probe Sequence
caattactaggtcaagatctagcga

SEQ ID NO: 168582 - DNA, 25 bp, Probe Sequence
caatgttgtgggagaagttggcccc

SEQ ID NO: 168583 - DNA, 25 bp, Probe Sequence
aattctgggaatccacagctctggc

SEQ ID NO: 168584 - DNA, 25 bp, Probe Sequence
aattctgtgagttctccacttcagt

SEQ ID NO: 168585 - DNA, 25 bp, Probe Sequence
caatgtatgttgggtccacctcagt

SEQ ID NO: 168586 - DNA, 25 bp, Probe Sequence
caagtatgttgccagctacgtcctg

SEQ ID NO: 168587 - DNA, 25 bp, Probe Sequence
aattctgataggctgacctctctgc

SEQ ID NO: 168588 - DNA, 25 bp, Probe Sequence
aattctgcacaatagcccatgctgt

SEQ ID NO: 168589 - DNA, 25 bp, Probe Sequence
aattctcaagaaagccctcattttt

SEQ ID NO: 168590 - DNA, 25 bp, Probe Sequence
aattctcaagaaagccctcattttt

SEQ ID NO: 168591 - DNA, 25 bp, Probe Sequence
aattccacataatccacttagcttt

SEQ ID NO: 168592 - DNA, 25 bp, Probe Sequence
aattgaccataattagcaatatact

SEQ ID NO: 168593 - DNA, 25 bp, Probe Sequence
aattgaccatgcatataatattctt

SEQ ID NO: 168594 - DNA, 25 bp, Probe Sequence
caattggcagcaaacaactatacct

SEQ ID NO: 168595 - DNA, 25 bp, Probe Sequence
caatattacaataactcttacctaa

SEQ ID NO: 168596 - DNA, 25 bp, Probe Sequence
caatcctcacctaacagttacttta

SEQ ID NO: 168597 - DNA, 25 bp, Probe Sequence
caatcctcacctaacagttacttta

SEQ ID NO: 168598 - DNA, 25 bp, Probe Sequence
caataataacttcctgtttcattgt

SEQ ID NO: 168599 - DNA, 25 bp, Probe Sequence
caattttatgtttccttttggcatt

SEQ ID NO: 168600 - DNA, 25 bp, Probe Sequence
aattgttagccttacatgttgtgta

SEQ ID NO: 168601 - DNA, 25 bp, Probe Sequence
aattgttgtgactctatgtttgctc

SEQ ID NO: 168602 - DNA, 25 bp, Probe Sequence
aattggcgtatatgtatctcttatc

SEQ ID NO: 168603 - DNA, 25 bp, Probe Sequence
caattcggtcaattgtcactgtcat

SEQ ID NO: 168604 - DNA, 25 bp, Probe Sequence
caattcggtcaattgtcactgtcat

SEQ ID NO: 168605 - DNA, 25 bp, Probe Sequence
aattgccgatgtgtccactggcttg

SEQ ID NO: 168606 - DNA, 25 bp, Probe Sequence
aattcggctgtgaatccatctggtc

SEQ ID NO: 168607 - DNA, 25 bp, Probe Sequence
aattgggctgatttgcctgctgctg

SEQ ID NO: 168608 - DNA, 25 bp, Probe Sequence
caatcatgggtgtattcaggagctg

SEQ ID NO: 168609 - DNA, 25 bp, Probe Sequence
aattgtgtgcattcattctgtaggt

SEQ ID NO: 168610 - DNA, 25 bp, Probe Sequence
aattgctatgattgtattgtacgtt

SEQ ID NO: 168611 - DNA, 25 bp, Probe Sequence
aattgcatgttctaattccacgtat

SEQ ID NO: 168612 - DNA, 25 bp, Probe Sequence
caatctcatgatcaacttaacggat

SEQ ID NO: 168613 - DNA, 25 bp, Probe Sequence
caatgactttaaatgtgaacggatt

SEQ ID NO: 168614 - DNA, 25 bp, Probe Sequence
caaatctattaatggaatccttttc

SEQ ID NO: 168615 - DNA, 25 bp, Probe Sequence
caattcctattggagtgcaatcctt

SEQ ID NO: 168616 - DNA, 25 bp, Probe Sequence
caatgcggctatagcagatggccat

SEQ ID NO: 168617 - DNA, 25 bp, Probe Sequence
caatctctgctttgcaatgggcaca

SEQ ID NO: 168618 - DNA, 25 bp, Probe Sequence
caattgcacagcagaatgttccaga

SEQ ID NO: 168619 - DNA, 25 bp, Probe Sequence
caatgtgaccgatatgttcccggac

SEQ ID NO: 168620 - DNA, 25 bp, Probe Sequence
caatttccaaaactgtccagggcgg

SEQ ID NO: 168621 - DNA, 25 bp, Probe Sequence
caattttaatgctatttccccaggg

SEQ ID NO: 168622 - DNA, 25 bp, Probe Sequence
caatttaaatgccatctcctcagag

SEQ ID NO: 168623 - DNA, 25 bp, Probe Sequence
caatcttcaactgagctctctgctc

SEQ ID NO: 168624 - DNA, 25 bp, Probe Sequence
caatctggaagaaagccctgtgctt

SEQ ID NO: 168625 - DNA, 25 bp, Probe Sequence
caatctggaacaatgtccctcctct

SEQ ID NO: 168626 - DNA, 25 bp, Probe Sequence
caatctgaagcaaattcaccccctg

SEQ ID NO: 168627 - DNA, 25 bp, Probe Sequence
caataacagaaagtccttccgcctt

SEQ ID NO: 168628 - DNA, 25 bp, Probe Sequence
caataacacaaaggccaatgtcaca

SEQ ID NO: 168629 - DNA, 25 bp, Probe Sequence
caatgaccacaatgatgacatcatg

SEQ ID NO: 168630 - DNA, 25 bp, Probe Sequence
caagcacatcaacgagctgactatg

SEQ ID NO: 168631 - DNA, 25 bp, Probe Sequence
caatcaaaaaggcagctaggtcaga

SEQ ID NO: 168632 - DNA, 25 bp, Probe Sequence
caataatcacaacaacgaagtaatg

SEQ ID NO: 168633 - DNA, 25 bp, Probe Sequence
caataccagaagcacaggaacggga

SEQ ID NO: 168634 - DNA, 25 bp, Probe Sequence
aattgcttgaacccaggaggcggag

SEQ ID NO: 168635 - DNA, 25 bp, Probe Sequence
caagtgttgttcccatggtgcacgg

SEQ ID NO: 168636 - DNA, 25 bp, Probe Sequence
ctagtctaggtccgcggttacggat

SEQ ID NO: 168637 - DNA, 25 bp, Probe Sequence
caagttgggccgcttggtcaaggac

SEQ ID NO: 168638 - DNA, 25 bp, Probe Sequence
caatgcttccacagcgtaaatacac

SEQ ID NO: 168639 - DNA, 25 bp, Probe Sequence
caatctgatatctattttacaaaca

SEQ ID NO: 168640 - DNA, 25 bp, Probe Sequence
caatctatctaaatttcatccatta

SEQ ID NO: 168641 - DNA, 25 bp, Probe Sequence
caataagtaattggtgaccttcacc

SEQ ID NO: 168642 - DNA, 25 bp, Probe Sequence
caatgaagccaaatgggccgttaag

SEQ ID NO: 168643 - DNA, 25 bp, Probe Sequence
caagaaggaggcccgcctgttacga

SEQ ID NO: 168644 - DNA, 25 bp, Probe Sequence
caaaagggccagtgtcgttattatc

SEQ ID NO: 168645 - DNA, 25 bp, Probe Sequence
caaaggttccacttcctaatactat

SEQ ID NO: 168646 - DNA, 25 bp, Probe Sequence
ctagagagctgtcacttccgagtaa

SEQ ID NO: 168647 - DNA, 25 bp, Probe Sequence
caataggctgtggacttacttgcca

SEQ ID NO: 168648 - DNA, 25 bp, Probe Sequence
caatgacagagttggcttacatatc

SEQ ID NO: 168649 - DNA, 25 bp, Probe Sequence
caatacgatggaacgttctatgaat

SEQ ID NO: 168650 - DNA, 25 bp, Probe Sequence
caatagccactaaccttgcctggta

SEQ ID NO: 168651 - DNA, 25 bp, Probe Sequence
cagaaccaggttcttgcgcgtctat

SEQ ID NO: 168652 - DNA, 25 bp, Probe Sequence
caataacaggtctgtgatgccctta

SEQ ID NO: 168653 - DNA, 25 bp, Probe Sequence
caataagaggtccggcacgacgtcg

SEQ ID NO: 168654 - DNA, 25 bp, Probe Sequence
caatgaacggtgcggcatttcgtcc

SEQ ID NO: 168655 - DNA, 25 bp, Probe Sequence
caatgtacatggtggactatgccgg

SEQ ID NO: 168656 - DNA, 25 bp, Probe Sequence
caagttctgttaggcctacatcgtg

SEQ ID NO: 168657 - DNA, 25 bp, Probe Sequence
caagttcccatcacgtcagatttgg

SEQ ID NO: 168658 - DNA, 25 bp, Probe Sequence
caagtttcctaagctcagagttctg

SEQ ID NO: 168659 - DNA, 25 bp, Probe Sequence
aattgttttctaactcaggagtcag

SEQ ID NO: 168660 - DNA, 25 bp, Probe Sequence
caattttctttaaccagtctgaagt

SEQ ID NO: 168661 - DNA, 25 bp, Probe Sequence
aattgtacagtttatgccaccataa

SEQ ID NO: 168662 - DNA, 25 bp, Probe Sequence
caatttacattagcatcccacaaaa

SEQ ID NO: 168663 - DNA, 25 bp, Probe Sequence
caattacactgtactacccaagaag

SEQ ID NO: 168664 - DNA, 25 bp, Probe Sequence
caatattcatgtgcctagaccaaga

SEQ ID NO: 168665 - DNA, 25 bp, Probe Sequence
caatatatcgtgtatccgaaaattg

SEQ ID NO: 168666 - DNA, 25 bp, Probe Sequence
caatgcattcgtaacacagattttt

SEQ ID NO: 168667 - DNA, 25 bp, Probe Sequence
caagcagttaagtcatagaatgttt

SEQ ID NO: 168668 - DNA, 25 bp, Probe Sequence
caaggactaagtatcagtgatttgt

SEQ ID NO: 168669 - DNA, 25 bp, Probe Sequence
caatggaatatgccttctctgctat

SEQ ID NO: 168670 - DNA, 25 bp, Probe Sequence
caaggaagcagcctgtttaacagta

SEQ ID NO: 168671 - DNA, 25 bp, Probe Sequence
caaggattgcactgagtaaagactt

SEQ ID NO: 168672 - DNA, 25 bp, Probe Sequence
caataatatcactctgtacatccac

SEQ ID NO: 168673 - DNA, 25 bp, Probe Sequence
caattgtaactccatctaatcaaga

SEQ ID NO: 168674 - DNA, 25 bp, Probe Sequence
aattgtataccgcagattcaggcat

SEQ ID NO: 168675 - DNA, 25 bp, Probe Sequence
aattgctagagaccgagtgtcctca

SEQ ID NO: 168676 - DNA, 25 bp, Probe Sequence
aattgtggaggtcagaacccaagga

SEQ ID NO: 168677 - DNA, 25 bp, Probe Sequence
aattgggatcttcacacagccacac

SEQ ID NO: 168678 - DNA, 25 bp, Probe Sequence
caatctgggcagtgtagcaagaccc

SEQ ID NO: 168679 - DNA, 25 bp, Probe Sequence
caattgagacctttagctaacttag

SEQ ID NO: 168680 - DNA, 25 bp, Probe Sequence
aattgagacctttagctaacttagt

SEQ ID NO: 168681 - DNA, 25 bp, Probe Sequence
aattgaggccctgcagttagtttgc

SEQ ID NO: 168682 - DNA, 25 bp, Probe Sequence
caagtgggtcctgcagttaccttgc

SEQ ID NO: 168683 - DNA, 25 bp, Probe Sequence
caaggggtttctgtttctattctct

SEQ ID NO: 168684 - DNA, 25 bp, Probe Sequence
caatgaggcagtttctggtactcct

SEQ ID NO: 168685 - DNA, 25 bp, Probe Sequence
caatgatgttctggctaggctaccc

SEQ ID NO: 168686 - DNA, 25 bp, Probe Sequence
aattgttcttgttggtggctcgact

SEQ ID NO: 168687 - DNA, 25 bp, Probe Sequence
caatggattttgttgggcaccgaaa

SEQ ID NO: 168688 - DNA, 25 bp, Probe Sequence
caatcagttctttgtgactcctcga

SEQ ID NO: 168689 - DNA, 25 bp, Probe Sequence
aattgtgtcatttgtactgtttgaa

SEQ ID NO: 168690 - DNA, 25 bp, Probe Sequence
aattgtgctgtttgcttgtagttga

SEQ ID NO: 168691 - DNA, 25 bp, Probe Sequence
caatttcagtgttgtgttcagccaa

SEQ ID NO: 168692 - DNA, 25 bp, Probe Sequence
caatttcacgctttgcttaccagaa

SEQ ID NO: 168693 - DNA, 25 bp, Probe Sequence
aattgtcacaattgctgaaaacaga

SEQ ID NO: 168694 - DNA, 25 bp, Probe Sequence
aattgtcacaattgctgaaaacaga

SEQ ID NO: 168695 - DNA, 25 bp, Probe Sequence
aattgtgcctacctcagatagacag

SEQ ID NO: 168696 - DNA, 25 bp, Probe Sequence
aattggcgtttgtcatcagaatcag

SEQ ID NO: 168697 - DNA, 25 bp, Probe Sequence
aattgtgttgggtatcagtatcttc

SEQ ID NO: 168698 - DNA, 25 bp, Probe Sequence
cacttgtaaggttagacttcactcc

SEQ ID NO: 168699 - DNA, 25 bp, Probe Sequence
caaatgataaggagggttcctgccc

SEQ ID NO: 168700 - DNA, 25 bp, Probe Sequence
aattgcatatagcttggtttccata

SEQ ID NO: 168701 - DNA, 25 bp, Probe Sequence
aattgctttgtcttgatgtttctat

SEQ ID NO: 168702 - DNA, 25 bp, Probe Sequence
caattggttggctgagatgctgtta

SEQ ID NO: 168703 - DNA, 25 bp, Probe Sequence
aattggaggcctgtatgcgcttcat

SEQ ID NO: 168704 - DNA, 25 bp, Probe Sequence
caattggaggcctgtatgcgcttca

SEQ ID NO: 168705 - DNA, 25 bp, Probe Sequence
caaggtcagcccttttggctaaaag

SEQ ID NO: 168706 - DNA, 25 bp, Probe Sequence
caaggcacagactgtggggctccca

SEQ ID NO: 168707 - DNA, 25 bp, Probe Sequence
caatggcacaggggtcttggggccc

SEQ ID NO: 168708 - DNA, 25 bp, Probe Sequence
caagaccaccactgttcaagtgccc

SEQ ID NO: 168709 - DNA, 25 bp, Probe Sequence
cacacaaaaactggtgtaattggca

SEQ ID NO: 168710 - DNA, 25 bp, Probe Sequence
caataacaaactggctgctttgttc

SEQ ID NO: 168711 - DNA, 25 bp, Probe Sequence
caatttcaaaccctgcttatgatat

SEQ ID NO: 168712 - DNA, 25 bp, Probe Sequence
caatattaacacgctgcctggtctg

SEQ ID NO: 168713 - DNA, 25 bp, Probe Sequence
caatattggagcgccagttcagttg

SEQ ID NO: 168714 - DNA, 25 bp, Probe Sequence
caatagtgctggcaccgttgcttcc

SEQ ID NO: 168715 - DNA, 25 bp, Probe Sequence
caataggggcctgctgtggctattc

SEQ ID NO: 168716 - DNA, 25 bp, Probe Sequence
caatgacgagaggccctggtgctac

SEQ ID NO: 168717 - DNA, 25 bp, Probe Sequence
caatggcagcgggacgctggatctg

SEQ ID NO: 168718 - DNA, 25 bp, Probe Sequence
caattgagctaggatcaggccactg

SEQ ID NO: 168719 - DNA, 25 bp, Probe Sequence
caatgtggtcatcatctacctcagc

SEQ ID NO: 168720 - DNA, 25 bp, Probe Sequence
caatgattgccattcacttctgtca

SEQ ID NO: 168721 - DNA, 25 bp, Probe Sequence
caatgatgtgccttctccatatgaa

SEQ ID NO: 168722 - DNA, 25 bp, Probe Sequence
caatattgtcttcctgcgagaatag

SEQ ID NO: 168723 - DNA, 25 bp, Probe Sequence
caattattcttcgtctaatgacaga

SEQ ID NO: 168724 - DNA, 25 bp, Probe Sequence
aattgcatattctcttcagaggaga

SEQ ID NO: 168725 - DNA, 25 bp, Probe Sequence
aattgatcatatttctgccaaggat

SEQ ID NO: 168726 - DNA, 25 bp, Probe Sequence
aattgtgctattactccaaggtcca

SEQ ID NO: 168727 - DNA, 25 bp, Probe Sequence
aattggctaaccagccaagatcccc

SEQ ID NO: 168728 - DNA, 25 bp, Probe Sequence
caaatttaccctggccaagatccgc

SEQ ID NO: 168729 - DNA, 25 bp, Probe Sequence
caaatttaccctggccaagatccgc

SEQ ID NO: 168730 - DNA, 25 bp, Probe Sequence
caagtgttaccatggcaaaactgga

SEQ ID NO: 168731 - DNA, 25 bp, Probe Sequence
caagtttacctgtgcaacaaatctg

SEQ ID NO: 168732 - DNA, 25 bp, Probe Sequence
caagttcaaccactgttaagacctc

SEQ ID NO: 168733 - DNA, 25 bp, Probe Sequence
caaggccaaccgcgagaagatgacc

SEQ ID NO: 168734 - DNA, 25 bp, Probe Sequence
aattgcccctctcagtgcaatgaaa

SEQ ID NO: 168735 - DNA, 25 bp, Probe Sequence
caataccccacttgcaacaatgaac

SEQ ID NO: 168736 - DNA, 25 bp, Probe Sequence
caattgccaggcccaaacacagaac

SEQ ID NO: 168737 - DNA, 25 bp, Probe Sequence
caaccttgctgcccaaatcagccaa

SEQ ID NO: 168738 - DNA, 25 bp, Probe Sequence
caatcaccagtctcaaatgcgctat

SEQ ID NO: 168739 - DNA, 25 bp, Probe Sequence
caatcaagggtatcatatgcgcaag

SEQ ID NO: 168740 - DNA, 25 bp, Probe Sequence
caatcacaggtgtttctatctagat

SEQ ID NO: 168741 - DNA, 25 bp, Probe Sequence
caatagcaggctttattcattctca

SEQ ID NO: 168742 - DNA, 25 bp, Probe Sequence
caataggcttcatagtatatctctg

SEQ ID NO: 168743 - DNA, 25 bp, Probe Sequence
caatgttctatggggttactctcta

SEQ ID NO: 168744 - DNA, 25 bp, Probe Sequence
caattacagactgtgttaccttgga

SEQ ID NO: 168745 - DNA, 25 bp, Probe Sequence
caatttcatgttgatgatatacaca

SEQ ID NO: 168746 - DNA, 25 bp, Probe Sequence
caatatttgtgtcataagacatctt

SEQ ID NO: 168747 - DNA, 25 bp, Probe Sequence
caatatgtgggttatcaagatagtc

SEQ ID NO: 168748 - DNA, 25 bp, Probe Sequence
aattgtcactgtcatcagaatctgt

SEQ ID NO: 168749 - DNA, 25 bp, Probe Sequence
caattgtagagtcctcaattgtgtt

SEQ ID NO: 168750 - DNA, 25 bp, Probe Sequence
aattgtgctgttcgtagtttgtata

SEQ ID NO: 168751 - DNA, 25 bp, Probe Sequence
caatgtgtgtttctggttcgtaccc

SEQ ID NO: 168752 - DNA, 25 bp, Probe Sequence
caaggtgtgtcctggttttacaaca

SEQ ID NO: 168753 - DNA, 25 bp, Probe Sequence
caagggggtcttgttttgctagaga

SEQ ID NO: 168754 - DNA, 25 bp, Probe Sequence
caaggaggttctgttattaaagtga

SEQ ID NO: 168755 - DNA, 25 bp, Probe Sequence
caagtaagctgtcccttttaattgt

SEQ ID NO: 168756 - DNA, 25 bp, Probe Sequence
caaggcattcgatgcgtgtttaatg

SEQ ID NO: 168757 - DNA, 25 bp, Probe Sequence
caagaggctggatactagttacatg

SEQ ID NO: 168758 - DNA, 25 bp, Probe Sequence
caaggcagtgtagatccaggtgtct

SEQ ID NO: 168759 - DNA, 25 bp, Probe Sequence
caaagtttcaggtctcgcggtttgt

SEQ ID NO: 168760 - DNA, 25 bp, Probe Sequence
cataactgttagacttcccgtttct

SEQ ID NO: 168761 - DNA, 25 bp, Probe Sequence
caagctgggtagtccccacagtttt

SEQ ID NO: 168762 - DNA, 25 bp, Probe Sequence
caatggtggaatgtcccagcgttct

SEQ ID NO: 168763 - DNA, 25 bp, Probe Sequence
caatgggaactctggccaagactct

SEQ ID NO: 168764 - DNA, 25 bp, Probe Sequence
caagggtcccaggtgtagagagctc

SEQ ID NO: 168765 - DNA, 25 bp, Probe Sequence
cagaggtctccctataccgagaccc

SEQ ID NO: 168766 - DNA, 25 bp, Probe Sequence
caaggtggccttaatttgagcccct

SEQ ID NO: 168767 - DNA, 25 bp, Probe Sequence
caatcgggagtttgtttgggcacca

SEQ ID NO: 168768 - DNA, 25 bp, Probe Sequence
caatgggagtttgttttggcaccaa

SEQ ID NO: 168769 - DNA, 25 bp, Probe Sequence
caatgggagtttgttttggcaccaa

SEQ ID NO: 168770 - DNA, 25 bp, Probe Sequence
caatgggagttttgttttggcacca

SEQ ID NO: 168771 - DNA, 25 bp, Probe Sequence
caatgggagttttgttttggcacca

SEQ ID NO: 168772 - DNA, 25 bp, Probe Sequence
caatgggagttttgttttggcacca

SEQ ID NO: 168773 - DNA, 25 bp, Probe Sequence
caatgggagttttgttttggcacca

SEQ ID NO: 168774 - DNA, 25 bp, Probe Sequence
caaggtgactgtgcttgtcgggacc

SEQ ID NO: 168775 - DNA, 25 bp, Probe Sequence
caagggacgttctgtgggcagtagc

SEQ ID NO: 168776 - DNA, 25 bp, Probe Sequence
caagtccacgtttcctgaggagctt

SEQ ID NO: 168777 - DNA, 25 bp, Probe Sequence
caatgaaaccttcctcttgagggtc

SEQ ID NO: 168778 - DNA, 25 bp, Probe Sequence
caataacattcttcgatctctggga

SEQ ID NO: 168779 - DNA, 25 bp, Probe Sequence
caataaagctctactgtctctgggt

SEQ ID NO: 168780 - DNA, 25 bp, Probe Sequence
caatgaagtgtatggcctctggagt

SEQ ID NO: 168781 - DNA, 25 bp, Probe Sequence
caatcactttattgactcctagccg

SEQ ID NO: 168782 - DNA, 25 bp, Probe Sequence
caatgatctcctttaccaatactgc

SEQ ID NO: 168783 - DNA, 25 bp, Probe Sequence
caatgcctgccttttgccaggcatc

SEQ ID NO: 168784 - DNA, 25 bp, Probe Sequence
caatgccattgcatccatccggcat

SEQ ID NO: 168785 - DNA, 25 bp, Probe Sequence
caatgccactgcatccatgcattct

SEQ ID NO: 168786 - DNA, 25 bp, Probe Sequence
caatcccagatttcgcaattcttct

SEQ ID NO: 168787 - DNA, 25 bp, Probe Sequence
caatcatccagtttggcagtgttac

SEQ ID NO: 168788 - DNA, 25 bp, Probe Sequence
caattggatgctgtggagatgataa

SEQ ID NO: 168789 - DNA, 25 bp, Probe Sequence
caagagatgatggttatgcaattaa

SEQ ID NO: 168790 - DNA, 25 bp, Probe Sequence
caagggagcctcatgcagatagtag

SEQ ID NO: 168791 - DNA, 25 bp, Probe Sequence
caatggaaccttggcaggcgtggtg

SEQ ID NO: 168792 - DNA, 25 bp, Probe Sequence
caatgaacagtatgcggggtggtct

SEQ ID NO: 168793 - DNA, 25 bp, Probe Sequence
caatcacacgaaaggcaggcgggct

SEQ ID NO: 168794 - DNA, 25 bp, Probe Sequence
caataccaaagtcgcaagaatggct

SEQ ID NO: 168795 - DNA, 25 bp, Probe Sequence
caatgtaaccaaagcaagaaggcag

SEQ ID NO: 168796 - DNA, 25 bp, Probe Sequence
caatatactctccggacatgaacca

SEQ ID NO: 168797 - DNA, 25 bp, Probe Sequence
caatgaccttgtcgaaatccacctg

SEQ ID NO: 168798 - DNA, 25 bp, Probe Sequence
caatgaactttgggcaccagcctct

SEQ ID NO: 168799 - DNA, 25 bp, Probe Sequence
caaggtttctgccagcccactgttg

SEQ ID NO: 168800 - DNA, 25 bp, Probe Sequence
caattttactgatctgcctctgtta

SEQ ID NO: 168801 - DNA, 25 bp, Probe Sequence
caattagtaggatggctgtgctgta

SEQ ID NO: 168802 - DNA, 25 bp, Probe Sequence
caattagctgagtgtggtggcgcat

SEQ ID NO: 168803 - DNA, 25 bp, Probe Sequence
caatgtcagtagttttgggaaattc

SEQ ID NO: 168804 - DNA, 25 bp, Probe Sequence
cactccaggggttgtgggtttgtca

SEQ ID NO: 168805 - DNA, 25 bp, Probe Sequence
caatagaggaggacggggtgctttc

SEQ ID NO: 168806 - DNA, 25 bp, Probe Sequence
caaagtagggtactgcgtggtctcc

SEQ ID NO: 168807 - DNA, 25 bp, Probe Sequence
caagaggagggcactagggccctgc

SEQ ID NO: 168808 - DNA, 25 bp, Probe Sequence
caagggtgtgagatgttccccctgc

SEQ ID NO: 168809 - DNA, 25 bp, Probe Sequence
caaggaatgggtgcttcccttcaga

SEQ ID NO: 168810 - DNA, 25 bp, Probe Sequence
caagaagggagggggctacttcagg

SEQ ID NO: 168811 - DNA, 25 bp, Probe Sequence
caaggctggaagcggttgactcacg

SEQ ID NO: 168812 - DNA, 25 bp, Probe Sequence
caaggcaagctacggtgtggaggac

SEQ ID NO: 168813 - DNA, 25 bp, Probe Sequence
caagtctagcatttggggtatggaa

SEQ ID NO: 168814 - DNA, 25 bp, Probe Sequence
caagttggatcatggggaatttcag

SEQ ID NO: 168815 - DNA, 25 bp, Probe Sequence
caagtaggagcagtggaaatggttc

SEQ ID NO: 168816 - DNA, 25 bp, Probe Sequence
caagttgtctcagcagaaagttgcc

SEQ ID NO: 168817 - DNA, 25 bp, Probe Sequence
caatgctttctacctgaaatgtgta

SEQ ID NO: 168818 - DNA, 25 bp, Probe Sequence
caatttatctagtccatgtacttaa

SEQ ID NO: 168819 - DNA, 25 bp, Probe Sequence
caatgcccatcaagtcagcttacgt

SEQ ID NO: 168820 - DNA, 25 bp, Probe Sequence
caatcatcccatcataaatactgct

SEQ ID NO: 168821 - DNA, 25 bp, Probe Sequence
caatctccccgatgagcaagtgctc

SEQ ID NO: 168822 - DNA, 25 bp, Probe Sequence
caatggccccgatgggatggagccc

SEQ ID NO: 168823 - DNA, 25 bp, Probe Sequence
caatggccccgatgggatggagccc

SEQ ID NO: 168824 - DNA, 25 bp, Probe Sequence
caatcggatcggtggagtgcagcag

SEQ ID NO: 168825 - DNA, 25 bp, Probe Sequence
caagggactgtgtgttgccacagga

SEQ ID NO: 168826 - DNA, 25 bp, Probe Sequence
caagtggatcgtcatgttcagtagt

SEQ ID NO: 168827 - DNA, 25 bp, Probe Sequence
caatgtgggcagcctcatggtgcct

SEQ ID NO: 168828 - DNA, 25 bp, Probe Sequence
caatgtgggcagcctcatggtgcct

SEQ ID NO: 168829 - DNA, 25 bp, Probe Sequence
caatgtgggcagcctcatggtgcct

SEQ ID NO: 168830 - DNA, 25 bp, Probe Sequence
caactgcagccaatcgcatggagcc

SEQ ID NO: 168831 - DNA, 25 bp, Probe Sequence
caatatgcaatcatcagcgaggcct

SEQ ID NO: 168832 - DNA, 25 bp, Probe Sequence
caatgacaccatcccagaggactat

SEQ ID NO: 168833 - DNA, 25 bp, Probe Sequence
caatttacttcccaggtctcatact

SEQ ID NO: 168834 - DNA, 25 bp, Probe Sequence
caatttgagttgttcaggctactga

SEQ ID NO: 168835 - DNA, 25 bp, Probe Sequence
caatttcatttttcaagtactgttt

SEQ ID NO: 168836 - DNA, 25 bp, Probe Sequence
aattggttattatgcttactgttct

SEQ ID NO: 168837 - DNA, 25 bp, Probe Sequence
aattgtggatttttttagatgcttc

SEQ ID NO: 168838 - DNA, 25 bp, Probe Sequence
aattgtctttttttttctgcttcag

SEQ ID NO: 168839 - DNA, 25 bp, Probe Sequence
caaggtttcgttttcattcctgtcg

SEQ ID NO: 168840 - DNA, 25 bp, Probe Sequence
caaggttatagtacttatgttcaac

SEQ ID NO: 168841 - DNA, 25 bp, Probe Sequence
ctcagaaattaatctttgtttttat

SEQ ID NO: 168842 - DNA, 25 bp, Probe Sequence
tccattaaaatatccggttgcgtac

SEQ ID NO: 168843 - DNA, 25 bp, Probe Sequence
tcctctaaaaagatcgtgtttaaat

SEQ ID NO: 168844 - DNA, 25 bp, Probe Sequence
tcccgaaacacacattggtactaaa

SEQ ID NO: 168845 - DNA, 25 bp, Probe Sequence
caacggtaacaacttcgtcacagaa

SEQ ID NO: 168846 - DNA, 25 bp, Probe Sequence
caatgcggccaagatcatccgccac

SEQ ID NO: 168847 - DNA, 25 bp, Probe Sequence
caatgcggccaagatcatccgccac

SEQ ID NO: 168848 - DNA, 25 bp, Probe Sequence
caatgcggccaagatcatccgccac

SEQ ID NO: 168849 - DNA, 25 bp, Probe Sequence
caatgcggccaagatcatccgccac

SEQ ID NO: 168850 - DNA, 25 bp, Probe Sequence
caatgcggccaggatacctgttccc

SEQ ID NO: 168851 - DNA, 25 bp, Probe Sequence
caagtagccaaagccgttgccaaac

SEQ ID NO: 168852 - DNA, 25 bp, Probe Sequence
caagccaattaagcctttccaacca

SEQ ID NO: 168853 - DNA, 25 bp, Probe Sequence
caaggtaattcagcctttcctccta

SEQ ID NO: 168854 - DNA, 25 bp, Probe Sequence
caaggtaagcgtggcgttctttctc

SEQ ID NO: 168855 - DNA, 25 bp, Probe Sequence
caaggtaccaggtcagtcttcttcc

SEQ ID NO: 168856 - DNA, 25 bp, Probe Sequence
caaggtaccaggtcagtcttcttcc

SEQ ID NO: 168857 - DNA, 25 bp, Probe Sequence
caagttacgaagctctgtccattcc

SEQ ID NO: 168858 - DNA, 25 bp, Probe Sequence
caagttgaagtacctggctttcctc

SEQ ID NO: 168859 - DNA, 25 bp, Probe Sequence
caagttgtataactcaggcgtcttt

SEQ ID NO: 168860 - DNA, 25 bp, Probe Sequence
caagtctgccattagtgaccacctc

SEQ ID NO: 168861 - DNA, 25 bp, Probe Sequence
caacctgcatgacagatcaagacct

SEQ ID NO: 168862 - DNA, 25 bp, Probe Sequence
caaggctgcagtgagttatgatcgc

SEQ ID NO: 168863 - DNA, 25 bp, Probe Sequence
caatgggcagtgtgttattcagaat

SEQ ID NO: 168864 - DNA, 25 bp, Probe Sequence
caatatgtctggtgtaactgaaatg

SEQ ID NO: 168865 - DNA, 25 bp, Probe Sequence
caattgttctgctctaactgatacc

SEQ ID NO: 168866 - DNA, 25 bp, Probe Sequence
caatggctttatcctacctagatcc

SEQ ID NO: 168867 - DNA, 25 bp, Probe Sequence
caatgactttgtcacaccagagccc

SEQ ID NO: 168868 - DNA, 25 bp, Probe Sequence
caagtcttttctacctatgagcctg

SEQ ID NO: 168869 - DNA, 25 bp, Probe Sequence
caatttctttcttcactgtggaatg

SEQ ID NO: 168870 - DNA, 25 bp, Probe Sequence
caatttctttcttcactgtggaatg

SEQ ID NO: 168871 - DNA, 25 bp, Probe Sequence
caattcttcttctcaagcactgaca

SEQ ID NO: 168872 - DNA, 25 bp, Probe Sequence
caattgcccctctcagtgcaatgaa

SEQ ID NO: 168873 - DNA, 25 bp, Probe Sequence
caatctgtcctgttacaaaagaaac

SEQ ID NO: 168874 - DNA, 25 bp, Probe Sequence
caatctgtcctgttacaaaagaaac

SEQ ID NO: 168875 - DNA, 25 bp, Probe Sequence
caaggtgccagctattcaacagaaa

SEQ ID NO: 168876 - DNA, 25 bp, Probe Sequence
caaggccgttctccaagcagaagtg

SEQ ID NO: 168877 - DNA, 25 bp, Probe Sequence
caaggccgttctccaagcagaagtg

SEQ ID NO: 168878 - DNA, 25 bp, Probe Sequence
caaggcctacttcaagcggggcaag

SEQ ID NO: 168879 - DNA, 25 bp, Probe Sequence
caaagcctcctgcctatacgggcag

SEQ ID NO: 168880 - DNA, 25 bp, Probe Sequence
caatgtggccgtggtacggatgaag

SEQ ID NO: 168881 - DNA, 25 bp, Probe Sequence
caagctggtcttggtaagtataaat

SEQ ID NO: 168882 - DNA, 25 bp, Probe Sequence
caatctcgcttaggtaaaattcttt

SEQ ID NO: 168883 - DNA, 25 bp, Probe Sequence
caatcagccttcaccaaaatctctg

SEQ ID NO: 168884 - DNA, 25 bp, Probe Sequence
caatcatgcctatttaatggaacct

SEQ ID NO: 168885 - DNA, 25 bp, Probe Sequence
caatgacctatgtaacggcaccctt

SEQ ID NO: 168886 - DNA, 25 bp, Probe Sequence
caatgccctcattaaagcagccggt

SEQ ID NO: 168887 - DNA, 25 bp, Probe Sequence
caatgccaccatgatacaggggcag

SEQ ID NO: 168888 - DNA, 25 bp, Probe Sequence
caagacaacagaatccatcagggcc

SEQ ID NO: 168889 - DNA, 25 bp, Probe Sequence
caatgagcaactgcccatgctgggc

SEQ ID NO: 168890 - DNA, 25 bp, Probe Sequence
caatgaaatactgagatgctgggct

SEQ ID NO: 168891 - DNA, 25 bp, Probe Sequence
caaggacactctgacattcggcttg

SEQ ID NO: 168892 - DNA, 25 bp, Probe Sequence
cttggcagccttgaagttggggtca

SEQ ID NO: 168893 - DNA, 25 bp, Probe Sequence
caaggagccgtgttaggaggggtcg

SEQ ID NO: 168894 - DNA, 25 bp, Probe Sequence
caagtaccgtggaaggtggattacg

SEQ ID NO: 168895 - DNA, 25 bp, Probe Sequence
caatgccgacgtggtagactggatc

SEQ ID NO: 168896 - DNA, 25 bp, Probe Sequence
caagggagcgtggttcctagtctgc

SEQ ID NO: 168897 - DNA, 25 bp, Probe Sequence
caaggccacctggattctattgcca

SEQ ID NO: 168898 - DNA, 25 bp, Probe Sequence
caatggtatccagtgattcgttgaa

SEQ ID NO: 168899 - DNA, 25 bp, Probe Sequence
caaggttcacaatattcttgcagaa

SEQ ID NO: 168900 - DNA, 25 bp, Probe Sequence
caagagtctacttaaccttggctgc

SEQ ID NO: 168901 - DNA, 25 bp, Probe Sequence
caagagctccaggctagaccgttgc

SEQ ID NO: 168902 - DNA, 25 bp, Probe Sequence
caatggtgccacggagcacatcgct

SEQ ID NO: 168903 - DNA, 25 bp, Probe Sequence
caaggactgctcccaagcaatgctg

SEQ ID NO: 168904 - DNA, 25 bp, Probe Sequence
caaggagatgctccagcacaaccag

SEQ ID NO: 168905 - DNA, 25 bp, Probe Sequence
caagaaattccagcggcagcatatg

SEQ ID NO: 168906 - DNA, 25 bp, Probe Sequence
caagaattgggaactgggatataag

SEQ ID NO: 168907 - DNA, 25 bp, Probe Sequence
caatttctggttttggtatatatcc

SEQ ID NO: 168908 - DNA, 25 bp, Probe Sequence
caatggccgtttttactatctgatc

SEQ ID NO: 168909 - DNA, 25 bp, Probe Sequence
caagagttgtttctacagacttttt

SEQ ID NO: 168910 - DNA, 25 bp, Probe Sequence
caagagttgtttctacagacttttt

SEQ ID NO: 168911 - DNA, 25 bp, Probe Sequence
caaagtgtttttcaagcctgttata

SEQ ID NO: 168912 - DNA, 25 bp, Probe Sequence
caaagtgtttttcaagcctgttata

SEQ ID NO: 168913 - DNA, 25 bp, Probe Sequence
caaactgttttcccaacgtgacatt

SEQ ID NO: 168914 - DNA, 25 bp, Probe Sequence
cagaaagtacttcccccagtggaag

SEQ ID NO: 168915 - DNA, 25 bp, Probe Sequence
caagaagtagttcaccccagctacg

SEQ ID NO: 168916 - DNA, 25 bp, Probe Sequence
caatgcaagtcaatcattaaccaac

SEQ ID NO: 168917 - DNA, 25 bp, Probe Sequence
caatgctgaggtacttgtcccattc

SEQ ID NO: 168918 - DNA, 25 bp, Probe Sequence
caatgatagcttgctgtgtcccacc

SEQ ID NO: 168919 - DNA, 25 bp, Probe Sequence
caatgtatcatatgccattacgccc

SEQ ID NO: 168920 - DNA, 25 bp, Probe Sequence
caatggatctagaacttcatcgccc

SEQ ID NO: 168921 - DNA, 25 bp, Probe Sequence
caaggagacagtatctcagcgccct

SEQ ID NO: 168922 - DNA, 25 bp, Probe Sequence
caaggcagaaggcaacgaccacatt

SEQ ID NO: 168923 - DNA, 25 bp, Probe Sequence
caatgcgaggaagcaaagagcctaa

SEQ ID NO: 168924 - DNA, 25 bp, Probe Sequence
caattaggattgcccaggagtccaa

SEQ ID NO: 168925 - DNA, 25 bp, Probe Sequence
caatgtttgttgcatagctggtaca

SEQ ID NO: 168926 - DNA, 25 bp, Probe Sequence
caatattgtgaagaactgctgtgaa

SEQ ID NO: 168927 - DNA, 25 bp, Probe Sequence
caatttgaaaggcaaggtaggagga

SEQ ID NO: 168928 - DNA, 25 bp, Probe Sequence
caatcctcaaatgcggggtgggggc

SEQ ID NO: 168929 - DNA, 25 bp, Probe Sequence
caaactcaaagaatggggtggtggg

SEQ ID NO: 168930 - DNA, 25 bp, Probe Sequence
caaaatcgtcgcaggggtactgggc

SEQ ID NO: 168931 - DNA, 25 bp, Probe Sequence
caaaatcgtcgcaggggtactgggc

SEQ ID NO: 168932 - DNA, 25 bp, Probe Sequence
ctagagcggtccttggggagacgcg

SEQ ID NO: 168933 - DNA, 25 bp, Probe Sequence
caagaagcgttccaggggaagcgcc

SEQ ID NO: 168934 - DNA, 25 bp, Probe Sequence
caataatagtcccacagggaacctg

SEQ ID NO: 168935 - DNA, 25 bp, Probe Sequence
caatgaataatccgccagaacgacc

SEQ ID NO: 168936 - DNA, 25 bp, Probe Sequence
caagtaacttgggaaaaggccgcat

SEQ ID NO: 168937 - DNA, 25 bp, Probe Sequence
caattcaatacgcgggatagcccca

SEQ ID NO: 168938 - DNA, 25 bp, Probe Sequence
caattccacctgactggcagaacct

SEQ ID NO: 168939 - DNA, 25 bp, Probe Sequence
caatcccatagcccggtaatgactg

SEQ ID NO: 168940 - DNA, 25 bp, Probe Sequence
caaactgctgaccacgccgaatccg

SEQ ID NO: 168941 - DNA, 25 bp, Probe Sequence
caatgagcttactacccaacttcaa

SEQ ID NO: 168942 - DNA, 25 bp, Probe Sequence
caaggtcacatcccagaacatttaa

SEQ ID NO: 168943 - DNA, 25 bp, Probe Sequence
caaggacatctacagctcctttggc

SEQ ID NO: 168944 - DNA, 25 bp, Probe Sequence
caagtgagcacctgattccgttgcc

SEQ ID NO: 168945 - DNA, 25 bp, Probe Sequence
caagtgagcccggagtacttctcca

SEQ ID NO: 168946 - DNA, 25 bp, Probe Sequence
caagtgaccaccgtgaagtgcctat

SEQ ID NO: 168947 - DNA, 25 bp, Probe Sequence
caagaggtccactcagatgctcctt

SEQ ID NO: 168948 - DNA, 25 bp, Probe Sequence
caagaggaaacccacagctcagctt

SEQ ID NO: 168949 - DNA, 25 bp, Probe Sequence
caatgggaaccccttgtgagcatgc

SEQ ID NO: 168950 - DNA, 25 bp, Probe Sequence
caataggagacaccagttctgactg

SEQ ID NO: 168951 - DNA, 25 bp, Probe Sequence
caataggcagactgcggcctcactt

SEQ ID NO: 168952 - DNA, 25 bp, Probe Sequence
caatgaacgcagtgcagagccccaa

SEQ ID NO: 168953 - DNA, 25 bp, Probe Sequence
caatgaacttaatggatgcaccaag

SEQ ID NO: 168954 - DNA, 25 bp, Probe Sequence
caagatgatttgtatcttagacgac

SEQ ID NO: 168955 - DNA, 25 bp, Probe Sequence
caatggtatctgcatattagcccct

SEQ ID NO: 168956 - DNA, 25 bp, Probe Sequence
caatgcctgcttcatgattatccca

SEQ ID NO: 168957 - DNA, 25 bp, Probe Sequence
caatgccgagtggctgactgtactt

SEQ ID NO: 168958 - DNA, 25 bp, Probe Sequence
caatcatctgtgggtcatttgactt

SEQ ID NO: 168959 - DNA, 25 bp, Probe Sequence
caatcaatggctgtcttgctcaatt

SEQ ID NO: 168960 - DNA, 25 bp, Probe Sequence
caatatggacatgtctttacattca

SEQ ID NO: 168961 - DNA, 25 bp, Probe Sequence
caattagcacatgttttgcatatta

SEQ ID NO: 168962 - DNA, 25 bp, Probe Sequence
caagtgcagcctgtcagttttagaa

SEQ ID NO: 168963 - DNA, 25 bp, Probe Sequence
caaggcctctggcatttgtgggaag

SEQ ID NO: 168964 - DNA, 25 bp, Probe Sequence
caagcactccaggggttgtgggttt

SEQ ID NO: 168965 - DNA, 25 bp, Probe Sequence
caaggcccagggcttcacagaggat

SEQ ID NO: 168966 - DNA, 25 bp, Probe Sequence
caatgttctaggtgaccctgggctg

SEQ ID NO: 168967 - DNA, 25 bp, Probe Sequence
caatagttagatctaccctgcctgt

SEQ ID NO: 168968 - DNA, 25 bp, Probe Sequence
caatatttagtactttcctgccttt

SEQ ID NO: 168969 - DNA, 25 bp, Probe Sequence
caatgtttttaggtttagcattttg

SEQ ID NO: 168970 - DNA, 25 bp, Probe Sequence
caagccgtttttattacacttagtg

SEQ ID NO: 168971 - DNA, 25 bp, Probe Sequence
caatgaccttttattttctgtttgt

SEQ ID NO: 168972 - DNA, 25 bp, Probe Sequence
caatgaccttttattttctgtttgt

SEQ ID NO: 168973 - DNA, 25 bp, Probe Sequence
caatgaccttttattttctgtttgt

SEQ ID NO: 168974 - DNA, 25 bp, Probe Sequence
caaggacctttcatcttcaggattt

SEQ ID NO: 168975 - DNA, 25 bp, Probe Sequence
caaggacctgaagacacacgggttc

SEQ ID NO: 168976 - DNA, 25 bp, Probe Sequence
caaggacctgagacctgaagggttg

SEQ ID NO: 168977 - DNA, 25 bp, Probe Sequence
caaggaccaggccgacaaggcatct

SEQ ID NO: 168978 - DNA, 25 bp, Probe Sequence
caatggggaacgctcacggactgtg

SEQ ID NO: 168979 - DNA, 25 bp, Probe Sequence
caaggtggtgactgtgcatctggag

SEQ ID NO: 168980 - DNA, 25 bp, Probe Sequence
caagtggttacctgttcaagaatca

SEQ ID NO: 168981 - DNA, 25 bp, Probe Sequence
caagttttacctggctaatagtact

SEQ ID NO: 168982 - DNA, 25 bp, Probe Sequence
caagattcctcctttgtgttgagta

SEQ ID NO: 168983 - DNA, 25 bp, Probe Sequence
caatgatccccgcatggtgttgggg

SEQ ID NO: 168984 - DNA, 25 bp, Probe Sequence
caagtgcccccgaagggtgggcgtg

SEQ ID NO: 168985 - DNA, 25 bp, Probe Sequence
caagtactccggcagggagggtgac

SEQ ID NO: 168986 - DNA, 25 bp, Probe Sequence
caagcgaccccgtggtgaggagaaa

SEQ ID NO: 168987 - DNA, 25 bp, Probe Sequence
caaggagctctccaaacgagacgga

SEQ ID NO: 168988 - DNA, 25 bp, Probe Sequence
caaggtcatccctgagctgaacggg

SEQ ID NO: 168989 - DNA, 25 bp, Probe Sequence
caaggtcatccctgagctgaacggg

SEQ ID NO: 168990 - DNA, 25 bp, Probe Sequence
caaggatacccacagtacggctggc

SEQ ID NO: 168991 - DNA, 25 bp, Probe Sequence
cacgtaagtccacatatacttctat

SEQ ID NO: 168992 - DNA, 25 bp, Probe Sequence
caagtcaatctactgaattcctttt

SEQ ID NO: 168993 - DNA, 25 bp, Probe Sequence
caatacctcatactgctttaccttt

SEQ ID NO: 168994 - DNA, 25 bp, Probe Sequence
caatgaaatcttctttgaccgttac

SEQ ID NO: 168995 - DNA, 25 bp, Probe Sequence
caatacagtttcattaactccttcc

SEQ ID NO: 168996 - DNA, 25 bp, Probe Sequence
caatacagtttcattaactccttcc

SEQ ID NO: 168997 - DNA, 25 bp, Probe Sequence
caagcctttatgcttgagtcccttc

SEQ ID NO: 168998 - DNA, 25 bp, Probe Sequence
caatgcctcagtagtttgttccctt

SEQ ID NO: 168999 - DNA, 25 bp, Probe Sequence
caatgtcacctggtatgtgtcctcc

SEQ ID NO: 169000 - DNA, 25 bp, Probe Sequence
caatgtcatcccggatctgtaaccg

SEQ ID NO: 169001 - DNA, 25 bp, Probe Sequence
caatgttaccaccgttgacaccaaa

SEQ ID NO: 169002 - DNA, 25 bp, Probe Sequence
caagtgacccagggcctgacaaaaa

SEQ ID NO: 169003 - DNA, 25 bp, Probe Sequence
caaggagcgccaggcagcctgcaaa

SEQ ID NO: 169004 - DNA, 25 bp, Probe Sequence
caaggatgtcaaggccgctgctaat

SEQ ID NO: 169005 - DNA, 25 bp, Probe Sequence
caagatagtcttggcacagtctcat

SEQ ID NO: 169006 - DNA, 25 bp, Probe Sequence
caagtagttttcaactctcccagtg

SEQ ID NO: 169007 - DNA, 25 bp, Probe Sequence
caagaagtctgaaaaccctgccaag

SEQ ID NO: 169008 - DNA, 25 bp, Probe Sequence
caagaaggttatctcctcagccaac

SEQ ID NO: 169009 - DNA, 25 bp, Probe Sequence
caagaaggtttcagcagtattacac

SEQ ID NO: 169010 - DNA, 25 bp, Probe Sequence
caagcgggtctcagagcagtttaca

SEQ ID NO: 169011 - DNA, 25 bp, Probe Sequence
caaggggcttgcatggagttagatc

SEQ ID NO: 169012 - DNA, 25 bp, Probe Sequence
caatgggcgtggatagcggtctgac

SEQ ID NO: 169013 - DNA, 25 bp, Probe Sequence
caatgggcctaggccggagtttcca

SEQ ID NO: 169014 - DNA, 25 bp, Probe Sequence
caatgggcgtgaatacggtgtgact

SEQ ID NO: 169015 - DNA, 25 bp, Probe Sequence
caatgctctggtggctagggatgta

SEQ ID NO: 169016 - DNA, 25 bp, Probe Sequence
caatctcctgaggcttgtggatttc

SEQ ID NO: 169017 - DNA, 25 bp, Probe Sequence
caatcccgaggctgctgagagacgg

SEQ ID NO: 169018 - DNA, 25 bp, Probe Sequence
caatgacggagtccctgacagtcgg

SEQ ID NO: 169019 - DNA, 25 bp, Probe Sequence
caatgaagaagcctttgcaccctgg

SEQ ID NO: 169020 - DNA, 25 bp, Probe Sequence
caatgaaaagccatccagtctcttg

SEQ ID NO: 169021 - DNA, 25 bp, Probe Sequence
caaggccacagcttttcagatccta

SEQ ID NO: 169022 - DNA, 25 bp, Probe Sequence
caagtaccagttgtctattcataag

SEQ ID NO: 169023 - DNA, 25 bp, Probe Sequence
caagaaggcgatagcttttagaaag

SEQ ID NO: 169024 - DNA, 25 bp, Probe Sequence
caagtacaggacatctttgagaaga

SEQ ID NO: 169025 - DNA, 25 bp, Probe Sequence
caagtagcagtgtcacgccttagcg

SEQ ID NO: 169026 - DNA, 25 bp, Probe Sequence
caatgctaaagtagctgtgctaggg

SEQ ID NO: 169027 - DNA, 25 bp, Probe Sequence
caagctgaaagctggtacaattttc

SEQ ID NO: 169028 - DNA, 25 bp, Probe Sequence
caacgacgcatgtggtaactttcag

SEQ ID NO: 169029 - DNA, 25 bp, Probe Sequence
caaccggcgctttgtcaacgttgtg

SEQ ID NO: 169030 - DNA, 25 bp, Probe Sequence
caacttggcttcactaataatggga

SEQ ID NO: 169031 - DNA, 25 bp, Probe Sequence
cataccttattccctataaagtaag

SEQ ID NO: 169032 - DNA, 25 bp, Probe Sequence
caagccagtaaggtttaaggttatg

SEQ ID NO: 169033 - DNA, 25 bp, Probe Sequence
caaggcacttgagggggaaggattc

SEQ ID NO: 169034 - DNA, 25 bp, Probe Sequence
caaggcctgcgagggaggaacgggc

SEQ ID NO: 169035 - DNA, 25 bp, Probe Sequence
caagacccgcaaccaggacgagggg

SEQ ID NO: 169036 - DNA, 25 bp, Probe Sequence
caaccgggcaagcagcgggggtggc

SEQ ID NO: 169037 - DNA, 25 bp, Probe Sequence
caataagagcgaaccagcctgggag

SEQ ID NO: 169038 - DNA, 25 bp, Probe Sequence
caatcagattgccagatctcgcctc

SEQ ID NO: 169039 - DNA, 25 bp, Probe Sequence
caatcagctggccagagtctgctac

SEQ ID NO: 169040 - DNA, 25 bp, Probe Sequence
caatagccaggccaggctgtcatcc

SEQ ID NO: 169041 - DNA, 25 bp, Probe Sequence
caatgagccgagatcacgtcactgc

SEQ ID NO: 169042 - DNA, 25 bp, Probe Sequence
caaggcctagacacggcactggcct

SEQ ID NO: 169043 - DNA, 25 bp, Probe Sequence
caaggcctagacacggcactggcct

SEQ ID NO: 169044 - DNA, 25 bp, Probe Sequence
caagagagtaaaccaggactgctgc

SEQ ID NO: 169045 - DNA, 25 bp, Probe Sequence
caatggaaatcccatcaccatcttc

SEQ ID NO: 169046 - DNA, 25 bp, Probe Sequence
caagtaagaccattcaacgcattga

SEQ ID NO: 169047 - DNA, 25 bp, Probe Sequence
caagttacaccatatatgtcatatc

SEQ ID NO: 169048 - DNA, 25 bp, Probe Sequence
caagtcagcacccaaaggtcaatgc

SEQ ID NO: 169049 - DNA, 25 bp, Probe Sequence
caagtagatccgcggctcattgatg

SEQ ID NO: 169050 - DNA, 25 bp, Probe Sequence
caagtagtccaccttcatttaactc

SEQ ID NO: 169051 - DNA, 25 bp, Probe Sequence
caaccacccaactatctataaacct

SEQ ID NO: 169052 - DNA, 25 bp, Probe Sequence
caaccaaccaaatttctgcattcga

SEQ ID NO: 169053 - DNA, 25 bp, Probe Sequence
caagctacatccagaattagtttga

SEQ ID NO: 169054 - DNA, 25 bp, Probe Sequence
caatgccagcatttggattttttta

SEQ ID NO: 169055 - DNA, 25 bp, Probe Sequence
caatgccacatatcgtgtgtccgtg

SEQ ID NO: 169056 - DNA, 25 bp, Probe Sequence
caatcacttatatgtgtgtcgaaga

SEQ ID NO: 169057 - DNA, 25 bp, Probe Sequence
caatagaaatcaaggtgttcaatac

SEQ ID NO: 169058 - DNA, 25 bp, Probe Sequence
caataaactactgatgtctgcaaaa

SEQ ID NO: 169059 - DNA, 25 bp, Probe Sequence
caatcaacatctactgaatgccagg

SEQ ID NO: 169060 - DNA, 25 bp, Probe Sequence
caatagcactttcattgccagtgtc

SEQ ID NO: 169061 - DNA, 25 bp, Probe Sequence
caaggcttggcacactgccagtgtc

SEQ ID NO: 169062 - DNA, 25 bp, Probe Sequence
caagtgtatgcgccagggctcgttc

SEQ ID NO: 169063 - DNA, 25 bp, Probe Sequence
caagttctagggccgtcaggacacg

SEQ ID NO: 169064 - DNA, 25 bp, Probe Sequence
caagttccagggtcaggacaccatc

SEQ ID NO: 169065 - DNA, 25 bp, Probe Sequence
caaggtgccagctgagcggaaccag

SEQ ID NO: 169066 - DNA, 25 bp, Probe Sequence
caaggctgccggcaccaagaagcag

SEQ ID NO: 169067 - DNA, 25 bp, Probe Sequence
caagggacggaaacatcagcaccaa

SEQ ID NO: 169068 - DNA, 25 bp, Probe Sequence
caaggggttacaggcatcgcccatg

SEQ ID NO: 169069 - DNA, 25 bp, Probe Sequence
caaggggttacaggcatcgcccatg

SEQ ID NO: 169070 - DNA, 25 bp, Probe Sequence
caagggcattgaaagccagccccac

SEQ ID NO: 169071 - DNA, 25 bp, Probe Sequence
caaggtcaggagatcgagcccatcc

SEQ ID NO: 169072 - DNA, 25 bp, Probe Sequence
caaggcgaggagctcagcatggtca

SEQ ID NO: 169073 - DNA, 25 bp, Probe Sequence
caatggcgaggtacaagctgagatc

SEQ ID NO: 169074 - DNA, 25 bp, Probe Sequence
caatgggaggctccacgctgtttgt

SEQ ID NO: 169075 - DNA, 25 bp, Probe Sequence
caagtgggtctgcatctgcttactg

SEQ ID NO: 169076 - DNA, 25 bp, Probe Sequence
caaggagtttcttggcttgcactga

SEQ ID NO: 169077 - DNA, 25 bp, Probe Sequence
caaggagtcccttgcgggaagactg

SEQ ID NO: 169078 - DNA, 25 bp, Probe Sequence
caaggggagccttgtggactacctg

SEQ ID NO: 169079 - DNA, 25 bp, Probe Sequence
caagctggggcctgtggcagttgtt

SEQ ID NO: 169080 - DNA, 25 bp, Probe Sequence
caagctgcagaacaaggagcatgta

SEQ ID NO: 169081 - DNA, 25 bp, Probe Sequence
caatggatacaccaaatgtgatata

SEQ ID NO: 169082 - DNA, 25 bp, Probe Sequence
caatcgtgaattccttgctcatctc

SEQ ID NO: 169083 - DNA, 25 bp, Probe Sequence
caatctagaatatgtctgctctcct

SEQ ID NO: 169084 - DNA, 25 bp, Probe Sequence
caatgtgatggtctttgctttctta

SEQ ID NO: 169085 - DNA, 25 bp, Probe Sequence
caatgtgtagtctttgtttttttct

SEQ ID NO: 169086 - DNA, 25 bp, Probe Sequence
caacttggtctttgttaggcttgtc

SEQ ID NO: 169087 - DNA, 25 bp, Probe Sequence
caatcttggcacacgtggggcttac

SEQ ID NO: 169088 - DNA, 25 bp, Probe Sequence
caatcctctacttcagtgggatgct

SEQ ID NO: 169089 - DNA, 25 bp, Probe Sequence
caatctgatctgcagtagtgtggac

SEQ ID NO: 169090 - DNA, 25 bp, Probe Sequence
caatgcagactgccccaatgtgaca

SEQ ID NO: 169091 - DNA, 25 bp, Probe Sequence
caatgctgacttggagctagatgag

SEQ ID NO: 169092 - DNA, 25 bp, Probe Sequence
caatcgcatcatcggtgccaaggac

SEQ ID NO: 169093 - DNA, 25 bp, Probe Sequence
caatcagatcttcggcctgagcgag

SEQ ID NO: 169094 - DNA, 25 bp, Probe Sequence
caatcatctttcctgttccagagag

SEQ ID NO: 169095 - DNA, 25 bp, Probe Sequence
caatcatctttcctgttccagagag

SEQ ID NO: 169096 - DNA, 25 bp, Probe Sequence
caatcatctttcctgttccagagag

SEQ ID NO: 169097 - DNA, 25 bp, Probe Sequence
caaattttgttgcaccagaggtttt

SEQ ID NO: 169098 - DNA, 25 bp, Probe Sequence
catcagttgtttaaacggggtattg

SEQ ID NO: 169099 - DNA, 25 bp, Probe Sequence
caaggtgttatttactggttaatat

SEQ ID NO: 169100 - DNA, 25 bp, Probe Sequence
caagactttttctctgtgttaggaa

SEQ ID NO: 169101 - DNA, 25 bp, Probe Sequence
caatcctttctatcactgtttggta

SEQ ID NO: 169102 - DNA, 25 bp, Probe Sequence
caatgatagttttcccgtttacata

SEQ ID NO: 169103 - DNA, 25 bp, Probe Sequence
caaggagttgtctcctggggccatg

SEQ ID NO: 169104 - DNA, 25 bp, Probe Sequence
caaggagttgtctcctggggccatg

SEQ ID NO: 169105 - DNA, 25 bp, Probe Sequence
caatgagggtctagtccaggggcca

SEQ ID NO: 169106 - DNA, 25 bp, Probe Sequence
cactgagaattcagaccctgggcca

SEQ ID NO: 169107 - DNA, 25 bp, Probe Sequence
caatgaaatggaggccccgaccaca

SEQ ID NO: 169108 - DNA, 25 bp, Probe Sequence
caatgaagtggagcccatcatcctc

SEQ ID NO: 169109 - DNA, 25 bp, Probe Sequence
caatgctattgccattaccatacca

SEQ ID NO: 169110 - DNA, 25 bp, Probe Sequence
caatggcactgcagtactcattcct

SEQ ID NO: 169111 - DNA, 25 bp, Probe Sequence
caaggcttacttatattcacccaac

SEQ ID NO: 169112 - DNA, 25 bp, Probe Sequence
caaggcttgaatctgtattacccag

SEQ ID NO: 169113 - DNA, 25 bp, Probe Sequence
cacaagctggaaagaaactatccga

SEQ ID NO: 169114 - DNA, 25 bp, Probe Sequence
caagagtaactacaatcttcccatg

SEQ ID NO: 169115 - DNA, 25 bp, Probe Sequence
caacagttacacaggccttcctaaa

SEQ ID NO: 169116 - DNA, 25 bp, Probe Sequence
caatgcggtaaatggcccgcctggc

SEQ ID NO: 169117 - DNA, 25 bp, Probe Sequence
caatgccttaacgagagccgcgagg

SEQ ID NO: 169118 - DNA, 25 bp, Probe Sequence
caagccccaagtgactcgcggggat

SEQ ID NO: 169119 - DNA, 25 bp, Probe Sequence
cacagacccaacacaaggcggggat

SEQ ID NO: 169120 - DNA, 25 bp, Probe Sequence
cacgccgacaccaccaagtgggagt

SEQ ID NO: 169121 - DNA, 25 bp, Probe Sequence
caggaagacacccccaaggggctct

SEQ ID NO: 169122 - DNA, 25 bp, Probe Sequence
caagtcagaccccccagaggggtct

SEQ ID NO: 169123 - DNA, 25 bp, Probe Sequence
caagataactggccccaagagtggg

SEQ ID NO: 169124 - DNA, 25 bp, Probe Sequence
caatgtctcaggccacgtcaaggag

SEQ ID NO: 169125 - DNA, 25 bp, Probe Sequence
caagtgaatggcaatcctaaatatg

SEQ ID NO: 169126 - DNA, 25 bp, Probe Sequence
caatgtcctgggtcctaagtctgtg

SEQ ID NO: 169127 - DNA, 25 bp, Probe Sequence
caatgtcctgggtcctaagtctgtg

SEQ ID NO: 169128 - DNA, 25 bp, Probe Sequence
caatgtgcctttgcataaagttgat

SEQ ID NO: 169129 - DNA, 25 bp, Probe Sequence
caatgctgctttaaaagaaatgcta

SEQ ID NO: 169130 - DNA, 25 bp, Probe Sequence
caatgctgctttcccaggagggtga

SEQ ID NO: 169131 - DNA, 25 bp, Probe Sequence
caaggcattaggatgggggagcaaa

SEQ ID NO: 169132 - DNA, 25 bp, Probe Sequence
caaggatctaccagtgtctgagcag

SEQ ID NO: 169133 - DNA, 25 bp, Probe Sequence
caaggctcatgaatccaaactggca

SEQ ID NO: 169134 - DNA, 25 bp, Probe Sequence
caatggccatgaacgcctttggaga

SEQ ID NO: 169135 - DNA, 25 bp, Probe Sequence
caaggcctcacaatgcacgtgggag

SEQ ID NO: 169136 - DNA, 25 bp, Probe Sequence
caaggcctgaatggagctcgggctg

SEQ ID NO: 169137 - DNA, 25 bp, Probe Sequence
caaggacgtgagccagtgggagctg

SEQ ID NO: 169138 - DNA, 25 bp, Probe Sequence
caagggggcccagctggagctggag

SEQ ID NO: 169139 - DNA, 25 bp, Probe Sequence
caagggtgatgccaactctgaagtc

SEQ ID NO: 169140 - DNA, 25 bp, Probe Sequence
caaggtgtactgccagcgcatgcag

SEQ ID NO: 169141 - DNA, 25 bp, Probe Sequence
caatgcatggagacatgccccagaa

SEQ ID NO: 169142 - DNA, 25 bp, Probe Sequence
caatcaggatgacgctggccaatga

SEQ ID NO: 169143 - DNA, 25 bp, Probe Sequence
caatcatggtggcatcacccataaa

SEQ ID NO: 169144 - DNA, 25 bp, Probe Sequence
caatctctatggcaacatcgtcaac

SEQ ID NO: 169145 - DNA, 25 bp, Probe Sequence
cactcctagggctgccagacatacg

SEQ ID NO: 169146 - DNA, 25 bp, Probe Sequence
cagatttaaggctgacaggaagact

SEQ ID NO: 169147 - DNA, 25 bp, Probe Sequence
cagaagtaaggaaggacccagtagg

SEQ ID NO: 169148 - DNA, 25 bp, Probe Sequence
caagagtaaaatggtcacgaggggg

SEQ ID NO: 169149 - DNA, 25 bp, Probe Sequence
caagcagtgaatgtggatctaacga

SEQ ID NO: 169150 - DNA, 25 bp, Probe Sequence
caatcatggcttgtggtctggtcgc

SEQ ID NO: 169151 - DNA, 25 bp, Probe Sequence
caatctgttttgagcttggaggctt

SEQ ID NO: 169152 - DNA, 25 bp, Probe Sequence
caagctgggtatgtgcttgaaggaa

SEQ ID NO: 169153 - DNA, 25 bp, Probe Sequence
caactgcccttgaccggaagcatga

SEQ ID NO: 169154 - DNA, 25 bp, Probe Sequence
caaggtccttgctgcgaaagtgctc

SEQ ID NO: 169155 - DNA, 25 bp, Probe Sequence
caaggctatcttggatgcagaacct

SEQ ID NO: 169156 - DNA, 25 bp, Probe Sequence
caaggccattgtggcaggagatcaa

SEQ ID NO: 169157 - DNA, 25 bp, Probe Sequence
caaggccatgatgctgcgggcagct

SEQ ID NO: 169158 - DNA, 25 bp, Probe Sequence
caaggcctgcaccaggtgcggctgt

SEQ ID NO: 169159 - DNA, 25 bp, Probe Sequence
caaggcctgcaccaggtgcggctgt

SEQ ID NO: 169160 - DNA, 25 bp, Probe Sequence
caaggcctgcaccaggtgcggctgt

SEQ ID NO: 169161 - DNA, 25 bp, Probe Sequence
caaggcctgcaccaggtgcggctgt

SEQ ID NO: 169162 - DNA, 25 bp, Probe Sequence
caaggagtcacttcttggggtcttg

SEQ ID NO: 169163 - DNA, 25 bp, Probe Sequence
caaggtggccgacagggtgacgtga

SEQ ID NO: 169164 - DNA, 25 bp, Probe Sequence
caacagtgtccgggtggttaagagc

SEQ ID NO: 169165 - DNA, 25 bp, Probe Sequence
caagcggaactgcgcttaaaacagc

SEQ ID NO: 169166 - DNA, 25 bp, Probe Sequence
caagggaccaggggccaagaactgc

SEQ ID NO: 169167 - DNA, 25 bp, Probe Sequence
caagggcacctgcgagcaaggtcct

SEQ ID NO: 169168 - DNA, 25 bp, Probe Sequence
caagggacccgtcaaggtcgtggtg

SEQ ID NO: 169169 - DNA, 25 bp, Probe Sequence
caagggacccgtcaaggtcgtggtg

SEQ ID NO: 169170 - DNA, 25 bp, Probe Sequence
caagaattcccctgaaggacgtcgt

SEQ ID NO: 169171 - DNA, 25 bp, Probe Sequence
caaaattccgaagtaatgccctggg

SEQ ID NO: 169172 - DNA, 25 bp, Probe Sequence
cacggattccagagccaatcccaga

SEQ ID NO: 169173 - DNA, 25 bp, Probe Sequence
cacgagtcccagagagattatgcca

SEQ ID NO: 169174 - DNA, 25 bp, Probe Sequence
caaggtccaagatttgttttcagat

SEQ ID NO: 169175 - DNA, 25 bp, Probe Sequence
caaggtccaagatttgttttcagat

SEQ ID NO: 169176 - DNA, 25 bp, Probe Sequence
caatgtctgcgatctttttttggat

SEQ ID NO: 169177 - DNA, 25 bp, Probe Sequence
caatgcactcgatcttgtcattttt

SEQ ID NO: 169178 - DNA, 25 bp, Probe Sequence
caatgcaccgtctttagaattatgt

SEQ ID NO: 169179 - DNA, 25 bp, Probe Sequence
caatgccaagacttcgaaaatgagt

SEQ ID NO: 169180 - DNA, 25 bp, Probe Sequence
caatctcacagaagtccactaaagt

SEQ ID NO: 169181 - DNA, 25 bp, Probe Sequence
caatgcgggcacacgctcttacagt

SEQ ID NO: 169182 - DNA, 25 bp, Probe Sequence
caatgcgggcacacgctcttacagt

SEQ ID NO: 169183 - DNA, 25 bp, Probe Sequence
caatgcgggtgactcctttacatgg

SEQ ID NO: 169184 - DNA, 25 bp, Probe Sequence
caatctgaaggccccattggacatc

SEQ ID NO: 169185 - DNA, 25 bp, Probe Sequence
caatcgaatggagccactgggcccc

SEQ ID NO: 169186 - DNA, 25 bp, Probe Sequence
caatcgaatggagccactgggcccc

SEQ ID NO: 169187 - DNA, 25 bp, Probe Sequence
caatccagatgtccattcgataggc

SEQ ID NO: 169188 - DNA, 25 bp, Probe Sequence
caatccaatgtttgttgcatagctg

SEQ ID NO: 169189 - DNA, 25 bp, Probe Sequence
caacccgtaatgaatggcacgaaat

SEQ ID NO: 169190 - DNA, 25 bp, Probe Sequence
caagaccgtcaagaggaccagatca

SEQ ID NO: 169191 - DNA, 25 bp, Probe Sequence
caagaccaccaaaactacccataat

SEQ ID NO: 169192 - DNA, 25 bp, Probe Sequence
caatgaccccttcattgacctcaac

SEQ ID NO: 169193 - DNA, 25 bp, Probe Sequence
caatgcttccctggacatagacctc

SEQ ID NO: 169194 - DNA, 25 bp, Probe Sequence
caatgttcccatcactcgaactggc

SEQ ID NO: 169195 - DNA, 25 bp, Probe Sequence
caatcgtttcatcattcggcgtgcg

SEQ ID NO: 169196 - DNA, 25 bp, Probe Sequence
caacgtgaacatcttcgacgccatc

SEQ ID NO: 169197 - DNA, 25 bp, Probe Sequence
caatgggaacgtctagacccctggc

SEQ ID NO: 169198 - DNA, 25 bp, Probe Sequence
caagggaatttcttcaactccctgc

SEQ ID NO: 169199 - DNA, 25 bp, Probe Sequence
caaggggctttggaagagctcttct

SEQ ID NO: 169200 - DNA, 25 bp, Probe Sequence
caaggaggtgttcaaggctgccgct

SEQ ID NO: 169201 - DNA, 25 bp, Probe Sequence
caaggggtgcttcaaggccattgtg

SEQ ID NO: 169202 - DNA, 25 bp, Probe Sequence
caagggactgttcacggcttgggac

SEQ ID NO: 169203 - DNA, 25 bp, Probe Sequence
caagggagtgaacaccggtgcggtg

SEQ ID NO: 169204 - DNA, 25 bp, Probe Sequence
caatggcaaggaaccatcccgtggc

SEQ ID NO: 169205 - DNA, 25 bp, Probe Sequence
caatgtgagcagccaggccatcctg

SEQ ID NO: 169206 - DNA, 25 bp, Probe Sequence
caaggacaacaagatcctgtgcaac

SEQ ID NO: 169207 - DNA, 25 bp, Probe Sequence
caaggacaaggacactctgacattc

SEQ ID NO: 169208 - DNA, 25 bp, Probe Sequence
caaggacaagtacagccacctcatc

SEQ ID NO: 169209 - DNA, 25 bp, Probe Sequence
caatgcgagagataaaggacttcac

SEQ ID NO: 169210 - DNA, 25 bp, Probe Sequence
caaggctggatacggttgacttcac

SEQ ID NO: 169211 - DNA, 25 bp, Probe Sequence
caacgtggacacacttggttcctca

SEQ ID NO: 169212 - DNA, 25 bp, Probe Sequence
caagagttacacacatttctatagt

SEQ ID NO: 169213 - DNA, 25 bp, Probe Sequence
caaggtacaaaatcttgcataagct

SEQ ID NO: 169214 - DNA, 25 bp, Probe Sequence
caaggaagaaccttctgtcccagct

SEQ ID NO: 169215 - DNA, 25 bp, Probe Sequence
caaggaagaacatgcgatatacaca

SEQ ID NO: 169216 - DNA, 25 bp, Probe Sequence
caaggataacacggcgatgaacgtc

SEQ ID NO: 169217 - DNA, 25 bp, Probe Sequence
caaggaaagctctccaaccatgtct

SEQ ID NO: 169218 - DNA, 25 bp, Probe Sequence
caagaataacacttcaaagtcatct

SEQ ID NO: 169219 - DNA, 25 bp, Probe Sequence
caagaccaagaatcagaagctcctg

SEQ ID NO: 169220 - DNA, 25 bp, Probe Sequence
caagaggactcttagcaaacccggc

SEQ ID NO: 169221 - DNA, 25 bp, Probe Sequence
caaggtgtgtcatccatacagctcc

SEQ ID NO: 169222 - DNA, 25 bp, Probe Sequence
caaggtgctgtctctaacttaaaaa

SEQ ID NO: 169223 - DNA, 25 bp, Probe Sequence
caatgttgcgtgggctagacttata

SEQ ID NO: 169224 - DNA, 25 bp, Probe Sequence
caagttctctggactcagatcctct

SEQ ID NO: 169225 - DNA, 25 bp, Probe Sequence
caagcttgttggggagttcctggaa

SEQ ID NO: 169226 - DNA, 25 bp, Probe Sequence
caagttacagtcaatgggccgtgga

SEQ ID NO: 169227 - DNA, 25 bp, Probe Sequence
caagggacagcaaggagtacgtgga

SEQ ID NO: 169228 - DNA, 25 bp, Probe Sequence
caaggtgaaacactgcagtcccggt

SEQ ID NO: 169229 - DNA, 25 bp, Probe Sequence
caatggttataactgccactgcccg

SEQ ID NO: 169230 - DNA, 25 bp, Probe Sequence
caatggttcttttgtcgatgccacc

SEQ ID NO: 169231 - DNA, 25 bp, Probe Sequence
caaggcgtctcttattttgcgctcg

SEQ ID NO: 169232 - DNA, 25 bp, Probe Sequence
caagtgaggccgtcagtcttggtgt

SEQ ID NO: 169233 - DNA, 25 bp, Probe Sequence
caagttgggctgggtcttggtacac

SEQ ID NO: 169234 - DNA, 25 bp, Probe Sequence
cggacgagggctctttcttatacac

SEQ ID NO: 169235 - DNA, 25 bp, Probe Sequence
caagactaacctttgttcgtatata

SEQ ID NO: 169236 - DNA, 25 bp, Probe Sequence
caaacaagactttcgttcgttgctt

SEQ ID NO: 169237 - DNA, 25 bp, Probe Sequence
cagaaaaactttctgattctgggtt

SEQ ID NO: 169238 - DNA, 25 bp, Probe Sequence
cagaaaaaggttatcattggtcgtt

SEQ ID NO: 169239 - DNA, 25 bp, Probe Sequence
gcaatagaatggatacaacttggtc

SEQ ID NO: 169240 - DNA, 25 bp, Probe Sequence
caatgacaagtacatcgccctggat

SEQ ID NO: 169241 - DNA, 25 bp, Probe Sequence
caatgacggtaaatgcccgcctggc

SEQ ID NO: 169242 - DNA, 25 bp, Probe Sequence
caatgacggtaaatgcccgcctggc

SEQ ID NO: 169243 - DNA, 25 bp, Probe Sequence
caatgacggtaaatggcccgccggg

SEQ ID NO: 169244 - DNA, 25 bp, Probe Sequence
caatgacggtaaatggcccgccggc

SEQ ID NO: 169245 - DNA, 25 bp, Probe Sequence
caatgacggtaaatggcccgcctgc

SEQ ID NO: 169246 - DNA, 25 bp, Probe Sequence
caatgacggtaaatggcccgcctgg

SEQ ID NO: 169247 - DNA, 25 bp, Probe Sequence
caatgacggtaaatggcccgcctgg

SEQ ID NO: 169248 - DNA, 25 bp, Probe Sequence
caatgacggtaaatggcccgcctgg

SEQ ID NO: 169249 - DNA, 25 bp, Probe Sequence
caatgacggtaaatggcccgcctgg

SEQ ID NO: 169250 - DNA, 25 bp, Probe Sequence
caatgacggtaaatggcccgcctgg

SEQ ID NO: 169251 - DNA, 25 bp, Probe Sequence
caatgacggtaaatggcccgcctgg

SEQ ID NO: 169252 - DNA, 25 bp, Probe Sequence
caatgacggtaaatggcccgcctgg

SEQ ID NO: 169253 - DNA, 25 bp, Probe Sequence
caatgacggtaaatggcccgcctgg

SEQ ID NO: 169254 - DNA, 25 bp, Probe Sequence
caatgacggtaaatggcccgcctgg

SEQ ID NO: 169255 - DNA, 25 bp, Probe Sequence
caatgacggtaaatggcccgcctgg

SEQ ID NO: 169256 - DNA, 25 bp, Probe Sequence
caatgacggtaaatggcccgcctgg

SEQ ID NO: 169257 - DNA, 25 bp, Probe Sequence
caatgacggtaaatggcccgcctgg

SEQ ID NO: 169258 - DNA, 25 bp, Probe Sequence
caatgacggtaaatggcccgcctgg

SEQ ID NO: 169259 - DNA, 25 bp, Probe Sequence
caatgacggtaaatggcccgcctgg

SEQ ID NO: 169260 - DNA, 25 bp, Probe Sequence
caagtcggttaatccctgtctggac

SEQ ID NO: 169261 - DNA, 25 bp, Probe Sequence
caagtggcactttaagccctgcatc

SEQ ID NO: 169262 - DNA, 25 bp, Probe Sequence
caagggtcacattaagccctctcca

SEQ ID NO: 169263 - DNA, 25 bp, Probe Sequence
caagggacacaaaggacctcctcaa

SEQ ID NO: 169264 - DNA, 25 bp, Probe Sequence
caagtggaaaattccccacctgaca

SEQ ID NO: 169265 - DNA, 25 bp, Probe Sequence
caagtggaaaattccccacctgaca

SEQ ID NO: 169266 - DNA, 25 bp, Probe Sequence
caaggaggaccacctcctaaggcca

SEQ ID NO: 169267 - DNA, 25 bp, Probe Sequence
caaggtggaccaccacactgacaag

SEQ ID NO: 169268 - DNA, 25 bp, Probe Sequence
caaggttgaggccgccattggaaga

SEQ ID NO: 169269 - DNA, 25 bp, Probe Sequence
caagcagtgtgtcgggaagggatag

SEQ ID NO: 169270 - DNA, 25 bp, Probe Sequence
caagacacgggatgacgggaagcag

SEQ ID NO: 169271 - DNA, 25 bp, Probe Sequence
caagaccggaggcacagagggcagg

SEQ ID NO: 169272 - DNA, 25 bp, Probe Sequence
caagaaggcgagctccgagggtggc

SEQ ID NO: 169273 - DNA, 25 bp, Probe Sequence
caagggatggtggccggggtgtggc

SEQ ID NO: 169274 - DNA, 25 bp, Probe Sequence
caagtggggtgctgggaggagggag

SEQ ID NO: 169275 - DNA, 25 bp, Probe Sequence
caaggtggagctctggggtttgaga

SEQ ID NO: 169276 - DNA, 25 bp, Probe Sequence
caatggtgtcacctgctggggtatt

SEQ ID NO: 169277 - DNA, 25 bp, Probe Sequence
caatgttgctgacctcatctgaggg

SEQ ID NO: 169278 - DNA, 25 bp, Probe Sequence
caatgaagcgagcctttgggggcat

SEQ ID NO: 169279 - DNA, 25 bp, Probe Sequence
caagtgaggggccgtggctgtggca

SEQ ID NO: 169280 - DNA, 25 bp, Probe Sequence
caatgagagagtcctcgtcggttcc

SEQ ID NO: 169281 - DNA, 25 bp, Probe Sequence
caaaaatggcactggggcttactta

SEQ ID NO: 169282 - DNA, 25 bp, Probe Sequence
gctaaattggtctgtaccttaattt

SEQ ID NO: 169283 - DNA, 25 bp, Probe Sequence
caatgagttggagtttacctaaatt

SEQ ID NO: 169284 - DNA, 25 bp, Probe Sequence
caagaggaggatttataaaaccatt

SEQ ID NO: 169285 - DNA, 25 bp, Probe Sequence
caagggaatacacatacaaacacac

SEQ ID NO: 169286 - DNA, 25 bp, Probe Sequence
caaggagggggctattaacacccag

SEQ ID NO: 169287 - DNA, 25 bp, Probe Sequence
caaggggggcaggttttacatcact

SEQ ID NO: 169288 - DNA, 25 bp, Probe Sequence
caagagggtgacagcttcctttcct

SEQ ID NO: 169289 - DNA, 25 bp, Probe Sequence
caagaggctggaacgctttttagct

SEQ ID NO: 169290 - DNA, 25 bp, Probe Sequence
caaggagaagtccgcttctctgccg

SEQ ID NO: 169291 - DNA, 25 bp, Probe Sequence
caaggagaagctgcactccctgacc

SEQ ID NO: 169292 - DNA, 25 bp, Probe Sequence
caaggagaagctgtgctacgtcgcc

SEQ ID NO: 169293 - DNA, 25 bp, Probe Sequence
caagtataggctctgcccagatgcc

SEQ ID NO: 169294 - DNA, 25 bp, Probe Sequence
caagtataggctctgcccagatgcc

SEQ ID NO: 169295 - DNA, 25 bp, Probe Sequence
caagttacaattacagccaggcctt

SEQ ID NO: 169296 - DNA, 25 bp, Probe Sequence
caagttactcacatctttcagcctt

SEQ ID NO: 169297 - DNA, 25 bp, Probe Sequence
caagttttgcttattccagtctgaa

SEQ ID NO: 169298 - DNA, 25 bp, Probe Sequence
cacagtttttgtaaagcccttgcac

SEQ ID NO: 169299 - DNA, 25 bp, Probe Sequence
caatggatcattttaaagcaaattc

SEQ ID NO: 169300 - DNA, 25 bp, Probe Sequence
caatgaacacattatccagacaaaa

SEQ ID NO: 169301 - DNA, 25 bp, Probe Sequence
caatgaccacagcaaatgacccaag

SEQ ID NO: 169302 - DNA, 25 bp, Probe Sequence
caatgacacacgcctataatcccag

SEQ ID NO: 169303 - DNA, 25 bp, Probe Sequence
caatgtacactgaccaaaaccaaag

SEQ ID NO: 169304 - DNA, 25 bp, Probe Sequence
caatgaactcaaacaaatttacaag

SEQ ID NO: 169305 - DNA, 25 bp, Probe Sequence
caagaactttagcaaatgtgtcata

SEQ ID NO: 169306 - DNA, 25 bp, Probe Sequence
caagccctgccttatagaatgtact

SEQ ID NO: 169307 - DNA, 25 bp, Probe Sequence
caagctccgttgcctaatgttatct

SEQ ID NO: 169308 - DNA, 25 bp, Probe Sequence
caagtccccagagtatttctatgtg

SEQ ID NO: 169309 - DNA, 25 bp, Probe Sequence
caaggtctgcaagggaattcttgtg

SEQ ID NO: 169310 - DNA, 25 bp, Probe Sequence
caagcagattccacgaatcctcggc

SEQ ID NO: 169311 - DNA, 25 bp, Probe Sequence
caagtgataacttcgaagccatagg

SEQ ID NO: 169312 - DNA, 25 bp, Probe Sequence
caaggacacagttcgaggccaggag

SEQ ID NO: 169313 - DNA, 25 bp, Probe Sequence
caaggccaagaaggaggcgccgccc

SEQ ID NO: 169314 - DNA, 25 bp, Probe Sequence
caatgtggaggaggcggacgccgcc

SEQ ID NO: 169315 - DNA, 25 bp, Probe Sequence
caagtggaggactgatgacgccccg

SEQ ID NO: 169316 - DNA, 25 bp, Probe Sequence
caacgtgacggtggtgacgtccctc

SEQ ID NO: 169317 - DNA, 25 bp, Probe Sequence
caacgtgcacggcaggagctacggc

SEQ ID NO: 169318 - DNA, 25 bp, Probe Sequence
caagctggtggtcgaggagtactac

SEQ ID NO: 169319 - DNA, 25 bp, Probe Sequence
caaggtgggtggcaagctaccctca

SEQ ID NO: 169320 - DNA, 25 bp, Probe Sequence
caagggaggtgccaacactgggctt

SEQ ID NO: 169321 - DNA, 25 bp, Probe Sequence
caatggaaggtgtagagtttacttt

SEQ ID NO: 169322 - DNA, 25 bp, Probe Sequence
caagaatggtggtggctttacattg

SEQ ID NO: 169323 - DNA, 25 bp, Probe Sequence
caagggttggatgggctgtctgagc

SEQ ID NO: 169324 - DNA, 25 bp, Probe Sequence
caagggttggatgggctgtctgagc

SEQ ID NO: 169325 - DNA, 25 bp, Probe Sequence
caagggttggatgggctgtctgagc

SEQ ID NO: 169326 - DNA, 25 bp, Probe Sequence
caaggttcttgtggtgcttgctggg

SEQ ID NO: 169327 - DNA, 25 bp, Probe Sequence
caatggattctggtcaactggtgga

SEQ ID NO: 169328 - DNA, 25 bp, Probe Sequence
caaggcatttgttgctatcggggac

SEQ ID NO: 169329 - DNA, 25 bp, Probe Sequence
caatgtaagttatatgggggagcaa

SEQ ID NO: 169330 - DNA, 25 bp, Probe Sequence
caagtaagcttatctccctgaggct

SEQ ID NO: 169331 - DNA, 25 bp, Probe Sequence
caaggtgcctttgtacctcaggtgt

SEQ ID NO: 169332 - DNA, 25 bp, Probe Sequence
caatggtcagcttggaaaccacagt

SEQ ID NO: 169333 - DNA, 25 bp, Probe Sequence
caatggtgctttggatactcggatg

SEQ ID NO: 169334 - DNA, 25 bp, Probe Sequence
caatgggcgttggatatcgtttgac

SEQ ID NO: 169335 - DNA, 25 bp, Probe Sequence
caaggctgccgtggaatggtttgat

SEQ ID NO: 169336 - DNA, 25 bp, Probe Sequence
caaggtgccttccaatggaaatgcg

SEQ ID NO: 169337 - DNA, 25 bp, Probe Sequence
caagtgtcacctccttggagaagcc

SEQ ID NO: 169338 - DNA, 25 bp, Probe Sequence
caagcagctcatctgctcttgggac

SEQ ID NO: 169339 - DNA, 25 bp, Probe Sequence
caagaacatcggtctgggcttcaag

SEQ ID NO: 169340 - DNA, 25 bp, Probe Sequence
cacagctggtaatctggacttaagg

SEQ ID NO: 169341 - DNA, 25 bp, Probe Sequence
caagctggggcttctagagttcaag

SEQ ID NO: 169342 - DNA, 25 bp, Probe Sequence
caaggcagtgtccattcatgagtgt

SEQ ID NO: 169343 - DNA, 25 bp, Probe Sequence
caagagcaggcccatattcagccac

SEQ ID NO: 169344 - DNA, 25 bp, Probe Sequence
caagatcgtgccattgcactccagc

SEQ ID NO: 169345 - DNA, 25 bp, Probe Sequence
caatgagcgctgggtgctcactgcc

SEQ ID NO: 169346 - DNA, 25 bp, Probe Sequence
caatgagctgcgtgtggctcccgag

SEQ ID NO: 169347 - DNA, 25 bp, Probe Sequence
caagatgcggaaatgatctctgtag

SEQ ID NO: 169348 - DNA, 25 bp, Probe Sequence
caagatctgaagcctgagtgtgtgt

SEQ ID NO: 169349 - DNA, 25 bp, Probe Sequence
caatgttcaatgccacgtgctgctg

SEQ ID NO: 169350 - DNA, 25 bp, Probe Sequence
caagggcaataccgtgttggttttg

SEQ ID NO: 169351 - DNA, 25 bp, Probe Sequence
caagaacaaagccactgactgagat

SEQ ID NO: 169352 - DNA, 25 bp, Probe Sequence
caagagatcatatcctcagaccagg

SEQ ID NO: 169353 - DNA, 25 bp, Probe Sequence
caagactgttgggtctgaccggctc

SEQ ID NO: 169354 - DNA, 25 bp, Probe Sequence
caagtctgtgcgcttctacacagag

SEQ ID NO: 169355 - DNA, 25 bp, Probe Sequence
caagtctctctcataccaacagaac

SEQ ID NO: 169356 - DNA, 25 bp, Probe Sequence
caagtgcatgtcaagtcacccactc

SEQ ID NO: 169357 - DNA, 25 bp, Probe Sequence
caagatcattctcgatcttcatcct

SEQ ID NO: 169358 - DNA, 25 bp, Probe Sequence
caagactcatcgccaaagcatcctg

SEQ ID NO: 169359 - DNA, 25 bp, Probe Sequence
caagatctagcgataatgacgatga

SEQ ID NO: 169360 - DNA, 25 bp, Probe Sequence
caagatcatgcaggtgaacggctgg

SEQ ID NO: 169361 - DNA, 25 bp, Probe Sequence
caagattccgtgtcactgtggagct

SEQ ID NO: 169362 - DNA, 25 bp, Probe Sequence
caagatctgacggaagctgagggct

SEQ ID NO: 169363 - DNA, 25 bp, Probe Sequence
caagatctgccagacctgcatggtc

SEQ ID NO: 169364 - DNA, 25 bp, Probe Sequence
caagattgtatgaaccgcatggtgc

SEQ ID NO: 169365 - DNA, 25 bp, Probe Sequence
caagattgtatgaaccgcatggtgc

SEQ ID NO: 169366 - DNA, 25 bp, Probe Sequence
caagatctttaatccattgtcagta

SEQ ID NO: 169367 - DNA, 25 bp, Probe Sequence
caagacttattttcacatgtgggga

SEQ ID NO: 169368 - DNA, 25 bp, Probe Sequence
caagctcctttaggactgggtggat

SEQ ID NO: 169369 - DNA, 25 bp, Probe Sequence
caagtacttcctgacgatggagatg

SEQ ID NO: 169370 - DNA, 25 bp, Probe Sequence
caagaatcgtccgcactaaagtccc

SEQ ID NO: 169371 - DNA, 25 bp, Probe Sequence
caagaatcgtccgcactaaagtccc

SEQ ID NO: 169372 - DNA, 25 bp, Probe Sequence
caaattcactccccagtacaaaggt

SEQ ID NO: 169373 - DNA, 25 bp, Probe Sequence
caacccaccccctcaacatgagggg

SEQ ID NO: 169374 - DNA, 25 bp, Probe Sequence
caacccgcctcaaaacctgatagag

SEQ ID NO: 169375 - DNA, 25 bp, Probe Sequence
caaccctacctcaaagcacaaaagt

SEQ ID NO: 169376 - DNA, 25 bp, Probe Sequence
caaccccaccacaagtctatagaac

SEQ ID NO: 169377 - DNA, 25 bp, Probe Sequence
gtaaactggcccaagtcggaaacag

SEQ ID NO: 169378 - DNA, 25 bp, Probe Sequence
gaaaacggccctgactgtaaactgc

SEQ ID NO: 169379 - DNA, 25 bp, Probe Sequence
cagaaacgaacctctttgaaactga

SEQ ID NO: 169380 - DNA, 25 bp, Probe Sequence
cagaaactacaacaaactcaaatta

SEQ ID NO: 169381 - DNA, 25 bp, Probe Sequence
caagccctaagagacaactcaacaa

SEQ ID NO: 169382 - DNA, 25 bp, Probe Sequence
caagccgcaacgtaaaatccttgga

SEQ ID NO: 169383 - DNA, 25 bp, Probe Sequence
caagcccaaggccaaatatcccttt

SEQ ID NO: 169384 - DNA, 25 bp, Probe Sequence
caaagcctagcaccaaacttctttt

SEQ ID NO: 169385 - DNA, 25 bp, Probe Sequence
caagagcctaaccaaaaagttcctg

SEQ ID NO: 169386 - DNA, 25 bp, Probe Sequence
caagactcacaagaaacctataact

SEQ ID NO: 169387 - DNA, 25 bp, Probe Sequence
caagaatagccagcatttccgattt

SEQ ID NO: 169388 - DNA, 25 bp, Probe Sequence
caaggatgcgttccattttcacact

SEQ ID NO: 169389 - DNA, 25 bp, Probe Sequence
caagggtgtgatccaagctatccag

SEQ ID NO: 169390 - DNA, 25 bp, Probe Sequence
caatgggtggaatgatgccacctgg

SEQ ID NO: 169391 - DNA, 25 bp, Probe Sequence
caaggaagcgaatgaccctcgcctg

SEQ ID NO: 169392 - DNA, 25 bp, Probe Sequence
caaagacggtaaatggcccgcctgg

SEQ ID NO: 169393 - DNA, 25 bp, Probe Sequence
caagtacatggtgactgaacgcgcc

SEQ ID NO: 169394 - DNA, 25 bp, Probe Sequence
caactactgcgagggtgagtgcccg

SEQ ID NO: 169395 - DNA, 25 bp, Probe Sequence
caagcagactgctcgtaagtccacc

SEQ ID NO: 169396 - DNA, 25 bp, Probe Sequence
caagtagtctaccgaagtctccatc

SEQ ID NO: 169397 - DNA, 25 bp, Probe Sequence
caaggtttacatcaccttccattcc

SEQ ID NO: 169398 - DNA, 25 bp, Probe Sequence
caagacttggaatatcctgggattc

SEQ ID NO: 169399 - DNA, 25 bp, Probe Sequence
caagctatggaataccctgggtgtg

SEQ ID NO: 169400 - DNA, 25 bp, Probe Sequence
caagcagattaatccctctttttgt

SEQ ID NO: 169401 - DNA, 25 bp, Probe Sequence
caaggttagtgggcctcgggtgact

SEQ ID NO: 169402 - DNA, 25 bp, Probe Sequence
caaggtgctcagaggcgtcgaggtg

SEQ ID NO: 169403 - DNA, 25 bp, Probe Sequence
caagtgtcctgcaggctgtaatgca

SEQ ID NO: 169404 - DNA, 25 bp, Probe Sequence
caaggatcatcgatgttgtctacaa

SEQ ID NO: 169405 - DNA, 25 bp, Probe Sequence
caaggacagcagctatattccccac

SEQ ID NO: 169406 - DNA, 25 bp, Probe Sequence
caaggagctgagccgaagcttcacc

SEQ ID NO: 169407 - DNA, 25 bp, Probe Sequence
caaggcattgctgcgcagatttgca

SEQ ID NO: 169408 - DNA, 25 bp, Probe Sequence
caaggttgctgttgtgcagtgtgcc

SEQ ID NO: 169409 - DNA, 25 bp, Probe Sequence
caaggctacgatggctatgatggtc

SEQ ID NO: 169410 - DNA, 25 bp, Probe Sequence
caagctggccgtggcagatgctgtg

SEQ ID NO: 169411 - DNA, 25 bp, Probe Sequence
caagaggcctctgatggtgctgggg

SEQ ID NO: 169412 - DNA, 25 bp, Probe Sequence
caagggcctgcatcatctttggcag

SEQ ID NO: 169413 - DNA, 25 bp, Probe Sequence
caaggacttcatgatccagggcgga

SEQ ID NO: 169414 - DNA, 25 bp, Probe Sequence
caaggatcttatgacctgcaggacc

SEQ ID NO: 169415 - DNA, 25 bp, Probe Sequence
caagatgtccttggatcctgcagac

SEQ ID NO: 169416 - DNA, 25 bp, Probe Sequence
caagatggcagcagcgtgtcggagc

SEQ ID NO: 169417 - DNA, 25 bp, Probe Sequence
caatggtgcgcatgaatgtcctggc

SEQ ID NO: 169418 - DNA, 25 bp, Probe Sequence
caaggctgctgtgacagccctggcc

SEQ ID NO: 169419 - DNA, 25 bp, Probe Sequence
caagtctggtgccagcagccgcggt

SEQ ID NO: 169420 - DNA, 25 bp, Probe Sequence
caagatccctgatgacctgggcttc

SEQ ID NO: 169421 - DNA, 25 bp, Probe Sequence
caaggccctcagaaagcgtgtggtt

SEQ ID NO: 169422 - DNA, 25 bp, Probe Sequence
caaggcaggcggatcacctgaggtc

SEQ ID NO: 169423 - DNA, 25 bp, Probe Sequence
caaggcagagctgcactcactctgg

SEQ ID NO: 169424 - DNA, 25 bp, Probe Sequence
caagtgcacaagccttactttggtt

SEQ ID NO: 169425 - DNA, 25 bp, Probe Sequence
caagtgccagaggtgggcaggtggt

SEQ ID NO: 169426 - DNA, 25 bp, Probe Sequence
caagtgtgaagaatgtggcaaagca

SEQ ID NO: 169427 - DNA, 25 bp, Probe Sequence
caatggtgctattctgtgtcaaaca

SEQ ID NO: 169428 - DNA, 25 bp, Probe Sequence
caatggtgctattctgtgtcaaaca

SEQ ID NO: 169429 - DNA, 25 bp, Probe Sequence
caatggtgcgcctgctggaagatgc

SEQ ID NO: 169430 - DNA, 25 bp, Probe Sequence
caagagtgcgtctcggacagcgaat

SEQ ID NO: 169431 - DNA, 25 bp, Probe Sequence
caaggagcgcgtgcggaagcgttcc

SEQ ID NO: 169432 - DNA, 25 bp, Probe Sequence
caaggatgccggggaaacaggacct

SEQ ID NO: 169433 - DNA, 25 bp, Probe Sequence
caaggacaccgtagtaagaggactt

SEQ ID NO: 169434 - DNA, 25 bp, Probe Sequence
caaaactccagtatatgacgagtgc

SEQ ID NO: 169435 - DNA, 25 bp, Probe Sequence
caaacccaatgtgtatgccaaccgg

SEQ ID NO: 169436 - DNA, 25 bp, Probe Sequence
caagaacaatttgtgtccctcgggc

SEQ ID NO: 169437 - DNA, 25 bp, Probe Sequence
caaggaatttatgctctgccgctgg

SEQ ID NO: 169438 - DNA, 25 bp, Probe Sequence
caaggatatttgggctgcctccgga

SEQ ID NO: 169439 - DNA, 25 bp, Probe Sequence
caagtgaagagtgagctgcccctgg

SEQ ID NO: 169440 - DNA, 25 bp, Probe Sequence
caagtgaagagtgagctgcccctgg

SEQ ID NO: 169441 - DNA, 25 bp, Probe Sequence
caaggaacagcaggattccccgggc

SEQ ID NO: 169442 - DNA, 25 bp, Probe Sequence
caagagggacatgcttccccttgtc

SEQ ID NO: 169443 - DNA, 25 bp, Probe Sequence
caagagggacatgcttccccttgtc

SEQ ID NO: 169444 - DNA, 25 bp, Probe Sequence
caaggggaagcattttctcctggac

SEQ ID NO: 169445 - DNA, 25 bp, Probe Sequence
caaggggaagcattttctcctggac

SEQ ID NO: 169446 - DNA, 25 bp, Probe Sequence
caaggagtgaactattttcttttgg

SEQ ID NO: 169447 - DNA, 25 bp, Probe Sequence
caaggactggtctttctatctcttg

SEQ ID NO: 169448 - DNA, 25 bp, Probe Sequence
caaggagggtggttaatctgctata

SEQ ID NO: 169449 - DNA, 25 bp, Probe Sequence
caagtgaggtttggtcacatcctat

SEQ ID NO: 169450 - DNA, 25 bp, Probe Sequence
caaggagggcttggtcagcagcatg

SEQ ID NO: 169451 - DNA, 25 bp, Probe Sequence
caaggagggtctggagctgcctgag

SEQ ID NO: 169452 - DNA, 25 bp, Probe Sequence
caaggaggagcacgaggtggctgtg

SEQ ID NO: 169453 - DNA, 25 bp, Probe Sequence
caaggaggcagccgaggcggtggtg

SEQ ID NO: 169454 - DNA, 25 bp, Probe Sequence
caaggcggcagcgaggctgggggag

SEQ ID NO: 169455 - DNA, 25 bp, Probe Sequence
caaggtgggcgccgcagaggaggag

SEQ ID NO: 169456 - DNA, 25 bp, Probe Sequence
caagcctagggaccagggtgaggac

SEQ ID NO: 169457 - DNA, 25 bp, Probe Sequence
caagccagaagagaatgggggccaa

SEQ ID NO: 169458 - DNA, 25 bp, Probe Sequence
caagccaaacatcatcatggagtgg

SEQ ID NO: 169459 - DNA, 25 bp, Probe Sequence
caagcacatatggctggacagcaaa

SEQ ID NO: 169460 - DNA, 25 bp, Probe Sequence
caagccactcctggagaagaatgat

SEQ ID NO: 169461 - DNA, 25 bp, Probe Sequence
caagaggccgcagagaagactatgt

SEQ ID NO: 169462 - DNA, 25 bp, Probe Sequence
caagggcacgctgagacgccatgac

SEQ ID NO: 169463 - DNA, 25 bp, Probe Sequence
cacagggcaaggggggccaagtgca

SEQ ID NO: 169464 - DNA, 25 bp, Probe Sequence
caagggtagggctgccgatcagagc

SEQ ID NO: 169465 - DNA, 25 bp, Probe Sequence
caagccgtacgtgtgtctggagtgc

SEQ ID NO: 169466 - DNA, 25 bp, Probe Sequence
caagtttcctgtgacgctgggtcag

SEQ ID NO: 169467 - DNA, 25 bp, Probe Sequence
caagtttcagtgtcaaatggcggtc

SEQ ID NO: 169468 - DNA, 25 bp, Probe Sequence
caagttctgcctcaagtgcgagcgc

SEQ ID NO: 169469 - DNA, 25 bp, Probe Sequence
caagtcacttgtccatggcgaaggc

SEQ ID NO: 169470 - DNA, 25 bp, Probe Sequence
caagtacctgaatgctgcgacaagc

SEQ ID NO: 169471 - DNA, 25 bp, Probe Sequence
caagtgactctgaccagcaggctta

SEQ ID NO: 169472 - DNA, 25 bp, Probe Sequence
caagctgatatcatcccattgcatt

SEQ ID NO: 169473 - DNA, 25 bp, Probe Sequence
ctagccaagcttcaaggcaaaaatc

SEQ ID NO: 169474 - DNA, 25 bp, Probe Sequence
caaggcaccttcttaaaagaaatct

SEQ ID NO: 169475 - DNA, 25 bp, Probe Sequence
caaggatccttatttaaagctttca

SEQ ID NO: 169476 - DNA, 25 bp, Probe Sequence
caaggcatacttactataaatattt

SEQ ID NO: 169477 - DNA, 25 bp, Probe Sequence
caaggcatttctatcacatatttga

SEQ ID NO: 169478 - DNA, 25 bp, Probe Sequence
caaactttcaggcacttttcaaatt

SEQ ID NO: 169479 - DNA, 25 bp, Probe Sequence
caagacatgttaaccttttataaat

SEQ ID NO: 169480 - DNA, 25 bp, Probe Sequence
caaccatgttcaacccgtaactact

SEQ ID NO: 169481 - DNA, 25 bp, Probe Sequence
caaccatttcacaccattgtaaagt

SEQ ID NO: 169482 - DNA, 25 bp, Probe Sequence
gaaccataacctgctgtggtacctt

SEQ ID NO: 169483 - DNA, 25 bp, Probe Sequence
caactcaaaccgggctgggcaaaca

SEQ ID NO: 169484 - DNA, 25 bp, Probe Sequence
cggattagccttcgcggggcaaaat

SEQ ID NO: 169485 - DNA, 25 bp, Probe Sequence
cagaggggccttccgggaaaggatg

SEQ ID NO: 169486 - DNA, 25 bp, Probe Sequence
caacggaccctctggggacaagagt

SEQ ID NO: 169487 - DNA, 25 bp, Probe Sequence
caacggaccctctggggacaagagt

SEQ ID NO: 169488 - DNA, 25 bp, Probe Sequence
caacggagccgtgagcgacgactcc

SEQ ID NO: 169489 - DNA, 25 bp, Probe Sequence
cagattggcaggtggactacgagtc

SEQ ID NO: 169490 - DNA, 25 bp, Probe Sequence
caacgtgagtgaccgcccaaggtca

SEQ ID NO: 169491 - DNA, 25 bp, Probe Sequence
caagttgaatcatatgcccaaagta

SEQ ID NO: 169492 - DNA, 25 bp, Probe Sequence
caagcttgaccactatgctatcatc

SEQ ID NO: 169493 - DNA, 25 bp, Probe Sequence
caagtgtgcccaaggctgcatctgc

SEQ ID NO: 169494 - DNA, 25 bp, Probe Sequence
caagtgtgcccagggctgcatctgc

SEQ ID NO: 169495 - DNA, 25 bp, Probe Sequence
caaggacatcgaggagcacctgcag

SEQ ID NO: 169496 - DNA, 25 bp, Probe Sequence
caagtcagcatggaagagattcaga

SEQ ID NO: 169497 - DNA, 25 bp, Probe Sequence
caagtacggaagtagtagcaacttt

SEQ ID NO: 169498 - DNA, 25 bp, Probe Sequence
caagtacccaaatgtgacgtttcct

SEQ ID NO: 169499 - DNA, 25 bp, Probe Sequence
caactcccaaaatataggttactct

SEQ ID NO: 169500 - DNA, 25 bp, Probe Sequence
caagtccccaaatctaaatcttctc

SEQ ID NO: 169501 - DNA, 25 bp, Probe Sequence
caaacgactcactccttaaattcac

SEQ ID NO: 169502 - DNA, 25 bp, Probe Sequence
caaatcgaccttgtttttatctgtt

SEQ ID NO: 169503 - DNA, 25 bp, Probe Sequence
caagattaccttcctgttttagcct

SEQ ID NO: 169504 - DNA, 25 bp, Probe Sequence
caagttaccctagggataacagcgc

SEQ ID NO: 169505 - DNA, 25 bp, Probe Sequence
ctagtttagacaactggtaagccag

SEQ ID NO: 169506 - DNA, 25 bp, Probe Sequence
caagttctagagtatgttcttatgc

SEQ ID NO: 169507 - DNA, 25 bp, Probe Sequence
caagcatttaaggtacatgttccag

SEQ ID NO: 169508 - DNA, 25 bp, Probe Sequence
caacctgtagacttacttctcaaga

SEQ ID NO: 169509 - DNA, 25 bp, Probe Sequence
caaactgtgaatcttctggataatg

SEQ ID NO: 169510 - DNA, 25 bp, Probe Sequence
caaactggactctcgtgcagaaaat

SEQ ID NO: 169511 - DNA, 25 bp, Probe Sequence
caaactgaacacttccaaaggaggc

SEQ ID NO: 169512 - DNA, 25 bp, Probe Sequence
caaaccaatcaaccacgacaaagga

SEQ ID NO: 169513 - DNA, 25 bp, Probe Sequence
caagaccaacaaaacaagcaatgag

SEQ ID NO: 169514 - DNA, 25 bp, Probe Sequence
caagaccaagacagctcaacagatt

SEQ ID NO: 169515 - DNA, 25 bp, Probe Sequence
caagagccagcttgctcgcatacag

SEQ ID NO: 169516 - DNA, 25 bp, Probe Sequence
caagtccagcctgggcaacgtggtg

SEQ ID NO: 169517 - DNA, 25 bp, Probe Sequence
caagaccagcctggccaacatggtg

SEQ ID NO: 169518 - DNA, 25 bp, Probe Sequence
caagaccagcctggctaatgtggca

SEQ ID NO: 169519 - DNA, 25 bp, Probe Sequence
caagtggagcacccaagcgtgacaa

SEQ ID NO: 169520 - DNA, 25 bp, Probe Sequence
caacgcgcagacctaaactgatcct

SEQ ID NO: 169521 - DNA, 25 bp, Probe Sequence
caaccctgagcactcttatcaatcc

SEQ ID NO: 169522 - DNA, 25 bp, Probe Sequence
caaggcaatccacctcgaagatcca

SEQ ID NO: 169523 - DNA, 25 bp, Probe Sequence
caaggaccagatctatgacatattc

SEQ ID NO: 169524 - DNA, 25 bp, Probe Sequence
caagtgaccatcagattatatcttc

SEQ ID NO: 169525 - DNA, 25 bp, Probe Sequence
caaggatccataaagctaccagctc

SEQ ID NO: 169526 - DNA, 25 bp, Probe Sequence
caaggatccataaagctaccagctc

SEQ ID NO: 169527 - DNA, 25 bp, Probe Sequence
caaggatccataaagctaccagctc

SEQ ID NO: 169528 - DNA, 25 bp, Probe Sequence
caaggatatatataagaccactgct

SEQ ID NO: 169529 - DNA, 25 bp, Probe Sequence
caaggattcttctatttcaccagct

SEQ ID NO: 169530 - DNA, 25 bp, Probe Sequence
caaggagtttaaattctagcagaga

SEQ ID NO: 169531 - DNA, 25 bp, Probe Sequence
caaggagggtaatgtgtcaatggac

SEQ ID NO: 169532 - DNA, 25 bp, Probe Sequence
caagaagggggaatgctgtcgggac

SEQ ID NO: 169533 - DNA, 25 bp, Probe Sequence
caagaagaggacgttcctgcggcca

SEQ ID NO: 169534 - DNA, 25 bp, Probe Sequence
caagatatgtggactctctcctgag

SEQ ID NO: 169535 - DNA, 25 bp, Probe Sequence
caagtgtgctggtctcttcagtgtg

SEQ ID NO: 169536 - DNA, 25 bp, Probe Sequence
caaggtctgagatgtcatagttgtg

SEQ ID NO: 169537 - DNA, 25 bp, Probe Sequence
caaggtctacaactatgtggactgg

SEQ ID NO: 169538 - DNA, 25 bp, Probe Sequence
caaggtctacaactatgtggactgg

SEQ ID NO: 169539 - DNA, 25 bp, Probe Sequence
caaggtgcataccatgataggggtg

SEQ ID NO: 169540 - DNA, 25 bp, Probe Sequence
caaggtgctcaacatgatgcccgag

SEQ ID NO: 169541 - DNA, 25 bp, Probe Sequence
caagcggctgccgaagatggcggag

SEQ ID NO: 169542 - DNA, 25 bp, Probe Sequence
caaggtgctggcggagcagctgcgg

SEQ ID NO: 169543 - DNA, 25 bp, Probe Sequence
caaggatctgctggaacctggctgc

SEQ ID NO: 169544 - DNA, 25 bp, Probe Sequence
caaggatctgctggaacctggctgc

SEQ ID NO: 169545 - DNA, 25 bp, Probe Sequence
caaggactgcggttctgtggatgga

SEQ ID NO: 169546 - DNA, 25 bp, Probe Sequence
caaggtctgggacctgtcttggact

SEQ ID NO: 169547 - DNA, 25 bp, Probe Sequence
caaggtctgggacctgtcttggact

SEQ ID NO: 169548 - DNA, 25 bp, Probe Sequence
caaggacggcgtcatttgctgttcg

SEQ ID NO: 169549 - DNA, 25 bp, Probe Sequence
caagacctgggtcagttctttgctg

SEQ ID NO: 169550 - DNA, 25 bp, Probe Sequence
caagacctttagggatttcatggtt

SEQ ID NO: 169551 - DNA, 25 bp, Probe Sequence
caagacttttgactgccattttgtt

SEQ ID NO: 169552 - DNA, 25 bp, Probe Sequence
caagagattccttatcatctttttt

SEQ ID NO: 169553 - DNA, 25 bp, Probe Sequence
caagaagtcctatcgttggttcctg

SEQ ID NO: 169554 - DNA, 25 bp, Probe Sequence
caagaagtcctatcgttggttcctg

SEQ ID NO: 169555 - DNA, 25 bp, Probe Sequence
caagaagtcctatcgttggttcctg

SEQ ID NO: 169556 - DNA, 25 bp, Probe Sequence
caagtagctttgtggcttcgtgtcc

SEQ ID NO: 169557 - DNA, 25 bp, Probe Sequence
caagtaggggattgcgttccctcca

SEQ ID NO: 169558 - DNA, 25 bp, Probe Sequence
caaggagcggggtcgtgaccgctta

SEQ ID NO: 169559 - DNA, 25 bp, Probe Sequence
caaggagcggggtcgtgaccgctta

SEQ ID NO: 169560 - DNA, 25 bp, Probe Sequence
caaggaggaggagtcagatgaggcc

SEQ ID NO: 169561 - DNA, 25 bp, Probe Sequence
caagcggtgtaggctccaatgctgc

SEQ ID NO: 169562 - DNA, 25 bp, Probe Sequence
caagtgggtgaggactccatggcca

SEQ ID NO: 169563 - DNA, 25 bp, Probe Sequence
caagtgagtggaggagactggtgcc

SEQ ID NO: 169564 - DNA, 25 bp, Probe Sequence
caagtggtggcgacaactgcgcgcc

SEQ ID NO: 169565 - DNA, 25 bp, Probe Sequence
caagtggaacgtgaatgctcctccc

SEQ ID NO: 169566 - DNA, 25 bp, Probe Sequence
caaggagaacgtggacgtgcccctg

SEQ ID NO: 169567 - DNA, 25 bp, Probe Sequence
caagggagacagtggggcacctctg

SEQ ID NO: 169568 - DNA, 25 bp, Probe Sequence
caacgaactcaaaggcgagaccatg

SEQ ID NO: 169569 - DNA, 25 bp, Probe Sequence
caaaaatatcagtcggggagtagga

SEQ ID NO: 169570 - DNA, 25 bp, Probe Sequence
caagcagaagactcctggaaacgga

SEQ ID NO: 169571 - DNA, 25 bp, Probe Sequence
caagcagaaggaggtggaaaacgga

SEQ ID NO: 169572 - DNA, 25 bp, Probe Sequence
caacgaatttggctacagcaacagg

SEQ ID NO: 169573 - DNA, 25 bp, Probe Sequence
caacaaatttgtcaacagcatcaac

SEQ ID NO: 169574 - DNA, 25 bp, Probe Sequence
caactaagttttcaggacagcactg

SEQ ID NO: 169575 - DNA, 25 bp, Probe Sequence
caagccaagtctgtgggtgacctcg

SEQ ID NO: 169576 - DNA, 25 bp, Probe Sequence
caagcacacgcattgttggaggaac

SEQ ID NO: 169577 - DNA, 25 bp, Probe Sequence
caagggctgaaggggacgtaccagg

SEQ ID NO: 169578 - DNA, 25 bp, Probe Sequence
cacaagtctaaggggggtgcccaag

SEQ ID NO: 169579 - DNA, 25 bp, Probe Sequence
caaggttaaagccgagccagccaaa

SEQ ID NO: 169580 - DNA, 25 bp, Probe Sequence
caaagccctcaaggaaccaccaaga

SEQ ID NO: 169581 - DNA, 25 bp, Probe Sequence
caagaccccaaggagatctacacgc

SEQ ID NO: 169582 - DNA, 25 bp, Probe Sequence
caagaactcctagtactctgaccag

SEQ ID NO: 169583 - DNA, 25 bp, Probe Sequence
caagagactccagagtcctcaccgg

SEQ ID NO: 169584 - DNA, 25 bp, Probe Sequence
caagtgaacatctcttgccatcacc

SEQ ID NO: 169585 - DNA, 25 bp, Probe Sequence
caagtgaacatctcttgccatcacc

SEQ ID NO: 169586 - DNA, 25 bp, Probe Sequence
caagagaaattctatggcctaccat

SEQ ID NO: 169587 - DNA, 25 bp, Probe Sequence
caagagaaggtcctggacggcctcc

SEQ ID NO: 169588 - DNA, 25 bp, Probe Sequence
caagagaagaggccttgggaccatg

SEQ ID NO: 169589 - DNA, 25 bp, Probe Sequence
caagattgagacccggggcaccagg

SEQ ID NO: 169590 - DNA, 25 bp, Probe Sequence
caagaaaggcccggaagcgccaggc

SEQ ID NO: 169591 - DNA, 25 bp, Probe Sequence
caagaaattctgagcccaggaagcg

SEQ ID NO: 169592 - DNA, 25 bp, Probe Sequence
caagttgttcgggccaaggacctga

SEQ ID NO: 169593 - DNA, 25 bp, Probe Sequence
caagtatgctgtggagtcccaaccc

SEQ ID NO: 169594 - DNA, 25 bp, Probe Sequence
caagattctgtgcagaccacccttt

SEQ ID NO: 169595 - DNA, 25 bp, Probe Sequence
caagaagcgtgagacgccaccattc

SEQ ID NO: 169596 - DNA, 25 bp, Probe Sequence
caagcccgagatgatcggccactac

SEQ ID NO: 169597 - DNA, 25 bp, Probe Sequence
caagacggagccatttccactgatg

SEQ ID NO: 169598 - DNA, 25 bp, Probe Sequence
caagctagggccattttactgcacc

SEQ ID NO: 169599 - DNA, 25 bp, Probe Sequence
caagaagtgtgcctttgtgctgact

SEQ ID NO: 169600 - DNA, 25 bp, Probe Sequence
caaccagttactatgagtgaaaggg

SEQ ID NO: 169601 - DNA, 25 bp, Probe Sequence
caaccagtcccgaaaatggcacaga

SEQ ID NO: 169602 - DNA, 25 bp, Probe Sequence
cacagcccccactttaaggaagagt

SEQ ID NO: 169603 - DNA, 25 bp, Probe Sequence
caagcacaaccggttcacaaaggag

SEQ ID NO: 169604 - DNA, 25 bp, Probe Sequence
caagatctaccccggacacgggagg

SEQ ID NO: 169605 - DNA, 25 bp, Probe Sequence
caagcctatcacgcgtgaatcggtg

SEQ ID NO: 169606 - DNA, 25 bp, Probe Sequence
caaccttattccttacatctggcaa

SEQ ID NO: 169607 - DNA, 25 bp, Probe Sequence
caacgtatgttcattatttgtacat

SEQ ID NO: 169608 - DNA, 25 bp, Probe Sequence
caactgttgtctcttttcaaaccaa

SEQ ID NO: 169609 - DNA, 25 bp, Probe Sequence
caagatgttcatgtagtattgaaac

SEQ ID NO: 169610 - DNA, 25 bp, Probe Sequence
caagtcactctccaatgtcattgca

SEQ ID NO: 169611 - DNA, 25 bp, Probe Sequence
caagtcactggtctgtttgcatttg

SEQ ID NO: 169612 - DNA, 25 bp, Probe Sequence
caagtacacttgctctttctgtggc

SEQ ID NO: 169613 - DNA, 25 bp, Probe Sequence
caagaatactggcagttcactgtgg

SEQ ID NO: 169614 - DNA, 25 bp, Probe Sequence
caacagacactggggtatattgcag

SEQ ID NO: 169615 - DNA, 25 bp, Probe Sequence
caacagaccaccagaaacggggcca

SEQ ID NO: 169616 - DNA, 25 bp, Probe Sequence
caacgtctccatcgggaagggggtg

SEQ ID NO: 169617 - DNA, 25 bp, Probe Sequence
caaggtcggaggagacaggggatga

SEQ ID NO: 169618 - DNA, 25 bp, Probe Sequence
caagtttgtacgagaaagcaggctg

SEQ ID NO: 169619 - DNA, 25 bp, Probe Sequence
caagtttgctacgaacaaaacgcag

SEQ ID NO: 169620 - DNA, 25 bp, Probe Sequence
caagactctgtctcaaaaagaaaaa

SEQ ID NO: 169621 - DNA, 25 bp, Probe Sequence
caagtctattctgctagataatgaa

SEQ ID NO: 169622 - DNA, 25 bp, Probe Sequence
caagatgctcagtccctggtatgat

SEQ ID NO: 169623 - DNA, 25 bp, Probe Sequence
caagtgcaatgggcacgcgtctctg

SEQ ID NO: 169624 - DNA, 25 bp, Probe Sequence
caagtgaaggccaggttgcgggagg

SEQ ID NO: 169625 - DNA, 25 bp, Probe Sequence
caagaccaaggagggagtgcgggag

SEQ ID NO: 169626 - DNA, 25 bp, Probe Sequence
caagttcgaggaggccgagcggtcg

SEQ ID NO: 169627 - DNA, 25 bp, Probe Sequence
caagtactacgatgccattgcctgc

SEQ ID NO: 169628 - DNA, 25 bp, Probe Sequence
caagaaagcctcagccattcactgc

SEQ ID NO: 169629 - DNA, 25 bp, Probe Sequence
caagatgataccctgtgacttcctc

SEQ ID NO: 169630 - DNA, 25 bp, Probe Sequence
caagaaggccgggcatctattctct

SEQ ID NO: 169631 - DNA, 25 bp, Probe Sequence
caagaagctgtccataactgattat

SEQ ID NO: 169632 - DNA, 25 bp, Probe Sequence
caagacattctgcctacctattagc

SEQ ID NO: 169633 - DNA, 25 bp, Probe Sequence
caagactttcgttcgttgcttgtgg

SEQ ID NO: 169634 - DNA, 25 bp, Probe Sequence
caagcagccttttactcttctgtta

SEQ ID NO: 169635 - DNA, 25 bp, Probe Sequence
caagaccttgttttgctgtcttcat

SEQ ID NO: 169636 - DNA, 25 bp, Probe Sequence
caaccttattctgtgtgtagacatt

SEQ ID NO: 169637 - DNA, 25 bp, Probe Sequence
caagctcctactacaatgtggaata

SEQ ID NO: 169638 - DNA, 25 bp, Probe Sequence
caagtcccgcatccaggtgagactg

SEQ ID NO: 169639 - DNA, 25 bp, Probe Sequence
caagtcccgcatccaggtgagactg

SEQ ID NO: 169640 - DNA, 25 bp, Probe Sequence
caagtcccgcatccaggtgagactg

SEQ ID NO: 169641 - DNA, 25 bp, Probe Sequence
caagtaccgcatccaggtgagactg

SEQ ID NO: 169642 - DNA, 25 bp, Probe Sequence
caagaagatccacgcggtgggcgcg

SEQ ID NO: 169643 - DNA, 25 bp, Probe Sequence
caagacactgaccgggcttttcaga

SEQ ID NO: 169644 - DNA, 25 bp, Probe Sequence
caagaactatcctgagtttctgtgg

SEQ ID NO: 169645 - DNA, 25 bp, Probe Sequence
caagacacctcccgagtgtctggtc

SEQ ID NO: 169646 - DNA, 25 bp, Probe Sequence
caagaaagccctcatgtttgtgata

SEQ ID NO: 169647 - DNA, 25 bp, Probe Sequence
caagaaagccgctcagatccggtcc

SEQ ID NO: 169648 - DNA, 25 bp, Probe Sequence
caagagaaccagggcgtcttcttct

SEQ ID NO: 169649 - DNA, 25 bp, Probe Sequence
caagaagactcacggcggctttggt

SEQ ID NO: 169650 - DNA, 25 bp, Probe Sequence
caagaggagatcggcgcggttgtca

SEQ ID NO: 169651 - DNA, 25 bp, Probe Sequence
caaggtgtctctgcgggattgtttc

SEQ ID NO: 169652 - DNA, 25 bp, Probe Sequence
caagttttgtccaggatggccctga

SEQ ID NO: 169653 - DNA, 25 bp, Probe Sequence
cacagacttttccagggtggtcctt

SEQ ID NO: 169654 - DNA, 25 bp, Probe Sequence
caacccttttggaggtgcttctcat

SEQ ID NO: 169655 - DNA, 25 bp, Probe Sequence
caacccagttacagggtgtttgcag

SEQ ID NO: 169656 - DNA, 25 bp, Probe Sequence
caaccacggtacccagatatttgga

SEQ ID NO: 169657 - DNA, 25 bp, Probe Sequence
caaacggagtactgagtcttctgta

SEQ ID NO: 169658 - DNA, 25 bp, Probe Sequence
caaagttagctatggagtttctgta

SEQ ID NO: 169659 - DNA, 25 bp, Probe Sequence
caaggtgctagtgtatgagttgttg

SEQ ID NO: 169660 - DNA, 25 bp, Probe Sequence
caagcctaagtccttgagttccggg

SEQ ID NO: 169661 - DNA, 25 bp, Probe Sequence
caagtgtggagttgttttctgccgg

SEQ ID NO: 169662 - DNA, 25 bp, Probe Sequence
caagataaggcatttctttcccgga

SEQ ID NO: 169663 - DNA, 25 bp, Probe Sequence
caagtataggctggacttgctcgcc

SEQ ID NO: 169664 - DNA, 25 bp, Probe Sequence
caagaagagctgctgctcctgctgc

SEQ ID NO: 169665 - DNA, 25 bp, Probe Sequence
caagatggtgctactgcactccagc

SEQ ID NO: 169666 - DNA, 25 bp, Probe Sequence
caagatcagtctacaggtcacagtg

SEQ ID NO: 169667 - DNA, 25 bp, Probe Sequence
caaccagtgcgtgggccacagggag

SEQ ID NO: 169668 - DNA, 25 bp, Probe Sequence
caagcaagtctgaaacccaagagag

SEQ ID NO: 169669 - DNA, 25 bp, Probe Sequence
caagaatttgacaactcacaagctg

SEQ ID NO: 169670 - DNA, 25 bp, Probe Sequence
caaacttcaagcactccaggggttg

SEQ ID NO: 169671 - DNA, 25 bp, Probe Sequence
caacacccaggagctcagggggcac

SEQ ID NO: 169672 - DNA, 25 bp, Probe Sequence
caacacctcggaggtctaccagggc

SEQ ID NO: 169673 - DNA, 25 bp, Probe Sequence
ccccccatgaacgcttcgaggggct

SEQ ID NO: 169674 - DNA, 25 bp, Probe Sequence
cacagccggaaagacctccggggat

SEQ ID NO: 169675 - DNA, 25 bp, Probe Sequence
caagaagaagaagcgcggccgggcc

SEQ ID NO: 169676 - DNA, 25 bp, Probe Sequence
caagacagcaaatgccagccgggca

SEQ ID NO: 169677 - DNA, 25 bp, Probe Sequence
caagatcatcagcaatgcctcctgc

SEQ ID NO: 169678 - DNA, 25 bp, Probe Sequence
caagatcatcagcaatgcctcctgc

SEQ ID NO: 169679 - DNA, 25 bp, Probe Sequence
caagactgcagggatggcccgcagc

SEQ ID NO: 169680 - DNA, 25 bp, Probe Sequence
caagagccagacaagtatgcccact

SEQ ID NO: 169681 - DNA, 25 bp, Probe Sequence
caagtccgagccatgatgtactctg

SEQ ID NO: 169682 - DNA, 25 bp, Probe Sequence
caagctgacgagacaggggactccc

SEQ ID NO: 169683 - DNA, 25 bp, Probe Sequence
caagatagcaagggagaaatccacc

SEQ ID NO: 169684 - DNA, 25 bp, Probe Sequence
caagaataagccatgaagtcaactg

SEQ ID NO: 169685 - DNA, 25 bp, Probe Sequence
caagaacgacacgtggaggcatacg

SEQ ID NO: 169686 - DNA, 25 bp, Probe Sequence
caagaatgcccatctgtgaacacat

SEQ ID NO: 169687 - DNA, 25 bp, Probe Sequence
caagaagctctcaagtgtaactatg

SEQ ID NO: 169688 - DNA, 25 bp, Probe Sequence
caagtactgctcatttacactcaaa

SEQ ID NO: 169689 - DNA, 25 bp, Probe Sequence
caactggcctaaataaacctacaca

SEQ ID NO: 169690 - DNA, 25 bp, Probe Sequence
cacacgtccaaagttagatttaaat

SEQ ID NO: 169691 - DNA, 25 bp, Probe Sequence
caacttagccagttttatttgcaaa

SEQ ID NO: 169692 - DNA, 25 bp, Probe Sequence
caagttgaagagactttattctcaa

SEQ ID NO: 169693 - DNA, 25 bp, Probe Sequence
caagtgctttaccttatctgttaaa

SEQ ID NO: 169694 - DNA, 25 bp, Probe Sequence
caagtgctgctaaacttactttgaa

SEQ ID NO: 169695 - DNA, 25 bp, Probe Sequence
cacattggccgtgttggtcttgaac

SEQ ID NO: 169696 - DNA, 25 bp, Probe Sequence
cacttcccgtctcagaatctaaacg

SEQ ID NO: 169697 - DNA, 25 bp, Probe Sequence
caagtcgggactgcataattaaagc

SEQ ID NO: 169698 - DNA, 25 bp, Probe Sequence
caaacgggagaagtacttaacagca

SEQ ID NO: 169699 - DNA, 25 bp, Probe Sequence
caaacggatgcacccgtctttagaa

SEQ ID NO: 169700 - DNA, 25 bp, Probe Sequence
caagatggttgccgggtcatgttaa

SEQ ID NO: 169701 - DNA, 25 bp, Probe Sequence
caagctggtggctggaccaatgtaa

SEQ ID NO: 169702 - DNA, 25 bp, Probe Sequence
caagttcttgggcaccaagtacctg

SEQ ID NO: 169703 - DNA, 25 bp, Probe Sequence
caaaggcctggcaccagaagtccca

SEQ ID NO: 169704 - DNA, 25 bp, Probe Sequence
caagggccctagttcagatagtgaa

SEQ ID NO: 169705 - DNA, 25 bp, Probe Sequence
caagcaggccctgttggaattgaag

SEQ ID NO: 169706 - DNA, 25 bp, Probe Sequence
caagggccctcatttggccaatagc

SEQ ID NO: 169707 - DNA, 25 bp, Probe Sequence
caagagggcactggtggcccgacag

SEQ ID NO: 169708 - DNA, 25 bp, Probe Sequence
caagacggcctggggatacaactct

SEQ ID NO: 169709 - DNA, 25 bp, Probe Sequence
caagaggatgggggttcaccacctg

SEQ ID NO: 169710 - DNA, 25 bp, Probe Sequence
caagggctggatgggctctcagaac

SEQ ID NO: 169711 - DNA, 25 bp, Probe Sequence
caacgagtgtgatgaggccgaggct

SEQ ID NO: 169712 - DNA, 25 bp, Probe Sequence
caacgagtgtgatgaggccgaggct

SEQ ID NO: 169713 - DNA, 25 bp, Probe Sequence
caagctggtgtgttcaaggcgagga

SEQ ID NO: 169714 - DNA, 25 bp, Probe Sequence
caactggttttctgaccacgacttt

SEQ ID NO: 169715 - DNA, 25 bp, Probe Sequence
caactggatttctaggtaaaactat

SEQ ID NO: 169716 - DNA, 25 bp, Probe Sequence
caacgggctctttggagaaaagtct

SEQ ID NO: 169717 - DNA, 25 bp, Probe Sequence
caacgggactttgccaaaatgtcgt

SEQ ID NO: 169718 - DNA, 25 bp, Probe Sequence
caacgaggacccgggcaagaatgag

SEQ ID NO: 169719 - DNA, 25 bp, Probe Sequence
caagtgaacaccccatgtgacaaaa

SEQ ID NO: 169720 - DNA, 25 bp, Probe Sequence
caagtgcaacctgctctacagcaaa

SEQ ID NO: 169721 - DNA, 25 bp, Probe Sequence
caagtagatctaagtctccagcatc

SEQ ID NO: 169722 - DNA, 25 bp, Probe Sequence
caagtccatagaagcctccgtggct

SEQ ID NO: 169723 - DNA, 25 bp, Probe Sequence
caagtctgggaagtgccctttctct

SEQ ID NO: 169724 - DNA, 25 bp, Probe Sequence
caagttggtggaggccctttgtgct

SEQ ID NO: 169725 - DNA, 25 bp, Probe Sequence
gcctgtcttgtctttaatgcatgga

SEQ ID NO: 169726 - DNA, 25 bp, Probe Sequence
caagttctacgatgtggctctggac

SEQ ID NO: 169727 - DNA, 25 bp, Probe Sequence
caagccttgggatgatgagacggac

SEQ ID NO: 169728 - DNA, 25 bp, Probe Sequence
caagccttgggatgatgagacggac

SEQ ID NO: 169729 - DNA, 25 bp, Probe Sequence
caactattacgacatgaacgcggcc

SEQ ID NO: 169730 - DNA, 25 bp, Probe Sequence
cacaccctaggacatgtaagccctc

SEQ ID NO: 169731 - DNA, 25 bp, Probe Sequence
caacggctccggcatgtgcaaggcc

SEQ ID NO: 169732 - DNA, 25 bp, Probe Sequence
caagctgtcatcggacgtgctgacg

SEQ ID NO: 169733 - DNA, 25 bp, Probe Sequence
caactgtccgggctgtgagcaagag

SEQ ID NO: 169734 - DNA, 25 bp, Probe Sequence
caagcgtccggcatggcggagagaa

SEQ ID NO: 169735 - DNA, 25 bp, Probe Sequence
caagttcctggagacggtggagttg

SEQ ID NO: 169736 - DNA, 25 bp, Probe Sequence
caagcttttaagggcaggggcgtct

SEQ ID NO: 169737 - DNA, 25 bp, Probe Sequence
caagcttgtccacgtggcaggtgac

SEQ ID NO: 169738 - DNA, 25 bp, Probe Sequence
caagcatctttcccagagggtgccc

SEQ ID NO: 169739 - DNA, 25 bp, Probe Sequence
caagctcttccccacaggttagggg

SEQ ID NO: 169740 - DNA, 25 bp, Probe Sequence
caagtttgtctccccggtgagaaga

SEQ ID NO: 169741 - DNA, 25 bp, Probe Sequence
caagtttggcaccggggtggatgca

SEQ ID NO: 169742 - DNA, 25 bp, Probe Sequence
caagcatattaacagggagggaaga

SEQ ID NO: 169743 - DNA, 25 bp, Probe Sequence
caaccttaacagcatgaggaggaag

SEQ ID NO: 169744 - DNA, 25 bp, Probe Sequence
caagctgcattatcagcactggggc

SEQ ID NO: 169745 - DNA, 25 bp, Probe Sequence
caagcagaacattcagaatcaggtc

SEQ ID NO: 169746 - DNA, 25 bp, Probe Sequence
caagaaagcattcactccttcatcc

SEQ ID NO: 169747 - DNA, 25 bp, Probe Sequence
caagtacagcttcatccaattcaga

SEQ ID NO: 169748 - DNA, 25 bp, Probe Sequence
caagtacatctatgaccagtgccca

SEQ ID NO: 169749 - DNA, 25 bp, Probe Sequence
caacgtcatcaatgtcatcgtcccc

SEQ ID NO: 169750 - DNA, 25 bp, Probe Sequence
caacgtcatcaatgtcatcgtcccc

SEQ ID NO: 169751 - DNA, 25 bp, Probe Sequence
caaagtgccaaaggatcttccccct

SEQ ID NO: 169752 - DNA, 25 bp, Probe Sequence
caagaatcttaagatcttccccagc

SEQ ID NO: 169753 - DNA, 25 bp, Probe Sequence
caagagtttagaagtcactcaccta

SEQ ID NO: 169754 - DNA, 25 bp, Probe Sequence
caagagttggagagagtgccccaca

SEQ ID NO: 169755 - DNA, 25 bp, Probe Sequence
caacactctgagttctggtgccgac

SEQ ID NO: 169756 - DNA, 25 bp, Probe Sequence
caacactctgagttctggtgccgac

SEQ ID NO: 169757 - DNA, 25 bp, Probe Sequence
caacctcggggatgtgtgcagacag

SEQ ID NO: 169758 - DNA, 25 bp, Probe Sequence
caagcctcttggctgagggtgaagg

SEQ ID NO: 169759 - DNA, 25 bp, Probe Sequence
caagttattgggctcagtgctgtag

SEQ ID NO: 169760 - DNA, 25 bp, Probe Sequence
caagttcatccggcctgagggagag

SEQ ID NO: 169761 - DNA, 25 bp, Probe Sequence
caagtccctgatggcctcagaggag

SEQ ID NO: 169762 - DNA, 25 bp, Probe Sequence
caagtccccagttgccaaggatgtg

SEQ ID NO: 169763 - DNA, 25 bp, Probe Sequence
caagtcctgcacttcaccaaggatg

SEQ ID NO: 169764 - DNA, 25 bp, Probe Sequence
caagtcctgcacttcaccaaggatg

SEQ ID NO: 169765 - DNA, 25 bp, Probe Sequence
caagtcctgcacttcaccaaggatg

SEQ ID NO: 169766 - DNA, 25 bp, Probe Sequence
caagtctctgctttgagtcaagggg

SEQ ID NO: 169767 - DNA, 25 bp, Probe Sequence
caagctcttcttcagtatggtggac

SEQ ID NO: 169768 - DNA, 25 bp, Probe Sequence
caagctcttcttcagtatggtggac

SEQ ID NO: 169769 - DNA, 25 bp, Probe Sequence
caagctcacctgtttgtgtggggac

SEQ ID NO: 169770 - DNA, 25 bp, Probe Sequence
caagatcccagactggttcttgaac

SEQ ID NO: 169771 - DNA, 25 bp, Probe Sequence
caagagccgctgttgagatccttaa

SEQ ID NO: 169772 - DNA, 25 bp, Probe Sequence
caagagctgcgttaaattccaagag

SEQ ID NO: 169773 - DNA, 25 bp, Probe Sequence
caagatgtggtactgaatgtgccta

SEQ ID NO: 169774 - DNA, 25 bp, Probe Sequence
caagcagtggacctgacattgccca

SEQ ID NO: 169775 - DNA, 25 bp, Probe Sequence
caagctgtgcgagcatgcaaggccc

SEQ ID NO: 169776 - DNA, 25 bp, Probe Sequence
caagcagacgaggactacagccacg

SEQ ID NO: 169777 - DNA, 25 bp, Probe Sequence
caagtgcctgtggacatacgagatc

SEQ ID NO: 169778 - DNA, 25 bp, Probe Sequence
caagtccttcatgatcagcgcagac

SEQ ID NO: 169779 - DNA, 25 bp, Probe Sequence
caacgcactgttgcatatgccagcc

SEQ ID NO: 169780 - DNA, 25 bp, Probe Sequence
caaagcgctatttcaggcacatcat

SEQ ID NO: 169781 - DNA, 25 bp, Probe Sequence
caagactgtctttgctgagcacatc

SEQ ID NO: 169782 - DNA, 25 bp, Probe Sequence
caagcctcagtaactgatgcaatca

SEQ ID NO: 169783 - DNA, 25 bp, Probe Sequence
caagcctactagagcaagaaaccag

SEQ ID NO: 169784 - DNA, 25 bp, Probe Sequence
caactcaacggctacatagaaaaat

SEQ ID NO: 169785 - DNA, 25 bp, Probe Sequence
caacgcaaaggcaccagtcacgaac

SEQ ID NO: 169786 - DNA, 25 bp, Probe Sequence
caagcgaaaggcacgcagcgggagc

SEQ ID NO: 169787 - DNA, 25 bp, Probe Sequence
caagcttgaaggacccggggagcag

SEQ ID NO: 169788 - DNA, 25 bp, Probe Sequence
caacgtgaagacggccgtgtgcgac

SEQ ID NO: 169789 - DNA, 25 bp, Probe Sequence
caacgtataatttgcaaagatggac

SEQ ID NO: 169790 - DNA, 25 bp, Probe Sequence
caacgactactttgctacgaagaaa

SEQ ID NO: 169791 - DNA, 25 bp, Probe Sequence
caactaccacttgccagcaacaaaa

SEQ ID NO: 169792 - DNA, 25 bp, Probe Sequence
caacttccctacatgcagaaactgc

SEQ ID NO: 169793 - DNA, 25 bp, Probe Sequence
caactcccttgacagtgtacgctgg

SEQ ID NO: 169794 - DNA, 25 bp, Probe Sequence
caacaccttcttcagtgaaacgggt

SEQ ID NO: 169795 - DNA, 25 bp, Probe Sequence
caagagccttttcagtgctacaatt

SEQ ID NO: 169796 - DNA, 25 bp, Probe Sequence
caagagccaggtatagtctcccttc

SEQ ID NO: 169797 - DNA, 25 bp, Probe Sequence
caagagcctggtgtgcactgctctc

SEQ ID NO: 169798 - DNA, 25 bp, Probe Sequence
caagagcctggaggcactgctgtcc

SEQ ID NO: 169799 - DNA, 25 bp, Probe Sequence
caagagcctggaggcactgctgtcc

SEQ ID NO: 169800 - DNA, 25 bp, Probe Sequence
caagagctggacaacctgctgcatg

SEQ ID NO: 169801 - DNA, 25 bp, Probe Sequence
caagactggccaagccactgtggct

SEQ ID NO: 169802 - DNA, 25 bp, Probe Sequence
caagacgtccagcaatgctctctgt

SEQ ID NO: 169803 - DNA, 25 bp, Probe Sequence
caagcacgactattaatctatcatg

SEQ ID NO: 169804 - DNA, 25 bp, Probe Sequence
caagagcaaaagtccatatcaataa

SEQ ID NO: 169805 - DNA, 25 bp, Probe Sequence
caagcagatagaaggccatacgatt

SEQ ID NO: 169806 - DNA, 25 bp, Probe Sequence
caagcgatgagcaacctgaaagtga

SEQ ID NO: 169807 - DNA, 25 bp, Probe Sequence
caacctatccacctgacaaagggct

SEQ ID NO: 169808 - DNA, 25 bp, Probe Sequence
caacctgaaccctacatggaagcgt

SEQ ID NO: 169809 - DNA, 25 bp, Probe Sequence
caagatctacagctcaacaggaact

SEQ ID NO: 169810 - DNA, 25 bp, Probe Sequence
caagactatcagctgggattcactt

SEQ ID NO: 169811 - DNA, 25 bp, Probe Sequence
caagagcgagcgctgcgtgaacacc

SEQ ID NO: 169812 - DNA, 25 bp, Probe Sequence
caagagcagtagccctgtcagagcc

SEQ ID NO: 169813 - DNA, 25 bp, Probe Sequence
caagtcactacagcatctggagccc

SEQ ID NO: 169814 - DNA, 25 bp, Probe Sequence
caaatcatcaacgtgcctggactcg

SEQ ID NO: 169815 - DNA, 25 bp, Probe Sequence
caagcacgcagatcccatggacatt

SEQ ID NO: 169816 - DNA, 25 bp, Probe Sequence
caagcacgcagatcccatggacatt

SEQ ID NO: 169817 - DNA, 25 bp, Probe Sequence
caaccagaagacccacatggttttg

SEQ ID NO: 169818 - DNA, 25 bp, Probe Sequence
caaccaatgtttcagccagattttg

SEQ ID NO: 169819 - DNA, 25 bp, Probe Sequence
caacctatgttacacgtgagattaa

SEQ ID NO: 169820 - DNA, 25 bp, Probe Sequence
caactctttatacggttggctctca

SEQ ID NO: 169821 - DNA, 25 bp, Probe Sequence
caagctctcgtaaccaggttctaca

SEQ ID NO: 169822 - DNA, 25 bp, Probe Sequence
caagcttcagtagccaatttgatca

SEQ ID NO: 169823 - DNA, 25 bp, Probe Sequence
caagcttcaatagccgattcgatca

SEQ ID NO: 169824 - DNA, 25 bp, Probe Sequence
caagatgaagaacctcgtgtggacc

SEQ ID NO: 169825 - DNA, 25 bp, Probe Sequence
caagtacagattcctttctgtgccc

SEQ ID NO: 169826 - DNA, 25 bp, Probe Sequence
caactagagttggtattggtgcctt

SEQ ID NO: 169827 - DNA, 25 bp, Probe Sequence
caagcttcacttctaaagtgcctac

SEQ ID NO: 169828 - DNA, 25 bp, Probe Sequence
caactccctgttcaaaatgcaccac

SEQ ID NO: 169829 - DNA, 25 bp, Probe Sequence
caagacccttctctagaatttccag

SEQ ID NO: 169830 - DNA, 25 bp, Probe Sequence
caagaccacatttgtaaaactaaca

SEQ ID NO: 169831 - DNA, 25 bp, Probe Sequence
caagcaccaaccccataaagtgaca

SEQ ID NO: 169832 - DNA, 25 bp, Probe Sequence
caacttcgactcctctgagaaggac

SEQ ID NO: 169833 - DNA, 25 bp, Probe Sequence
caacatgtcaactgtcctggaggaa

SEQ ID NO: 169834 - DNA, 25 bp, Probe Sequence
cacacattatacacccttaggcaga

SEQ ID NO: 169835 - DNA, 25 bp, Probe Sequence
caactgcttagcacccctggccaag

SEQ ID NO: 169836 - DNA, 25 bp, Probe Sequence
cacacgcaaaccaacatgccttgcc

SEQ ID NO: 169837 - DNA, 25 bp, Probe Sequence
caaccaaagatcagcatggtccctg

SEQ ID NO: 169838 - DNA, 25 bp, Probe Sequence
caagcaaggagttgccagcgtccct

SEQ ID NO: 169839 - DNA, 25 bp, Probe Sequence
caagcaaggagttgccagcgtccct

SEQ ID NO: 169840 - DNA, 25 bp, Probe Sequence
caagaaggctgtggccagtgtggcc

SEQ ID NO: 169841 - DNA, 25 bp, Probe Sequence
caagaaagctgtggtgcagtccccg

SEQ ID NO: 169842 - DNA, 25 bp, Probe Sequence
caagatcaaggctcgagatcttcgc

SEQ ID NO: 169843 - DNA, 25 bp, Probe Sequence
caagataatgtctccaacgtctcct

SEQ ID NO: 169844 - DNA, 25 bp, Probe Sequence
caagaacatgtctgtacacctgtcc

SEQ ID NO: 169845 - DNA, 25 bp, Probe Sequence
caagaacatgtctgtacacctgtcc

SEQ ID NO: 169846 - DNA, 25 bp, Probe Sequence
caagaacatgtctgtacacctgtcc

SEQ ID NO: 169847 - DNA, 25 bp, Probe Sequence
caaccatgctgtttacaacctgtac

SEQ ID NO: 169848 - DNA, 25 bp, Probe Sequence
caaccacgatagagaagtcctgatg

SEQ ID NO: 169849 - DNA, 25 bp, Probe Sequence
caactacttcactgtatggcctgca

SEQ ID NO: 169850 - DNA, 25 bp, Probe Sequence
caagctgttgacatactcattgcct

SEQ ID NO: 169851 - DNA, 25 bp, Probe Sequence
caagatgtacacaatcttttgcctt

SEQ ID NO: 169852 - DNA, 25 bp, Probe Sequence
caaagtagccaatgtttctcttttg

SEQ ID NO: 169853 - DNA, 25 bp, Probe Sequence
caagagcatacgaaggttccctttt

SEQ ID NO: 169854 - DNA, 25 bp, Probe Sequence
caagacagaacaaggcttggagctc

SEQ ID NO: 169855 - DNA, 25 bp, Probe Sequence
caagaagaagtcagcttgagcatac

SEQ ID NO: 169856 - DNA, 25 bp, Probe Sequence
caagagaaaccatctctgaccaccc

SEQ ID NO: 169857 - DNA, 25 bp, Probe Sequence
caaaaaagcacaagcgaaccccagc

SEQ ID NO: 169858 - DNA, 25 bp, Probe Sequence
caacaaacgtagtgcaacccggtct

SEQ ID NO: 169859 - DNA, 25 bp, Probe Sequence
caaaatgtcgtatacaactccgccc

SEQ ID NO: 169860 - DNA, 25 bp, Probe Sequence
caacgtctttaatgcaaccttccac

SEQ ID NO: 169861 - DNA, 25 bp, Probe Sequence
caaccccctaaaacattcatatcta

SEQ ID NO: 169862 - DNA, 25 bp, Probe Sequence
caagaccctctacgaacattctttg

SEQ ID NO: 169863 - DNA, 25 bp, Probe Sequence
caagttgctctgtaggaatttctgt

SEQ ID NO: 169864 - DNA, 25 bp, Probe Sequence
caagcttgccagtgtacctgctggt

SEQ ID NO: 169865 - DNA, 25 bp, Probe Sequence
caagagtgtcagttgtacccgaggc

SEQ ID NO: 169866 - DNA, 25 bp, Probe Sequence
caagagctacaatgtcacctccgtc

SEQ ID NO: 169867 - DNA, 25 bp, Probe Sequence
caagagcttcaatatccctctactc

SEQ ID NO: 169868 - DNA, 25 bp, Probe Sequence
caagagcttcaatatccctctactc

SEQ ID NO: 169869 - DNA, 25 bp, Probe Sequence
caagacttgataaatccctctccag

SEQ ID NO: 169870 - DNA, 25 bp, Probe Sequence
caagactcgattgcagacctgtccg

SEQ ID NO: 169871 - DNA, 25 bp, Probe Sequence
caagattgaattccgtctctgtgtt

SEQ ID NO: 169872 - DNA, 25 bp, Probe Sequence
cgagattgacccggtcttgttccag

SEQ ID NO: 169873 - DNA, 25 bp, Probe Sequence
caagctttctcgagcttttgtccgg

SEQ ID NO: 169874 - DNA, 25 bp, Probe Sequence
caagccattgcagcggcatttggtc

SEQ ID NO: 169875 - DNA, 25 bp, Probe Sequence
caagctcaatgaggcggtcctgtta

SEQ ID NO: 169876 - DNA, 25 bp, Probe Sequence
cagagctagtactttgtccatttta

SEQ ID NO: 169877 - DNA, 25 bp, Probe Sequence
caagcaagtagctttccacatttgt

SEQ ID NO: 169878 - DNA, 25 bp, Probe Sequence
caagaagcatgcacttctcctcttg

SEQ ID NO: 169879 - DNA, 25 bp, Probe Sequence
caagaagcatcgtctggcgttgtgg

SEQ ID NO: 169880 - DNA, 25 bp, Probe Sequence
caagatatcatcaacggagccctgc

SEQ ID NO: 169881 - DNA, 25 bp, Probe Sequence
caagaactacacggctcccgaaagt

SEQ ID NO: 169882 - DNA, 25 bp, Probe Sequence
caagaattacaaggagcccgagccg

SEQ ID NO: 169883 - DNA, 25 bp, Probe Sequence
caaacattaagaagtgccggtcctg

SEQ ID NO: 169884 - DNA, 25 bp, Probe Sequence
caagaagtacaacgtgccggtccag

SEQ ID NO: 169885 - DNA, 25 bp, Probe Sequence
caagaagctgaatcagctgcgcgca

SEQ ID NO: 169886 - DNA, 25 bp, Probe Sequence
caagaactgcactgcatctcactgc

SEQ ID NO: 169887 - DNA, 25 bp, Probe Sequence
caagatccatgcgatggcctaccag

SEQ ID NO: 169888 - DNA, 25 bp, Probe Sequence
caagctcacagctaacattatactg

SEQ ID NO: 169889 - DNA, 25 bp, Probe Sequence
caagctacaaacaatgccacgctta

SEQ ID NO: 169890 - DNA, 25 bp, Probe Sequence
caagctctaagcgattctcaaatgt

SEQ ID NO: 169891 - DNA, 25 bp, Probe Sequence
caactgtcaaccttgacaaattgtg

SEQ ID NO: 169892 - DNA, 25 bp, Probe Sequence
caacctcaacactattgacttttgg

SEQ ID NO: 169893 - DNA, 25 bp, Probe Sequence
caactccaaagttcgtgcttttcca

SEQ ID NO: 169894 - DNA, 25 bp, Probe Sequence
caagctaaagcaagtctgtgttttc

SEQ ID NO: 169895 - DNA, 25 bp, Probe Sequence
caagctgggagcacatcttgttcac

SEQ ID NO: 169896 - DNA, 25 bp, Probe Sequence
caagctgggagcacatcttgttcac

SEQ ID NO: 169897 - DNA, 25 bp, Probe Sequence
caagctgtgattctatctcggctca

SEQ ID NO: 169898 - DNA, 25 bp, Probe Sequence
caactggagtgctctctcagcactg

SEQ ID NO: 169899 - DNA, 25 bp, Probe Sequence
caactggcaagcttgcagctgccct

SEQ ID NO: 169900 - DNA, 25 bp, Probe Sequence
caactggcagggtagtggctcccac

SEQ ID NO: 169901 - DNA, 25 bp, Probe Sequence
caacgcgggagtggatgggcccctt

SEQ ID NO: 169902 - DNA, 25 bp, Probe Sequence
ctgacgggtaaatgggcccgcctgg

SEQ ID NO: 169903 - DNA, 25 bp, Probe Sequence
caagcgggagaaacggccccgcctg

SEQ ID NO: 169904 - DNA, 25 bp, Probe Sequence
caagcttgggaagcgtgctcgtgcc

SEQ ID NO: 169905 - DNA, 25 bp, Probe Sequence
caactctggaaacctggcctgacag

SEQ ID NO: 169906 - DNA, 25 bp, Probe Sequence
caagttggagaccttcatccaggag

SEQ ID NO: 169907 - DNA, 25 bp, Probe Sequence
caagagctggagacgttccgggagg

SEQ ID NO: 169908 - DNA, 25 bp, Probe Sequence
caagaggcaaggttacggcgagggt

SEQ ID NO: 169909 - DNA, 25 bp, Probe Sequence
caagagggggtaagcgggactgtgg

SEQ ID NO: 169910 - DNA, 25 bp, Probe Sequence
caagaggcggagggtcggtgacgtg

SEQ ID NO: 169911 - DNA, 25 bp, Probe Sequence
caagaggcggagggccgctgacgtg

SEQ ID NO: 169912 - DNA, 25 bp, Probe Sequence
caagacgctgaaggggctgctgggg

SEQ ID NO: 169913 - DNA, 25 bp, Probe Sequence
caagactggcaagtggtaggggtgg

SEQ ID NO: 169914 - DNA, 25 bp, Probe Sequence
caagaaggcaccaggggtctgtgga

SEQ ID NO: 169915 - DNA, 25 bp, Probe Sequence
caagaaggggccaggggccggcagc

SEQ ID NO: 169916 - DNA, 25 bp, Probe Sequence
caagaaagggccaggagatgaattc

SEQ ID NO: 169917 - DNA, 25 bp, Probe Sequence
caagaaggggcggggcaaggtcact

SEQ ID NO: 169918 - DNA, 25 bp, Probe Sequence
caagaagtgtggggccaaacctgca

SEQ ID NO: 169919 - DNA, 25 bp, Probe Sequence
caaaagttcctacaaatcaatcaaa

SEQ ID NO: 169920 - DNA, 25 bp, Probe Sequence
caaaagcttcttttcaaaccacgat

SEQ ID NO: 169921 - DNA, 25 bp, Probe Sequence
caaaacgcgtcttcttaatccaatt

SEQ ID NO: 169922 - DNA, 25 bp, Probe Sequence
cacaaaccagggttatgtcccaaag

SEQ ID NO: 169923 - DNA, 25 bp, Probe Sequence
caagaaaaacaggtttgcaccaaag

SEQ ID NO: 169924 - DNA, 25 bp, Probe Sequence
caagacaaaggcggtttcccgctcg

SEQ ID NO: 169925 - DNA, 25 bp, Probe Sequence
caagcacaggggagtttatagttct

SEQ ID NO: 169926 - DNA, 25 bp, Probe Sequence
caagaagttgttctttctgagttca

SEQ ID NO: 169927 - DNA, 25 bp, Probe Sequence
caagatggtgttatcttttgaattc

SEQ ID NO: 169928 - DNA, 25 bp, Probe Sequence
caagaactgatcccctttgtgaagc

SEQ ID NO: 169929 - DNA, 25 bp, Probe Sequence
caagaacgtcagttcgtgttgacgc

SEQ ID NO: 169930 - DNA, 25 bp, Probe Sequence
caagaactgcctgtgcggtgggctc

SEQ ID NO: 169931 - DNA, 25 bp, Probe Sequence
caagaactgcctgtgcggtgggctc

SEQ ID NO: 169932 - DNA, 25 bp, Probe Sequence
caagaactgcctgtgcggtgggctc

SEQ ID NO: 169933 - DNA, 25 bp, Probe Sequence
caagaacgccatgacgcgcaaggcc

SEQ ID NO: 169934 - DNA, 25 bp, Probe Sequence
caagaaccaaatactgcccatggcc

SEQ ID NO: 169935 - DNA, 25 bp, Probe Sequence
caagaactctttcctgtaataagca

SEQ ID NO: 169936 - DNA, 25 bp, Probe Sequence
caagaatggtttcctcaacttggcc

SEQ ID NO: 169937 - DNA, 25 bp, Probe Sequence
caagagatttcttttgactttggcc

SEQ ID NO: 169938 - DNA, 25 bp, Probe Sequence
caagagatcttcattaagtacccaa

SEQ ID NO: 169939 - DNA, 25 bp, Probe Sequence
caagcagtccagattatataagcgg

SEQ ID NO: 169940 - DNA, 25 bp, Probe Sequence
caagcatatcctctattattgaatg

SEQ ID NO: 169941 - DNA, 25 bp, Probe Sequence
caagaatcctatcataatgtaatct

SEQ ID NO: 169942 - DNA, 25 bp, Probe Sequence
caagaatgtctgagggcatgtaaaa

SEQ ID NO: 169943 - DNA, 25 bp, Probe Sequence
caagaatgcttgtggctctggctat

SEQ ID NO: 169944 - DNA, 25 bp, Probe Sequence
caagccatctggttttcatgaggat

SEQ ID NO: 169945 - DNA, 25 bp, Probe Sequence
caagcgctctgcgtttacaggcttg

SEQ ID NO: 169946 - DNA, 25 bp, Probe Sequence
caagcccaagatgttctgtgctggc

SEQ ID NO: 169947 - DNA, 25 bp, Probe Sequence
caagacctacactgttggctgtgag

SEQ ID NO: 169948 - DNA, 25 bp, Probe Sequence
caagccctacatctaagccagagag

SEQ ID NO: 169949 - DNA, 25 bp, Probe Sequence
caaccactacatcacgccgatgatg

SEQ ID NO: 169950 - DNA, 25 bp, Probe Sequence
caaccacaacttccggctgaatgag

SEQ ID NO: 169951 - DNA, 25 bp, Probe Sequence
caaccacaacaaataggcaaatagg

SEQ ID NO: 169952 - DNA, 25 bp, Probe Sequence
caacgagcggaaaatggcagacaat

SEQ ID NO: 169953 - DNA, 25 bp, Probe Sequence
caagaaggggaccatggcagccatg

SEQ ID NO: 169954 - DNA, 25 bp, Probe Sequence
caagactgtgggcgtggagccggca

SEQ ID NO: 169955 - DNA, 25 bp, Probe Sequence
caagcgtgtgggcattgtggcctgg

SEQ ID NO: 169956 - DNA, 25 bp, Probe Sequence
caagctggtggtgggtcatgacctg

SEQ ID NO: 169957 - DNA, 25 bp, Probe Sequence
caagcaggtggtgaacatcccgtcc

SEQ ID NO: 169958 - DNA, 25 bp, Probe Sequence
caagcaggtggtgaacatcccgtcc

SEQ ID NO: 169959 - DNA, 25 bp, Probe Sequence
caacgagcgcgagaacctgccgctc

SEQ ID NO: 169960 - DNA, 25 bp, Probe Sequence
caagagacgcgagagacgtgcttcc

SEQ ID NO: 169961 - DNA, 25 bp, Probe Sequence
caacgtgcctgagcagtcggctgtg

SEQ ID NO: 169962 - DNA, 25 bp, Probe Sequence
caagcttcctgattatgttcactgt

SEQ ID NO: 169963 - DNA, 25 bp, Probe Sequence
caagccgcctgacgatctaattgta

SEQ ID NO: 169964 - DNA, 25 bp, Probe Sequence
caagctagactgtgtctgaatcatg

SEQ ID NO: 169965 - DNA, 25 bp, Probe Sequence
caagcacaactgttctctgagtgga

SEQ ID NO: 169966 - DNA, 25 bp, Probe Sequence
caactatgacttcctctgagtggag

SEQ ID NO: 169967 - DNA, 25 bp, Probe Sequence
caacttggctatctttgggggcctt

SEQ ID NO: 169968 - DNA, 25 bp, Probe Sequence
caagcttggtttacttgccggaggt

SEQ ID NO: 169969 - DNA, 25 bp, Probe Sequence
caaccgagttctagttccctgaggt

SEQ ID NO: 169970 - DNA, 25 bp, Probe Sequence
caaccgcagcgaggagtttctcatt

SEQ ID NO: 169971 - DNA, 25 bp, Probe Sequence
caagcggctctatgagtctattatt

SEQ ID NO: 169972 - DNA, 25 bp, Probe Sequence
caagcctcttaatttcaaatattca

SEQ ID NO: 169973 - DNA, 25 bp, Probe Sequence
caagctcttcgatgcttcggattcc

SEQ ID NO: 169974 - DNA, 25 bp, Probe Sequence
caagccttcgctagatatcacagag

SEQ ID NO: 169975 - DNA, 25 bp, Probe Sequence
caagccttactaagcatatgatagt

SEQ ID NO: 169976 - DNA, 25 bp, Probe Sequence
caagcactgtgccatgtcagcaagt

SEQ ID NO: 169977 - DNA, 25 bp, Probe Sequence
caagaagatccatcgcagagtccta

SEQ ID NO: 169978 - DNA, 25 bp, Probe Sequence
caactggatccatcggatcatcccc

SEQ ID NO: 169979 - DNA, 25 bp, Probe Sequence
caagctgtgtccaatctggctttgc

SEQ ID NO: 169980 - DNA, 25 bp, Probe Sequence
caagagagctcaggcatttgttttc

SEQ ID NO: 169981 - DNA, 25 bp, Probe Sequence
caagcaagctgctgacatgattctt

SEQ ID NO: 169982 - DNA, 25 bp, Probe Sequence
caagcatcacgattaatgttctagg

SEQ ID NO: 169983 - DNA, 25 bp, Probe Sequence
caactccatgtatttattcaagtgc

SEQ ID NO: 169984 - DNA, 25 bp, Probe Sequence
caagagccagatgttcttcacgatg

SEQ ID NO: 169985 - DNA, 25 bp, Probe Sequence
caagagcacagctttgtcgtcaggg

SEQ ID NO: 169986 - DNA, 25 bp, Probe Sequence
caagacgacttcgtgctgacagctg

SEQ ID NO: 169987 - DNA, 25 bp, Probe Sequence
caagaccatcatgcagctgtgccac

SEQ ID NO: 169988 - DNA, 25 bp, Probe Sequence
caagaccacaccggatgtcatcttt

SEQ ID NO: 169989 - DNA, 25 bp, Probe Sequence
caagcatctcaaccacagtttttgt

SEQ ID NO: 169990 - DNA, 25 bp, Probe Sequence
caagccatcacaaactctttttagg

SEQ ID NO: 169991 - DNA, 25 bp, Probe Sequence
caacacgcaagttccttcttgaacc

SEQ ID NO: 169992 - DNA, 25 bp, Probe Sequence
caacacctggatttaataagaacct

SEQ ID NO: 169993 - DNA, 25 bp, Probe Sequence
cacaaccggttcacaaaggagacct

SEQ ID NO: 169994 - DNA, 25 bp, Probe Sequence
caacccttattcaccatcagagaat

SEQ ID NO: 169995 - DNA, 25 bp, Probe Sequence
caaccatctttcgagatcctcggag

SEQ ID NO: 169996 - DNA, 25 bp, Probe Sequence
caacgtcttgctgatgacgccgtcg

SEQ ID NO: 169997 - DNA, 25 bp, Probe Sequence
caaatgttgtctctcattgccgtag

SEQ ID NO: 169998 - DNA, 25 bp, Probe Sequence
caacttactctgttgctggctttag

SEQ ID NO: 169999 - DNA, 25 bp, Probe Sequence
caacttcacctattcatgagtatta

SEQ ID NO: 170000 - DNA, 25 bp, Probe Sequence
caacttcacctcggcaacaattact

SEQ ID NO: 170001 - DNA, 25 bp, Probe Sequence
caagcttttctggccatccaagtag

SEQ ID NO: 170002 - DNA, 25 bp, Probe Sequence
caagctgagcttgccgcacaaaaag

SEQ ID NO: 170003 - DNA, 25 bp, Probe Sequence
caagcagagcttgatcgccagtgga

SEQ ID NO: 170004 - DNA, 25 bp, Probe Sequence
caacgagccttgagccagggagaca

SEQ ID NO: 170005 - DNA, 25 bp, Probe Sequence
caagccaccttgaccgtaggggaag

SEQ ID NO: 170006 - DNA, 25 bp, Probe Sequence
caaccagattggtcctgaaggtgga

SEQ ID NO: 170007 - DNA, 25 bp, Probe Sequence
caaccatgtgtgtcctataatgggg

SEQ ID NO: 170008 - DNA, 25 bp, Probe Sequence
caagcctggtgtttatactagagtt

SEQ ID NO: 170009 - DNA, 25 bp, Probe Sequence
taagcttagattgtaattcaagtac

SEQ ID NO: 170010 - DNA, 25 bp, Probe Sequence
caagcctagttgctaatatagaaga

SEQ ID NO: 170011 - DNA, 25 bp, Probe Sequence
caagctaatagccctaatgaacata

SEQ ID NO: 170012 - DNA, 25 bp, Probe Sequence
caagctccagagccattggtacaaa

SEQ ID NO: 170013 - DNA, 25 bp, Probe Sequence
caagacctagccaatggcaacatca

SEQ ID NO: 170014 - DNA, 25 bp, Probe Sequence
caagaacacgcctggcaacataata

SEQ ID NO: 170015 - DNA, 25 bp, Probe Sequence
caaaaccccatctctactgaaaata

SEQ ID NO: 170016 - DNA, 25 bp, Probe Sequence
caaaaccaaattccctgctaaggct

SEQ ID NO: 170017 - DNA, 25 bp, Probe Sequence
caagaactcgaacccggacgaggtg

SEQ ID NO: 170018 - DNA, 25 bp, Probe Sequence
caagaagcccaacaatggaaaacta

SEQ ID NO: 170019 - DNA, 25 bp, Probe Sequence
caacaacaacaacaacaaaaacaca

SEQ ID NO: 170020 - DNA, 25 bp, Probe Sequence
caaacctatacacaaccaagtgaaa

SEQ ID NO: 170021 - DNA, 25 bp, Probe Sequence
caaccccatcactgaacctagtttg

SEQ ID NO: 170022 - DNA, 25 bp, Probe Sequence
caaccaataaagtaaccactttcag

SEQ ID NO: 170023 - DNA, 25 bp, Probe Sequence
cataaccataaataacccttcacgt

SEQ ID NO: 170024 - DNA, 25 bp, Probe Sequence
cataaccataaataacccttcacgt

SEQ ID NO: 170025 - DNA, 25 bp, Probe Sequence
caagaacataagctaccaccttctc

SEQ ID NO: 170026 - DNA, 25 bp, Probe Sequence
caagaatcaagagccctcatcctgc

SEQ ID NO: 170027 - DNA, 25 bp, Probe Sequence
caagaatcaagagccctcatcctgc

SEQ ID NO: 170028 - DNA, 25 bp, Probe Sequence
caagaacatgaagatcaggtcctgg

SEQ ID NO: 170029 - DNA, 25 bp, Probe Sequence
caagaagcgagggtgggtcctgggc

SEQ ID NO: 170030 - DNA, 25 bp, Probe Sequence
caagaaggaagagttgaccctggag

SEQ ID NO: 170031 - DNA, 25 bp, Probe Sequence
caagaaccagatggtgttccccgcg

SEQ ID NO: 170032 - DNA, 25 bp, Probe Sequence
caagctatgccagagtttccagacc

SEQ ID NO: 170033 - DNA, 25 bp, Probe Sequence
caagcattgctgataggttttacct

SEQ ID NO: 170034 - DNA, 25 bp, Probe Sequence
caagctctgccctaggcttgttact

SEQ ID NO: 170035 - DNA, 25 bp, Probe Sequence
caagctgcgaaaatggagtgaaact

SEQ ID NO: 170036 - DNA, 25 bp, Probe Sequence
caagcactaaaaagttgaaccatta

SEQ ID NO: 170037 - DNA, 25 bp, Probe Sequence
caagcactaaaaagttgaaccatta

SEQ ID NO: 170038 - DNA, 25 bp, Probe Sequence
caagacttcattatttgccttttga

SEQ ID NO: 170039 - DNA, 25 bp, Probe Sequence
caacttctctgtgtaacctcatttg

SEQ ID NO: 170040 - DNA, 25 bp, Probe Sequence
caactttcgatggtagtcgccgtgc

SEQ ID NO: 170041 - DNA, 25 bp, Probe Sequence
caactttctgcatgttgatgcccga

SEQ ID NO: 170042 - DNA, 25 bp, Probe Sequence
caacggtcagcttgttggtgccaag

SEQ ID NO: 170043 - DNA, 25 bp, Probe Sequence
caactggccagacttttggctaaaa

SEQ ID NO: 170044 - DNA, 25 bp, Probe Sequence
caactgatgccaccgggttcatcaa

SEQ ID NO: 170045 - DNA, 25 bp, Probe Sequence
caagctactcatccgcaagtctgga

SEQ ID NO: 170046 - DNA, 25 bp, Probe Sequence
caagctgttctgaagcaagtctagt

SEQ ID NO: 170047 - DNA, 25 bp, Probe Sequence
caagcagtactgccgcgagagcggt

SEQ ID NO: 170048 - DNA, 25 bp, Probe Sequence
caagcagatagctcatggctagcat

SEQ ID NO: 170049 - DNA, 25 bp, Probe Sequence
caacaatatgctgcagtgccgctgc

SEQ ID NO: 170050 - DNA, 25 bp, Probe Sequence
caagcacagatcccagactttgcca

SEQ ID NO: 170051 - DNA, 25 bp, Probe Sequence
caacatcatattcagcccatcacgc

SEQ ID NO: 170052 - DNA, 25 bp, Probe Sequence
caaccacattggccacacaggctat

SEQ ID NO: 170053 - DNA, 25 bp, Probe Sequence
caacaacgtgtgcaccggtgtgctc

SEQ ID NO: 170054 - DNA, 25 bp, Probe Sequence
caaccggatccgtagcggcatgttc

SEQ ID NO: 170055 - DNA, 25 bp, Probe Sequence
caagccggcaagcgagcacagtatt

SEQ ID NO: 170056 - DNA, 25 bp, Probe Sequence
caactctggcatacggcccagatct

SEQ ID NO: 170057 - DNA, 25 bp, Probe Sequence
caacctgggcattggcctagctatc

SEQ ID NO: 170058 - DNA, 25 bp, Probe Sequence
caactctggtaagcctagcttctcc

SEQ ID NO: 170059 - DNA, 25 bp, Probe Sequence
caacctcttctaaactgacttgcca

SEQ ID NO: 170060 - DNA, 25 bp, Probe Sequence
caacagcatcaacaaacccttggca

SEQ ID NO: 170061 - DNA, 25 bp, Probe Sequence
caactgcaggctcatcaaccctgat

SEQ ID NO: 170062 - DNA, 25 bp, Probe Sequence
caagccagcgggacaaccctggtgt

SEQ ID NO: 170063 - DNA, 25 bp, Probe Sequence
caagccacacggaaggcccaggatt

SEQ ID NO: 170064 - DNA, 25 bp, Probe Sequence
caagcacaccaaacagagcctgcag

SEQ ID NO: 170065 - DNA, 25 bp, Probe Sequence
caaactgccaatacacgaatgacat

SEQ ID NO: 170066 - DNA, 25 bp, Probe Sequence
caaccatgtctaagcaccatagaat

SEQ ID NO: 170067 - DNA, 25 bp, Probe Sequence
caaccatgcctactctcaatgagtt

SEQ ID NO: 170068 - DNA, 25 bp, Probe Sequence
caagcactgttgactctgcatattt

SEQ ID NO: 170069 - DNA, 25 bp, Probe Sequence
caagcaactgtaggcagctcatgtt

SEQ ID NO: 170070 - DNA, 25 bp, Probe Sequence
caagaacatgatggccgcctgcgac

SEQ ID NO: 170071 - DNA, 25 bp, Probe Sequence
caagaacacagccggaaagacctcc

SEQ ID NO: 170072 - DNA, 25 bp, Probe Sequence
caagaaccgcgaggacagagccgcc

SEQ ID NO: 170073 - DNA, 25 bp, Probe Sequence
caagaaaacagtggccgacaccctg

SEQ ID NO: 170074 - DNA, 25 bp, Probe Sequence
caagaaagaaaacgcccactcctgg

SEQ ID NO: 170075 - DNA, 25 bp, Probe Sequence
caagaaattcaaacaactcctccat

SEQ ID NO: 170076 - DNA, 25 bp, Probe Sequence
caaaacttactaaactggcacaatt

SEQ ID NO: 170077 - DNA, 25 bp, Probe Sequence
caaaaactggtgtaattggcaaata

SEQ ID NO: 170078 - DNA, 25 bp, Probe Sequence
caaaaccttaaaaagcagcgagata

SEQ ID NO: 170079 - DNA, 25 bp, Probe Sequence
caagaatcacttaaacctgggaggt

SEQ ID NO: 170080 - DNA, 25 bp, Probe Sequence
caagaacctttctactgctgagctg

SEQ ID NO: 170081 - DNA, 25 bp, Probe Sequence
caagaaactttcaactctttgcctt

SEQ ID NO: 170082 - DNA, 25 bp, Probe Sequence
caagaaccttataactttcacactc

SEQ ID NO: 170083 - DNA, 25 bp, Probe Sequence
caagaaacctataacttcacactca

SEQ ID NO: 170084 - DNA, 25 bp, Probe Sequence
caagaatgaaactccatctcaaata

SEQ ID NO: 170085 - DNA, 25 bp, Probe Sequence
caagaaatctacatccaccaaaatt

SEQ ID NO: 170086 - DNA, 25 bp, Probe Sequence
caaaagtctgacaccaacaaacaaa

SEQ ID NO: 170087 - DNA, 25 bp, Probe Sequence
caaaagttacaccaacagaatacca

SEQ ID NO: 170088 - DNA, 25 bp, Probe Sequence
caagaagagtaagagcagcagcaaa

SEQ ID NO: 170089 - DNA, 25 bp, Probe Sequence
caagcaaggatatcagagctgggaa

SEQ ID NO: 170090 - DNA, 25 bp, Probe Sequence
caagctgctagaaaccactgaggaa

SEQ ID NO: 170091 - DNA, 25 bp, Probe Sequence
caactgataccagccgctgcaaaat

SEQ ID NO: 170092 - DNA, 25 bp, Probe Sequence
caaccagatctcactcgtgcaatgg

SEQ ID NO: 170093 - DNA, 25 bp, Probe Sequence
caacatcaattccctcaggctgaag

SEQ ID NO: 170094 - DNA, 25 bp, Probe Sequence
caagctcaagtggtcctgtcgaagt

SEQ ID NO: 170095 - DNA, 25 bp, Probe Sequence
caagccagaagtgccagtcagaggt

SEQ ID NO: 170096 - DNA, 25 bp, Probe Sequence
caaccagaatgtatcccagaaggac

SEQ ID NO: 170097 - DNA, 25 bp, Probe Sequence
caagcacagaataattccacaacag

SEQ ID NO: 170098 - DNA, 25 bp, Probe Sequence
caagcaagcatcattctggagaccg

SEQ ID NO: 170099 - DNA, 25 bp, Probe Sequence
caagaacagcgtcagccagatctcg

SEQ ID NO: 170100 - DNA, 25 bp, Probe Sequence
caagcacagacgtccagacagaccc

SEQ ID NO: 170101 - DNA, 25 bp, Probe Sequence
caacacgtcaagcagactgccaccc

SEQ ID NO: 170102 - DNA, 25 bp, Probe Sequence
caagccgcaaaggcagcaggctacc

SEQ ID NO: 170103 - DNA, 25 bp, Probe Sequence
caagccgatgactccatggctactg

SEQ ID NO: 170104 - DNA, 25 bp, Probe Sequence
caacctgtactatgagcggcgctgg

SEQ ID NO: 170105 - DNA, 25 bp, Probe Sequence
caagccttcaacagaagctgtgctg

SEQ ID NO: 170106 - DNA, 25 bp, Probe Sequence
caacctgctcaaaatacagttctgc

SEQ ID NO: 170107 - DNA, 25 bp, Probe Sequence
caaccaacaaaaccagcaactgcgt

SEQ ID NO: 170108 - DNA, 25 bp, Probe Sequence
cacagcgcaccagaagctaaagtct

SEQ ID NO: 170109 - DNA, 25 bp, Probe Sequence
caagctgcacctgtaccaacaaata

SEQ ID NO: 170110 - DNA, 25 bp, Probe Sequence
caagctaacttccactaatccatta

SEQ ID NO: 170111 - DNA, 25 bp, Probe Sequence
caagctctacttgaatctgatcctt

SEQ ID NO: 170112 - DNA, 25 bp, Probe Sequence
caagcctagcaatccatcagacaat

SEQ ID NO: 170113 - DNA, 25 bp, Probe Sequence
caagcactgacagacctcacaatca

SEQ ID NO: 170114 - DNA, 25 bp, Probe Sequence
caagcactgacactcattaccgtct

SEQ ID NO: 170115 - DNA, 25 bp, Probe Sequence
caagccagcacttctgtatacttca

SEQ ID NO: 170116 - DNA, 25 bp, Probe Sequence
caagccagatctacgagataacccc

SEQ ID NO: 170117 - DNA, 25 bp, Probe Sequence
caaccagatcttgcgtgaactcatc

SEQ ID NO: 170118 - DNA, 25 bp, Probe Sequence
caaccagcagttcctggcaggcact

SEQ ID NO: 170119 - DNA, 25 bp, Probe Sequence
caaccacttgtcttggctgtagatt

SEQ ID NO: 170120 - DNA, 25 bp, Probe Sequence
caaccttggctctagactgttactc

SEQ ID NO: 170121 - DNA, 25 bp, Probe Sequence
caacctaagctctggtccaaatcaa

SEQ ID NO: 170122 - DNA, 25 bp, Probe Sequence
caaactaagcccccgctgtaatgaa

SEQ ID NO: 170123 - DNA, 25 bp, Probe Sequence
caaacaaccccgaagcgaactggat

SEQ ID NO: 170124 - DNA, 25 bp, Probe Sequence
caaccacaccttgaagcagactctg

SEQ ID NO: 170125 - DNA, 25 bp, Probe Sequence
caacccactcttgagggaactaatg

SEQ ID NO: 170126 - DNA, 25 bp, Probe Sequence
caaagtcctttgaagtagaactcaa

SEQ ID NO: 170127 - DNA, 25 bp, Probe Sequence
caaagagccccgaagctaagagccc

SEQ ID NO: 170128 - DNA, 25 bp, Probe Sequence
caaaatccccagagccaaggcagaa

SEQ ID NO: 170129 - DNA, 25 bp, Probe Sequence
caaaaccaataagccttgccaacag

SEQ ID NO: 170130 - DNA, 25 bp, Probe Sequence
caaaactcacaccaggtacttaaag

SEQ ID NO: 170131 - DNA, 25 bp, Probe Sequence
caagcaattacccagtttccttatc

SEQ ID NO: 170132 - DNA, 25 bp, Probe Sequence
caacaggctcaactcagtttcctta

SEQ ID NO: 170133 - DNA, 25 bp, Probe Sequence
caacaggatgcatctacctttccaa

SEQ ID NO: 170134 - DNA, 25 bp, Probe Sequence
caactgccagctctgaactgagtcc

SEQ ID NO: 170135 - DNA, 25 bp, Probe Sequence
caagcagacagccattgacctaaac

SEQ ID NO: 170136 - DNA, 25 bp, Probe Sequence
caacagaagtgcgtaccagaagtat

SEQ ID NO: 170137 - DNA, 25 bp, Probe Sequence
caacccagctcagacacagtggtta

SEQ ID NO: 170138 - DNA, 25 bp, Probe Sequence
caagcctgcaccgaactcataggat

SEQ ID NO: 170139 - DNA, 25 bp, Probe Sequence
caacctctcccaactataaaactag

SEQ ID NO: 170140 - DNA, 25 bp, Probe Sequence
caacctctcccaactataaaactag

SEQ ID NO: 170141 - DNA, 25 bp, Probe Sequence
caacctgccctttcttaatatgact

SEQ ID NO: 170142 - DNA, 25 bp, Probe Sequence
caacttccctgatctttaagacttt

SEQ ID NO: 170143 - DNA, 25 bp, Probe Sequence
caactactactatctttcaagccag

SEQ ID NO: 170144 - DNA, 25 bp, Probe Sequence
cacactatcatagatttcttaggta

SEQ ID NO: 170145 - DNA, 25 bp, Probe Sequence
caacttcaaggtttctgccagccca

SEQ ID NO: 170146 - DNA, 25 bp, Probe Sequence
caactctaagtgatttccagggaac

SEQ ID NO: 170147 - DNA, 25 bp, Probe Sequence
caaccttagctgctttgctcaggaa

SEQ ID NO: 170148 - DNA, 25 bp, Probe Sequence
caacctcgagtgcatcgtgctgcac

SEQ ID NO: 170149 - DNA, 25 bp, Probe Sequence
caactctggagtcctctgagagagc

SEQ ID NO: 170150 - DNA, 25 bp, Probe Sequence
caaccccagatgtcctatgagatgt

SEQ ID NO: 170151 - DNA, 25 bp, Probe Sequence
caagcgcctacagcagctcatagag

SEQ ID NO: 170152 - DNA, 25 bp, Probe Sequence
caacaccaacacgggcaagtgcttc

SEQ ID NO: 170153 - DNA, 25 bp, Probe Sequence
caacaccaccaccactgaagtattt

SEQ ID NO: 170154 - DNA, 25 bp, Probe Sequence
caaaccaccccactcatagagtact

SEQ ID NO: 170155 - DNA, 25 bp, Probe Sequence
gaaacccccaagctaggatttctgc

SEQ ID NO: 170156 - DNA, 25 bp, Probe Sequence
gaaccccctggtatgggttcacgca

SEQ ID NO: 170157 - DNA, 25 bp, Probe Sequence
caactgggcctgggatggggcttca

SEQ ID NO: 170158 - DNA, 25 bp, Probe Sequence
caactgggcctgggatggggcttca

SEQ ID NO: 170159 - DNA, 25 bp, Probe Sequence
caacggccactgtgtgtggctgctc

SEQ ID NO: 170160 - DNA, 25 bp, Probe Sequence
caacgggctctgtggcaagatctat

SEQ ID NO: 170161 - DNA, 25 bp, Probe Sequence
caacgaccactttgtcaagctcatt

SEQ ID NO: 170162 - DNA, 25 bp, Probe Sequence
caagctgcactcagttcttttcatg

SEQ ID NO: 170163 - DNA, 25 bp, Probe Sequence
caagcgcctgtactgcttttttgct

SEQ ID NO: 170164 - DNA, 25 bp, Probe Sequence
caaccacagtattcctttgtctgtc

SEQ ID NO: 170165 - DNA, 25 bp, Probe Sequence
caagcaccagcagatcctatttctt

SEQ ID NO: 170166 - DNA, 25 bp, Probe Sequence
caaccaccatggaccagaagtctct

SEQ ID NO: 170167 - DNA, 25 bp, Probe Sequence
caaccaacattatagaacttttagg

SEQ ID NO: 170168 - DNA, 25 bp, Probe Sequence
caaacaaattaatgttgttctaaag

SEQ ID NO: 170169 - DNA, 25 bp, Probe Sequence
cacaaaaactggtgtaattggcaaa

SEQ ID NO: 170170 - DNA, 25 bp, Probe Sequence
cacaaacctggtgtaaattggcaaa

SEQ ID NO: 170171 - DNA, 25 bp, Probe Sequence
caaaacctgacgttaaattgcctga

SEQ ID NO: 170172 - DNA, 25 bp, Probe Sequence
caactaccttagataatatttctga

SEQ ID NO: 170173 - DNA, 25 bp, Probe Sequence
caactgcacgtgttttatattttta

SEQ ID NO: 170174 - DNA, 25 bp, Probe Sequence
caagccctggataatgctttacttt

SEQ ID NO: 170175 - DNA, 25 bp, Probe Sequence
caagctagctacttattttcatttt

SEQ ID NO: 170176 - DNA, 25 bp, Probe Sequence
caagccagcatttgtattttgcatc

SEQ ID NO: 170177 - DNA, 25 bp, Probe Sequence
caacttcatttggcttgtgtgcatc

SEQ ID NO: 170178 - DNA, 25 bp, Probe Sequence
caacctcactatggtatgctggcca

SEQ ID NO: 170179 - DNA, 25 bp, Probe Sequence
caaccgcctgcaggaggctctgaac

SEQ ID NO: 170180 - DNA, 25 bp, Probe Sequence
caaccgcctgcaggaggctctgaac

SEQ ID NO: 170181 - DNA, 25 bp, Probe Sequence
caacgagagccagagcctcgatgac

SEQ ID NO: 170182 - DNA, 25 bp, Probe Sequence
caacgtggtgagacgccatctctac

SEQ ID NO: 170183 - DNA, 25 bp, Probe Sequence
caacgggatcagaggaccatcagca

SEQ ID NO: 170184 - DNA, 25 bp, Probe Sequence
caacaggacaacaataatcacaaca

SEQ ID NO: 170185 - DNA, 25 bp, Probe Sequence
caacagtacgagactctgttccaaa

SEQ ID NO: 170186 - DNA, 25 bp, Probe Sequence
caacgacctagtggcgttccatgac

SEQ ID NO: 170187 - DNA, 25 bp, Probe Sequence
caacgacctagtggcgttccatgac

SEQ ID NO: 170188 - DNA, 25 bp, Probe Sequence
caacgacctagtggcgttccatgac

SEQ ID NO: 170189 - DNA, 25 bp, Probe Sequence
caagctgccctagtgggtatctctt

SEQ ID NO: 170190 - DNA, 25 bp, Probe Sequence
caagcgccctatgttgcttgtcatt

SEQ ID NO: 170191 - DNA, 25 bp, Probe Sequence
caagccaccatttgttcttgttgct

SEQ ID NO: 170192 - DNA, 25 bp, Probe Sequence
caagcagcatccgttttgttttctc

SEQ ID NO: 170193 - DNA, 25 bp, Probe Sequence
caaaactcagttatcgctgtttcca

SEQ ID NO: 170194 - DNA, 25 bp, Probe Sequence
caacattttcttctcgtgtgtggcc

SEQ ID NO: 170195 - DNA, 25 bp, Probe Sequence
caactgttgtctttccgttgtgtcc

SEQ ID NO: 170196 - DNA, 25 bp, Probe Sequence
caactggggagttccgtgtggaccg

SEQ ID NO: 170197 - DNA, 25 bp, Probe Sequence
caacgggctggtcagtgttggcttc

SEQ ID NO: 170198 - DNA, 25 bp, Probe Sequence
caacgaggggactgtttctcttcca

SEQ ID NO: 170199 - DNA, 25 bp, Probe Sequence
caacagggaaactcttcacctccct

SEQ ID NO: 170200 - DNA, 25 bp, Probe Sequence
caaatgggagatgccctttgacccc

SEQ ID NO: 170201 - DNA, 25 bp, Probe Sequence
caaaggaagaagcccggtggcgcct

SEQ ID NO: 170202 - DNA, 25 bp, Probe Sequence
ctcagggaggaaaccggcttgccag

SEQ ID NO: 170203 - DNA, 25 bp, Probe Sequence
caagccgtggaataggtgtatcaag

SEQ ID NO: 170204 - DNA, 25 bp, Probe Sequence
caagccgtgggaggagcggaccgac

SEQ ID NO: 170205 - DNA, 25 bp, Probe Sequence
caacgccgtcaatgagggcacctac

SEQ ID NO: 170206 - DNA, 25 bp, Probe Sequence
caaccctgtctgtagagggccctgg

SEQ ID NO: 170207 - DNA, 25 bp, Probe Sequence
caaacactatcgggggcccgcaggg

SEQ ID NO: 170208 - DNA, 25 bp, Probe Sequence
caaacactatcgggggcccgcaggg

SEQ ID NO: 170209 - DNA, 25 bp, Probe Sequence
caaacagtagagatggagggccggg

SEQ ID NO: 170210 - DNA, 25 bp, Probe Sequence
caacaagaaggcagcggagtcctga

SEQ ID NO: 170211 - DNA, 25 bp, Probe Sequence
caacatgcagacagccgtggtgatc

SEQ ID NO: 170212 - DNA, 25 bp, Probe Sequence
caacacagactacaggttccgcgta

SEQ ID NO: 170213 - DNA, 25 bp, Probe Sequence
caaccacactcagctgagttccctt

SEQ ID NO: 170214 - DNA, 25 bp, Probe Sequence
caagcaccacaaccttattgaccat

SEQ ID NO: 170215 - DNA, 25 bp, Probe Sequence
caagcaccttatctatcacagacca

SEQ ID NO: 170216 - DNA, 25 bp, Probe Sequence
caactgctctttcaacggaccaggg

SEQ ID NO: 170217 - DNA, 25 bp, Probe Sequence
caagccttagataaaagaaccgagc

SEQ ID NO: 170218 - DNA, 25 bp, Probe Sequence
caacggctacatagaaaaatccacc

SEQ ID NO: 170219 - DNA, 25 bp, Probe Sequence
ctatgcttataaaacccaaccctgc

SEQ ID NO: 170220 - DNA, 25 bp, Probe Sequence
caagcttcatattaaccctacctgt

SEQ ID NO: 170221 - DNA, 25 bp, Probe Sequence
caacttctgaaaagacgctagcctt

SEQ ID NO: 170222 - DNA, 25 bp, Probe Sequence
caactgtgtgcactattacccggtt

SEQ ID NO: 170223 - DNA, 25 bp, Probe Sequence
caacattaagagttaccctggatta

SEQ ID NO: 170224 - DNA, 25 bp, Probe Sequence
caaataaacgctcactccgaattag

SEQ ID NO: 170225 - DNA, 25 bp, Probe Sequence
caaaataaccagagttcgtttagtg

SEQ ID NO: 170226 - DNA, 25 bp, Probe Sequence
cacacaagaccctttgttacttaga

SEQ ID NO: 170227 - DNA, 25 bp, Probe Sequence
caaacccccacaggtttctaagcat

SEQ ID NO: 170228 - DNA, 25 bp, Probe Sequence
caaaccccctgacatagtctcagag

SEQ ID NO: 170229 - DNA, 25 bp, Probe Sequence
caaaccaccctggaacagttacaga

SEQ ID NO: 170230 - DNA, 25 bp, Probe Sequence
caacgccttcgtgagcacggctaag

SEQ ID NO: 170231 - DNA, 25 bp, Probe Sequence
caaccgcttcgagaagcgccacaag

SEQ ID NO: 170232 - DNA, 25 bp, Probe Sequence
caagccgcttgccagaaagctgcgc

SEQ ID NO: 170233 - DNA, 25 bp, Probe Sequence
caacgcagttgacaatgacagcttc

SEQ ID NO: 170234 - DNA, 25 bp, Probe Sequence
caaccctgtgatcagaacctccaaa

SEQ ID NO: 170235 - DNA, 25 bp, Probe Sequence
caaccatctgtggtatggacttctc

SEQ ID NO: 170236 - DNA, 25 bp, Probe Sequence
caaccaggtggttgtgcagtggctg

SEQ ID NO: 170237 - DNA, 25 bp, Probe Sequence
caagccggtgactgtgcgtggctgc

SEQ ID NO: 170238 - DNA, 25 bp, Probe Sequence
caagccagggccgttggcttatgcc

SEQ ID NO: 170239 - DNA, 25 bp, Probe Sequence
caagcgcacgatccagtttgtggat

SEQ ID NO: 170240 - DNA, 25 bp, Probe Sequence
caagctgctggtgaggtttggaagc

SEQ ID NO: 170241 - DNA, 25 bp, Probe Sequence
caagctcatagcacatgttttacaa

SEQ ID NO: 170242 - DNA, 25 bp, Probe Sequence
caacatctagcaaatgttatgcata

SEQ ID NO: 170243 - DNA, 25 bp, Probe Sequence
caactctgacacttgtagtccattg

SEQ ID NO: 170244 - DNA, 25 bp, Probe Sequence
caacttgtacttgtttcatctggtt

SEQ ID NO: 170245 - DNA, 25 bp, Probe Sequence
caacttattttgctttaattgcttt

SEQ ID NO: 170246 - DNA, 25 bp, Probe Sequence
caacttattttgctttaattgcttt

SEQ ID NO: 170247 - DNA, 25 bp, Probe Sequence
cacagcatttagttcgtttaatttt

SEQ ID NO: 170248 - DNA, 25 bp, Probe Sequence
caagcatattgcatttttttttttt

SEQ ID NO: 170249 - DNA, 25 bp, Probe Sequence
caacattctgggactctttttctta

SEQ ID NO: 170250 - DNA, 25 bp, Probe Sequence
caactttcaagtgcgttctttagac

SEQ ID NO: 170251 - DNA, 25 bp, Probe Sequence
caacttttagtcatgatgttctgta

SEQ ID NO: 170252 - DNA, 25 bp, Probe Sequence
caactttgtgagtaataatgtcagg

SEQ ID NO: 170253 - DNA, 25 bp, Probe Sequence
caactggattgacaaaatcatgagg

SEQ ID NO: 170254 - DNA, 25 bp, Probe Sequence
caactgtgtaggccagtacagctgg

SEQ ID NO: 170255 - DNA, 25 bp, Probe Sequence
caactgctggggcaggtcgtgggcg

SEQ ID NO: 170256 - DNA, 25 bp, Probe Sequence
caacgctatcgcccagggcggggag

SEQ ID NO: 170257 - DNA, 25 bp, Probe Sequence
caacctttaccatggagaagcgagg

SEQ ID NO: 170258 - DNA, 25 bp, Probe Sequence
caaatattacaccaagggacgtagg

SEQ ID NO: 170259 - DNA, 25 bp, Probe Sequence
caaataaagacctgagaaccttcca

SEQ ID NO: 170260 - DNA, 25 bp, Probe Sequence
caaataaaatacagattgtccttta

SEQ ID NO: 170261 - DNA, 25 bp, Probe Sequence
caacatgaagtttcctacttccttg

SEQ ID NO: 170262 - DNA, 25 bp, Probe Sequence
cagaatgacaggcccttacttccga

SEQ ID NO: 170263 - DNA, 25 bp, Probe Sequence
caactacagggtcctagctgggggc

SEQ ID NO: 170264 - DNA, 25 bp, Probe Sequence
caacttcaagttcggacagcggcgg

SEQ ID NO: 170265 - DNA, 25 bp, Probe Sequence
caacttcaattaccgacgcagacgc

SEQ ID NO: 170266 - DNA, 25 bp, Probe Sequence
caacgaatttggccacactcagtcc

SEQ ID NO: 170267 - DNA, 25 bp, Probe Sequence
caacctgagttgggacaccctgcac

SEQ ID NO: 170268 - DNA, 25 bp, Probe Sequence
caaccagagttggtcactcctcagg

SEQ ID NO: 170269 - DNA, 25 bp, Probe Sequence
caaccatgatgctgccatctttcca

SEQ ID NO: 170270 - DNA, 25 bp, Probe Sequence
caagccagatcagctcaagtgacca

SEQ ID NO: 170271 - DNA, 25 bp, Probe Sequence
caacctcacacagtcacagattgcc

SEQ ID NO: 170272 - DNA, 25 bp, Probe Sequence
caacctctcaatcccagattttcaa

SEQ ID NO: 170273 - DNA, 25 bp, Probe Sequence
caaccattcttatatgtgctttgct

SEQ ID NO: 170274 - DNA, 25 bp, Probe Sequence
caaccatctctttttatattatgcc

SEQ ID NO: 170275 - DNA, 25 bp, Probe Sequence
caaccattatctttgattaatactg

SEQ ID NO: 170276 - DNA, 25 bp, Probe Sequence
caacctatttgctgatctagtaact

SEQ ID NO: 170277 - DNA, 25 bp, Probe Sequence
caacctccttcttatctgtgataaa

SEQ ID NO: 170278 - DNA, 25 bp, Probe Sequence
caaccccatttatgcaggaagggac

SEQ ID NO: 170279 - DNA, 25 bp, Probe Sequence
caagcgcccacttagaaggacggta

SEQ ID NO: 170280 - DNA, 25 bp, Probe Sequence
caaccaagcgcctggaggacgggac

SEQ ID NO: 170281 - DNA, 25 bp, Probe Sequence
caaaaagcaggctggtaccggtccg

SEQ ID NO: 170282 - DNA, 25 bp, Probe Sequence
caaaaagcaggctggtaccggtccg

SEQ ID NO: 170283 - DNA, 25 bp, Probe Sequence
caaaaagcaggctggtaccggtccg

SEQ ID NO: 170284 - DNA, 25 bp, Probe Sequence
caaaaagcaggctggtaccggtccg

SEQ ID NO: 170285 - DNA, 25 bp, Probe Sequence
caaaaagcaggctggtaccggtccg

SEQ ID NO: 170286 - DNA, 25 bp, Probe Sequence
caaaaagcaggctggtaccggtccg

SEQ ID NO: 170287 - DNA, 25 bp, Probe Sequence
caaaacagccagtcggtacttagcc

SEQ ID NO: 170288 - DNA, 25 bp, Probe Sequence
caaagctaccagggggacatgtacc

SEQ ID NO: 170289 - DNA, 25 bp, Probe Sequence
caaagccccctggggagatcttcct

SEQ ID NO: 170290 - DNA, 25 bp, Probe Sequence
caaaaactacgtggtggtcctcagt

SEQ ID NO: 170291 - DNA, 25 bp, Probe Sequence
caaaaaaatcgtagccttctccact

SEQ ID NO: 170292 - DNA, 25 bp, Probe Sequence
caaaaaagccgatgccttaccttct

SEQ ID NO: 170293 - DNA, 25 bp, Probe Sequence
caaaaacctcaatgcctttagggct

SEQ ID NO: 170294 - DNA, 25 bp, Probe Sequence
caaaaatccttcatcctttgagggg

SEQ ID NO: 170295 - DNA, 25 bp, Probe Sequence
caaagtacttttaggcatattaggt

SEQ ID NO: 170296 - DNA, 25 bp, Probe Sequence
cacagcagtaccttagggttttgcc

SEQ ID NO: 170297 - DNA, 25 bp, Probe Sequence
cacaggtcaggtatgagtttttgaa

SEQ ID NO: 170298 - DNA, 25 bp, Probe Sequence
ctcaggtacggttgacatttaggga

SEQ ID NO: 170299 - DNA, 25 bp, Probe Sequence
cacggaacagttgcctttaaggatt

SEQ ID NO: 170300 - DNA, 25 bp, Probe Sequence
tccctaaagttctcttctaagagga

SEQ ID NO: 170301 - DNA, 25 bp, Probe Sequence
cacttaaagctatccgtctaaacag

SEQ ID NO: 170302 - DNA, 25 bp, Probe Sequence
caaacaaatacacccctcattagtt

SEQ ID NO: 170303 - DNA, 25 bp, Probe Sequence
caaacagttggctcccatttgggat

SEQ ID NO: 170304 - DNA, 25 bp, Probe Sequence
caaacagttggctcccatttgggat

SEQ ID NO: 170305 - DNA, 25 bp, Probe Sequence
caactagtatggtcccattttgggg

SEQ ID NO: 170306 - DNA, 25 bp, Probe Sequence
caaccaggataccaccactttgggg

SEQ ID NO: 170307 - DNA, 25 bp, Probe Sequence
caaccaattgaccagcagcctatag

SEQ ID NO: 170308 - DNA, 25 bp, Probe Sequence
caaccattcgtgtgcacctaattgt

SEQ ID NO: 170309 - DNA, 25 bp, Probe Sequence
caacaatttgacacccttcattcat

SEQ ID NO: 170310 - DNA, 25 bp, Probe Sequence
caacactcttacacctgttatggaa

SEQ ID NO: 170311 - DNA, 25 bp, Probe Sequence
caaccctctaattcaccttatgggg

SEQ ID NO: 170312 - DNA, 25 bp, Probe Sequence
caaccccaacaaaatcttcggcgtg

SEQ ID NO: 170313 - DNA, 25 bp, Probe Sequence
caaccccagaaatgcctgctgggcc

SEQ ID NO: 170314 - DNA, 25 bp, Probe Sequence
caaccctcaaagagctacgtggcca

SEQ ID NO: 170315 - DNA, 25 bp, Probe Sequence
caacacagctgcaaagtagcaacag

SEQ ID NO: 170316 - DNA, 25 bp, Probe Sequence
caacaacgatacccagcacatctgg

SEQ ID NO: 170317 - DNA, 25 bp, Probe Sequence
caaaatctgcatcagcggcacagtg

SEQ ID NO: 170318 - DNA, 25 bp, Probe Sequence
caacagcacagacagcgagcgctgg

SEQ ID NO: 170319 - DNA, 25 bp, Probe Sequence
caacatcatcaacggggctgactgg

SEQ ID NO: 170320 - DNA, 25 bp, Probe Sequence
caaccatgcagcctgagctgggacc

SEQ ID NO: 170321 - DNA, 25 bp, Probe Sequence
caaccaggacgaggggatcctgccc

SEQ ID NO: 170322 - DNA, 25 bp, Probe Sequence
caaaggcatgagcggggtcttcctc

SEQ ID NO: 170323 - DNA, 25 bp, Probe Sequence
caacaggctgactgggtgttagtgg

SEQ ID NO: 170324 - DNA, 25 bp, Probe Sequence
caaaatgcacactgcgggttattga

SEQ ID NO: 170325 - DNA, 25 bp, Probe Sequence
caaaatcccttcggacatttctcag

SEQ ID NO: 170326 - DNA, 25 bp, Probe Sequence
caaagactcattgcttaattctaag

SEQ ID NO: 170327 - DNA, 25 bp, Probe Sequence
caaagtttgactatctgactccaag

SEQ ID NO: 170328 - DNA, 25 bp, Probe Sequence
caacaatctagacttctctgacttc

SEQ ID NO: 170329 - DNA, 25 bp, Probe Sequence
caacattgggagcctcatctgcaat

SEQ ID NO: 170330 - DNA, 25 bp, Probe Sequence
caacattgaaagcctcgtaccctgg

SEQ ID NO: 170331 - DNA, 25 bp, Probe Sequence
caacagctaaagcctctggtacctc

SEQ ID NO: 170332 - DNA, 25 bp, Probe Sequence
caacagcgaaagacattgcccctac

SEQ ID NO: 170333 - DNA, 25 bp, Probe Sequence
caaacgcattgactttgacctctac

SEQ ID NO: 170334 - DNA, 25 bp, Probe Sequence
caaacctttggaagcacgtttcagg

SEQ ID NO: 170335 - DNA, 25 bp, Probe Sequence
cacaatccgttgcaaacccaaagga

SEQ ID NO: 170336 - DNA, 25 bp, Probe Sequence
caaaccgtgttaggactctcaaagg

SEQ ID NO: 170337 - DNA, 25 bp, Probe Sequence
caaacacagttgaaagacttagaaa

SEQ ID NO: 170338 - DNA, 25 bp, Probe Sequence
caaccccgtgttagagcattagcag

SEQ ID NO: 170339 - DNA, 25 bp, Probe Sequence
caacccccatgtatgcctatatgtg

SEQ ID NO: 170340 - DNA, 25 bp, Probe Sequence
caaccctctcaggtgaccaaaatcc

SEQ ID NO: 170341 - DNA, 25 bp, Probe Sequence
caaatccttagcagcccaaacttca

SEQ ID NO: 170342 - DNA, 25 bp, Probe Sequence
caaaccaacaaacccaactctaatg

SEQ ID NO: 170343 - DNA, 25 bp, Probe Sequence
caactgccattaaacttaactcaaa

SEQ ID NO: 170344 - DNA, 25 bp, Probe Sequence
caactgcatgcagaaatttacacag

SEQ ID NO: 170345 - DNA, 25 bp, Probe Sequence
caaccaggcaaatttctcacgcatc

SEQ ID NO: 170346 - DNA, 25 bp, Probe Sequence
caacctggagggatcccagatctat

SEQ ID NO: 170347 - DNA, 25 bp, Probe Sequence
caacctagaggcggctcctcatgat

SEQ ID NO: 170348 - DNA, 25 bp, Probe Sequence
caaccccagatgcagcatgtcctga

SEQ ID NO: 170349 - DNA, 25 bp, Probe Sequence
caacccgcaagctcatgtatcagga

SEQ ID NO: 170350 - DNA, 25 bp, Probe Sequence
caaccaggcggaacaatatctggag

SEQ ID NO: 170351 - DNA, 25 bp, Probe Sequence
caacacactctgaatccaaccttag

SEQ ID NO: 170352 - DNA, 25 bp, Probe Sequence
caacaagtcttactcctcctataag

SEQ ID NO: 170353 - DNA, 25 bp, Probe Sequence
caactggtttaaagccctgaggata

SEQ ID NO: 170354 - DNA, 25 bp, Probe Sequence
caacaaagttcattaacctgggatg

SEQ ID NO: 170355 - DNA, 25 bp, Probe Sequence
caacggggccatgaacgtggagatt

SEQ ID NO: 170356 - DNA, 25 bp, Probe Sequence
caactgggcaccattacaggaagat

SEQ ID NO: 170357 - DNA, 25 bp, Probe Sequence
caaccaggacctataagccaaagtt

SEQ ID NO: 170358 - DNA, 25 bp, Probe Sequence
caaccagcaagcccttgatgaccaa

SEQ ID NO: 170359 - DNA, 25 bp, Probe Sequence
caaccagatatgtatttgctactca

SEQ ID NO: 170360 - DNA, 25 bp, Probe Sequence
caacacagtaattgccttacatgac

SEQ ID NO: 170361 - DNA, 25 bp, Probe Sequence
caacatcaggtattcctttagagca

SEQ ID NO: 170362 - DNA, 25 bp, Probe Sequence
caacctggtatatcgcatgcggggc

SEQ ID NO: 170363 - DNA, 25 bp, Probe Sequence
caacatgctggtgaaggtgaaaggc

SEQ ID NO: 170364 - DNA, 25 bp, Probe Sequence
cagcactttgggagggccaaggcgg

SEQ ID NO: 170365 - DNA, 25 bp, Probe Sequence
caacactttgggaggcccaggcggg

SEQ ID NO: 170366 - DNA, 25 bp, Probe Sequence
caacactttgggaggcccaggcggg

SEQ ID NO: 170367 - DNA, 25 bp, Probe Sequence
caacctcttacgtgcgcctttctgc

SEQ ID NO: 170368 - DNA, 25 bp, Probe Sequence
caacctcttacgtgcgcctttctgc

SEQ ID NO: 170369 - DNA, 25 bp, Probe Sequence
caacgtcttaagtaggctttcttca

SEQ ID NO: 170370 - DNA, 25 bp, Probe Sequence
caacgtcttgaacaggcgctgatga

SEQ ID NO: 170371 - DNA, 25 bp, Probe Sequence
caacggtgtgaacaggtcaagaata

SEQ ID NO: 170372 - DNA, 25 bp, Probe Sequence
caacacggtgactgcggtgaagaat

SEQ ID NO: 170373 - DNA, 25 bp, Probe Sequence
caactcgagctggctccgggagaag

SEQ ID NO: 170374 - DNA, 25 bp, Probe Sequence
caactctgagcacatgctgggtgaa

SEQ ID NO: 170375 - DNA, 25 bp, Probe Sequence
caactctgcgcgcagtgggcgagat

SEQ ID NO: 170376 - DNA, 25 bp, Probe Sequence
caacctgcagtcgggtgaggtgacc

SEQ ID NO: 170377 - DNA, 25 bp, Probe Sequence
caaccgctgtccacatggagtgagg

SEQ ID NO: 170378 - DNA, 25 bp, Probe Sequence
caacacctgctgcgcttggtaggtg

SEQ ID NO: 170379 - DNA, 25 bp, Probe Sequence
caacatcacgccagctgaggtgggt

SEQ ID NO: 170380 - DNA, 25 bp, Probe Sequence
caactactaaactgggggatattat

SEQ ID NO: 170381 - DNA, 25 bp, Probe Sequence
caactttacctctgtgggagatgca

SEQ ID NO: 170382 - DNA, 25 bp, Probe Sequence
caacttcttccttgttggggacaag

SEQ ID NO: 170383 - DNA, 25 bp, Probe Sequence
caaagtttagacttggagggaaatg

SEQ ID NO: 170384 - DNA, 25 bp, Probe Sequence
caaagctactaaactgaaggtaagg

SEQ ID NO: 170385 - DNA, 25 bp, Probe Sequence
caaactactacagccaactcaaaag

SEQ ID NO: 170386 - DNA, 25 bp, Probe Sequence
caacttcagtaccccaaatacaata

SEQ ID NO: 170387 - DNA, 25 bp, Probe Sequence
caacttcagtgatggagaaatctca

SEQ ID NO: 170388 - DNA, 25 bp, Probe Sequence
caactacatggtttacatgttccaa

SEQ ID NO: 170389 - DNA, 25 bp, Probe Sequence
caaataatatgtttccttccctcaa

SEQ ID NO: 170390 - DNA, 25 bp, Probe Sequence
cagactttagtaatagttccaccta

SEQ ID NO: 170391 - DNA, 25 bp, Probe Sequence
caaagacttccaagaggtcaccctt

SEQ ID NO: 170392 - DNA, 25 bp, Probe Sequence
caaaagcttgagtacagtgtcccct

SEQ ID NO: 170393 - DNA, 25 bp, Probe Sequence
caaaaaatgcaaccagcaggcctgc

SEQ ID NO: 170394 - DNA, 25 bp, Probe Sequence
caacaaagatgcctcgcagcgagcg

SEQ ID NO: 170395 - DNA, 25 bp, Probe Sequence
caaccagagtgacctgattgagcag

SEQ ID NO: 170396 - DNA, 25 bp, Probe Sequence
caaccaatctgatctgcagtagtgt

SEQ ID NO: 170397 - DNA, 25 bp, Probe Sequence
caacatctttgagcctggagctgat

SEQ ID NO: 170398 - DNA, 25 bp, Probe Sequence
caaccttctgcaccaatgaacagtg

SEQ ID NO: 170399 - DNA, 25 bp, Probe Sequence
caacctacatgcccaaaggagcttc

SEQ ID NO: 170400 - DNA, 25 bp, Probe Sequence
caacagcttcacctgacaacgactg

SEQ ID NO: 170401 - DNA, 25 bp, Probe Sequence
caacctgctcctgaatgactactgg

SEQ ID NO: 170402 - DNA, 25 bp, Probe Sequence
caaccatctgccagagaactcctat

SEQ ID NO: 170403 - DNA, 25 bp, Probe Sequence
caacgacatgctctggaaatcccaa

SEQ ID NO: 170404 - DNA, 25 bp, Probe Sequence
caaacactgcagagtgaactacagc

SEQ ID NO: 170405 - DNA, 25 bp, Probe Sequence
caaccaggatggggctgagctatac

SEQ ID NO: 170406 - DNA, 25 bp, Probe Sequence
caaccagcctggtgtgcttattcag

SEQ ID NO: 170407 - DNA, 25 bp, Probe Sequence
caaccagcctggtgtgcttattcag

SEQ ID NO: 170408 - DNA, 25 bp, Probe Sequence
caaccccatgaattgtgttattgta

SEQ ID NO: 170409 - DNA, 25 bp, Probe Sequence
caaccccatgaattcctgttctaga

SEQ ID NO: 170410 - DNA, 25 bp, Probe Sequence
caactttctatttagctgtcactag

SEQ ID NO: 170411 - DNA, 25 bp, Probe Sequence
caacattttttgtacttctccaaga

SEQ ID NO: 170412 - DNA, 25 bp, Probe Sequence
caacttttttagtctgctccaaagt

SEQ ID NO: 170413 - DNA, 25 bp, Probe Sequence
caacttttttggtgtctcagatgag

SEQ ID NO: 170414 - DNA, 25 bp, Probe Sequence
caacgagtgtttggacggctcagga

SEQ ID NO: 170415 - DNA, 25 bp, Probe Sequence
caactgatgagtatctaggatgcca

SEQ ID NO: 170416 - DNA, 25 bp, Probe Sequence
caactctgagctgttcagactgtcg

SEQ ID NO: 170417 - DNA, 25 bp, Probe Sequence
caacctgactgcttttcctgtcagt

SEQ ID NO: 170418 - DNA, 25 bp, Probe Sequence
caacgtatctgattcactgctgctg

SEQ ID NO: 170419 - DNA, 25 bp, Probe Sequence
caactctgcactgacctgtgctgat

SEQ ID NO: 170420 - DNA, 25 bp, Probe Sequence
caaccgcatctatcgcatgatcaag

SEQ ID NO: 170421 - DNA, 25 bp, Probe Sequence
caaccgcatctatcgcatgatcaag

SEQ ID NO: 170422 - DNA, 25 bp, Probe Sequence
caacccaacacaggcatgctcataa

SEQ ID NO: 170423 - DNA, 25 bp, Probe Sequence
caacccaacacaggcatgctcataa

SEQ ID NO: 170424 - DNA, 25 bp, Probe Sequence
caacccacacaggccaatgcaagag

SEQ ID NO: 170425 - DNA, 25 bp, Probe Sequence
caaccacaaaggcacccaagagcaa

SEQ ID NO: 170426 - DNA, 25 bp, Probe Sequence
caactacagcaagagcaccaccgac

SEQ ID NO: 170427 - DNA, 25 bp, Probe Sequence
caactaccagaccagaacacgagcc

SEQ ID NO: 170428 - DNA, 25 bp, Probe Sequence
caaccaccatgtcgagcaaaaaggc

SEQ ID NO: 170429 - DNA, 25 bp, Probe Sequence
caactcacaagctggaaagaaacta

SEQ ID NO: 170430 - DNA, 25 bp, Probe Sequence
caactttcgctggggaaaacctatg

SEQ ID NO: 170431 - DNA, 25 bp, Probe Sequence
caacccccgacatggaacccatgat

SEQ ID NO: 170432 - DNA, 25 bp, Probe Sequence
caaccctccagccagaggaactcta

SEQ ID NO: 170433 - DNA, 25 bp, Probe Sequence
caaccctggcctcaggatgagagct

SEQ ID NO: 170434 - DNA, 25 bp, Probe Sequence
caacgcctggtccaaggaatccttc

SEQ ID NO: 170435 - DNA, 25 bp, Probe Sequence
caacagcttttcccaggagaccatt

SEQ ID NO: 170436 - DNA, 25 bp, Probe Sequence
caactcagtgtttaaggcacaccct

SEQ ID NO: 170437 - DNA, 25 bp, Probe Sequence
caactgcctggatgaaccagctccc

SEQ ID NO: 170438 - DNA, 25 bp, Probe Sequence
caacctggagaagacctgagacatc

SEQ ID NO: 170439 - DNA, 25 bp, Probe Sequence
caacctggaaaggccatcggctttg

SEQ ID NO: 170440 - DNA, 25 bp, Probe Sequence
caacatcgaggatggccacgtgctg

SEQ ID NO: 170441 - DNA, 25 bp, Probe Sequence
caacactgaggatgtggttcatggg

SEQ ID NO: 170442 - DNA, 25 bp, Probe Sequence
caacatccaggattgtgtctttatg

SEQ ID NO: 170443 - DNA, 25 bp, Probe Sequence
caacatgagaggatgtatatttatt

SEQ ID NO: 170444 - DNA, 25 bp, Probe Sequence
caacttgatgtaactgactttattt

SEQ ID NO: 170445 - DNA, 25 bp, Probe Sequence
caacttgtgaacacacatttctgtt

SEQ ID NO: 170446 - DNA, 25 bp, Probe Sequence
caacttttccagtgcattacatggt

SEQ ID NO: 170447 - DNA, 25 bp, Probe Sequence
caaatttgggaaacatgtaatgggg

SEQ ID NO: 170448 - DNA, 25 bp, Probe Sequence
caaatctggggaacaaattcttcgt

SEQ ID NO: 170449 - DNA, 25 bp, Probe Sequence
cacaagctggggataaactacctga

SEQ ID NO: 170450 - DNA, 25 bp, Probe Sequence
caacctggaggtggaagacgaagaa

SEQ ID NO: 170451 - DNA, 25 bp, Probe Sequence
caacccgatggcggcaagaccgaga

SEQ ID NO: 170452 - DNA, 25 bp, Probe Sequence
caacatccagtcctgagaagccctg

SEQ ID NO: 170453 - DNA, 25 bp, Probe Sequence
caacatgcacgagatgggagcgccc

SEQ ID NO: 170454 - DNA, 25 bp, Probe Sequence
caacatcatcgaggagctcaggcaa

SEQ ID NO: 170455 - DNA, 25 bp, Probe Sequence
caaccatgcagaggcccagagacat

SEQ ID NO: 170456 - DNA, 25 bp, Probe Sequence
caaccaggaggcccagcaaggccac

SEQ ID NO: 170457 - DNA, 25 bp, Probe Sequence
caaccgctggtatcaaatgggcatc

SEQ ID NO: 170458 - DNA, 25 bp, Probe Sequence
caaccatccaattagaggagggctc

SEQ ID NO: 170459 - DNA, 25 bp, Probe Sequence
caacgcattgcattaactggaggtg

SEQ ID NO: 170460 - DNA, 25 bp, Probe Sequence
caaccttccacatctggcacagtgg

SEQ ID NO: 170461 - DNA, 25 bp, Probe Sequence
caactgctcacagaacggatcatgt

SEQ ID NO: 170462 - DNA, 25 bp, Probe Sequence
caacgctatgacgcagctgtgatat

SEQ ID NO: 170463 - DNA, 25 bp, Probe Sequence
caactgtgatgagcctatgtatgtc

SEQ ID NO: 170464 - DNA, 25 bp, Probe Sequence
caactcttaccagtagtgctgctct

SEQ ID NO: 170465 - DNA, 25 bp, Probe Sequence
caacatatctcatgaatattcgtgc

SEQ ID NO: 170466 - DNA, 25 bp, Probe Sequence
caactctccttttatccagctgaga

SEQ ID NO: 170467 - DNA, 25 bp, Probe Sequence
tccaatcccattcttccagggaaac

SEQ ID NO: 170468 - DNA, 25 bp, Probe Sequence
caacctcctgtggtctctaaggaaa

SEQ ID NO: 170469 - DNA, 25 bp, Probe Sequence
caactcccctgtagtttaggacaca

SEQ ID NO: 170470 - DNA, 25 bp, Probe Sequence
caaccccctgtgagaagagtccatt

SEQ ID NO: 170471 - DNA, 25 bp, Probe Sequence
caaccctagcttctcaaaatacatt

SEQ ID NO: 170472 - DNA, 25 bp, Probe Sequence
caacctaagtgcctatcaacagata

SEQ ID NO: 170473 - DNA, 25 bp, Probe Sequence
caactctatagctctaactggctag

SEQ ID NO: 170474 - DNA, 25 bp, Probe Sequence
caactcttcaggttccacatggtat

SEQ ID NO: 170475 - DNA, 25 bp, Probe Sequence
caactctacggatttgcctgttctg

SEQ ID NO: 170476 - DNA, 25 bp, Probe Sequence
cactttaggagtttgtcgtcttgga

SEQ ID NO: 170477 - DNA, 25 bp, Probe Sequence
cactaatagaaacttggcactcctg

SEQ ID NO: 170478 - DNA, 25 bp, Probe Sequence
caaaaaacaggaaggcactcccaag

SEQ ID NO: 170479 - DNA, 25 bp, Probe Sequence
caaaagaaaagaacccgccgagcag

SEQ ID NO: 170480 - DNA, 25 bp, Probe Sequence
cagaataaaaaacagccccgccaag

SEQ ID NO: 170481 - DNA, 25 bp, Probe Sequence
caaaatgaaccagataccccctaga

SEQ ID NO: 170482 - DNA, 25 bp, Probe Sequence
caaaacaaacaaatacacccctcat

SEQ ID NO: 170483 - DNA, 25 bp, Probe Sequence
caacaagcaaacaactaccccatta

SEQ ID NO: 170484 - DNA, 25 bp, Probe Sequence
caacaagaaaaaccatctccgacca

SEQ ID NO: 170485 - DNA, 25 bp, Probe Sequence
cggccacttaaatcattcttaacag

SEQ ID NO: 170486 - DNA, 25 bp, Probe Sequence
caacccttagacttttattgagaca

SEQ ID NO: 170487 - DNA, 25 bp, Probe Sequence
caactcagttcatctttctgcttga

SEQ ID NO: 170488 - DNA, 25 bp, Probe Sequence
caacatcaggcctgatttctccaag

SEQ ID NO: 170489 - DNA, 25 bp, Probe Sequence
caacacagagtcctttgctgtcgca

SEQ ID NO: 170490 - DNA, 25 bp, Probe Sequence
caacacagctgcttatcttggctcc

SEQ ID NO: 170491 - DNA, 25 bp, Probe Sequence
caacaagccattatttccctgtctt

SEQ ID NO: 170492 - DNA, 25 bp, Probe Sequence
caaactacatggactctgtccctgg

SEQ ID NO: 170493 - DNA, 25 bp, Probe Sequence
cagaacaacggtttttcttctgcca

SEQ ID NO: 170494 - DNA, 25 bp, Probe Sequence
ggggacatgttgggatctcataaat

SEQ ID NO: 170495 - DNA, 25 bp, Probe Sequence
caaagaaccatgtattaaccacact

SEQ ID NO: 170496 - DNA, 25 bp, Probe Sequence
caacttagtattatacccacaccca

SEQ ID NO: 170497 - DNA, 25 bp, Probe Sequence
caaagtggttccagattccaccccg

SEQ ID NO: 170498 - DNA, 25 bp, Probe Sequence
caaagtctttcctaaatactccatc

SEQ ID NO: 170499 - DNA, 25 bp, Probe Sequence
caaaggttttaatgtgatctcctgg

SEQ ID NO: 170500 - DNA, 25 bp, Probe Sequence
caaagcgactttgaactgtcccatt

SEQ ID NO: 170501 - DNA, 25 bp, Probe Sequence
caaagagtctttatacctcccttca

SEQ ID NO: 170502 - DNA, 25 bp, Probe Sequence
caaataggtttcatactctaatttt

SEQ ID NO: 170503 - DNA, 25 bp, Probe Sequence
caaacaggctgttgcttaccgtcag

SEQ ID NO: 170504 - DNA, 25 bp, Probe Sequence
cacgacgatggcacctgaccaggtg

SEQ ID NO: 170505 - DNA, 25 bp, Probe Sequence
caaactatgaaatgtgaccacgtcc

SEQ ID NO: 170506 - DNA, 25 bp, Probe Sequence
caaatcggataggagtgtcaggcct

SEQ ID NO: 170507 - DNA, 25 bp, Probe Sequence
caaatagtgctttaggtcaggccaa

SEQ ID NO: 170508 - DNA, 25 bp, Probe Sequence
caaaatcttaaaagcttgtctgcaa

SEQ ID NO: 170509 - DNA, 25 bp, Probe Sequence
caaagtaatcccagcttgtctgcca

SEQ ID NO: 170510 - DNA, 25 bp, Probe Sequence
caaactttcctggtgtttacacaag

SEQ ID NO: 170511 - DNA, 25 bp, Probe Sequence
cagaattatttagctggtaacacaa

SEQ ID NO: 170512 - DNA, 25 bp, Probe Sequence
caaactcttcttgtcagtgaatcca

SEQ ID NO: 170513 - DNA, 25 bp, Probe Sequence
caaagcttacgcggctacgtatcca

SEQ ID NO: 170514 - DNA, 25 bp, Probe Sequence
caaagccttacgtcgacagttgcca

SEQ ID NO: 170515 - DNA, 25 bp, Probe Sequence
caaacactctacgtgcccaattgtg

SEQ ID NO: 170516 - DNA, 25 bp, Probe Sequence
caactcctcaactcacaagattgtt

SEQ ID NO: 170517 - DNA, 25 bp, Probe Sequence
caactaccgcctgcatgtggatggt

SEQ ID NO: 170518 - DNA, 25 bp, Probe Sequence
caactacaccgccacagtgcgtggc

SEQ ID NO: 170519 - DNA, 25 bp, Probe Sequence
caaaaaccacgagggcgggctgagc

SEQ ID NO: 170520 - DNA, 25 bp, Probe Sequence
cacaaaaccccagggacagcggtct

SEQ ID NO: 170521 - DNA, 25 bp, Probe Sequence
caacaagacccctgacaagctgcag

SEQ ID NO: 170522 - DNA, 25 bp, Probe Sequence
caacaaaatcccaatccaagtcaaa

SEQ ID NO: 170523 - DNA, 25 bp, Probe Sequence
caacaaaagcccagccgctgtctga

SEQ ID NO: 170524 - DNA, 25 bp, Probe Sequence
caacaagtacaaactgacaggtgtg

SEQ ID NO: 170525 - DNA, 25 bp, Probe Sequence
caaacccatcaagctgactcaggtg

SEQ ID NO: 170526 - DNA, 25 bp, Probe Sequence
caacaccacataacgtgtcctggag

SEQ ID NO: 170527 - DNA, 25 bp, Probe Sequence
caactacacattggtggccctggtg

SEQ ID NO: 170528 - DNA, 25 bp, Probe Sequence
cacactacacagacagtggcccttt

SEQ ID NO: 170529 - DNA, 25 bp, Probe Sequence
caactgaacgcaaatcagccacttt

SEQ ID NO: 170530 - DNA, 25 bp, Probe Sequence
caacagaatcaaaacctgcatttta

SEQ ID NO: 170531 - DNA, 25 bp, Probe Sequence
caacagtgtaaaagcattcatgttt

SEQ ID NO: 170532 - DNA, 25 bp, Probe Sequence
caacactttagattgcttttgtatc

SEQ ID NO: 170533 - DNA, 25 bp, Probe Sequence
caacagttgatgtgcttctttgggc

SEQ ID NO: 170534 - DNA, 25 bp, Probe Sequence
caaagtcataatgctgtttaaggac

SEQ ID NO: 170535 - DNA, 25 bp, Probe Sequence
caaatgtcatagtctcctttcaaag

SEQ ID NO: 170536 - DNA, 25 bp, Probe Sequence
caacaggctagggcacttcacgatg

SEQ ID NO: 170537 - DNA, 25 bp, Probe Sequence
caaagagcttgctccctacgatgag

SEQ ID NO: 170538 - DNA, 25 bp, Probe Sequence
caaaggcggctgtgcgctaagtggc

SEQ ID NO: 170539 - DNA, 25 bp, Probe Sequence
caaagcagacggggcgtgggtgggg

SEQ ID NO: 170540 - DNA, 25 bp, Probe Sequence
cacactggagaaggcgggggtggct

SEQ ID NO: 170541 - DNA, 25 bp, Probe Sequence
caactgtgggcagccgaggagctgg

SEQ ID NO: 170542 - DNA, 25 bp, Probe Sequence
caactgtgtgtacaccagggatctg

SEQ ID NO: 170543 - DNA, 25 bp, Probe Sequence
caactgcggcatagcaacctggtgc

SEQ ID NO: 170544 - DNA, 25 bp, Probe Sequence
cactcatgcggctgaagcccgtggt

SEQ ID NO: 170545 - DNA, 25 bp, Probe Sequence
cagcgtgggagtgaaccgggtgggc

SEQ ID NO: 170546 - DNA, 25 bp, Probe Sequence
caggtaaagccctatcacgggggcg

SEQ ID NO: 170547 - DNA, 25 bp, Probe Sequence
caaagaaggccacctccgggtggtg

SEQ ID NO: 170548 - DNA, 25 bp, Probe Sequence
caaagggacaggcctccttgttggg

SEQ ID NO: 170549 - DNA, 25 bp, Probe Sequence
caaagggacaggcctccttgttggg

SEQ ID NO: 170550 - DNA, 25 bp, Probe Sequence
caacagggaattgggccttgggcct

SEQ ID NO: 170551 - DNA, 25 bp, Probe Sequence
caaagggacttgtggctgtggagaa

SEQ ID NO: 170552 - DNA, 25 bp, Probe Sequence
caacacggacctcgccgtggtggaa

SEQ ID NO: 170553 - DNA, 25 bp, Probe Sequence
caaaaggacgcccacggggagatgg

SEQ ID NO: 170554 - DNA, 25 bp, Probe Sequence
caaaattgcctgccccggcagagat

SEQ ID NO: 170555 - DNA, 25 bp, Probe Sequence
caaaattcaggtctctgagcggccc

SEQ ID NO: 170556 - DNA, 25 bp, Probe Sequence
caaatgaaggtggttcgacgccccg

SEQ ID NO: 170557 - DNA, 25 bp, Probe Sequence
caaaccaagggtacagatccccagc

SEQ ID NO: 170558 - DNA, 25 bp, Probe Sequence
caaagaacaggagccgacccagcag

SEQ ID NO: 170559 - DNA, 25 bp, Probe Sequence
caaacaaaggacaccaaccacactc

SEQ ID NO: 170560 - DNA, 25 bp, Probe Sequence
caaaggacagtaaaataaccagact

SEQ ID NO: 170561 - DNA, 25 bp, Probe Sequence
caaaacaacattgaattcccagccc

SEQ ID NO: 170562 - DNA, 25 bp, Probe Sequence
caaaaataagtcatgtgtcccagca

SEQ ID NO: 170563 - DNA, 25 bp, Probe Sequence
cagccaaaatagaagctttccgagc

SEQ ID NO: 170564 - DNA, 25 bp, Probe Sequence
caccaaggtggtgcattaccggaag

SEQ ID NO: 170565 - DNA, 25 bp, Probe Sequence
cacggaggttgtgtttacaatgtag

SEQ ID NO: 170566 - DNA, 25 bp, Probe Sequence
caaaacgttgcgattataagtgtga

SEQ ID NO: 170567 - DNA, 25 bp, Probe Sequence
caaagtcgtagggcttataaagtgg

SEQ ID NO: 170568 - DNA, 25 bp, Probe Sequence
caaagttgtgacccattttactctg

SEQ ID NO: 170569 - DNA, 25 bp, Probe Sequence
caacagttgctgactcacattagtg

SEQ ID NO: 170570 - DNA, 25 bp, Probe Sequence
caacaggcgttttgcaatgcagatg

SEQ ID NO: 170571 - DNA, 25 bp, Probe Sequence
caacaggcacttcccaacaatggcc

SEQ ID NO: 170572 - DNA, 25 bp, Probe Sequence
caacgcccataatcataccaagccc

SEQ ID NO: 170573 - DNA, 25 bp, Probe Sequence
caaaacctaaacttgcacgagccac

SEQ ID NO: 170574 - DNA, 25 bp, Probe Sequence
caaaacctaacttggcattgggcaa

SEQ ID NO: 170575 - DNA, 25 bp, Probe Sequence
caaaacacttaatccttgaggcttg

SEQ ID NO: 170576 - DNA, 25 bp, Probe Sequence
caaaacagattttagacttaccttg

SEQ ID NO: 170577 - DNA, 25 bp, Probe Sequence
caaagcaccctttaaacatactttg

SEQ ID NO: 170578 - DNA, 25 bp, Probe Sequence
caaaacccgctacagacaagctttc

SEQ ID NO: 170579 - DNA, 25 bp, Probe Sequence
caaaatcccaatccaagtcaaactt

SEQ ID NO: 170580 - DNA, 25 bp, Probe Sequence
caaaatccagcagggcggtcaaatc

SEQ ID NO: 170581 - DNA, 25 bp, Probe Sequence
caaaatccagcatccattcctaata

SEQ ID NO: 170582 - DNA, 25 bp, Probe Sequence
caaaatcttcactatcatgtctaaa

SEQ ID NO: 170583 - DNA, 25 bp, Probe Sequence
caacagtccctctatcacatatgac

SEQ ID NO: 170584 - DNA, 25 bp, Probe Sequence
caacactcccatcatcctagtggga

SEQ ID NO: 170585 - DNA, 25 bp, Probe Sequence
caaaccccactactcttcatgggag

SEQ ID NO: 170586 - DNA, 25 bp, Probe Sequence
caaaccctgagctcaacttggagag

SEQ ID NO: 170587 - DNA, 25 bp, Probe Sequence
caaacccactgtgcgacatttggcc

SEQ ID NO: 170588 - DNA, 25 bp, Probe Sequence
caaaggaccttgggactctggtggc

SEQ ID NO: 170589 - DNA, 25 bp, Probe Sequence
caaaggaacgtatccctctgtggtt

SEQ ID NO: 170590 - DNA, 25 bp, Probe Sequence
caaaggctaagtttgccggcaggga

SEQ ID NO: 170591 - DNA, 25 bp, Probe Sequence
caaaaataattatgccccatgacca

SEQ ID NO: 170592 - DNA, 25 bp, Probe Sequence
caaaaatggaatgaccccaggctga

SEQ ID NO: 170593 - DNA, 25 bp, Probe Sequence
caaagacagcgctcaaaactcggtg

SEQ ID NO: 170594 - DNA, 25 bp, Probe Sequence
caaaagcggccccaaggccttagct

SEQ ID NO: 170595 - DNA, 25 bp, Probe Sequence
caaaagctggtctgaagtccttaag

SEQ ID NO: 170596 - DNA, 25 bp, Probe Sequence
cagaaactggtataacatgccttca

SEQ ID NO: 170597 - DNA, 25 bp, Probe Sequence
cagaaactggtataacatgccttca

SEQ ID NO: 170598 - DNA, 25 bp, Probe Sequence
caaaacagggatttggacatgttca

SEQ ID NO: 170599 - DNA, 25 bp, Probe Sequence
caaaagcagctgtacgtcggattcc

SEQ ID NO: 170600 - DNA, 25 bp, Probe Sequence
caaaatgatgctgatggctcaggat

SEQ ID NO: 170601 - DNA, 25 bp, Probe Sequence
caacactgcctcatgagctactgct

SEQ ID NO: 170602 - DNA, 25 bp, Probe Sequence
caacatgatgcccctgagtactgtg

SEQ ID NO: 170603 - DNA, 25 bp, Probe Sequence
caacatgagcgcctcggccatgttg

SEQ ID NO: 170604 - DNA, 25 bp, Probe Sequence
caacagcagggtgggcttgtggggc

SEQ ID NO: 170605 - DNA, 25 bp, Probe Sequence
caacagagggttggtggcggctggg

SEQ ID NO: 170606 - DNA, 25 bp, Probe Sequence
caaatggggccagatccagcctggg

SEQ ID NO: 170607 - DNA, 25 bp, Probe Sequence
caaattggccgttagccacctgggt

SEQ ID NO: 170608 - DNA, 25 bp, Probe Sequence
caactatggccgagagcacttcctg

SEQ ID NO: 170609 - DNA, 25 bp, Probe Sequence
caactttgaatggggcactttttct

SEQ ID NO: 170610 - DNA, 25 bp, Probe Sequence
caactgttttaagtcctcattttct

SEQ ID NO: 170611 - DNA, 25 bp, Probe Sequence
caacgttaataattctggattttct

SEQ ID NO: 170612 - DNA, 25 bp, Probe Sequence
caactttccatttttagatgtttcg

SEQ ID NO: 170613 - DNA, 25 bp, Probe Sequence
caactttgtctcaaatcataatttt

SEQ ID NO: 170614 - DNA, 25 bp, Probe Sequence
caactccgtctcaagcatattaaca

SEQ ID NO: 170615 - DNA, 25 bp, Probe Sequence
caactcaccctgacacagttacata

SEQ ID NO: 170616 - DNA, 25 bp, Probe Sequence
caacatgaccacccaagattcaaac

SEQ ID NO: 170617 - DNA, 25 bp, Probe Sequence
caacgtctgccgacaagcttcgggc

SEQ ID NO: 170618 - DNA, 25 bp, Probe Sequence
caacgtccttgttgcactttgggta

SEQ ID NO: 170619 - DNA, 25 bp, Probe Sequence
caacggccattgagctttgggcctg

SEQ ID NO: 170620 - DNA, 25 bp, Probe Sequence
cagactggctagggaccttgggcct

SEQ ID NO: 170621 - DNA, 25 bp, Probe Sequence
caactggaaggaacggatgggcctc

SEQ ID NO: 170622 - DNA, 25 bp, Probe Sequence
caactggaaggtccttctctggcct

SEQ ID NO: 170623 - DNA, 25 bp, Probe Sequence
caaataaacttgctctctgggcctc

SEQ ID NO: 170624 - DNA, 25 bp, Probe Sequence
caaaaagaattccaaccgaccagct

SEQ ID NO: 170625 - DNA, 25 bp, Probe Sequence
caaaacatactctgatcaccccgag

SEQ ID NO: 170626 - DNA, 25 bp, Probe Sequence
caaataaagttggtgcacgttcgcg

SEQ ID NO: 170627 - DNA, 25 bp, Probe Sequence
caaaatcagcagtatggtctctttc

SEQ ID NO: 170628 - DNA, 25 bp, Probe Sequence
caaagatcagcatggtccctgttgt

SEQ ID NO: 170629 - DNA, 25 bp, Probe Sequence
caaagtgcaagcgagtacctatggt

SEQ ID NO: 170630 - DNA, 25 bp, Probe Sequence
caacaactgggcttatcactgggaa

SEQ ID NO: 170631 - DNA, 25 bp, Probe Sequence
caaaaagaggttacacagactgaga

SEQ ID NO: 170632 - DNA, 25 bp, Probe Sequence
caaatgagatgtatgcccaaagcgg

SEQ ID NO: 170633 - DNA, 25 bp, Probe Sequence
caacaaatttttccagcaagctgag

SEQ ID NO: 170634 - DNA, 25 bp, Probe Sequence
caaaatcatgccattgcactccagc

SEQ ID NO: 170635 - DNA, 25 bp, Probe Sequence
caaaatcatgccattgcactccagc

SEQ ID NO: 170636 - DNA, 25 bp, Probe Sequence
caaaatcacactagctcaccagcag

SEQ ID NO: 170637 - DNA, 25 bp, Probe Sequence
caaattccaccacaatccagtaagc

SEQ ID NO: 170638 - DNA, 25 bp, Probe Sequence
caaactacccagcaacctgagaagc

SEQ ID NO: 170639 - DNA, 25 bp, Probe Sequence
cagaaatttcctcagccactggagg

SEQ ID NO: 170640 - DNA, 25 bp, Probe Sequence
cagaataattccacaacaggaaggt

SEQ ID NO: 170641 - DNA, 25 bp, Probe Sequence
caaatagttcgttcaaagtggagcc

SEQ ID NO: 170642 - DNA, 25 bp, Probe Sequence
caaaacccagtttaggatgtagcac

SEQ ID NO: 170643 - DNA, 25 bp, Probe Sequence
caaaactccctcaactggatgaaga

SEQ ID NO: 170644 - DNA, 25 bp, Probe Sequence
caaaaaccaccttctggcagatgga

SEQ ID NO: 170645 - DNA, 25 bp, Probe Sequence
caaaatcaccccttctgcaagaaag

SEQ ID NO: 170646 - DNA, 25 bp, Probe Sequence
caaaatccctcactttagagaagag

SEQ ID NO: 170647 - DNA, 25 bp, Probe Sequence
caaaataatctcttgttatgcaggg

SEQ ID NO: 170648 - DNA, 25 bp, Probe Sequence
cacaattatttggtttaggatggtt

SEQ ID NO: 170649 - DNA, 25 bp, Probe Sequence
caggattatggggtcttaaaggctg

SEQ ID NO: 170650 - DNA, 25 bp, Probe Sequence
cagttactggggtcacccaacctga

SEQ ID NO: 170651 - DNA, 25 bp, Probe Sequence
caaaacggagagtcacccaactgtg

SEQ ID NO: 170652 - DNA, 25 bp, Probe Sequence
caaaacggagagtcacccaactgtg

SEQ ID NO: 170653 - DNA, 25 bp, Probe Sequence
caaaacccacagtccattgtgaagt

SEQ ID NO: 170654 - DNA, 25 bp, Probe Sequence
caactgatccaagaccctgtgaagt

SEQ ID NO: 170655 - DNA, 25 bp, Probe Sequence
caaagaccaggaccgggtgaagctg

SEQ ID NO: 170656 - DNA, 25 bp, Probe Sequence
caaagacgccgtgcggaggacgctg

SEQ ID NO: 170657 - DNA, 25 bp, Probe Sequence
caaagacccgcaaaagatgtatgcc

SEQ ID NO: 170658 - DNA, 25 bp, Probe Sequence
caaagccgtcagggaaggaagcaac

SEQ ID NO: 170659 - DNA, 25 bp, Probe Sequence
caacaccgtcacagagagcttcagc

SEQ ID NO: 170660 - DNA, 25 bp, Probe Sequence
caacagcctggccaagaagtacaag

SEQ ID NO: 170661 - DNA, 25 bp, Probe Sequence
caaagccttagacaagcgccaagcc

SEQ ID NO: 170662 - DNA, 25 bp, Probe Sequence
caaagcctattccagttggcctacc

SEQ ID NO: 170663 - DNA, 25 bp, Probe Sequence
caaagcttagacctttaccttccag

SEQ ID NO: 170664 - DNA, 25 bp, Probe Sequence
caaagcttagacctttaccttccag

SEQ ID NO: 170665 - DNA, 25 bp, Probe Sequence
caaagcttagacctttaccttccag

SEQ ID NO: 170666 - DNA, 25 bp, Probe Sequence
caaagcttagacctttaccttccag

SEQ ID NO: 170667 - DNA, 25 bp, Probe Sequence
caaagccagagagctttgtccccgg

SEQ ID NO: 170668 - DNA, 25 bp, Probe Sequence
caacagtggacagctttactcccag

SEQ ID NO: 170669 - DNA, 25 bp, Probe Sequence
caactgataaatctatattcaccca

SEQ ID NO: 170670 - DNA, 25 bp, Probe Sequence
caacagcaacgtcttgaacaggcgc

SEQ ID NO: 170671 - DNA, 25 bp, Probe Sequence
caaagagatcgtctttgccaacagc

SEQ ID NO: 170672 - DNA, 25 bp, Probe Sequence
caaagacaccgagtttggctaccaa

SEQ ID NO: 170673 - DNA, 25 bp, Probe Sequence
caaatagcccaaaatggacttccaa

SEQ ID NO: 170674 - DNA, 25 bp, Probe Sequence
caaaccgtacaaagtaattctctct

SEQ ID NO: 170675 - DNA, 25 bp, Probe Sequence
cacaaccccaaaattaacaccatct

SEQ ID NO: 170676 - DNA, 25 bp, Probe Sequence
caaacttgccaataatgacctttca

SEQ ID NO: 170677 - DNA, 25 bp, Probe Sequence
caaattatgccacctaatgaaatac

SEQ ID NO: 170678 - DNA, 25 bp, Probe Sequence
caaaagtcacatctactgaagctga

SEQ ID NO: 170679 - DNA, 25 bp, Probe Sequence
caacatctgtcacttgtcctgaaaa

SEQ ID NO: 170680 - DNA, 25 bp, Probe Sequence
caactgcgacacattcgcctagaga

SEQ ID NO: 170681 - DNA, 25 bp, Probe Sequence
caacatggcagccttttccttagaa

SEQ ID NO: 170682 - DNA, 25 bp, Probe Sequence
caacatggagagacctccctctcta

SEQ ID NO: 170683 - DNA, 25 bp, Probe Sequence
caacaggacatggcctgcagcttcc

SEQ ID NO: 170684 - DNA, 25 bp, Probe Sequence
caacagcagcctgcagctggattac

SEQ ID NO: 170685 - DNA, 25 bp, Probe Sequence
caacaagcacgaccatggatgatgg

SEQ ID NO: 170686 - DNA, 25 bp, Probe Sequence
caacaacatcgccgtgcgcaagagc

SEQ ID NO: 170687 - DNA, 25 bp, Probe Sequence
caacagaagctgtgctgccacggca

SEQ ID NO: 170688 - DNA, 25 bp, Probe Sequence
caacatcaacatgacccactacatc

SEQ ID NO: 170689 - DNA, 25 bp, Probe Sequence
caacatcaacatgacccactacatc

SEQ ID NO: 170690 - DNA, 25 bp, Probe Sequence
caacacagtatgaccccatctgtac

SEQ ID NO: 170691 - DNA, 25 bp, Probe Sequence
caacacggatgataccatcggggac

SEQ ID NO: 170692 - DNA, 25 bp, Probe Sequence
caaaaggaataaagcctgcgtggca

SEQ ID NO: 170693 - DNA, 25 bp, Probe Sequence
caacacaggcaatattccagctatg

SEQ ID NO: 170694 - DNA, 25 bp, Probe Sequence
caacattggcaatgtgctccctgtg

SEQ ID NO: 170695 - DNA, 25 bp, Probe Sequence
caacttgagcgaaaccgcctgcttt

SEQ ID NO: 170696 - DNA, 25 bp, Probe Sequence
caacttggcagtaaatctacgtatt

SEQ ID NO: 170697 - DNA, 25 bp, Probe Sequence
caaatgtaaatttactgagcgtgtt

SEQ ID NO: 170698 - DNA, 25 bp, Probe Sequence
caaaaaaagtggactgcagcattta

SEQ ID NO: 170699 - DNA, 25 bp, Probe Sequence
caaaaccaggtccaatgagctttct

SEQ ID NO: 170700 - DNA, 25 bp, Probe Sequence
caaaactgggtttctgatatttgta

SEQ ID NO: 170701 - DNA, 25 bp, Probe Sequence
cacaaaccggtaactgtacctgtca

SEQ ID NO: 170702 - DNA, 25 bp, Probe Sequence
caaataccgagtggacttgaccccg

SEQ ID NO: 170703 - DNA, 25 bp, Probe Sequence
caaaacctgatagagggacctccct

SEQ ID NO: 170704 - DNA, 25 bp, Probe Sequence
caaaagcactttgagtggcactgtt

SEQ ID NO: 170705 - DNA, 25 bp, Probe Sequence
caactcagaatttccagagagctct

SEQ ID NO: 170706 - DNA, 25 bp, Probe Sequence
caacatggactttgtcatggcactc

SEQ ID NO: 170707 - DNA, 25 bp, Probe Sequence
caactacattaccatgctgtgcctc

SEQ ID NO: 170708 - DNA, 25 bp, Probe Sequence
caactatcagggcatgctctgcctc

SEQ ID NO: 170709 - DNA, 25 bp, Probe Sequence
cacgctaccgggagctggtcaagaa

SEQ ID NO: 170710 - DNA, 25 bp, Probe Sequence
caccgaagcgggagcggccaaaatg

SEQ ID NO: 170711 - DNA, 25 bp, Probe Sequence
caccggaaggggccttggcgaagct

SEQ ID NO: 170712 - DNA, 25 bp, Probe Sequence
cacgggaaggaggtgacttcgcctg

SEQ ID NO: 170713 - DNA, 25 bp, Probe Sequence
cactttgtaaaaggactcttccatc

SEQ ID NO: 170714 - DNA, 25 bp, Probe Sequence
caaatcttatgttccaactttccca

SEQ ID NO: 170715 - DNA, 25 bp, Probe Sequence
caaacctcaggaaaactgtgccctc

SEQ ID NO: 170716 - DNA, 25 bp, Probe Sequence
caaacccagtactaaagtcgctctc

SEQ ID NO: 170717 - DNA, 25 bp, Probe Sequence
caaaatccagatctataattgcgca

SEQ ID NO: 170718 - DNA, 25 bp, Probe Sequence
caaactcggtgagaacaatgctgag

SEQ ID NO: 170719 - DNA, 25 bp, Probe Sequence
caaatcctttgggtcacctggatcc

SEQ ID NO: 170720 - DNA, 25 bp, Probe Sequence
cacaaccttattgaccatctcgtgc

SEQ ID NO: 170721 - DNA, 25 bp, Probe Sequence
cacaagggctatgggaccaccctgc

SEQ ID NO: 170722 - DNA, 25 bp, Probe Sequence
caacaggactttgtccagactctcc

SEQ ID NO: 170723 - DNA, 25 bp, Probe Sequence
caaaatcttactttccagaatccca

SEQ ID NO: 170724 - DNA, 25 bp, Probe Sequence
caaaatctgtacatgtctcccatca

SEQ ID NO: 170725 - DNA, 25 bp, Probe Sequence
caaaagcactacaggcccatgaatt

SEQ ID NO: 170726 - DNA, 25 bp, Probe Sequence
caaagaattccttggcagcctgaag

SEQ ID NO: 170727 - DNA, 25 bp, Probe Sequence
caacagaatccatcagggccatgag

SEQ ID NO: 170728 - DNA, 25 bp, Probe Sequence
caaatgatagaaacagactgcctga

SEQ ID NO: 170729 - DNA, 25 bp, Probe Sequence
caaatgatagaaacagactgcctga

SEQ ID NO: 170730 - DNA, 25 bp, Probe Sequence
caaagtgtgataaaacctctggctc

SEQ ID NO: 170731 - DNA, 25 bp, Probe Sequence
cttggattacaaaacctcgagccct

SEQ ID NO: 170732 - DNA, 25 bp, Probe Sequence
cagatggattacaagggccagaagc

SEQ ID NO: 170733 - DNA, 25 bp, Probe Sequence
caaaatggagctcgaggccatgagc

SEQ ID NO: 170734 - DNA, 25 bp, Probe Sequence
caacactggacttgggctctgtgca

SEQ ID NO: 170735 - DNA, 25 bp, Probe Sequence
caaaatgaaatcttgctgcacggag

SEQ ID NO: 170736 - DNA, 25 bp, Probe Sequence
caacaagcaagatctgctcgctgag

SEQ ID NO: 170737 - DNA, 25 bp, Probe Sequence
caacattcacaagcgcatccatgga

SEQ ID NO: 170738 - DNA, 25 bp, Probe Sequence
caaactaagcaggtactcatgccag

SEQ ID NO: 170739 - DNA, 25 bp, Probe Sequence
caaaatgcaacgggactctccaaaa

SEQ ID NO: 170740 - DNA, 25 bp, Probe Sequence
caaagtgaagcggtcactcctctca

SEQ ID NO: 170741 - DNA, 25 bp, Probe Sequence
caaactgaacgacattctcctcatc

SEQ ID NO: 170742 - DNA, 25 bp, Probe Sequence
caaactaacgaaaaggcctgcatga

SEQ ID NO: 170743 - DNA, 25 bp, Probe Sequence
caacaccaacagcaaaggccttgtt

SEQ ID NO: 170744 - DNA, 25 bp, Probe Sequence
caacacccaagttgaagactttgtt

SEQ ID NO: 170745 - DNA, 25 bp, Probe Sequence
caacacccaagttgaagactttgtt

SEQ ID NO: 170746 - DNA, 25 bp, Probe Sequence
caaactcacctgaatgggacttttt

SEQ ID NO: 170747 - DNA, 25 bp, Probe Sequence
caaatgccctctctggtgacgtttg

SEQ ID NO: 170748 - DNA, 25 bp, Probe Sequence
caaatttcctgggtgtgtccttgtt

SEQ ID NO: 170749 - DNA, 25 bp, Probe Sequence
caaaatatcgccgttgttccttctg

SEQ ID NO: 170750 - DNA, 25 bp, Probe Sequence
caaaatatgcccggtgctatccgcc

SEQ ID NO: 170751 - DNA, 25 bp, Probe Sequence
caaacagaagctgggtcttacccgc

SEQ ID NO: 170752 - DNA, 25 bp, Probe Sequence
caaaggaactacctgcctttcacgg

SEQ ID NO: 170753 - DNA, 25 bp, Probe Sequence
cacaaacattcttcgttctttaagg

SEQ ID NO: 170754 - DNA, 25 bp, Probe Sequence
cacaaacttggtggtcctgcaccaa

SEQ ID NO: 170755 - DNA, 25 bp, Probe Sequence
caacaagcttggaggtctgccatca

SEQ ID NO: 170756 - DNA, 25 bp, Probe Sequence
caacagatgctgttggggctggccc

SEQ ID NO: 170757 - DNA, 25 bp, Probe Sequence
caacagagctgtgtgctgcactgtg

SEQ ID NO: 170758 - DNA, 25 bp, Probe Sequence
caacagattgtgccctatctcatct

SEQ ID NO: 170759 - DNA, 25 bp, Probe Sequence
caaagtcagggcatgatatctcatc

SEQ ID NO: 170760 - DNA, 25 bp, Probe Sequence
caaatgccaaacactagctctgtat

SEQ ID NO: 170761 - DNA, 25 bp, Probe Sequence
caaagccaggacttctaggaattaa

SEQ ID NO: 170762 - DNA, 25 bp, Probe Sequence
caaacaactgccattaaacttaact

SEQ ID NO: 170763 - DNA, 25 bp, Probe Sequence
caacacagagctgctattaaattaa

SEQ ID NO: 170764 - DNA, 25 bp, Probe Sequence
caacagccacttgagccaaatataa

SEQ ID NO: 170765 - DNA, 25 bp, Probe Sequence
cacacaggcctagaggtaaccaata

SEQ ID NO: 170766 - DNA, 25 bp, Probe Sequence
caaaagcctactgttaaccagaagc

SEQ ID NO: 170767 - DNA, 25 bp, Probe Sequence
caaacaccaattgctttacctgaac

SEQ ID NO: 170768 - DNA, 25 bp, Probe Sequence
caaaagtcaattgccttcctatata

SEQ ID NO: 170769 - DNA, 25 bp, Probe Sequence
caacatagtaataccctctctctac

SEQ ID NO: 170770 - DNA, 25 bp, Probe Sequence
caacatggcaaaaccccatctctac

SEQ ID NO: 170771 - DNA, 25 bp, Probe Sequence
caacatggcaaaaccccatctctac

SEQ ID NO: 170772 - DNA, 25 bp, Probe Sequence
caaatccaattatcatccctctgac

SEQ ID NO: 170773 - DNA, 25 bp, Probe Sequence
caaagccagaaatgctctctccagg

SEQ ID NO: 170774 - DNA, 25 bp, Probe Sequence
caaagccaataaagtgatacacccg

SEQ ID NO: 170775 - DNA, 25 bp, Probe Sequence
caacaccttcaaagacaggccctct

SEQ ID NO: 170776 - DNA, 25 bp, Probe Sequence
caaacctctaacccaggtcttgaca

SEQ ID NO: 170777 - DNA, 25 bp, Probe Sequence
caaactgccttatcacttgggtgga

SEQ ID NO: 170778 - DNA, 25 bp, Probe Sequence
caaactgccttatcacttgggtgga

SEQ ID NO: 170779 - DNA, 25 bp, Probe Sequence
caaaggctttaaacatgtggggcaa

SEQ ID NO: 170780 - DNA, 25 bp, Probe Sequence
gttggactttgatcctttgggcaga

SEQ ID NO: 170781 - DNA, 25 bp, Probe Sequence
gttggactttgatcctttgggcaga

SEQ ID NO: 170782 - DNA, 25 bp, Probe Sequence
gttggactttgatcctttgggcaga

SEQ ID NO: 170783 - DNA, 25 bp, Probe Sequence
gttgaacgtattcttaagcatggaa

SEQ ID NO: 170784 - DNA, 25 bp, Probe Sequence
caaaacattattctatcgattggaa

SEQ ID NO: 170785 - DNA, 25 bp, Probe Sequence
caaaattagtcgccttcgtcgagag

SEQ ID NO: 170786 - DNA, 25 bp, Probe Sequence
caaaagcaagttattcgccgaagta

SEQ ID NO: 170787 - DNA, 25 bp, Probe Sequence
cagaagggggttgtggccaaagcca

SEQ ID NO: 170788 - DNA, 25 bp, Probe Sequence
caaacttggtggtcctgcaccaaac

SEQ ID NO: 170789 - DNA, 25 bp, Probe Sequence
caaatgcttggtccaccatcatcgt

SEQ ID NO: 170790 - DNA, 25 bp, Probe Sequence
caaaatatcgtgctgccacatgttc

SEQ ID NO: 170791 - DNA, 25 bp, Probe Sequence
caaaaatcgttgtcacatcagtgac

SEQ ID NO: 170792 - DNA, 25 bp, Probe Sequence
caaaagcacatggtaccagctgggt

SEQ ID NO: 170793 - DNA, 25 bp, Probe Sequence
caaacacgctgcgatacggcggtca

SEQ ID NO: 170794 - DNA, 25 bp, Probe Sequence
catgaaccctggagggtggtcccca

SEQ ID NO: 170795 - DNA, 25 bp, Probe Sequence
caaacccaggcaagggtcctcagca

SEQ ID NO: 170796 - DNA, 25 bp, Probe Sequence
caacaatcgacgtgtgggactggca

SEQ ID NO: 170797 - DNA, 25 bp, Probe Sequence
caaagacaacggctgggactgaccc

SEQ ID NO: 170798 - DNA, 25 bp, Probe Sequence
caacaaaatcttcggcgtgacgacc

SEQ ID NO: 170799 - DNA, 25 bp, Probe Sequence
caaaatacacttcggcaagccagag

SEQ ID NO: 170800 - DNA, 25 bp, Probe Sequence
caaaaacctgctctgttgtgctggc

SEQ ID NO: 170801 - DNA, 25 bp, Probe Sequence
caaaaacctgctctgttgtgctggc

SEQ ID NO: 170802 - DNA, 25 bp, Probe Sequence
caaaaagccatgattgtcctggtgc

SEQ ID NO: 170803 - DNA, 25 bp, Probe Sequence
caaattacctcaacatgtattggct

SEQ ID NO: 170804 - DNA, 25 bp, Probe Sequence
caaaatagtccaccagtgattctgt

SEQ ID NO: 170805 - DNA, 25 bp, Probe Sequence
caaaatagtatgtagatgtgatctc

SEQ ID NO: 170806 - DNA, 25 bp, Probe Sequence
caaacatcagttgaacatgagctaa

SEQ ID NO: 170807 - DNA, 25 bp, Probe Sequence
caaaatcttgcataagctgaactaa

SEQ ID NO: 170808 - DNA, 25 bp, Probe Sequence
caaacaatatgcttaatgatgaaat

SEQ ID NO: 170809 - DNA, 25 bp, Probe Sequence
caaacaatacctatcataactacgt

SEQ ID NO: 170810 - DNA, 25 bp, Probe Sequence
caaacttctcagcgtaaagcaatcc

SEQ ID NO: 170811 - DNA, 25 bp, Probe Sequence
caaatctcctctttgtgaaatccca

SEQ ID NO: 170812 - DNA, 25 bp, Probe Sequence
caaatctttgtttgtaaacctcttg

SEQ ID NO: 170813 - DNA, 25 bp, Probe Sequence
caaatttggggactgaacatcgttc

SEQ ID NO: 170814 - DNA, 25 bp, Probe Sequence
cacagttttgggttcaggctatgct

SEQ ID NO: 170815 - DNA, 25 bp, Probe Sequence
cacagcttttcttgataggcctagt

SEQ ID NO: 170816 - DNA, 25 bp, Probe Sequence
caacatcttttattaagttcagtta

SEQ ID NO: 170817 - DNA, 25 bp, Probe Sequence
caaatttgtttttatgtcctcttct

SEQ ID NO: 170818 - DNA, 25 bp, Probe Sequence
caaaagtgtctctgtggagccactt

SEQ ID NO: 170819 - DNA, 25 bp, Probe Sequence
caaaagagtcctggttattcctgtt

SEQ ID NO: 170820 - DNA, 25 bp, Probe Sequence
caaagcgttcctggataaccctggc

SEQ ID NO: 170821 - DNA, 25 bp, Probe Sequence
caaagttttgtactataaagcaggc

SEQ ID NO: 170822 - DNA, 25 bp, Probe Sequence
caacagtatcacataccaaaacagg

SEQ ID NO: 170823 - DNA, 25 bp, Probe Sequence
caaaaatcaatctccaacatacaat

SEQ ID NO: 170824 - DNA, 25 bp, Probe Sequence
caaaaagaccagactaatatattaa

SEQ ID NO: 170825 - DNA, 25 bp, Probe Sequence
caaaaaccacatactaatttgaaag

SEQ ID NO: 170826 - DNA, 25 bp, Probe Sequence
caaaatgatccctgcatttcctgaa

SEQ ID NO: 170827 - DNA, 25 bp, Probe Sequence
caaaagagcctctgacattactgtc

SEQ ID NO: 170828 - DNA, 25 bp, Probe Sequence
caaagtgatcctgaggattacagct

SEQ ID NO: 170829 - DNA, 25 bp, Probe Sequence
caaagccacagctctgtcattacag

SEQ ID NO: 170830 - DNA, 25 bp, Probe Sequence
caaacactagctctgtattaatccc

SEQ ID NO: 170831 - DNA, 25 bp, Probe Sequence
caaacctggtctcgtatatcatccc

SEQ ID NO: 170832 - DNA, 25 bp, Probe Sequence
caaaagtgggccagatatttgctgc

SEQ ID NO: 170833 - DNA, 25 bp, Probe Sequence
caaagaggccaacttatgtttgctc

SEQ ID NO: 170834 - DNA, 25 bp, Probe Sequence
caacacggaaaaatcatgtctctac

SEQ ID NO: 170835 - DNA, 25 bp, Probe Sequence
caacacggaggatatccagcttccc

SEQ ID NO: 170836 - DNA, 25 bp, Probe Sequence
caacagagggagtacccctattctc

SEQ ID NO: 170837 - DNA, 25 bp, Probe Sequence
caaaatggtgaaaccccatctctac

SEQ ID NO: 170838 - DNA, 25 bp, Probe Sequence
caaagatgggacacctgtcccgacc

SEQ ID NO: 170839 - DNA, 25 bp, Probe Sequence
tacgggagctactccgggaacacac

SEQ ID NO: 170840 - DNA, 25 bp, Probe Sequence
tacgggagctactccgggaacacac

SEQ ID NO: 170841 - DNA, 25 bp, Probe Sequence
gactgggttaagtgggctaagacca

SEQ ID NO: 170842 - DNA, 25 bp, Probe Sequence
cacagggttacgtgcggaatccgcc

SEQ ID NO: 170843 - DNA, 25 bp, Probe Sequence
cacagggttagcaggtggtcaccag

SEQ ID NO: 170844 - DNA, 25 bp, Probe Sequence
cacggagcttcgtggagaccaggcc

SEQ ID NO: 170845 - DNA, 25 bp, Probe Sequence
caccaatttctatggcaaacagggc

SEQ ID NO: 170846 - DNA, 25 bp, Probe Sequence
ctcaaagtccgatgccaaccgggca

SEQ ID NO: 170847 - DNA, 25 bp, Probe Sequence
caaacagtccagttgcataagcact

SEQ ID NO: 170848 - DNA, 25 bp, Probe Sequence
caacaagctccacacatggcagtca

SEQ ID NO: 170849 - DNA, 25 bp, Probe Sequence
caacaagacgatccacgcagagctc

SEQ ID NO: 170850 - DNA, 25 bp, Probe Sequence
caaacagacgataacggctctctct

SEQ ID NO: 170851 - DNA, 25 bp, Probe Sequence
caaaaacatgatcaagtccttctat

SEQ ID NO: 170852 - DNA, 25 bp, Probe Sequence
caaactgacttgtaattgccaaata

SEQ ID NO: 170853 - DNA, 25 bp, Probe Sequence
caaatctactttgtctccataagcc

SEQ ID NO: 170854 - DNA, 25 bp, Probe Sequence
caaattacatttgacccccaggttg

SEQ ID NO: 170855 - DNA, 25 bp, Probe Sequence
caaaatacagcttgaagaccccagc

SEQ ID NO: 170856 - DNA, 25 bp, Probe Sequence
caaaatgctacttgttacctctatt

SEQ ID NO: 170857 - DNA, 25 bp, Probe Sequence
caaagctaagctttctacacttttt

SEQ ID NO: 170858 - DNA, 25 bp, Probe Sequence
caaatctaaatcttctccagctttc

SEQ ID NO: 170859 - DNA, 25 bp, Probe Sequence
caaaaatagcaatgcctccctatcc

SEQ ID NO: 170860 - DNA, 25 bp, Probe Sequence
caaaactgaaatagcctccctttag

SEQ ID NO: 170861 - DNA, 25 bp, Probe Sequence
caaaagtcaaatattacctgcaggg

SEQ ID NO: 170862 - DNA, 25 bp, Probe Sequence
caaataaaagactttatcctgttgg

SEQ ID NO: 170863 - DNA, 25 bp, Probe Sequence
caaagcaaacggtttctcctgtgga

SEQ ID NO: 170864 - DNA, 25 bp, Probe Sequence
caaagcaagttagtttgtcctagga

SEQ ID NO: 170865 - DNA, 25 bp, Probe Sequence
caacaaagtgggactctgtcttaaa

SEQ ID NO: 170866 - DNA, 25 bp, Probe Sequence
caaaagcagccgaccatctttcaaa

SEQ ID NO: 170867 - DNA, 25 bp, Probe Sequence
caaacaaccccttcttatcatcggg

SEQ ID NO: 170868 - DNA, 25 bp, Probe Sequence
caaacacacctgtctacgctacagg

SEQ ID NO: 170869 - DNA, 25 bp, Probe Sequence
caaacacacctgtctacgctacagg

SEQ ID NO: 170870 - DNA, 25 bp, Probe Sequence
caacacgccggactgactctggcgg

SEQ ID NO: 170871 - DNA, 25 bp, Probe Sequence
caacacagctcgcaacttatggctc

SEQ ID NO: 170872 - DNA, 25 bp, Probe Sequence
caacacctttaagtctagctcatcc

SEQ ID NO: 170873 - DNA, 25 bp, Probe Sequence
caaacttctgtgcacaaagtgctcc

SEQ ID NO: 170874 - DNA, 25 bp, Probe Sequence
caacacctctgtgagaggtgtgctc

SEQ ID NO: 170875 - DNA, 25 bp, Probe Sequence
caacactggattcagtgcaggtttg

SEQ ID NO: 170876 - DNA, 25 bp, Probe Sequence
caaacgcagagcccttgcaggttct

SEQ ID NO: 170877 - DNA, 25 bp, Probe Sequence
caaagagctgagctgcttcggggcc

SEQ ID NO: 170878 - DNA, 25 bp, Probe Sequence
caaacggactgagtgctccgtggcc

SEQ ID NO: 170879 - DNA, 25 bp, Probe Sequence
caaagcgggctggtgcctttgatgc

SEQ ID NO: 170880 - DNA, 25 bp, Probe Sequence
caaacttgatttgcatattcgatgc

SEQ ID NO: 170881 - DNA, 25 bp, Probe Sequence
caaatctgtctcctagaatcttatg

SEQ ID NO: 170882 - DNA, 25 bp, Probe Sequence
cacaagttcccttaagtcttgccct

SEQ ID NO: 170883 - DNA, 25 bp, Probe Sequence
cacacagattcactttaatttctta

SEQ ID NO: 170884 - DNA, 25 bp, Probe Sequence
cagaagttcaagctaaatattgttt

SEQ ID NO: 170885 - DNA, 25 bp, Probe Sequence
caaaattcacaccttataagtcatt

SEQ ID NO: 170886 - DNA, 25 bp, Probe Sequence
caaacttcactcctgtttcatgttc

SEQ ID NO: 170887 - DNA, 25 bp, Probe Sequence
caaactatgcaaatttctctttcat

SEQ ID NO: 170888 - DNA, 25 bp, Probe Sequence
caaacttgaatccccatgttcttag

SEQ ID NO: 170889 - DNA, 25 bp, Probe Sequence
caaactcgtacggcaagtatttcaa

SEQ ID NO: 170890 - DNA, 25 bp, Probe Sequence
ctcaacggctacatagaaaaatcca

SEQ ID NO: 170891 - DNA, 25 bp, Probe Sequence
cacataccccacacaaaaaactgca

SEQ ID NO: 170892 - DNA, 25 bp, Probe Sequence
cacacataccccacacaaaaaactg

SEQ ID NO: 170893 - DNA, 25 bp, Probe Sequence
cacacatacggagtctgcaaaaaat

SEQ ID NO: 170894 - DNA, 25 bp, Probe Sequence
cacacagccccagctggggcaaaca

SEQ ID NO: 170895 - DNA, 25 bp, Probe Sequence
caaactcaccaccattgaggccaaa

SEQ ID NO: 170896 - DNA, 25 bp, Probe Sequence
caaaatcccggaaggagccaaggag

SEQ ID NO: 170897 - DNA, 25 bp, Probe Sequence
caaaatccacagtatgggaccctgg

SEQ ID NO: 170898 - DNA, 25 bp, Probe Sequence
caacaaccacatcatgaagctcacc

SEQ ID NO: 170899 - DNA, 25 bp, Probe Sequence
caaaagctcatgcgctcagagccac

SEQ ID NO: 170900 - DNA, 25 bp, Probe Sequence
caaagagaagcgcctgcaactgtcc

SEQ ID NO: 170901 - DNA, 25 bp, Probe Sequence
caaaacctcggcgaatcttgcgctc

SEQ ID NO: 170902 - DNA, 25 bp, Probe Sequence
caaatctcccagagaatccgagccc

SEQ ID NO: 170903 - DNA, 25 bp, Probe Sequence
caaatctggaacccgtgtggaccac

SEQ ID NO: 170904 - DNA, 25 bp, Probe Sequence
caaatagggaggccctgggctcctg

SEQ ID NO: 170905 - DNA, 25 bp, Probe Sequence
caacaaggcgagggacctggccctg

SEQ ID NO: 170906 - DNA, 25 bp, Probe Sequence
caaaatggcgatgacaccggcacct

SEQ ID NO: 170907 - DNA, 25 bp, Probe Sequence
caaaatggcaacttcccacagccac

SEQ ID NO: 170908 - DNA, 25 bp, Probe Sequence
caaagcagtgccgccggacaggcac

SEQ ID NO: 170909 - DNA, 25 bp, Probe Sequence
caaacatgctccgccagatcatcgg

SEQ ID NO: 170910 - DNA, 25 bp, Probe Sequence
caaaatgcataaaccatgtccccag

SEQ ID NO: 170911 - DNA, 25 bp, Probe Sequence
caaaatcatactgctgctgtacctc

SEQ ID NO: 170912 - DNA, 25 bp, Probe Sequence
caaaactgttccgatttgcctctga

SEQ ID NO: 170913 - DNA, 25 bp, Probe Sequence
caaaatctgttccttcgggatctga

SEQ ID NO: 170914 - DNA, 25 bp, Probe Sequence
caaattctttcacaaggtacaaaat

SEQ ID NO: 170915 - DNA, 25 bp, Probe Sequence
caaaattcttagtaatgagtatgag

SEQ ID NO: 170916 - DNA, 25 bp, Probe Sequence
caaatattcattgcacagtggattg

SEQ ID NO: 170917 - DNA, 25 bp, Probe Sequence
cacagccttcttcaagtggctccgt

SEQ ID NO: 170918 - DNA, 25 bp, Probe Sequence
caccattgatgagaaagggaccgaa

SEQ ID NO: 170919 - DNA, 25 bp, Probe Sequence
cactctttactcaggagggccttgc

SEQ ID NO: 170920 - DNA, 25 bp, Probe Sequence
cacttatccaccaggagggcaaccg

SEQ ID NO: 170921 - DNA, 25 bp, Probe Sequence
cacaatacccaccgggtggtaagca

SEQ ID NO: 170922 - DNA, 25 bp, Probe Sequence
caaattccgctctcatgagggtgaa

SEQ ID NO: 170923 - DNA, 25 bp, Probe Sequence
caaaaccctattgtggctgtgagca

SEQ ID NO: 170924 - DNA, 25 bp, Probe Sequence
caaaaaattatagtttctctggcct

SEQ ID NO: 170925 - DNA, 25 bp, Probe Sequence
caaaatcctgtatgctttctttgcc

SEQ ID NO: 170926 - DNA, 25 bp, Probe Sequence
caaatgaccttggaccattctttcc

SEQ ID NO: 170927 - DNA, 25 bp, Probe Sequence
caaatgatccttcctactttgcttc

SEQ ID NO: 170928 - DNA, 25 bp, Probe Sequence
caaaatcctaccaagctattttgta

SEQ ID NO: 170929 - DNA, 25 bp, Probe Sequence
caaatatttaccactaagacttctg

SEQ ID NO: 170930 - DNA, 25 bp, Probe Sequence
caaaaattcccaaaccatacttgct

SEQ ID NO: 170931 - DNA, 25 bp, Probe Sequence
caaaaattcccaaaccatacttgct

SEQ ID NO: 170932 - DNA, 25 bp, Probe Sequence
caaaaattgtccacaagtcatttgt

SEQ ID NO: 170933 - DNA, 25 bp, Probe Sequence
caaaaattatccaggagtgttggtg

SEQ ID NO: 170934 - DNA, 25 bp, Probe Sequence
caaaaattagctggtcatggtgtgt

SEQ ID NO: 170935 - DNA, 25 bp, Probe Sequence
caaaagcattagtagtttgtttgtt

SEQ ID NO: 170936 - DNA, 25 bp, Probe Sequence
caaaatggatcacagacttaagtgt

SEQ ID NO: 170937 - DNA, 25 bp, Probe Sequence
caaacagcacaaaagcactttgagt

SEQ ID NO: 170938 - DNA, 25 bp, Probe Sequence
caaaaacagtaaggcttttgttcag

SEQ ID NO: 170939 - DNA, 25 bp, Probe Sequence
cacgaaaagtattctgttaagttag

SEQ ID NO: 170940 - DNA, 25 bp, Probe Sequence
cacacaaatatatgtgtaccaaatc

SEQ ID NO: 170941 - DNA, 25 bp, Probe Sequence
caccaagactaatctcagccaaacc

SEQ ID NO: 170942 - DNA, 25 bp, Probe Sequence
cacaatcaggatgacgctggccaat

SEQ ID NO: 170943 - DNA, 25 bp, Probe Sequence
cagagtcagggggccggtgaaggtc

SEQ ID NO: 170944 - DNA, 25 bp, Probe Sequence
caaacgggtgtgactcctaatggca

SEQ ID NO: 170945 - DNA, 25 bp, Probe Sequence
caaaagcttggtaagcccaagagaa

SEQ ID NO: 170946 - DNA, 25 bp, Probe Sequence
caaacccttggcaacactagaagaa

SEQ ID NO: 170947 - DNA, 25 bp, Probe Sequence
caaaccggggcctactagagtctga

SEQ ID NO: 170948 - DNA, 25 bp, Probe Sequence
gaaacctaggggcacattgggtaat

SEQ ID NO: 170949 - DNA, 25 bp, Probe Sequence
gaaacctcagcgtgaatttggggga

SEQ ID NO: 170950 - DNA, 25 bp, Probe Sequence
caaacccaggtttctcttgcttggg

SEQ ID NO: 170951 - DNA, 25 bp, Probe Sequence
caaacccaaggtgatcatcttcgag

SEQ ID NO: 170952 - DNA, 25 bp, Probe Sequence
caaaccccagtgtaatcctatttgg

SEQ ID NO: 170953 - DNA, 25 bp, Probe Sequence
caaacccacaaggagtcccttgcgg

SEQ ID NO: 170954 - DNA, 25 bp, Probe Sequence
caaagacccaagggttgcgctggcc

SEQ ID NO: 170955 - DNA, 25 bp, Probe Sequence
cacaaaaccaagcgaggccaggccg

SEQ ID NO: 170956 - DNA, 25 bp, Probe Sequence
cacacaagtctaaggggggtgccca

SEQ ID NO: 170957 - DNA, 25 bp, Probe Sequence
caacaatgtctgcgcgggactggtc

SEQ ID NO: 170958 - DNA, 25 bp, Probe Sequence
caaaaggctgggcgtagtggctcac

SEQ ID NO: 170959 - DNA, 25 bp, Probe Sequence
caaaagtgttgtcttcactggctac

SEQ ID NO: 170960 - DNA, 25 bp, Probe Sequence
caaaagtgtacggcttcctgtgctg

SEQ ID NO: 170961 - DNA, 25 bp, Probe Sequence
caaacttgtaatcctcactctttgg

SEQ ID NO: 170962 - DNA, 25 bp, Probe Sequence
caaaactataatccagcatctttta

SEQ ID NO: 170963 - DNA, 25 bp, Probe Sequence
caaaactattcatactcttgtcata

SEQ ID NO: 170964 - DNA, 25 bp, Probe Sequence
caaaatcttgttaatgtcattgcta

SEQ ID NO: 170965 - DNA, 25 bp, Probe Sequence
caaaatcttgttaatgtcattgcta

SEQ ID NO: 170966 - DNA, 25 bp, Probe Sequence
caaaacttgtgttctcatgagccta

SEQ ID NO: 170967 - DNA, 25 bp, Probe Sequence
caaaattattggcctcatgagagct

SEQ ID NO: 170968 - DNA, 25 bp, Probe Sequence
caaaagctattgttcataatggcat

SEQ ID NO: 170969 - DNA, 25 bp, Probe Sequence
caaatggtgaatgctcatcctgcct

SEQ ID NO: 170970 - DNA, 25 bp, Probe Sequence
caaatgcagtttatccctggttctg

SEQ ID NO: 170971 - DNA, 25 bp, Probe Sequence
caaatagattgtgttccaggaatgc

SEQ ID NO: 170972 - DNA, 25 bp, Probe Sequence
caaaagtcttctatgctgcgggtgc

SEQ ID NO: 170973 - DNA, 25 bp, Probe Sequence
caaacgtctggccaatgtcgttcgc

SEQ ID NO: 170974 - DNA, 25 bp, Probe Sequence
caaacgtaggcgtctgtgtttcgca

SEQ ID NO: 170975 - DNA, 25 bp, Probe Sequence
caaacggtatgccactgggtcacga

SEQ ID NO: 170976 - DNA, 25 bp, Probe Sequence
caaagggcattccttgagctgtacg

SEQ ID NO: 170977 - DNA, 25 bp, Probe Sequence
caaatccatcacacattggcttatg

SEQ ID NO: 170978 - DNA, 25 bp, Probe Sequence
caaatgccccttcatgagcttatta

SEQ ID NO: 170979 - DNA, 25 bp, Probe Sequence
caaatgccttttagctggcttttta

SEQ ID NO: 170980 - DNA, 25 bp, Probe Sequence
caaattcttccaagttctatttaat

SEQ ID NO: 170981 - DNA, 25 bp, Probe Sequence
caaattcttgtcacttttttacagc

SEQ ID NO: 170982 - DNA, 25 bp, Probe Sequence
caaagtgtttaactctagtatttcg

SEQ ID NO: 170983 - DNA, 25 bp, Probe Sequence
caaaagctgtgcaagattctggtat

SEQ ID NO: 170984 - DNA, 25 bp, Probe Sequence
caaaatcatgatgcatgcatttttg

SEQ ID NO: 170985 - DNA, 25 bp, Probe Sequence
caaaatcatgaggctcactcctctt

SEQ ID NO: 170986 - DNA, 25 bp, Probe Sequence
caaaacaggatttctgctcctcttg

SEQ ID NO: 170987 - DNA, 25 bp, Probe Sequence
caaaagcaggtacctgctcacgccc

SEQ ID NO: 170988 - DNA, 25 bp, Probe Sequence
caaaatcatcaagcctgtcctgaca

SEQ ID NO: 170989 - DNA, 25 bp, Probe Sequence
caaagatcctatgaggccctgcaag

SEQ ID NO: 170990 - DNA, 25 bp, Probe Sequence
caaagatggatgttaagcaactcat

SEQ ID NO: 170991 - DNA, 25 bp, Probe Sequence
caaatggcgagactaccacccaagg

SEQ ID NO: 170992 - DNA, 25 bp, Probe Sequence
caaatggcgagactaccacccaagg

SEQ ID NO: 170993 - DNA, 25 bp, Probe Sequence
caaatggcgagactaccacccaagg

SEQ ID NO: 170994 - DNA, 25 bp, Probe Sequence
caaatgggagccctccagacataag

SEQ ID NO: 170995 - DNA, 25 bp, Probe Sequence
caaagaaagacactggcaatgaaag

SEQ ID NO: 170996 - DNA, 25 bp, Probe Sequence
caaatgcaaaaccttgcagaacaga

SEQ ID NO: 170997 - DNA, 25 bp, Probe Sequence
caaacaactatacctgcgtagatat

SEQ ID NO: 170998 - DNA, 25 bp, Probe Sequence
caaaccctatctgctgctgatttac

SEQ ID NO: 170999 - DNA, 25 bp, Probe Sequence
caaaccagtacaactatattgcata

SEQ ID NO: 171000 - DNA, 25 bp, Probe Sequence
caaagctcagtgtcccattgtggag

SEQ ID NO: 171001 - DNA, 25 bp, Probe Sequence
caaagggatgtagatgtggagagta

SEQ ID NO: 171002 - DNA, 25 bp, Probe Sequence
caaactttggatgagtgggcagggg

SEQ ID NO: 171003 - DNA, 25 bp, Probe Sequence
cacacgctttttttaggtgcagggc

SEQ ID NO: 171004 - DNA, 25 bp, Probe Sequence
cacacgcactttatgagggagaccc

SEQ ID NO: 171005 - DNA, 25 bp, Probe Sequence
cacaacacttaacagggaacggcag

SEQ ID NO: 171006 - DNA, 25 bp, Probe Sequence
cacaagccttactttggttaccgtg

SEQ ID NO: 171007 - DNA, 25 bp, Probe Sequence
caaagccctgatctggagttacctg

SEQ ID NO: 171008 - DNA, 25 bp, Probe Sequence
caaagccactatcatctgatgtgtt

SEQ ID NO: 171009 - DNA, 25 bp, Probe Sequence
caaagacatgttcttgggagtctga

SEQ ID NO: 171010 - DNA, 25 bp, Probe Sequence
caaagtctgttctggcggcattgtg

SEQ ID NO: 171011 - DNA, 25 bp, Probe Sequence
caaactgcaaggcggcagcgaggct

SEQ ID NO: 171012 - DNA, 25 bp, Probe Sequence
caaaatgcaggccgagcgcggtggc

SEQ ID NO: 171013 - DNA, 25 bp, Probe Sequence
caaactctgtcctaggcagggagcg

SEQ ID NO: 171014 - DNA, 25 bp, Probe Sequence
caaacctgatctgagtactagtgtg

SEQ ID NO: 171015 - DNA, 25 bp, Probe Sequence
caggacctgacctgttgctgggtga

SEQ ID NO: 171016 - DNA, 25 bp, Probe Sequence
cacatacctaccagtttgtggttct

SEQ ID NO: 171017 - DNA, 25 bp, Probe Sequence
cacacctctcccagttgttgggatt

SEQ ID NO: 171018 - DNA, 25 bp, Probe Sequence
cactcttacacctgttatggaaaat

SEQ ID NO: 171019 - DNA, 25 bp, Probe Sequence
cttggaacctcatccttggaacttg

SEQ ID NO: 171020 - DNA, 25 bp, Probe Sequence
gcacttaaccacaccctggttttgt

SEQ ID NO: 171021 - DNA, 25 bp, Probe Sequence
ctatgtaacggcacccttttttgct

SEQ ID NO: 171022 - DNA, 25 bp, Probe Sequence
gatttaactcgagaccttttcaact

SEQ ID NO: 171023 - DNA, 25 bp, Probe Sequence
gatttttgtgaaggacgttcccaat

SEQ ID NO: 171024 - DNA, 25 bp, Probe Sequence
cattttttgttttgagttccctcat

SEQ ID NO: 171025 - DNA, 25 bp, Probe Sequence
cataattaagttttaggtcacctag

SEQ ID NO: 171026 - DNA, 25 bp, Probe Sequence
cagaattaattttagggcgcaccct

SEQ ID NO: 171027 - DNA, 25 bp, Probe Sequence
caaagatcatattttagctggccac

SEQ ID NO: 171028 - DNA, 25 bp, Probe Sequence
caaaagctatatgccactgccagcc

SEQ ID NO: 171029 - DNA, 25 bp, Probe Sequence
caaatactatcctatactccagctg

SEQ ID NO: 171030 - DNA, 25 bp, Probe Sequence
caaaacagggctcaccaagctcatc

SEQ ID NO: 171031 - DNA, 25 bp, Probe Sequence
caaaaatgctgacaatccagagtta

SEQ ID NO: 171032 - DNA, 25 bp, Probe Sequence
caaaaatctgtttgatccctgttac

SEQ ID NO: 171033 - DNA, 25 bp, Probe Sequence
cataaatttcttcatcgacattttc

SEQ ID NO: 171034 - DNA, 25 bp, Probe Sequence
caaagatcttgccttacagacttta

SEQ ID NO: 171035 - DNA, 25 bp, Probe Sequence
caaactgtgcgcctgtaaggtttat

SEQ ID NO: 171036 - DNA, 25 bp, Probe Sequence
caaacctgccgcaacagaaattgtt

SEQ ID NO: 171037 - DNA, 25 bp, Probe Sequence
caaacctgccgcaacagaaattgtt

SEQ ID NO: 171038 - DNA, 25 bp, Probe Sequence
caaagctccccaagcatcaatactc

SEQ ID NO: 171039 - DNA, 25 bp, Probe Sequence
caaagactgcagtatccataacccc

SEQ ID NO: 171040 - DNA, 25 bp, Probe Sequence
caaaacagcagtggctcacaggccc

SEQ ID NO: 171041 - DNA, 25 bp, Probe Sequence
caaacaggcagttggccagagagcc

SEQ ID NO: 171042 - DNA, 25 bp, Probe Sequence
caaacagagcagacaccctggatcc

SEQ ID NO: 171043 - DNA, 25 bp, Probe Sequence
caaacagagctcaaacctcggtcag

SEQ ID NO: 171044 - DNA, 25 bp, Probe Sequence
caaacatggtgaaaccctgtctcta

SEQ ID NO: 171045 - DNA, 25 bp, Probe Sequence
caaacactgagaaagcccaatccta

SEQ ID NO: 171046 - DNA, 25 bp, Probe Sequence
caaaactgaaggacccacactaaca

SEQ ID NO: 171047 - DNA, 25 bp, Probe Sequence
caaacattgataaacgtaactacta

SEQ ID NO: 171048 - DNA, 25 bp, Probe Sequence
caaactatgtagtgtgtccctatta

SEQ ID NO: 171049 - DNA, 25 bp, Probe Sequence
caaatattttgaggttccatctgtc

SEQ ID NO: 171050 - DNA, 25 bp, Probe Sequence
caaacatgcttctttattactctgt

SEQ ID NO: 171051 - DNA, 25 bp, Probe Sequence
caaactcttataatatgctatccaa

SEQ ID NO: 171052 - DNA, 25 bp, Probe Sequence
caaactttgcacatatttatattta

SEQ ID NO: 171053 - DNA, 25 bp, Probe Sequence
caaactatataactgaccttattta

SEQ ID NO: 171054 - DNA, 25 bp, Probe Sequence
caaactgtataacggtttatgtccg

SEQ ID NO: 171055 - DNA, 25 bp, Probe Sequence
caaaccttcaagctgtgtaatattc

SEQ ID NO: 171056 - DNA, 25 bp, Probe Sequence
caaagccttttgatcatgtacattt

SEQ ID NO: 171057 - DNA, 25 bp, Probe Sequence
cacagaccttttctacaaatttcca

SEQ ID NO: 171058 - DNA, 25 bp, Probe Sequence
cacatacgtttccctgaaaccttgg

SEQ ID NO: 171059 - DNA, 25 bp, Probe Sequence
cacagggtaattcactaagagcttg

SEQ ID NO: 171060 - DNA, 25 bp, Probe Sequence
cacacttcaaaaccaataagccttg

SEQ ID NO: 171061 - DNA, 25 bp, Probe Sequence
cacacaccagaagaaatgaaccaag

SEQ ID NO: 171062 - DNA, 25 bp, Probe Sequence
caaacagcaaacaaaggacaccaac

SEQ ID NO: 171063 - DNA, 25 bp, Probe Sequence
caaacagcaccagaatggacagcac

SEQ ID NO: 171064 - DNA, 25 bp, Probe Sequence
caaagcggccaaggacggagcatcc

SEQ ID NO: 171065 - DNA, 25 bp, Probe Sequence
caaactggccaagaagggccttact

SEQ ID NO: 171066 - DNA, 25 bp, Probe Sequence
caaattgggcctgtaaggccgttgt

SEQ ID NO: 171067 - DNA, 25 bp, Probe Sequence
caaactgcccgtttagagtcctgtt

SEQ ID NO: 171068 - DNA, 25 bp, Probe Sequence
caaagtcccgatgaaggagctctga

SEQ ID NO: 171069 - DNA, 25 bp, Probe Sequence
cacaagaaccctgagactgacctgc

SEQ ID NO: 171070 - DNA, 25 bp, Probe Sequence
caaagattaccttaagcaacacatg

SEQ ID NO: 171071 - DNA, 25 bp, Probe Sequence
caaagcagtttccacaagcaagcca

SEQ ID NO: 171072 - DNA, 25 bp, Probe Sequence
caaaggtttgaagacacagcctccc

SEQ ID NO: 171073 - DNA, 25 bp, Probe Sequence
caaaggcttggaaatctcagcgccc

SEQ ID NO: 171074 - DNA, 25 bp, Probe Sequence
cacaaggccaagaacccagagccac

SEQ ID NO: 171075 - DNA, 25 bp, Probe Sequence
cacaaggtacgaacctctcaggcct

SEQ ID NO: 171076 - DNA, 25 bp, Probe Sequence
caaagggaccatacaccgtgatcct

SEQ ID NO: 171077 - DNA, 25 bp, Probe Sequence
cacaacgtgtccattatcctgaagt

SEQ ID NO: 171078 - DNA, 25 bp, Probe Sequence
cacaacacgttcatggacctgattg

SEQ ID NO: 171079 - DNA, 25 bp, Probe Sequence
caaaacgcatttgccatcacagttg

SEQ ID NO: 171080 - DNA, 25 bp, Probe Sequence
caaagacctgtacgccaacacagtg

SEQ ID NO: 171081 - DNA, 25 bp, Probe Sequence
caaagttccacatgccagaaagatt

SEQ ID NO: 171082 - DNA, 25 bp, Probe Sequence
caaatcttccacaccacataagtga

SEQ ID NO: 171083 - DNA, 25 bp, Probe Sequence
caaatatccaagacccagctcaagc

SEQ ID NO: 171084 - DNA, 25 bp, Probe Sequence
caaagtacaggatcacagcataaaa

SEQ ID NO: 171085 - DNA, 25 bp, Probe Sequence
caaagttggtttggcaatgaaaaga

SEQ ID NO: 171086 - DNA, 25 bp, Probe Sequence
aaaccttgctagccaaagcggtagc

SEQ ID NO: 171087 - DNA, 25 bp, Probe Sequence
caaacggctgtctgccaactggtag

SEQ ID NO: 171088 - DNA, 25 bp, Probe Sequence
caaacaggtgcgtcggaccgagaag

SEQ ID NO: 171089 - DNA, 25 bp, Probe Sequence
caaacaggtggaggtgcacccgccg

SEQ ID NO: 171090 - DNA, 25 bp, Probe Sequence
caaacaggtggaggtgcacccgccg

SEQ ID NO: 171091 - DNA, 25 bp, Probe Sequence
caaacagctggccacgaaagccgcc

SEQ ID NO: 171092 - DNA, 25 bp, Probe Sequence
caaatggaggcgcccaaatccagcc

SEQ ID NO: 171093 - DNA, 25 bp, Probe Sequence
cacttctgtggcaccagattccacc

SEQ ID NO: 171094 - DNA, 25 bp, Probe Sequence
caaaggtggtcccggatcagcggtg

SEQ ID NO: 171095 - DNA, 25 bp, Probe Sequence
caaagttcaccctgaaggctgggca

SEQ ID NO: 171096 - DNA, 25 bp, Probe Sequence
caaagttcaccctgaaggctgggca

SEQ ID NO: 171097 - DNA, 25 bp, Probe Sequence
caaagtccaccatggcaagctctga

SEQ ID NO: 171098 - DNA, 25 bp, Probe Sequence
caaatatccccattgttgcactgta

SEQ ID NO: 171099 - DNA, 25 bp, Probe Sequence
caaatacatgaagcttcatgcactt

SEQ ID NO: 171100 - DNA, 25 bp, Probe Sequence
caaatcatctgttaattgtcctttt

SEQ ID NO: 171101 - DNA, 25 bp, Probe Sequence
cacaaatgcctatgatttaggttac

SEQ ID NO: 171102 - DNA, 25 bp, Probe Sequence
ctcacaataccttatttaagtaact

SEQ ID NO: 171103 - DNA, 25 bp, Probe Sequence
gactggcaaccttattttactacac

SEQ ID NO: 171104 - DNA, 25 bp, Probe Sequence
cacggaacgttatatgggtcaccct

SEQ ID NO: 171105 - DNA, 25 bp, Probe Sequence
cacagtaacgttcattggttccttt

SEQ ID NO: 171106 - DNA, 25 bp, Probe Sequence
caccatcaacgtcttaagtaggctt

SEQ ID NO: 171107 - DNA, 25 bp, Probe Sequence
caccatccacttctttgggaacgag

SEQ ID NO: 171108 - DNA, 25 bp, Probe Sequence
caaaccctaggcccttgagaagctg

SEQ ID NO: 171109 - DNA, 25 bp, Probe Sequence
cagacccctagggtcctgacaggtg

SEQ ID NO: 171110 - DNA, 25 bp, Probe Sequence
cacactcccgagtgtcttggaggga

SEQ ID NO: 171111 - DNA, 25 bp, Probe Sequence
cacatccagggaagaggagtgtcgg

SEQ ID NO: 171112 - DNA, 25 bp, Probe Sequence
cacgggaggcggaggttgcggttag

SEQ ID NO: 171113 - DNA, 25 bp, Probe Sequence
cacgggggacgagccgtgggttctg

SEQ ID NO: 171114 - DNA, 25 bp, Probe Sequence
cacggtggaaaataccaagttcttg

SEQ ID NO: 171115 - DNA, 25 bp, Probe Sequence
cacgctgggtaagaatgcctttttt

SEQ ID NO: 171116 - DNA, 25 bp, Probe Sequence
ccattcggaaaccaacgattttgtg

SEQ ID NO: 171117 - DNA, 25 bp, Probe Sequence
cagattaggaactcaaaattatttt

SEQ ID NO: 171118 - DNA, 25 bp, Probe Sequence
caaatagagaactaaatcacagtac

SEQ ID NO: 171119 - DNA, 25 bp, Probe Sequence
cagaaaagatgataaaccttagaaa

SEQ ID NO: 171120 - DNA, 25 bp, Probe Sequence
cacaccaagaaacagcctttgcaaa

SEQ ID NO: 171121 - DNA, 25 bp, Probe Sequence
cacacccaggtgatttcctctaaag

SEQ ID NO: 171122 - DNA, 25 bp, Probe Sequence
cacaactcaactattacacctaaca

SEQ ID NO: 171123 - DNA, 25 bp, Probe Sequence
caaacaaataggttcaactcttatc

SEQ ID NO: 171124 - DNA, 25 bp, Probe Sequence
caaacaacatagggacgtatctgct

SEQ ID NO: 171125 - DNA, 25 bp, Probe Sequence
cacaacagcaattttgggtactcgt

SEQ ID NO: 171126 - DNA, 25 bp, Probe Sequence
caaacagaatatttcagagccttgg

SEQ ID NO: 171127 - DNA, 25 bp, Probe Sequence
caaacaacattttctagccattaca

SEQ ID NO: 171128 - DNA, 25 bp, Probe Sequence
caaacgaactgtggctgcaccatct

SEQ ID NO: 171129 - DNA, 25 bp, Probe Sequence
caaacagaaggtcatgacccacgtc

SEQ ID NO: 171130 - DNA, 25 bp, Probe Sequence
caaataatggtctttgtccccgtag

SEQ ID NO: 171131 - DNA, 25 bp, Probe Sequence
caaaaaggtctatgcctctcagcga

SEQ ID NO: 171132 - DNA, 25 bp, Probe Sequence
caaagcatagtttacctgcccacga

SEQ ID NO: 171133 - DNA, 25 bp, Probe Sequence
caaaaagttcatattcacacacaga

SEQ ID NO: 171134 - DNA, 25 bp, Probe Sequence
caaagaacttcttgctaaacgagca

SEQ ID NO: 171135 - DNA, 25 bp, Probe Sequence
cacacaaacctggtgtaaattggca

SEQ ID NO: 171136 - DNA, 25 bp, Probe Sequence
caaattgagatctgctgtaagtatg

SEQ ID NO: 171137 - DNA, 25 bp, Probe Sequence
caaattggctctttggaggcgagag

SEQ ID NO: 171138 - DNA, 25 bp, Probe Sequence
caaagctggtgccgttgagaagggg

SEQ ID NO: 171139 - DNA, 25 bp, Probe Sequence
caaactgatgatcgagatggatgga

SEQ ID NO: 171140 - DNA, 25 bp, Probe Sequence
caaacgatttgattggctgcataat

SEQ ID NO: 171141 - DNA, 25 bp, Probe Sequence
caaacatgttgttgcagcttgatgg

SEQ ID NO: 171142 - DNA, 25 bp, Probe Sequence
cacaaagctttatcgtgttgtataa

SEQ ID NO: 171143 - DNA, 25 bp, Probe Sequence
caaaaatttgcctgctgtgttacaa

SEQ ID NO: 171144 - DNA, 25 bp, Probe Sequence
cacataaatgttcccgctgtgtccc

SEQ ID NO: 171145 - DNA, 25 bp, Probe Sequence
cacaatgatttgtccccagtgaccc

SEQ ID NO: 171146 - DNA, 25 bp, Probe Sequence
caaagttatatcaccagcaattcca

SEQ ID NO: 171147 - DNA, 25 bp, Probe Sequence
caaatgttaactgccaagcttggag

SEQ ID NO: 171148 - DNA, 25 bp, Probe Sequence
caaattcttttggtgcaattgagga

SEQ ID NO: 171149 - DNA, 25 bp, Probe Sequence
caaaccttgacgggactgggagacg

SEQ ID NO: 171150 - DNA, 25 bp, Probe Sequence
cacacaccttacacgaatggtaatg

SEQ ID NO: 171151 - DNA, 25 bp, Probe Sequence
caaacctatccccggatgtgtgaga

SEQ ID NO: 171152 - DNA, 25 bp, Probe Sequence
caaactgtacgagcagctgtctggg

SEQ ID NO: 171153 - DNA, 25 bp, Probe Sequence
caaagtgtaaaccgcatggatgggc

SEQ ID NO: 171154 - DNA, 25 bp, Probe Sequence
caaaggggtcaccagtcgttggcac

SEQ ID NO: 171155 - DNA, 25 bp, Probe Sequence
caaatggggcccatggccttgagca

SEQ ID NO: 171156 - DNA, 25 bp, Probe Sequence
cacaaggggcccttggagcgtggac

SEQ ID NO: 171157 - DNA, 25 bp, Probe Sequence
cacaaaaggcttttgaagctgtgga

SEQ ID NO: 171158 - DNA, 25 bp, Probe Sequence
cacaatcacgacttctatgcacgtt

SEQ ID NO: 171159 - DNA, 25 bp, Probe Sequence
caaacccaactctaatgctgcatct

SEQ ID NO: 171160 - DNA, 25 bp, Probe Sequence
caaacccactcttcatatatgcttc

SEQ ID NO: 171161 - DNA, 25 bp, Probe Sequence
caaacaacctcttcatggtgcgctt

SEQ ID NO: 171162 - DNA, 25 bp, Probe Sequence
caaaccagcgcttcagtggttctat

SEQ ID NO: 171163 - DNA, 25 bp, Probe Sequence
caaacacaggtctaatctcttttgt

SEQ ID NO: 171164 - DNA, 25 bp, Probe Sequence
cacaacacatgggatagaattattt

SEQ ID NO: 171165 - DNA, 25 bp, Probe Sequence
caaacatatgttaacttcttcaata

SEQ ID NO: 171166 - DNA, 25 bp, Probe Sequence
cacaacaatttgacacccttcattc

SEQ ID NO: 171167 - DNA, 25 bp, Probe Sequence
caaacacatctagtgccatcgctgt

SEQ ID NO: 171168 - DNA, 25 bp, Probe Sequence
cacaacacattacccacgtttgtgg

SEQ ID NO: 171169 - DNA, 25 bp, Probe Sequence
caaagccagtgacctccttttgaag

SEQ ID NO: 171170 - DNA, 25 bp, Probe Sequence
caaagccgctgccattttattaaag

SEQ ID NO: 171171 - DNA, 25 bp, Probe Sequence
caaaccctgcttatgatatgaaaat

SEQ ID NO: 171172 - DNA, 25 bp, Probe Sequence
caaacacggcttaattagaagaatg

SEQ ID NO: 171173 - DNA, 25 bp, Probe Sequence
caaacaccgcgtgattggaagtgga

SEQ ID NO: 171174 - DNA, 25 bp, Probe Sequence
cactacacggagggggcggagctgg

SEQ ID NO: 171175 - DNA, 25 bp, Probe Sequence
cacttctctgagatcgaacggactg

SEQ ID NO: 171176 - DNA, 25 bp, Probe Sequence
cacttctctgagatcgaacggactg

SEQ ID NO: 171177 - DNA, 25 bp, Probe Sequence
cacacctaaactcagtctggcctgc

SEQ ID NO: 171178 - DNA, 25 bp, Probe Sequence
caccgtaaaggcgctgcgcgcctgc

SEQ ID NO: 171179 - DNA, 25 bp, Probe Sequence
cacgggagaaggacctggcgaaggc

SEQ ID NO: 171180 - DNA, 25 bp, Probe Sequence
cacagccagaagcggtggggacagg

SEQ ID NO: 171181 - DNA, 25 bp, Probe Sequence
cacagccaagagcggtaccggcatt

SEQ ID NO: 171182 - DNA, 25 bp, Probe Sequence
cactcgaaagggaatcctcctgttt

SEQ ID NO: 171183 - DNA, 25 bp, Probe Sequence
cacggaggacggaaagtgcctttgg

SEQ ID NO: 171184 - DNA, 25 bp, Probe Sequence
cacagagggtacctgaaatggtcct

SEQ ID NO: 171185 - DNA, 25 bp, Probe Sequence
cacagaagggcctgcaagtggatct

SEQ ID NO: 171186 - DNA, 25 bp, Probe Sequence
caaagatggcccacacagggaccac

SEQ ID NO: 171187 - DNA, 25 bp, Probe Sequence
caaagggctccatacagcaggcact

SEQ ID NO: 171188 - DNA, 25 bp, Probe Sequence
cacaagatggcgccgaaagcgaaga

SEQ ID NO: 171189 - DNA, 25 bp, Probe Sequence
caaagtggcagggaccggcagagct

SEQ ID NO: 171190 - DNA, 25 bp, Probe Sequence
caaatgtgtgaacacctgcggcgct

SEQ ID NO: 171191 - DNA, 25 bp, Probe Sequence
caaactggcaaggtcctaggcatgg

SEQ ID NO: 171192 - DNA, 25 bp, Probe Sequence
caaactggcagagctccacgggaac

SEQ ID NO: 171193 - DNA, 25 bp, Probe Sequence
caaactggcagagctccacgggaac

SEQ ID NO: 171194 - DNA, 25 bp, Probe Sequence
caaactggggctaaatccgcagcaa

SEQ ID NO: 171195 - DNA, 25 bp, Probe Sequence
caaagctgggatcccaatccagaca

SEQ ID NO: 171196 - DNA, 25 bp, Probe Sequence
caaaggtgtgttgagcccattcatt

SEQ ID NO: 171197 - DNA, 25 bp, Probe Sequence
caaatgtattttagtgccacccact

SEQ ID NO: 171198 - DNA, 25 bp, Probe Sequence
caaatctatttgttttacccctgat

SEQ ID NO: 171199 - DNA, 25 bp, Probe Sequence
cacagtagttctgtcttacccactt

SEQ ID NO: 171200 - DNA, 25 bp, Probe Sequence
caaagttggaagtgctacacacttt

SEQ ID NO: 171201 - DNA, 25 bp, Probe Sequence
caaagttgctaacatcatcttcctt

SEQ ID NO: 171202 - DNA, 25 bp, Probe Sequence
caaagttgctaccagtgtatgcagt

SEQ ID NO: 171203 - DNA, 25 bp, Probe Sequence
caaagtactgctgaactgtgagtgc

SEQ ID NO: 171204 - DNA, 25 bp, Probe Sequence
caaagtgacttgagcatctgaagat

SEQ ID NO: 171205 - DNA, 25 bp, Probe Sequence
caaagcttgcttagtgattaactgc

SEQ ID NO: 171206 - DNA, 25 bp, Probe Sequence
caaactctcaccatgatgtgaagag

SEQ ID NO: 171207 - DNA, 25 bp, Probe Sequence
caaagcccaacaatgatctcaggaa

SEQ ID NO: 171208 - DNA, 25 bp, Probe Sequence
caaaccaatacatcacatcagcaga

SEQ ID NO: 171209 - DNA, 25 bp, Probe Sequence
caaacccactgatgccacaggagct

SEQ ID NO: 171210 - DNA, 25 bp, Probe Sequence
caaacccttgtagacagagcatatc

SEQ ID NO: 171211 - DNA, 25 bp, Probe Sequence
caaaccactctgtgaactgcagcct

SEQ ID NO: 171212 - DNA, 25 bp, Probe Sequence
caaatcagagagaaggaatccacct

SEQ ID NO: 171213 - DNA, 25 bp, Probe Sequence
caaacagtgcacaaggatttcaact

SEQ ID NO: 171214 - DNA, 25 bp, Probe Sequence
caaacgggcaaggacatctctacaa

SEQ ID NO: 171215 - DNA, 25 bp, Probe Sequence
caaactggccaagtgcttctgtaga

SEQ ID NO: 171216 - DNA, 25 bp, Probe Sequence
caaactggccaagtgcttctgtaga

SEQ ID NO: 171217 - DNA, 25 bp, Probe Sequence
caaacatgtccagaattgctgcgaa

SEQ ID NO: 171218 - DNA, 25 bp, Probe Sequence
caaacggcggcgtattgctctgaag

SEQ ID NO: 171219 - DNA, 25 bp, Probe Sequence
caaactacagtcctatgtactgaag

SEQ ID NO: 171220 - DNA, 25 bp, Probe Sequence
caaatgtactgggcattgtcctggt

SEQ ID NO: 171221 - DNA, 25 bp, Probe Sequence
caaaggagtgcgtagtcaccggctc

SEQ ID NO: 171222 - DNA, 25 bp, Probe Sequence
caaagctctgggtgacacgtggctc

SEQ ID NO: 171223 - DNA, 25 bp, Probe Sequence
caaagcatcgtgtgagatccgcgtg

SEQ ID NO: 171224 - DNA, 25 bp, Probe Sequence
cacaacctggtatatcgcatgcggg

SEQ ID NO: 171225 - DNA, 25 bp, Probe Sequence
caaatcctggaaccatacatcagga

SEQ ID NO: 171226 - DNA, 25 bp, Probe Sequence
caaaggcttgcaaaagacatcagtg

SEQ ID NO: 171227 - DNA, 25 bp, Probe Sequence
caaactcactgctcaagaagacatg

SEQ ID NO: 171228 - DNA, 25 bp, Probe Sequence
cacacccactgggcaataaactttc

SEQ ID NO: 171229 - DNA, 25 bp, Probe Sequence
cacacaacaaggacataaaaatttt

SEQ ID NO: 171230 - DNA, 25 bp, Probe Sequence
cacaaccaagtgaaaggattaattt

SEQ ID NO: 171231 - DNA, 25 bp, Probe Sequence
gtagggaagttatgaattactcctt

SEQ ID NO: 171232 - DNA, 25 bp, Probe Sequence
gttaaaggttgctggaaaatgcctt

SEQ ID NO: 171233 - DNA, 25 bp, Probe Sequence
gttaagaagtcgtggctaggtgttg

SEQ ID NO: 171234 - DNA, 25 bp, Probe Sequence
cactagggtttgtgaccagggtctg

SEQ ID NO: 171235 - DNA, 25 bp, Probe Sequence
gcctaggtggtgcaaaaattactct

SEQ ID NO: 171236 - DNA, 25 bp, Probe Sequence
gagtagggccttataagaccacctg

SEQ ID NO: 171237 - DNA, 25 bp, Probe Sequence
caaagggatttcttacaacctccag

SEQ ID NO: 171238 - DNA, 25 bp, Probe Sequence
caaatcggtttgtaataacacctag

SEQ ID NO: 171239 - DNA, 25 bp, Probe Sequence
caaataatcctttagaaacccgatg

SEQ ID NO: 171240 - DNA, 25 bp, Probe Sequence
caaataacctttgcaaaccttcaag

SEQ ID NO: 171241 - DNA, 25 bp, Probe Sequence
caaataacctttgcaaaccttcaag

SEQ ID NO: 171242 - DNA, 25 bp, Probe Sequence
caaagacacctttgataagaattac

SEQ ID NO: 171243 - DNA, 25 bp, Probe Sequence
caaagccatcctgaaaaatatctca

SEQ ID NO: 171244 - DNA, 25 bp, Probe Sequence
caaactaccattaaagaatactata

SEQ ID NO: 171245 - DNA, 25 bp, Probe Sequence
caaagtaccttgaactcttagtgat

SEQ ID NO: 171246 - DNA, 25 bp, Probe Sequence
caaactccacttgacatttactgta

SEQ ID NO: 171247 - DNA, 25 bp, Probe Sequence
caaatcccaaatctctttcattgat

SEQ ID NO: 171248 - DNA, 25 bp, Probe Sequence
caaagaccaggccgttttcttcatg

SEQ ID NO: 171249 - DNA, 25 bp, Probe Sequence
cacacggccaggcctgtttatctac

SEQ ID NO: 171250 - DNA, 25 bp, Probe Sequence
cacagtgacctgcgcaatgtttata

SEQ ID NO: 171251 - DNA, 25 bp, Probe Sequence
cacaaagccgctgccattttattaa

SEQ ID NO: 171252 - DNA, 25 bp, Probe Sequence
caaatagaagcttcttgctcctgtt

SEQ ID NO: 171253 - DNA, 25 bp, Probe Sequence
caaagaacagatttgcctccaggtc

SEQ ID NO: 171254 - DNA, 25 bp, Probe Sequence
caaataaggatgtgttctctgagac

SEQ ID NO: 171255 - DNA, 25 bp, Probe Sequence
caaatgggagtttgttttggcacca

SEQ ID NO: 171256 - DNA, 25 bp, Probe Sequence
caaatgggactgaagcaactgtaca

SEQ ID NO: 171257 - DNA, 25 bp, Probe Sequence
caaatcgagttgaagatcccatacg

SEQ ID NO: 171258 - DNA, 25 bp, Probe Sequence
catatttaagtggagcccctacgta

SEQ ID NO: 171259 - DNA, 25 bp, Probe Sequence
caaatatgactttacccttgacttt

SEQ ID NO: 171260 - DNA, 25 bp, Probe Sequence
caaatgtaattcctgctcctggact

SEQ ID NO: 171261 - DNA, 25 bp, Probe Sequence
caaagtgaagcccatcagcctggca

SEQ ID NO: 171262 - DNA, 25 bp, Probe Sequence
caaagccagagcccaagcctaaaaa

SEQ ID NO: 171263 - DNA, 25 bp, Probe Sequence
caaagcaagaccctatctctaaaaa

SEQ ID NO: 171264 - DNA, 25 bp, Probe Sequence
caaatggaatcccaatctatctaaa

SEQ ID NO: 171265 - DNA, 25 bp, Probe Sequence
cacacacgatatgttacgatataaa

SEQ ID NO: 171266 - DNA, 25 bp, Probe Sequence
caaaggcatatcttctatatctgaa

SEQ ID NO: 171267 - DNA, 25 bp, Probe Sequence
caaaggcattcatgagcttcggagc

SEQ ID NO: 171268 - DNA, 25 bp, Probe Sequence
caaagtatacattcactgtctggtg

SEQ ID NO: 171269 - DNA, 25 bp, Probe Sequence
caaactgtcacaagttgttatgtcc

SEQ ID NO: 171270 - DNA, 25 bp, Probe Sequence
caaactgtcactcttcatcgatgat

SEQ ID NO: 171271 - DNA, 25 bp, Probe Sequence
caaacgctgtgtccattctcagcat

SEQ ID NO: 171272 - DNA, 25 bp, Probe Sequence
caaatcggtgcactgatcgctgcca

SEQ ID NO: 171273 - DNA, 25 bp, Probe Sequence
caaagagagtcgcatctcagtgcag

SEQ ID NO: 171274 - DNA, 25 bp, Probe Sequence
caaagagacctttgctcagggacgc

SEQ ID NO: 171275 - DNA, 25 bp, Probe Sequence
caaagaagccttgccatctggcgct

SEQ ID NO: 171276 - DNA, 25 bp, Probe Sequence
caaagacagcgcatggaagctccac

SEQ ID NO: 171277 - DNA, 25 bp, Probe Sequence
cacagaagtccactaaagttcacca

SEQ ID NO: 171278 - DNA, 25 bp, Probe Sequence
cacaactgtccacgtaggcattcac

SEQ ID NO: 171279 - DNA, 25 bp, Probe Sequence
caaactgtcacattagggatacaaa

SEQ ID NO: 171280 - DNA, 25 bp, Probe Sequence
caaagctgtacattaagatggggca

SEQ ID NO: 171281 - DNA, 25 bp, Probe Sequence
caaaggatactttggtgatgagcag

SEQ ID NO: 171282 - DNA, 25 bp, Probe Sequence
caaaggctcagctggggatggtgtt

SEQ ID NO: 171283 - DNA, 25 bp, Probe Sequence
caaagagctgcctcttggtggcagt

SEQ ID NO: 171284 - DNA, 25 bp, Probe Sequence
caaatactggcgaactcctggcgct

SEQ ID NO: 171285 - DNA, 25 bp, Probe Sequence
caaatactggcgaactcctggcgct

SEQ ID NO: 171286 - DNA, 25 bp, Probe Sequence
caaatggcggatgacgccggtgcag

SEQ ID NO: 171287 - DNA, 25 bp, Probe Sequence
caaatgcaaggttactggctgggga

SEQ ID NO: 171288 - DNA, 25 bp, Probe Sequence
caaatgcaggccctccatttgggga

SEQ ID NO: 171289 - DNA, 25 bp, Probe Sequence
caaatgggcatcgtctcatggggtg

SEQ ID NO: 171290 - DNA, 25 bp, Probe Sequence
caaagcggcatggcggcatggcgtg

SEQ ID NO: 171291 - DNA, 25 bp, Probe Sequence
caaagcgctgatccaagttgctctg

SEQ ID NO: 171292 - DNA, 25 bp, Probe Sequence
caaagctgctggccaagctcagtgg

SEQ ID NO: 171293 - DNA, 25 bp, Probe Sequence
caaagctgctggccaagctcagtgg

SEQ ID NO: 171294 - DNA, 25 bp, Probe Sequence
caaagctgctggccaagctcagtgg

SEQ ID NO: 171295 - DNA, 25 bp, Probe Sequence
cacaggtgatggggtgccagattga

SEQ ID NO: 171296 - DNA, 25 bp, Probe Sequence
cacaggtggtgaaattgcctctacc

SEQ ID NO: 171297 - DNA, 25 bp, Probe Sequence
cacaattagtaaagtactgtacctt

SEQ ID NO: 171298 - DNA, 25 bp, Probe Sequence
caaatttgcaacagttctttcccca

SEQ ID NO: 171299 - DNA, 25 bp, Probe Sequence
caaatgtgctgcagctcgttttctc

SEQ ID NO: 171300 - DNA, 25 bp, Probe Sequence
caaatgtgctgcagctcgttttctc

SEQ ID NO: 171301 - DNA, 25 bp, Probe Sequence
caaatgtggaaggtgtttcctccca

SEQ ID NO: 171302 - DNA, 25 bp, Probe Sequence
caaatggaagatcctagtacctccc

SEQ ID NO: 171303 - DNA, 25 bp, Probe Sequence
gcaaaggaatgtactaagcccccgc

SEQ ID NO: 171304 - DNA, 25 bp, Probe Sequence
cactttaatgtacatgggccgcacc

SEQ ID NO: 171305 - DNA, 25 bp, Probe Sequence
cactttccagtagatgtgcctaaaa

SEQ ID NO: 171306 - DNA, 25 bp, Probe Sequence
cactgaggggcaacagggacccccg

SEQ ID NO: 171307 - DNA, 25 bp, Probe Sequence
caaagaagacagagaggtcagcccc

SEQ ID NO: 171308 - DNA, 25 bp, Probe Sequence
caaagaattcagagatggctgccag

SEQ ID NO: 171309 - DNA, 25 bp, Probe Sequence
caaagactcggtatgtgcccagaca

SEQ ID NO: 171310 - DNA, 25 bp, Probe Sequence
caaatagtctatcttccccagacac

SEQ ID NO: 171311 - DNA, 25 bp, Probe Sequence
caaagaatcttgtttccattcggaa

SEQ ID NO: 171312 - DNA, 25 bp, Probe Sequence
caaagagctcttctgaccatatcct

SEQ ID NO: 171313 - DNA, 25 bp, Probe Sequence
cacaagagctttcctgcctaatgaa

SEQ ID NO: 171314 - DNA, 25 bp, Probe Sequence
cacacagacactaacgaaatatcaa

SEQ ID NO: 171315 - DNA, 25 bp, Probe Sequence
cacagagaatctatcccataaaagg

SEQ ID NO: 171316 - DNA, 25 bp, Probe Sequence
cacacacaaccagtcccgaaaatgg

SEQ ID NO: 171317 - DNA, 25 bp, Probe Sequence
cacagccagggtgaccacagaaagg

SEQ ID NO: 171318 - DNA, 25 bp, Probe Sequence
caaagcctgagtgaccatagagaga

SEQ ID NO: 171319 - DNA, 25 bp, Probe Sequence
caaattctggtggccgcattgacag

SEQ ID NO: 171320 - DNA, 25 bp, Probe Sequence
caaatgactactgcacctggacagc

SEQ ID NO: 171321 - DNA, 25 bp, Probe Sequence
caaaggcagcaggctaccggacggc

SEQ ID NO: 171322 - DNA, 25 bp, Probe Sequence
caaatggagagtgtagcctgagggc

SEQ ID NO: 171323 - DNA, 25 bp, Probe Sequence
caaagatggaagtggcctgggcccc

SEQ ID NO: 171324 - DNA, 25 bp, Probe Sequence
caaagagtgaagaggctcatgctga

SEQ ID NO: 171325 - DNA, 25 bp, Probe Sequence
caaagcgaaagcggcaggatcgacg

SEQ ID NO: 171326 - DNA, 25 bp, Probe Sequence
caaagccagcaacgacatgtaccac

SEQ ID NO: 171327 - DNA, 25 bp, Probe Sequence
caaatcgcacaatggcaaagccaaa

SEQ ID NO: 171328 - DNA, 25 bp, Probe Sequence
cacaacagacaatggctcagcgagc

SEQ ID NO: 171329 - DNA, 25 bp, Probe Sequence
cacaaagaaacaccaggcgtacctg

SEQ ID NO: 171330 - DNA, 25 bp, Probe Sequence
cacaggaacaactgccggtgatact

SEQ ID NO: 171331 - DNA, 25 bp, Probe Sequence
cacaagagaaactcctagtttagac

SEQ ID NO: 171332 - DNA, 25 bp, Probe Sequence
caaataaaaaccctagacatgctac

SEQ ID NO: 171333 - DNA, 25 bp, Probe Sequence
caaagaaccaactgataatcatcat

SEQ ID NO: 171334 - DNA, 25 bp, Probe Sequence
caaagggctctttaaaatcatattt

SEQ ID NO: 171335 - DNA, 25 bp, Probe Sequence
caaatggtacgttataacatcaatt

SEQ ID NO: 171336 - DNA, 25 bp, Probe Sequence
caaaggtcaccttcttgactccttt

SEQ ID NO: 171337 - DNA, 25 bp, Probe Sequence
caaagggagcacagtctgcacccag

SEQ ID NO: 171338 - DNA, 25 bp, Probe Sequence
cacaaggcgtgagagcctgccagcg

SEQ ID NO: 171339 - DNA, 25 bp, Probe Sequence
ctacgggtacgtggctgaacagttc

SEQ ID NO: 171340 - DNA, 25 bp, Probe Sequence
cttcgaggtgaccggccaggaaacg

SEQ ID NO: 171341 - DNA, 25 bp, Probe Sequence
ctccggggatacagccatggctaag

SEQ ID NO: 171342 - DNA, 25 bp, Probe Sequence
cgcttggggaacctgacgtctaagt

SEQ ID NO: 171343 - DNA, 25 bp, Probe Sequence
cagccttggaaacagacctccaagg

SEQ ID NO: 171344 - DNA, 25 bp, Probe Sequence
cacagccttggaaacagacctccaa

SEQ ID NO: 171345 - DNA, 25 bp, Probe Sequence
cacagcctttgtggaacattccgta

SEQ ID NO: 171346 - DNA, 25 bp, Probe Sequence
cacagcttgggtgaaaggggattcc

SEQ ID NO: 171347 - DNA, 25 bp, Probe Sequence
cacgttaggcatgaaacaggacaac

SEQ ID NO: 171348 - DNA, 25 bp, Probe Sequence
cacagttggtgccacataaaggctc

SEQ ID NO: 171349 - DNA, 25 bp, Probe Sequence
cacacttgttgcaccaaagtgatac

SEQ ID NO: 171350 - DNA, 25 bp, Probe Sequence
cacagtagtgatctcctcggttcac

SEQ ID NO: 171351 - DNA, 25 bp, Probe Sequence
cacagtaggacaccatccttctgtt

SEQ ID NO: 171352 - DNA, 25 bp, Probe Sequence
caccggaccatgtcatgtcctgctt

SEQ ID NO: 171353 - DNA, 25 bp, Probe Sequence
cacaagtaaggctatggctctgatt

SEQ ID NO: 171354 - DNA, 25 bp, Probe Sequence
caaagtcaaggtagctgtagccata

SEQ ID NO: 171355 - DNA, 25 bp, Probe Sequence
caaaggcaaagattgttagatcaga

SEQ ID NO: 171356 - DNA, 25 bp, Probe Sequence
caaataccaacattgttatgccaga

SEQ ID NO: 171357 - DNA, 25 bp, Probe Sequence
cacagtaactcagagattaccaacc

SEQ ID NO: 171358 - DNA, 25 bp, Probe Sequence
cacagggttatgcaattcccggcct

SEQ ID NO: 171359 - DNA, 25 bp, Probe Sequence
caaatgtgtaatggagattgcctca

SEQ ID NO: 171360 - DNA, 25 bp, Probe Sequence
caaatgttgacatggtgacctcatc

SEQ ID NO: 171361 - DNA, 25 bp, Probe Sequence
caaagttcacaatgtggccgaggac

SEQ ID NO: 171362 - DNA, 25 bp, Probe Sequence
cacaggttccagtgggccaaggttg

SEQ ID NO: 171363 - DNA, 25 bp, Probe Sequence
cacaggtcccggggcatcaggagaa

SEQ ID NO: 171364 - DNA, 25 bp, Probe Sequence
caaagtctgctcgaggagtctgtaa

SEQ ID NO: 171365 - DNA, 25 bp, Probe Sequence
cacagactgcaaataggcatgcttt

SEQ ID NO: 171366 - DNA, 25 bp, Probe Sequence
cacacattgcgaacaacatgttggg

SEQ ID NO: 171367 - DNA, 25 bp, Probe Sequence
cacacattgcgaacaacatgttggg

SEQ ID NO: 171368 - DNA, 25 bp, Probe Sequence
cacaacagcgaaggaatttgctgat

SEQ ID NO: 171369 - DNA, 25 bp, Probe Sequence
cacaaggcggggatgcttccacgcc

SEQ ID NO: 171370 - DNA, 25 bp, Probe Sequence
caaagctggcgtgattgttgacccc

SEQ ID NO: 171371 - DNA, 25 bp, Probe Sequence
caaagctggctgagactctgtgatc

SEQ ID NO: 171372 - DNA, 25 bp, Probe Sequence
caaagcaagcatgcatcccgtgact

SEQ ID NO: 171373 - DNA, 25 bp, Probe Sequence
caaatgcaatcccatttctgtgcct

SEQ ID NO: 171374 - DNA, 25 bp, Probe Sequence
caaagaatcggcctggcagtgccct

SEQ ID NO: 171375 - DNA, 25 bp, Probe Sequence
caaagagccaggcatcgcaggactc

SEQ ID NO: 171376 - DNA, 25 bp, Probe Sequence
caaagctgccattgtcatcctggcc

SEQ ID NO: 171377 - DNA, 25 bp, Probe Sequence
caaatgctgccattgacacagtagc

SEQ ID NO: 171378 - DNA, 25 bp, Probe Sequence
caaaggcgcagctacgtgtgcagcc

SEQ ID NO: 171379 - DNA, 25 bp, Probe Sequence
caaagaagagcgccaggctcacctc

SEQ ID NO: 171380 - DNA, 25 bp, Probe Sequence
caaagaagagcgccaggctcacctc

SEQ ID NO: 171381 - DNA, 25 bp, Probe Sequence
caaagagaggctcacctgtaccact

SEQ ID NO: 171382 - DNA, 25 bp, Probe Sequence
caaaggagtcctgacatctggccac

SEQ ID NO: 171383 - DNA, 25 bp, Probe Sequence
cacacgggtctaaatttggcaagga

SEQ ID NO: 171384 - DNA, 25 bp, Probe Sequence
cacaaggtacaaaatcttgcataag

SEQ ID NO: 171385 - DNA, 25 bp, Probe Sequence
cacacagggaaacagctatgaccat

SEQ ID NO: 171386 - DNA, 25 bp, Probe Sequence
cacacgggcgagaagcgcttctcct

SEQ ID NO: 171387 - DNA, 25 bp, Probe Sequence
cacatcaaggcacatcagacttctc

SEQ ID NO: 171388 - DNA, 25 bp, Probe Sequence
cacaagcggctctatgagtctatta

SEQ ID NO: 171389 - DNA, 25 bp, Probe Sequence
caaagacagctcctggccatatatc

SEQ ID NO: 171390 - DNA, 25 bp, Probe Sequence
caaagcacagctagctgccatcacc

SEQ ID NO: 171391 - DNA, 25 bp, Probe Sequence
caaagcatcagcaccagaacgcaca

SEQ ID NO: 171392 - DNA, 25 bp, Probe Sequence
caaagcatcagcaccagaacgcaca

SEQ ID NO: 171393 - DNA, 25 bp, Probe Sequence
caaagcatcagttctaaacaataga

SEQ ID NO: 171394 - DNA, 25 bp, Probe Sequence
cacacagcatcacatgttagaaata

SEQ ID NO: 171395 - DNA, 25 bp, Probe Sequence
cacacagtaggcccagtgcaagtat

SEQ ID NO: 171396 - DNA, 25 bp, Probe Sequence
caaagatcagcatcagcgtcatatt

SEQ ID NO: 171397 - DNA, 25 bp, Probe Sequence
caaagatgactatgcttttatttta

SEQ ID NO: 171398 - DNA, 25 bp, Probe Sequence
caaatcattcaatgcttttatattt

SEQ ID NO: 171399 - DNA, 25 bp, Probe Sequence
caaattctctatcctttctaagtta

SEQ ID NO: 171400 - DNA, 25 bp, Probe Sequence
caaatttcattgcactttcctttca

SEQ ID NO: 171401 - DNA, 25 bp, Probe Sequence
caaatttcattgcactttcctttca

SEQ ID NO: 171402 - DNA, 25 bp, Probe Sequence
caaagtacactgaacttccttatgg

SEQ ID NO: 171403 - DNA, 25 bp, Probe Sequence
caaagacacaataaacttcctatgg

SEQ ID NO: 171404 - DNA, 25 bp, Probe Sequence
caaagcaaagaaattctacctctgc

SEQ ID NO: 171405 - DNA, 25 bp, Probe Sequence
cacaggaaaaacacagaccctcata

SEQ ID NO: 171406 - DNA, 25 bp, Probe Sequence
caaataactaacacgaacttccaga

SEQ ID NO: 171407 - DNA, 25 bp, Probe Sequence
caaatactctcgacaccgaatcacc

SEQ ID NO: 171408 - DNA, 25 bp, Probe Sequence
caaagcattctcatcagtcgcaatg

SEQ ID NO: 171409 - DNA, 25 bp, Probe Sequence
caaagactctgaaagtggcaatgga

SEQ ID NO: 171410 - DNA, 25 bp, Probe Sequence
caaataccagctagggccagtgaca

SEQ ID NO: 171411 - DNA, 25 bp, Probe Sequence
cacagacaccctaccgatagaacag

SEQ ID NO: 171412 - DNA, 25 bp, Probe Sequence
caaagaagtatagttgtgccagctt

SEQ ID NO: 171413 - DNA, 25 bp, Probe Sequence
cactaaattacgatgtcctcaggtt

SEQ ID NO: 171414 - DNA, 25 bp, Probe Sequence
cacaaactgtttctgcatcccaggg

SEQ ID NO: 171415 - DNA, 25 bp, Probe Sequence
cacaaggtggttctttccagttagg

SEQ ID NO: 171416 - DNA, 25 bp, Probe Sequence
caaagtttgttgaagcttcgagtta

SEQ ID NO: 171417 - DNA, 25 bp, Probe Sequence
caaattttgttaagttcagccatta

SEQ ID NO: 171418 - DNA, 25 bp, Probe Sequence
cacactgctttggatacttatctac

SEQ ID NO: 171419 - DNA, 25 bp, Probe Sequence
cacaatgttagattcatcttactga

SEQ ID NO: 171420 - DNA, 25 bp, Probe Sequence
caaatgttagacttgtgtgcatgga

SEQ ID NO: 171421 - DNA, 25 bp, Probe Sequence
caaattttgcgctcggtgcgatact

SEQ ID NO: 171422 - DNA, 25 bp, Probe Sequence
caaatctttggctgccttggccagt

SEQ ID NO: 171423 - DNA, 25 bp, Probe Sequence
caaatcgtcaggtgcctggagcaaa

SEQ ID NO: 171424 - DNA, 25 bp, Probe Sequence
caaattgacagaactcgatggagaa

SEQ ID NO: 171425 - DNA, 25 bp, Probe Sequence
caaagtgacagctgccatgggcaag

SEQ ID NO: 171426 - DNA, 25 bp, Probe Sequence
cattattacctcctagggccaggaa

SEQ ID NO: 171427 - DNA, 25 bp, Probe Sequence
cactactacctcttaagtcccagta

SEQ ID NO: 171428 - DNA, 25 bp, Probe Sequence
cacaacgaactctgaaggcactggg

SEQ ID NO: 171429 - DNA, 25 bp, Probe Sequence
cacaaaagcactttgagtggcactg

SEQ ID NO: 171430 - DNA, 25 bp, Probe Sequence
caccaaagcaatttttccctcaggg

SEQ ID NO: 171431 - DNA, 25 bp, Probe Sequence
cactccataaattctattacctaaa

SEQ ID NO: 171432 - DNA, 25 bp, Probe Sequence
caccacttattactacatgacactg

SEQ ID NO: 171433 - DNA, 25 bp, Probe Sequence
cacaagtatcatagccaaatgatca

SEQ ID NO: 171434 - DNA, 25 bp, Probe Sequence
cacaccatcagattccaaagaagtt

SEQ ID NO: 171435 - DNA, 25 bp, Probe Sequence
cagccatattggtctagaaacgtta

SEQ ID NO: 171436 - DNA, 25 bp, Probe Sequence
cacacttctggcttgttaacagatt

SEQ ID NO: 171437 - DNA, 25 bp, Probe Sequence
cacagtgcagtgaccttcataaagc

SEQ ID NO: 171438 - DNA, 25 bp, Probe Sequence
cacaatttgtacttaaaagcgaaag

SEQ ID NO: 171439 - DNA, 25 bp, Probe Sequence
cacacttggttcctcacaaagccaa

SEQ ID NO: 171440 - DNA, 25 bp, Probe Sequence
cactttgatttccttaatagcccat

SEQ ID NO: 171441 - DNA, 25 bp, Probe Sequence
cacttgtcttggctgtagattccct

SEQ ID NO: 171442 - DNA, 25 bp, Probe Sequence
caaatttttggttcatcgtcacctc

SEQ ID NO: 171443 - DNA, 25 bp, Probe Sequence
caaatatttatacagcaccagacgc

SEQ ID NO: 171444 - DNA, 25 bp, Probe Sequence
caaatgatttgattaaacctagacg

SEQ ID NO: 171445 - DNA, 25 bp, Probe Sequence
caaattttgatcctaaccttgaagt

SEQ ID NO: 171446 - DNA, 25 bp, Probe Sequence
caaattatcttgctgaatccttcta

SEQ ID NO: 171447 - DNA, 25 bp, Probe Sequence
cacaaagtttctcatatcctgttca

SEQ ID NO: 171448 - DNA, 25 bp, Probe Sequence
caaagattccctcgaatcctcgtgc

SEQ ID NO: 171449 - DNA, 25 bp, Probe Sequence
caaagtctacgcctgcgaagtcacc

SEQ ID NO: 171450 - DNA, 25 bp, Probe Sequence
caaatgaacaccccgatgagatacc

SEQ ID NO: 171451 - DNA, 25 bp, Probe Sequence
caaataacacccctaacatatgcac

SEQ ID NO: 171452 - DNA, 25 bp, Probe Sequence
cacaagaaacctataacttcacact

SEQ ID NO: 171453 - DNA, 25 bp, Probe Sequence
cacaagaaccttataactttcacac

SEQ ID NO: 171454 - DNA, 25 bp, Probe Sequence
cacaaggtccttatactgcagatcc

SEQ ID NO: 171455 - DNA, 25 bp, Probe Sequence
cacacagggcctaattaacatctct

SEQ ID NO: 171456 - DNA, 25 bp, Probe Sequence
cacacagggcttcatcgtaactgct

SEQ ID NO: 171457 - DNA, 25 bp, Probe Sequence
cacactggacttctggactacatat

SEQ ID NO: 171458 - DNA, 25 bp, Probe Sequence
cacacactgctactttgtgagtaaa

SEQ ID NO: 171459 - DNA, 25 bp, Probe Sequence
cacatgacttagttagtgcataaag

SEQ ID NO: 171460 - DNA, 25 bp, Probe Sequence
cacagccttctgtggtgtcatttct

SEQ ID NO: 171461 - DNA, 25 bp, Probe Sequence
cacaccgggatgctttgtttgttcg

SEQ ID NO: 171462 - DNA, 25 bp, Probe Sequence
cacaccgttgagctaatgttgtatt

SEQ ID NO: 171463 - DNA, 25 bp, Probe Sequence
cacacaggtaggccatgacagttct

SEQ ID NO: 171464 - DNA, 25 bp, Probe Sequence
cacaagggaggggaacattccatcc

SEQ ID NO: 171465 - DNA, 25 bp, Probe Sequence
cacaaagggttgtagcactgtcctc

SEQ ID NO: 171466 - DNA, 25 bp, Probe Sequence
caaagaggtggtgacattctcctca

SEQ ID NO: 171467 - DNA, 25 bp, Probe Sequence
cacagagggggaaaagactcttact

SEQ ID NO: 171468 - DNA, 25 bp, Probe Sequence
cacggggttcagaaggactacaacg

SEQ ID NO: 171469 - DNA, 25 bp, Probe Sequence
caccgtagtaagaggacttccacgt

SEQ ID NO: 171470 - DNA, 25 bp, Probe Sequence
caccgtgactttctaggcttctacg

SEQ ID NO: 171471 - DNA, 25 bp, Probe Sequence
ctgtgggactttgtgggtactattt

SEQ ID NO: 171472 - DNA, 25 bp, Probe Sequence
ctttggagttactgcagttactgtt

SEQ ID NO: 171473 - DNA, 25 bp, Probe Sequence
cacttgggttacctgccttgaagga

SEQ ID NO: 171474 - DNA, 25 bp, Probe Sequence
cagttaggttaaccacccagaggct

SEQ ID NO: 171475 - DNA, 25 bp, Probe Sequence
cagcgacagtttcgagaacccgggc

SEQ ID NO: 171476 - DNA, 25 bp, Probe Sequence
cacagaggtcctcaagacccacgga

SEQ ID NO: 171477 - DNA, 25 bp, Probe Sequence
cacagaggtcctcaagacccacgga

SEQ ID NO: 171478 - DNA, 25 bp, Probe Sequence
cacagacgacgacaagaccgaccac

SEQ ID NO: 171479 - DNA, 25 bp, Probe Sequence
cacacaaacgaggaatgaggggctt

SEQ ID NO: 171480 - DNA, 25 bp, Probe Sequence
cacacacgaggaggccaggcaaggt

SEQ ID NO: 171481 - DNA, 25 bp, Probe Sequence
cacatgctgatctgtggccagccaa

SEQ ID NO: 171482 - DNA, 25 bp, Probe Sequence
cacactgtaggactcacacacgact

SEQ ID NO: 171483 - DNA, 25 bp, Probe Sequence
cacacttaggcaagcatacacaggc

SEQ ID NO: 171484 - DNA, 25 bp, Probe Sequence
cacacttggctctaataagctggaa

SEQ ID NO: 171485 - DNA, 25 bp, Probe Sequence
cacactttggctaattttggaattt

SEQ ID NO: 171486 - DNA, 25 bp, Probe Sequence
cacacctgtagcaatttccagtttt

SEQ ID NO: 171487 - DNA, 25 bp, Probe Sequence
cacaccagttgcgaagtccttttga

SEQ ID NO: 171488 - DNA, 25 bp, Probe Sequence
cacagaagtagtcatgcccttttgt

SEQ ID NO: 171489 - DNA, 25 bp, Probe Sequence
cacaaattggtgttctaaatgtctt

SEQ ID NO: 171490 - DNA, 25 bp, Probe Sequence
cacagctaacgttgttaattgcttt

SEQ ID NO: 171491 - DNA, 25 bp, Probe Sequence
cacagccaaggtttttaggttgcta

SEQ ID NO: 171492 - DNA, 25 bp, Probe Sequence
cacatctaagggattttgtttgcta

SEQ ID NO: 171493 - DNA, 25 bp, Probe Sequence
cacactacagtcatttcttttcctc

SEQ ID NO: 171494 - DNA, 25 bp, Probe Sequence
cacaccaggccaatccttgttaacc

SEQ ID NO: 171495 - DNA, 25 bp, Probe Sequence
cacaccagtggcctcgtggttataa

SEQ ID NO: 171496 - DNA, 25 bp, Probe Sequence
cacagctcagtcctgagcagcaggc

SEQ ID NO: 171497 - DNA, 25 bp, Probe Sequence
cacagctgagtccgacaaccattgg

SEQ ID NO: 171498 - DNA, 25 bp, Probe Sequence
cacagccgtccaggaactcaagcgg

SEQ ID NO: 171499 - DNA, 25 bp, Probe Sequence
cacaacttcagagcattcatcaccc

SEQ ID NO: 171500 - DNA, 25 bp, Probe Sequence
cacacacattaaatcagttagcccc

SEQ ID NO: 171501 - DNA, 25 bp, Probe Sequence
cacacgcacttatcaggaacgcctc

SEQ ID NO: 171502 - DNA, 25 bp, Probe Sequence
caaatgccatgtgccgagaactgcc

SEQ ID NO: 171503 - DNA, 25 bp, Probe Sequence
caaatcgcagagctgaggcacactg

SEQ ID NO: 171504 - DNA, 25 bp, Probe Sequence
caaaggcgagaccatggacacctcc

SEQ ID NO: 171505 - DNA, 25 bp, Probe Sequence
cacagacagcgagcgctggaaggcc

SEQ ID NO: 171506 - DNA, 25 bp, Probe Sequence
cacagacgtaaggcgtggagacagc

SEQ ID NO: 171507 - DNA, 25 bp, Probe Sequence
cacaagcggggtgcaggtgatctgc

SEQ ID NO: 171508 - DNA, 25 bp, Probe Sequence
cacaggctggtttaccatggtgatc

SEQ ID NO: 171509 - DNA, 25 bp, Probe Sequence
cacactctgggttgacccctatgaa

SEQ ID NO: 171510 - DNA, 25 bp, Probe Sequence
cacacattggtactaaaactatgaa

SEQ ID NO: 171511 - DNA, 25 bp, Probe Sequence
cacaatgtcgtgctaaataaatgta

SEQ ID NO: 171512 - DNA, 25 bp, Probe Sequence
cacacagctcttcttaaaattgaag

SEQ ID NO: 171513 - DNA, 25 bp, Probe Sequence
caaatgcagcttctatttcacctga

SEQ ID NO: 171514 - DNA, 25 bp, Probe Sequence
cacaatctgctccttttttttgtcc

SEQ ID NO: 171515 - DNA, 25 bp, Probe Sequence
cacattgctctttttgtattttcgt

SEQ ID NO: 171516 - DNA, 25 bp, Probe Sequence
cacttctgtttgttcagtttttcaa

SEQ ID NO: 171517 - DNA, 25 bp, Probe Sequence
cacttacaggtaccatttatttcaa

SEQ ID NO: 171518 - DNA, 25 bp, Probe Sequence
cacagacttcatgatcacacatgac

SEQ ID NO: 171519 - DNA, 25 bp, Probe Sequence
cacagctttatgatatcaaagactc

SEQ ID NO: 171520 - DNA, 25 bp, Probe Sequence
cacagctctatacctagaagcagcc

SEQ ID NO: 171521 - DNA, 25 bp, Probe Sequence
cacacccatccaggtgcaatgctcc

SEQ ID NO: 171522 - DNA, 25 bp, Probe Sequence
caaagtcaccaggctcaaatcgctc

SEQ ID NO: 171523 - DNA, 25 bp, Probe Sequence
caaaggcaccagtcacgaaccctgg

SEQ ID NO: 171524 - DNA, 25 bp, Probe Sequence
caaataaccatgtcaaataccctgt

SEQ ID NO: 171525 - DNA, 25 bp, Probe Sequence
caaatacccgtgtcatgaacagccg

SEQ ID NO: 171526 - DNA, 25 bp, Probe Sequence
cacaaaggcccaatcagaagccgcg

SEQ ID NO: 171527 - DNA, 25 bp, Probe Sequence
caaatactgcccgcaaagctcgcgc

SEQ ID NO: 171528 - DNA, 25 bp, Probe Sequence
caaatatcctcggaagagcgctccc

SEQ ID NO: 171529 - DNA, 25 bp, Probe Sequence
caaattgagctcggggggtcagcca

SEQ ID NO: 171530 - DNA, 25 bp, Probe Sequence
caaatatgccggacagggtgtggcc

SEQ ID NO: 171531 - DNA, 25 bp, Probe Sequence
cacaatagggagagcctgtgtgcac

SEQ ID NO: 171532 - DNA, 25 bp, Probe Sequence
cacacagagggacctacgggcagct

SEQ ID NO: 171533 - DNA, 25 bp, Probe Sequence
cacaaatgaagccttccgagccctg

SEQ ID NO: 171534 - DNA, 25 bp, Probe Sequence
cacagaatgtcaccttctcatgggc

SEQ ID NO: 171535 - DNA, 25 bp, Probe Sequence
cacactgattcccacattcatctgg

SEQ ID NO: 171536 - DNA, 25 bp, Probe Sequence
cacaagattgacagcttctgctgtg

SEQ ID NO: 171537 - DNA, 25 bp, Probe Sequence
caaagtgtacactactgatgctgtt

SEQ ID NO: 171538 - DNA, 25 bp, Probe Sequence
cacacgatgttgtcaaggatggttt

SEQ ID NO: 171539 - DNA, 25 bp, Probe Sequence
cacacgttgtatttggttgataatg

SEQ ID NO: 171540 - DNA, 25 bp, Probe Sequence
cacacgttattatggccgaaagcaa

SEQ ID NO: 171541 - DNA, 25 bp, Probe Sequence
taaccattttgacggacgacaaagg

SEQ ID NO: 171542 - DNA, 25 bp, Probe Sequence
tataccttacttccgggacgaggag

SEQ ID NO: 171543 - DNA, 25 bp, Probe Sequence
cacccttttgttgggtgaccggatg

SEQ ID NO: 171544 - DNA, 25 bp, Probe Sequence
cactttctttaatggtgacgtgaag

SEQ ID NO: 171545 - DNA, 25 bp, Probe Sequence
cactggtacgttggggaggggatgg

SEQ ID NO: 171546 - DNA, 25 bp, Probe Sequence
cacgtttgcgtctggggaggaataa

SEQ ID NO: 171547 - DNA, 25 bp, Probe Sequence
cacagtccgtgtgcggggaggtaac

SEQ ID NO: 171548 - DNA, 25 bp, Probe Sequence
cacagacctttaacggggagaagag

SEQ ID NO: 171549 - DNA, 25 bp, Probe Sequence
cacaaattcctatagggcagcagaa

SEQ ID NO: 171550 - DNA, 25 bp, Probe Sequence
cacaagaccgtcaagaggaccagat

SEQ ID NO: 171551 - DNA, 25 bp, Probe Sequence
cacagagatcccctaaggtcctggc

SEQ ID NO: 171552 - DNA, 25 bp, Probe Sequence
cacagacatccctaaaagtgccccc

SEQ ID NO: 171553 - DNA, 25 bp, Probe Sequence
cacaacacagctaacacaaggcccc

SEQ ID NO: 171554 - DNA, 25 bp, Probe Sequence
cacaatacctaactcatgtttccca

SEQ ID NO: 171555 - DNA, 25 bp, Probe Sequence
caaattgcactgtacttttcactcc

SEQ ID NO: 171556 - DNA, 25 bp, Probe Sequence
caaattggctgatctttccgttgca

SEQ ID NO: 171557 - DNA, 25 bp, Probe Sequence
caaatggcagtgtgctgtcacctgc

SEQ ID NO: 171558 - DNA, 25 bp, Probe Sequence
caaatgggctgctgcttagcttgca

SEQ ID NO: 171559 - DNA, 25 bp, Probe Sequence
caaaggatatatcctcatggctcga

SEQ ID NO: 171560 - DNA, 25 bp, Probe Sequence
caaaggatatcgtcaatgggctgag

SEQ ID NO: 171561 - DNA, 25 bp, Probe Sequence
cacaagagcaaagagatgggccagt

SEQ ID NO: 171562 - DNA, 25 bp, Probe Sequence
cacaaaccacagtagtattagcagt

SEQ ID NO: 171563 - DNA, 25 bp, Probe Sequence
cacttcccctgctggtaagagttat

SEQ ID NO: 171564 - DNA, 25 bp, Probe Sequence
caaatgccccatgcggtgagaggat

SEQ ID NO: 171565 - DNA, 25 bp, Probe Sequence
caaatcaaagattccttgagggcat

SEQ ID NO: 171566 - DNA, 25 bp, Probe Sequence
caaatgtcattgtctactcctagaa

SEQ ID NO: 171567 - DNA, 25 bp, Probe Sequence
cacactgacttatttccctaaacta

SEQ ID NO: 171568 - DNA, 25 bp, Probe Sequence
cacagtaaatcatttctcctgaaat

SEQ ID NO: 171569 - DNA, 25 bp, Probe Sequence
cacagtgatgaagattcgggaaatt

SEQ ID NO: 171570 - DNA, 25 bp, Probe Sequence
cacactgggaggtctcgcggaattg

SEQ ID NO: 171571 - DNA, 25 bp, Probe Sequence
cacactaggagatctcctcaaagaa

SEQ ID NO: 171572 - DNA, 25 bp, Probe Sequence
cacaaatatatgtgtaccaaatcaa

SEQ ID NO: 171573 - DNA, 25 bp, Probe Sequence
cacaactcaacggctacatagaaaa

SEQ ID NO: 171574 - DNA, 25 bp, Probe Sequence
cacaattcttcggatgactgcagaa

SEQ ID NO: 171575 - DNA, 25 bp, Probe Sequence
caaatcgtccgcgatgacatgctgt

SEQ ID NO: 171576 - DNA, 25 bp, Probe Sequence
caaatggtcctttcacatgtgcttt

SEQ ID NO: 171577 - DNA, 25 bp, Probe Sequence
caaaggctctgcaccaggtctttga

SEQ ID NO: 171578 - DNA, 25 bp, Probe Sequence
caaaggaatcctgcaggctcttcct

SEQ ID NO: 171579 - DNA, 25 bp, Probe Sequence
cacagggaacctgggttcttctggg

SEQ ID NO: 171580 - DNA, 25 bp, Probe Sequence
cacaggtgtcccagggtgctctgtg

SEQ ID NO: 171581 - DNA, 25 bp, Probe Sequence
cacaggtgtcccagggtgctctgtg

SEQ ID NO: 171582 - DNA, 25 bp, Probe Sequence
cacagggacttgagcggcagctccg

SEQ ID NO: 171583 - DNA, 25 bp, Probe Sequence
cacagtgcccgtgtcggagccgcgc

SEQ ID NO: 171584 - DNA, 25 bp, Probe Sequence
cacaggctacgtgttgagcgtggcc

SEQ ID NO: 171585 - DNA, 25 bp, Probe Sequence
cacagggaatggccttggcctggcc

SEQ ID NO: 171586 - DNA, 25 bp, Probe Sequence
cacagggaatggccttggcctggcc

SEQ ID NO: 171587 - DNA, 25 bp, Probe Sequence
cacaggccaagagttctgcctttga

SEQ ID NO: 171588 - DNA, 25 bp, Probe Sequence
cacagtgccaaagtatcaccctgga

SEQ ID NO: 171589 - DNA, 25 bp, Probe Sequence
cacaggtaatacaacacgccggact

SEQ ID NO: 171590 - DNA, 25 bp, Probe Sequence
cacagaataattccacaacaggaag

SEQ ID NO: 171591 - DNA, 25 bp, Probe Sequence
caaatcccattttcagagcaacaag

SEQ ID NO: 171592 - DNA, 25 bp, Probe Sequence
cacaagcctcagtaactgatgcaat

SEQ ID NO: 171593 - DNA, 25 bp, Probe Sequence
cacacgctccattgaagaggctatg

SEQ ID NO: 171594 - DNA, 25 bp, Probe Sequence
cacacactcatctgactgagggtga

SEQ ID NO: 171595 - DNA, 25 bp, Probe Sequence
cacacagcgacatcacatagtggaa

SEQ ID NO: 171596 - DNA, 25 bp, Probe Sequence
cacacacgactctaacgggattgta

SEQ ID NO: 171597 - DNA, 25 bp, Probe Sequence
cacacactgagcagtactgggaaaa

SEQ ID NO: 171598 - DNA, 25 bp, Probe Sequence
cacaattgaggacttctggcgaatg

SEQ ID NO: 171599 - DNA, 25 bp, Probe Sequence
cacagactacaggttccgcgtatgt

SEQ ID NO: 171600 - DNA, 25 bp, Probe Sequence
cacaatatagagggttggagttgtt

SEQ ID NO: 171601 - DNA, 25 bp, Probe Sequence
cacactgtagatcgtgtctgggtgc

SEQ ID NO: 171602 - DNA, 25 bp, Probe Sequence
cacactggagcatttgcgcttgcgg

SEQ ID NO: 171603 - DNA, 25 bp, Probe Sequence
cacacagcactgtttgcaatagcag

SEQ ID NO: 171604 - DNA, 25 bp, Probe Sequence
cacagcagcggctggcaaccaattc

SEQ ID NO: 171605 - DNA, 25 bp, Probe Sequence
cagcatggggcttggctccaagttc

SEQ ID NO: 171606 - DNA, 25 bp, Probe Sequence
cacagccctcgtgggcacattgtta

SEQ ID NO: 171607 - DNA, 25 bp, Probe Sequence
cacaattctgctttgatgcctttaa

SEQ ID NO: 171608 - DNA, 25 bp, Probe Sequence
caaatttttcattccttttgctctt

SEQ ID NO: 171609 - DNA, 25 bp, Probe Sequence
caaattattgtcaacttgttctctt

SEQ ID NO: 171610 - DNA, 25 bp, Probe Sequence
caaattctggcctgctgtgtacatc

SEQ ID NO: 171611 - DNA, 25 bp, Probe Sequence
caaatgcatctgtccaccttataga

SEQ ID NO: 171612 - DNA, 25 bp, Probe Sequence
cacacagcagaggcaccctcgtatg

SEQ ID NO: 171613 - DNA, 25 bp, Probe Sequence
cacagagccagctctaccgaagacc

SEQ ID NO: 171614 - DNA, 25 bp, Probe Sequence
cacatggcaagcggtaccgagtccc

SEQ ID NO: 171615 - DNA, 25 bp, Probe Sequence
cacgtaacctgcaatgtcgcttacc

SEQ ID NO: 171616 - DNA, 25 bp, Probe Sequence
cacacaaacttggtggtcctgcacc

SEQ ID NO: 171617 - DNA, 25 bp, Probe Sequence
cacaaagccaagccggctgcagctg

SEQ ID NO: 171618 - DNA, 25 bp, Probe Sequence
cacacgtgcctggtcaggctggctt

SEQ ID NO: 171619 - DNA, 25 bp, Probe Sequence
cacacagatgcggttcatggcctgc

SEQ ID NO: 171620 - DNA, 25 bp, Probe Sequence
cacaagatgcggaaatgatctctgt

SEQ ID NO: 171621 - DNA, 25 bp, Probe Sequence
cacagggggacttgatctcatcttc

SEQ ID NO: 171622 - DNA, 25 bp, Probe Sequence
cacatcttgttgactggaggcatct

SEQ ID NO: 171623 - DNA, 25 bp, Probe Sequence
cacactgcatgaatggggagaacca

SEQ ID NO: 171624 - DNA, 25 bp, Probe Sequence
cacactgctactttgtgagtaaaga

SEQ ID NO: 171625 - DNA, 25 bp, Probe Sequence
catactcacttatgttggaattaat

SEQ ID NO: 171626 - DNA, 25 bp, Probe Sequence
cacactcagtctttgttcaatggtc

SEQ ID NO: 171627 - DNA, 25 bp, Probe Sequence
cacagccagcttatagtcctagtca

SEQ ID NO: 171628 - DNA, 25 bp, Probe Sequence
cacaccagctttcagatctcactga

SEQ ID NO: 171629 - DNA, 25 bp, Probe Sequence
cacaaggctttcaagaccatcagag

SEQ ID NO: 171630 - DNA, 25 bp, Probe Sequence
cacagatgtgtgcgactacgcccag

SEQ ID NO: 171631 - DNA, 25 bp, Probe Sequence
cacagactgccggttattcactagg

SEQ ID NO: 171632 - DNA, 25 bp, Probe Sequence
cacagacccatgttaatgacctcat

SEQ ID NO: 171633 - DNA, 25 bp, Probe Sequence
cacaggcctagaggtaaccaataaa

SEQ ID NO: 171634 - DNA, 25 bp, Probe Sequence
cactggccgatgaagtaaccctgga

SEQ ID NO: 171635 - DNA, 25 bp, Probe Sequence
cacttgcccatagtgtgagccttct

SEQ ID NO: 171636 - DNA, 25 bp, Probe Sequence
cacttggctgcttgagattggttct

SEQ ID NO: 171637 - DNA, 25 bp, Probe Sequence
cacttgtctttaggtgggtctcaaa

SEQ ID NO: 171638 - DNA, 25 bp, Probe Sequence
cacacatgtctttaggtggaaattc

SEQ ID NO: 171639 - DNA, 25 bp, Probe Sequence
cacttgtcctttgggatgaaagcca

SEQ ID NO: 171640 - DNA, 25 bp, Probe Sequence
cacacggcggcttggagaaacccag

SEQ ID NO: 171641 - DNA, 25 bp, Probe Sequence
cacactgggcctagggagggctcga

SEQ ID NO: 171642 - DNA, 25 bp, Probe Sequence
cacacgcgcttcaagcaggagggtg

SEQ ID NO: 171643 - DNA, 25 bp, Probe Sequence
cacaagcgtcatgaagaggggcaca

SEQ ID NO: 171644 - DNA, 25 bp, Probe Sequence
cacaaggtgcatgccatgagagggg

SEQ ID NO: 171645 - DNA, 25 bp, Probe Sequence
cacaagtactccggcagggagggtg

SEQ ID NO: 171646 - DNA, 25 bp, Probe Sequence
cactgttactccacagcggaggaga

SEQ ID NO: 171647 - DNA, 25 bp, Probe Sequence
cctgttgtcccacacgtggggggtg

SEQ ID NO: 171648 - DNA, 25 bp, Probe Sequence
cagttctttcgatacggcttagggt

SEQ ID NO: 171649 - DNA, 25 bp, Probe Sequence
caaatcatttggaacaccctttggg

SEQ ID NO: 171650 - DNA, 25 bp, Probe Sequence
ccgtaaagagtatccctttcgatga

SEQ ID NO: 171651 - DNA, 25 bp, Probe Sequence
cactggtctaagagaccctttcaac

SEQ ID NO: 171652 - DNA, 25 bp, Probe Sequence
cactgtttagaatgacccttgggaa

SEQ ID NO: 171653 - DNA, 25 bp, Probe Sequence
cacttttaaaattatccttcaggca

SEQ ID NO: 171654 - DNA, 25 bp, Probe Sequence
cacttttttgaatcatactacggac

SEQ ID NO: 171655 - DNA, 25 bp, Probe Sequence
caaatttattagctctactacttga

SEQ ID NO: 171656 - DNA, 25 bp, Probe Sequence
caaattcttaactctgacacaattg

SEQ ID NO: 171657 - DNA, 25 bp, Probe Sequence
caaatcctatcatcaagctcacaaa

SEQ ID NO: 171658 - DNA, 25 bp, Probe Sequence
cacaatacttcagacacacaacaag

SEQ ID NO: 171659 - DNA, 25 bp, Probe Sequence
cacacagatcttgacacatcctact

SEQ ID NO: 171660 - DNA, 25 bp, Probe Sequence
cacacattctctaagaaacagcttg

SEQ ID NO: 171661 - DNA, 25 bp, Probe Sequence
cacacattttcctaagaacattcat

SEQ ID NO: 171662 - DNA, 25 bp, Probe Sequence
cacaatttctccaataattctatat

SEQ ID NO: 171663 - DNA, 25 bp, Probe Sequence
cacactcattgcactgataaggctt

SEQ ID NO: 171664 - DNA, 25 bp, Probe Sequence
cacagtctggctcatgatgtgggct

SEQ ID NO: 171665 - DNA, 25 bp, Probe Sequence
cacaagctgcctctgacagcagcct

SEQ ID NO: 171666 - DNA, 25 bp, Probe Sequence
cacactgctctccagtagcacagat

SEQ ID NO: 171667 - DNA, 25 bp, Probe Sequence
cacaagtgcagccagctcaatcaat

SEQ ID NO: 171668 - DNA, 25 bp, Probe Sequence
cacactgatgcaagactactatcag

SEQ ID NO: 171669 - DNA, 25 bp, Probe Sequence
cacactgcagtgtgccaacatcagc

SEQ ID NO: 171670 - DNA, 25 bp, Probe Sequence
cacaccgatgcacacgcacatagag

SEQ ID NO: 171671 - DNA, 25 bp, Probe Sequence
cacatccgtattactcgcatcagga

SEQ ID NO: 171672 - DNA, 25 bp, Probe Sequence
cacacctgtgttttcccatggaaat

SEQ ID NO: 171673 - DNA, 25 bp, Probe Sequence
cacaccatttcatacttcaactaat

SEQ ID NO: 171674 - DNA, 25 bp, Probe Sequence
cacagagcttttattgtcacccaaa

SEQ ID NO: 171675 - DNA, 25 bp, Probe Sequence
cacagactgtttcatcttaaccagg

SEQ ID NO: 171676 - DNA, 25 bp, Probe Sequence
cacagagtgttaaagcctccaccgt

SEQ ID NO: 171677 - DNA, 25 bp, Probe Sequence
cacaagtgattcagctgcttcctct

SEQ ID NO: 171678 - DNA, 25 bp, Probe Sequence
cacaagaagatctacatcttcctgg

SEQ ID NO: 171679 - DNA, 25 bp, Probe Sequence
cacaagcactgttgactctgcatat

SEQ ID NO: 171680 - DNA, 25 bp, Probe Sequence
cacaaccggatgtcttgattgattt

SEQ ID NO: 171681 - DNA, 25 bp, Probe Sequence
cacaaccagtgcacagtttgacagt

SEQ ID NO: 171682 - DNA, 25 bp, Probe Sequence
cacaactacacagagatttctcagc

SEQ ID NO: 171683 - DNA, 25 bp, Probe Sequence
cagaatctaagcagttttcaccccc

SEQ ID NO: 171684 - DNA, 25 bp, Probe Sequence
cagttgtaacatcttaccatttccc

SEQ ID NO: 171685 - DNA, 25 bp, Probe Sequence
cactgttttctttctacaatttcca

SEQ ID NO: 171686 - DNA, 25 bp, Probe Sequence
cacttcgtttgtgctataacctcaa

SEQ ID NO: 171687 - DNA, 25 bp, Probe Sequence
cactgacttatttccctaaactatt

SEQ ID NO: 171688 - DNA, 25 bp, Probe Sequence
cacattttttgtcctctgaaaattt

SEQ ID NO: 171689 - DNA, 25 bp, Probe Sequence
cacattttcttgatccgatccacta

SEQ ID NO: 171690 - DNA, 25 bp, Probe Sequence
cacaattactgtgtgctggacaagc

SEQ ID NO: 171691 - DNA, 25 bp, Probe Sequence
caaatacatctgccctcatggaagg

SEQ ID NO: 171692 - DNA, 25 bp, Probe Sequence
cacaaccgctgtccacatggagtga

SEQ ID NO: 171693 - DNA, 25 bp, Probe Sequence
cacagagctcctagatccttgaagt

SEQ ID NO: 171694 - DNA, 25 bp, Probe Sequence
cacacatttccaatctcttgcaagc

SEQ ID NO: 171695 - DNA, 25 bp, Probe Sequence
cacactatctacacttggagaccct

SEQ ID NO: 171696 - DNA, 25 bp, Probe Sequence
cacactgaccacatctgtagacatc

SEQ ID NO: 171697 - DNA, 25 bp, Probe Sequence
cacactagctcaccagcagtgaatc

SEQ ID NO: 171698 - DNA, 25 bp, Probe Sequence
cacacagtacagacagcatggatat

SEQ ID NO: 171699 - DNA, 25 bp, Probe Sequence
cacatatgtgcagtgtcagcaccat

SEQ ID NO: 171700 - DNA, 25 bp, Probe Sequence
cacacatcagcaccaagaccataga

SEQ ID NO: 171701 - DNA, 25 bp, Probe Sequence
cacagcagcagataagacaaacttt

SEQ ID NO: 171702 - DNA, 25 bp, Probe Sequence
cacacagaaaaggcatctcaactcc

SEQ ID NO: 171703 - DNA, 25 bp, Probe Sequence
cacacaaagaacctcctaagaccta

SEQ ID NO: 171704 - DNA, 25 bp, Probe Sequence
cacacaggaaacacgctagtgacca

SEQ ID NO: 171705 - DNA, 25 bp, Probe Sequence
cacacagagagatgccggcttctac

SEQ ID NO: 171706 - DNA, 25 bp, Probe Sequence
cacacagacatgagctgcagggcca

SEQ ID NO: 171707 - DNA, 25 bp, Probe Sequence
cacagccaatgatgtgccttctcca

SEQ ID NO: 171708 - DNA, 25 bp, Probe Sequence
cacacgcagtatgagcgcttcatcc

SEQ ID NO: 171709 - DNA, 25 bp, Probe Sequence
cacaggcagtgagagccccatcgtg

SEQ ID NO: 171710 - DNA, 25 bp, Probe Sequence
cacacgttgcagaggctgcaacagg

SEQ ID NO: 171711 - DNA, 25 bp, Probe Sequence
cacacgtgtgatctcgtcttcagtg

SEQ ID NO: 171712 - DNA, 25 bp, Probe Sequence
cacactctgaatccaaccttagctg

SEQ ID NO: 171713 - DNA, 25 bp, Probe Sequence
cacacatgtcaacaatccttactgt

SEQ ID NO: 171714 - DNA, 25 bp, Probe Sequence
cacaagtaagtgtcaccattttatg

SEQ ID NO: 171715 - DNA, 25 bp, Probe Sequence
cacagactacagcacccaggaggtg

SEQ ID NO: 171716 - DNA, 25 bp, Probe Sequence
cactactacgagcccaaggggccgg

SEQ ID NO: 171717 - DNA, 25 bp, Probe Sequence
cacaactgagggctggtggggccgg

SEQ ID NO: 171718 - DNA, 25 bp, Probe Sequence
cactttggcaggatgtctggggcct

SEQ ID NO: 171719 - DNA, 25 bp, Probe Sequence
cacttctgggtggggcagtgggtcc

SEQ ID NO: 171720 - DNA, 25 bp, Probe Sequence
cacactttggcccagggtggccaca

SEQ ID NO: 171721 - DNA, 25 bp, Probe Sequence
cacactttggcccagggtggccaca

SEQ ID NO: 171722 - DNA, 25 bp, Probe Sequence
cacaactgtggccaacgtggagaca

SEQ ID NO: 171723 - DNA, 25 bp, Probe Sequence
cacatcacagggaaacgggaggcat

SEQ ID NO: 171724 - DNA, 25 bp, Probe Sequence
cacatccgtagaaggcagcgcggcc

SEQ ID NO: 171725 - DNA, 25 bp, Probe Sequence
cacactgcttaatggccacatgcca

SEQ ID NO: 171726 - DNA, 25 bp, Probe Sequence
cacacagttccagagctaaggcaag

SEQ ID NO: 171727 - DNA, 25 bp, Probe Sequence
cacacagctccctgctgatgaagtc

SEQ ID NO: 171728 - DNA, 25 bp, Probe Sequence
cacacacacacatatatgtacatgt

SEQ ID NO: 171729 - DNA, 25 bp, Probe Sequence
cacagacagctgcaaatccagcttt

SEQ ID NO: 171730 - DNA, 25 bp, Probe Sequence
cacatcaatgtagaactcagccttc

SEQ ID NO: 171731 - DNA, 25 bp, Probe Sequence
cacatcactaaacaatcatgccagt

SEQ ID NO: 171732 - DNA, 25 bp, Probe Sequence
cactacggaacttattcacgtaact

SEQ ID NO: 171733 - DNA, 25 bp, Probe Sequence
cactctcggcaaatattagccagta

SEQ ID NO: 171734 - DNA, 25 bp, Probe Sequence
cacatccagatcatttctaggacta

SEQ ID NO: 171735 - DNA, 25 bp, Probe Sequence
cacactagaccactctttggattca

SEQ ID NO: 171736 - DNA, 25 bp, Probe Sequence
cacacatcagatgcagtcattgttg

SEQ ID NO: 171737 - DNA, 25 bp, Probe Sequence
cacctacattccatagtgggcccgt

SEQ ID NO: 171738 - DNA, 25 bp, Probe Sequence
cacacccttcaaatacaggggctgc

SEQ ID NO: 171739 - DNA, 25 bp, Probe Sequence
cacacccagtaacatccggatggca

SEQ ID NO: 171740 - DNA, 25 bp, Probe Sequence
cacattcctctagcttcctggagga

SEQ ID NO: 171741 - DNA, 25 bp, Probe Sequence
cacattcatccttgaagtccggggt

SEQ ID NO: 171742 - DNA, 25 bp, Probe Sequence
cacatgtaccgggagcgcgggggtg

SEQ ID NO: 171743 - DNA, 25 bp, Probe Sequence
cagctctaccgaagacctggggttt

SEQ ID NO: 171744 - DNA, 25 bp, Probe Sequence
cactcccttgtaacaattaggttgt

SEQ ID NO: 171745 - DNA, 25 bp, Probe Sequence
cactgctcaattctgtttttcgttt

SEQ ID NO: 171746 - DNA, 25 bp, Probe Sequence
cactccaatgatagttttcccgttt

SEQ ID NO: 171747 - DNA, 25 bp, Probe Sequence
cacttcatgtgaaaactactccagt

SEQ ID NO: 171748 - DNA, 25 bp, Probe Sequence
cactatatgagaaccgagaccttgg

SEQ ID NO: 171749 - DNA, 25 bp, Probe Sequence
cactcaataacagaaaccttggccg

SEQ ID NO: 171750 - DNA, 25 bp, Probe Sequence
cactaaaaataacacgattgcacca

SEQ ID NO: 171751 - DNA, 25 bp, Probe Sequence
cacccctggttacaggagtaccaga

SEQ ID NO: 171752 - DNA, 25 bp, Probe Sequence
ctccctcggttataaagattcccat

SEQ ID NO: 171753 - DNA, 25 bp, Probe Sequence
ccctccaagtgataaccttttccag

SEQ ID NO: 171754 - DNA, 25 bp, Probe Sequence
cacgtcccacgagacactattttcg

SEQ ID NO: 171755 - DNA, 25 bp, Probe Sequence
cacagctccccgtatcaagaaattt

SEQ ID NO: 171756 - DNA, 25 bp, Probe Sequence
cacagccgcccattctaaataagat

SEQ ID NO: 171757 - DNA, 25 bp, Probe Sequence
cactgccaagacattcaaacaaata

SEQ ID NO: 171758 - DNA, 25 bp, Probe Sequence
cacttccaacttaggaccaacctga

SEQ ID NO: 171759 - DNA, 25 bp, Probe Sequence
cacttaaacagtataaaatgcgtga

SEQ ID NO: 171760 - DNA, 25 bp, Probe Sequence
cacttaaatgccaattaaacaagaa

SEQ ID NO: 171761 - DNA, 25 bp, Probe Sequence
cacaaaggtcctactaaacaagcag

SEQ ID NO: 171762 - DNA, 25 bp, Probe Sequence
caccagaagcccacttaaacacatt

SEQ ID NO: 171763 - DNA, 25 bp, Probe Sequence
cacaaaatggaatgcttcaaccact

SEQ ID NO: 171764 - DNA, 25 bp, Probe Sequence
cacaagaagcgtgagacgccaccat

SEQ ID NO: 171765 - DNA, 25 bp, Probe Sequence
cacacaatacttcagacacacaaca

SEQ ID NO: 171766 - DNA, 25 bp, Probe Sequence
caaattgagctctggcatcacctac

SEQ ID NO: 171767 - DNA, 25 bp, Probe Sequence
cacaatggcacttactgtgcaccaa

SEQ ID NO: 171768 - DNA, 25 bp, Probe Sequence
cacaagatgacattggtgatacaat

SEQ ID NO: 171769 - DNA, 25 bp, Probe Sequence
cacacagcatgtaatggtatcttaa

SEQ ID NO: 171770 - DNA, 25 bp, Probe Sequence
cacacatcttcttggtcttgcataa

SEQ ID NO: 171771 - DNA, 25 bp, Probe Sequence
cacagatctgtttcgtgcattggaa

SEQ ID NO: 171772 - DNA, 25 bp, Probe Sequence
cacagctcattttagagctctgtac

SEQ ID NO: 171773 - DNA, 25 bp, Probe Sequence
cacacatatgtttattgcagcacta

SEQ ID NO: 171774 - DNA, 25 bp, Probe Sequence
cacaattatctgtacgcagcctgcg

SEQ ID NO: 171775 - DNA, 25 bp, Probe Sequence
cacaaatatgtcttcactcctgatg

SEQ ID NO: 171776 - DNA, 25 bp, Probe Sequence
cacaaatatgtcttcactcctgatg

SEQ ID NO: 171777 - DNA, 25 bp, Probe Sequence
cacagatttgagctcagccctggtg

SEQ ID NO: 171778 - DNA, 25 bp, Probe Sequence
cacagctttgtcgtcagggatgggg

SEQ ID NO: 171779 - DNA, 25 bp, Probe Sequence
cacagcccttcctagggtgtggaga

SEQ ID NO: 171780 - DNA, 25 bp, Probe Sequence
cacatgcacctcactagggtttgtg

SEQ ID NO: 171781 - DNA, 25 bp, Probe Sequence
cacagcacccagagcagggattcta

SEQ ID NO: 171782 - DNA, 25 bp, Probe Sequence
cacagacaccacaacaggagactta

SEQ ID NO: 171783 - DNA, 25 bp, Probe Sequence
cacacacccacagagagagagctgc

SEQ ID NO: 171784 - DNA, 25 bp, Probe Sequence
cacccccaggaagcatggatgggga

SEQ ID NO: 171785 - DNA, 25 bp, Probe Sequence
cacacaccggagcctgttggtgggg

SEQ ID NO: 171786 - DNA, 25 bp, Probe Sequence
cacactcaactactgcgtatggcgg

SEQ ID NO: 171787 - DNA, 25 bp, Probe Sequence
cacactcatagctgtagattacgtg

SEQ ID NO: 171788 - DNA, 25 bp, Probe Sequence
cacttaacactttgattagccatga

SEQ ID NO: 171789 - DNA, 25 bp, Probe Sequence
cacatgaaacctcctaatgacctgg

SEQ ID NO: 171790 - DNA, 25 bp, Probe Sequence
cacagataagcctgaaacagcctct

SEQ ID NO: 171791 - DNA, 25 bp, Probe Sequence
cacaagaggccgcagagaagactat

SEQ ID NO: 171792 - DNA, 25 bp, Probe Sequence
cactcataagcgggaactaagctat

SEQ ID NO: 171793 - DNA, 25 bp, Probe Sequence
cacactcatagctgaaaattactta

SEQ ID NO: 171794 - DNA, 25 bp, Probe Sequence
cacatccaagtgcacagaaccattt

SEQ ID NO: 171795 - DNA, 25 bp, Probe Sequence
cacattaaatgttgcaaacgtctgc

SEQ ID NO: 171796 - DNA, 25 bp, Probe Sequence
cacttgaattggtcctatttctctt

SEQ ID NO: 171797 - DNA, 25 bp, Probe Sequence
cactacacattcctttagtcttcct

SEQ ID NO: 171798 - DNA, 25 bp, Probe Sequence
cactaacttgtgcattgactaatgg

SEQ ID NO: 171799 - DNA, 25 bp, Probe Sequence
cactaacttgtgcattgactaatgg

SEQ ID NO: 171800 - DNA, 25 bp, Probe Sequence
cactaacttgtgcattgactaatgg

SEQ ID NO: 171801 - DNA, 25 bp, Probe Sequence
cactagactactcttttgcaaggta

SEQ ID NO: 171802 - DNA, 25 bp, Probe Sequence
cactagtccctcttattcatgtggg

SEQ ID NO: 171803 - DNA, 25 bp, Probe Sequence
cactacatcccctgactaagggaaa

SEQ ID NO: 171804 - DNA, 25 bp, Probe Sequence
cactggcatcgtgatggactccggt

SEQ ID NO: 171805 - DNA, 25 bp, Probe Sequence
cactatgtctgggttgacctaggcc

SEQ ID NO: 171806 - DNA, 25 bp, Probe Sequence
cacttctcatgtggttgaaccagtg

SEQ ID NO: 171807 - DNA, 25 bp, Probe Sequence
cacattcctgtttgtaatccttggt

SEQ ID NO: 171808 - DNA, 25 bp, Probe Sequence
cacttcctaatactataccttcggg

SEQ ID NO: 171809 - DNA, 25 bp, Probe Sequence
cacttccaaaagattgttgtaggat

SEQ ID NO: 171810 - DNA, 25 bp, Probe Sequence
cacattaaaacgatttgcccagcta

SEQ ID NO: 171811 - DNA, 25 bp, Probe Sequence
cactgtaagaacctggagcccaagt

SEQ ID NO: 171812 - DNA, 25 bp, Probe Sequence
cacaggaaacagctatgaccattag

SEQ ID NO: 171813 - DNA, 25 bp, Probe Sequence
cacaggtaacaggctatgaccctta

SEQ ID NO: 171814 - DNA, 25 bp, Probe Sequence
cacaggggacagctatgacccctag

SEQ ID NO: 171815 - DNA, 25 bp, Probe Sequence
cacgggggcaagtgacagccctggt

SEQ ID NO: 171816 - DNA, 25 bp, Probe Sequence
catagcgagtgtcagggacggccgg

SEQ ID NO: 171817 - DNA, 25 bp, Probe Sequence
cacaagagggaagagcaccgccggg

SEQ ID NO: 171818 - DNA, 25 bp, Probe Sequence
cacagagggcaggagcacagacccc

SEQ ID NO: 171819 - DNA, 25 bp, Probe Sequence
cacaagggcgactatcagccacaca

SEQ ID NO: 171820 - DNA, 25 bp, Probe Sequence
cactgctggggagtccctgccacac

SEQ ID NO: 171821 - DNA, 25 bp, Probe Sequence
cactctgagggactcttctgcatat

SEQ ID NO: 171822 - DNA, 25 bp, Probe Sequence
cactctcaggagaccattgcatcat

SEQ ID NO: 171823 - DNA, 25 bp, Probe Sequence
cacacataggagaccagccactaac

SEQ ID NO: 171824 - DNA, 25 bp, Probe Sequence
cacattcgaagaacccgtatacata

SEQ ID NO: 171825 - DNA, 25 bp, Probe Sequence
cacatgtggaagaacctttaatcag

SEQ ID NO: 171826 - DNA, 25 bp, Probe Sequence
cagaaggaactaccatttaatattt

SEQ ID NO: 171827 - DNA, 25 bp, Probe Sequence
cacaagaacaatctttgctataatt

SEQ ID NO: 171828 - DNA, 25 bp, Probe Sequence
cacatttaccagcatactccaaact

SEQ ID NO: 171829 - DNA, 25 bp, Probe Sequence
cacatttattcagatactccccttt

SEQ ID NO: 171830 - DNA, 25 bp, Probe Sequence
cacactatcatttatatctcacccc

SEQ ID NO: 171831 - DNA, 25 bp, Probe Sequence
cacattcatagcctgtagtgccccc

SEQ ID NO: 171832 - DNA, 25 bp, Probe Sequence
cacagtgctgtctggcggcaccacc

SEQ ID NO: 171833 - DNA, 25 bp, Probe Sequence
cacgagattcaaagcaacaccacca

SEQ ID NO: 171834 - DNA, 25 bp, Probe Sequence
cacagcagatttagagagactccag

SEQ ID NO: 171835 - DNA, 25 bp, Probe Sequence
cacacatgtctaccgaggtctcaga

SEQ ID NO: 171836 - DNA, 25 bp, Probe Sequence
cacacatgggattctctggtcacag

SEQ ID NO: 171837 - DNA, 25 bp, Probe Sequence
cacacatgggattctctggtcacag

SEQ ID NO: 171838 - DNA, 25 bp, Probe Sequence
cacactggtgtttctgcgagaatgg

SEQ ID NO: 171839 - DNA, 25 bp, Probe Sequence
cacactctactcactggctgaatgt

SEQ ID NO: 171840 - DNA, 25 bp, Probe Sequence
cacagcctcctgactccaggaagag

SEQ ID NO: 171841 - DNA, 25 bp, Probe Sequence
cacagcccgaatccgggacacactt

SEQ ID NO: 171842 - DNA, 25 bp, Probe Sequence
cacaccctgccataggggcagtcct

SEQ ID NO: 171843 - DNA, 25 bp, Probe Sequence
cacactctcttcttgagggtggact

SEQ ID NO: 171844 - DNA, 25 bp, Probe Sequence
cacagtgtcactgtggaattgtgac

SEQ ID NO: 171845 - DNA, 25 bp, Probe Sequence
cacacttcactgtggatctgatgga

SEQ ID NO: 171846 - DNA, 25 bp, Probe Sequence
cacagcttcctgaggatctgtttaa

SEQ ID NO: 171847 - DNA, 25 bp, Probe Sequence
cacagcttcctcatgaacttttcta

SEQ ID NO: 171848 - DNA, 25 bp, Probe Sequence
cacagatttctatgcacctttactc

SEQ ID NO: 171849 - DNA, 25 bp, Probe Sequence
cacagatttcagcgagcctttcagc

SEQ ID NO: 171850 - DNA, 25 bp, Probe Sequence
cacacctatagggagtttatctgag

SEQ ID NO: 171851 - DNA, 25 bp, Probe Sequence
cacactttcagtcatgtctagagga

SEQ ID NO: 171852 - DNA, 25 bp, Probe Sequence
cacactctagcattgccatctcaaa

SEQ ID NO: 171853 - DNA, 25 bp, Probe Sequence
cacacgtacattgactgcagcacta

SEQ ID NO: 171854 - DNA, 25 bp, Probe Sequence
cacactggcagcatcaacagcacag

SEQ ID NO: 171855 - DNA, 25 bp, Probe Sequence
cacactgagcacccagagacagcgg

SEQ ID NO: 171856 - DNA, 25 bp, Probe Sequence
cacactgagcacccagagacagcgg

SEQ ID NO: 171857 - DNA, 25 bp, Probe Sequence
cacagctgcactggcaagaaaatgg

SEQ ID NO: 171858 - DNA, 25 bp, Probe Sequence
cacaggccttccgaaaatgcgcggc

SEQ ID NO: 171859 - DNA, 25 bp, Probe Sequence
cacagtcctctccgattatgtgggc

SEQ ID NO: 171860 - DNA, 25 bp, Probe Sequence
cacagcccagtttgttcatgtcagt

SEQ ID NO: 171861 - DNA, 25 bp, Probe Sequence
cacagcccatgcatttgtaataatc

SEQ ID NO: 171862 - DNA, 25 bp, Probe Sequence
cacagccgtatttttggacattcag

SEQ ID NO: 171863 - DNA, 25 bp, Probe Sequence
cactcccaatttctgaggtccagcc

SEQ ID NO: 171864 - DNA, 25 bp, Probe Sequence
cactatcatagatttcttaggtaaa

SEQ ID NO: 171865 - DNA, 25 bp, Probe Sequence
cactaatgacagtccatgattcgga

SEQ ID NO: 171866 - DNA, 25 bp, Probe Sequence
cagctgaagtactacaactccgacg

SEQ ID NO: 171867 - DNA, 25 bp, Probe Sequence
cactaagtccgtggataccagaccc

SEQ ID NO: 171868 - DNA, 25 bp, Probe Sequence
cactaaggccgtgtctctgaggacg

SEQ ID NO: 171869 - DNA, 25 bp, Probe Sequence
cacaaagagcttgctccctacgatg

SEQ ID NO: 171870 - DNA, 25 bp, Probe Sequence
cacaaaggtgctgcttttacaggga

SEQ ID NO: 171871 - DNA, 25 bp, Probe Sequence
cacaaagtttctctttactgccaca

SEQ ID NO: 171872 - DNA, 25 bp, Probe Sequence
cacaaagaacctcctaagacctaca

SEQ ID NO: 171873 - DNA, 25 bp, Probe Sequence
cacaaataacctttgcaaaccttca

SEQ ID NO: 171874 - DNA, 25 bp, Probe Sequence
cacaaataacctttgcaaaccttca

SEQ ID NO: 171875 - DNA, 25 bp, Probe Sequence
cacaacaacaacaacaaaaagcttc

SEQ ID NO: 171876 - DNA, 25 bp, Probe Sequence
cacaaaacccgctacagacaagctt

SEQ ID NO: 171877 - DNA, 25 bp, Probe Sequence
cacaaaaaccaccacaccaaatgct

SEQ ID NO: 171878 - DNA, 25 bp, Probe Sequence
cacaaaaaccaccacaccaaatgct

SEQ ID NO: 171879 - DNA, 25 bp, Probe Sequence
cacagagtaccctccctatatatgt

SEQ ID NO: 171880 - DNA, 25 bp, Probe Sequence
cacagggtccgtgtctttgtatatt

SEQ ID NO: 171881 - DNA, 25 bp, Probe Sequence
cactaggccagttttgttatgtttt

SEQ ID NO: 171882 - DNA, 25 bp, Probe Sequence
cacttaccagtctgattttatcgtc

SEQ ID NO: 171883 - DNA, 25 bp, Probe Sequence
cactaacctgtcacttgttgggagc

SEQ ID NO: 171884 - DNA, 25 bp, Probe Sequence
cactagaacttccctgtgtgctgtg

SEQ ID NO: 171885 - DNA, 25 bp, Probe Sequence
cactagaacttccctgtgtgctgtg

SEQ ID NO: 171886 - DNA, 25 bp, Probe Sequence
cacattgaagttgtgtgcagtggct

SEQ ID NO: 171887 - DNA, 25 bp, Probe Sequence
cacaggggtgtttgtgtgtgtgcgc

SEQ ID NO: 171888 - DNA, 25 bp, Probe Sequence
cacagtgggtggtgagttctgacta

SEQ ID NO: 171889 - DNA, 25 bp, Probe Sequence
cacagttgaggggaactttgccagc

SEQ ID NO: 171890 - DNA, 25 bp, Probe Sequence
cacagttgagaggccacccattgcc

SEQ ID NO: 171891 - DNA, 25 bp, Probe Sequence
cacagctatgagtcccttcgtgtga

SEQ ID NO: 171892 - DNA, 25 bp, Probe Sequence
cacagctttaccagcatctgttgtt

SEQ ID NO: 171893 - DNA, 25 bp, Probe Sequence
cacactttacccaagtcgtattctt

SEQ ID NO: 171894 - DNA, 25 bp, Probe Sequence
cacaccttaacatgaacagatattc

SEQ ID NO: 171895 - DNA, 25 bp, Probe Sequence
cacacctttcacaagggcaaacttt

SEQ ID NO: 171896 - DNA, 25 bp, Probe Sequence
cacaccttacacgaatggtaatgaa

SEQ ID NO: 171897 - DNA, 25 bp, Probe Sequence
cacaccttatccgacaccaaagaat

SEQ ID NO: 171898 - DNA, 25 bp, Probe Sequence
cacacctttgactacaactgcagaa

SEQ ID NO: 171899 - DNA, 25 bp, Probe Sequence
cacagttattaaccagactcagaaa

SEQ ID NO: 171900 - DNA, 25 bp, Probe Sequence
cacaggcttcagtacctgaccagta

SEQ ID NO: 171901 - DNA, 25 bp, Probe Sequence
cacggatatcagcatcctgtccttg

SEQ ID NO: 171902 - DNA, 25 bp, Probe Sequence
cacagttgatacgttctgctccatt

SEQ ID NO: 171903 - DNA, 25 bp, Probe Sequence
cacagttgtgagggctcctctgcat

SEQ ID NO: 171904 - DNA, 25 bp, Probe Sequence
cacagttgtgagggctcctctgcat

SEQ ID NO: 171905 - DNA, 25 bp, Probe Sequence
cacaccatgataaggacgctgctgc

SEQ ID NO: 171906 - DNA, 25 bp, Probe Sequence
cacacaagcaggatgacgctggctg

SEQ ID NO: 171907 - DNA, 25 bp, Probe Sequence
cacacaagcaggatgacgctggctg

SEQ ID NO: 171908 - DNA, 25 bp, Probe Sequence
cacacaatcaggatgacgctggcca

SEQ ID NO: 171909 - DNA, 25 bp, Probe Sequence
cacacgacagagatgcaggggccag

SEQ ID NO: 171910 - DNA, 25 bp, Probe Sequence
cacactgtcccttgcaaggtgacag

SEQ ID NO: 171911 - DNA, 25 bp, Probe Sequence
cacacgctgcgccggaagtgtgaac

SEQ ID NO: 171912 - DNA, 25 bp, Probe Sequence
cacacagtgcgcagaaaggcaggag

SEQ ID NO: 171913 - DNA, 25 bp, Probe Sequence
cacacagttcaaggcagaggtgcgg

SEQ ID NO: 171914 - DNA, 25 bp, Probe Sequence
cacacaatgtcatcccggatctgta

SEQ ID NO: 171915 - DNA, 25 bp, Probe Sequence
cacacggtccccgggagcatgaatg

SEQ ID NO: 171916 - DNA, 25 bp, Probe Sequence
cacagggctgcagcccggagaggag

SEQ ID NO: 171917 - DNA, 25 bp, Probe Sequence
cacggagctgatgcatcccgtgggt

SEQ ID NO: 171918 - DNA, 25 bp, Probe Sequence
ccgtgtcatgaacagccggggtatg

SEQ ID NO: 171919 - DNA, 25 bp, Probe Sequence
caccgattacagaacccgggtcagc

SEQ ID NO: 171920 - DNA, 25 bp, Probe Sequence
cacccattgaagtctccttgggcca

SEQ ID NO: 171921 - DNA, 25 bp, Probe Sequence
cactaatggaagctgcctctggtgg

SEQ ID NO: 171922 - DNA, 25 bp, Probe Sequence
cacatacggaatggccatattttct

SEQ ID NO: 171923 - DNA, 25 bp, Probe Sequence
cacaccaggaatggcaatgcaattc

SEQ ID NO: 171924 - DNA, 25 bp, Probe Sequence
cacacttgtaatcccagcaatttgg

SEQ ID NO: 171925 - DNA, 25 bp, Probe Sequence
cacatggatggaacatacaaatttt

SEQ ID NO: 171926 - DNA, 25 bp, Probe Sequence
cacatggcattgaggactgagtttc

SEQ ID NO: 171927 - DNA, 25 bp, Probe Sequence
cacaggcatatatggtgctggttgt

SEQ ID NO: 171928 - DNA, 25 bp, Probe Sequence
cacagccatgaagatatgctggttg

SEQ ID NO: 171929 - DNA, 25 bp, Probe Sequence
cacagccaagtgcctatgctttgtt

SEQ ID NO: 171930 - DNA, 25 bp, Probe Sequence
cacagccaagtgcctatgctttgtt

SEQ ID NO: 171931 - DNA, 25 bp, Probe Sequence
cacacagaatgggctggtttctttc

SEQ ID NO: 171932 - DNA, 25 bp, Probe Sequence
cacacaggcatgcgtgtgtatgtgc

SEQ ID NO: 171933 - DNA, 25 bp, Probe Sequence
cacacaggcatgagggatggcccgg

SEQ ID NO: 171934 - DNA, 25 bp, Probe Sequence
cactgaagataagggaagcccccgg

SEQ ID NO: 171935 - DNA, 25 bp, Probe Sequence
cactgggaacaacacagccgtccag

SEQ ID NO: 171936 - DNA, 25 bp, Probe Sequence
cactgggtacatgcaaatactccct

SEQ ID NO: 171937 - DNA, 25 bp, Probe Sequence
cacttgctgtaaatctactactaaa

SEQ ID NO: 171938 - DNA, 25 bp, Probe Sequence
cacttcctacaaaactattgcataa

SEQ ID NO: 171939 - DNA, 25 bp, Probe Sequence
cacttcgcccacacaggacagtgga

SEQ ID NO: 171940 - DNA, 25 bp, Probe Sequence
cagtatgaccgctcagggaacctgc

SEQ ID NO: 171941 - DNA, 25 bp, Probe Sequence
cacagagcccgcaaggcaggaaccc

SEQ ID NO: 171942 - DNA, 25 bp, Probe Sequence
cacaggacccactgaggagatccgg

SEQ ID NO: 171943 - DNA, 25 bp, Probe Sequence
cacagacccacatgtgggtgggggg

SEQ ID NO: 171944 - DNA, 25 bp, Probe Sequence
cagagaagactatgttggtgggcaa

SEQ ID NO: 171945 - DNA, 25 bp, Probe Sequence
cttaaaccggcattgtattccaaag

SEQ ID NO: 171946 - DNA, 25 bp, Probe Sequence
cactaaaacccttggttctctctag

SEQ ID NO: 171947 - DNA, 25 bp, Probe Sequence
cacattaattccctttgctatactg

SEQ ID NO: 171948 - DNA, 25 bp, Probe Sequence
cacatctgaaattccttttgacacc

SEQ ID NO: 171949 - DNA, 25 bp, Probe Sequence
cacagtcagaataggtttttcacac

SEQ ID NO: 171950 - DNA, 25 bp, Probe Sequence
cacagacagaacagttctttcttcc

SEQ ID NO: 171951 - DNA, 25 bp, Probe Sequence
cacatgccggccagttaattcattc

SEQ ID NO: 171952 - DNA, 25 bp, Probe Sequence
cacactcgagctctctttacattgt

SEQ ID NO: 171953 - DNA, 25 bp, Probe Sequence
cacaggtagcgcccttttattcttg

SEQ ID NO: 171954 - DNA, 25 bp, Probe Sequence
cacaggcctccctgtttgaagcctg

SEQ ID NO: 171955 - DNA, 25 bp, Probe Sequence
cacaggcctccctgtttgaagcctg

SEQ ID NO: 171956 - DNA, 25 bp, Probe Sequence
cacactggggcctgttgtggggtgg

SEQ ID NO: 171957 - DNA, 25 bp, Probe Sequence
cacaccggaccatgtcatgtcctgc

SEQ ID NO: 171958 - DNA, 25 bp, Probe Sequence
cacacagggaacagctatgaccatt

SEQ ID NO: 171959 - DNA, 25 bp, Probe Sequence
cacacaggaaacagctatgaccatt

SEQ ID NO: 171960 - DNA, 25 bp, Probe Sequence
cacacaggaaacagctatgaccatt

SEQ ID NO: 171961 - DNA, 25 bp, Probe Sequence
cacacaggaaacagctatgaccatt

SEQ ID NO: 171962 - DNA, 25 bp, Probe Sequence
cacacaggaaacagctatgaccatt

SEQ ID NO: 171963 - DNA, 25 bp, Probe Sequence
cacacaggaaacagctatgaccatt

SEQ ID NO: 171964 - DNA, 25 bp, Probe Sequence
cacacaggaaacagctatgaccatt

SEQ ID NO: 171965 - DNA, 25 bp, Probe Sequence
cacacaggaaacagctatgaccatt

SEQ ID NO: 171966 - DNA, 25 bp, Probe Sequence
cacacaggaaacagctatgaccatt

SEQ ID NO: 171967 - DNA, 25 bp, Probe Sequence
cacacaggaaacagctatgaccatt

SEQ ID NO: 171968 - DNA, 25 bp, Probe Sequence
cacacaggaaacagctatgaccatt

SEQ ID NO: 171969 - DNA, 25 bp, Probe Sequence
cacacaggaaacagctatgaccatt

SEQ ID NO: 171970 - DNA, 25 bp, Probe Sequence
cacacaggaaacagctatgaccatt

SEQ ID NO: 171971 - DNA, 25 bp, Probe Sequence
cacacaggaaacagctatgaccatt

SEQ ID NO: 171972 - DNA, 25 bp, Probe Sequence
cacacaggaaacagctatgaccatt

SEQ ID NO: 171973 - DNA, 25 bp, Probe Sequence
cacacaggaaacagctatgaccatt

SEQ ID NO: 171974 - DNA, 25 bp, Probe Sequence
cacacaggaaacagctatgaccatt

SEQ ID NO: 171975 - DNA, 25 bp, Probe Sequence
cacagcggaagaccatctcagactc

SEQ ID NO: 171976 - DNA, 25 bp, Probe Sequence
cacagcggaagaccatctcagactc

SEQ ID NO: 171977 - DNA, 25 bp, Probe Sequence
cacactccaaagacggcagactcac

SEQ ID NO: 171978 - DNA, 25 bp, Probe Sequence
cacatcccagatgacgtgaacatca

SEQ ID NO: 171979 - DNA, 25 bp, Probe Sequence
cacagcctcgatgacagaatgacac

SEQ ID NO: 171980 - DNA, 25 bp, Probe Sequence
cacattgccgactgatgaagacagc

SEQ ID NO: 171981 - DNA, 25 bp, Probe Sequence
cacttccaaaaacggcagcactttt

SEQ ID NO: 171982 - DNA, 25 bp, Probe Sequence
cactttcaagaatcagacagcagga

SEQ ID NO: 171983 - DNA, 25 bp, Probe Sequence
cacttttacaagccgcaaaggcagc

SEQ ID NO: 171984 - DNA, 25 bp, Probe Sequence
cacgtgattgaccacaccaaggggc

SEQ ID NO: 171985 - DNA, 25 bp, Probe Sequence
cacccatgggcccaccaattgggct

SEQ ID NO: 171986 - DNA, 25 bp, Probe Sequence
cacactcagggatcaccacattgtc

SEQ ID NO: 171987 - DNA, 25 bp, Probe Sequence
cacacgggtatcatcttctatgctc

SEQ ID NO: 171988 - DNA, 25 bp, Probe Sequence
cacagatggtgcaatactttccttc

SEQ ID NO: 171989 - DNA, 25 bp, Probe Sequence
cacagctgtccaagactttccattt

SEQ ID NO: 171990 - DNA, 25 bp, Probe Sequence
cacactgtccaggccttaactgaga

SEQ ID NO: 171991 - DNA, 25 bp, Probe Sequence
cacatgccatacttccggaagcgga

SEQ ID NO: 171992 - DNA, 25 bp, Probe Sequence
cacatgccttaaggggaccgtggcc

SEQ ID NO: 171993 - DNA, 25 bp, Probe Sequence
cacatccattaagatggctcctgtg

SEQ ID NO: 171994 - DNA, 25 bp, Probe Sequence
cacaccattaacaagatgagccttg

SEQ ID NO: 171995 - DNA, 25 bp, Probe Sequence
cacattttccaacatgagcctcatg

SEQ ID NO: 171996 - DNA, 25 bp, Probe Sequence
cacaggaatccaagaagagcaccag

SEQ ID NO: 171997 - DNA, 25 bp, Probe Sequence
cacagagacatcggggtgcccgcga

SEQ ID NO: 171998 - DNA, 25 bp, Probe Sequence
cacacgactctgcggagaagctgcc

SEQ ID NO: 171999 - DNA, 25 bp, Probe Sequence
cacaccctgggggagaacatcgccg

SEQ ID NO: 172000 - DNA, 25 bp, Probe Sequence
cacacctctgagggagagactgctc

SEQ ID NO: 172001 - DNA, 25 bp, Probe Sequence
cacagtatctgaagaggcagacttc

SEQ ID NO: 172002 - DNA, 25 bp, Probe Sequence
cacagtcactgaagcaggccctgtt

SEQ ID NO: 172003 - DNA, 25 bp, Probe Sequence
cacatgtcgcagcatggtggccgtg

SEQ ID NO: 172004 - DNA, 25 bp, Probe Sequence
cacattgtaccatgtgagccagttc

SEQ ID NO: 172005 - DNA, 25 bp, Probe Sequence
cacagatcttcctgtcagcgttttt

SEQ ID NO: 172006 - DNA, 25 bp, Probe Sequence
cacagttatcctttcacagtgttcc

SEQ ID NO: 172007 - DNA, 25 bp, Probe Sequence
cacgttaccttgacacatagttttt

SEQ ID NO: 172008 - DNA, 25 bp, Probe Sequence
cacgtgctatccagtaatatactta

SEQ ID NO: 172009 - DNA, 25 bp, Probe Sequence
cacagttgcagcctggaaaaactta

SEQ ID NO: 172010 - DNA, 25 bp, Probe Sequence
cacagactgccgcctgacaaacggc

SEQ ID NO: 172011 - DNA, 25 bp, Probe Sequence
cacactcatggccgggaaatgctgg

SEQ ID NO: 172012 - DNA, 25 bp, Probe Sequence
cacagccaggcctggagcgaggtgc

SEQ ID NO: 172013 - DNA, 25 bp, Probe Sequence
cacaggcaggacgggcgtggtctgc

SEQ ID NO: 172014 - DNA, 25 bp, Probe Sequence
cacgaacgagctggagggaatctgc

SEQ ID NO: 172015 - DNA, 25 bp, Probe Sequence
cacagaatcgggggactggaccacc

SEQ ID NO: 172016 - DNA, 25 bp, Probe Sequence
cacaggatggggcaagctctggcac

SEQ ID NO: 172017 - DNA, 25 bp, Probe Sequence
cacactggggagagatgatctgaca

SEQ ID NO: 172018 - DNA, 25 bp, Probe Sequence
cacactttcactgggatgttgtcag

SEQ ID NO: 172019 - DNA, 25 bp, Probe Sequence
cacactgttacaatggattttagag

SEQ ID NO: 172020 - DNA, 25 bp, Probe Sequence
cacattggcccttggattgttcgga

SEQ ID NO: 172021 - DNA, 25 bp, Probe Sequence
cacatttgggactgcatttctggaa

SEQ ID NO: 172022 - DNA, 25 bp, Probe Sequence
cacagtggagcgaattcctttggaa

SEQ ID NO: 172023 - DNA, 25 bp, Probe Sequence
cacagtgcaagcaaacacctttgaa

SEQ ID NO: 172024 - DNA, 25 bp, Probe Sequence
cacagtcacgcaaacacacactaat

SEQ ID NO: 172025 - DNA, 25 bp, Probe Sequence
cacatatacacgaatagacatcaaa

SEQ ID NO: 172026 - DNA, 25 bp, Probe Sequence
cacatgcacacgtacattgactgca

SEQ ID NO: 172027 - DNA, 25 bp, Probe Sequence
cacagcagcacgccagataactcag

SEQ ID NO: 172028 - DNA, 25 bp, Probe Sequence
cacagagcacatcctgaaagacaag

SEQ ID NO: 172029 - DNA, 25 bp, Probe Sequence
cacagcatgtatctgacttgaagga

SEQ ID NO: 172030 - DNA, 25 bp, Probe Sequence
cacagctgacatcatacctaatggc

SEQ ID NO: 172031 - DNA, 25 bp, Probe Sequence
cacagttgcggttgctctttgggat

SEQ ID NO: 172032 - DNA, 25 bp, Probe Sequence
cacatgttcaaggcccattctggtt

SEQ ID NO: 172033 - DNA, 25 bp, Probe Sequence
tattcctcctgctcatattgtgatt

SEQ ID NO: 172034 - DNA, 25 bp, Probe Sequence
cacagctctcacctagactttggag

SEQ ID NO: 172035 - DNA, 25 bp, Probe Sequence
cacagctcttcttaaaattgaaggt

SEQ ID NO: 172036 - DNA, 25 bp, Probe Sequence
cacaggcttcttgactacgtagttg

SEQ ID NO: 172037 - DNA, 25 bp, Probe Sequence
cacagaacctatctactcgttgttg

SEQ ID NO: 172038 - DNA, 25 bp, Probe Sequence
cacataaccttattcctggtcttta

SEQ ID NO: 172039 - DNA, 25 bp, Probe Sequence
cacttcaccttaatgggtcttgtct

SEQ ID NO: 172040 - DNA, 25 bp, Probe Sequence
cacattccctccttaggaatcttcc

SEQ ID NO: 172041 - DNA, 25 bp, Probe Sequence
cactcccctagaaagtaaatctcct

SEQ ID NO: 172042 - DNA, 25 bp, Probe Sequence
cacaggcccggggcattcaaagctg

SEQ ID NO: 172043 - DNA, 25 bp, Probe Sequence
cacagggcactgaggggcaacaggg

SEQ ID NO: 172044 - DNA, 25 bp, Probe Sequence
cacagccccagctggggcaaacagc

SEQ ID NO: 172045 - DNA, 25 bp, Probe Sequence
cacactccagcctgggcaacaagag

SEQ ID NO: 172046 - DNA, 25 bp, Probe Sequence
cacagctccacgaagactcaaaagg

SEQ ID NO: 172047 - DNA, 25 bp, Probe Sequence
cacaggccaggtaagtacacgagaa

SEQ ID NO: 172048 - DNA, 25 bp, Probe Sequence
caggtgacagggagcttcccttacc

SEQ ID NO: 172049 - DNA, 25 bp, Probe Sequence
cacttagcggaaagcttcctcttcc

SEQ ID NO: 172050 - DNA, 25 bp, Probe Sequence
cactctagagtaatgatggtccctg

SEQ ID NO: 172051 - DNA, 25 bp, Probe Sequence
cactttgatgtcatgtgttcccttt

SEQ ID NO: 172052 - DNA, 25 bp, Probe Sequence
cactttgttcttgtactagctatgt

SEQ ID NO: 172053 - DNA, 25 bp, Probe Sequence
cactttctttgtttatgtcagtaat

SEQ ID NO: 172054 - DNA, 25 bp, Probe Sequence
cacatttttgtgttacagtcattga

SEQ ID NO: 172055 - DNA, 25 bp, Probe Sequence
cacagatttctgtttacccatggaa

SEQ ID NO: 172056 - DNA, 25 bp, Probe Sequence
cacagcttatcatgaatccctagag

SEQ ID NO: 172057 - DNA, 25 bp, Probe Sequence
cacagcctccatggatctaattaga

SEQ ID NO: 172058 - DNA, 25 bp, Probe Sequence
cacaccaatcggtcttgatcttaca

SEQ ID NO: 172059 - DNA, 25 bp, Probe Sequence
cacatccctaggttgtgtgcttaga

SEQ ID NO: 172060 - DNA, 25 bp, Probe Sequence
cacatcctgctaagacgtttaaaac

SEQ ID NO: 172061 - DNA, 25 bp, Probe Sequence
cacacctgcaaagtctgttctgcca

SEQ ID NO: 172062 - DNA, 25 bp, Probe Sequence
cactgcctgaaaggtttgtacagat

SEQ ID NO: 172063 - DNA, 25 bp, Probe Sequence
cacttgtgaaattctcttgtctaat

SEQ ID NO: 172064 - DNA, 25 bp, Probe Sequence
cactttgcaactccctgggtaagag

SEQ ID NO: 172065 - DNA, 25 bp, Probe Sequence
cacagaagcaacacagctgggaaag

SEQ ID NO: 172066 - DNA, 25 bp, Probe Sequence
cacaggagagacaccgtctgaacaa

SEQ ID NO: 172067 - DNA, 25 bp, Probe Sequence
cacacgagaacatgcctcttgcaaa

SEQ ID NO: 172068 - DNA, 25 bp, Probe Sequence
cacagaatgttctgcttctagctag

SEQ ID NO: 172069 - DNA, 25 bp, Probe Sequence
cacagcactttctgcagctagagct

SEQ ID NO: 172070 - DNA, 25 bp, Probe Sequence
cacatccttatctcattgctggctt

SEQ ID NO: 172071 - DNA, 25 bp, Probe Sequence
cactacttgtttttctgacgttcca

SEQ ID NO: 172072 - DNA, 25 bp, Probe Sequence
cacttcttggatttttaaaccacag

SEQ ID NO: 172073 - DNA, 25 bp, Probe Sequence
catcagggtggtttttcttaaacat

SEQ ID NO: 172074 - DNA, 25 bp, Probe Sequence
cacatccgtggttttttggcaaaat

SEQ ID NO: 172075 - DNA, 25 bp, Probe Sequence
cacattctttgtcaccttggtaaaa

SEQ ID NO: 172076 - DNA, 25 bp, Probe Sequence
cacattcatttggtgccctctgtgt

SEQ ID NO: 172077 - DNA, 25 bp, Probe Sequence
cacttatttctgggaccatgtgacc

SEQ ID NO: 172078 - DNA, 25 bp, Probe Sequence
cacttggtttgttgaccataaccgt

SEQ ID NO: 172079 - DNA, 25 bp, Probe Sequence
cacattggttccaggtctcaacgtt

SEQ ID NO: 172080 - DNA, 25 bp, Probe Sequence
cacataatggtgtgcggttaccagt

SEQ ID NO: 172081 - DNA, 25 bp, Probe Sequence
cacatataggtgagggtctccacat

SEQ ID NO: 172082 - DNA, 25 bp, Probe Sequence
cacattaggctgttggttcaaactt

SEQ ID NO: 172083 - DNA, 25 bp, Probe Sequence
cacatattgttgttggtacacccgg

SEQ ID NO: 172084 - DNA, 25 bp, Probe Sequence
cacagagactgtttggaatcccgcc

SEQ ID NO: 172085 - DNA, 25 bp, Probe Sequence
cacagagaaggctgtggttcccctg

SEQ ID NO: 172086 - DNA, 25 bp, Probe Sequence
cacagagaaggctgtggttcccctg

SEQ ID NO: 172087 - DNA, 25 bp, Probe Sequence
cacaggtagaccctgtgattctccc

SEQ ID NO: 172088 - DNA, 25 bp, Probe Sequence
cacaggctgagaactcgttcacctc

SEQ ID NO: 172089 - DNA, 25 bp, Probe Sequence
cacaggtgagcagccttatacgtgt

SEQ ID NO: 172090 - DNA, 25 bp, Probe Sequence
cacatgggattctctggtcacagtt

SEQ ID NO: 172091 - DNA, 25 bp, Probe Sequence
cacatttagcctactgggcaaaatc

SEQ ID NO: 172092 - DNA, 25 bp, Probe Sequence
cactgttgacccttgtggaagatat

SEQ ID NO: 172093 - DNA, 25 bp, Probe Sequence
cacagttaccgcgtgtactacaatg

SEQ ID NO: 172094 - DNA, 25 bp, Probe Sequence
cacttttgcagttgattactgaaat

SEQ ID NO: 172095 - DNA, 25 bp, Probe Sequence
cacttttgcagattgggtaacacag

SEQ ID NO: 172096 - DNA, 25 bp, Probe Sequence
cacgatttcacactgggtacagcta

SEQ ID NO: 172097 - DNA, 25 bp, Probe Sequence
cactgatttcgaccaggttcgttca

SEQ ID NO: 172098 - DNA, 25 bp, Probe Sequence
cacagtattctagagacgggttgca

SEQ ID NO: 172099 - DNA, 25 bp, Probe Sequence
cacagtttgcatcagaacgtgttta

SEQ ID NO: 172100 - DNA, 25 bp, Probe Sequence
cacttttgagtgcaactgccttcca

SEQ ID NO: 172101 - DNA, 25 bp, Probe Sequence
cacatgtcctagtgaactgcttaca

SEQ ID NO: 172102 - DNA, 25 bp, Probe Sequence
cacaggcctgtgagaactggctccg

SEQ ID NO: 172103 - DNA, 25 bp, Probe Sequence
cacaggcctggactaaattgatttt

SEQ ID NO: 172104 - DNA, 25 bp, Probe Sequence
cacgttcgcgatcaaattcttctct

SEQ ID NO: 172105 - DNA, 25 bp, Probe Sequence
cacagctctcctattgaaacttgcc

SEQ ID NO: 172106 - DNA, 25 bp, Probe Sequence
cacacccgtctttgacaacatctgg

SEQ ID NO: 172107 - DNA, 25 bp, Probe Sequence
cacacccagctgatatagaacattt

SEQ ID NO: 172108 - DNA, 25 bp, Probe Sequence
caccatctgaggtgggaaatccttc

SEQ ID NO: 172109 - DNA, 25 bp, Probe Sequence
cacatcttgggaagtgggaatcctg

SEQ ID NO: 172110 - DNA, 25 bp, Probe Sequence
cacatttgggagctggagaacaggg

SEQ ID NO: 172111 - DNA, 25 bp, Probe Sequence
cacatttactcacgtggaagccgag

SEQ ID NO: 172112 - DNA, 25 bp, Probe Sequence
cacattgctacccaatggacacact

SEQ ID NO: 172113 - DNA, 25 bp, Probe Sequence
cacaggtacagccacaggcacattc

SEQ ID NO: 172114 - DNA, 25 bp, Probe Sequence
cacagactaatggctatgaccttca

SEQ ID NO: 172115 - DNA, 25 bp, Probe Sequence
cacagtctacatgggcaaagtgacc

SEQ ID NO: 172116 - DNA, 25 bp, Probe Sequence
cacagctctagccacagcagaagga

SEQ ID NO: 172117 - DNA, 25 bp, Probe Sequence
cacagctcatcaatcatcagagaac

SEQ ID NO: 172118 - DNA, 25 bp, Probe Sequence
cacagctacagcaatctgaggatta

SEQ ID NO: 172119 - DNA, 25 bp, Probe Sequence
cacagcttctgaactgagccggaga

SEQ ID NO: 172120 - DNA, 25 bp, Probe Sequence
cacagtagttcccagggcagcagaa

SEQ ID NO: 172121 - DNA, 25 bp, Probe Sequence
cacagctgaggtgccagcttggaga

SEQ ID NO: 172122 - DNA, 25 bp, Probe Sequence
cacaccagtttccagtgcggagtct

SEQ ID NO: 172123 - DNA, 25 bp, Probe Sequence
cacagctcatttgcgaacggatttt

SEQ ID NO: 172124 - DNA, 25 bp, Probe Sequence
cacagctattccagacacctgtttg

SEQ ID NO: 172125 - DNA, 25 bp, Probe Sequence
cacatttgtgtaaacagtgttttgg

SEQ ID NO: 172126 - DNA, 25 bp, Probe Sequence
cagctgggtttatagtctttgggcc

SEQ ID NO: 172127 - DNA, 25 bp, Probe Sequence
cactgtcctttatcatgttttgaag

SEQ ID NO: 172128 - DNA, 25 bp, Probe Sequence
cacagactgctttttcattttagaa

SEQ ID NO: 172129 - DNA, 25 bp, Probe Sequence
cacagatatccatgcctgttttaca

SEQ ID NO: 172130 - DNA, 25 bp, Probe Sequence
cacaggttcattgctgtcatttaga

SEQ ID NO: 172131 - DNA, 25 bp, Probe Sequence
cacaggttgcctccgttgtgtaaaa

SEQ ID NO: 172132 - DNA, 25 bp, Probe Sequence
cacagcagcttccttggtagtgtac

SEQ ID NO: 172133 - DNA, 25 bp, Probe Sequence
cacagcaggccccggtatgtgatgt

SEQ ID NO: 172134 - DNA, 25 bp, Probe Sequence
cacagaggtgcccatggagcgcgtg

SEQ ID NO: 172135 - DNA, 25 bp, Probe Sequence
cacagaggctgccgcagccactgct

SEQ ID NO: 172136 - DNA, 25 bp, Probe Sequence
cacagaatatgcactgtccatcatg

SEQ ID NO: 172137 - DNA, 25 bp, Probe Sequence
cacagagatatgcacacaccgatgt

SEQ ID NO: 172138 - DNA, 25 bp, Probe Sequence
cacagctaatgattcaatgcgagac

SEQ ID NO: 172139 - DNA, 25 bp, Probe Sequence
cacagctatgtgtagtactgagcac

SEQ ID NO: 172140 - DNA, 25 bp, Probe Sequence
cacagatatgcgcacacctgagcac

SEQ ID NO: 172141 - DNA, 25 bp, Probe Sequence
cacagcagatggtacaccgtgaccc

SEQ ID NO: 172142 - DNA, 25 bp, Probe Sequence
cacagacgatgttccacaggagccc

SEQ ID NO: 172143 - DNA, 25 bp, Probe Sequence
cacagaccagaagccagcttccagc

SEQ ID NO: 172144 - DNA, 25 bp, Probe Sequence
cacagaccgtggtgagcttggcggc

SEQ ID NO: 172145 - DNA, 25 bp, Probe Sequence
cacaggcctgggtaaccatggtgag

SEQ ID NO: 172146 - DNA, 25 bp, Probe Sequence
cacaggcctggggtcaacagaagag

SEQ ID NO: 172147 - DNA, 25 bp, Probe Sequence
cacagacctgtggctccaaggaatc

SEQ ID NO: 172148 - DNA, 25 bp, Probe Sequence
cacagtgctttggactatgagaaac

SEQ ID NO: 172149 - DNA, 25 bp, Probe Sequence
cacagtgcttctgtttacacagtca

SEQ ID NO: 172150 - DNA, 25 bp, Probe Sequence
cacagtctctgcatgtttccaagag

SEQ ID NO: 172151 - DNA, 25 bp, Probe Sequence
cacagctctcttctcatgtaaatga

SEQ ID NO: 172152 - DNA, 25 bp, Probe Sequence
cacatgttgatatacatctacatat

SEQ ID NO: 172153 - DNA, 25 bp, Probe Sequence
cacttctcatgatagctgttatata

SEQ ID NO: 172154 - DNA, 25 bp, Probe Sequence
cacattttgatacctgccatgtaac

SEQ ID NO: 172155 - DNA, 25 bp, Probe Sequence
cacttaaacagcctccagtcataaa

SEQ ID NO: 172156 - DNA, 25 bp, Probe Sequence
cacatcataaactctgcacattcat

SEQ ID NO: 172157 - DNA, 25 bp, Probe Sequence
cacatcataaactctgcacattcat

SEQ ID NO: 172158 - DNA, 25 bp, Probe Sequence
cacatgctccatggaactatcatta

SEQ ID NO: 172159 - DNA, 25 bp, Probe Sequence
cacagcccggtaatatgtctcatcc

SEQ ID NO: 172160 - DNA, 25 bp, Probe Sequence
cacatagcccctagattgctcaatc

SEQ ID NO: 172161 - DNA, 25 bp, Probe Sequence
cacagcccaagcagatagctcatgg

SEQ ID NO: 172162 - DNA, 25 bp, Probe Sequence
cacatccgagccagctatgctgcag

SEQ ID NO: 172163 - DNA, 25 bp, Probe Sequence
cacattgaccacgtgcacaggctgg

SEQ ID NO: 172164 - DNA, 25 bp, Probe Sequence
cacttttcctggccagagctgggcc

SEQ ID NO: 172165 - DNA, 25 bp, Probe Sequence
cacttttcctggccagagctgggcc

SEQ ID NO: 172166 - DNA, 25 bp, Probe Sequence
cacttttcctggccagagctgggcc

SEQ ID NO: 172167 - DNA, 25 bp, Probe Sequence
cacttgtgattacgcgggctgcggc

SEQ ID NO: 172168 - DNA, 25 bp, Probe Sequence
cacagtgtgggttgcgggtgctgga

SEQ ID NO: 172169 - DNA, 25 bp, Probe Sequence
cacatgttgtgggagccactggtgg

SEQ ID NO: 172170 - DNA, 25 bp, Probe Sequence
cacatgggattatccctggtgagga

SEQ ID NO: 172171 - DNA, 25 bp, Probe Sequence
gtgtggtgaaactggtcatgtagcc

SEQ ID NO: 172172 - DNA, 25 bp, Probe Sequence
cagcaggacaaccttctagcgggga

SEQ ID NO: 172173 - DNA, 25 bp, Probe Sequence
cacctacaacgtcatagtggaggca

SEQ ID NO: 172174 - DNA, 25 bp, Probe Sequence
cactcaactactgcgtatggcggga

SEQ ID NO: 172175 - DNA, 25 bp, Probe Sequence
cactcaaagacagcactctgggtgc

SEQ ID NO: 172176 - DNA, 25 bp, Probe Sequence
cactctgacaggcctcaccagaggt

SEQ ID NO: 172177 - DNA, 25 bp, Probe Sequence
cacatcttgttgtccaccagagagt

SEQ ID NO: 172178 - DNA, 25 bp, Probe Sequence
cacatcttatatacagcagtcagag

SEQ ID NO: 172179 - DNA, 25 bp, Probe Sequence
cactttcttgaaggtcaggggcttt

SEQ ID NO: 172180 - DNA, 25 bp, Probe Sequence
cactttttctaccttggaactgtat

SEQ ID NO: 172181 - DNA, 25 bp, Probe Sequence
cactttttctaccttggaactgtat

SEQ ID NO: 172182 - DNA, 25 bp, Probe Sequence
cactttttctaccttggaactgtat

SEQ ID NO: 172183 - DNA, 25 bp, Probe Sequence
cacattttctcatcgttgaacactt

SEQ ID NO: 172184 - DNA, 25 bp, Probe Sequence
cacataagcccaaactgatagacag

SEQ ID NO: 172185 - DNA, 25 bp, Probe Sequence
cacagtcacctttcactgaggtcag

SEQ ID NO: 172186 - DNA, 25 bp, Probe Sequence
cacagtcacctttcactgaggtcag

SEQ ID NO: 172187 - DNA, 25 bp, Probe Sequence
cacagtcacctttcactgaggtcag

SEQ ID NO: 172188 - DNA, 25 bp, Probe Sequence
cacagtcacctttcactgaggtcag

SEQ ID NO: 172189 - DNA, 25 bp, Probe Sequence
cacagtcacactgatatgctgattt

SEQ ID NO: 172190 - DNA, 25 bp, Probe Sequence
cacagcacaccttaagaattctcag

SEQ ID NO: 172191 - DNA, 25 bp, Probe Sequence
cacatcaacctctttcaagtgctgc

SEQ ID NO: 172192 - DNA, 25 bp, Probe Sequence
cactaaggccaatctagctgctgct

SEQ ID NO: 172193 - DNA, 25 bp, Probe Sequence
cactgaatggctgacctgacctgat

SEQ ID NO: 172194 - DNA, 25 bp, Probe Sequence
cactgaatggctgacctgacctgat

SEQ ID NO: 172195 - DNA, 25 bp, Probe Sequence
cacagacagaatccctgctaccaga

SEQ ID NO: 172196 - DNA, 25 bp, Probe Sequence
cacagtcaaagcggctctagctctg

SEQ ID NO: 172197 - DNA, 25 bp, Probe Sequence
cacagaccaagggctcacagtctgc

SEQ ID NO: 172198 - DNA, 25 bp, Probe Sequence
cacagagagaaccaccagcattgcc

SEQ ID NO: 172199 - DNA, 25 bp, Probe Sequence
cacaggaaacacgctagtgaccatt

SEQ ID NO: 172200 - DNA, 25 bp, Probe Sequence
cacatgtactaaacctgagggctct

SEQ ID NO: 172201 - DNA, 25 bp, Probe Sequence
cactttctaacacctttgatgcctt

SEQ ID NO: 172202 - DNA, 25 bp, Probe Sequence
cacatttccaatctcttgcaagcct

SEQ ID NO: 172203 - DNA, 25 bp, Probe Sequence
cacttcaaagtcatcttgccagcca

SEQ ID NO: 172204 - DNA, 25 bp, Probe Sequence
cacaggcaggtgactactccatgcg

SEQ ID NO: 172205 - DNA, 25 bp, Probe Sequence
cacaggcaggtgactactccatgcg

SEQ ID NO: 172206 - DNA, 25 bp, Probe Sequence
cacagaggtaccaactgccagcatt

SEQ ID NO: 172207 - DNA, 25 bp, Probe Sequence
cacgatgggatgaacctggagcttt

SEQ ID NO: 172208 - DNA, 25 bp, Probe Sequence
cacgatgggatgaacctggagcttt

SEQ ID NO: 172209 - DNA, 25 bp, Probe Sequence
cacagagagcgagacgcggagtccc

SEQ ID NO: 172210 - DNA, 25 bp, Probe Sequence
cacggaggatggggccgaacccctg

SEQ ID NO: 172211 - DNA, 25 bp, Probe Sequence
cacaggaagtcgggaaggggccctg

SEQ ID NO: 172212 - DNA, 25 bp, Probe Sequence
cacaggtagttcggggatgtctcgc

SEQ ID NO: 172213 - DNA, 25 bp, Probe Sequence
cacaggctgattacctaggatttat

SEQ ID NO: 172214 - DNA, 25 bp, Probe Sequence
cacaggtgttgcaccagggacttct

SEQ ID NO: 172215 - DNA, 25 bp, Probe Sequence
cacagggttgcaaccaggctgggtg

SEQ ID NO: 172216 - DNA, 25 bp, Probe Sequence
cactgggtggcatccaagtcttgga

SEQ ID NO: 172217 - DNA, 25 bp, Probe Sequence
cacatggtgggggccacaccatttg

SEQ ID NO: 172218 - DNA, 25 bp, Probe Sequence
cacatggtagagtctccaacctgtt

SEQ ID NO: 172219 - DNA, 25 bp, Probe Sequence
cacaggaagacctgcaccactgtcg

SEQ ID NO: 172220 - DNA, 25 bp, Probe Sequence
cacaggaagacctgcaccactgtcg

SEQ ID NO: 172221 - DNA, 25 bp, Probe Sequence
cacagtgagaactgagcccgcaggg

SEQ ID NO: 172222 - DNA, 25 bp, Probe Sequence
cacatgatcaaagacaacggctggg

SEQ ID NO: 172223 - DNA, 25 bp, Probe Sequence
cacaggcaacagacctgaaagtggc

SEQ ID NO: 172224 - DNA, 25 bp, Probe Sequence
cacatggcggaaactggatcctggc

SEQ ID NO: 172225 - DNA, 25 bp, Probe Sequence
cacaggggccagggactcctggagc

SEQ ID NO: 172226 - DNA, 25 bp, Probe Sequence
cacaggaggccggtggccgtgtggt

SEQ ID NO: 172227 - DNA, 25 bp, Probe Sequence
cacaggtgagcaaggtgcccagggg

SEQ ID NO: 172228 - DNA, 25 bp, Probe Sequence
cacagaggacgtctaccagctggag

SEQ ID NO: 172229 - DNA, 25 bp, Probe Sequence
cacagaagactttaatccgtcaaat

SEQ ID NO: 172230 - DNA, 25 bp, Probe Sequence
cacagaaccatttttgcaagattaa

SEQ ID NO: 172231 - DNA, 25 bp, Probe Sequence
cacagaaccattggctctcactgaa

SEQ ID NO: 172232 - DNA, 25 bp, Probe Sequence
cacagacacacaagggagcaggcta

SEQ ID NO: 172233 - DNA, 25 bp, Probe Sequence
cacatggacatcactggagaggaaa

SEQ ID NO: 172234 - DNA, 25 bp, Probe Sequence
cacagagactctccatgggaggggg

SEQ ID NO: 172235 - DNA, 25 bp, Probe Sequence
cacaggctgccttttggagggaggg

SEQ ID NO: 172236 - DNA, 25 bp, Probe Sequence
cacatagctgttattctggggagag

SEQ ID NO: 172237 - DNA, 25 bp, Probe Sequence
cacaggctcgtgctgtcttggaaag

SEQ ID NO: 172238 - DNA, 25 bp, Probe Sequence
cacaggctctgccaggtctggaaag

SEQ ID NO: 172239 - DNA, 25 bp, Probe Sequence
cacattgccatccaggccttgagag

SEQ ID NO: 172240 - DNA, 25 bp, Probe Sequence
cacattgccatccaggccttgagag

SEQ ID NO: 172241 - DNA, 25 bp, Probe Sequence
cacatctactgcctgaactgagaga

SEQ ID NO: 172242 - DNA, 25 bp, Probe Sequence
cacatggagtgcctgtacaagctga

SEQ ID NO: 172243 - DNA, 25 bp, Probe Sequence
cactgggtttggtcacagcagtccc

SEQ ID NO: 172244 - DNA, 25 bp, Probe Sequence
cacaggacttatctcacacatgtct

SEQ ID NO: 172245 - DNA, 25 bp, Probe Sequence
cacagaccttcactacctattctga

SEQ ID NO: 172246 - DNA, 25 bp, Probe Sequence
cacagaccttcactacctattctga

SEQ ID NO: 172247 - DNA, 25 bp, Probe Sequence
cactgctccagtgtcacggatttga

SEQ ID NO: 172248 - DNA, 25 bp, Probe Sequence
cacagtcacagtcacgcaggatggg

SEQ ID NO: 172249 - DNA, 25 bp, Probe Sequence
cacagagacagtacctgtaatgaga

SEQ ID NO: 172250 - DNA, 25 bp, Probe Sequence
cacagatagagccttctgtgttgca

SEQ ID NO: 172251 - DNA, 25 bp, Probe Sequence
cacagagatgaccactgcggctggc

SEQ ID NO: 172252 - DNA, 25 bp, Probe Sequence
cacatgagagacttctttgctgatg

SEQ ID NO: 172253 - DNA, 25 bp, Probe Sequence
cactgaaaccttttccagtgccaaa

SEQ ID NO: 172254 - DNA, 25 bp, Probe Sequence
cacataaagcttgctaccgctcaaa

SEQ ID NO: 172255 - DNA, 25 bp, Probe Sequence
cacatatgacacaggctagtcctat

SEQ ID NO: 172256 - DNA, 25 bp, Probe Sequence
cacagtactcaaagcttgttatctt

SEQ ID NO: 172257 - DNA, 25 bp, Probe Sequence
cacaggcaccaaagtggattttttc

SEQ ID NO: 172258 - DNA, 25 bp, Probe Sequence
cacatggacacacagtgactctctt

SEQ ID NO: 172259 - DNA, 25 bp, Probe Sequence
cacaggagcctttgagctcatctat

SEQ ID NO: 172260 - DNA, 25 bp, Probe Sequence
cacagtatcgtgatgcagtcatgtc

SEQ ID NO: 172261 - DNA, 25 bp, Probe Sequence
cacagtgtcactgtcagatggtctg

SEQ ID NO: 172262 - DNA, 25 bp, Probe Sequence
cacatttgcctactaatggaaaagg

SEQ ID NO: 172263 - DNA, 25 bp, Probe Sequence
cacgtccactaatcggcaaaaggag

SEQ ID NO: 172264 - DNA, 25 bp, Probe Sequence
cacagtctcactgaattccagaaca

SEQ ID NO: 172265 - DNA, 25 bp, Probe Sequence
cacagtccctaatttctgctgctat

SEQ ID NO: 172266 - DNA, 25 bp, Probe Sequence
cacagtgatctcacattttgcgaga

SEQ ID NO: 172267 - DNA, 25 bp, Probe Sequence
cacagatgcctcttctgtgccttaa

SEQ ID NO: 172268 - DNA, 25 bp, Probe Sequence
cacagatgtctgtttgtgctgcccc

SEQ ID NO: 172269 - DNA, 25 bp, Probe Sequence
cacagagtcttgctctgttgcccag

SEQ ID NO: 172270 - DNA, 25 bp, Probe Sequence
cacagatgcctacttttggcctcat

SEQ ID NO: 172271 - DNA, 25 bp, Probe Sequence
cacagtgcctgattggtatagcctt

SEQ ID NO: 172272 - DNA, 25 bp, Probe Sequence
cacatggcgctggtgcagctggagc

SEQ ID NO: 172273 - DNA, 25 bp, Probe Sequence
cactgtcagatggtctgcagcgagt

SEQ ID NO: 172274 - DNA, 25 bp, Probe Sequence
cactgtccaggagcgtggttttctg

SEQ ID NO: 172275 - DNA, 25 bp, Probe Sequence
cacttcctgtggaggtggctttcag

SEQ ID NO: 172276 - DNA, 25 bp, Probe Sequence
cacttgacgtcacatgggagatttg

SEQ ID NO: 172277 - DNA, 25 bp, Probe Sequence
cactttcgtcactgtaggcaatgta

SEQ ID NO: 172278 - DNA, 25 bp, Probe Sequence
cacagatgccgtcagaaaggaatat

SEQ ID NO: 172279 - DNA, 25 bp, Probe Sequence
cacagtcctggctggagcagcgagt

SEQ ID NO: 172280 - DNA, 25 bp, Probe Sequence
cacagtgcctgtcgctggtgcactg

SEQ ID NO: 172281 - DNA, 25 bp, Probe Sequence
cacagggctttgagctgcactggcc

SEQ ID NO: 172282 - DNA, 25 bp, Probe Sequence
cacagggcttgcaaaccctgagctc

SEQ ID NO: 172283 - DNA, 25 bp, Probe Sequence
cacagtgccttcaaatcatccaagg

SEQ ID NO: 172284 - DNA, 25 bp, Probe Sequence
cacagtgtattctagatcatctaag

SEQ ID NO: 172285 - DNA, 25 bp, Probe Sequence
cacatgttgtcctagacgcttcgga

SEQ ID NO: 172286 - DNA, 25 bp, Probe Sequence
cacattgtttcttacggtcggagca

SEQ ID NO: 172287 - DNA, 25 bp, Probe Sequence
cacatttttttgagccctggctcat

SEQ ID NO: 172288 - DNA, 25 bp, Probe Sequence
cactataattttaaccctgtgattg

SEQ ID NO: 172289 - DNA, 25 bp, Probe Sequence
cactaagtttacactcactttatag

SEQ ID NO: 172290 - DNA, 25 bp, Probe Sequence
cactaagacttctgactccaattta

SEQ ID NO: 172291 - DNA, 25 bp, Probe Sequence
cactaaatattgtaatcctaattct

SEQ ID NO: 172292 - DNA, 25 bp, Probe Sequence
cacataacaatattacctttaaatg

SEQ ID NO: 172293 - DNA, 25 bp, Probe Sequence
cactaacattttgccgcagtacact

SEQ ID NO: 172294 - DNA, 25 bp, Probe Sequence
cactgtactctgaggtccaaatact

SEQ ID NO: 172295 - DNA, 25 bp, Probe Sequence
cacagtgactacagagtctcaagta

SEQ ID NO: 172296 - DNA, 25 bp, Probe Sequence
cacaggacttcgcagatgtcacatt

SEQ ID NO: 172297 - DNA, 25 bp, Probe Sequence
cactgcaaactcccagttgcaagct

SEQ ID NO: 172298 - DNA, 25 bp, Probe Sequence
caccataccataccgtgcatcaatg

SEQ ID NO: 172299 - DNA, 25 bp, Probe Sequence
cactctaccatgcatcgtgtatatt

SEQ ID NO: 172300 - DNA, 25 bp, Probe Sequence
cactattccatgcttttaagtagtt

SEQ ID NO: 172301 - DNA, 25 bp, Probe Sequence
cactatactcatcttataactaatg

SEQ ID NO: 172302 - DNA, 25 bp, Probe Sequence
cagttgggctgcttgttaaaaatgc

SEQ ID NO: 172303 - DNA, 25 bp, Probe Sequence
cacatagacctgcagttagtaaatc

SEQ ID NO: 172304 - DNA, 25 bp, Probe Sequence
cactcgagctcaacagttcgatacc

SEQ ID NO: 172305 - DNA, 25 bp, Probe Sequence
cacccgcatcaacaatctaagcctg

SEQ ID NO: 172306 - DNA, 25 bp, Probe Sequence
cactcggcataacatcatctaggtc

SEQ ID NO: 172307 - DNA, 25 bp, Probe Sequence
cactcgtgtaagcagtttggtggaa

SEQ ID NO: 172308 - DNA, 25 bp, Probe Sequence
cactctttgaagctgttgggaaaat

SEQ ID NO: 172309 - DNA, 25 bp, Probe Sequence
cacatgccttgaagttttggaataa

SEQ ID NO: 172310 - DNA, 25 bp, Probe Sequence
cacatccttgtctaatttcaataac

SEQ ID NO: 172311 - DNA, 25 bp, Probe Sequence
cacaggttgtcattacttaattatt

SEQ ID NO: 172312 - DNA, 25 bp, Probe Sequence
cacagtgctcagttgtactttttat

SEQ ID NO: 172313 - DNA, 25 bp, Probe Sequence
cacagttacctgtcaatgtattctt

SEQ ID NO: 172314 - DNA, 25 bp, Probe Sequence
cacaggtactctcatattcaacttg

SEQ ID NO: 172315 - DNA, 25 bp, Probe Sequence
cacttatacttggatttgctctctt

SEQ ID NO: 172316 - DNA, 25 bp, Probe Sequence
cactaaagcctgacagtgtccggtc

SEQ ID NO: 172317 - DNA, 25 bp, Probe Sequence
cactgaaagtgtgctgctctccagg

SEQ ID NO: 172318 - DNA, 25 bp, Probe Sequence
cactgcctaggaggctggccaaggt

SEQ ID NO: 172319 - DNA, 25 bp, Probe Sequence
cactgctaaggctgctggcttcagg

SEQ ID NO: 172320 - DNA, 25 bp, Probe Sequence
cactgcaaagagactggttgtcggg

SEQ ID NO: 172321 - DNA, 25 bp, Probe Sequence
cactgcatataagagttatgttagc

SEQ ID NO: 172322 - DNA, 25 bp, Probe Sequence
cactctgtcaaggattttgttggct

SEQ ID NO: 172323 - DNA, 25 bp, Probe Sequence
cacttgacagtcatatttcttgtat

SEQ ID NO: 172324 - DNA, 25 bp, Probe Sequence
cacttagatgtcgtttccttcttgc

SEQ ID NO: 172325 - DNA, 25 bp, Probe Sequence
cacttttgtccatgtcactgatctt

SEQ ID NO: 172326 - DNA, 25 bp, Probe Sequence
cacttttgtgatcagtcatttttat

SEQ ID NO: 172327 - DNA, 25 bp, Probe Sequence
cactcattttgaccatatagatttt

SEQ ID NO: 172328 - DNA, 25 bp, Probe Sequence
cacctccttgagctttatttaccta

SEQ ID NO: 172329 - DNA, 25 bp, Probe Sequence
cacctccttgagctttatttaccta

SEQ ID NO: 172330 - DNA, 25 bp, Probe Sequence
cacttcctgtgtccttaaccaagtt

SEQ ID NO: 172331 - DNA, 25 bp, Probe Sequence
cacttgcctcttccttgaagaactg

SEQ ID NO: 172332 - DNA, 25 bp, Probe Sequence
cacatgtcctctcgcattgtaaata

SEQ ID NO: 172333 - DNA, 25 bp, Probe Sequence
cacttcactccagtctgggcaacag

SEQ ID NO: 172334 - DNA, 25 bp, Probe Sequence
cacttctatgtctctggaccacagg

SEQ ID NO: 172335 - DNA, 25 bp, Probe Sequence
cactgcgtggaaccggacatcaagg

SEQ ID NO: 172336 - DNA, 25 bp, Probe Sequence
cactcaggtaaatgcgaatgtaagg

SEQ ID NO: 172337 - DNA, 25 bp, Probe Sequence
cactcaggccgatcaggacttcaag

SEQ ID NO: 172338 - DNA, 25 bp, Probe Sequence
cactcaaagctatatggctatttgg

SEQ ID NO: 172339 - DNA, 25 bp, Probe Sequence
caccataggcaataccttttttctt

SEQ ID NO: 172340 - DNA, 25 bp, Probe Sequence
cacctgaacaatgacccatcatctc

SEQ ID NO: 172341 - DNA, 25 bp, Probe Sequence
cactctgtaccctcaacatatatcc

SEQ ID NO: 172342 - DNA, 25 bp, Probe Sequence
cactctgtaccctcaacatatatcc

SEQ ID NO: 172343 - DNA, 25 bp, Probe Sequence
cactctgctcatcacgggaggatac

SEQ ID NO: 172344 - DNA, 25 bp, Probe Sequence
cacattatgatggagcgggagcgca

SEQ ID NO: 172345 - DNA, 25 bp, Probe Sequence
cacagtgatgatgtcgagatcggaa

SEQ ID NO: 172346 - DNA, 25 bp, Probe Sequence
cacatgtgagatttgctgctgttgc

SEQ ID NO: 172347 - DNA, 25 bp, Probe Sequence
cacatggagtgaggctgcagggccg

SEQ ID NO: 172348 - DNA, 25 bp, Probe Sequence
cacagtggtgtccgagaagtcaggc

SEQ ID NO: 172349 - DNA, 25 bp, Probe Sequence
cacaggctgtttcccaatgtcaagt

SEQ ID NO: 172350 - DNA, 25 bp, Probe Sequence
cacatgtgtttttccgttcatctgt

SEQ ID NO: 172351 - DNA, 25 bp, Probe Sequence
cacttgtcttatcactggtcactga

SEQ ID NO: 172352 - DNA, 25 bp, Probe Sequence
cactttttgacaccttatcctgatg

SEQ ID NO: 172353 - DNA, 25 bp, Probe Sequence
cactcttggggaccatatatactta

SEQ ID NO: 172354 - DNA, 25 bp, Probe Sequence
cacatctctacaggatacattatcc

SEQ ID NO: 172355 - DNA, 25 bp, Probe Sequence
cacatcgctgacgctgattgtgttc

SEQ ID NO: 172356 - DNA, 25 bp, Probe Sequence
cacattctgagctatgctttgtgtt

SEQ ID NO: 172357 - DNA, 25 bp, Probe Sequence
cacttcgaggccattgcgttggtgg

SEQ ID NO: 172358 - DNA, 25 bp, Probe Sequence
cactttgggcctatggattggaaaa

SEQ ID NO: 172359 - DNA, 25 bp, Probe Sequence
cactttgggctgtgggtttcagctt

SEQ ID NO: 172360 - DNA, 25 bp, Probe Sequence
cactttgtgggataggattggcggc

SEQ ID NO: 172361 - DNA, 25 bp, Probe Sequence
cacttcgtcaaatgcaggaatgtgc

SEQ ID NO: 172362 - DNA, 25 bp, Probe Sequence
cacttccttgaatggaggatgcagc

SEQ ID NO: 172363 - DNA, 25 bp, Probe Sequence
cacttatctaaaggtgagagctgca

SEQ ID NO: 172364 - DNA, 25 bp, Probe Sequence
cactgtcctccaaggctacaggacc

SEQ ID NO: 172365 - DNA, 25 bp, Probe Sequence
cacttctctctaaggagaatggccc

SEQ ID NO: 172366 - DNA, 25 bp, Probe Sequence
cacatctcccctatatggcatggac

SEQ ID NO: 172367 - DNA, 25 bp, Probe Sequence
cacatgctccctgtacgagctgtgc

SEQ ID NO: 172368 - DNA, 25 bp, Probe Sequence
cacatgatccgagggaccctgctgg

SEQ ID NO: 172369 - DNA, 25 bp, Probe Sequence
cacattccagttgatgccttgcagg

SEQ ID NO: 172370 - DNA, 25 bp, Probe Sequence
cactacctgctagagcctactgtga

SEQ ID NO: 172371 - DNA, 25 bp, Probe Sequence
cactacgcttagcagatgtcctctg

SEQ ID NO: 172372 - DNA, 25 bp, Probe Sequence
cacatacacctctggtgacctattt

SEQ ID NO: 172373 - DNA, 25 bp, Probe Sequence
cacatgaactcctgatgttttttct

SEQ ID NO: 172374 - DNA, 25 bp, Probe Sequence
cactgacagaccagcattttttttt

SEQ ID NO: 172375 - DNA, 25 bp, Probe Sequence
cactttgatctctttttgaggtttt

SEQ ID NO: 172376 - DNA, 25 bp, Probe Sequence
cactttttcactatagagcctttct

SEQ ID NO: 172377 - DNA, 25 bp, Probe Sequence
cacattagttacaaaaaccgttgct

SEQ ID NO: 172378 - DNA, 25 bp, Probe Sequence
cacgttgctccaccaataaacgttt

SEQ ID NO: 172379 - DNA, 25 bp, Probe Sequence
cactgtactacccaagaagactgtt

SEQ ID NO: 172380 - DNA, 25 bp, Probe Sequence
cactgttgtagtttagaaggctttt

SEQ ID NO: 172381 - DNA, 25 bp, Probe Sequence
caccggctggcttgccaaagggttt

SEQ ID NO: 172382 - DNA, 25 bp, Probe Sequence
caccggctggcttgccaaagggttt

SEQ ID NO: 172383 - DNA, 25 bp, Probe Sequence
caccggctggcttgccaaagggttt

SEQ ID NO: 172384 - DNA, 25 bp, Probe Sequence
cagccaaggttagttttgggtgtct

SEQ ID NO: 172385 - DNA, 25 bp, Probe Sequence
cacttcttgtctttttgtgggttca

SEQ ID NO: 172386 - DNA, 25 bp, Probe Sequence
cacttgcgagatgtccttagggtac

SEQ ID NO: 172387 - DNA, 25 bp, Probe Sequence
cacttccagaaggccttaaggactg

SEQ ID NO: 172388 - DNA, 25 bp, Probe Sequence
cacttcacaagaccgtcaagaggac

SEQ ID NO: 172389 - DNA, 25 bp, Probe Sequence
cttcctcagttacacaaaggacctc

SEQ ID NO: 172390 - DNA, 25 bp, Probe Sequence
cattaataggttctgcaaagacacc

SEQ ID NO: 172391 - DNA, 25 bp, Probe Sequence
cagtaccgaaacagacacagacacc

SEQ ID NO: 172392 - DNA, 25 bp, Probe Sequence
cacttcctaacacagagcctgacac

SEQ ID NO: 172393 - DNA, 25 bp, Probe Sequence
cacttcccaatagtacccaaatcct

SEQ ID NO: 172394 - DNA, 25 bp, Probe Sequence
cacatcctctacagcacacaaaaat

SEQ ID NO: 172395 - DNA, 25 bp, Probe Sequence
cactgcacatttctcctcaagaaaa

SEQ ID NO: 172396 - DNA, 25 bp, Probe Sequence
cactgacctcttgtctcaaaaaaaa

SEQ ID NO: 172397 - DNA, 25 bp, Probe Sequence
cacattgcttttatcatacacataa

SEQ ID NO: 172398 - DNA, 25 bp, Probe Sequence
cacattgttaggtgctgacctagac

SEQ ID NO: 172399 - DNA, 25 bp, Probe Sequence
cacattattacctactacctgaacg

SEQ ID NO: 172400 - DNA, 25 bp, Probe Sequence
cactaaatcacacactatcctaatc

SEQ ID NO: 172401 - DNA, 25 bp, Probe Sequence
cactgacaattccaacattctttac

SEQ ID NO: 172402 - DNA, 25 bp, Probe Sequence
cactgagaaagcccaatcctatatg

SEQ ID NO: 172403 - DNA, 25 bp, Probe Sequence
cactgagaaaatcactcctctggag

SEQ ID NO: 172404 - DNA, 25 bp, Probe Sequence
cactgtaagaagctgtccagctggg

SEQ ID NO: 172405 - DNA, 25 bp, Probe Sequence
cagctgtatggctgcacattcccat

SEQ ID NO: 172406 - DNA, 25 bp, Probe Sequence
cagctgtatggctgcacattcccat

SEQ ID NO: 172407 - DNA, 25 bp, Probe Sequence
cactgagtgtctggccagactccat

SEQ ID NO: 172408 - DNA, 25 bp, Probe Sequence
cacaggctgctctgtgagcacttca

SEQ ID NO: 172409 - DNA, 25 bp, Probe Sequence
cacatgccttctgctagcatctgtg

SEQ ID NO: 172410 - DNA, 25 bp, Probe Sequence
cacatgcatgtctgcctatgcactg

SEQ ID NO: 172411 - DNA, 25 bp, Probe Sequence
cactgctgcaatgggctctgagctg

SEQ ID NO: 172412 - DNA, 25 bp, Probe Sequence
cactctgggtgcgatctgcacgtgc

SEQ ID NO: 172413 - DNA, 25 bp, Probe Sequence
cactcaagtggctattgctcttcag

SEQ ID NO: 172414 - DNA, 25 bp, Probe Sequence
cactttgtgaatgagctgcgctatg

SEQ ID NO: 172415 - DNA, 25 bp, Probe Sequence
cactaggcacgtaacctgcaatgtc

SEQ ID NO: 172416 - DNA, 25 bp, Probe Sequence
cactgaaacataaatccgcaagtca

SEQ ID NO: 172417 - DNA, 25 bp, Probe Sequence
cacatcaaactccgggccacaggag

SEQ ID NO: 172418 - DNA, 25 bp, Probe Sequence
cacatcacagcatcagggggctcag

SEQ ID NO: 172419 - DNA, 25 bp, Probe Sequence
cacatgctctgatgcgaaggggcag

SEQ ID NO: 172420 - DNA, 25 bp, Probe Sequence
cacatcatcagcgcgcaagagggca

SEQ ID NO: 172421 - DNA, 25 bp, Probe Sequence
cacatacagccccgcaagaggtgtg

SEQ ID NO: 172422 - DNA, 25 bp, Probe Sequence
cacatcccagacatcatcaaggtgg

SEQ ID NO: 172423 - DNA, 25 bp, Probe Sequence
cactatcctggcaactcaaggctgc

SEQ ID NO: 172424 - DNA, 25 bp, Probe Sequence
cacatttccgtgttacagcagctgc

SEQ ID NO: 172425 - DNA, 25 bp, Probe Sequence
cacatgtatccgggataaccgggac

SEQ ID NO: 172426 - DNA, 25 bp, Probe Sequence
cacttactctgcagtttcctggaag

SEQ ID NO: 172427 - DNA, 25 bp, Probe Sequence
cacttagccgctgtctcgccgtgtc

SEQ ID NO: 172428 - DNA, 25 bp, Probe Sequence
caccaaggcgctggtgcaacacctg

SEQ ID NO: 172429 - DNA, 25 bp, Probe Sequence
cactccaggcctggtgacataccaa

SEQ ID NO: 172430 - DNA, 25 bp, Probe Sequence
cactccaggctgggcaacagtacga

SEQ ID NO: 172431 - DNA, 25 bp, Probe Sequence
cactccaggctgggcaacagtacga

SEQ ID NO: 172432 - DNA, 25 bp, Probe Sequence
cactccagactgggaaagccgagaa

SEQ ID NO: 172433 - DNA, 25 bp, Probe Sequence
cacttcacagctggagacaccggag

SEQ ID NO: 172434 - DNA, 25 bp, Probe Sequence
cacttcacagctggagacaccggag

SEQ ID NO: 172435 - DNA, 25 bp, Probe Sequence
cacttcacactcggcatgcattgtg

SEQ ID NO: 172436 - DNA, 25 bp, Probe Sequence
cacttcacactcggcatgcattgtg

SEQ ID NO: 172437 - DNA, 25 bp, Probe Sequence
cacttcacactcggcatgcattgtg

SEQ ID NO: 172438 - DNA, 25 bp, Probe Sequence
cactctaccatcgatcctatgtgga

SEQ ID NO: 172439 - DNA, 25 bp, Probe Sequence
cactctaccatcgatcctatgtgga

SEQ ID NO: 172440 - DNA, 25 bp, Probe Sequence
cactgcttcctgcagctttgtagag

SEQ ID NO: 172441 - DNA, 25 bp, Probe Sequence
cactcatacctttcttcgagcatga

SEQ ID NO: 172442 - DNA, 25 bp, Probe Sequence
cactgtatcctcaatgcatggagac

SEQ ID NO: 172443 - DNA, 25 bp, Probe Sequence
cactttcctcctggcagaatgctag

SEQ ID NO: 172444 - DNA, 25 bp, Probe Sequence
cactttcctcctggcagaatgctag

SEQ ID NO: 172445 - DNA, 25 bp, Probe Sequence
cacttctcctcattgcaaatctaag

SEQ ID NO: 172446 - DNA, 25 bp, Probe Sequence
cactgcccaatctagaatatgtctg

SEQ ID NO: 172447 - DNA, 25 bp, Probe Sequence
cactctcagccatagcactttgttc

SEQ ID NO: 172448 - DNA, 25 bp, Probe Sequence
cacatctcggacagcatgctctgtg

SEQ ID NO: 172449 - DNA, 25 bp, Probe Sequence
cacttcctgacaggtgtgtgcgcca

SEQ ID NO: 172450 - DNA, 25 bp, Probe Sequence
cactgccattaagggtgtgggccga

SEQ ID NO: 172451 - DNA, 25 bp, Probe Sequence
cacggatgttcagtggatatcggtc

SEQ ID NO: 172452 - DNA, 25 bp, Probe Sequence
cactcagttatggcttctacggctg

SEQ ID NO: 172453 - DNA, 25 bp, Probe Sequence
cactcatctggggcatttacttcgc

SEQ ID NO: 172454 - DNA, 25 bp, Probe Sequence
cacgcatgtgtaccagtggactttg

SEQ ID NO: 172455 - DNA, 25 bp, Probe Sequence
cactcagctatgctagggcttggct

SEQ ID NO: 172456 - DNA, 25 bp, Probe Sequence
cactatattgtgtcaggctgtcttg

SEQ ID NO: 172457 - DNA, 25 bp, Probe Sequence
cacatatgtattcctgatcgccaac

SEQ ID NO: 172458 - DNA, 25 bp, Probe Sequence
cacatttcatatactgcaggtaaca

SEQ ID NO: 172459 - DNA, 25 bp, Probe Sequence
cactttgcaggccgaggtagacaga

SEQ ID NO: 172460 - DNA, 25 bp, Probe Sequence
cactctacgtgcccaattgtgacca

SEQ ID NO: 172461 - DNA, 25 bp, Probe Sequence
cacttagcttgttcagatctctgca

SEQ ID NO: 172462 - DNA, 25 bp, Probe Sequence
cacatctggtggtgagacttgcatt

SEQ ID NO: 172463 - DNA, 25 bp, Probe Sequence
cacattggccagtggactcatccat

SEQ ID NO: 172464 - DNA, 25 bp, Probe Sequence
cagaaggccgaaggtttccattgga

SEQ ID NO: 172465 - DNA, 25 bp, Probe Sequence
cagaaggactattttttgttgtgta

SEQ ID NO: 172466 - DNA, 25 bp, Probe Sequence
cagtatggacctttttccttggtag

SEQ ID NO: 172467 - DNA, 25 bp, Probe Sequence
cagtttaactgggtgtcccggctgg

SEQ ID NO: 172468 - DNA, 25 bp, Probe Sequence
cagttttactgatgatacccacgga

SEQ ID NO: 172469 - DNA, 25 bp, Probe Sequence
cacttattccatttgtacctaagag

SEQ ID NO: 172470 - DNA, 25 bp, Probe Sequence
cactttctatctattgcacctaagg

SEQ ID NO: 172471 - DNA, 25 bp, Probe Sequence
cacttttagctcatcgcaccaatat

SEQ ID NO: 172472 - DNA, 25 bp, Probe Sequence
cactctcttactgagacacccataa

SEQ ID NO: 172473 - DNA, 25 bp, Probe Sequence
cactttgctcactgaaggcagccaa

SEQ ID NO: 172474 - DNA, 25 bp, Probe Sequence
cacttgtggatgtttagtgcagcca

SEQ ID NO: 172475 - DNA, 25 bp, Probe Sequence
cacttcggatacccaggacagcatg

SEQ ID NO: 172476 - DNA, 25 bp, Probe Sequence
cacttcggatacccaggacagcatg

SEQ ID NO: 172477 - DNA, 25 bp, Probe Sequence
cacttcgacatcacgggaatgaagg

SEQ ID NO: 172478 - DNA, 25 bp, Probe Sequence
cactcccagctctcgggtagaggga

SEQ ID NO: 172479 - DNA, 25 bp, Probe Sequence
cacataccacaaaccggtaactgta

SEQ ID NO: 172480 - DNA, 25 bp, Probe Sequence
cactaccccaaacacgatactgtca

SEQ ID NO: 172481 - DNA, 25 bp, Probe Sequence
cactcccctcaataatgcggtttga

SEQ ID NO: 172482 - DNA, 25 bp, Probe Sequence
cacccccaagtgcatatgggtctgt

SEQ ID NO: 172483 - DNA, 25 bp, Probe Sequence
cacccagccagaattttgacttcta

SEQ ID NO: 172484 - DNA, 25 bp, Probe Sequence
caccagaatcaggacatttggcttt

SEQ ID NO: 172485 - DNA, 25 bp, Probe Sequence
cactcattatcccacataattgtgt

SEQ ID NO: 172486 - DNA, 25 bp, Probe Sequence
cactatttctagtcaatttctgctg

SEQ ID NO: 172487 - DNA, 25 bp, Probe Sequence
cacatttttatgacactgtattcca

SEQ ID NO: 172488 - DNA, 25 bp, Probe Sequence
cacatgattatttgccattgtttcg

SEQ ID NO: 172489 - DNA, 25 bp, Probe Sequence
cagagcttacttcattgtctgtccc

SEQ ID NO: 172490 - DNA, 25 bp, Probe Sequence
cacatcctactaaattcctgactct

SEQ ID NO: 172491 - DNA, 25 bp, Probe Sequence
cacatcctgactactaccgtatagt

SEQ ID NO: 172492 - DNA, 25 bp, Probe Sequence
cactcactacttaatactgccatgg

SEQ ID NO: 172493 - DNA, 25 bp, Probe Sequence
cactcaagacttttgactgccattt

SEQ ID NO: 172494 - DNA, 25 bp, Probe Sequence
cactaaccattttgacggacgacaa

SEQ ID NO: 172495 - DNA, 25 bp, Probe Sequence
cactcacgccctaataaggagcgaa

SEQ ID NO: 172496 - DNA, 25 bp, Probe Sequence
cacatcaccagccacctaatagagc

SEQ ID NO: 172497 - DNA, 25 bp, Probe Sequence
cacatcccagggcttatggtgcagc

SEQ ID NO: 172498 - DNA, 25 bp, Probe Sequence
cactgaccgggcttttcagagcctg

SEQ ID NO: 172499 - DNA, 25 bp, Probe Sequence
cactgcacacggctgtttacaacta

SEQ ID NO: 172500 - DNA, 25 bp, Probe Sequence
cactgccctactgttggtatgacta

SEQ ID NO: 172501 - DNA, 25 bp, Probe Sequence
cacttcactccagcctgggtgacaa

SEQ ID NO: 172502 - DNA, 25 bp, Probe Sequence
cacttcactccagcctgggtgacag

SEQ ID NO: 172503 - DNA, 25 bp, Probe Sequence
cactacactccagcctgggtgacag

SEQ ID NO: 172504 - DNA, 25 bp, Probe Sequence
cactacactccagcctgggtgacag

SEQ ID NO: 172505 - DNA, 25 bp, Probe Sequence
cactccatcccagatttgttgtctg

SEQ ID NO: 172506 - DNA, 25 bp, Probe Sequence
cacttcaggccgctggtttgtcagc

SEQ ID NO: 172507 - DNA, 25 bp, Probe Sequence
cactccaggcttcacgtttggaaat

SEQ ID NO: 172508 - DNA, 25 bp, Probe Sequence
cacggcggcttctgttattaggaat

SEQ ID NO: 172509 - DNA, 25 bp, Probe Sequence
cactctggatttcagcctcttagga

SEQ ID NO: 172510 - DNA, 25 bp, Probe Sequence
cactttgatttccagccatttactc

SEQ ID NO: 172511 - DNA, 25 bp, Probe Sequence
cacttcgtttccagctttacatgtg

SEQ ID NO: 172512 - DNA, 25 bp, Probe Sequence
cactgtttactgttttttcacatgt

SEQ ID NO: 172513 - DNA, 25 bp, Probe Sequence
cactgtgggactttgtgggtactat

SEQ ID NO: 172514 - DNA, 25 bp, Probe Sequence
cacttgggttctatgctcagaactt

SEQ ID NO: 172515 - DNA, 25 bp, Probe Sequence
cacctggagtcctaatccagtccct

SEQ ID NO: 172516 - DNA, 25 bp, Probe Sequence
catccaggaacttagaccaacttta

SEQ ID NO: 172517 - DNA, 25 bp, Probe Sequence
catccaggaacttagaccaacttta

SEQ ID NO: 172518 - DNA, 25 bp, Probe Sequence
catcggggaccttaagaagctgatt

SEQ ID NO: 172519 - DNA, 25 bp, Probe Sequence
cactgaaggcccaaatgagcaattt

SEQ ID NO: 172520 - DNA, 25 bp, Probe Sequence
cactacaggcccatgaattacttcc

SEQ ID NO: 172521 - DNA, 25 bp, Probe Sequence
cactaggtcttcatagttccaggcc

SEQ ID NO: 172522 - DNA, 25 bp, Probe Sequence
cactaaatctgagccagtgtccaag

SEQ ID NO: 172523 - DNA, 25 bp, Probe Sequence
cactcgaatcgaacacgtcttgcta

SEQ ID NO: 172524 - DNA, 25 bp, Probe Sequence
cacttgattcagatcaggtcggcta

SEQ ID NO: 172525 - DNA, 25 bp, Probe Sequence
cacttgttgcagtccaagtcctcta

SEQ ID NO: 172526 - DNA, 25 bp, Probe Sequence
cactgctggtgtttcaagatcccga

SEQ ID NO: 172527 - DNA, 25 bp, Probe Sequence
cactctgtagtcttcagtgctaccg

SEQ ID NO: 172528 - DNA, 25 bp, Probe Sequence
cactctctgagtgcatcatgtacaa

SEQ ID NO: 172529 - DNA, 25 bp, Probe Sequence
cacttgctggtcctcaacaagatgg

SEQ ID NO: 172530 - DNA, 25 bp, Probe Sequence
cacttgctcgtccatccctcaagag

SEQ ID NO: 172531 - DNA, 25 bp, Probe Sequence
cacttacttccctcacaatgatgat

SEQ ID NO: 172532 - DNA, 25 bp, Probe Sequence
cactcttttccaggacagcaattgt

SEQ ID NO: 172533 - DNA, 25 bp, Probe Sequence
cactttctccagtgccagcaaagtc

SEQ ID NO: 172534 - DNA, 25 bp, Probe Sequence
cagttaacacacaagcccaaagaaa

SEQ ID NO: 172535 - DNA, 25 bp, Probe Sequence
cacgtcaacagttcacccaaagaga

SEQ ID NO: 172536 - DNA, 25 bp, Probe Sequence
cactgtcagtggagccccagaagct

SEQ ID NO: 172537 - DNA, 25 bp, Probe Sequence
cacttagtgatcagctccctaaaac

SEQ ID NO: 172538 - DNA, 25 bp, Probe Sequence
cactatattatcatctctctctatc

SEQ ID NO: 172539 - DNA, 25 bp, Probe Sequence
cacttgattccatttcattgtcatt

SEQ ID NO: 172540 - DNA, 25 bp, Probe Sequence
cactggcttctctatattcccaaat

SEQ ID NO: 172541 - DNA, 25 bp, Probe Sequence
cactggtgcagatttatccccagag

SEQ ID NO: 172542 - DNA, 25 bp, Probe Sequence
cacatttgagacaactgcactccag

SEQ ID NO: 172543 - DNA, 25 bp, Probe Sequence
cacattctgaaggacctctctagct

SEQ ID NO: 172544 - DNA, 25 bp, Probe Sequence
cactgcatctacagaccatccgcag

SEQ ID NO: 172545 - DNA, 25 bp, Probe Sequence
cactgcttaatggccacatgccagt

SEQ ID NO: 172546 - DNA, 25 bp, Probe Sequence
cactcttgaggcttaaggcgcatgt

SEQ ID NO: 172547 - DNA, 25 bp, Probe Sequence
cactgcatggaggtcataaggctga

SEQ ID NO: 172548 - DNA, 25 bp, Probe Sequence
cactctgaggcttcagaacatgctg

SEQ ID NO: 172549 - DNA, 25 bp, Probe Sequence
cactctgggtcagagagctctggtc

SEQ ID NO: 172550 - DNA, 25 bp, Probe Sequence
cacttgggcactgactgtaggatat

SEQ ID NO: 172551 - DNA, 25 bp, Probe Sequence
cacttggtgacatccgcagggagat

SEQ ID NO: 172552 - DNA, 25 bp, Probe Sequence
cacttcttgcattcctcgatgggaa

SEQ ID NO: 172553 - DNA, 25 bp, Probe Sequence
cactctgattcttccttcagtgaca

SEQ ID NO: 172554 - DNA, 25 bp, Probe Sequence
cactgtgatgtccacctcataagtc

SEQ ID NO: 172555 - DNA, 25 bp, Probe Sequence
cacttatgttccttctagagtaacc

SEQ ID NO: 172556 - DNA, 25 bp, Probe Sequence
cacttctgctgtcaccttgaatgaa

SEQ ID NO: 172557 - DNA, 25 bp, Probe Sequence
cacttgatttgggccttgaagagta

SEQ ID NO: 172558 - DNA, 25 bp, Probe Sequence
cactatgatgtttgagtcgggaagt

SEQ ID NO: 172559 - DNA, 25 bp, Probe Sequence
cacttgagtgaggagtgcggggagc

SEQ ID NO: 172560 - DNA, 25 bp, Probe Sequence
cacttgggaaagactggcttagctg

SEQ ID NO: 172561 - DNA, 25 bp, Probe Sequence
cacccggaagcgcaggcttgaggat

SEQ ID NO: 172562 - DNA, 25 bp, Probe Sequence
cacgcctgtaatcccagcactttgg

SEQ ID NO: 172563 - DNA, 25 bp, Probe Sequence
cactgccatgtatgaaagtctcttt

SEQ ID NO: 172564 - DNA, 25 bp, Probe Sequence
cacgaatattcgcacgtgtattttt

SEQ ID NO: 172565 - DNA, 25 bp, Probe Sequence
cactgaatataaccctggttttgtg

SEQ ID NO: 172566 - DNA, 25 bp, Probe Sequence
cacattctacactcagctggtgttg

SEQ ID NO: 172567 - DNA, 25 bp, Probe Sequence
cacctgtcatcataactggcttctg

SEQ ID NO: 172568 - DNA, 25 bp, Probe Sequence
cactggaatgcatatactactttat

SEQ ID NO: 172569 - DNA, 25 bp, Probe Sequence
cacttgaatatctaatagacatctt

SEQ ID NO: 172570 - DNA, 25 bp, Probe Sequence
cactcagtcatctttgtatgaatcc

SEQ ID NO: 172571 - DNA, 25 bp, Probe Sequence
cactctgtcatgtcctgctgatgga

SEQ ID NO: 172572 - DNA, 25 bp, Probe Sequence
cacttgtgcatgggctaaaaccagg

SEQ ID NO: 172573 - DNA, 25 bp, Probe Sequence
cacgtggagctgcctaaatcctgat

SEQ ID NO: 172574 - DNA, 25 bp, Probe Sequence
cactgtggacacccagttcatcgac

SEQ ID NO: 172575 - DNA, 25 bp, Probe Sequence
cacttgacgcatgaagtttcgcaac

SEQ ID NO: 172576 - DNA, 25 bp, Probe Sequence
cacttacctaacaagtactgctcat

SEQ ID NO: 172577 - DNA, 25 bp, Probe Sequence
cacttcagcctcccaagtagctggt

SEQ ID NO: 172578 - DNA, 25 bp, Probe Sequence
cacttgcactccggaggtagaggtt

SEQ ID NO: 172579 - DNA, 25 bp, Probe Sequence
cacttgcaccgctgaaggaagacaa

SEQ ID NO: 172580 - DNA, 25 bp, Probe Sequence
cacttgcaaccgtggaggagccaga

SEQ ID NO: 172581 - DNA, 25 bp, Probe Sequence
cctggctacaagctgggggacgacc

SEQ ID NO: 172582 - DNA, 25 bp, Probe Sequence
cactggcaacaaagaaggtgggagc

SEQ ID NO: 172583 - DNA, 25 bp, Probe Sequence
cactggattcagtgcaggtttggat

SEQ ID NO: 172584 - DNA, 25 bp, Probe Sequence
cactggataaacctggttcatcttt

SEQ ID NO: 172585 - DNA, 25 bp, Probe Sequence
cactgtgaaatcgctggtgctcaca

SEQ ID NO: 172586 - DNA, 25 bp, Probe Sequence
cactgagaccacgctttgatccagt

SEQ ID NO: 172587 - DNA, 25 bp, Probe Sequence
cactggtccggaggttatgtcttcg

SEQ ID NO: 172588 - DNA, 25 bp, Probe Sequence
cactcgctgggggtgtttgtttgcc

SEQ ID NO: 172589 - DNA, 25 bp, Probe Sequence
cactactgaggtggttctttctatc

SEQ ID NO: 172590 - DNA, 25 bp, Probe Sequence
cactcctgagcatgtgtttattcat

SEQ ID NO: 172591 - DNA, 25 bp, Probe Sequence
cactactgcagctgtcttttctatc

SEQ ID NO: 172592 - DNA, 25 bp, Probe Sequence
cactcactaccctgtttcagatgca

SEQ ID NO: 172593 - DNA, 25 bp, Probe Sequence
cagacctacccttcgattggaactg

SEQ ID NO: 172594 - DNA, 25 bp, Probe Sequence
gaaacgtcccttgtcaggagacggc

SEQ ID NO: 172595 - DNA, 25 bp, Probe Sequence
gaaccagtccctgaccaggatgagc

SEQ ID NO: 172596 - DNA, 25 bp, Probe Sequence
ggaccagaccctgaaacctggcaaa

SEQ ID NO: 172597 - DNA, 25 bp, Probe Sequence
gaaccaatgtttgaagtccctaatt

SEQ ID NO: 172598 - DNA, 25 bp, Probe Sequence
cacgcaagcatggttaacgtcccta

SEQ ID NO: 172599 - DNA, 25 bp, Probe Sequence
cactcagtaggtctgaaggcctcca

SEQ ID NO: 172600 - DNA, 25 bp, Probe Sequence
cacttgtgagttcataggacctgac

SEQ ID NO: 172601 - DNA, 25 bp, Probe Sequence
cactcttggttctttggagccttgt

SEQ ID NO: 172602 - DNA, 25 bp, Probe Sequence
cactcttggttctttggagccttgt

SEQ ID NO: 172603 - DNA, 25 bp, Probe Sequence
cactttgggtattctgagattttct

SEQ ID NO: 172604 - DNA, 25 bp, Probe Sequence
cactacttggtttctgatttgctct

SEQ ID NO: 172605 - DNA, 25 bp, Probe Sequence
cacttattagtctgctgtttctctg

SEQ ID NO: 172606 - DNA, 25 bp, Probe Sequence
cacttcccaagctgctgtttcaagg

SEQ ID NO: 172607 - DNA, 25 bp, Probe Sequence
cactgccccaacagctatgttaata

SEQ ID NO: 172608 - DNA, 25 bp, Probe Sequence
cactggccgaacatcaagggatcat

SEQ ID NO: 172609 - DNA, 25 bp, Probe Sequence
cacttcacgatgtcactacttgttt

SEQ ID NO: 172610 - DNA, 25 bp, Probe Sequence
cacttgtcatggtctttcttggtat

SEQ ID NO: 172611 - DNA, 25 bp, Probe Sequence
cactcattcagtttgctactaggtc

SEQ ID NO: 172612 - DNA, 25 bp, Probe Sequence
cactcactctgtctggtataggcta

SEQ ID NO: 172613 - DNA, 25 bp, Probe Sequence
cactcagccaatctgttctgggccc

SEQ ID NO: 172614 - DNA, 25 bp, Probe Sequence
cactgcgcgaagctgctgactgagg

SEQ ID NO: 172615 - DNA, 25 bp, Probe Sequence
cactcgccgatgaggccagcaggaa

SEQ ID NO: 172616 - DNA, 25 bp, Probe Sequence
cactcgccgatgaggccagcagatc

SEQ ID NO: 172617 - DNA, 25 bp, Probe Sequence
cacttccgctgctgcggcagcatat

SEQ ID NO: 172618 - DNA, 25 bp, Probe Sequence
cacttccgctgctgcggcagcatat

SEQ ID NO: 172619 - DNA, 25 bp, Probe Sequence
cacttctgcctctactgtagatgta

SEQ ID NO: 172620 - DNA, 25 bp, Probe Sequence
cacttctgcctctactgtagatgta

SEQ ID NO: 172621 - DNA, 25 bp, Probe Sequence
cacttctgcctcggtttgttgagac

SEQ ID NO: 172622 - DNA, 25 bp, Probe Sequence
cactgtggccaagaggtgcttgagg

SEQ ID NO: 172623 - DNA, 25 bp, Probe Sequence
cacttcatcctacagacgcttgagg

SEQ ID NO: 172624 - DNA, 25 bp, Probe Sequence
cacttcatcctaaacacagcttctc

SEQ ID NO: 172625 - DNA, 25 bp, Probe Sequence
cacgtgtccttaacacctgatctgg

SEQ ID NO: 172626 - DNA, 25 bp, Probe Sequence
cactgtgtcctttctatcacgttat

SEQ ID NO: 172627 - DNA, 25 bp, Probe Sequence
cactgggcactttcttatcgagata

SEQ ID NO: 172628 - DNA, 25 bp, Probe Sequence
cactgttgccaaactataccatgga

SEQ ID NO: 172629 - DNA, 25 bp, Probe Sequence
cacttggacctgattgaacatgcga

SEQ ID NO: 172630 - DNA, 25 bp, Probe Sequence
cactgtggaacgtctgtaaatatgt

SEQ ID NO: 172631 - DNA, 25 bp, Probe Sequence
cacttgagaaggctgatcacccagc

SEQ ID NO: 172632 - DNA, 25 bp, Probe Sequence
cactagagattgcctgtgtcctgcc

SEQ ID NO: 172633 - DNA, 25 bp, Probe Sequence
cacttagcatatcgtgggcatctcc

SEQ ID NO: 172634 - DNA, 25 bp, Probe Sequence
cactaactatgcatggtgccccagg

SEQ ID NO: 172635 - DNA, 25 bp, Probe Sequence
cactgagacggcagagaccccagga

SEQ ID NO: 172636 - DNA, 25 bp, Probe Sequence
cacgaacagggtcgagcttctcggt

SEQ ID NO: 172637 - DNA, 25 bp, Probe Sequence
cacggcactccgcgagctgtatcgg

SEQ ID NO: 172638 - DNA, 25 bp, Probe Sequence
cacgtcccgggcggtatacagttgc

SEQ ID NO: 172639 - DNA, 25 bp, Probe Sequence
cacggccgagggagaaggagtatga

SEQ ID NO: 172640 - DNA, 25 bp, Probe Sequence
cacgtgccggaagccaagtggtggc

SEQ ID NO: 172641 - DNA, 25 bp, Probe Sequence
cactttgggagtgccaaggcaggtg

SEQ ID NO: 172642 - DNA, 25 bp, Probe Sequence
cactttgggaggctgacgcaggcgg

SEQ ID NO: 172643 - DNA, 25 bp, Probe Sequence
cacttagggaggccgaggcgggcgg

SEQ ID NO: 172644 - DNA, 25 bp, Probe Sequence
cacttagggaggccgaggcgggcgg

SEQ ID NO: 172645 - DNA, 25 bp, Probe Sequence
cactggaggggttcaaaggttcgcg

SEQ ID NO: 172646 - DNA, 25 bp, Probe Sequence
cacggttgggtaaacatagttactg

SEQ ID NO: 172647 - DNA, 25 bp, Probe Sequence
cactggtgggtggaatgacattgtt

SEQ ID NO: 172648 - DNA, 25 bp, Probe Sequence
cactttgcctgggatatgagccggt

SEQ ID NO: 172649 - DNA, 25 bp, Probe Sequence
cactctatccgggagatggcctgca

SEQ ID NO: 172650 - DNA, 25 bp, Probe Sequence
cactctattcgccttaggcatgtgc

SEQ ID NO: 172651 - DNA, 25 bp, Probe Sequence
cactattggccgcctgcaggatgag

SEQ ID NO: 172652 - DNA, 25 bp, Probe Sequence
cactgaagcagccgctggcacagga

SEQ ID NO: 172653 - DNA, 25 bp, Probe Sequence
cactgagacggccgatgccatgaac

SEQ ID NO: 172654 - DNA, 25 bp, Probe Sequence
cacggtcaggcttggctgcaaaaca

SEQ ID NO: 172655 - DNA, 25 bp, Probe Sequence
cacttacagaggtgcatgactaaat

SEQ ID NO: 172656 - DNA, 25 bp, Probe Sequence
cactatcacgagacccagattaatt

SEQ ID NO: 172657 - DNA, 25 bp, Probe Sequence
cactatcctaatcgcccatattaat

SEQ ID NO: 172658 - DNA, 25 bp, Probe Sequence
cacttcgtcaatagacactttgcag

SEQ ID NO: 172659 - DNA, 25 bp, Probe Sequence
cactagtgtctaatgaagcttttaa

SEQ ID NO: 172660 - DNA, 25 bp, Probe Sequence
cactgaggttttaagctgctgtata

SEQ ID NO: 172661 - DNA, 25 bp, Probe Sequence
cactggagtatttgcttttataggc

SEQ ID NO: 172662 - DNA, 25 bp, Probe Sequence
cactggcaaaaacattatgaccctc

SEQ ID NO: 172663 - DNA, 25 bp, Probe Sequence
cacggaacggaattcttcagctccc

SEQ ID NO: 172664 - DNA, 25 bp, Probe Sequence
cagcaaaggggaccctttgctggcc

SEQ ID NO: 172665 - DNA, 25 bp, Probe Sequence
cacgaaggcaaaccctactgcaacc

SEQ ID NO: 172666 - DNA, 25 bp, Probe Sequence
cacgcagggcaaaaggcaactgcag

SEQ ID NO: 172667 - DNA, 25 bp, Probe Sequence
cactctggacttcagccaacaggac

SEQ ID NO: 172668 - DNA, 25 bp, Probe Sequence
cactgcagtgcattataccaaagag

SEQ ID NO: 172669 - DNA, 25 bp, Probe Sequence
cactgcagtgcattataccaaagag

SEQ ID NO: 172670 - DNA, 25 bp, Probe Sequence
cactgcaggacagcaacaacaagct

SEQ ID NO: 172671 - DNA, 25 bp, Probe Sequence
cacgctgtccaaggcattacagagt

SEQ ID NO: 172672 - DNA, 25 bp, Probe Sequence
cactctagccacagtatattgcaat

SEQ ID NO: 172673 - DNA, 25 bp, Probe Sequence
cactctggttcagtgttttgaaaat

SEQ ID NO: 172674 - DNA, 25 bp, Probe Sequence
cactgtgttctatatggttacgtat

SEQ ID NO: 172675 - DNA, 25 bp, Probe Sequence
cactaaactaaattgtgtacagtat

SEQ ID NO: 172676 - DNA, 25 bp, Probe Sequence
cactaacacatatagggcttccttt

SEQ ID NO: 172677 - DNA, 25 bp, Probe Sequence
catcttccctagagggttcctgtag

SEQ ID NO: 172678 - DNA, 25 bp, Probe Sequence
cacttcttctagagtaattatctgt

SEQ ID NO: 172679 - DNA, 25 bp, Probe Sequence
cactctccctaatgaaatgtacttc

SEQ ID NO: 172680 - DNA, 25 bp, Probe Sequence
cacttccccaacgaatttattgttg

SEQ ID NO: 172681 - DNA, 25 bp, Probe Sequence
cacttcccatctgtaatttgcaggg

SEQ ID NO: 172682 - DNA, 25 bp, Probe Sequence
cacgtcgtcgcggtagaaatggagg

SEQ ID NO: 172683 - DNA, 25 bp, Probe Sequence
cacctggtcggggaggagaccatgg

SEQ ID NO: 172684 - DNA, 25 bp, Probe Sequence
cactgtggtcatgggaacgagaaca

SEQ ID NO: 172685 - DNA, 25 bp, Probe Sequence
cactgaggccgtgaccagagaagag

SEQ ID NO: 172686 - DNA, 25 bp, Probe Sequence
caccaggcctgaaaccagccctggg

SEQ ID NO: 172687 - DNA, 25 bp, Probe Sequence
cacttctgccgaatgactctggcca

SEQ ID NO: 172688 - DNA, 25 bp, Probe Sequence
cactttgtctgtacatactggcctc

SEQ ID NO: 172689 - DNA, 25 bp, Probe Sequence
cactgtatttgtatctctgaagcat

SEQ ID NO: 172690 - DNA, 25 bp, Probe Sequence
cactgatttggtatactgcactcta

SEQ ID NO: 172691 - DNA, 25 bp, Probe Sequence
cactgttcttgtagatggctgctct

SEQ ID NO: 172692 - DNA, 25 bp, Probe Sequence
cactggctctatgttgaggactcag

SEQ ID NO: 172693 - DNA, 25 bp, Probe Sequence
cactcagctggtgttgatgcccaag

SEQ ID NO: 172694 - DNA, 25 bp, Probe Sequence
cactcattgacagggctggccttag

SEQ ID NO: 172695 - DNA, 25 bp, Probe Sequence
cactcagtgacacggctcaagtcta

SEQ ID NO: 172696 - DNA, 25 bp, Probe Sequence
cactcttacaggcccaggactggag

SEQ ID NO: 172697 - DNA, 25 bp, Probe Sequence
cactttacagaatccagttgtgcag

SEQ ID NO: 172698 - DNA, 25 bp, Probe Sequence
cactttgccaaagctctgggtgaca

SEQ ID NO: 172699 - DNA, 25 bp, Probe Sequence
cactttgcaaaaactgtcaggaggg

SEQ ID NO: 172700 - DNA, 25 bp, Probe Sequence
cactcttcagagactacgtccacag

SEQ ID NO: 172701 - DNA, 25 bp, Probe Sequence
cactttatagccacggctgcacaga

SEQ ID NO: 172702 - DNA, 25 bp, Probe Sequence
cactttctacgctcgggagcggctg

SEQ ID NO: 172703 - DNA, 25 bp, Probe Sequence
cactttccagactgggcagccaggc

SEQ ID NO: 172704 - DNA, 25 bp, Probe Sequence
cactactcaagaccggaggcacaga

SEQ ID NO: 172705 - DNA, 25 bp, Probe Sequence
caccataaaacccttgagcacaaca

SEQ ID NO: 172706 - DNA, 25 bp, Probe Sequence
caccgaaaagagcctgtacaaccag

SEQ ID NO: 172707 - DNA, 25 bp, Probe Sequence
cacctaaggaagcctttggcacccg

SEQ ID NO: 172708 - DNA, 25 bp, Probe Sequence
caccaaatggacctggtggccaccc

SEQ ID NO: 172709 - DNA, 25 bp, Probe Sequence
cagccattattacttttggtatccc

SEQ ID NO: 172710 - DNA, 25 bp, Probe Sequence
cactcttacatattccttggaacct

SEQ ID NO: 172711 - DNA, 25 bp, Probe Sequence
cactccaaaagttttcgacacctag

SEQ ID NO: 172712 - DNA, 25 bp, Probe Sequence
cacccaggtagttttgctgtcagcc

SEQ ID NO: 172713 - DNA, 25 bp, Probe Sequence
cacccgggactacttgctggtgact

SEQ ID NO: 172714 - DNA, 25 bp, Probe Sequence
cagccttttactcttctgttagctc

SEQ ID NO: 172715 - DNA, 25 bp, Probe Sequence
cacggtttaattttcatggggctct

SEQ ID NO: 172716 - DNA, 25 bp, Probe Sequence
cacgctttttttaggtgcagggcgc

SEQ ID NO: 172717 - DNA, 25 bp, Probe Sequence
caccgtttcctgattgctcagggac

SEQ ID NO: 172718 - DNA, 25 bp, Probe Sequence
caccagtggtttcttctaattataa

SEQ ID NO: 172719 - DNA, 25 bp, Probe Sequence
cactcactcgtgttcttttcaaata

SEQ ID NO: 172720 - DNA, 25 bp, Probe Sequence
caccaccctgagggttgtgcaccac

SEQ ID NO: 172721 - DNA, 25 bp, Probe Sequence
cactactcctgaggatgctactccc

SEQ ID NO: 172722 - DNA, 25 bp, Probe Sequence
cacgtatgccgtacagtactcctgc

SEQ ID NO: 172723 - DNA, 25 bp, Probe Sequence
cacgtgtctgtggctggaactgccc

SEQ ID NO: 172724 - DNA, 25 bp, Probe Sequence
cactgtgcattgcattatggacagc

SEQ ID NO: 172725 - DNA, 25 bp, Probe Sequence
cactgcatcttgtatcgattatggt

SEQ ID NO: 172726 - DNA, 25 bp, Probe Sequence
cactatgttgcctgcaatagggctc

SEQ ID NO: 172727 - DNA, 25 bp, Probe Sequence
cacgatgtacatttacaagcggcct

SEQ ID NO: 172728 - DNA, 25 bp, Probe Sequence
cacggagatcattatcaccacaagt

SEQ ID NO: 172729 - DNA, 25 bp, Probe Sequence
caccatggcgcagacttccaaataa

SEQ ID NO: 172730 - DNA, 25 bp, Probe Sequence
cactatgtgccccaatatcatcaaa

SEQ ID NO: 172731 - DNA, 25 bp, Probe Sequence
cactgttcccagtcagcatatacaa

SEQ ID NO: 172732 - DNA, 25 bp, Probe Sequence
cactcattaccgtctgtgattgcca

SEQ ID NO: 172733 - DNA, 25 bp, Probe Sequence
cactagctcaccagcagtgaatcca

SEQ ID NO: 172734 - DNA, 25 bp, Probe Sequence
cactcactgcactggcagggtgcaa

SEQ ID NO: 172735 - DNA, 25 bp, Probe Sequence
cactgaccaccggcaggagctaatt

SEQ ID NO: 172736 - DNA, 25 bp, Probe Sequence
cactttgcctccagacagctaatac

SEQ ID NO: 172737 - DNA, 25 bp, Probe Sequence
cacgtgtccccaaacagcaatagtc

SEQ ID NO: 172738 - DNA, 25 bp, Probe Sequence
catctttccagtaaccaggtagtcc

SEQ ID NO: 172739 - DNA, 25 bp, Probe Sequence
cactatatcgagtacatacaggtag

SEQ ID NO: 172740 - DNA, 25 bp, Probe Sequence
cacttactgtgtataaggcttgcaa

SEQ ID NO: 172741 - DNA, 25 bp, Probe Sequence
cacggactgtagtaataagcttgca

SEQ ID NO: 172742 - DNA, 25 bp, Probe Sequence
cacgaactggagattaacgtactgt

SEQ ID NO: 172743 - DNA, 25 bp, Probe Sequence
caccagtctggctttaaaccaactg

SEQ ID NO: 172744 - DNA, 25 bp, Probe Sequence
caccaaaacaattaccagccatact

SEQ ID NO: 172745 - DNA, 25 bp, Probe Sequence
cacccaactatctataaacctagcc

SEQ ID NO: 172746 - DNA, 25 bp, Probe Sequence
caccatcaagctgctgaatgaaaat

SEQ ID NO: 172747 - DNA, 25 bp, Probe Sequence
caccccgtcctggtgaataaacgca

SEQ ID NO: 172748 - DNA, 25 bp, Probe Sequence
caccctttgcttggttttaagtatg

SEQ ID NO: 172749 - DNA, 25 bp, Probe Sequence
caccctttgcttggttttaagtatg

SEQ ID NO: 172750 - DNA, 25 bp, Probe Sequence
gactcgtacttaggtgtcttaacgt

SEQ ID NO: 172751 - DNA, 25 bp, Probe Sequence
cactgcgtactggaagggcttcaag

SEQ ID NO: 172752 - DNA, 25 bp, Probe Sequence
cactcactacatgaagtcctgaaaa

SEQ ID NO: 172753 - DNA, 25 bp, Probe Sequence
cactccatacgcaaaccgcgataca

SEQ ID NO: 172754 - DNA, 25 bp, Probe Sequence
cactccccagactaagccgagatag

SEQ ID NO: 172755 - DNA, 25 bp, Probe Sequence
cacctcaccgaaaagagcctgtaca

SEQ ID NO: 172756 - DNA, 25 bp, Probe Sequence
cagggacctgaaaggatccagaaat

SEQ ID NO: 172757 - DNA, 25 bp, Probe Sequence
cacggacctaataccttgagacttc

SEQ ID NO: 172758 - DNA, 25 bp, Probe Sequence
cactggactgtggatacgttgaaat

SEQ ID NO: 172759 - DNA, 25 bp, Probe Sequence
caccgagagatcgtacgggactttc

SEQ ID NO: 172760 - DNA, 25 bp, Probe Sequence
caccaagatcaccgacgtcgacatt

SEQ ID NO: 172761 - DNA, 25 bp, Probe Sequence
caccaagatcaccgacgtcgacatt

SEQ ID NO: 172762 - DNA, 25 bp, Probe Sequence
caccaagatcaccgacgtcgacatt

SEQ ID NO: 172763 - DNA, 25 bp, Probe Sequence
cacgagaacaactacgtgatgaatg

SEQ ID NO: 172764 - DNA, 25 bp, Probe Sequence
cacggtgaaaatgcactgctacatg

SEQ ID NO: 172765 - DNA, 25 bp, Probe Sequence
cacgtaaatgcgtccctgtacagat

SEQ ID NO: 172766 - DNA, 25 bp, Probe Sequence
cagagaggggccttacttaagtaat

SEQ ID NO: 172767 - DNA, 25 bp, Probe Sequence
cacgagattggccattccttaggtc

SEQ ID NO: 172768 - DNA, 25 bp, Probe Sequence
cacgatgtgccagtcattcctttgg

SEQ ID NO: 172769 - DNA, 25 bp, Probe Sequence
cacgtttgccatatcccattggtta

SEQ ID NO: 172770 - DNA, 25 bp, Probe Sequence
cactgtgttccatgtgcctgatgtg

SEQ ID NO: 172771 - DNA, 25 bp, Probe Sequence
cactgcagcgactagggacacttgt

SEQ ID NO: 172772 - DNA, 25 bp, Probe Sequence
cactgacagagctagaggagtccat

SEQ ID NO: 172773 - DNA, 25 bp, Probe Sequence
cactgaggatgcagtgcgcagccac

SEQ ID NO: 172774 - DNA, 25 bp, Probe Sequence
cactgggagcacaatgcccacatca

SEQ ID NO: 172775 - DNA, 25 bp, Probe Sequence
cactgagtggcttcagcctcagtcc

SEQ ID NO: 172776 - DNA, 25 bp, Probe Sequence
cactgggcatcaatcagccttgtct

SEQ ID NO: 172777 - DNA, 25 bp, Probe Sequence
cactgttctataggcttatgatctg

SEQ ID NO: 172778 - DNA, 25 bp, Probe Sequence
cactctgacattcggcttgatccat

SEQ ID NO: 172779 - DNA, 25 bp, Probe Sequence
cactctgacctagctagtgcctggt

SEQ ID NO: 172780 - DNA, 25 bp, Probe Sequence
cactatgttctagataggtcagtct

SEQ ID NO: 172781 - DNA, 25 bp, Probe Sequence
cactatttgtaacagccaactctgg

SEQ ID NO: 172782 - DNA, 25 bp, Probe Sequence
cactttggaagatggcataacctgt

SEQ ID NO: 172783 - DNA, 25 bp, Probe Sequence
cactttgtgggattggaagaccgca

SEQ ID NO: 172784 - DNA, 25 bp, Probe Sequence
cactttgtggtgtgcaacagatcaa

SEQ ID NO: 172785 - DNA, 25 bp, Probe Sequence
caccctgggtattcaaaaacggcag

SEQ ID NO: 172786 - DNA, 25 bp, Probe Sequence
cccttgttccaaaatgaagacggca

SEQ ID NO: 172787 - DNA, 25 bp, Probe Sequence
cacgttttcatctctagggaccaga

SEQ ID NO: 172788 - DNA, 25 bp, Probe Sequence
cactgtcctgttttcttaggcactg

SEQ ID NO: 172789 - DNA, 25 bp, Probe Sequence
cactgtcctgttttcttaggcactg

SEQ ID NO: 172790 - DNA, 25 bp, Probe Sequence
cactgttctcttctgctgggaaatg

SEQ ID NO: 172791 - DNA, 25 bp, Probe Sequence
cactttctgcccatgctgcagacag

SEQ ID NO: 172792 - DNA, 25 bp, Probe Sequence
cactttctgcccatgctgcagacag

SEQ ID NO: 172793 - DNA, 25 bp, Probe Sequence
cactttggccacagcaggacagggg

SEQ ID NO: 172794 - DNA, 25 bp, Probe Sequence
cactctaggactctgcactgaatgg

SEQ ID NO: 172795 - DNA, 25 bp, Probe Sequence
cactctaggactctgcactgaatgg

SEQ ID NO: 172796 - DNA, 25 bp, Probe Sequence
cactcggcagtcatccactaagatg

SEQ ID NO: 172797 - DNA, 25 bp, Probe Sequence
cactcctggatcttcacattgaact

SEQ ID NO: 172798 - DNA, 25 bp, Probe Sequence
cactctgttctctcatctgtgaaca

SEQ ID NO: 172799 - DNA, 25 bp, Probe Sequence
cactctggacctaatagctgttcct

SEQ ID NO: 172800 - DNA, 25 bp, Probe Sequence
cactgcgagacctgcatatctggct

SEQ ID NO: 172801 - DNA, 25 bp, Probe Sequence
cactgatgaacaactgcattccgca

SEQ ID NO: 172802 - DNA, 25 bp, Probe Sequence
cactgtcatcagaatctgtcggcca

SEQ ID NO: 172803 - DNA, 25 bp, Probe Sequence
cactgtcatggcaatgggctcacac

SEQ ID NO: 172804 - DNA, 25 bp, Probe Sequence
cactgtgatgtggacgggcagccgg

SEQ ID NO: 172805 - DNA, 25 bp, Probe Sequence
cacgtgcagtgaaggcggctgcaca

SEQ ID NO: 172806 - DNA, 25 bp, Probe Sequence
cacgtgtggtaccagggcaacgcgt

SEQ ID NO: 172807 - DNA, 25 bp, Probe Sequence
cactgtggagtaatgagggggagga

SEQ ID NO: 172808 - DNA, 25 bp, Probe Sequence
cactgggatccaagcagggggatga

SEQ ID NO: 172809 - DNA, 25 bp, Probe Sequence
cactgggcctagggagggctcgaag

SEQ ID NO: 172810 - DNA, 25 bp, Probe Sequence
cactgggcccaggccaggaggggcc

SEQ ID NO: 172811 - DNA, 25 bp, Probe Sequence
cactatgcgccacaccagatgaagg

SEQ ID NO: 172812 - DNA, 25 bp, Probe Sequence
cactatgcctctgacctggacaagg

SEQ ID NO: 172813 - DNA, 25 bp, Probe Sequence
cactgtctatcagtacgtcggcaat

SEQ ID NO: 172814 - DNA, 25 bp, Probe Sequence
cactcccatcagaacttggcagcct

SEQ ID NO: 172815 - DNA, 25 bp, Probe Sequence
cactcccatcagaacttggcagcct

SEQ ID NO: 172816 - DNA, 25 bp, Probe Sequence
cactgctcattaatcctgggagtct

SEQ ID NO: 172817 - DNA, 25 bp, Probe Sequence
cacgtcagttgaccaggaagtcccc

SEQ ID NO: 172818 - DNA, 25 bp, Probe Sequence
cacccagtgtccctggagcaatacc

SEQ ID NO: 172819 - DNA, 25 bp, Probe Sequence
tacgctcagttcgtcgtcgtaagtc

SEQ ID NO: 172820 - DNA, 25 bp, Probe Sequence
cacgtcggtctgggtgttaagtgct

SEQ ID NO: 172821 - DNA, 25 bp, Probe Sequence
caccctggctagagtttacgttgat

SEQ ID NO: 172822 - DNA, 25 bp, Probe Sequence
caccgggtgaccggcttacagggat

SEQ ID NO: 172823 - DNA, 25 bp, Probe Sequence
cccgggatggccgctaaatagctca

SEQ ID NO: 172824 - DNA, 25 bp, Probe Sequence
cacgggggaccgaatccaaagctct

SEQ ID NO: 172825 - DNA, 25 bp, Probe Sequence
cactgggcaaatatggtacaaactt

SEQ ID NO: 172826 - DNA, 25 bp, Probe Sequence
cactggcaagaaaatggacccacct

SEQ ID NO: 172827 - DNA, 25 bp, Probe Sequence
cactgagaactaaatgctgtaccac

SEQ ID NO: 172828 - DNA, 25 bp, Probe Sequence
cactggcaccataacatggggccaa

SEQ ID NO: 172829 - DNA, 25 bp, Probe Sequence
cactgtcacgctcacagtagccata

SEQ ID NO: 172830 - DNA, 25 bp, Probe Sequence
cactgactggctcagcgtgtgccta

SEQ ID NO: 172831 - DNA, 25 bp, Probe Sequence
cactgtgcggctcaaattcctcaat

SEQ ID NO: 172832 - DNA, 25 bp, Probe Sequence
cactatcggcatcggaactcctgcc

SEQ ID NO: 172833 - DNA, 25 bp, Probe Sequence
cactcacggataagacaccaagacg

SEQ ID NO: 172834 - DNA, 25 bp, Probe Sequence
cactcagctcttaaagcaacctgtc

SEQ ID NO: 172835 - DNA, 25 bp, Probe Sequence
cactcagctcaaagcaaccagctcc

SEQ ID NO: 172836 - DNA, 25 bp, Probe Sequence
cactgcagatgaccaaacctgtccc

SEQ ID NO: 172837 - DNA, 25 bp, Probe Sequence
cactgcagatgaccaaacctgtccc

SEQ ID NO: 172838 - DNA, 25 bp, Probe Sequence
cactgatatatgcaaacccgccggt

SEQ ID NO: 172839 - DNA, 25 bp, Probe Sequence
cactattttagattcctggcattcg

SEQ ID NO: 172840 - DNA, 25 bp, Probe Sequence
cactgttttagctcttgccaaacct

SEQ ID NO: 172841 - DNA, 25 bp, Probe Sequence
cacgttggagctttcttgccagaac

SEQ ID NO: 172842 - DNA, 25 bp, Probe Sequence
cactgaggggtcgccccgagagaag

SEQ ID NO: 172843 - DNA, 25 bp, Probe Sequence
cactgaggggtcgccccgagagaag

SEQ ID NO: 172844 - DNA, 25 bp, Probe Sequence
cacgggtctgcctcctaaaagaagg

SEQ ID NO: 172845 - DNA, 25 bp, Probe Sequence
cactgggtttgctccctgattaaag

SEQ ID NO: 172846 - DNA, 25 bp, Probe Sequence
cactatctcggagacccagatttaa

SEQ ID NO: 172847 - DNA, 25 bp, Probe Sequence
cacggcacggaaacccatatttagt

SEQ ID NO: 172848 - DNA, 25 bp, Probe Sequence
cacggcaaaaaacccttcagtcagc

SEQ ID NO: 172849 - DNA, 25 bp, Probe Sequence
caccgaaaacaacagggagctcagt

SEQ ID NO: 172850 - DNA, 25 bp, Probe Sequence
caccgacgagaccagaagtggcatg

SEQ ID NO: 172851 - DNA, 25 bp, Probe Sequence
caccgccaggactgaatgttacatc

SEQ ID NO: 172852 - DNA, 25 bp, Probe Sequence
cactgccccgtgtgaatgtagcttc

SEQ ID NO: 172853 - DNA, 25 bp, Probe Sequence
caccgcaccgtatcagtgctcaatg

SEQ ID NO: 172854 - DNA, 25 bp, Probe Sequence
cacgctcaaagtttcaggtctcgcg

SEQ ID NO: 172855 - DNA, 25 bp, Probe Sequence
cactgggaagtctaagagtccatgc

SEQ ID NO: 172856 - DNA, 25 bp, Probe Sequence
cactggaaagagtgccagtcagcag

SEQ ID NO: 172857 - DNA, 25 bp, Probe Sequence
cactgagaaagctaagccctacatt

SEQ ID NO: 172858 - DNA, 25 bp, Probe Sequence
cactacaaaaaggcgcccatcttca

SEQ ID NO: 172859 - DNA, 25 bp, Probe Sequence
cactaaacacaagtcccagtgtggc

SEQ ID NO: 172860 - DNA, 25 bp, Probe Sequence
cactgaaaccgagtcacctgtgggg

SEQ ID NO: 172861 - DNA, 25 bp, Probe Sequence
cacggactccagtgccactgtgagg

SEQ ID NO: 172862 - DNA, 25 bp, Probe Sequence
cactggagccactccaattgctggc

SEQ ID NO: 172863 - DNA, 25 bp, Probe Sequence
cactcgggctaagcagattgtgtgg

SEQ ID NO: 172864 - DNA, 25 bp, Probe Sequence
cactgcggtgcttggtgtggttgtg

SEQ ID NO: 172865 - DNA, 25 bp, Probe Sequence
cagctggtgctatgcgtgctggcta

SEQ ID NO: 172866 - DNA, 25 bp, Probe Sequence
cacgagtgtattggtctgtctgcta

SEQ ID NO: 172867 - DNA, 25 bp, Probe Sequence
cactggtgtcgatattgtcatgaac

SEQ ID NO: 172868 - DNA, 25 bp, Probe Sequence
cactgaacctagtttgacagaagct

SEQ ID NO: 172869 - DNA, 25 bp, Probe Sequence
cactgactcctgggctctgaagaat

SEQ ID NO: 172870 - DNA, 25 bp, Probe Sequence
cactgactcctgggctctgaagaat

SEQ ID NO: 172871 - DNA, 25 bp, Probe Sequence
cactgacatgttgatcttaagattt

SEQ ID NO: 172872 - DNA, 25 bp, Probe Sequence
cactggcatgttgttggagattgat

SEQ ID NO: 172873 - DNA, 25 bp, Probe Sequence
cactgccaggtgcactggaattgct

SEQ ID NO: 172874 - DNA, 25 bp, Probe Sequence
cactcacagtgtcactgtcagatgg

SEQ ID NO: 172875 - DNA, 25 bp, Probe Sequence
cactcactgttgtagcttctgttgt

SEQ ID NO: 172876 - DNA, 25 bp, Probe Sequence
cactactcctagcctttgttaagat

SEQ ID NO: 172877 - DNA, 25 bp, Probe Sequence
caccaactctggcttagttaagtga

SEQ ID NO: 172878 - DNA, 25 bp, Probe Sequence
cacccactcgggctgcaaaaggtga

SEQ ID NO: 172879 - DNA, 25 bp, Probe Sequence
cactccagccggggtgacagaagag

SEQ ID NO: 172880 - DNA, 25 bp, Probe Sequence
cactacaccgggatgcttgaagatg

SEQ ID NO: 172881 - DNA, 25 bp, Probe Sequence
cactgtcccttgcaaggtgacaggc

SEQ ID NO: 172882 - DNA, 25 bp, Probe Sequence
cactacactcctgccagagtgacag

SEQ ID NO: 172883 - DNA, 25 bp, Probe Sequence
cactacagatcctccagatctaact

SEQ ID NO: 172884 - DNA, 25 bp, Probe Sequence
cactggcacttcgggcaataactct

SEQ ID NO: 172885 - DNA, 25 bp, Probe Sequence
cactggacttctggactacatatag

SEQ ID NO: 172886 - DNA, 25 bp, Probe Sequence
cactggatcgtcgacacagactacg

SEQ ID NO: 172887 - DNA, 25 bp, Probe Sequence
cactcagattgtagcccgtgtagca

SEQ ID NO: 172888 - DNA, 25 bp, Probe Sequence
cactgcagatagttccctgtgatcc

SEQ ID NO: 172889 - DNA, 25 bp, Probe Sequence
cactgcagagaaatggctcccacct

SEQ ID NO: 172890 - DNA, 25 bp, Probe Sequence
cactgaagaactgtcagctcagcgt

SEQ ID NO: 172891 - DNA, 25 bp, Probe Sequence
cacgaagggttttctcatcgtcgct

SEQ ID NO: 172892 - DNA, 25 bp, Probe Sequence
cactcaaggactttgttcatttcca

SEQ ID NO: 172893 - DNA, 25 bp, Probe Sequence
cactcaacggtttggatcctagaag

SEQ ID NO: 172894 - DNA, 25 bp, Probe Sequence
cactcaaccactttgaacctcagtt

SEQ ID NO: 172895 - DNA, 25 bp, Probe Sequence
cacccaaaataggagcacccagatt

SEQ ID NO: 172896 - DNA, 25 bp, Probe Sequence
cacgtaactgaacaccacctgttcc

SEQ ID NO: 172897 - DNA, 25 bp, Probe Sequence
cacgtcaactgcagccactgcaagc

SEQ ID NO: 172898 - DNA, 25 bp, Probe Sequence
cactggccaatgatgcaatctgcac

SEQ ID NO: 172899 - DNA, 25 bp, Probe Sequence
cacgaccatccattgcagatgcgca

SEQ ID NO: 172900 - DNA, 25 bp, Probe Sequence
cactgatcgctgccaatgcactcga

SEQ ID NO: 172901 - DNA, 25 bp, Probe Sequence
cacgctcagcagcatcagacacatg

SEQ ID NO: 172902 - DNA, 25 bp, Probe Sequence
cactgctctcagcacagtacgagac

SEQ ID NO: 172903 - DNA, 25 bp, Probe Sequence
cactgtccaggcaaatgccaggcct

SEQ ID NO: 172904 - DNA, 25 bp, Probe Sequence
cactgtgaactcaatctccagggct

SEQ ID NO: 172905 - DNA, 25 bp, Probe Sequence
cactgctcaacctactgcaggggct

SEQ ID NO: 172906 - DNA, 25 bp, Probe Sequence
cactctgtcacccaggctggagtgc

SEQ ID NO: 172907 - DNA, 25 bp, Probe Sequence
cactcttcttgcagctgttgagcgc

SEQ ID NO: 172908 - DNA, 25 bp, Probe Sequence
cactgcatctcgagggatctgacct

SEQ ID NO: 172909 - DNA, 25 bp, Probe Sequence
cactgatgctggatgaccttggcct

SEQ ID NO: 172910 - DNA, 25 bp, Probe Sequence
cactgatgctggatgaccttggcct

SEQ ID NO: 172911 - DNA, 25 bp, Probe Sequence
cactgtgcaggttgtgacattgtac

SEQ ID NO: 172912 - DNA, 25 bp, Probe Sequence
cactgttggtgcgagacttgttttg

SEQ ID NO: 172913 - DNA, 25 bp, Probe Sequence
cactgtttgtgtgactttgcactat

SEQ ID NO: 172914 - DNA, 25 bp, Probe Sequence
cactctgggctgtaacgtggcactg

SEQ ID NO: 172915 - DNA, 25 bp, Probe Sequence
cactcttgccctaaggtggaagccg

SEQ ID NO: 172916 - DNA, 25 bp, Probe Sequence
cactgcattttctggaaggacaccg

SEQ ID NO: 172917 - DNA, 25 bp, Probe Sequence
cacgcacttatcaggaacgcctcga

SEQ ID NO: 172918 - DNA, 25 bp, Probe Sequence
cacgcacttatcaggaacgcctcga

SEQ ID NO: 172919 - DNA, 25 bp, Probe Sequence
cactgaccttatatgtgacccctga

SEQ ID NO: 172920 - DNA, 25 bp, Probe Sequence
cactgaccttatatgtgacccctga

SEQ ID NO: 172921 - DNA, 25 bp, Probe Sequence
cactccctgttcatagagcacgtct

SEQ ID NO: 172922 - DNA, 25 bp, Probe Sequence
cactcttctgtaaatagatgacctt

SEQ ID NO: 172923 - DNA, 25 bp, Probe Sequence
cactgttctccaaaggtaccttatc

SEQ ID NO: 172924 - DNA, 25 bp, Probe Sequence
cactgccttccaaagaaacgattga

SEQ ID NO: 172925 - DNA, 25 bp, Probe Sequence
cactcacttccaaaagattgttgta

SEQ ID NO: 172926 - DNA, 25 bp, Probe Sequence
caccgtacatcacaatgaagtgttc

SEQ ID NO: 172927 - DNA, 25 bp, Probe Sequence
caccccactcgtgtaagcagtttgg

SEQ ID NO: 172928 - DNA, 25 bp, Probe Sequence
catccccactgtatacaactttggg

SEQ ID NO: 172929 - DNA, 25 bp, Probe Sequence
catccccattaaaaagcttttcctg

SEQ ID NO: 172930 - DNA, 25 bp, Probe Sequence
cactcccaaaatgaggcttttctga

SEQ ID NO: 172931 - DNA, 25 bp, Probe Sequence
cactccgaattagcggtgtatttct

SEQ ID NO: 172932 - DNA, 25 bp, Probe Sequence
cactccaaactaagggcttctagct

SEQ ID NO: 172933 - DNA, 25 bp, Probe Sequence
cactctcacaaccaatgagatctga

SEQ ID NO: 172934 - DNA, 25 bp, Probe Sequence
cactcatcactaacaaggtcatcat

SEQ ID NO: 172935 - DNA, 25 bp, Probe Sequence
cactctcatttgtaagcagtccaca

SEQ ID NO: 172936 - DNA, 25 bp, Probe Sequence
cactcttctggctgacagcacaaga

SEQ ID NO: 172937 - DNA, 25 bp, Probe Sequence
cactctacttgatctcagagaaggt

SEQ ID NO: 172938 - DNA, 25 bp, Probe Sequence
cactgctactttgtgagtaaagaaa

SEQ ID NO: 172939 - DNA, 25 bp, Probe Sequence
cactgtacctctcgtaacacagcaa

SEQ ID NO: 172940 - DNA, 25 bp, Probe Sequence
cactctgccctccaaaaagacaaaa

SEQ ID NO: 172941 - DNA, 25 bp, Probe Sequence
cactgatccctggacagaaaaaaag

SEQ ID NO: 172942 - DNA, 25 bp, Probe Sequence
cactccagcctgggcaaaaaagcaa

SEQ ID NO: 172943 - DNA, 25 bp, Probe Sequence
cactccagcctgggcaacaagtcaa

SEQ ID NO: 172944 - DNA, 25 bp, Probe Sequence
cactccagcttgggcaacgagcaaa

SEQ ID NO: 172945 - DNA, 25 bp, Probe Sequence
cactccagcttgggcaacagcgaga

SEQ ID NO: 172946 - DNA, 25 bp, Probe Sequence
cactgcggttcattcatacaatgga

SEQ ID NO: 172947 - DNA, 25 bp, Probe Sequence
cactgtgttttgtcaacgtgaaatt

SEQ ID NO: 172948 - DNA, 25 bp, Probe Sequence
cactcttttcattcacacttgtaca

SEQ ID NO: 172949 - DNA, 25 bp, Probe Sequence
cactcttattcatgagtccgtatca

SEQ ID NO: 172950 - DNA, 25 bp, Probe Sequence
cactgcctcagaagacttcctttca

SEQ ID NO: 172951 - DNA, 25 bp, Probe Sequence
cactcctcagaatattcttctaagt

SEQ ID NO: 172952 - DNA, 25 bp, Probe Sequence
cactcttacattgatattcccagcg

SEQ ID NO: 172953 - DNA, 25 bp, Probe Sequence
cactctgtaagtcaatattccatgt

SEQ ID NO: 172954 - DNA, 25 bp, Probe Sequence
cactctgaaggtacagaattcactg

SEQ ID NO: 172955 - DNA, 25 bp, Probe Sequence
cactcccaggtgagaattcaggcaa

SEQ ID NO: 172956 - DNA, 25 bp, Probe Sequence
cactcccaggtggtgagcatttcca

SEQ ID NO: 172957 - DNA, 25 bp, Probe Sequence
cactcccagtgcttgcaagattcca

SEQ ID NO: 172958 - DNA, 25 bp, Probe Sequence
caccccctgtaggaatatgccaagt

SEQ ID NO: 172959 - DNA, 25 bp, Probe Sequence
cacccctcgaaggagagggcgcttc

SEQ ID NO: 172960 - DNA, 25 bp, Probe Sequence
cagcccctaaaggtaatgccagccc

SEQ ID NO: 172961 - DNA, 25 bp, Probe Sequence
caccccaactatgtcactgcggggc

SEQ ID NO: 172962 - DNA, 25 bp, Probe Sequence
cactccaaataatctcctcggtgtg

SEQ ID NO: 172963 - DNA, 25 bp, Probe Sequence
cactcctagtaaccttctgcttgtg

SEQ ID NO: 172964 - DNA, 25 bp, Probe Sequence
cactcttcagtgttcctgttattta

SEQ ID NO: 172965 - DNA, 25 bp, Probe Sequence
cactcttctgtgtcattttgttgtt

SEQ ID NO: 172966 - DNA, 25 bp, Probe Sequence
cactcgttgctgttctcacgatggt

SEQ ID NO: 172967 - DNA, 25 bp, Probe Sequence
cactcccctgatgatcagtgatatt

SEQ ID NO: 172968 - DNA, 25 bp, Probe Sequence
cactcttcctgacagcagaatgatc

SEQ ID NO: 172969 - DNA, 25 bp, Probe Sequence
cactcgcatctcctacaagaatgat

SEQ ID NO: 172970 - DNA, 25 bp, Probe Sequence
cactgagcttcactaataatatgta

SEQ ID NO: 172971 - DNA, 25 bp, Probe Sequence
cactggttcctccatgagatcagat

SEQ ID NO: 172972 - DNA, 25 bp, Probe Sequence
cacggctttgcccgatgatcaaatg

SEQ ID NO: 172973 - DNA, 25 bp, Probe Sequence
cacggtgttctccgagtaagtgaaa

SEQ ID NO: 172974 - DNA, 25 bp, Probe Sequence
cactggtgtttctgcgagaatggaa

SEQ ID NO: 172975 - DNA, 25 bp, Probe Sequence
cactggtgtctgaaaggaataagga

SEQ ID NO: 172976 - DNA, 25 bp, Probe Sequence
cccttgggaaagctttaggcaccag

SEQ ID NO: 172977 - DNA, 25 bp, Probe Sequence
caccaaggagaatagtttaggagaa

SEQ ID NO: 172978 - DNA, 25 bp, Probe Sequence
cacctcggaacatcacatctaaggg

SEQ ID NO: 172979 - DNA, 25 bp, Probe Sequence
cactgcttggacatggcacctgaga

SEQ ID NO: 172980 - DNA, 25 bp, Probe Sequence
cactgcttgcaccatttaccataag

SEQ ID NO: 172981 - DNA, 25 bp, Probe Sequence
cactctgtcaaactgtcaccaacag

SEQ ID NO: 172982 - DNA, 25 bp, Probe Sequence
cactgtgtgaaactgtatctgccac

SEQ ID NO: 172983 - DNA, 25 bp, Probe Sequence
cactgtggaatatagacccataatc

SEQ ID NO: 172984 - DNA, 25 bp, Probe Sequence
cactctgagaatcctagcacacctc

SEQ ID NO: 172985 - DNA, 25 bp, Probe Sequence
cactgtgggcatcagaggccctctc

SEQ ID NO: 172986 - DNA, 25 bp, Probe Sequence
cacgtggctaatagggcctctgcct

SEQ ID NO: 172987 - DNA, 25 bp, Probe Sequence
cactggagtttgagaccaccctggc

SEQ ID NO: 172988 - DNA, 25 bp, Probe Sequence
cactggagtttgagaccaccctggc

SEQ ID NO: 172989 - DNA, 25 bp, Probe Sequence
cactggtatttgtgatctcaccatt

SEQ ID NO: 172990 - DNA, 25 bp, Probe Sequence
cacggttatatgtgtgtccctcatt

SEQ ID NO: 172991 - DNA, 25 bp, Probe Sequence
caccgttgttatgtacctgcatcac

SEQ ID NO: 172992 - DNA, 25 bp, Probe Sequence
cactctgttttgacctccatagaag

SEQ ID NO: 172993 - DNA, 25 bp, Probe Sequence
cactgtgcatttattctcagcatca

SEQ ID NO: 172994 - DNA, 25 bp, Probe Sequence
cactgtgatctgcagtcctgcttca

SEQ ID NO: 172995 - DNA, 25 bp, Probe Sequence
cactgttcatgcttctactaatcaa

SEQ ID NO: 172996 - DNA, 25 bp, Probe Sequence
cacgcttagtgtctctaaaaaccga

SEQ ID NO: 172997 - DNA, 25 bp, Probe Sequence
cacgtttggtgattataatagatag

SEQ ID NO: 172998 - DNA, 25 bp, Probe Sequence
cacgcttggggagaacatcgcagat

SEQ ID NO: 172999 - DNA, 25 bp, Probe Sequence
cactgccgttaagattcagagagat

SEQ ID NO: 173000 - DNA, 25 bp, Probe Sequence
cactccctctacatcatcattggag

SEQ ID NO: 173001 - DNA, 25 bp, Probe Sequence
cactcccttcatacaatctagtcag

SEQ ID NO: 173002 - DNA, 25 bp, Probe Sequence
cacctcctttttttagtcgagatat

SEQ ID NO: 173003 - DNA, 25 bp, Probe Sequence
cacctcattcttctaaaagtggata

SEQ ID NO: 173004 - DNA, 25 bp, Probe Sequence
cactctccctgtcttaaagtcagct

SEQ ID NO: 173005 - DNA, 25 bp, Probe Sequence
cactcccctggcttaggcaggtagg

SEQ ID NO: 173006 - DNA, 25 bp, Probe Sequence
cactccctgagggtctggggtcagg

SEQ ID NO: 173007 - DNA, 25 bp, Probe Sequence
cactccgcgagctgtatcgggtggt

SEQ ID NO: 173008 - DNA, 25 bp, Probe Sequence
cactcccgcagcttatgtctagcgt

SEQ ID NO: 173009 - DNA, 25 bp, Probe Sequence
cactcctctcagggatcatatccac

SEQ ID NO: 173010 - DNA, 25 bp, Probe Sequence
cactgacttcagagacgattgcaga

SEQ ID NO: 173011 - DNA, 25 bp, Probe Sequence
cactgacactcattaccgtctgtga

SEQ ID NO: 173012 - DNA, 25 bp, Probe Sequence
cactgacagccactatgcttttggg

SEQ ID NO: 173013 - DNA, 25 bp, Probe Sequence
cactgtcaccccttatttgaggaac

SEQ ID NO: 173014 - DNA, 25 bp, Probe Sequence
cactgtcacacagcttataacatgt

SEQ ID NO: 173015 - DNA, 25 bp, Probe Sequence
cactgtgactctgtataaaatggtt

SEQ ID NO: 173016 - DNA, 25 bp, Probe Sequence
cactgatcgtcaagtcaaaatctgg

SEQ ID NO: 173017 - DNA, 25 bp, Probe Sequence
cactgcatatgcgaagaacaaactg

SEQ ID NO: 173018 - DNA, 25 bp, Probe Sequence
cactgctctgtgaaataaacctgta

SEQ ID NO: 173019 - DNA, 25 bp, Probe Sequence
cttgctgagtggataatcacgggaa

SEQ ID NO: 173020 - DNA, 25 bp, Probe Sequence
cttcgacgtccttacaactggacag

SEQ ID NO: 173021 - DNA, 25 bp, Probe Sequence
caccgacgaatattacaacgcggca

SEQ ID NO: 173022 - DNA, 25 bp, Probe Sequence
cagccaaagttactacaacggcgac

SEQ ID NO: 173023 - DNA, 25 bp, Probe Sequence
caccctagttagcacgcatgggcgc

SEQ ID NO: 173024 - DNA, 25 bp, Probe Sequence
caccccagattgtcaacggggacca

SEQ ID NO: 173025 - DNA, 25 bp, Probe Sequence
cactcccgagtgtcttggagggaca

SEQ ID NO: 173026 - DNA, 25 bp, Probe Sequence
cactccatcaaagtctttgagggtt

SEQ ID NO: 173027 - DNA, 25 bp, Probe Sequence
cactgccagatgtgttcagtaaggt

SEQ ID NO: 173028 - DNA, 25 bp, Probe Sequence
cactccagctgtttgaagagaggga

SEQ ID NO: 173029 - DNA, 25 bp, Probe Sequence
cacccactatatgagaaccgagacc

SEQ ID NO: 173030 - DNA, 25 bp, Probe Sequence
caccccaaatacaacagccggactc

SEQ ID NO: 173031 - DNA, 25 bp, Probe Sequence
caccccaaatacaacagccggactc

SEQ ID NO: 173032 - DNA, 25 bp, Probe Sequence
caccccaaatacaagacggaactct

SEQ ID NO: 173033 - DNA, 25 bp, Probe Sequence
cacccccaaagtaagaagaaacatg

SEQ ID NO: 173034 - DNA, 25 bp, Probe Sequence
cacccctcattagttaaggataaag

SEQ ID NO: 173035 - DNA, 25 bp, Probe Sequence
cagcccagtcctcttaactgaaaca

SEQ ID NO: 173036 - DNA, 25 bp, Probe Sequence
cacgaggtcccctcgaggaacatct

SEQ ID NO: 173037 - DNA, 25 bp, Probe Sequence
cacgaagtcccgtgtagaacgccac

SEQ ID NO: 173038 - DNA, 25 bp, Probe Sequence
cactgtttccccttgtgaaaccaca

SEQ ID NO: 173039 - DNA, 25 bp, Probe Sequence
cactgtgttacccatcttggaataa

SEQ ID NO: 173040 - DNA, 25 bp, Probe Sequence
cacggcatcgtctcctatggaaagt

SEQ ID NO: 173041 - DNA, 25 bp, Probe Sequence
cacggcaaagctgtctatggtaaat

SEQ ID NO: 173042 - DNA, 25 bp, Probe Sequence
cacggagaacgagctgcatggggag

SEQ ID NO: 173043 - DNA, 25 bp, Probe Sequence
cactggtataaatttgatgttggag

SEQ ID NO: 173044 - DNA, 25 bp, Probe Sequence
cactgggtaacctgatcgtggagag

SEQ ID NO: 173045 - DNA, 25 bp, Probe Sequence
cacggtgggagccttatagtggcag

SEQ ID NO: 173046 - DNA, 25 bp, Probe Sequence
cacgagctggggcgaaggctgtgct

SEQ ID NO: 173047 - DNA, 25 bp, Probe Sequence
cactggtgtgggtgcatggggctgt

SEQ ID NO: 173048 - DNA, 25 bp, Probe Sequence
cacggtacgtcttcatgggagtcat

SEQ ID NO: 173049 - DNA, 25 bp, Probe Sequence
cacggatgacgactatgcgggcttc

SEQ ID NO: 173050 - DNA, 25 bp, Probe Sequence
cactggtgcgcggcatacgcgcttt

SEQ ID NO: 173051 - DNA, 25 bp, Probe Sequence
cactgagatgggcccatgccgtaga

SEQ ID NO: 173052 - DNA, 25 bp, Probe Sequence
cactgtgggtgacagcgcctaggtc

SEQ ID NO: 173053 - DNA, 25 bp, Probe Sequence
cacgggcctgcaaactcgacaggac

SEQ ID NO: 173054 - DNA, 25 bp, Probe Sequence
cacggtgccatttactccaaggact

SEQ ID NO: 173055 - DNA, 25 bp, Probe Sequence
cacgaggccaatgggaccgaggacg

SEQ ID NO: 173056 - DNA, 25 bp, Probe Sequence
cacggtcacaatggggccagtgccg

SEQ ID NO: 173057 - DNA, 25 bp, Probe Sequence
cacggctgccctgggctgggcagct

SEQ ID NO: 173058 - DNA, 25 bp, Probe Sequence
cactgcttcccggagcggaaccggg

SEQ ID NO: 173059 - DNA, 25 bp, Probe Sequence
cactcccccagaggcagggacgtga

SEQ ID NO: 173060 - DNA, 25 bp, Probe Sequence
cactcccgcacaaggtacgagcgaa

SEQ ID NO: 173061 - DNA, 25 bp, Probe Sequence
cactccgctcctcagaaggggaagt

SEQ ID NO: 173062 - DNA, 25 bp, Probe Sequence
cactccatccctatggcagaggaat

SEQ ID NO: 173063 - DNA, 25 bp, Probe Sequence
cactcctgccctttgcagaggcaga

SEQ ID NO: 173064 - DNA, 25 bp, Probe Sequence
cactccagcctgggtgatagagcaa

SEQ ID NO: 173065 - DNA, 25 bp, Probe Sequence
cactccagcctgggtggcagagcaa

SEQ ID NO: 173066 - DNA, 25 bp, Probe Sequence
cactccagcctgggcaacagagcaa

SEQ ID NO: 173067 - DNA, 25 bp, Probe Sequence
cactccagcctgggcaacaagaaca

SEQ ID NO: 173068 - DNA, 25 bp, Probe Sequence
cactccagcctgggcaacaaagtgg

SEQ ID NO: 173069 - DNA, 25 bp, Probe Sequence
cactccagcctgggcaataagagcg

SEQ ID NO: 173070 - DNA, 25 bp, Probe Sequence
cactccagcctgggcaataagagcg

SEQ ID NO: 173071 - DNA, 25 bp, Probe Sequence
cactccagcctgggcaacaagagcg

SEQ ID NO: 173072 - DNA, 25 bp, Probe Sequence
cactccagcctgggcaacaagagcg

SEQ ID NO: 173073 - DNA, 25 bp, Probe Sequence
cactccagcctgggtgacaagagcg

SEQ ID NO: 173074 - DNA, 25 bp, Probe Sequence
cactccagcctgggtgacaagagcg

SEQ ID NO: 173075 - DNA, 25 bp, Probe Sequence
cactccagcctgggtgacagaggga

SEQ ID NO: 173076 - DNA, 25 bp, Probe Sequence
cactccagcctgggtgacagaggga

SEQ ID NO: 173077 - DNA, 25 bp, Probe Sequence
cactccagcctgggcaacagaggga

SEQ ID NO: 173078 - DNA, 25 bp, Probe Sequence
cactccagcctgggcaacagagaga

SEQ ID NO: 173079 - DNA, 25 bp, Probe Sequence
cactccagcctgggcgacagagcga

SEQ ID NO: 173080 - DNA, 25 bp, Probe Sequence
cactccagtctgggcaacagagcga

SEQ ID NO: 173081 - DNA, 25 bp, Probe Sequence
cactggctttgaggtagcacgctgc

SEQ ID NO: 173082 - DNA, 25 bp, Probe Sequence
cactggtcctcagtgtcaccagatg

SEQ ID NO: 173083 - DNA, 25 bp, Probe Sequence
cacgcctgcccaatgatcgtagcag

SEQ ID NO: 173084 - DNA, 25 bp, Probe Sequence
cactgcccaccagtgacggacatgc

SEQ ID NO: 173085 - DNA, 25 bp, Probe Sequence
cactgcctgcaaacagactgggatc

SEQ ID NO: 173086 - DNA, 25 bp, Probe Sequence
cacggcgagtggacactgtggaccc

SEQ ID NO: 173087 - DNA, 25 bp, Probe Sequence
cacgtggagcctagagtgagggcct

SEQ ID NO: 173088 - DNA, 25 bp, Probe Sequence
cacgaggaggcatgggggacgctac

SEQ ID NO: 173089 - DNA, 25 bp, Probe Sequence
cacctgggtcactggaggaccaacc

SEQ ID NO: 173090 - DNA, 25 bp, Probe Sequence
cacctgggtcactggaggaccaacc

SEQ ID NO: 173091 - DNA, 25 bp, Probe Sequence
cacctgggtcactggaggaccaacc

SEQ ID NO: 173092 - DNA, 25 bp, Probe Sequence
cacgcatgtgtgacatccggagtcc

SEQ ID NO: 173093 - DNA, 25 bp, Probe Sequence
cactgcatttggtcaggggggcatg

SEQ ID NO: 173094 - DNA, 25 bp, Probe Sequence
cactgactctgtacaggatggggcc

SEQ ID NO: 173095 - DNA, 25 bp, Probe Sequence
cactgtctttcctagatggcagtca

SEQ ID NO: 173096 - DNA, 25 bp, Probe Sequence
cactgatgcatcctccaagggtaga

SEQ ID NO: 173097 - DNA, 25 bp, Probe Sequence
cactgatgccagggaggtgggagga

SEQ ID NO: 173098 - DNA, 25 bp, Probe Sequence
cactgtgcctgggaggcgtggagcc

SEQ ID NO: 173099 - DNA, 25 bp, Probe Sequence
cactgtgactgggacggctgtggat

SEQ ID NO: 173100 - DNA, 25 bp, Probe Sequence
cactgtaatgtgggatggatggtta

SEQ ID NO: 173101 - DNA, 25 bp, Probe Sequence
cactgtggagttgagatgcatttta

SEQ ID NO: 173102 - DNA, 25 bp, Probe Sequence
cactgttcagtgaggatcttatcat

SEQ ID NO: 173103 - DNA, 25 bp, Probe Sequence
cactgttaggggctcatctcatgta

SEQ ID NO: 173104 - DNA, 25 bp, Probe Sequence
cactgctaagggactctatccattg

SEQ ID NO: 173105 - DNA, 25 bp, Probe Sequence
cacctgacaacgactgttcctatga

SEQ ID NO: 173106 - DNA, 25 bp, Probe Sequence
cacgaggaacagagatggcccagca

SEQ ID NO: 173107 - DNA, 25 bp, Probe Sequence
cacgaggaacagagatggcccagca

SEQ ID NO: 173108 - DNA, 25 bp, Probe Sequence
cacggtggacaatgaggctggcaag

SEQ ID NO: 173109 - DNA, 25 bp, Probe Sequence
cacgctgtggaataaggatgacatc

SEQ ID NO: 173110 - DNA, 25 bp, Probe Sequence
cactgtatggaatcagaaccagatg

SEQ ID NO: 173111 - DNA, 25 bp, Probe Sequence
cactggtggaaccatgaacgctgcc

SEQ ID NO: 173112 - DNA, 25 bp, Probe Sequence
cacggatggaattctagtcagctgc

SEQ ID NO: 173113 - DNA, 25 bp, Probe Sequence
cacgggggatgccatcagtgtcatg

SEQ ID NO: 173114 - DNA, 25 bp, Probe Sequence
cacctgggctaggtcagttcggaaa

SEQ ID NO: 173115 - DNA, 25 bp, Probe Sequence
cacctggacctgggctttatggaga

SEQ ID NO: 173116 - DNA, 25 bp, Probe Sequence
cacccgcacacgcgtgtagataacg

SEQ ID NO: 173117 - DNA, 25 bp, Probe Sequence
caccttcacctcccggagtaagcag

SEQ ID NO: 173118 - DNA, 25 bp, Probe Sequence
cacgaccccgacgggggcaagatgc

SEQ ID NO: 173119 - DNA, 25 bp, Probe Sequence
cactgcactcccgtctgggggagag

SEQ ID NO: 173120 - DNA, 25 bp, Probe Sequence
cacgcaccatccactgtgtttattg

SEQ ID NO: 173121 - DNA, 25 bp, Probe Sequence
cactgctacaccattactttcttga

SEQ ID NO: 173122 - DNA, 25 bp, Probe Sequence
cagtccaacctttttctgtgtctgg

SEQ ID NO: 173123 - DNA, 25 bp, Probe Sequence
cactccacactctatatttctgtgt

SEQ ID NO: 173124 - DNA, 25 bp, Probe Sequence
cactgactgttgtatttcatctgct

SEQ ID NO: 173125 - DNA, 25 bp, Probe Sequence
cactgtctgttgtctttataggaaa

SEQ ID NO: 173126 - DNA, 25 bp, Probe Sequence
catcgacgtggagattacaggacca

SEQ ID NO: 173127 - DNA, 25 bp, Probe Sequence
cacgagggtgatgaggacgacagcc

SEQ ID NO: 173128 - DNA, 25 bp, Probe Sequence
cacgcactttatgagggagaccccg

SEQ ID NO: 173129 - DNA, 25 bp, Probe Sequence
cactgcctgtcttctaggaatgacc

SEQ ID NO: 173130 - DNA, 25 bp, Probe Sequence
cactgcactggcttgtagaggccgc

SEQ ID NO: 173131 - DNA, 25 bp, Probe Sequence
cactgactgcagttgagagagaccc

SEQ ID NO: 173132 - DNA, 25 bp, Probe Sequence
cactgaccaacgcagctggcaagcg

SEQ ID NO: 173133 - DNA, 25 bp, Probe Sequence
cactgcactccagcctgggcgacag

SEQ ID NO: 173134 - DNA, 25 bp, Probe Sequence
cactgcattccagcctgggtgacaa

SEQ ID NO: 173135 - DNA, 25 bp, Probe Sequence
cactgggcacaggggagatgtgaaa

SEQ ID NO: 173136 - DNA, 25 bp, Probe Sequence
cacgggagagggcgaggacacacgg

SEQ ID NO: 173137 - DNA, 25 bp, Probe Sequence
cactgagggggaacgattgcacaca

SEQ ID NO: 173138 - DNA, 25 bp, Probe Sequence
cactgagcgaggctacagcttcacc

SEQ ID NO: 173139 - DNA, 25 bp, Probe Sequence
cactgtctggtgatacctatatcca

SEQ ID NO: 173140 - DNA, 25 bp, Probe Sequence
cactgacttgagaccagttgaataa

SEQ ID NO: 173141 - DNA, 25 bp, Probe Sequence
cagctacttggtgagttggaaaaag

SEQ ID NO: 173142 - DNA, 25 bp, Probe Sequence
cacccttgggctctatgggaaggac

SEQ ID NO: 173143 - DNA, 25 bp, Probe Sequence
caccgcttagagatttggggggctc

SEQ ID NO: 173144 - DNA, 25 bp, Probe Sequence
cacccggggagtatgtggtggtgcc

SEQ ID NO: 173145 - DNA, 25 bp, Probe Sequence
cacgacggtggcgtttgacgtgcgg

SEQ ID NO: 173146 - DNA, 25 bp, Probe Sequence
cacgtctggttcgtgatgggcttgg

SEQ ID NO: 173147 - DNA, 25 bp, Probe Sequence
cactgtgctggtaacgggagctggg

SEQ ID NO: 173148 - DNA, 25 bp, Probe Sequence
cacgggtgtttctgtgtgctagttg

SEQ ID NO: 173149 - DNA, 25 bp, Probe Sequence
catcgaggttttcagtcacttcttg

SEQ ID NO: 173150 - DNA, 25 bp, Probe Sequence
cagcgaatccttctagtactagttg

SEQ ID NO: 173151 - DNA, 25 bp, Probe Sequence
cagcttttcttgataggcctagtac

SEQ ID NO: 173152 - DNA, 25 bp, Probe Sequence
cactggtggggcatacagcctaatg

SEQ ID NO: 173153 - DNA, 25 bp, Probe Sequence
cacggctggagagttgatacctgca

SEQ ID NO: 173154 - DNA, 25 bp, Probe Sequence
cacgggggcaattgtgacatatcac

SEQ ID NO: 173155 - DNA, 25 bp, Probe Sequence
caccagggccaataggcattcctgg

SEQ ID NO: 173156 - DNA, 25 bp, Probe Sequence
cagccaggagtgttaagcgttcagt

SEQ ID NO: 173157 - DNA, 25 bp, Probe Sequence
cactgactggtcttaagctgttctt

SEQ ID NO: 173158 - DNA, 25 bp, Probe Sequence
cactgactggtcttaagctgttctt

SEQ ID NO: 173159 - DNA, 25 bp, Probe Sequence
cactgatttcatcctcaagtttccg

SEQ ID NO: 173160 - DNA, 25 bp, Probe Sequence
cactgatttcatcctcaagtttccg

SEQ ID NO: 173161 - DNA, 25 bp, Probe Sequence
cacgatatcatcaccaagttcctgg

SEQ ID NO: 173162 - DNA, 25 bp, Probe Sequence
cactgattcagcactaatttcctgc

SEQ ID NO: 173163 - DNA, 25 bp, Probe Sequence
cactgattggaactgtattatatta

SEQ ID NO: 173164 - DNA, 25 bp, Probe Sequence
cactgattgatccaggacatccata

SEQ ID NO: 173165 - DNA, 25 bp, Probe Sequence
cactgcttatctctgccatgtagaa

SEQ ID NO: 173166 - DNA, 25 bp, Probe Sequence
cacgtatatctcttctgtcttgaag

SEQ ID NO: 173167 - DNA, 25 bp, Probe Sequence
cacgctatagtctctggaggtcatg

SEQ ID NO: 173168 - DNA, 25 bp, Probe Sequence
cacgcccagtcgactggcaacaatg

SEQ ID NO: 173169 - DNA, 25 bp, Probe Sequence
caccccatgtggaccaagccaaatg

SEQ ID NO: 173170 - DNA, 25 bp, Probe Sequence
cacctttgggacagcatgaaacagg

SEQ ID NO: 173171 - DNA, 25 bp, Probe Sequence
cacctttagcagtgccagaaaccat

SEQ ID NO: 173172 - DNA, 25 bp, Probe Sequence
cacccttacagtgccgtacagaata

SEQ ID NO: 173173 - DNA, 25 bp, Probe Sequence
cacccattatgtactcccatacata

SEQ ID NO: 173174 - DNA, 25 bp, Probe Sequence
cacccagtgtggatattaacattct

SEQ ID NO: 173175 - DNA, 25 bp, Probe Sequence
caccgcctttgagttggacacagat

SEQ ID NO: 173176 - DNA, 25 bp, Probe Sequence
cactggtctgtttgcatttgataca

SEQ ID NO: 173177 - DNA, 25 bp, Probe Sequence
cactgtgatttcaagcatgttttct

SEQ ID NO: 173178 - DNA, 25 bp, Probe Sequence
cactgtatttctagatggacccatc

SEQ ID NO: 173179 - DNA, 25 bp, Probe Sequence
cacgtgtatattaaggaactgatgc

SEQ ID NO: 173180 - DNA, 25 bp, Probe Sequence
cacgctgtatacctagatgatgact

SEQ ID NO: 173181 - DNA, 25 bp, Probe Sequence
cactggtgatacctcacattcaatg

SEQ ID NO: 173182 - DNA, 25 bp, Probe Sequence
cactggtgacacctcacactcagtg

SEQ ID NO: 173183 - DNA, 25 bp, Probe Sequence
cactggtgacacctcacactcagtg

SEQ ID NO: 173184 - DNA, 25 bp, Probe Sequence
cacgaatgaagcctccttcagtggc

SEQ ID NO: 173185 - DNA, 25 bp, Probe Sequence
cacgttgaggccagtctcagttggg

SEQ ID NO: 173186 - DNA, 25 bp, Probe Sequence
cacgtggggacatgtccttggcgtg

SEQ ID NO: 173187 - DNA, 25 bp, Probe Sequence
cacgctggctgctcaagtactagcc

SEQ ID NO: 173188 - DNA, 25 bp, Probe Sequence
cacgtggtctcagatttctcagagc

SEQ ID NO: 173189 - DNA, 25 bp, Probe Sequence
cagctgagggtcctgtctgttagaa

SEQ ID NO: 173190 - DNA, 25 bp, Probe Sequence
cactgatttgtacgtctgactgaga

SEQ ID NO: 173191 - DNA, 25 bp, Probe Sequence
cactgatccattttgttgacttgag

SEQ ID NO: 173192 - DNA, 25 bp, Probe Sequence
cactgtcctctgtcaatctagttag

SEQ ID NO: 173193 - DNA, 25 bp, Probe Sequence
cactgtcgccttcacacaggtgaac

SEQ ID NO: 173194 - DNA, 25 bp, Probe Sequence
cactgtcgccttcacacaggtgaac

SEQ ID NO: 173195 - DNA, 25 bp, Probe Sequence
cactgatgtccttcagacagaagta

SEQ ID NO: 173196 - DNA, 25 bp, Probe Sequence
cagcgaggcctcaagacagtgtttg

SEQ ID NO: 173197 - DNA, 25 bp, Probe Sequence
cactggcatcccagccaggttcagt

SEQ ID NO: 173198 - DNA, 25 bp, Probe Sequence
caccgagcgagcagctcggtccagt

SEQ ID NO: 173199 - DNA, 25 bp, Probe Sequence
cacccatggagggtactgtccgcaa

SEQ ID NO: 173200 - DNA, 25 bp, Probe Sequence
cactgatttgaagaactgtctatga

SEQ ID NO: 173201 - DNA, 25 bp, Probe Sequence
caccattgtgaagcacctactatgt

SEQ ID NO: 173202 - DNA, 25 bp, Probe Sequence
cacctgggaaggtctcggcttgatt

SEQ ID NO: 173203 - DNA, 25 bp, Probe Sequence
cacgtctgtaaggtcggtcttcgtc

SEQ ID NO: 173204 - DNA, 25 bp, Probe Sequence
cacgtggaacagtgcgagtgcttcg

SEQ ID NO: 173205 - DNA, 25 bp, Probe Sequence
cacggccagaacggcaagagtgtcc

SEQ ID NO: 173206 - DNA, 25 bp, Probe Sequence
cacgcccagaagaacgagaatgctc

SEQ ID NO: 173207 - DNA, 25 bp, Probe Sequence
cacggcgagagcctaagaacattca

SEQ ID NO: 173208 - DNA, 25 bp, Probe Sequence
cacggccatagcttccaatacaagc

SEQ ID NO: 173209 - DNA, 25 bp, Probe Sequence
cacggcatctagccatgcttaaaca

SEQ ID NO: 173210 - DNA, 25 bp, Probe Sequence
cacgatggctcatgctgtaatccca

SEQ ID NO: 173211 - DNA, 25 bp, Probe Sequence
cacggagcatctgttgattccacag

SEQ ID NO: 173212 - DNA, 25 bp, Probe Sequence
cactggatacccatgactgcaagaa

SEQ ID NO: 173213 - DNA, 25 bp, Probe Sequence
cactggacctccaaaatctgagaga

SEQ ID NO: 173214 - DNA, 25 bp, Probe Sequence
cagcttgaccatgccaacttgcagt

SEQ ID NO: 173215 - DNA, 25 bp, Probe Sequence
caccgagttgtccaattatctgctt

SEQ ID NO: 173216 - DNA, 25 bp, Probe Sequence
cacggcaactcttcagtgttggctg

SEQ ID NO: 173217 - DNA, 25 bp, Probe Sequence
cacggccaccatgaagtctggcaac

SEQ ID NO: 173218 - DNA, 25 bp, Probe Sequence
cacgtccacctgcatgagcacgtgc

SEQ ID NO: 173219 - DNA, 25 bp, Probe Sequence
cactgaccaccaggtagacagcgca

SEQ ID NO: 173220 - DNA, 25 bp, Probe Sequence
cacgagcccctggtagatgtccaga

SEQ ID NO: 173221 - DNA, 25 bp, Probe Sequence
cacggcaaccatccgatttctcaat

SEQ ID NO: 173222 - DNA, 25 bp, Probe Sequence
cactggcaactcctggtcatggtga

SEQ ID NO: 173223 - DNA, 25 bp, Probe Sequence
cactggcaactcctggtcatggtga

SEQ ID NO: 173224 - DNA, 25 bp, Probe Sequence
cactggactttgccgtcggcgagta

SEQ ID NO: 173225 - DNA, 25 bp, Probe Sequence
cactggactgttcccatgtgcaggg

SEQ ID NO: 173226 - DNA, 25 bp, Probe Sequence
cactgagagctgctcctttggggga

SEQ ID NO: 173227 - DNA, 25 bp, Probe Sequence
cacgaggcaggggcttttgtatttc

SEQ ID NO: 173228 - DNA, 25 bp, Probe Sequence
cacgaggagaaatttttgtcctcca

SEQ ID NO: 173229 - DNA, 25 bp, Probe Sequence
cactgatcaaaatgttgttctgctt

SEQ ID NO: 173230 - DNA, 25 bp, Probe Sequence
cacctaaaccggtattctgctgctc

SEQ ID NO: 173231 - DNA, 25 bp, Probe Sequence
cacccaaaccagtaatatgctaacc

SEQ ID NO: 173232 - DNA, 25 bp, Probe Sequence
cacccattcccgaaaagattattca

SEQ ID NO: 173233 - DNA, 25 bp, Probe Sequence
caggccctcgactgaaaagttctca

SEQ ID NO: 173234 - DNA, 25 bp, Probe Sequence
cagaccccctctagaaatttttcag

SEQ ID NO: 173235 - DNA, 25 bp, Probe Sequence
cagccccaacttaaaattcttacat

SEQ ID NO: 173236 - DNA, 25 bp, Probe Sequence
caccaacaacctcaagtctcttgag

SEQ ID NO: 173237 - DNA, 25 bp, Probe Sequence
cacccaatgaaaaaaggatctggag

SEQ ID NO: 173238 - DNA, 25 bp, Probe Sequence
cacccagaaaaaaggccatgcaagg

SEQ ID NO: 173239 - DNA, 25 bp, Probe Sequence
cacccaacaaaagtgtctctgtgga

SEQ ID NO: 173240 - DNA, 25 bp, Probe Sequence
cacccaagcaacaaagtcccgagca

SEQ ID NO: 173241 - DNA, 25 bp, Probe Sequence
cacccaaaaataactgcctctcgct

SEQ ID NO: 173242 - DNA, 25 bp, Probe Sequence
cacccggaaatgaggaccatcactg

SEQ ID NO: 173243 - DNA, 25 bp, Probe Sequence
cacccgtagtagatcagactcatct

SEQ ID NO: 173244 - DNA, 25 bp, Probe Sequence
caccgcggaggagttcacctatatc

SEQ ID NO: 173245 - DNA, 25 bp, Probe Sequence
cagccgcggtaattccagctccaat

SEQ ID NO: 173246 - DNA, 25 bp, Probe Sequence
caccactggaactcaaggccattga

SEQ ID NO: 173247 - DNA, 25 bp, Probe Sequence
cacctctggaaatacttggctctgc

SEQ ID NO: 173248 - DNA, 25 bp, Probe Sequence
caccctgtaactccacctgagttac

SEQ ID NO: 173249 - DNA, 25 bp, Probe Sequence
cacccacgatatcatcaccaagttc

SEQ ID NO: 173250 - DNA, 25 bp, Probe Sequence
cacccagctgaccggaccggtcatg

SEQ ID NO: 173251 - DNA, 25 bp, Probe Sequence
cacccagcaatagagacgggactgc

SEQ ID NO: 173252 - DNA, 25 bp, Probe Sequence
caccctgaatgcattggccggtgcc

SEQ ID NO: 173253 - DNA, 25 bp, Probe Sequence
cacgtgtaagctttgagccctagcc

SEQ ID NO: 173254 - DNA, 25 bp, Probe Sequence
cacggaatctgattaagccctggcc

SEQ ID NO: 173255 - DNA, 25 bp, Probe Sequence
cacgtccctgcatgaggcccacgag

SEQ ID NO: 173256 - DNA, 25 bp, Probe Sequence
cactgtccaggatgagagccactca

SEQ ID NO: 173257 - DNA, 25 bp, Probe Sequence
cactgtccaggttggaggcatctct

SEQ ID NO: 173258 - DNA, 25 bp, Probe Sequence
cacgcctcaggcaattagacacttt

SEQ ID NO: 173259 - DNA, 25 bp, Probe Sequence
cactgtgctcagcccattttttatt

SEQ ID NO: 173260 - DNA, 25 bp, Probe Sequence
cacgctgacaaccattcatatttac

SEQ ID NO: 173261 - DNA, 25 bp, Probe Sequence
cacgcttccatcttgcattatttat

SEQ ID NO: 173262 - DNA, 25 bp, Probe Sequence
cactgttgactctgcatatttattt

SEQ ID NO: 173263 - DNA, 25 bp, Probe Sequence
cacgttgcctctactttatcaatta

SEQ ID NO: 173264 - DNA, 25 bp, Probe Sequence
cacgttgcctctactttatcaatta

SEQ ID NO: 173265 - DNA, 25 bp, Probe Sequence
cacggtgcactctacaagtgaccat

SEQ ID NO: 173266 - DNA, 25 bp, Probe Sequence
cacgtggcactaatctggtgtcact

SEQ ID NO: 173267 - DNA, 25 bp, Probe Sequence
cacgctggacattgtcgcaagtcac

SEQ ID NO: 173268 - DNA, 25 bp, Probe Sequence
cactgtgtacaattctgaagacact

SEQ ID NO: 173269 - DNA, 25 bp, Probe Sequence
cactgtggacagtttgacatcgact

SEQ ID NO: 173270 - DNA, 25 bp, Probe Sequence
cactgtccacatcctgtgtatctga

SEQ ID NO: 173271 - DNA, 25 bp, Probe Sequence
cacgtcagcaacggctgtcagctgc

SEQ ID NO: 173272 - DNA, 25 bp, Probe Sequence
cacgtggctcacctgctgttgagcc

SEQ ID NO: 173273 - DNA, 25 bp, Probe Sequence
cacgcgcgctacactgactggctca

SEQ ID NO: 173274 - DNA, 25 bp, Probe Sequence
cacgcgcgctacactgactggctca

SEQ ID NO: 173275 - DNA, 25 bp, Probe Sequence
cacggcagctatttccacatggctg

SEQ ID NO: 173276 - DNA, 25 bp, Probe Sequence
cactgtcctcagtaccattgtgtgc

SEQ ID NO: 173277 - DNA, 25 bp, Probe Sequence
cacggcccagattcacttgaagcag

SEQ ID NO: 173278 - DNA, 25 bp, Probe Sequence
cacctgtacgcatccatcagggcag

SEQ ID NO: 173279 - DNA, 25 bp, Probe Sequence
cacctcagacgtacctgcaagctga

SEQ ID NO: 173280 - DNA, 25 bp, Probe Sequence
cacctagacgtaccgcacgggaagg

SEQ ID NO: 173281 - DNA, 25 bp, Probe Sequence
cacctgagggggagacggcgttggg

SEQ ID NO: 173282 - DNA, 25 bp, Probe Sequence
caccgggtgtagagggcggtcgcgg

SEQ ID NO: 173283 - DNA, 25 bp, Probe Sequence
cacgttggtgggaggtggcttccgt

SEQ ID NO: 173284 - DNA, 25 bp, Probe Sequence
cacgtgctaggggatgaggggcttc

SEQ ID NO: 173285 - DNA, 25 bp, Probe Sequence
cacggatagtgagggagtggctgct

SEQ ID NO: 173286 - DNA, 25 bp, Probe Sequence
cacggagagtgaggtggcccggggc

SEQ ID NO: 173287 - DNA, 25 bp, Probe Sequence
cacggcatggggaggccagctggag

SEQ ID NO: 173288 - DNA, 25 bp, Probe Sequence
cacctgcaacggagactccggtggg

SEQ ID NO: 173289 - DNA, 25 bp, Probe Sequence
caccggagcctgttggtggggtggg

SEQ ID NO: 173290 - DNA, 25 bp, Probe Sequence
cacggtcagccggctggtggagagg

SEQ ID NO: 173291 - DNA, 25 bp, Probe Sequence
cacggtggacgagtggctggaggcc

SEQ ID NO: 173292 - DNA, 25 bp, Probe Sequence
cacggatgataccatcggggacctt

SEQ ID NO: 173293 - DNA, 25 bp, Probe Sequence
cacgtgatagaaatgcctggtacct

SEQ ID NO: 173294 - DNA, 25 bp, Probe Sequence
cactgtgtcaggtagcctcactatc

SEQ ID NO: 173295 - DNA, 25 bp, Probe Sequence
cactgtgtcaggtagcctcactatc

SEQ ID NO: 173296 - DNA, 25 bp, Probe Sequence
cagtcttcagactggtcagcattag

SEQ ID NO: 173297 - DNA, 25 bp, Probe Sequence
caccttcagtcatgatgtagtccac

SEQ ID NO: 173298 - DNA, 25 bp, Probe Sequence
cacgctgtggtttgatgatgcgctc

SEQ ID NO: 173299 - DNA, 25 bp, Probe Sequence
cactggtgtgtttgtgatcctttcc

SEQ ID NO: 173300 - DNA, 25 bp, Probe Sequence
cactgtgctttttgtatcattaacc

SEQ ID NO: 173301 - DNA, 25 bp, Probe Sequence
cactggtttctgtctatgtctaccc

SEQ ID NO: 173302 - DNA, 25 bp, Probe Sequence
cactggttttgccggtagagcagcc

SEQ ID NO: 173303 - DNA, 25 bp, Probe Sequence
cacgagtatgtacccactatgacgc

SEQ ID NO: 173304 - DNA, 25 bp, Probe Sequence
cacgagctatagtggcgcacaagcg

SEQ ID NO: 173305 - DNA, 25 bp, Probe Sequence
cacgcagtactatggccaacaggcc

SEQ ID NO: 173306 - DNA, 25 bp, Probe Sequence
cacgcagtatgctcaccataaaaca

SEQ ID NO: 173307 - DNA, 25 bp, Probe Sequence
tacgagttccccgacaaggactggg

SEQ ID NO: 173308 - DNA, 25 bp, Probe Sequence
cactggttcccagaaaagccatgca

SEQ ID NO: 173309 - DNA, 25 bp, Probe Sequence
cacgcggcctacgtgaacaacctga

SEQ ID NO: 173310 - DNA, 25 bp, Probe Sequence
caccaggccagtcctaaaagagctc

SEQ ID NO: 173311 - DNA, 25 bp, Probe Sequence
cagccaggcggtctctttagaggat

SEQ ID NO: 173312 - DNA, 25 bp, Probe Sequence
caccaggtggtctcctctgacttca

SEQ ID NO: 173313 - DNA, 25 bp, Probe Sequence
caccagggggcagagttgcactttt

SEQ ID NO: 173314 - DNA, 25 bp, Probe Sequence
caccaagggacgtaggtaaattatg

SEQ ID NO: 173315 - DNA, 25 bp, Probe Sequence
caccaaccccgtgttagagcattag

SEQ ID NO: 173316 - DNA, 25 bp, Probe Sequence
caccacattcctgtttttcagctta

SEQ ID NO: 173317 - DNA, 25 bp, Probe Sequence
caccactacggaacttattcacgta

SEQ ID NO: 173318 - DNA, 25 bp, Probe Sequence
cagccacggggacaatattcacttt

SEQ ID NO: 173319 - DNA, 25 bp, Probe Sequence
cagcctggggcatctatattaccgg

SEQ ID NO: 173320 - DNA, 25 bp, Probe Sequence
caccggatgtcatctttgtatttgg

SEQ ID NO: 173321 - DNA, 25 bp, Probe Sequence
cacctggctaatttttgtattctta

SEQ ID NO: 173322 - DNA, 25 bp, Probe Sequence
caccgtccacagctttggaataaac

SEQ ID NO: 173323 - DNA, 25 bp, Probe Sequence
caccaggcccagccttatgaactga

SEQ ID NO: 173324 - DNA, 25 bp, Probe Sequence
cagccagggcttacctgtacactga

SEQ ID NO: 173325 - DNA, 25 bp, Probe Sequence
cacgcagttctcttacgtggactca

SEQ ID NO: 173326 - DNA, 25 bp, Probe Sequence
cacgcttttctacaatggcattcaa

SEQ ID NO: 173327 - DNA, 25 bp, Probe Sequence
caccttttaatgtagctgaatttgg

SEQ ID NO: 173328 - DNA, 25 bp, Probe Sequence
caccttttgcctaccaatacttggt

SEQ ID NO: 173329 - DNA, 25 bp, Probe Sequence
caccttgttttcaaccattcttggt

SEQ ID NO: 173330 - DNA, 25 bp, Probe Sequence
cacggctgtttttgacctgccatag

SEQ ID NO: 173331 - DNA, 25 bp, Probe Sequence
cacggcgtctgttcgaaggcaacgc

SEQ ID NO: 173332 - DNA, 25 bp, Probe Sequence
cactggtgtctgggtatgaggctac

SEQ ID NO: 173333 - DNA, 25 bp, Probe Sequence
cacgtgtgaagtgtagtggcatcca

SEQ ID NO: 173334 - DNA, 25 bp, Probe Sequence
cacgtggacaggatccggtcagcag

SEQ ID NO: 173335 - DNA, 25 bp, Probe Sequence
cacgtggacaggatccggtcagcag

SEQ ID NO: 173336 - DNA, 25 bp, Probe Sequence
cacgctgtgtgcagaggccagggaa

SEQ ID NO: 173337 - DNA, 25 bp, Probe Sequence
caccttgtaaaactgctgggagaaa

SEQ ID NO: 173338 - DNA, 25 bp, Probe Sequence
cacgccttggattagctttgcagag

SEQ ID NO: 173339 - DNA, 25 bp, Probe Sequence
cacccctggccaaggtcatccatga

SEQ ID NO: 173340 - DNA, 25 bp, Probe Sequence
cacgccctgggcaggtaggcgggag

SEQ ID NO: 173341 - DNA, 25 bp, Probe Sequence
cactggcctcccaggagggcagggg

SEQ ID NO: 173342 - DNA, 25 bp, Probe Sequence
cactggcctcccaggagggcagggg

SEQ ID NO: 173343 - DNA, 25 bp, Probe Sequence
cagccacctcccaggaagatctggc

SEQ ID NO: 173344 - DNA, 25 bp, Probe Sequence
cacctagccccaagtaatcgggcgc

SEQ ID NO: 173345 - DNA, 25 bp, Probe Sequence
caccttcaccacagggctagaggcc

SEQ ID NO: 173346 - DNA, 25 bp, Probe Sequence
caccagaactccacggtgagggccg

SEQ ID NO: 173347 - DNA, 25 bp, Probe Sequence
caccatctactggtaccgggaggcc

SEQ ID NO: 173348 - DNA, 25 bp, Probe Sequence
cacgcgctagaattaccgaggagcc

SEQ ID NO: 173349 - DNA, 25 bp, Probe Sequence
cagcccaggaaaaactggaagcctt

SEQ ID NO: 173350 - DNA, 25 bp, Probe Sequence
cacccaggaaaccatcgacaagact

SEQ ID NO: 173351 - DNA, 25 bp, Probe Sequence
cacccatgagactcggtccaagagt

SEQ ID NO: 173352 - DNA, 25 bp, Probe Sequence
cccttggacaaggtccccaggatcg

SEQ ID NO: 173353 - DNA, 25 bp, Probe Sequence
cacctttactcacaccctgagaatt

SEQ ID NO: 173354 - DNA, 25 bp, Probe Sequence
cacctttactcacaccctgagaatt

SEQ ID NO: 173355 - DNA, 25 bp, Probe Sequence
cacctttagtctatcccaggaagat

SEQ ID NO: 173356 - DNA, 25 bp, Probe Sequence
caccctgtctttgtctccaggggaa

SEQ ID NO: 173357 - DNA, 25 bp, Probe Sequence
caccctcctttctgcattagtggag

SEQ ID NO: 173358 - DNA, 25 bp, Probe Sequence
cacccgcctggtttcttgaagtgtg

SEQ ID NO: 173359 - DNA, 25 bp, Probe Sequence
caccccctgatgagtgttacctggg

SEQ ID NO: 173360 - DNA, 25 bp, Probe Sequence
cacgtctacatgtacgtgttcatcc

SEQ ID NO: 173361 - DNA, 25 bp, Probe Sequence
cacgtgctatcgtgcgagcactgcc

SEQ ID NO: 173362 - DNA, 25 bp, Probe Sequence
cacgtgcttgcagggtgagggccag

SEQ ID NO: 173363 - DNA, 25 bp, Probe Sequence
cacggccagcaatgtggggcatcgg

SEQ ID NO: 173364 - DNA, 25 bp, Probe Sequence
cacgctggcagcaaggtgggagacc

SEQ ID NO: 173365 - DNA, 25 bp, Probe Sequence
cacctggctgctattgcaggaggcc

SEQ ID NO: 173366 - DNA, 25 bp, Probe Sequence
cacgggcatatcataggctgaagga

SEQ ID NO: 173367 - DNA, 25 bp, Probe Sequence
cacgggaagcctccgtcaggagaga

SEQ ID NO: 173368 - DNA, 25 bp, Probe Sequence
cacggtgggccaaaggatgaagaga

SEQ ID NO: 173369 - DNA, 25 bp, Probe Sequence
cacggttctccaatgagtagaagag

SEQ ID NO: 173370 - DNA, 25 bp, Probe Sequence
cactggtgtcaccctggataggcaa

SEQ ID NO: 173371 - DNA, 25 bp, Probe Sequence
cacggtgtccatatggagaggaaaa

SEQ ID NO: 173372 - DNA, 25 bp, Probe Sequence
cacgactgcccaaatatggtgtgaa

SEQ ID NO: 173373 - DNA, 25 bp, Probe Sequence
cacccccttccatgtgttgaataat

SEQ ID NO: 173374 - DNA, 25 bp, Probe Sequence
cacccctctaattatttctgaactt

SEQ ID NO: 173375 - DNA, 25 bp, Probe Sequence
caccctcctcaagtatacttcaaag

SEQ ID NO: 173376 - DNA, 25 bp, Probe Sequence
caccagcccgaacaccattgaggga

SEQ ID NO: 173377 - DNA, 25 bp, Probe Sequence
cacgacaccaagggaagcagctgag

SEQ ID NO: 173378 - DNA, 25 bp, Probe Sequence
cacgcactcctcggtcaagagcgtg

SEQ ID NO: 173379 - DNA, 25 bp, Probe Sequence
cacctccccagattcaaacttgaaa

SEQ ID NO: 173380 - DNA, 25 bp, Probe Sequence
cacgttgctgtcgattaagaccgga

SEQ ID NO: 173381 - DNA, 25 bp, Probe Sequence
caccggctctgcggataagaccgta

SEQ ID NO: 173382 - DNA, 25 bp, Probe Sequence
cacctggcatagttaaaaccttgct

SEQ ID NO: 173383 - DNA, 25 bp, Probe Sequence
cacctggaagtttcagaacccactt

SEQ ID NO: 173384 - DNA, 25 bp, Probe Sequence
caccagcagaagatcacaaatgagc

SEQ ID NO: 173385 - DNA, 25 bp, Probe Sequence
cagccaagctacatccagaattagt

SEQ ID NO: 173386 - DNA, 25 bp, Probe Sequence
cacccagctgatatagaacatttgt

SEQ ID NO: 173387 - DNA, 25 bp, Probe Sequence
cacccatgtttgttgaacttagagt

SEQ ID NO: 173388 - DNA, 25 bp, Probe Sequence
cacgcctgttttccatttatagcaa

SEQ ID NO: 173389 - DNA, 25 bp, Probe Sequence
cacgcgatgttgactgcacaggtaa

SEQ ID NO: 173390 - DNA, 25 bp, Probe Sequence
cagctggattacgcaacagtaaatc

SEQ ID NO: 173391 - DNA, 25 bp, Probe Sequence
cactggttttacacagagaaataca

SEQ ID NO: 173392 - DNA, 25 bp, Probe Sequence
cagctaccttttccagcaggacaag

SEQ ID NO: 173393 - DNA, 25 bp, Probe Sequence
cacccccatactgcaaggacaaagg

SEQ ID NO: 173394 - DNA, 25 bp, Probe Sequence
caccaccggatcaacttcgacaaat

SEQ ID NO: 173395 - DNA, 25 bp, Probe Sequence
caccgccagcgtggattttccaaat

SEQ ID NO: 173396 - DNA, 25 bp, Probe Sequence
caccccagcgccatttgtaaagagc

SEQ ID NO: 173397 - DNA, 25 bp, Probe Sequence
caccccagcgccatttgtaaagagc

SEQ ID NO: 173398 - DNA, 25 bp, Probe Sequence
caccctgcccatttttgtaaaactg

SEQ ID NO: 173399 - DNA, 25 bp, Probe Sequence
caccctcccaagatgttcacaaaag

SEQ ID NO: 173400 - DNA, 25 bp, Probe Sequence
cacctcattccagcagctaacactg

SEQ ID NO: 173401 - DNA, 25 bp, Probe Sequence
cacccatacacatccatgttcactg

SEQ ID NO: 173402 - DNA, 25 bp, Probe Sequence
cacccatacacatccatgttcactg

SEQ ID NO: 173403 - DNA, 25 bp, Probe Sequence
cacgtgcaaatctcatcacttcctg

SEQ ID NO: 173404 - DNA, 25 bp, Probe Sequence
cacggaataggcaaacttcacagga

SEQ ID NO: 173405 - DNA, 25 bp, Probe Sequence
cacggagatgggacccctgagatgg

SEQ ID NO: 173406 - DNA, 25 bp, Probe Sequence
cacgctggtgattgacctccataga

SEQ ID NO: 173407 - DNA, 25 bp, Probe Sequence
cacgtgctgtgttatggtcgatggc

SEQ ID NO: 173408 - DNA, 25 bp, Probe Sequence
cacgtgcatctgtcatagtctgggt

SEQ ID NO: 173409 - DNA, 25 bp, Probe Sequence
cacgtgacaggcgaggcggcagtga

SEQ ID NO: 173410 - DNA, 25 bp, Probe Sequence
cacgcataagaggcagtgcgaacaa

SEQ ID NO: 173411 - DNA, 25 bp, Probe Sequence
cacctgcaacagaagtgcgtaccag

SEQ ID NO: 173412 - DNA, 25 bp, Probe Sequence
cacgggagaaaggcgtccacacaga

SEQ ID NO: 173413 - DNA, 25 bp, Probe Sequence
cacggaaatgaagctgagaccaaga

SEQ ID NO: 173414 - DNA, 25 bp, Probe Sequence
caccgaagtgactctatgacccagt

SEQ ID NO: 173415 - DNA, 25 bp, Probe Sequence
cacctacagcagtgtctatgactcc

SEQ ID NO: 173416 - DNA, 25 bp, Probe Sequence
cacgctgagcacgaaggcaaaccct

SEQ ID NO: 173417 - DNA, 25 bp, Probe Sequence
cacctggcccaacaaccagtttgac

SEQ ID NO: 173418 - DNA, 25 bp, Probe Sequence
ccctggacccataaaccagtccact

SEQ ID NO: 173419 - DNA, 25 bp, Probe Sequence
catccggtgaaagaaccagtccctg

SEQ ID NO: 173420 - DNA, 25 bp, Probe Sequence
catccgggaggacaaccagaccaac

SEQ ID NO: 173421 - DNA, 25 bp, Probe Sequence
catccgggaggacaaccagaccaac

SEQ ID NO: 173422 - DNA, 25 bp, Probe Sequence
cacggggcctcccaactatgaataa

SEQ ID NO: 173423 - DNA, 25 bp, Probe Sequence
cacccctgcctcggaagaataaaga

SEQ ID NO: 173424 - DNA, 25 bp, Probe Sequence
caccgtggtcttgcacatgactaag

SEQ ID NO: 173425 - DNA, 25 bp, Probe Sequence
caccgtttcttcccaggtgacagag

SEQ ID NO: 173426 - DNA, 25 bp, Probe Sequence
caccctccatgtacccaggggagat

SEQ ID NO: 173427 - DNA, 25 bp, Probe Sequence
cacgtcactgagaacccagggaaga

SEQ ID NO: 173428 - DNA, 25 bp, Probe Sequence
cacgtctctgcaattctcgtggaga

SEQ ID NO: 173429 - DNA, 25 bp, Probe Sequence
cacgctgccagctttactggagaac

SEQ ID NO: 173430 - DNA, 25 bp, Probe Sequence
cacgtggtccttttgtgaaacctag

SEQ ID NO: 173431 - DNA, 25 bp, Probe Sequence
cacgctgtgtccctcaattacagag

SEQ ID NO: 173432 - DNA, 25 bp, Probe Sequence
cacgggagactttatctgacagcag

SEQ ID NO: 173433 - DNA, 25 bp, Probe Sequence
cacctgggtctttatgcatgaagat

SEQ ID NO: 173434 - DNA, 25 bp, Probe Sequence
cacctgggccatatactcaactggc

SEQ ID NO: 173435 - DNA, 25 bp, Probe Sequence
cccttgaccttatctaactaccaga

SEQ ID NO: 173436 - DNA, 25 bp, Probe Sequence
cagcctatacccatactaacaaaga

SEQ ID NO: 173437 - DNA, 25 bp, Probe Sequence
cacctgtcaccttttctagaaataa

SEQ ID NO: 173438 - DNA, 25 bp, Probe Sequence
cacccaatccaacttcagagaacct

SEQ ID NO: 173439 - DNA, 25 bp, Probe Sequence
caccagcaatattcagtctaaaagc

SEQ ID NO: 173440 - DNA, 25 bp, Probe Sequence
cacggcgatgaacgtcttacaactc

SEQ ID NO: 173441 - DNA, 25 bp, Probe Sequence
cacggtgattcatgtttacagatac

SEQ ID NO: 173442 - DNA, 25 bp, Probe Sequence
cacgttgataccgactagatagata

SEQ ID NO: 173443 - DNA, 25 bp, Probe Sequence
cacgttgtatttggttgataatgac

SEQ ID NO: 173444 - DNA, 25 bp, Probe Sequence
cacggtgatttcatgttatatatgc

SEQ ID NO: 173445 - DNA, 25 bp, Probe Sequence
cacgcatgtatgcttagtataaatg

SEQ ID NO: 173446 - DNA, 25 bp, Probe Sequence
cacctgagatcgcgagttcaacatg

SEQ ID NO: 173447 - DNA, 25 bp, Probe Sequence
cacgctgcgccggaagtgtgaactg

SEQ ID NO: 173448 - DNA, 25 bp, Probe Sequence
cacgctggctgctaagggcgacttg

SEQ ID NO: 173449 - DNA, 25 bp, Probe Sequence
cacgctcactgcgaaggcaggttat

SEQ ID NO: 173450 - DNA, 25 bp, Probe Sequence
cacgctcagtgccaacctggaaaag

SEQ ID NO: 173451 - DNA, 25 bp, Probe Sequence
cacgttctcacacattgcgaacaac

SEQ ID NO: 173452 - DNA, 25 bp, Probe Sequence
cacgttctcacacattgcgaacaac

SEQ ID NO: 173453 - DNA, 25 bp, Probe Sequence
cacgatcctattctgtggcaagctt

SEQ ID NO: 173454 - DNA, 25 bp, Probe Sequence
cacgtcgtactgatgggctaggtag

SEQ ID NO: 173455 - DNA, 25 bp, Probe Sequence
cacgtgtttgtgaagggctatgaaa

SEQ ID NO: 173456 - DNA, 25 bp, Probe Sequence
cacgtgatttgtccagcgacactca

SEQ ID NO: 173457 - DNA, 25 bp, Probe Sequence
cacgtacattgactgcagcactatt

SEQ ID NO: 173458 - DNA, 25 bp, Probe Sequence
cacgtccatgacttgcagagctttg

SEQ ID NO: 173459 - DNA, 25 bp, Probe Sequence
cacgatgctgctctggtgattcttg

SEQ ID NO: 173460 - DNA, 25 bp, Probe Sequence
caccaggctcctgggatatgtcgtc

SEQ ID NO: 173461 - DNA, 25 bp, Probe Sequence
catccgtggcttgagatctttacct

SEQ ID NO: 173462 - DNA, 25 bp, Probe Sequence
caccgggatgctttgtttgttcgct

SEQ ID NO: 173463 - DNA, 25 bp, Probe Sequence
cacccgagattctatgtgtagattt

SEQ ID NO: 173464 - DNA, 25 bp, Probe Sequence
cacccacaaacattcttcgttcttt

SEQ ID NO: 173465 - DNA, 25 bp, Probe Sequence
cacgcccagctaatttttgtatttt

SEQ ID NO: 173466 - DNA, 25 bp, Probe Sequence
cacgcccagctaatttttgtatttt

SEQ ID NO: 173467 - DNA, 25 bp, Probe Sequence
cacgcctgactaattttgtattttt

SEQ ID NO: 173468 - DNA, 25 bp, Probe Sequence
caccctaccagagcctgttttgttg

SEQ ID NO: 173469 - DNA, 25 bp, Probe Sequence
cacccttggcaactactgattttgt

SEQ ID NO: 173470 - DNA, 25 bp, Probe Sequence
cacccttggtagaagttcccatgag

SEQ ID NO: 173471 - DNA, 25 bp, Probe Sequence
cacccatctgggtatagccaaccgg

SEQ ID NO: 173472 - DNA, 25 bp, Probe Sequence
caccctcgaggttgaaccctcggat

SEQ ID NO: 173473 - DNA, 25 bp, Probe Sequence
cagccctaggggaaacacctttgat

SEQ ID NO: 173474 - DNA, 25 bp, Probe Sequence
cagccctagatacaatcccttttga

SEQ ID NO: 173475 - DNA, 25 bp, Probe Sequence
caccttagtgagatcccttctctta

SEQ ID NO: 173476 - DNA, 25 bp, Probe Sequence
cacgattcggcaaatccctggtgga

SEQ ID NO: 173477 - DNA, 25 bp, Probe Sequence
caccattgtggaatgatgccctggc

SEQ ID NO: 173478 - DNA, 25 bp, Probe Sequence
cacgtcatgtaccatgactggcggc

SEQ ID NO: 173479 - DNA, 25 bp, Probe Sequence
cacgtcatggaccatgactgggcgg

SEQ ID NO: 173480 - DNA, 25 bp, Probe Sequence
caccgagcatgcgaaacctgcacag

SEQ ID NO: 173481 - DNA, 25 bp, Probe Sequence
caccgttcgtgatcccaagacagga

SEQ ID NO: 173482 - DNA, 25 bp, Probe Sequence
cagccgtttgtatcctcggaagaac

SEQ ID NO: 173483 - DNA, 25 bp, Probe Sequence
cagccgtttgtatcctcggaagaac

SEQ ID NO: 173484 - DNA, 25 bp, Probe Sequence
cagccgtttgtatcctcggaagaac

SEQ ID NO: 173485 - DNA, 25 bp, Probe Sequence
cacccaggtgatttcctctaaagaa

SEQ ID NO: 173486 - DNA, 25 bp, Probe Sequence
cagcccgagttctctcttaaatggc

SEQ ID NO: 173487 - DNA, 25 bp, Probe Sequence
cagactaggttctgcctttgactca

SEQ ID NO: 173488 - DNA, 25 bp, Probe Sequence
cacgcgcaggtgacggccttagatc

SEQ ID NO: 173489 - DNA, 25 bp, Probe Sequence
cacgccagagtgatggggcgagact

SEQ ID NO: 173490 - DNA, 25 bp, Probe Sequence
cacgcctgcaggctggagactggac

SEQ ID NO: 173491 - DNA, 25 bp, Probe Sequence
cacgccctgctggaggggcggacca

SEQ ID NO: 173492 - DNA, 25 bp, Probe Sequence
cacgcatcttcatgaagggcgcgac

SEQ ID NO: 173493 - DNA, 25 bp, Probe Sequence
cacgccctaataaggagcgaatcct

SEQ ID NO: 173494 - DNA, 25 bp, Probe Sequence
cacgctggggaaagcgggaagcgct

SEQ ID NO: 173495 - DNA, 25 bp, Probe Sequence
cacgggaggatacctgtgtgccggc

SEQ ID NO: 173496 - DNA, 25 bp, Probe Sequence
caccgcgaggaagatgcgtgcgccc

SEQ ID NO: 173497 - DNA, 25 bp, Probe Sequence
cacgcatgagagtgacgacgcgcgc

SEQ ID NO: 173498 - DNA, 25 bp, Probe Sequence
cagctgcatgatgctggaccacctc

SEQ ID NO: 173499 - DNA, 25 bp, Probe Sequence
cacggatccggagctttctggatga

SEQ ID NO: 173500 - DNA, 25 bp, Probe Sequence
caccggccaggaggcttcaagagga

SEQ ID NO: 173501 - DNA, 25 bp, Probe Sequence
cacccccatgccactattagaggca

SEQ ID NO: 173502 - DNA, 25 bp, Probe Sequence
caccccactcatagagtactacagg

SEQ ID NO: 173503 - DNA, 25 bp, Probe Sequence
caccctggtcatcactgacaaagag

SEQ ID NO: 173504 - DNA, 25 bp, Probe Sequence
caccacggtatctactggattatag

SEQ ID NO: 173505 - DNA, 25 bp, Probe Sequence
cacgactgtctatactgagagtgtc

SEQ ID NO: 173506 - DNA, 25 bp, Probe Sequence
cacgacagttatgtccgagggcgcc

SEQ ID NO: 173507 - DNA, 25 bp, Probe Sequence
cacccaggatctggtctcggtggtc

SEQ ID NO: 173508 - DNA, 25 bp, Probe Sequence
caccgatggcctcatctgggtagtg

SEQ ID NO: 173509 - DNA, 25 bp, Probe Sequence
cagctcctggcagacttgggttttc

SEQ ID NO: 173510 - DNA, 25 bp, Probe Sequence
cagctcctggcagacttgggttttc

SEQ ID NO: 173511 - DNA, 25 bp, Probe Sequence
caccactgtgaccacggtggggttc

SEQ ID NO: 173512 - DNA, 25 bp, Probe Sequence
caccctgtacgaggcggtgcgggaa

SEQ ID NO: 173513 - DNA, 25 bp, Probe Sequence
caccctttgggcagcgtgtggtgaa

SEQ ID NO: 173514 - DNA, 25 bp, Probe Sequence
cacccccgctggaggatgtgggcag

SEQ ID NO: 173515 - DNA, 25 bp, Probe Sequence
caccccacagtgcttgatatttcag

SEQ ID NO: 173516 - DNA, 25 bp, Probe Sequence
caccccacagtgcttgatatttcag

SEQ ID NO: 173517 - DNA, 25 bp, Probe Sequence
caccccacagtgcttgatatttcag

SEQ ID NO: 173518 - DNA, 25 bp, Probe Sequence
caccccacagtgcttgatatttcag

SEQ ID NO: 173519 - DNA, 25 bp, Probe Sequence
caccccaattagctgaattcgcgtg

SEQ ID NO: 173520 - DNA, 25 bp, Probe Sequence
cacccgagattgagcaataacaggt

SEQ ID NO: 173521 - DNA, 25 bp, Probe Sequence
cacccaagcactaccagacaaagcg

SEQ ID NO: 173522 - DNA, 25 bp, Probe Sequence
cacgcagaatacctcgaaccaggcg

SEQ ID NO: 173523 - DNA, 25 bp, Probe Sequence
cacgaatagacatcaaactcaatgc

SEQ ID NO: 173524 - DNA, 25 bp, Probe Sequence
cacgccaggagctcaaactattctc

SEQ ID NO: 173525 - DNA, 25 bp, Probe Sequence
cacccagctagctcaaacaaccatg

SEQ ID NO: 173526 - DNA, 25 bp, Probe Sequence
caccaactgtgtgcactattacccg

SEQ ID NO: 173527 - DNA, 25 bp, Probe Sequence
caccaaattgtctcttcaaatacgt

SEQ ID NO: 173528 - DNA, 25 bp, Probe Sequence
cacgcaagtttcagtgtcaaatggc

SEQ ID NO: 173529 - DNA, 25 bp, Probe Sequence
cacgaagttttcattaaagccacag

SEQ ID NO: 173530 - DNA, 25 bp, Probe Sequence
caccaagtagttattcatacatcca

SEQ ID NO: 173531 - DNA, 25 bp, Probe Sequence
caccaattggttaatctttcctgat

SEQ ID NO: 173532 - DNA, 25 bp, Probe Sequence
caccatccgttttcatgacctcctg

SEQ ID NO: 173533 - DNA, 25 bp, Probe Sequence
caccagcaagatgtacagaacgcct

SEQ ID NO: 173534 - DNA, 25 bp, Probe Sequence
caccaattgtagaaagcaacccttt

SEQ ID NO: 173535 - DNA, 25 bp, Probe Sequence
cacgcaacgtagatgcatcacacac

SEQ ID NO: 173536 - DNA, 25 bp, Probe Sequence
cacgtcacggacttgtcatgcacaa

SEQ ID NO: 173537 - DNA, 25 bp, Probe Sequence
cacgctctctggacttcacagaact

SEQ ID NO: 173538 - DNA, 25 bp, Probe Sequence
cacgttcatggacctgattgagcag

SEQ ID NO: 173539 - DNA, 25 bp, Probe Sequence
cagcgtccaagccctgaaagactga

SEQ ID NO: 173540 - DNA, 25 bp, Probe Sequence
caccctcaacacggatatcagcatc

SEQ ID NO: 173541 - DNA, 25 bp, Probe Sequence
caccctcatggcagctgacagagcc

SEQ ID NO: 173542 - DNA, 25 bp, Probe Sequence
cacgcacatcatcaaggcgcagagc

SEQ ID NO: 173543 - DNA, 25 bp, Probe Sequence
cacgcacacagtgagcagctgcagg

SEQ ID NO: 173544 - DNA, 25 bp, Probe Sequence
cacgcagacactgtgcagctggtgt

SEQ ID NO: 173545 - DNA, 25 bp, Probe Sequence
cacgcatacctgtagccatgtgtgt

SEQ ID NO: 173546 - DNA, 25 bp, Probe Sequence
cacgcatccctacggttgttgaatc

SEQ ID NO: 173547 - DNA, 25 bp, Probe Sequence
cacgtgccactgcggttgtttgtgg

SEQ ID NO: 173548 - DNA, 25 bp, Probe Sequence
cacgtggatctgcatggtttgcctg

SEQ ID NO: 173549 - DNA, 25 bp, Probe Sequence
cacgtgtgtggcatggtttggcctg

SEQ ID NO: 173550 - DNA, 25 bp, Probe Sequence
cacgcattgtagatgactttggcac

SEQ ID NO: 173551 - DNA, 25 bp, Probe Sequence
cacgatggtgggcacttgtagtccc

SEQ ID NO: 173552 - DNA, 25 bp, Probe Sequence
cacgctggtgcagggatcgttaccc

SEQ ID NO: 173553 - DNA, 25 bp, Probe Sequence
ccaaggtccgagtgctggacccgga

SEQ ID NO: 173554 - DNA, 25 bp, Probe Sequence
cagaaggaccgagtcggaggcttcc

SEQ ID NO: 173555 - DNA, 25 bp, Probe Sequence
cagaagcagaacgcttgggtcccct

SEQ ID NO: 173556 - DNA, 25 bp, Probe Sequence
cagaatggaaacggaggccgcccct

SEQ ID NO: 173557 - DNA, 25 bp, Probe Sequence
cagagggggcaaagggcacgtccca

SEQ ID NO: 173558 - DNA, 25 bp, Probe Sequence
cagcagtgggggaggacctcttcca

SEQ ID NO: 173559 - DNA, 25 bp, Probe Sequence
cacgagcggaggtgtgagcccattg

SEQ ID NO: 173560 - DNA, 25 bp, Probe Sequence
caccctgctgatgtaggacaccttc

SEQ ID NO: 173561 - DNA, 25 bp, Probe Sequence
cacccttatctgcaggatacgttcc

SEQ ID NO: 173562 - DNA, 25 bp, Probe Sequence
caccctcctctcttggatatggttg

SEQ ID NO: 173563 - DNA, 25 bp, Probe Sequence
caccacatatactttgttagatttg

SEQ ID NO: 173564 - DNA, 25 bp, Probe Sequence
cagccacttactgtctaatgattta

SEQ ID NO: 173565 - DNA, 25 bp, Probe Sequence
caccaaacctacgtcaagattaaca

SEQ ID NO: 173566 - DNA, 25 bp, Probe Sequence
cacccacacctaagtcacagaattt

SEQ ID NO: 173567 - DNA, 25 bp, Probe Sequence
cagccccactttactaagtagtcat

SEQ ID NO: 173568 - DNA, 25 bp, Probe Sequence
cagcccaatttaaccccttatatat

SEQ ID NO: 173569 - DNA, 25 bp, Probe Sequence
cacccaaatatcactttctttgttt

SEQ ID NO: 173570 - DNA, 25 bp, Probe Sequence
cacctaaatccatctgactacttgt

SEQ ID NO: 173571 - DNA, 25 bp, Probe Sequence
cacccacagagccaacgattgactg

SEQ ID NO: 173572 - DNA, 25 bp, Probe Sequence
cacccatcaatgcagagcactccag

SEQ ID NO: 173573 - DNA, 25 bp, Probe Sequence
caccatccagtgtgcatacatccac

SEQ ID NO: 173574 - DNA, 25 bp, Probe Sequence
cacctccagctgccaaacaagcagc

SEQ ID NO: 173575 - DNA, 25 bp, Probe Sequence
caccttcactgggaacaacacagcc

SEQ ID NO: 173576 - DNA, 25 bp, Probe Sequence
cacctgttttgctagaaacaagacg

SEQ ID NO: 173577 - DNA, 25 bp, Probe Sequence
caccttcttctataaatgcaaactt

SEQ ID NO: 173578 - DNA, 25 bp, Probe Sequence
caccccattctagaaaagtctctta

SEQ ID NO: 173579 - DNA, 25 bp, Probe Sequence
cacctactccaagagtaagttctgc

SEQ ID NO: 173580 - DNA, 25 bp, Probe Sequence
cacctttctgcaacaagttagtttt

SEQ ID NO: 173581 - DNA, 25 bp, Probe Sequence
cacccatcaccaaatcggtaatttc

SEQ ID NO: 173582 - DNA, 25 bp, Probe Sequence
cacccatcaccaaatcggtaatttc

SEQ ID NO: 173583 - DNA, 25 bp, Probe Sequence
cacccaacgctccaaagtcataatt

SEQ ID NO: 173584 - DNA, 25 bp, Probe Sequence
caccagaaccaacaagattgagaat

SEQ ID NO: 173585 - DNA, 25 bp, Probe Sequence
caccaagacctacactgttggctgt

SEQ ID NO: 173586 - DNA, 25 bp, Probe Sequence
caccttatcctagaacttgaggctg

SEQ ID NO: 173587 - DNA, 25 bp, Probe Sequence
caccttcttctaggtgcagggccct

SEQ ID NO: 173588 - DNA, 25 bp, Probe Sequence
caccccattaaagtgcagttccctc

SEQ ID NO: 173589 - DNA, 25 bp, Probe Sequence
caccaccataaaacccttgagcaca

SEQ ID NO: 173590 - DNA, 25 bp, Probe Sequence
caccttcatttaactctttgaaact

SEQ ID NO: 173591 - DNA, 25 bp, Probe Sequence
caccctcagtgtagactgccttgga

SEQ ID NO: 173592 - DNA, 25 bp, Probe Sequence
cacctgtagagatcaccaatctgga

SEQ ID NO: 173593 - DNA, 25 bp, Probe Sequence
cacccatcaagctcagcaaattacc

SEQ ID NO: 173594 - DNA, 25 bp, Probe Sequence
cagccccgactgctgaaatccaact

SEQ ID NO: 173595 - DNA, 25 bp, Probe Sequence
caccctcaaggctcatgaatccaaa

SEQ ID NO: 173596 - DNA, 25 bp, Probe Sequence
caccctcagcggatgataatctcaa

SEQ ID NO: 173597 - DNA, 25 bp, Probe Sequence
caccctgtctgactacaacatccag

SEQ ID NO: 173598 - DNA, 25 bp, Probe Sequence
caccctgtctgactacaacatccag

SEQ ID NO: 173599 - DNA, 25 bp, Probe Sequence
caccctatacacatcataatctctg

SEQ ID NO: 173600 - DNA, 25 bp, Probe Sequence
cacccatagcaagttcatcatctcc

SEQ ID NO: 173601 - DNA, 25 bp, Probe Sequence
cacgcacataatatcactatctcta

SEQ ID NO: 173602 - DNA, 25 bp, Probe Sequence
caccagagcactacagccttttatt

SEQ ID NO: 173603 - DNA, 25 bp, Probe Sequence
caccagagcactacagccttttatt

SEQ ID NO: 173604 - DNA, 25 bp, Probe Sequence
cagccaggactagtgtccttttaag

SEQ ID NO: 173605 - DNA, 25 bp, Probe Sequence
cgacaggttcatctctatttaaagg

SEQ ID NO: 173606 - DNA, 25 bp, Probe Sequence
caccgtttggctcgatattataaga

SEQ ID NO: 173607 - DNA, 25 bp, Probe Sequence
caccagttgtggcgtccagaaagct

SEQ ID NO: 173608 - DNA, 25 bp, Probe Sequence
cagccttgttgtctcacacaaaagc

SEQ ID NO: 173609 - DNA, 25 bp, Probe Sequence
caccttatctatcacagaccagtag

SEQ ID NO: 173610 - DNA, 25 bp, Probe Sequence
cacgctttgattcacagactcaact

SEQ ID NO: 173611 - DNA, 25 bp, Probe Sequence
caccttttcggatgacatacgccag

SEQ ID NO: 173612 - DNA, 25 bp, Probe Sequence
caccttcttttgagacattagccag

SEQ ID NO: 173613 - DNA, 25 bp, Probe Sequence
cacccttgctttagtgcaaatcagc

SEQ ID NO: 173614 - DNA, 25 bp, Probe Sequence
cacccttgtcagtgtctattgcacc

SEQ ID NO: 173615 - DNA, 25 bp, Probe Sequence
caccatcctggaaggttattaccta

SEQ ID NO: 173616 - DNA, 25 bp, Probe Sequence
caccatctggcgaggtcatttactg

SEQ ID NO: 173617 - DNA, 25 bp, Probe Sequence
cacgctggggacgtgtatctctacg

SEQ ID NO: 173618 - DNA, 25 bp, Probe Sequence
caccgtgagaacggaccctacagcc

SEQ ID NO: 173619 - DNA, 25 bp, Probe Sequence
caccatgaaaagagaccccactgcc

SEQ ID NO: 173620 - DNA, 25 bp, Probe Sequence
caccggaaagattgtctcctccatc

SEQ ID NO: 173621 - DNA, 25 bp, Probe Sequence
caccggaaagattgtctcctccatc

SEQ ID NO: 173622 - DNA, 25 bp, Probe Sequence
caccgagaaggggacctcatctaga

SEQ ID NO: 173623 - DNA, 25 bp, Probe Sequence
caccgaaagagagcgcctatctcat

SEQ ID NO: 173624 - DNA, 25 bp, Probe Sequence
caccgaaagagagcgcctatctcat

SEQ ID NO: 173625 - DNA, 25 bp, Probe Sequence
caccagaccaagggcagtgccccaa

SEQ ID NO: 173626 - DNA, 25 bp, Probe Sequence
cacctaccggaacgtgactgccgag

SEQ ID NO: 173627 - DNA, 25 bp, Probe Sequence
cacctagttgcaaaggacactggga

SEQ ID NO: 173628 - DNA, 25 bp, Probe Sequence
caccgcagtcttctgtgaccagcgg

SEQ ID NO: 173629 - DNA, 25 bp, Probe Sequence
cacctggttttaatagccagccagt

SEQ ID NO: 173630 - DNA, 25 bp, Probe Sequence
cacctggtttgtcctaaggccatag

SEQ ID NO: 173631 - DNA, 25 bp, Probe Sequence
cacctagtcttcactatattgagta

SEQ ID NO: 173632 - DNA, 25 bp, Probe Sequence
cacctacggcatgcctctatgtatt

SEQ ID NO: 173633 - DNA, 25 bp, Probe Sequence
caccctcaggtgtcctgtgatgctg

SEQ ID NO: 173634 - DNA, 25 bp, Probe Sequence
cacccagcaggtgtttggcatcgat

SEQ ID NO: 173635 - DNA, 25 bp, Probe Sequence
cacctatgcaggtcttatttacagt

SEQ ID NO: 173636 - DNA, 25 bp, Probe Sequence
cacctctggggcattgtacaagttc

SEQ ID NO: 173637 - DNA, 25 bp, Probe Sequence
cacctggggccgagatcacagtgat

SEQ ID NO: 173638 - DNA, 25 bp, Probe Sequence
cacctgccaggacgttctagcaggt

SEQ ID NO: 173639 - DNA, 25 bp, Probe Sequence
cacctgccgtggtctatatcgagat

SEQ ID NO: 173640 - DNA, 25 bp, Probe Sequence
cacctgccgtggtctatatcgagat

SEQ ID NO: 173641 - DNA, 25 bp, Probe Sequence
cacctgccgtggtctatatcgagat

SEQ ID NO: 173642 - DNA, 25 bp, Probe Sequence
caccaccagtggtcttaaggttgaa

SEQ ID NO: 173643 - DNA, 25 bp, Probe Sequence
caccaccgttgaatacgagggggag

SEQ ID NO: 173644 - DNA, 25 bp, Probe Sequence
cacccctgaagatcccaggtgggcg

SEQ ID NO: 173645 - DNA, 25 bp, Probe Sequence
cacctcctgagagccactaatgtaa

SEQ ID NO: 173646 - DNA, 25 bp, Probe Sequence
cacccctgagccagtatacagtacc

SEQ ID NO: 173647 - DNA, 25 bp, Probe Sequence
cacccctagtcattttccaatgagc

SEQ ID NO: 173648 - DNA, 25 bp, Probe Sequence
cacccctcagcttgaggaccaatac

SEQ ID NO: 173649 - DNA, 25 bp, Probe Sequence
caccctcataagtcgtcactaatac

SEQ ID NO: 173650 - DNA, 25 bp, Probe Sequence
catttccaaactgccttaaacgttg

SEQ ID NO: 173651 - DNA, 25 bp, Probe Sequence
catttcccttctgatgttaaaaggt

SEQ ID NO: 173652 - DNA, 25 bp, Probe Sequence
cagttcccatttctccttataagga

SEQ ID NO: 173653 - DNA, 25 bp, Probe Sequence
cagcattgcccacaaatccttttag

SEQ ID NO: 173654 - DNA, 25 bp, Probe Sequence
cacctggccatgaaggaccttttga

SEQ ID NO: 173655 - DNA, 25 bp, Probe Sequence
caccgtgccaaagactggatgcccc

SEQ ID NO: 173656 - DNA, 25 bp, Probe Sequence
caccgctgcagccaaaacaggctcc

SEQ ID NO: 173657 - DNA, 25 bp, Probe Sequence
cacccagcaaggtgacggctcgacc

SEQ ID NO: 173658 - DNA, 25 bp, Probe Sequence
cacctacttcgtgacaggcatcgtc

SEQ ID NO: 173659 - DNA, 25 bp, Probe Sequence
cacctattggcttaacagagatcga

SEQ ID NO: 173660 - DNA, 25 bp, Probe Sequence
cacgaattgcacagtcatcaatgac

SEQ ID NO: 173661 - DNA, 25 bp, Probe Sequence
cacgcagtggccaataatcaagaca

SEQ ID NO: 173662 - DNA, 25 bp, Probe Sequence
cacgctggcctatatatcagggacc

SEQ ID NO: 173663 - DNA, 25 bp, Probe Sequence
caccctcttacatttatggggcaca

SEQ ID NO: 173664 - DNA, 25 bp, Probe Sequence
caccctcttactttggagggagtct

SEQ ID NO: 173665 - DNA, 25 bp, Probe Sequence
cacccatgctgaacattatgaagag

SEQ ID NO: 173666 - DNA, 25 bp, Probe Sequence
caccaatgctgttgttaaagagcct

SEQ ID NO: 173667 - DNA, 25 bp, Probe Sequence
caccatcacttacctaactgacagc

SEQ ID NO: 173668 - DNA, 25 bp, Probe Sequence
cacgacctgttatttccatgactgc

SEQ ID NO: 173669 - DNA, 25 bp, Probe Sequence
cacgcacgtgatttgtccagcgaca

SEQ ID NO: 173670 - DNA, 25 bp, Probe Sequence
cacctcgaactttgacagcgacaag

SEQ ID NO: 173671 - DNA, 25 bp, Probe Sequence
caccacgatatcatgttactaaagt

SEQ ID NO: 173672 - DNA, 25 bp, Probe Sequence
caccatggagactttctactagagg

SEQ ID NO: 173673 - DNA, 25 bp, Probe Sequence
cagccggaactggttaccaaggaca

SEQ ID NO: 173674 - DNA, 25 bp, Probe Sequence
ctgccggaacccggacaacgacatc

SEQ ID NO: 173675 - DNA, 25 bp, Probe Sequence
caccggatcaacttcgacaaatacc

SEQ ID NO: 173676 - DNA, 25 bp, Probe Sequence
cacctcgtcagacatcagaaaatcc

SEQ ID NO: 173677 - DNA, 25 bp, Probe Sequence
cacctttgcaacgcggaatatcaca

SEQ ID NO: 173678 - DNA, 25 bp, Probe Sequence
caccctctgagggcgggaagcttca

SEQ ID NO: 173679 - DNA, 25 bp, Probe Sequence
cacctgcaaggaccgggagatctta

SEQ ID NO: 173680 - DNA, 25 bp, Probe Sequence
caccagcaaggacggccaggacggt

SEQ ID NO: 173681 - DNA, 25 bp, Probe Sequence
cacctgaaccacgagccagggctgg

SEQ ID NO: 173682 - DNA, 25 bp, Probe Sequence
cacccagaccctcacagggctgggg

SEQ ID NO: 173683 - DNA, 25 bp, Probe Sequence
caccgcgggccaggaagagttcggg

SEQ ID NO: 173684 - DNA, 25 bp, Probe Sequence
cacccagggagcaggggcgtcaggg

SEQ ID NO: 173685 - DNA, 25 bp, Probe Sequence
cacccagggagcaggggcgtcaggg

SEQ ID NO: 173686 - DNA, 25 bp, Probe Sequence
cacgccagtgagccttgggaggcca

SEQ ID NO: 173687 - DNA, 25 bp, Probe Sequence
cacccagaagactgtggatggcccc

SEQ ID NO: 173688 - DNA, 25 bp, Probe Sequence
cacgctgcggcaccatagtggattg

SEQ ID NO: 173689 - DNA, 25 bp, Probe Sequence
cacgcctggcaggacatagcagata

SEQ ID NO: 173690 - DNA, 25 bp, Probe Sequence
cacgcctggccagaagacatgattt

SEQ ID NO: 173691 - DNA, 25 bp, Probe Sequence
cacctctgtgccgggaaagacatca

SEQ ID NO: 173692 - DNA, 25 bp, Probe Sequence
caccctagcctgggcaacagagcga

SEQ ID NO: 173693 - DNA, 25 bp, Probe Sequence
caccgtagccatctactctgagcag

SEQ ID NO: 173694 - DNA, 25 bp, Probe Sequence
caccctgagccatgtggtctggcag

SEQ ID NO: 173695 - DNA, 25 bp, Probe Sequence
caccagtggcctcgtggttataagc

SEQ ID NO: 173696 - DNA, 25 bp, Probe Sequence
caccttcagccacagccttataaaa

SEQ ID NO: 173697 - DNA, 25 bp, Probe Sequence
caccgcatcccacaggtgtcagaaa

SEQ ID NO: 173698 - DNA, 25 bp, Probe Sequence
ccgaccccatcgtagaatacaaact

SEQ ID NO: 173699 - DNA, 25 bp, Probe Sequence
caccagccccagaacaagtacaaac

SEQ ID NO: 173700 - DNA, 25 bp, Probe Sequence
cacctcagcccagaacaatgctaaa

SEQ ID NO: 173701 - DNA, 25 bp, Probe Sequence
cacccacccagcagagcagtgctga

SEQ ID NO: 173702 - DNA, 25 bp, Probe Sequence
caccctgccataggggcagtcctgc

SEQ ID NO: 173703 - DNA, 25 bp, Probe Sequence
caccctattagtgggcatttgtgtt

SEQ ID NO: 173704 - DNA, 25 bp, Probe Sequence
cacccagatggggccagagtctgtg

SEQ ID NO: 173705 - DNA, 25 bp, Probe Sequence
cacctcctgtgtccatcagaatgtt

SEQ ID NO: 173706 - DNA, 25 bp, Probe Sequence
caccttctttcgtgaatgttttgat

SEQ ID NO: 173707 - DNA, 25 bp, Probe Sequence
caccttttccaggaggtttgttatg

SEQ ID NO: 173708 - DNA, 25 bp, Probe Sequence
cacctataccctctggtgttgcttt

SEQ ID NO: 173709 - DNA, 25 bp, Probe Sequence
caccattcctaccattggttttaat

SEQ ID NO: 173710 - DNA, 25 bp, Probe Sequence
cagccattggctatttaaacttgta

SEQ ID NO: 173711 - DNA, 25 bp, Probe Sequence
cagccattagcactcatttaaccct

SEQ ID NO: 173712 - DNA, 25 bp, Probe Sequence
caccaatgagcttactacccaactt

SEQ ID NO: 173713 - DNA, 25 bp, Probe Sequence
caccactgtcgtttaccacagtttc

SEQ ID NO: 173714 - DNA, 25 bp, Probe Sequence
caccaggctggtctaccaggtagtt

SEQ ID NO: 173715 - DNA, 25 bp, Probe Sequence
caccaatctggactgtactcgggag

SEQ ID NO: 173716 - DNA, 25 bp, Probe Sequence
caccctctatgccttcaacagtggc

SEQ ID NO: 173717 - DNA, 25 bp, Probe Sequence
cacccttctcattccaacagtgagt

SEQ ID NO: 173718 - DNA, 25 bp, Probe Sequence
cacccattctgtacagggagtgagg

SEQ ID NO: 173719 - DNA, 25 bp, Probe Sequence
cacccacgctggaatgcagtggcgg

SEQ ID NO: 173720 - DNA, 25 bp, Probe Sequence
cacgctacagtacaagctgctggag

SEQ ID NO: 173721 - DNA, 25 bp, Probe Sequence
cacctacagaaaccctgggagtgga

SEQ ID NO: 173722 - DNA, 25 bp, Probe Sequence
caccccagagggtcgggcaggttga

SEQ ID NO: 173723 - DNA, 25 bp, Probe Sequence
caccccaagggccatgggagccagc

SEQ ID NO: 173724 - DNA, 25 bp, Probe Sequence
caccccaagggccatgggagccagc

SEQ ID NO: 173725 - DNA, 25 bp, Probe Sequence
cacccgcaagcaggcagtgggacct

SEQ ID NO: 173726 - DNA, 25 bp, Probe Sequence
caccaccagaatgcagttccagctt

SEQ ID NO: 173727 - DNA, 25 bp, Probe Sequence
caccagccatggtggtttctggagc

SEQ ID NO: 173728 - DNA, 25 bp, Probe Sequence
cagctagttggcgggggtgctggac

SEQ ID NO: 173729 - DNA, 25 bp, Probe Sequence
cacccgtggagccggaggtggcaat

SEQ ID NO: 173730 - DNA, 25 bp, Probe Sequence
caccgtgttagccaggatggtctcg

SEQ ID NO: 173731 - DNA, 25 bp, Probe Sequence
caccctggtgacagagtgagactct

SEQ ID NO: 173732 - DNA, 25 bp, Probe Sequence
cacccttggacaagctgtgagacca

SEQ ID NO: 173733 - DNA, 25 bp, Probe Sequence
cacccttggcacgagggcagggctg

SEQ ID NO: 173734 - DNA, 25 bp, Probe Sequence
cacccttgccacagaggtagacgat

SEQ ID NO: 173735 - DNA, 25 bp, Probe Sequence
catcctttcaccctctggtagaagg

SEQ ID NO: 173736 - DNA, 25 bp, Probe Sequence
cacctcagtccctctttgggaggtg

SEQ ID NO: 173737 - DNA, 25 bp, Probe Sequence
caccagcagtaccccgtggaggggt

SEQ ID NO: 173738 - DNA, 25 bp, Probe Sequence
caccctgattcggcctgatggagag

SEQ ID NO: 173739 - DNA, 25 bp, Probe Sequence
caccactgaggcccctggtgaatac

SEQ ID NO: 173740 - DNA, 25 bp, Probe Sequence
caccacgacgctctctgagagacca

SEQ ID NO: 173741 - DNA, 25 bp, Probe Sequence
catccgaggcctggttgaagaaaac

SEQ ID NO: 173742 - DNA, 25 bp, Probe Sequence
caccgaagcccctaataaatgaagc

SEQ ID NO: 173743 - DNA, 25 bp, Probe Sequence
caccgaagcccctaataaatgaagc

SEQ ID NO: 173744 - DNA, 25 bp, Probe Sequence
cagaagtagccccacaaaaataaag

SEQ ID NO: 173745 - DNA, 25 bp, Probe Sequence
cggggtggcccagaaaagcatgaag

SEQ ID NO: 173746 - DNA, 25 bp, Probe Sequence
cgtagggaacgcggaaggatcataa

SEQ ID NO: 173747 - DNA, 25 bp, Probe Sequence
cagaagggaaagaagtaggcagaaa

SEQ ID NO: 173748 - DNA, 25 bp, Probe Sequence
cagcctgggcaacaagtcaaaaaaa

SEQ ID NO: 173749 - DNA, 25 bp, Probe Sequence
cagcctgacgaacatagaaaaacct

SEQ ID NO: 173750 - DNA, 25 bp, Probe Sequence
caccgacgatgacaagcaagaccac

SEQ ID NO: 173751 - DNA, 25 bp, Probe Sequence
catccgtggaggacggccagatccc

SEQ ID NO: 173752 - DNA, 25 bp, Probe Sequence
cattgcggtcgcgcggatcatgatg

SEQ ID NO: 173753 - DNA, 25 bp, Probe Sequence
catcctgtgtcctgggactgagggt

SEQ ID NO: 173754 - DNA, 25 bp, Probe Sequence
cacctttgccattgcggacgaagag

SEQ ID NO: 173755 - DNA, 25 bp, Probe Sequence
cacctcttccattggggcacataaa

SEQ ID NO: 173756 - DNA, 25 bp, Probe Sequence
cacctctttccacagtgactacaga

SEQ ID NO: 173757 - DNA, 25 bp, Probe Sequence
cacccctcccattaggacaatcagt

SEQ ID NO: 173758 - DNA, 25 bp, Probe Sequence
caccccactccagtacaaatacatg

SEQ ID NO: 173759 - DNA, 25 bp, Probe Sequence
cacccccaacaaagcactatcattt

SEQ ID NO: 173760 - DNA, 25 bp, Probe Sequence
cacccccaaatgttgactatccatt

SEQ ID NO: 173761 - DNA, 25 bp, Probe Sequence
caccccctagagtgctctgtgtatg

SEQ ID NO: 173762 - DNA, 25 bp, Probe Sequence
cacccagtctggggagtctgtgaag

SEQ ID NO: 173763 - DNA, 25 bp, Probe Sequence
caccaactctcgcgtgttggagaga

SEQ ID NO: 173764 - DNA, 25 bp, Probe Sequence
cacccactacagcacaggcgggaat

SEQ ID NO: 173765 - DNA, 25 bp, Probe Sequence
cacctgagaacgcacaacggcgcct

SEQ ID NO: 173766 - DNA, 25 bp, Probe Sequence
cagcctagcccataaacgaccgctg

SEQ ID NO: 173767 - DNA, 25 bp, Probe Sequence
cacctgagttacaaagacagaccct

SEQ ID NO: 173768 - DNA, 25 bp, Probe Sequence
cacccagatctgcaaatacatgtcc

SEQ ID NO: 173769 - DNA, 25 bp, Probe Sequence
cacccgcatgtgtaacaacagccgc

SEQ ID NO: 173770 - DNA, 25 bp, Probe Sequence
cagccaaatggctgagctagctccc

SEQ ID NO: 173771 - DNA, 25 bp, Probe Sequence
caccattggcaatgagcggttccgc

SEQ ID NO: 173772 - DNA, 25 bp, Probe Sequence
caccatgctggctatccgggtgtta

SEQ ID NO: 173773 - DNA, 25 bp, Probe Sequence
caccattgatattggggaggctcca

SEQ ID NO: 173774 - DNA, 25 bp, Probe Sequence
caccttctcagagaggcggcatcca

SEQ ID NO: 173775 - DNA, 25 bp, Probe Sequence
caccttcaccatcggcaggtgacct

SEQ ID NO: 173776 - DNA, 25 bp, Probe Sequence
catacccttcagtgcagtgtaccag

SEQ ID NO: 173777 - DNA, 25 bp, Probe Sequence
catacccttcagtgcagtgtaccag

SEQ ID NO: 173778 - DNA, 25 bp, Probe Sequence
caccctcttctgtgagcaggaaaag

SEQ ID NO: 173779 - DNA, 25 bp, Probe Sequence
cacccagtcattttgcggtgaaaac

SEQ ID NO: 173780 - DNA, 25 bp, Probe Sequence
cacctcagtgactttcggcaagaaa

SEQ ID NO: 173781 - DNA, 25 bp, Probe Sequence
cacccggaacttggcaaatgagttt

SEQ ID NO: 173782 - DNA, 25 bp, Probe Sequence
cacccaggaggatggcaaagagagt

SEQ ID NO: 173783 - DNA, 25 bp, Probe Sequence
cacccaggctggagtgcagtagtgc

SEQ ID NO: 173784 - DNA, 25 bp, Probe Sequence
cacccaggctggagtgcagtggtgc

SEQ ID NO: 173785 - DNA, 25 bp, Probe Sequence
cacccaggctctacgagaagcgggg

SEQ ID NO: 173786 - DNA, 25 bp, Probe Sequence
cacccaggctttgaagagcatggag

SEQ ID NO: 173787 - DNA, 25 bp, Probe Sequence
caccctcgccttgtgtcaatggagg

SEQ ID NO: 173788 - DNA, 25 bp, Probe Sequence
caccctcgccttgtgtcaatggagg

SEQ ID NO: 173789 - DNA, 25 bp, Probe Sequence
cacctctcccttgatggtctgggag

SEQ ID NO: 173790 - DNA, 25 bp, Probe Sequence
caccttccgcgtcatgttcaaggag

SEQ ID NO: 173791 - DNA, 25 bp, Probe Sequence
caccctgccggtggagttcaagtgc

SEQ ID NO: 173792 - DNA, 25 bp, Probe Sequence
caccctccggtggatgtaccaccac

SEQ ID NO: 173793 - DNA, 25 bp, Probe Sequence
caccccctgggcaagtgagagcatc

SEQ ID NO: 173794 - DNA, 25 bp, Probe Sequence
caccctgcagctcagcaagtgatag

SEQ ID NO: 173795 - DNA, 25 bp, Probe Sequence
caccctcatctccagagattttgtg

SEQ ID NO: 173796 - DNA, 25 bp, Probe Sequence
caccctgtcctgtatattttctaca

SEQ ID NO: 173797 - DNA, 25 bp, Probe Sequence
cacccttcatctaacacttttataa

SEQ ID NO: 173798 - DNA, 25 bp, Probe Sequence
caccacatacttatcaatttcttga

SEQ ID NO: 173799 - DNA, 25 bp, Probe Sequence
caccaaagtttgttttcctgcattc

SEQ ID NO: 173800 - DNA, 25 bp, Probe Sequence
caccaaagtttgttttcctgcattc

SEQ ID NO: 173801 - DNA, 25 bp, Probe Sequence
caccaaagtttgttttcctgcattc

SEQ ID NO: 173802 - DNA, 25 bp, Probe Sequence
caccatggcaatatgtatttccctt

SEQ ID NO: 173803 - DNA, 25 bp, Probe Sequence
caccaaaaaagtatactgcctgttt

SEQ ID NO: 173804 - DNA, 25 bp, Probe Sequence
gcctaaataaagcttggcaactttt

SEQ ID NO: 173805 - DNA, 25 bp, Probe Sequence
catgcgaactacagtttggaacttg

SEQ ID NO: 173806 - DNA, 25 bp, Probe Sequence
catcccacttctgtttcaaactaaa

SEQ ID NO: 173807 - DNA, 25 bp, Probe Sequence
caccacctgtcagcatatccaaaac

SEQ ID NO: 173808 - DNA, 25 bp, Probe Sequence
caccactggtcatgctgatgacaaa

SEQ ID NO: 173809 - DNA, 25 bp, Probe Sequence
cagccacatggcaaggcatgccaga

SEQ ID NO: 173810 - DNA, 25 bp, Probe Sequence
caccactggcacatcacacatgtta

SEQ ID NO: 173811 - DNA, 25 bp, Probe Sequence
cacccagtcactacagcatatgaaa

SEQ ID NO: 173812 - DNA, 25 bp, Probe Sequence
cacccagtctttacagatgaacctc

SEQ ID NO: 173813 - DNA, 25 bp, Probe Sequence
caccctgatttccaagcaaacacat

SEQ ID NO: 173814 - DNA, 25 bp, Probe Sequence
cacctgtgtacccggcaaagcagat

SEQ ID NO: 173815 - DNA, 25 bp, Probe Sequence
cacctgattactttggttgcagcac

SEQ ID NO: 173816 - DNA, 25 bp, Probe Sequence
caccagttgccttcacagttgcaac

SEQ ID NO: 173817 - DNA, 25 bp, Probe Sequence
caccgcttggtttgcagttgagagg

SEQ ID NO: 173818 - DNA, 25 bp, Probe Sequence
caccgccatcgacgtgcaggtgggg

SEQ ID NO: 173819 - DNA, 25 bp, Probe Sequence
caccagacaggccccattgtgtggg

SEQ ID NO: 173820 - DNA, 25 bp, Probe Sequence
caccacccccacgattggtatgatg

SEQ ID NO: 173821 - DNA, 25 bp, Probe Sequence
caccaccctgccggtggagttcaag

SEQ ID NO: 173822 - DNA, 25 bp, Probe Sequence
caccatcatcggcgagtgggtaaag

SEQ ID NO: 173823 - DNA, 25 bp, Probe Sequence
cacctgtagtcccagctacttgaaa

SEQ ID NO: 173824 - DNA, 25 bp, Probe Sequence
cacctgtagtcccagctactaggga

SEQ ID NO: 173825 - DNA, 25 bp, Probe Sequence
cacctgtagttccagctactcagtg

SEQ ID NO: 173826 - DNA, 25 bp, Probe Sequence
cacctgtattcccatctactcagga

SEQ ID NO: 173827 - DNA, 25 bp, Probe Sequence
cacctgtttggacctccatatgaga

SEQ ID NO: 173828 - DNA, 25 bp, Probe Sequence
cacctggcaatgagatccctgtaga

SEQ ID NO: 173829 - DNA, 25 bp, Probe Sequence
cacctccattgttgtccttgttgag

SEQ ID NO: 173830 - DNA, 25 bp, Probe Sequence
caccaccattatgtcctgattaggg

SEQ ID NO: 173831 - DNA, 25 bp, Probe Sequence
cacccgcttatcctgaaggtgcagg

SEQ ID NO: 173832 - DNA, 25 bp, Probe Sequence
caccagccctatgtggagagcgaca

SEQ ID NO: 173833 - DNA, 25 bp, Probe Sequence
caccatgtccttgttggcagctaac

SEQ ID NO: 173834 - DNA, 25 bp, Probe Sequence
caccatgccctggctgattgtgtct

SEQ ID NO: 173835 - DNA, 25 bp, Probe Sequence
caccctctgctgtcatcagctgatg

SEQ ID NO: 173836 - DNA, 25 bp, Probe Sequence
caccgatgctgactccatgtgtgct

SEQ ID NO: 173837 - DNA, 25 bp, Probe Sequence
caccgacgatggcatggctgtggcc

SEQ ID NO: 173838 - DNA, 25 bp, Probe Sequence
caccgatgcgtgccagggtgattcc

SEQ ID NO: 173839 - DNA, 25 bp, Probe Sequence
caccatgtcagacgcagccgtagac

SEQ ID NO: 173840 - DNA, 25 bp, Probe Sequence
caccgtgcagagctgcacttggcct

SEQ ID NO: 173841 - DNA, 25 bp, Probe Sequence
caccattggacctatcttggcttct

SEQ ID NO: 173842 - DNA, 25 bp, Probe Sequence
caccattaacaagatgagccttgtg

SEQ ID NO: 173843 - DNA, 25 bp, Probe Sequence
caccttcaaagacaggccctctgag

SEQ ID NO: 173844 - DNA, 25 bp, Probe Sequence
cacctcctaaactgagcagtctcat

SEQ ID NO: 173845 - DNA, 25 bp, Probe Sequence
cacctcctaagaataagaaccaaca

SEQ ID NO: 173846 - DNA, 25 bp, Probe Sequence
cacccccaaaaaatgacaagtatat

SEQ ID NO: 173847 - DNA, 25 bp, Probe Sequence
cacccctaagcatgttacaagcaaa

SEQ ID NO: 173848 - DNA, 25 bp, Probe Sequence
caccagccttcctgtatagacacta

SEQ ID NO: 173849 - DNA, 25 bp, Probe Sequence
caccagagttcattgttatgtgcca

SEQ ID NO: 173850 - DNA, 25 bp, Probe Sequence
caccgatgattccatttgtgtgctg

SEQ ID NO: 173851 - DNA, 25 bp, Probe Sequence
caccgtgttcgaaatcgtgcagggg

SEQ ID NO: 173852 - DNA, 25 bp, Probe Sequence
cacctgctttccaaatctggcagat

SEQ ID NO: 173853 - DNA, 25 bp, Probe Sequence
caccctgtgttcaaattcactgata

SEQ ID NO: 173854 - DNA, 25 bp, Probe Sequence
caccctgtgttcatctgtgacatta

SEQ ID NO: 173855 - DNA, 25 bp, Probe Sequence
cacctccatttcagcatgtggctcg

SEQ ID NO: 173856 - DNA, 25 bp, Probe Sequence
caccttgacttggcagcatggagcc

SEQ ID NO: 173857 - DNA, 25 bp, Probe Sequence
cacctgctgtctaccatggacagcc

SEQ ID NO: 173858 - DNA, 25 bp, Probe Sequence
cacccgctctacgatatgagcctcc

SEQ ID NO: 173859 - DNA, 25 bp, Probe Sequence
cacctcgtcgtatatatcctcgata

SEQ ID NO: 173860 - DNA, 25 bp, Probe Sequence
cagcctcttagtgctattcattggt

SEQ ID NO: 173861 - DNA, 25 bp, Probe Sequence
cacctattcatgagtattattgaaa

SEQ ID NO: 173862 - DNA, 25 bp, Probe Sequence
caccatccactgtgtttattgatga

SEQ ID NO: 173863 - DNA, 25 bp, Probe Sequence
caccaccagtggattatgaagatga

SEQ ID NO: 173864 - DNA, 25 bp, Probe Sequence
cacctgacggtgatcttgggcagaa

SEQ ID NO: 173865 - DNA, 25 bp, Probe Sequence
cacctgggggcattgagtggcgcag

SEQ ID NO: 173866 - DNA, 25 bp, Probe Sequence
caccatgggaaactgttgtgggcgc

SEQ ID NO: 173867 - DNA, 25 bp, Probe Sequence
caccagggagaatgttcttggggcc

SEQ ID NO: 173868 - DNA, 25 bp, Probe Sequence
caccaaccagaacgtggtttgcctg

SEQ ID NO: 173869 - DNA, 25 bp, Probe Sequence
cagccaaccagttaattctcttcct

SEQ ID NO: 173870 - DNA, 25 bp, Probe Sequence
cagcgtgttagcattttctttgact

SEQ ID NO: 173871 - DNA, 25 bp, Probe Sequence
cagcttttaagattgtacttttatc

SEQ ID NO: 173872 - DNA, 25 bp, Probe Sequence
cagcttttaaagtgtcttctatctc

SEQ ID NO: 173873 - DNA, 25 bp, Probe Sequence
cagcttccaaactggtatacattcc

SEQ ID NO: 173874 - DNA, 25 bp, Probe Sequence
cagccacaaaactgtcattcactct

SEQ ID NO: 173875 - DNA, 25 bp, Probe Sequence
caccagaaagatttgtgggactcaa

SEQ ID NO: 173876 - DNA, 25 bp, Probe Sequence
catctcccaacttttaaagccagat

SEQ ID NO: 173877 - DNA, 25 bp, Probe Sequence
caccacccactatatgagaaccgag

SEQ ID NO: 173878 - DNA, 25 bp, Probe Sequence
caccacacgcacttatcaggaacgc

SEQ ID NO: 173879 - DNA, 25 bp, Probe Sequence
cacctcagcaaccatgacctgaaac

SEQ ID NO: 173880 - DNA, 25 bp, Probe Sequence
caccggaagcagtactcagaacaag

SEQ ID NO: 173881 - DNA, 25 bp, Probe Sequence
caccgtgaagtgcctatgatgaagc

SEQ ID NO: 173882 - DNA, 25 bp, Probe Sequence
caccgactgtgtgctgatcagagac

SEQ ID NO: 173883 - DNA, 25 bp, Probe Sequence
caccgcaggtgtagagaaggcactt

SEQ ID NO: 173884 - DNA, 25 bp, Probe Sequence
caccctggtgaatgtcagcacctgg

SEQ ID NO: 173885 - DNA, 25 bp, Probe Sequence
cacctcggaggtatccgagctggac

SEQ ID NO: 173886 - DNA, 25 bp, Probe Sequence
caccccgaggtgttcctcagattga

SEQ ID NO: 173887 - DNA, 25 bp, Probe Sequence
cacctataagtgtactcgacagatt

SEQ ID NO: 173888 - DNA, 25 bp, Probe Sequence
caccaaaatgcttacatccgtgtgt

SEQ ID NO: 173889 - DNA, 25 bp, Probe Sequence
caccaaggatgtcaaggccgctgct

SEQ ID NO: 173890 - DNA, 25 bp, Probe Sequence
caccaaggatgtcaaggccgctgct

SEQ ID NO: 173891 - DNA, 25 bp, Probe Sequence
caccaaggatgtcaaggccgctgct

SEQ ID NO: 173892 - DNA, 25 bp, Probe Sequence
caccaatcagatcttcggcctgagc

SEQ ID NO: 173893 - DNA, 25 bp, Probe Sequence
caccatctcagtgaggggcaggagc

SEQ ID NO: 173894 - DNA, 25 bp, Probe Sequence
cagctactcaggaggctaaggcatg

SEQ ID NO: 173895 - DNA, 25 bp, Probe Sequence
cagtacatcaaggctggatacggtt

SEQ ID NO: 173896 - DNA, 25 bp, Probe Sequence
cagcggcatagagctgctgacctgc

SEQ ID NO: 173897 - DNA, 25 bp, Probe Sequence
cagcgtgcatcttggcatatgtccc

SEQ ID NO: 173898 - DNA, 25 bp, Probe Sequence
cagcgtcatcgtggttatgaccatc

SEQ ID NO: 173899 - DNA, 25 bp, Probe Sequence
caccagcattgtgtgtgcagacttc

SEQ ID NO: 173900 - DNA, 25 bp, Probe Sequence
cagccatgaattcagtgaactcttt

SEQ ID NO: 173901 - DNA, 25 bp, Probe Sequence
caccagaatctcctctacagatttt

SEQ ID NO: 173902 - DNA, 25 bp, Probe Sequence
caccgagtctctgtataatctattt

SEQ ID NO: 173903 - DNA, 25 bp, Probe Sequence
caccgtatgttgttagagtctttta

SEQ ID NO: 173904 - DNA, 25 bp, Probe Sequence
cacctccttctgggaagttctcttg

SEQ ID NO: 173905 - DNA, 25 bp, Probe Sequence
cacctccttctgggaagttctcttg

SEQ ID NO: 173906 - DNA, 25 bp, Probe Sequence
cacctccacgctcaaagtttcaggt

SEQ ID NO: 173907 - DNA, 25 bp, Probe Sequence
cacctgagcctgtctaaactttcgg

SEQ ID NO: 173908 - DNA, 25 bp, Probe Sequence
cacctcagcctcccaaagtgttggg

SEQ ID NO: 173909 - DNA, 25 bp, Probe Sequence
cacctcagcctccaaagtgctggga

SEQ ID NO: 173910 - DNA, 25 bp, Probe Sequence
cacctgcagcacatcatgaagtggc

SEQ ID NO: 173911 - DNA, 25 bp, Probe Sequence
cacctgtgcatagcagatcatcttc

SEQ ID NO: 173912 - DNA, 25 bp, Probe Sequence
cagcctgtgctttttgacttcagtt

SEQ ID NO: 173913 - DNA, 25 bp, Probe Sequence
cacctctgcttctcagacattcagt

SEQ ID NO: 173914 - DNA, 25 bp, Probe Sequence
cacccctataaccatcattctgatt

SEQ ID NO: 173915 - DNA, 25 bp, Probe Sequence
caccacccatgatccatctgtgtag

SEQ ID NO: 173916 - DNA, 25 bp, Probe Sequence
caccacccatgatccatctgtgtag

SEQ ID NO: 173917 - DNA, 25 bp, Probe Sequence
caccccacatttgcatctgctggtg

SEQ ID NO: 173918 - DNA, 25 bp, Probe Sequence
caccccacatttgcatctgctggtg

SEQ ID NO: 173919 - DNA, 25 bp, Probe Sequence
caccccacatttgcatctgctggtg

SEQ ID NO: 173920 - DNA, 25 bp, Probe Sequence
caccccagtgatccctctgggaaga

SEQ ID NO: 173921 - DNA, 25 bp, Probe Sequence
caccccttgacgtccatgggagttt

SEQ ID NO: 173922 - DNA, 25 bp, Probe Sequence
caccccattgacgtctatgggtgtt

SEQ ID NO: 173923 - DNA, 25 bp, Probe Sequence
caccccactgtagctgtgacgtgtt

SEQ ID NO: 173924 - DNA, 25 bp, Probe Sequence
cacccccatgtggttgccacaggtg

SEQ ID NO: 173925 - DNA, 25 bp, Probe Sequence
cacccctaggtcatccaagagagct

SEQ ID NO: 173926 - DNA, 25 bp, Probe Sequence
cacctcttcaggttaacaggggctg

SEQ ID NO: 173927 - DNA, 25 bp, Probe Sequence
cagccatttggtgataccgggggct

SEQ ID NO: 173928 - DNA, 25 bp, Probe Sequence
caccaaatggcggatgacgccggtg

SEQ ID NO: 173929 - DNA, 25 bp, Probe Sequence
cacctgtggtgggtgccgccaggtg

SEQ ID NO: 173930 - DNA, 25 bp, Probe Sequence
cacctgctaggggctgggcaaggcc

SEQ ID NO: 173931 - DNA, 25 bp, Probe Sequence
caccatctagagtgagcaggctcag

SEQ ID NO: 173932 - DNA, 25 bp, Probe Sequence
caccattcgagacctgcaggcaaat

SEQ ID NO: 173933 - DNA, 25 bp, Probe Sequence
caccttcgaagattaccagatcatc

SEQ ID NO: 173934 - DNA, 25 bp, Probe Sequence
cacctgtctttgtgcatgccaatct

SEQ ID NO: 173935 - DNA, 25 bp, Probe Sequence
cacctacttggatatacttctggtc

SEQ ID NO: 173936 - DNA, 25 bp, Probe Sequence
caccttcaaggtgacttttgtatct

SEQ ID NO: 173937 - DNA, 25 bp, Probe Sequence
catgaccttagggaactttcctact

SEQ ID NO: 173938 - DNA, 25 bp, Probe Sequence
cagacttagaggggacttccagccg

SEQ ID NO: 173939 - DNA, 25 bp, Probe Sequence
cagctgcttattcggaacattcctc

SEQ ID NO: 173940 - DNA, 25 bp, Probe Sequence
caccattttggcaagctctatcacc

SEQ ID NO: 173941 - DNA, 25 bp, Probe Sequence
cagccttatgtgttacattattcca

SEQ ID NO: 173942 - DNA, 25 bp, Probe Sequence
cagccttcgaggaagccatacccaa

SEQ ID NO: 173943 - DNA, 25 bp, Probe Sequence
cagccgtccaggaactcaagcgggt

SEQ ID NO: 173944 - DNA, 25 bp, Probe Sequence
cagccttgccacaacctgaagtgat

SEQ ID NO: 173945 - DNA, 25 bp, Probe Sequence
caccgcacagacaccaaatggattg

SEQ ID NO: 173946 - DNA, 25 bp, Probe Sequence
catccgtcattacccaaagacttgg

SEQ ID NO: 173947 - DNA, 25 bp, Probe Sequence
caccccatgtgacaaaagaatctga

SEQ ID NO: 173948 - DNA, 25 bp, Probe Sequence
caccgccatggccgaggaaggcatt

SEQ ID NO: 173949 - DNA, 25 bp, Probe Sequence
caccaccaggctgagcagtgaggag

SEQ ID NO: 173950 - DNA, 25 bp, Probe Sequence
caccgcccgctgaggagatggatga

SEQ ID NO: 173951 - DNA, 25 bp, Probe Sequence
caccgcatgccacgggagcagtggt

SEQ ID NO: 173952 - DNA, 25 bp, Probe Sequence
caccgcggaccgaatcaggcggatg

SEQ ID NO: 173953 - DNA, 25 bp, Probe Sequence
caccaggcgaggctcaaggctgagt

SEQ ID NO: 173954 - DNA, 25 bp, Probe Sequence
caccgcaccaggctcaaatgaactt

SEQ ID NO: 173955 - DNA, 25 bp, Probe Sequence
caccgaacagcgttgaattaacttt

SEQ ID NO: 173956 - DNA, 25 bp, Probe Sequence
caccgcaccctgctaattttttgta

SEQ ID NO: 173957 - DNA, 25 bp, Probe Sequence
caccacgcccagctaatttttgtat

SEQ ID NO: 173958 - DNA, 25 bp, Probe Sequence
caccacgcccagctaatttttgtat

SEQ ID NO: 173959 - DNA, 25 bp, Probe Sequence
caccacacccaactaatttttgtat

SEQ ID NO: 173960 - DNA, 25 bp, Probe Sequence
caccacacccagcctaagtgttgtt

SEQ ID NO: 173961 - DNA, 25 bp, Probe Sequence
caccaacaccacggtagtgcctgaa

SEQ ID NO: 173962 - DNA, 25 bp, Probe Sequence
cagccaacctatgttacacgtgaga

SEQ ID NO: 173963 - DNA, 25 bp, Probe Sequence
cagcgcaatcctattctagagtcca

SEQ ID NO: 173964 - DNA, 25 bp, Probe Sequence
cagccttcctttccaaagttcattt

SEQ ID NO: 173965 - DNA, 25 bp, Probe Sequence
cacctatggctttgactttgttatt

SEQ ID NO: 173966 - DNA, 25 bp, Probe Sequence
cagcccattttttatttgtttcttg

SEQ ID NO: 173967 - DNA, 25 bp, Probe Sequence
cacctttattttctgagctttgttg

SEQ ID NO: 173968 - DNA, 25 bp, Probe Sequence
cacctttttgtctaagatctattga

SEQ ID NO: 173969 - DNA, 25 bp, Probe Sequence
caccttgttttcaaagtgtggctga

SEQ ID NO: 173970 - DNA, 25 bp, Probe Sequence
caccatgtgtctatctgaaggttgc

SEQ ID NO: 173971 - DNA, 25 bp, Probe Sequence
caccatggctgcaatccgaaagaag

SEQ ID NO: 173972 - DNA, 25 bp, Probe Sequence
cacctggcacagttgctgaagaaca

SEQ ID NO: 173973 - DNA, 25 bp, Probe Sequence
cacctggagcagtattagagaacaa

SEQ ID NO: 173974 - DNA, 25 bp, Probe Sequence
caccattggaattttgcagacagaa

SEQ ID NO: 173975 - DNA, 25 bp, Probe Sequence
cacctctatgaacttgatggacgaa

SEQ ID NO: 173976 - DNA, 25 bp, Probe Sequence
cacctttgaatttgcggatgctgag

SEQ ID NO: 173977 - DNA, 25 bp, Probe Sequence
caccttagcaacaatgggagctgtg

SEQ ID NO: 173978 - DNA, 25 bp, Probe Sequence
cacctcccacctttggagaggaatc

SEQ ID NO: 173979 - DNA, 25 bp, Probe Sequence
caccccaacctacagaggaggatcc

SEQ ID NO: 173980 - DNA, 25 bp, Probe Sequence
caccccaatcctcggagactgagtt

SEQ ID NO: 173981 - DNA, 25 bp, Probe Sequence
cacctcccaagctggagacatggag

SEQ ID NO: 173982 - DNA, 25 bp, Probe Sequence
cacctcctcagaattgcagaagatg

SEQ ID NO: 173983 - DNA, 25 bp, Probe Sequence
caccttccagaccacagcagatgtg

SEQ ID NO: 173984 - DNA, 25 bp, Probe Sequence
caccggcactcagttatgcagatga

SEQ ID NO: 173985 - DNA, 25 bp, Probe Sequence
cagccgatgcccgattctggaaggg

SEQ ID NO: 173986 - DNA, 25 bp, Probe Sequence
cagccagtgcccgaggccaggaagg

SEQ ID NO: 173987 - DNA, 25 bp, Probe Sequence
cagccagtgcccaagaacaacaagg

SEQ ID NO: 173988 - DNA, 25 bp, Probe Sequence
cagccagtgcccaagaacaacaagg

SEQ ID NO: 173989 - DNA, 25 bp, Probe Sequence
caccaaacccgatgaccaagagcag

SEQ ID NO: 173990 - DNA, 25 bp, Probe Sequence
caccaaagcccgatacctgaagaaa

SEQ ID NO: 173991 - DNA, 25 bp, Probe Sequence
caccattcaggaagattacctaaga

SEQ ID NO: 173992 - DNA, 25 bp, Probe Sequence
caccttcagctacagtgacctgtaa

SEQ ID NO: 173993 - DNA, 25 bp, Probe Sequence
cacctgctttgtcagatacagctgg

SEQ ID NO: 173994 - DNA, 25 bp, Probe Sequence
cacctgctctttcaatcctggtgtg

SEQ ID NO: 173995 - DNA, 25 bp, Probe Sequence
cagccctctaatcaagtcacgtgat

SEQ ID NO: 173996 - DNA, 25 bp, Probe Sequence
cagcgtgctgtagtggaagttttgt

SEQ ID NO: 173997 - DNA, 25 bp, Probe Sequence
cagcctctaaatggaatgttttgtg

SEQ ID NO: 173998 - DNA, 25 bp, Probe Sequence
cagcgtgcaacatccaatgtgtttg

SEQ ID NO: 173999 - DNA, 25 bp, Probe Sequence
cagcctggatgccatccaagttgta

SEQ ID NO: 174000 - DNA, 25 bp, Probe Sequence
caccatggaccagaagtctctctgg

SEQ ID NO: 174001 - DNA, 25 bp, Probe Sequence
cacctgaactcaaatgagatgccgg

SEQ ID NO: 174002 - DNA, 25 bp, Probe Sequence
caccgagcgcttgatgtgcgcggag

SEQ ID NO: 174003 - DNA, 25 bp, Probe Sequence
cacctgcaggctgtatggcgaggac

SEQ ID NO: 174004 - DNA, 25 bp, Probe Sequence
caccgcagatctgtagccagtcaga

SEQ ID NO: 174005 - DNA, 25 bp, Probe Sequence
caccacaatctcgcaccaatggtca

SEQ ID NO: 174006 - DNA, 25 bp, Probe Sequence
cagccaaattctgccattaggaagt

SEQ ID NO: 174007 - DNA, 25 bp, Probe Sequence
caccaaattccgctctcatgagggt

SEQ ID NO: 174008 - DNA, 25 bp, Probe Sequence
caccattaatcagtgtttagaggag

SEQ ID NO: 174009 - DNA, 25 bp, Probe Sequence
caccgtcacagcacttgtgaggaag

SEQ ID NO: 174010 - DNA, 25 bp, Probe Sequence
caccgtcaccaccttggtggagaac

SEQ ID NO: 174011 - DNA, 25 bp, Probe Sequence
cagccttccttcctgggtatggaat

SEQ ID NO: 174012 - DNA, 25 bp, Probe Sequence
cagcccttcttcaggactctgggct

SEQ ID NO: 174013 - DNA, 25 bp, Probe Sequence
cagccctccttaatcaacttcaagg

SEQ ID NO: 174014 - DNA, 25 bp, Probe Sequence
cagcccccgaattcacaaactaggt

SEQ ID NO: 174015 - DNA, 25 bp, Probe Sequence
cagcgtcctcgaaaccacgagcaag

SEQ ID NO: 174016 - DNA, 25 bp, Probe Sequence
cagctgagtccgacaaccattgggg

SEQ ID NO: 174017 - DNA, 25 bp, Probe Sequence
cagcttcatccggcaacaaaaggac

SEQ ID NO: 174018 - DNA, 25 bp, Probe Sequence
cagcccagccccaaagagaaagaag

SEQ ID NO: 174019 - DNA, 25 bp, Probe Sequence
cagcccagccccaaagagaaagaag

SEQ ID NO: 174020 - DNA, 25 bp, Probe Sequence
cagcccagccccaaagagaaagaag

SEQ ID NO: 174021 - DNA, 25 bp, Probe Sequence
cacctgagacccaatgagaatcaac

SEQ ID NO: 174022 - DNA, 25 bp, Probe Sequence
cacctgatacaatgcagacattcaa

SEQ ID NO: 174023 - DNA, 25 bp, Probe Sequence
cagccattccaataggcttcatagt

SEQ ID NO: 174024 - DNA, 25 bp, Probe Sequence
caccattcacttttactgctttgta

SEQ ID NO: 174025 - DNA, 25 bp, Probe Sequence
caccattcttatgtcactttagaat

SEQ ID NO: 174026 - DNA, 25 bp, Probe Sequence
caccttgctgttgtacttctgaaat

SEQ ID NO: 174027 - DNA, 25 bp, Probe Sequence
caccttattgtccccttatacagat

SEQ ID NO: 174028 - DNA, 25 bp, Probe Sequence
cagctgtttttccccttaataaatg

SEQ ID NO: 174029 - DNA, 25 bp, Probe Sequence
cagctgttttcccagtcaaaaataa

SEQ ID NO: 174030 - DNA, 25 bp, Probe Sequence
cagctgttgtccttaaaaatgaatt

SEQ ID NO: 174031 - DNA, 25 bp, Probe Sequence
cagccccatccacaacaaatgatta

SEQ ID NO: 174032 - DNA, 25 bp, Probe Sequence
cagcctccctgaagaccaaaattag

SEQ ID NO: 174033 - DNA, 25 bp, Probe Sequence
cagctctccctaagcttcaaactag

SEQ ID NO: 174034 - DNA, 25 bp, Probe Sequence
cagctgtccctgtagcgacaggtct

SEQ ID NO: 174035 - DNA, 25 bp, Probe Sequence
cagctgcctccgtgtataattacgc

SEQ ID NO: 174036 - DNA, 25 bp, Probe Sequence
cagcctttctggttatgttacacct

SEQ ID NO: 174037 - DNA, 25 bp, Probe Sequence
cagcctctccatcatgttttaacat

SEQ ID NO: 174038 - DNA, 25 bp, Probe Sequence
cagccttctcaacctttgcagaaat

SEQ ID NO: 174039 - DNA, 25 bp, Probe Sequence
cacctgcaccaactctttgcaaagt

SEQ ID NO: 174040 - DNA, 25 bp, Probe Sequence
cagcccaggaaacttgtgcaagcag

SEQ ID NO: 174041 - DNA, 25 bp, Probe Sequence
caccacagaatatctcattactggg

SEQ ID NO: 174042 - DNA, 25 bp, Probe Sequence
cacctcagaagtgtcatctctctct

SEQ ID NO: 174043 - DNA, 25 bp, Probe Sequence
cagccctgaagtgcctgtctggctg

SEQ ID NO: 174044 - DNA, 25 bp, Probe Sequence
caccattggagtggacttcgagatg

SEQ ID NO: 174045 - DNA, 25 bp, Probe Sequence
cacctgaggctgggagttcgagacc

SEQ ID NO: 174046 - DNA, 25 bp, Probe Sequence
cacctgatgccacaactggccagac

SEQ ID NO: 174047 - DNA, 25 bp, Probe Sequence
cacctcagctgacagcgtgggcaac

SEQ ID NO: 174048 - DNA, 25 bp, Probe Sequence
cagcctccagagtagctgggactac

SEQ ID NO: 174049 - DNA, 25 bp, Probe Sequence
cagactgctacattcactggtaaat

SEQ ID NO: 174050 - DNA, 25 bp, Probe Sequence
cagaagctaaagtcttgatgccatc

SEQ ID NO: 174051 - DNA, 25 bp, Probe Sequence
cagcagaaaaagccctgaactcttg

SEQ ID NO: 174052 - DNA, 25 bp, Probe Sequence
cagtgaaaaactgcttggccctggc

SEQ ID NO: 174053 - DNA, 25 bp, Probe Sequence
caggaaaatggtgtcaacccgggag

SEQ ID NO: 174054 - DNA, 25 bp, Probe Sequence
cagtataaaatgcgtgaacccggga

SEQ ID NO: 174055 - DNA, 25 bp, Probe Sequence
cagtaacaacggctactgcaccgtg

SEQ ID NO: 174056 - DNA, 25 bp, Probe Sequence
cattataattcggttacacggttgg

SEQ ID NO: 174057 - DNA, 25 bp, Probe Sequence
cctaaaggtggccatacctggtttg

SEQ ID NO: 174058 - DNA, 25 bp, Probe Sequence
caccatggggcttggataccggttt

SEQ ID NO: 174059 - DNA, 25 bp, Probe Sequence
cacctggggtgaggagccctgacat

SEQ ID NO: 174060 - DNA, 25 bp, Probe Sequence
caccgggcgattggaacacagagag

SEQ ID NO: 174061 - DNA, 25 bp, Probe Sequence
cacctgccctttggcaacaaaacca

SEQ ID NO: 174062 - DNA, 25 bp, Probe Sequence
caccttgaatttggcacacacacac

SEQ ID NO: 174063 - DNA, 25 bp, Probe Sequence
caccttatcttatccaagcatcacg

SEQ ID NO: 174064 - DNA, 25 bp, Probe Sequence
cacctctctttattccatgattaag

SEQ ID NO: 174065 - DNA, 25 bp, Probe Sequence
cacctccctctatgccatattaata

SEQ ID NO: 174066 - DNA, 25 bp, Probe Sequence
cacctcacactttgtgggtgtagat

SEQ ID NO: 174067 - DNA, 25 bp, Probe Sequence
caccatatccttttgctgttgaaaa

SEQ ID NO: 174068 - DNA, 25 bp, Probe Sequence
cacctaccgcttacctgaaatgcag

SEQ ID NO: 174069 - DNA, 25 bp, Probe Sequence
cacctactggcattccttgaaatgc

SEQ ID NO: 174070 - DNA, 25 bp, Probe Sequence
cacctccgtcattcacagggacatg

SEQ ID NO: 174071 - DNA, 25 bp, Probe Sequence
cagcctcggacctcaggtggctgaa

SEQ ID NO: 174072 - DNA, 25 bp, Probe Sequence
caccttgggcctgagctgtggtgtc

SEQ ID NO: 174073 - DNA, 25 bp, Probe Sequence
caccttgacggagagtgtggccatc

SEQ ID NO: 174074 - DNA, 25 bp, Probe Sequence
cacctgtgatcccagctacttggga

SEQ ID NO: 174075 - DNA, 25 bp, Probe Sequence
cacctgtccacttgttcttgtgtga

SEQ ID NO: 174076 - DNA, 25 bp, Probe Sequence
cacctgagcccattgttctcatggg

SEQ ID NO: 174077 - DNA, 25 bp, Probe Sequence
cacctggctgcagagtgtcacggag

SEQ ID NO: 174078 - DNA, 25 bp, Probe Sequence
caccagagctgaagagggcaaaaga

SEQ ID NO: 174079 - DNA, 25 bp, Probe Sequence
cacctgaggtcatggaggtcgagac

SEQ ID NO: 174080 - DNA, 25 bp, Probe Sequence
cacctggaggagcacgagatcggcc

SEQ ID NO: 174081 - DNA, 25 bp, Probe Sequence
caccatggtgggcaggctgatttca

SEQ ID NO: 174082 - DNA, 25 bp, Probe Sequence
cacctgtgtgtgtcaccagtataac

SEQ ID NO: 174083 - DNA, 25 bp, Probe Sequence
caccttgtcatgtaccatcaataaa

SEQ ID NO: 174084 - DNA, 25 bp, Probe Sequence
caccttgtctgctaaataaacatgt

SEQ ID NO: 174085 - DNA, 25 bp, Probe Sequence
caccagaggtgccacctacaacgtc

SEQ ID NO: 174086 - DNA, 25 bp, Probe Sequence
caccagtgtgtgcgactcagcaagt

SEQ ID NO: 174087 - DNA, 25 bp, Probe Sequence
cacctcgctgctggtgacgcagaat

SEQ ID NO: 174088 - DNA, 25 bp, Probe Sequence
cagcctgcagctggattacgcaaca

SEQ ID NO: 174089 - DNA, 25 bp, Probe Sequence
cacctgactctaggacatgcaacac

SEQ ID NO: 174090 - DNA, 25 bp, Probe Sequence
cacctgcctgcaaggaatggggctc

SEQ ID NO: 174091 - DNA, 25 bp, Probe Sequence
cacctcctgcaagaaaagctgctgc

SEQ ID NO: 174092 - DNA, 25 bp, Probe Sequence
cacctcctgcaagaagagctgctgc

SEQ ID NO: 174093 - DNA, 25 bp, Probe Sequence
cagcctccaacacaaggctccaaga

SEQ ID NO: 174094 - DNA, 25 bp, Probe Sequence
cagcctttattaccaagcccagaga

SEQ ID NO: 174095 - DNA, 25 bp, Probe Sequence
cagcctcatgaagacccaccggctg

SEQ ID NO: 174096 - DNA, 25 bp, Probe Sequence
cagcctcaaaaagagcctggtgccc

SEQ ID NO: 174097 - DNA, 25 bp, Probe Sequence
caccttcagaagtcgacctgtggca

SEQ ID NO: 174098 - DNA, 25 bp, Probe Sequence
caccatcctctgcattgacttgggc

SEQ ID NO: 174099 - DNA, 25 bp, Probe Sequence
caccatcctttttgactgttgacct

SEQ ID NO: 174100 - DNA, 25 bp, Probe Sequence
caccagcctttctggtgctgttctc

SEQ ID NO: 174101 - DNA, 25 bp, Probe Sequence
caccagcttggtattgtcagtctcc

SEQ ID NO: 174102 - DNA, 25 bp, Probe Sequence
cacctcattcttcatttcagatctg

SEQ ID NO: 174103 - DNA, 25 bp, Probe Sequence
cacctattgcttctctatgagtctt

SEQ ID NO: 174104 - DNA, 25 bp, Probe Sequence
caccatcttgttggtttgcaccttt

SEQ ID NO: 174105 - DNA, 25 bp, Probe Sequence
caccacttttcaaaggacttcttgg

SEQ ID NO: 174106 - DNA, 25 bp, Probe Sequence
cagccaattcctccgaggtcttttg

SEQ ID NO: 174107 - DNA, 25 bp, Probe Sequence
caccaaatgcttctagtattgtttc

SEQ ID NO: 174108 - DNA, 25 bp, Probe Sequence
cagccaagatgttcatgtagtattg

SEQ ID NO: 174109 - DNA, 25 bp, Probe Sequence
caccaactgctttgaggtcactgtg

SEQ ID NO: 174110 - DNA, 25 bp, Probe Sequence
cagtaaatcgtgtaggcctctgctt

SEQ ID NO: 174111 - DNA, 25 bp, Probe Sequence
cagctaaaagagcacacccgtctat

SEQ ID NO: 174112 - DNA, 25 bp, Probe Sequence
gcaaaaagtcagcaccgggttatct

SEQ ID NO: 174113 - DNA, 25 bp, Probe Sequence
caccaaagtagttcacggtatttgc

SEQ ID NO: 174114 - DNA, 25 bp, Probe Sequence
ctaaagggttactggctcatgttgt

SEQ ID NO: 174115 - DNA, 25 bp, Probe Sequence
ttaattgggtttttcaggcagttga

SEQ ID NO: 174116 - DNA, 25 bp, Probe Sequence
cattttgtgggtgttgaggaggtac

SEQ ID NO: 174117 - DNA, 25 bp, Probe Sequence
cttagtgtgttagctggtggggtac

SEQ ID NO: 174118 - DNA, 25 bp, Probe Sequence
cacctctgcaggaatccctctgcag

SEQ ID NO: 174119 - DNA, 25 bp, Probe Sequence
cacctctagtcaacagtccttgttg

SEQ ID NO: 174120 - DNA, 25 bp, Probe Sequence
caccttagataaatgacttagcttc

SEQ ID NO: 174121 - DNA, 25 bp, Probe Sequence
cagcctctggcttgagaacttacta

SEQ ID NO: 174122 - DNA, 25 bp, Probe Sequence
cagcctatggtttaagcctgaagaa

SEQ ID NO: 174123 - DNA, 25 bp, Probe Sequence
cagcttagatgtgttagaatgaatg

SEQ ID NO: 174124 - DNA, 25 bp, Probe Sequence
cagcattaaagctggcgcttaataa

SEQ ID NO: 174125 - DNA, 25 bp, Probe Sequence
cagcatttcgtgggatggtcttgat

SEQ ID NO: 174126 - DNA, 25 bp, Probe Sequence
cagcattcctagtcgttgcttcagt

SEQ ID NO: 174127 - DNA, 25 bp, Probe Sequence
cagtttgccagtcttgcaatcaggt

SEQ ID NO: 174128 - DNA, 25 bp, Probe Sequence
tatgggtcgtggcggaatcggtggt

SEQ ID NO: 174129 - DNA, 25 bp, Probe Sequence
cagccccgtgagtggaagaagctgg

SEQ ID NO: 174130 - DNA, 25 bp, Probe Sequence
cagcaactctatggtagggggagag

SEQ ID NO: 174131 - DNA, 25 bp, Probe Sequence
cagccagcactttcctgggggaagt

SEQ ID NO: 174132 - DNA, 25 bp, Probe Sequence
caccacggggtctgcagcaatgaag

SEQ ID NO: 174133 - DNA, 25 bp, Probe Sequence
caccacgggactctagcctgggtga

SEQ ID NO: 174134 - DNA, 25 bp, Probe Sequence
cctaccggaacgtgactgccgagca

SEQ ID NO: 174135 - DNA, 25 bp, Probe Sequence
caggaccctaaagaatggccgagcc

SEQ ID NO: 174136 - DNA, 25 bp, Probe Sequence
cagaaacctaactcactcgtcaagg

SEQ ID NO: 174137 - DNA, 25 bp, Probe Sequence
cataaaccttgggacttccctagtg

SEQ ID NO: 174138 - DNA, 25 bp, Probe Sequence
cagaagaccaagatttaccgccctg

SEQ ID NO: 174139 - DNA, 25 bp, Probe Sequence
caccaaccaagtgttacaagcccca

SEQ ID NO: 174140 - DNA, 25 bp, Probe Sequence
cagtaactcagagattaccaacccc

SEQ ID NO: 174141 - DNA, 25 bp, Probe Sequence
cagcttagccgaggaagagccaggc

SEQ ID NO: 174142 - DNA, 25 bp, Probe Sequence
cagccttggtgaggacagtgttggg

SEQ ID NO: 174143 - DNA, 25 bp, Probe Sequence
cacctctttacgtatatgatgtggc

SEQ ID NO: 174144 - DNA, 25 bp, Probe Sequence
cacctctttacgtatatgatgtggc

SEQ ID NO: 174145 - DNA, 25 bp, Probe Sequence
caccttcttacgctatggcaggtaa

SEQ ID NO: 174146 - DNA, 25 bp, Probe Sequence
caccttcccaggctgatctgaggta

SEQ ID NO: 174147 - DNA, 25 bp, Probe Sequence
caccttcccaggctgatctgaggta

SEQ ID NO: 174148 - DNA, 25 bp, Probe Sequence
caccttcaccatgtctgacgaggaa

SEQ ID NO: 174149 - DNA, 25 bp, Probe Sequence
cacctcaacacgctgctgggagagc

SEQ ID NO: 174150 - DNA, 25 bp, Probe Sequence
cacctacagctggccgctgagggag

SEQ ID NO: 174151 - DNA, 25 bp, Probe Sequence
caccagtactgcccaggaggggaga

SEQ ID NO: 174152 - DNA, 25 bp, Probe Sequence
caccagcccagtcaggaggagtgtg

SEQ ID NO: 174153 - DNA, 25 bp, Probe Sequence
caccagggagatccagttaccttgt

SEQ ID NO: 174154 - DNA, 25 bp, Probe Sequence
cagcctgggggcaagttagcacttt

SEQ ID NO: 174155 - DNA, 25 bp, Probe Sequence
caccatgggtggccactatacagcc

SEQ ID NO: 174156 - DNA, 25 bp, Probe Sequence
caccatcccagaggactatgagacc

SEQ ID NO: 174157 - DNA, 25 bp, Probe Sequence
cagcgacccaatggcgtgtaactcg

SEQ ID NO: 174158 - DNA, 25 bp, Probe Sequence
cagccaagacaaggaggtagagagg

SEQ ID NO: 174159 - DNA, 25 bp, Probe Sequence
cagaagaaggaccggtatgagatca

SEQ ID NO: 174160 - DNA, 25 bp, Probe Sequence
cagagatgatagaaccggacctagc

SEQ ID NO: 174161 - DNA, 25 bp, Probe Sequence
cagcggcatttggtcgggcagccgc

SEQ ID NO: 174162 - DNA, 25 bp, Probe Sequence
cagggcaagttccaaggcagaccgc

SEQ ID NO: 174163 - DNA, 25 bp, Probe Sequence
cagccccgagtccaagaagatcctg

SEQ ID NO: 174164 - DNA, 25 bp, Probe Sequence
caccaccaagtgcacaagagatacc

SEQ ID NO: 174165 - DNA, 25 bp, Probe Sequence
caccaccaacgaatacgtctaccgc

SEQ ID NO: 174166 - DNA, 25 bp, Probe Sequence
caccagcccttaaagtgtcggccgc

SEQ ID NO: 174167 - DNA, 25 bp, Probe Sequence
cagtagactttaccatttcaggccc

SEQ ID NO: 174168 - DNA, 25 bp, Probe Sequence
cagctagtgttttttaccatccgtc

SEQ ID NO: 174169 - DNA, 25 bp, Probe Sequence
caccttttgattttagcgcacctgt

SEQ ID NO: 174170 - DNA, 25 bp, Probe Sequence
cacctactgtatattagccacatct

SEQ ID NO: 174171 - DNA, 25 bp, Probe Sequence
caccaacgtgaaggtgaccctccga

SEQ ID NO: 174172 - DNA, 25 bp, Probe Sequence
cagcccaagtggggtcaactcctaa

SEQ ID NO: 174173 - DNA, 25 bp, Probe Sequence
cagcctacagttgggatgaatttca

SEQ ID NO: 174174 - DNA, 25 bp, Probe Sequence
cacctacatggcaggatgcaatcag

SEQ ID NO: 174175 - DNA, 25 bp, Probe Sequence
caccatgcctgagggtacaatcgtg

SEQ ID NO: 174176 - DNA, 25 bp, Probe Sequence
cagcttcctgagggctaattctggg

SEQ ID NO: 174177 - DNA, 25 bp, Probe Sequence
cagctgtccactggggaagtcaaga

SEQ ID NO: 174178 - DNA, 25 bp, Probe Sequence
cagcggctcacacagcgaaggaggg

SEQ ID NO: 174179 - DNA, 25 bp, Probe Sequence
cagcggcatcaaactcaacggggac

SEQ ID NO: 174180 - DNA, 25 bp, Probe Sequence
cagctgcatcattgaccgcacagcg

SEQ ID NO: 174181 - DNA, 25 bp, Probe Sequence
cagcgccagagtgctgacgccttac

SEQ ID NO: 174182 - DNA, 25 bp, Probe Sequence
cagctcatagggtcaggccatcagt

SEQ ID NO: 174183 - DNA, 25 bp, Probe Sequence
cagcacaagagaaactcctagttta

SEQ ID NO: 174184 - DNA, 25 bp, Probe Sequence
cagcagtcaattaactctccagtta

SEQ ID NO: 174185 - DNA, 25 bp, Probe Sequence
cagctgtcacgggagttcctgttaa

SEQ ID NO: 174186 - DNA, 25 bp, Probe Sequence
cagcgatgccgggagattttcttcc

SEQ ID NO: 174187 - DNA, 25 bp, Probe Sequence
cagctagtctcagaactgttccttc

SEQ ID NO: 174188 - DNA, 25 bp, Probe Sequence
caccacctcgaaactattccatgat

SEQ ID NO: 174189 - DNA, 25 bp, Probe Sequence
caccacctcgaaactattccatgat

SEQ ID NO: 174190 - DNA, 25 bp, Probe Sequence
cagcccctgcagcaaatgactactg

SEQ ID NO: 174191 - DNA, 25 bp, Probe Sequence
caccactgctgcctgaaatgctttg

SEQ ID NO: 174192 - DNA, 25 bp, Probe Sequence
caccaggtggctgatggctctgtgg

SEQ ID NO: 174193 - DNA, 25 bp, Probe Sequence
caccaggaggatctgcgcacggtgc

SEQ ID NO: 174194 - DNA, 25 bp, Probe Sequence
caccaggaggatctgcgcacggtgc

SEQ ID NO: 174195 - DNA, 25 bp, Probe Sequence
caccaggggagaggcgaccagtgca

SEQ ID NO: 174196 - DNA, 25 bp, Probe Sequence
cagcggggggaggctgagctgctgc

SEQ ID NO: 174197 - DNA, 25 bp, Probe Sequence
cagcggggggaggctgagctgctgc

SEQ ID NO: 174198 - DNA, 25 bp, Probe Sequence
cagcggctggagcggcagatcagcc

SEQ ID NO: 174199 - DNA, 25 bp, Probe Sequence
cagcctgtcagcctgggcaatggct

SEQ ID NO: 174200 - DNA, 25 bp, Probe Sequence
cagcggtgccctggtgaatgagcgc

SEQ ID NO: 174201 - DNA, 25 bp, Probe Sequence
cagctgctgtcggcgttacagagcc

SEQ ID NO: 174202 - DNA, 25 bp, Probe Sequence
cagctgcagcggtctttcctgcagt

SEQ ID NO: 174203 - DNA, 25 bp, Probe Sequence
cagccaggaccttttctgggtcatg

SEQ ID NO: 174204 - DNA, 25 bp, Probe Sequence
cacctactactatttcaaggtcatg

SEQ ID NO: 174205 - DNA, 25 bp, Probe Sequence
cagcctatacttttccatatggtat

SEQ ID NO: 174206 - DNA, 25 bp, Probe Sequence
cgccggattttaaatagcgtattgt

SEQ ID NO: 174207 - DNA, 25 bp, Probe Sequence
cagccggattttgttattgatatct

SEQ ID NO: 174208 - DNA, 25 bp, Probe Sequence
cagctttaattcacttgttcagatc

SEQ ID NO: 174209 - DNA, 25 bp, Probe Sequence
caccttataccagcgttatgagatc

SEQ ID NO: 174210 - DNA, 25 bp, Probe Sequence
caccattaactggcctgatctaaca

SEQ ID NO: 174211 - DNA, 25 bp, Probe Sequence
caccttgcacaagcatcttctcaga

SEQ ID NO: 174212 - DNA, 25 bp, Probe Sequence
caccttggcgcagctgctggccaag

SEQ ID NO: 174213 - DNA, 25 bp, Probe Sequence
cagcctacagggactgggcaaagat

SEQ ID NO: 174214 - DNA, 25 bp, Probe Sequence
cacctcaagtgtaaaggcagacata

SEQ ID NO: 174215 - DNA, 25 bp, Probe Sequence
cacctactgtgttataaaatatatc

SEQ ID NO: 174216 - DNA, 25 bp, Probe Sequence
cacctactttaatgatatagcacat

SEQ ID NO: 174217 - DNA, 25 bp, Probe Sequence
cacctttatatatcaaattgcatct

SEQ ID NO: 174218 - DNA, 25 bp, Probe Sequence
caccttgctcataaacaaaatgccc

SEQ ID NO: 174219 - DNA, 25 bp, Probe Sequence
caccttgccatcaagatgccagaga

SEQ ID NO: 174220 - DNA, 25 bp, Probe Sequence
cagccttcaccaagagcgaaaccat

SEQ ID NO: 174221 - DNA, 25 bp, Probe Sequence
cagccttacccggaaatacttgtgg

SEQ ID NO: 174222 - DNA, 25 bp, Probe Sequence
caccttgacctcctaaattgttggg

SEQ ID NO: 174223 - DNA, 25 bp, Probe Sequence
caccttgacctcctaaattgttggg

SEQ ID NO: 174224 - DNA, 25 bp, Probe Sequence
caccttgacctcctaaattgttggg

SEQ ID NO: 174225 - DNA, 25 bp, Probe Sequence
caccttgaactcctatgagatgcgc

SEQ ID NO: 174226 - DNA, 25 bp, Probe Sequence
cagccttgactatgtctagagcctc

SEQ ID NO: 174227 - DNA, 25 bp, Probe Sequence
cagcactagaataagttttcctgcc

SEQ ID NO: 174228 - DNA, 25 bp, Probe Sequence
cagctctagatttgaagtgtccttg

SEQ ID NO: 174229 - DNA, 25 bp, Probe Sequence
cagcgatcagcattggaactgttga

SEQ ID NO: 174230 - DNA, 25 bp, Probe Sequence
caccatgataaggacgctgctgctg

SEQ ID NO: 174231 - DNA, 25 bp, Probe Sequence
caccatgatcaagacagcagacctg

SEQ ID NO: 174232 - DNA, 25 bp, Probe Sequence
caccatcactactcaagaccggagg

SEQ ID NO: 174233 - DNA, 25 bp, Probe Sequence
caccatcctggataagtacctgaag

SEQ ID NO: 174234 - DNA, 25 bp, Probe Sequence
cagccacctggagaacttcataaag

SEQ ID NO: 174235 - DNA, 25 bp, Probe Sequence
caccaactgggacgacatggagaaa

SEQ ID NO: 174236 - DNA, 25 bp, Probe Sequence
caccagtatagaatagacagggaga

SEQ ID NO: 174237 - DNA, 25 bp, Probe Sequence
cagccagtataacttgaagcccgaa

SEQ ID NO: 174238 - DNA, 25 bp, Probe Sequence
cagcacattaacttctggactgccg

SEQ ID NO: 174239 - DNA, 25 bp, Probe Sequence
caccaaagattgagaagctgccagt

SEQ ID NO: 174240 - DNA, 25 bp, Probe Sequence
caccagaggaagagtctgcctatgt

SEQ ID NO: 174241 - DNA, 25 bp, Probe Sequence
caccagttaatctttctccaatgat

SEQ ID NO: 174242 - DNA, 25 bp, Probe Sequence
cagaaattaatcagctcccaatggg

SEQ ID NO: 174243 - DNA, 25 bp, Probe Sequence
cagaaggtacagagcctccgaaggg

SEQ ID NO: 174244 - DNA, 25 bp, Probe Sequence
cagaagggtcagagcatgttcgtgg

SEQ ID NO: 174245 - DNA, 25 bp, Probe Sequence
caccaggttcaaggcatttgttgct

SEQ ID NO: 174246 - DNA, 25 bp, Probe Sequence
caccaggtctagatccttatggctg

SEQ ID NO: 174247 - DNA, 25 bp, Probe Sequence
cagccagtgcactatgattccatta

SEQ ID NO: 174248 - DNA, 25 bp, Probe Sequence
caccatttcatacttcaactaatta

SEQ ID NO: 174249 - DNA, 25 bp, Probe Sequence
caccttgttactgctactacacttt

SEQ ID NO: 174250 - DNA, 25 bp, Probe Sequence
cagcctgttttcactcagcttaatt

SEQ ID NO: 174251 - DNA, 25 bp, Probe Sequence
cagcctttttaggccacagtgacct

SEQ ID NO: 174252 - DNA, 25 bp, Probe Sequence
cagctttttaactatccagtcaact

SEQ ID NO: 174253 - DNA, 25 bp, Probe Sequence
caccttttgatacatgccatgcctt

SEQ ID NO: 174254 - DNA, 25 bp, Probe Sequence
caccagttctgactgaaccatgccc

SEQ ID NO: 174255 - DNA, 25 bp, Probe Sequence
caccatgttgggcaaccatcatcac

SEQ ID NO: 174256 - DNA, 25 bp, Probe Sequence
caccagttggagcagatgcctcccc

SEQ ID NO: 174257 - DNA, 25 bp, Probe Sequence
caccaacatggagagacctccctct

SEQ ID NO: 174258 - DNA, 25 bp, Probe Sequence
cagccaacaggagcgtccttttcta

SEQ ID NO: 174259 - DNA, 25 bp, Probe Sequence
cagccgacttcgacagtctttggtc

SEQ ID NO: 174260 - DNA, 25 bp, Probe Sequence
cagccaactctggaagacatttgga

SEQ ID NO: 174261 - DNA, 25 bp, Probe Sequence
caccaatgtcaggccaggcactgtc

SEQ ID NO: 174262 - DNA, 25 bp, Probe Sequence
caccaatcagcaggagatcgcctcc

SEQ ID NO: 174263 - DNA, 25 bp, Probe Sequence
caccaacaccgattgcatgtgctcc

SEQ ID NO: 174264 - DNA, 25 bp, Probe Sequence
caccagcatcgggcagctggtgctc

SEQ ID NO: 174265 - DNA, 25 bp, Probe Sequence
caccatgcacggccagcaagaatca

SEQ ID NO: 174266 - DNA, 25 bp, Probe Sequence
caccagcactggcctgcattgaata

SEQ ID NO: 174267 - DNA, 25 bp, Probe Sequence
cagccagagctttctatgtactgtt

SEQ ID NO: 174268 - DNA, 25 bp, Probe Sequence
cagcctggctttgggtacagcatgt

SEQ ID NO: 174269 - DNA, 25 bp, Probe Sequence
cagctgctcctttttggtcaatgag

SEQ ID NO: 174270 - DNA, 25 bp, Probe Sequence
caccatacttcattcagaccagtga

SEQ ID NO: 174271 - DNA, 25 bp, Probe Sequence
caccttctacaatgagctgcgtgtg

SEQ ID NO: 174272 - DNA, 25 bp, Probe Sequence
caccttatttcattgactgctggct

SEQ ID NO: 174273 - DNA, 25 bp, Probe Sequence
caccttctctgtatgcagtgcttct

SEQ ID NO: 174274 - DNA, 25 bp, Probe Sequence
cagcctttggctactcagtgagcac

SEQ ID NO: 174275 - DNA, 25 bp, Probe Sequence
cagccggtggtcatgccatgagcag

SEQ ID NO: 174276 - DNA, 25 bp, Probe Sequence
cagcccgtggtcaggtagagagtga

SEQ ID NO: 174277 - DNA, 25 bp, Probe Sequence
cagcccatggtttcaggatcaaagc

SEQ ID NO: 174278 - DNA, 25 bp, Probe Sequence
cagccttggtaatggcatcactatt

SEQ ID NO: 174279 - DNA, 25 bp, Probe Sequence
cagctgttaatgctgggatccatat

SEQ ID NO: 174280 - DNA, 25 bp, Probe Sequence
cagctgttttcgatttctaatgtga

SEQ ID NO: 174281 - DNA, 25 bp, Probe Sequence
cagctgctgttgtgttttggggatg

SEQ ID NO: 174282 - DNA, 25 bp, Probe Sequence
cagcccctgaaggtcctggggaagc

SEQ ID NO: 174283 - DNA, 25 bp, Probe Sequence
cagcctgcactgaagttcaatggtg

SEQ ID NO: 174284 - DNA, 25 bp, Probe Sequence
caccatcgtggacttccatggctgt

SEQ ID NO: 174285 - DNA, 25 bp, Probe Sequence
caccacctgagaccatcgatttctc

SEQ ID NO: 174286 - DNA, 25 bp, Probe Sequence
caccagccatgaattcagtgaactc

SEQ ID NO: 174287 - DNA, 25 bp, Probe Sequence
caccagctcatgtaaactgcagaga

SEQ ID NO: 174288 - DNA, 25 bp, Probe Sequence
cagccttctgaatagctggaacaac

SEQ ID NO: 174289 - DNA, 25 bp, Probe Sequence
cagctctgaccctgatgcttaataa

SEQ ID NO: 174290 - DNA, 25 bp, Probe Sequence
cagctatgaccattaggcctattta

SEQ ID NO: 174291 - DNA, 25 bp, Probe Sequence
cagctatgaccattaggcctattta

SEQ ID NO: 174292 - DNA, 25 bp, Probe Sequence
cagctatgaccattaggcctattta

SEQ ID NO: 174293 - DNA, 25 bp, Probe Sequence
cagctatgaccattaggcctattta

SEQ ID NO: 174294 - DNA, 25 bp, Probe Sequence
cagctgcgatcactaaacctggttc

SEQ ID NO: 174295 - DNA, 25 bp, Probe Sequence
cagcggtaaagaacatcggacatga

SEQ ID NO: 174296 - DNA, 25 bp, Probe Sequence
cagccgttgaacacataggaatgtc

SEQ ID NO: 174297 - DNA, 25 bp, Probe Sequence
cagggttgtttaaagagaagtctat

SEQ ID NO: 174298 - DNA, 25 bp, Probe Sequence
cagggtttcctcttcaagtaggtct

SEQ ID NO: 174299 - DNA, 25 bp, Probe Sequence
cagcggttcctggactaagtccggc

SEQ ID NO: 174300 - DNA, 25 bp, Probe Sequence
cagggtacttcgttcaagaccggcg

SEQ ID NO: 174301 - DNA, 25 bp, Probe Sequence
cagggtggcccggtggaaatcctgc

SEQ ID NO: 174302 - DNA, 25 bp, Probe Sequence
cagctggttcccagtggaaggcccg

SEQ ID NO: 174303 - DNA, 25 bp, Probe Sequence
cagccactatcccttgctggaaggc

SEQ ID NO: 174304 - DNA, 25 bp, Probe Sequence
caccactccctgttctgatgagaga

SEQ ID NO: 174305 - DNA, 25 bp, Probe Sequence
cagccacccctggttacaggagtac

SEQ ID NO: 174306 - DNA, 25 bp, Probe Sequence
cagcccacttcgacttccagggctg

SEQ ID NO: 174307 - DNA, 25 bp, Probe Sequence
cagccaaggaccgattccaggcact

SEQ ID NO: 174308 - DNA, 25 bp, Probe Sequence
cagccggaagcctattcgcaggatt

SEQ ID NO: 174309 - DNA, 25 bp, Probe Sequence
caccatagagacccatgtcagcaaa

SEQ ID NO: 174310 - DNA, 25 bp, Probe Sequence
cagccttgaactccttgagctcaag

SEQ ID NO: 174311 - DNA, 25 bp, Probe Sequence
cagctctaggacccaattctatagc

SEQ ID NO: 174312 - DNA, 25 bp, Probe Sequence
cagcttggcgacccagctgttaagc

SEQ ID NO: 174313 - DNA, 25 bp, Probe Sequence
cagcctgggcaaacacgttgaaacc

SEQ ID NO: 174314 - DNA, 25 bp, Probe Sequence
cagccttgccacgaacagttgataa

SEQ ID NO: 174315 - DNA, 25 bp, Probe Sequence
cagcctaggccagagcactttactc

SEQ ID NO: 174316 - DNA, 25 bp, Probe Sequence
cagccaagccggggcagtttcagtc

SEQ ID NO: 174317 - DNA, 25 bp, Probe Sequence
caccaaggcctgggagcatggacgt

SEQ ID NO: 174318 - DNA, 25 bp, Probe Sequence
caccaacatcctgggggagatcgtg

SEQ ID NO: 174319 - DNA, 25 bp, Probe Sequence
cagccaaacctgctgcttggtggtg

SEQ ID NO: 174320 - DNA, 25 bp, Probe Sequence
cagctatcaactcgcgccctggaag

SEQ ID NO: 174321 - DNA, 25 bp, Probe Sequence
cagccatcagggccggaggacaatg

SEQ ID NO: 174322 - DNA, 25 bp, Probe Sequence
cagagtcgtggccggggaaccggct

SEQ ID NO: 174323 - DNA, 25 bp, Probe Sequence
cagttcgaggccaggaggagacccc

SEQ ID NO: 174324 - DNA, 25 bp, Probe Sequence
cagctgatcaacccggggagtactc

SEQ ID NO: 174325 - DNA, 25 bp, Probe Sequence
cagcatgaccaaacccaggtttctc

SEQ ID NO: 174326 - DNA, 25 bp, Probe Sequence
cagctgggcacaacttcagagcatt

SEQ ID NO: 174327 - DNA, 25 bp, Probe Sequence
cagcaggatgacacagtctacatgg

SEQ ID NO: 174328 - DNA, 25 bp, Probe Sequence
cagctgcctgaaacagccatgtcca

SEQ ID NO: 174329 - DNA, 25 bp, Probe Sequence
cagcgccgacaggagcggcggcaga

SEQ ID NO: 174330 - DNA, 25 bp, Probe Sequence
cagcgcgcaagagggcagaccgata

SEQ ID NO: 174331 - DNA, 25 bp, Probe Sequence
caccagcgaagggagtgcgagtatg

SEQ ID NO: 174332 - DNA, 25 bp, Probe Sequence
cagcaagataagcagggccagtctc

SEQ ID NO: 174333 - DNA, 25 bp, Probe Sequence
cagcgacatgcatctagtggctcct

SEQ ID NO: 174334 - DNA, 25 bp, Probe Sequence
caccactcattttatgactccaaat

SEQ ID NO: 174335 - DNA, 25 bp, Probe Sequence
caccagctccttgagatgttcaaag

SEQ ID NO: 174336 - DNA, 25 bp, Probe Sequence
caccaccagcttccagagattaaag

SEQ ID NO: 174337 - DNA, 25 bp, Probe Sequence
caccactcgtcgtcaagatagacaa

SEQ ID NO: 174338 - DNA, 25 bp, Probe Sequence
caccaccctctgtagagctgagcat

SEQ ID NO: 174339 - DNA, 25 bp, Probe Sequence
caccaccctctgtagagctgagcat

SEQ ID NO: 174340 - DNA, 25 bp, Probe Sequence
caccagcctctcacggaggcatctt

SEQ ID NO: 174341 - DNA, 25 bp, Probe Sequence
caccagcctctcacggaggcatctt

SEQ ID NO: 174342 - DNA, 25 bp, Probe Sequence
cagccacgcggcaggagagtgtgct

SEQ ID NO: 174343 - DNA, 25 bp, Probe Sequence
caccaagccgcaggatggcgatgtt

SEQ ID NO: 174344 - DNA, 25 bp, Probe Sequence
caccaaccacacatgccagaagtta

SEQ ID NO: 174345 - DNA, 25 bp, Probe Sequence
cagcgatacctagggcggaagtgct

SEQ ID NO: 174346 - DNA, 25 bp, Probe Sequence
cagattaatcaagagtggggttact

SEQ ID NO: 174347 - DNA, 25 bp, Probe Sequence
cagccttcaaacgtgtggggtctac

SEQ ID NO: 174348 - DNA, 25 bp, Probe Sequence
cagccatgggcaactttgtggacct

SEQ ID NO: 174349 - DNA, 25 bp, Probe Sequence
caccatggatgcactttgaagtcta

SEQ ID NO: 174350 - DNA, 25 bp, Probe Sequence
caccatgaatctacttctgatcctt

SEQ ID NO: 174351 - DNA, 25 bp, Probe Sequence
caccacatattagtgcttgaccctg

SEQ ID NO: 174352 - DNA, 25 bp, Probe Sequence
caccagacagatagtccataccctg

SEQ ID NO: 174353 - DNA, 25 bp, Probe Sequence
caccaacggatgaccaacggggcca

SEQ ID NO: 174354 - DNA, 25 bp, Probe Sequence
cagcccctggatgctaacaggggcg

SEQ ID NO: 174355 - DNA, 25 bp, Probe Sequence
caccacctggctgctattgcaggag

SEQ ID NO: 174356 - DNA, 25 bp, Probe Sequence
cagccacgtggagcctagagtgagg

SEQ ID NO: 174357 - DNA, 25 bp, Probe Sequence
caccacaggaggcagctgaagctga

SEQ ID NO: 174358 - DNA, 25 bp, Probe Sequence
cagcgcaaggaggggctgcttctga

SEQ ID NO: 174359 - DNA, 25 bp, Probe Sequence
cagagcaaaaccccgtctctaaaat

SEQ ID NO: 174360 - DNA, 25 bp, Probe Sequence
cagacttaagacccgttcaaattat

SEQ ID NO: 174361 - DNA, 25 bp, Probe Sequence
cagcctttgggcaggtgtagaaatt

SEQ ID NO: 174362 - DNA, 25 bp, Probe Sequence
cagcctgttacgacatcgatgtgga

SEQ ID NO: 174363 - DNA, 25 bp, Probe Sequence
cagcctgattacccagggctgccag

SEQ ID NO: 174364 - DNA, 25 bp, Probe Sequence
caccagaagcacttcatgggccaga

SEQ ID NO: 174365 - DNA, 25 bp, Probe Sequence
caccagtggcagctctggtgcctgt

SEQ ID NO: 174366 - DNA, 25 bp, Probe Sequence
cagcacagttagccctggtggctcg

SEQ ID NO: 174367 - DNA, 25 bp, Probe Sequence
caccagcactacctgggtggtcagg

SEQ ID NO: 174368 - DNA, 25 bp, Probe Sequence
cagcccgtactggtggagtgtcagg

SEQ ID NO: 174369 - DNA, 25 bp, Probe Sequence
cagctccagttcaggccgtggaggg

SEQ ID NO: 174370 - DNA, 25 bp, Probe Sequence
cagccactttgaagcccggaagaag

SEQ ID NO: 174371 - DNA, 25 bp, Probe Sequence
cagctgcactttaaccctagatagg

SEQ ID NO: 174372 - DNA, 25 bp, Probe Sequence
cagccactttgcaaaaactgtcagg

SEQ ID NO: 174373 - DNA, 25 bp, Probe Sequence
cagccactttcaccagaactgagaa

SEQ ID NO: 174374 - DNA, 25 bp, Probe Sequence
cagccaaatcaaccagccaatggaa

SEQ ID NO: 174375 - DNA, 25 bp, Probe Sequence
cagccacgagacgtcaccaagaaaa

SEQ ID NO: 174376 - DNA, 25 bp, Probe Sequence
cagctaagcagcatgtaccggaggc

SEQ ID NO: 174377 - DNA, 25 bp, Probe Sequence
cagccaagagcggtaccggcattgc

SEQ ID NO: 174378 - DNA, 25 bp, Probe Sequence
cagcgggagcaggaacgggcagtgc

SEQ ID NO: 174379 - DNA, 25 bp, Probe Sequence
cagcccgtgcaggacacgaagctgc

SEQ ID NO: 174380 - DNA, 25 bp, Probe Sequence
cagccgtgtgcagcctatcaagctg

SEQ ID NO: 174381 - DNA, 25 bp, Probe Sequence
cagcctggccagacaagacgactgt

SEQ ID NO: 174382 - DNA, 25 bp, Probe Sequence
cagcctggtgacagagccagatcct

SEQ ID NO: 174383 - DNA, 25 bp, Probe Sequence
cagcctcgatgacttacgagccctc

SEQ ID NO: 174384 - DNA, 25 bp, Probe Sequence
cagcctcgatgacttacgagccctc

SEQ ID NO: 174385 - DNA, 25 bp, Probe Sequence
caccatggatgacttgacaacagcc

SEQ ID NO: 174386 - DNA, 25 bp, Probe Sequence
cagccagaagactgacaaagtcatc

SEQ ID NO: 174387 - DNA, 25 bp, Probe Sequence
cagccaacgagcggaaaatggcaga

SEQ ID NO: 174388 - DNA, 25 bp, Probe Sequence
caccaagcagccaagacacaaggga

SEQ ID NO: 174389 - DNA, 25 bp, Probe Sequence
cagccaagcagctctaggcaaggcc

SEQ ID NO: 174390 - DNA, 25 bp, Probe Sequence
cagctggagacgtcattgaagaggc

SEQ ID NO: 174391 - DNA, 25 bp, Probe Sequence
cagctggagggcgaagtgaaggaga

SEQ ID NO: 174392 - DNA, 25 bp, Probe Sequence
cagcgtgtcggagcgtgaagggcct

SEQ ID NO: 174393 - DNA, 25 bp, Probe Sequence
cagccatatcgccaacgtggagcgg

SEQ ID NO: 174394 - DNA, 25 bp, Probe Sequence
cagcctcagaggtcacagtgggtgg

SEQ ID NO: 174395 - DNA, 25 bp, Probe Sequence
cagcccgaacaccattgagggagct

SEQ ID NO: 174396 - DNA, 25 bp, Probe Sequence
cagctccgatctccaattagttgag

SEQ ID NO: 174397 - DNA, 25 bp, Probe Sequence
cagctccgatctccaattagttgag

SEQ ID NO: 174398 - DNA, 25 bp, Probe Sequence
cagccggcagtgaagagtgacttga

SEQ ID NO: 174399 - DNA, 25 bp, Probe Sequence
cagcctggagccaaatgtgtctgtg

SEQ ID NO: 174400 - DNA, 25 bp, Probe Sequence
caccagagaaccgatgtgtttgccc

SEQ ID NO: 174401 - DNA, 25 bp, Probe Sequence
cagccagagactgccgtgctgtggg

SEQ ID NO: 174402 - DNA, 25 bp, Probe Sequence
cagcggttattcggtgagcggtggt

SEQ ID NO: 174403 - DNA, 25 bp, Probe Sequence
cagcgaggtgttggtgggggacttg

SEQ ID NO: 174404 - DNA, 25 bp, Probe Sequence
cagcaacgttccctagaagaactgg

SEQ ID NO: 174405 - DNA, 25 bp, Probe Sequence
cagcccgttccacagatggggccag

SEQ ID NO: 174406 - DNA, 25 bp, Probe Sequence
caccacgttctccaaaaagtgcacc

SEQ ID NO: 174407 - DNA, 25 bp, Probe Sequence
cagccaccttgtgaacacgaggcaa

SEQ ID NO: 174408 - DNA, 25 bp, Probe Sequence
cagccgcaatccaggcacaggacga

SEQ ID NO: 174409 - DNA, 25 bp, Probe Sequence
cagcccagtgaaaggaaggatgttc

SEQ ID NO: 174410 - DNA, 25 bp, Probe Sequence
cagcgtcgtgagtactggggattac

SEQ ID NO: 174411 - DNA, 25 bp, Probe Sequence
cagagatctgtagggccgaggttac

SEQ ID NO: 174412 - DNA, 25 bp, Probe Sequence
cagcttcttcaggcggtagctgatt

SEQ ID NO: 174413 - DNA, 25 bp, Probe Sequence
cagctctttggtgctgctggtgtca

SEQ ID NO: 174414 - DNA, 25 bp, Probe Sequence
cagaatcttggtgctttgtggctca

SEQ ID NO: 174415 - DNA, 25 bp, Probe Sequence
cagaagcacttagcgttggcctctg

SEQ ID NO: 174416 - DNA, 25 bp, Probe Sequence
cagcccgcttatgcgtatgtgcacg

SEQ ID NO: 174417 - DNA, 25 bp, Probe Sequence
cagcctgtgtagtccagctgtgctc

SEQ ID NO: 174418 - DNA, 25 bp, Probe Sequence
cagcctgtgtgactttcaatgcctg

SEQ ID NO: 174419 - DNA, 25 bp, Probe Sequence
cagcttggagagcttcacaaatgcc

SEQ ID NO: 174420 - DNA, 25 bp, Probe Sequence
cagccagagggactcctgcaagggc

SEQ ID NO: 174421 - DNA, 25 bp, Probe Sequence
cagcctgtgggactactgctaggtg

SEQ ID NO: 174422 - DNA, 25 bp, Probe Sequence
cagccgctggaactttgcgtactgg

SEQ ID NO: 174423 - DNA, 25 bp, Probe Sequence
cagcgtgggtatcgaggcggacgac

SEQ ID NO: 174424 - DNA, 25 bp, Probe Sequence
cagcctgaggttgcagactggtctg

SEQ ID NO: 174425 - DNA, 25 bp, Probe Sequence
cagcctgaggttgcagactggtctg

SEQ ID NO: 174426 - DNA, 25 bp, Probe Sequence
cagcctgaggttgcagactggtctg

SEQ ID NO: 174427 - DNA, 25 bp, Probe Sequence
cagccggcagttgcccaagatctga

SEQ ID NO: 174428 - DNA, 25 bp, Probe Sequence
cagcggtatgttgggccagagcatc

SEQ ID NO: 174429 - DNA, 25 bp, Probe Sequence
cagcttgctactgaggccaggctga

SEQ ID NO: 174430 - DNA, 25 bp, Probe Sequence
cagctttagccggcagtatgcccac

SEQ ID NO: 174431 - DNA, 25 bp, Probe Sequence
cagtttgcccaaattgagcccatct

SEQ ID NO: 174432 - DNA, 25 bp, Probe Sequence
cagcctgctcccaattatgttaatc

SEQ ID NO: 174433 - DNA, 25 bp, Probe Sequence
cagcaggccccactgtattatgtat

SEQ ID NO: 174434 - DNA, 25 bp, Probe Sequence
cagcgtgacccaacttttctagtgt

SEQ ID NO: 174435 - DNA, 25 bp, Probe Sequence
cagcgtcgccaaaactagtgttctt

SEQ ID NO: 174436 - DNA, 25 bp, Probe Sequence
cagcctcatgcctgaatcaaatttt

SEQ ID NO: 174437 - DNA, 25 bp, Probe Sequence
cagctctgagccagattaacaggaa

SEQ ID NO: 174438 - DNA, 25 bp, Probe Sequence
cagcctgcaggctgagtaccaggtg

SEQ ID NO: 174439 - DNA, 25 bp, Probe Sequence
cagcctgcagaactggggcaagggt

SEQ ID NO: 174440 - DNA, 25 bp, Probe Sequence
cagcctgcagaactaggatgtaact

SEQ ID NO: 174441 - DNA, 25 bp, Probe Sequence
cagcctagctacagaactagactct

SEQ ID NO: 174442 - DNA, 25 bp, Probe Sequence
cagcttactcaactggatttcctcc

SEQ ID NO: 174443 - DNA, 25 bp, Probe Sequence
cagctcgaatatatggattgggatc

SEQ ID NO: 174444 - DNA, 25 bp, Probe Sequence
cagctgaaattcatgtgttcaaatc

SEQ ID NO: 174445 - DNA, 25 bp, Probe Sequence
cagcaaacatacctagttagtaaaa

SEQ ID NO: 174446 - DNA, 25 bp, Probe Sequence
cagccaagaatcctatcataatgta

SEQ ID NO: 174447 - DNA, 25 bp, Probe Sequence
cagcattatgtctgtatgaagcatg

SEQ ID NO: 174448 - DNA, 25 bp, Probe Sequence
cagctgattccatgtctgggatgac

SEQ ID NO: 174449 - DNA, 25 bp, Probe Sequence
cagccatatctcatctctgagagga

SEQ ID NO: 174450 - DNA, 25 bp, Probe Sequence
cagcgacactcattcattgaagaag

SEQ ID NO: 174451 - DNA, 25 bp, Probe Sequence
cagcagttcatcttcatgggaaatt

SEQ ID NO: 174452 - DNA, 25 bp, Probe Sequence
cagctgggctgtcagggccatagta

SEQ ID NO: 174453 - DNA, 25 bp, Probe Sequence
cagctgagactgatgagaggagggc

SEQ ID NO: 174454 - DNA, 25 bp, Probe Sequence
cagccagtgtggggatgtgatgagg

SEQ ID NO: 174455 - DNA, 25 bp, Probe Sequence
cagccagtgtggggatgtgatgagg

SEQ ID NO: 174456 - DNA, 25 bp, Probe Sequence
cagccaggattgatggcagctgagg

SEQ ID NO: 174457 - DNA, 25 bp, Probe Sequence
cagccaggatgtcaagctggagcca

SEQ ID NO: 174458 - DNA, 25 bp, Probe Sequence
caccacatttgtaacggagccattg

SEQ ID NO: 174459 - DNA, 25 bp, Probe Sequence
cagctacttcttcaagggtgcctat

SEQ ID NO: 174460 - DNA, 25 bp, Probe Sequence
cagctgagctctgtcacaagggtac

SEQ ID NO: 174461 - DNA, 25 bp, Probe Sequence
cagcggctcaggacaaagggcaggt

SEQ ID NO: 174462 - DNA, 25 bp, Probe Sequence
cagcctccagctcatagggtcaggc

SEQ ID NO: 174463 - DNA, 25 bp, Probe Sequence
cagccttgaagttggggtcagcctc

SEQ ID NO: 174464 - DNA, 25 bp, Probe Sequence
cagcctgggcaatggctgcgtagcc

SEQ ID NO: 174465 - DNA, 25 bp, Probe Sequence
cagcctggtgcgtacattctgtaga

SEQ ID NO: 174466 - DNA, 25 bp, Probe Sequence
cagcctgtgctgttatcattttgac

SEQ ID NO: 174467 - DNA, 25 bp, Probe Sequence
cagcctgagctgcctaatagtcata

SEQ ID NO: 174468 - DNA, 25 bp, Probe Sequence
caccaccagctgacaatattcataa

SEQ ID NO: 174469 - DNA, 25 bp, Probe Sequence
caccaccctgtctttgactatgagg

SEQ ID NO: 174470 - DNA, 25 bp, Probe Sequence
caccaccctgtctttgactatgagg

SEQ ID NO: 174471 - DNA, 25 bp, Probe Sequence
caccaacctgtcatccagcattagg

SEQ ID NO: 174472 - DNA, 25 bp, Probe Sequence
caccaacgcatcctattcgcttagg

SEQ ID NO: 174473 - DNA, 25 bp, Probe Sequence
cagctcagaagctgctagtctgtct

SEQ ID NO: 174474 - DNA, 25 bp, Probe Sequence
cagccatgacagtgcagatcctgct

SEQ ID NO: 174475 - DNA, 25 bp, Probe Sequence
cagccagaatgaaatgcaccagtct

SEQ ID NO: 174476 - DNA, 25 bp, Probe Sequence
cagccagcagcaaaggccggctatg

SEQ ID NO: 174477 - DNA, 25 bp, Probe Sequence
cagccagccatgctgagcatctgag

SEQ ID NO: 174478 - DNA, 25 bp, Probe Sequence
cagccatggctggatgtgcatctgg

SEQ ID NO: 174479 - DNA, 25 bp, Probe Sequence
cagccatgctgagcatctgagctcg

SEQ ID NO: 174480 - DNA, 25 bp, Probe Sequence
cagctcagctgattcagatcagagg

SEQ ID NO: 174481 - DNA, 25 bp, Probe Sequence
cagccactcagaaaagacgcaccag

SEQ ID NO: 174482 - DNA, 25 bp, Probe Sequence
cagcccctgaaaagaagcctgcaga

SEQ ID NO: 174483 - DNA, 25 bp, Probe Sequence
cagcctcctaactgacagaatctga

SEQ ID NO: 174484 - DNA, 25 bp, Probe Sequence
caccacccagaagaagagcctgaac

SEQ ID NO: 174485 - DNA, 25 bp, Probe Sequence
cagcccccaaacaaggaattatcca

SEQ ID NO: 174486 - DNA, 25 bp, Probe Sequence
cagcccccactaggtggacacatta

SEQ ID NO: 174487 - DNA, 25 bp, Probe Sequence
caccacaaccttattgaccatctcg

SEQ ID NO: 174488 - DNA, 25 bp, Probe Sequence
cagccagtactctttttggccactc

SEQ ID NO: 174489 - DNA, 25 bp, Probe Sequence
cagcctgacaacttttttgccgctg

SEQ ID NO: 174490 - DNA, 25 bp, Probe Sequence
cagcctgagcggttattcttgacac

SEQ ID NO: 174491 - DNA, 25 bp, Probe Sequence
cagcctcacgttcacttaggcacat

SEQ ID NO: 174492 - DNA, 25 bp, Probe Sequence
cagcccagtttgttcatgtcagtga

SEQ ID NO: 174493 - DNA, 25 bp, Probe Sequence
cagcccttctggaacatgtcagtat

SEQ ID NO: 174494 - DNA, 25 bp, Probe Sequence
cagccattttgggcatatgtatctt

SEQ ID NO: 174495 - DNA, 25 bp, Probe Sequence
cagccttgctttggataggacctcc

SEQ ID NO: 174496 - DNA, 25 bp, Probe Sequence
cagccttcctgaggatgggcaaccc

SEQ ID NO: 174497 - DNA, 25 bp, Probe Sequence
cagccttcctgagaagatgcaacca

SEQ ID NO: 174498 - DNA, 25 bp, Probe Sequence
cagccttggtgacagagtgagactc

SEQ ID NO: 174499 - DNA, 25 bp, Probe Sequence
cagccttggtgacagagtgagactc

SEQ ID NO: 174500 - DNA, 25 bp, Probe Sequence
cagcctctgggtctgagtcatggcc

SEQ ID NO: 174501 - DNA, 25 bp, Probe Sequence
cagcctcatattctgtattcatgag

SEQ ID NO: 174502 - DNA, 25 bp, Probe Sequence
cagcctgttctggatttgctgcaga

SEQ ID NO: 174503 - DNA, 25 bp, Probe Sequence
cagcgtttgatgggtagcagagaga

SEQ ID NO: 174504 - DNA, 25 bp, Probe Sequence
cagcctttgagagtgggcgagtgag

SEQ ID NO: 174505 - DNA, 25 bp, Probe Sequence
cagccagggagaatgggcccagggg

SEQ ID NO: 174506 - DNA, 25 bp, Probe Sequence
cagcccacaagaaggccctgcgggc

SEQ ID NO: 174507 - DNA, 25 bp, Probe Sequence
cagcccacatagtgatggttcccct

SEQ ID NO: 174508 - DNA, 25 bp, Probe Sequence
cagcgctacaagtactggttctccc

SEQ ID NO: 174509 - DNA, 25 bp, Probe Sequence
cagtgatctccagagctagttccct

SEQ ID NO: 174510 - DNA, 25 bp, Probe Sequence
cagaatgcccagggcggtttctcct

SEQ ID NO: 174511 - DNA, 25 bp, Probe Sequence
cagaatgcttacgggtgttattttt

SEQ ID NO: 174512 - DNA, 25 bp, Probe Sequence
cagacatgaatacctcgtgttcctc

SEQ ID NO: 174513 - DNA, 25 bp, Probe Sequence
cagacatgaatacctcgtgttcctc

SEQ ID NO: 174514 - DNA, 25 bp, Probe Sequence
cagacatgaatacctcgtgttcctc

SEQ ID NO: 174515 - DNA, 25 bp, Probe Sequence
cagcacaagaagtctcaaaattccg

SEQ ID NO: 174516 - DNA, 25 bp, Probe Sequence
cagcaaagagagttacgaattacgt

SEQ ID NO: 174517 - DNA, 25 bp, Probe Sequence
cagaaaacagttacgtgaaagtgga

SEQ ID NO: 174518 - DNA, 25 bp, Probe Sequence
cagacaggacagaaatccggaaaaa

SEQ ID NO: 174519 - DNA, 25 bp, Probe Sequence
cagcaagagaagtcaatagggcagg

SEQ ID NO: 174520 - DNA, 25 bp, Probe Sequence
cagcatacgcaactcacgaaggccg

SEQ ID NO: 174521 - DNA, 25 bp, Probe Sequence
cagacagcgagcgctggaaggccat

SEQ ID NO: 174522 - DNA, 25 bp, Probe Sequence
cagaactcagatgtggctagaccaa

SEQ ID NO: 174523 - DNA, 25 bp, Probe Sequence
cagctacttatcctggtaccagcag

SEQ ID NO: 174524 - DNA, 25 bp, Probe Sequence
cagcccttacggattgccaggaagg

SEQ ID NO: 174525 - DNA, 25 bp, Probe Sequence
cagcctggtacgcagatcccagaat

SEQ ID NO: 174526 - DNA, 25 bp, Probe Sequence
cagcctggtacgcagatcccagaat

SEQ ID NO: 174527 - DNA, 25 bp, Probe Sequence
cagccatctggacaagacccaaaaa

SEQ ID NO: 174528 - DNA, 25 bp, Probe Sequence
cagccatcttgggaagactctaaag

SEQ ID NO: 174529 - DNA, 25 bp, Probe Sequence
cagccatcaggtggaagcctctgga

SEQ ID NO: 174530 - DNA, 25 bp, Probe Sequence
cagccaatcgcatggagccgctgtg

SEQ ID NO: 174531 - DNA, 25 bp, Probe Sequence
cagccacattactgatgggcattgt

SEQ ID NO: 174532 - DNA, 25 bp, Probe Sequence
cagcgcctaggtcaggagatcttag

SEQ ID NO: 174533 - DNA, 25 bp, Probe Sequence
cagcccataggtttgtcagtttcac

SEQ ID NO: 174534 - DNA, 25 bp, Probe Sequence
cagcccaatttgtgatcttttatgc

SEQ ID NO: 174535 - DNA, 25 bp, Probe Sequence
cagcccagtagtcttcttttgagtg

SEQ ID NO: 174536 - DNA, 25 bp, Probe Sequence
cagcatcatcagaagttttgtcctc

SEQ ID NO: 174537 - DNA, 25 bp, Probe Sequence
cagccatgagtcagtttgtgcccat

SEQ ID NO: 174538 - DNA, 25 bp, Probe Sequence
cagcttggtattgtcagtctccttc

SEQ ID NO: 174539 - DNA, 25 bp, Probe Sequence
cagctaagggcagctaactccttcc

SEQ ID NO: 174540 - DNA, 25 bp, Probe Sequence
cagctccagggagttaactcttctt

SEQ ID NO: 174541 - DNA, 25 bp, Probe Sequence
cagcccgtggctgtgaattctttat

SEQ ID NO: 174542 - DNA, 25 bp, Probe Sequence
cagcccctgatcaactaagttttgt

SEQ ID NO: 174543 - DNA, 25 bp, Probe Sequence
cagcccactgttgtatacgcttatt

SEQ ID NO: 174544 - DNA, 25 bp, Probe Sequence
cagcctcactgcggcttatacagta

SEQ ID NO: 174545 - DNA, 25 bp, Probe Sequence
cagctgcatgactcctaaaccataa

SEQ ID NO: 174546 - DNA, 25 bp, Probe Sequence
cagctgcagccaacatgaaaaaaaa

SEQ ID NO: 174547 - DNA, 25 bp, Probe Sequence
cagctgatcgcccatgacaaagagg

SEQ ID NO: 174548 - DNA, 25 bp, Probe Sequence
cagctggccgcattacagagaaggt

SEQ ID NO: 174549 - DNA, 25 bp, Probe Sequence
cagctgcttcagactaccaaactgg

SEQ ID NO: 174550 - DNA, 25 bp, Probe Sequence
cagctctacagctttctcaaacggc

SEQ ID NO: 174551 - DNA, 25 bp, Probe Sequence
cagctgtgaaaccatcatcataatc

SEQ ID NO: 174552 - DNA, 25 bp, Probe Sequence
cagcttcaaatgcacaattcatcat

SEQ ID NO: 174553 - DNA, 25 bp, Probe Sequence
cagcctcacaggccaaagcatcagc

SEQ ID NO: 174554 - DNA, 25 bp, Probe Sequence
cagcctcacaggccaaagcatcagc

SEQ ID NO: 174555 - DNA, 25 bp, Probe Sequence
cagcctcctatgcctaggtgagctg

SEQ ID NO: 174556 - DNA, 25 bp, Probe Sequence
cagcttcctttccagctggagaggc

SEQ ID NO: 174557 - DNA, 25 bp, Probe Sequence
cagaccgcctttccttgaagggagt

SEQ ID NO: 174558 - DNA, 25 bp, Probe Sequence
cagacccgttgtccctaaagatggg

SEQ ID NO: 174559 - DNA, 25 bp, Probe Sequence
cagaaactgtttccctacggagagc

SEQ ID NO: 174560 - DNA, 25 bp, Probe Sequence
cagaaccaggacccttaatgggact

SEQ ID NO: 174561 - DNA, 25 bp, Probe Sequence
cagaacgaggttcagaaagtggctt

SEQ ID NO: 174562 - DNA, 25 bp, Probe Sequence
cagcctaaggtgttcaggaaggccg

SEQ ID NO: 174563 - DNA, 25 bp, Probe Sequence
cagccagaagcggtggggacaggac

SEQ ID NO: 174564 - DNA, 25 bp, Probe Sequence
cagcctgtatcttgggggacagggc

SEQ ID NO: 174565 - DNA, 25 bp, Probe Sequence
cagcacttactccggggggtagagc

SEQ ID NO: 174566 - DNA, 25 bp, Probe Sequence
cagtattatctgcggtggggggagg

SEQ ID NO: 174567 - DNA, 25 bp, Probe Sequence
cagttggctaggggagcagggggcc

SEQ ID NO: 174568 - DNA, 25 bp, Probe Sequence
cagccggctggtggagagggaggcc

SEQ ID NO: 174569 - DNA, 25 bp, Probe Sequence
cagacccagtggggaggcggacgtt

SEQ ID NO: 174570 - DNA, 25 bp, Probe Sequence
cagaacttgggtgaccggatccttc

SEQ ID NO: 174571 - DNA, 25 bp, Probe Sequence
cagaaattccggaaccaattcctct

SEQ ID NO: 174572 - DNA, 25 bp, Probe Sequence
cagaaaatcctgaccagcacaattg

SEQ ID NO: 174573 - DNA, 25 bp, Probe Sequence
cagaagacatttccaacagtttgcc

SEQ ID NO: 174574 - DNA, 25 bp, Probe Sequence
cagaagaaaagcccatcttttccct

SEQ ID NO: 174575 - DNA, 25 bp, Probe Sequence
cagagttacaagcaccttttccagc

SEQ ID NO: 174576 - DNA, 25 bp, Probe Sequence
cagacattgacagcgaacatttcat

SEQ ID NO: 174577 - DNA, 25 bp, Probe Sequence
cagactggaaatgtacactttggag

SEQ ID NO: 174578 - DNA, 25 bp, Probe Sequence
cagcagtggacatctactcctttgg

SEQ ID NO: 174579 - DNA, 25 bp, Probe Sequence
cagcctggataagtttgccttctga

SEQ ID NO: 174580 - DNA, 25 bp, Probe Sequence
cagccttaaagtagtccattcttgc

SEQ ID NO: 174581 - DNA, 25 bp, Probe Sequence
cagctttcaagagtactccacgctg

SEQ ID NO: 174582 - DNA, 25 bp, Probe Sequence
cagctgtcttacacctcaagtgctg

SEQ ID NO: 174583 - DNA, 25 bp, Probe Sequence
cagctgtctgaccttccaaagacta

SEQ ID NO: 174584 - DNA, 25 bp, Probe Sequence
cagccctgacagcctggaaaacatt

SEQ ID NO: 174585 - DNA, 25 bp, Probe Sequence
cagcccgaaggagagacacatcatt

SEQ ID NO: 174586 - DNA, 25 bp, Probe Sequence
cagcccgcatgatggacagacagac

SEQ ID NO: 174587 - DNA, 25 bp, Probe Sequence
cagccccagcaagagcacaagagga

SEQ ID NO: 174588 - DNA, 25 bp, Probe Sequence
cagccctggaggggaacagagtgag

SEQ ID NO: 174589 - DNA, 25 bp, Probe Sequence
cagccctgcaggtggacctggtgtg

SEQ ID NO: 174590 - DNA, 25 bp, Probe Sequence
cagcctctgagagcagttactgggg

SEQ ID NO: 174591 - DNA, 25 bp, Probe Sequence
cagccccagatggtgactactggag

SEQ ID NO: 174592 - DNA, 25 bp, Probe Sequence
cagccctatgtggagagcgacagta

SEQ ID NO: 174593 - DNA, 25 bp, Probe Sequence
cagccgtatgtgaatggagctctgt

SEQ ID NO: 174594 - DNA, 25 bp, Probe Sequence
cagccagaagtgcaacatgtatgtg

SEQ ID NO: 174595 - DNA, 25 bp, Probe Sequence
cagccaacagactgaatgttatggt

SEQ ID NO: 174596 - DNA, 25 bp, Probe Sequence
cagccaacatcctggctgtctctgg

SEQ ID NO: 174597 - DNA, 25 bp, Probe Sequence
cagccaactcattgggttgtagcca

SEQ ID NO: 174598 - DNA, 25 bp, Probe Sequence
cagccataccacaaggtacgtccat

SEQ ID NO: 174599 - DNA, 25 bp, Probe Sequence
cagccacacgcgaaggtgaccttaa

SEQ ID NO: 174600 - DNA, 25 bp, Probe Sequence
cagccccactcaaggatagccttaa

SEQ ID NO: 174601 - DNA, 25 bp, Probe Sequence
cagccccctggtgaatcaggtacct

SEQ ID NO: 174602 - DNA, 25 bp, Probe Sequence
cagcccccaggggaggatggtactg

SEQ ID NO: 174603 - DNA, 25 bp, Probe Sequence
cagccacgagagcgcacggtggtag

SEQ ID NO: 174604 - DNA, 25 bp, Probe Sequence
cagccagtcagacttcaaggctttt

SEQ ID NO: 174605 - DNA, 25 bp, Probe Sequence
cagcctgatagagctccgtggtttc

SEQ ID NO: 174606 - DNA, 25 bp, Probe Sequence
cagcctgcttacatagcctggcttt

SEQ ID NO: 174607 - DNA, 25 bp, Probe Sequence
cagcccctcatcatatactggctga

SEQ ID NO: 174608 - DNA, 25 bp, Probe Sequence
cagccactctccatacaggtgatat

SEQ ID NO: 174609 - DNA, 25 bp, Probe Sequence
cagctacctgccttcactgaaatat

SEQ ID NO: 174610 - DNA, 25 bp, Probe Sequence
cagccacccgagattgagcaataac

SEQ ID NO: 174611 - DNA, 25 bp, Probe Sequence
cagccactcaaggtcttggctccaa

SEQ ID NO: 174612 - DNA, 25 bp, Probe Sequence
cagcctctccagtatggtggcttca

SEQ ID NO: 174613 - DNA, 25 bp, Probe Sequence
cagcccgccagcggaaggttcattc

SEQ ID NO: 174614 - DNA, 25 bp, Probe Sequence
cagccttgccactggagtggctatt

SEQ ID NO: 174615 - DNA, 25 bp, Probe Sequence
cagccttgcactgtgggggctggtc

SEQ ID NO: 174616 - DNA, 25 bp, Probe Sequence
cagcactcgcaggaaggggggtcgc

SEQ ID NO: 174617 - DNA, 25 bp, Probe Sequence
cagcccagccgacagaagcggtcgg

SEQ ID NO: 174618 - DNA, 25 bp, Probe Sequence
cagccccacagacagaacagttctt

SEQ ID NO: 174619 - DNA, 25 bp, Probe Sequence
cagctgccaccaaggggcactgttt

SEQ ID NO: 174620 - DNA, 25 bp, Probe Sequence
cagctccaccagatgcagatttgtg

SEQ ID NO: 174621 - DNA, 25 bp, Probe Sequence
cagctcttctcaaggctagttgtga

SEQ ID NO: 174622 - DNA, 25 bp, Probe Sequence
cagctttcagaagtgctgagttggc

SEQ ID NO: 174623 - DNA, 25 bp, Probe Sequence
cagcgttggaacgtgagcctcggat

SEQ ID NO: 174624 - DNA, 25 bp, Probe Sequence
cagcgtcttcaacggagccgtgagc

SEQ ID NO: 174625 - DNA, 25 bp, Probe Sequence
cagcggctccagagatactctctaa

SEQ ID NO: 174626 - DNA, 25 bp, Probe Sequence
cagcggctccagagatactctctaa

SEQ ID NO: 174627 - DNA, 25 bp, Probe Sequence
cagctcctcgcgaagtgaacctgaa

SEQ ID NO: 174628 - DNA, 25 bp, Probe Sequence
cagctcctcgcgaagtgaacctgaa

SEQ ID NO: 174629 - DNA, 25 bp, Probe Sequence
cagctcctcgcgaagtgaacctgaa

SEQ ID NO: 174630 - DNA, 25 bp, Probe Sequence
cagctcctcgcgaagtgaacctgaa

SEQ ID NO: 174631 - DNA, 25 bp, Probe Sequence
cagcctgcctctgttatagcttgta

SEQ ID NO: 174632 - DNA, 25 bp, Probe Sequence
cagccttcttcccaatagtgttaac

SEQ ID NO: 174633 - DNA, 25 bp, Probe Sequence
cagccttctgtttgcagaacgttca

SEQ ID NO: 174634 - DNA, 25 bp, Probe Sequence
cagccatactccacagaatcttatc

SEQ ID NO: 174635 - DNA, 25 bp, Probe Sequence
cagccatactccacagaatcttatc

SEQ ID NO: 174636 - DNA, 25 bp, Probe Sequence
cagccatccaccttcagatgtgtct

SEQ ID NO: 174637 - DNA, 25 bp, Probe Sequence
cagccatccaccttcagatgtgtct

SEQ ID NO: 174638 - DNA, 25 bp, Probe Sequence
cagccatccaccttcagatgtgtct

SEQ ID NO: 174639 - DNA, 25 bp, Probe Sequence
cagccatccaccttcagatgtgtct

SEQ ID NO: 174640 - DNA, 25 bp, Probe Sequence
cagcctctatcctacaaggcctatg

SEQ ID NO: 174641 - DNA, 25 bp, Probe Sequence
cagcctctgatctgtgcagggtatt

SEQ ID NO: 174642 - DNA, 25 bp, Probe Sequence
cagcgctcaaaactcggtgatcata

SEQ ID NO: 174643 - DNA, 25 bp, Probe Sequence
cagctccatacacccagtagaacag

SEQ ID NO: 174644 - DNA, 25 bp, Probe Sequence
cagctgtctaatcccttcaagaact

SEQ ID NO: 174645 - DNA, 25 bp, Probe Sequence
cagctttcaaatcgtccgcgatgac

SEQ ID NO: 174646 - DNA, 25 bp, Probe Sequence
cagctttcagtgatgtccgtgctgg

SEQ ID NO: 174647 - DNA, 25 bp, Probe Sequence
cagctttgggataccgctgggcagg

SEQ ID NO: 174648 - DNA, 25 bp, Probe Sequence
cagccttgatgccatatgccttggg

SEQ ID NO: 174649 - DNA, 25 bp, Probe Sequence
cagcctttgccaatcgtgggtgaaa

SEQ ID NO: 174650 - DNA, 25 bp, Probe Sequence
cagccttgttttcggtgtgtaggcc

SEQ ID NO: 174651 - DNA, 25 bp, Probe Sequence
cagcccagcctttcagagtggtggg

SEQ ID NO: 174652 - DNA, 25 bp, Probe Sequence
cagcagtcccctacaagtggtgggg

SEQ ID NO: 174653 - DNA, 25 bp, Probe Sequence
cagcccctctcccacgtgggagagg

SEQ ID NO: 174654 - DNA, 25 bp, Probe Sequence
cagctccgtcattaccataggggac

SEQ ID NO: 174655 - DNA, 25 bp, Probe Sequence
cagctccgtcattaccataggggac

SEQ ID NO: 174656 - DNA, 25 bp, Probe Sequence
cagcccgctcggacatcaatggggc

SEQ ID NO: 174657 - DNA, 25 bp, Probe Sequence
cagctccgtggggcatcatgaggag

SEQ ID NO: 174658 - DNA, 25 bp, Probe Sequence
cagcagccctgagccacaggaagtt

SEQ ID NO: 174659 - DNA, 25 bp, Probe Sequence
cagcgccaaggacatcaagaagatc

SEQ ID NO: 174660 - DNA, 25 bp, Probe Sequence
cagcctacacagtccatcaaataca

SEQ ID NO: 174661 - DNA, 25 bp, Probe Sequence
cagccatgacaaacaccaggatgca

SEQ ID NO: 174662 - DNA, 25 bp, Probe Sequence
cagcctgatgacagaccgagacact

SEQ ID NO: 174663 - DNA, 25 bp, Probe Sequence
cagcttgggctttggcagcagacac

SEQ ID NO: 174664 - DNA, 25 bp, Probe Sequence
cagcattagcagtacagggcccagc

SEQ ID NO: 174665 - DNA, 25 bp, Probe Sequence
cagcattagatgcaggtcgtacata

SEQ ID NO: 174666 - DNA, 25 bp, Probe Sequence
cagctagtgcttgggatcgtacatg

SEQ ID NO: 174667 - DNA, 25 bp, Probe Sequence
cagctggtgcgaaaatcgctaagca

SEQ ID NO: 174668 - DNA, 25 bp, Probe Sequence
cagctgcctatgaaaatgacaaatg

SEQ ID NO: 174669 - DNA, 25 bp, Probe Sequence
cagcccacatgctacaggccaataa

SEQ ID NO: 174670 - DNA, 25 bp, Probe Sequence
cagccgcctgcaatcaggtgaatat

SEQ ID NO: 174671 - DNA, 25 bp, Probe Sequence
cagctgcagtctgtcaggatgagat

SEQ ID NO: 174672 - DNA, 25 bp, Probe Sequence
cagcgacttcgaatgcaatcagatg

SEQ ID NO: 174673 - DNA, 25 bp, Probe Sequence
cagctgcactggcaagaaaatggac

SEQ ID NO: 174674 - DNA, 25 bp, Probe Sequence
cagcctcatggcctagcaaaagaac

SEQ ID NO: 174675 - DNA, 25 bp, Probe Sequence
cagcccagaacaatgctaaagtagc

SEQ ID NO: 174676 - DNA, 25 bp, Probe Sequence
cagccccgatgattcttaacacagc

SEQ ID NO: 174677 - DNA, 25 bp, Probe Sequence
cagccccgatgattcttaacacagc

SEQ ID NO: 174678 - DNA, 25 bp, Probe Sequence
cagctgcccgaatgttgttgcacag

SEQ ID NO: 174679 - DNA, 25 bp, Probe Sequence
cagctccgggaactgcagctgtgca

SEQ ID NO: 174680 - DNA, 25 bp, Probe Sequence
cagctccgggaactgcagctgtgca

SEQ ID NO: 174681 - DNA, 25 bp, Probe Sequence
cagcctcatgggaagtcctggcaca

SEQ ID NO: 174682 - DNA, 25 bp, Probe Sequence
cagctgcttgggagtttgagcatgg

SEQ ID NO: 174683 - DNA, 25 bp, Probe Sequence
cagcagctgagtggtggttatggag

SEQ ID NO: 174684 - DNA, 25 bp, Probe Sequence
cagcctgagctagtgagctagattc

SEQ ID NO: 174685 - DNA, 25 bp, Probe Sequence
cagcgctggaagcagctgagcctcc

SEQ ID NO: 174686 - DNA, 25 bp, Probe Sequence
cagcactgtaagaagctgtccagct

SEQ ID NO: 174687 - DNA, 25 bp, Probe Sequence
cagcagcgtgacgatactgccactg

SEQ ID NO: 174688 - DNA, 25 bp, Probe Sequence
cagcaggtacactggcaagcttgcc

SEQ ID NO: 174689 - DNA, 25 bp, Probe Sequence
cagcaggtcactgctacaagtcccg

SEQ ID NO: 174690 - DNA, 25 bp, Probe Sequence
cagcaggtcactgctacaagtcccg

SEQ ID NO: 174691 - DNA, 25 bp, Probe Sequence
cagcggtatgctgttcgaccagcgg

SEQ ID NO: 174692 - DNA, 25 bp, Probe Sequence
cagctgaaatcggattcgtcccgct

SEQ ID NO: 174693 - DNA, 25 bp, Probe Sequence
cagcatggacatgagggtccccgct

SEQ ID NO: 174694 - DNA, 25 bp, Probe Sequence
cagagtgaaatacgtgtccaccgct

SEQ ID NO: 174695 - DNA, 25 bp, Probe Sequence
cagcttgaagaactatgatccccag

SEQ ID NO: 174696 - DNA, 25 bp, Probe Sequence
cagcttgaggagttcctgaaccaga

SEQ ID NO: 174697 - DNA, 25 bp, Probe Sequence
cagctggcagggtgccaaccatgca

SEQ ID NO: 174698 - DNA, 25 bp, Probe Sequence
cagcccaggctctgacaacatcaga

SEQ ID NO: 174699 - DNA, 25 bp, Probe Sequence
cagccgcacactatgagcaacatgc

SEQ ID NO: 174700 - DNA, 25 bp, Probe Sequence
cagcctcaagatcatcagcaatgcc

SEQ ID NO: 174701 - DNA, 25 bp, Probe Sequence
cagcctaaataaagcttggcaactt

SEQ ID NO: 174702 - DNA, 25 bp, Probe Sequence
cagcttaagatattactattcagca

SEQ ID NO: 174703 - DNA, 25 bp, Probe Sequence
cagcctcagaccttagcttgaagca

SEQ ID NO: 174704 - DNA, 25 bp, Probe Sequence
cagcccaagcctcaggatggacaag

SEQ ID NO: 174705 - DNA, 25 bp, Probe Sequence
cagcttaactgacagatgttaaagc

SEQ ID NO: 174706 - DNA, 25 bp, Probe Sequence
cagcctccctgaacgattaaacagc

SEQ ID NO: 174707 - DNA, 25 bp, Probe Sequence
cagcacgttgctgtcgattaagacc

SEQ ID NO: 174708 - DNA, 25 bp, Probe Sequence
cagcccttccttgagatgatacacg

SEQ ID NO: 174709 - DNA, 25 bp, Probe Sequence
cagcctctcccggaaaggaagcgtt

SEQ ID NO: 174710 - DNA, 25 bp, Probe Sequence
cagcctctcccgctaggagagtcct

SEQ ID NO: 174711 - DNA, 25 bp, Probe Sequence
cagcctgccgggcagggagcagccc

SEQ ID NO: 174712 - DNA, 25 bp, Probe Sequence
cagcttaccgggtgataggccccat

SEQ ID NO: 174713 - DNA, 25 bp, Probe Sequence
cagctgttccgggttacggacttct

SEQ ID NO: 174714 - DNA, 25 bp, Probe Sequence
cagctgtcccggttatgccggaatc

SEQ ID NO: 174715 - DNA, 25 bp, Probe Sequence
cagcttcctacgatcagccgaagaa

SEQ ID NO: 174716 - DNA, 25 bp, Probe Sequence
cagctgcgcctcggggatgtaaaga

SEQ ID NO: 174717 - DNA, 25 bp, Probe Sequence
cagctatgactgtgggatgtacgtg

SEQ ID NO: 174718 - DNA, 25 bp, Probe Sequence
cagctggagctgtggacttttgtac

SEQ ID NO: 174719 - DNA, 25 bp, Probe Sequence
cagctacagcgtggggttgtggtcc

SEQ ID NO: 174720 - DNA, 25 bp, Probe Sequence
cagctgacattgagaaatggttgtc

SEQ ID NO: 174721 - DNA, 25 bp, Probe Sequence
cagctggtcgtctatcaatggttcg

SEQ ID NO: 174722 - DNA, 25 bp, Probe Sequence
cagctggagttcaacaatggtacct

SEQ ID NO: 174723 - DNA, 25 bp, Probe Sequence
cagctggagattgcgcacgagaagc

SEQ ID NO: 174724 - DNA, 25 bp, Probe Sequence
cagctggagatgatcgtctgagccc

SEQ ID NO: 174725 - DNA, 25 bp, Probe Sequence
cagcggcagcatatggactcagaca

SEQ ID NO: 174726 - DNA, 25 bp, Probe Sequence
cagcgctcgcaagtggcgctggcca

SEQ ID NO: 174727 - DNA, 25 bp, Probe Sequence
cagctgctcagccatcagcagcctg

SEQ ID NO: 174728 - DNA, 25 bp, Probe Sequence
cagcgcatcaccaagcaattggaga

SEQ ID NO: 174729 - DNA, 25 bp, Probe Sequence
cagcgcaacagcagcctgcagctgg

SEQ ID NO: 174730 - DNA, 25 bp, Probe Sequence
cagccgcacacaggcctagaggtaa

SEQ ID NO: 174731 - DNA, 25 bp, Probe Sequence
cagccccactagccaagagaaacag

SEQ ID NO: 174732 - DNA, 25 bp, Probe Sequence
cagctccacctactgtaaccaaatg

SEQ ID NO: 174733 - DNA, 25 bp, Probe Sequence
cagctggcacgtcagttgaccagga

SEQ ID NO: 174734 - DNA, 25 bp, Probe Sequence
cagctcagcaagtggtggaccaggc

SEQ ID NO: 174735 - DNA, 25 bp, Probe Sequence
cagctcctggacagtgtcctatggc

SEQ ID NO: 174736 - DNA, 25 bp, Probe Sequence
cagccctgacaaaggtcagctagcc

SEQ ID NO: 174737 - DNA, 25 bp, Probe Sequence
cagcccagaccagaggctctgagcc

SEQ ID NO: 174738 - DNA, 25 bp, Probe Sequence
cagcaccagttaggggtctggcccc

SEQ ID NO: 174739 - DNA, 25 bp, Probe Sequence
cagaacttagaagggcgtggcctct

SEQ ID NO: 174740 - DNA, 25 bp, Probe Sequence
cagctgcaattctgaggggggtttg

SEQ ID NO: 174741 - DNA, 25 bp, Probe Sequence
cagctcttttgggattgggtgtttc

SEQ ID NO: 174742 - DNA, 25 bp, Probe Sequence
cagctttgatttcattggtggattt

SEQ ID NO: 174743 - DNA, 25 bp, Probe Sequence
cagccccttgatcatctggggtttg

SEQ ID NO: 174744 - DNA, 25 bp, Probe Sequence
cagcccctctatccaaggggctctc

SEQ ID NO: 174745 - DNA, 25 bp, Probe Sequence
cagcccccatcttcaagggctgctt

SEQ ID NO: 174746 - DNA, 25 bp, Probe Sequence
cagcccctcatcctgagatgggagc

SEQ ID NO: 174747 - DNA, 25 bp, Probe Sequence
cagcccacatgctgcataagatggg

SEQ ID NO: 174748 - DNA, 25 bp, Probe Sequence
cagcctcagatgctgaaccagcgtg

SEQ ID NO: 174749 - DNA, 25 bp, Probe Sequence
cagcccagggaaggctccgtgggag

SEQ ID NO: 174750 - DNA, 25 bp, Probe Sequence
caggtgagatggagacccctggggc

SEQ ID NO: 174751 - DNA, 25 bp, Probe Sequence
caggtagacggggcccggagtctgc

SEQ ID NO: 174752 - DNA, 25 bp, Probe Sequence
cagaacaggggcttccccaagttgc

SEQ ID NO: 174753 - DNA, 25 bp, Probe Sequence
taagaaggggaaaactgcgcagggg

SEQ ID NO: 174754 - DNA, 25 bp, Probe Sequence
taagaaggggaaaactgcgcagggg

SEQ ID NO: 174755 - DNA, 25 bp, Probe Sequence
tttaggggctacagagtcgagggac

SEQ ID NO: 174756 - DNA, 25 bp, Probe Sequence
cagcttctaagttcagttctgcaag

SEQ ID NO: 174757 - DNA, 25 bp, Probe Sequence
cagctctaaggaccgtcctgcgaga

SEQ ID NO: 174758 - DNA, 25 bp, Probe Sequence
cagcatccaagacagcttcgtggag

SEQ ID NO: 174759 - DNA, 25 bp, Probe Sequence
cagcccaggtgcagcggctggaggc

SEQ ID NO: 174760 - DNA, 25 bp, Probe Sequence
cagcagccaggtgccgagtggattg

SEQ ID NO: 174761 - DNA, 25 bp, Probe Sequence
cagcgtcagtgtgtcgatgggaact

SEQ ID NO: 174762 - DNA, 25 bp, Probe Sequence
cagctgaaggacatcgtggagtacg

SEQ ID NO: 174763 - DNA, 25 bp, Probe Sequence
cagctggggatcgggctgtggtgac

SEQ ID NO: 174764 - DNA, 25 bp, Probe Sequence
cagctgaattaagggcggcggccac

SEQ ID NO: 174765 - DNA, 25 bp, Probe Sequence
cagcagttggaagacggtggccctg

SEQ ID NO: 174766 - DNA, 25 bp, Probe Sequence
cagaagtcggcagaagagttggcgt

SEQ ID NO: 174767 - DNA, 25 bp, Probe Sequence
cagacaccggcgtgggaatgtggga

SEQ ID NO: 174768 - DNA, 25 bp, Probe Sequence
catacctcccagacggggtggtggc

SEQ ID NO: 174769 - DNA, 25 bp, Probe Sequence
catccaatcctcactgggtggggtg

SEQ ID NO: 174770 - DNA, 25 bp, Probe Sequence
catccacgtctagtcagggaccgtt

SEQ ID NO: 174771 - DNA, 25 bp, Probe Sequence
cagaccgttatttgatggacctagt

SEQ ID NO: 174772 - DNA, 25 bp, Probe Sequence
cataacccgttccattgaccggata

SEQ ID NO: 174773 - DNA, 25 bp, Probe Sequence
catagaccccaaaaatctcagccga

SEQ ID NO: 174774 - DNA, 25 bp, Probe Sequence
catagaccccaaaaatctcagccga

SEQ ID NO: 174775 - DNA, 25 bp, Probe Sequence
catgaacccttagaagccaccatag

SEQ ID NO: 174776 - DNA, 25 bp, Probe Sequence
cagctttccttgctgataccagcct

SEQ ID NO: 174777 - DNA, 25 bp, Probe Sequence
cagctttgcctttaattaaaccatg

SEQ ID NO: 174778 - DNA, 25 bp, Probe Sequence
cagctattggcaagttttaaaccca

SEQ ID NO: 174779 - DNA, 25 bp, Probe Sequence
cagcttggccaacatggcgaaaccc

SEQ ID NO: 174780 - DNA, 25 bp, Probe Sequence
cagcctgggcaacctggtgaaaccc

SEQ ID NO: 174781 - DNA, 25 bp, Probe Sequence
cagcctggccaacatggtgaaaccc

SEQ ID NO: 174782 - DNA, 25 bp, Probe Sequence
cagcctggacaacagcgagagctcc

SEQ ID NO: 174783 - DNA, 25 bp, Probe Sequence
cagccggcagaaagcagtgcggccc

SEQ ID NO: 174784 - DNA, 25 bp, Probe Sequence
cagcctggagaattcagtgcagcca

SEQ ID NO: 174785 - DNA, 25 bp, Probe Sequence
cagcgctgtgtggagatcctgagcc

SEQ ID NO: 174786 - DNA, 25 bp, Probe Sequence
cagcgctgtgaggacatcctgcagc

SEQ ID NO: 174787 - DNA, 25 bp, Probe Sequence
cagcctgtgacaggctcctggctgg

SEQ ID NO: 174788 - DNA, 25 bp, Probe Sequence
cagcctgtacaccatgtctagtggc

SEQ ID NO: 174789 - DNA, 25 bp, Probe Sequence
cagcctggctcggcaagtagatggc

SEQ ID NO: 174790 - DNA, 25 bp, Probe Sequence
cagccggctcgagagggatgtctgg

SEQ ID NO: 174791 - DNA, 25 bp, Probe Sequence
cagccgctccgagagattagtggat

SEQ ID NO: 174792 - DNA, 25 bp, Probe Sequence
cagcacctgggaacgttacttcatt

SEQ ID NO: 174793 - DNA, 25 bp, Probe Sequence
cagcacgtgggagccattatattgc

SEQ ID NO: 174794 - DNA, 25 bp, Probe Sequence
cagcctgggtgacagagcaagattc

SEQ ID NO: 174795 - DNA, 25 bp, Probe Sequence
cagcctgggcgacagtgcaagactc

SEQ ID NO: 174796 - DNA, 25 bp, Probe Sequence
cagcctgggcgacagagcgagactc

SEQ ID NO: 174797 - DNA, 25 bp, Probe Sequence
cagcctgggtgacagagtgatactg

SEQ ID NO: 174798 - DNA, 25 bp, Probe Sequence
cagcctgggtgacagagagactctg

SEQ ID NO: 174799 - DNA, 25 bp, Probe Sequence
cagcggcaggtgtacaggacgtctg

SEQ ID NO: 174800 - DNA, 25 bp, Probe Sequence
cagcggtggcgagaggagcgcttcc

SEQ ID NO: 174801 - DNA, 25 bp, Probe Sequence
cagcgacggtgggaagatgccttac

SEQ ID NO: 174802 - DNA, 25 bp, Probe Sequence
caggtagcggggacgatgccttgga

SEQ ID NO: 174803 - DNA, 25 bp, Probe Sequence
cagttccagggatagcaacttggct

SEQ ID NO: 174804 - DNA, 25 bp, Probe Sequence
cagctagccaggcaaagggggcaat

SEQ ID NO: 174805 - DNA, 25 bp, Probe Sequence
cagaaacatgttaaaggccggacaa

SEQ ID NO: 174806 - DNA, 25 bp, Probe Sequence
cagaaacacttttgggcccaacact

SEQ ID NO: 174807 - DNA, 25 bp, Probe Sequence
cagaattgagttggagtcccaaccc

SEQ ID NO: 174808 - DNA, 25 bp, Probe Sequence
cagaataggtttttcacaccacctg

SEQ ID NO: 174809 - DNA, 25 bp, Probe Sequence
cagaaagcggtgacttcacctcatg

SEQ ID NO: 174810 - DNA, 25 bp, Probe Sequence
cagaagtggttgtttcccttgcatg

SEQ ID NO: 174811 - DNA, 25 bp, Probe Sequence
cagacagaagtatcttcctttactt

SEQ ID NO: 174812 - DNA, 25 bp, Probe Sequence
cagcacggatgttactgtcctgctc

SEQ ID NO: 174813 - DNA, 25 bp, Probe Sequence
cagcccgtgctaacatgaaatgcat

SEQ ID NO: 174814 - DNA, 25 bp, Probe Sequence
cagctcctgagttcctaatgctcag

SEQ ID NO: 174815 - DNA, 25 bp, Probe Sequence
cagctcctgagttcctaatgctcag

SEQ ID NO: 174816 - DNA, 25 bp, Probe Sequence
cagctgacatcatacctaatggcga

SEQ ID NO: 174817 - DNA, 25 bp, Probe Sequence
cagcttcatcaatcgcaactacagg

SEQ ID NO: 174818 - DNA, 25 bp, Probe Sequence
cagcgtatgcacacgaactgccaaa

SEQ ID NO: 174819 - DNA, 25 bp, Probe Sequence
cagcgaagaatgccaacacctcaaa

SEQ ID NO: 174820 - DNA, 25 bp, Probe Sequence
cagcagggaagccaagcacccattc

SEQ ID NO: 174821 - DNA, 25 bp, Probe Sequence
cagctggaagatggacgcaccctgt

SEQ ID NO: 174822 - DNA, 25 bp, Probe Sequence
cagctggaagatggacgcaccctgt

SEQ ID NO: 174823 - DNA, 25 bp, Probe Sequence
cagctggaacatgtgcagccctgga

SEQ ID NO: 174824 - DNA, 25 bp, Probe Sequence
cagcgtacacagcgacctcatgtac

SEQ ID NO: 174825 - DNA, 25 bp, Probe Sequence
cagctttctcatgtgacactcatgc

SEQ ID NO: 174826 - DNA, 25 bp, Probe Sequence
cagcgcttcttgcgcacatgatccg

SEQ ID NO: 174827 - DNA, 25 bp, Probe Sequence
cagccgtctcagaagccagatacaa

SEQ ID NO: 174828 - DNA, 25 bp, Probe Sequence
cagccgtccgaaggcgagagcagga

SEQ ID NO: 174829 - DNA, 25 bp, Probe Sequence
cagccggtcaagaagcaggagcagg

SEQ ID NO: 174830 - DNA, 25 bp, Probe Sequence
cagccggtcaagaagcaggagcagg

SEQ ID NO: 174831 - DNA, 25 bp, Probe Sequence
cagcgcggtacagaccatgcacatg

SEQ ID NO: 174832 - DNA, 25 bp, Probe Sequence
cagcatgggtaatacctgcctccat

SEQ ID NO: 174833 - DNA, 25 bp, Probe Sequence
cagcagggtaaaccgatcaaccaca

SEQ ID NO: 174834 - DNA, 25 bp, Probe Sequence
caggtggtcaagcacgtacgcaggc

SEQ ID NO: 174835 - DNA, 25 bp, Probe Sequence
cagcgtgggcaacagagtaagacct

SEQ ID NO: 174836 - DNA, 25 bp, Probe Sequence
cagcaggcggctattggtaaacgct

SEQ ID NO: 174837 - DNA, 25 bp, Probe Sequence
cagctgtggaccactgcctgaaagg

SEQ ID NO: 174838 - DNA, 25 bp, Probe Sequence
cagctggtagccagctactgcccag

SEQ ID NO: 174839 - DNA, 25 bp, Probe Sequence
cagctggccagagtctgctacagcc

SEQ ID NO: 174840 - DNA, 25 bp, Probe Sequence
cagcagcgtggagttctacgcctcg

SEQ ID NO: 174841 - DNA, 25 bp, Probe Sequence
cagctggtctattttaccctgtgac

SEQ ID NO: 174842 - DNA, 25 bp, Probe Sequence
cagaacctacagataccctgctact

SEQ ID NO: 174843 - DNA, 25 bp, Probe Sequence
cagaacctatctactcgttgttgaa

SEQ ID NO: 174844 - DNA, 25 bp, Probe Sequence
cagccctcagtttatcgttggtgga

SEQ ID NO: 174845 - DNA, 25 bp, Probe Sequence
cagcccgcagtatatttttggagat

SEQ ID NO: 174846 - DNA, 25 bp, Probe Sequence
cagctaagactgggtcctttggagt

SEQ ID NO: 174847 - DNA, 25 bp, Probe Sequence
cagctagaattcactccacttggac

SEQ ID NO: 174848 - DNA, 25 bp, Probe Sequence
cagctaggaataccactgatttaga

SEQ ID NO: 174849 - DNA, 25 bp, Probe Sequence
cagctaggaaaccctgtgtgtcatg

SEQ ID NO: 174850 - DNA, 25 bp, Probe Sequence
cagaaggagctcaccattggctcga

SEQ ID NO: 174851 - DNA, 25 bp, Probe Sequence
cagctgctgggtgtccattgccata

SEQ ID NO: 174852 - DNA, 25 bp, Probe Sequence
cagcttcgagtttgcgcttgcaatt

SEQ ID NO: 174853 - DNA, 25 bp, Probe Sequence
cagctatctgcactctaaactgcaa

SEQ ID NO: 174854 - DNA, 25 bp, Probe Sequence
cagccctcttctgacactaaaacac

SEQ ID NO: 174855 - DNA, 25 bp, Probe Sequence
cagccctcttctgacactaaaacac

SEQ ID NO: 174856 - DNA, 25 bp, Probe Sequence
cagcatccacttcataattaaaaac

SEQ ID NO: 174857 - DNA, 25 bp, Probe Sequence
cagcatccagctctcagttaagaag

SEQ ID NO: 174858 - DNA, 25 bp, Probe Sequence
cagctcctccaaggctctgaaaagg

SEQ ID NO: 174859 - DNA, 25 bp, Probe Sequence
cagctcctccaaggctctgaaaagg

SEQ ID NO: 174860 - DNA, 25 bp, Probe Sequence
cagcgccacactggtgtctgaaagg

SEQ ID NO: 174861 - DNA, 25 bp, Probe Sequence
cagctggcaacacgtttgcaaaggt

SEQ ID NO: 174862 - DNA, 25 bp, Probe Sequence
cagcaggcaaacactggaaagtctg

SEQ ID NO: 174863 - DNA, 25 bp, Probe Sequence
cagcagctagagaccctgaaacgta

SEQ ID NO: 174864 - DNA, 25 bp, Probe Sequence
cagacttgaacagttggaatggtca

SEQ ID NO: 174865 - DNA, 25 bp, Probe Sequence
cagctctggagtaaatggttggctc

SEQ ID NO: 174866 - DNA, 25 bp, Probe Sequence
cagctctaggtccaattgttctgct

SEQ ID NO: 174867 - DNA, 25 bp, Probe Sequence
cagcgccagagtggagtggtggcct

SEQ ID NO: 174868 - DNA, 25 bp, Probe Sequence
cagcccattggcaatgaggctgccc

SEQ ID NO: 174869 - DNA, 25 bp, Probe Sequence
cagctgcaatggcactgcagtactc

SEQ ID NO: 174870 - DNA, 25 bp, Probe Sequence
cagcgcagagcgcacagcaagactc

SEQ ID NO: 174871 - DNA, 25 bp, Probe Sequence
cagctgatctctcggcagaaactct

SEQ ID NO: 174872 - DNA, 25 bp, Probe Sequence
cagctgtcctgcagcaaacactcca

SEQ ID NO: 174873 - DNA, 25 bp, Probe Sequence
cagcttcaccaggagtacattccat

SEQ ID NO: 174874 - DNA, 25 bp, Probe Sequence
cagctggccacaagattgaattccg

SEQ ID NO: 174875 - DNA, 25 bp, Probe Sequence
cagcgcaccagaagctaaagtcttg

SEQ ID NO: 174876 - DNA, 25 bp, Probe Sequence
cagcgccacagaactcatgaacatt

SEQ ID NO: 174877 - DNA, 25 bp, Probe Sequence
cagactgacagttttgcataattat

SEQ ID NO: 174878 - DNA, 25 bp, Probe Sequence
cagaaggtggtttgacagcatcata

SEQ ID NO: 174879 - DNA, 25 bp, Probe Sequence
cagaattcaggatcgatatgcagca

SEQ ID NO: 174880 - DNA, 25 bp, Probe Sequence
cagatatgcgggtccagtgtcaaca

SEQ ID NO: 174881 - DNA, 25 bp, Probe Sequence
cagaattggtagacatttcaaactg

SEQ ID NO: 174882 - DNA, 25 bp, Probe Sequence
cagagcctggtatgtcttcatagtc

SEQ ID NO: 174883 - DNA, 25 bp, Probe Sequence
cagcaggattttgctcttctacagc

SEQ ID NO: 174884 - DNA, 25 bp, Probe Sequence
cagcaggattttgctcttctacagc

SEQ ID NO: 174885 - DNA, 25 bp, Probe Sequence
cagcggatgtcacgagctcgttagc

SEQ ID NO: 174886 - DNA, 25 bp, Probe Sequence
cagcaggtgacaggcctagctatag

SEQ ID NO: 174887 - DNA, 25 bp, Probe Sequence
cagcagatgttcgacgccaggaaca

SEQ ID NO: 174888 - DNA, 25 bp, Probe Sequence
cagcaagcatctatgctgccagtga

SEQ ID NO: 174889 - DNA, 25 bp, Probe Sequence
cagcaacatttgggccagctaaaca

SEQ ID NO: 174890 - DNA, 25 bp, Probe Sequence
cagcaaattccatcgtgtaatcaag

SEQ ID NO: 174891 - DNA, 25 bp, Probe Sequence
cagcggaaacttgatgataacatgg

SEQ ID NO: 174892 - DNA, 25 bp, Probe Sequence
cagggagaacctgtgccaactgtgg

SEQ ID NO: 174893 - DNA, 25 bp, Probe Sequence
cagagggagaccgttctgcaagcct

SEQ ID NO: 174894 - DNA, 25 bp, Probe Sequence
cagagagggcccctttaactcttat

SEQ ID NO: 174895 - DNA, 25 bp, Probe Sequence
cagaacggcctgcatgttaattgtt

SEQ ID NO: 174896 - DNA, 25 bp, Probe Sequence
cagcaaccgctaggtttctattttt

SEQ ID NO: 174897 - DNA, 25 bp, Probe Sequence
cagaaaatctacgtattaattcatc

SEQ ID NO: 174898 - DNA, 25 bp, Probe Sequence
cagcaaagtctggcgtgatcaacat

SEQ ID NO: 174899 - DNA, 25 bp, Probe Sequence
cagcagaagcactctgcgtcgctga

SEQ ID NO: 174900 - DNA, 25 bp, Probe Sequence
cagcaaaaccctcatcagcattaca

SEQ ID NO: 174901 - DNA, 25 bp, Probe Sequence
cagcacctaccgagaagctgccaca

SEQ ID NO: 174902 - DNA, 25 bp, Probe Sequence
cagctccccccaagatgagctgcag

SEQ ID NO: 174903 - DNA, 25 bp, Probe Sequence
cagctctcattcagctagagacaga

SEQ ID NO: 174904 - DNA, 25 bp, Probe Sequence
cagccctcttcgtcaagagcagcaa

SEQ ID NO: 174905 - DNA, 25 bp, Probe Sequence
cagctaatgattcaatgcgagacaa

SEQ ID NO: 174906 - DNA, 25 bp, Probe Sequence
cagctttgtcgtcatgtagcacaaa

SEQ ID NO: 174907 - DNA, 25 bp, Probe Sequence
cagcttttttcttgctataaattga

SEQ ID NO: 174908 - DNA, 25 bp, Probe Sequence
cagctttctatttcatccctaatag

SEQ ID NO: 174909 - DNA, 25 bp, Probe Sequence
cagctcatttaatcccaggaaagag

SEQ ID NO: 174910 - DNA, 25 bp, Probe Sequence
catcacgtttgtgcccggaaattgg

SEQ ID NO: 174911 - DNA, 25 bp, Probe Sequence
catcttctttggtgcccgacaaatg

SEQ ID NO: 174912 - DNA, 25 bp, Probe Sequence
catcttctttggtgcccgacaaatg

SEQ ID NO: 174913 - DNA, 25 bp, Probe Sequence
catcttctttggtgcccgacaaatg

SEQ ID NO: 174914 - DNA, 25 bp, Probe Sequence
catctacgtaggtggtcgagcgaca

SEQ ID NO: 174915 - DNA, 25 bp, Probe Sequence
cagtagctggggcggtcgcagtaat

SEQ ID NO: 174916 - DNA, 25 bp, Probe Sequence
cagtcaggtaagcaggtcaaatata

SEQ ID NO: 174917 - DNA, 25 bp, Probe Sequence
cagatagtgaaaggcctgaaatata

SEQ ID NO: 174918 - DNA, 25 bp, Probe Sequence
cagctatgtggaggccctacacagt

SEQ ID NO: 174919 - DNA, 25 bp, Probe Sequence
cagctgagggaaactctcctgcagg

SEQ ID NO: 174920 - DNA, 25 bp, Probe Sequence
cagcgagtggaagttcgccgcctgt

SEQ ID NO: 174921 - DNA, 25 bp, Probe Sequence
cagcaggcgcgcaaattacccactc

SEQ ID NO: 174922 - DNA, 25 bp, Probe Sequence
cagagagcggaagtgcccggaaccc

SEQ ID NO: 174923 - DNA, 25 bp, Probe Sequence
cagatacgatgagatccgccgtcac

SEQ ID NO: 174924 - DNA, 25 bp, Probe Sequence
cagatacgatgagatccgccgtcac

SEQ ID NO: 174925 - DNA, 25 bp, Probe Sequence
cagaacctgaatgacgcctacggac

SEQ ID NO: 174926 - DNA, 25 bp, Probe Sequence
cagaagccttgagagctggcatcaa

SEQ ID NO: 174927 - DNA, 25 bp, Probe Sequence
cagcacacagtatgacctgtccaag

SEQ ID NO: 174928 - DNA, 25 bp, Probe Sequence
cagcgccatgctgaggcgcttcctg

SEQ ID NO: 174929 - DNA, 25 bp, Probe Sequence
cagcccatgccatggcggattctga

SEQ ID NO: 174930 - DNA, 25 bp, Probe Sequence
cagctgaagccaacaagagttctga

SEQ ID NO: 174931 - DNA, 25 bp, Probe Sequence
cagctgcataccagcagagcctgac

SEQ ID NO: 174932 - DNA, 25 bp, Probe Sequence
cagcattattctagcagcatccatt

SEQ ID NO: 174933 - DNA, 25 bp, Probe Sequence
cagctctagctttgcagtcgtgtaa

SEQ ID NO: 174934 - DNA, 25 bp, Probe Sequence
cagctacatcctactgtgcgtgtat

SEQ ID NO: 174935 - DNA, 25 bp, Probe Sequence
cagcgacttttattgcagatgtctt

SEQ ID NO: 174936 - DNA, 25 bp, Probe Sequence
cagcgactttttatcattcattttc

SEQ ID NO: 174937 - DNA, 25 bp, Probe Sequence
cagctgtgtttttctgtcagatttt

SEQ ID NO: 174938 - DNA, 25 bp, Probe Sequence
cagctggtatttgggtgaatgttgt

SEQ ID NO: 174939 - DNA, 25 bp, Probe Sequence
cagctgtgtacttgagtctttttta

SEQ ID NO: 174940 - DNA, 25 bp, Probe Sequence
cagctgcttacattttttctttcat

SEQ ID NO: 174941 - DNA, 25 bp, Probe Sequence
cagctgcttacatgttcatctcttg

SEQ ID NO: 174942 - DNA, 25 bp, Probe Sequence
cagcttctgacaggtccttcaggaa

SEQ ID NO: 174943 - DNA, 25 bp, Probe Sequence
cagttctacactgttggggaaaatc

SEQ ID NO: 174944 - DNA, 25 bp, Probe Sequence
cagcttttacattttggggaaccat

SEQ ID NO: 174945 - DNA, 25 bp, Probe Sequence
cagcttgatatgtatgctgttggag

SEQ ID NO: 174946 - DNA, 25 bp, Probe Sequence
cagctcgtgacattctgattcgaat

SEQ ID NO: 174947 - DNA, 25 bp, Probe Sequence
cagcgagaactcagatggcgacatg

SEQ ID NO: 174948 - DNA, 25 bp, Probe Sequence
cagcttggcactcaggtgctgaagg

SEQ ID NO: 174949 - DNA, 25 bp, Probe Sequence
cagcttggccatttgaggcaaaggc

SEQ ID NO: 174950 - DNA, 25 bp, Probe Sequence
cagctagcagccactgggaatcaga

SEQ ID NO: 174951 - DNA, 25 bp, Probe Sequence
cagctatggccccagggttgaaaag

SEQ ID NO: 174952 - DNA, 25 bp, Probe Sequence
cagcatcatggcccacgagctgttg

SEQ ID NO: 174953 - DNA, 25 bp, Probe Sequence
cagctagggccagtgacagttgcag

SEQ ID NO: 174954 - DNA, 25 bp, Probe Sequence
cagcttggtgtagacagtctgaaca

SEQ ID NO: 174955 - DNA, 25 bp, Probe Sequence
cagctggggctctagaagtcagaga

SEQ ID NO: 174956 - DNA, 25 bp, Probe Sequence
cagcgtgcgtcctgatgaggatgtg

SEQ ID NO: 174957 - DNA, 25 bp, Probe Sequence
cagctcacggccttgtgtgtatgtg

SEQ ID NO: 174958 - DNA, 25 bp, Probe Sequence
cagctcatccctgatggctgtgggg

SEQ ID NO: 174959 - DNA, 25 bp, Probe Sequence
cagctagcacctgagagctgggcct

SEQ ID NO: 174960 - DNA, 25 bp, Probe Sequence
cagcttcttgctggagcaggggagc

SEQ ID NO: 174961 - DNA, 25 bp, Probe Sequence
cagcgtctatggcatgtgtgtggac

SEQ ID NO: 174962 - DNA, 25 bp, Probe Sequence
cagctgccagggcctgtggaggaca

SEQ ID NO: 174963 - DNA, 25 bp, Probe Sequence
cagataaggcagctaagggcacagt

SEQ ID NO: 174964 - DNA, 25 bp, Probe Sequence
cagagaaggcagctacggctactcc

SEQ ID NO: 174965 - DNA, 25 bp, Probe Sequence
cagagcagtggctaaattgcagtag

SEQ ID NO: 174966 - DNA, 25 bp, Probe Sequence
cagagcgcgagctcaatcaggccgg

SEQ ID NO: 174967 - DNA, 25 bp, Probe Sequence
cagcaccgagctggagactggcagt

SEQ ID NO: 174968 - DNA, 25 bp, Probe Sequence
cagcagggcagcagtgaaccagttg

SEQ ID NO: 174969 - DNA, 25 bp, Probe Sequence
cagcaaggacggccaggacggtgct

SEQ ID NO: 174970 - DNA, 25 bp, Probe Sequence
cagcagggactggtgcaaatgggtc

SEQ ID NO: 174971 - DNA, 25 bp, Probe Sequence
cagcagctggacatggggaggcgac

SEQ ID NO: 174972 - DNA, 25 bp, Probe Sequence
cagcagcggtatgttgggccagagc

SEQ ID NO: 174973 - DNA, 25 bp, Probe Sequence
cagcagtggtcaaagtgcccctgaa

SEQ ID NO: 174974 - DNA, 25 bp, Probe Sequence
cagcagtggtctttgaagcacctgt

SEQ ID NO: 174975 - DNA, 25 bp, Probe Sequence
cagaatgtatcccagaaggactgca

SEQ ID NO: 174976 - DNA, 25 bp, Probe Sequence
cagaagtcactatgaatgtgtgcat

SEQ ID NO: 174977 - DNA, 25 bp, Probe Sequence
cagaagacagcttagaagtccaagg

SEQ ID NO: 174978 - DNA, 25 bp, Probe Sequence
cagcagagagccaggaggtccaacc

SEQ ID NO: 174979 - DNA, 25 bp, Probe Sequence
cagataactatcggggctctgcacc

SEQ ID NO: 174980 - DNA, 25 bp, Probe Sequence
cagcatcaagcgggtgctggccatc

SEQ ID NO: 174981 - DNA, 25 bp, Probe Sequence
cagcatcaacccctatggcatgcat

SEQ ID NO: 174982 - DNA, 25 bp, Probe Sequence
cagcatcgtcttcttgcacatgaag

SEQ ID NO: 174983 - DNA, 25 bp, Probe Sequence
cagcatggacttcttggtgaagtga

SEQ ID NO: 174984 - DNA, 25 bp, Probe Sequence
cagcatggagttcccgtgggtggtg

SEQ ID NO: 174985 - DNA, 25 bp, Probe Sequence
cagcagggcttacctgtggtgatgc

SEQ ID NO: 174986 - DNA, 25 bp, Probe Sequence
cagcgatggctactacgtggcgctg

SEQ ID NO: 174987 - DNA, 25 bp, Probe Sequence
cagcgattgcaactggcctggccgc

SEQ ID NO: 174988 - DNA, 25 bp, Probe Sequence
cagcatattgtactggcctgctgct

SEQ ID NO: 174989 - DNA, 25 bp, Probe Sequence
cagctcattgtacagcctcaaacca

SEQ ID NO: 174990 - DNA, 25 bp, Probe Sequence
cagcatttggaggcacctgcagacc

SEQ ID NO: 174991 - DNA, 25 bp, Probe Sequence
cagcaagtggtggaccaggccacag

SEQ ID NO: 174992 - DNA, 25 bp, Probe Sequence
cagaaggtggacttctggcgtggcc

SEQ ID NO: 174993 - DNA, 25 bp, Probe Sequence
cagaaagtggcttttgttgctgcgc

SEQ ID NO: 174994 - DNA, 25 bp, Probe Sequence
cagaagctggcagaatttattggga

SEQ ID NO: 174995 - DNA, 25 bp, Probe Sequence
cagaagcagccagatttccaatgtt

SEQ ID NO: 174996 - DNA, 25 bp, Probe Sequence
cagaagtccggggagccttgtttgg

SEQ ID NO: 174997 - DNA, 25 bp, Probe Sequence
cagagggtcgggcaggttgacatat

SEQ ID NO: 174998 - DNA, 25 bp, Probe Sequence
cagactggttggcacgtttacaatg

SEQ ID NO: 174999 - DNA, 25 bp, Probe Sequence
cagcaaggttggcatggattacaga

SEQ ID NO: 175000 - DNA, 25 bp, Probe Sequence
cagcaatgctgtttcactggttatg

SEQ ID NO: 175001 - DNA, 25 bp, Probe Sequence
cagcagtgttgactgccgggctatc

SEQ ID NO: 175002 - DNA, 25 bp, Probe Sequence
cagcggttcctgtgcagatgctgct

SEQ ID NO: 175003 - DNA, 25 bp, Probe Sequence
cagcagcagttggcgtggatgtcct

SEQ ID NO: 175004 - DNA, 25 bp, Probe Sequence
cagcaggagaggccagtgcagttct

SEQ ID NO: 175005 - DNA, 25 bp, Probe Sequence
cagcaagaatgctctggcactcttt

SEQ ID NO: 175006 - DNA, 25 bp, Probe Sequence
cagcactatccaacaggaccttctg

SEQ ID NO: 175007 - DNA, 25 bp, Probe Sequence
cagcaaatctacaagagaccctggt

SEQ ID NO: 175008 - DNA, 25 bp, Probe Sequence
cagcaacaaacaatacacccaggta

SEQ ID NO: 175009 - DNA, 25 bp, Probe Sequence
cagaaccaagatgggccccaggctc

SEQ ID NO: 175010 - DNA, 25 bp, Probe Sequence
cagaagctaaactccctgagactcc

SEQ ID NO: 175011 - DNA, 25 bp, Probe Sequence
cagaagccaaactaacttgcagaat

SEQ ID NO: 175012 - DNA, 25 bp, Probe Sequence
cagaagactaaagatacatgacaac

SEQ ID NO: 175013 - DNA, 25 bp, Probe Sequence
cagacaagcaacccaaactgaaccc

SEQ ID NO: 175014 - DNA, 25 bp, Probe Sequence
cagagcatactgttccaaactaccc

SEQ ID NO: 175015 - DNA, 25 bp, Probe Sequence
cagcagctcactgctacaagacccg

SEQ ID NO: 175016 - DNA, 25 bp, Probe Sequence
cagcaggcctccaacttggacctgc

SEQ ID NO: 175017 - DNA, 25 bp, Probe Sequence
cagcaggcgtcagaggcggacgccg

SEQ ID NO: 175018 - DNA, 25 bp, Probe Sequence
cagctgacgtacctgagcatggacg

SEQ ID NO: 175019 - DNA, 25 bp, Probe Sequence
cagcttgtgcccctgagatgagacg

SEQ ID NO: 175020 - DNA, 25 bp, Probe Sequence
tcttaggcggtgcatgaccacgcag

SEQ ID NO: 175021 - DNA, 25 bp, Probe Sequence
cagcatcgggccacagagcgaagga

SEQ ID NO: 175022 - DNA, 25 bp, Probe Sequence
cagcatgtggaggcttggatggaaa

SEQ ID NO: 175023 - DNA, 25 bp, Probe Sequence
cagctgatgccaacattgatgcatg

SEQ ID NO: 175024 - DNA, 25 bp, Probe Sequence
cagctcatcgcaagagtagcagcag

SEQ ID NO: 175025 - DNA, 25 bp, Probe Sequence
cagctctggcagaactagacagcgt

SEQ ID NO: 175026 - DNA, 25 bp, Probe Sequence
cagctcaatgcacaagaacagagga

SEQ ID NO: 175027 - DNA, 25 bp, Probe Sequence
cagcatcaacagcacagacagcgag

SEQ ID NO: 175028 - DNA, 25 bp, Probe Sequence
cagctagagcagggcagccacacag

SEQ ID NO: 175029 - DNA, 25 bp, Probe Sequence
cagctgaggatgggcctagcagatg

SEQ ID NO: 175030 - DNA, 25 bp, Probe Sequence
cagctcatgaatggccccatcagaa

SEQ ID NO: 175031 - DNA, 25 bp, Probe Sequence
cagctcataagagtctcaatggagt

SEQ ID NO: 175032 - DNA, 25 bp, Probe Sequence
cagttacggcctggatgccagtcgc

SEQ ID NO: 175033 - DNA, 25 bp, Probe Sequence
cagcttccggctggtagtagttccg

SEQ ID NO: 175034 - DNA, 25 bp, Probe Sequence
cagcaagacggtgtatggggaccag

SEQ ID NO: 175035 - DNA, 25 bp, Probe Sequence
cagcaaagtcctcattggtggcaac

SEQ ID NO: 175036 - DNA, 25 bp, Probe Sequence
cagaaggattcctatgtgggcgacg

SEQ ID NO: 175037 - DNA, 25 bp, Probe Sequence
cagcaaggaacccaggtcgagatgg

SEQ ID NO: 175038 - DNA, 25 bp, Probe Sequence
cagctaggaaccctttggaggacag

SEQ ID NO: 175039 - DNA, 25 bp, Probe Sequence
cagctcagaggcacctgtgtggagg

SEQ ID NO: 175040 - DNA, 25 bp, Probe Sequence
cagcatcagttcatcgagtgaggaa

SEQ ID NO: 175041 - DNA, 25 bp, Probe Sequence
cagcacgtgctcttgccagtgctgg

SEQ ID NO: 175042 - DNA, 25 bp, Probe Sequence
cagactttcctgccagtgtcagaaa

SEQ ID NO: 175043 - DNA, 25 bp, Probe Sequence
cagctgcctgtctggagttcaagtg

SEQ ID NO: 175044 - DNA, 25 bp, Probe Sequence
cagaacgctcttgaaacaagtaatg

SEQ ID NO: 175045 - DNA, 25 bp, Probe Sequence
cagagacctttgtaaccaatggaat

SEQ ID NO: 175046 - DNA, 25 bp, Probe Sequence
cagaaattttgaagccagaaggaca

SEQ ID NO: 175047 - DNA, 25 bp, Probe Sequence
cagaagatttcttcccgtggtgggt

SEQ ID NO: 175048 - DNA, 25 bp, Probe Sequence
cagcagaagtccagcgggggtggga

SEQ ID NO: 175049 - DNA, 25 bp, Probe Sequence
caggagctgtcctgggactttggga

SEQ ID NO: 175050 - DNA, 25 bp, Probe Sequence
cagtgatctttctgggccttttgag

SEQ ID NO: 175051 - DNA, 25 bp, Probe Sequence
cagctcattttctcagttttttggt

SEQ ID NO: 175052 - DNA, 25 bp, Probe Sequence
cagctgattcttgacagatttagtc

SEQ ID NO: 175053 - DNA, 25 bp, Probe Sequence
cagaatctcctctacagatttttgc

SEQ ID NO: 175054 - DNA, 25 bp, Probe Sequence
cagaatccttaccagtttgatgtgc

SEQ ID NO: 175055 - DNA, 25 bp, Probe Sequence
cagaatgatagtccaagttctattg

SEQ ID NO: 175056 - DNA, 25 bp, Probe Sequence
cagcaatgtgagtattatttggagt

SEQ ID NO: 175057 - DNA, 25 bp, Probe Sequence
cagctggtgcagatgttcattggag

SEQ ID NO: 175058 - DNA, 25 bp, Probe Sequence
catattagcagcggttattcggtga

SEQ ID NO: 175059 - DNA, 25 bp, Probe Sequence
cagctctcagcagggctttggggat

SEQ ID NO: 175060 - DNA, 25 bp, Probe Sequence
cagctctgcaagtagtttagtagga

SEQ ID NO: 175061 - DNA, 25 bp, Probe Sequence
cagctgacaagctatgtgtgtagta

SEQ ID NO: 175062 - DNA, 25 bp, Probe Sequence
cagctgaacatgtcttcctgagtca

SEQ ID NO: 175063 - DNA, 25 bp, Probe Sequence
cagctgagacacttcccaagctgct

SEQ ID NO: 175064 - DNA, 25 bp, Probe Sequence
cagctgtgacaggcccttagctgct

SEQ ID NO: 175065 - DNA, 25 bp, Probe Sequence
cagcaggagagagccttcacgctgg

SEQ ID NO: 175066 - DNA, 25 bp, Probe Sequence
cagaagaagaaattccacgggtact

SEQ ID NO: 175067 - DNA, 25 bp, Probe Sequence
cagaatgaaccagaccagggaggcc

SEQ ID NO: 175068 - DNA, 25 bp, Probe Sequence
cagcaaatcccctcaaagccagggc

SEQ ID NO: 175069 - DNA, 25 bp, Probe Sequence
cagaaatgcccagtaatcacctcag

SEQ ID NO: 175070 - DNA, 25 bp, Probe Sequence
cagcagatgattgctaattccttga

SEQ ID NO: 175071 - DNA, 25 bp, Probe Sequence
cagcatggaacctgcatttcataga

SEQ ID NO: 175072 - DNA, 25 bp, Probe Sequence
cagcatggaactgatgcttttctca

SEQ ID NO: 175073 - DNA, 25 bp, Probe Sequence
cagcagagcagaatagtgtttgtct

SEQ ID NO: 175074 - DNA, 25 bp, Probe Sequence
cagcagacaacaagcaattctattt

SEQ ID NO: 175075 - DNA, 25 bp, Probe Sequence
cagcagccacatttgcaaccttggc

SEQ ID NO: 175076 - DNA, 25 bp, Probe Sequence
cagcagctacatttacacatctagc

SEQ ID NO: 175077 - DNA, 25 bp, Probe Sequence
cagctgctcaggagtcatgcttagg

SEQ ID NO: 175078 - DNA, 25 bp, Probe Sequence
cagctgctcaggaggctgaggcagg

SEQ ID NO: 175079 - DNA, 25 bp, Probe Sequence
cagctctactgacgggagctgcact

SEQ ID NO: 175080 - DNA, 25 bp, Probe Sequence
cagcattactgactgcttatgtatc

SEQ ID NO: 175081 - DNA, 25 bp, Probe Sequence
cagcatatcctgagtcatttgacca

SEQ ID NO: 175082 - DNA, 25 bp, Probe Sequence
cagcataccatgttacagttcccac

SEQ ID NO: 175083 - DNA, 25 bp, Probe Sequence
cagcacagatattcgaatgtttcca

SEQ ID NO: 175084 - DNA, 25 bp, Probe Sequence
cagctgcaggattctggcattttgc

SEQ ID NO: 175085 - DNA, 25 bp, Probe Sequence
cagtatagtatatgcatgctcaggc

SEQ ID NO: 175086 - DNA, 25 bp, Probe Sequence
cagcttagacatcatctctcaacct

SEQ ID NO: 175087 - DNA, 25 bp, Probe Sequence
cagcttcagccatgtctctacaagc

SEQ ID NO: 175088 - DNA, 25 bp, Probe Sequence
cagcttccatacctgttcagcaagc

SEQ ID NO: 175089 - DNA, 25 bp, Probe Sequence
cagcagacctagccatgggcacaag

SEQ ID NO: 175090 - DNA, 25 bp, Probe Sequence
cagcaggcctgcattgaggccaagc

SEQ ID NO: 175091 - DNA, 25 bp, Probe Sequence
cagaggttactgaagagcaatagcc

SEQ ID NO: 175092 - DNA, 25 bp, Probe Sequence
cagaaggaagccagcagccaagccg

SEQ ID NO: 175093 - DNA, 25 bp, Probe Sequence
cagaactgaagcgctgcggcatggc

SEQ ID NO: 175094 - DNA, 25 bp, Probe Sequence
cagaacgtggtttgcctgaggctgt

SEQ ID NO: 175095 - DNA, 25 bp, Probe Sequence
cagaacgtggtttgcctgaggctgt

SEQ ID NO: 175096 - DNA, 25 bp, Probe Sequence
cagcaactctggaaacctggcctga

SEQ ID NO: 175097 - DNA, 25 bp, Probe Sequence
cagaacctgaacgacctgatgctgc

SEQ ID NO: 175098 - DNA, 25 bp, Probe Sequence
cagacagtcatgttcaaccgaccct

SEQ ID NO: 175099 - DNA, 25 bp, Probe Sequence
cagtaccggtgcaacggcaccagct

SEQ ID NO: 175100 - DNA, 25 bp, Probe Sequence
cagcaacgttggaacggccatcagc

SEQ ID NO: 175101 - DNA, 25 bp, Probe Sequence
cagcaccattgtttactgaccagcc

SEQ ID NO: 175102 - DNA, 25 bp, Probe Sequence
cagctctgtaaactaccactcagcc

SEQ ID NO: 175103 - DNA, 25 bp, Probe Sequence
cagctctgacaatctcaatcactcc

SEQ ID NO: 175104 - DNA, 25 bp, Probe Sequence
cagcacagaaattctcaatcactga

SEQ ID NO: 175105 - DNA, 25 bp, Probe Sequence
cagcaggagttcgtcagagctctgg

SEQ ID NO: 175106 - DNA, 25 bp, Probe Sequence
cagcagccggcagccaagatctgag

SEQ ID NO: 175107 - DNA, 25 bp, Probe Sequence
cagactccagcagccaagatggtga

SEQ ID NO: 175108 - DNA, 25 bp, Probe Sequence
cagactctacatgtaggatggtaac

SEQ ID NO: 175109 - DNA, 25 bp, Probe Sequence
cagcaccatcctggaaggttattac

SEQ ID NO: 175110 - DNA, 25 bp, Probe Sequence
cagcacaactgcaagaatggatttt

SEQ ID NO: 175111 - DNA, 25 bp, Probe Sequence
cagcatccctctacaaggtgcattt

SEQ ID NO: 175112 - DNA, 25 bp, Probe Sequence
cagcaagccttccaacagctggttc

SEQ ID NO: 175113 - DNA, 25 bp, Probe Sequence
cagcaacgcttgtagaactcactct

SEQ ID NO: 175114 - DNA, 25 bp, Probe Sequence
cagcagcaagcattatacggtcatc

SEQ ID NO: 175115 - DNA, 25 bp, Probe Sequence
cagcacagcagctcatgcctgtaat

SEQ ID NO: 175116 - DNA, 25 bp, Probe Sequence
cagcatatgcagcccgtgctaacat

SEQ ID NO: 175117 - DNA, 25 bp, Probe Sequence
cagcagcatctggccaatgccaagt

SEQ ID NO: 175118 - DNA, 25 bp, Probe Sequence
cagctctgctgcttcaacaacagtg

SEQ ID NO: 175119 - DNA, 25 bp, Probe Sequence
cagcttcagcttaactgacagatgt

SEQ ID NO: 175120 - DNA, 25 bp, Probe Sequence
cagctctggttttctaggagctatg

SEQ ID NO: 175121 - DNA, 25 bp, Probe Sequence
cagctcttggaaactaatacattgt

SEQ ID NO: 175122 - DNA, 25 bp, Probe Sequence
cagtctcggaaacacagagccagga

SEQ ID NO: 175123 - DNA, 25 bp, Probe Sequence
cgaatcccaaatcaggagccttccc

SEQ ID NO: 175124 - DNA, 25 bp, Probe Sequence
cagaaccccaggcagtagacttcct

SEQ ID NO: 175125 - DNA, 25 bp, Probe Sequence
cagaccctccgggttcaaaatcctg

SEQ ID NO: 175126 - DNA, 25 bp, Probe Sequence
cgacggcaccgtgttcgaaatcgtg

SEQ ID NO: 175127 - DNA, 25 bp, Probe Sequence
cagagcgtcaacaggttcctacacg

SEQ ID NO: 175128 - DNA, 25 bp, Probe Sequence
cagagcatccggaggttcacaacct

SEQ ID NO: 175129 - DNA, 25 bp, Probe Sequence
cagaatccgagtgatgctgtacccc

SEQ ID NO: 175130 - DNA, 25 bp, Probe Sequence
cagaatccgagtgatgctgtacccc

SEQ ID NO: 175131 - DNA, 25 bp, Probe Sequence
cagaatcgggggactggaccaccca

SEQ ID NO: 175132 - DNA, 25 bp, Probe Sequence
cagcaacgtggtcttggacacaacc

SEQ ID NO: 175133 - DNA, 25 bp, Probe Sequence
cagcaacgtggtcttggacacaacc

SEQ ID NO: 175134 - DNA, 25 bp, Probe Sequence
cagcagacggggctatgcccagctt

SEQ ID NO: 175135 - DNA, 25 bp, Probe Sequence
cagcagttggcgtggatgtcctgcg

SEQ ID NO: 175136 - DNA, 25 bp, Probe Sequence
cagagtgatggggcgagactccatc

SEQ ID NO: 175137 - DNA, 25 bp, Probe Sequence
cagcactctgggaatcagagctcca

SEQ ID NO: 175138 - DNA, 25 bp, Probe Sequence
cagcacctgggggatgtcctgaatt

SEQ ID NO: 175139 - DNA, 25 bp, Probe Sequence
cagcaggctcagcagtgttgactgc

SEQ ID NO: 175140 - DNA, 25 bp, Probe Sequence
cagcaggtgcatcgccagcatttcg

SEQ ID NO: 175141 - DNA, 25 bp, Probe Sequence
cagctgctggtggatcagatatacg

SEQ ID NO: 175142 - DNA, 25 bp, Probe Sequence
cagctgctggtggccataaacagta

SEQ ID NO: 175143 - DNA, 25 bp, Probe Sequence
cagacggtgacataacacaggaagg

SEQ ID NO: 175144 - DNA, 25 bp, Probe Sequence
cagaacagtgcctgtgacaccggag

SEQ ID NO: 175145 - DNA, 25 bp, Probe Sequence
cagagacctctacaatcacctggag

SEQ ID NO: 175146 - DNA, 25 bp, Probe Sequence
cagagttccgacagaacctgggccg

SEQ ID NO: 175147 - DNA, 25 bp, Probe Sequence
gcagaggtccaagtaaaccgctagc

SEQ ID NO: 175148 - DNA, 25 bp, Probe Sequence
cagaagttcctctaggtctcgtagc

SEQ ID NO: 175149 - DNA, 25 bp, Probe Sequence
cagaagttcctctaggtctcgtagc

SEQ ID NO: 175150 - DNA, 25 bp, Probe Sequence
cagaagttcctctaggtctcgtagc

SEQ ID NO: 175151 - DNA, 25 bp, Probe Sequence
cagaattccttccaggttcgtaaat

SEQ ID NO: 175152 - DNA, 25 bp, Probe Sequence
cagaagttttccatcttcccaaatt

SEQ ID NO: 175153 - DNA, 25 bp, Probe Sequence
cagaagtccactaaagttcaccaaa

SEQ ID NO: 175154 - DNA, 25 bp, Probe Sequence
cagaattcccgtactgattagtcaa

SEQ ID NO: 175155 - DNA, 25 bp, Probe Sequence
cagaaaccgagatataaaacagcag

SEQ ID NO: 175156 - DNA, 25 bp, Probe Sequence
cagagaaccggaccctaatcaaacg

SEQ ID NO: 175157 - DNA, 25 bp, Probe Sequence
cagcaagagacgtcaccctagaaaa

SEQ ID NO: 175158 - DNA, 25 bp, Probe Sequence
cagcagaagcaagcacttctagcca

SEQ ID NO: 175159 - DNA, 25 bp, Probe Sequence
cagacaaaaccagtgtcaggccttt

SEQ ID NO: 175160 - DNA, 25 bp, Probe Sequence
cagaaaacaagaagtcatacctttt

SEQ ID NO: 175161 - DNA, 25 bp, Probe Sequence
cagctcaaacagaaggtcatgaccc

SEQ ID NO: 175162 - DNA, 25 bp, Probe Sequence
cagctcttcaacaagtttgcactgc

SEQ ID NO: 175163 - DNA, 25 bp, Probe Sequence
cagcagcctggaccagatgttccgc

SEQ ID NO: 175164 - DNA, 25 bp, Probe Sequence
cagcagtgcttacatcaaatccagc

SEQ ID NO: 175165 - DNA, 25 bp, Probe Sequence
cagcaatgtccgcatcaacttgcag

SEQ ID NO: 175166 - DNA, 25 bp, Probe Sequence
cagcagaacctgaacgacctgatgc

SEQ ID NO: 175167 - DNA, 25 bp, Probe Sequence
cagagtcagcccagtgacttgcatg

SEQ ID NO: 175168 - DNA, 25 bp, Probe Sequence
cagaccaccatatgttctttgacta

SEQ ID NO: 175169 - DNA, 25 bp, Probe Sequence
cagcaccaaatgattccctggttat

SEQ ID NO: 175170 - DNA, 25 bp, Probe Sequence
cagaccagttttaggactggtaatc

SEQ ID NO: 175171 - DNA, 25 bp, Probe Sequence
cagaccaggtggaattacttaaatt

SEQ ID NO: 175172 - DNA, 25 bp, Probe Sequence
cagcacacagggctatttctccaat

SEQ ID NO: 175173 - DNA, 25 bp, Probe Sequence
cagcagcccggggtattcctatagg

SEQ ID NO: 175174 - DNA, 25 bp, Probe Sequence
cagcagaatttgggtttctgtaaag

SEQ ID NO: 175175 - DNA, 25 bp, Probe Sequence
cagaaagattggccttgtccttaag

SEQ ID NO: 175176 - DNA, 25 bp, Probe Sequence
cagaagtatcttcctttactttcat

SEQ ID NO: 175177 - DNA, 25 bp, Probe Sequence
cagacagtatacccaaacttttata

SEQ ID NO: 175178 - DNA, 25 bp, Probe Sequence
cagacaggtccgtcaaaatctttga

SEQ ID NO: 175179 - DNA, 25 bp, Probe Sequence
cagacttggctcctctaaacatttg

SEQ ID NO: 175180 - DNA, 25 bp, Probe Sequence
cagaattcctccatagcaggctgtt

SEQ ID NO: 175181 - DNA, 25 bp, Probe Sequence
cagcacacccatccaggtgcaatgc

SEQ ID NO: 175182 - DNA, 25 bp, Probe Sequence
cagcagtcctgccttggatgcagag

SEQ ID NO: 175183 - DNA, 25 bp, Probe Sequence
cagcagctccttactgcacaaaggg

SEQ ID NO: 175184 - DNA, 25 bp, Probe Sequence
cagcagcggctcaggacaaagggca

SEQ ID NO: 175185 - DNA, 25 bp, Probe Sequence
cagcagctagccaggcaaagggggc

SEQ ID NO: 175186 - DNA, 25 bp, Probe Sequence
cagcagccacacagacatagactgg

SEQ ID NO: 175187 - DNA, 25 bp, Probe Sequence
cagcagtctcagacggcctactgag

SEQ ID NO: 175188 - DNA, 25 bp, Probe Sequence
cagcatcttcagaacgctcaacatg

SEQ ID NO: 175189 - DNA, 25 bp, Probe Sequence
cagcatgtgccaatgactgtcacct

SEQ ID NO: 175190 - DNA, 25 bp, Probe Sequence
cagcatatgctcaatggggagccat

SEQ ID NO: 175191 - DNA, 25 bp, Probe Sequence
cagcatgcatccaaggccagagctc

SEQ ID NO: 175192 - DNA, 25 bp, Probe Sequence
cagcagtcactggggatgcgctgcc

SEQ ID NO: 175193 - DNA, 25 bp, Probe Sequence
cagaatgcctgcaaggatgccctgc

SEQ ID NO: 175194 - DNA, 25 bp, Probe Sequence
cagcatgtcctcaatgaacggtgcg

SEQ ID NO: 175195 - DNA, 25 bp, Probe Sequence
cagcagctttcagtgatgtccgtgc

SEQ ID NO: 175196 - DNA, 25 bp, Probe Sequence
cagaagcttgcagtgatcccagatc

SEQ ID NO: 175197 - DNA, 25 bp, Probe Sequence
cagaacatccaggagacccatcggc

SEQ ID NO: 175198 - DNA, 25 bp, Probe Sequence
cagagacacacaagagcaccaaagc

SEQ ID NO: 175199 - DNA, 25 bp, Probe Sequence
cagagacggtcatgcaagaaagcag

SEQ ID NO: 175200 - DNA, 25 bp, Probe Sequence
cagcatccggcgcagccggaagcgc

SEQ ID NO: 175201 - DNA, 25 bp, Probe Sequence
cagactgaggtctaccgaggggctc

SEQ ID NO: 175202 - DNA, 25 bp, Probe Sequence
cagaggccctgatccgagaggtggc

SEQ ID NO: 175203 - DNA, 25 bp, Probe Sequence
cagaagtctctctgggcaggtgtag

SEQ ID NO: 175204 - DNA, 25 bp, Probe Sequence
cagctttcatctttgtggatggtgt

SEQ ID NO: 175205 - DNA, 25 bp, Probe Sequence
cagcacccatgcatgcttggagggt

SEQ ID NO: 175206 - DNA, 25 bp, Probe Sequence
cagcacgcctgctttgtggggcagg

SEQ ID NO: 175207 - DNA, 25 bp, Probe Sequence
cagacgccgaggatggtgctcatgg

SEQ ID NO: 175208 - DNA, 25 bp, Probe Sequence
cagcacgccttggattagctttgca

SEQ ID NO: 175209 - DNA, 25 bp, Probe Sequence
cagactacactgcttacgttgccat

SEQ ID NO: 175210 - DNA, 25 bp, Probe Sequence
cagaccaagggctcacagtctgcgt

SEQ ID NO: 175211 - DNA, 25 bp, Probe Sequence
cagacccaggtcttcaagctgggct

SEQ ID NO: 175212 - DNA, 25 bp, Probe Sequence
cagagccctggaacaaactgggtcc

SEQ ID NO: 175213 - DNA, 25 bp, Probe Sequence
caggctctacgagaagcggggtcag

SEQ ID NO: 175214 - DNA, 25 bp, Probe Sequence
cagcagcttacgcaaacagaacctt

SEQ ID NO: 175215 - DNA, 25 bp, Probe Sequence
cagactaagaggaaacaaagcgttc

SEQ ID NO: 175216 - DNA, 25 bp, Probe Sequence
cagactcaagagaaactacccaggt

SEQ ID NO: 175217 - DNA, 25 bp, Probe Sequence
cagatctacgagataaccccaagtt

SEQ ID NO: 175218 - DNA, 25 bp, Probe Sequence
cagaatttaggttcctgccctgttt

SEQ ID NO: 175219 - DNA, 25 bp, Probe Sequence
cagaatgttatccttacgtcctgag

SEQ ID NO: 175220 - DNA, 25 bp, Probe Sequence
cagaatttttgcatccatgttcata

SEQ ID NO: 175221 - DNA, 25 bp, Probe Sequence
cagaatctgttgtccttaattatat

SEQ ID NO: 175222 - DNA, 25 bp, Probe Sequence
cagacagtttgatattaatgctata

SEQ ID NO: 175223 - DNA, 25 bp, Probe Sequence
cagcatcctttatctgtgacttcat

SEQ ID NO: 175224 - DNA, 25 bp, Probe Sequence
cagcaccttcttttgagacattagc

SEQ ID NO: 175225 - DNA, 25 bp, Probe Sequence
cagagccttgcttataacagtggag

SEQ ID NO: 175226 - DNA, 25 bp, Probe Sequence
cagcaccatggcactgcaacaggcc

SEQ ID NO: 175227 - DNA, 25 bp, Probe Sequence
cagcaactggaaggaacggatgggc

SEQ ID NO: 175228 - DNA, 25 bp, Probe Sequence
cagcacactgagaggccaaggtggg

SEQ ID NO: 175229 - DNA, 25 bp, Probe Sequence
cagcaggggtcggccaactgatggc

SEQ ID NO: 175230 - DNA, 25 bp, Probe Sequence
cagcatgacctgtgaccagcactgt

SEQ ID NO: 175231 - DNA, 25 bp, Probe Sequence
cagcagagttgatgcagctagcctg

SEQ ID NO: 175232 - DNA, 25 bp, Probe Sequence
cagcagagttgatgcagctagcctg

SEQ ID NO: 175233 - DNA, 25 bp, Probe Sequence
cagcagagttgatgcagctagcctg

SEQ ID NO: 175234 - DNA, 25 bp, Probe Sequence
cagcaatttagccctatgcctgtgg

SEQ ID NO: 175235 - DNA, 25 bp, Probe Sequence
cagcacacctaaactcagtctggcc

SEQ ID NO: 175236 - DNA, 25 bp, Probe Sequence
cagcatctgttcaaagtcgtagggc

SEQ ID NO: 175237 - DNA, 25 bp, Probe Sequence
cagcaggttccagtgcctgacttgg

SEQ ID NO: 175238 - DNA, 25 bp, Probe Sequence
cagcaggccccagggtagcctgcag

SEQ ID NO: 175239 - DNA, 25 bp, Probe Sequence
cagagccccaagggtagggctgccg

SEQ ID NO: 175240 - DNA, 25 bp, Probe Sequence
cagcagccccaagcctgagaggctg

SEQ ID NO: 175241 - DNA, 25 bp, Probe Sequence
cagcagcctccagtggcctggagga

SEQ ID NO: 175242 - DNA, 25 bp, Probe Sequence
cagcaggctaccggacggcaggtta

SEQ ID NO: 175243 - DNA, 25 bp, Probe Sequence
cagagagataccgccggcatgggac

SEQ ID NO: 175244 - DNA, 25 bp, Probe Sequence
cagaagtacgctgaacgagatctac

SEQ ID NO: 175245 - DNA, 25 bp, Probe Sequence
cagacacccctgtagaaagaaacaa

SEQ ID NO: 175246 - DNA, 25 bp, Probe Sequence
cagaagcacccacacgtagaaagag

SEQ ID NO: 175247 - DNA, 25 bp, Probe Sequence
cagaaccccagccttgaaaatagtg

SEQ ID NO: 175248 - DNA, 25 bp, Probe Sequence
cagacacacccaggcttgatttgga

SEQ ID NO: 175249 - DNA, 25 bp, Probe Sequence
cagacaacgcgcttttgctgaactg

SEQ ID NO: 175250 - DNA, 25 bp, Probe Sequence
cagactactcgaaatggcgtccgcc

SEQ ID NO: 175251 - DNA, 25 bp, Probe Sequence
cagcaagatccgtgaggagttcccg

SEQ ID NO: 175252 - DNA, 25 bp, Probe Sequence
cagcacaggccgtgctggcactttc

SEQ ID NO: 175253 - DNA, 25 bp, Probe Sequence
cagacatggcccatgctgtgcatcc

SEQ ID NO: 175254 - DNA, 25 bp, Probe Sequence
cagcagctgcctgattgttacgcga

SEQ ID NO: 175255 - DNA, 25 bp, Probe Sequence
cagcagcctgcagctggattacgca

SEQ ID NO: 175256 - DNA, 25 bp, Probe Sequence
cagcaggtgcaagtggactgccact

SEQ ID NO: 175257 - DNA, 25 bp, Probe Sequence
cagcagaccatagggtccatcaggt

SEQ ID NO: 175258 - DNA, 25 bp, Probe Sequence
cataccctagttgccattttttaat

SEQ ID NO: 175259 - DNA, 25 bp, Probe Sequence
catacaccataggtttttattttgg

SEQ ID NO: 175260 - DNA, 25 bp, Probe Sequence
cagaattcagaggtttttagtatat

SEQ ID NO: 175261 - DNA, 25 bp, Probe Sequence
cagatattcgaatgtttccaatatt

SEQ ID NO: 175262 - DNA, 25 bp, Probe Sequence
cagcattttaaagctctcgctgaag

SEQ ID NO: 175263 - DNA, 25 bp, Probe Sequence
cagtttgtacagccctcttgtatag

SEQ ID NO: 175264 - DNA, 25 bp, Probe Sequence
cagctttagccaactttctgtgaag

SEQ ID NO: 175265 - DNA, 25 bp, Probe Sequence
cagctttatcccgccagatggagag

SEQ ID NO: 175266 - DNA, 25 bp, Probe Sequence
cagcatttttgggagccgagccagg

SEQ ID NO: 175267 - DNA, 25 bp, Probe Sequence
cagcttctgggggggtgatctcaga

SEQ ID NO: 175268 - DNA, 25 bp, Probe Sequence
cagcttgtgggtgtggacctgaaca

SEQ ID NO: 175269 - DNA, 25 bp, Probe Sequence
cagttggagaccgtcaaccttcaag

SEQ ID NO: 175270 - DNA, 25 bp, Probe Sequence
cagcttgtgattcgctctagacttt

SEQ ID NO: 175271 - DNA, 25 bp, Probe Sequence
cagcatggcttgtcttcaagacttt

SEQ ID NO: 175272 - DNA, 25 bp, Probe Sequence
cagctttatgatatcaaagactcat

SEQ ID NO: 175273 - DNA, 25 bp, Probe Sequence
cagcacatttctagtcaaaaatatc

SEQ ID NO: 175274 - DNA, 25 bp, Probe Sequence
cagcagagcttcaggacacaaaatc

SEQ ID NO: 175275 - DNA, 25 bp, Probe Sequence
cagaactactgacaccaaccaaagc

SEQ ID NO: 175276 - DNA, 25 bp, Probe Sequence
cagaactaccactgggcaataaagt

SEQ ID NO: 175277 - DNA, 25 bp, Probe Sequence
cagaacttcgcctggagaacagagt

SEQ ID NO: 175278 - DNA, 25 bp, Probe Sequence
cagacagcatctccccgggaaatga

SEQ ID NO: 175279 - DNA, 25 bp, Probe Sequence
cagcatccatgtcacctgggaaatt

SEQ ID NO: 175280 - DNA, 25 bp, Probe Sequence
cagcactcaatgacaatctggagaa

SEQ ID NO: 175281 - DNA, 25 bp, Probe Sequence
cagcaccatcaagctgctgaatgaa

SEQ ID NO: 175282 - DNA, 25 bp, Probe Sequence
cagcagtcatgcacgctgataaaaa

SEQ ID NO: 175283 - DNA, 25 bp, Probe Sequence
cagcagtggcgatttgaccagataa

SEQ ID NO: 175284 - DNA, 25 bp, Probe Sequence
cagcatctccaattttcagcagctc

SEQ ID NO: 175285 - DNA, 25 bp, Probe Sequence
cagcatgtgccaggcttttgctgct

SEQ ID NO: 175286 - DNA, 25 bp, Probe Sequence
cagaatgctcagctacttgtgctgg

SEQ ID NO: 175287 - DNA, 25 bp, Probe Sequence
cagacagcctgtatcttgggggaca

SEQ ID NO: 175288 - DNA, 25 bp, Probe Sequence
cagtcacgtttaggtggggcgtgcc

SEQ ID NO: 175289 - DNA, 25 bp, Probe Sequence
cagtcccagttccagggggaggcct

SEQ ID NO: 175290 - DNA, 25 bp, Probe Sequence
cagtacctccttcagcggaaggcct

SEQ ID NO: 175291 - DNA, 25 bp, Probe Sequence
cagtccgccactcacggacaagagc

SEQ ID NO: 175292 - DNA, 25 bp, Probe Sequence
cagtctgcggattctaagaccaaag

SEQ ID NO: 175293 - DNA, 25 bp, Probe Sequence
cagcttcttgtcttcaaacacaaga

SEQ ID NO: 175294 - DNA, 25 bp, Probe Sequence
cagcttgttggtttagatgaggaga

SEQ ID NO: 175295 - DNA, 25 bp, Probe Sequence
cagcaatgttgatctcataaaagga

SEQ ID NO: 175296 - DNA, 25 bp, Probe Sequence
cagcagctgttgtccttaaaaatga

SEQ ID NO: 175297 - DNA, 25 bp, Probe Sequence
cagcagtcattgtctcctcaataaa

SEQ ID NO: 175298 - DNA, 25 bp, Probe Sequence
cagcatgctatctatagttaataac

SEQ ID NO: 175299 - DNA, 25 bp, Probe Sequence
cagcatcttgtaactaaatgatata

SEQ ID NO: 175300 - DNA, 25 bp, Probe Sequence
cagcacagagataacacaaataatt

SEQ ID NO: 175301 - DNA, 25 bp, Probe Sequence
cagcacgaggaatcagcagatgagc

SEQ ID NO: 175302 - DNA, 25 bp, Probe Sequence
cagcactgggagaccagcaggactc

SEQ ID NO: 175303 - DNA, 25 bp, Probe Sequence
cagaatggggcagagcaagatcttg

SEQ ID NO: 175304 - DNA, 25 bp, Probe Sequence
cagaatggtccagcacttttgcttt

SEQ ID NO: 175305 - DNA, 25 bp, Probe Sequence
cagaatgtgttaaatttcttgtaca

SEQ ID NO: 175306 - DNA, 25 bp, Probe Sequence
cagacttgattaaatgtccttgata

SEQ ID NO: 175307 - DNA, 25 bp, Probe Sequence
cagcactctctaaatcttccttgtg

SEQ ID NO: 175308 - DNA, 25 bp, Probe Sequence
cagagtttatattttccttcagtta

SEQ ID NO: 175309 - DNA, 25 bp, Probe Sequence
cagactgactttataccttcatttc

SEQ ID NO: 175310 - DNA, 25 bp, Probe Sequence
cagaagttctctgaacctcaattgt

SEQ ID NO: 175311 - DNA, 25 bp, Probe Sequence
cagacgttgctaggaaactgccttt

SEQ ID NO: 175312 - DNA, 25 bp, Probe Sequence
cagaaagctgcctgaaacgttgctt

SEQ ID NO: 175313 - DNA, 25 bp, Probe Sequence
cagaaagtgtattgccaactttgtt

SEQ ID NO: 175314 - DNA, 25 bp, Probe Sequence
cagagcattgtgcaatacagtttca

SEQ ID NO: 175315 - DNA, 25 bp, Probe Sequence
cagacttgagtgtatgcaggatttc

SEQ ID NO: 175316 - DNA, 25 bp, Probe Sequence
cagagactggtattgtggctgtgcc

SEQ ID NO: 175317 - DNA, 25 bp, Probe Sequence
cagcagcctggtatgatgtgtcatc

SEQ ID NO: 175318 - DNA, 25 bp, Probe Sequence
cagcagtcggttggagcgagcatcc

SEQ ID NO: 175319 - DNA, 25 bp, Probe Sequence
cagcagtcggttggagcgagcatcc

SEQ ID NO: 175320 - DNA, 25 bp, Probe Sequence
cagcaggtgtttggcatcgatgctc

SEQ ID NO: 175321 - DNA, 25 bp, Probe Sequence
cagcagcgttctcggatgctagcta

SEQ ID NO: 175322 - DNA, 25 bp, Probe Sequence
cagacagaatcactgctgcagctac

SEQ ID NO: 175323 - DNA, 25 bp, Probe Sequence
cagagcaatgacctgcatgcagcaa

SEQ ID NO: 175324 - DNA, 25 bp, Probe Sequence
cagaaagcagcacagcaggcagcct

SEQ ID NO: 175325 - DNA, 25 bp, Probe Sequence
cagcagcacgcaggccaaggatgcc

SEQ ID NO: 175326 - DNA, 25 bp, Probe Sequence
cagcagcctgcagcctgaagatttt

SEQ ID NO: 175327 - DNA, 25 bp, Probe Sequence
cagagacagagccgagaagattatt

SEQ ID NO: 175328 - DNA, 25 bp, Probe Sequence
cagcagtgccgcctgaaagtgtctt

SEQ ID NO: 175329 - DNA, 25 bp, Probe Sequence
cagcaggaagccatagatgctggct

SEQ ID NO: 175330 - DNA, 25 bp, Probe Sequence
cagcaggatcatgccttctgtgtct

SEQ ID NO: 175331 - DNA, 25 bp, Probe Sequence
cagcaggattggatgttgtgtattg

SEQ ID NO: 175332 - DNA, 25 bp, Probe Sequence
cagcagtgaaccagttgtccaagac

SEQ ID NO: 175333 - DNA, 25 bp, Probe Sequence
cagcagtgaactctggtgtctcaaa

SEQ ID NO: 175334 - DNA, 25 bp, Probe Sequence
cagcaggaccagatctgctatctca

SEQ ID NO: 175335 - DNA, 25 bp, Probe Sequence
cagcagttcctaaatgattctcaca

SEQ ID NO: 175336 - DNA, 25 bp, Probe Sequence
cagcagtacactctagaaccatcag

SEQ ID NO: 175337 - DNA, 25 bp, Probe Sequence
cagagaaacccgtcaacatcagctg

SEQ ID NO: 175338 - DNA, 25 bp, Probe Sequence
cagaatccacattcagataaccatt

SEQ ID NO: 175339 - DNA, 25 bp, Probe Sequence
cagaaatcattatcttagccaccag

SEQ ID NO: 175340 - DNA, 25 bp, Probe Sequence
cagaaatggtaaattagcctgcata

SEQ ID NO: 175341 - DNA, 25 bp, Probe Sequence
cagaactgggaaatctatggagacc

SEQ ID NO: 175342 - DNA, 25 bp, Probe Sequence
cagacaggaccacatctaggacctc

SEQ ID NO: 175343 - DNA, 25 bp, Probe Sequence
cagcactggagccagtcatcaagga

SEQ ID NO: 175344 - DNA, 25 bp, Probe Sequence
cagcagcgtcaggaatctctagaaa

SEQ ID NO: 175345 - DNA, 25 bp, Probe Sequence
cagagcaggccgaacgctatgagga

SEQ ID NO: 175346 - DNA, 25 bp, Probe Sequence
cagagcaggtcttgaccctggtcaa

SEQ ID NO: 175347 - DNA, 25 bp, Probe Sequence
cagagctgtttataccacatgataa

SEQ ID NO: 175348 - DNA, 25 bp, Probe Sequence
cagacttcaaccacacacatggaaa

SEQ ID NO: 175349 - DNA, 25 bp, Probe Sequence
cagactgctcaagagaagcacatga

SEQ ID NO: 175350 - DNA, 25 bp, Probe Sequence
cagaatgatcaagttgacgacagga

SEQ ID NO: 175351 - DNA, 25 bp, Probe Sequence
cagatatgatcatgtaaaacttacc

SEQ ID NO: 175352 - DNA, 25 bp, Probe Sequence
catgttatgggatctcaacgaaggc

SEQ ID NO: 175353 - DNA, 25 bp, Probe Sequence
cagtctgggaattccccgaaggcac

SEQ ID NO: 175354 - DNA, 25 bp, Probe Sequence
cagtcgccggaattcgcggtacaga

SEQ ID NO: 175355 - DNA, 25 bp, Probe Sequence
cagtgcccggagtcaggaactacgg

SEQ ID NO: 175356 - DNA, 25 bp, Probe Sequence
cagatccagggagcattcacctgcc

SEQ ID NO: 175357 - DNA, 25 bp, Probe Sequence
cagaaaggtgacgattctcactcac

SEQ ID NO: 175358 - DNA, 25 bp, Probe Sequence
cagcaataggtaggtcccattctct

SEQ ID NO: 175359 - DNA, 25 bp, Probe Sequence
cagaggaggatctccaccatcctct

SEQ ID NO: 175360 - DNA, 25 bp, Probe Sequence
cagaggcaggtctcatagtcttccc

SEQ ID NO: 175361 - DNA, 25 bp, Probe Sequence
ccgaagtgttcacaacgtcaccggg

SEQ ID NO: 175362 - DNA, 25 bp, Probe Sequence
ccgggttacttatcccaggcagaag

SEQ ID NO: 175363 - DNA, 25 bp, Probe Sequence
caggtgagttacttaaggctaggag

SEQ ID NO: 175364 - DNA, 25 bp, Probe Sequence
cggtagttccggtgtcaacatggac

SEQ ID NO: 175365 - DNA, 25 bp, Probe Sequence
cagatgttgttcgggggacaacttg

SEQ ID NO: 175366 - DNA, 25 bp, Probe Sequence
cagaaggtgctcagcagggagaccc

SEQ ID NO: 175367 - DNA, 25 bp, Probe Sequence
cgtaagcagcacactaggaggccca

SEQ ID NO: 175368 - DNA, 25 bp, Probe Sequence
cagaagaaacaaatggaggcgccca

SEQ ID NO: 175369 - DNA, 25 bp, Probe Sequence
cagcaacaacaagctggcaggcgcc

SEQ ID NO: 175370 - DNA, 25 bp, Probe Sequence
cagattcaaccagctgcaaacaggg

SEQ ID NO: 175371 - DNA, 25 bp, Probe Sequence
cagcaccagacgcgatggcaaagtg

SEQ ID NO: 175372 - DNA, 25 bp, Probe Sequence
cagaccgctcgggcatggagaattc

SEQ ID NO: 175373 - DNA, 25 bp, Probe Sequence
cagacctattcccaggaagtctccc

SEQ ID NO: 175374 - DNA, 25 bp, Probe Sequence
cagacctattctcaggagttctccc

SEQ ID NO: 175375 - DNA, 25 bp, Probe Sequence
cagaactgctttcctatgtttaccc

SEQ ID NO: 175376 - DNA, 25 bp, Probe Sequence
cagaaattatatcccctttgagccc

SEQ ID NO: 175377 - DNA, 25 bp, Probe Sequence
cagaaattaacagccatattggtct

SEQ ID NO: 175378 - DNA, 25 bp, Probe Sequence
cagaaattcaaagctcgtctgcgct

SEQ ID NO: 175379 - DNA, 25 bp, Probe Sequence
cagaatgttcaagactgagattagt

SEQ ID NO: 175380 - DNA, 25 bp, Probe Sequence
cagaagaacgcagacagaagaagga

SEQ ID NO: 175381 - DNA, 25 bp, Probe Sequence
cagagaacacgagaccaatggtgtg

SEQ ID NO: 175382 - DNA, 25 bp, Probe Sequence
cagcaccccgagaacacattttgat

SEQ ID NO: 175383 - DNA, 25 bp, Probe Sequence
cagactcccgcaatgtagactctgg

SEQ ID NO: 175384 - DNA, 25 bp, Probe Sequence
cagaccccatgttgttggtcaatga

SEQ ID NO: 175385 - DNA, 25 bp, Probe Sequence
cagaccccaggatttcagagttgaa

SEQ ID NO: 175386 - DNA, 25 bp, Probe Sequence
cagaccggagtaatccaggtcggtt

SEQ ID NO: 175387 - DNA, 25 bp, Probe Sequence
cagaaagggccttccaagtggggat

SEQ ID NO: 175388 - DNA, 25 bp, Probe Sequence
catcgaccggaagcgcacgggggat

SEQ ID NO: 175389 - DNA, 25 bp, Probe Sequence
catccacctgggaccccagggtggc

SEQ ID NO: 175390 - DNA, 25 bp, Probe Sequence
catccacctgggaccccagggtggc

SEQ ID NO: 175391 - DNA, 25 bp, Probe Sequence
gttagaagggtctggcgggggcagt

SEQ ID NO: 175392 - DNA, 25 bp, Probe Sequence
ctaaaacaggtcaggccgggcatgg

SEQ ID NO: 175393 - DNA, 25 bp, Probe Sequence
cttaacggggctgtgcgcgaggaga

SEQ ID NO: 175394 - DNA, 25 bp, Probe Sequence
cagcaaccacaccatcttcttgctg

SEQ ID NO: 175395 - DNA, 25 bp, Probe Sequence
cagcaacagcaaatcctgttccggc

SEQ ID NO: 175396 - DNA, 25 bp, Probe Sequence
cagcacaaaagcactttgagtggca

SEQ ID NO: 175397 - DNA, 25 bp, Probe Sequence
cgcggacaatgcattttgggacccc

SEQ ID NO: 175398 - DNA, 25 bp, Probe Sequence
cagcagtgccagtcactttggggac

SEQ ID NO: 175399 - DNA, 25 bp, Probe Sequence
cagcaggggacctgagggctgtcct

SEQ ID NO: 175400 - DNA, 25 bp, Probe Sequence
cagcaggggacctgagggctgtcct

SEQ ID NO: 175401 - DNA, 25 bp, Probe Sequence
cagcaggggcctgtggtggtgagcc

SEQ ID NO: 175402 - DNA, 25 bp, Probe Sequence
cagcagcttgggccagaagtgcgga

SEQ ID NO: 175403 - DNA, 25 bp, Probe Sequence
cagcagcttggggcaaggtgctgga

SEQ ID NO: 175404 - DNA, 25 bp, Probe Sequence
cagactgtggctcctagtgatgtgg

SEQ ID NO: 175405 - DNA, 25 bp, Probe Sequence
cagacgaggtggcgtgcgtggtgcc

SEQ ID NO: 175406 - DNA, 25 bp, Probe Sequence
cagaggttgcagtgagctggggtcg

SEQ ID NO: 175407 - DNA, 25 bp, Probe Sequence
cagacaacagcctggtggcagcggg

SEQ ID NO: 175408 - DNA, 25 bp, Probe Sequence
cagacataaatctcggcgactcggc

SEQ ID NO: 175409 - DNA, 25 bp, Probe Sequence
cagacataaatctcggcgactcggc

SEQ ID NO: 175410 - DNA, 25 bp, Probe Sequence
cagaattagtttgaggacctggaat

SEQ ID NO: 175411 - DNA, 25 bp, Probe Sequence
cagaataccctaaaggacctggaat

SEQ ID NO: 175412 - DNA, 25 bp, Probe Sequence
cagaacactcctatttgtacctcaa

SEQ ID NO: 175413 - DNA, 25 bp, Probe Sequence
cagaacactcctatttgtacctcaa

SEQ ID NO: 175414 - DNA, 25 bp, Probe Sequence
cagaagcctttgatattgccaccct

SEQ ID NO: 175415 - DNA, 25 bp, Probe Sequence
cagaagcctttgatattgccaccct

SEQ ID NO: 175416 - DNA, 25 bp, Probe Sequence
cagcagagcttcagaggttgcccca

SEQ ID NO: 175417 - DNA, 25 bp, Probe Sequence
cagcagctggttgaggggcaccaag

SEQ ID NO: 175418 - DNA, 25 bp, Probe Sequence
cagacagtctgtctgcgaggcacta

SEQ ID NO: 175419 - DNA, 25 bp, Probe Sequence
cagacgacagatagggaagcaagaa

SEQ ID NO: 175420 - DNA, 25 bp, Probe Sequence
cagagttaataaagacagaagatag

SEQ ID NO: 175421 - DNA, 25 bp, Probe Sequence
cagactaagcactaaaaagcaaagc

SEQ ID NO: 175422 - DNA, 25 bp, Probe Sequence
cagaacacccaagagcgagcaaaca

SEQ ID NO: 175423 - DNA, 25 bp, Probe Sequence
cagaaccaacaagattgagaatttc

SEQ ID NO: 175424 - DNA, 25 bp, Probe Sequence
cagatcccaaaagcttggtaagccc

SEQ ID NO: 175425 - DNA, 25 bp, Probe Sequence
cagattacaagcaccttttccagcc

SEQ ID NO: 175426 - DNA, 25 bp, Probe Sequence
cagagaaaagagtccttgttccagc

SEQ ID NO: 175427 - DNA, 25 bp, Probe Sequence
cagatgaggcaatgtttattttcca

SEQ ID NO: 175428 - DNA, 25 bp, Probe Sequence
cagtgcagtgtagctttagtttaag

SEQ ID NO: 175429 - DNA, 25 bp, Probe Sequence
cagagcactacagccttttattgag

SEQ ID NO: 175430 - DNA, 25 bp, Probe Sequence
cagagcactacagccttttattgag

SEQ ID NO: 175431 - DNA, 25 bp, Probe Sequence
cagcagatttccagccttctactgc

SEQ ID NO: 175432 - DNA, 25 bp, Probe Sequence
cagcaacatgatgcccctgagtact

SEQ ID NO: 175433 - DNA, 25 bp, Probe Sequence
cagagacagaatcccaataatagtc

SEQ ID NO: 175434 - DNA, 25 bp, Probe Sequence
cagatcgagctacctaagaacagct

SEQ ID NO: 175435 - DNA, 25 bp, Probe Sequence
cagtcagatttcttcaggaacccag

SEQ ID NO: 175436 - DNA, 25 bp, Probe Sequence
cagacagtgttacaagaatccccac

SEQ ID NO: 175437 - DNA, 25 bp, Probe Sequence
cagaaagttagcaaggatatccagg

SEQ ID NO: 175438 - DNA, 25 bp, Probe Sequence
caggaggtggagaggtaccggcttc

SEQ ID NO: 175439 - DNA, 25 bp, Probe Sequence
cgacttgtgaagaaggttcccgctt

SEQ ID NO: 175440 - DNA, 25 bp, Probe Sequence
cgttatggggatttcttcatccgtc

SEQ ID NO: 175441 - DNA, 25 bp, Probe Sequence
cagttcagcgggaggctttccgtac

SEQ ID NO: 175442 - DNA, 25 bp, Probe Sequence
cagttcagcgggaggctttccgtac

SEQ ID NO: 175443 - DNA, 25 bp, Probe Sequence
cagttacctggttgctgttttaatt

SEQ ID NO: 175444 - DNA, 25 bp, Probe Sequence
cagttgacttactgtttcttacctt

SEQ ID NO: 175445 - DNA, 25 bp, Probe Sequence
cagttgacttactgtttcttacctt

SEQ ID NO: 175446 - DNA, 25 bp, Probe Sequence
cagacagacctagggacttcctact

SEQ ID NO: 175447 - DNA, 25 bp, Probe Sequence
cagacagacctcatctataacctcc

SEQ ID NO: 175448 - DNA, 25 bp, Probe Sequence
cagcacagactgactttataccttc

SEQ ID NO: 175449 - DNA, 25 bp, Probe Sequence
cagagagcagtgagcctataccatt

SEQ ID NO: 175450 - DNA, 25 bp, Probe Sequence
cagcaagtgcacaagccttactttg

SEQ ID NO: 175451 - DNA, 25 bp, Probe Sequence
cagacgtgagcttggcattgaagtt

SEQ ID NO: 175452 - DNA, 25 bp, Probe Sequence
cagaagatgcatcaggcaccaattt

SEQ ID NO: 175453 - DNA, 25 bp, Probe Sequence
cagaatatgcactgtccatcatgtt

SEQ ID NO: 175454 - DNA, 25 bp, Probe Sequence
cagcaacatgcagagtccctgagcc

SEQ ID NO: 175455 - DNA, 25 bp, Probe Sequence
cagcaaatgactactgcacctggac

SEQ ID NO: 175456 - DNA, 25 bp, Probe Sequence
cagagagagactgtcaccgagcctc

SEQ ID NO: 175457 - DNA, 25 bp, Probe Sequence
cagaaggcaacattccctgaacata

SEQ ID NO: 175458 - DNA, 25 bp, Probe Sequence
cagagggctaaatccatgaagtttg

SEQ ID NO: 175459 - DNA, 25 bp, Probe Sequence
cagatgtggctagaccaaccagtgg

SEQ ID NO: 175460 - DNA, 25 bp, Probe Sequence
cagagcttattggaaatatctcagt

SEQ ID NO: 175461 - DNA, 25 bp, Probe Sequence
cagagctgacttgggcaatcctccc

SEQ ID NO: 175462 - DNA, 25 bp, Probe Sequence
cagaatgatctgtgtgaccttgaac

SEQ ID NO: 175463 - DNA, 25 bp, Probe Sequence
cagaatcttgaaaagcccagagatc

SEQ ID NO: 175464 - DNA, 25 bp, Probe Sequence
cagcacatttagtaaggacacagga

SEQ ID NO: 175465 - DNA, 25 bp, Probe Sequence
cagagatttaagccacagacacaca

SEQ ID NO: 175466 - DNA, 25 bp, Probe Sequence
cagagttctgaatcactggcctgaa

SEQ ID NO: 175467 - DNA, 25 bp, Probe Sequence
cagtattctagagacgggttgcaat

SEQ ID NO: 175468 - DNA, 25 bp, Probe Sequence
cagtttgcaaagtggggtcccatca

SEQ ID NO: 175469 - DNA, 25 bp, Probe Sequence
catgggtaaaggagaccccaacaag

SEQ ID NO: 175470 - DNA, 25 bp, Probe Sequence
catgggtgaagacacctacccctac

SEQ ID NO: 175471 - DNA, 25 bp, Probe Sequence
cagatggggaacactgtgcctccct

SEQ ID NO: 175472 - DNA, 25 bp, Probe Sequence
cagagaaaacacacgctcctctgcc

SEQ ID NO: 175473 - DNA, 25 bp, Probe Sequence
cagagggacgacggcgtctttgtgc

SEQ ID NO: 175474 - DNA, 25 bp, Probe Sequence
cagagggctagtttcagtaatttgc

SEQ ID NO: 175475 - DNA, 25 bp, Probe Sequence
cagagggctatgacacggtcactct

SEQ ID NO: 175476 - DNA, 25 bp, Probe Sequence
cagagggctgtgtacaaggacctgg

SEQ ID NO: 175477 - DNA, 25 bp, Probe Sequence
cagagggcaggagcacagacccctt

SEQ ID NO: 175478 - DNA, 25 bp, Probe Sequence
cagagtggggatgtcacctgcaact

SEQ ID NO: 175479 - DNA, 25 bp, Probe Sequence
cagaggggagaggtactcgacccaa

SEQ ID NO: 175480 - DNA, 25 bp, Probe Sequence
cagaggggtagtacaacagctccaa

SEQ ID NO: 175481 - DNA, 25 bp, Probe Sequence
cagagtggcttacactgggtctcaa

SEQ ID NO: 175482 - DNA, 25 bp, Probe Sequence
cagactgccgtacactgtgggactt

SEQ ID NO: 175483 - DNA, 25 bp, Probe Sequence
cagactgcaaataggcatgcttttg

SEQ ID NO: 175484 - DNA, 25 bp, Probe Sequence
cagaagacaatggcgctgcatgttt

SEQ ID NO: 175485 - DNA, 25 bp, Probe Sequence
cagaacattctgacctctgtcttgc

SEQ ID NO: 175486 - DNA, 25 bp, Probe Sequence
cagcaacttcaaggtttctgccagc

SEQ ID NO: 175487 - DNA, 25 bp, Probe Sequence
cagcacatatataacgtctctctcc

SEQ ID NO: 175488 - DNA, 25 bp, Probe Sequence
cagaatgctatgctcgacatcttcc

SEQ ID NO: 175489 - DNA, 25 bp, Probe Sequence
cagaatgtcagaattcctgttccct

SEQ ID NO: 175490 - DNA, 25 bp, Probe Sequence
cagaatgtcagattcctttcccttt

SEQ ID NO: 175491 - DNA, 25 bp, Probe Sequence
cagagagacaattcactccatccct

SEQ ID NO: 175492 - DNA, 25 bp, Probe Sequence
cagagaaacactgtccatctggctg

SEQ ID NO: 175493 - DNA, 25 bp, Probe Sequence
cagaggaaactctgcattctcgctt

SEQ ID NO: 175494 - DNA, 25 bp, Probe Sequence
cagaggcagatactaaattaagcat

SEQ ID NO: 175495 - DNA, 25 bp, Probe Sequence
cagaggacatcgtagattaagagtc

SEQ ID NO: 175496 - DNA, 25 bp, Probe Sequence
cagagctcattagacatcggagagt

SEQ ID NO: 175497 - DNA, 25 bp, Probe Sequence
cagaccgtcagaaactggagagttt

SEQ ID NO: 175498 - DNA, 25 bp, Probe Sequence
cagaatcagtcgaggtggacagttt

SEQ ID NO: 175499 - DNA, 25 bp, Probe Sequence
cagaaaggtgctctgtgccaagttc

SEQ ID NO: 175500 - DNA, 25 bp, Probe Sequence
cagaaatggactatgttgaagacaa

SEQ ID NO: 175501 - DNA, 25 bp, Probe Sequence
cagaaatggactatgttgaagacaa

SEQ ID NO: 175502 - DNA, 25 bp, Probe Sequence
cagacagtggcccttttgtgggcag

SEQ ID NO: 175503 - DNA, 25 bp, Probe Sequence
cagagccaacacctttgttgcagag

SEQ ID NO: 175504 - DNA, 25 bp, Probe Sequence
cagaccacgcacgtgatttgtccag

SEQ ID NO: 175505 - DNA, 25 bp, Probe Sequence
cagacccgatcgtctatggtccagt

SEQ ID NO: 175506 - DNA, 25 bp, Probe Sequence
cagaccaaggctgcaagtggccctc

SEQ ID NO: 175507 - DNA, 25 bp, Probe Sequence
cagacataaggaggccagaggctgc

SEQ ID NO: 175508 - DNA, 25 bp, Probe Sequence
cagacataaggaggccagaggctgc

SEQ ID NO: 175509 - DNA, 25 bp, Probe Sequence
cagcacagaagcctgcgaggaagcc

SEQ ID NO: 175510 - DNA, 25 bp, Probe Sequence
cagaaaagaggccagctctgcagcc

SEQ ID NO: 175511 - DNA, 25 bp, Probe Sequence
cagaaccaagtggatatgctgctcc

SEQ ID NO: 175512 - DNA, 25 bp, Probe Sequence
cagaatcccaataatagtcccacag

SEQ ID NO: 175513 - DNA, 25 bp, Probe Sequence
cagagatccaaaagaagcccccagt

SEQ ID NO: 175514 - DNA, 25 bp, Probe Sequence
catggccaacaatggacacctccag

SEQ ID NO: 175515 - DNA, 25 bp, Probe Sequence
cagaccaagaatttgacaactcaca

SEQ ID NO: 175516 - DNA, 25 bp, Probe Sequence
cagagccaggaaaaacagactacat

SEQ ID NO: 175517 - DNA, 25 bp, Probe Sequence
cagacactggaacagtatgagttct

SEQ ID NO: 175518 - DNA, 25 bp, Probe Sequence
cagacctgggaggagttcagccgcg

SEQ ID NO: 175519 - DNA, 25 bp, Probe Sequence
cagacacggtagaagactcgcccat

SEQ ID NO: 175520 - DNA, 25 bp, Probe Sequence
cagaaccaggagatcctgctcccag

SEQ ID NO: 175521 - DNA, 25 bp, Probe Sequence
cagagaacaggagacctgccagccc

SEQ ID NO: 175522 - DNA, 25 bp, Probe Sequence
cagaggaagttatcctctgcctccc

SEQ ID NO: 175523 - DNA, 25 bp, Probe Sequence
cagatcggaagtaactgctccctcc

SEQ ID NO: 175524 - DNA, 25 bp, Probe Sequence
cagaaggatagtgatcatgtctagt

SEQ ID NO: 175525 - DNA, 25 bp, Probe Sequence
cagaatggttatgatagcactcagc

SEQ ID NO: 175526 - DNA, 25 bp, Probe Sequence
cagaaggactctcaatcactcagct

SEQ ID NO: 175527 - DNA, 25 bp, Probe Sequence
cagaacagcctccaagagctctact

SEQ ID NO: 175528 - DNA, 25 bp, Probe Sequence
cagaaatgcctgctgggccttaagc

SEQ ID NO: 175529 - DNA, 25 bp, Probe Sequence
cagaacagactggcggaggaaaagg

SEQ ID NO: 175530 - DNA, 25 bp, Probe Sequence
cagcaaggacatccggatgaaaaag

SEQ ID NO: 175531 - DNA, 25 bp, Probe Sequence
cagcaagggctgccatgggatacag

SEQ ID NO: 175532 - DNA, 25 bp, Probe Sequence
cagcacagacagcgagcgctggaag

SEQ ID NO: 175533 - DNA, 25 bp, Probe Sequence
cagcacagccagacgttctagaagt

SEQ ID NO: 175534 - DNA, 25 bp, Probe Sequence
cagcacatccgtcttttcagagaaa

SEQ ID NO: 175535 - DNA, 25 bp, Probe Sequence
cagactcatcctttttaaatgagac

SEQ ID NO: 175536 - DNA, 25 bp, Probe Sequence
cagacgcttagctcttaaaagattt

SEQ ID NO: 175537 - DNA, 25 bp, Probe Sequence
cagaggcactgagtcccctaaagtt

SEQ ID NO: 175538 - DNA, 25 bp, Probe Sequence
ccaggaacccacgtgtcaaaattca

SEQ ID NO: 175539 - DNA, 25 bp, Probe Sequence
ccaggtcacccttttcacaagggct

SEQ ID NO: 175540 - DNA, 25 bp, Probe Sequence
gtgggccaccctgaacacaaaggga

SEQ ID NO: 175541 - DNA, 25 bp, Probe Sequence
cagggccaaacggaaagcaggggtg

SEQ ID NO: 175542 - DNA, 25 bp, Probe Sequence
caggcccgaaggcaacagagggcgg

SEQ ID NO: 175543 - DNA, 25 bp, Probe Sequence
cagaccctgaaacctggcaaagtcg

SEQ ID NO: 175544 - DNA, 25 bp, Probe Sequence
cagacttgtcaagcctgtgcaaaaa

SEQ ID NO: 175545 - DNA, 25 bp, Probe Sequence
cagttggtcaactctgatacaaagt

SEQ ID NO: 175546 - DNA, 25 bp, Probe Sequence
catttgtgtaatctccaaaagtgtt

SEQ ID NO: 175547 - DNA, 25 bp, Probe Sequence
cagttttgaactacctatgaatttg

SEQ ID NO: 175548 - DNA, 25 bp, Probe Sequence
cagacttttacttctcttacactgc

SEQ ID NO: 175549 - DNA, 25 bp, Probe Sequence
cagatattttaccgccttaccaaat

SEQ ID NO: 175550 - DNA, 25 bp, Probe Sequence
cagaattttgcattgcagtcataga

SEQ ID NO: 175551 - DNA, 25 bp, Probe Sequence
cagaacttctgcaaatgaaaaatgt

SEQ ID NO: 175552 - DNA, 25 bp, Probe Sequence
cagtacctgtaatgagaaacagtaa

SEQ ID NO: 175553 - DNA, 25 bp, Probe Sequence
cagtaagtgtaaggtgtacttggta

SEQ ID NO: 175554 - DNA, 25 bp, Probe Sequence
cagtaggtctgaaggcctccatttg

SEQ ID NO: 175555 - DNA, 25 bp, Probe Sequence
cagtacgatagcaccttcctgtttg

SEQ ID NO: 175556 - DNA, 25 bp, Probe Sequence
cagaactgaagttgccctactttta

SEQ ID NO: 175557 - DNA, 25 bp, Probe Sequence
cagaattgactttcctcatcaggtt

SEQ ID NO: 175558 - DNA, 25 bp, Probe Sequence
cagaatggtgctgatccccaacttt

SEQ ID NO: 175559 - DNA, 25 bp, Probe Sequence
cagaatgtggctaactctcctacca

SEQ ID NO: 175560 - DNA, 25 bp, Probe Sequence
cagacagaggaaagtctccctgccc

SEQ ID NO: 175561 - DNA, 25 bp, Probe Sequence
cagaagaggaattctcacctcccca

SEQ ID NO: 175562 - DNA, 25 bp, Probe Sequence
cagaaggagatcactgccctggcac

SEQ ID NO: 175563 - DNA, 25 bp, Probe Sequence
cagaagagtattcacgcctgcgcag

SEQ ID NO: 175564 - DNA, 25 bp, Probe Sequence
cagaaggtcatgacccacgtcagca

SEQ ID NO: 175565 - DNA, 25 bp, Probe Sequence
cagaagagatgctgcccgtacagcc

SEQ ID NO: 175566 - DNA, 25 bp, Probe Sequence
cagaatccatcaaccgggacagcga

SEQ ID NO: 175567 - DNA, 25 bp, Probe Sequence
cagaaacacaaccggatgtcttgat

SEQ ID NO: 175568 - DNA, 25 bp, Probe Sequence
cagaaacacaagcggctctatgagt

SEQ ID NO: 175569 - DNA, 25 bp, Probe Sequence
cagaaaccattcagcctgcaaagct

SEQ ID NO: 175570 - DNA, 25 bp, Probe Sequence
cagatcgacctttaccggagaatcc

SEQ ID NO: 175571 - DNA, 25 bp, Probe Sequence
cagaagactttaatccgtcaaattc

SEQ ID NO: 175572 - DNA, 25 bp, Probe Sequence
caggaacctttctcttcagtatttt

SEQ ID NO: 175573 - DNA, 25 bp, Probe Sequence
gaggaaattttccgcaaggttcgat

SEQ ID NO: 175574 - DNA, 25 bp, Probe Sequence
cagaaggtttggcgacgtttccatc

SEQ ID NO: 175575 - DNA, 25 bp, Probe Sequence
cagacaggactaaggggactttcct

SEQ ID NO: 175576 - DNA, 25 bp, Probe Sequence
cagacactactgaggtggttctttc

SEQ ID NO: 175577 - DNA, 25 bp, Probe Sequence
cagagactggttcgcttgttttttc

SEQ ID NO: 175578 - DNA, 25 bp, Probe Sequence
cagatataggtgcgttctttttttt

SEQ ID NO: 175579 - DNA, 25 bp, Probe Sequence
cagaatatgtatgcagttctttctt

SEQ ID NO: 175580 - DNA, 25 bp, Probe Sequence
cagactttacgactacacaatatat

SEQ ID NO: 175581 - DNA, 25 bp, Probe Sequence
cagacttttcaactacatgtattca

SEQ ID NO: 175582 - DNA, 25 bp, Probe Sequence
cagactttatcaatgtataattaac

SEQ ID NO: 175583 - DNA, 25 bp, Probe Sequence
cagacttatcaccattcttatgtca

SEQ ID NO: 175584 - DNA, 25 bp, Probe Sequence
cagactctcatcatgcaaattagcc

SEQ ID NO: 175585 - DNA, 25 bp, Probe Sequence
cagacagtaacgtcagttgatgctg

SEQ ID NO: 175586 - DNA, 25 bp, Probe Sequence
cagaatttatctgagtctgctgctg

SEQ ID NO: 175587 - DNA, 25 bp, Probe Sequence
cagaattacaccgagtggctgcagg

SEQ ID NO: 175588 - DNA, 25 bp, Probe Sequence
cagcaagatacaacagtggcaccag

SEQ ID NO: 175589 - DNA, 25 bp, Probe Sequence
cagattgtcaacggggaccagtact

SEQ ID NO: 175590 - DNA, 25 bp, Probe Sequence
cagactctcccggaggacaatgagg

SEQ ID NO: 175591 - DNA, 25 bp, Probe Sequence
cagaccccaggctggacatgctgac

SEQ ID NO: 175592 - DNA, 25 bp, Probe Sequence
cagaccaggctacactgacaggaag

SEQ ID NO: 175593 - DNA, 25 bp, Probe Sequence
cagatttggtagaataacgggagtc

SEQ ID NO: 175594 - DNA, 25 bp, Probe Sequence
cagattaggttggataggtggggaa

SEQ ID NO: 175595 - DNA, 25 bp, Probe Sequence
cagaatcggttggtgcgtcttgtgt

SEQ ID NO: 175596 - DNA, 25 bp, Probe Sequence
cagaatcccttaacagttgtattta

SEQ ID NO: 175597 - DNA, 25 bp, Probe Sequence
cagacagcctctaaatcaagtcctt

SEQ ID NO: 175598 - DNA, 25 bp, Probe Sequence
cagaatgttctggacatgcaccacc

SEQ ID NO: 175599 - DNA, 25 bp, Probe Sequence
cagagctgttccagctgcggcctgc

SEQ ID NO: 175600 - DNA, 25 bp, Probe Sequence
cagagctgagtctggccgactatgc

SEQ ID NO: 175601 - DNA, 25 bp, Probe Sequence
cagactcagcagtgtgacggtatga

SEQ ID NO: 175602 - DNA, 25 bp, Probe Sequence
cagacacacaagggagcaggctatg

SEQ ID NO: 175603 - DNA, 25 bp, Probe Sequence
cagagcccagagttattgatgcagg

SEQ ID NO: 175604 - DNA, 25 bp, Probe Sequence
cagagccaagagtaatggcatgcgg

SEQ ID NO: 175605 - DNA, 25 bp, Probe Sequence
cagagcctggtggagaagctgcacg

SEQ ID NO: 175606 - DNA, 25 bp, Probe Sequence
cagagcgcggggcagacgcaaagtg

SEQ ID NO: 175607 - DNA, 25 bp, Probe Sequence
cagagacatgggccagggccaggag

SEQ ID NO: 175608 - DNA, 25 bp, Probe Sequence
cagagcagttcgccaggaacctgtc

SEQ ID NO: 175609 - DNA, 25 bp, Probe Sequence
cagagctcgtttagtgaaccgtcag

SEQ ID NO: 175610 - DNA, 25 bp, Probe Sequence
cagagctcgtttagtgaaccgtcag

SEQ ID NO: 175611 - DNA, 25 bp, Probe Sequence
cagagctcgtttagtgaaccgtcag

SEQ ID NO: 175612 - DNA, 25 bp, Probe Sequence
cagagctcgtttagtgaaccgtcag

SEQ ID NO: 175613 - DNA, 25 bp, Probe Sequence
cagagtgccatagtctgtgaccctg

SEQ ID NO: 175614 - DNA, 25 bp, Probe Sequence
cagagagcttagcctggagcacctt

SEQ ID NO: 175615 - DNA, 25 bp, Probe Sequence
cagaagcatctgggctaggcctctt

SEQ ID NO: 175616 - DNA, 25 bp, Probe Sequence
cagagagatcgggctcaggacctgt

SEQ ID NO: 175617 - DNA, 25 bp, Probe Sequence
cagaagactgattggagggccctat

SEQ ID NO: 175618 - DNA, 25 bp, Probe Sequence
cagaatccagtgggtgagtgccctc

SEQ ID NO: 175619 - DNA, 25 bp, Probe Sequence
cagaagccggagtcggagcacacct

SEQ ID NO: 175620 - DNA, 25 bp, Probe Sequence
cagaagcacaggaacgggaaacagt

SEQ ID NO: 175621 - DNA, 25 bp, Probe Sequence
cagacgaagggagtgctgggacgca

SEQ ID NO: 175622 - DNA, 25 bp, Probe Sequence
cagagcgcttggcacaggaggagcg

SEQ ID NO: 175623 - DNA, 25 bp, Probe Sequence
cagagggctacttcatggaggatgg

SEQ ID NO: 175624 - DNA, 25 bp, Probe Sequence
cagaagaggtctagctgtaggatgg

SEQ ID NO: 175625 - DNA, 25 bp, Probe Sequence
cagaataagatcctgctggccgagc

SEQ ID NO: 175626 - DNA, 25 bp, Probe Sequence
cagaagatggaggtgcagcgccggc

SEQ ID NO: 175627 - DNA, 25 bp, Probe Sequence
cagacagatgtggttgcatcctaac

SEQ ID NO: 175628 - DNA, 25 bp, Probe Sequence
cagaatgtggtaactctctaccagg

SEQ ID NO: 175629 - DNA, 25 bp, Probe Sequence
cagacatgcggtgaccactatcaaa

SEQ ID NO: 175630 - DNA, 25 bp, Probe Sequence
cagaagagcagttccacccaataac

SEQ ID NO: 175631 - DNA, 25 bp, Probe Sequence
cagaaagtgtgtgcctccgagaagc

SEQ ID NO: 175632 - DNA, 25 bp, Probe Sequence
cagacaaccagcgtttctcaggaag

SEQ ID NO: 175633 - DNA, 25 bp, Probe Sequence
cagaaagctctgttatattatgaaa

SEQ ID NO: 175634 - DNA, 25 bp, Probe Sequence
cagacaagctccctggattcaagat

SEQ ID NO: 175635 - DNA, 25 bp, Probe Sequence
cagagacagtacctgtaatgagaaa

SEQ ID NO: 175636 - DNA, 25 bp, Probe Sequence
cagacatcattttgtgggattataa

SEQ ID NO: 175637 - DNA, 25 bp, Probe Sequence
cagaagagtttgtgtgatcttgagc

SEQ ID NO: 175638 - DNA, 25 bp, Probe Sequence
cagagagaatgaatagggtgcttag

SEQ ID NO: 175639 - DNA, 25 bp, Probe Sequence
cagactgaatgttatggttttagaa

SEQ ID NO: 175640 - DNA, 25 bp, Probe Sequence
cagacgccgtgctaggtgttttagc

SEQ ID NO: 175641 - DNA, 25 bp, Probe Sequence
cagacctgcagctgagggtcctgtc

SEQ ID NO: 175642 - DNA, 25 bp, Probe Sequence
cagagcctgcaggtgatcgagtccg

SEQ ID NO: 175643 - DNA, 25 bp, Probe Sequence
cagagacgcagctgtctcagtgccc

SEQ ID NO: 175644 - DNA, 25 bp, Probe Sequence
cagacaccagcatgtagacctgccg

SEQ ID NO: 175645 - DNA, 25 bp, Probe Sequence
cagaagcagctgtttcaactccctg

SEQ ID NO: 175646 - DNA, 25 bp, Probe Sequence
cagaaccgtgctgcatactatcctc

SEQ ID NO: 175647 - DNA, 25 bp, Probe Sequence
cagaaccgtgctgcatactatcctc

SEQ ID NO: 175648 - DNA, 25 bp, Probe Sequence
cagaagcccagtgtcctatgtatgc

SEQ ID NO: 175649 - DNA, 25 bp, Probe Sequence
cagaagctccaagttcctgtcttct

SEQ ID NO: 175650 - DNA, 25 bp, Probe Sequence
cagaagcacatcgacttctctctgc

SEQ ID NO: 175651 - DNA, 25 bp, Probe Sequence
cagagcatcacaaatgcctctctct

SEQ ID NO: 175652 - DNA, 25 bp, Probe Sequence
cagagtcaccaagcatagcactgta

SEQ ID NO: 175653 - DNA, 25 bp, Probe Sequence
cagaccactctagccacagtatatt

SEQ ID NO: 175654 - DNA, 25 bp, Probe Sequence
cagacaagcaattacccagtttcct

SEQ ID NO: 175655 - DNA, 25 bp, Probe Sequence
cagatcaagcaagaaccagacccca

SEQ ID NO: 175656 - DNA, 25 bp, Probe Sequence
cagacatctgttgagacctgacccc

SEQ ID NO: 175657 - DNA, 25 bp, Probe Sequence
cagactggctcggagaacgacgccc

SEQ ID NO: 175658 - DNA, 25 bp, Probe Sequence
cagactgccgcctgacaaacggctc

SEQ ID NO: 175659 - DNA, 25 bp, Probe Sequence
cagacccgcttggccaagagaggca

SEQ ID NO: 175660 - DNA, 25 bp, Probe Sequence
cagaccccgtctggcaagaaatgca

SEQ ID NO: 175661 - DNA, 25 bp, Probe Sequence
cagaccccgtctggcaagaaatgca

SEQ ID NO: 175662 - DNA, 25 bp, Probe Sequence
cagaccccgtctggcaagaaatgca

SEQ ID NO: 175663 - DNA, 25 bp, Probe Sequence
cagactgcagccacttgcagcagga

SEQ ID NO: 175664 - DNA, 25 bp, Probe Sequence
cagactgcggcaagatcgaggtgga

SEQ ID NO: 175665 - DNA, 25 bp, Probe Sequence
cagtcacttgcaaccgtggaggagc

SEQ ID NO: 175666 - DNA, 25 bp, Probe Sequence
cagacacctgtgtgcctgaaggagc

SEQ ID NO: 175667 - DNA, 25 bp, Probe Sequence
cagatgacgtgatccttaaagactg

SEQ ID NO: 175668 - DNA, 25 bp, Probe Sequence
cagaagctgatatcccagaaagact

SEQ ID NO: 175669 - DNA, 25 bp, Probe Sequence
cagaagagcatatcccagaaggtga

SEQ ID NO: 175670 - DNA, 25 bp, Probe Sequence
cagacagacagtggccgaccaggtg

SEQ ID NO: 175671 - DNA, 25 bp, Probe Sequence
cagagcagaccctgtaccaggtaca

SEQ ID NO: 175672 - DNA, 25 bp, Probe Sequence
cagagcgactcggttaagggaaagc

SEQ ID NO: 175673 - DNA, 25 bp, Probe Sequence
cagagtacccttgtatggagagaag

SEQ ID NO: 175674 - DNA, 25 bp, Probe Sequence
cagactaccctaatttgtaaatggt

SEQ ID NO: 175675 - DNA, 25 bp, Probe Sequence
cagaaaacctccaaagtagatgtgg

SEQ ID NO: 175676 - DNA, 25 bp, Probe Sequence
caggattgacctctggggagtgatg

SEQ ID NO: 175677 - DNA, 25 bp, Probe Sequence
cagagaaagcttcattaggagttga

SEQ ID NO: 175678 - DNA, 25 bp, Probe Sequence
cagagatacctacagacggagtgct

SEQ ID NO: 175679 - DNA, 25 bp, Probe Sequence
cagagttcttacgggtggagtgtgg

SEQ ID NO: 175680 - DNA, 25 bp, Probe Sequence
cagatttttggccaggtggaatatg

SEQ ID NO: 175681 - DNA, 25 bp, Probe Sequence
cagttttccggagggcgagctgagc

SEQ ID NO: 175682 - DNA, 25 bp, Probe Sequence
cagatattttctggaaagggctgag

SEQ ID NO: 175683 - DNA, 25 bp, Probe Sequence
cagactgtttctgcaaaagcgaata

SEQ ID NO: 175684 - DNA, 25 bp, Probe Sequence
cagaagcttgacgcaccaagcggaa

SEQ ID NO: 175685 - DNA, 25 bp, Probe Sequence
cagaagtgtcatctctctctgagca

SEQ ID NO: 175686 - DNA, 25 bp, Probe Sequence
cagaagtgtcatctctctctgagca

SEQ ID NO: 175687 - DNA, 25 bp, Probe Sequence
cagagactggaccacagcactgact

SEQ ID NO: 175688 - DNA, 25 bp, Probe Sequence
cagaactgacacagcagatctccag

SEQ ID NO: 175689 - DNA, 25 bp, Probe Sequence
cagatcactgatccagaacacttca

SEQ ID NO: 175690 - DNA, 25 bp, Probe Sequence
cagacacagctgggacacatgccta

SEQ ID NO: 175691 - DNA, 25 bp, Probe Sequence
cagatgacacatgaaagcagctcca

SEQ ID NO: 175692 - DNA, 25 bp, Probe Sequence
cagaagcagcttgacagcctcacag

SEQ ID NO: 175693 - DNA, 25 bp, Probe Sequence
cagatagatcctgaagttacagatg

SEQ ID NO: 175694 - DNA, 25 bp, Probe Sequence
cagattgaagttacatttgacattg

SEQ ID NO: 175695 - DNA, 25 bp, Probe Sequence
cagatggactgcttcctttggagta

SEQ ID NO: 175696 - DNA, 25 bp, Probe Sequence
cagatgggctgccacttttcggata

SEQ ID NO: 175697 - DNA, 25 bp, Probe Sequence
cagagataccgacttgttccttacg

SEQ ID NO: 175698 - DNA, 25 bp, Probe Sequence
cagattacaccacggattccttaag

SEQ ID NO: 175699 - DNA, 25 bp, Probe Sequence
cagattgagacccggtatccaaaaa

SEQ ID NO: 175700 - DNA, 25 bp, Probe Sequence
cagtacgagactctgttccaaaaaa

SEQ ID NO: 175701 - DNA, 25 bp, Probe Sequence
cagaccgagactccgtctcaaaaaa

SEQ ID NO: 175702 - DNA, 25 bp, Probe Sequence
cagagtgaaactccgtctccaaaaa

SEQ ID NO: 175703 - DNA, 25 bp, Probe Sequence
cagagggagactctgtctcgaaaga

SEQ ID NO: 175704 - DNA, 25 bp, Probe Sequence
cagacggagaagatgtgctagggag

SEQ ID NO: 175705 - DNA, 25 bp, Probe Sequence
cagaagccacaaggattgaagggaa

SEQ ID NO: 175706 - DNA, 25 bp, Probe Sequence
cagaagctcaccagaacaagctaga

SEQ ID NO: 175707 - DNA, 25 bp, Probe Sequence
cagaacacagctcctagacaagtag

SEQ ID NO: 175708 - DNA, 25 bp, Probe Sequence
cagaacaccttccagaagctgctcc

SEQ ID NO: 175709 - DNA, 25 bp, Probe Sequence
cagagacacacctggaaatgctgca

SEQ ID NO: 175710 - DNA, 25 bp, Probe Sequence
cagaaagctgcctggtatatccaaa

SEQ ID NO: 175711 - DNA, 25 bp, Probe Sequence
cagagaattgcccggctttctaaca

SEQ ID NO: 175712 - DNA, 25 bp, Probe Sequence
cagaacatgtgggcgcctttgtgga

SEQ ID NO: 175713 - DNA, 25 bp, Probe Sequence
cagaagagctgggcaccttagcgac

SEQ ID NO: 175714 - DNA, 25 bp, Probe Sequence
cagaggactgggacacaccacgaga

SEQ ID NO: 175715 - DNA, 25 bp, Probe Sequence
cagatggaccagctagcaccatcca

SEQ ID NO: 175716 - DNA, 25 bp, Probe Sequence
cagaggcaaggcgtcagcaggcatc

SEQ ID NO: 175717 - DNA, 25 bp, Probe Sequence
cagagatgaatgcagtagaggccat

SEQ ID NO: 175718 - DNA, 25 bp, Probe Sequence
cagatgcatgccacagtagatgtcc

SEQ ID NO: 175719 - DNA, 25 bp, Probe Sequence
cagatagccatggcagctcagatgg

SEQ ID NO: 175720 - DNA, 25 bp, Probe Sequence
cagaagccatgagttcagttagctc

SEQ ID NO: 175721 - DNA, 25 bp, Probe Sequence
caggacaaatgcttcagtccgccga

SEQ ID NO: 175722 - DNA, 25 bp, Probe Sequence
cagagcaagaactgcactgcatctc

SEQ ID NO: 175723 - DNA, 25 bp, Probe Sequence
cagacagagttcagctctcattcaa

SEQ ID NO: 175724 - DNA, 25 bp, Probe Sequence
cagactggcattctctctatggcca

SEQ ID NO: 175725 - DNA, 25 bp, Probe Sequence
cagactggtctctttttgagatctt

SEQ ID NO: 175726 - DNA, 25 bp, Probe Sequence
cagatgctcgttctttagcagacat

SEQ ID NO: 175727 - DNA, 25 bp, Probe Sequence
cagacagtttgtttctatgcagaag

SEQ ID NO: 175728 - DNA, 25 bp, Probe Sequence
cagacagtctgttatgcactgtggt

SEQ ID NO: 175729 - DNA, 25 bp, Probe Sequence
cagaggtcagtatctcagcgtgtga

SEQ ID NO: 175730 - DNA, 25 bp, Probe Sequence
cagagcagtcgctactgctcagcag

SEQ ID NO: 175731 - DNA, 25 bp, Probe Sequence
cagactgatcagtcactctcagaaa

SEQ ID NO: 175732 - DNA, 25 bp, Probe Sequence
cagagttagatcctctcagaacaga

SEQ ID NO: 175733 - DNA, 25 bp, Probe Sequence
cagagattgagcttctgcctaccaa

SEQ ID NO: 175734 - DNA, 25 bp, Probe Sequence
cagaaatgagcagttcgctcctccc

SEQ ID NO: 175735 - DNA, 25 bp, Probe Sequence
cagaaattgagttccagcctctctc

SEQ ID NO: 175736 - DNA, 25 bp, Probe Sequence
cagaaattgtttgctatctctcttc

SEQ ID NO: 175737 - DNA, 25 bp, Probe Sequence
cagaaacatgtcctttgtgcctact

SEQ ID NO: 175738 - DNA, 25 bp, Probe Sequence
cagaccctgatgctatttacatccc

SEQ ID NO: 175739 - DNA, 25 bp, Probe Sequence
cagaacctgtgattattctcgcatg

SEQ ID NO: 175740 - DNA, 25 bp, Probe Sequence
cagacagcttgtgattcgctctaga

SEQ ID NO: 175741 - DNA, 25 bp, Probe Sequence
cagacccttattccagatgctgaga

SEQ ID NO: 175742 - DNA, 25 bp, Probe Sequence
cagacacagactatgcagatgggag

SEQ ID NO: 175743 - DNA, 25 bp, Probe Sequence
cagacaatttttcgctccatgatgc

SEQ ID NO: 175744 - DNA, 25 bp, Probe Sequence
cagacattctatttggtcaatgcag

SEQ ID NO: 175745 - DNA, 25 bp, Probe Sequence
cagaccctgatagagtcagatctgt

SEQ ID NO: 175746 - DNA, 25 bp, Probe Sequence
cagaccagtgaaagagtagtgcatt

SEQ ID NO: 175747 - DNA, 25 bp, Probe Sequence
cagaccaagtatagagggcagcttc

SEQ ID NO: 175748 - DNA, 25 bp, Probe Sequence
cagatccacaaatttgaggagctta

SEQ ID NO: 175749 - DNA, 25 bp, Probe Sequence
cagacaccacaacaggagacttaac

SEQ ID NO: 175750 - DNA, 25 bp, Probe Sequence
cagtcgccacaagaaacgtttattg

SEQ ID NO: 175751 - DNA, 25 bp, Probe Sequence
cagaggccggaacacacctttatgg

SEQ ID NO: 175752 - DNA, 25 bp, Probe Sequence
cagaggacggatctagctcctgtat

SEQ ID NO: 175753 - DNA, 25 bp, Probe Sequence
cagaggttggagcttcatatgctga

SEQ ID NO: 175754 - DNA, 25 bp, Probe Sequence
cagagagctctggtctgttgtatct

SEQ ID NO: 175755 - DNA, 25 bp, Probe Sequence
cagacactgctgctcatggttctgc

SEQ ID NO: 175756 - DNA, 25 bp, Probe Sequence
cagatcctgcttcatagattgcatc

SEQ ID NO: 175757 - DNA, 25 bp, Probe Sequence
cagatcatctgatttatagaggatt

SEQ ID NO: 175758 - DNA, 25 bp, Probe Sequence
cagaacatgatcctactgaggtcat

SEQ ID NO: 175759 - DNA, 25 bp, Probe Sequence
cagaactgaataactgcagtgactt

SEQ ID NO: 175760 - DNA, 25 bp, Probe Sequence
cagtcacgttaaccagatgactttg

SEQ ID NO: 175761 - DNA, 25 bp, Probe Sequence
cagtaaatgctttggagaagtcttg

SEQ ID NO: 175762 - DNA, 25 bp, Probe Sequence
cagtcattccttagtaaagtttcca

SEQ ID NO: 175763 - DNA, 25 bp, Probe Sequence
cttgtctaatttcaataactaccag

SEQ ID NO: 175764 - DNA, 25 bp, Probe Sequence
ctagtggcgttttttaacttctcag

SEQ ID NO: 175765 - DNA, 25 bp, Probe Sequence
ctagggaaatgcctttgtactttag

SEQ ID NO: 175766 - DNA, 25 bp, Probe Sequence
cagattgaaagggttttagatttga

SEQ ID NO: 175767 - DNA, 25 bp, Probe Sequence
cagattgaacggatccctggctatg

SEQ ID NO: 175768 - DNA, 25 bp, Probe Sequence
tcatgactgaaagaagacacgagcg

SEQ ID NO: 175769 - DNA, 25 bp, Probe Sequence
cagacttagggactttcgtactggc

SEQ ID NO: 175770 - DNA, 25 bp, Probe Sequence
cagacttagggacttctactgccag

SEQ ID NO: 175771 - DNA, 25 bp, Probe Sequence
cagaccgagggctgctgcataagcc

SEQ ID NO: 175772 - DNA, 25 bp, Probe Sequence
cagtccggggcgctgcatagagtgc

SEQ ID NO: 175773 - DNA, 25 bp, Probe Sequence
cagaccgcggcctaataatgagtga

SEQ ID NO: 175774 - DNA, 25 bp, Probe Sequence
cagagggcggccaaatccagtatac

SEQ ID NO: 175775 - DNA, 25 bp, Probe Sequence
cagagccggtggtagaccttacagc

SEQ ID NO: 175776 - DNA, 25 bp, Probe Sequence
cagacttgggagtgtcctgatatcc

SEQ ID NO: 175777 - DNA, 25 bp, Probe Sequence
cagacttaggactatttgtttccct

SEQ ID NO: 175778 - DNA, 25 bp, Probe Sequence
cagactatcaggcccatttgtctcc

SEQ ID NO: 175779 - DNA, 25 bp, Probe Sequence
cagacttgggtggcaattcctcaac

SEQ ID NO: 175780 - DNA, 25 bp, Probe Sequence
cagttagggctcctattcaacacac

SEQ ID NO: 175781 - DNA, 25 bp, Probe Sequence
caggtcggtctgattccaaaactgc

SEQ ID NO: 175782 - DNA, 25 bp, Probe Sequence
caggctttgaccgtgtccgaaatgc

SEQ ID NO: 175783 - DNA, 25 bp, Probe Sequence
cagactcctaaggtggccaaacagg

SEQ ID NO: 175784 - DNA, 25 bp, Probe Sequence
cagttcttggaggatgctggaaaca

SEQ ID NO: 175785 - DNA, 25 bp, Probe Sequence
cagttgttggagcactgaccagaac

SEQ ID NO: 175786 - DNA, 25 bp, Probe Sequence
cagatggtctgcagcgagtcacacc

SEQ ID NO: 175787 - DNA, 25 bp, Probe Sequence
cagaggagctaggccagtccatctg

SEQ ID NO: 175788 - DNA, 25 bp, Probe Sequence
cagagttgctaggctgctgctgtat

SEQ ID NO: 175789 - DNA, 25 bp, Probe Sequence
cagagttgctaggctgctgctgtat

SEQ ID NO: 175790 - DNA, 25 bp, Probe Sequence
cagaggatccatgcttgctctggcc

SEQ ID NO: 175791 - DNA, 25 bp, Probe Sequence
cagatgtgatccaccatgttggcac

SEQ ID NO: 175792 - DNA, 25 bp, Probe Sequence
cagagtcatcctcgggtgatgcctt

SEQ ID NO: 175793 - DNA, 25 bp, Probe Sequence
cagaacaccatggggcttggatacc

SEQ ID NO: 175794 - DNA, 25 bp, Probe Sequence
cagatcacacggcggcttggagaaa

SEQ ID NO: 175795 - DNA, 25 bp, Probe Sequence
cagatcctttggcatccggagaaat

SEQ ID NO: 175796 - DNA, 25 bp, Probe Sequence
cagtttaggagcaccttggaagatt

SEQ ID NO: 175797 - DNA, 25 bp, Probe Sequence
cagttaagcaggctcctcggaagtc

SEQ ID NO: 175798 - DNA, 25 bp, Probe Sequence
cagtaaaccgagaccatttgcagga

SEQ ID NO: 175799 - DNA, 25 bp, Probe Sequence
cagtaaagcctgaaccatgcctgcc

SEQ ID NO: 175800 - DNA, 25 bp, Probe Sequence
cagtaaagcctgaaccatgcctgcc

SEQ ID NO: 175801 - DNA, 25 bp, Probe Sequence
cagtacaaggcacacttctggccac

SEQ ID NO: 175802 - DNA, 25 bp, Probe Sequence
cagatttcggaaacttctggcagcc

SEQ ID NO: 175803 - DNA, 25 bp, Probe Sequence
cagatcaatcgtgcatccttagtga

SEQ ID NO: 175804 - DNA, 25 bp, Probe Sequence
cagagaactgcatctcagcagtagg

SEQ ID NO: 175805 - DNA, 25 bp, Probe Sequence
cagagcaagtcactctcgattggtt

SEQ ID NO: 175806 - DNA, 25 bp, Probe Sequence
cagacaaccctcagatttgatgatt

SEQ ID NO: 175807 - DNA, 25 bp, Probe Sequence
cagacaaccatctctttttatatta

SEQ ID NO: 175808 - DNA, 25 bp, Probe Sequence
cagagcaagcttttttattttttat

SEQ ID NO: 175809 - DNA, 25 bp, Probe Sequence
cagagccacctagtttgtctttgtc

SEQ ID NO: 175810 - DNA, 25 bp, Probe Sequence
cagaccctcagaatatttctcttag

SEQ ID NO: 175811 - DNA, 25 bp, Probe Sequence
cagagcccaaggatgtctcttttca

SEQ ID NO: 175812 - DNA, 25 bp, Probe Sequence
cagagacgcctggatggctctgtta

SEQ ID NO: 175813 - DNA, 25 bp, Probe Sequence
cagagcggcctgggcgctctgagtc

SEQ ID NO: 175814 - DNA, 25 bp, Probe Sequence
cagagaagcctcaccattgacttct

SEQ ID NO: 175815 - DNA, 25 bp, Probe Sequence
cagattcccttgcaatcgatttctc

SEQ ID NO: 175816 - DNA, 25 bp, Probe Sequence
cagacctctctgtgcaataacttgt

SEQ ID NO: 175817 - DNA, 25 bp, Probe Sequence
cagactcagctaaacaataagttat

SEQ ID NO: 175818 - DNA, 25 bp, Probe Sequence
cagactcatcctataagaagtgcta

SEQ ID NO: 175819 - DNA, 25 bp, Probe Sequence
cagagatcccggtacatgaagctta

SEQ ID NO: 175820 - DNA, 25 bp, Probe Sequence
cagagtccacttttgtcacaattca

SEQ ID NO: 175821 - DNA, 25 bp, Probe Sequence
cagaaacgtgtttatcagcaagtcg

SEQ ID NO: 175822 - DNA, 25 bp, Probe Sequence
cagataacctgatctaccaagtggc

SEQ ID NO: 175823 - DNA, 25 bp, Probe Sequence
cagactgagcgtgcctaccaaaagc

SEQ ID NO: 175824 - DNA, 25 bp, Probe Sequence
caggcagcaatgccacactgaccaa

SEQ ID NO: 175825 - DNA, 25 bp, Probe Sequence
cagaggcaatgccaccatgatacag

SEQ ID NO: 175826 - DNA, 25 bp, Probe Sequence
cagacgaagctactctggcatctgc

SEQ ID NO: 175827 - DNA, 25 bp, Probe Sequence
cagaaagactcactgctcacagctg

SEQ ID NO: 175828 - DNA, 25 bp, Probe Sequence
cagagaggcttgactgccacagcat

SEQ ID NO: 175829 - DNA, 25 bp, Probe Sequence
cagatgattgctaattccttgaagg

SEQ ID NO: 175830 - DNA, 25 bp, Probe Sequence
cagaaatgtgaagtgctagctgaag

SEQ ID NO: 175831 - DNA, 25 bp, Probe Sequence
cagacacggacagtgacaggaggga

SEQ ID NO: 175832 - DNA, 25 bp, Probe Sequence
cagaccgtcaatggagcagaggcgg

SEQ ID NO: 175833 - DNA, 25 bp, Probe Sequence
cagaccagccactgcagcagacaga

SEQ ID NO: 175834 - DNA, 25 bp, Probe Sequence
cagatgcatccgagacagaacatgc

SEQ ID NO: 175835 - DNA, 25 bp, Probe Sequence
cagagcatcctggccagaacaagcc

SEQ ID NO: 175836 - DNA, 25 bp, Probe Sequence
cagagcatcctggccagaacaagcc

SEQ ID NO: 175837 - DNA, 25 bp, Probe Sequence
cagactcaagtcagatacaaccctg

SEQ ID NO: 175838 - DNA, 25 bp, Probe Sequence
cagaccacgtgggacagaactcctg

SEQ ID NO: 175839 - DNA, 25 bp, Probe Sequence
cagacccaggacacggagctcgtgg

SEQ ID NO: 175840 - DNA, 25 bp, Probe Sequence
cagaccttggacagccagatccagg

SEQ ID NO: 175841 - DNA, 25 bp, Probe Sequence
cagactttgcgaacgctacgccatg

SEQ ID NO: 175842 - DNA, 25 bp, Probe Sequence
cagacatttcagatctctaatgcat

SEQ ID NO: 175843 - DNA, 25 bp, Probe Sequence
cagacagaccagattctcacagaaa

SEQ ID NO: 175844 - DNA, 25 bp, Probe Sequence
cagacagcctgcgtgttgtaaataa

SEQ ID NO: 175845 - DNA, 25 bp, Probe Sequence
cagactgctgtggatgtttttcgaa

SEQ ID NO: 175846 - DNA, 25 bp, Probe Sequence
cagactgctgtggatcttcacttgt

SEQ ID NO: 175847 - DNA, 25 bp, Probe Sequence
cagacatgtctttctatctctctgt

SEQ ID NO: 175848 - DNA, 25 bp, Probe Sequence
cagagatgcttctaagatccttgtt

SEQ ID NO: 175849 - DNA, 25 bp, Probe Sequence
cagagagctaaattacaattgtcat

SEQ ID NO: 175850 - DNA, 25 bp, Probe Sequence
cagtgactagaatataagggaggta

SEQ ID NO: 175851 - DNA, 25 bp, Probe Sequence
cagtgagtgaaaccatcccggggtg

SEQ ID NO: 175852 - DNA, 25 bp, Probe Sequence
cagggaaactaccccaatgttatgt

SEQ ID NO: 175853 - DNA, 25 bp, Probe Sequence
cagtttaaccctccctagttgaatg

SEQ ID NO: 175854 - DNA, 25 bp, Probe Sequence
cagattaaatccattcctagaccct

SEQ ID NO: 175855 - DNA, 25 bp, Probe Sequence
cagattaacttacaaccaacctcca

SEQ ID NO: 175856 - DNA, 25 bp, Probe Sequence
caggtgatattttcaaaccccctct

SEQ ID NO: 175857 - DNA, 25 bp, Probe Sequence
cagggcatattactgacaccccact

SEQ ID NO: 175858 - DNA, 25 bp, Probe Sequence
cagatggtttgggccacttccaatc

SEQ ID NO: 175859 - DNA, 25 bp, Probe Sequence
catgggttttcagcctcttaagccc

SEQ ID NO: 175860 - DNA, 25 bp, Probe Sequence
cagggtccatgtatacgttggagga

SEQ ID NO: 175861 - DNA, 25 bp, Probe Sequence
cagattatccttgtactttgaggag

SEQ ID NO: 175862 - DNA, 25 bp, Probe Sequence
cagattctttgtggatactattaaa

SEQ ID NO: 175863 - DNA, 25 bp, Probe Sequence
cagattattggtgaacagctgtaaa

SEQ ID NO: 175864 - DNA, 25 bp, Probe Sequence
cagacttgccgttaacagcattaaa

SEQ ID NO: 175865 - DNA, 25 bp, Probe Sequence
cagactgggaggcatgacaagtaaa

SEQ ID NO: 175866 - DNA, 25 bp, Probe Sequence
cagactgggatgagcaacgggctga

SEQ ID NO: 175867 - DNA, 25 bp, Probe Sequence
cagacatgggagtgccaaggtggcc

SEQ ID NO: 175868 - DNA, 25 bp, Probe Sequence
cagactgtggagtgccatgcagttt

SEQ ID NO: 175869 - DNA, 25 bp, Probe Sequence
cagagggtgtgtgcctagctgtgga

SEQ ID NO: 175870 - DNA, 25 bp, Probe Sequence
cagagtgctgacgccttactggcaa

SEQ ID NO: 175871 - DNA, 25 bp, Probe Sequence
cagagtctgggcctctgactctgag

SEQ ID NO: 175872 - DNA, 25 bp, Probe Sequence
cagactctgtcgttctatcatcaga

SEQ ID NO: 175873 - DNA, 25 bp, Probe Sequence
cagacattccagtgatagcatccaa

SEQ ID NO: 175874 - DNA, 25 bp, Probe Sequence
cagacttctctgtagatcgctgagc

SEQ ID NO: 175875 - DNA, 25 bp, Probe Sequence
cagagcttttattgtcacccaaaga

SEQ ID NO: 175876 - DNA, 25 bp, Probe Sequence
cagagtctttaaacactcctcaaaa

SEQ ID NO: 175877 - DNA, 25 bp, Probe Sequence
caggccaactactcactaatggaaa

SEQ ID NO: 175878 - DNA, 25 bp, Probe Sequence
cagagcacatttgcctactaatgga

SEQ ID NO: 175879 - DNA, 25 bp, Probe Sequence
cagagcaatttctgtttaagaaacc

SEQ ID NO: 175880 - DNA, 25 bp, Probe Sequence
cagagcacttcttcgagtacaagaa

SEQ ID NO: 175881 - DNA, 25 bp, Probe Sequence
cagagactatctccagcaggaatga

SEQ ID NO: 175882 - DNA, 25 bp, Probe Sequence
cagagcctacatgcgcagacaggac

SEQ ID NO: 175883 - DNA, 25 bp, Probe Sequence
cagagcctacccaaataagaaggaa

SEQ ID NO: 175884 - DNA, 25 bp, Probe Sequence
cagaccagccaagaaaaaagagaga

SEQ ID NO: 175885 - DNA, 25 bp, Probe Sequence
cagaccaggccacattaacagaaat

SEQ ID NO: 175886 - DNA, 25 bp, Probe Sequence
cagaccaggccacattaacagaaat

SEQ ID NO: 175887 - DNA, 25 bp, Probe Sequence
cagacatcactgccaacttagacag

SEQ ID NO: 175888 - DNA, 25 bp, Probe Sequence
cagagcatacccaaagatcagcatc

SEQ ID NO: 175889 - DNA, 25 bp, Probe Sequence
cagacatgatgcagctatggagtga

SEQ ID NO: 175890 - DNA, 25 bp, Probe Sequence
cagacatgcagctgtgtgtggcagt

SEQ ID NO: 175891 - DNA, 25 bp, Probe Sequence
cagacatagcatcttgtggctttgc

SEQ ID NO: 175892 - DNA, 25 bp, Probe Sequence
cagagtacccattgagctgtttcgc

SEQ ID NO: 175893 - DNA, 25 bp, Probe Sequence
cagaggacccattcattgcttctgc

SEQ ID NO: 175894 - DNA, 25 bp, Probe Sequence
cagaggataccattgtcttcctgcc

SEQ ID NO: 175895 - DNA, 25 bp, Probe Sequence
cagagaaagtcagtgttatccagga

SEQ ID NO: 175896 - DNA, 25 bp, Probe Sequence
cattaaagtgcagttcctccggaaa

SEQ ID NO: 175897 - DNA, 25 bp, Probe Sequence
catcttcaagatgtaccttacgtca

SEQ ID NO: 175898 - DNA, 25 bp, Probe Sequence
catgtagcaactgtcctttactaaa

SEQ ID NO: 175899 - DNA, 25 bp, Probe Sequence
cagtatacccaaacttttatataat

SEQ ID NO: 175900 - DNA, 25 bp, Probe Sequence
cagtttcttactgttttgtatcaaa

SEQ ID NO: 175901 - DNA, 25 bp, Probe Sequence
cagttcttattgtgttggttctaaa

SEQ ID NO: 175902 - DNA, 25 bp, Probe Sequence
catgttctagtctgctttggtacta

SEQ ID NO: 175903 - DNA, 25 bp, Probe Sequence
catgtttgaccgctccgaggtctat

SEQ ID NO: 175904 - DNA, 25 bp, Probe Sequence
cagttggtctcgcaccagatagtat

SEQ ID NO: 175905 - DNA, 25 bp, Probe Sequence
cagttgcggttgctctttgggattg

SEQ ID NO: 175906 - DNA, 25 bp, Probe Sequence
cagttggtgactctgtgactggcca

SEQ ID NO: 175907 - DNA, 25 bp, Probe Sequence
cagtcggtacttagccacctgatga

SEQ ID NO: 175908 - DNA, 25 bp, Probe Sequence
cagtcgtctaagtccaaccaataag

SEQ ID NO: 175909 - DNA, 25 bp, Probe Sequence
cagtctgtccaatttaccctataat

SEQ ID NO: 175910 - DNA, 25 bp, Probe Sequence
cagtagtctaaaacacgttcatgtg

SEQ ID NO: 175911 - DNA, 25 bp, Probe Sequence
cagatagttatattaggcagacata

SEQ ID NO: 175912 - DNA, 25 bp, Probe Sequence
cagatgctttcatttacacagatat

SEQ ID NO: 175913 - DNA, 25 bp, Probe Sequence
cagagtctctgcgttacaaactcct

SEQ ID NO: 175914 - DNA, 25 bp, Probe Sequence
cagagcacttctgaaatacacacca

SEQ ID NO: 175915 - DNA, 25 bp, Probe Sequence
cagatcctatctcaataaaaacccc

SEQ ID NO: 175916 - DNA, 25 bp, Probe Sequence
cagaccatgtttccaagagaaacct

SEQ ID NO: 175917 - DNA, 25 bp, Probe Sequence
cagacctgtggctccaaggaatctt

SEQ ID NO: 175918 - DNA, 25 bp, Probe Sequence
catgagctttggtgcggacgaacaa

SEQ ID NO: 175919 - DNA, 25 bp, Probe Sequence
cagagtgttgtactcgtaaaacaag

SEQ ID NO: 175920 - DNA, 25 bp, Probe Sequence
cagacttctatcctcattcaaaaat

SEQ ID NO: 175921 - DNA, 25 bp, Probe Sequence
cagactgtcgacattccagaaaatg

SEQ ID NO: 175922 - DNA, 25 bp, Probe Sequence
cagttactgactttccatcaaatag

SEQ ID NO: 175923 - DNA, 25 bp, Probe Sequence
cagttgacgccttcccagagtcaac

SEQ ID NO: 175924 - DNA, 25 bp, Probe Sequence
cagatttcaggttcctaaggacagc

SEQ ID NO: 175925 - DNA, 25 bp, Probe Sequence
cagagacagggttgcttataggaag

SEQ ID NO: 175926 - DNA, 25 bp, Probe Sequence
cagagacagtctacgccttaacaag

SEQ ID NO: 175927 - DNA, 25 bp, Probe Sequence
cagttcagtcgacggcaacaacacg

SEQ ID NO: 175928 - DNA, 25 bp, Probe Sequence
tcgttcagccctagtagggaccagt

SEQ ID NO: 175929 - DNA, 25 bp, Probe Sequence
cagttacccttgtgtatcctgcaga

SEQ ID NO: 175930 - DNA, 25 bp, Probe Sequence
cagtttgtaccttttagcctggctg

SEQ ID NO: 175931 - DNA, 25 bp, Probe Sequence
cagtttgtaccaaaaagccggctgg

SEQ ID NO: 175932 - DNA, 25 bp, Probe Sequence
cagtattcccacagaggggtagctg

SEQ ID NO: 175933 - DNA, 25 bp, Probe Sequence
cagttttgctcatctagggaaaata

SEQ ID NO: 175934 - DNA, 25 bp, Probe Sequence
cagtaatctgcctcctagtgaaagt

SEQ ID NO: 175935 - DNA, 25 bp, Probe Sequence
cagtacctgctctcaaattgaaaaa

SEQ ID NO: 175936 - DNA, 25 bp, Probe Sequence
cagagatccagataagagttaaaac

SEQ ID NO: 175937 - DNA, 25 bp, Probe Sequence
cagagtctctgatcaagcagattcc

SEQ ID NO: 175938 - DNA, 25 bp, Probe Sequence
cagagactctgatagagagcaagat

SEQ ID NO: 175939 - DNA, 25 bp, Probe Sequence
cggaatgctgtggatggaaaatggt

SEQ ID NO: 175940 - DNA, 25 bp, Probe Sequence
cagagttgtgtgtcaggaaattcct

SEQ ID NO: 175941 - DNA, 25 bp, Probe Sequence
cagtttggtggcatgctacttgcct

SEQ ID NO: 175942 - DNA, 25 bp, Probe Sequence
cagtttcgctcagagcttgtctcct

SEQ ID NO: 175943 - DNA, 25 bp, Probe Sequence
cagatggttctcgaatcgtcttccg

SEQ ID NO: 175944 - DNA, 25 bp, Probe Sequence
catgattgctttcaatgccctttgc

SEQ ID NO: 175945 - DNA, 25 bp, Probe Sequence
cagttatgatgtcattccctctggc

SEQ ID NO: 175946 - DNA, 25 bp, Probe Sequence
cagatgcaaaatcaccccttctgca

SEQ ID NO: 175947 - DNA, 25 bp, Probe Sequence
cagatgaaaaatgtcacctttgaac

SEQ ID NO: 175948 - DNA, 25 bp, Probe Sequence
catgaaggaaacacacctcttattc

SEQ ID NO: 175949 - DNA, 25 bp, Probe Sequence
cagactggaaacgggactttctatt

SEQ ID NO: 175950 - DNA, 25 bp, Probe Sequence
cagggagcaccaaaggaccttcgtt

SEQ ID NO: 175951 - DNA, 25 bp, Probe Sequence
cagataagagttaaaaccttttatg

SEQ ID NO: 175952 - DNA, 25 bp, Probe Sequence
caggacgggcccaaagttatttatg

SEQ ID NO: 175953 - DNA, 25 bp, Probe Sequence
cagataggggacggaaggtcgtttg

SEQ ID NO: 175954 - DNA, 25 bp, Probe Sequence
cagatggggctgttaaagggttggg

SEQ ID NO: 175955 - DNA, 25 bp, Probe Sequence
cagagttggcttcagaaggtgtgta

SEQ ID NO: 175956 - DNA, 25 bp, Probe Sequence
cagttgtggcgtccagaaagcttcc

SEQ ID NO: 175957 - DNA, 25 bp, Probe Sequence
cagttgttggcttcagcaaatataa

SEQ ID NO: 175958 - DNA, 25 bp, Probe Sequence
cagagtgtatacatgcacctgaaaa

SEQ ID NO: 175959 - DNA, 25 bp, Probe Sequence
cagagtgtcatccttgtgcttaaga

SEQ ID NO: 175960 - DNA, 25 bp, Probe Sequence
cagagcgagactctgtctcaagaaa

SEQ ID NO: 175961 - DNA, 25 bp, Probe Sequence
cagagcaagattccatctcaaaaaa

SEQ ID NO: 175962 - DNA, 25 bp, Probe Sequence
cagagaagactttatacaaccagtt

SEQ ID NO: 175963 - DNA, 25 bp, Probe Sequence
caggaggattgtttggaaccagttc

SEQ ID NO: 175964 - DNA, 25 bp, Probe Sequence
cgggatatttttcaatccactttag

SEQ ID NO: 175965 - DNA, 25 bp, Probe Sequence
cggataacttgctgtttctcacgtt

SEQ ID NO: 175966 - DNA, 25 bp, Probe Sequence
cagagtggacttgtgttttttcttt

SEQ ID NO: 175967 - DNA, 25 bp, Probe Sequence
caggtacactcctgggagttttgtt

SEQ ID NO: 175968 - DNA, 25 bp, Probe Sequence
caggaacatccctccttattttgtg

SEQ ID NO: 175969 - DNA, 25 bp, Probe Sequence
cagagacaaggactttggtttttgt

SEQ ID NO: 175970 - DNA, 25 bp, Probe Sequence
caggacaagtacataagactttaaa

SEQ ID NO: 175971 - DNA, 25 bp, Probe Sequence
cagggaactgagctaatactttttt

SEQ ID NO: 175972 - DNA, 25 bp, Probe Sequence
ctatggccctggcctagcatacgta

SEQ ID NO: 175973 - DNA, 25 bp, Probe Sequence
cagtgtccctggagcaatacctgat

SEQ ID NO: 175974 - DNA, 25 bp, Probe Sequence
cagtatagccggtgaaccctgatac

SEQ ID NO: 175975 - DNA, 25 bp, Probe Sequence
cagtgtacctacggaaatcctaact

SEQ ID NO: 175976 - DNA, 25 bp, Probe Sequence
cagttcccaccagtaaaattatcct

SEQ ID NO: 175977 - DNA, 25 bp, Probe Sequence
catgttcaacccgtaactactacta

SEQ ID NO: 175978 - DNA, 25 bp, Probe Sequence
cagttaactctcttaactcccttat

SEQ ID NO: 175979 - DNA, 25 bp, Probe Sequence
cagattaagtgttttaactccctga

SEQ ID NO: 175980 - DNA, 25 bp, Probe Sequence
cagttgaggtgttttatgtcacgca

SEQ ID NO: 175981 - DNA, 25 bp, Probe Sequence
cagatcggtggccttgatgttccgc

SEQ ID NO: 175982 - DNA, 25 bp, Probe Sequence
cagatggtgaagccttgggactcgc

SEQ ID NO: 175983 - DNA, 25 bp, Probe Sequence
cagagcgagaagcccggaggttgcg

SEQ ID NO: 175984 - DNA, 25 bp, Probe Sequence
cagagctgagcactcagcccgggag

SEQ ID NO: 175985 - DNA, 25 bp, Probe Sequence
cagagcgtgaatgggatcgggacaa

SEQ ID NO: 175986 - DNA, 25 bp, Probe Sequence
cagaggcataaggttcgggaagagg

SEQ ID NO: 175987 - DNA, 25 bp, Probe Sequence
cagagcgaaagcatttgccaagaat

SEQ ID NO: 175988 - DNA, 25 bp, Probe Sequence
cagaccaaaggatcgccatcgacct

SEQ ID NO: 175989 - DNA, 25 bp, Probe Sequence
cagtcgtgacatcaaccctagacct

SEQ ID NO: 175990 - DNA, 25 bp, Probe Sequence
cagtcccaatgtaaacctaaccata

SEQ ID NO: 175991 - DNA, 25 bp, Probe Sequence
cagttcctatgtaaagcctgaggga

SEQ ID NO: 175992 - DNA, 25 bp, Probe Sequence
cagtcccctgctaaagttgctcagg

SEQ ID NO: 175993 - DNA, 25 bp, Probe Sequence
cagtcccctgctaaagttgctcagg

SEQ ID NO: 175994 - DNA, 25 bp, Probe Sequence
cagtcccctgctaaagttgctcagg

SEQ ID NO: 175995 - DNA, 25 bp, Probe Sequence
cagtcccctgctaaagttgctcagg

SEQ ID NO: 175996 - DNA, 25 bp, Probe Sequence
cagtagccagtgctgacttctctag

SEQ ID NO: 175997 - DNA, 25 bp, Probe Sequence
cagtccagtgctcagacctttagac

SEQ ID NO: 175998 - DNA, 25 bp, Probe Sequence
cagatccggtcccaggttatgacac

SEQ ID NO: 175999 - DNA, 25 bp, Probe Sequence
cagtcttggtttttgtttgccctgc

SEQ ID NO: 176000 - DNA, 25 bp, Probe Sequence
cagtttgagtttgaccccaatgcca

SEQ ID NO: 176001 - DNA, 25 bp, Probe Sequence
cagtttgattaatagactccattcc

SEQ ID NO: 176002 - DNA, 25 bp, Probe Sequence
cagttcttttcctaaatcgattcgg

SEQ ID NO: 176003 - DNA, 25 bp, Probe Sequence
cagttttttggataatacagctttt

SEQ ID NO: 176004 - DNA, 25 bp, Probe Sequence
cagttagtttgcgggaactcagctc

SEQ ID NO: 176005 - DNA, 25 bp, Probe Sequence
cagtatagttctgtatcaaatccaa

SEQ ID NO: 176006 - DNA, 25 bp, Probe Sequence
cagttagaaatcgtaagagtcaaat

SEQ ID NO: 176007 - DNA, 25 bp, Probe Sequence
cagatatcaatctcgcttaggtaaa

SEQ ID NO: 176008 - DNA, 25 bp, Probe Sequence
cagagatcaaccccgacaggatgaa

SEQ ID NO: 176009 - DNA, 25 bp, Probe Sequence
cagagagatacctcaccatggatga

SEQ ID NO: 176010 - DNA, 25 bp, Probe Sequence
cagagactacgtccacagacactga

SEQ ID NO: 176011 - DNA, 25 bp, Probe Sequence
cagacctacttgacatgcagatgca

SEQ ID NO: 176012 - DNA, 25 bp, Probe Sequence
cagagccaacctgcagcgagagaga

SEQ ID NO: 176013 - DNA, 25 bp, Probe Sequence
cagagtaatcttgactgaatggaga

SEQ ID NO: 176014 - DNA, 25 bp, Probe Sequence
cagagtactgtttttagatgtgaaa

SEQ ID NO: 176015 - DNA, 25 bp, Probe Sequence
cagattacttcattgttcagtggcc

SEQ ID NO: 176016 - DNA, 25 bp, Probe Sequence
cagatttctacaattgtgcgttgac

SEQ ID NO: 176017 - DNA, 25 bp, Probe Sequence
cagattttcaccatgtggcttcatc

SEQ ID NO: 176018 - DNA, 25 bp, Probe Sequence
cagtttaccttaatgccttagcaga

SEQ ID NO: 176019 - DNA, 25 bp, Probe Sequence
cagtaaatccttacaccttcgcaga

SEQ ID NO: 176020 - DNA, 25 bp, Probe Sequence
cagtccttccttacactaatttgaa

SEQ ID NO: 176021 - DNA, 25 bp, Probe Sequence
cagtttgcccttacaactttgtcaa

SEQ ID NO: 176022 - DNA, 25 bp, Probe Sequence
cagtttgcctgctgtatttatagta

SEQ ID NO: 176023 - DNA, 25 bp, Probe Sequence
cagtcttctcatgaataaattcctt

SEQ ID NO: 176024 - DNA, 25 bp, Probe Sequence
caggcagctcggattcaactacctt

SEQ ID NO: 176025 - DNA, 25 bp, Probe Sequence
cagagcatgtggatttgcaagtgag

SEQ ID NO: 176026 - DNA, 25 bp, Probe Sequence
caggcaagggattatgggataggga

SEQ ID NO: 176027 - DNA, 25 bp, Probe Sequence
caggaacgggaacggtcgaggacag

SEQ ID NO: 176028 - DNA, 25 bp, Probe Sequence
cagtcacacgggagcgtttgggcgc

SEQ ID NO: 176029 - DNA, 25 bp, Probe Sequence
catctacaacgggcgcgtggtgggc

SEQ ID NO: 176030 - DNA, 25 bp, Probe Sequence
catccagaaagagctttattggaag

SEQ ID NO: 176031 - DNA, 25 bp, Probe Sequence
ctaaaaggaactatgtctggaaggc

SEQ ID NO: 176032 - DNA, 25 bp, Probe Sequence
cagaccttcactacctattctgaca

SEQ ID NO: 176033 - DNA, 25 bp, Probe Sequence
cagggcttacctgtacactgacttg

SEQ ID NO: 176034 - DNA, 25 bp, Probe Sequence
cagagacggagcacctgagatgtgg

SEQ ID NO: 176035 - DNA, 25 bp, Probe Sequence
cagagaacaaggacgctggtgtggc

SEQ ID NO: 176036 - DNA, 25 bp, Probe Sequence
cagagatcccatgcatcgtggtggc

SEQ ID NO: 176037 - DNA, 25 bp, Probe Sequence
cagagtccatatgcctggggaggcc

SEQ ID NO: 176038 - DNA, 25 bp, Probe Sequence
cagagggatgtggccggtgggcctc

SEQ ID NO: 176039 - DNA, 25 bp, Probe Sequence
cagaggagggtctggcaggggctgc

SEQ ID NO: 176040 - DNA, 25 bp, Probe Sequence
cagagggggttggggctgggactct

SEQ ID NO: 176041 - DNA, 25 bp, Probe Sequence
caggttgggttctggcaagggccct

SEQ ID NO: 176042 - DNA, 25 bp, Probe Sequence
cagagtgtgggcttaggtttgggac

SEQ ID NO: 176043 - DNA, 25 bp, Probe Sequence
cagaggggttgtcactttgggcatg

SEQ ID NO: 176044 - DNA, 25 bp, Probe Sequence
cagaggtagggggctgctttgggct

SEQ ID NO: 176045 - DNA, 25 bp, Probe Sequence
cagtactacgggtacctgtggagcg

SEQ ID NO: 176046 - DNA, 25 bp, Probe Sequence
cagtggctcccgggactttgggagg

SEQ ID NO: 176047 - DNA, 25 bp, Probe Sequence
cagttatcccaaagccttcaggtgg

SEQ ID NO: 176048 - DNA, 25 bp, Probe Sequence
cagttattgcccagtccacataggg

SEQ ID NO: 176049 - DNA, 25 bp, Probe Sequence
cagataaattccaggcaactagtga

SEQ ID NO: 176050 - DNA, 25 bp, Probe Sequence
cagtattattcccgacgacacatat

SEQ ID NO: 176051 - DNA, 25 bp, Probe Sequence
cagtcattttgcggtgaaaacataa

SEQ ID NO: 176052 - DNA, 25 bp, Probe Sequence
cagtatatctatctttaacacaaag

SEQ ID NO: 176053 - DNA, 25 bp, Probe Sequence
cagtattcttggggtaaacccagct

SEQ ID NO: 176054 - DNA, 25 bp, Probe Sequence
cagttgcttcaggcggtaaaccaac

SEQ ID NO: 176055 - DNA, 25 bp, Probe Sequence
cagagtcgtcatggggcgagaacaa

SEQ ID NO: 176056 - DNA, 25 bp, Probe Sequence
cagagtgtgcttggagtcagagaac

SEQ ID NO: 176057 - DNA, 25 bp, Probe Sequence
cagagatggcacagactgcaaatag

SEQ ID NO: 176058 - DNA, 25 bp, Probe Sequence
cagagcttcacgcactatcgatagg

SEQ ID NO: 176059 - DNA, 25 bp, Probe Sequence
cagagcattacaacagccatcgagg

SEQ ID NO: 176060 - DNA, 25 bp, Probe Sequence
cagagcagacacagaacatctgcag

SEQ ID NO: 176061 - DNA, 25 bp, Probe Sequence
cagagggagcgggctcatctgcaga

SEQ ID NO: 176062 - DNA, 25 bp, Probe Sequence
cagtcaggaggagccctgtgagtgc

SEQ ID NO: 176063 - DNA, 25 bp, Probe Sequence
cagtaggataagccactctgtccct

SEQ ID NO: 176064 - DNA, 25 bp, Probe Sequence
cagatagtagagggccctgcctaca

SEQ ID NO: 176065 - DNA, 25 bp, Probe Sequence
cagatcagttgcaggcctctgtttc

SEQ ID NO: 176066 - DNA, 25 bp, Probe Sequence
cagtagtattttctgtgttacacat

SEQ ID NO: 176067 - DNA, 25 bp, Probe Sequence
cagtcagcgattccaggttttaaat

SEQ ID NO: 176068 - DNA, 25 bp, Probe Sequence
cagatgcgatttccgttttaacaga

SEQ ID NO: 176069 - DNA, 25 bp, Probe Sequence
cagatgccattacttctgctttcgt

SEQ ID NO: 176070 - DNA, 25 bp, Probe Sequence
cagtcctttgtactctgactgccta

SEQ ID NO: 176071 - DNA, 25 bp, Probe Sequence
cagagctcggagaagtccaaggcta

SEQ ID NO: 176072 - DNA, 25 bp, Probe Sequence
cagatggagtagcatgcccaaggct

SEQ ID NO: 176073 - DNA, 25 bp, Probe Sequence
cagatgtggttgcatcctaactcca

SEQ ID NO: 176074 - DNA, 25 bp, Probe Sequence
cagatgttttactagtgaattccac

SEQ ID NO: 176075 - DNA, 25 bp, Probe Sequence
cagagtctgtttcaggagcggcgcc

SEQ ID NO: 176076 - DNA, 25 bp, Probe Sequence
cagagctcgtgtatagtgacccgtc

SEQ ID NO: 176077 - DNA, 25 bp, Probe Sequence
cagagcctcgtttagtgaaccgtca

SEQ ID NO: 176078 - DNA, 25 bp, Probe Sequence
cagagcctcgtgagaggtcaccggg

SEQ ID NO: 176079 - DNA, 25 bp, Probe Sequence
cagttatcgtgaagggccccagagg

SEQ ID NO: 176080 - DNA, 25 bp, Probe Sequence
cagttactgtgactgagtcggccca

SEQ ID NO: 176081 - DNA, 25 bp, Probe Sequence
cagtattctgtgatggttttctaat

SEQ ID NO: 176082 - DNA, 25 bp, Probe Sequence
cagttactcgggatttctacagcta

SEQ ID NO: 176083 - DNA, 25 bp, Probe Sequence
catttgacaccgcagttctgttcag

SEQ ID NO: 176084 - DNA, 25 bp, Probe Sequence
ctttatcccctgtatttagtcacca

SEQ ID NO: 176085 - DNA, 25 bp, Probe Sequence
cagtttttgccctatttagtcaaca

SEQ ID NO: 176086 - DNA, 25 bp, Probe Sequence
cagatttcttccactgtttgacacc

SEQ ID NO: 176087 - DNA, 25 bp, Probe Sequence
cagatatatctgtcctaatgcttat

SEQ ID NO: 176088 - DNA, 25 bp, Probe Sequence
cagatgcaggatccactaatttttt

SEQ ID NO: 176089 - DNA, 25 bp, Probe Sequence
cagatggggccagagtctgtgtgga

SEQ ID NO: 176090 - DNA, 25 bp, Probe Sequence
cagagcccgcctggagggatgtggg

SEQ ID NO: 176091 - DNA, 25 bp, Probe Sequence
cagttccagccagcgaggttgggcg

SEQ ID NO: 176092 - DNA, 25 bp, Probe Sequence
cagttccagccagcgaggttgggcg

SEQ ID NO: 176093 - DNA, 25 bp, Probe Sequence
cagatgtctacttgttcagtttttc

SEQ ID NO: 176094 - DNA, 25 bp, Probe Sequence
cagagtcaggctttttgagttttaa

SEQ ID NO: 176095 - DNA, 25 bp, Probe Sequence
cagaggggattttggatgtcttcca

SEQ ID NO: 176096 - DNA, 25 bp, Probe Sequence
cagaggacgcttgagccagaatctc

SEQ ID NO: 176097 - DNA, 25 bp, Probe Sequence
cagaggactatgagacccatcagct

SEQ ID NO: 176098 - DNA, 25 bp, Probe Sequence
cagagctttcaaacactcctcagaa

SEQ ID NO: 176099 - DNA, 25 bp, Probe Sequence
cagaggttcatctcaacctcaacac

SEQ ID NO: 176100 - DNA, 25 bp, Probe Sequence
cagaggaatccaggcacctctacca

SEQ ID NO: 176101 - DNA, 25 bp, Probe Sequence
cagagtacaacagacccttgctcgc

SEQ ID NO: 176102 - DNA, 25 bp, Probe Sequence
cagagcttctgaggaagcccctgcc

SEQ ID NO: 176103 - DNA, 25 bp, Probe Sequence
cagagcttctgaggaagcccctgcc

SEQ ID NO: 176104 - DNA, 25 bp, Probe Sequence
cagagcttctgaggaagcccctgcc

SEQ ID NO: 176105 - DNA, 25 bp, Probe Sequence
cagagcttctgaggaagcccctgcc

SEQ ID NO: 176106 - DNA, 25 bp, Probe Sequence
caggcttcaaagctgtctgggccaa

SEQ ID NO: 176107 - DNA, 25 bp, Probe Sequence
caggcttcaaagctgtctgggccaa

SEQ ID NO: 176108 - DNA, 25 bp, Probe Sequence
cagtcaataaaggatccgggcccaa

SEQ ID NO: 176109 - DNA, 25 bp, Probe Sequence
cagatcgagaaaccatcctggaccc

SEQ ID NO: 176110 - DNA, 25 bp, Probe Sequence
cagatgaaggaacagcctgggtccc

SEQ ID NO: 176111 - DNA, 25 bp, Probe Sequence
cagaggaagagtctgcctatgtggc

SEQ ID NO: 176112 - DNA, 25 bp, Probe Sequence
cagaggattgtgtcgtgccaatgag

SEQ ID NO: 176113 - DNA, 25 bp, Probe Sequence
cagagagtttgcctgagaaagcagc

SEQ ID NO: 176114 - DNA, 25 bp, Probe Sequence
cagaggtgcactactggaggagcag

SEQ ID NO: 176115 - DNA, 25 bp, Probe Sequence
cagatctgctcaccctcggtgagca

SEQ ID NO: 176116 - DNA, 25 bp, Probe Sequence
cagatcgcttgcttcattggtcaaa

SEQ ID NO: 176117 - DNA, 25 bp, Probe Sequence
cagagtgctggaggatgtggaaatt

SEQ ID NO: 176118 - DNA, 25 bp, Probe Sequence
cagagctcatggtcggattaaccca

SEQ ID NO: 176119 - DNA, 25 bp, Probe Sequence
cagagcttgtggagaccaggcctgc

SEQ ID NO: 176120 - DNA, 25 bp, Probe Sequence
cagagttcggagaacactggctctc

SEQ ID NO: 176121 - DNA, 25 bp, Probe Sequence
cagagtcctgggaccatcttgttct

SEQ ID NO: 176122 - DNA, 25 bp, Probe Sequence
cagagtaagtgccgcctttgcgtct

SEQ ID NO: 176123 - DNA, 25 bp, Probe Sequence
cagagactgactgctgctcttgtgc

SEQ ID NO: 176124 - DNA, 25 bp, Probe Sequence
cagatgcactgggagcagcctttgc

SEQ ID NO: 176125 - DNA, 25 bp, Probe Sequence
cagatgatctgagcgagattaccaa

SEQ ID NO: 176126 - DNA, 25 bp, Probe Sequence
cagagtctgagcctgtgagaaccag

SEQ ID NO: 176127 - DNA, 25 bp, Probe Sequence
cagagttagctgtctagcgcctagc

SEQ ID NO: 176128 - DNA, 25 bp, Probe Sequence
cagagtgttcgattctgccctattt

SEQ ID NO: 176129 - DNA, 25 bp, Probe Sequence
cagagtgttcgattctgccctattt

SEQ ID NO: 176130 - DNA, 25 bp, Probe Sequence
cagagtacatgtctctgcctctgtt

SEQ ID NO: 176131 - DNA, 25 bp, Probe Sequence
cagagtgtcttcttcttctctggag

SEQ ID NO: 176132 - DNA, 25 bp, Probe Sequence
cagagtgataatatttctctaatgc

SEQ ID NO: 176133 - DNA, 25 bp, Probe Sequence
cagaggaaaattttcgtagtctttg

SEQ ID NO: 176134 - DNA, 25 bp, Probe Sequence
cagatgccacaaaactgtcagtatc

SEQ ID NO: 176135 - DNA, 25 bp, Probe Sequence
cagatgaaaaggggtgcagagacag

SEQ ID NO: 176136 - DNA, 25 bp, Probe Sequence
cagatgtaaatgtggcagcatgcaa

SEQ ID NO: 176137 - DNA, 25 bp, Probe Sequence
cgtgtggacagctggcgaaacttcc

SEQ ID NO: 176138 - DNA, 25 bp, Probe Sequence
cagggaacactctcaggaacaacct

SEQ ID NO: 176139 - DNA, 25 bp, Probe Sequence
cagggcccacatttgggaaagttct

SEQ ID NO: 176140 - DNA, 25 bp, Probe Sequence
cagagtgtccctgtgggaggcaggc

SEQ ID NO: 176141 - DNA, 25 bp, Probe Sequence
cagaggtcacagtgggtggcaggtg

SEQ ID NO: 176142 - DNA, 25 bp, Probe Sequence
cagagggcaagggaggggtggtatt

SEQ ID NO: 176143 - DNA, 25 bp, Probe Sequence
cagaggccaaggaatttggcctgta

SEQ ID NO: 176144 - DNA, 25 bp, Probe Sequence
cagaggacaaggtcatcctggcccg

SEQ ID NO: 176145 - DNA, 25 bp, Probe Sequence
cagagagatcagggaccagggctcc

SEQ ID NO: 176146 - DNA, 25 bp, Probe Sequence
cgatgagtagtgacaccgggccgat

SEQ ID NO: 176147 - DNA, 25 bp, Probe Sequence
cagtcagttcttgcaggttgcctga

SEQ ID NO: 176148 - DNA, 25 bp, Probe Sequence
cagtcagttctcggcaggggccgac

SEQ ID NO: 176149 - DNA, 25 bp, Probe Sequence
cagatgaagcttgccagcaaggcca

SEQ ID NO: 176150 - DNA, 25 bp, Probe Sequence
cagagatcaggtgtccagggctcag

SEQ ID NO: 176151 - DNA, 25 bp, Probe Sequence
cagagactatgtggtccatcgcctt

SEQ ID NO: 176152 - DNA, 25 bp, Probe Sequence
cagatacttgttcccaggaccttaa

SEQ ID NO: 176153 - DNA, 25 bp, Probe Sequence
cagtttttatatgcccactgttgaa

SEQ ID NO: 176154 - DNA, 25 bp, Probe Sequence
cagttcagtttatctccagttgaaa

SEQ ID NO: 176155 - DNA, 25 bp, Probe Sequence
cagtttgctttctcattagtttttt

SEQ ID NO: 176156 - DNA, 25 bp, Probe Sequence
catgttcttttcatagtcgtatttt

SEQ ID NO: 176157 - DNA, 25 bp, Probe Sequence
cagtgccttttggggtccaatcttt

SEQ ID NO: 176158 - DNA, 25 bp, Probe Sequence
cagagagctttgtggttctccaccg

SEQ ID NO: 176159 - DNA, 25 bp, Probe Sequence
cagatacattggaggcttcacccac

SEQ ID NO: 176160 - DNA, 25 bp, Probe Sequence
cagatactatttgggctctctccca

SEQ ID NO: 176161 - DNA, 25 bp, Probe Sequence
cagatcaggtttggacttctcccac

SEQ ID NO: 176162 - DNA, 25 bp, Probe Sequence
cagagaggccttcactgatgtcgcc

SEQ ID NO: 176163 - DNA, 25 bp, Probe Sequence
cagagggcagccatagtgtgccgac

SEQ ID NO: 176164 - DNA, 25 bp, Probe Sequence
cagagaggagccagaaggccacccc

SEQ ID NO: 176165 - DNA, 25 bp, Probe Sequence
cagagagggtcaggaatttggcccc

SEQ ID NO: 176166 - DNA, 25 bp, Probe Sequence
cagagagaggcagggggcctggccg

SEQ ID NO: 176167 - DNA, 25 bp, Probe Sequence
cagagagggagcctggttctgctgc

SEQ ID NO: 176168 - DNA, 25 bp, Probe Sequence
cagagaggaggccagcaggcccaga

SEQ ID NO: 176169 - DNA, 25 bp, Probe Sequence
cagagaccagctggcagggtgccaa

SEQ ID NO: 176170 - DNA, 25 bp, Probe Sequence
cagagacgctcaggctgtgttctca

SEQ ID NO: 176171 - DNA, 25 bp, Probe Sequence
caggaccccagaactgtggagtcag

SEQ ID NO: 176172 - DNA, 25 bp, Probe Sequence
cagaggcctgtgatgacttggagtt

SEQ ID NO: 176173 - DNA, 25 bp, Probe Sequence
catgacccctatttgtctgaggttc

SEQ ID NO: 176174 - DNA, 25 bp, Probe Sequence
cagagtccccagtttaagtgtacca

SEQ ID NO: 176175 - DNA, 25 bp, Probe Sequence
cagagacaccacttttcaaaggact

SEQ ID NO: 176176 - DNA, 25 bp, Probe Sequence
caggccaagcctctctaaatgacct

SEQ ID NO: 176177 - DNA, 25 bp, Probe Sequence
cagagtgcaaccctcattaaacacc

SEQ ID NO: 176178 - DNA, 25 bp, Probe Sequence
cagaggctcaaccaaataaaaccaa

SEQ ID NO: 176179 - DNA, 25 bp, Probe Sequence
ctgaggccaagcccgaaggacctag

SEQ ID NO: 176180 - DNA, 25 bp, Probe Sequence
cagggccaaggcctaaggatcgccg

SEQ ID NO: 176181 - DNA, 25 bp, Probe Sequence
caggcccaaacacagaaccagtctg

SEQ ID NO: 176182 - DNA, 25 bp, Probe Sequence
caggttcaaacacagccaaagccat

SEQ ID NO: 176183 - DNA, 25 bp, Probe Sequence
cagttgtccccacagtagacacata

SEQ ID NO: 176184 - DNA, 25 bp, Probe Sequence
cagtttctcagtgtcagtacacact

SEQ ID NO: 176185 - DNA, 25 bp, Probe Sequence
cagttattttctacgctacctgtgc

SEQ ID NO: 176186 - DNA, 25 bp, Probe Sequence
cagtttttcccacctagatgttgag

SEQ ID NO: 176187 - DNA, 25 bp, Probe Sequence
cagatttctttctcctataaatgag

SEQ ID NO: 176188 - DNA, 25 bp, Probe Sequence
cagtcttgtctattcaccaaaaaag

SEQ ID NO: 176189 - DNA, 25 bp, Probe Sequence
catggctaatcttcccaaaaactag

SEQ ID NO: 176190 - DNA, 25 bp, Probe Sequence
cttgtgcccttaactacgaactgaa

SEQ ID NO: 176191 - DNA, 25 bp, Probe Sequence
cagttaccttagttaacaagctgaa

SEQ ID NO: 176192 - DNA, 25 bp, Probe Sequence
caggaacccaagtctttcaacggat

SEQ ID NO: 176193 - DNA, 25 bp, Probe Sequence
cagtaaacaaattctttcacaaggt

SEQ ID NO: 176194 - DNA, 25 bp, Probe Sequence
caggttatcaaattcttccaagttc

SEQ ID NO: 176195 - DNA, 25 bp, Probe Sequence
caggttccatactacttaaattaat

SEQ ID NO: 176196 - DNA, 25 bp, Probe Sequence
cagtaggcctaatgcttgaaataag

SEQ ID NO: 176197 - DNA, 25 bp, Probe Sequence
cagtatggttcttcgctgtaaaaga

SEQ ID NO: 176198 - DNA, 25 bp, Probe Sequence
cagtaggaggctggaggtaaaagaa

SEQ ID NO: 176199 - DNA, 25 bp, Probe Sequence
cagtgggaactcaaaatttcagaaa

SEQ ID NO: 176200 - DNA, 25 bp, Probe Sequence
cagaggtagaccctatcttgttaaa

SEQ ID NO: 176201 - DNA, 25 bp, Probe Sequence
cagaggtgatacgttcctgtgctgc

SEQ ID NO: 176202 - DNA, 25 bp, Probe Sequence
cagatgggtgggacctgtgtgctgc

SEQ ID NO: 176203 - DNA, 25 bp, Probe Sequence
cagatggtgatgcatgacccaagct

SEQ ID NO: 176204 - DNA, 25 bp, Probe Sequence
cagatggatgtgaaccccgagggca

SEQ ID NO: 176205 - DNA, 25 bp, Probe Sequence
cagattgcagcggacatcccagaag

SEQ ID NO: 176206 - DNA, 25 bp, Probe Sequence
cagattcccaagtgcctgatcatac

SEQ ID NO: 176207 - DNA, 25 bp, Probe Sequence
cagttcccaggttggctgaaggctt

SEQ ID NO: 176208 - DNA, 25 bp, Probe Sequence
cagttcctctttggtgtacagactt

SEQ ID NO: 176209 - DNA, 25 bp, Probe Sequence
caggtcccattttctgttagatgtc

SEQ ID NO: 176210 - DNA, 25 bp, Probe Sequence
caggaacctgttttgatgtattata

SEQ ID NO: 176211 - DNA, 25 bp, Probe Sequence
cagtgtaacttatacatggcctaaa

SEQ ID NO: 176212 - DNA, 25 bp, Probe Sequence
cagagtaattttaaagcttctattt

SEQ ID NO: 176213 - DNA, 25 bp, Probe Sequence
caggtagactttcaactattgttag

SEQ ID NO: 176214 - DNA, 25 bp, Probe Sequence
cagtcaacctttctagtagtttatg

SEQ ID NO: 176215 - DNA, 25 bp, Probe Sequence
cagtatagcccttttagttgtttga

SEQ ID NO: 176216 - DNA, 25 bp, Probe Sequence
cagttagccccatttattcagtatt

SEQ ID NO: 176217 - DNA, 25 bp, Probe Sequence
cagtaatatcccttgtttctgcctc

SEQ ID NO: 176218 - DNA, 25 bp, Probe Sequence
cagtaactcgtggtgttgccatggc

SEQ ID NO: 176219 - DNA, 25 bp, Probe Sequence
cagtacttgcggattggctctgtcc

SEQ ID NO: 176220 - DNA, 25 bp, Probe Sequence
cagttcttgccaaattgatctatag

SEQ ID NO: 176221 - DNA, 25 bp, Probe Sequence
cagattcttgtctaacttcaatttc

SEQ ID NO: 176222 - DNA, 25 bp, Probe Sequence
cagattctactacaattcagtcatt

SEQ ID NO: 176223 - DNA, 25 bp, Probe Sequence
cagattctcctcccattatagttgg

SEQ ID NO: 176224 - DNA, 25 bp, Probe Sequence
cagttgtgccatcccttaagatgaa

SEQ ID NO: 176225 - DNA, 25 bp, Probe Sequence
cagatgattgcccccagataagtgg

SEQ ID NO: 176226 - DNA, 25 bp, Probe Sequence
cagatgaagactccagccatgacct

SEQ ID NO: 176227 - DNA, 25 bp, Probe Sequence
cagagtcagagtcctgggaccatct

SEQ ID NO: 176228 - DNA, 25 bp, Probe Sequence
cagatgtcaactccttggggtgctg

SEQ ID NO: 176229 - DNA, 25 bp, Probe Sequence
cagaggaccttgagaggctgctgcc

SEQ ID NO: 176230 - DNA, 25 bp, Probe Sequence
cagagtacctggtgggctggcagag

SEQ ID NO: 176231 - DNA, 25 bp, Probe Sequence
cagagtacctggtgggctggcagag

SEQ ID NO: 176232 - DNA, 25 bp, Probe Sequence
cagagtacctggtgggctggcagag

SEQ ID NO: 176233 - DNA, 25 bp, Probe Sequence
cagagatacctggcctggtctggac

SEQ ID NO: 176234 - DNA, 25 bp, Probe Sequence
cagatgattccattctccgattggc

SEQ ID NO: 176235 - DNA, 25 bp, Probe Sequence
cagatccgcctaaccaatgtggccg

SEQ ID NO: 176236 - DNA, 25 bp, Probe Sequence
cagatgaggcctaatccacgctggc

SEQ ID NO: 176237 - DNA, 25 bp, Probe Sequence
cagatcggtctgaatggctggctgc

SEQ ID NO: 176238 - DNA, 25 bp, Probe Sequence
cagatcggtctgaatggctggctgc

SEQ ID NO: 176239 - DNA, 25 bp, Probe Sequence
cagatcggtctgaatggctggctgc

SEQ ID NO: 176240 - DNA, 25 bp, Probe Sequence
cagatcgagtccaaggcagcctatg

SEQ ID NO: 176241 - DNA, 25 bp, Probe Sequence
cagatccttgagaagcgagcctata

SEQ ID NO: 176242 - DNA, 25 bp, Probe Sequence
cagatcctaggaagcaagtggcatt

SEQ ID NO: 176243 - DNA, 25 bp, Probe Sequence
cagagtcgaggaaccatctgccctt

SEQ ID NO: 176244 - DNA, 25 bp, Probe Sequence
cagaggcgtgaacatcactcccatg

SEQ ID NO: 176245 - DNA, 25 bp, Probe Sequence
cagtgccgagggctaccattcagtg

SEQ ID NO: 176246 - DNA, 25 bp, Probe Sequence
cagtgcctttggctaccttgagtgc

SEQ ID NO: 176247 - DNA, 25 bp, Probe Sequence
cagtcattttggcctccattgtgga

SEQ ID NO: 176248 - DNA, 25 bp, Probe Sequence
cagtgttgttggcccacggggaacg

SEQ ID NO: 176249 - DNA, 25 bp, Probe Sequence
cagtgttgtgttcagccaaggggac

SEQ ID NO: 176250 - DNA, 25 bp, Probe Sequence
cagtcattgctgttaattcgggtgg

SEQ ID NO: 176251 - DNA, 25 bp, Probe Sequence
cagtttcttatttggccaggtagct

SEQ ID NO: 176252 - DNA, 25 bp, Probe Sequence
cagtagtattagcagtgcctgggac

SEQ ID NO: 176253 - DNA, 25 bp, Probe Sequence
cagaggtatgggtgtcgtggctgtc

SEQ ID NO: 176254 - DNA, 25 bp, Probe Sequence
cagaggctgtggctggtgagccggt

SEQ ID NO: 176255 - DNA, 25 bp, Probe Sequence
cagaggtgatgtctgggagcccttc

SEQ ID NO: 176256 - DNA, 25 bp, Probe Sequence
cagatgtttgtgcagtagcccaccc

SEQ ID NO: 176257 - DNA, 25 bp, Probe Sequence
cagagtgtcacggagatgggacccc

SEQ ID NO: 176258 - DNA, 25 bp, Probe Sequence
cagaggccaggatgtgggcccagcc

SEQ ID NO: 176259 - DNA, 25 bp, Probe Sequence
cagaggctggggctgaggtccccat

SEQ ID NO: 176260 - DNA, 25 bp, Probe Sequence
cagaggctggggccaactggaacca

SEQ ID NO: 176261 - DNA, 25 bp, Probe Sequence
cagatggcatggttgctctattgga

SEQ ID NO: 176262 - DNA, 25 bp, Probe Sequence
cagatagagccttctgtgttgcaga

SEQ ID NO: 176263 - DNA, 25 bp, Probe Sequence
cagtaagatctattttggcagcaac

SEQ ID NO: 176264 - DNA, 25 bp, Probe Sequence
cagatcaagagaatatactgggcag

SEQ ID NO: 176265 - DNA, 25 bp, Probe Sequence
cagatcagcggaggctgaccggcgc

SEQ ID NO: 176266 - DNA, 25 bp, Probe Sequence
cagatgcacgtgattgaccacacca

SEQ ID NO: 176267 - DNA, 25 bp, Probe Sequence
cagatcctggcacagtgcccagggt

SEQ ID NO: 176268 - DNA, 25 bp, Probe Sequence
catgacggtgagcacctcgaacgct

SEQ ID NO: 176269 - DNA, 25 bp, Probe Sequence
caggcaagtgagcaccggggactga

SEQ ID NO: 176270 - DNA, 25 bp, Probe Sequence
cagtacagtcagctctccgtaactg

SEQ ID NO: 176271 - DNA, 25 bp, Probe Sequence
cagatctacatctgtctccagaaac

SEQ ID NO: 176272 - DNA, 25 bp, Probe Sequence
cagatctgcacctgagccaaagaaa

SEQ ID NO: 176273 - DNA, 25 bp, Probe Sequence
cagttcacaatctagtaatagcaaa

SEQ ID NO: 176274 - DNA, 25 bp, Probe Sequence
cagatgatcacatgctcgtgaaaaa

SEQ ID NO: 176275 - DNA, 25 bp, Probe Sequence
cagatgatcacatttatggagatta

SEQ ID NO: 176276 - DNA, 25 bp, Probe Sequence
catgtgatatgatgctcggctgatt

SEQ ID NO: 176277 - DNA, 25 bp, Probe Sequence
catgtctatagttcctgagatttta

SEQ ID NO: 176278 - DNA, 25 bp, Probe Sequence
cagatcttcctgtcagcgtttttga

SEQ ID NO: 176279 - DNA, 25 bp, Probe Sequence
cagtcttcttccatgttctattagc

SEQ ID NO: 176280 - DNA, 25 bp, Probe Sequence
cagtcattcatagcactatatcgag

SEQ ID NO: 176281 - DNA, 25 bp, Probe Sequence
cagtttcaacactctgatcagcatg

SEQ ID NO: 176282 - DNA, 25 bp, Probe Sequence
cagatcccaatcaaagtgccaagtg

SEQ ID NO: 176283 - DNA, 25 bp, Probe Sequence
cagtgccctgatagtcagttcgaat

SEQ ID NO: 176284 - DNA, 25 bp, Probe Sequence
cagttcactgtggacagtttgacat

SEQ ID NO: 176285 - DNA, 25 bp, Probe Sequence
cagatttctatgcacctttactctt

SEQ ID NO: 176286 - DNA, 25 bp, Probe Sequence
cagattcctagtagcatgccttacc

SEQ ID NO: 176287 - DNA, 25 bp, Probe Sequence
cagatacgacagatgatgcttttcg

SEQ ID NO: 176288 - DNA, 25 bp, Probe Sequence
cagatacgcagtaacatgtgttggc

SEQ ID NO: 176289 - DNA, 25 bp, Probe Sequence
cagtaccatttatttgtctgccgct

SEQ ID NO: 176290 - DNA, 25 bp, Probe Sequence
cagttcacttattgtactctggcaa

SEQ ID NO: 176291 - DNA, 25 bp, Probe Sequence
cagtctaactagttcaagcttaatt

SEQ ID NO: 176292 - DNA, 25 bp, Probe Sequence
cagtctatgaccattaggcctattt

SEQ ID NO: 176293 - DNA, 25 bp, Probe Sequence
cagttagaatctaccaggcacagat

SEQ ID NO: 176294 - DNA, 25 bp, Probe Sequence
cagtttcatctcaacacagctgcca

SEQ ID NO: 176295 - DNA, 25 bp, Probe Sequence
cagattatatcttcaacaccacacc

SEQ ID NO: 176296 - DNA, 25 bp, Probe Sequence
cagttgctattatacaccacctgta

SEQ ID NO: 176297 - DNA, 25 bp, Probe Sequence
cagttccactattaaaacatttcag

SEQ ID NO: 176298 - DNA, 25 bp, Probe Sequence
cagtttcactttcacatagatgtcc

SEQ ID NO: 176299 - DNA, 25 bp, Probe Sequence
cagttaatctttctccaatgatcct

SEQ ID NO: 176300 - DNA, 25 bp, Probe Sequence
cagtaaagtcttccatccaaaaggg

SEQ ID NO: 176301 - DNA, 25 bp, Probe Sequence
cagatcgaggtcctgtctcaaaaaa

SEQ ID NO: 176302 - DNA, 25 bp, Probe Sequence
cagatctgagaatggctctcccaga

SEQ ID NO: 176303 - DNA, 25 bp, Probe Sequence
cagattgtattctatgagtcccaga

SEQ ID NO: 176304 - DNA, 25 bp, Probe Sequence
cagattccatctgatggccactgta

SEQ ID NO: 176305 - DNA, 25 bp, Probe Sequence
cagatgtccattcgataggcgtatg

SEQ ID NO: 176306 - DNA, 25 bp, Probe Sequence
cagatgtggatcagcaagcaggagt

SEQ ID NO: 176307 - DNA, 25 bp, Probe Sequence
cagagggagctggtacagtagtgtt

SEQ ID NO: 176308 - DNA, 25 bp, Probe Sequence
cagaggccgccagtggagatcatgg

SEQ ID NO: 176309 - DNA, 25 bp, Probe Sequence
cagtcccccctggagtcagggattg

SEQ ID NO: 176310 - DNA, 25 bp, Probe Sequence
caggccaccctcatagtaagtggtg

SEQ ID NO: 176311 - DNA, 25 bp, Probe Sequence
cagtctcaccctatcagcaagtgat

SEQ ID NO: 176312 - DNA, 25 bp, Probe Sequence
cagttcccctttgcattgtattgct

SEQ ID NO: 176313 - DNA, 25 bp, Probe Sequence
cagtaatatcctttcaatgtgtttt

SEQ ID NO: 176314 - DNA, 25 bp, Probe Sequence
catgtataaacttgaagtggttgtg

SEQ ID NO: 176315 - DNA, 25 bp, Probe Sequence
cagattataacttcaatgggacact

SEQ ID NO: 176316 - DNA, 25 bp, Probe Sequence
cagttaatgcctaagagtgaaagta

SEQ ID NO: 176317 - DNA, 25 bp, Probe Sequence
cagtgataatgccccaaggacaagg

SEQ ID NO: 176318 - DNA, 25 bp, Probe Sequence
cagtctacatgggcaaagtgacctt

SEQ ID NO: 176319 - DNA, 25 bp, Probe Sequence
cagtccaagccctggataatgcttt

SEQ ID NO: 176320 - DNA, 25 bp, Probe Sequence
cagtcgatcccctgacaaagctagt

SEQ ID NO: 176321 - DNA, 25 bp, Probe Sequence
cagattccccactgagcaacagaaa

SEQ ID NO: 176322 - DNA, 25 bp, Probe Sequence
cagatccccaagcctggcaagggaa

SEQ ID NO: 176323 - DNA, 25 bp, Probe Sequence
cagaggctgtcatggtaatcgggaa

SEQ ID NO: 176324 - DNA, 25 bp, Probe Sequence
cagttgttcaggttcattcgtcaaa

SEQ ID NO: 176325 - DNA, 25 bp, Probe Sequence
cagggtaagctgctctgaggtaaag

SEQ ID NO: 176326 - DNA, 25 bp, Probe Sequence
cagtgttaagctccagctcattgga

SEQ ID NO: 176327 - DNA, 25 bp, Probe Sequence
cagatgcctgaagggagtgctttga

SEQ ID NO: 176328 - DNA, 25 bp, Probe Sequence
cagttacaagggcctgcatcatctt

SEQ ID NO: 176329 - DNA, 25 bp, Probe Sequence
cagttactcagaacagcatctgaca

SEQ ID NO: 176330 - DNA, 25 bp, Probe Sequence
cagttacataattcactctgagtgt

SEQ ID NO: 176331 - DNA, 25 bp, Probe Sequence
cagtaagccagattactccactgcc

SEQ ID NO: 176332 - DNA, 25 bp, Probe Sequence
cagttatccaactaccagcaatctc

SEQ ID NO: 176333 - DNA, 25 bp, Probe Sequence
cagttcccagaggagctagagacat

SEQ ID NO: 176334 - DNA, 25 bp, Probe Sequence
cagtcagccataggtatgtaggaat

SEQ ID NO: 176335 - DNA, 25 bp, Probe Sequence
cagatgcccagaggggtagtacaac

SEQ ID NO: 176336 - DNA, 25 bp, Probe Sequence
cagtctcgaactcctgggttcaagc

SEQ ID NO: 176337 - DNA, 25 bp, Probe Sequence
cagttagccactgctggtgtttatg

SEQ ID NO: 176338 - DNA, 25 bp, Probe Sequence
cagtaatgcgatgcttgggtcaaat

SEQ ID NO: 176339 - DNA, 25 bp, Probe Sequence
cagtaggagcattttccctacaata

SEQ ID NO: 176340 - DNA, 25 bp, Probe Sequence
cagatggctacaatttccctgatcc

SEQ ID NO: 176341 - DNA, 25 bp, Probe Sequence
cagatggtagccagtgactcagatc

SEQ ID NO: 176342 - DNA, 25 bp, Probe Sequence
cagaggccagctgggggccagtggg

SEQ ID NO: 176343 - DNA, 25 bp, Probe Sequence
cagaggccagctgggggccagtggg

SEQ ID NO: 176344 - DNA, 25 bp, Probe Sequence
cagaggaagcgggagtacattgagg

SEQ ID NO: 176345 - DNA, 25 bp, Probe Sequence
cagataaagctgctaactcctgatc

SEQ ID NO: 176346 - DNA, 25 bp, Probe Sequence
caggaacgtggagaccctgacgtgg

SEQ ID NO: 176347 - DNA, 25 bp, Probe Sequence
cggaccgggactatcaatgacttca

SEQ ID NO: 176348 - DNA, 25 bp, Probe Sequence
cagggcctgggaaatttctacttat

SEQ ID NO: 176349 - DNA, 25 bp, Probe Sequence
caggacttgggctgtttgtagtttt

SEQ ID NO: 176350 - DNA, 25 bp, Probe Sequence
cagtacttggcctgtatataatggc

SEQ ID NO: 176351 - DNA, 25 bp, Probe Sequence
cagatatccatgcctgttttacaga

SEQ ID NO: 176352 - DNA, 25 bp, Probe Sequence
cagatgtgtatcagatgtttcactg

SEQ ID NO: 176353 - DNA, 25 bp, Probe Sequence
cagatttgtctgtatttctcaccat

SEQ ID NO: 176354 - DNA, 25 bp, Probe Sequence
cagatctaggcttcatcattttcca

SEQ ID NO: 176355 - DNA, 25 bp, Probe Sequence
cagatctgaggtcatcaagaacaac

SEQ ID NO: 176356 - DNA, 25 bp, Probe Sequence
cagatcacacttcatcacagaaaga

SEQ ID NO: 176357 - DNA, 25 bp, Probe Sequence
cagtagccaaggtcatgcagaagga

SEQ ID NO: 176358 - DNA, 25 bp, Probe Sequence
cagattgccggcttcgtgaaggagt

SEQ ID NO: 176359 - DNA, 25 bp, Probe Sequence
caggaccaggcacttgtaggggacc

SEQ ID NO: 176360 - DNA, 25 bp, Probe Sequence
catggccgtgggagtactgggagta

SEQ ID NO: 176361 - DNA, 25 bp, Probe Sequence
caggaagttcagagttctaggagtg

SEQ ID NO: 176362 - DNA, 25 bp, Probe Sequence
cagtaacttacccttagggaggctg

SEQ ID NO: 176363 - DNA, 25 bp, Probe Sequence
cagtttcctatctttcttgggtggg

SEQ ID NO: 176364 - DNA, 25 bp, Probe Sequence
cagtcttcaatctgttttgagcttg

SEQ ID NO: 176365 - DNA, 25 bp, Probe Sequence
cagtttttttgtttgcgagcttgcc

SEQ ID NO: 176366 - DNA, 25 bp, Probe Sequence
cagatttgttattgaagtggacatt

SEQ ID NO: 176367 - DNA, 25 bp, Probe Sequence
cagattgatggttatgtcactgacc

SEQ ID NO: 176368 - DNA, 25 bp, Probe Sequence
cagttgatggcattttcacgcccca

SEQ ID NO: 176369 - DNA, 25 bp, Probe Sequence
cagttgtgcacttttacaagccgca

SEQ ID NO: 176370 - DNA, 25 bp, Probe Sequence
cagtcttcactcactgcaaactctg

SEQ ID NO: 176371 - DNA, 25 bp, Probe Sequence
cagttgtgacttatgtatacagctg

SEQ ID NO: 176372 - DNA, 25 bp, Probe Sequence
cagtaggatccttagttacagtgtt

SEQ ID NO: 176373 - DNA, 25 bp, Probe Sequence
cagtagaaattctgttactctctgt

SEQ ID NO: 176374 - DNA, 25 bp, Probe Sequence
cagtaacgttcattggttcctttga

SEQ ID NO: 176375 - DNA, 25 bp, Probe Sequence
cagtatacagtcctgtggtctcctt

SEQ ID NO: 176376 - DNA, 25 bp, Probe Sequence
cagattgaggtggtgccttctgcct

SEQ ID NO: 176377 - DNA, 25 bp, Probe Sequence
cagatggacgtggtccaccgcatgt

SEQ ID NO: 176378 - DNA, 25 bp, Probe Sequence
cagatcatccgtgtgatactcgagt

SEQ ID NO: 176379 - DNA, 25 bp, Probe Sequence
cagattcactgtgttcagctctgaa

SEQ ID NO: 176380 - DNA, 25 bp, Probe Sequence
cagatctacagcgccagagtgctga

SEQ ID NO: 176381 - DNA, 25 bp, Probe Sequence
catgattacaccacggcactacaac

SEQ ID NO: 176382 - DNA, 25 bp, Probe Sequence
cagttaccgcgtgtactacaatgcc

SEQ ID NO: 176383 - DNA, 25 bp, Probe Sequence
cagttacgggattgctgaatcaaat

SEQ ID NO: 176384 - DNA, 25 bp, Probe Sequence
cagatttcagagttcaggagccaaa

SEQ ID NO: 176385 - DNA, 25 bp, Probe Sequence
cagttccagaagtgcgtcgaaatgg

SEQ ID NO: 176386 - DNA, 25 bp, Probe Sequence
cagttccaaatgaggtcagcattta

SEQ ID NO: 176387 - DNA, 25 bp, Probe Sequence
cagtacctcaagaacgacacgtgga

SEQ ID NO: 176388 - DNA, 25 bp, Probe Sequence
cagtacccagagacctacagggcct

SEQ ID NO: 176389 - DNA, 25 bp, Probe Sequence
cagttcctgcagaactacacggccc

SEQ ID NO: 176390 - DNA, 25 bp, Probe Sequence
cagggccatggatgtggagccccgc

SEQ ID NO: 176391 - DNA, 25 bp, Probe Sequence
cagggccatggatgtggagccccgc

SEQ ID NO: 176392 - DNA, 25 bp, Probe Sequence
catgggctacagtgtctggccttgg

SEQ ID NO: 176393 - DNA, 25 bp, Probe Sequence
catgggctacagtgtctggccttgg

SEQ ID NO: 176394 - DNA, 25 bp, Probe Sequence
cagttctgcaagtagtttagtagga

SEQ ID NO: 176395 - DNA, 25 bp, Probe Sequence
cagttcatgatttagtcctcagaaa

SEQ ID NO: 176396 - DNA, 25 bp, Probe Sequence
cagttgcagacgtctgtgcctagca

SEQ ID NO: 176397 - DNA, 25 bp, Probe Sequence
cagattgcgagcacattacttgctg

SEQ ID NO: 176398 - DNA, 25 bp, Probe Sequence
cagatgtccataatcagtactgatg

SEQ ID NO: 176399 - DNA, 25 bp, Probe Sequence
cagttagctcatacagtgcctttga

SEQ ID NO: 176400 - DNA, 25 bp, Probe Sequence
cagttcaccatgattctcttctgtc

SEQ ID NO: 176401 - DNA, 25 bp, Probe Sequence
cagggacgatttattccttcactcc

SEQ ID NO: 176402 - DNA, 25 bp, Probe Sequence
cagggaattattcttttttctgcaa

SEQ ID NO: 176403 - DNA, 25 bp, Probe Sequence
ctggggactcctcttaatgtttcca

SEQ ID NO: 176404 - DNA, 25 bp, Probe Sequence
cagtgtgtaccagtttaaagctttc

SEQ ID NO: 176405 - DNA, 25 bp, Probe Sequence
cagttgtgatggttgttaaatgctc

SEQ ID NO: 176406 - DNA, 25 bp, Probe Sequence
cagtctgaatggcatcttacagatt

SEQ ID NO: 176407 - DNA, 25 bp, Probe Sequence
cagattcagaagccatgagttcagt

SEQ ID NO: 176408 - DNA, 25 bp, Probe Sequence
cagatctaacagctgatgtggactt

SEQ ID NO: 176409 - DNA, 25 bp, Probe Sequence
cagtctattcgggagtctgagtata

SEQ ID NO: 176410 - DNA, 25 bp, Probe Sequence
cagtttatggtgcagaatggattga

SEQ ID NO: 176411 - DNA, 25 bp, Probe Sequence
cagtttgagcctagaatgatggtta

SEQ ID NO: 176412 - DNA, 25 bp, Probe Sequence
cagatcttgatgcccaacattggtt

SEQ ID NO: 176413 - DNA, 25 bp, Probe Sequence
cagatcttgcgtgaactcatcgatg

SEQ ID NO: 176414 - DNA, 25 bp, Probe Sequence
cagatcatatggtggactcagtgtt

SEQ ID NO: 176415 - DNA, 25 bp, Probe Sequence
cagtcaaagcggctctagctctgat

SEQ ID NO: 176416 - DNA, 25 bp, Probe Sequence
cagtaaagtggttctctgccttttt

SEQ ID NO: 176417 - DNA, 25 bp, Probe Sequence
cagttacattgtcttactctctttt

SEQ ID NO: 176418 - DNA, 25 bp, Probe Sequence
cagtttcattgtctaacacacttct

SEQ ID NO: 176419 - DNA, 25 bp, Probe Sequence
cagtgtcctttcttatacacgtaca

SEQ ID NO: 176420 - DNA, 25 bp, Probe Sequence
cagtttctggcctttacacagtcac

SEQ ID NO: 176421 - DNA, 25 bp, Probe Sequence
cagtttctggcctttacacagtcac

SEQ ID NO: 176422 - DNA, 25 bp, Probe Sequence
cagtttctggcctttacacagtcac

SEQ ID NO: 176423 - DNA, 25 bp, Probe Sequence
cagtttctggcctttacacagtcac

SEQ ID NO: 176424 - DNA, 25 bp, Probe Sequence
cagttttcctgatttacaagtgcaa

SEQ ID NO: 176425 - DNA, 25 bp, Probe Sequence
cagtagcttccgccagtacaagtat

SEQ ID NO: 176426 - DNA, 25 bp, Probe Sequence
cagtacgtcggcaatggaagaagac

SEQ ID NO: 176427 - DNA, 25 bp, Probe Sequence
cagttatgatcaggctgcatggaca

SEQ ID NO: 176428 - DNA, 25 bp, Probe Sequence
cagatctcagacagtgtgcggcggc

SEQ ID NO: 176429 - DNA, 25 bp, Probe Sequence
cagatatgctcctcattgctggggt

SEQ ID NO: 176430 - DNA, 25 bp, Probe Sequence
cagattcacactagcaggatgaggg

SEQ ID NO: 176431 - DNA, 25 bp, Probe Sequence
cagattcacacaagcaggatgacgc

SEQ ID NO: 176432 - DNA, 25 bp, Probe Sequence
cagattcacacaagcaggatgacgc

SEQ ID NO: 176433 - DNA, 25 bp, Probe Sequence
cagatgctcaagtgaggctgcaggc

SEQ ID NO: 176434 - DNA, 25 bp, Probe Sequence
cagatcatcggtcaggccaagaagc

SEQ ID NO: 176435 - DNA, 25 bp, Probe Sequence
cagttgcggtgggtgtcatcaaagc

SEQ ID NO: 176436 - DNA, 25 bp, Probe Sequence
cagtcatcggtgaggttaatgcact

SEQ ID NO: 176437 - DNA, 25 bp, Probe Sequence
cagatcatcccgatggtcactgaac

SEQ ID NO: 176438 - DNA, 25 bp, Probe Sequence
cagatcctccaaaggcacacgttgc

SEQ ID NO: 176439 - DNA, 25 bp, Probe Sequence
cagtcccacatttctgtactgttcc

SEQ ID NO: 176440 - DNA, 25 bp, Probe Sequence
cagttacacttattttcagctcctc

SEQ ID NO: 176441 - DNA, 25 bp, Probe Sequence
cagttagaattgtttctttctctcc

SEQ ID NO: 176442 - DNA, 25 bp, Probe Sequence
cagttaagaatgcacaatttgtcct

SEQ ID NO: 176443 - DNA, 25 bp, Probe Sequence
cagattgaaggatcaactatttgcc

SEQ ID NO: 176444 - DNA, 25 bp, Probe Sequence
cagataggaacttcagagcttattg

SEQ ID NO: 176445 - DNA, 25 bp, Probe Sequence
cagattgtaaattccagtttggttc

SEQ ID NO: 176446 - DNA, 25 bp, Probe Sequence
cagttcttaatacctgttttgtaat

SEQ ID NO: 176447 - DNA, 25 bp, Probe Sequence
cagattcactattactagttttttt

SEQ ID NO: 176448 - DNA, 25 bp, Probe Sequence
cagttctcaatttcattttttatgt

SEQ ID NO: 176449 - DNA, 25 bp, Probe Sequence
cagttccagagtgctacttatatag

SEQ ID NO: 176450 - DNA, 25 bp, Probe Sequence
cagggccatagtagctccctttgga

SEQ ID NO: 176451 - DNA, 25 bp, Probe Sequence
cagggcctacgggctgtgtttgatg

SEQ ID NO: 176452 - DNA, 25 bp, Probe Sequence
cagggcctgactgtatttttcatcc

SEQ ID NO: 176453 - DNA, 25 bp, Probe Sequence
gcaggggcttttgtatttcctgcct

SEQ ID NO: 176454 - DNA, 25 bp, Probe Sequence
caggaccttatgggactttcctact

SEQ ID NO: 176455 - DNA, 25 bp, Probe Sequence
caggtccttcaggaagtactccaga

SEQ ID NO: 176456 - DNA, 25 bp, Probe Sequence
cagtgtttccgtcagtacgcgaagg

SEQ ID NO: 176457 - DNA, 25 bp, Probe Sequence
cagtgtcgtcctaccagaggggatt

SEQ ID NO: 176458 - DNA, 25 bp, Probe Sequence
cagtgccttcctaggacacagggga

SEQ ID NO: 176459 - DNA, 25 bp, Probe Sequence
caggccctgtatacgatccgggtga

SEQ ID NO: 176460 - DNA, 25 bp, Probe Sequence
cagtggcactttatagccacggctg

SEQ ID NO: 176461 - DNA, 25 bp, Probe Sequence
cagtcggctttactacaacaagctg

SEQ ID NO: 176462 - DNA, 25 bp, Probe Sequence
cagtcaggccgttttagaagagctt

SEQ ID NO: 176463 - DNA, 25 bp, Probe Sequence
cagtccactctgtctttaaaacata

SEQ ID NO: 176464 - DNA, 25 bp, Probe Sequence
cagtagccagcatcttgtaactaaa

SEQ ID NO: 176465 - DNA, 25 bp, Probe Sequence
cagtagacatcatcttggcatctgt

SEQ ID NO: 176466 - DNA, 25 bp, Probe Sequence
cagtaggctgcatctggagagcatg

SEQ ID NO: 176467 - DNA, 25 bp, Probe Sequence
cagtcggcttaatcagagtgtggca

SEQ ID NO: 176468 - DNA, 25 bp, Probe Sequence
cagtcattgttgctatcagtgtgga

SEQ ID NO: 176469 - DNA, 25 bp, Probe Sequence
cagatttgtcagctgtcagggtgca

SEQ ID NO: 176470 - DNA, 25 bp, Probe Sequence
cagtccatctcctggaggcagacag

SEQ ID NO: 176471 - DNA, 25 bp, Probe Sequence
cagtccatctcctggaggcagacag

SEQ ID NO: 176472 - DNA, 25 bp, Probe Sequence
cagtacatctataggaagtgaagag

SEQ ID NO: 176473 - DNA, 25 bp, Probe Sequence
cagtcactttgccagagcctgagag

SEQ ID NO: 176474 - DNA, 25 bp, Probe Sequence
cagtcatctctgcctgagatccatt

SEQ ID NO: 176475 - DNA, 25 bp, Probe Sequence
cagtctgccatgccaggagtcactg

SEQ ID NO: 176476 - DNA, 25 bp, Probe Sequence
cagtactcagccggcagcataatga

SEQ ID NO: 176477 - DNA, 25 bp, Probe Sequence
cagtgaagccgcggctcaaagccgg

SEQ ID NO: 176478 - DNA, 25 bp, Probe Sequence
cagtgccatgcgttcgctgaaaggc

SEQ ID NO: 176479 - DNA, 25 bp, Probe Sequence
cagtccggtatggccaatgctgggt

SEQ ID NO: 176480 - DNA, 25 bp, Probe Sequence
catgtatgcaggatgactcaatgtt

SEQ ID NO: 176481 - DNA, 25 bp, Probe Sequence
cagtcagcagtcatgcacgctgata

SEQ ID NO: 176482 - DNA, 25 bp, Probe Sequence
cagtcacagctcagacttcatagag

SEQ ID NO: 176483 - DNA, 25 bp, Probe Sequence
cagtcacactgcagtgtgccaacat

SEQ ID NO: 176484 - DNA, 25 bp, Probe Sequence
caggctgatctgaggtaaactttga

SEQ ID NO: 176485 - DNA, 25 bp, Probe Sequence
cagtcaccgtggctcaaacttgtaa

SEQ ID NO: 176486 - DNA, 25 bp, Probe Sequence
cagtgcccagggctctaatgtgtct

SEQ ID NO: 176487 - DNA, 25 bp, Probe Sequence
cagtgaccatgatggattccatttt

SEQ ID NO: 176488 - DNA, 25 bp, Probe Sequence
cagtactaaagtcgctctcatgggt

SEQ ID NO: 176489 - DNA, 25 bp, Probe Sequence
cagtctctacaagtagccctgctgg

SEQ ID NO: 176490 - DNA, 25 bp, Probe Sequence
cagtccatgaaatcgacctgtttaa

SEQ ID NO: 176491 - DNA, 25 bp, Probe Sequence
cagatatttgaagctgaccgtcttt

SEQ ID NO: 176492 - DNA, 25 bp, Probe Sequence
cagtatttactcatatcctcagctt

SEQ ID NO: 176493 - DNA, 25 bp, Probe Sequence
caggattttctcgcatccaaatgtg

SEQ ID NO: 176494 - DNA, 25 bp, Probe Sequence
caggattttcgccactagaaaccca

SEQ ID NO: 176495 - DNA, 25 bp, Probe Sequence
caggacttacctacaaaatactcct

SEQ ID NO: 176496 - DNA, 25 bp, Probe Sequence
cagtgacttgtcctccaacaaaacc

SEQ ID NO: 176497 - DNA, 25 bp, Probe Sequence
cagtgagtttttgttcaataaccca

SEQ ID NO: 176498 - DNA, 25 bp, Probe Sequence
cagtgttttctagttataaccacca

SEQ ID NO: 176499 - DNA, 25 bp, Probe Sequence
cagttttcctatgctttgaaacaga

SEQ ID NO: 176500 - DNA, 25 bp, Probe Sequence
cagtgtttacttgtagatgtaacat

SEQ ID NO: 176501 - DNA, 25 bp, Probe Sequence
cagtggtttcttctaattataaaat

SEQ ID NO: 176502 - DNA, 25 bp, Probe Sequence
caggtttttagactaatatacaact

SEQ ID NO: 176503 - DNA, 25 bp, Probe Sequence
caggcctggttttggtttatagagt

SEQ ID NO: 176504 - DNA, 25 bp, Probe Sequence
caggacggagttttggtatcttagt

SEQ ID NO: 176505 - DNA, 25 bp, Probe Sequence
cagtttggggcttgtggggcttaga

SEQ ID NO: 176506 - DNA, 25 bp, Probe Sequence
cagttggggagcacggttctgggag

SEQ ID NO: 176507 - DNA, 25 bp, Probe Sequence
cagtatggagtcaccaagttcagtg

SEQ ID NO: 176508 - DNA, 25 bp, Probe Sequence
cagatatgggcggcctcaagctggc

SEQ ID NO: 176509 - DNA, 25 bp, Probe Sequence
cagttggagcgtgcgatctgcaggg

SEQ ID NO: 176510 - DNA, 25 bp, Probe Sequence
cagttggagcgtgcgatctgcaggg

SEQ ID NO: 176511 - DNA, 25 bp, Probe Sequence
cagtcctactgaggctgcagtgcgc

SEQ ID NO: 176512 - DNA, 25 bp, Probe Sequence
cagtccctgtgactgtcatggagcc

SEQ ID NO: 176513 - DNA, 25 bp, Probe Sequence
cagtcccttgcttgctcagtggact

SEQ ID NO: 176514 - DNA, 25 bp, Probe Sequence
cagtaattatgttccagattgacca

SEQ ID NO: 176515 - DNA, 25 bp, Probe Sequence
caggacaatatgcaatcagttacac

SEQ ID NO: 176516 - DNA, 25 bp, Probe Sequence
cagtgactaatgagagggtagcctg

SEQ ID NO: 176517 - DNA, 25 bp, Probe Sequence
cagggtgcactgcgtgaggaagcct

SEQ ID NO: 176518 - DNA, 25 bp, Probe Sequence
cagggtgcactgcgtgaggaagcct

SEQ ID NO: 176519 - DNA, 25 bp, Probe Sequence
caggttgaatccggggtgcctttag

SEQ ID NO: 176520 - DNA, 25 bp, Probe Sequence
caggttgaaccacgggaccttgact

SEQ ID NO: 176521 - DNA, 25 bp, Probe Sequence
caggtttaccgacaagactgtgaaa

SEQ ID NO: 176522 - DNA, 25 bp, Probe Sequence
caggtcctagcctggggtaggaaag

SEQ ID NO: 176523 - DNA, 25 bp, Probe Sequence
caggtcctctagaggggaaataggg

SEQ ID NO: 176524 - DNA, 25 bp, Probe Sequence
cagtgccaccctattggggcaacag

SEQ ID NO: 176525 - DNA, 25 bp, Probe Sequence
caggaacctcaccttggacggaatg

SEQ ID NO: 176526 - DNA, 25 bp, Probe Sequence
caggaacccaacagagctcaggaca

SEQ ID NO: 176527 - DNA, 25 bp, Probe Sequence
caggtaatacaacacgccggactga

SEQ ID NO: 176528 - DNA, 25 bp, Probe Sequence
cagtttcaaggacatcggctggaat

SEQ ID NO: 176529 - DNA, 25 bp, Probe Sequence
cagttaagtggattggtgttggtaa

SEQ ID NO: 176530 - DNA, 25 bp, Probe Sequence
cagtgtttattgtggttaggaagca

SEQ ID NO: 176531 - DNA, 25 bp, Probe Sequence
cagtgtttattgtggttaggaagca

SEQ ID NO: 176532 - DNA, 25 bp, Probe Sequence
caggttgtacagagccttaggcaaa

SEQ ID NO: 176533 - DNA, 25 bp, Probe Sequence
cagtattttagtggccttgaacaac

SEQ ID NO: 176534 - DNA, 25 bp, Probe Sequence
cagtagtttgttcccttagaaacat

SEQ ID NO: 176535 - DNA, 25 bp, Probe Sequence
cagttttgattccccaaacagaaca

SEQ ID NO: 176536 - DNA, 25 bp, Probe Sequence
cagattgtatcatccccattactga

SEQ ID NO: 176537 - DNA, 25 bp, Probe Sequence
tagttttccggcagattaatcaatt

SEQ ID NO: 176538 - DNA, 25 bp, Probe Sequence
cagtcttttaggattagaagaatta

SEQ ID NO: 176539 - DNA, 25 bp, Probe Sequence
cagtgctttttgcctttaagaaata

SEQ ID NO: 176540 - DNA, 25 bp, Probe Sequence
cagtgttggaattctttggtgtaaa

SEQ ID NO: 176541 - DNA, 25 bp, Probe Sequence
cagttgtgcttctctaggaggttgg

SEQ ID NO: 176542 - DNA, 25 bp, Probe Sequence
cagattcagttctggcggggctagg

SEQ ID NO: 176543 - DNA, 25 bp, Probe Sequence
cagttcggctccgaggtggagctga

SEQ ID NO: 176544 - DNA, 25 bp, Probe Sequence
cagttggtctccctggaggggactt

SEQ ID NO: 176545 - DNA, 25 bp, Probe Sequence
cagttggtgccatttgcggaggccc

SEQ ID NO: 176546 - DNA, 25 bp, Probe Sequence
cagggttctagcgatgggactgccc

SEQ ID NO: 176547 - DNA, 25 bp, Probe Sequence
cagggattaacctctgcactactga

SEQ ID NO: 176548 - DNA, 25 bp, Probe Sequence
cagggttgaagagactgttagggtc

SEQ ID NO: 176549 - DNA, 25 bp, Probe Sequence
cagttgttgaagttaatgttatggt

SEQ ID NO: 176550 - DNA, 25 bp, Probe Sequence
catgttcttatacctaattttagtc

SEQ ID NO: 176551 - DNA, 25 bp, Probe Sequence
cagttctctgaatgccaatatgatt

SEQ ID NO: 176552 - DNA, 25 bp, Probe Sequence
cagtccttgcaatgttctaggtgac

SEQ ID NO: 176553 - DNA, 25 bp, Probe Sequence
cagtgccttgagagtttcacctggg

SEQ ID NO: 176554 - DNA, 25 bp, Probe Sequence
cagtccttgttcttttgaagcttgt

SEQ ID NO: 176555 - DNA, 25 bp, Probe Sequence
cagtagcatttgccttttgggtttt

SEQ ID NO: 176556 - DNA, 25 bp, Probe Sequence
cagttgatttgtgagtaggcactct

SEQ ID NO: 176557 - DNA, 25 bp, Probe Sequence
catgtggttaactggactgacctaa

SEQ ID NO: 176558 - DNA, 25 bp, Probe Sequence
cagtccttcaaagatgaccaccata

SEQ ID NO: 176559 - DNA, 25 bp, Probe Sequence
aagcatctggacagacaggccttgc

SEQ ID NO: 176560 - DNA, 25 bp, Probe Sequence
cagtccttcacccaaaagttcaaat

SEQ ID NO: 176561 - DNA, 25 bp, Probe Sequence
cagtccttacaccacaaagatgcta

SEQ ID NO: 176562 - DNA, 25 bp, Probe Sequence
cagtctctcaaccatcctaagagct

SEQ ID NO: 176563 - DNA, 25 bp, Probe Sequence
cagtcctcaatctcctatatgtatt

SEQ ID NO: 176564 - DNA, 25 bp, Probe Sequence
cagtgccagttctcctaaggagctg

SEQ ID NO: 176565 - DNA, 25 bp, Probe Sequence
cagtcacagtgggtcctcaaggact

SEQ ID NO: 176566 - DNA, 25 bp, Probe Sequence
cagtagcagatgccgttcaaaaggt

SEQ ID NO: 176567 - DNA, 25 bp, Probe Sequence
cagtcatgcacgctgataaaaaaaa

SEQ ID NO: 176568 - DNA, 25 bp, Probe Sequence
cagtatctggaggaaacacagaata

SEQ ID NO: 176569 - DNA, 25 bp, Probe Sequence
cagtacggaggagtaccaccacagg

SEQ ID NO: 176570 - DNA, 25 bp, Probe Sequence
cagtaggggacccagagtcccaggc

SEQ ID NO: 176571 - DNA, 25 bp, Probe Sequence
cagggactggaagaggctcccaacc

SEQ ID NO: 176572 - DNA, 25 bp, Probe Sequence
cagtgaacttaagcaaattaccctc

SEQ ID NO: 176573 - DNA, 25 bp, Probe Sequence
caggaatctccacacaaatgtccca

SEQ ID NO: 176574 - DNA, 25 bp, Probe Sequence
cagtagtctgtctgaatctttacca

SEQ ID NO: 176575 - DNA, 25 bp, Probe Sequence
cagttgctcttttattttttccagt

SEQ ID NO: 176576 - DNA, 25 bp, Probe Sequence
cagtttctgttaatgatggtttcca

SEQ ID NO: 176577 - DNA, 25 bp, Probe Sequence
cagtaatctgtatttagccctttag

SEQ ID NO: 176578 - DNA, 25 bp, Probe Sequence
cagttttgtgctttgagccactttt

SEQ ID NO: 176579 - DNA, 25 bp, Probe Sequence
caggtttggacatggcacctttctg

SEQ ID NO: 176580 - DNA, 25 bp, Probe Sequence
cagttttgaacagagccctcagttg

SEQ ID NO: 176581 - DNA, 25 bp, Probe Sequence
catttaggaccacagcttgctggat

SEQ ID NO: 176582 - DNA, 25 bp, Probe Sequence
cagttgggacgaaacttcagagccc

SEQ ID NO: 176583 - DNA, 25 bp, Probe Sequence
cagtggggtgtgagaccaaggccct

SEQ ID NO: 176584 - DNA, 25 bp, Probe Sequence
cagggaagggacaccatcaggcctc

SEQ ID NO: 176585 - DNA, 25 bp, Probe Sequence
caggtgggggaaacctatccaattg

SEQ ID NO: 176586 - DNA, 25 bp, Probe Sequence
cagattggttgaaaaccctgtcttc

SEQ ID NO: 176587 - DNA, 25 bp, Probe Sequence
cagttgggtctcaagacctttcctc

SEQ ID NO: 176588 - DNA, 25 bp, Probe Sequence
cagtgggaggccgagtttttcgcac

SEQ ID NO: 176589 - DNA, 25 bp, Probe Sequence
cagttggagtgctggagactttgga

SEQ ID NO: 176590 - DNA, 25 bp, Probe Sequence
cagtggttgatgcgggttttggcag

SEQ ID NO: 176591 - DNA, 25 bp, Probe Sequence
cagtagggaggtcagtgcttcgtgc

SEQ ID NO: 176592 - DNA, 25 bp, Probe Sequence
cagtgacctcagctaagactgggtc

SEQ ID NO: 176593 - DNA, 25 bp, Probe Sequence
cagtgacacccggaaatgaggacca

SEQ ID NO: 176594 - DNA, 25 bp, Probe Sequence
cagttttctctggaatatatgtggc

SEQ ID NO: 176595 - DNA, 25 bp, Probe Sequence
cagtctgttttccgatgatgtgtac

SEQ ID NO: 176596 - DNA, 25 bp, Probe Sequence
cagttgtctctgatgtagcttatac

SEQ ID NO: 176597 - DNA, 25 bp, Probe Sequence
cagttgtctctgatgtagcttatac

SEQ ID NO: 176598 - DNA, 25 bp, Probe Sequence
cagttgttgctgatgtcctagataa

SEQ ID NO: 176599 - DNA, 25 bp, Probe Sequence
cagttgtctgttactcttcacacaa

SEQ ID NO: 176600 - DNA, 25 bp, Probe Sequence
cagtagttgcttccctaactgcaaa

SEQ ID NO: 176601 - DNA, 25 bp, Probe Sequence
caggaggtttctataatgccacata

SEQ ID NO: 176602 - DNA, 25 bp, Probe Sequence
cagggagtttccttattcactcttt

SEQ ID NO: 176603 - DNA, 25 bp, Probe Sequence
cagggaagttaatttgttgctcgtt

SEQ ID NO: 176604 - DNA, 25 bp, Probe Sequence
caggcgggttgcttgtaattttatt

SEQ ID NO: 176605 - DNA, 25 bp, Probe Sequence
cagtggggtacattgtgggctttag

SEQ ID NO: 176606 - DNA, 25 bp, Probe Sequence
caggggatcctaactgggttcttgg

SEQ ID NO: 176607 - DNA, 25 bp, Probe Sequence
cagggtctccttgggtatgttcttg

SEQ ID NO: 176608 - DNA, 25 bp, Probe Sequence
cagggttccctggaacatagttcga

SEQ ID NO: 176609 - DNA, 25 bp, Probe Sequence
cagtgtggttagcgaaaggattagc

SEQ ID NO: 176610 - DNA, 25 bp, Probe Sequence
cagtggagtctcccaagcaaggagt

SEQ ID NO: 176611 - DNA, 25 bp, Probe Sequence
cagggagccacttgaaccactgaac

SEQ ID NO: 176612 - DNA, 25 bp, Probe Sequence
caggtatgcccagcaagacctgaag

SEQ ID NO: 176613 - DNA, 25 bp, Probe Sequence
cagttgatgccttcccagagtcaac

SEQ ID NO: 176614 - DNA, 25 bp, Probe Sequence
cagtttcacaactcaggtgcaaaga

SEQ ID NO: 176615 - DNA, 25 bp, Probe Sequence
cagttccacgactccaagatcaagt

SEQ ID NO: 176616 - DNA, 25 bp, Probe Sequence
catgttgcaacagccccaacatcac

SEQ ID NO: 176617 - DNA, 25 bp, Probe Sequence
catgttgcaacagccccaacatcac

SEQ ID NO: 176618 - DNA, 25 bp, Probe Sequence
catgttgcaacagccccaacatcac

SEQ ID NO: 176619 - DNA, 25 bp, Probe Sequence
cagttgctgcaagacctatgaccac

SEQ ID NO: 176620 - DNA, 25 bp, Probe Sequence
cagttgctgactcacattagtgcca

SEQ ID NO: 176621 - DNA, 25 bp, Probe Sequence
cggcgtactggttgtaggcgtagct

SEQ ID NO: 176622 - DNA, 25 bp, Probe Sequence
cggggaccagtactgtggggactat

SEQ ID NO: 176623 - DNA, 25 bp, Probe Sequence
cagtggctacaaatacgtgggaatg

SEQ ID NO: 176624 - DNA, 25 bp, Probe Sequence
caggcccagaccacgtgggacagaa

SEQ ID NO: 176625 - DNA, 25 bp, Probe Sequence
cagggaagacttcgtggaggagaaa

SEQ ID NO: 176626 - DNA, 25 bp, Probe Sequence
cagtcagaagcccagctgggacgag

SEQ ID NO: 176627 - DNA, 25 bp, Probe Sequence
cagtcagcaagagggtggggtagtc

SEQ ID NO: 176628 - DNA, 25 bp, Probe Sequence
cagtcgaagaaggtgtgggcagaag

SEQ ID NO: 176629 - DNA, 25 bp, Probe Sequence
cagtgagaaattgtgtggagtgacg

SEQ ID NO: 176630 - DNA, 25 bp, Probe Sequence
cagtctaacatagctgagagattga

SEQ ID NO: 176631 - DNA, 25 bp, Probe Sequence
cagttaatgctagtctttcatgtga

SEQ ID NO: 176632 - DNA, 25 bp, Probe Sequence
cagtttacatgagctgttctgcagc

SEQ ID NO: 176633 - DNA, 25 bp, Probe Sequence
cagttatcactgcttatctctgcca

SEQ ID NO: 176634 - DNA, 25 bp, Probe Sequence
cagtaacgtcagttgatgctggaac

SEQ ID NO: 176635 - DNA, 25 bp, Probe Sequence
cagtaaggtcgagagctgctgagaa

SEQ ID NO: 176636 - DNA, 25 bp, Probe Sequence
cagtaaggtctggggattgcagcag

SEQ ID NO: 176637 - DNA, 25 bp, Probe Sequence
cagtaatggtatcactgttgaccct

SEQ ID NO: 176638 - DNA, 25 bp, Probe Sequence
cagtcaatgagttggagtttaccta

SEQ ID NO: 176639 - DNA, 25 bp, Probe Sequence
cagtatgagagtttagttatttgta

SEQ ID NO: 176640 - DNA, 25 bp, Probe Sequence
cagtcatattttaagtattcttgat

SEQ ID NO: 176641 - DNA, 25 bp, Probe Sequence
cagtgaatccttgcagaacttctgt

SEQ ID NO: 176642 - DNA, 25 bp, Probe Sequence
cagtgaatcccccaggggtcttgtt

SEQ ID NO: 176643 - DNA, 25 bp, Probe Sequence
cagtacattcttctggggatatggt

SEQ ID NO: 176644 - DNA, 25 bp, Probe Sequence
cagtaattgttccttgtgcatgtta

SEQ ID NO: 176645 - DNA, 25 bp, Probe Sequence
cagtcacattggcagcttctgcacc

SEQ ID NO: 176646 - DNA, 25 bp, Probe Sequence
cagtgcatgctgggactgttcttcg

SEQ ID NO: 176647 - DNA, 25 bp, Probe Sequence
cagtgcatgcatatactgtctctgt

SEQ ID NO: 176648 - DNA, 25 bp, Probe Sequence
cagtgaccactgtgatctgcagtcc

SEQ ID NO: 176649 - DNA, 25 bp, Probe Sequence
cagtccacactgtagatcgtgtctg

SEQ ID NO: 176650 - DNA, 25 bp, Probe Sequence
cagtccattcatttgaattctgtga

SEQ ID NO: 176651 - DNA, 25 bp, Probe Sequence
cagtaattgctgttgcttgttgtca

SEQ ID NO: 176652 - DNA, 25 bp, Probe Sequence
cagtaattctgctcttggtcatgtg

SEQ ID NO: 176653 - DNA, 25 bp, Probe Sequence
cagtaattctgctcttggtcatgtg

SEQ ID NO: 176654 - DNA, 25 bp, Probe Sequence
cagtaattctgctcttggtcatgtg

SEQ ID NO: 176655 - DNA, 25 bp, Probe Sequence
cagtaattctgctcttggtcatgtg

SEQ ID NO: 176656 - DNA, 25 bp, Probe Sequence
cagtaattctgctcttggtcatgtg

SEQ ID NO: 176657 - DNA, 25 bp, Probe Sequence
cagtgaaatgcctcttggtcctgtc

SEQ ID NO: 176658 - DNA, 25 bp, Probe Sequence
cagtccactttgacttcgtactgtc

SEQ ID NO: 176659 - DNA, 25 bp, Probe Sequence
cagtccttaccaagcaactacttca

SEQ ID NO: 176660 - DNA, 25 bp, Probe Sequence
cagtttccgcagaaatcctatttca

SEQ ID NO: 176661 - DNA, 25 bp, Probe Sequence
cagttttccaatttcacgtgtatat

SEQ ID NO: 176662 - DNA, 25 bp, Probe Sequence
cagtttttcacttctacctacatat

SEQ ID NO: 176663 - DNA, 25 bp, Probe Sequence
cagtttggtgaattgcaaccaacaa

SEQ ID NO: 176664 - DNA, 25 bp, Probe Sequence
cagttttgctggaggccgcaaccag

SEQ ID NO: 176665 - DNA, 25 bp, Probe Sequence
cagtgtttcgggcatgggcaaagcc

SEQ ID NO: 176666 - DNA, 25 bp, Probe Sequence
cagttagagcggtcgttggccaacc

SEQ ID NO: 176667 - DNA, 25 bp, Probe Sequence
gagcttgaagcctcacttgggaagg

SEQ ID NO: 176668 - DNA, 25 bp, Probe Sequence
cagtgctgcagaacggacttgggag

SEQ ID NO: 176669 - DNA, 25 bp, Probe Sequence
caggtcaaagctgatctttctggaa

SEQ ID NO: 176670 - DNA, 25 bp, Probe Sequence
cagggcttacctgtacactgacttg

SEQ ID NO: 176671 - DNA, 25 bp, Probe Sequence
cagggcttacctgtacactgacttg

SEQ ID NO: 176672 - DNA, 25 bp, Probe Sequence
cagggactacttctcattgctgagc

SEQ ID NO: 176673 - DNA, 25 bp, Probe Sequence
cagtatgactacatcttgcctcaag

SEQ ID NO: 176674 - DNA, 25 bp, Probe Sequence
cagtatgactcaagtttggaggaga

SEQ ID NO: 176675 - DNA, 25 bp, Probe Sequence
cagtatgtgccttgggggaggaggg

SEQ ID NO: 176676 - DNA, 25 bp, Probe Sequence
cagtgagtcaggctgggagggcggg

SEQ ID NO: 176677 - DNA, 25 bp, Probe Sequence
cagtgggtagggtagagggagggag

SEQ ID NO: 176678 - DNA, 25 bp, Probe Sequence
caggggcctgtctggagcaggggta

SEQ ID NO: 176679 - DNA, 25 bp, Probe Sequence
caggggatcggctgggaactgggcc

SEQ ID NO: 176680 - DNA, 25 bp, Probe Sequence
caggggatcggctgggaactgggcc

SEQ ID NO: 176681 - DNA, 25 bp, Probe Sequence
caggggtgggggtggaggcttcctg

SEQ ID NO: 176682 - DNA, 25 bp, Probe Sequence
cagggtggggggttgagtcagcctc

SEQ ID NO: 176683 - DNA, 25 bp, Probe Sequence
cagggggcggggtgcagaagaatcc

SEQ ID NO: 176684 - DNA, 25 bp, Probe Sequence
caggggcctgggggatatgaagcta

SEQ ID NO: 176685 - DNA, 25 bp, Probe Sequence
cagtgaaacgggtgctggcaagcat

SEQ ID NO: 176686 - DNA, 25 bp, Probe Sequence
cagtaaagcctgctgatcttaagaa

SEQ ID NO: 176687 - DNA, 25 bp, Probe Sequence
cagtgaaatccttttgttaagagat

SEQ ID NO: 176688 - DNA, 25 bp, Probe Sequence
cagtcagaatggcttttgataaaga

SEQ ID NO: 176689 - DNA, 25 bp, Probe Sequence
cagtcagaataggtttttcacacca

SEQ ID NO: 176690 - DNA, 25 bp, Probe Sequence
cagtggaaatggttccttgcaaact

SEQ ID NO: 176691 - DNA, 25 bp, Probe Sequence
cagggaaagccttcttaccacactg

SEQ ID NO: 176692 - DNA, 25 bp, Probe Sequence
cagggaaagcccctaagctcctgat

SEQ ID NO: 176693 - DNA, 25 bp, Probe Sequence
cagtgaagagacccttagagcccgt

SEQ ID NO: 176694 - DNA, 25 bp, Probe Sequence
cagtgggattcccattaggctcatc

SEQ ID NO: 176695 - DNA, 25 bp, Probe Sequence
cagtcatcacgtggagaaaggtcac

SEQ ID NO: 176696 - DNA, 25 bp, Probe Sequence
cagtctgactgtggagtatgaggat

SEQ ID NO: 176697 - DNA, 25 bp, Probe Sequence
cagtgtatcttgcatgtcatcggaa

SEQ ID NO: 176698 - DNA, 25 bp, Probe Sequence
cagtgtatcttgcatgtcatcggaa

SEQ ID NO: 176699 - DNA, 25 bp, Probe Sequence
cagtgagactgtacataattgcatg

SEQ ID NO: 176700 - DNA, 25 bp, Probe Sequence
cagtgagtgatggtcagaatagaat

SEQ ID NO: 176701 - DNA, 25 bp, Probe Sequence
cagtctggctggtcagcagctgcag

SEQ ID NO: 176702 - DNA, 25 bp, Probe Sequence
cagtcatggatgaccagcgcgacct

SEQ ID NO: 176703 - DNA, 25 bp, Probe Sequence
cagtcatggcattcgcagtgcccag

SEQ ID NO: 176704 - DNA, 25 bp, Probe Sequence
cagtaggtatcacgtcatgccatgt

SEQ ID NO: 176705 - DNA, 25 bp, Probe Sequence
cagtagcaaataagacgcctgtcta

SEQ ID NO: 176706 - DNA, 25 bp, Probe Sequence
cagtagatgttaagtgtctttatca

SEQ ID NO: 176707 - DNA, 25 bp, Probe Sequence
cagtctgctttttagtctttatcat

SEQ ID NO: 176708 - DNA, 25 bp, Probe Sequence
cagttttgatccagtcctgttgatc

SEQ ID NO: 176709 - DNA, 25 bp, Probe Sequence
cagtttataaagctctctgtcatat

SEQ ID NO: 176710 - DNA, 25 bp, Probe Sequence
cagtattcgagaacccatagccaat

SEQ ID NO: 176711 - DNA, 25 bp, Probe Sequence
cagtattatggcttctcgcataccg

SEQ ID NO: 176712 - DNA, 25 bp, Probe Sequence
cagtttcagagaatctttaccctcc

SEQ ID NO: 176713 - DNA, 25 bp, Probe Sequence
cagtgttcaagcagtgattccctcc

SEQ ID NO: 176714 - DNA, 25 bp, Probe Sequence
cagtgcttccacagagattagcctg

SEQ ID NO: 176715 - DNA, 25 bp, Probe Sequence
caggttcccatgcagactttctgct

SEQ ID NO: 176716 - DNA, 25 bp, Probe Sequence
catggttcctgacggagacttcgcc

SEQ ID NO: 176717 - DNA, 25 bp, Probe Sequence
cagtttaggatgtagcacctgcccc

SEQ ID NO: 176718 - DNA, 25 bp, Probe Sequence
cagttttgaggaggtcctcagctcc

SEQ ID NO: 176719 - DNA, 25 bp, Probe Sequence
caggtcttggtaggtgcctgcatct

SEQ ID NO: 176720 - DNA, 25 bp, Probe Sequence
caggtttagtatttttgcctgttag

SEQ ID NO: 176721 - DNA, 25 bp, Probe Sequence
caggtttcactaatatttgtcatgc

SEQ ID NO: 176722 - DNA, 25 bp, Probe Sequence
cagtgttacctcatgatgtcataat

SEQ ID NO: 176723 - DNA, 25 bp, Probe Sequence
caggtttccctgcagtatgagaaaa

SEQ ID NO: 176724 - DNA, 25 bp, Probe Sequence
cagttttcccatggaaatcagacag

SEQ ID NO: 176725 - DNA, 25 bp, Probe Sequence
catgatttagtcctcagaaatggac

SEQ ID NO: 176726 - DNA, 25 bp, Probe Sequence
cagtgcttagcaagtagataatgta

SEQ ID NO: 176727 - DNA, 25 bp, Probe Sequence
cagtgttcagaattcaagcatattt

SEQ ID NO: 176728 - DNA, 25 bp, Probe Sequence
cagtgtccgaattgaggccatttgg

SEQ ID NO: 176729 - DNA, 25 bp, Probe Sequence
cagtgtcccaatccgggttgtggaa

SEQ ID NO: 176730 - DNA, 25 bp, Probe Sequence
cagtgtcccaatccgggttgtggaa

SEQ ID NO: 176731 - DNA, 25 bp, Probe Sequence
cagtgtcccaatccgggttgtggaa

SEQ ID NO: 176732 - DNA, 25 bp, Probe Sequence
catcttcacctttacggtattaaat

SEQ ID NO: 176733 - DNA, 25 bp, Probe Sequence
catttggagctttgggagtattaaa

SEQ ID NO: 176734 - DNA, 25 bp, Probe Sequence
cagtgatgaagattcgggaaattaa

SEQ ID NO: 176735 - DNA, 25 bp, Probe Sequence
cagtggacagtttggcacaatcaat

SEQ ID NO: 176736 - DNA, 25 bp, Probe Sequence
cagtgtacaattcaaaatcatgcaa

SEQ ID NO: 176737 - DNA, 25 bp, Probe Sequence
cagtgggcacatttacaaccagaat

SEQ ID NO: 176738 - DNA, 25 bp, Probe Sequence
cagtgggcatcaactcagcccgact

SEQ ID NO: 176739 - DNA, 25 bp, Probe Sequence
caggggctacaggatgccacgtttc

SEQ ID NO: 176740 - DNA, 25 bp, Probe Sequence
ccgggcttagaaggccggctactga

SEQ ID NO: 176741 - DNA, 25 bp, Probe Sequence
ctcgaggttgaaccctcggatacga

SEQ ID NO: 176742 - DNA, 25 bp, Probe Sequence
cggagaggtgaatccccagtacgat

SEQ ID NO: 176743 - DNA, 25 bp, Probe Sequence
cagggtgcgtaaccacccatggacc

SEQ ID NO: 176744 - DNA, 25 bp, Probe Sequence
catgtcctgataatagctacctcat

SEQ ID NO: 176745 - DNA, 25 bp, Probe Sequence
cagtgcctagcatagtacctgactc

SEQ ID NO: 176746 - DNA, 25 bp, Probe Sequence
cagtgccatgaagatggagactgtg

SEQ ID NO: 176747 - DNA, 25 bp, Probe Sequence
cagtcgaggactgagcagattgagt

SEQ ID NO: 176748 - DNA, 25 bp, Probe Sequence
cagtcgaggactgagcagattgagt

SEQ ID NO: 176749 - DNA, 25 bp, Probe Sequence
cagtgctgaggcatgcccagcaggg

SEQ ID NO: 176750 - DNA, 25 bp, Probe Sequence
cagtctgtggagtccccagagaacc

SEQ ID NO: 176751 - DNA, 25 bp, Probe Sequence
cagtcgtgtgattggcctcaagcga

SEQ ID NO: 176752 - DNA, 25 bp, Probe Sequence
cagtcagcgagctggggctgcactg

SEQ ID NO: 176753 - DNA, 25 bp, Probe Sequence
cagtcatgttgaggtgggctccctg

SEQ ID NO: 176754 - DNA, 25 bp, Probe Sequence
cagtcagcaaggaattgtctcccag

SEQ ID NO: 176755 - DNA, 25 bp, Probe Sequence
cagtctgcataacattgtaacaatg

SEQ ID NO: 176756 - DNA, 25 bp, Probe Sequence
cagtgccagaacttgtatcaacttg

SEQ ID NO: 176757 - DNA, 25 bp, Probe Sequence
cagtatgagttctgctacaaggtgg

SEQ ID NO: 176758 - DNA, 25 bp, Probe Sequence
cagtttgttcatgtcagtgagagct

SEQ ID NO: 176759 - DNA, 25 bp, Probe Sequence
cagtttgtgttgttcagagatgttt

SEQ ID NO: 176760 - DNA, 25 bp, Probe Sequence
caggttagtctcacagttgctgtct

SEQ ID NO: 176761 - DNA, 25 bp, Probe Sequence
cagggaatttgagcagttcagtctg

SEQ ID NO: 176762 - DNA, 25 bp, Probe Sequence
cagggcttctgagccctgtcttcgt

SEQ ID NO: 176763 - DNA, 25 bp, Probe Sequence
cagggttctaggagctcctgggtag

SEQ ID NO: 176764 - DNA, 25 bp, Probe Sequence
cagggttgcattcacattcctgggt

SEQ ID NO: 176765 - DNA, 25 bp, Probe Sequence
caggttatgacacacctccgtgtga

SEQ ID NO: 176766 - DNA, 25 bp, Probe Sequence
cagtggattactgactgcccttgta

SEQ ID NO: 176767 - DNA, 25 bp, Probe Sequence
cagtggattaagtacattctcattg

SEQ ID NO: 176768 - DNA, 25 bp, Probe Sequence
cagtagatcactttttactctgtgt

SEQ ID NO: 176769 - DNA, 25 bp, Probe Sequence
cagtggaatcttgtatttctggttc

SEQ ID NO: 176770 - DNA, 25 bp, Probe Sequence
cagggcaactttgtcaacggcatcc

SEQ ID NO: 176771 - DNA, 25 bp, Probe Sequence
cagggaaaattgttgcagtatggtg

SEQ ID NO: 176772 - DNA, 25 bp, Probe Sequence
cagtgccaaaatcgcggcactgcac

SEQ ID NO: 176773 - DNA, 25 bp, Probe Sequence
cagtactgaagactctgcagccctc

SEQ ID NO: 176774 - DNA, 25 bp, Probe Sequence
cagtactgaagactctgcagccctc

SEQ ID NO: 176775 - DNA, 25 bp, Probe Sequence
cagtactgaagactctgcagccctc

SEQ ID NO: 176776 - DNA, 25 bp, Probe Sequence
cagtaagcacagatcgcactgcctc

SEQ ID NO: 176777 - DNA, 25 bp, Probe Sequence
cagtaacaagcaaggaatccaagtg

SEQ ID NO: 176778 - DNA, 25 bp, Probe Sequence
caggaaacagctatgaccattaggc

SEQ ID NO: 176779 - DNA, 25 bp, Probe Sequence
catctgaagacgtttgaccggggaa

SEQ ID NO: 176780 - DNA, 25 bp, Probe Sequence
ctaaagccgcatttgaaagggaaag

SEQ ID NO: 176781 - DNA, 25 bp, Probe Sequence
ctagaaccagtgtgagcgagtctaa

SEQ ID NO: 176782 - DNA, 25 bp, Probe Sequence
cagggacagggcagaatgcagtgta

SEQ ID NO: 176783 - DNA, 25 bp, Probe Sequence
cagtaaactgagagtagagtgctta

SEQ ID NO: 176784 - DNA, 25 bp, Probe Sequence
cagtaggactggactcgggccatat

SEQ ID NO: 176785 - DNA, 25 bp, Probe Sequence
cagtagtgttggactgttgccacag

SEQ ID NO: 176786 - DNA, 25 bp, Probe Sequence
cagtcagtgtttaagagtgcccggc

SEQ ID NO: 176787 - DNA, 25 bp, Probe Sequence
cagtacgtatctaagatgctgacac

SEQ ID NO: 176788 - DNA, 25 bp, Probe Sequence
cagtatgaattctgagatgttccaa

SEQ ID NO: 176789 - DNA, 25 bp, Probe Sequence
cagtcatgaatgtggccatggcccc

SEQ ID NO: 176790 - DNA, 25 bp, Probe Sequence
cagtgagatcattggacactggaca

SEQ ID NO: 176791 - DNA, 25 bp, Probe Sequence
cagtctttactgacaggagcagcag

SEQ ID NO: 176792 - DNA, 25 bp, Probe Sequence
cagtccagctcttatatgtagcaca

SEQ ID NO: 176793 - DNA, 25 bp, Probe Sequence
cagtgccagcatcccaaatgcaggc

SEQ ID NO: 176794 - DNA, 25 bp, Probe Sequence
cagtcctgctcaatcacaaggtgca

SEQ ID NO: 176795 - DNA, 25 bp, Probe Sequence
cagtctcatctctcactggtgagaa

SEQ ID NO: 176796 - DNA, 25 bp, Probe Sequence
cagtcattctcatagggtgacaatg

SEQ ID NO: 176797 - DNA, 25 bp, Probe Sequence
cagtcatgtctagaggacaatcagg

SEQ ID NO: 176798 - DNA, 25 bp, Probe Sequence
cagtgctctctaacaggaccatcac

SEQ ID NO: 176799 - DNA, 25 bp, Probe Sequence
cagtgccgttgggtgatgcaatcac

SEQ ID NO: 176800 - DNA, 25 bp, Probe Sequence
caggtggtgttgggtgagtacaacc

SEQ ID NO: 176801 - DNA, 25 bp, Probe Sequence
caggtggatcttcttgttccaacca

SEQ ID NO: 176802 - DNA, 25 bp, Probe Sequence
taggggacttggttttagactctga

SEQ ID NO: 176803 - DNA, 25 bp, Probe Sequence
taggggacttggttttagactctga

SEQ ID NO: 176804 - DNA, 25 bp, Probe Sequence
ctgggaggttggataatcaaattca

SEQ ID NO: 176805 - DNA, 25 bp, Probe Sequence
caggggcaggggatcctcagtatag

SEQ ID NO: 176806 - DNA, 25 bp, Probe Sequence
cagggggccagtacaccaacctgca

SEQ ID NO: 176807 - DNA, 25 bp, Probe Sequence
caggggcccaggaagagcaaaatgg

SEQ ID NO: 176808 - DNA, 25 bp, Probe Sequence
caggaggccacactgatgttctaaa

SEQ ID NO: 176809 - DNA, 25 bp, Probe Sequence
cagtgacctccagtgcagggtcaga

SEQ ID NO: 176810 - DNA, 25 bp, Probe Sequence
cagtcctctctgtctgaaggctgag

SEQ ID NO: 176811 - DNA, 25 bp, Probe Sequence
cagtccctccatctggtatgagtaa

SEQ ID NO: 176812 - DNA, 25 bp, Probe Sequence
cagtcccatacactggggcagttaa

SEQ ID NO: 176813 - DNA, 25 bp, Probe Sequence
cagtcccaacctcggggatgtgtgc

SEQ ID NO: 176814 - DNA, 25 bp, Probe Sequence
caggctccaaacaggcatgcgaggt

SEQ ID NO: 176815 - DNA, 25 bp, Probe Sequence
caggtcaaagacagcgctcaaaact

SEQ ID NO: 176816 - DNA, 25 bp, Probe Sequence
cagtgtagagaagacctcaaatgac

SEQ ID NO: 176817 - DNA, 25 bp, Probe Sequence
caggaaaaagattccatgtcagata

SEQ ID NO: 176818 - DNA, 25 bp, Probe Sequence
caggtaaactcttccagcctgatgc

SEQ ID NO: 176819 - DNA, 25 bp, Probe Sequence
caggtaacaactccgtgggtgccat

SEQ ID NO: 176820 - DNA, 25 bp, Probe Sequence
caggtgaaaaaggtgtgagggttga

SEQ ID NO: 176821 - DNA, 25 bp, Probe Sequence
cagtgtgacaagtgccgggagatct

SEQ ID NO: 176822 - DNA, 25 bp, Probe Sequence
catggacaaggttctcagggaagtt

SEQ ID NO: 176823 - DNA, 25 bp, Probe Sequence
cagggacagtgtgctcagtaaagtc

SEQ ID NO: 176824 - DNA, 25 bp, Probe Sequence
cagggggatcgcttgcagtaaggag

SEQ ID NO: 176825 - DNA, 25 bp, Probe Sequence
caggtggccattgtcgtgaaacgag

SEQ ID NO: 176826 - DNA, 25 bp, Probe Sequence
cagggcgccatcgccaagtaagaaa

SEQ ID NO: 176827 - DNA, 25 bp, Probe Sequence
caggcagccactggcagctaaaaaa

SEQ ID NO: 176828 - DNA, 25 bp, Probe Sequence
cagtgccgcacaatgagtcagaaga

SEQ ID NO: 176829 - DNA, 25 bp, Probe Sequence
cagtccatcaagtaacagaagcatt

SEQ ID NO: 176830 - DNA, 25 bp, Probe Sequence
caggcctcaagatcctaagcccaag

SEQ ID NO: 176831 - DNA, 25 bp, Probe Sequence
cagtcgtcgtgttacttgtgcacaa

SEQ ID NO: 176832 - DNA, 25 bp, Probe Sequence
cagtgtgggatttgactcctccaag

SEQ ID NO: 176833 - DNA, 25 bp, Probe Sequence
caggtggaatatgacccatctcccc

SEQ ID NO: 176834 - DNA, 25 bp, Probe Sequence
cagtgttcgttcaagtctgactacc

SEQ ID NO: 176835 - DNA, 25 bp, Probe Sequence
cagggtcctgctgagttaccatagc

SEQ ID NO: 176836 - DNA, 25 bp, Probe Sequence
cagggaactgcctagtgtaacaatg

SEQ ID NO: 176837 - DNA, 25 bp, Probe Sequence
cagtggtgacttcactgatatttag

SEQ ID NO: 176838 - DNA, 25 bp, Probe Sequence
cagtctgtgcaacggattttttttt

SEQ ID NO: 176839 - DNA, 25 bp, Probe Sequence
cagtcttgcattctgtttgtctcgt

SEQ ID NO: 176840 - DNA, 25 bp, Probe Sequence
cagtccatgggggcctgaggctcct

SEQ ID NO: 176841 - DNA, 25 bp, Probe Sequence
cagtgccaggtggacagccagtgtc

SEQ ID NO: 176842 - DNA, 25 bp, Probe Sequence
cagggcagcagtgaaccagttgtcc

SEQ ID NO: 176843 - DNA, 25 bp, Probe Sequence
cagggcagcagaaagtactgaaatc

SEQ ID NO: 176844 - DNA, 25 bp, Probe Sequence
cagtgccacagagaagacgggattg

SEQ ID NO: 176845 - DNA, 25 bp, Probe Sequence
cagtgccaagatgtcgacggcggcg

SEQ ID NO: 176846 - DNA, 25 bp, Probe Sequence
cagtggcaatcagctccactgcgga

SEQ ID NO: 176847 - DNA, 25 bp, Probe Sequence
caggatgacacagtctacatgggca

SEQ ID NO: 176848 - DNA, 25 bp, Probe Sequence
caggagagcatcttccaggctgaga

SEQ ID NO: 176849 - DNA, 25 bp, Probe Sequence
cagggagactatgggactgtgaaag

SEQ ID NO: 176850 - DNA, 25 bp, Probe Sequence
cagtggataccatgtggctgagaaa

SEQ ID NO: 176851 - DNA, 25 bp, Probe Sequence
cagtggtgatgttcagctagctcag

SEQ ID NO: 176852 - DNA, 25 bp, Probe Sequence
cagtcagagtgttagcagcagctac

SEQ ID NO: 176853 - DNA, 25 bp, Probe Sequence
cagtcacactgatatgctgatttgc

SEQ ID NO: 176854 - DNA, 25 bp, Probe Sequence
cagtccgctaatatgattgtgcagt

SEQ ID NO: 176855 - DNA, 25 bp, Probe Sequence
cagtcctgcggaaatgtgtcttgtc

SEQ ID NO: 176856 - DNA, 25 bp, Probe Sequence
cagtctcctggaaataggtctgtcc

SEQ ID NO: 176857 - DNA, 25 bp, Probe Sequence
cagtccctggtatgatgagtttcta

SEQ ID NO: 176858 - DNA, 25 bp, Probe Sequence
cagtccttgtcttcatgtggttatg

SEQ ID NO: 176859 - DNA, 25 bp, Probe Sequence
cagtgctcttgttgatcttgtattc

SEQ ID NO: 176860 - DNA, 25 bp, Probe Sequence
cagtgctcttgttgatcttgtattc

SEQ ID NO: 176861 - DNA, 25 bp, Probe Sequence
cagtgtctttgccattattctcggg

SEQ ID NO: 176862 - DNA, 25 bp, Probe Sequence
cagtgcctttgtctatattctgctc

SEQ ID NO: 176863 - DNA, 25 bp, Probe Sequence
cagtcctgattgcatcataattgtg

SEQ ID NO: 176864 - DNA, 25 bp, Probe Sequence
cagtcgcagaccctatcagatttgg

SEQ ID NO: 176865 - DNA, 25 bp, Probe Sequence
cagtctgcaaggctacagctggctg

SEQ ID NO: 176866 - DNA, 25 bp, Probe Sequence
cagtctcatgggtagatagtggtgc

SEQ ID NO: 176867 - DNA, 25 bp, Probe Sequence
cagtggatggtatatggtggatttg

SEQ ID NO: 176868 - DNA, 25 bp, Probe Sequence
cagtgtgtgggaaatctgatttttt

SEQ ID NO: 176869 - DNA, 25 bp, Probe Sequence
cagtgggcacaggcttcagttttac

SEQ ID NO: 176870 - DNA, 25 bp, Probe Sequence
cagggggtgagctcagactttgaaa

SEQ ID NO: 176871 - DNA, 25 bp, Probe Sequence
caggggttgctgttagactgtcaag

SEQ ID NO: 176872 - DNA, 25 bp, Probe Sequence
caggggaaagttaagcatgtgctag

SEQ ID NO: 176873 - DNA, 25 bp, Probe Sequence
cagtgcgatcaaagttctacgtgcg

SEQ ID NO: 176874 - DNA, 25 bp, Probe Sequence
cagtggtacgagtcccactatgcgc

SEQ ID NO: 176875 - DNA, 25 bp, Probe Sequence
cagtggtacgagtcccactatgcgc

SEQ ID NO: 176876 - DNA, 25 bp, Probe Sequence
cagggggctggactgctaccagcct

SEQ ID NO: 176877 - DNA, 25 bp, Probe Sequence
cagggctggtgcgagatcacggccc

SEQ ID NO: 176878 - DNA, 25 bp, Probe Sequence
cagtcattgccttcaacacagagcc

SEQ ID NO: 176879 - DNA, 25 bp, Probe Sequence
cagtcctgccttacacatagaagca

SEQ ID NO: 176880 - DNA, 25 bp, Probe Sequence
cagtcctgggcactacatgtaaatt

SEQ ID NO: 176881 - DNA, 25 bp, Probe Sequence
caggtgctgcggttcacatgtgtaa

SEQ ID NO: 176882 - DNA, 25 bp, Probe Sequence
caggttgtggcagtcaaggctccag

SEQ ID NO: 176883 - DNA, 25 bp, Probe Sequence
cagtgtgctggtgggcaaggcggct

SEQ ID NO: 176884 - DNA, 25 bp, Probe Sequence
cagtgtgctggtgggcaaggcggct

SEQ ID NO: 176885 - DNA, 25 bp, Probe Sequence
cagtgcagtgggtgagagacgagtc

SEQ ID NO: 176886 - DNA, 25 bp, Probe Sequence
cagtcgctgggtttatcccacatcg

SEQ ID NO: 176887 - DNA, 25 bp, Probe Sequence
cagtgcctgggtggatgggccaccg

SEQ ID NO: 176888 - DNA, 25 bp, Probe Sequence
cagtcatctaattggatgtgtggac

SEQ ID NO: 176889 - DNA, 25 bp, Probe Sequence
cagtcattaatttaagagggtccat

SEQ ID NO: 176890 - DNA, 25 bp, Probe Sequence
cagtcaccattttaatatggggaca

SEQ ID NO: 176891 - DNA, 25 bp, Probe Sequence
caggttctgtaatatttgggcaatg

SEQ ID NO: 176892 - DNA, 25 bp, Probe Sequence
caggttcagttttgaactggccctg

SEQ ID NO: 176893 - DNA, 25 bp, Probe Sequence
caggttacttcatggcagctatccc

SEQ ID NO: 176894 - DNA, 25 bp, Probe Sequence
cagtgtctactggaaggcccaagcc

SEQ ID NO: 176895 - DNA, 25 bp, Probe Sequence
caggttgggcagaagcccatgcaag

SEQ ID NO: 176896 - DNA, 25 bp, Probe Sequence
cagggagggcatgatccctgccagc

SEQ ID NO: 176897 - DNA, 25 bp, Probe Sequence
cagggctggactgaggcctgagcgc

SEQ ID NO: 176898 - DNA, 25 bp, Probe Sequence
cagggctgagaagaaccgcctctgg

SEQ ID NO: 176899 - DNA, 25 bp, Probe Sequence
cagggctggatagcccagccatcct

SEQ ID NO: 176900 - DNA, 25 bp, Probe Sequence
caggcagcggactccgccaatatta

SEQ ID NO: 176901 - DNA, 25 bp, Probe Sequence
cagtcactggaaagagtgccagtca

SEQ ID NO: 176902 - DNA, 25 bp, Probe Sequence
cagtctgctggagtcagacgtcaga

SEQ ID NO: 176903 - DNA, 25 bp, Probe Sequence
cagtctgcaggcctatgatgccaag

SEQ ID NO: 176904 - DNA, 25 bp, Probe Sequence
cagtgagcagggatgaccacatacc

SEQ ID NO: 176905 - DNA, 25 bp, Probe Sequence
cagtcacatgggaacatccacaatg

SEQ ID NO: 176906 - DNA, 25 bp, Probe Sequence
cagtcggctgtgactctcgacaatg

SEQ ID NO: 176907 - DNA, 25 bp, Probe Sequence
cagtctcagtttgccagtcttgcaa

SEQ ID NO: 176908 - DNA, 25 bp, Probe Sequence
cagtcaagtttctctgctttcactg

SEQ ID NO: 176909 - DNA, 25 bp, Probe Sequence
cagtcaacatttcccttaatagcag

SEQ ID NO: 176910 - DNA, 25 bp, Probe Sequence
cagtccactcgtttattgaatagca

SEQ ID NO: 176911 - DNA, 25 bp, Probe Sequence
cagtgcccaccaaatcttcataagc

SEQ ID NO: 176912 - DNA, 25 bp, Probe Sequence
cagtctcgtccaatttctatagcac

SEQ ID NO: 176913 - DNA, 25 bp, Probe Sequence
cagtgctttccgatgagactcagcc

SEQ ID NO: 176914 - DNA, 25 bp, Probe Sequence
cagtgaacacctttgtgcacgagcc

SEQ ID NO: 176915 - DNA, 25 bp, Probe Sequence
cagtgacatactgcggctgatcaag

SEQ ID NO: 176916 - DNA, 25 bp, Probe Sequence
cagtgactgcctgtctggtgaagct

SEQ ID NO: 176917 - DNA, 25 bp, Probe Sequence
caggatttcatcatttgtatagctg

SEQ ID NO: 176918 - DNA, 25 bp, Probe Sequence
cagtgtttaaagcttctctgctgat

SEQ ID NO: 176919 - DNA, 25 bp, Probe Sequence
caggttctaaagtcattagtcatat

SEQ ID NO: 176920 - DNA, 25 bp, Probe Sequence
cagtgatcttaaaagctccaggcag

SEQ ID NO: 176921 - DNA, 25 bp, Probe Sequence
cagtgtttaagagtgcccggcagaa

SEQ ID NO: 176922 - DNA, 25 bp, Probe Sequence
catgtttgtgataaccgtggcgaaa

SEQ ID NO: 176923 - DNA, 25 bp, Probe Sequence
cagtcttgctgagactctgtctgga

SEQ ID NO: 176924 - DNA, 25 bp, Probe Sequence
cagtcactctaggactctgcactga

SEQ ID NO: 176925 - DNA, 25 bp, Probe Sequence
cagtgcctcaagtacatccttatta

SEQ ID NO: 176926 - DNA, 25 bp, Probe Sequence
cagtgactgcactttatcctatagt

SEQ ID NO: 176927 - DNA, 25 bp, Probe Sequence
cagtgactggtatatcttcatcagt

SEQ ID NO: 176928 - DNA, 25 bp, Probe Sequence
cagtctctgttgtcaacctcataga

SEQ ID NO: 176929 - DNA, 25 bp, Probe Sequence
cagtgctggatgtaaatggcgtaga

SEQ ID NO: 176930 - DNA, 25 bp, Probe Sequence
cagtctggatgctggtgccactaat

SEQ ID NO: 176931 - DNA, 25 bp, Probe Sequence
cagtgctgatggggtgtgcccacgt

SEQ ID NO: 176932 - DNA, 25 bp, Probe Sequence
cagtgctgtctggcggcaccaccat

SEQ ID NO: 176933 - DNA, 25 bp, Probe Sequence
cagtctattcggtaagcaacaggac

SEQ ID NO: 176934 - DNA, 25 bp, Probe Sequence
cagtgtgtttgacaagacagcttga

SEQ ID NO: 176935 - DNA, 25 bp, Probe Sequence
cagtggtttcatcaatcatgcctat

SEQ ID NO: 176936 - DNA, 25 bp, Probe Sequence
cagtgtactcttagcaatccattat

SEQ ID NO: 176937 - DNA, 25 bp, Probe Sequence
cagtgtgtactgttttgccacatac

SEQ ID NO: 176938 - DNA, 25 bp, Probe Sequence
caggtttgtttgaatgcctctaaag

SEQ ID NO: 176939 - DNA, 25 bp, Probe Sequence
cagggattgctggtggtgacattaa

SEQ ID NO: 176940 - DNA, 25 bp, Probe Sequence
cagggaacctggctggctagaaggg

SEQ ID NO: 176941 - DNA, 25 bp, Probe Sequence
cagggaatcctggagttctatggtg

SEQ ID NO: 176942 - DNA, 25 bp, Probe Sequence
cagggaatcctggagcacttgttcc

SEQ ID NO: 176943 - DNA, 25 bp, Probe Sequence
cagtgtggtctgagagacctgtttg

SEQ ID NO: 176944 - DNA, 25 bp, Probe Sequence
cagtggtctttgaagcacctgtggt

SEQ ID NO: 176945 - DNA, 25 bp, Probe Sequence
caggggcgtctaatatcctggcttc

SEQ ID NO: 176946 - DNA, 25 bp, Probe Sequence
caggggctgccaaaactcttgattt

SEQ ID NO: 176947 - DNA, 25 bp, Probe Sequence
caggagggtctcgaactcctggcct

SEQ ID NO: 176948 - DNA, 25 bp, Probe Sequence
caggaagttgatcaatcccgaggct

SEQ ID NO: 176949 - DNA, 25 bp, Probe Sequence
cagggcatttttttacgctgggcat

SEQ ID NO: 176950 - DNA, 25 bp, Probe Sequence
caggacttttgttccaggttgccag

SEQ ID NO: 176951 - DNA, 25 bp, Probe Sequence
caggacaatgtttttaggtttagca

SEQ ID NO: 176952 - DNA, 25 bp, Probe Sequence
ccgacttgaatattcctggacttac

SEQ ID NO: 176953 - DNA, 25 bp, Probe Sequence
ctagttaatctattgcttggactta

SEQ ID NO: 176954 - DNA, 25 bp, Probe Sequence
caggtttgatctcagtgtaacgaca

SEQ ID NO: 176955 - DNA, 25 bp, Probe Sequence
caggtatcgtagcggcgacacgaga

SEQ ID NO: 176956 - DNA, 25 bp, Probe Sequence
cagtgtgtcgggaagggatagtgga

SEQ ID NO: 176957 - DNA, 25 bp, Probe Sequence
cagtgcccgggaaaggaagatcaac

SEQ ID NO: 176958 - DNA, 25 bp, Probe Sequence
cagtcgtcgggaaggaacaagaggc

SEQ ID NO: 176959 - DNA, 25 bp, Probe Sequence
cagtggtgggaacgacaaacaaggt

SEQ ID NO: 176960 - DNA, 25 bp, Probe Sequence
caggggccaaaaccagagaaaggct

SEQ ID NO: 176961 - DNA, 25 bp, Probe Sequence
caggggatcaaaaggacggagtggg

SEQ ID NO: 176962 - DNA, 25 bp, Probe Sequence
caggtggtaagaaaacagccagttg

SEQ ID NO: 176963 - DNA, 25 bp, Probe Sequence
caggggtaattattagcgtggcttt

SEQ ID NO: 176964 - DNA, 25 bp, Probe Sequence
caggggaaggtagagctggagcttt

SEQ ID NO: 176965 - DNA, 25 bp, Probe Sequence
cagtgcgcagaaaggcaggagttga

SEQ ID NO: 176966 - DNA, 25 bp, Probe Sequence
cagggctgaaaggggcttttgtcct

SEQ ID NO: 176967 - DNA, 25 bp, Probe Sequence
cagggagacaagggagtcggtgtcc

SEQ ID NO: 176968 - DNA, 25 bp, Probe Sequence
ctgggaaaacgtctcaggtggcctc

SEQ ID NO: 176969 - DNA, 25 bp, Probe Sequence
cagggaaaacctcactgtgtctgcc

SEQ ID NO: 176970 - DNA, 25 bp, Probe Sequence
cagggtctacaagaacgagtgcgcc

SEQ ID NO: 176971 - DNA, 25 bp, Probe Sequence
cagtggctctcagacgaagaggcga

SEQ ID NO: 176972 - DNA, 25 bp, Probe Sequence
cagggcctacgagtgaagggctaat

SEQ ID NO: 176973 - DNA, 25 bp, Probe Sequence
cagggcctgggaggatagggctaat

SEQ ID NO: 176974 - DNA, 25 bp, Probe Sequence
caggaccttaggggactgtgctact

SEQ ID NO: 176975 - DNA, 25 bp, Probe Sequence
caggaactcaagcgggtctcagagc

SEQ ID NO: 176976 - DNA, 25 bp, Probe Sequence
cagtgcagatccggcggggacgaga

SEQ ID NO: 176977 - DNA, 25 bp, Probe Sequence
cagtgcagtgactctgcagggaaag

SEQ ID NO: 176978 - DNA, 25 bp, Probe Sequence
cagtgcagtgaccttcataaagcat

SEQ ID NO: 176979 - DNA, 25 bp, Probe Sequence
cagtgaggacctcgatgtccagctg

SEQ ID NO: 176980 - DNA, 25 bp, Probe Sequence
catggtggagggcacttcaggtccg

SEQ ID NO: 176981 - DNA, 25 bp, Probe Sequence
cagggaggagcaaccttcaggtggc

SEQ ID NO: 176982 - DNA, 25 bp, Probe Sequence
cagggagaggagccgtggataatgg

SEQ ID NO: 176983 - DNA, 25 bp, Probe Sequence
cagtgcgtggccgcagtgttcattg

SEQ ID NO: 176984 - DNA, 25 bp, Probe Sequence
cagtgcgtggccgcagtgttcattg

SEQ ID NO: 176985 - DNA, 25 bp, Probe Sequence
cagtgacctgcgcaatgtttatatg

SEQ ID NO: 176986 - DNA, 25 bp, Probe Sequence
cagtgacctgcgcaatgtttatatg

SEQ ID NO: 176987 - DNA, 25 bp, Probe Sequence
cagtgacctgcgcaatgtttatatg

SEQ ID NO: 176988 - DNA, 25 bp, Probe Sequence
cagtgacctgcgcaatgtttatatg

SEQ ID NO: 176989 - DNA, 25 bp, Probe Sequence
cagtgacctgcgcaatgtttatatg

SEQ ID NO: 176990 - DNA, 25 bp, Probe Sequence
cagtgaccatgcgcagggttctgat

SEQ ID NO: 176991 - DNA, 25 bp, Probe Sequence
caggtctgcgctgcagtgggatctg

SEQ ID NO: 176992 - DNA, 25 bp, Probe Sequence
caggtcagcacgttgctgtcgatta

SEQ ID NO: 176993 - DNA, 25 bp, Probe Sequence
cagtgtgagaggatcgagccattga

SEQ ID NO: 176994 - DNA, 25 bp, Probe Sequence
cagtgacaggatctcggctcactgc

SEQ ID NO: 176995 - DNA, 25 bp, Probe Sequence
cagtgagccgagatcatgccattgc

SEQ ID NO: 176996 - DNA, 25 bp, Probe Sequence
cagtgagccgagattgtgccattgc

SEQ ID NO: 176997 - DNA, 25 bp, Probe Sequence
caggagactgaggtcttcctgggcc

SEQ ID NO: 176998 - DNA, 25 bp, Probe Sequence
caggactgcattgttttctagcccc

SEQ ID NO: 176999 - DNA, 25 bp, Probe Sequence
caggactgcattgttttctagcccc

SEQ ID NO: 177000 - DNA, 25 bp, Probe Sequence
caggaggcttggctgtttgggacct

SEQ ID NO: 177001 - DNA, 25 bp, Probe Sequence
cagggtgctaagctgcttctggagg

SEQ ID NO: 177002 - DNA, 25 bp, Probe Sequence
cagggaatgttgtatctttggaggg

SEQ ID NO: 177003 - DNA, 25 bp, Probe Sequence
cagtgtcgttattatccttgtggag

SEQ ID NO: 177004 - DNA, 25 bp, Probe Sequence
cagtgtttttagacctgtgttacta

SEQ ID NO: 177005 - DNA, 25 bp, Probe Sequence
cagtgtttgttggatccgtttgacc

SEQ ID NO: 177006 - DNA, 25 bp, Probe Sequence
cagtgtttccaggcatccttttagg

SEQ ID NO: 177007 - DNA, 25 bp, Probe Sequence
caggagttacaggttctaagccagg

SEQ ID NO: 177008 - DNA, 25 bp, Probe Sequence
cagtgccttacacatgcttgattcc

SEQ ID NO: 177009 - DNA, 25 bp, Probe Sequence
cagtgttgtcactgagtggtcccct

SEQ ID NO: 177010 - DNA, 25 bp, Probe Sequence
cagtgggcccattgaggttggctcc

SEQ ID NO: 177011 - DNA, 25 bp, Probe Sequence
cagtcgtcgtattagtcatttgttc

SEQ ID NO: 177012 - DNA, 25 bp, Probe Sequence
cagtgtgctcagtaaagtcttccat

SEQ ID NO: 177013 - DNA, 25 bp, Probe Sequence
cagtggccacatcatagttcacctt

SEQ ID NO: 177014 - DNA, 25 bp, Probe Sequence
cagtggccattgccacggtcatcgt

SEQ ID NO: 177015 - DNA, 25 bp, Probe Sequence
cagtgctgatctgggacgatgcccg

SEQ ID NO: 177016 - DNA, 25 bp, Probe Sequence
cagtgctgacttctctagcatgctc

SEQ ID NO: 177017 - DNA, 25 bp, Probe Sequence
cagtgtcactgtcagatggtctgca

SEQ ID NO: 177018 - DNA, 25 bp, Probe Sequence
cagtgaaatgtgcagcagttggctc

SEQ ID NO: 177019 - DNA, 25 bp, Probe Sequence
cagtggcaagtgcaggcagctgtcc

SEQ ID NO: 177020 - DNA, 25 bp, Probe Sequence
cagggacaagtaccggtccgaggca

SEQ ID NO: 177021 - DNA, 25 bp, Probe Sequence
caggacacagggacacgttccctgg

SEQ ID NO: 177022 - DNA, 25 bp, Probe Sequence
cagtgaccaggtcagagatgtcatc

SEQ ID NO: 177023 - DNA, 25 bp, Probe Sequence
cagtgcggggagcaggctgctgctg

SEQ ID NO: 177024 - DNA, 25 bp, Probe Sequence
caggctcgggagtgcctgttgttct

SEQ ID NO: 177025 - DNA, 25 bp, Probe Sequence
caggcccaggactggagctttctct

SEQ ID NO: 177026 - DNA, 25 bp, Probe Sequence
catgtccaaggattggccgcttgtc

SEQ ID NO: 177027 - DNA, 25 bp, Probe Sequence
catgttcagggatcgccaggcgttt

SEQ ID NO: 177028 - DNA, 25 bp, Probe Sequence
catgagaaaaacggcacaggccttc

SEQ ID NO: 177029 - DNA, 25 bp, Probe Sequence
cagggatcaaacagaagcagccgtg

SEQ ID NO: 177030 - DNA, 25 bp, Probe Sequence
cagggatctccgagtcaggacggtc

SEQ ID NO: 177031 - DNA, 25 bp, Probe Sequence
cagggtagcaccatggcaggactgg

SEQ ID NO: 177032 - DNA, 25 bp, Probe Sequence
cagtggtacaagatgtggaggagga

SEQ ID NO: 177033 - DNA, 25 bp, Probe Sequence
cagtgggaagagactgcgggccgtg

SEQ ID NO: 177034 - DNA, 25 bp, Probe Sequence
cagtgggcaagagatgaatggcaag

SEQ ID NO: 177035 - DNA, 25 bp, Probe Sequence
cagtgggcggactgcttgagcccag

SEQ ID NO: 177036 - DNA, 25 bp, Probe Sequence
cagtgatcgctactgcaacttgatg

SEQ ID NO: 177037 - DNA, 25 bp, Probe Sequence
cagtgctctgctcatcaagtgtctg

SEQ ID NO: 177038 - DNA, 25 bp, Probe Sequence
cagtgccgcctgaaagtgtcttggg

SEQ ID NO: 177039 - DNA, 25 bp, Probe Sequence
caggtcccaaacgattcttcctgcc

SEQ ID NO: 177040 - DNA, 25 bp, Probe Sequence
caggaccacctttattgtgtcccca

SEQ ID NO: 177041 - DNA, 25 bp, Probe Sequence
caggaaaccttgattagacccctct

SEQ ID NO: 177042 - DNA, 25 bp, Probe Sequence
cagtgcaaaatccatgttctaacat

SEQ ID NO: 177043 - DNA, 25 bp, Probe Sequence
cagtgcaaaatccatgttctaacat

SEQ ID NO: 177044 - DNA, 25 bp, Probe Sequence
cagtgaaattctatcttgcaaatgc

SEQ ID NO: 177045 - DNA, 25 bp, Probe Sequence
caggaaaatgtgctattgagattcc

SEQ ID NO: 177046 - DNA, 25 bp, Probe Sequence
caggagaattagtagatgcagagtt

SEQ ID NO: 177047 - DNA, 25 bp, Probe Sequence
caggggatggcctgatcgagctgcg

SEQ ID NO: 177048 - DNA, 25 bp, Probe Sequence
cagtggtgatgcaccgcactgagcc

SEQ ID NO: 177049 - DNA, 25 bp, Probe Sequence
cagtgactgtgagcacggcatggcc

SEQ ID NO: 177050 - DNA, 25 bp, Probe Sequence
cagtgcaggagagacagtgaggctg

SEQ ID NO: 177051 - DNA, 25 bp, Probe Sequence
catggcacgagaacaactacgtgat

SEQ ID NO: 177052 - DNA, 25 bp, Probe Sequence
cagtgcaggagaaagctctacttct

SEQ ID NO: 177053 - DNA, 25 bp, Probe Sequence
caggcatgagactaaccttcctctg

SEQ ID NO: 177054 - DNA, 25 bp, Probe Sequence
cagtgcaggcgtggaatattcccat

SEQ ID NO: 177055 - DNA, 25 bp, Probe Sequence
caggactgatgccgaaatgtcacca

SEQ ID NO: 177056 - DNA, 25 bp, Probe Sequence
caggttattagaagagtcccatgaa

SEQ ID NO: 177057 - DNA, 25 bp, Probe Sequence
cagtgattttagactgacctccatt

SEQ ID NO: 177058 - DNA, 25 bp, Probe Sequence
caggttttatgagacttcctattaa

SEQ ID NO: 177059 - DNA, 25 bp, Probe Sequence
caggttactaatcccttattattag

SEQ ID NO: 177060 - DNA, 25 bp, Probe Sequence
caggttccttatccttctgatgaag

SEQ ID NO: 177061 - DNA, 25 bp, Probe Sequence
cagtgattgcgattgttttctagaa

SEQ ID NO: 177062 - DNA, 25 bp, Probe Sequence
cagtgtgtggcagtgttttattgaa

SEQ ID NO: 177063 - DNA, 25 bp, Probe Sequence
cagtggcctcgtggttataagcaag

SEQ ID NO: 177064 - DNA, 25 bp, Probe Sequence
cagtgaactctggtgtctcaaagaa

SEQ ID NO: 177065 - DNA, 25 bp, Probe Sequence
cagtgatagcctgtgggcaccagca

SEQ ID NO: 177066 - DNA, 25 bp, Probe Sequence
cagtgatcagagattgcgccctcag

SEQ ID NO: 177067 - DNA, 25 bp, Probe Sequence
cagtgagctatgatcacgccgctat

SEQ ID NO: 177068 - DNA, 25 bp, Probe Sequence
cagtgagctgtgatcacaccactgc

SEQ ID NO: 177069 - DNA, 25 bp, Probe Sequence
cagtgagccatgatcacaccactgc

SEQ ID NO: 177070 - DNA, 25 bp, Probe Sequence
cagtggaatgcaccacagccatctc

SEQ ID NO: 177071 - DNA, 25 bp, Probe Sequence
cagtgcataacaccacactcagctg

SEQ ID NO: 177072 - DNA, 25 bp, Probe Sequence
cagtgaccacagtcaactccacaag

SEQ ID NO: 177073 - DNA, 25 bp, Probe Sequence
cagtgtccaatgtcaatttgaaatt

SEQ ID NO: 177074 - DNA, 25 bp, Probe Sequence
catgtacctggtgcatgttacaaat

SEQ ID NO: 177075 - DNA, 25 bp, Probe Sequence
catgaaccggatgtctcggcattaa

SEQ ID NO: 177076 - DNA, 25 bp, Probe Sequence
cagtgactacagagtctcaagtata

SEQ ID NO: 177077 - DNA, 25 bp, Probe Sequence
cagtggctcccattttcattttagc

SEQ ID NO: 177078 - DNA, 25 bp, Probe Sequence
cagtgaatcctcctaatctgttttc

SEQ ID NO: 177079 - DNA, 25 bp, Probe Sequence
cagtgaattaataaggccttttcgc

SEQ ID NO: 177080 - DNA, 25 bp, Probe Sequence
cggaatctaaaaagcttttcaacat

SEQ ID NO: 177081 - DNA, 25 bp, Probe Sequence
caggaaatacaacccttttgcccat

SEQ ID NO: 177082 - DNA, 25 bp, Probe Sequence
caggaaatacaacccttttgcccat

SEQ ID NO: 177083 - DNA, 25 bp, Probe Sequence
ctgcagtaaaaaaacctttgaccat

SEQ ID NO: 177084 - DNA, 25 bp, Probe Sequence
caggtaggagaatcccggtgatcca

SEQ ID NO: 177085 - DNA, 25 bp, Probe Sequence
caggacgggaactactttgaacaca

SEQ ID NO: 177086 - DNA, 25 bp, Probe Sequence
caggaggctgggtccttttaagcac

SEQ ID NO: 177087 - DNA, 25 bp, Probe Sequence
caggggtggctgcctcatttagaga

SEQ ID NO: 177088 - DNA, 25 bp, Probe Sequence
cagggtgctctgtgccagttaagat

SEQ ID NO: 177089 - DNA, 25 bp, Probe Sequence
cagggtgctctgtgccagttaagat

SEQ ID NO: 177090 - DNA, 25 bp, Probe Sequence
caggttccagtgcctgacttgggat

SEQ ID NO: 177091 - DNA, 25 bp, Probe Sequence
cagggtccgtgtctttgtatattca

SEQ ID NO: 177092 - DNA, 25 bp, Probe Sequence
cagggacacaggtttcttctatctt

SEQ ID NO: 177093 - DNA, 25 bp, Probe Sequence
caggtagaagactttctccttctta

SEQ ID NO: 177094 - DNA, 25 bp, Probe Sequence
caggtagtcctggtactcctttagt

SEQ ID NO: 177095 - DNA, 25 bp, Probe Sequence
caggtggtcctgtaaaagctttatt

SEQ ID NO: 177096 - DNA, 25 bp, Probe Sequence
cagggtttatagaaacttctgtatt

SEQ ID NO: 177097 - DNA, 25 bp, Probe Sequence
caggatgctttgtgggggtcgtcct

SEQ ID NO: 177098 - DNA, 25 bp, Probe Sequence
caggtgtgttgaagccgggctcaga

SEQ ID NO: 177099 - DNA, 25 bp, Probe Sequence
caggctgggtgtaccttgagctggg

SEQ ID NO: 177100 - DNA, 25 bp, Probe Sequence
caggcgggaaacatccaggcctgcc

SEQ ID NO: 177101 - DNA, 25 bp, Probe Sequence
cggccgctacacgtgtacggccgcc

SEQ ID NO: 177102 - DNA, 25 bp, Probe Sequence
cgggcctgcaaactcgacaggaccc

SEQ ID NO: 177103 - DNA, 25 bp, Probe Sequence
caggggacaaccgagagcgtagcca

SEQ ID NO: 177104 - DNA, 25 bp, Probe Sequence
caggaggtaaaggttgcagtgagcc

SEQ ID NO: 177105 - DNA, 25 bp, Probe Sequence
cagggggaatacgaaggtgactctt

SEQ ID NO: 177106 - DNA, 25 bp, Probe Sequence
caggtggagaaagcctgggccctct

SEQ ID NO: 177107 - DNA, 25 bp, Probe Sequence
caggtgggaggttagtgtggcccgg

SEQ ID NO: 177108 - DNA, 25 bp, Probe Sequence
cagtgtgttaggaatgggaggcccc

SEQ ID NO: 177109 - DNA, 25 bp, Probe Sequence
cagtgggtcaggcacagggagcccc

SEQ ID NO: 177110 - DNA, 25 bp, Probe Sequence
cagtgacgtcaatgggtggagattt

SEQ ID NO: 177111 - DNA, 25 bp, Probe Sequence
cagtggctttcttggactgggcact

SEQ ID NO: 177112 - DNA, 25 bp, Probe Sequence
cagtgcgtgctgtctgtggagtgtg

SEQ ID NO: 177113 - DNA, 25 bp, Probe Sequence
caggctggtgccatgcgattggaat

SEQ ID NO: 177114 - DNA, 25 bp, Probe Sequence
caggtgcaatgctccgattatgaca

SEQ ID NO: 177115 - DNA, 25 bp, Probe Sequence
caggagatagcagactcagatatga

SEQ ID NO: 177116 - DNA, 25 bp, Probe Sequence
cagtgaagaagccctgagagcagat

SEQ ID NO: 177117 - DNA, 25 bp, Probe Sequence
cagtgaaggcggctgcacagagatg

SEQ ID NO: 177118 - DNA, 25 bp, Probe Sequence
caggcacaggctgggtccagttctg

SEQ ID NO: 177119 - DNA, 25 bp, Probe Sequence
caggcacaggctgggtccagttctg

SEQ ID NO: 177120 - DNA, 25 bp, Probe Sequence
cagtgatcacctgagtcagagtttg

SEQ ID NO: 177121 - DNA, 25 bp, Probe Sequence
cagtgtcacatccaagatccgactc

SEQ ID NO: 177122 - DNA, 25 bp, Probe Sequence
caggatacatgacaggccagccttt

SEQ ID NO: 177123 - DNA, 25 bp, Probe Sequence
cagtgagtctgagatggcaccacta

SEQ ID NO: 177124 - DNA, 25 bp, Probe Sequence
cagtgagccgagacgacaccactgc

SEQ ID NO: 177125 - DNA, 25 bp, Probe Sequence
cagtgagccgagacgacaccactgc

SEQ ID NO: 177126 - DNA, 25 bp, Probe Sequence
cagtgagccgagattgcaccactgc

SEQ ID NO: 177127 - DNA, 25 bp, Probe Sequence
cagtgagccgagattgcaccactgc

SEQ ID NO: 177128 - DNA, 25 bp, Probe Sequence
cagtgagccaagatcgcaccactgc

SEQ ID NO: 177129 - DNA, 25 bp, Probe Sequence
cagtgagccgagatcacaccactgc

SEQ ID NO: 177130 - DNA, 25 bp, Probe Sequence
cagtggcacatgcctgtaatcccag

SEQ ID NO: 177131 - DNA, 25 bp, Probe Sequence
cagtgacacggctcaagtctacatg

SEQ ID NO: 177132 - DNA, 25 bp, Probe Sequence
cagtgaatcgtgctgtatgcttact

SEQ ID NO: 177133 - DNA, 25 bp, Probe Sequence
cagtgactcttagtgtctgtttctg

SEQ ID NO: 177134 - DNA, 25 bp, Probe Sequence
caggatctgtgtctgagtcatcttt

SEQ ID NO: 177135 - DNA, 25 bp, Probe Sequence
cagggctgttttgctgcagcttctg

SEQ ID NO: 177136 - DNA, 25 bp, Probe Sequence
cagggctgtgaattccatactagtt

SEQ ID NO: 177137 - DNA, 25 bp, Probe Sequence
cagggggaagatcctttggcacttt

SEQ ID NO: 177138 - DNA, 25 bp, Probe Sequence
cagtggggtttgttttgcaatgttt

SEQ ID NO: 177139 - DNA, 25 bp, Probe Sequence
cagggctaggttttttcaatgaagt

SEQ ID NO: 177140 - DNA, 25 bp, Probe Sequence
cagggcttttcagcttaaatcaaga

SEQ ID NO: 177141 - DNA, 25 bp, Probe Sequence
cagggctatttctccaatgtacaat

SEQ ID NO: 177142 - DNA, 25 bp, Probe Sequence
cagggcttcgtctaacacaaaacag

SEQ ID NO: 177143 - DNA, 25 bp, Probe Sequence
cagtgggggtgctcagaaccacacg

SEQ ID NO: 177144 - DNA, 25 bp, Probe Sequence
caggtggaaggcgcggacctgacag

SEQ ID NO: 177145 - DNA, 25 bp, Probe Sequence
caggggaagtgcccagagtcgtggc

SEQ ID NO: 177146 - DNA, 25 bp, Probe Sequence
cagggcgacgtgcagatggctgtgt

SEQ ID NO: 177147 - DNA, 25 bp, Probe Sequence
cagggaaggtccctgggtgtctcag

SEQ ID NO: 177148 - DNA, 25 bp, Probe Sequence
cagggaaggctccgtgggaggctgg

SEQ ID NO: 177149 - DNA, 25 bp, Probe Sequence
cagggtagggaccgtgtacagcttg

SEQ ID NO: 177150 - DNA, 25 bp, Probe Sequence
cagggaagggagctctagaatctat

SEQ ID NO: 177151 - DNA, 25 bp, Probe Sequence
cagggcagggggcagcaggatacct

SEQ ID NO: 177152 - DNA, 25 bp, Probe Sequence
caggtgacgtggccgaaggtatccc

SEQ ID NO: 177153 - DNA, 25 bp, Probe Sequence
cagggacctggaggaagattcccct

SEQ ID NO: 177154 - DNA, 25 bp, Probe Sequence
cagggaagcggcagagcttctcctc

SEQ ID NO: 177155 - DNA, 25 bp, Probe Sequence
cagggaagtggcgagggtctcacgt

SEQ ID NO: 177156 - DNA, 25 bp, Probe Sequence
caggggaatggccaggaacaccgtc

SEQ ID NO: 177157 - DNA, 25 bp, Probe Sequence
caggcggcactggtcatggaaaacg

SEQ ID NO: 177158 - DNA, 25 bp, Probe Sequence
caggcttccccagggacaaactggc

SEQ ID NO: 177159 - DNA, 25 bp, Probe Sequence
caggattccccgggcaacaaggact

SEQ ID NO: 177160 - DNA, 25 bp, Probe Sequence
caggttccctacgcagtcaagggga

SEQ ID NO: 177161 - DNA, 25 bp, Probe Sequence
caggttctcttctccgtaaagagga

SEQ ID NO: 177162 - DNA, 25 bp, Probe Sequence
caggatcctggtatccgctaacagg

SEQ ID NO: 177163 - DNA, 25 bp, Probe Sequence
caggacctgcggaataggcctggcc

SEQ ID NO: 177164 - DNA, 25 bp, Probe Sequence
caggacctgcggaataggcctggcc

SEQ ID NO: 177165 - DNA, 25 bp, Probe Sequence
caggtcctgcagcggaacctggagc

SEQ ID NO: 177166 - DNA, 25 bp, Probe Sequence
caggtccacagggtatcccaggagg

SEQ ID NO: 177167 - DNA, 25 bp, Probe Sequence
cagggccactggattgccggagagt

SEQ ID NO: 177168 - DNA, 25 bp, Probe Sequence
cagggccaataggcattcctggcac

SEQ ID NO: 177169 - DNA, 25 bp, Probe Sequence
cagtgagggatgccgcaacctcgac

SEQ ID NO: 177170 - DNA, 25 bp, Probe Sequence
caggaagcgtattgaagcttggact

SEQ ID NO: 177171 - DNA, 25 bp, Probe Sequence
cagtgttctgatttgggtctggaca

SEQ ID NO: 177172 - DNA, 25 bp, Probe Sequence
cagtgattccatttctcgtctgtaa

SEQ ID NO: 177173 - DNA, 25 bp, Probe Sequence
caggctataaatatcctttcaaatc

SEQ ID NO: 177174 - DNA, 25 bp, Probe Sequence
caggtgtacaaccttctttccaagt

SEQ ID NO: 177175 - DNA, 25 bp, Probe Sequence
cagggaaaccgttttggtcactgtg

SEQ ID NO: 177176 - DNA, 25 bp, Probe Sequence
caggaaacccgttgtcttgtaatct

SEQ ID NO: 177177 - DNA, 25 bp, Probe Sequence
cagggtatccggtattttgtaatag

SEQ ID NO: 177178 - DNA, 25 bp, Probe Sequence
cagtgttggggttgtttcttaaatg

SEQ ID NO: 177179 - DNA, 25 bp, Probe Sequence
caggtgggaccttttgtgttaatct

SEQ ID NO: 177180 - DNA, 25 bp, Probe Sequence
cagtggaggtcctctggtttgcttc

SEQ ID NO: 177181 - DNA, 25 bp, Probe Sequence
cagtggaggtcctgcatgggatctg

SEQ ID NO: 177182 - DNA, 25 bp, Probe Sequence
cagtgtactgtcctggcaggagtgg

SEQ ID NO: 177183 - DNA, 25 bp, Probe Sequence
cagtgtgactctccttcactgagtg

SEQ ID NO: 177184 - DNA, 25 bp, Probe Sequence
cagtgtccttggcaggctgatttct

SEQ ID NO: 177185 - DNA, 25 bp, Probe Sequence
cagtgtttagaggaggtgaatttat

SEQ ID NO: 177186 - DNA, 25 bp, Probe Sequence
cattttgtcaggtgggagatttgga

SEQ ID NO: 177187 - DNA, 25 bp, Probe Sequence
catgtctttaggtggaaattctgga

SEQ ID NO: 177188 - DNA, 25 bp, Probe Sequence
catgtatgaggagggggaaatttgt

SEQ ID NO: 177189 - DNA, 25 bp, Probe Sequence
cagtggctggcaaggcggttttgtt

SEQ ID NO: 177190 - DNA, 25 bp, Probe Sequence
caggcagcttaagtgtgagtttagt

SEQ ID NO: 177191 - DNA, 25 bp, Probe Sequence
catgaggcttgactttggattccaa

SEQ ID NO: 177192 - DNA, 25 bp, Probe Sequence
catgatctcttggtgttatttcgtt

SEQ ID NO: 177193 - DNA, 25 bp, Probe Sequence
cagtggctttttgattgattgtttg

SEQ ID NO: 177194 - DNA, 25 bp, Probe Sequence
cagtgtgtttctacagtatgttttt

SEQ ID NO: 177195 - DNA, 25 bp, Probe Sequence
cagtgatctttcaacagtaatgttt

SEQ ID NO: 177196 - DNA, 25 bp, Probe Sequence
caggtcattcccaagtaaatttatt

SEQ ID NO: 177197 - DNA, 25 bp, Probe Sequence
cagtgtcttcttaaaatcaaatgta

SEQ ID NO: 177198 - DNA, 25 bp, Probe Sequence
cagtgtcttcttaaaatcaaatgta

SEQ ID NO: 177199 - DNA, 25 bp, Probe Sequence
caggtcgccatcataaacaactcta

SEQ ID NO: 177200 - DNA, 25 bp, Probe Sequence
caggtcgcagacactcaaaacatcc

SEQ ID NO: 177201 - DNA, 25 bp, Probe Sequence
caggtatggagcagccactttcacc

SEQ ID NO: 177202 - DNA, 25 bp, Probe Sequence
cagggagaagctggcacctgtaccc

SEQ ID NO: 177203 - DNA, 25 bp, Probe Sequence
caggctgagaagtaaccatggacgt

SEQ ID NO: 177204 - DNA, 25 bp, Probe Sequence
cagggtgacaggtgaatgaacttaa

SEQ ID NO: 177205 - DNA, 25 bp, Probe Sequence
cagggtaggtgctcagaaaatcatg

SEQ ID NO: 177206 - DNA, 25 bp, Probe Sequence
catgaagggtgtcaccaaggccatg

SEQ ID NO: 177207 - DNA, 25 bp, Probe Sequence
catgaagtgggtgccccactcactt

SEQ ID NO: 177208 - DNA, 25 bp, Probe Sequence
catgatgattggctaccagccccac

SEQ ID NO: 177209 - DNA, 25 bp, Probe Sequence
cagtgtgggcagatgccagcggccc

SEQ ID NO: 177210 - DNA, 25 bp, Probe Sequence
caggtaggatattccagcagccgcc

SEQ ID NO: 177211 - DNA, 25 bp, Probe Sequence
caggtacgaagctgcaactctgcgc

SEQ ID NO: 177212 - DNA, 25 bp, Probe Sequence
cagggacaaagctcttcatccacgg

SEQ ID NO: 177213 - DNA, 25 bp, Probe Sequence
cagtggacataagcattgggccata

SEQ ID NO: 177214 - DNA, 25 bp, Probe Sequence
cagtggactgtcttttggattcaaa

SEQ ID NO: 177215 - DNA, 25 bp, Probe Sequence
cagggactggcaaatagaggatcaa

SEQ ID NO: 177216 - DNA, 25 bp, Probe Sequence
cagggcactgaaaaccagaggctac

SEQ ID NO: 177217 - DNA, 25 bp, Probe Sequence
cagggctctgatattccatgaatgt

SEQ ID NO: 177218 - DNA, 25 bp, Probe Sequence
cagggcctgagacctgcaggatcag

SEQ ID NO: 177219 - DNA, 25 bp, Probe Sequence
cagtgtctgtgacgagctcaggagg

SEQ ID NO: 177220 - DNA, 25 bp, Probe Sequence
cagtgtgggcagcagtagaatacta

SEQ ID NO: 177221 - DNA, 25 bp, Probe Sequence
cagtggggcgtgcttggaagccacc

SEQ ID NO: 177222 - DNA, 25 bp, Probe Sequence
caggggagcaggcttcttatggcac

SEQ ID NO: 177223 - DNA, 25 bp, Probe Sequence
cagggggaggcaggtcttagcccat

SEQ ID NO: 177224 - DNA, 25 bp, Probe Sequence
catgggggcagggacacccagtact

SEQ ID NO: 177225 - DNA, 25 bp, Probe Sequence
cagtggggaggcggcagccgcagtg

SEQ ID NO: 177226 - DNA, 25 bp, Probe Sequence
cagtggggagagcagtggcagtggg

SEQ ID NO: 177227 - DNA, 25 bp, Probe Sequence
cttgggagggtgaggcgggtggatc

SEQ ID NO: 177228 - DNA, 25 bp, Probe Sequence
catgggggggtggagaggggtgcaa

SEQ ID NO: 177229 - DNA, 25 bp, Probe Sequence
catgggggggtggagaggggtgcaa

SEQ ID NO: 177230 - DNA, 25 bp, Probe Sequence
catgggggggtggagaggggtgcaa

SEQ ID NO: 177231 - DNA, 25 bp, Probe Sequence
caggtgtcccggaaaggggctgcag

SEQ ID NO: 177232 - DNA, 25 bp, Probe Sequence
caggttcttgggagcgtgaggcagg

SEQ ID NO: 177233 - DNA, 25 bp, Probe Sequence
cagggtttttgctgattcaggcttg

SEQ ID NO: 177234 - DNA, 25 bp, Probe Sequence
cagtgttttttgtagattctcgttc

SEQ ID NO: 177235 - DNA, 25 bp, Probe Sequence
caggtggttttctaagtgctcctta

SEQ ID NO: 177236 - DNA, 25 bp, Probe Sequence
cagggtgttgttagagcgtctcgtg

SEQ ID NO: 177237 - DNA, 25 bp, Probe Sequence
caggagagttattagcactaccgat

SEQ ID NO: 177238 - DNA, 25 bp, Probe Sequence
caggatgttgcttaccaggacggag

SEQ ID NO: 177239 - DNA, 25 bp, Probe Sequence
caggatgttttactacagatctgga

SEQ ID NO: 177240 - DNA, 25 bp, Probe Sequence
catggtgggcgtctacaacggcaag

SEQ ID NO: 177241 - DNA, 25 bp, Probe Sequence
caggggagctgtatttcctggcgac

SEQ ID NO: 177242 - DNA, 25 bp, Probe Sequence
cagtggcgagcagtttcccacttgc

SEQ ID NO: 177243 - DNA, 25 bp, Probe Sequence
cagtggctggagcttgggcacttgt

SEQ ID NO: 177244 - DNA, 25 bp, Probe Sequence
cagggaacaggtagaggacattgct

SEQ ID NO: 177245 - DNA, 25 bp, Probe Sequence
cagggaatccgcggaggcagttcat

SEQ ID NO: 177246 - DNA, 25 bp, Probe Sequence
catggagttcccgtgggtggtgtcg

SEQ ID NO: 177247 - DNA, 25 bp, Probe Sequence
caggagtgactcagggggtggtcgg

SEQ ID NO: 177248 - DNA, 25 bp, Probe Sequence
cagtggtccatcagggaggcaggtg

SEQ ID NO: 177249 - DNA, 25 bp, Probe Sequence
cagggctccagcgggggagcggttg

SEQ ID NO: 177250 - DNA, 25 bp, Probe Sequence
caggtggtcaccagggatcggggag

SEQ ID NO: 177251 - DNA, 25 bp, Probe Sequence
caggggccaaaagcagtctgaggta

SEQ ID NO: 177252 - DNA, 25 bp, Probe Sequence
cagggtcctaaaacttggatggact

SEQ ID NO: 177253 - DNA, 25 bp, Probe Sequence
cagggtcccacaggtttggggacat

SEQ ID NO: 177254 - DNA, 25 bp, Probe Sequence
cagggatcgccaggcgttttctgag

SEQ ID NO: 177255 - DNA, 25 bp, Probe Sequence
cagtggacacttggggattatctgt

SEQ ID NO: 177256 - DNA, 25 bp, Probe Sequence
cagggaacttgccctgcatctattt

SEQ ID NO: 177257 - DNA, 25 bp, Probe Sequence
cagggaatgctctactctgtctatg

SEQ ID NO: 177258 - DNA, 25 bp, Probe Sequence
cagtgtgtatattatctcttgctct

SEQ ID NO: 177259 - DNA, 25 bp, Probe Sequence
cagtggtcatcatttcctttctgga

SEQ ID NO: 177260 - DNA, 25 bp, Probe Sequence
cagtggtgacatctcagtttgggaa

SEQ ID NO: 177261 - DNA, 25 bp, Probe Sequence
caggtggacccttggtctgtgacaa

SEQ ID NO: 177262 - DNA, 25 bp, Probe Sequence
caggtcctagccaatggtctggaca

SEQ ID NO: 177263 - DNA, 25 bp, Probe Sequence
caggtcctagctcaggagttggcaa

SEQ ID NO: 177264 - DNA, 25 bp, Probe Sequence
caggtgccttggagggtcccaagct

SEQ ID NO: 177265 - DNA, 25 bp, Probe Sequence
cagtgtcctatggctgggggcacta

SEQ ID NO: 177266 - DNA, 25 bp, Probe Sequence
cagtggcccttttgtgggcagcaaa

SEQ ID NO: 177267 - DNA, 25 bp, Probe Sequence
cagggtccagtcagtagacaaaaac

SEQ ID NO: 177268 - DNA, 25 bp, Probe Sequence
caggtgtccccagtcatagaaacaa

SEQ ID NO: 177269 - DNA, 25 bp, Probe Sequence
cagtgtgcctgtccatcttagagga

SEQ ID NO: 177270 - DNA, 25 bp, Probe Sequence
caggtacagctggcattttggcaga

SEQ ID NO: 177271 - DNA, 25 bp, Probe Sequence
cagggacagctgccaataccctgct

SEQ ID NO: 177272 - DNA, 25 bp, Probe Sequence
caggtaacaggctatgacccttagg

SEQ ID NO: 177273 - DNA, 25 bp, Probe Sequence
caggaaacacgctagtgaccattag

SEQ ID NO: 177274 - DNA, 25 bp, Probe Sequence
cagggaccactggcagtacctatgt

SEQ ID NO: 177275 - DNA, 25 bp, Probe Sequence
cagggaggacagtcaagacctctgt

SEQ ID NO: 177276 - DNA, 25 bp, Probe Sequence
cagggaagaagattcatacgcctct

SEQ ID NO: 177277 - DNA, 25 bp, Probe Sequence
cagggccagtagttatcctgcctgt

SEQ ID NO: 177278 - DNA, 25 bp, Probe Sequence
cagggcactttgtcttggtgttgtg

SEQ ID NO: 177279 - DNA, 25 bp, Probe Sequence
caggacattctcccaagtggtctgg

SEQ ID NO: 177280 - DNA, 25 bp, Probe Sequence
caggaaggatgcctaaggatgcctt

SEQ ID NO: 177281 - DNA, 25 bp, Probe Sequence
caggacatgaccttatgggacttcc

SEQ ID NO: 177282 - DNA, 25 bp, Probe Sequence
caggaattctcatgtgggattcccc

SEQ ID NO: 177283 - DNA, 25 bp, Probe Sequence
caggtatttcaggtcagccacagct

SEQ ID NO: 177284 - DNA, 25 bp, Probe Sequence
cagggctttcaaatctccatgctgc

SEQ ID NO: 177285 - DNA, 25 bp, Probe Sequence
cagggctttgcaatttgctgatgta

SEQ ID NO: 177286 - DNA, 25 bp, Probe Sequence
caggagctgcttgttcctgactact

SEQ ID NO: 177287 - DNA, 25 bp, Probe Sequence
cagggtccagaaatcgtgttcacat

SEQ ID NO: 177288 - DNA, 25 bp, Probe Sequence
caggtgcccagagatcaggtgtcca

SEQ ID NO: 177289 - DNA, 25 bp, Probe Sequence
caggaggccgaggatctcgtgtcca

SEQ ID NO: 177290 - DNA, 25 bp, Probe Sequence
caggagtccaacgatcacgtgtgtc

SEQ ID NO: 177291 - DNA, 25 bp, Probe Sequence
cagggcagcaaacatccttgttctg

SEQ ID NO: 177292 - DNA, 25 bp, Probe Sequence
caggcccaacatgttgtgagttcgt

SEQ ID NO: 177293 - DNA, 25 bp, Probe Sequence
caggccagtcacgtttaggtggggc

SEQ ID NO: 177294 - DNA, 25 bp, Probe Sequence
caggcaggtactgctgccagggggc

SEQ ID NO: 177295 - DNA, 25 bp, Probe Sequence
caggatgaagcagtccccagtgttg

SEQ ID NO: 177296 - DNA, 25 bp, Probe Sequence
caggagaagtgtgcccagtactggc

SEQ ID NO: 177297 - DNA, 25 bp, Probe Sequence
cagggcaattgctatcgccagtgac

SEQ ID NO: 177298 - DNA, 25 bp, Probe Sequence
cagtggcacgatctcagctcactgc

SEQ ID NO: 177299 - DNA, 25 bp, Probe Sequence
cagtggcattgaatccagctctcca

SEQ ID NO: 177300 - DNA, 25 bp, Probe Sequence
cagggctcatgaatctcattctctt

SEQ ID NO: 177301 - DNA, 25 bp, Probe Sequence
caggcagggaaaatatcctctacct

SEQ ID NO: 177302 - DNA, 25 bp, Probe Sequence
cagggggacatgtgtccctcagctc

SEQ ID NO: 177303 - DNA, 25 bp, Probe Sequence
caggggatggcatcgggccagagct

SEQ ID NO: 177304 - DNA, 25 bp, Probe Sequence
caggaatgaagaactgtggcctaat

SEQ ID NO: 177305 - DNA, 25 bp, Probe Sequence
cagggagacagcaaccatcgcctga

SEQ ID NO: 177306 - DNA, 25 bp, Probe Sequence
cagggcagcaagggccctggcgagg

SEQ ID NO: 177307 - DNA, 25 bp, Probe Sequence
caggtgagcgacgaccttacagagc

SEQ ID NO: 177308 - DNA, 25 bp, Probe Sequence
caggtgcctgtgcactttgacggtt

SEQ ID NO: 177309 - DNA, 25 bp, Probe Sequence
cagtggctctgtaatgctaacaaga

SEQ ID NO: 177310 - DNA, 25 bp, Probe Sequence
cagtggctcgtgtctgtaatctcaa

SEQ ID NO: 177311 - DNA, 25 bp, Probe Sequence
cagtggtgtgcatctgtagtcccag

SEQ ID NO: 177312 - DNA, 25 bp, Probe Sequence
cagggcttctgacttcagggacaaa

SEQ ID NO: 177313 - DNA, 25 bp, Probe Sequence
cagggcttgctacatcaagagaaga

SEQ ID NO: 177314 - DNA, 25 bp, Probe Sequence
cagggcctgccagacgaggagcagg

SEQ ID NO: 177315 - DNA, 25 bp, Probe Sequence
cagggagctcacagaaggggaggga

SEQ ID NO: 177316 - DNA, 25 bp, Probe Sequence
cagggacaccctgaaggggtgatat

SEQ ID NO: 177317 - DNA, 25 bp, Probe Sequence
catgtagaccccttgaagaggggag

SEQ ID NO: 177318 - DNA, 25 bp, Probe Sequence
cagtggagccccagaagctagatgg

SEQ ID NO: 177319 - DNA, 25 bp, Probe Sequence
cagggagtcctgaacaactggggag

SEQ ID NO: 177320 - DNA, 25 bp, Probe Sequence
caggggatcctcagtatagccggtg

SEQ ID NO: 177321 - DNA, 25 bp, Probe Sequence
cagggcccctgggattagccaggtg

SEQ ID NO: 177322 - DNA, 25 bp, Probe Sequence
caggggccggagtaggagcactggg

SEQ ID NO: 177323 - DNA, 25 bp, Probe Sequence
cagggagacgggatggagacacggg

SEQ ID NO: 177324 - DNA, 25 bp, Probe Sequence
caggagaacaatgttggtgaacgtc

SEQ ID NO: 177325 - DNA, 25 bp, Probe Sequence
caggcaggcacatttctttggaagg

SEQ ID NO: 177326 - DNA, 25 bp, Probe Sequence
caggtgcggcttctttggaaggacc

SEQ ID NO: 177327 - DNA, 25 bp, Probe Sequence
cagtggaggattacttcatgcgcaa

SEQ ID NO: 177328 - DNA, 25 bp, Probe Sequence
cagtggagtatggtgttcggcaaaa

SEQ ID NO: 177329 - DNA, 25 bp, Probe Sequence
cagtggcagtgggtctgggacagac

SEQ ID NO: 177330 - DNA, 25 bp, Probe Sequence
caggtgtgggcagttgggcaagcac

SEQ ID NO: 177331 - DNA, 25 bp, Probe Sequence
caggagggacttagtggctctgccg

SEQ ID NO: 177332 - DNA, 25 bp, Probe Sequence
cagggtgatgacctgtggacctgcc

SEQ ID NO: 177333 - DNA, 25 bp, Probe Sequence
caggacgctgaccgtggagcttaag

SEQ ID NO: 177334 - DNA, 25 bp, Probe Sequence
caggcgcgcggtctggcagtaaaaa

SEQ ID NO: 177335 - DNA, 25 bp, Probe Sequence
caggtgtcaggaccggcctaataaa

SEQ ID NO: 177336 - DNA, 25 bp, Probe Sequence
caggttcagtgaatcctcctaatct

SEQ ID NO: 177337 - DNA, 25 bp, Probe Sequence
caggagtcactgattcagcactaat

SEQ ID NO: 177338 - DNA, 25 bp, Probe Sequence
cagggtcctgtttcacatcacaggg

SEQ ID NO: 177339 - DNA, 25 bp, Probe Sequence
cagggtcactggagaccacgtcgac

SEQ ID NO: 177340 - DNA, 25 bp, Probe Sequence
caggagggactgagacccgggacgc

SEQ ID NO: 177341 - DNA, 25 bp, Probe Sequence
catgggaagacgaggccctcgggcc

SEQ ID NO: 177342 - DNA, 25 bp, Probe Sequence
caggggactcagaggctcccctgtg

SEQ ID NO: 177343 - DNA, 25 bp, Probe Sequence
cagggcaaaagcaaactccaccatg

SEQ ID NO: 177344 - DNA, 25 bp, Probe Sequence
cagggaatgaagaagctctcctaca

SEQ ID NO: 177345 - DNA, 25 bp, Probe Sequence
cagggcaacattaagtagcttacat

SEQ ID NO: 177346 - DNA, 25 bp, Probe Sequence
cagggaacagtttgtcctgaccaca

SEQ ID NO: 177347 - DNA, 25 bp, Probe Sequence
cagggccaagtatgctactgtctcc

SEQ ID NO: 177348 - DNA, 25 bp, Probe Sequence
cagggtcaagtttctcactgttgca

SEQ ID NO: 177349 - DNA, 25 bp, Probe Sequence
catgtgggacgtttctgcatttgga

SEQ ID NO: 177350 - DNA, 25 bp, Probe Sequence
catgtttgcacctttctagttgaaa

SEQ ID NO: 177351 - DNA, 25 bp, Probe Sequence
catcatttccctggactgagttccc

SEQ ID NO: 177352 - DNA, 25 bp, Probe Sequence
catctgtcccttggggagatcccag

SEQ ID NO: 177353 - DNA, 25 bp, Probe Sequence
catctgtcccttggggagatcccag

SEQ ID NO: 177354 - DNA, 25 bp, Probe Sequence
catctgtcccttggggagatcccag

SEQ ID NO: 177355 - DNA, 25 bp, Probe Sequence
caggtgcacctaaaggctgacccgg

SEQ ID NO: 177356 - DNA, 25 bp, Probe Sequence
caggtccatctcaaaggtcacacgt

SEQ ID NO: 177357 - DNA, 25 bp, Probe Sequence
caggtcctttggggcatagatcaga

SEQ ID NO: 177358 - DNA, 25 bp, Probe Sequence
cagggccatattagcagtgaaacat

SEQ ID NO: 177359 - DNA, 25 bp, Probe Sequence
cagggcgacagctcagtgaagtctt

SEQ ID NO: 177360 - DNA, 25 bp, Probe Sequence
cagggctgactgaacagatgaatga

SEQ ID NO: 177361 - DNA, 25 bp, Probe Sequence
cagggcccaacatgtggcatgcaat

SEQ ID NO: 177362 - DNA, 25 bp, Probe Sequence
cagggcctgaacaagaacatcaacc

SEQ ID NO: 177363 - DNA, 25 bp, Probe Sequence
caggaactccgacgaaatcaacgcc

SEQ ID NO: 177364 - DNA, 25 bp, Probe Sequence
caggcaaggccttgaggactctacc

SEQ ID NO: 177365 - DNA, 25 bp, Probe Sequence
caggaaacgatttgggcctctgtca

SEQ ID NO: 177366 - DNA, 25 bp, Probe Sequence
caggaaggaacaggggtcctgtaga

SEQ ID NO: 177367 - DNA, 25 bp, Probe Sequence
cagggggccacagggtgggctgtgg

SEQ ID NO: 177368 - DNA, 25 bp, Probe Sequence
cagggctaggccctggtggtgtgtg

SEQ ID NO: 177369 - DNA, 25 bp, Probe Sequence
cagggccaggcagagagtgaggctg

SEQ ID NO: 177370 - DNA, 25 bp, Probe Sequence
cagggacagtgcacgcaggtgcgcg

SEQ ID NO: 177371 - DNA, 25 bp, Probe Sequence
cagggacacgtggggtgtgctgctg

SEQ ID NO: 177372 - DNA, 25 bp, Probe Sequence
cagggacagaggggagaggcctcca

SEQ ID NO: 177373 - DNA, 25 bp, Probe Sequence
caggtactttgggaaatgactccat

SEQ ID NO: 177374 - DNA, 25 bp, Probe Sequence
caggggtttgcaaaaagactacagc

SEQ ID NO: 177375 - DNA, 25 bp, Probe Sequence
caggagcgttttgataacagtgacc

SEQ ID NO: 177376 - DNA, 25 bp, Probe Sequence
cagggagtttcaactgtgacagtga

SEQ ID NO: 177377 - DNA, 25 bp, Probe Sequence
cagggagttatccagctgggtgctg

SEQ ID NO: 177378 - DNA, 25 bp, Probe Sequence
cagggagtgttcccagggagcctct

SEQ ID NO: 177379 - DNA, 25 bp, Probe Sequence
cagggagtgtaccacacagggccat

SEQ ID NO: 177380 - DNA, 25 bp, Probe Sequence
cagggagttgagccaagatcgcgcc

SEQ ID NO: 177381 - DNA, 25 bp, Probe Sequence
caggggcttggagagacctgcgccc

SEQ ID NO: 177382 - DNA, 25 bp, Probe Sequence
caggggcttggagagacctgcgccc

SEQ ID NO: 177383 - DNA, 25 bp, Probe Sequence
caggggctggtaaagcccctcctct

SEQ ID NO: 177384 - DNA, 25 bp, Probe Sequence
caggggaagcaaagacctcttccct

SEQ ID NO: 177385 - DNA, 25 bp, Probe Sequence
caggggacagctatgacccctagcc

SEQ ID NO: 177386 - DNA, 25 bp, Probe Sequence
caggggaccctggagatcctgtacc

SEQ ID NO: 177387 - DNA, 25 bp, Probe Sequence
catggtagagtctccaacctgttcc

SEQ ID NO: 177388 - DNA, 25 bp, Probe Sequence
catgggggtcccatgacattttctc

SEQ ID NO: 177389 - DNA, 25 bp, Probe Sequence
catgggggtaccccaatctgaagtc

SEQ ID NO: 177390 - DNA, 25 bp, Probe Sequence
caggagggcaagggcgattctgggg

SEQ ID NO: 177391 - DNA, 25 bp, Probe Sequence
caggatgggactggtcgtgtttgtg

SEQ ID NO: 177392 - DNA, 25 bp, Probe Sequence
cagggcggcacatgagtgtttttgg

SEQ ID NO: 177393 - DNA, 25 bp, Probe Sequence
caggctgcggaggagactgcttttg

SEQ ID NO: 177394 - DNA, 25 bp, Probe Sequence
caggtggcaaaattcattctatgtg

SEQ ID NO: 177395 - DNA, 25 bp, Probe Sequence
caggggaaattctacacttgttgca

SEQ ID NO: 177396 - DNA, 25 bp, Probe Sequence
cagggtaatattgagtcccattgca

SEQ ID NO: 177397 - DNA, 25 bp, Probe Sequence
caggttaatttccagaattcttgca

SEQ ID NO: 177398 - DNA, 25 bp, Probe Sequence
caggtttcatattccagaaggttgg

SEQ ID NO: 177399 - DNA, 25 bp, Probe Sequence
caggtgaacatttccgcctggtcta

SEQ ID NO: 177400 - DNA, 25 bp, Probe Sequence
cagggaactcttacatcctgtctcc

SEQ ID NO: 177401 - DNA, 25 bp, Probe Sequence
cagggttcattttcatccattcttc

SEQ ID NO: 177402 - DNA, 25 bp, Probe Sequence
cagggttatgtctatgttcattcta

SEQ ID NO: 177403 - DNA, 25 bp, Probe Sequence
cagggctttcatttggtcatccttg

SEQ ID NO: 177404 - DNA, 25 bp, Probe Sequence
cagggctctaatgatgttgaacttg

SEQ ID NO: 177405 - DNA, 25 bp, Probe Sequence
catcggcttaagaatttctagtcac

SEQ ID NO: 177406 - DNA, 25 bp, Probe Sequence
catcgtgatccggttttgcaagtac

SEQ ID NO: 177407 - DNA, 25 bp, Probe Sequence
catggtaatccgttttgccagtaca

SEQ ID NO: 177408 - DNA, 25 bp, Probe Sequence
caggttcatctctatttaaaggaac

SEQ ID NO: 177409 - DNA, 25 bp, Probe Sequence
caggtatgctcttttctgcagaagg

SEQ ID NO: 177410 - DNA, 25 bp, Probe Sequence
caggtcatcaccattggcaatgagc

SEQ ID NO: 177411 - DNA, 25 bp, Probe Sequence
caggctacaacaagctgtcctgcaa

SEQ ID NO: 177412 - DNA, 25 bp, Probe Sequence
caggcagctaagcagcacctcaaga

SEQ ID NO: 177413 - DNA, 25 bp, Probe Sequence
caggatcatactcagagaccataac

SEQ ID NO: 177414 - DNA, 25 bp, Probe Sequence
caggacaccatcctggactacacac

SEQ ID NO: 177415 - DNA, 25 bp, Probe Sequence
caggatgcacggcgggcaaggagct

SEQ ID NO: 177416 - DNA, 25 bp, Probe Sequence
caggacactgactctgtacaggatg

SEQ ID NO: 177417 - DNA, 25 bp, Probe Sequence
caggtaccagtgtctgtgacgagct

SEQ ID NO: 177418 - DNA, 25 bp, Probe Sequence
caggtaccagatgggctgcgagtgc

SEQ ID NO: 177419 - DNA, 25 bp, Probe Sequence
caggtaccagatgggctgcgagtgc

SEQ ID NO: 177420 - DNA, 25 bp, Probe Sequence
caggtggcgcagatgcagctgaagt

SEQ ID NO: 177421 - DNA, 25 bp, Probe Sequence
caggatgcctgcgagggcgacagtg

SEQ ID NO: 177422 - DNA, 25 bp, Probe Sequence
caggggctgcgaagggaatgccaac

SEQ ID NO: 177423 - DNA, 25 bp, Probe Sequence
cagggtgcagaaaggcaggcatcca

SEQ ID NO: 177424 - DNA, 25 bp, Probe Sequence
caggaggcaattaggattgcccagg

SEQ ID NO: 177425 - DNA, 25 bp, Probe Sequence
caggcgaaactgtgatctgcggcgg

SEQ ID NO: 177426 - DNA, 25 bp, Probe Sequence
caggtgaaaatgggcaggtggcagg

SEQ ID NO: 177427 - DNA, 25 bp, Probe Sequence
caggtagcaagagagcagcgcccag

SEQ ID NO: 177428 - DNA, 25 bp, Probe Sequence
cagggagctagggcagggaccaaat

SEQ ID NO: 177429 - DNA, 25 bp, Probe Sequence
caggctgagaacgcagggaaggaga

SEQ ID NO: 177430 - DNA, 25 bp, Probe Sequence
catccgcgccaagaggaagcgggag

SEQ ID NO: 177431 - DNA, 25 bp, Probe Sequence
catcacccgaacccaagaggcggag

SEQ ID NO: 177432 - DNA, 25 bp, Probe Sequence
cttcgcggggcaaaatggagctcga

SEQ ID NO: 177433 - DNA, 25 bp, Probe Sequence
cttcctttccaacttggacgctgca

SEQ ID NO: 177434 - DNA, 25 bp, Probe Sequence
cggtttcttcatattgaggggcaac

SEQ ID NO: 177435 - DNA, 25 bp, Probe Sequence
caggtatcctctgtttgaagggcaa

SEQ ID NO: 177436 - DNA, 25 bp, Probe Sequence
cagggatttttttctcatagagtaa

SEQ ID NO: 177437 - DNA, 25 bp, Probe Sequence
cagggtttggtctatctcattggga

SEQ ID NO: 177438 - DNA, 25 bp, Probe Sequence
caggcagttgtgctagtttctagga

SEQ ID NO: 177439 - DNA, 25 bp, Probe Sequence
caggcatgtttgagtgttcttaggg

SEQ ID NO: 177440 - DNA, 25 bp, Probe Sequence
caggctggtctaccaggtagttggg

SEQ ID NO: 177441 - DNA, 25 bp, Probe Sequence
caggctggttcggatttggggtgga

SEQ ID NO: 177442 - DNA, 25 bp, Probe Sequence
caggtgaggtgcggtatagtggact

SEQ ID NO: 177443 - DNA, 25 bp, Probe Sequence
cagggacggggtacagaggatagtg

SEQ ID NO: 177444 - DNA, 25 bp, Probe Sequence
caggggcgtgaggtcccaggaagtg

SEQ ID NO: 177445 - DNA, 25 bp, Probe Sequence
cagggtgcagtgggacgtcagagac

SEQ ID NO: 177446 - DNA, 25 bp, Probe Sequence
caggctacaatacaggtcagagaca

SEQ ID NO: 177447 - DNA, 25 bp, Probe Sequence
caggcaccggagcaggtagagactg

SEQ ID NO: 177448 - DNA, 25 bp, Probe Sequence
caggcagtgcaggagtatggttgag

SEQ ID NO: 177449 - DNA, 25 bp, Probe Sequence
caggcgatgtgctttatggcaggcg

SEQ ID NO: 177450 - DNA, 25 bp, Probe Sequence
caggcatgagccattgtgcccagcc

SEQ ID NO: 177451 - DNA, 25 bp, Probe Sequence
caggaagctcacctgtgcctgaagc

SEQ ID NO: 177452 - DNA, 25 bp, Probe Sequence
caggaagtactccagaagaaggcat

SEQ ID NO: 177453 - DNA, 25 bp, Probe Sequence
caggacagtaagcagaacaatcaga

SEQ ID NO: 177454 - DNA, 25 bp, Probe Sequence
caggaaggacagcgcagctctatta

SEQ ID NO: 177455 - DNA, 25 bp, Probe Sequence
cagggggcagagttgcacttttcca

SEQ ID NO: 177456 - DNA, 25 bp, Probe Sequence
cagggagtgaggagccttgctgctc

SEQ ID NO: 177457 - DNA, 25 bp, Probe Sequence
caggagaataggcaccggctggctt

SEQ ID NO: 177458 - DNA, 25 bp, Probe Sequence
cagggaaagtgaatcttggcgcctt

SEQ ID NO: 177459 - DNA, 25 bp, Probe Sequence
caggtgcaaagcctggattgccgcc

SEQ ID NO: 177460 - DNA, 25 bp, Probe Sequence
caggtctaagatctgactgcctcct

SEQ ID NO: 177461 - DNA, 25 bp, Probe Sequence
caggaaatagatcgttatgccagtg

SEQ ID NO: 177462 - DNA, 25 bp, Probe Sequence
caggaaaactcagtgcagtccagtg

SEQ ID NO: 177463 - DNA, 25 bp, Probe Sequence
caggaacaactgccggtgatactgg

SEQ ID NO: 177464 - DNA, 25 bp, Probe Sequence
caggacatccatagcccgataagct

SEQ ID NO: 177465 - DNA, 25 bp, Probe Sequence
caggcacaccccactgaagagcctg

SEQ ID NO: 177466 - DNA, 25 bp, Probe Sequence
caggcatcaagctgaacaacaaggt

SEQ ID NO: 177467 - DNA, 25 bp, Probe Sequence
caggcacagaacaacaaacatggta

SEQ ID NO: 177468 - DNA, 25 bp, Probe Sequence
caggccagataaacacttactgcca

SEQ ID NO: 177469 - DNA, 25 bp, Probe Sequence
catgggacgaaagcttggctccaaa

SEQ ID NO: 177470 - DNA, 25 bp, Probe Sequence
caggcgggaatagcacagctgccct

SEQ ID NO: 177471 - DNA, 25 bp, Probe Sequence
catggggaaacagatgcctcagcct

SEQ ID NO: 177472 - DNA, 25 bp, Probe Sequence
caggctgtgctatccctgtacgcct

SEQ ID NO: 177473 - DNA, 25 bp, Probe Sequence
caggcgctgatgaccccggacaccg

SEQ ID NO: 177474 - DNA, 25 bp, Probe Sequence
caggcaggaagcaagccgtacccag

SEQ ID NO: 177475 - DNA, 25 bp, Probe Sequence
caggagtacgtgactcgtcacccgg

SEQ ID NO: 177476 - DNA, 25 bp, Probe Sequence
caggcagtacaggctgatcgtccac

SEQ ID NO: 177477 - DNA, 25 bp, Probe Sequence
cagggtgatatgctgattttcattg

SEQ ID NO: 177478 - DNA, 25 bp, Probe Sequence
cagggtatgctgcctctgtaaattc

SEQ ID NO: 177479 - DNA, 25 bp, Probe Sequence
caggtctgtgatgcccttagatgtc

SEQ ID NO: 177480 - DNA, 25 bp, Probe Sequence
caggtctgtgatgcccttagatgtc

SEQ ID NO: 177481 - DNA, 25 bp, Probe Sequence
caggtctggaaagtcttggagctcc

SEQ ID NO: 177482 - DNA, 25 bp, Probe Sequence
caggatgctggctatatcttcgggc

SEQ ID NO: 177483 - DNA, 25 bp, Probe Sequence
caggactcagatgacttcgaggccc

SEQ ID NO: 177484 - DNA, 25 bp, Probe Sequence
caggaccagatctgctatctcagaa

SEQ ID NO: 177485 - DNA, 25 bp, Probe Sequence
caggagtctgtctctgctatggaat

SEQ ID NO: 177486 - DNA, 25 bp, Probe Sequence
caggaggctgcctcttagacgatct

SEQ ID NO: 177487 - DNA, 25 bp, Probe Sequence
caggggtgccaggtgtgagggctgc

SEQ ID NO: 177488 - DNA, 25 bp, Probe Sequence
caggggtgccaggtgtgagggctgc

SEQ ID NO: 177489 - DNA, 25 bp, Probe Sequence
cagggatgggcaggctggcatgggg

SEQ ID NO: 177490 - DNA, 25 bp, Probe Sequence
cagggatgtggcagctgcagtgggc

SEQ ID NO: 177491 - DNA, 25 bp, Probe Sequence
caggaagtggctatgctgggggggc

SEQ ID NO: 177492 - DNA, 25 bp, Probe Sequence
caggaaggactcacattggggcgaa

SEQ ID NO: 177493 - DNA, 25 bp, Probe Sequence
caggaaaaatcaacacttggtgtgg

SEQ ID NO: 177494 - DNA, 25 bp, Probe Sequence
caggaataggataccagatttttgg

SEQ ID NO: 177495 - DNA, 25 bp, Probe Sequence
caggaccaggaagtaactttagagg

SEQ ID NO: 177496 - DNA, 25 bp, Probe Sequence
caggactcagtatatggttcttggg

SEQ ID NO: 177497 - DNA, 25 bp, Probe Sequence
caggcaccaatttattcctcgttgc

SEQ ID NO: 177498 - DNA, 25 bp, Probe Sequence
caggatgccactcacatttttttct

SEQ ID NO: 177499 - DNA, 25 bp, Probe Sequence
caggtgacttgtgcattgctttatt

SEQ ID NO: 177500 - DNA, 25 bp, Probe Sequence
caggcaatctttccactgattattc

SEQ ID NO: 177501 - DNA, 25 bp, Probe Sequence
cagggtctgtagccacacaattgtg

SEQ ID NO: 177502 - DNA, 25 bp, Probe Sequence
cagggtctgcggtacgaagtcagcg

SEQ ID NO: 177503 - DNA, 25 bp, Probe Sequence
caggcttggggctgcgagaggggcc

SEQ ID NO: 177504 - DNA, 25 bp, Probe Sequence
caggcttgggaggaccatggggcac

SEQ ID NO: 177505 - DNA, 25 bp, Probe Sequence
catgaaaggtaggagcctgggtccc

SEQ ID NO: 177506 - DNA, 25 bp, Probe Sequence
catgaagtgaggagatggttattta

SEQ ID NO: 177507 - DNA, 25 bp, Probe Sequence
cgtactgatgggctaggtagttcaa

SEQ ID NO: 177508 - DNA, 25 bp, Probe Sequence
cggattttgagcacaggattcccaa

SEQ ID NO: 177509 - DNA, 25 bp, Probe Sequence
caggcatttttttctggattcaaac

SEQ ID NO: 177510 - DNA, 25 bp, Probe Sequence
caggcatttttttctggattcaaac

SEQ ID NO: 177511 - DNA, 25 bp, Probe Sequence
caggcatttttttctggattcaaac

SEQ ID NO: 177512 - DNA, 25 bp, Probe Sequence
caggaagtgtttttgctaccgtgaa

SEQ ID NO: 177513 - DNA, 25 bp, Probe Sequence
catggaaggggatcgcaacatctgg

SEQ ID NO: 177514 - DNA, 25 bp, Probe Sequence
catgggggtggatcgaatcctctgg

SEQ ID NO: 177515 - DNA, 25 bp, Probe Sequence
cagggggctctgaactagtgcctgc

SEQ ID NO: 177516 - DNA, 25 bp, Probe Sequence
caggatggccctgacaagtatgatc

SEQ ID NO: 177517 - DNA, 25 bp, Probe Sequence
caggcagccctgggacataggaagc

SEQ ID NO: 177518 - DNA, 25 bp, Probe Sequence
caggcatccctggggtccaaagtga

SEQ ID NO: 177519 - DNA, 25 bp, Probe Sequence
caggcccgctgggagggtacatgga

SEQ ID NO: 177520 - DNA, 25 bp, Probe Sequence
caggtgggatcaaagaggtcataag

SEQ ID NO: 177521 - DNA, 25 bp, Probe Sequence
caggctgggactgatcagaggtgaa

SEQ ID NO: 177522 - DNA, 25 bp, Probe Sequence
caggcactgggacatcacaggcttc

SEQ ID NO: 177523 - DNA, 25 bp, Probe Sequence
caggcactgggcatgaggggttcct

SEQ ID NO: 177524 - DNA, 25 bp, Probe Sequence
caggcctgggtctaaggggcacgtg

SEQ ID NO: 177525 - DNA, 25 bp, Probe Sequence
caggttggagtgcagtggcgcgatc

SEQ ID NO: 177526 - DNA, 25 bp, Probe Sequence
caggcttaaagctattggacttcag

SEQ ID NO: 177527 - DNA, 25 bp, Probe Sequence
catggctaaggagattggtgctgta

SEQ ID NO: 177528 - DNA, 25 bp, Probe Sequence
caggcacaagtgcgcattggtggga

SEQ ID NO: 177529 - DNA, 25 bp, Probe Sequence
caggcatccttctcaaggggaagcc

SEQ ID NO: 177530 - DNA, 25 bp, Probe Sequence
caggttctcagtcccaaggagaacg

SEQ ID NO: 177531 - DNA, 25 bp, Probe Sequence
caggtcttcggacgcaagaagacag

SEQ ID NO: 177532 - DNA, 25 bp, Probe Sequence
caggatccactgcaaggaacaacag

SEQ ID NO: 177533 - DNA, 25 bp, Probe Sequence
caggcttcacgtttggaaatctgag

SEQ ID NO: 177534 - DNA, 25 bp, Probe Sequence
caggattcgcctttgggagactgcc

SEQ ID NO: 177535 - DNA, 25 bp, Probe Sequence
caggatttgccatagcggatcaagc

SEQ ID NO: 177536 - DNA, 25 bp, Probe Sequence
caggtatgcggatgaggagctccag

SEQ ID NO: 177537 - DNA, 25 bp, Probe Sequence
caggctatggactttctacttgcag

SEQ ID NO: 177538 - DNA, 25 bp, Probe Sequence
caggagaggacaccctggcatgtca

SEQ ID NO: 177539 - DNA, 25 bp, Probe Sequence
caggaattgcaaaggctctgctgtc

SEQ ID NO: 177540 - DNA, 25 bp, Probe Sequence
caggtcattgcactcaagcctgggc

SEQ ID NO: 177541 - DNA, 25 bp, Probe Sequence
catcgtgcactgcctaaacggggga

SEQ ID NO: 177542 - DNA, 25 bp, Probe Sequence
cataagacttgcttgaacccgggag

SEQ ID NO: 177543 - DNA, 25 bp, Probe Sequence
caggagaattgcttgaacccaggag

SEQ ID NO: 177544 - DNA, 25 bp, Probe Sequence
caggcagagtagttgatctcacaca

SEQ ID NO: 177545 - DNA, 25 bp, Probe Sequence
caggcaagcggattgctttgcactc

SEQ ID NO: 177546 - DNA, 25 bp, Probe Sequence
caggcaacgtgttcttgtaaccttt

SEQ ID NO: 177547 - DNA, 25 bp, Probe Sequence
caggcaccaggttctctttattgct

SEQ ID NO: 177548 - DNA, 25 bp, Probe Sequence
caggcacacgagacacttggtttca

SEQ ID NO: 177549 - DNA, 25 bp, Probe Sequence
caggccaaaaccaatatgcttataa

SEQ ID NO: 177550 - DNA, 25 bp, Probe Sequence
caggcacagcatacactttctttac

SEQ ID NO: 177551 - DNA, 25 bp, Probe Sequence
caggttctcacagtattctttccag

SEQ ID NO: 177552 - DNA, 25 bp, Probe Sequence
caggttcagccagtattcacgtgcc

SEQ ID NO: 177553 - DNA, 25 bp, Probe Sequence
caggacttcgcagatgtcacattgc

SEQ ID NO: 177554 - DNA, 25 bp, Probe Sequence
caggatcgacgcgcttctgtatggg

SEQ ID NO: 177555 - DNA, 25 bp, Probe Sequence
caggtagcaagctttttgatgatgc

SEQ ID NO: 177556 - DNA, 25 bp, Probe Sequence
caggttcaaggcatttgttgctatc

SEQ ID NO: 177557 - DNA, 25 bp, Probe Sequence
caggtttcagtcatattgcggcata

SEQ ID NO: 177558 - DNA, 25 bp, Probe Sequence
caggatttccacatcttggtgaagt

SEQ ID NO: 177559 - DNA, 25 bp, Probe Sequence
caggatttcaagaccctgaggcaac

SEQ ID NO: 177560 - DNA, 25 bp, Probe Sequence
caggtcatcttcacccagaggagaa

SEQ ID NO: 177561 - DNA, 25 bp, Probe Sequence
caggttctaccagctccatagagaa

SEQ ID NO: 177562 - DNA, 25 bp, Probe Sequence
catgtctccttccagttctataaaa

SEQ ID NO: 177563 - DNA, 25 bp, Probe Sequence
catgtctccttccagttctataaaa

SEQ ID NO: 177564 - DNA, 25 bp, Probe Sequence
catgtgcacgttttctgtttaaata

SEQ ID NO: 177565 - DNA, 25 bp, Probe Sequence
caggccatgttagttcttagaagat

SEQ ID NO: 177566 - DNA, 25 bp, Probe Sequence
catggcactttggcataccgaaaaa

SEQ ID NO: 177567 - DNA, 25 bp, Probe Sequence
caggtgattctaatacacagacaaa

SEQ ID NO: 177568 - DNA, 25 bp, Probe Sequence
caggcaagctgcaaagacggaaata

SEQ ID NO: 177569 - DNA, 25 bp, Probe Sequence
caggctatgggaagacggagatgca

SEQ ID NO: 177570 - DNA, 25 bp, Probe Sequence
caggcttcaggtgcccagagatcag

SEQ ID NO: 177571 - DNA, 25 bp, Probe Sequence
catgtgcttcgggcccaagaaagtg

SEQ ID NO: 177572 - DNA, 25 bp, Probe Sequence
caggttcattcgtcaaagttaagtt

SEQ ID NO: 177573 - DNA, 25 bp, Probe Sequence
caggtttctctggaaagctccacaa

SEQ ID NO: 177574 - DNA, 25 bp, Probe Sequence
caggtggctttggcacaacttcaac

SEQ ID NO: 177575 - DNA, 25 bp, Probe Sequence
caggtgttctagtcctgacttcacc

SEQ ID NO: 177576 - DNA, 25 bp, Probe Sequence
caggtgttctagtcctgacttcacc

SEQ ID NO: 177577 - DNA, 25 bp, Probe Sequence
caggtgttctagtcctgacttcacc

SEQ ID NO: 177578 - DNA, 25 bp, Probe Sequence
caggtgttctagtcctgacttcacc

SEQ ID NO: 177579 - DNA, 25 bp, Probe Sequence
caggtgtttggcatcgatgctctca

SEQ ID NO: 177580 - DNA, 25 bp, Probe Sequence
caggtgcgttatctcagcttcttca

SEQ ID NO: 177581 - DNA, 25 bp, Probe Sequence
catggtggttactctgtgtttgctg

SEQ ID NO: 177582 - DNA, 25 bp, Probe Sequence
caggtgtttcatacggttattgggg

SEQ ID NO: 177583 - DNA, 25 bp, Probe Sequence
caggggcttcattcagggtgtctgt

SEQ ID NO: 177584 - DNA, 25 bp, Probe Sequence
caggggctgtaatggcctttcttat

SEQ ID NO: 177585 - DNA, 25 bp, Probe Sequence
caggagaggtcactgggcctgtttt

SEQ ID NO: 177586 - DNA, 25 bp, Probe Sequence
caggatgaggcgtgcaggcctgggt

SEQ ID NO: 177587 - DNA, 25 bp, Probe Sequence
caggtggaggtgtcaggctgctggc

SEQ ID NO: 177588 - DNA, 25 bp, Probe Sequence
caggtttggtggcactgctggttac

SEQ ID NO: 177589 - DNA, 25 bp, Probe Sequence
catgagtttgttgcggcgggtttcg

SEQ ID NO: 177590 - DNA, 25 bp, Probe Sequence
catttggtgataccgggggcttcca

SEQ ID NO: 177591 - DNA, 25 bp, Probe Sequence
catatttgaaaaagctgggaattgc

SEQ ID NO: 177592 - DNA, 25 bp, Probe Sequence
catagttggtaatgcttggaatggc

SEQ ID NO: 177593 - DNA, 25 bp, Probe Sequence
catcagtagtgtcaccttctaccac

SEQ ID NO: 177594 - DNA, 25 bp, Probe Sequence
catcctactgtgcgtgtatatacgc

SEQ ID NO: 177595 - DNA, 25 bp, Probe Sequence
caggctgactggcaggaatgaaaaa

SEQ ID NO: 177596 - DNA, 25 bp, Probe Sequence
catgtcagtctgcttagaaataaca

SEQ ID NO: 177597 - DNA, 25 bp, Probe Sequence
caggcctcgcgataaaaacaaaaca

SEQ ID NO: 177598 - DNA, 25 bp, Probe Sequence
caggacctcactcagaaagactaaa

SEQ ID NO: 177599 - DNA, 25 bp, Probe Sequence
caggagtctcatggcctgaacgacc

SEQ ID NO: 177600 - DNA, 25 bp, Probe Sequence
caggattcctgagctgaagtgcaga

SEQ ID NO: 177601 - DNA, 25 bp, Probe Sequence
caggtggcacgatcagcagcactag

SEQ ID NO: 177602 - DNA, 25 bp, Probe Sequence
caggggcacgtggtcaacaggactc

SEQ ID NO: 177603 - DNA, 25 bp, Probe Sequence
caggacgagagggccaacctgacca

SEQ ID NO: 177604 - DNA, 25 bp, Probe Sequence
caggcacccagtgtggacctagaat

SEQ ID NO: 177605 - DNA, 25 bp, Probe Sequence
caggacccgatgcagactcctgaaa

SEQ ID NO: 177606 - DNA, 25 bp, Probe Sequence
caggacctcagtaggcaccgttgag

SEQ ID NO: 177607 - DNA, 25 bp, Probe Sequence
caggagacacagagtcccaggtgcg

SEQ ID NO: 177608 - DNA, 25 bp, Probe Sequence
caggagacacagagtcccaggtgcg

SEQ ID NO: 177609 - DNA, 25 bp, Probe Sequence
caggaaccattccccaatggtgcca

SEQ ID NO: 177610 - DNA, 25 bp, Probe Sequence
caggcatagacctgaccaaggtgcc

SEQ ID NO: 177611 - DNA, 25 bp, Probe Sequence
caggccaatctgtgaggcaagggag

SEQ ID NO: 177612 - DNA, 25 bp, Probe Sequence
caggtgttctgctggtgacggtagc

SEQ ID NO: 177613 - DNA, 25 bp, Probe Sequence
caggtgtaccggattatggctgagc

SEQ ID NO: 177614 - DNA, 25 bp, Probe Sequence
caggtgtactcagtgcctatggggg

SEQ ID NO: 177615 - DNA, 25 bp, Probe Sequence
caggattacattgcagtgaaggaga

SEQ ID NO: 177616 - DNA, 25 bp, Probe Sequence
caggtgtatcctgcatggagaagaa

SEQ ID NO: 177617 - DNA, 25 bp, Probe Sequence
caggtggacactttctccagatgga

SEQ ID NO: 177618 - DNA, 25 bp, Probe Sequence
caggctgagacccagcctctttgta

SEQ ID NO: 177619 - DNA, 25 bp, Probe Sequence
caggtgcaggtcagcacgttgctgt

SEQ ID NO: 177620 - DNA, 25 bp, Probe Sequence
caggtgcagagcgggcactgagctc

SEQ ID NO: 177621 - DNA, 25 bp, Probe Sequence
caggtgactggtggcctgacatcga

SEQ ID NO: 177622 - DNA, 25 bp, Probe Sequence
caggagattgagaccagctgaccaa

SEQ ID NO: 177623 - DNA, 25 bp, Probe Sequence
cgggatctggtatcttcaaaatcca

SEQ ID NO: 177624 - DNA, 25 bp, Probe Sequence
caggcagctttaaccattaaaactg

SEQ ID NO: 177625 - DNA, 25 bp, Probe Sequence
caggcagctttaaccattaaaactg

SEQ ID NO: 177626 - DNA, 25 bp, Probe Sequence
caggactttatacctcttttactgt

SEQ ID NO: 177627 - DNA, 25 bp, Probe Sequence
caggatctttatgtttggcttattt

SEQ ID NO: 177628 - DNA, 25 bp, Probe Sequence
caggtctaatcaggtttctttattg

SEQ ID NO: 177629 - DNA, 25 bp, Probe Sequence
caggtctaatctcttttgtgttttt

SEQ ID NO: 177630 - DNA, 25 bp, Probe Sequence
caggtgctaatttgttttggatata

SEQ ID NO: 177631 - DNA, 25 bp, Probe Sequence
caggtgcggagtttttcgtggatcc

SEQ ID NO: 177632 - DNA, 25 bp, Probe Sequence
caggacgttgctttttcactgtttc

SEQ ID NO: 177633 - DNA, 25 bp, Probe Sequence
caggtgcttggttatcttcaattta

SEQ ID NO: 177634 - DNA, 25 bp, Probe Sequence
catggtgtgcggttcatcttcacgc

SEQ ID NO: 177635 - DNA, 25 bp, Probe Sequence
catggagttggccctattcatgctc

SEQ ID NO: 177636 - DNA, 25 bp, Probe Sequence
caggatggagctcttcatgactgtc

SEQ ID NO: 177637 - DNA, 25 bp, Probe Sequence
caggatggactcttgcacatcacta

SEQ ID NO: 177638 - DNA, 25 bp, Probe Sequence
caggatctgactgtcctcgagatga

SEQ ID NO: 177639 - DNA, 25 bp, Probe Sequence
caggtctgacgatctttggcatgat

SEQ ID NO: 177640 - DNA, 25 bp, Probe Sequence
caggtcagttgatcttctgcaggaa

SEQ ID NO: 177641 - DNA, 25 bp, Probe Sequence
caggaagactgatgttcatgggtaa

SEQ ID NO: 177642 - DNA, 25 bp, Probe Sequence
caggaatgattgtgttgccgtgctc

SEQ ID NO: 177643 - DNA, 25 bp, Probe Sequence
caggcagagttgtctgaatccttcc

SEQ ID NO: 177644 - DNA, 25 bp, Probe Sequence
caggaatgttactacctgcttctcc

SEQ ID NO: 177645 - DNA, 25 bp, Probe Sequence
cggaattacctgtccatcttccgga

SEQ ID NO: 177646 - DNA, 25 bp, Probe Sequence
caggaactacgccgacagcttcctg

SEQ ID NO: 177647 - DNA, 25 bp, Probe Sequence
caggtagttcggggatgtctcgctt

SEQ ID NO: 177648 - DNA, 25 bp, Probe Sequence
caggagagactcggggttctcgttg

SEQ ID NO: 177649 - DNA, 25 bp, Probe Sequence
caggagatactaccggtctccttcg

SEQ ID NO: 177650 - DNA, 25 bp, Probe Sequence
caggagtccatgagaggctttcttc

SEQ ID NO: 177651 - DNA, 25 bp, Probe Sequence
caggcagacctttaggttttgctgc

SEQ ID NO: 177652 - DNA, 25 bp, Probe Sequence
caggtgacctatacaggttctggtg

SEQ ID NO: 177653 - DNA, 25 bp, Probe Sequence
caggagaccttcagcgggatggatc

SEQ ID NO: 177654 - DNA, 25 bp, Probe Sequence
caggataccttcctggtgctatgcc

SEQ ID NO: 177655 - DNA, 25 bp, Probe Sequence
caggatgcaaggtctgcggtccaga

SEQ ID NO: 177656 - DNA, 25 bp, Probe Sequence
caggcaagatggtcagagagttcaa

SEQ ID NO: 177657 - DNA, 25 bp, Probe Sequence
catggacaaggctaggaatcaaact

SEQ ID NO: 177658 - DNA, 25 bp, Probe Sequence
caggacaacctaggggcagggctgg

SEQ ID NO: 177659 - DNA, 25 bp, Probe Sequence
caggaccggctgaagggcggccggc

SEQ ID NO: 177660 - DNA, 25 bp, Probe Sequence
caggaccggctgaagggcggccggc

SEQ ID NO: 177661 - DNA, 25 bp, Probe Sequence
caggagggtggcaggggccctgcct

SEQ ID NO: 177662 - DNA, 25 bp, Probe Sequence
caggagagggaccaggggtgcgccc

SEQ ID NO: 177663 - DNA, 25 bp, Probe Sequence
caggaggcttcaagaggagggcact

SEQ ID NO: 177664 - DNA, 25 bp, Probe Sequence
catgtcggcttttgtgtgattgtga

SEQ ID NO: 177665 - DNA, 25 bp, Probe Sequence
catcttcagtaattgtggttgcgtg

SEQ ID NO: 177666 - DNA, 25 bp, Probe Sequence
caggagaggaaccggtgtgcgatgc

SEQ ID NO: 177667 - DNA, 25 bp, Probe Sequence
caggagtgggacctgaggcgagctg

SEQ ID NO: 177668 - DNA, 25 bp, Probe Sequence
caggccgtggagggacgtgatgctg

SEQ ID NO: 177669 - DNA, 25 bp, Probe Sequence
caggtgcggctgatgaagaggattg

SEQ ID NO: 177670 - DNA, 25 bp, Probe Sequence
caggttgactgtgaatggctattag

SEQ ID NO: 177671 - DNA, 25 bp, Probe Sequence
caggttgacatacctgatgtgctca

SEQ ID NO: 177672 - DNA, 25 bp, Probe Sequence
caggctgtgaagaagctgtatgaca

SEQ ID NO: 177673 - DNA, 25 bp, Probe Sequence
caggttggaggcatctctgacacca

SEQ ID NO: 177674 - DNA, 25 bp, Probe Sequence
catggtcataggccttctctgaaaa

SEQ ID NO: 177675 - DNA, 25 bp, Probe Sequence
catggtcattgacgagactctggat

SEQ ID NO: 177676 - DNA, 25 bp, Probe Sequence
caggtcaagggacgttctgtgggca

SEQ ID NO: 177677 - DNA, 25 bp, Probe Sequence
caggtcacagatagagccttctgtg

SEQ ID NO: 177678 - DNA, 25 bp, Probe Sequence
catgcaatccagtgaggcttcagtg

SEQ ID NO: 177679 - DNA, 25 bp, Probe Sequence
catgaatcaacagggtttcagtcct

SEQ ID NO: 177680 - DNA, 25 bp, Probe Sequence
catgccaacagaggtgtttaccccc

SEQ ID NO: 177681 - DNA, 25 bp, Probe Sequence
caggagaggggtctatccacccctg

SEQ ID NO: 177682 - DNA, 25 bp, Probe Sequence
caggaattgggcagcttccacatcc

SEQ ID NO: 177683 - DNA, 25 bp, Probe Sequence
caggaactgtgtgtgacttccgcct

SEQ ID NO: 177684 - DNA, 25 bp, Probe Sequence
caggaagattctgagacatttcgcc

SEQ ID NO: 177685 - DNA, 25 bp, Probe Sequence
caggccagaggggcaacctggcgcc

SEQ ID NO: 177686 - DNA, 25 bp, Probe Sequence
caggcaaagatcgcaggcggggccg

SEQ ID NO: 177687 - DNA, 25 bp, Probe Sequence
caggacgaaagcgaggcggtctgca

SEQ ID NO: 177688 - DNA, 25 bp, Probe Sequence
catggacgcaaatggccggtagggc

SEQ ID NO: 177689 - DNA, 25 bp, Probe Sequence
catggaacagaaggctcggggggag

SEQ ID NO: 177690 - DNA, 25 bp, Probe Sequence
caggagaagacacctctgggagcct

SEQ ID NO: 177691 - DNA, 25 bp, Probe Sequence
caggagctgacaacctgctgggcac

SEQ ID NO: 177692 - DNA, 25 bp, Probe Sequence
caggagtgccataatctctaccacc

SEQ ID NO: 177693 - DNA, 25 bp, Probe Sequence
caggagaccaagacacattccaccc

SEQ ID NO: 177694 - DNA, 25 bp, Probe Sequence
caggcaactagtgaatgtgccacct

SEQ ID NO: 177695 - DNA, 25 bp, Probe Sequence
caggacacgaatgaagcctccttca

SEQ ID NO: 177696 - DNA, 25 bp, Probe Sequence
caggcttcagaagaggctcgcctct

SEQ ID NO: 177697 - DNA, 25 bp, Probe Sequence
caggcttaaaaatccatgcacaatc

SEQ ID NO: 177698 - DNA, 25 bp, Probe Sequence
caggtcaagaataacacttcaaagt

SEQ ID NO: 177699 - DNA, 25 bp, Probe Sequence
caggttcaacttgccattcaggtgt

SEQ ID NO: 177700 - DNA, 25 bp, Probe Sequence
caggcttcagaccttacctgggttt

SEQ ID NO: 177701 - DNA, 25 bp, Probe Sequence
catggcccacacgttgtatttggtt

SEQ ID NO: 177702 - DNA, 25 bp, Probe Sequence
catggcggccatgagtttgttgcgg

SEQ ID NO: 177703 - DNA, 25 bp, Probe Sequence
catggtagtctctgatagttattgg

SEQ ID NO: 177704 - DNA, 25 bp, Probe Sequence
caggaatgactctgtctttgcatgg

SEQ ID NO: 177705 - DNA, 25 bp, Probe Sequence
caggatcagtcctaatctattggag

SEQ ID NO: 177706 - DNA, 25 bp, Probe Sequence
caggatagcaaatatctatctgcta

SEQ ID NO: 177707 - DNA, 25 bp, Probe Sequence
caggtagtgaggtttatgcctacat

SEQ ID NO: 177708 - DNA, 25 bp, Probe Sequence
catgtgtaaaggtttcatgttcact

SEQ ID NO: 177709 - DNA, 25 bp, Probe Sequence
catgtgtaacaacagccgcttctgg

SEQ ID NO: 177710 - DNA, 25 bp, Probe Sequence
catgttaacacgaagccagagccca

SEQ ID NO: 177711 - DNA, 25 bp, Probe Sequence
caggtagacgagcatgctcggcccc

SEQ ID NO: 177712 - DNA, 25 bp, Probe Sequence
caggagaaggatgtgtctacctcca

SEQ ID NO: 177713 - DNA, 25 bp, Probe Sequence
cataaatagcgtatacgagccttca

SEQ ID NO: 177714 - DNA, 25 bp, Probe Sequence
cttgaataccttgatccagcgttcc

SEQ ID NO: 177715 - DNA, 25 bp, Probe Sequence
cttggtaccgtatcaagctctttcc

SEQ ID NO: 177716 - DNA, 25 bp, Probe Sequence
cttgggccctgatttcagagtcctc

SEQ ID NO: 177717 - DNA, 25 bp, Probe Sequence
catagtacccattaggacttccatg

SEQ ID NO: 177718 - DNA, 25 bp, Probe Sequence
ctagtactaccatgcgtattccctg

SEQ ID NO: 177719 - DNA, 25 bp, Probe Sequence
ctcgctataccctggtattccgttt

SEQ ID NO: 177720 - DNA, 25 bp, Probe Sequence
gcttgaaaactcagactttcggtct

SEQ ID NO: 177721 - DNA, 25 bp, Probe Sequence
cttgaaaactattacctggaggtca

SEQ ID NO: 177722 - DNA, 25 bp, Probe Sequence
cttccggaataacgcttggcggtca

SEQ ID NO: 177723 - DNA, 25 bp, Probe Sequence
caggcaggctaaacaagtgtggggt

SEQ ID NO: 177724 - DNA, 25 bp, Probe Sequence
caggagttcgagaccagtctggtca

SEQ ID NO: 177725 - DNA, 25 bp, Probe Sequence
caggagttcgagaccatcctggcca

SEQ ID NO: 177726 - DNA, 25 bp, Probe Sequence
caggagttcgagaccatcctggcca

SEQ ID NO: 177727 - DNA, 25 bp, Probe Sequence
caggagttcgtgaccagcctgacaa

SEQ ID NO: 177728 - DNA, 25 bp, Probe Sequence
caggagttcgtcagagctctggcag

SEQ ID NO: 177729 - DNA, 25 bp, Probe Sequence
caggcagttggccagagagcctggt

SEQ ID NO: 177730 - DNA, 25 bp, Probe Sequence
caggatttatgctggagctctgttt

SEQ ID NO: 177731 - DNA, 25 bp, Probe Sequence
caggtattctcaatttccttttaag

SEQ ID NO: 177732 - DNA, 25 bp, Probe Sequence
caggtactctcatattcaacttgta

SEQ ID NO: 177733 - DNA, 25 bp, Probe Sequence
catggtggcttcatattaagtagta

SEQ ID NO: 177734 - DNA, 25 bp, Probe Sequence
caggttttttgttacgctgctgtca

SEQ ID NO: 177735 - DNA, 25 bp, Probe Sequence
caggtttcattttgggccttgctaa

SEQ ID NO: 177736 - DNA, 25 bp, Probe Sequence
caggttcttgttctggcacaagtag

SEQ ID NO: 177737 - DNA, 25 bp, Probe Sequence
caggctttttctgtgagactgcgtt

SEQ ID NO: 177738 - DNA, 25 bp, Probe Sequence
caggcttagatcaatgtatagggct

SEQ ID NO: 177739 - DNA, 25 bp, Probe Sequence
caggatagatcacatgttagggcac

SEQ ID NO: 177740 - DNA, 25 bp, Probe Sequence
caggctttgcaggagttagccgacc

SEQ ID NO: 177741 - DNA, 25 bp, Probe Sequence
catggaggtcgagaccagcctgacc

SEQ ID NO: 177742 - DNA, 25 bp, Probe Sequence
cattatggggaagcctggtacccct

SEQ ID NO: 177743 - DNA, 25 bp, Probe Sequence
catcacggggaagccgggagttccg

SEQ ID NO: 177744 - DNA, 25 bp, Probe Sequence
ctactggggaaagggagggctcact

SEQ ID NO: 177745 - DNA, 25 bp, Probe Sequence
cattcttggtttaagggggccagat

SEQ ID NO: 177746 - DNA, 25 bp, Probe Sequence
cattttcggggtatgggcccgatag

SEQ ID NO: 177747 - DNA, 25 bp, Probe Sequence
catgtttgtggccgaacgggcccct

SEQ ID NO: 177748 - DNA, 25 bp, Probe Sequence
catggcttgttgaggactgggactt

SEQ ID NO: 177749 - DNA, 25 bp, Probe Sequence
caggctctttgcttatgccagggca

SEQ ID NO: 177750 - DNA, 25 bp, Probe Sequence
caggcagtaatgtgagcaatgggga

SEQ ID NO: 177751 - DNA, 25 bp, Probe Sequence
caggaggacatcttggcagtgctgg

SEQ ID NO: 177752 - DNA, 25 bp, Probe Sequence
caggctgaacatactccagattccc

SEQ ID NO: 177753 - DNA, 25 bp, Probe Sequence
catgcctgatttacttcacttaaca

SEQ ID NO: 177754 - DNA, 25 bp, Probe Sequence
caggctattaaattgcaatgtagaa

SEQ ID NO: 177755 - DNA, 25 bp, Probe Sequence
catggtcattaccctgagaagaaac

SEQ ID NO: 177756 - DNA, 25 bp, Probe Sequence
caggccatggacgccatcaagaaga

SEQ ID NO: 177757 - DNA, 25 bp, Probe Sequence
caggccatgcttgcactcagaagtt

SEQ ID NO: 177758 - DNA, 25 bp, Probe Sequence
caggccatgcttgcactcagaagtt

SEQ ID NO: 177759 - DNA, 25 bp, Probe Sequence
caggccatgcttgcactcagaagtt

SEQ ID NO: 177760 - DNA, 25 bp, Probe Sequence
caggccagctattgtaaaagctttt

SEQ ID NO: 177761 - DNA, 25 bp, Probe Sequence
caggccctatcctgaacaggagact

SEQ ID NO: 177762 - DNA, 25 bp, Probe Sequence
caggccttccgaaaatgcgcggctt

SEQ ID NO: 177763 - DNA, 25 bp, Probe Sequence
caggactgtcctcgaattgtgggtg

SEQ ID NO: 177764 - DNA, 25 bp, Probe Sequence
caggagctacacaccttcgaggtga

SEQ ID NO: 177765 - DNA, 25 bp, Probe Sequence
caggatgcgaacacactgagtgagg

SEQ ID NO: 177766 - DNA, 25 bp, Probe Sequence
catggtgaattgaatcctgcagctc

SEQ ID NO: 177767 - DNA, 25 bp, Probe Sequence
caggagacaggttagctgctcccca

SEQ ID NO: 177768 - DNA, 25 bp, Probe Sequence
catggggcaggcttagccccggaag

SEQ ID NO: 177769 - DNA, 25 bp, Probe Sequence
caggcaggaggagagcgccgagcgg

SEQ ID NO: 177770 - DNA, 25 bp, Probe Sequence
caggcaggcagctgtacccaagctg

SEQ ID NO: 177771 - DNA, 25 bp, Probe Sequence
caggaggctctactcctgcaaatgg

SEQ ID NO: 177772 - DNA, 25 bp, Probe Sequence
caggactcatgaagatcgtgaaaga

SEQ ID NO: 177773 - DNA, 25 bp, Probe Sequence
caggatgcaatgtgcatgcctaaat

SEQ ID NO: 177774 - DNA, 25 bp, Probe Sequence
catggaatatgccctgcgtaaactg

SEQ ID NO: 177775 - DNA, 25 bp, Probe Sequence
caggagctagactgccttgaggctg

SEQ ID NO: 177776 - DNA, 25 bp, Probe Sequence
caggagctcagggggcactaagatg

SEQ ID NO: 177777 - DNA, 25 bp, Probe Sequence
caggagctcagggggcactaagatg

SEQ ID NO: 177778 - DNA, 25 bp, Probe Sequence
caggcgctggctcagtcaataaagg

SEQ ID NO: 177779 - DNA, 25 bp, Probe Sequence
caggccttgttataaataagctgca

SEQ ID NO: 177780 - DNA, 25 bp, Probe Sequence
caggccttcattaaaactcaacaaa

SEQ ID NO: 177781 - DNA, 25 bp, Probe Sequence
caggctaccttgacacagatccaaa

SEQ ID NO: 177782 - DNA, 25 bp, Probe Sequence
caggcaaaacgaggaatcatcaaga

SEQ ID NO: 177783 - DNA, 25 bp, Probe Sequence
caggaggagcaccagaaatgtcagc

SEQ ID NO: 177784 - DNA, 25 bp, Probe Sequence
caggcatggagcggagaggcactca

SEQ ID NO: 177785 - DNA, 25 bp, Probe Sequence
catggtgatgcaccagacaggcctc

SEQ ID NO: 177786 - DNA, 25 bp, Probe Sequence
caggatgatcagtccggggcgctgc

SEQ ID NO: 177787 - DNA, 25 bp, Probe Sequence
caggagaagcgcgaggcatgggtgc

SEQ ID NO: 177788 - DNA, 25 bp, Probe Sequence
caggagacatcggcgagctgctagt

SEQ ID NO: 177789 - DNA, 25 bp, Probe Sequence
catggggccctggagctgcaaaatc

SEQ ID NO: 177790 - DNA, 25 bp, Probe Sequence
caggcctgccgtgggggaaacaggg

SEQ ID NO: 177791 - DNA, 25 bp, Probe Sequence
caggcctccgtggggagataacaca

SEQ ID NO: 177792 - DNA, 25 bp, Probe Sequence
caggccacgtttgggcatgtagccc

SEQ ID NO: 177793 - DNA, 25 bp, Probe Sequence
caggccctgatgtaggggtcgtccg

SEQ ID NO: 177794 - DNA, 25 bp, Probe Sequence
caggcccatatgcagcaggtgactt

SEQ ID NO: 177795 - DNA, 25 bp, Probe Sequence
caggctagcctgcagtgggatggga

SEQ ID NO: 177796 - DNA, 25 bp, Probe Sequence
caggcttcctgcaaagaccagggaa

SEQ ID NO: 177797 - DNA, 25 bp, Probe Sequence
caggcttcagcaaaaatggtggagg

SEQ ID NO: 177798 - DNA, 25 bp, Probe Sequence
caggcaccaatggaacaggttgggg

SEQ ID NO: 177799 - DNA, 25 bp, Probe Sequence
caggctccagtgacaatcgtgtgat

SEQ ID NO: 177800 - DNA, 25 bp, Probe Sequence
caggcccaggtttctctggaaagct

SEQ ID NO: 177801 - DNA, 25 bp, Probe Sequence
caggccttggagaaccggatgaagc

SEQ ID NO: 177802 - DNA, 25 bp, Probe Sequence
caggcctgggtaaccatggtgagac

SEQ ID NO: 177803 - DNA, 25 bp, Probe Sequence
caggcctgtgggagaatgagccaga

SEQ ID NO: 177804 - DNA, 25 bp, Probe Sequence
caggcccagagtcctgacgggcaac

SEQ ID NO: 177805 - DNA, 25 bp, Probe Sequence
caggccaacagatctcatataggag

SEQ ID NO: 177806 - DNA, 25 bp, Probe Sequence
catggcccacatggcctccaaggag

SEQ ID NO: 177807 - DNA, 25 bp, Probe Sequence
catggacgcaatggccgtagcgttt

SEQ ID NO: 177808 - DNA, 25 bp, Probe Sequence
catggagccgctgtggacaggtttc

SEQ ID NO: 177809 - DNA, 25 bp, Probe Sequence
catggataatgatctggaggtttta

SEQ ID NO: 177810 - DNA, 25 bp, Probe Sequence
catggcaatctgtttggggctgttt

SEQ ID NO: 177811 - DNA, 25 bp, Probe Sequence
caggctttgatcttggggacttttc

SEQ ID NO: 177812 - DNA, 25 bp, Probe Sequence
catggtcttaaacaggtcttatttt

SEQ ID NO: 177813 - DNA, 25 bp, Probe Sequence
catggtgtcccacaaatggtttttt

SEQ ID NO: 177814 - DNA, 25 bp, Probe Sequence
gctaagactccagaccttttgtttt

SEQ ID NO: 177815 - DNA, 25 bp, Probe Sequence
ctcacggtcacagaactagtttttt

SEQ ID NO: 177816 - DNA, 25 bp, Probe Sequence
catgcacttaaagaagtatttttag

SEQ ID NO: 177817 - DNA, 25 bp, Probe Sequence
catggttccacagaagctttgtttc

SEQ ID NO: 177818 - DNA, 25 bp, Probe Sequence
catggtgatcgcggtggagttgtgt

SEQ ID NO: 177819 - DNA, 25 bp, Probe Sequence
catggtcaccgccaggactgaatgt

SEQ ID NO: 177820 - DNA, 25 bp, Probe Sequence
catggatgagccggttgcagctaag

SEQ ID NO: 177821 - DNA, 25 bp, Probe Sequence
catgatgaacctgtcgactgggcgg

SEQ ID NO: 177822 - DNA, 25 bp, Probe Sequence
catgtatacacctatgtgcaatgtg

SEQ ID NO: 177823 - DNA, 25 bp, Probe Sequence
catgtattcccttatcttttacttt

SEQ ID NO: 177824 - DNA, 25 bp, Probe Sequence
catgtattcccttatcttttacttt

SEQ ID NO: 177825 - DNA, 25 bp, Probe Sequence
catgtattcccttatcttttacttt

SEQ ID NO: 177826 - DNA, 25 bp, Probe Sequence
catgttaggcccaaatatactatct

SEQ ID NO: 177827 - DNA, 25 bp, Probe Sequence
catgttgggtatcctactactttgt

SEQ ID NO: 177828 - DNA, 25 bp, Probe Sequence
catggggagaagatgagtacttgaa

SEQ ID NO: 177829 - DNA, 25 bp, Probe Sequence
catgggtacttttagaacctgatag

SEQ ID NO: 177830 - DNA, 25 bp, Probe Sequence
catggcttgctcaagttgaaccctg

SEQ ID NO: 177831 - DNA, 25 bp, Probe Sequence
caggcctgccatgttgagaaccatg

SEQ ID NO: 177832 - DNA, 25 bp, Probe Sequence
caggccatgctatcaggaagacaat

SEQ ID NO: 177833 - DNA, 25 bp, Probe Sequence
caggcctgagcacaagagcagaatt

SEQ ID NO: 177834 - DNA, 25 bp, Probe Sequence
caggcgcggaccaaagcgatctctt

SEQ ID NO: 177835 - DNA, 25 bp, Probe Sequence
caggaagggtccaagccatcactat

SEQ ID NO: 177836 - DNA, 25 bp, Probe Sequence
caggaaagtacccagctgcctgtga

SEQ ID NO: 177837 - DNA, 25 bp, Probe Sequence
caggaaattcctcagagagctcaga

SEQ ID NO: 177838 - DNA, 25 bp, Probe Sequence
caggaaatggcgattcagcagtcac

SEQ ID NO: 177839 - DNA, 25 bp, Probe Sequence
caggaagacaggagctcactctcac

SEQ ID NO: 177840 - DNA, 25 bp, Probe Sequence
caggaaacggcaacaagcctcccag

SEQ ID NO: 177841 - DNA, 25 bp, Probe Sequence
catgagctaaaggaacacagacttc

SEQ ID NO: 177842 - DNA, 25 bp, Probe Sequence
caggctatacacgagagtagcacgt

SEQ ID NO: 177843 - DNA, 25 bp, Probe Sequence
caggctgtacctggacatacacaat

SEQ ID NO: 177844 - DNA, 25 bp, Probe Sequence
caggcatgtcggggaaaccagcacg

SEQ ID NO: 177845 - DNA, 25 bp, Probe Sequence
caggctgcttggacatgaaaccccg

SEQ ID NO: 177846 - DNA, 25 bp, Probe Sequence
caggccaatggtcacagacctagga

SEQ ID NO: 177847 - DNA, 25 bp, Probe Sequence
catggagaatggcgtcaacccggga

SEQ ID NO: 177848 - DNA, 25 bp, Probe Sequence
caggaggggcgtgaatccttctgga

SEQ ID NO: 177849 - DNA, 25 bp, Probe Sequence
caggaaggacggggaccttctgtgc

SEQ ID NO: 177850 - DNA, 25 bp, Probe Sequence
caggaagtgaagccctacaccctgg

SEQ ID NO: 177851 - DNA, 25 bp, Probe Sequence
caggaatggaaaccatagagcccac

SEQ ID NO: 177852 - DNA, 25 bp, Probe Sequence
caggaatcgatctcgtgaagcccgc

SEQ ID NO: 177853 - DNA, 25 bp, Probe Sequence
caggcaatctgattttttctccaca

SEQ ID NO: 177854 - DNA, 25 bp, Probe Sequence
caggcactgttttagctcttgccaa

SEQ ID NO: 177855 - DNA, 25 bp, Probe Sequence
caggcactctgtagtcttcagtgct

SEQ ID NO: 177856 - DNA, 25 bp, Probe Sequence
caggcagccatggagtctctgggat

SEQ ID NO: 177857 - DNA, 25 bp, Probe Sequence
catggtcgcatggagccctgagaat

SEQ ID NO: 177858 - DNA, 25 bp, Probe Sequence
catggtcacgcatgcctataatccc

SEQ ID NO: 177859 - DNA, 25 bp, Probe Sequence
caggagacgctcgagtctgcgtccc

SEQ ID NO: 177860 - DNA, 25 bp, Probe Sequence
caggacaagcacgacgatcttcacc

SEQ ID NO: 177861 - DNA, 25 bp, Probe Sequence
caggacaagcacgacgatcttcacc

SEQ ID NO: 177862 - DNA, 25 bp, Probe Sequence
catggacacagggcactgccttgcc

SEQ ID NO: 177863 - DNA, 25 bp, Probe Sequence
caggagatcgagaccatcctggcca

SEQ ID NO: 177864 - DNA, 25 bp, Probe Sequence
caggagcttgaagcactcggctgca

SEQ ID NO: 177865 - DNA, 25 bp, Probe Sequence
catggaccagaagtctctctgggca

SEQ ID NO: 177866 - DNA, 25 bp, Probe Sequence
catggacacccagtactatggcgag

SEQ ID NO: 177867 - DNA, 25 bp, Probe Sequence
catggaccccagcatcaggtgggag

SEQ ID NO: 177868 - DNA, 25 bp, Probe Sequence
caggaccgggtgaagctgggtgtgg

SEQ ID NO: 177869 - DNA, 25 bp, Probe Sequence
caggcccagggagacgggatggaga

SEQ ID NO: 177870 - DNA, 25 bp, Probe Sequence
catggtaccggggacttgggagagt

SEQ ID NO: 177871 - DNA, 25 bp, Probe Sequence
catggtaccttggccaagttggaag

SEQ ID NO: 177872 - DNA, 25 bp, Probe Sequence
gactgtcaactttggaattgtagta

SEQ ID NO: 177873 - DNA, 25 bp, Probe Sequence
catcccagactttaaaattcagtaa

SEQ ID NO: 177874 - DNA, 25 bp, Probe Sequence
caggccatatttaacaagttcgatg

SEQ ID NO: 177875 - DNA, 25 bp, Probe Sequence
caggaaatcttcagcaacgtcagtt

SEQ ID NO: 177876 - DNA, 25 bp, Probe Sequence
caggaaatcttacagcacgtgccat

SEQ ID NO: 177877 - DNA, 25 bp, Probe Sequence
catggagactttgtaccgtgtcccg

SEQ ID NO: 177878 - DNA, 25 bp, Probe Sequence
catggagaccttgaacgaaggccgg

SEQ ID NO: 177879 - DNA, 25 bp, Probe Sequence
caggcagttcttgattctggaggcc

SEQ ID NO: 177880 - DNA, 25 bp, Probe Sequence
caggcactttctgtttgaacccctg

SEQ ID NO: 177881 - DNA, 25 bp, Probe Sequence
catggcgttgatacggttgactccg

SEQ ID NO: 177882 - DNA, 25 bp, Probe Sequence
caggcgttatggggatttcttcatc

SEQ ID NO: 177883 - DNA, 25 bp, Probe Sequence
catggcgaaccggatcagtgccttt

SEQ ID NO: 177884 - DNA, 25 bp, Probe Sequence
catggccaacaacgaaggacttttc

SEQ ID NO: 177885 - DNA, 25 bp, Probe Sequence
catggacgtcaatggggagtttgtt

SEQ ID NO: 177886 - DNA, 25 bp, Probe Sequence
caggacgtcaagggtggagatttac

SEQ ID NO: 177887 - DNA, 25 bp, Probe Sequence
caggacgtgagggtctgggtgtttc

SEQ ID NO: 177888 - DNA, 25 bp, Probe Sequence
cgaagcgtacctggtgggtctgttc

SEQ ID NO: 177889 - DNA, 25 bp, Probe Sequence
caggcagcgtacatacggttctgtt

SEQ ID NO: 177890 - DNA, 25 bp, Probe Sequence
caggacgttctagcaggtcatcggt

SEQ ID NO: 177891 - DNA, 25 bp, Probe Sequence
caggagctgttcaagcgcatctccg

SEQ ID NO: 177892 - DNA, 25 bp, Probe Sequence
caggagctgttcaagcgcatctccg

SEQ ID NO: 177893 - DNA, 25 bp, Probe Sequence
catggagcagttcatcgtcagccag

SEQ ID NO: 177894 - DNA, 25 bp, Probe Sequence
caggcagtgcttcctgagcagacca

SEQ ID NO: 177895 - DNA, 25 bp, Probe Sequence
caggacttcatcatgctgcagaaca

SEQ ID NO: 177896 - DNA, 25 bp, Probe Sequence
catggacttaacaatgcaaaacatt

SEQ ID NO: 177897 - DNA, 25 bp, Probe Sequence
caggcacttaagcacaagcagagtg

SEQ ID NO: 177898 - DNA, 25 bp, Probe Sequence
catgctgacgaatcttaagtggggt

SEQ ID NO: 177899 - DNA, 25 bp, Probe Sequence
cttgatcaagaatttgggtgggaga

SEQ ID NO: 177900 - DNA, 25 bp, Probe Sequence
ctccatgcaaaagtggggctaaatg

SEQ ID NO: 177901 - DNA, 25 bp, Probe Sequence
catgccatgcaatgatgtaggagtt

SEQ ID NO: 177902 - DNA, 25 bp, Probe Sequence
catccgcaatgtaaaaggccccgtg

SEQ ID NO: 177903 - DNA, 25 bp, Probe Sequence
catgtcccagggagagagccacacg

SEQ ID NO: 177904 - DNA, 25 bp, Probe Sequence
catgtccatcagctttgggctacaa

SEQ ID NO: 177905 - DNA, 25 bp, Probe Sequence
catgaccacgcagatttgagaaaca

SEQ ID NO: 177906 - DNA, 25 bp, Probe Sequence
catgtcctctcgcattgtaaataca

SEQ ID NO: 177907 - DNA, 25 bp, Probe Sequence
catgttcccgagttgaaaacagatg

SEQ ID NO: 177908 - DNA, 25 bp, Probe Sequence
catggtaccatgcttgataaatagt

SEQ ID NO: 177909 - DNA, 25 bp, Probe Sequence
caggctacctttgacaaagctttct

SEQ ID NO: 177910 - DNA, 25 bp, Probe Sequence
catggtcactctgaaaaccgatttc

SEQ ID NO: 177911 - DNA, 25 bp, Probe Sequence
caggcacaatctggtgaataacgat

SEQ ID NO: 177912 - DNA, 25 bp, Probe Sequence
caggaacagcagctcaatgccactg

SEQ ID NO: 177913 - DNA, 25 bp, Probe Sequence
catgtgagactggttccatggcctc

SEQ ID NO: 177914 - DNA, 25 bp, Probe Sequence
catggagacggcgagactgcgtcaa

SEQ ID NO: 177915 - DNA, 25 bp, Probe Sequence
caggagcaggtgaagaggcccaagg

SEQ ID NO: 177916 - DNA, 25 bp, Probe Sequence
caggagcatttcaaggtggccagag

SEQ ID NO: 177917 - DNA, 25 bp, Probe Sequence
catgaagctttctcagatggccgtt

SEQ ID NO: 177918 - DNA, 25 bp, Probe Sequence
catgaaatgtgtgcccatggctggg

SEQ ID NO: 177919 - DNA, 25 bp, Probe Sequence
caggaatgtgctccggcagagtgct

SEQ ID NO: 177920 - DNA, 25 bp, Probe Sequence
caggaatgtgctccggcagagtgct

SEQ ID NO: 177921 - DNA, 25 bp, Probe Sequence
catggaaggcatcctggaggtgcag

SEQ ID NO: 177922 - DNA, 25 bp, Probe Sequence
catgaagagcaatgtgggagtagcc

SEQ ID NO: 177923 - DNA, 25 bp, Probe Sequence
caggacagcaattgtggtagatgga

SEQ ID NO: 177924 - DNA, 25 bp, Probe Sequence
caggcacgcatgtgtaccagtggac

SEQ ID NO: 177925 - DNA, 25 bp, Probe Sequence
caggcatggtggctcacacctgtag

SEQ ID NO: 177926 - DNA, 25 bp, Probe Sequence
caggcatggtggcacctgcctgtaa

SEQ ID NO: 177927 - DNA, 25 bp, Probe Sequence
caggcatggtggcacctgcctgtaa

SEQ ID NO: 177928 - DNA, 25 bp, Probe Sequence
caggcatgacggtgcacgcctgtta

SEQ ID NO: 177929 - DNA, 25 bp, Probe Sequence
caggcatgacggtgcacgcctgtta

SEQ ID NO: 177930 - DNA, 25 bp, Probe Sequence
caggcagagctgatcgacgtgatga

SEQ ID NO: 177931 - DNA, 25 bp, Probe Sequence
caggcatggctgacattttggtggt

SEQ ID NO: 177932 - DNA, 25 bp, Probe Sequence
caggcagggacaactgggaggatga

SEQ ID NO: 177933 - DNA, 25 bp, Probe Sequence
caggcaggcaaagctaggcagaaga

SEQ ID NO: 177934 - DNA, 25 bp, Probe Sequence
catggaatcttgtcctgggcagaag

SEQ ID NO: 177935 - DNA, 25 bp, Probe Sequence
caggactcttgagctgaagtgcaga

SEQ ID NO: 177936 - DNA, 25 bp, Probe Sequence
caggactgcgtgcccatgagaatga

SEQ ID NO: 177937 - DNA, 25 bp, Probe Sequence
caggccgctgattccatgtgacagc

SEQ ID NO: 177938 - DNA, 25 bp, Probe Sequence
caggcctgagatttcatctgctctc

SEQ ID NO: 177939 - DNA, 25 bp, Probe Sequence
caggcctgacaatttcatctttggt

SEQ ID NO: 177940 - DNA, 25 bp, Probe Sequence
caggctggaaacaatctcttggttc

SEQ ID NO: 177941 - DNA, 25 bp, Probe Sequence
caggcaggaggacatcttggcagtg

SEQ ID NO: 177942 - DNA, 25 bp, Probe Sequence
caggcaaggtggctcgtgcctgtag

SEQ ID NO: 177943 - DNA, 25 bp, Probe Sequence
caggaagatctggcctctgtcctgt

SEQ ID NO: 177944 - DNA, 25 bp, Probe Sequence
caggaagatcgaggtcctcctgcct

SEQ ID NO: 177945 - DNA, 25 bp, Probe Sequence
catggatactagtgccgtactggct

SEQ ID NO: 177946 - DNA, 25 bp, Probe Sequence
caggaatgtcgaagcaaatgccatg

SEQ ID NO: 177947 - DNA, 25 bp, Probe Sequence
catggaagctccacaaagcagcagc

SEQ ID NO: 177948 - DNA, 25 bp, Probe Sequence
catgatttgcccgctaatcaagcct

SEQ ID NO: 177949 - DNA, 25 bp, Probe Sequence
catgtcttgacaacgtaatgacgtg

SEQ ID NO: 177950 - DNA, 25 bp, Probe Sequence
catgtttgaatgtgtgactaggaga

SEQ ID NO: 177951 - DNA, 25 bp, Probe Sequence
catgtttgccagttaattagggagt

SEQ ID NO: 177952 - DNA, 25 bp, Probe Sequence
catgtgtgtcctataatggggaata

SEQ ID NO: 177953 - DNA, 25 bp, Probe Sequence
catggtggccaacagaggtgagatt

SEQ ID NO: 177954 - DNA, 25 bp, Probe Sequence
catgggccagaatgaatggatgtgt

SEQ ID NO: 177955 - DNA, 25 bp, Probe Sequence
catgtggcccgtctatgatgtgttt

SEQ ID NO: 177956 - DNA, 25 bp, Probe Sequence
catgatgccaacctcttacgtgcgc

SEQ ID NO: 177957 - DNA, 25 bp, Probe Sequence
catgatcaagtccttctatactgca

SEQ ID NO: 177958 - DNA, 25 bp, Probe Sequence
catgaacagcctttgccaatcgtgg

SEQ ID NO: 177959 - DNA, 25 bp, Probe Sequence
catgaacagcctttgccaatcgtgg

SEQ ID NO: 177960 - DNA, 25 bp, Probe Sequence
catggacaccatctggcgaggtcat

SEQ ID NO: 177961 - DNA, 25 bp, Probe Sequence
caggcacacctgcgagggggcaggt

SEQ ID NO: 177962 - DNA, 25 bp, Probe Sequence
catgtaccctggcattgccgacagg

SEQ ID NO: 177963 - DNA, 25 bp, Probe Sequence
catgtggctagtgtttgccgaatga

SEQ ID NO: 177964 - DNA, 25 bp, Probe Sequence
catgggctggtgtgtttaaagattg

SEQ ID NO: 177965 - DNA, 25 bp, Probe Sequence
catgtggttgatttgttctgaaaag

SEQ ID NO: 177966 - DNA, 25 bp, Probe Sequence
catgggtttccttattgaaaaatca

SEQ ID NO: 177967 - DNA, 25 bp, Probe Sequence
catggaatttccacaagatcaaatt

SEQ ID NO: 177968 - DNA, 25 bp, Probe Sequence
catagttttccttgaatccaacttt

SEQ ID NO: 177969 - DNA, 25 bp, Probe Sequence
caggcttttgctttgattccagctt

SEQ ID NO: 177970 - DNA, 25 bp, Probe Sequence
caggcttttgctttgattccagctt

SEQ ID NO: 177971 - DNA, 25 bp, Probe Sequence
caggctctccatcttgatttatgct

SEQ ID NO: 177972 - DNA, 25 bp, Probe Sequence
caggctctcagattgttgacattga

SEQ ID NO: 177973 - DNA, 25 bp, Probe Sequence
catggctggcatgcatgttggcatg

SEQ ID NO: 177974 - DNA, 25 bp, Probe Sequence
catggcttcatggcattcagtgatt

SEQ ID NO: 177975 - DNA, 25 bp, Probe Sequence
caggcttcttctcagagatgacaga

SEQ ID NO: 177976 - DNA, 25 bp, Probe Sequence
caggctctgctttaaagcagccatg

SEQ ID NO: 177977 - DNA, 25 bp, Probe Sequence
caggcatcctcggatacgacactgt

SEQ ID NO: 177978 - DNA, 25 bp, Probe Sequence
catgaactcctggttccaactgtaa

SEQ ID NO: 177979 - DNA, 25 bp, Probe Sequence
cataacaacactgggccttcttaac

SEQ ID NO: 177980 - DNA, 25 bp, Probe Sequence
catgaaaaccaggggcttgcccaag

SEQ ID NO: 177981 - DNA, 25 bp, Probe Sequence
catgccagaaaagagccttcccatt

SEQ ID NO: 177982 - DNA, 25 bp, Probe Sequence
catccagagaaagcaccttatgagt

SEQ ID NO: 177983 - DNA, 25 bp, Probe Sequence
caggcagaaattaccatctctattt

SEQ ID NO: 177984 - DNA, 25 bp, Probe Sequence
caggaaccattttcacctattacca

SEQ ID NO: 177985 - DNA, 25 bp, Probe Sequence
catggtttcatttagcagactttac

SEQ ID NO: 177986 - DNA, 25 bp, Probe Sequence
catgattcttatttacaaccccaga

SEQ ID NO: 177987 - DNA, 25 bp, Probe Sequence
catcttaactgatttaacccctgaa

SEQ ID NO: 177988 - DNA, 25 bp, Probe Sequence
catcttaatctgatattcccccaag

SEQ ID NO: 177989 - DNA, 25 bp, Probe Sequence
catctaaacagtcgtcatccaactc

SEQ ID NO: 177990 - DNA, 25 bp, Probe Sequence
catgtacccatatgtccatcacagt

SEQ ID NO: 177991 - DNA, 25 bp, Probe Sequence
catgatgaaccagagggcaatcgtg

SEQ ID NO: 177992 - DNA, 25 bp, Probe Sequence
catgttcatctcaggtggcatttgc

SEQ ID NO: 177993 - DNA, 25 bp, Probe Sequence
catgttcatcctagaatcctgtcac

SEQ ID NO: 177994 - DNA, 25 bp, Probe Sequence
catgtatcacagcctgtacctgaag

SEQ ID NO: 177995 - DNA, 25 bp, Probe Sequence
catgtaccatgactggcggctggtg

SEQ ID NO: 177996 - DNA, 25 bp, Probe Sequence
catggcacctagtgcagtgctgggc

SEQ ID NO: 177997 - DNA, 25 bp, Probe Sequence
caggcagcctgcaaacaggtgcgtc

SEQ ID NO: 177998 - DNA, 25 bp, Probe Sequence
caggcagctctggaaaatgaagcca

SEQ ID NO: 177999 - DNA, 25 bp, Probe Sequence
caggctctcagtacaaagaacaagg

SEQ ID NO: 178000 - DNA, 25 bp, Probe Sequence
caggccgcattgacaagaagatcga

SEQ ID NO: 178001 - DNA, 25 bp, Probe Sequence
caggctacactgacaggaagctcaa

SEQ ID NO: 178002 - DNA, 25 bp, Probe Sequence
caggcagaccttagggcctcaactc

SEQ ID NO: 178003 - DNA, 25 bp, Probe Sequence
caggcatacttgaaggagccctttc

SEQ ID NO: 178004 - DNA, 25 bp, Probe Sequence
cttcaacctacagacccttttgtat

SEQ ID NO: 178005 - DNA, 25 bp, Probe Sequence
cccagggctacatactgttttttat

SEQ ID NO: 178006 - DNA, 25 bp, Probe Sequence
cccagatggaaagacgtttttgtgc

SEQ ID NO: 178007 - DNA, 25 bp, Probe Sequence
catcacggggaagacgttttcatcc

SEQ ID NO: 178008 - DNA, 25 bp, Probe Sequence
cataaagggaacaaatgtctagttt

SEQ ID NO: 178009 - DNA, 25 bp, Probe Sequence
cataaaaggtttaatgtcagggtca

SEQ ID NO: 178010 - DNA, 25 bp, Probe Sequence
catataaaagttcaaggacccacac

SEQ ID NO: 178011 - DNA, 25 bp, Probe Sequence
cttggaatactactaagtgactaac

SEQ ID NO: 178012 - DNA, 25 bp, Probe Sequence
catcttaattggcataaggacatat

SEQ ID NO: 178013 - DNA, 25 bp, Probe Sequence
catgctgggcatacggaaagtactg

SEQ ID NO: 178014 - DNA, 25 bp, Probe Sequence
caggcctgatccagaatggagactg

SEQ ID NO: 178015 - DNA, 25 bp, Probe Sequence
caggcctgatccagaatggagattg

SEQ ID NO: 178016 - DNA, 25 bp, Probe Sequence
caggctctgatgccttgaattggtt

SEQ ID NO: 178017 - DNA, 25 bp, Probe Sequence
catgctaatatccattgaatcggta

SEQ ID NO: 178018 - DNA, 25 bp, Probe Sequence
catgcttaatggtgtgaggcgtcag

SEQ ID NO: 178019 - DNA, 25 bp, Probe Sequence
catcaatggagtccagtaccccgtg

SEQ ID NO: 178020 - DNA, 25 bp, Probe Sequence
catcaggacggggttgccctgtgtt

SEQ ID NO: 178021 - DNA, 25 bp, Probe Sequence
cattgctgcgggtgttcccgttgtc

SEQ ID NO: 178022 - DNA, 25 bp, Probe Sequence
catggctgggagtttgtcgggattg

SEQ ID NO: 178023 - DNA, 25 bp, Probe Sequence
catgagggggatttctgggtctttc

SEQ ID NO: 178024 - DNA, 25 bp, Probe Sequence
catgggtgggacttgtgaccctacc

SEQ ID NO: 178025 - DNA, 25 bp, Probe Sequence
caggctggaacacctgtacctcaac

SEQ ID NO: 178026 - DNA, 25 bp, Probe Sequence
catgacgggaagccgttctgccaca

SEQ ID NO: 178027 - DNA, 25 bp, Probe Sequence
catggcaggggtggcgtcttcatga

SEQ ID NO: 178028 - DNA, 25 bp, Probe Sequence
caggcatctgtgctgaatgtcttat

SEQ ID NO: 178029 - DNA, 25 bp, Probe Sequence
caggcgcagtggctcatgcctgtaa

SEQ ID NO: 178030 - DNA, 25 bp, Probe Sequence
caggccatgaagcgagctctgcata

SEQ ID NO: 178031 - DNA, 25 bp, Probe Sequence
catgcccgagtgcagacctgcatca

SEQ ID NO: 178032 - DNA, 25 bp, Probe Sequence
catgtcaggcgttaaactgtcagtc

SEQ ID NO: 178033 - DNA, 25 bp, Probe Sequence
catgtcaggcgttaaactgtcagtc

SEQ ID NO: 178034 - DNA, 25 bp, Probe Sequence
catgttggagatctctattgtaatc

SEQ ID NO: 178035 - DNA, 25 bp, Probe Sequence
cattggaaatttagcattgtagtgc

SEQ ID NO: 178036 - DNA, 25 bp, Probe Sequence
catgggtatttttgctaaagctgtg

SEQ ID NO: 178037 - DNA, 25 bp, Probe Sequence
catcctgtactgtgtctggaagcct

SEQ ID NO: 178038 - DNA, 25 bp, Probe Sequence
catccagaattagtttgaggacctg

SEQ ID NO: 178039 - DNA, 25 bp, Probe Sequence
catcgtgtgttagtgttagtggcat

SEQ ID NO: 178040 - DNA, 25 bp, Probe Sequence
catgggtaaatgtcttagtgtctag

SEQ ID NO: 178041 - DNA, 25 bp, Probe Sequence
catggtgtaaatattagtgcagtta

SEQ ID NO: 178042 - DNA, 25 bp, Probe Sequence
catgggcaaagactttatgactagt

SEQ ID NO: 178043 - DNA, 25 bp, Probe Sequence
catgtggaagaacctttaatcagag

SEQ ID NO: 178044 - DNA, 25 bp, Probe Sequence
catagtcaaggctcttagtacagga

SEQ ID NO: 178045 - DNA, 25 bp, Probe Sequence
catggtcaagcctcttatgggggtg

SEQ ID NO: 178046 - DNA, 25 bp, Probe Sequence
catggtcaccgtgctggagatgggg

SEQ ID NO: 178047 - DNA, 25 bp, Probe Sequence
catggaccttactggagatctggaa

SEQ ID NO: 178048 - DNA, 25 bp, Probe Sequence
caggctccctttgggaatcatgtta

SEQ ID NO: 178049 - DNA, 25 bp, Probe Sequence
caggctccactatggtgggctcact

SEQ ID NO: 178050 - DNA, 25 bp, Probe Sequence
caggcagccagctttgggctgagct

SEQ ID NO: 178051 - DNA, 25 bp, Probe Sequence
catggagccactttgcaggagcaca

SEQ ID NO: 178052 - DNA, 25 bp, Probe Sequence
caggcagcacagacgtggggcatcc

SEQ ID NO: 178053 - DNA, 25 bp, Probe Sequence
caggctgccagaagagcgaggcccc

SEQ ID NO: 178054 - DNA, 25 bp, Probe Sequence
catgagcatgcccacgggattcggc

SEQ ID NO: 178055 - DNA, 25 bp, Probe Sequence
catgtgcagcacgaggggctgcccc

SEQ ID NO: 178056 - DNA, 25 bp, Probe Sequence
catggacacacagatggctccggct

SEQ ID NO: 178057 - DNA, 25 bp, Probe Sequence
catgttgcccaggatggtctcgatc

SEQ ID NO: 178058 - DNA, 25 bp, Probe Sequence
catgttgcccaggatggtctcgatc

SEQ ID NO: 178059 - DNA, 25 bp, Probe Sequence
catgggctccacagtgtgcacagat

SEQ ID NO: 178060 - DNA, 25 bp, Probe Sequence
catgggtattgcaggcaccaatgga

SEQ ID NO: 178061 - DNA, 25 bp, Probe Sequence
catgggtaatacctgcctccatgat

SEQ ID NO: 178062 - DNA, 25 bp, Probe Sequence
catggcagaaatgatgtacacctga

SEQ ID NO: 178063 - DNA, 25 bp, Probe Sequence
catggcaaattccatggcaccgtca

SEQ ID NO: 178064 - DNA, 25 bp, Probe Sequence
catggctagcatatgggcactttac

SEQ ID NO: 178065 - DNA, 25 bp, Probe Sequence
catgaatacatttcccaccttcaaa

SEQ ID NO: 178066 - DNA, 25 bp, Probe Sequence
catgctctaatttccgggctaaaac

SEQ ID NO: 178067 - DNA, 25 bp, Probe Sequence
catgctctaatttccgggctaaaac

SEQ ID NO: 178068 - DNA, 25 bp, Probe Sequence
catgtctccctctcaggggtagcag

SEQ ID NO: 178069 - DNA, 25 bp, Probe Sequence
catcccccccaaagagagtggcgtt

SEQ ID NO: 178070 - DNA, 25 bp, Probe Sequence
ctctcccgggaaagaacaggtcgtg

SEQ ID NO: 178071 - DNA, 25 bp, Probe Sequence
cttccgggaaaggatggatcctcgg

SEQ ID NO: 178072 - DNA, 25 bp, Probe Sequence
ctggacgacgaacgtatcgactccc

SEQ ID NO: 178073 - DNA, 25 bp, Probe Sequence
catgaaagccgaagttatggaccgc

SEQ ID NO: 178074 - DNA, 25 bp, Probe Sequence
caggcttccgattttatgtgaactc

SEQ ID NO: 178075 - DNA, 25 bp, Probe Sequence
caggcttcctaggatttagcattcc

SEQ ID NO: 178076 - DNA, 25 bp, Probe Sequence
caggcttgctctgggacttttatgc

SEQ ID NO: 178077 - DNA, 25 bp, Probe Sequence
caggctctgactgagtttctttcag

SEQ ID NO: 178078 - DNA, 25 bp, Probe Sequence
caggccgttaggaatccattctcac

SEQ ID NO: 178079 - DNA, 25 bp, Probe Sequence
caggctggcttctgatgttcagtcc

SEQ ID NO: 178080 - DNA, 25 bp, Probe Sequence
catggtggcgtaagtgttcgggcag

SEQ ID NO: 178081 - DNA, 25 bp, Probe Sequence
caggcgcaggtaaagttgctggaga

SEQ ID NO: 178082 - DNA, 25 bp, Probe Sequence
caggccaggtaagtacacgagaagc

SEQ ID NO: 178083 - DNA, 25 bp, Probe Sequence
caggcctggtgacataccaagactc

SEQ ID NO: 178084 - DNA, 25 bp, Probe Sequence
caggctgcggtgagaatgccaagaa

SEQ ID NO: 178085 - DNA, 25 bp, Probe Sequence
caggcacgccagaaggatgccgcag

SEQ ID NO: 178086 - DNA, 25 bp, Probe Sequence
caggcactgctcattaatcctggga

SEQ ID NO: 178087 - DNA, 25 bp, Probe Sequence
catggcctggcagtgttacctcatg

SEQ ID NO: 178088 - DNA, 25 bp, Probe Sequence
catggcgtggctggttctgccacat

SEQ ID NO: 178089 - DNA, 25 bp, Probe Sequence
catgtgcctatgcgtttgtatatgc

SEQ ID NO: 178090 - DNA, 25 bp, Probe Sequence
catgtgcggctggttttggacagcg

SEQ ID NO: 178091 - DNA, 25 bp, Probe Sequence
catgtcctgcatcttctataaacag

SEQ ID NO: 178092 - DNA, 25 bp, Probe Sequence
catgatcttgaaagtgccaaaaaaa

SEQ ID NO: 178093 - DNA, 25 bp, Probe Sequence
catgatctgtgcaggtggcgcaggt

SEQ ID NO: 178094 - DNA, 25 bp, Probe Sequence
catgaccatgtttgtgaccgcgtcc

SEQ ID NO: 178095 - DNA, 25 bp, Probe Sequence
caggccattacagtaccatgttccc

SEQ ID NO: 178096 - DNA, 25 bp, Probe Sequence
caggcccatgaattacttcctcact

SEQ ID NO: 178097 - DNA, 25 bp, Probe Sequence
catggtgccaggttagttccttctg

SEQ ID NO: 178098 - DNA, 25 bp, Probe Sequence
catgtctctgagcattagatttctc

SEQ ID NO: 178099 - DNA, 25 bp, Probe Sequence
caggctgcacagcatttgctttcct

SEQ ID NO: 178100 - DNA, 25 bp, Probe Sequence
catgtctacagaatttctcctcctt

SEQ ID NO: 178101 - DNA, 25 bp, Probe Sequence
catgtctacataactttcgtaatgg

SEQ ID NO: 178102 - DNA, 25 bp, Probe Sequence
catgattgaatcagctttaaagcat

SEQ ID NO: 178103 - DNA, 25 bp, Probe Sequence
catggtgggccgcttgaatgagctg

SEQ ID NO: 178104 - DNA, 25 bp, Probe Sequence
catggacggccggtaacaaagaacg

SEQ ID NO: 178105 - DNA, 25 bp, Probe Sequence
catggcaaaaccctactaaagatac

SEQ ID NO: 178106 - DNA, 25 bp, Probe Sequence
catggaaaagccttcttatatctga

SEQ ID NO: 178107 - DNA, 25 bp, Probe Sequence
catgtggatcaaccatcgctttatt

SEQ ID NO: 178108 - DNA, 25 bp, Probe Sequence
catgtgcataaggaactgcttctat

SEQ ID NO: 178109 - DNA, 25 bp, Probe Sequence
catgatagtcacaaacgccgcatgt

SEQ ID NO: 178110 - DNA, 25 bp, Probe Sequence
catgatcagcgcagacatggcccat

SEQ ID NO: 178111 - DNA, 25 bp, Probe Sequence
catgagcagcaaagtctctcgcgac

SEQ ID NO: 178112 - DNA, 25 bp, Probe Sequence
catgaagatgcactgctgcgtggcc

SEQ ID NO: 178113 - DNA, 25 bp, Probe Sequence
catgacatcatcactgatgtcgcca

SEQ ID NO: 178114 - DNA, 25 bp, Probe Sequence
catggcaacactggattcagtgcag

SEQ ID NO: 178115 - DNA, 25 bp, Probe Sequence
caggcaggtgctggcattgttgctg

SEQ ID NO: 178116 - DNA, 25 bp, Probe Sequence
caggcatttgctactgtgtctggtt

SEQ ID NO: 178117 - DNA, 25 bp, Probe Sequence
caggcttccatgtctgactgtgagt

SEQ ID NO: 178118 - DNA, 25 bp, Probe Sequence
catgagcttcgttctacgtgaaccc

SEQ ID NO: 178119 - DNA, 25 bp, Probe Sequence
catgagtactacagccgagaggccc

SEQ ID NO: 178120 - DNA, 25 bp, Probe Sequence
catgagttctatgtctggggccgac

SEQ ID NO: 178121 - DNA, 25 bp, Probe Sequence
catgtttcttgtaaaggcgtctgac

SEQ ID NO: 178122 - DNA, 25 bp, Probe Sequence
catgtcttcctgagtcagtgcctga

SEQ ID NO: 178123 - DNA, 25 bp, Probe Sequence
catggtgagccgagatcacgccatt

SEQ ID NO: 178124 - DNA, 25 bp, Probe Sequence
catgtggcagctgagtgttcgactt

SEQ ID NO: 178125 - DNA, 25 bp, Probe Sequence
catgtggcagctgagtgttcgactt

SEQ ID NO: 178126 - DNA, 25 bp, Probe Sequence
catggtgcactgcagtcttctggta

SEQ ID NO: 178127 - DNA, 25 bp, Probe Sequence
catggtgatcggtttttgcagtaca

SEQ ID NO: 178128 - DNA, 25 bp, Probe Sequence
catggtgatcggttttggcagtaca

SEQ ID NO: 178129 - DNA, 25 bp, Probe Sequence
catgggatgcggttttgcagtacat

SEQ ID NO: 178130 - DNA, 25 bp, Probe Sequence
catggagaggacttttggtttttat

SEQ ID NO: 178131 - DNA, 25 bp, Probe Sequence
catgagcgaagttctttgttttttg

SEQ ID NO: 178132 - DNA, 25 bp, Probe Sequence
catgagcaaaggatttcttaaatga

SEQ ID NO: 178133 - DNA, 25 bp, Probe Sequence
catggaccaatgaattccctaattc

SEQ ID NO: 178134 - DNA, 25 bp, Probe Sequence
catgtaccaagcaatgtgcctttaa

SEQ ID NO: 178135 - DNA, 25 bp, Probe Sequence
catgtaccaagcaatgtgcctttaa

SEQ ID NO: 178136 - DNA, 25 bp, Probe Sequence
catgatagccttgtgacatctttag

SEQ ID NO: 178137 - DNA, 25 bp, Probe Sequence
catgacgttatgggactgtcctact

SEQ ID NO: 178138 - DNA, 25 bp, Probe Sequence
catgactttatgggacgttctactt

SEQ ID NO: 178139 - DNA, 25 bp, Probe Sequence
catggctttgtatcaccttttcttt

SEQ ID NO: 178140 - DNA, 25 bp, Probe Sequence
catggcgttgaaaccacacagttct

SEQ ID NO: 178141 - DNA, 25 bp, Probe Sequence
catggcgttttgtaatcagagtctt

SEQ ID NO: 178142 - DNA, 25 bp, Probe Sequence
catgaagtttcgcaacatggagacg

SEQ ID NO: 178143 - DNA, 25 bp, Probe Sequence
cataaacgatgccgaccggcgatgc

SEQ ID NO: 178144 - DNA, 25 bp, Probe Sequence
ctaaagtcgggagggcaagcatgct

SEQ ID NO: 178145 - DNA, 25 bp, Probe Sequence
ccccgacgggggcaagatgcccaag

SEQ ID NO: 178146 - DNA, 25 bp, Probe Sequence
tccccttcggcgtggaagtttcaat

SEQ ID NO: 178147 - DNA, 25 bp, Probe Sequence
catcccttcgtggtaaaaactctca

SEQ ID NO: 178148 - DNA, 25 bp, Probe Sequence
catacacttttactttaggactcca

SEQ ID NO: 178149 - DNA, 25 bp, Probe Sequence
catactcgtttatctgggtgaccaa

SEQ ID NO: 178150 - DNA, 25 bp, Probe Sequence
catttggttttaaggatgacccaca

SEQ ID NO: 178151 - DNA, 25 bp, Probe Sequence
ctttcttttggatatgtacccagga

SEQ ID NO: 178152 - DNA, 25 bp, Probe Sequence
ctattcgaagtgtattattaagccg

SEQ ID NO: 178153 - DNA, 25 bp, Probe Sequence
catcatacgaaggatactttctagc

SEQ ID NO: 178154 - DNA, 25 bp, Probe Sequence
catcccggcagtcatggttttgctt

SEQ ID NO: 178155 - DNA, 25 bp, Probe Sequence
catgcccagccgaaaagcttttgag

SEQ ID NO: 178156 - DNA, 25 bp, Probe Sequence
catggccaccgagacccaaatgtgg

SEQ ID NO: 178157 - DNA, 25 bp, Probe Sequence
catggccacctgggacgaaaaggca

SEQ ID NO: 178158 - DNA, 25 bp, Probe Sequence
caggccgcatgcttggaggtaaagt

SEQ ID NO: 178159 - DNA, 25 bp, Probe Sequence
caggctgcgctgttggtaggagtga

SEQ ID NO: 178160 - DNA, 25 bp, Probe Sequence
caggccagctgggggaggtgatgaa

SEQ ID NO: 178161 - DNA, 25 bp, Probe Sequence
caggctgcgggcaaggggtgcaggc

SEQ ID NO: 178162 - DNA, 25 bp, Probe Sequence
caggctggggtccagtgggaggggc

SEQ ID NO: 178163 - DNA, 25 bp, Probe Sequence
catagtggcggtgcatgccgcggtg

SEQ ID NO: 178164 - DNA, 25 bp, Probe Sequence
catggtgatcggaggcacggctggc

SEQ ID NO: 178165 - DNA, 25 bp, Probe Sequence
catggctgctcccaaggacgatggg

SEQ ID NO: 178166 - DNA, 25 bp, Probe Sequence
catggctcagcaggaggggcgggag

SEQ ID NO: 178167 - DNA, 25 bp, Probe Sequence
caggccagcctccgagagggagaga

SEQ ID NO: 178168 - DNA, 25 bp, Probe Sequence
catggcgcctgctggaggaggagag

SEQ ID NO: 178169 - DNA, 25 bp, Probe Sequence
catgggctccagtcaactatgggac

SEQ ID NO: 178170 - DNA, 25 bp, Probe Sequence
catggtgccgcataactataatccc

SEQ ID NO: 178171 - DNA, 25 bp, Probe Sequence
catggtggctcacacctgtaatccc

SEQ ID NO: 178172 - DNA, 25 bp, Probe Sequence
catggtggctcacacctgtaatccc

SEQ ID NO: 178173 - DNA, 25 bp, Probe Sequence
catggagggcccatctggatatcct

SEQ ID NO: 178174 - DNA, 25 bp, Probe Sequence
catgcggcgcctgaagcgtgaactt

SEQ ID NO: 178175 - DNA, 25 bp, Probe Sequence
catggccagcacagcattctaaact

SEQ ID NO: 178176 - DNA, 25 bp, Probe Sequence
catgtgcgcatggtggatcccaaga

SEQ ID NO: 178177 - DNA, 25 bp, Probe Sequence
catgtggcaggcagtactctcagaa

SEQ ID NO: 178178 - DNA, 25 bp, Probe Sequence
catcggtgccacgcatcttcatgaa

SEQ ID NO: 178179 - DNA, 25 bp, Probe Sequence
catcacgttgaggccagtctcagtt

SEQ ID NO: 178180 - DNA, 25 bp, Probe Sequence
catggcagttggatcagctccttta

SEQ ID NO: 178181 - DNA, 25 bp, Probe Sequence
catcggattggttagccttcattga

SEQ ID NO: 178182 - DNA, 25 bp, Probe Sequence
catctgggtggttagcattcaagtt

SEQ ID NO: 178183 - DNA, 25 bp, Probe Sequence
cattgccgagtatgccttcaagctg

SEQ ID NO: 178184 - DNA, 25 bp, Probe Sequence
cattcccagctctggcttaactgga

SEQ ID NO: 178185 - DNA, 25 bp, Probe Sequence
caggccctgtctgggccagaactga

SEQ ID NO: 178186 - DNA, 25 bp, Probe Sequence
catggcaccgtcaaggctgagaacg

SEQ ID NO: 178187 - DNA, 25 bp, Probe Sequence
catgtgcacacattatacgcagatg

SEQ ID NO: 178188 - DNA, 25 bp, Probe Sequence
catgtacagcatgcatcacggatca

SEQ ID NO: 178189 - DNA, 25 bp, Probe Sequence
catgtgatacatacaaaagaatata

SEQ ID NO: 178190 - DNA, 25 bp, Probe Sequence
catggcttatgttaaaaatacccag

SEQ ID NO: 178191 - DNA, 25 bp, Probe Sequence
catgttgttgtcccagtaaatccca

SEQ ID NO: 178192 - DNA, 25 bp, Probe Sequence
catgttggtcacccagtttgcagtc

SEQ ID NO: 178193 - DNA, 25 bp, Probe Sequence
catgttgagccaggcctgggtctgt

SEQ ID NO: 178194 - DNA, 25 bp, Probe Sequence
catggaatcatcagccttggtcaga

SEQ ID NO: 178195 - DNA, 25 bp, Probe Sequence
catggagtcatgagctgtctgggaa

SEQ ID NO: 178196 - DNA, 25 bp, Probe Sequence
catggattatgaaagcctggagaag

SEQ ID NO: 178197 - DNA, 25 bp, Probe Sequence
catggagattcagaccctgatagag

SEQ ID NO: 178198 - DNA, 25 bp, Probe Sequence
catgggcacctctaccatgtgtggt

SEQ ID NO: 178199 - DNA, 25 bp, Probe Sequence
caggctcccatgtcatcgatgcctg

SEQ ID NO: 178200 - DNA, 25 bp, Probe Sequence
caggctcccatgtcatcgatgcctg

SEQ ID NO: 178201 - DNA, 25 bp, Probe Sequence
caggctccctgagtgatgagcttga

SEQ ID NO: 178202 - DNA, 25 bp, Probe Sequence
caggccgggcatggtggctcatgcc

SEQ ID NO: 178203 - DNA, 25 bp, Probe Sequence
caggccagggatgggcatgcagagc

SEQ ID NO: 178204 - DNA, 25 bp, Probe Sequence
catgagcacagggacgagcacgagg

SEQ ID NO: 178205 - DNA, 25 bp, Probe Sequence
cataggcatgacgatgctgctgcaa

SEQ ID NO: 178206 - DNA, 25 bp, Probe Sequence
catgagctcatgtctatgcagcaca

SEQ ID NO: 178207 - DNA, 25 bp, Probe Sequence
catgctgacatgttctgccacaggc

SEQ ID NO: 178208 - DNA, 25 bp, Probe Sequence
catgatagtcatttgcccgtcaagt

SEQ ID NO: 178209 - DNA, 25 bp, Probe Sequence
catctagtcagagctcaccgaaaac

SEQ ID NO: 178210 - DNA, 25 bp, Probe Sequence
catgtattaaccacacttaaactta

SEQ ID NO: 178211 - DNA, 25 bp, Probe Sequence
catgtttaacatccagcactgtaag

SEQ ID NO: 178212 - DNA, 25 bp, Probe Sequence
catgttgcttaccgcaccattccgg

SEQ ID NO: 178213 - DNA, 25 bp, Probe Sequence
catgctctgtaaagggtcttcctga

SEQ ID NO: 178214 - DNA, 25 bp, Probe Sequence
catgttgttggggtgtctttctggt

SEQ ID NO: 178215 - DNA, 25 bp, Probe Sequence
catgtttttggtgtatttctgaatt

SEQ ID NO: 178216 - DNA, 25 bp, Probe Sequence
catggctttttagaatttcgttacg

SEQ ID NO: 178217 - DNA, 25 bp, Probe Sequence
catggcgtgtttgtcaacattcagt

SEQ ID NO: 178218 - DNA, 25 bp, Probe Sequence
catggtcttgttgtcattgctccag

SEQ ID NO: 178219 - DNA, 25 bp, Probe Sequence
catgagtctgtttcccaagctagac

SEQ ID NO: 178220 - DNA, 25 bp, Probe Sequence
catactttagcatcaacgctgagtt

SEQ ID NO: 178221 - DNA, 25 bp, Probe Sequence
catggtgttgattgacaagcagggt

SEQ ID NO: 178222 - DNA, 25 bp, Probe Sequence
caggctggtgtggatgtagtggttt

SEQ ID NO: 178223 - DNA, 25 bp, Probe Sequence
caggctggagtgcagtggtgcagtc

SEQ ID NO: 178224 - DNA, 25 bp, Probe Sequence
caggctgaggtcctggagtgcgtga

SEQ ID NO: 178225 - DNA, 25 bp, Probe Sequence
caggctgagatgtcggagcacctgg

SEQ ID NO: 178226 - DNA, 25 bp, Probe Sequence
catggctgggaactgcagacctgtc

SEQ ID NO: 178227 - DNA, 25 bp, Probe Sequence
catgtgctggtaacgcatgcctggg

SEQ ID NO: 178228 - DNA, 25 bp, Probe Sequence
catgtgctggtaacgcatgcctggg

SEQ ID NO: 178229 - DNA, 25 bp, Probe Sequence
catgtcttgcaatgagcacctgtgc

SEQ ID NO: 178230 - DNA, 25 bp, Probe Sequence
catcctatgccataagtggtcccac

SEQ ID NO: 178231 - DNA, 25 bp, Probe Sequence
catccatctccagaagttttccatc

SEQ ID NO: 178232 - DNA, 25 bp, Probe Sequence
catcccagccggagttggaccggtc

SEQ ID NO: 178233 - DNA, 25 bp, Probe Sequence
catcccactgggaaaacgtctcagg

SEQ ID NO: 178234 - DNA, 25 bp, Probe Sequence
catgtggcctgggaaggacagccgc

SEQ ID NO: 178235 - DNA, 25 bp, Probe Sequence
caggccctgcaggacagagactggc

SEQ ID NO: 178236 - DNA, 25 bp, Probe Sequence
caggcctgtccggcagaatctggcc

SEQ ID NO: 178237 - DNA, 25 bp, Probe Sequence
caggcctgtccggcagaatctggcc

SEQ ID NO: 178238 - DNA, 25 bp, Probe Sequence
catggctctctctgccagaattgtg

SEQ ID NO: 178239 - DNA, 25 bp, Probe Sequence
catggcaggcctgccagagcttggc

SEQ ID NO: 178240 - DNA, 25 bp, Probe Sequence
catgaaggcacacccgcagaaggcc

SEQ ID NO: 178241 - DNA, 25 bp, Probe Sequence
catggagagagagcggaaagtgagt

SEQ ID NO: 178242 - DNA, 25 bp, Probe Sequence
catggacgagctggtggaacactac

SEQ ID NO: 178243 - DNA, 25 bp, Probe Sequence
catggacaggcgggaacatggccac

SEQ ID NO: 178244 - DNA, 25 bp, Probe Sequence
catgtacatccgcgagaaggccagc

SEQ ID NO: 178245 - DNA, 25 bp, Probe Sequence
catggagagccaccggaatgccaac

SEQ ID NO: 178246 - DNA, 25 bp, Probe Sequence
catggagtcctatgtggtccacacc

SEQ ID NO: 178247 - DNA, 25 bp, Probe Sequence
catggagtacttcaaatctgcccac

SEQ ID NO: 178248 - DNA, 25 bp, Probe Sequence
catcgatttctcagaaacgcccgcc

SEQ ID NO: 178249 - DNA, 25 bp, Probe Sequence
catggactttatcaacgacgccacc

SEQ ID NO: 178250 - DNA, 25 bp, Probe Sequence
catggactctggagacggggtcacc

SEQ ID NO: 178251 - DNA, 25 bp, Probe Sequence
catgggattgagggacggggctgca

SEQ ID NO: 178252 - DNA, 25 bp, Probe Sequence
catggtgttctgacttcaagggctg

SEQ ID NO: 178253 - DNA, 25 bp, Probe Sequence
catggctgttcttcttagggccata

SEQ ID NO: 178254 - DNA, 25 bp, Probe Sequence
catggctgttcttcggggaaaagat

SEQ ID NO: 178255 - DNA, 25 bp, Probe Sequence
catggtggccgccaggggcagataa

SEQ ID NO: 178256 - DNA, 25 bp, Probe Sequence
catgaagggcgcgacccgcgaatat

SEQ ID NO: 178257 - DNA, 25 bp, Probe Sequence
catgcagaggtacactcggccagtg

SEQ ID NO: 178258 - DNA, 25 bp, Probe Sequence
catggagctgaagaccgagcccttt

SEQ ID NO: 178259 - DNA, 25 bp, Probe Sequence
catggtcattgagtacatcgggact

SEQ ID NO: 178260 - DNA, 25 bp, Probe Sequence
catgcaatttgagaactggcgcccc

SEQ ID NO: 178261 - DNA, 25 bp, Probe Sequence
catatggactcagacagttccccca

SEQ ID NO: 178262 - DNA, 25 bp, Probe Sequence
catatgagacttgggggtccctccc

SEQ ID NO: 178263 - DNA, 25 bp, Probe Sequence
catgagaattgtgtgctgaaccagt

SEQ ID NO: 178264 - DNA, 25 bp, Probe Sequence
catggacactgttgagcaatgtaca

SEQ ID NO: 178265 - DNA, 25 bp, Probe Sequence
catgctgatggtggggcacagtagc

SEQ ID NO: 178266 - DNA, 25 bp, Probe Sequence
catgattgctgctggacttgttgac

SEQ ID NO: 178267 - DNA, 25 bp, Probe Sequence
catgtggtctagacatttgctgctg

SEQ ID NO: 178268 - DNA, 25 bp, Probe Sequence
catgtgtgactttcatgcttctggg

SEQ ID NO: 178269 - DNA, 25 bp, Probe Sequence
catgctgaagtatagtttttgggaa

SEQ ID NO: 178270 - DNA, 25 bp, Probe Sequence
catggggtagggtttctctgtggaa

SEQ ID NO: 178271 - DNA, 25 bp, Probe Sequence
catgggatttggcctttttgattaa

SEQ ID NO: 178272 - DNA, 25 bp, Probe Sequence
catggtgattcgggttttggccaag

SEQ ID NO: 178273 - DNA, 25 bp, Probe Sequence
catggtgattccggtttttgtcagt

SEQ ID NO: 178274 - DNA, 25 bp, Probe Sequence
catgcgttcccgtatatttgtctcg

SEQ ID NO: 178275 - DNA, 25 bp, Probe Sequence
catggattcccatgatcatgctctt

SEQ ID NO: 178276 - DNA, 25 bp, Probe Sequence
catggattcaatggactcatccatt

SEQ ID NO: 178277 - DNA, 25 bp, Probe Sequence
catgtttgagctggatctgcccact

SEQ ID NO: 178278 - DNA, 25 bp, Probe Sequence
catgtatttctgaatcagtccgcta

SEQ ID NO: 178279 - DNA, 25 bp, Probe Sequence
catgtgatcatgctgtttgtgcctg

SEQ ID NO: 178280 - DNA, 25 bp, Probe Sequence
catggtagactcacagctgcctgtg

SEQ ID NO: 178281 - DNA, 25 bp, Probe Sequence
catgggagacttccttcatcacatc

SEQ ID NO: 178282 - DNA, 25 bp, Probe Sequence
catgggatgtattgtttccactcgt

SEQ ID NO: 178283 - DNA, 25 bp, Probe Sequence
catgggcattcttgctagaccttct

SEQ ID NO: 178284 - DNA, 25 bp, Probe Sequence
catggagattctcctcaattcttcc

SEQ ID NO: 178285 - DNA, 25 bp, Probe Sequence
catgaacacacttccgattttctcc

SEQ ID NO: 178286 - DNA, 25 bp, Probe Sequence
catgtaattttaccatttcccatcc

SEQ ID NO: 178287 - DNA, 25 bp, Probe Sequence
cattcagtattttgttttccttccg

SEQ ID NO: 178288 - DNA, 25 bp, Probe Sequence
catgtggtttttctgtgtgctttca

SEQ ID NO: 178289 - DNA, 25 bp, Probe Sequence
catgtggtttttatatatgcacttt

SEQ ID NO: 178290 - DNA, 25 bp, Probe Sequence
catgtgtattttcttattctggtat

SEQ ID NO: 178291 - DNA, 25 bp, Probe Sequence
catgattatttttttaagctggttg

SEQ ID NO: 178292 - DNA, 25 bp, Probe Sequence
catgtatttcttctttgggctgttg

SEQ ID NO: 178293 - DNA, 25 bp, Probe Sequence
catggattaccatctttattgctgt

SEQ ID NO: 178294 - DNA, 25 bp, Probe Sequence
catggcaaacctcgttttcatcgtc

SEQ ID NO: 178295 - DNA, 25 bp, Probe Sequence
catgccaaagccagttgtcttgcca

SEQ ID NO: 178296 - DNA, 25 bp, Probe Sequence
catcaaaaccaagcgcacgatccag

SEQ ID NO: 178297 - DNA, 25 bp, Probe Sequence
catagaacaccgggaccgatccagc

SEQ ID NO: 178298 - DNA, 25 bp, Probe Sequence
catagagaagccgcttccggctgag

SEQ ID NO: 178299 - DNA, 25 bp, Probe Sequence
catctgcaaaggggcgtcggacaag

SEQ ID NO: 178300 - DNA, 25 bp, Probe Sequence
cattcacagcggaggtgagagttag

SEQ ID NO: 178301 - DNA, 25 bp, Probe Sequence
catctacggagcagaggcgcggaag

SEQ ID NO: 178302 - DNA, 25 bp, Probe Sequence
catgccggaaaattggtcgcgattg

SEQ ID NO: 178303 - DNA, 25 bp, Probe Sequence
catgccggaaaattggtcgcgattg

SEQ ID NO: 178304 - DNA, 25 bp, Probe Sequence
catgaagcgaacatctgggtggtta

SEQ ID NO: 178305 - DNA, 25 bp, Probe Sequence
catgtagctggtgggtggcccgtat

SEQ ID NO: 178306 - DNA, 25 bp, Probe Sequence
catgtgccaggtggacggcgcctgg

SEQ ID NO: 178307 - DNA, 25 bp, Probe Sequence
catgtccgtgtgtcatcttggtttg

SEQ ID NO: 178308 - DNA, 25 bp, Probe Sequence
catggccatttgtatattggctact

SEQ ID NO: 178309 - DNA, 25 bp, Probe Sequence
catgaccattctgctcatcgtcatc

SEQ ID NO: 178310 - DNA, 25 bp, Probe Sequence
cataccattcactcatgtaatcctc

SEQ ID NO: 178311 - DNA, 25 bp, Probe Sequence
catgaaggtcacagctggaatctcc

SEQ ID NO: 178312 - DNA, 25 bp, Probe Sequence
catgaatgcagtgccttcaaagtac

SEQ ID NO: 178313 - DNA, 25 bp, Probe Sequence
catgggcatctggccaccaaggaat

SEQ ID NO: 178314 - DNA, 25 bp, Probe Sequence
catggctcacaggaatccaagaaga

SEQ ID NO: 178315 - DNA, 25 bp, Probe Sequence
catgtgctaataggtgccaatactg

SEQ ID NO: 178316 - DNA, 25 bp, Probe Sequence
catgtgttgaagggcatttgcattg

SEQ ID NO: 178317 - DNA, 25 bp, Probe Sequence
catgtgagtgttccgacttcatctg

SEQ ID NO: 178318 - DNA, 25 bp, Probe Sequence
catgatgagacagtccaactctacc

SEQ ID NO: 178319 - DNA, 25 bp, Probe Sequence
catgtgagcaagtccagttccagcc

SEQ ID NO: 178320 - DNA, 25 bp, Probe Sequence
catggacaagacgggtctcctgctg

SEQ ID NO: 178321 - DNA, 25 bp, Probe Sequence
catggtaaacgctgtccctagtaaa

SEQ ID NO: 178322 - DNA, 25 bp, Probe Sequence
catggagaaactccgtctttactaa

SEQ ID NO: 178323 - DNA, 25 bp, Probe Sequence
catggcaaaaccccatctttactaa

SEQ ID NO: 178324 - DNA, 25 bp, Probe Sequence
catgggaagacccaagctttccctc

SEQ ID NO: 178325 - DNA, 25 bp, Probe Sequence
cataggaagaacccacctgtagccc

SEQ ID NO: 178326 - DNA, 25 bp, Probe Sequence
catgaaaaaatcccagccctagtag

SEQ ID NO: 178327 - DNA, 25 bp, Probe Sequence
cattcaaaaatctgggccttgctga

SEQ ID NO: 178328 - DNA, 25 bp, Probe Sequence
gcttaaaaaccgggagctccagccg

SEQ ID NO: 178329 - DNA, 25 bp, Probe Sequence
cttgagcagaacaggggcttcccca

SEQ ID NO: 178330 - DNA, 25 bp, Probe Sequence
cttggacaacgggcaagttggccta

SEQ ID NO: 178331 - DNA, 25 bp, Probe Sequence
cttggtaacaggcacatcttcctcc

SEQ ID NO: 178332 - DNA, 25 bp, Probe Sequence
cattagggacagcgagtcctcgccc

SEQ ID NO: 178333 - DNA, 25 bp, Probe Sequence
catgaaacgaagccgggctctcctc

SEQ ID NO: 178334 - DNA, 25 bp, Probe Sequence
catggaacagaacggagccatcccc

SEQ ID NO: 178335 - DNA, 25 bp, Probe Sequence
catggatgtaaccacaacctccacc

SEQ ID NO: 178336 - DNA, 25 bp, Probe Sequence
catggtctatagtatacctctcaca

SEQ ID NO: 178337 - DNA, 25 bp, Probe Sequence
catggtgtcagatacatatgtctca

SEQ ID NO: 178338 - DNA, 25 bp, Probe Sequence
catgtatgtagattttagtctcgtg

SEQ ID NO: 178339 - DNA, 25 bp, Probe Sequence
catggcagccgcttttatttctgga

SEQ ID NO: 178340 - DNA, 25 bp, Probe Sequence
catggcaatcgctctgtctcttcta

SEQ ID NO: 178341 - DNA, 25 bp, Probe Sequence
catggcagattgttagtgctttcaa

SEQ ID NO: 178342 - DNA, 25 bp, Probe Sequence
catggtgaatgcatatgcctttaga

SEQ ID NO: 178343 - DNA, 25 bp, Probe Sequence
catggtttgactccattttgaagtt

SEQ ID NO: 178344 - DNA, 25 bp, Probe Sequence
catgttttcactaatctgttgagag

SEQ ID NO: 178345 - DNA, 25 bp, Probe Sequence
catgtctttcacttcactttatgat

SEQ ID NO: 178346 - DNA, 25 bp, Probe Sequence
catgctcttctaggagactttagcc

SEQ ID NO: 178347 - DNA, 25 bp, Probe Sequence
catgccatattccagatgagcccta

SEQ ID NO: 178348 - DNA, 25 bp, Probe Sequence
catgctgtattccacgaggcattga

SEQ ID NO: 178349 - DNA, 25 bp, Probe Sequence
catgcttattccatgactgcttgcc

SEQ ID NO: 178350 - DNA, 25 bp, Probe Sequence
cattgtaggtcttgagcacttcccc

SEQ ID NO: 178351 - DNA, 25 bp, Probe Sequence
catgtacttggcctgagactgacct

SEQ ID NO: 178352 - DNA, 25 bp, Probe Sequence
catgtacggagccgagattatcgca

SEQ ID NO: 178353 - DNA, 25 bp, Probe Sequence
catttcggacggatggatccctttc

SEQ ID NO: 178354 - DNA, 25 bp, Probe Sequence
cttggggacgtatgtggccgtcttc

SEQ ID NO: 178355 - DNA, 25 bp, Probe Sequence
cttggggacaggggggctttggatg

SEQ ID NO: 178356 - DNA, 25 bp, Probe Sequence
cttgggtgaaggctgggtggggcca

SEQ ID NO: 178357 - DNA, 25 bp, Probe Sequence
ctcggtacccagcgggtagggcgat

SEQ ID NO: 178358 - DNA, 25 bp, Probe Sequence
cttgggacgccagaggggcagtggg

SEQ ID NO: 178359 - DNA, 25 bp, Probe Sequence
cttaaggcacttcacggtcgtggga

SEQ ID NO: 178360 - DNA, 25 bp, Probe Sequence
cttcacggattactacggccggagc

SEQ ID NO: 178361 - DNA, 25 bp, Probe Sequence
cattaggtcttcctacttaggtggt

SEQ ID NO: 178362 - DNA, 25 bp, Probe Sequence
catcaaggtttctttctggcagtgg

SEQ ID NO: 178363 - DNA, 25 bp, Probe Sequence
catgacaactttggtatcgtggaag

SEQ ID NO: 178364 - DNA, 25 bp, Probe Sequence
catgacctctgatgggggtggatgg

SEQ ID NO: 178365 - DNA, 25 bp, Probe Sequence
catggagactgatgggggcggctgg

SEQ ID NO: 178366 - DNA, 25 bp, Probe Sequence
catgggcattgcaggagtggtgagg

SEQ ID NO: 178367 - DNA, 25 bp, Probe Sequence
catgggccagggccaggagtgggtc

SEQ ID NO: 178368 - DNA, 25 bp, Probe Sequence
catgggctccggtgagtctggagtc

SEQ ID NO: 178369 - DNA, 25 bp, Probe Sequence
catgtttcccagtacacctgtagat

SEQ ID NO: 178370 - DNA, 25 bp, Probe Sequence
catgttcttcaagccacactgggat

SEQ ID NO: 178371 - DNA, 25 bp, Probe Sequence
catgttcatctcttgccaaataagg

SEQ ID NO: 178372 - DNA, 25 bp, Probe Sequence
catgttcttctgtctccaggaaggg

SEQ ID NO: 178373 - DNA, 25 bp, Probe Sequence
catgttcgacttcagcgagaagctc

SEQ ID NO: 178374 - DNA, 25 bp, Probe Sequence
catctcccacttctggagaaggtaa

SEQ ID NO: 178375 - DNA, 25 bp, Probe Sequence
catgtcttcctgcccggaaagcagt

SEQ ID NO: 178376 - DNA, 25 bp, Probe Sequence
catgtattttccgtgagaatgccaa

SEQ ID NO: 178377 - DNA, 25 bp, Probe Sequence
catgtgtttctgggctgcgaagaca

SEQ ID NO: 178378 - DNA, 25 bp, Probe Sequence
catggtttgtgctggcaatgcccaa

SEQ ID NO: 178379 - DNA, 25 bp, Probe Sequence
catcggtacttgagcaatgcctacg

SEQ ID NO: 178380 - DNA, 25 bp, Probe Sequence
catccgtgtgttccgggcctgcacg

SEQ ID NO: 178381 - DNA, 25 bp, Probe Sequence
catgccgtggtgtctcggatggata

SEQ ID NO: 178382 - DNA, 25 bp, Probe Sequence
catgctctgatgcgaaggggcagaa

SEQ ID NO: 178383 - DNA, 25 bp, Probe Sequence
catgtgcttgggcactggtgggcct

SEQ ID NO: 178384 - DNA, 25 bp, Probe Sequence
cattttgggcctggttggccctggg

SEQ ID NO: 178385 - DNA, 25 bp, Probe Sequence
catctttggtcagagtggggccggc

SEQ ID NO: 178386 - DNA, 25 bp, Probe Sequence
cttgttttgcacagacgtgggcctg

SEQ ID NO: 178387 - DNA, 25 bp, Probe Sequence
catgtttttcacttacagtaggagt

SEQ ID NO: 178388 - DNA, 25 bp, Probe Sequence
catgggttacagtgacagtggggac

SEQ ID NO: 178389 - DNA, 25 bp, Probe Sequence
catgggtggacacggatctgctggg

SEQ ID NO: 178390 - DNA, 25 bp, Probe Sequence
catggtgtgtacctgtaatctcagc

SEQ ID NO: 178391 - DNA, 25 bp, Probe Sequence
catcctagaatcctgtcacactaca

SEQ ID NO: 178392 - DNA, 25 bp, Probe Sequence
catccatagatagacataaccaact

SEQ ID NO: 178393 - DNA, 25 bp, Probe Sequence
catgtcaaaaccctgtacctacaaa

SEQ ID NO: 178394 - DNA, 25 bp, Probe Sequence
catggtgaaaccccatctctttaaa

SEQ ID NO: 178395 - DNA, 25 bp, Probe Sequence
catggtgaaaccctgtctgtactaa

SEQ ID NO: 178396 - DNA, 25 bp, Probe Sequence
catgttaccaccctggctgtgggaa

SEQ ID NO: 178397 - DNA, 25 bp, Probe Sequence
catggtcacacccggtgcagaggaa

SEQ ID NO: 178398 - DNA, 25 bp, Probe Sequence
catggataacatgctgacataggct

SEQ ID NO: 178399 - DNA, 25 bp, Probe Sequence
catgtgatcctctctgagatcaagg

SEQ ID NO: 178400 - DNA, 25 bp, Probe Sequence
catgagcttgctgttgtacacaggg

SEQ ID NO: 178401 - DNA, 25 bp, Probe Sequence
catggggctcctgtacaaggtgctg

SEQ ID NO: 178402 - DNA, 25 bp, Probe Sequence
catggtggcaccagcgaagggagtg

SEQ ID NO: 178403 - DNA, 25 bp, Probe Sequence
catggtggcaggtgcagcggtgggg

SEQ ID NO: 178404 - DNA, 25 bp, Probe Sequence
catggtgagcaagaccggcgaggcg

SEQ ID NO: 178405 - DNA, 25 bp, Probe Sequence
catgggaagagtggccaaccccagc

SEQ ID NO: 178406 - DNA, 25 bp, Probe Sequence
catgggggagatggaccacccctgg

SEQ ID NO: 178407 - DNA, 25 bp, Probe Sequence
catggggaattctagcccccactgg

SEQ ID NO: 178408 - DNA, 25 bp, Probe Sequence
catggggaagtgtgcccagctggct

SEQ ID NO: 178409 - DNA, 25 bp, Probe Sequence
catgtgtgtaacaccccacatggca

SEQ ID NO: 178410 - DNA, 25 bp, Probe Sequence
catgtctcatggtattcgggaaggc

SEQ ID NO: 178411 - DNA, 25 bp, Probe Sequence
catgatgtcataatttgctgagaga

SEQ ID NO: 178412 - DNA, 25 bp, Probe Sequence
catggatgatggattgtggataact

SEQ ID NO: 178413 - DNA, 25 bp, Probe Sequence
catggagaggctctgggcatacctg

SEQ ID NO: 178414 - DNA, 25 bp, Probe Sequence
catggggtgcgaatgggactcctgg

SEQ ID NO: 178415 - DNA, 25 bp, Probe Sequence
catgagggagcgtgggtagcctctg

SEQ ID NO: 178416 - DNA, 25 bp, Probe Sequence
catgacctacaacgggtacctctgc

SEQ ID NO: 178417 - DNA, 25 bp, Probe Sequence
catgaccataaatagcgtatacgag

SEQ ID NO: 178418 - DNA, 25 bp, Probe Sequence
catgggcataaatttctgccataaa

SEQ ID NO: 178419 - DNA, 25 bp, Probe Sequence
catgggacttcttcactccaaaatt

SEQ ID NO: 178420 - DNA, 25 bp, Probe Sequence
catggatgcactttgaagtctaaag

SEQ ID NO: 178421 - DNA, 25 bp, Probe Sequence
catggtggtattaacctcacagggt

SEQ ID NO: 178422 - DNA, 25 bp, Probe Sequence
catgggtgactcttacccacagctg

SEQ ID NO: 178423 - DNA, 25 bp, Probe Sequence
catggtgtggtatagcatcctcaag

SEQ ID NO: 178424 - DNA, 25 bp, Probe Sequence
catgactgttgctacaaacgtctgg

SEQ ID NO: 178425 - DNA, 25 bp, Probe Sequence
catgcaccttcgtcagtacgagctg

SEQ ID NO: 178426 - DNA, 25 bp, Probe Sequence
catgatcctactgaggtcatgagtt

SEQ ID NO: 178427 - DNA, 25 bp, Probe Sequence
catgaacgacttggtgtctgaatat

SEQ ID NO: 178428 - DNA, 25 bp, Probe Sequence
catgacattactactttctgaaagg

SEQ ID NO: 178429 - DNA, 25 bp, Probe Sequence
catgcacattctgactggataacaa

SEQ ID NO: 178430 - DNA, 25 bp, Probe Sequence
catgatctttatactgtgaatagca

SEQ ID NO: 178431 - DNA, 25 bp, Probe Sequence
catgtcctgtggaattgcacaaatt

SEQ ID NO: 178432 - DNA, 25 bp, Probe Sequence
catgtccagctcagaagaggaattc

SEQ ID NO: 178433 - DNA, 25 bp, Probe Sequence
catgtccgctctgtaagaagctaca

SEQ ID NO: 178434 - DNA, 25 bp, Probe Sequence
catggatcccagtatgaagcccaac

SEQ ID NO: 178435 - DNA, 25 bp, Probe Sequence
catgcaggccctttgaagcctcagc

SEQ ID NO: 178436 - DNA, 25 bp, Probe Sequence
catgcaggccctttgaagcctcagc

SEQ ID NO: 178437 - DNA, 25 bp, Probe Sequence
catgactcacgattgctgaagcctg

SEQ ID NO: 178438 - DNA, 25 bp, Probe Sequence
catgtgccacaactgctgtggcccc

SEQ ID NO: 178439 - DNA, 25 bp, Probe Sequence
catgtgccaagagggtggcgcaccc

SEQ ID NO: 178440 - DNA, 25 bp, Probe Sequence
catgaccagaagcttgacgcaccaa

SEQ ID NO: 178441 - DNA, 25 bp, Probe Sequence
catgaccagaagcttgacgcaccaa

SEQ ID NO: 178442 - DNA, 25 bp, Probe Sequence
cataaggcaagtcctgagcgaccta

SEQ ID NO: 178443 - DNA, 25 bp, Probe Sequence
catacaggcacaatcctaggcaccg

SEQ ID NO: 178444 - DNA, 25 bp, Probe Sequence
catacagccgcttcctggaagccgc

SEQ ID NO: 178445 - DNA, 25 bp, Probe Sequence
catgagaccccatctgaaggtcacc

SEQ ID NO: 178446 - DNA, 25 bp, Probe Sequence
catgaacctccctggggatcaactc

SEQ ID NO: 178447 - DNA, 25 bp, Probe Sequence
catcaactccactggggaaggctcc

SEQ ID NO: 178448 - DNA, 25 bp, Probe Sequence
catctggttcaagagggaattcccc

SEQ ID NO: 178449 - DNA, 25 bp, Probe Sequence
catcactgcgtactggaagggcttc

SEQ ID NO: 178450 - DNA, 25 bp, Probe Sequence
catgagcagccttatggagaggacc

SEQ ID NO: 178451 - DNA, 25 bp, Probe Sequence
catcagcagcctgcagcctgaagat

SEQ ID NO: 178452 - DNA, 25 bp, Probe Sequence
catacacaccacccagaagttgtca

SEQ ID NO: 178453 - DNA, 25 bp, Probe Sequence
catcctgaacaacaaagagtgtgac

SEQ ID NO: 178454 - DNA, 25 bp, Probe Sequence
catccttctaccaaaagtggctgac

SEQ ID NO: 178455 - DNA, 25 bp, Probe Sequence
catccttcccttatggtggcatgga

SEQ ID NO: 178456 - DNA, 25 bp, Probe Sequence
catgttaccatcttacttgagcctt

SEQ ID NO: 178457 - DNA, 25 bp, Probe Sequence
catgtgtccctgttacctgagaatg

SEQ ID NO: 178458 - DNA, 25 bp, Probe Sequence
catgaatccctagagctgctatgat

SEQ ID NO: 178459 - DNA, 25 bp, Probe Sequence
catgatataccttctggatcttatg

SEQ ID NO: 178460 - DNA, 25 bp, Probe Sequence
catgacatactgtgctctgagctta

SEQ ID NO: 178461 - DNA, 25 bp, Probe Sequence
catgagataataggcctactcatat

SEQ ID NO: 178462 - DNA, 25 bp, Probe Sequence
catgtatatatattgcactggctat

SEQ ID NO: 178463 - DNA, 25 bp, Probe Sequence
catgcatatacactctacagtgctg

SEQ ID NO: 178464 - DNA, 25 bp, Probe Sequence
catgttcaaggcccattctggttcc

SEQ ID NO: 178465 - DNA, 25 bp, Probe Sequence
catgttgcaggaggtattctagttc

SEQ ID NO: 178466 - DNA, 25 bp, Probe Sequence
catgaggcgacaggtcttcaaattg

SEQ ID NO: 178467 - DNA, 25 bp, Probe Sequence
catgcggtgaccactatcaaaatga

SEQ ID NO: 178468 - DNA, 25 bp, Probe Sequence
catgacttacctgctaataaaaact

SEQ ID NO: 178469 - DNA, 25 bp, Probe Sequence
catccgccaccctaaatacaacagg

SEQ ID NO: 178470 - DNA, 25 bp, Probe Sequence
catccgccaccctaaatacaacagg

SEQ ID NO: 178471 - DNA, 25 bp, Probe Sequence
catctctaaccctaagaccattcgc

SEQ ID NO: 178472 - DNA, 25 bp, Probe Sequence
catactggatcctgaagaactcctg

SEQ ID NO: 178473 - DNA, 25 bp, Probe Sequence
catgaatattcgtgcaaaaatcctc

SEQ ID NO: 178474 - DNA, 25 bp, Probe Sequence
catgaaacttaacagatactcagat

SEQ ID NO: 178475 - DNA, 25 bp, Probe Sequence
catgccaactactgcgagggtgagt

SEQ ID NO: 178476 - DNA, 25 bp, Probe Sequence
catccgcaaatctccataggtagaa

SEQ ID NO: 178477 - DNA, 25 bp, Probe Sequence
catcacaggcactttcctagcctaa

SEQ ID NO: 178478 - DNA, 25 bp, Probe Sequence
catccaggatcgaatccaggccctg

SEQ ID NO: 178479 - DNA, 25 bp, Probe Sequence
catgcatcggattggttagccttca

SEQ ID NO: 178480 - DNA, 25 bp, Probe Sequence
catggggagatggttatctgcctca

SEQ ID NO: 178481 - DNA, 25 bp, Probe Sequence
catgggtggccactatacagcctac

SEQ ID NO: 178482 - DNA, 25 bp, Probe Sequence
catggtgtggtcagatttgccgccc

SEQ ID NO: 178483 - DNA, 25 bp, Probe Sequence
catgtgttcaccaaaattgcctgcc

SEQ ID NO: 178484 - DNA, 25 bp, Probe Sequence
catgtttgtctcgaaaagcctgcgg

SEQ ID NO: 178485 - DNA, 25 bp, Probe Sequence
catgctgtgtgccgggaacacccgg

SEQ ID NO: 178486 - DNA, 25 bp, Probe Sequence
catgctgtgtgccgggaacacccgg

SEQ ID NO: 178487 - DNA, 25 bp, Probe Sequence
catattagcatcagtcaacccctgc

SEQ ID NO: 178488 - DNA, 25 bp, Probe Sequence
catgtttcatcaaggcaccacatcc

SEQ ID NO: 178489 - DNA, 25 bp, Probe Sequence
catgtttatcaagatgcctcaccct

SEQ ID NO: 178490 - DNA, 25 bp, Probe Sequence
cataattacaaccattcaatgcccc

SEQ ID NO: 178491 - DNA, 25 bp, Probe Sequence
cataagttcagtagttgcttcccta

SEQ ID NO: 178492 - DNA, 25 bp, Probe Sequence
catgaatttcccagtgttccagtaa

SEQ ID NO: 178493 - DNA, 25 bp, Probe Sequence
catgagccttcggaggtactgccag

SEQ ID NO: 178494 - DNA, 25 bp, Probe Sequence
catgcatgactttaaaagcagctaa

SEQ ID NO: 178495 - DNA, 25 bp, Probe Sequence
catgtgtctctgtaatagggataat

SEQ ID NO: 178496 - DNA, 25 bp, Probe Sequence
catgttccgcatggataacgaccat

SEQ ID NO: 178497 - DNA, 25 bp, Probe Sequence
catgatgcccgtgagaaggtgctgc

SEQ ID NO: 178498 - DNA, 25 bp, Probe Sequence
catgactacattacaacgggccagg

SEQ ID NO: 178499 - DNA, 25 bp, Probe Sequence
catgatgctactgaacctggtggag

SEQ ID NO: 178500 - DNA, 25 bp, Probe Sequence
catgagaagcggtacctgcgggcgc

SEQ ID NO: 178501 - DNA, 25 bp, Probe Sequence
catgaaagggacgacgggagctgca

SEQ ID NO: 178502 - DNA, 25 bp, Probe Sequence
catgaagggcgaccgtgcaggagtc

SEQ ID NO: 178503 - DNA, 25 bp, Probe Sequence
ctatattgcggacattgaggtggac

SEQ ID NO: 178504 - DNA, 25 bp, Probe Sequence
catctgcttcggagactcaggtggc

SEQ ID NO: 178505 - DNA, 25 bp, Probe Sequence
catgcctactgccggaatccggaca

SEQ ID NO: 178506 - DNA, 25 bp, Probe Sequence
catgcccacgagtggtgctctggac

SEQ ID NO: 178507 - DNA, 25 bp, Probe Sequence
cattcccgggctcgatgccggaaaa

SEQ ID NO: 178508 - DNA, 25 bp, Probe Sequence
catccaagcgggggccacttgagaa

SEQ ID NO: 178509 - DNA, 25 bp, Probe Sequence
catccaattctacactcagttaaag

SEQ ID NO: 178510 - DNA, 25 bp, Probe Sequence
catccttactctcaccttttatgag

SEQ ID NO: 178511 - DNA, 25 bp, Probe Sequence
catccttactctcaccttttatgag

SEQ ID NO: 178512 - DNA, 25 bp, Probe Sequence
catccttactctcaccttttatgag

SEQ ID NO: 178513 - DNA, 25 bp, Probe Sequence
catcctttctttgaccttctgaaga

SEQ ID NO: 178514 - DNA, 25 bp, Probe Sequence
catcctttctttgaccttctgaaga

SEQ ID NO: 178515 - DNA, 25 bp, Probe Sequence
catcctttctttgaccttctgaaga

SEQ ID NO: 178516 - DNA, 25 bp, Probe Sequence
catccttcttttgtagcttacacca

SEQ ID NO: 178517 - DNA, 25 bp, Probe Sequence
cttccttttagcctagttcatccaa

SEQ ID NO: 178518 - DNA, 25 bp, Probe Sequence
catccctttctaatttattccctag

SEQ ID NO: 178519 - DNA, 25 bp, Probe Sequence
ctgccctatttatgtttctactcgg

SEQ ID NO: 178520 - DNA, 25 bp, Probe Sequence
ctgccctatttatgtttctactcgg

SEQ ID NO: 178521 - DNA, 25 bp, Probe Sequence
ctgccctatttatgtttctactcgg

SEQ ID NO: 178522 - DNA, 25 bp, Probe Sequence
catcctgcaactctttttctaattg

SEQ ID NO: 178523 - DNA, 25 bp, Probe Sequence
catgcctgaatcaaatttttaatta

SEQ ID NO: 178524 - DNA, 25 bp, Probe Sequence
catcctaactagttttcatattttt

SEQ ID NO: 178525 - DNA, 25 bp, Probe Sequence
catgcccacctaattttttatttct

SEQ ID NO: 178526 - DNA, 25 bp, Probe Sequence
catgcaccgtccatcgtgtttattg

SEQ ID NO: 178527 - DNA, 25 bp, Probe Sequence
catgcaccgtccatcgtgtttattg

SEQ ID NO: 178528 - DNA, 25 bp, Probe Sequence
catgcaggggtctacggtttgtggt

SEQ ID NO: 178529 - DNA, 25 bp, Probe Sequence
catcgtgggtaacagccttggggag

SEQ ID NO: 178530 - DNA, 25 bp, Probe Sequence
catcgggtttgaggggccgtggagg

SEQ ID NO: 178531 - DNA, 25 bp, Probe Sequence
cataatggtttgttgggggtgaggg

SEQ ID NO: 178532 - DNA, 25 bp, Probe Sequence
catgggtttggcttgaggctggtag

SEQ ID NO: 178533 - DNA, 25 bp, Probe Sequence
catgtggttttggctgtggcagctg

SEQ ID NO: 178534 - DNA, 25 bp, Probe Sequence
catgtggatttgcaagtgagaagac

SEQ ID NO: 178535 - DNA, 25 bp, Probe Sequence
catgtctgttagggaaagcaggagc

SEQ ID NO: 178536 - DNA, 25 bp, Probe Sequence
catcgccaacgccgtcaatgagggc

SEQ ID NO: 178537 - DNA, 25 bp, Probe Sequence
catctgcctacggtgtcagtgttgg

SEQ ID NO: 178538 - DNA, 25 bp, Probe Sequence
catcgcaggcacgctgaagctgtac

SEQ ID NO: 178539 - DNA, 25 bp, Probe Sequence
catgccatgagcagccttatggaga

SEQ ID NO: 178540 - DNA, 25 bp, Probe Sequence
catgccatggcagtctagcctgggc

SEQ ID NO: 178541 - DNA, 25 bp, Probe Sequence
catgccatggcagtctagcctgggc

SEQ ID NO: 178542 - DNA, 25 bp, Probe Sequence
catgctctggccaataagatgggtc

SEQ ID NO: 178543 - DNA, 25 bp, Probe Sequence
catgttggcacctggatggagtgct

SEQ ID NO: 178544 - DNA, 25 bp, Probe Sequence
catgttccatcgtgtcatctgggtc

SEQ ID NO: 178545 - DNA, 25 bp, Probe Sequence
catgttcatcttgtcctccaagtta

SEQ ID NO: 178546 - DNA, 25 bp, Probe Sequence
catgtcttcattggctctctaaaat

SEQ ID NO: 178547 - DNA, 25 bp, Probe Sequence
catgtcttcatttgcttccacaaga

SEQ ID NO: 178548 - DNA, 25 bp, Probe Sequence
catgtctacttctttctacacagac

SEQ ID NO: 178549 - DNA, 25 bp, Probe Sequence
catgtctacttctttctacacagac

SEQ ID NO: 178550 - DNA, 25 bp, Probe Sequence
catcatagacgagctcttccaggac

SEQ ID NO: 178551 - DNA, 25 bp, Probe Sequence
catgtagctctagttctcttcagta

SEQ ID NO: 178552 - DNA, 25 bp, Probe Sequence
cattagcattagcgccatggcaaaa

SEQ ID NO: 178553 - DNA, 25 bp, Probe Sequence
catgtacttaccgaagcgaacgcag

SEQ ID NO: 178554 - DNA, 25 bp, Probe Sequence
catgcccttatctagcagggaagcc

SEQ ID NO: 178555 - DNA, 25 bp, Probe Sequence
catgcttcttacacagagaggcagc

SEQ ID NO: 178556 - DNA, 25 bp, Probe Sequence
catgctacttgcctacagtggggtg

SEQ ID NO: 178557 - DNA, 25 bp, Probe Sequence
catgctacttgggaggctgaggcag

SEQ ID NO: 178558 - DNA, 25 bp, Probe Sequence
catgcaagtttgctgagctgaagga

SEQ ID NO: 178559 - DNA, 25 bp, Probe Sequence
catgcaagtttgctgagctgaagga

SEQ ID NO: 178560 - DNA, 25 bp, Probe Sequence
catgcagagagttctagggaatgga

SEQ ID NO: 178561 - DNA, 25 bp, Probe Sequence
catgccagactttgaggacgatggt

SEQ ID NO: 178562 - DNA, 25 bp, Probe Sequence
catgcccacactacaggccagggct

SEQ ID NO: 178563 - DNA, 25 bp, Probe Sequence
catctagcagaaatgcacgaaggag

SEQ ID NO: 178564 - DNA, 25 bp, Probe Sequence
catctgaggactgcatcggtggaca

SEQ ID NO: 178565 - DNA, 25 bp, Probe Sequence
catcttggcagtgctggcttggcca

SEQ ID NO: 178566 - DNA, 25 bp, Probe Sequence
catcttgaggtggccaatatgggga

SEQ ID NO: 178567 - DNA, 25 bp, Probe Sequence
catcttgacgttgctgaccgtggtc

SEQ ID NO: 178568 - DNA, 25 bp, Probe Sequence
catccagagtttctcatcctgtggt

SEQ ID NO: 178569 - DNA, 25 bp, Probe Sequence
catccagagtttctcatcctgtggt

SEQ ID NO: 178570 - DNA, 25 bp, Probe Sequence
catgcgatgtatgtttccacgggct

SEQ ID NO: 178571 - DNA, 25 bp, Probe Sequence
catcagggacaatctccacctggct

SEQ ID NO: 178572 - DNA, 25 bp, Probe Sequence
catgctgaagcatataacagcccat

SEQ ID NO: 178573 - DNA, 25 bp, Probe Sequence
catgtgagacatgtgaagccacgaa

SEQ ID NO: 178574 - DNA, 25 bp, Probe Sequence
catgtaaattatggagcacaatgta

SEQ ID NO: 178575 - DNA, 25 bp, Probe Sequence
catgttattgttgacatgaatctat

SEQ ID NO: 178576 - DNA, 25 bp, Probe Sequence
catgtatgtagttatcacagacttt

SEQ ID NO: 178577 - DNA, 25 bp, Probe Sequence
catttccagttttcaggcagttatt

SEQ ID NO: 178578 - DNA, 25 bp, Probe Sequence
cgttctatgaatttcgtacttatta

SEQ ID NO: 178579 - DNA, 25 bp, Probe Sequence
ctgttatagaagtttgtaaggtcca

SEQ ID NO: 178580 - DNA, 25 bp, Probe Sequence
ctatataaggaattttccggtctct

SEQ ID NO: 178581 - DNA, 25 bp, Probe Sequence
catcaaaagttatcttccgttccca

SEQ ID NO: 178582 - DNA, 25 bp, Probe Sequence
catcatcaaaagttatcttccgttc

SEQ ID NO: 178583 - DNA, 25 bp, Probe Sequence
catgccaaagtatacattcactgtc

SEQ ID NO: 178584 - DNA, 25 bp, Probe Sequence
catgcttttgctcagaatgacaagg

SEQ ID NO: 178585 - DNA, 25 bp, Probe Sequence
catgctatttctcatctgacagaag

SEQ ID NO: 178586 - DNA, 25 bp, Probe Sequence
catgaattcctgttctagatctcag

SEQ ID NO: 178587 - DNA, 25 bp, Probe Sequence
catgagttagctctctagctctgca

SEQ ID NO: 178588 - DNA, 25 bp, Probe Sequence
catgaggtcagctttctgcctcata

SEQ ID NO: 178589 - DNA, 25 bp, Probe Sequence
catgaggtcaggagttccagaccag

SEQ ID NO: 178590 - DNA, 25 bp, Probe Sequence
catgaggtccaggtgttcgagaaca

SEQ ID NO: 178591 - DNA, 25 bp, Probe Sequence
catgaggccaaggtgaactgtgcat

SEQ ID NO: 178592 - DNA, 25 bp, Probe Sequence
catgaggctcgaagctgaagcagtt

SEQ ID NO: 178593 - DNA, 25 bp, Probe Sequence
catgctggctggtggaagagtttgt

SEQ ID NO: 178594 - DNA, 25 bp, Probe Sequence
catgcggggcgacatgcaacttttc

SEQ ID NO: 178595 - DNA, 25 bp, Probe Sequence
catgttgggcaaccatcatcactct

SEQ ID NO: 178596 - DNA, 25 bp, Probe Sequence
catgaaggtgaaccccatccagggc

SEQ ID NO: 178597 - DNA, 25 bp, Probe Sequence
catgcaccggaattcctttgggatg

SEQ ID NO: 178598 - DNA, 25 bp, Probe Sequence
catgagcatcatgaactcgtttgta

SEQ ID NO: 178599 - DNA, 25 bp, Probe Sequence
catgtgcacatccagacggctggtt

SEQ ID NO: 178600 - DNA, 25 bp, Probe Sequence
catgctcatcagtcaggagggctgt

SEQ ID NO: 178601 - DNA, 25 bp, Probe Sequence
catgatcactaaagagttgctgctt

SEQ ID NO: 178602 - DNA, 25 bp, Probe Sequence
catgattcttataaccgtgcttctt

SEQ ID NO: 178603 - DNA, 25 bp, Probe Sequence
catgatgtttatagttcctgtggtt

SEQ ID NO: 178604 - DNA, 25 bp, Probe Sequence
catgagttatttcctattctgtggt

SEQ ID NO: 178605 - DNA, 25 bp, Probe Sequence
catgaactatatccgtaacctggat

SEQ ID NO: 178606 - DNA, 25 bp, Probe Sequence
catacatctaagcctgaacccataa

SEQ ID NO: 178607 - DNA, 25 bp, Probe Sequence
catcgcatcaacgcgcagacctaaa

SEQ ID NO: 178608 - DNA, 25 bp, Probe Sequence
catcctaatcagtcagcagtaatca

SEQ ID NO: 178609 - DNA, 25 bp, Probe Sequence
catgtctaagcaccatagaatatag

SEQ ID NO: 178610 - DNA, 25 bp, Probe Sequence
catgcccatcgtcctagaattaatt

SEQ ID NO: 178611 - DNA, 25 bp, Probe Sequence
catgtctccctgatctgaactattt

SEQ ID NO: 178612 - DNA, 25 bp, Probe Sequence
catgtttcatgttttgtgactatat

SEQ ID NO: 178613 - DNA, 25 bp, Probe Sequence
catgtttcagtctgttgtctattat

SEQ ID NO: 178614 - DNA, 25 bp, Probe Sequence
catgccctttactgtgtctattgat

SEQ ID NO: 178615 - DNA, 25 bp, Probe Sequence
catgttcttctggtagtgtttggat

SEQ ID NO: 178616 - DNA, 25 bp, Probe Sequence
catgttgctttgctttcttgtggac

SEQ ID NO: 178617 - DNA, 25 bp, Probe Sequence
catacctttaatgcctttggccttc

SEQ ID NO: 178618 - DNA, 25 bp, Probe Sequence
catagccttggaataccctggccac

SEQ ID NO: 178619 - DNA, 25 bp, Probe Sequence
catcaagctatggaataccctgggt

SEQ ID NO: 178620 - DNA, 25 bp, Probe Sequence
catgcacacattatacacccttagg

SEQ ID NO: 178621 - DNA, 25 bp, Probe Sequence
catccacagtaggacaccatccttc

SEQ ID NO: 178622 - DNA, 25 bp, Probe Sequence
catgccacagtagatgtccacataa

SEQ ID NO: 178623 - DNA, 25 bp, Probe Sequence
catgcccagccagagatgctcaatt

SEQ ID NO: 178624 - DNA, 25 bp, Probe Sequence
catgttcaccaactgcatgcagaaa

SEQ ID NO: 178625 - DNA, 25 bp, Probe Sequence
catgcaagacaatgctgctgccaac

SEQ ID NO: 178626 - DNA, 25 bp, Probe Sequence
catcataatctctgtcaaaagccca

SEQ ID NO: 178627 - DNA, 25 bp, Probe Sequence
catctcaattaccatatatacaccc

SEQ ID NO: 178628 - DNA, 25 bp, Probe Sequence
catcatgaatgctggttttcacacc

SEQ ID NO: 178629 - DNA, 25 bp, Probe Sequence
catgcagacagccgtggtgatcacc

SEQ ID NO: 178630 - DNA, 25 bp, Probe Sequence
catgacacagctcgggctgtcagag

SEQ ID NO: 178631 - DNA, 25 bp, Probe Sequence
catgatctactgtgcacatccaggc

SEQ ID NO: 178632 - DNA, 25 bp, Probe Sequence
catgatctactgtgcacatccaggc

SEQ ID NO: 178633 - DNA, 25 bp, Probe Sequence
catgatctactgtgcacatccaggc

SEQ ID NO: 178634 - DNA, 25 bp, Probe Sequence
catgatctactgtgcacatccaggc

SEQ ID NO: 178635 - DNA, 25 bp, Probe Sequence
catgataactgctacaaggagccag

SEQ ID NO: 178636 - DNA, 25 bp, Probe Sequence
catgcgcagacaggacagaggaccc

SEQ ID NO: 178637 - DNA, 25 bp, Probe Sequence
catccacaagccaaagaacacggag

SEQ ID NO: 178638 - DNA, 25 bp, Probe Sequence
catcaacacgctcaaggtcacggct

SEQ ID NO: 178639 - DNA, 25 bp, Probe Sequence
catgcgttcgctgaaaggcatcggt

SEQ ID NO: 178640 - DNA, 25 bp, Probe Sequence
catcgtgctcgttacctgaccgatg

SEQ ID NO: 178641 - DNA, 25 bp, Probe Sequence
catgatgcctcttgtagccatatcc

SEQ ID NO: 178642 - DNA, 25 bp, Probe Sequence
catgatactcacttacacacatcta

SEQ ID NO: 178643 - DNA, 25 bp, Probe Sequence
catgctccagacataaatagctcac

SEQ ID NO: 178644 - DNA, 25 bp, Probe Sequence
catgcccagctactaaaaatacttg

SEQ ID NO: 178645 - DNA, 25 bp, Probe Sequence
catccaagtgcacagaaccattttt

SEQ ID NO: 178646 - DNA, 25 bp, Probe Sequence
catcgtagtcctagtttgcattttt

SEQ ID NO: 178647 - DNA, 25 bp, Probe Sequence
catcgtgaggggtctttgtcctctg

SEQ ID NO: 178648 - DNA, 25 bp, Probe Sequence
catctgggaggggtttgtgggtgaa

SEQ ID NO: 178649 - DNA, 25 bp, Probe Sequence
cttgggagacccgttatgacctaat

SEQ ID NO: 178650 - DNA, 25 bp, Probe Sequence
catctgtgaaaagcgttttcagtta

SEQ ID NO: 178651 - DNA, 25 bp, Probe Sequence
catgcttggaattaagttttagctg

SEQ ID NO: 178652 - DNA, 25 bp, Probe Sequence
catgcttggaattaagttttagctg

SEQ ID NO: 178653 - DNA, 25 bp, Probe Sequence
catgcttggaattaagttttagctg

SEQ ID NO: 178654 - DNA, 25 bp, Probe Sequence
catcctggagtggcaaattttgggg

SEQ ID NO: 178655 - DNA, 25 bp, Probe Sequence
catgcatctgtactgcacaagatta

SEQ ID NO: 178656 - DNA, 25 bp, Probe Sequence
catgcattgtgatgccggcaggcag

SEQ ID NO: 178657 - DNA, 25 bp, Probe Sequence
catgctgactgagtgactggagaca

SEQ ID NO: 178658 - DNA, 25 bp, Probe Sequence
catgcgcaatgctgacttggagcta

SEQ ID NO: 178659 - DNA, 25 bp, Probe Sequence
catgctgagcatctgagctcgctgc

SEQ ID NO: 178660 - DNA, 25 bp, Probe Sequence
catgatgatggcttgagtcagctgc

SEQ ID NO: 178661 - DNA, 25 bp, Probe Sequence
catgatgaggtaggcctgctgcagc

SEQ ID NO: 178662 - DNA, 25 bp, Probe Sequence
catgatggtgatggtcggctacccg

SEQ ID NO: 178663 - DNA, 25 bp, Probe Sequence
catgatggcagtggccgtgttcctc

SEQ ID NO: 178664 - DNA, 25 bp, Probe Sequence
catgaggtgtggactgctgtcatcc

SEQ ID NO: 178665 - DNA, 25 bp, Probe Sequence
catgcgcagggttctgatgtgtctc

SEQ ID NO: 178666 - DNA, 25 bp, Probe Sequence
catgatgcatgggtcatttgtcttg

SEQ ID NO: 178667 - DNA, 25 bp, Probe Sequence
catgatgatgcggttttgacagtac

SEQ ID NO: 178668 - DNA, 25 bp, Probe Sequence
catgctatgctggtagttggctaca

SEQ ID NO: 178669 - DNA, 25 bp, Probe Sequence
catgctatgctggtggttggctaca

SEQ ID NO: 178670 - DNA, 25 bp, Probe Sequence
catgctatgctgctggttggctaca

SEQ ID NO: 178671 - DNA, 25 bp, Probe Sequence
catgattggcaaatgttgtctctca

SEQ ID NO: 178672 - DNA, 25 bp, Probe Sequence
catgttgagaatgggtttccaggaa

SEQ ID NO: 178673 - DNA, 25 bp, Probe Sequence
catgttgatgtacttgtcttccgtc

SEQ ID NO: 178674 - DNA, 25 bp, Probe Sequence
catgttgtgcattgttgtggtccag

SEQ ID NO: 178675 - DNA, 25 bp, Probe Sequence
catgcctgttgattggctcagtcac

SEQ ID NO: 178676 - DNA, 25 bp, Probe Sequence
catgcgggattccctcattgacagc

SEQ ID NO: 178677 - DNA, 25 bp, Probe Sequence
catgcgggattccctcattgacagc

SEQ ID NO: 178678 - DNA, 25 bp, Probe Sequence
catccgggccagtcacattggcagc

SEQ ID NO: 178679 - DNA, 25 bp, Probe Sequence
catgcacagtagaattccattgtca

SEQ ID NO: 178680 - DNA, 25 bp, Probe Sequence
cataccaagtgaatctattctcatg

SEQ ID NO: 178681 - DNA, 25 bp, Probe Sequence
catcacccagtgaaattgctaatag

SEQ ID NO: 178682 - DNA, 25 bp, Probe Sequence
catcccaaagctattgttaagcccc

SEQ ID NO: 178683 - DNA, 25 bp, Probe Sequence
catccaccagcactcctttaaagtg

SEQ ID NO: 178684 - DNA, 25 bp, Probe Sequence
catcctcagtcatccttctagaagg

SEQ ID NO: 178685 - DNA, 25 bp, Probe Sequence
catgccactgaatacgttgaaaaaa

SEQ ID NO: 178686 - DNA, 25 bp, Probe Sequence
catgacttgccacacgctgtacaag

SEQ ID NO: 178687 - DNA, 25 bp, Probe Sequence
catgactgaccgaggcagtggcaag

SEQ ID NO: 178688 - DNA, 25 bp, Probe Sequence
catgactgaccgaggcagtggcaag

SEQ ID NO: 178689 - DNA, 25 bp, Probe Sequence
catgacttcctcagagatggcaaat

SEQ ID NO: 178690 - DNA, 25 bp, Probe Sequence
catgactatctattggttccataac

SEQ ID NO: 178691 - DNA, 25 bp, Probe Sequence
catgagcttatattttgggaacaca

SEQ ID NO: 178692 - DNA, 25 bp, Probe Sequence
catgacttagttagtgcataaagcc

SEQ ID NO: 178693 - DNA, 25 bp, Probe Sequence
catgaccaacttggtgagacactgc

SEQ ID NO: 178694 - DNA, 25 bp, Probe Sequence
catgccacacacttgctgtaaggct

SEQ ID NO: 178695 - DNA, 25 bp, Probe Sequence
catgccatatcatgtgtgtacgctg

SEQ ID NO: 178696 - DNA, 25 bp, Probe Sequence
catgcaatatttagcagccactgct

SEQ ID NO: 178697 - DNA, 25 bp, Probe Sequence
catgcagatgttccacatgcccatc

SEQ ID NO: 178698 - DNA, 25 bp, Probe Sequence
catgcagtttggtcagctcctgaca

SEQ ID NO: 178699 - DNA, 25 bp, Probe Sequence
catgcatgtttatagctccagccag

SEQ ID NO: 178700 - DNA, 25 bp, Probe Sequence
catgcatgtttatagctccagccag

SEQ ID NO: 178701 - DNA, 25 bp, Probe Sequence
catgatggagtttgagcggcaggca

SEQ ID NO: 178702 - DNA, 25 bp, Probe Sequence
catgttgatgatatacacaatggct

SEQ ID NO: 178703 - DNA, 25 bp, Probe Sequence
catgttgagctacttcaagccgctg

SEQ ID NO: 178704 - DNA, 25 bp, Probe Sequence
catgttgcactgtttgcatgcgccc

SEQ ID NO: 178705 - DNA, 25 bp, Probe Sequence
catgcttcaatgtataatgcctcaa

SEQ ID NO: 178706 - DNA, 25 bp, Probe Sequence
catgcttttcatcatatgcaccaaa

SEQ ID NO: 178707 - DNA, 25 bp, Probe Sequence
catccttctcatcctggtacagaga

SEQ ID NO: 178708 - DNA, 25 bp, Probe Sequence
catctttccggaggctaacagacct

SEQ ID NO: 178709 - DNA, 25 bp, Probe Sequence
ctttcggctggtgtagaatagccag

SEQ ID NO: 178710 - DNA, 25 bp, Probe Sequence
cttcctgtgggaggacgattgcccg

SEQ ID NO: 178711 - DNA, 25 bp, Probe Sequence
catttagtgggggatgggtcctcta

SEQ ID NO: 178712 - DNA, 25 bp, Probe Sequence
catctttggggggttgtgaactaca

SEQ ID NO: 178713 - DNA, 25 bp, Probe Sequence
catgttcttgggagtctgaattctc

SEQ ID NO: 178714 - DNA, 25 bp, Probe Sequence
catgttgtgcatgttttaatatttc

SEQ ID NO: 178715 - DNA, 25 bp, Probe Sequence
catgttccatatatgttataccttg

SEQ ID NO: 178716 - DNA, 25 bp, Probe Sequence
catgttccaatatgattccacccat

SEQ ID NO: 178717 - DNA, 25 bp, Probe Sequence
catgcttccatatatgatgtacatc

SEQ ID NO: 178718 - DNA, 25 bp, Probe Sequence
catcctcacttaccagtatgccgag

SEQ ID NO: 178719 - DNA, 25 bp, Probe Sequence
catctgctagttaccatggtgatgc

SEQ ID NO: 178720 - DNA, 25 bp, Probe Sequence
catcacgcctttatcgctgatgcca

SEQ ID NO: 178721 - DNA, 25 bp, Probe Sequence
catcagacctttttcacctgtgaca

SEQ ID NO: 178722 - DNA, 25 bp, Probe Sequence
catctgggcttgtttacctggacta

SEQ ID NO: 178723 - DNA, 25 bp, Probe Sequence
catgcgagtgctgtactaccgagat

SEQ ID NO: 178724 - DNA, 25 bp, Probe Sequence
catgcaggtgctgttttccggtgag

SEQ ID NO: 178725 - DNA, 25 bp, Probe Sequence
catgcaggtgctgttttccggtgag

SEQ ID NO: 178726 - DNA, 25 bp, Probe Sequence
catgctggtggcttggttactgtga

SEQ ID NO: 178727 - DNA, 25 bp, Probe Sequence
catgctgttggcattgttgtaaaca

SEQ ID NO: 178728 - DNA, 25 bp, Probe Sequence
catgctgttggcattgttgtaaaca

SEQ ID NO: 178729 - DNA, 25 bp, Probe Sequence
catgatgctctgcagttttattaag

SEQ ID NO: 178730 - DNA, 25 bp, Probe Sequence
catgctctgtaagttgcttcctaac

SEQ ID NO: 178731 - DNA, 25 bp, Probe Sequence
catgatcgctcattcttcttttatg

SEQ ID NO: 178732 - DNA, 25 bp, Probe Sequence
catgatcgctttctacactgtatta

SEQ ID NO: 178733 - DNA, 25 bp, Probe Sequence
catcctgtgtatctgagcacgtatt

SEQ ID NO: 178734 - DNA, 25 bp, Probe Sequence
catgcttgacatacctaccagtatt

SEQ ID NO: 178735 - DNA, 25 bp, Probe Sequence
catgttgagattttaccctctcctc

SEQ ID NO: 178736 - DNA, 25 bp, Probe Sequence
catgttggtctcatacctcatatgc

SEQ ID NO: 178737 - DNA, 25 bp, Probe Sequence
catgagggactcccctgtcattgat

SEQ ID NO: 178738 - DNA, 25 bp, Probe Sequence
catgaagagcctgatccttcttgcc

SEQ ID NO: 178739 - DNA, 25 bp, Probe Sequence
catgagatggtatatccttgcgatg

SEQ ID NO: 178740 - DNA, 25 bp, Probe Sequence
catgaatgtatctgtctgctcggtc

SEQ ID NO: 178741 - DNA, 25 bp, Probe Sequence
catgatatgtagcagtggtggccct

SEQ ID NO: 178742 - DNA, 25 bp, Probe Sequence
catgaagtcaccgggatgaacctat

SEQ ID NO: 178743 - DNA, 25 bp, Probe Sequence
cataagtcctccgtcagaaattatt

SEQ ID NO: 178744 - DNA, 25 bp, Probe Sequence
cttagtacccatgcctgaatttttt

SEQ ID NO: 178745 - DNA, 25 bp, Probe Sequence
catgaagctagctcatccctgaata

SEQ ID NO: 178746 - DNA, 25 bp, Probe Sequence
catgaggcagatcacaacagtaata

SEQ ID NO: 178747 - DNA, 25 bp, Probe Sequence
catgcagaactgcacactcagtccc

SEQ ID NO: 178748 - DNA, 25 bp, Probe Sequence
catgcacatagctcagcccagatac

SEQ ID NO: 178749 - DNA, 25 bp, Probe Sequence
catgcacctgtagtcccagctacag

SEQ ID NO: 178750 - DNA, 25 bp, Probe Sequence
catgcagcctggttaggagcaaagg

SEQ ID NO: 178751 - DNA, 25 bp, Probe Sequence
catgcatcctgggagactcacacat

SEQ ID NO: 178752 - DNA, 25 bp, Probe Sequence
catgagcctgcttggaatcacactg

SEQ ID NO: 178753 - DNA, 25 bp, Probe Sequence
catgacctgggccatttcatgctgc

SEQ ID NO: 178754 - DNA, 25 bp, Probe Sequence
catgacatctgggtcatctgtcctc

SEQ ID NO: 178755 - DNA, 25 bp, Probe Sequence
catgactctgtggataagcttgtca

SEQ ID NO: 178756 - DNA, 25 bp, Probe Sequence
catgcactctggaatttgttgtatt

SEQ ID NO: 178757 - DNA, 25 bp, Probe Sequence
catgctttcagccattgtgggtatg

SEQ ID NO: 178758 - DNA, 25 bp, Probe Sequence
catgcaggcccttatggggtatggc

SEQ ID NO: 178759 - DNA, 25 bp, Probe Sequence
catctcccgctttgagggcttggag

SEQ ID NO: 178760 - DNA, 25 bp, Probe Sequence
catctcccgctttgagggcttggag

SEQ ID NO: 178761 - DNA, 25 bp, Probe Sequence
catccgccagatttgagcagcgcct

SEQ ID NO: 178762 - DNA, 25 bp, Probe Sequence
catcatcccagtggtcatggctggc

SEQ ID NO: 178763 - DNA, 25 bp, Probe Sequence
catgctccactgactgttgttgcag

SEQ ID NO: 178764 - DNA, 25 bp, Probe Sequence
catgctccatctatcatcttcatgg

SEQ ID NO: 178765 - DNA, 25 bp, Probe Sequence
catgatcgtgtcttctgcactcatg

SEQ ID NO: 178766 - DNA, 25 bp, Probe Sequence
catgcaagatgatttgtatcttaga

SEQ ID NO: 178767 - DNA, 25 bp, Probe Sequence
catgcaagatgattttatctctcca

SEQ ID NO: 178768 - DNA, 25 bp, Probe Sequence
catgcatgaggtcagctttctgcct

SEQ ID NO: 178769 - DNA, 25 bp, Probe Sequence
catgagagcaagtacttttcacact

SEQ ID NO: 178770 - DNA, 25 bp, Probe Sequence
catagagagagacagttttccaaac

SEQ ID NO: 178771 - DNA, 25 bp, Probe Sequence
catacagtagatcactttttactct

SEQ ID NO: 178772 - DNA, 25 bp, Probe Sequence
catgaattcagtgaactcttttctc

SEQ ID NO: 178773 - DNA, 25 bp, Probe Sequence
cataaatgcggtaccctttactaca

SEQ ID NO: 178774 - DNA, 25 bp, Probe Sequence
catatatgtgccttagtccatttag

SEQ ID NO: 178775 - DNA, 25 bp, Probe Sequence
catgctttgcactgtacgatcttag

SEQ ID NO: 178776 - DNA, 25 bp, Probe Sequence
catcctatcatctgtaggctcattc

SEQ ID NO: 178777 - DNA, 25 bp, Probe Sequence
ctgtcctcgctgctgagaagagcca

SEQ ID NO: 178778 - DNA, 25 bp, Probe Sequence
catgctcagtttaatacacctatgc

SEQ ID NO: 178779 - DNA, 25 bp, Probe Sequence
catgccttatgataacaccgatttg

SEQ ID NO: 178780 - DNA, 25 bp, Probe Sequence
catccattattctagagcactctga

SEQ ID NO: 178781 - DNA, 25 bp, Probe Sequence
catcctgctacagaacctgggaggc

SEQ ID NO: 178782 - DNA, 25 bp, Probe Sequence
catcctatctcaaaacccatggagg

SEQ ID NO: 178783 - DNA, 25 bp, Probe Sequence
catcactactcaagaccggaggcac

SEQ ID NO: 178784 - DNA, 25 bp, Probe Sequence
catcctgcgtctggacctggctggc

SEQ ID NO: 178785 - DNA, 25 bp, Probe Sequence
catcctgcttcgggccaagcaagat

SEQ ID NO: 178786 - DNA, 25 bp, Probe Sequence
catccagccggaggccagagctgag

SEQ ID NO: 178787 - DNA, 25 bp, Probe Sequence
cataccccgtaggcagacagagacc

SEQ ID NO: 178788 - DNA, 25 bp, Probe Sequence
catactcggcatacgacccagagac

SEQ ID NO: 178789 - DNA, 25 bp, Probe Sequence
cataacgcttagcacaccagacacc

SEQ ID NO: 178790 - DNA, 25 bp, Probe Sequence
cataccctaatgatcccagcaagat

SEQ ID NO: 178791 - DNA, 25 bp, Probe Sequence
cataaccaagagatccacattagct

SEQ ID NO: 178792 - DNA, 25 bp, Probe Sequence
cataaccagcaagcctctcaatgcc

SEQ ID NO: 178793 - DNA, 25 bp, Probe Sequence
catcaacacagctcgcaacttatgg

SEQ ID NO: 178794 - DNA, 25 bp, Probe Sequence
catcacacacacccaaaggcaaaga

SEQ ID NO: 178795 - DNA, 25 bp, Probe Sequence
catcgccaaagcatcctggcaaagc

SEQ ID NO: 178796 - DNA, 25 bp, Probe Sequence
catgccaaatgagttgcctgtcaaa

SEQ ID NO: 178797 - DNA, 25 bp, Probe Sequence
catccaacaggctttatgtatcaat

SEQ ID NO: 178798 - DNA, 25 bp, Probe Sequence
catctgaagcggttctcagaatcca

SEQ ID NO: 178799 - DNA, 25 bp, Probe Sequence
catgctgataagtggccggtgccag

SEQ ID NO: 178800 - DNA, 25 bp, Probe Sequence
catccaaaaggggcagggcacggtg

SEQ ID NO: 178801 - DNA, 25 bp, Probe Sequence
catcgccatcaagccggacggcgtg

SEQ ID NO: 178802 - DNA, 25 bp, Probe Sequence
catctactctgagcaggacacgggc

SEQ ID NO: 178803 - DNA, 25 bp, Probe Sequence
catccatcttaattggcataaggac

SEQ ID NO: 178804 - DNA, 25 bp, Probe Sequence
catcagctgcggcaagcctagggac

SEQ ID NO: 178805 - DNA, 25 bp, Probe Sequence
catcagctggtcctacgtgtggagg

SEQ ID NO: 178806 - DNA, 25 bp, Probe Sequence
catcgggtgcagcaggggctatggc

SEQ ID NO: 178807 - DNA, 25 bp, Probe Sequence
catcaggactggcaagctggggccc

SEQ ID NO: 178808 - DNA, 25 bp, Probe Sequence
catcgccctggatgagtgggccggc

SEQ ID NO: 178809 - DNA, 25 bp, Probe Sequence
catctaccagtccaaggaggccggg

SEQ ID NO: 178810 - DNA, 25 bp, Probe Sequence
cattaccattgtcctggaagtcccg

SEQ ID NO: 178811 - DNA, 25 bp, Probe Sequence
ctagagtgtgttctgtgaagtcttc

SEQ ID NO: 178812 - DNA, 25 bp, Probe Sequence
catcggtgtgtaaggtggcctattc

SEQ ID NO: 178813 - DNA, 25 bp, Probe Sequence
catcggcgtaaatctaactttcttc

SEQ ID NO: 178814 - DNA, 25 bp, Probe Sequence
cataggcttaacagaaatacttttg

SEQ ID NO: 178815 - DNA, 25 bp, Probe Sequence
catgaacagatttcttgaataaaat

SEQ ID NO: 178816 - DNA, 25 bp, Probe Sequence
catgaagcttcatgcacttaaagaa

SEQ ID NO: 178817 - DNA, 25 bp, Probe Sequence
catgcaatttgcagccatccaaaca

SEQ ID NO: 178818 - DNA, 25 bp, Probe Sequence
catccagcttgttgtcccaatgaaa

SEQ ID NO: 178819 - DNA, 25 bp, Probe Sequence
catgccatgcaagtgctatccaaat

SEQ ID NO: 178820 - DNA, 25 bp, Probe Sequence
catgcatggcatttgttcctgaaca

SEQ ID NO: 178821 - DNA, 25 bp, Probe Sequence
catgcatactattgtccctgaaaac

SEQ ID NO: 178822 - DNA, 25 bp, Probe Sequence
catgctcatcttcatgacctacaac

SEQ ID NO: 178823 - DNA, 25 bp, Probe Sequence
catgctgcacttctacgctgagcag

SEQ ID NO: 178824 - DNA, 25 bp, Probe Sequence
catgctgcaatttcttcctgagatt

SEQ ID NO: 178825 - DNA, 25 bp, Probe Sequence
catgctgaattagcctcgatctttt

SEQ ID NO: 178826 - DNA, 25 bp, Probe Sequence
catgctacaatgacagagttggctt

SEQ ID NO: 178827 - DNA, 25 bp, Probe Sequence
catgctacaagaagttatgagcctt

SEQ ID NO: 178828 - DNA, 25 bp, Probe Sequence
cataacaggtatttaacctttcaag

SEQ ID NO: 178829 - DNA, 25 bp, Probe Sequence
cattgggtttacgaaccttcgaatg

SEQ ID NO: 178830 - DNA, 25 bp, Probe Sequence
catcttggtttgtgtttttccctgt

SEQ ID NO: 178831 - DNA, 25 bp, Probe Sequence
catcttggtttgtgtttttccctgt

SEQ ID NO: 178832 - DNA, 25 bp, Probe Sequence
ctgctttcttcgtggtaggttctag

SEQ ID NO: 178833 - DNA, 25 bp, Probe Sequence
catgctttcttcaaggtgacaggtc

SEQ ID NO: 178834 - DNA, 25 bp, Probe Sequence
catgctgtttacaacctgtacgctg

SEQ ID NO: 178835 - DNA, 25 bp, Probe Sequence
catcgcgttcacaaccgtgaagagg

SEQ ID NO: 178836 - DNA, 25 bp, Probe Sequence
catccacttcacaagccttgtttct

SEQ ID NO: 178837 - DNA, 25 bp, Probe Sequence
catccacttccagtttgctggtctc

SEQ ID NO: 178838 - DNA, 25 bp, Probe Sequence
catccagcttcatctaggtggtcat

SEQ ID NO: 178839 - DNA, 25 bp, Probe Sequence
catccagcttcatctaggtggtcat

SEQ ID NO: 178840 - DNA, 25 bp, Probe Sequence
catccagctggcacttcgtgagagc

SEQ ID NO: 178841 - DNA, 25 bp, Probe Sequence
catgcagactggcactggcagggcc

SEQ ID NO: 178842 - DNA, 25 bp, Probe Sequence
catgcagatctacagcgccagagtg

SEQ ID NO: 178843 - DNA, 25 bp, Probe Sequence
catgcattcatacaggcagcgatgg

SEQ ID NO: 178844 - DNA, 25 bp, Probe Sequence
catgcctatgatcgtagcacttggg

SEQ ID NO: 178845 - DNA, 25 bp, Probe Sequence
catgctcatatgtgtgcacgcttgg

SEQ ID NO: 178846 - DNA, 25 bp, Probe Sequence
catgctcatatgtattgcctgttgc

SEQ ID NO: 178847 - DNA, 25 bp, Probe Sequence
catccattgcagatgcgcagacatg

SEQ ID NO: 178848 - DNA, 25 bp, Probe Sequence
catccattaggccagcaacgcttgt

SEQ ID NO: 178849 - DNA, 25 bp, Probe Sequence
catccttagtgaacttctgttgtcc

SEQ ID NO: 178850 - DNA, 25 bp, Probe Sequence
catcttttcgtagacattttcctgt

SEQ ID NO: 178851 - DNA, 25 bp, Probe Sequence
catctttggcagacagagaattgga

SEQ ID NO: 178852 - DNA, 25 bp, Probe Sequence
catctttccttcgggttggcaaaat

SEQ ID NO: 178853 - DNA, 25 bp, Probe Sequence
catctttccttcgggttggcaaaat

SEQ ID NO: 178854 - DNA, 25 bp, Probe Sequence
catcttttccacattttctgtaaat

SEQ ID NO: 178855 - DNA, 25 bp, Probe Sequence
catgcattagctcactttcatttaa

SEQ ID NO: 178856 - DNA, 25 bp, Probe Sequence
catgctttctgttattatctttctt

SEQ ID NO: 178857 - DNA, 25 bp, Probe Sequence
catcgttcttagcctacattgtcat

SEQ ID NO: 178858 - DNA, 25 bp, Probe Sequence
catcgtctataaactagctttagga

SEQ ID NO: 178859 - DNA, 25 bp, Probe Sequence
catgcctcactgacagaccagcatt

SEQ ID NO: 178860 - DNA, 25 bp, Probe Sequence
catctctgcctgagatccattcttc

SEQ ID NO: 178861 - DNA, 25 bp, Probe Sequence
catgccttcgagatcatacacctgc

SEQ ID NO: 178862 - DNA, 25 bp, Probe Sequence
catccttaactttgtatcctggctt

SEQ ID NO: 178863 - DNA, 25 bp, Probe Sequence
catgcctgtagtcctagctacttgg

SEQ ID NO: 178864 - DNA, 25 bp, Probe Sequence
catgcctgtaatctcagcactttgg

SEQ ID NO: 178865 - DNA, 25 bp, Probe Sequence
catgcctgtaatctcagcactttgg

SEQ ID NO: 178866 - DNA, 25 bp, Probe Sequence
catgcgctgtgaaagctccacttgg

SEQ ID NO: 178867 - DNA, 25 bp, Probe Sequence
catcactgtgacggtccctgtagaa

SEQ ID NO: 178868 - DNA, 25 bp, Probe Sequence
catccttacccctatttaatgtagt

SEQ ID NO: 178869 - DNA, 25 bp, Probe Sequence
catccatcccctcatagttaagtag

SEQ ID NO: 178870 - DNA, 25 bp, Probe Sequence
tatcccgctccagaagtaaaacgtt

SEQ ID NO: 178871 - DNA, 25 bp, Probe Sequence
catcccactctggacaataaaaacg

SEQ ID NO: 178872 - DNA, 25 bp, Probe Sequence
catccacaccttaacatgaacagat

SEQ ID NO: 178873 - DNA, 25 bp, Probe Sequence
catgcctcacgcttcatggaggaca

SEQ ID NO: 178874 - DNA, 25 bp, Probe Sequence
catcctctctcctagctgagtaaat

SEQ ID NO: 178875 - DNA, 25 bp, Probe Sequence
catgccctctgcaccatgaaggaat

SEQ ID NO: 178876 - DNA, 25 bp, Probe Sequence
catgcaccttgctcccaatggtgct

SEQ ID NO: 178877 - DNA, 25 bp, Probe Sequence
catgcaggaatctccacacaaatgt

SEQ ID NO: 178878 - DNA, 25 bp, Probe Sequence
catccgtgatgtggccaagcaagtg

SEQ ID NO: 178879 - DNA, 25 bp, Probe Sequence
catccgttggggtaggagtgatctc

SEQ ID NO: 178880 - DNA, 25 bp, Probe Sequence
catccatttgtgaggaggacttctc

SEQ ID NO: 178881 - DNA, 25 bp, Probe Sequence
catccatttctgataaagttctcta

SEQ ID NO: 178882 - DNA, 25 bp, Probe Sequence
catccagtcttcagctaagtcctgt

SEQ ID NO: 178883 - DNA, 25 bp, Probe Sequence
catgccaacttgcagtacagcctca

SEQ ID NO: 178884 - DNA, 25 bp, Probe Sequence
catccacatcctgatgttagccccc

SEQ ID NO: 178885 - DNA, 25 bp, Probe Sequence
catccaatatttatctgagcaccta

SEQ ID NO: 178886 - DNA, 25 bp, Probe Sequence
catccaattgttcttggcccaaaca

SEQ ID NO: 178887 - DNA, 25 bp, Probe Sequence
catgcgagttggttttggcaccaaa

SEQ ID NO: 178888 - DNA, 25 bp, Probe Sequence
ctcagagcttcctggggaccaagat

SEQ ID NO: 178889 - DNA, 25 bp, Probe Sequence
cattcacattcctgggtacccagtg

SEQ ID NO: 178890 - DNA, 25 bp, Probe Sequence
catctccttctccgggaattcaagt

SEQ ID NO: 178891 - DNA, 25 bp, Probe Sequence
catccctgtctgctttgttacaagc

SEQ ID NO: 178892 - DNA, 25 bp, Probe Sequence
catccagtttggcagtgttacaacg

SEQ ID NO: 178893 - DNA, 25 bp, Probe Sequence
catacaggcctgtcgaggagaacaa

SEQ ID NO: 178894 - DNA, 25 bp, Probe Sequence
catgcaaggacgtcaacccaacaca

SEQ ID NO: 178895 - DNA, 25 bp, Probe Sequence
catcaatggaaatcccatcaccatc

SEQ ID NO: 178896 - DNA, 25 bp, Probe Sequence
catcaatggaaatcccatcaccatc

SEQ ID NO: 178897 - DNA, 25 bp, Probe Sequence
catgaaccataaccatactaccatc

SEQ ID NO: 178898 - DNA, 25 bp, Probe Sequence
catcaacaattaagagcaccccatc

SEQ ID NO: 178899 - DNA, 25 bp, Probe Sequence
catataatttgctagtcatccccta

SEQ ID NO: 178900 - DNA, 25 bp, Probe Sequence
catcagatactatggttctccacta

SEQ ID NO: 178901 - DNA, 25 bp, Probe Sequence
catagcaactcctgtactctactaa

SEQ ID NO: 178902 - DNA, 25 bp, Probe Sequence
catccaactcctgaaatccaataaa

SEQ ID NO: 178903 - DNA, 25 bp, Probe Sequence
catccaggtcctgaagatcgccaag

SEQ ID NO: 178904 - DNA, 25 bp, Probe Sequence
catcaactgaacgcaaatcagccac

SEQ ID NO: 178905 - DNA, 25 bp, Probe Sequence
catctgttatgggtaagatctgcca

SEQ ID NO: 178906 - DNA, 25 bp, Probe Sequence
cattgatttgtgtctcaacttcagc

SEQ ID NO: 178907 - DNA, 25 bp, Probe Sequence
catcgatctgggtatcaaatatgac

SEQ ID NO: 178908 - DNA, 25 bp, Probe Sequence
catcgttggaatgaattatgctttc

SEQ ID NO: 178909 - DNA, 25 bp, Probe Sequence
ctcagaccaggtggaattacttaaa

SEQ ID NO: 178910 - DNA, 25 bp, Probe Sequence
catcagggacgtcgtttacttccag

SEQ ID NO: 178911 - DNA, 25 bp, Probe Sequence
catcctggaaggttattacctaatg

SEQ ID NO: 178912 - DNA, 25 bp, Probe Sequence
catccatggcctggcagtgttacct

SEQ ID NO: 178913 - DNA, 25 bp, Probe Sequence
catccttccggcatgattatgtgct

SEQ ID NO: 178914 - DNA, 25 bp, Probe Sequence
catccttcgattactattcgtgcct

SEQ ID NO: 178915 - DNA, 25 bp, Probe Sequence
catcgttatcatcactttcttcgta

SEQ ID NO: 178916 - DNA, 25 bp, Probe Sequence
catgctataatcctatcattttggg

SEQ ID NO: 178917 - DNA, 25 bp, Probe Sequence
catgcatatactgtctctgtttgca

SEQ ID NO: 178918 - DNA, 25 bp, Probe Sequence
catgcagtaatttctgcagttggga

SEQ ID NO: 178919 - DNA, 25 bp, Probe Sequence
catgcttaattgtgcagttgctcaa

SEQ ID NO: 178920 - DNA, 25 bp, Probe Sequence
catttacattttccttatcaaggtg

SEQ ID NO: 178921 - DNA, 25 bp, Probe Sequence
catttaaatacatcgtgacctgtgt

SEQ ID NO: 178922 - DNA, 25 bp, Probe Sequence
cattaaatcagttatggttcctttg

SEQ ID NO: 178923 - DNA, 25 bp, Probe Sequence
catcgtcaacgacgaggttcgctac

SEQ ID NO: 178924 - DNA, 25 bp, Probe Sequence
catcgtcattcttcaggattgccct

SEQ ID NO: 178925 - DNA, 25 bp, Probe Sequence
catcgtcattcttcaggattgccct

SEQ ID NO: 178926 - DNA, 25 bp, Probe Sequence
catcgtcattcttcaggattgccct

SEQ ID NO: 178927 - DNA, 25 bp, Probe Sequence
catgcctatttactggaaacctgtt

SEQ ID NO: 178928 - DNA, 25 bp, Probe Sequence
catgcctatttaatggaacctccat

SEQ ID NO: 178929 - DNA, 25 bp, Probe Sequence
ctaagtttggtgcgaacgccattct

SEQ ID NO: 178930 - DNA, 25 bp, Probe Sequence
ctagacttttgttggtcgccctaat

SEQ ID NO: 178931 - DNA, 25 bp, Probe Sequence
ctaagtttaattttcagctcctctg

SEQ ID NO: 178932 - DNA, 25 bp, Probe Sequence
cataaattgccatttcaaatctccc

SEQ ID NO: 178933 - DNA, 25 bp, Probe Sequence
ctaaatgggctttatcctttccgtg

SEQ ID NO: 178934 - DNA, 25 bp, Probe Sequence
catccaagatggagttcccttgccc

SEQ ID NO: 178935 - DNA, 25 bp, Probe Sequence
catcaaaagaatcttccctacaccc

SEQ ID NO: 178936 - DNA, 25 bp, Probe Sequence
cataaaatgtatcttccatgctaca

SEQ ID NO: 178937 - DNA, 25 bp, Probe Sequence
cattaaagaaacaccgtgcaacgtg

SEQ ID NO: 178938 - DNA, 25 bp, Probe Sequence
catctagaggaataaatcgtaacaa

SEQ ID NO: 178939 - DNA, 25 bp, Probe Sequence
catctcaaggcctgaagctgcccag

SEQ ID NO: 178940 - DNA, 25 bp, Probe Sequence
catccaaggaatagactccttcgtg

SEQ ID NO: 178941 - DNA, 25 bp, Probe Sequence
catgccaggaacaatgtctcccttt

SEQ ID NO: 178942 - DNA, 25 bp, Probe Sequence
catcatcaggaactttcggttttaa

SEQ ID NO: 178943 - DNA, 25 bp, Probe Sequence
catatggggactatagtgcaaccta

SEQ ID NO: 178944 - DNA, 25 bp, Probe Sequence
catctggaagcctacggtgttcact

SEQ ID NO: 178945 - DNA, 25 bp, Probe Sequence
catctggcctggaactggtgttaag

SEQ ID NO: 178946 - DNA, 25 bp, Probe Sequence
catctgccctgtgatgctgggtgat

SEQ ID NO: 178947 - DNA, 25 bp, Probe Sequence
catcccaatgctgagtggtattttg

SEQ ID NO: 178948 - DNA, 25 bp, Probe Sequence
catctcgaagtgttctggaatttgg

SEQ ID NO: 178949 - DNA, 25 bp, Probe Sequence
catctacggcatcatcatggcaatt

SEQ ID NO: 178950 - DNA, 25 bp, Probe Sequence
catcactctggcccattgacagatg

SEQ ID NO: 178951 - DNA, 25 bp, Probe Sequence
catcaatcatgcctatttaatggaa

SEQ ID NO: 178952 - DNA, 25 bp, Probe Sequence
catcgtgctcctatgaccggaaagt

SEQ ID NO: 178953 - DNA, 25 bp, Probe Sequence
catcatgtcaccactggccaaaaag

SEQ ID NO: 178954 - DNA, 25 bp, Probe Sequence
catagtccccactctatgaaaactt

SEQ ID NO: 178955 - DNA, 25 bp, Probe Sequence
catagtcgtggatcactacaaggag

SEQ ID NO: 178956 - DNA, 25 bp, Probe Sequence
catcaacgggcaccaggccaagttc

SEQ ID NO: 178957 - DNA, 25 bp, Probe Sequence
cataaacgaccgctgctacgcgatc

SEQ ID NO: 178958 - DNA, 25 bp, Probe Sequence
cataaaaacacacgtgctctccctg

SEQ ID NO: 178959 - DNA, 25 bp, Probe Sequence
catcaacaaacccttggcaacacta

SEQ ID NO: 178960 - DNA, 25 bp, Probe Sequence
cataaaacccttgagcacaacagca

SEQ ID NO: 178961 - DNA, 25 bp, Probe Sequence
cataagaaccctttatgtaccatct

SEQ ID NO: 178962 - DNA, 25 bp, Probe Sequence
catcaagataaggcatttctttccc

SEQ ID NO: 178963 - DNA, 25 bp, Probe Sequence
catcagagagacgcaacccatctcc

SEQ ID NO: 178964 - DNA, 25 bp, Probe Sequence
catcagacaacaccagtgcttcctc

SEQ ID NO: 178965 - DNA, 25 bp, Probe Sequence
catagcaaaactatgaggctgctgt

SEQ ID NO: 178966 - DNA, 25 bp, Probe Sequence
cattaaaatatccggttgcgtacca

SEQ ID NO: 178967 - DNA, 25 bp, Probe Sequence
cttgaaaatccgcctgcaagcctac

SEQ ID NO: 178968 - DNA, 25 bp, Probe Sequence
cttgcaaaacctgcacaatcagtcc

SEQ ID NO: 178969 - DNA, 25 bp, Probe Sequence
gctaaataaagtgaaataccctata

SEQ ID NO: 178970 - DNA, 25 bp, Probe Sequence
gccatattacaagaagttaccctag

SEQ ID NO: 178971 - DNA, 25 bp, Probe Sequence
catcaataaaagtaatttcacccga

SEQ ID NO: 178972 - DNA, 25 bp, Probe Sequence
catcttacagggcttgtgtccccag

SEQ ID NO: 178973 - DNA, 25 bp, Probe Sequence
catcttccaggagcgagatccctcc

SEQ ID NO: 178974 - DNA, 25 bp, Probe Sequence
catcgtcctagaattaattccccta

SEQ ID NO: 178975 - DNA, 25 bp, Probe Sequence
catcgtcctagaattaattccccta

SEQ ID NO: 178976 - DNA, 25 bp, Probe Sequence
catctgtgctgaatgtcttatatgc

SEQ ID NO: 178977 - DNA, 25 bp, Probe Sequence
catgctgcatcgtgttgtattggga

SEQ ID NO: 178978 - DNA, 25 bp, Probe Sequence
catcgcatcgtggtgtgtcaatgcc

SEQ ID NO: 178979 - DNA, 25 bp, Probe Sequence
catcgcataggaatgtgtgcatgtg

SEQ ID NO: 178980 - DNA, 25 bp, Probe Sequence
catccaatgtgtttgccatgtttga

SEQ ID NO: 178981 - DNA, 25 bp, Probe Sequence
catccacagtgtctgctggtcgtgg

SEQ ID NO: 178982 - DNA, 25 bp, Probe Sequence
catgccatcctgcgtctggacctgg

SEQ ID NO: 178983 - DNA, 25 bp, Probe Sequence
catccttcatgagcctgcagaactg

SEQ ID NO: 178984 - DNA, 25 bp, Probe Sequence
catcctttatctgtgacttcatgct

SEQ ID NO: 178985 - DNA, 25 bp, Probe Sequence
catccaactacttgtgatctctctc

SEQ ID NO: 178986 - DNA, 25 bp, Probe Sequence
catcgcatcatcaaaagttatcttc

SEQ ID NO: 178987 - DNA, 25 bp, Probe Sequence
catctgctatggccatggtttttct

SEQ ID NO: 178988 - DNA, 25 bp, Probe Sequence
catctgtaggctcattcatttctct

SEQ ID NO: 178989 - DNA, 25 bp, Probe Sequence
catcgtcagacgtgatcatttcctg

SEQ ID NO: 178990 - DNA, 25 bp, Probe Sequence
catcgagagcggggacactgacctg

SEQ ID NO: 178991 - DNA, 25 bp, Probe Sequence
catcggcatcggggacatgttccac

SEQ ID NO: 178992 - DNA, 25 bp, Probe Sequence
catcggcatcggggacatgttccac

SEQ ID NO: 178993 - DNA, 25 bp, Probe Sequence
catccagcactgtaagaagctgtcc

SEQ ID NO: 178994 - DNA, 25 bp, Probe Sequence
catccaggctggaaggagctctctg

SEQ ID NO: 178995 - DNA, 25 bp, Probe Sequence
catccagagcgacatcggagccagc

SEQ ID NO: 178996 - DNA, 25 bp, Probe Sequence
catccaggacatcctgcgggacggc

SEQ ID NO: 178997 - DNA, 25 bp, Probe Sequence
catcaaggaggccggggacgccgag

SEQ ID NO: 178998 - DNA, 25 bp, Probe Sequence
cataacggagcccggagggcgaggc

SEQ ID NO: 178999 - DNA, 25 bp, Probe Sequence
catccacgtagggggcaggggcagg

SEQ ID NO: 179000 - DNA, 25 bp, Probe Sequence
catccacgtttgcgtctggggagga

SEQ ID NO: 179001 - DNA, 25 bp, Probe Sequence
ctaatagtgtacagttggggagtac

SEQ ID NO: 179002 - DNA, 25 bp, Probe Sequence
catataagagttatgttagccaggt

SEQ ID NO: 179003 - DNA, 25 bp, Probe Sequence
catctgaaggatttcgtccccaggg

SEQ ID NO: 179004 - DNA, 25 bp, Probe Sequence
catcgattgatttacggcgctaagg

SEQ ID NO: 179005 - DNA, 25 bp, Probe Sequence
catcagagttcttacgggtggagtg

SEQ ID NO: 179006 - DNA, 25 bp, Probe Sequence
ccaggttcgaactggcgaagtggtg

SEQ ID NO: 179007 - DNA, 25 bp, Probe Sequence
cgggtcaggaactagcggaattact

SEQ ID NO: 179008 - DNA, 25 bp, Probe Sequence
cttcctaggacacaggggactcctt

SEQ ID NO: 179009 - DNA, 25 bp, Probe Sequence
cttccaagctagagggctgggccct

SEQ ID NO: 179010 - DNA, 25 bp, Probe Sequence
catctacaccaactatgaggcgggc

SEQ ID NO: 179011 - DNA, 25 bp, Probe Sequence
catctgccctcatggaaggtgacgt

SEQ ID NO: 179012 - DNA, 25 bp, Probe Sequence
catcatcctcacagtgacaggagag

SEQ ID NO: 179013 - DNA, 25 bp, Probe Sequence
catctgccacctgctggggaggcag

SEQ ID NO: 179014 - DNA, 25 bp, Probe Sequence
catgctgtcgctgccgaggcagaaa

SEQ ID NO: 179015 - DNA, 25 bp, Probe Sequence
catgctgtgtgcggggagcgaaaat

SEQ ID NO: 179016 - DNA, 25 bp, Probe Sequence
catgctgtttatgaacggaaatcat

SEQ ID NO: 179017 - DNA, 25 bp, Probe Sequence
catcgactggatcaacgagaaaatg

SEQ ID NO: 179018 - DNA, 25 bp, Probe Sequence
catcacgcatggaagaagtagacta

SEQ ID NO: 179019 - DNA, 25 bp, Probe Sequence
catcctgggctacactgagcaccag

SEQ ID NO: 179020 - DNA, 25 bp, Probe Sequence
catcctgggctacactgagcaccag

SEQ ID NO: 179021 - DNA, 25 bp, Probe Sequence
catcctgggctacactgagcaccag

SEQ ID NO: 179022 - DNA, 25 bp, Probe Sequence
catcctggacgacagtggctacgtg

SEQ ID NO: 179023 - DNA, 25 bp, Probe Sequence
catcctgtggtgtccatgaggtacc

SEQ ID NO: 179024 - DNA, 25 bp, Probe Sequence
catcctcttttcaagagcagtgtcc

SEQ ID NO: 179025 - DNA, 25 bp, Probe Sequence
catctctgtctcaacttcatggtgc

SEQ ID NO: 179026 - DNA, 25 bp, Probe Sequence
catcacagtctccaaatgcatgcag

SEQ ID NO: 179027 - DNA, 25 bp, Probe Sequence
catcgcgctgcaggcatacagcaag

SEQ ID NO: 179028 - DNA, 25 bp, Probe Sequence
catcgctgccaacagctaaagcccc

SEQ ID NO: 179029 - DNA, 25 bp, Probe Sequence
catcgctgccaacagctaaagcccc

SEQ ID NO: 179030 - DNA, 25 bp, Probe Sequence
catccagccaagcagctctaggcaa

SEQ ID NO: 179031 - DNA, 25 bp, Probe Sequence
catccgcaaagacctgtacgccaac

SEQ ID NO: 179032 - DNA, 25 bp, Probe Sequence
cataccaacagaacttccggtactt

SEQ ID NO: 179033 - DNA, 25 bp, Probe Sequence
catacccaaactgtctggcagtcac

SEQ ID NO: 179034 - DNA, 25 bp, Probe Sequence
cataccgaatccgtgtgcggctgtc

SEQ ID NO: 179035 - DNA, 25 bp, Probe Sequence
catccacacagtccgtgtgcgggga

SEQ ID NO: 179036 - DNA, 25 bp, Probe Sequence
catccacatattgcaatgctatggg

SEQ ID NO: 179037 - DNA, 25 bp, Probe Sequence
catccagctaatgtcatgtctgtgt

SEQ ID NO: 179038 - DNA, 25 bp, Probe Sequence
catagcactattgcatctcctagct

SEQ ID NO: 179039 - DNA, 25 bp, Probe Sequence
catacgcatgactacattacaacgg

SEQ ID NO: 179040 - DNA, 25 bp, Probe Sequence
catcctctgactccactcaaagagg

SEQ ID NO: 179041 - DNA, 25 bp, Probe Sequence
catcgctcagacaccatggggaagg

SEQ ID NO: 179042 - DNA, 25 bp, Probe Sequence
catcgctcagacaccatggggaagg

SEQ ID NO: 179043 - DNA, 25 bp, Probe Sequence
catgcctaagcacccagagctggca

SEQ ID NO: 179044 - DNA, 25 bp, Probe Sequence
catcccagatacgacagatgatgct

SEQ ID NO: 179045 - DNA, 25 bp, Probe Sequence
catctgcaattacgaagcatctgcc

SEQ ID NO: 179046 - DNA, 25 bp, Probe Sequence
catcggagaagtgcagctgctgcgc

SEQ ID NO: 179047 - DNA, 25 bp, Probe Sequence
catgcgggaacttcgcatccgcaaa

SEQ ID NO: 179048 - DNA, 25 bp, Probe Sequence
catcgtgaggactaaccgcgcagag

SEQ ID NO: 179049 - DNA, 25 bp, Probe Sequence
catcatgctgaccattaagccaggg

SEQ ID NO: 179050 - DNA, 25 bp, Probe Sequence
catcattaatgagacacagagttgt

SEQ ID NO: 179051 - DNA, 25 bp, Probe Sequence
catcatctttggcagacagagaatt

SEQ ID NO: 179052 - DNA, 25 bp, Probe Sequence
catgcgctttgccaagaagcacaac

SEQ ID NO: 179053 - DNA, 25 bp, Probe Sequence
catgccctgctctgaagagacaccc

SEQ ID NO: 179054 - DNA, 25 bp, Probe Sequence
catccacgctaagagagtcaccatc

SEQ ID NO: 179055 - DNA, 25 bp, Probe Sequence
catccacaccaagctgcagaacaag

SEQ ID NO: 179056 - DNA, 25 bp, Probe Sequence
catcacacacacagttgacaacagg

SEQ ID NO: 179057 - DNA, 25 bp, Probe Sequence
catcggcacactcattgtcacaaag

SEQ ID NO: 179058 - DNA, 25 bp, Probe Sequence
catcgagcacggcatcgtcaccaac

SEQ ID NO: 179059 - DNA, 25 bp, Probe Sequence
catctatggggtaccccaagtcgga

SEQ ID NO: 179060 - DNA, 25 bp, Probe Sequence
catccagggcttagcctccaagtgg

SEQ ID NO: 179061 - DNA, 25 bp, Probe Sequence
catcctggtgtcatcacagccaagg

SEQ ID NO: 179062 - DNA, 25 bp, Probe Sequence
catgcctgtgtttaacgtcgatgga

SEQ ID NO: 179063 - DNA, 25 bp, Probe Sequence
catcgtctttaaacctgtgtggcaa

SEQ ID NO: 179064 - DNA, 25 bp, Probe Sequence
catcctcttcgatagcctgtttaaa

SEQ ID NO: 179065 - DNA, 25 bp, Probe Sequence
catccctaggaggatctctgtcttg

SEQ ID NO: 179066 - DNA, 25 bp, Probe Sequence
catccctaaagttctcttctaagag

SEQ ID NO: 179067 - DNA, 25 bp, Probe Sequence
catgccccaatgcttctatatgcta

SEQ ID NO: 179068 - DNA, 25 bp, Probe Sequence
catgccttcaacctatgatcatagc

SEQ ID NO: 179069 - DNA, 25 bp, Probe Sequence
catgccttgccactttacaagttct

SEQ ID NO: 179070 - DNA, 25 bp, Probe Sequence
catccagtgccctgatagtcagttc

SEQ ID NO: 179071 - DNA, 25 bp, Probe Sequence
ctgccagccagtctaactagttcaa

SEQ ID NO: 179072 - DNA, 25 bp, Probe Sequence
catacccagcattatacttggttca

SEQ ID NO: 179073 - DNA, 25 bp, Probe Sequence
catcccgagctgaatatcggggtca

SEQ ID NO: 179074 - DNA, 25 bp, Probe Sequence
catcccagacatcatcaaggtggcc

SEQ ID NO: 179075 - DNA, 25 bp, Probe Sequence
catcctcgagaagaagggagcacta

SEQ ID NO: 179076 - DNA, 25 bp, Probe Sequence
catccctgagacggccacaggacaa

SEQ ID NO: 179077 - DNA, 25 bp, Probe Sequence
catcaccgaagcgggagcggccaaa

SEQ ID NO: 179078 - DNA, 25 bp, Probe Sequence
catcaacgaggacccgggcaagaat

SEQ ID NO: 179079 - DNA, 25 bp, Probe Sequence
gtaccaagtggagcggacacgaaca

SEQ ID NO: 179080 - DNA, 25 bp, Probe Sequence
gaacaagtttgctacgaacaaaacg

SEQ ID NO: 179081 - DNA, 25 bp, Probe Sequence
catacttctttgcagcggacaaata

SEQ ID NO: 179082 - DNA, 25 bp, Probe Sequence
catacggcatttcccgggacagaca

SEQ ID NO: 179083 - DNA, 25 bp, Probe Sequence
catacggcatttcccgggacagaca

SEQ ID NO: 179084 - DNA, 25 bp, Probe Sequence
catcctggctaacacggtgaaaccc

SEQ ID NO: 179085 - DNA, 25 bp, Probe Sequence
catcctggctaacatggtgaaaccc

SEQ ID NO: 179086 - DNA, 25 bp, Probe Sequence
catcctggctaacatggtgaaaccc

SEQ ID NO: 179087 - DNA, 25 bp, Probe Sequence
catcctggctaacatggtgaaaccc

SEQ ID NO: 179088 - DNA, 25 bp, Probe Sequence
catcccctgactaagggaaaccatg

SEQ ID NO: 179089 - DNA, 25 bp, Probe Sequence
catcccctactccaagatggaaaga

SEQ ID NO: 179090 - DNA, 25 bp, Probe Sequence
catcaccccaacctacagggaaaat

SEQ ID NO: 179091 - DNA, 25 bp, Probe Sequence
catcaccccaacctacagggaaaat

SEQ ID NO: 179092 - DNA, 25 bp, Probe Sequence
catctccaccctcaacagtggcaag

SEQ ID NO: 179093 - DNA, 25 bp, Probe Sequence
catcaccaccacctttttggagaga

SEQ ID NO: 179094 - DNA, 25 bp, Probe Sequence
catccagcacctgtcatttggggag

SEQ ID NO: 179095 - DNA, 25 bp, Probe Sequence
catcgagcatgccgagttctcgggg

SEQ ID NO: 179096 - DNA, 25 bp, Probe Sequence
catcaagcagctaaattccgaagag

SEQ ID NO: 179097 - DNA, 25 bp, Probe Sequence
cataatcatgtcgcagtcacgaact

SEQ ID NO: 179098 - DNA, 25 bp, Probe Sequence
catcaatactcatcattaataatca

SEQ ID NO: 179099 - DNA, 25 bp, Probe Sequence
catccataatccttctaatagccat

SEQ ID NO: 179100 - DNA, 25 bp, Probe Sequence
catccatatgacacttggaatgtga

SEQ ID NO: 179101 - DNA, 25 bp, Probe Sequence
catcgatgaagccccaggcacagtg

SEQ ID NO: 179102 - DNA, 25 bp, Probe Sequence
catcgtgcaagacccattgcctatg

SEQ ID NO: 179103 - DNA, 25 bp, Probe Sequence
catcggcactgacctcaacaggaat

SEQ ID NO: 179104 - DNA, 25 bp, Probe Sequence
catctggttaccaaacataaatgct

SEQ ID NO: 179105 - DNA, 25 bp, Probe Sequence
catctggattctgcctaataaaaaa

SEQ ID NO: 179106 - DNA, 25 bp, Probe Sequence
catcacgtgactgttaatgtaaacc

SEQ ID NO: 179107 - DNA, 25 bp, Probe Sequence
catcttcgactttctaaaaaagctc

SEQ ID NO: 179108 - DNA, 25 bp, Probe Sequence
catctttcccacctaaaaatgtctg

SEQ ID NO: 179109 - DNA, 25 bp, Probe Sequence
catctttcccacctaaaaatgtctg

SEQ ID NO: 179110 - DNA, 25 bp, Probe Sequence
catcattccctagaaactgccattt

SEQ ID NO: 179111 - DNA, 25 bp, Probe Sequence
catcagcgttctgagaaactgcttt

SEQ ID NO: 179112 - DNA, 25 bp, Probe Sequence
catcaaaatctatggtaatctttca

SEQ ID NO: 179113 - DNA, 25 bp, Probe Sequence
catgccaaattcacagtttttatct

SEQ ID NO: 179114 - DNA, 25 bp, Probe Sequence
catccaagaccatccattattctag

SEQ ID NO: 179115 - DNA, 25 bp, Probe Sequence
catccaggaccttctatttatatac

SEQ ID NO: 179116 - DNA, 25 bp, Probe Sequence
catccaggtcctgccttgtgagatg

SEQ ID NO: 179117 - DNA, 25 bp, Probe Sequence
catcccgtgactgcaatgctggtgg

SEQ ID NO: 179118 - DNA, 25 bp, Probe Sequence
catccggatcacggcaatgcggctg

SEQ ID NO: 179119 - DNA, 25 bp, Probe Sequence
catccgggcagagctacagagcatt

SEQ ID NO: 179120 - DNA, 25 bp, Probe Sequence
catctcgtgtggaccatctaggctc

SEQ ID NO: 179121 - DNA, 25 bp, Probe Sequence
catcccgatggtcactgaactgatt

SEQ ID NO: 179122 - DNA, 25 bp, Probe Sequence
catcaccgtagtcacagacacagga

SEQ ID NO: 179123 - DNA, 25 bp, Probe Sequence
catcagcgcgcaagagggcagaccg

SEQ ID NO: 179124 - DNA, 25 bp, Probe Sequence
catctgcactgcagcggatgaccac

SEQ ID NO: 179125 - DNA, 25 bp, Probe Sequence
catctcaacttccttgaccatagtg

SEQ ID NO: 179126 - DNA, 25 bp, Probe Sequence
catcatcaccaagctgtaccagagt

SEQ ID NO: 179127 - DNA, 25 bp, Probe Sequence
catatactcagagctactccctgtt

SEQ ID NO: 179128 - DNA, 25 bp, Probe Sequence
cataaataacccttcacgtgtcaaa

SEQ ID NO: 179129 - DNA, 25 bp, Probe Sequence
cataagtcaactcttctccttgaag

SEQ ID NO: 179130 - DNA, 25 bp, Probe Sequence
catcggatgaccctggtcttcaatg

SEQ ID NO: 179131 - DNA, 25 bp, Probe Sequence
catcagccttggccatggttttcat

SEQ ID NO: 179132 - DNA, 25 bp, Probe Sequence
catcctctggaccggaagtctgcat

SEQ ID NO: 179133 - DNA, 25 bp, Probe Sequence
catccatccgacattgaagttgact

SEQ ID NO: 179134 - DNA, 25 bp, Probe Sequence
catcctcacgagctatagtggcgca

SEQ ID NO: 179135 - DNA, 25 bp, Probe Sequence
catttctctgagcagtcagggtggg

SEQ ID NO: 179136 - DNA, 25 bp, Probe Sequence
catcccctgaacacgtggtggtgac

SEQ ID NO: 179137 - DNA, 25 bp, Probe Sequence
catccattattagcctggggtgtgg

SEQ ID NO: 179138 - DNA, 25 bp, Probe Sequence
catcccgaggcagccagggtttgtt

SEQ ID NO: 179139 - DNA, 25 bp, Probe Sequence
catcccgagaagtccagacggctgt

SEQ ID NO: 179140 - DNA, 25 bp, Probe Sequence
catccagtgagaagacctgctcctc

SEQ ID NO: 179141 - DNA, 25 bp, Probe Sequence
catacatgggatagcacctgggccg

SEQ ID NO: 179142 - DNA, 25 bp, Probe Sequence
catcgcgtagtagccatggtgatcg

SEQ ID NO: 179143 - DNA, 25 bp, Probe Sequence
catccctcagcttccagatggtgaa

SEQ ID NO: 179144 - DNA, 25 bp, Probe Sequence
catcacctggtatggctggcatgga

SEQ ID NO: 179145 - DNA, 25 bp, Probe Sequence
catccctgagggccagctggaggcc

SEQ ID NO: 179146 - DNA, 25 bp, Probe Sequence
catcctcggggaccggcaggatgcc

SEQ ID NO: 179147 - DNA, 25 bp, Probe Sequence
catcccggggtggaagcactgacac

SEQ ID NO: 179148 - DNA, 25 bp, Probe Sequence
catctccggtgaagctgaaggggcc

SEQ ID NO: 179149 - DNA, 25 bp, Probe Sequence
catccctcctgaccagcagaggttg

SEQ ID NO: 179150 - DNA, 25 bp, Probe Sequence
catccctcctgaccagcagaggttg

SEQ ID NO: 179151 - DNA, 25 bp, Probe Sequence
catctcccgctgatgagcgaggcgg

SEQ ID NO: 179152 - DNA, 25 bp, Probe Sequence
catccccatcgtgggcatcattgct

SEQ ID NO: 179153 - DNA, 25 bp, Probe Sequence
catccccatcgtgggcatcattgct

SEQ ID NO: 179154 - DNA, 25 bp, Probe Sequence
catcctcttctatggcagattctca

SEQ ID NO: 179155 - DNA, 25 bp, Probe Sequence
catcgccattgctgcgggtgttccc

SEQ ID NO: 179156 - DNA, 25 bp, Probe Sequence
catcccactcctaggtatgtatcct

SEQ ID NO: 179157 - DNA, 25 bp, Probe Sequence
catcccacactcaaagttgtctctt

SEQ ID NO: 179158 - DNA, 25 bp, Probe Sequence
catcgacgccataagcatgtttctg

SEQ ID NO: 179159 - DNA, 25 bp, Probe Sequence
catcctcgccttagcatgatttatc

SEQ ID NO: 179160 - DNA, 25 bp, Probe Sequence
catccattccttcatgtctttattt

SEQ ID NO: 179161 - DNA, 25 bp, Probe Sequence
catatctgacttctaggatttattg

SEQ ID NO: 179162 - DNA, 25 bp, Probe Sequence
catctctaccatcatccggtttagt

SEQ ID NO: 179163 - DNA, 25 bp, Probe Sequence
catctgtacaatctcctgtttcttt

SEQ ID NO: 179164 - DNA, 25 bp, Probe Sequence
cttaactacgaactgaattgtatta

SEQ ID NO: 179165 - DNA, 25 bp, Probe Sequence
catatcggctcgcaaatctttgata

SEQ ID NO: 179166 - DNA, 25 bp, Probe Sequence
catatgggtctgtcaaagcctatac

SEQ ID NO: 179167 - DNA, 25 bp, Probe Sequence
catcaggggctggatggagccgggc

SEQ ID NO: 179168 - DNA, 25 bp, Probe Sequence
catcggctggtggttggtaggggag

SEQ ID NO: 179169 - DNA, 25 bp, Probe Sequence
catcctgtctgtgttatgtgggtgg

SEQ ID NO: 179170 - DNA, 25 bp, Probe Sequence
catccctcttccatactgaggtgga

SEQ ID NO: 179171 - DNA, 25 bp, Probe Sequence
cattccttttacaggcacgtggatg

SEQ ID NO: 179172 - DNA, 25 bp, Probe Sequence
catctctatttaaaggaacgaaatg

SEQ ID NO: 179173 - DNA, 25 bp, Probe Sequence
catctctgtttctgagtgacaaagt

SEQ ID NO: 179174 - DNA, 25 bp, Probe Sequence
catcctcattgttcacagtgaaaac

SEQ ID NO: 179175 - DNA, 25 bp, Probe Sequence
catctgcacttgactcaatgctgcc

SEQ ID NO: 179176 - DNA, 25 bp, Probe Sequence
catcgcctttctcacgatcaagggc

SEQ ID NO: 179177 - DNA, 25 bp, Probe Sequence
catcgtcttctccaaagtcaagggg

SEQ ID NO: 179178 - DNA, 25 bp, Probe Sequence
catccgcttctccaaatatctgggc

SEQ ID NO: 179179 - DNA, 25 bp, Probe Sequence
catccatgtttccagtgtttcggtt

SEQ ID NO: 179180 - DNA, 25 bp, Probe Sequence
catcctctcaagtggttacctgttc

SEQ ID NO: 179181 - DNA, 25 bp, Probe Sequence
catctttgcaggcggtcaggcctat

SEQ ID NO: 179182 - DNA, 25 bp, Probe Sequence
catcctgtgcatcaaggacatggcc

SEQ ID NO: 179183 - DNA, 25 bp, Probe Sequence
catctctgcctgacaaggccagcac

SEQ ID NO: 179184 - DNA, 25 bp, Probe Sequence
catcctgccttagtgtgcaatctca

SEQ ID NO: 179185 - DNA, 25 bp, Probe Sequence
catcccctatgccattgcatatcaa

SEQ ID NO: 179186 - DNA, 25 bp, Probe Sequence
catcctcgctatcatattcattaat

SEQ ID NO: 179187 - DNA, 25 bp, Probe Sequence
catccttgtctaatttcaataacta

SEQ ID NO: 179188 - DNA, 25 bp, Probe Sequence
catcacttacacatcccaaaactaa

SEQ ID NO: 179189 - DNA, 25 bp, Probe Sequence
cataccattcacacctaaagactga

SEQ ID NO: 179190 - DNA, 25 bp, Probe Sequence
cataacattacaagacgaggcaaaa

SEQ ID NO: 179191 - DNA, 25 bp, Probe Sequence
cataacttcaggtacagcagagata

SEQ ID NO: 179192 - DNA, 25 bp, Probe Sequence
catccgcttcctgaatgctgagaat

SEQ ID NO: 179193 - DNA, 25 bp, Probe Sequence
catctcctgtccttcagtttgtata

SEQ ID NO: 179194 - DNA, 25 bp, Probe Sequence
catccgtattctttgtgttgataag

SEQ ID NO: 179195 - DNA, 25 bp, Probe Sequence
cattctctaggtttgcatgtagcta

SEQ ID NO: 179196 - DNA, 25 bp, Probe Sequence
catccctgggcatatgtgtaccaaa

SEQ ID NO: 179197 - DNA, 25 bp, Probe Sequence
catcccagggcttatggtgcagcag

SEQ ID NO: 179198 - DNA, 25 bp, Probe Sequence
catcccaggcagcaatgccacactg

SEQ ID NO: 179199 - DNA, 25 bp, Probe Sequence
catcgctcaggctgagtgaccctgg

SEQ ID NO: 179200 - DNA, 25 bp, Probe Sequence
catcggcagcggcaggaacggtttt

SEQ ID NO: 179201 - DNA, 25 bp, Probe Sequence
catcaatgggcgtggatagcggttt

SEQ ID NO: 179202 - DNA, 25 bp, Probe Sequence
catattaggcgcagataaaagaatt

SEQ ID NO: 179203 - DNA, 25 bp, Probe Sequence
catcttcaagccagtgcgcaagcac

SEQ ID NO: 179204 - DNA, 25 bp, Probe Sequence
catctatttctcaagcccaaagggc

SEQ ID NO: 179205 - DNA, 25 bp, Probe Sequence
catcttttctgaagtgtctttgggc

SEQ ID NO: 179206 - DNA, 25 bp, Probe Sequence
catcctgactctgacttctttggac

SEQ ID NO: 179207 - DNA, 25 bp, Probe Sequence
catctcagccttcttgtgcttagga

SEQ ID NO: 179208 - DNA, 25 bp, Probe Sequence
cattgcagcggcatttggtcgggca

SEQ ID NO: 179209 - DNA, 25 bp, Probe Sequence
catcacggcaacagtgcgacgggcg

SEQ ID NO: 179210 - DNA, 25 bp, Probe Sequence
catcgaggctataggacgcagctgt

SEQ ID NO: 179211 - DNA, 25 bp, Probe Sequence
catcgtggttatgaccatcttcttg

SEQ ID NO: 179212 - DNA, 25 bp, Probe Sequence
catccggtttagtcatccaacaaga

SEQ ID NO: 179213 - DNA, 25 bp, Probe Sequence
catctcgtgttatgccacaacagaa

SEQ ID NO: 179214 - DNA, 25 bp, Probe Sequence
catcctgcaatctaagccacaatgg

SEQ ID NO: 179215 - DNA, 25 bp, Probe Sequence
catcaacaatctaagcctgcatctg

SEQ ID NO: 179216 - DNA, 25 bp, Probe Sequence
catcctggtacttcctcaatgtatt

SEQ ID NO: 179217 - DNA, 25 bp, Probe Sequence
catcctggacacttgcctgtatgtg

SEQ ID NO: 179218 - DNA, 25 bp, Probe Sequence
catcctgcgcaaattcagattactg

SEQ ID NO: 179219 - DNA, 25 bp, Probe Sequence
catcatctgactcttcagactcctc

SEQ ID NO: 179220 - DNA, 25 bp, Probe Sequence
catctcgaatggatcactgtagcct

SEQ ID NO: 179221 - DNA, 25 bp, Probe Sequence
catctcaaatggaacacgccatgga

SEQ ID NO: 179222 - DNA, 25 bp, Probe Sequence
catctgccttgcttaccttatgagg

SEQ ID NO: 179223 - DNA, 25 bp, Probe Sequence
catacattcatctgatcagcattaa

SEQ ID NO: 179224 - DNA, 25 bp, Probe Sequence
catactgctcagtgacatggcccag

SEQ ID NO: 179225 - DNA, 25 bp, Probe Sequence
catcctggatgtcgagctgatgccc

SEQ ID NO: 179226 - DNA, 25 bp, Probe Sequence
catcttgtctgccggcagcatgcat

SEQ ID NO: 179227 - DNA, 25 bp, Probe Sequence
catctgtacatcaccatcatcaaag

SEQ ID NO: 179228 - DNA, 25 bp, Probe Sequence
catcgtgatccagcagctctcaaat

SEQ ID NO: 179229 - DNA, 25 bp, Probe Sequence
catcatatgtcacagtgttcagaat

SEQ ID NO: 179230 - DNA, 25 bp, Probe Sequence
catcatagctcactgattttgctat

SEQ ID NO: 179231 - DNA, 25 bp, Probe Sequence
catctagccatgcttaaacattttt

SEQ ID NO: 179232 - DNA, 25 bp, Probe Sequence
catcgactcagcccaaaagcttctt

SEQ ID NO: 179233 - DNA, 25 bp, Probe Sequence
catctgagccagctcaaagcatgtt

SEQ ID NO: 179234 - DNA, 25 bp, Probe Sequence
catcgacctgttcaagcaccaaggc

SEQ ID NO: 179235 - DNA, 25 bp, Probe Sequence
catcagactgtgaaccccacgaagg

SEQ ID NO: 179236 - DNA, 25 bp, Probe Sequence
cataactctaaccagcacagggctg

SEQ ID NO: 179237 - DNA, 25 bp, Probe Sequence
catcgacaagaacggctgcgtggtg

SEQ ID NO: 179238 - DNA, 25 bp, Probe Sequence
catcgtcaacaatgtctgcgcggga

SEQ ID NO: 179239 - DNA, 25 bp, Probe Sequence
catcgtcaacaatgtctgcgcggga

SEQ ID NO: 179240 - DNA, 25 bp, Probe Sequence
catagtagcaagtcttctggtagaa

SEQ ID NO: 179241 - DNA, 25 bp, Probe Sequence
catagtagcaagtcttctggtagaa

SEQ ID NO: 179242 - DNA, 25 bp, Probe Sequence
catcgccaacttgtctctgtagaag

SEQ ID NO: 179243 - DNA, 25 bp, Probe Sequence
catccctaatgtgtgccatagagtt

SEQ ID NO: 179244 - DNA, 25 bp, Probe Sequence
catccctcaagagagaatgcatgga

SEQ ID NO: 179245 - DNA, 25 bp, Probe Sequence
catccccaccactgatatcatgggg

SEQ ID NO: 179246 - DNA, 25 bp, Probe Sequence
catcacttaccaggagcctcaggga

SEQ ID NO: 179247 - DNA, 25 bp, Probe Sequence
catcatcttcaaggcggcctatggg

SEQ ID NO: 179248 - DNA, 25 bp, Probe Sequence
catcttcacctgggggcattgagtg

SEQ ID NO: 179249 - DNA, 25 bp, Probe Sequence
catctgtcctgtgtggaatccagtg

SEQ ID NO: 179250 - DNA, 25 bp, Probe Sequence
catctgtcctgtgtggaatccagtg

SEQ ID NO: 179251 - DNA, 25 bp, Probe Sequence
catatggtcgattctggttctaggg

SEQ ID NO: 179252 - DNA, 25 bp, Probe Sequence
catcatggacctattgttcgggcgc

SEQ ID NO: 179253 - DNA, 25 bp, Probe Sequence
catcactacctgcagtttcgtggct

SEQ ID NO: 179254 - DNA, 25 bp, Probe Sequence
catcagtcaccgctttctatggcgt

SEQ ID NO: 179255 - DNA, 25 bp, Probe Sequence
catcaggcccagtattcctgtctgg

SEQ ID NO: 179256 - DNA, 25 bp, Probe Sequence
catcccactgaaattcctttggcat

SEQ ID NO: 179257 - DNA, 25 bp, Probe Sequence
catcccactgaaattcctttggcat

SEQ ID NO: 179258 - DNA, 25 bp, Probe Sequence
catccctcaagtaagccctgtgagg

SEQ ID NO: 179259 - DNA, 25 bp, Probe Sequence
catcccgtagtaagatccatgtatt

SEQ ID NO: 179260 - DNA, 25 bp, Probe Sequence
catcaccactcattttgaccatata

SEQ ID NO: 179261 - DNA, 25 bp, Probe Sequence
catctgcaaccatgtgtgtcctata

SEQ ID NO: 179262 - DNA, 25 bp, Probe Sequence
catctgaaccagaagctgacgctga

SEQ ID NO: 179263 - DNA, 25 bp, Probe Sequence
ctgctgagtcaagtggctgatctga

SEQ ID NO: 179264 - DNA, 25 bp, Probe Sequence
catctggtgaatgccatggagaacg

SEQ ID NO: 179265 - DNA, 25 bp, Probe Sequence
catctttatatgcttgtgtaacagg

SEQ ID NO: 179266 - DNA, 25 bp, Probe Sequence
catcttgttcatcttgttcagtcct

SEQ ID NO: 179267 - DNA, 25 bp, Probe Sequence
catctgtgtttcaagtggggctcgc

SEQ ID NO: 179268 - DNA, 25 bp, Probe Sequence
catcgtcatgtcctggggcaggggc

SEQ ID NO: 179269 - DNA, 25 bp, Probe Sequence
catctgcgtggagtgcggggagggc

SEQ ID NO: 179270 - DNA, 25 bp, Probe Sequence
catcgtgatggactccggtgacggg

SEQ ID NO: 179271 - DNA, 25 bp, Probe Sequence
catcatgtgcatggaccacctggag

SEQ ID NO: 179272 - DNA, 25 bp, Probe Sequence
catcattgacattgcacccatggac

SEQ ID NO: 179273 - DNA, 25 bp, Probe Sequence
catcattggatggaccgctgcaggg

SEQ ID NO: 179274 - DNA, 25 bp, Probe Sequence
catcaagtgatcaaaggccagacgc

SEQ ID NO: 179275 - DNA, 25 bp, Probe Sequence
catcacctgcacatgggacagaccg

SEQ ID NO: 179276 - DNA, 25 bp, Probe Sequence
catcacctggctttcagagctacta

SEQ ID NO: 179277 - DNA, 25 bp, Probe Sequence
catcaactggattgacaaaatcatg

SEQ ID NO: 179278 - DNA, 25 bp, Probe Sequence
catctagctatctatgacctacctg

SEQ ID NO: 179279 - DNA, 25 bp, Probe Sequence
catctcatcatatcatatctcatca

SEQ ID NO: 179280 - DNA, 25 bp, Probe Sequence
catcatcatctctgcaagactcatc

SEQ ID NO: 179281 - DNA, 25 bp, Probe Sequence
catactgcataggctagaatctcca

SEQ ID NO: 179282 - DNA, 25 bp, Probe Sequence
catcaacagctcctacaatgtagca

SEQ ID NO: 179283 - DNA, 25 bp, Probe Sequence
cataaaccacgagagtgacagtcat

SEQ ID NO: 179284 - DNA, 25 bp, Probe Sequence
catcccattcaagccaggcacattt

SEQ ID NO: 179285 - DNA, 25 bp, Probe Sequence
cattccacaagagctaaacacttca

SEQ ID NO: 179286 - DNA, 25 bp, Probe Sequence
cttctcaggtggctttagacctcaa

SEQ ID NO: 179287 - DNA, 25 bp, Probe Sequence
cttgtctcggcccatttgaagacca

SEQ ID NO: 179288 - DNA, 25 bp, Probe Sequence
ctgtttaggcccactaaggcaaaat

SEQ ID NO: 179289 - DNA, 25 bp, Probe Sequence
ctgtttaaacctgtattaataggca

SEQ ID NO: 179290 - DNA, 25 bp, Probe Sequence
cttgctgtaaatctactactaaaac

SEQ ID NO: 179291 - DNA, 25 bp, Probe Sequence
ctagtgctaaataatagtactgaaa

SEQ ID NO: 179292 - DNA, 25 bp, Probe Sequence
catagctgaaaattacttaaggaag

SEQ ID NO: 179293 - DNA, 25 bp, Probe Sequence
cataaaacaccatcattaagaataa

SEQ ID NO: 179294 - DNA, 25 bp, Probe Sequence
cataataagacctcatctcagagaa

SEQ ID NO: 179295 - DNA, 25 bp, Probe Sequence
ctaggctaagtatgcacctaaatat

SEQ ID NO: 179296 - DNA, 25 bp, Probe Sequence
catactgtaagtttagcctataggt

SEQ ID NO: 179297 - DNA, 25 bp, Probe Sequence
catcactgacagaaataagcactct

SEQ ID NO: 179298 - DNA, 25 bp, Probe Sequence
catctctggccatatacagaccgaa

SEQ ID NO: 179299 - DNA, 25 bp, Probe Sequence
catcgtgggcatcattgctggcctg

SEQ ID NO: 179300 - DNA, 25 bp, Probe Sequence
catcgtgggcatcattgctggcctg

SEQ ID NO: 179301 - DNA, 25 bp, Probe Sequence
catcgtgggcatcattgctggcctg

SEQ ID NO: 179302 - DNA, 25 bp, Probe Sequence
catcgtgggcatcattgctggcctg

SEQ ID NO: 179303 - DNA, 25 bp, Probe Sequence
catcgtggagatctttggcagcgcc

SEQ ID NO: 179304 - DNA, 25 bp, Probe Sequence
catctgcttggtggttctggatgcc

SEQ ID NO: 179305 - DNA, 25 bp, Probe Sequence
catcgcttggcctatgacaggtcac

SEQ ID NO: 179306 - DNA, 25 bp, Probe Sequence
catactatggctcattcgttacccg

SEQ ID NO: 179307 - DNA, 25 bp, Probe Sequence
catactcattgcctactttaacacc

SEQ ID NO: 179308 - DNA, 25 bp, Probe Sequence
catctaattgttacttctaactcat

SEQ ID NO: 179309 - DNA, 25 bp, Probe Sequence
cattatttgttgtcctttactactg

SEQ ID NO: 179310 - DNA, 25 bp, Probe Sequence
catcattggttctgtgtttcctacg

SEQ ID NO: 179311 - DNA, 25 bp, Probe Sequence
catcttggttgttgtgcttgtcctg

SEQ ID NO: 179312 - DNA, 25 bp, Probe Sequence
catagtgtcttgttatggtgccccc

SEQ ID NO: 179313 - DNA, 25 bp, Probe Sequence
catcagtgtttgagtcagtccccag

SEQ ID NO: 179314 - DNA, 25 bp, Probe Sequence
catctggtttattactctcacccat

SEQ ID NO: 179315 - DNA, 25 bp, Probe Sequence
catcaggtatataccagaccccctt

SEQ ID NO: 179316 - DNA, 25 bp, Probe Sequence
catctggaaggagcaactaccgctt

SEQ ID NO: 179317 - DNA, 25 bp, Probe Sequence
catctgcaaagatccaactttaaat

SEQ ID NO: 179318 - DNA, 25 bp, Probe Sequence
catctgctatcacttatctttttaa

SEQ ID NO: 179319 - DNA, 25 bp, Probe Sequence
catctgccatcacttagcttactaa

SEQ ID NO: 179320 - DNA, 25 bp, Probe Sequence
catctctatcacatggtgtttgaac

SEQ ID NO: 179321 - DNA, 25 bp, Probe Sequence
catcccaccactagctggttgaagt

SEQ ID NO: 179322 - DNA, 25 bp, Probe Sequence
catcaccacctcaatctgacataga

SEQ ID NO: 179323 - DNA, 25 bp, Probe Sequence
catacagatgcccaatctggtaaac

SEQ ID NO: 179324 - DNA, 25 bp, Probe Sequence
catcacagatgcaacttcttgtaat

SEQ ID NO: 179325 - DNA, 25 bp, Probe Sequence
catcggctgcattgtggtggataat

SEQ ID NO: 179326 - DNA, 25 bp, Probe Sequence
catcgtgcgccagtgcgtggaggag

SEQ ID NO: 179327 - DNA, 25 bp, Probe Sequence
catcgctggccatgagagtggagag

SEQ ID NO: 179328 - DNA, 25 bp, Probe Sequence
cataatgatgccaatgggtggaatg

SEQ ID NO: 179329 - DNA, 25 bp, Probe Sequence
catacaatggaacatggaaagcatc

SEQ ID NO: 179330 - DNA, 25 bp, Probe Sequence
catcaaataattctggaacaacaaa

SEQ ID NO: 179331 - DNA, 25 bp, Probe Sequence
cattaataattcttggtgacacgaa

SEQ ID NO: 179332 - DNA, 25 bp, Probe Sequence
catagaatacagttgtttccaaaag

SEQ ID NO: 179333 - DNA, 25 bp, Probe Sequence
catagaatatagtttgtgtgtcaca

SEQ ID NO: 179334 - DNA, 25 bp, Probe Sequence
catcatatcatatctcatcatttta

SEQ ID NO: 179335 - DNA, 25 bp, Probe Sequence
catcatcctcgctatcatattcatt

SEQ ID NO: 179336 - DNA, 25 bp, Probe Sequence
catcgtctcagctcatttatcaagt

SEQ ID NO: 179337 - DNA, 25 bp, Probe Sequence
catcgtgcacatcagcatcttctac

SEQ ID NO: 179338 - DNA, 25 bp, Probe Sequence
catcagtgactggtatatcttcatc

SEQ ID NO: 179339 - DNA, 25 bp, Probe Sequence
catcgtggctgctatgacccagcat

SEQ ID NO: 179340 - DNA, 25 bp, Probe Sequence
catctgtgagatgaggctagcgatt

SEQ ID NO: 179341 - DNA, 25 bp, Probe Sequence
catctgccatgatggcctcctatta

SEQ ID NO: 179342 - DNA, 25 bp, Probe Sequence
catctctagagaggacatccctgct

SEQ ID NO: 179343 - DNA, 25 bp, Probe Sequence
catcttgggagatgactcctcttca

SEQ ID NO: 179344 - DNA, 25 bp, Probe Sequence
catcttctagatatgatctccattt

SEQ ID NO: 179345 - DNA, 25 bp, Probe Sequence
catcttgtcagtagcattccgcgag

SEQ ID NO: 179346 - DNA, 25 bp, Probe Sequence
cgtgtaactcacagccgaagcactc

SEQ ID NO: 179347 - DNA, 25 bp, Probe Sequence
cttcatcaactggattgacaaaatc

SEQ ID NO: 179348 - DNA, 25 bp, Probe Sequence
cttcctacaggggccaaaaccagag

SEQ ID NO: 179349 - DNA, 25 bp, Probe Sequence
cttccttcagcggtacttacaccaa

SEQ ID NO: 179350 - DNA, 25 bp, Probe Sequence
catttctgtcagtgggattaaccat

SEQ ID NO: 179351 - DNA, 25 bp, Probe Sequence
catctttgttgacccggtacttcat

SEQ ID NO: 179352 - DNA, 25 bp, Probe Sequence
catctttctagatacccaacttctc

SEQ ID NO: 179353 - DNA, 25 bp, Probe Sequence
catctttcaagataacccgtggaat

SEQ ID NO: 179354 - DNA, 25 bp, Probe Sequence
cattattccaatgatacccaacagt

SEQ ID NO: 179355 - DNA, 25 bp, Probe Sequence
catatgatttacatttcctcaccat

SEQ ID NO: 179356 - DNA, 25 bp, Probe Sequence
cttgaacttcacatttcccacattg

SEQ ID NO: 179357 - DNA, 25 bp, Probe Sequence
catctgaaattccttttgacacctg

SEQ ID NO: 179358 - DNA, 25 bp, Probe Sequence
catcaatgaccccttcattgacctc

SEQ ID NO: 179359 - DNA, 25 bp, Probe Sequence
catctacacgccattcactgaggac

SEQ ID NO: 179360 - DNA, 25 bp, Probe Sequence
catcttgccccaattcttaggattt

SEQ ID NO: 179361 - DNA, 25 bp, Probe Sequence
catctgtgacacctttttaggttaa

SEQ ID NO: 179362 - DNA, 25 bp, Probe Sequence
catctggagccgagccttaggcttc

SEQ ID NO: 179363 - DNA, 25 bp, Probe Sequence
catcaagtgccgagcttccggcttg

SEQ ID NO: 179364 - DNA, 25 bp, Probe Sequence
catcaagttcaaatgctactctgtg

SEQ ID NO: 179365 - DNA, 25 bp, Probe Sequence
catcatgggtaaatgtcttagtgtc

SEQ ID NO: 179366 - DNA, 25 bp, Probe Sequence
catctgggtgccttttaggagtcca

SEQ ID NO: 179367 - DNA, 25 bp, Probe Sequence
catctggcgaggtcatttactgagt

SEQ ID NO: 179368 - DNA, 25 bp, Probe Sequence
catctcgtaatgcctcttgacttgg

SEQ ID NO: 179369 - DNA, 25 bp, Probe Sequence
cattcagtgaatccccagtttgggg

SEQ ID NO: 179370 - DNA, 25 bp, Probe Sequence
cattgaatagaagccagtttgggat

SEQ ID NO: 179371 - DNA, 25 bp, Probe Sequence
catctcaataaacacattttggata

SEQ ID NO: 179372 - DNA, 25 bp, Probe Sequence
catcaaaaacactactccttttcct

SEQ ID NO: 179373 - DNA, 25 bp, Probe Sequence
catcaaattgcccttggacttttcc

SEQ ID NO: 179374 - DNA, 25 bp, Probe Sequence
catctaattgccttgtcgtcattaa

SEQ ID NO: 179375 - DNA, 25 bp, Probe Sequence
catctacaatccctccgttagatta

SEQ ID NO: 179376 - DNA, 25 bp, Probe Sequence
cattacaacccttctggttattccg

SEQ ID NO: 179377 - DNA, 25 bp, Probe Sequence
cataacttttctactggtgtaattt

SEQ ID NO: 179378 - DNA, 25 bp, Probe Sequence
cataagttttttggtgtgttttctg

SEQ ID NO: 179379 - DNA, 25 bp, Probe Sequence
cattatgatttgagtggtgcttttc

SEQ ID NO: 179380 - DNA, 25 bp, Probe Sequence
catctgtgtcagtccagtgcgtttt

SEQ ID NO: 179381 - DNA, 25 bp, Probe Sequence
catctggtaccttggctggcattat

SEQ ID NO: 179382 - DNA, 25 bp, Probe Sequence
catcaagctaccaatgactttcttc

SEQ ID NO: 179383 - DNA, 25 bp, Probe Sequence
cattagtaactgcacactatttccc

SEQ ID NO: 179384 - DNA, 25 bp, Probe Sequence
catacagcacaactgcaaattaata

SEQ ID NO: 179385 - DNA, 25 bp, Probe Sequence
catacaactgtctcacattaaagct

SEQ ID NO: 179386 - DNA, 25 bp, Probe Sequence
catcagaatctgtcggccaaaagcg

SEQ ID NO: 179387 - DNA, 25 bp, Probe Sequence
catcagaatctgtcggccaaaagcg

SEQ ID NO: 179388 - DNA, 25 bp, Probe Sequence
catcacaatctatgacgaggaagcg

SEQ ID NO: 179389 - DNA, 25 bp, Probe Sequence
catcatccatcttaattggcataag

SEQ ID NO: 179390 - DNA, 25 bp, Probe Sequence
catctgctttataataatgctcaag

SEQ ID NO: 179391 - DNA, 25 bp, Probe Sequence
catctgctgcttcttattgatagat

SEQ ID NO: 179392 - DNA, 25 bp, Probe Sequence
catctcattgtgcttcgtatcagtc

SEQ ID NO: 179393 - DNA, 25 bp, Probe Sequence
cataatcatggtctccctgcatgtc

SEQ ID NO: 179394 - DNA, 25 bp, Probe Sequence
catcaatgcagagcactccaggctt

SEQ ID NO: 179395 - DNA, 25 bp, Probe Sequence
catcatgatcagcgtcatcgtggtt

SEQ ID NO: 179396 - DNA, 25 bp, Probe Sequence
catcatcagctggggatcgggctgt

SEQ ID NO: 179397 - DNA, 25 bp, Probe Sequence
catcacagatgctgtgaaggtcgtg

SEQ ID NO: 179398 - DNA, 25 bp, Probe Sequence
catcatgaacaccttcagcgtcgtg

SEQ ID NO: 179399 - DNA, 25 bp, Probe Sequence
catcaacagcacagacagcgagcgc

SEQ ID NO: 179400 - DNA, 25 bp, Probe Sequence
catcaacagcacagacagcgagcgc

SEQ ID NO: 179401 - DNA, 25 bp, Probe Sequence
catctcaagtcaagtcactggtctg

SEQ ID NO: 179402 - DNA, 25 bp, Probe Sequence
catctgacagtctctacgctgtgaa

SEQ ID NO: 179403 - DNA, 25 bp, Probe Sequence
catcatggggccctgagccatgtgc

SEQ ID NO: 179404 - DNA, 25 bp, Probe Sequence
catctggtgactcatgatgcccgca

SEQ ID NO: 179405 - DNA, 25 bp, Probe Sequence
catctggtgactcatgatgcccgca

SEQ ID NO: 179406 - DNA, 25 bp, Probe Sequence
catctgtgagatgctgtggcccagc

SEQ ID NO: 179407 - DNA, 25 bp, Probe Sequence
catatgcagaggacgctgtgcccac

SEQ ID NO: 179408 - DNA, 25 bp, Probe Sequence
catataggtgagggtctccacattt

SEQ ID NO: 179409 - DNA, 25 bp, Probe Sequence
catacagggtgtcatccttctttcc

SEQ ID NO: 179410 - DNA, 25 bp, Probe Sequence
catactagtttatggcttctttcac

SEQ ID NO: 179411 - DNA, 25 bp, Probe Sequence
catataattcttttggctttgaaac

SEQ ID NO: 179412 - DNA, 25 bp, Probe Sequence
catttttcattatttgtactaaaca

SEQ ID NO: 179413 - DNA, 25 bp, Probe Sequence
cattattacttttggtatcccagaa

SEQ ID NO: 179414 - DNA, 25 bp, Probe Sequence
catttttgttattggcaagggcaac

SEQ ID NO: 179415 - DNA, 25 bp, Probe Sequence
cattaattttgatttcaaatggaag

SEQ ID NO: 179416 - DNA, 25 bp, Probe Sequence
cattaaattctaacccagggcatgg

SEQ ID NO: 179417 - DNA, 25 bp, Probe Sequence
catctcaatttctaataccggttgt

SEQ ID NO: 179418 - DNA, 25 bp, Probe Sequence
catctctgtttcaaatccacgactc

SEQ ID NO: 179419 - DNA, 25 bp, Probe Sequence
catcactctgattcaaatgcctctg

SEQ ID NO: 179420 - DNA, 25 bp, Probe Sequence
catcagtcgcaatgattcagctcgc

SEQ ID NO: 179421 - DNA, 25 bp, Probe Sequence
catcatggactatatccagcctgca

SEQ ID NO: 179422 - DNA, 25 bp, Probe Sequence
catctatatttctatatcatgcctg

SEQ ID NO: 179423 - DNA, 25 bp, Probe Sequence
catcttcattgttagtcctcaactt

SEQ ID NO: 179424 - DNA, 25 bp, Probe Sequence
catcttcctggatgcatcgtcagtc

SEQ ID NO: 179425 - DNA, 25 bp, Probe Sequence
ctttccggaggctaacagacctggg

SEQ ID NO: 179426 - DNA, 25 bp, Probe Sequence
gaattatcggaagccctgaccaggc

SEQ ID NO: 179427 - DNA, 25 bp, Probe Sequence
catatagatcgttacaaccgaacag

SEQ ID NO: 179428 - DNA, 25 bp, Probe Sequence
cattaaagtgattcacccgaagctg

SEQ ID NO: 179429 - DNA, 25 bp, Probe Sequence
cattaaagtgattcacccgaagctg

SEQ ID NO: 179430 - DNA, 25 bp, Probe Sequence
catctttcgagatcctcggagcagc

SEQ ID NO: 179431 - DNA, 25 bp, Probe Sequence
catcatttagactcacacgctgtgg

SEQ ID NO: 179432 - DNA, 25 bp, Probe Sequence
catctttcagattcacacaagcagg

SEQ ID NO: 179433 - DNA, 25 bp, Probe Sequence
catctttcagattcacacaagcagg

SEQ ID NO: 179434 - DNA, 25 bp, Probe Sequence
catctgttgaaatgctcaagacttc

SEQ ID NO: 179435 - DNA, 25 bp, Probe Sequence
catatgcctaaatccaagagctaaa

SEQ ID NO: 179436 - DNA, 25 bp, Probe Sequence
catacctgtaaatcatggtccacaa

SEQ ID NO: 179437 - DNA, 25 bp, Probe Sequence
catacacttaagaaatttgagcaga

SEQ ID NO: 179438 - DNA, 25 bp, Probe Sequence
ctacttaagggaataggccaggctc

SEQ ID NO: 179439 - DNA, 25 bp, Probe Sequence
ctcagtcaaaggcattcgccacgac

SEQ ID NO: 179440 - DNA, 25 bp, Probe Sequence
ctcagtcaataaaggatccgggccc

SEQ ID NO: 179441 - DNA, 25 bp, Probe Sequence
catcatgtctgttagggaaagcagg

SEQ ID NO: 179442 - DNA, 25 bp, Probe Sequence
catcagcatctgcaatgggccaaac

SEQ ID NO: 179443 - DNA, 25 bp, Probe Sequence
catagatgcttagtccctcatgcaa

SEQ ID NO: 179444 - DNA, 25 bp, Probe Sequence
catctaggctgagtccagtggcata

SEQ ID NO: 179445 - DNA, 25 bp, Probe Sequence
catctacctggagtcagtggccatc

SEQ ID NO: 179446 - DNA, 25 bp, Probe Sequence
catctccctggagggcaagcctttg

SEQ ID NO: 179447 - DNA, 25 bp, Probe Sequence
cattaacagaaggacaaacttaggg

SEQ ID NO: 179448 - DNA, 25 bp, Probe Sequence
cattaaaggaactagaggctctggg

SEQ ID NO: 179449 - DNA, 25 bp, Probe Sequence
catttgggttaatatggctcttcat

SEQ ID NO: 179450 - DNA, 25 bp, Probe Sequence
catagtggaatatattacgccttaa

SEQ ID NO: 179451 - DNA, 25 bp, Probe Sequence
catttggtcaaatgtaatcacttaa

SEQ ID NO: 179452 - DNA, 25 bp, Probe Sequence
catagtttaacacgtggtccttttg

SEQ ID NO: 179453 - DNA, 25 bp, Probe Sequence
catactatttacatatgtgtagctt

SEQ ID NO: 179454 - DNA, 25 bp, Probe Sequence
catacattctcatacatttaacttg

SEQ ID NO: 179455 - DNA, 25 bp, Probe Sequence
cataatctgttaacattccaaagtg

SEQ ID NO: 179456 - DNA, 25 bp, Probe Sequence
catctcacgtctaccttacaaattc

SEQ ID NO: 179457 - DNA, 25 bp, Probe Sequence
catctcggacatccagctaacacta

SEQ ID NO: 179458 - DNA, 25 bp, Probe Sequence
catctttcacagcacaacacactag

SEQ ID NO: 179459 - DNA, 25 bp, Probe Sequence
catcttctaacccatcgcaaagagg

SEQ ID NO: 179460 - DNA, 25 bp, Probe Sequence
catctttgaatcgctgtactacagg

SEQ ID NO: 179461 - DNA, 25 bp, Probe Sequence
catttgtggtctgactccttggggt

SEQ ID NO: 179462 - DNA, 25 bp, Probe Sequence
catattggtattcactaatctggga

SEQ ID NO: 179463 - DNA, 25 bp, Probe Sequence
catcattggtacccacttgctttta

SEQ ID NO: 179464 - DNA, 25 bp, Probe Sequence
catctagcagtcagttcttgttttc

SEQ ID NO: 179465 - DNA, 25 bp, Probe Sequence
catctatcactggcagttctgtttt

SEQ ID NO: 179466 - DNA, 25 bp, Probe Sequence
catctgatatcagcgactaatattt

SEQ ID NO: 179467 - DNA, 25 bp, Probe Sequence
catctttacccccaagactttattg

SEQ ID NO: 179468 - DNA, 25 bp, Probe Sequence
catacttacctagtgaaacttttct

SEQ ID NO: 179469 - DNA, 25 bp, Probe Sequence
catattttctctaggcttttttcct

SEQ ID NO: 179470 - DNA, 25 bp, Probe Sequence
catttttacttagattttctcctag

SEQ ID NO: 179471 - DNA, 25 bp, Probe Sequence
catcttttacctggggattattaca

SEQ ID NO: 179472 - DNA, 25 bp, Probe Sequence
catcttgttgactggaggcatctag

SEQ ID NO: 179473 - DNA, 25 bp, Probe Sequence
catcttgaatccgggaggtggaggt

SEQ ID NO: 179474 - DNA, 25 bp, Probe Sequence
catctaccccgccatgagtatggga

SEQ ID NO: 179475 - DNA, 25 bp, Probe Sequence
catctaccgcgggagatttcccaat

SEQ ID NO: 179476 - DNA, 25 bp, Probe Sequence
catcttccacaaagcagtttccaca

SEQ ID NO: 179477 - DNA, 25 bp, Probe Sequence
catctcaccaacagactgtggctcc

SEQ ID NO: 179478 - DNA, 25 bp, Probe Sequence
catctactcacacttcacgtgtgcc

SEQ ID NO: 179479 - DNA, 25 bp, Probe Sequence
catctttgacactctgcagactgct

SEQ ID NO: 179480 - DNA, 25 bp, Probe Sequence
catctcctacactgcgcagatattt

SEQ ID NO: 179481 - DNA, 25 bp, Probe Sequence
catctcctaccacctggtgcagaag

SEQ ID NO: 179482 - DNA, 25 bp, Probe Sequence
catcatcagcgcgcaagagggcaga

SEQ ID NO: 179483 - DNA, 25 bp, Probe Sequence
catctcactgcccaaggtctgtgat

SEQ ID NO: 179484 - DNA, 25 bp, Probe Sequence
catcttcattcataggtctgcgctg

SEQ ID NO: 179485 - DNA, 25 bp, Probe Sequence
catcttatttgtgcagtctgactac

SEQ ID NO: 179486 - DNA, 25 bp, Probe Sequence
catcttatttgtgcagtctgactac

SEQ ID NO: 179487 - DNA, 25 bp, Probe Sequence
catcttatttgtgcagtctgactac

SEQ ID NO: 179488 - DNA, 25 bp, Probe Sequence
catcagtttttgacccaactaacct

SEQ ID NO: 179489 - DNA, 25 bp, Probe Sequence
catcactattttaaacatatccagt

SEQ ID NO: 179490 - DNA, 25 bp, Probe Sequence
catctctttttatattatgccgctt

SEQ ID NO: 179491 - DNA, 25 bp, Probe Sequence
cattcattgggtctatttgcctaat

SEQ ID NO: 179492 - DNA, 25 bp, Probe Sequence
cattctgtaggtaaaattcttaagg

SEQ ID NO: 179493 - DNA, 25 bp, Probe Sequence
cattggtcaaactcaattttagaaa

SEQ ID NO: 179494 - DNA, 25 bp, Probe Sequence
cattacctacccacatcttataaaa

SEQ ID NO: 179495 - DNA, 25 bp, Probe Sequence
catctacttaaggcccagttaatat

SEQ ID NO: 179496 - DNA, 25 bp, Probe Sequence
catcttcttgaagtcgcctttaggg

SEQ ID NO: 179497 - DNA, 25 bp, Probe Sequence
catctctctttactgccagtgatta

SEQ ID NO: 179498 - DNA, 25 bp, Probe Sequence
catctctcagattacttcattgttc

SEQ ID NO: 179499 - DNA, 25 bp, Probe Sequence
catcttcagttgtctctgatgcagc

SEQ ID NO: 179500 - DNA, 25 bp, Probe Sequence
catcatataatttgctagtcatccc

SEQ ID NO: 179501 - DNA, 25 bp, Probe Sequence
catacacatagaagctgagtctctg

SEQ ID NO: 179502 - DNA, 25 bp, Probe Sequence
catctcctcagagctgagtttcctg

SEQ ID NO: 179503 - DNA, 25 bp, Probe Sequence
catctcccagaggcatttggtctgt

SEQ ID NO: 179504 - DNA, 25 bp, Probe Sequence
catcttgacgaggctgcggtgtctg

SEQ ID NO: 179505 - DNA, 25 bp, Probe Sequence
catcagatatgcgggtccagtgtca

SEQ ID NO: 179506 - DNA, 25 bp, Probe Sequence
catcaattctgcagctctcagtttg

SEQ ID NO: 179507 - DNA, 25 bp, Probe Sequence
cataagcattgggccatagtttgtt

SEQ ID NO: 179508 - DNA, 25 bp, Probe Sequence
catagggtcactggaatgctttgtg

SEQ ID NO: 179509 - DNA, 25 bp, Probe Sequence
catagaggctcaaccaatataggat

SEQ ID NO: 179510 - DNA, 25 bp, Probe Sequence
cataaggccatttatgttcagcagc

SEQ ID NO: 179511 - DNA, 25 bp, Probe Sequence
catcatcgcgccaaattttgcgctc

SEQ ID NO: 179512 - DNA, 25 bp, Probe Sequence
catatactgtctctgtttgcatcat

SEQ ID NO: 179513 - DNA, 25 bp, Probe Sequence
catcatccctccctgatattgtatt

SEQ ID NO: 179514 - DNA, 25 bp, Probe Sequence
catcaccccctttgcaatatatttt

SEQ ID NO: 179515 - DNA, 25 bp, Probe Sequence
catcagcctccttaccaaatatgga

SEQ ID NO: 179516 - DNA, 25 bp, Probe Sequence
catcacctcacttaaacaattataa

SEQ ID NO: 179517 - DNA, 25 bp, Probe Sequence
catctactcattcattcataatcta

SEQ ID NO: 179518 - DNA, 25 bp, Probe Sequence
catcatgtctatagttcctgagatt

SEQ ID NO: 179519 - DNA, 25 bp, Probe Sequence
catcatggtttggtccaggttctgt

SEQ ID NO: 179520 - DNA, 25 bp, Probe Sequence
catattcatttgtatccaaggtgct

SEQ ID NO: 179521 - DNA, 25 bp, Probe Sequence
catattcatttgtatccaaggtgct

SEQ ID NO: 179522 - DNA, 25 bp, Probe Sequence
catcatgtgcatctcctcataaggg

SEQ ID NO: 179523 - DNA, 25 bp, Probe Sequence
catcagtatcccagcaggagcagcg

SEQ ID NO: 179524 - DNA, 25 bp, Probe Sequence
cataatctcaccacaggtgccacgc

SEQ ID NO: 179525 - DNA, 25 bp, Probe Sequence
cataatccacgctcatcttgcaaag

SEQ ID NO: 179526 - DNA, 25 bp, Probe Sequence
catacatcatcaggtcgcacgtgaa

SEQ ID NO: 179527 - DNA, 25 bp, Probe Sequence
catagccagcatgtcctcaatgaac

SEQ ID NO: 179528 - DNA, 25 bp, Probe Sequence
catcatccacaccttaacatgaaca

SEQ ID NO: 179529 - DNA, 25 bp, Probe Sequence
catcatcatctcttttacaccaaaa

SEQ ID NO: 179530 - DNA, 25 bp, Probe Sequence
catcttcatcttctagctgggacaa

SEQ ID NO: 179531 - DNA, 25 bp, Probe Sequence
catcttcctctcagaaggatgaaaa

SEQ ID NO: 179532 - DNA, 25 bp, Probe Sequence
catctttcttccggacaatgaaata

SEQ ID NO: 179533 - DNA, 25 bp, Probe Sequence
ccctatttcgccgtcctataatagg

SEQ ID NO: 179534 - DNA, 25 bp, Probe Sequence
cgttgttacccagtcctacaatggg

SEQ ID NO: 179535 - DNA, 25 bp, Probe Sequence
cattagttaccttctgcattacatt

SEQ ID NO: 179536 - DNA, 25 bp, Probe Sequence
cttgaaggaacttgccattccttgc

SEQ ID NO: 179537 - DNA, 25 bp, Probe Sequence
catatggcgtaaccttcagtccttc

SEQ ID NO: 179538 - DNA, 25 bp, Probe Sequence
cataggggcatatgctgtagtccca

SEQ ID NO: 179539 - DNA, 25 bp, Probe Sequence
cataggaggctctcgatagcacctg

SEQ ID NO: 179540 - DNA, 25 bp, Probe Sequence
catagaaggtcatgcagatgatctg

SEQ ID NO: 179541 - DNA, 25 bp, Probe Sequence
catagagctgtgtctgtatacactg

SEQ ID NO: 179542 - DNA, 25 bp, Probe Sequence
cataatccttctaatagccatcctc

SEQ ID NO: 179543 - DNA, 25 bp, Probe Sequence
cataactttcactaacacacacata

SEQ ID NO: 179544 - DNA, 25 bp, Probe Sequence
cataatttcaactagatcaagacat

SEQ ID NO: 179545 - DNA, 25 bp, Probe Sequence
catcagatttatactagctatatgg

SEQ ID NO: 179546 - DNA, 25 bp, Probe Sequence
catcatttccatcccagtcaatgtc

SEQ ID NO: 179547 - DNA, 25 bp, Probe Sequence
catctttccagacattaacttacac

SEQ ID NO: 179548 - DNA, 25 bp, Probe Sequence
catatattctagatattaaccccat

SEQ ID NO: 179549 - DNA, 25 bp, Probe Sequence
cattttctacagttttttccgcaga

SEQ ID NO: 179550 - DNA, 25 bp, Probe Sequence
catcttgcctacttgttctttatta

SEQ ID NO: 179551 - DNA, 25 bp, Probe Sequence
catcttcttagtggttttgtgctta

SEQ ID NO: 179552 - DNA, 25 bp, Probe Sequence
catcttattgttggtaatagtgctt

SEQ ID NO: 179553 - DNA, 25 bp, Probe Sequence
catcagtaatgtattctatctctct

SEQ ID NO: 179554 - DNA, 25 bp, Probe Sequence
catagtaatcctgtttccactttgt

SEQ ID NO: 179555 - DNA, 25 bp, Probe Sequence
catcattactaatttttccctcttt

SEQ ID NO: 179556 - DNA, 25 bp, Probe Sequence
catttatcttttatagaccattttc

SEQ ID NO: 179557 - DNA, 25 bp, Probe Sequence
catttcactcttcagtgttcctgtt

SEQ ID NO: 179558 - DNA, 25 bp, Probe Sequence
catttcactcttcagtgttcctgtt

SEQ ID NO: 179559 - DNA, 25 bp, Probe Sequence
catttcactcttcagtgttcctgtt

SEQ ID NO: 179560 - DNA, 25 bp, Probe Sequence
catttcactcttcagtgttcctgtt

SEQ ID NO: 179561 - DNA, 25 bp, Probe Sequence
catttcactcttcagtgttcctgtt

SEQ ID NO: 179562 - DNA, 25 bp, Probe Sequence
catattaacttgtgctgtcgccttt

SEQ ID NO: 179563 - DNA, 25 bp, Probe Sequence
catataagacctctgtatctgcctt

SEQ ID NO: 179564 - DNA, 25 bp, Probe Sequence
catcttcagagccgggtactcactg

SEQ ID NO: 179565 - DNA, 25 bp, Probe Sequence
catcttcatcgaccggaagcgcacg

SEQ ID NO: 179566 - DNA, 25 bp, Probe Sequence
catcttaagagattggaagcaacct

SEQ ID NO: 179567 - DNA, 25 bp, Probe Sequence
cattcgcaaggagtggaaaccacca

SEQ ID NO: 179568 - DNA, 25 bp, Probe Sequence
catatcccaaggtagaaaccacgca

SEQ ID NO: 179569 - DNA, 25 bp, Probe Sequence
catacatccagtgaaaatacccctc

SEQ ID NO: 179570 - DNA, 25 bp, Probe Sequence
ctacaggcccatgaattacttcctc

SEQ ID NO: 179571 - DNA, 25 bp, Probe Sequence
catacttgccctgaatcaatttacc

SEQ ID NO: 179572 - DNA, 25 bp, Probe Sequence
cataaaatgcttcaacaatcattca

SEQ ID NO: 179573 - DNA, 25 bp, Probe Sequence
cataagacatcttcaagacatcttt

SEQ ID NO: 179574 - DNA, 25 bp, Probe Sequence
catcatttcatttaagagatcattt

SEQ ID NO: 179575 - DNA, 25 bp, Probe Sequence
catatctcaaagtaaagtcattaac

SEQ ID NO: 179576 - DNA, 25 bp, Probe Sequence
cattaagtgcagaaataactaagac

SEQ ID NO: 179577 - DNA, 25 bp, Probe Sequence
cattagatgatgctgaaagaccaag

SEQ ID NO: 179578 - DNA, 25 bp, Probe Sequence
cattgcaggggggagcagactctca

SEQ ID NO: 179579 - DNA, 25 bp, Probe Sequence
ctgtctggggggtggccatttaggg

SEQ ID NO: 179580 - DNA, 25 bp, Probe Sequence
cttggtggggtttggatttgatagc

SEQ ID NO: 179581 - DNA, 25 bp, Probe Sequence
cttggctgggtttagtgtactgatc

SEQ ID NO: 179582 - DNA, 25 bp, Probe Sequence
cttggtggacttgcagttctcgtcc

SEQ ID NO: 179583 - DNA, 25 bp, Probe Sequence
cattgatggacacttaagatgattc

SEQ ID NO: 179584 - DNA, 25 bp, Probe Sequence
catcttggtactactagatgtcttt

SEQ ID NO: 179585 - DNA, 25 bp, Probe Sequence
catcatttggtgcttagtctttgta

SEQ ID NO: 179586 - DNA, 25 bp, Probe Sequence
catcttctgatgtgttggtttttga

SEQ ID NO: 179587 - DNA, 25 bp, Probe Sequence
catcatcatctgcttggtggttctg

SEQ ID NO: 179588 - DNA, 25 bp, Probe Sequence
catcttctggcttgccgggattgct

SEQ ID NO: 179589 - DNA, 25 bp, Probe Sequence
catcttctggcttgactggatggaa

SEQ ID NO: 179590 - DNA, 25 bp, Probe Sequence
catattagtgcttgaccctggcagg

SEQ ID NO: 179591 - DNA, 25 bp, Probe Sequence
catattgtggcctaccccaaatgga

SEQ ID NO: 179592 - DNA, 25 bp, Probe Sequence
catttgtcccaagtgccaaagaagc

SEQ ID NO: 179593 - DNA, 25 bp, Probe Sequence
catcaggttctcagtcccaaggaga

SEQ ID NO: 179594 - DNA, 25 bp, Probe Sequence
catcaaggtatcatatcccaagtac

SEQ ID NO: 179595 - DNA, 25 bp, Probe Sequence
catcaaggatagctagaggagagtg

SEQ ID NO: 179596 - DNA, 25 bp, Probe Sequence
catcaaggctacaattgctggtggt

SEQ ID NO: 179597 - DNA, 25 bp, Probe Sequence
catcaaggctggatacggttgactt

SEQ ID NO: 179598 - DNA, 25 bp, Probe Sequence
catcatggcgttgatacggttgact

SEQ ID NO: 179599 - DNA, 25 bp, Probe Sequence
catcagagagtttgtcaccagttaa

SEQ ID NO: 179600 - DNA, 25 bp, Probe Sequence
catcatggatttcgcctaagtgata

SEQ ID NO: 179601 - DNA, 25 bp, Probe Sequence
catcagtatggccgcctacgtgtca

SEQ ID NO: 179602 - DNA, 25 bp, Probe Sequence
catcatgttgacagccttgcacttc

SEQ ID NO: 179603 - DNA, 25 bp, Probe Sequence
catcatgtagacagctatgaccatt

SEQ ID NO: 179604 - DNA, 25 bp, Probe Sequence
catcttcagacaagtatgcagctct

SEQ ID NO: 179605 - DNA, 25 bp, Probe Sequence
cttgtcaccaaccattcttacttgg

SEQ ID NO: 179606 - DNA, 25 bp, Probe Sequence
catatctgacaatccactcgtactc

SEQ ID NO: 179607 - DNA, 25 bp, Probe Sequence
catcatcgacacacccaagtgcaac

SEQ ID NO: 179608 - DNA, 25 bp, Probe Sequence
cattctccctaaccaaggcaaaatg

SEQ ID NO: 179609 - DNA, 25 bp, Probe Sequence
catatcccgaaaccaaaactagtga

SEQ ID NO: 179610 - DNA, 25 bp, Probe Sequence
cataacccaaggctgaaaataatgt

SEQ ID NO: 179611 - DNA, 25 bp, Probe Sequence
catcttcccaagctgtgaaaatttg

SEQ ID NO: 179612 - DNA, 25 bp, Probe Sequence
catcttcctaacccaagcatatctt

SEQ ID NO: 179613 - DNA, 25 bp, Probe Sequence
catcttcctgaaaataacattccct

SEQ ID NO: 179614 - DNA, 25 bp, Probe Sequence
catcttcgtggggaacacgaccctt

SEQ ID NO: 179615 - DNA, 25 bp, Probe Sequence
catagtccgtcggtatatcgtccct

SEQ ID NO: 179616 - DNA, 25 bp, Probe Sequence
catagtcactctgggtcatcagcat

SEQ ID NO: 179617 - DNA, 25 bp, Probe Sequence
cataatagctacagtgcatagttgt

SEQ ID NO: 179618 - DNA, 25 bp, Probe Sequence
cataatcactgaggagctatttctt

SEQ ID NO: 179619 - DNA, 25 bp, Probe Sequence
catcagtcactgaggccattcctgt

SEQ ID NO: 179620 - DNA, 25 bp, Probe Sequence
cataaatctaggccctgatccgtct

SEQ ID NO: 179621 - DNA, 25 bp, Probe Sequence
catacaagcatgatgacactggccg

SEQ ID NO: 179622 - DNA, 25 bp, Probe Sequence
catacgtgattgcagccgggcatgg

SEQ ID NO: 179623 - DNA, 25 bp, Probe Sequence
catactgtgattctatctggtcata

SEQ ID NO: 179624 - DNA, 25 bp, Probe Sequence
cataatttgatgattcttgtgatga

SEQ ID NO: 179625 - DNA, 25 bp, Probe Sequence
catatcttttggtctggtgcagtga

SEQ ID NO: 179626 - DNA, 25 bp, Probe Sequence
catcactctcttggcattggtttac

SEQ ID NO: 179627 - DNA, 25 bp, Probe Sequence
catactgctattggtctttttatat

SEQ ID NO: 179628 - DNA, 25 bp, Probe Sequence
cataatgttgtgggtctttgttttg

SEQ ID NO: 179629 - DNA, 25 bp, Probe Sequence
catttgctggttgtttattttttgg

SEQ ID NO: 179630 - DNA, 25 bp, Probe Sequence
cattactgggttcttttattttgat

SEQ ID NO: 179631 - DNA, 25 bp, Probe Sequence
cttctcttagttatttctgggttgt

SEQ ID NO: 179632 - DNA, 25 bp, Probe Sequence
catcatctgcttaatttgatttttc

SEQ ID NO: 179633 - DNA, 25 bp, Probe Sequence
catcacgctgtggtttgatgatgcg

SEQ ID NO: 179634 - DNA, 25 bp, Probe Sequence
catcacagctgccagcttggtgtgc

SEQ ID NO: 179635 - DNA, 25 bp, Probe Sequence
catcactgaggacatgctgtgtgcc

SEQ ID NO: 179636 - DNA, 25 bp, Probe Sequence
catactgaggtggagatgctcatgc

SEQ ID NO: 179637 - DNA, 25 bp, Probe Sequence
catcactgaggccaggagctctgcc

SEQ ID NO: 179638 - DNA, 25 bp, Probe Sequence
catcaacactgccagtgtggctgcc

SEQ ID NO: 179639 - DNA, 25 bp, Probe Sequence
catcaacctgcagatgcggctgggg

SEQ ID NO: 179640 - DNA, 25 bp, Probe Sequence
catcaaggtgcacgtcggcgacgag

SEQ ID NO: 179641 - DNA, 25 bp, Probe Sequence
catcaagatggacgggcgctacctg

SEQ ID NO: 179642 - DNA, 25 bp, Probe Sequence
catcagagggcaagggcgtcttcga

SEQ ID NO: 179643 - DNA, 25 bp, Probe Sequence
catcaaggagatgcggcagttctgc

SEQ ID NO: 179644 - DNA, 25 bp, Probe Sequence
catcaaggacatggccgggctgctg

SEQ ID NO: 179645 - DNA, 25 bp, Probe Sequence
catcaagtcagcttacgtcgtgtgc

SEQ ID NO: 179646 - DNA, 25 bp, Probe Sequence
catacctcggaaggcatcggagagt

SEQ ID NO: 179647 - DNA, 25 bp, Probe Sequence
cataccgagctaaattctgtggagt

SEQ ID NO: 179648 - DNA, 25 bp, Probe Sequence
catcagccccttgatcatctggggt

SEQ ID NO: 179649 - DNA, 25 bp, Probe Sequence
cattcccactaggtgtcgggtttct

SEQ ID NO: 179650 - DNA, 25 bp, Probe Sequence
cattcccctgcagcagtcgaggact

SEQ ID NO: 179651 - DNA, 25 bp, Probe Sequence
cattcccctgcagcagtcgaggact

SEQ ID NO: 179652 - DNA, 25 bp, Probe Sequence
cattcccctgcagcagtcgaggact

SEQ ID NO: 179653 - DNA, 25 bp, Probe Sequence
cattttcctgagggactgggactcc

SEQ ID NO: 179654 - DNA, 25 bp, Probe Sequence
cattttctggaaggacaccgacccg

SEQ ID NO: 179655 - DNA, 25 bp, Probe Sequence
cattttgctggtacagcctaccaag

SEQ ID NO: 179656 - DNA, 25 bp, Probe Sequence
cataacatggggccaaatacccaga

SEQ ID NO: 179657 - DNA, 25 bp, Probe Sequence
ctaacaaagggctaatacccagaat

SEQ ID NO: 179658 - DNA, 25 bp, Probe Sequence
ctatattaatagctactaactagaa

SEQ ID NO: 179659 - DNA, 25 bp, Probe Sequence
cataattcagggcttccagacatca

SEQ ID NO: 179660 - DNA, 25 bp, Probe Sequence
cattttggggtaatgccagacagag

SEQ ID NO: 179661 - DNA, 25 bp, Probe Sequence
catttttggggattgcttacatcgc

SEQ ID NO: 179662 - DNA, 25 bp, Probe Sequence
cattctattagacaagcacgtatcg

SEQ ID NO: 179663 - DNA, 25 bp, Probe Sequence
cattcatattgactgtaaaggatta

SEQ ID NO: 179664 - DNA, 25 bp, Probe Sequence
catcatatctcaaagtaaagtcatt

SEQ ID NO: 179665 - DNA, 25 bp, Probe Sequence
catatgagctgcagcaataaaagtg

SEQ ID NO: 179666 - DNA, 25 bp, Probe Sequence
catcatggccaccctgaaaatcagg

SEQ ID NO: 179667 - DNA, 25 bp, Probe Sequence
catcacctaccactgcaagaacagc

SEQ ID NO: 179668 - DNA, 25 bp, Probe Sequence
catacctaatgctgcaggaaacatt

SEQ ID NO: 179669 - DNA, 25 bp, Probe Sequence
catagcactatatcgagtacataca

SEQ ID NO: 179670 - DNA, 25 bp, Probe Sequence
catcagcctccatggagtacttcaa

SEQ ID NO: 179671 - DNA, 25 bp, Probe Sequence
catcagcccggacagggtctacatc

SEQ ID NO: 179672 - DNA, 25 bp, Probe Sequence
catcactccgaccggtgagtcattt

SEQ ID NO: 179673 - DNA, 25 bp, Probe Sequence
catatcctcagaccaggtggaatta

SEQ ID NO: 179674 - DNA, 25 bp, Probe Sequence
catcaccatcttccaggagcgagat

SEQ ID NO: 179675 - DNA, 25 bp, Probe Sequence
catcacctgctacatgatggccgtc

SEQ ID NO: 179676 - DNA, 25 bp, Probe Sequence
catcaccttatcttatccaagcatc

SEQ ID NO: 179677 - DNA, 25 bp, Probe Sequence
catacgctacatgaggcaccagctc

SEQ ID NO: 179678 - DNA, 25 bp, Probe Sequence
catcaactacatggcagctgacggt

SEQ ID NO: 179679 - DNA, 25 bp, Probe Sequence
catcaaccaatgggtgaaggaggcc

SEQ ID NO: 179680 - DNA, 25 bp, Probe Sequence
cataccacactggtgccaggggaac

SEQ ID NO: 179681 - DNA, 25 bp, Probe Sequence
catagccaaatgatcaagtggaaga

SEQ ID NO: 179682 - DNA, 25 bp, Probe Sequence
cattcccacactagcactgctaaaa

SEQ ID NO: 179683 - DNA, 25 bp, Probe Sequence
cattaacactgccatgacattataa

SEQ ID NO: 179684 - DNA, 25 bp, Probe Sequence
cattaagccatccaacttcatgcca

SEQ ID NO: 179685 - DNA, 25 bp, Probe Sequence
cataaggccatccaggccctcaatg

SEQ ID NO: 179686 - DNA, 25 bp, Probe Sequence
cataaggacatcaagaccccaaccc

SEQ ID NO: 179687 - DNA, 25 bp, Probe Sequence
catagagacaattagggccaacccc

SEQ ID NO: 179688 - DNA, 25 bp, Probe Sequence
cttggcaagaaaccctaatctccct

SEQ ID NO: 179689 - DNA, 25 bp, Probe Sequence
cttgtcccaaaataaatcctttcag

SEQ ID NO: 179690 - DNA, 25 bp, Probe Sequence
ctttctctgaaaaacacaacgttct

SEQ ID NO: 179691 - DNA, 25 bp, Probe Sequence
cgtgtccgaagataagctccaggtc

SEQ ID NO: 179692 - DNA, 25 bp, Probe Sequence
catagctccgaatataatgctccat

SEQ ID NO: 179693 - DNA, 25 bp, Probe Sequence
catacctgctgcaccaaattcatct

SEQ ID NO: 179694 - DNA, 25 bp, Probe Sequence
catacagtctgcaaatgctacaaca

SEQ ID NO: 179695 - DNA, 25 bp, Probe Sequence
cataagcactgatgtgtgtaacaga

SEQ ID NO: 179696 - DNA, 25 bp, Probe Sequence
catcaagcagtggggctctcagtaa

SEQ ID NO: 179697 - DNA, 25 bp, Probe Sequence
cattcagctgctgggtgtccattgc

SEQ ID NO: 179698 - DNA, 25 bp, Probe Sequence
cattcagggccttgtcatcattggg

SEQ ID NO: 179699 - DNA, 25 bp, Probe Sequence
cattcaaggtcccattcggggctga

SEQ ID NO: 179700 - DNA, 25 bp, Probe Sequence
cattagggtttacttggttgtggca

SEQ ID NO: 179701 - DNA, 25 bp, Probe Sequence
catttcgtaatcaacttggtccggt

SEQ ID NO: 179702 - DNA, 25 bp, Probe Sequence
cattcacttaacagctcttttggga

SEQ ID NO: 179703 - DNA, 25 bp, Probe Sequence
cattactggtaaagcctcatttgaa

SEQ ID NO: 179704 - DNA, 25 bp, Probe Sequence
cttcctggggaactacactggcaat

SEQ ID NO: 179705 - DNA, 25 bp, Probe Sequence
cttccggggaatccaatcccattct

SEQ ID NO: 179706 - DNA, 25 bp, Probe Sequence
cattgccgtaggttgccaaccccat

SEQ ID NO: 179707 - DNA, 25 bp, Probe Sequence
cattgctttaggcctggagactttc

SEQ ID NO: 179708 - DNA, 25 bp, Probe Sequence
catacgtccagagtgggtacttgtc

SEQ ID NO: 179709 - DNA, 25 bp, Probe Sequence
catacacctctggtgacctatttgc

SEQ ID NO: 179710 - DNA, 25 bp, Probe Sequence
catactatcctcctagccaaattgc

SEQ ID NO: 179711 - DNA, 25 bp, Probe Sequence
catttaacttctcgcacatggttcc

SEQ ID NO: 179712 - DNA, 25 bp, Probe Sequence
catattaggttttacatgcctgcta

SEQ ID NO: 179713 - DNA, 25 bp, Probe Sequence
cattttggattttagctcgtgcctt

SEQ ID NO: 179714 - DNA, 25 bp, Probe Sequence
cattccgacgtgtaactcacagccg

SEQ ID NO: 179715 - DNA, 25 bp, Probe Sequence
cattccaaaggaatatgtccccata

SEQ ID NO: 179716 - DNA, 25 bp, Probe Sequence
cattaaacaggttctgacccagcca

SEQ ID NO: 179717 - DNA, 25 bp, Probe Sequence
cataaaatagagaccgaccccaaca

SEQ ID NO: 179718 - DNA, 25 bp, Probe Sequence
catagaattgttaccaacctccaaa

SEQ ID NO: 179719 - DNA, 25 bp, Probe Sequence
catcagcaatgttcttcacaccctg

SEQ ID NO: 179720 - DNA, 25 bp, Probe Sequence
catcaaactacccagcaacctgaga

SEQ ID NO: 179721 - DNA, 25 bp, Probe Sequence
catcaagacacccctaactcttaat

SEQ ID NO: 179722 - DNA, 25 bp, Probe Sequence
catcaacctccaaatcgagctctgc

SEQ ID NO: 179723 - DNA, 25 bp, Probe Sequence
cattgaccgccaattgggccggtta

SEQ ID NO: 179724 - DNA, 25 bp, Probe Sequence
ctctgcgggcaaaaggggtggattt

SEQ ID NO: 179725 - DNA, 25 bp, Probe Sequence
catcacgaggccatgaggtgggtgc

SEQ ID NO: 179726 - DNA, 25 bp, Probe Sequence
cataccagccacttggtgggcagtg

SEQ ID NO: 179727 - DNA, 25 bp, Probe Sequence
catttagctcacgagtggtcgagtg

SEQ ID NO: 179728 - DNA, 25 bp, Probe Sequence
catttggtcacaagctgctggggcg

SEQ ID NO: 179729 - DNA, 25 bp, Probe Sequence
catcaacgccaacgtgcaggtggcc

SEQ ID NO: 179730 - DNA, 25 bp, Probe Sequence
catattcggcctgtgaagtggccaa

SEQ ID NO: 179731 - DNA, 25 bp, Probe Sequence
catttcccttttcaggtgatgagac

SEQ ID NO: 179732 - DNA, 25 bp, Probe Sequence
cattctcccttggggaggctgtgag

SEQ ID NO: 179733 - DNA, 25 bp, Probe Sequence
cattcccacaatggcccagggtgtg

SEQ ID NO: 179734 - DNA, 25 bp, Probe Sequence
cataacactgcattggaccgggggc

SEQ ID NO: 179735 - DNA, 25 bp, Probe Sequence
ctaacaccgcggaccgaatcaggcg

SEQ ID NO: 179736 - DNA, 25 bp, Probe Sequence
cataatcacccttgtcacaaacaat

SEQ ID NO: 179737 - DNA, 25 bp, Probe Sequence
catttgcaaacttctacataatcaa

SEQ ID NO: 179738 - DNA, 25 bp, Probe Sequence
catttagcagactttactaagaaag

SEQ ID NO: 179739 - DNA, 25 bp, Probe Sequence
catattgaaggcattgactttgaaa

SEQ ID NO: 179740 - DNA, 25 bp, Probe Sequence
catagggaggatttgagctcatagg

SEQ ID NO: 179741 - DNA, 25 bp, Probe Sequence
cataggaggatgattcagcatcaga

SEQ ID NO: 179742 - DNA, 25 bp, Probe Sequence
cttgaattgtgcaatttgtagaact

SEQ ID NO: 179743 - DNA, 25 bp, Probe Sequence
cttggaactgtattagataaaatca

SEQ ID NO: 179744 - DNA, 25 bp, Probe Sequence
cttgaatccttttggcactaactgc

SEQ ID NO: 179745 - DNA, 25 bp, Probe Sequence
cattaagccttttggacacaggacc

SEQ ID NO: 179746 - DNA, 25 bp, Probe Sequence
catttacttttttgaccacgagcca

SEQ ID NO: 179747 - DNA, 25 bp, Probe Sequence
catttgtcttttttgagccaaggct

SEQ ID NO: 179748 - DNA, 25 bp, Probe Sequence
cttttccttattaaccatgttctgg

SEQ ID NO: 179749 - DNA, 25 bp, Probe Sequence
cattctttttgagatacgtttattg

SEQ ID NO: 179750 - DNA, 25 bp, Probe Sequence
catttcaatttataacgttctcagt

SEQ ID NO: 179751 - DNA, 25 bp, Probe Sequence
catttatttctatactttttctgtt

SEQ ID NO: 179752 - DNA, 25 bp, Probe Sequence
catactattatgaatgtacattttt

SEQ ID NO: 179753 - DNA, 25 bp, Probe Sequence
catacatattccatttgtcctttca

SEQ ID NO: 179754 - DNA, 25 bp, Probe Sequence
cattagatttctcatttgccaataa

SEQ ID NO: 179755 - DNA, 25 bp, Probe Sequence
cataaatcacttcaactgctaaaaa

SEQ ID NO: 179756 - DNA, 25 bp, Probe Sequence
cattcaatgccccgaagctggaaac

SEQ ID NO: 179757 - DNA, 25 bp, Probe Sequence
cattcagatcgtccgctactggaac

SEQ ID NO: 179758 - DNA, 25 bp, Probe Sequence
cattagatgcaggtcgtacataact

SEQ ID NO: 179759 - DNA, 25 bp, Probe Sequence
cataaaggcagtcgtacatactacg

SEQ ID NO: 179760 - DNA, 25 bp, Probe Sequence
cataaagccaaggaactaccccgct

SEQ ID NO: 179761 - DNA, 25 bp, Probe Sequence
cataacccaaggtaccatcctaggc

SEQ ID NO: 179762 - DNA, 25 bp, Probe Sequence
catagacgtagaaaacgcatccttg

SEQ ID NO: 179763 - DNA, 25 bp, Probe Sequence
catagcagggaacaacagatactgg

SEQ ID NO: 179764 - DNA, 25 bp, Probe Sequence
cattgaaggaaagaccagactttta

SEQ ID NO: 179765 - DNA, 25 bp, Probe Sequence
cattaaggattcgacacccgtttgt

SEQ ID NO: 179766 - DNA, 25 bp, Probe Sequence
catttgagaaaccaatcctcttttg

SEQ ID NO: 179767 - DNA, 25 bp, Probe Sequence
cattagctgaaatttacccttgttt

SEQ ID NO: 179768 - DNA, 25 bp, Probe Sequence
cattagtgaaggtggcttttgcttt

SEQ ID NO: 179769 - DNA, 25 bp, Probe Sequence
cattcaataaagtgtatatgtttct

SEQ ID NO: 179770 - DNA, 25 bp, Probe Sequence
cattgtccggagagtatattgttga

SEQ ID NO: 179771 - DNA, 25 bp, Probe Sequence
catattctcgagttttatacagttg

SEQ ID NO: 179772 - DNA, 25 bp, Probe Sequence
gcatactccagtgttttaggggttt

SEQ ID NO: 179773 - DNA, 25 bp, Probe Sequence
catattccattctattttaaggccc

SEQ ID NO: 179774 - DNA, 25 bp, Probe Sequence
catttcctacactatttgagcatgg

SEQ ID NO: 179775 - DNA, 25 bp, Probe Sequence
cattcctcaaacctttcaggagggg

SEQ ID NO: 179776 - DNA, 25 bp, Probe Sequence
cattgcctcaaaccctggggtaggt

SEQ ID NO: 179777 - DNA, 25 bp, Probe Sequence
cattgccgacaagcctggggaagat

SEQ ID NO: 179778 - DNA, 25 bp, Probe Sequence
catttctgcaaagcctggaaccaaa

SEQ ID NO: 179779 - DNA, 25 bp, Probe Sequence
catatttggataacctggaaaacac

SEQ ID NO: 179780 - DNA, 25 bp, Probe Sequence
cattgtttgaacccctggaaacact

SEQ ID NO: 179781 - DNA, 25 bp, Probe Sequence
catagtttcaacctttctgcataaa

SEQ ID NO: 179782 - DNA, 25 bp, Probe Sequence
catagaatgtttgttagctgtgaaa

SEQ ID NO: 179783 - DNA, 25 bp, Probe Sequence
catagaatgttggccttgcagcatt

SEQ ID NO: 179784 - DNA, 25 bp, Probe Sequence
catagttgacccatctggcattgcc

SEQ ID NO: 179785 - DNA, 25 bp, Probe Sequence
catagacgagctggcgttggaccca

SEQ ID NO: 179786 - DNA, 25 bp, Probe Sequence
catagccggtgggtgaggagattcc

SEQ ID NO: 179787 - DNA, 25 bp, Probe Sequence
catacccttggcctgagagacagtc

SEQ ID NO: 179788 - DNA, 25 bp, Probe Sequence
cataccagcctgggcaacagacaag

SEQ ID NO: 179789 - DNA, 25 bp, Probe Sequence
catagcttccatgagaacagcaggg

SEQ ID NO: 179790 - DNA, 25 bp, Probe Sequence
catttccagcatgaagatcactggg

SEQ ID NO: 179791 - DNA, 25 bp, Probe Sequence
cataccaccatgtagcagctacatg

SEQ ID NO: 179792 - DNA, 25 bp, Probe Sequence
cataccgtgcatcaatgcagaagcc

SEQ ID NO: 179793 - DNA, 25 bp, Probe Sequence
cataacagtatttggagaactcact

SEQ ID NO: 179794 - DNA, 25 bp, Probe Sequence
ctcgacgtcctgtgcgaaatgactg

SEQ ID NO: 179795 - DNA, 25 bp, Probe Sequence
cataggccttctctgaaaatgtatg

SEQ ID NO: 179796 - DNA, 25 bp, Probe Sequence
catagtcctccagctaaatttcagt

SEQ ID NO: 179797 - DNA, 25 bp, Probe Sequence
catagtctgctccatcttgatagtt

SEQ ID NO: 179798 - DNA, 25 bp, Probe Sequence
cataattgctctttatattgtgtgt

SEQ ID NO: 179799 - DNA, 25 bp, Probe Sequence
catactgtcaattttccttgtttga

SEQ ID NO: 179800 - DNA, 25 bp, Probe Sequence
catttgtgcaacttttctctttttc

SEQ ID NO: 179801 - DNA, 25 bp, Probe Sequence
catattggcatggatttctgtcttc

SEQ ID NO: 179802 - DNA, 25 bp, Probe Sequence
cattaagctaaactctgactttcat

SEQ ID NO: 179803 - DNA, 25 bp, Probe Sequence
catttaataccatctagtgatatat

SEQ ID NO: 179804 - DNA, 25 bp, Probe Sequence
catttgaaaccaatatcctgatatt

SEQ ID NO: 179805 - DNA, 25 bp, Probe Sequence
catttatggttctctccgcaagtat

SEQ ID NO: 179806 - DNA, 25 bp, Probe Sequence
gaatgtctttgtgtgtccgaagttg

SEQ ID NO: 179807 - DNA, 25 bp, Probe Sequence
cgctactttcggatccaggaggtgc

SEQ ID NO: 179808 - DNA, 25 bp, Probe Sequence
cttacttccgggacgaggagctgtc

SEQ ID NO: 179809 - DNA, 25 bp, Probe Sequence
cattttctcacgtctaccaggaatt

SEQ ID NO: 179810 - DNA, 25 bp, Probe Sequence
catatttgctttctaggaggtttgt

SEQ ID NO: 179811 - DNA, 25 bp, Probe Sequence
cattttcttaccaggagcagcattg

SEQ ID NO: 179812 - DNA, 25 bp, Probe Sequence
cattttcattaccaggtttcatttt

SEQ ID NO: 179813 - DNA, 25 bp, Probe Sequence
catttttgtccctagctttctatat

SEQ ID NO: 179814 - DNA, 25 bp, Probe Sequence
catttttctccatggtgttttagag

SEQ ID NO: 179815 - DNA, 25 bp, Probe Sequence
cttggttttaagtatgtatggaatg

SEQ ID NO: 179816 - DNA, 25 bp, Probe Sequence
cttggctttattgtactgggtatta

SEQ ID NO: 179817 - DNA, 25 bp, Probe Sequence
cttggctttcagagtttggttaatc

SEQ ID NO: 179818 - DNA, 25 bp, Probe Sequence
cttgccactaagctatttgttttat

SEQ ID NO: 179819 - DNA, 25 bp, Probe Sequence
gcattaactaatctattgggttcat

SEQ ID NO: 179820 - DNA, 25 bp, Probe Sequence
catttactaaggtgtgctgggtcat

SEQ ID NO: 179821 - DNA, 25 bp, Probe Sequence
cattttgctaagtccctgagggtca

SEQ ID NO: 179822 - DNA, 25 bp, Probe Sequence
cattcattattagctccatgtgagg

SEQ ID NO: 179823 - DNA, 25 bp, Probe Sequence
cataatagcttctctctcatcggag

SEQ ID NO: 179824 - DNA, 25 bp, Probe Sequence
catcaacagctcttccaccaagaga

SEQ ID NO: 179825 - DNA, 25 bp, Probe Sequence
cataaagcttgctaccgctcaaaaa

SEQ ID NO: 179826 - DNA, 25 bp, Probe Sequence
cattaggcattcatcctgccaacca

SEQ ID NO: 179827 - DNA, 25 bp, Probe Sequence
cataaccatactaccatcaatactc

SEQ ID NO: 179828 - DNA, 25 bp, Probe Sequence
catacacacatatacactcacagcc

SEQ ID NO: 179829 - DNA, 25 bp, Probe Sequence
cttcaattaccaacgcagatgccca

SEQ ID NO: 179830 - DNA, 25 bp, Probe Sequence
cattccttcccaacgatagtaacag

SEQ ID NO: 179831 - DNA, 25 bp, Probe Sequence
cattccttcccaacgatagtaacag

SEQ ID NO: 179832 - DNA, 25 bp, Probe Sequence
cattctttactcaaggataacacgg

SEQ ID NO: 179833 - DNA, 25 bp, Probe Sequence
catttgtatccaaggtgctgaatct

SEQ ID NO: 179834 - DNA, 25 bp, Probe Sequence
catttgtatgccagtgcttaacaca

SEQ ID NO: 179835 - DNA, 25 bp, Probe Sequence
catattgctaactccttaactcagg

SEQ ID NO: 179836 - DNA, 25 bp, Probe Sequence
catatgtaatccgcgtctacaccag

SEQ ID NO: 179837 - DNA, 25 bp, Probe Sequence
cattgtaacattggtttcccgagat

SEQ ID NO: 179838 - DNA, 25 bp, Probe Sequence
cttgtgaaattaggttggggttgca

SEQ ID NO: 179839 - DNA, 25 bp, Probe Sequence
cttgtgggagatgcgtagggggtca

SEQ ID NO: 179840 - DNA, 25 bp, Probe Sequence
ctttcgggccggaaaggccctgcag

SEQ ID NO: 179841 - DNA, 25 bp, Probe Sequence
cattgtgggctacgtggaaacccct

SEQ ID NO: 179842 - DNA, 25 bp, Probe Sequence
cttgggctctatgggaaggaccagc

SEQ ID NO: 179843 - DNA, 25 bp, Probe Sequence
cttggtgttatttcgttaccactgc

SEQ ID NO: 179844 - DNA, 25 bp, Probe Sequence
cattgtgatgtttacctttatagcc

SEQ ID NO: 179845 - DNA, 25 bp, Probe Sequence
cattctgtgggcagcttttctatgc

SEQ ID NO: 179846 - DNA, 25 bp, Probe Sequence
cattttagccattttgtcgcctgca

SEQ ID NO: 179847 - DNA, 25 bp, Probe Sequence
catagttaatcttttgtctcttgcg

SEQ ID NO: 179848 - DNA, 25 bp, Probe Sequence
catagggagatccaaagtcctgtgg

SEQ ID NO: 179849 - DNA, 25 bp, Probe Sequence
cataggagcgaacactgctgctctc

SEQ ID NO: 179850 - DNA, 25 bp, Probe Sequence
cataggactctagacggcatccagc

SEQ ID NO: 179851 - DNA, 25 bp, Probe Sequence
catagagaccgaggcacagcccagc

SEQ ID NO: 179852 - DNA, 25 bp, Probe Sequence
cataacagactaggccagacatagc

SEQ ID NO: 179853 - DNA, 25 bp, Probe Sequence
catatacatatttgcatcctgacta

SEQ ID NO: 179854 - DNA, 25 bp, Probe Sequence
catatctcatgaatattcgtgcaaa

SEQ ID NO: 179855 - DNA, 25 bp, Probe Sequence
catatcatgtgtgtacgctgaaaga

SEQ ID NO: 179856 - DNA, 25 bp, Probe Sequence
catacatggcactttggcataccga

SEQ ID NO: 179857 - DNA, 25 bp, Probe Sequence
catatgtgtgcacgcttggacaccc

SEQ ID NO: 179858 - DNA, 25 bp, Probe Sequence
catatttcggcttcagcacaggacc

SEQ ID NO: 179859 - DNA, 25 bp, Probe Sequence
catatgcatatcctgctactgcagc

SEQ ID NO: 179860 - DNA, 25 bp, Probe Sequence
cttacaggggacatggggagcttag

SEQ ID NO: 179861 - DNA, 25 bp, Probe Sequence
cttcggctcggagcccaagatcctc

SEQ ID NO: 179862 - DNA, 25 bp, Probe Sequence
cttccgttggtagcttgagtcccat

SEQ ID NO: 179863 - DNA, 25 bp, Probe Sequence
cattcatcgtgaggggtctttgtcc

SEQ ID NO: 179864 - DNA, 25 bp, Probe Sequence
catttctgaagcgagcgtcttcgat

SEQ ID NO: 179865 - DNA, 25 bp, Probe Sequence
cattttgcacatcatgcacatcatg

SEQ ID NO: 179866 - DNA, 25 bp, Probe Sequence
catagcttcagctctcatcatgatc

SEQ ID NO: 179867 - DNA, 25 bp, Probe Sequence
catatctgatcatctctttcatgca

SEQ ID NO: 179868 - DNA, 25 bp, Probe Sequence
catatcgatgctgctctttctgagg

SEQ ID NO: 179869 - DNA, 25 bp, Probe Sequence
catatggtgtggacttcctggtgcc

SEQ ID NO: 179870 - DNA, 25 bp, Probe Sequence
catatttgggcctttacttgccttt

SEQ ID NO: 179871 - DNA, 25 bp, Probe Sequence
catatgttgggtttacgttttgtat

SEQ ID NO: 179872 - DNA, 25 bp, Probe Sequence
catactgggtttaactccatttgtt

SEQ ID NO: 179873 - DNA, 25 bp, Probe Sequence
catagagtggtttcttcattcatgt

SEQ ID NO: 179874 - DNA, 25 bp, Probe Sequence
cataggccatataactcaattctat

SEQ ID NO: 179875 - DNA, 25 bp, Probe Sequence
catagagccatattgactacttgcc

SEQ ID NO: 179876 - DNA, 25 bp, Probe Sequence
catagcagctgctactagctctttg

SEQ ID NO: 179877 - DNA, 25 bp, Probe Sequence
cattcatgctctagtagttcctggc

SEQ ID NO: 179878 - DNA, 25 bp, Probe Sequence
catttgcactgactttatccagacc

SEQ ID NO: 179879 - DNA, 25 bp, Probe Sequence
catattccagagcctgtctgctata

SEQ ID NO: 179880 - DNA, 25 bp, Probe Sequence
catacccaagtccttcatgatcagc

SEQ ID NO: 179881 - DNA, 25 bp, Probe Sequence
catacccatctgtttacatgataac

SEQ ID NO: 179882 - DNA, 25 bp, Probe Sequence
catacgcctctactgatacatgtct

SEQ ID NO: 179883 - DNA, 25 bp, Probe Sequence
cataccccttcaaacatgttgcttt

SEQ ID NO: 179884 - DNA, 25 bp, Probe Sequence
catactccatctaaagtcatttttc

SEQ ID NO: 179885 - DNA, 25 bp, Probe Sequence
catactaccatcaatactcatcatt

SEQ ID NO: 179886 - DNA, 25 bp, Probe Sequence
cattctaacatccatacagtctctg

SEQ ID NO: 179887 - DNA, 25 bp, Probe Sequence
cattctcaacatctcagaccactgg

SEQ ID NO: 179888 - DNA, 25 bp, Probe Sequence
cattgctgcacctgggaccatagga

SEQ ID NO: 179889 - DNA, 25 bp, Probe Sequence
cattgtgactattgttggtcaaagt

SEQ ID NO: 179890 - DNA, 25 bp, Probe Sequence
cattgctactttccttgccaaatac

SEQ ID NO: 179891 - DNA, 25 bp, Probe Sequence
catagcccctagattgctcaatcaa

SEQ ID NO: 179892 - DNA, 25 bp, Probe Sequence
cataaacctcagattcatctgtaga

SEQ ID NO: 179893 - DNA, 25 bp, Probe Sequence
catagacacagcacgttcattccag

SEQ ID NO: 179894 - DNA, 25 bp, Probe Sequence
catatcaccatgattgattttccac

SEQ ID NO: 179895 - DNA, 25 bp, Probe Sequence
ctacccatattttctggtcccattg

SEQ ID NO: 179896 - DNA, 25 bp, Probe Sequence
cataccctaaattctgagtttcagc

SEQ ID NO: 179897 - DNA, 25 bp, Probe Sequence
cattccctagaaactgccatttact

SEQ ID NO: 179898 - DNA, 25 bp, Probe Sequence
cattccgtaggggacctgctattct

SEQ ID NO: 179899 - DNA, 25 bp, Probe Sequence
cttcgcccagaaggacctgctggtt

SEQ ID NO: 179900 - DNA, 25 bp, Probe Sequence
cattatgcccagtacatgacttatg

SEQ ID NO: 179901 - DNA, 25 bp, Probe Sequence
cttgtgtaagaggctgacttttcca

SEQ ID NO: 179902 - DNA, 25 bp, Probe Sequence
catttgggtcagcctggctggtccc

SEQ ID NO: 179903 - DNA, 25 bp, Probe Sequence
cattttggtgtgactaggccacacc

SEQ ID NO: 179904 - DNA, 25 bp, Probe Sequence
cattatagtagaatctcggcccctc

SEQ ID NO: 179905 - DNA, 25 bp, Probe Sequence
catttcagctgatcagtgggcctcc

SEQ ID NO: 179906 - DNA, 25 bp, Probe Sequence
catttgcatctgctggtggacctgc

SEQ ID NO: 179907 - DNA, 25 bp, Probe Sequence
catttgcatctgctggtggacctgc

SEQ ID NO: 179908 - DNA, 25 bp, Probe Sequence
cattgtgcatcaagagacaggtctc

SEQ ID NO: 179909 - DNA, 25 bp, Probe Sequence
cattttctgagagcaggtatggaag

SEQ ID NO: 179910 - DNA, 25 bp, Probe Sequence
catatgtatttgaccctgtgggagg

SEQ ID NO: 179911 - DNA, 25 bp, Probe Sequence
cattttgtatattccaggggggccg

SEQ ID NO: 179912 - DNA, 25 bp, Probe Sequence
catagttgtatttcacagaatgcta

SEQ ID NO: 179913 - DNA, 25 bp, Probe Sequence
catacttacatttcagacatatcca

SEQ ID NO: 179914 - DNA, 25 bp, Probe Sequence
catacttacatttcagacatatcca

SEQ ID NO: 179915 - DNA, 25 bp, Probe Sequence
catactttgcatagtctgtttctgc

SEQ ID NO: 179916 - DNA, 25 bp, Probe Sequence
catactgtatgaagcttgtcctctg

SEQ ID NO: 179917 - DNA, 25 bp, Probe Sequence
catatgattataagcattcccctct

SEQ ID NO: 179918 - DNA, 25 bp, Probe Sequence
catacattaccagtatctcacgcct

SEQ ID NO: 179919 - DNA, 25 bp, Probe Sequence
cattgctgataccaatatcaccagc

SEQ ID NO: 179920 - DNA, 25 bp, Probe Sequence
cttcagagacgattgcagacttgca

SEQ ID NO: 179921 - DNA, 25 bp, Probe Sequence
cattcatagcactatatcgagtaca

SEQ ID NO: 179922 - DNA, 25 bp, Probe Sequence
cataccagacattgacagcgaacat

SEQ ID NO: 179923 - DNA, 25 bp, Probe Sequence
cataccacacatagccacagaaaca

SEQ ID NO: 179924 - DNA, 25 bp, Probe Sequence
cataacaactctgaaaggcacctag

SEQ ID NO: 179925 - DNA, 25 bp, Probe Sequence
cattacccctcctaagagaggctgg

SEQ ID NO: 179926 - DNA, 25 bp, Probe Sequence
cattgaaccccctgaaagctttgaa

SEQ ID NO: 179927 - DNA, 25 bp, Probe Sequence
cttaacacccagtgaaagcccagcc

SEQ ID NO: 179928 - DNA, 25 bp, Probe Sequence
cttgtaaacctgtgaatggacccca

SEQ ID NO: 179929 - DNA, 25 bp, Probe Sequence
cttggcactacggctaacaggacgc

SEQ ID NO: 179930 - DNA, 25 bp, Probe Sequence
cttggccaaatcgtcttcagagtcc

SEQ ID NO: 179931 - DNA, 25 bp, Probe Sequence
cttgtgggtcagatttcagagttca

SEQ ID NO: 179932 - DNA, 25 bp, Probe Sequence
cattctgggaccatctccaggagtc

SEQ ID NO: 179933 - DNA, 25 bp, Probe Sequence
cattgttaacacatccctaggttgt

SEQ ID NO: 179934 - DNA, 25 bp, Probe Sequence
cattgttaattggccgcccaagggt

SEQ ID NO: 179935 - DNA, 25 bp, Probe Sequence
catttgtactgaagaccccatctgg

SEQ ID NO: 179936 - DNA, 25 bp, Probe Sequence
catattgtcaaaatagtccaccagt

SEQ ID NO: 179937 - DNA, 25 bp, Probe Sequence
cattttcttgatccgatccactagt

SEQ ID NO: 179938 - DNA, 25 bp, Probe Sequence
catattacactacagatcctccaga

SEQ ID NO: 179939 - DNA, 25 bp, Probe Sequence
catacaactctgcatgaaacaccaa

SEQ ID NO: 179940 - DNA, 25 bp, Probe Sequence
cattctgacgtgtaaaggaccataa

SEQ ID NO: 179941 - DNA, 25 bp, Probe Sequence
catttacagctgtctgaaggaagaa

SEQ ID NO: 179942 - DNA, 25 bp, Probe Sequence
cattcgtcagcgacaattggacaga

SEQ ID NO: 179943 - DNA, 25 bp, Probe Sequence
cattcgtcagcgacaattggacaga

SEQ ID NO: 179944 - DNA, 25 bp, Probe Sequence
catatgctgaagtgccttggatgga

SEQ ID NO: 179945 - DNA, 25 bp, Probe Sequence
catatatgttataccttgtatgata

SEQ ID NO: 179946 - DNA, 25 bp, Probe Sequence
catttttatttcttcgtgaacatag

SEQ ID NO: 179947 - DNA, 25 bp, Probe Sequence
cattttgttttactcttaatatgtt

SEQ ID NO: 179948 - DNA, 25 bp, Probe Sequence
cattgtggtttcattcgctcaaatt

SEQ ID NO: 179949 - DNA, 25 bp, Probe Sequence
catttggcttgtgtgcatctggcct

SEQ ID NO: 179950 - DNA, 25 bp, Probe Sequence
catttggcctgtgtcttataattcc

SEQ ID NO: 179951 - DNA, 25 bp, Probe Sequence
catatgggcctgagttgtacccacc

SEQ ID NO: 179952 - DNA, 25 bp, Probe Sequence
cattgagaccttctacaacacctcc

SEQ ID NO: 179953 - DNA, 25 bp, Probe Sequence
cattgagaccttctacaacacctcc

SEQ ID NO: 179954 - DNA, 25 bp, Probe Sequence
cattgtacatttctacagaacctgt

SEQ ID NO: 179955 - DNA, 25 bp, Probe Sequence
cattaaacattgccaacgcaaatgt

SEQ ID NO: 179956 - DNA, 25 bp, Probe Sequence
cttaaacatgagggagcgtgggtag

SEQ ID NO: 179957 - DNA, 25 bp, Probe Sequence
cattaatgcctacctaagtgggata

SEQ ID NO: 179958 - DNA, 25 bp, Probe Sequence
cattaatcagtgtttagaggaggtg

SEQ ID NO: 179959 - DNA, 25 bp, Probe Sequence
cattccacagatggggggttagtgt

SEQ ID NO: 179960 - DNA, 25 bp, Probe Sequence
cttccacttcggtgcagtaattctg

SEQ ID NO: 179961 - DNA, 25 bp, Probe Sequence
cattcccttaggctttagcagcttt

SEQ ID NO: 179962 - DNA, 25 bp, Probe Sequence
cttacctaaagtctaattcttcgct

SEQ ID NO: 179963 - DNA, 25 bp, Probe Sequence
ctttcctaacttcaaaatcctctct

SEQ ID NO: 179964 - DNA, 25 bp, Probe Sequence
catttgcctactaatggaaaaggtt

SEQ ID NO: 179965 - DNA, 25 bp, Probe Sequence
catttgcctttgaactgagagacac

SEQ ID NO: 179966 - DNA, 25 bp, Probe Sequence
catatctgacatcctggagtggaag

SEQ ID NO: 179967 - DNA, 25 bp, Probe Sequence
catatctaagtcagcatcggagaat

SEQ ID NO: 179968 - DNA, 25 bp, Probe Sequence
cattgtcttgacaggaggaaattcc

SEQ ID NO: 179969 - DNA, 25 bp, Probe Sequence
catttcatatactgcaggtaacaaa

SEQ ID NO: 179970 - DNA, 25 bp, Probe Sequence
catacatcaggataaggtgtcaaaa

SEQ ID NO: 179971 - DNA, 25 bp, Probe Sequence
catagacctgaccaaggtgccagct

SEQ ID NO: 179972 - DNA, 25 bp, Probe Sequence
catagctccgactacagcatgtgga

SEQ ID NO: 179973 - DNA, 25 bp, Probe Sequence
catacctgcagagtcagagagatgc

SEQ ID NO: 179974 - DNA, 25 bp, Probe Sequence
cattctcatcagtcgcaatgattca

SEQ ID NO: 179975 - DNA, 25 bp, Probe Sequence
catattctcactggctgtgattaag

SEQ ID NO: 179976 - DNA, 25 bp, Probe Sequence
catagttctgaccatgtattccatg

SEQ ID NO: 179977 - DNA, 25 bp, Probe Sequence
cattgttagcactaggcacccagct

SEQ ID NO: 179978 - DNA, 25 bp, Probe Sequence
cattttgaccaaccgcagcaatgca

SEQ ID NO: 179979 - DNA, 25 bp, Probe Sequence
cattttgccgcagtacactatacga

SEQ ID NO: 179980 - DNA, 25 bp, Probe Sequence
cattttccaagccaccacaagtgat

SEQ ID NO: 179981 - DNA, 25 bp, Probe Sequence
cattttgcggtgaaaacataatgat

SEQ ID NO: 179982 - DNA, 25 bp, Probe Sequence
cattataggtgtttccacatgaatt

SEQ ID NO: 179983 - DNA, 25 bp, Probe Sequence
cattttctgtgtgatccagcgatag

SEQ ID NO: 179984 - DNA, 25 bp, Probe Sequence
cattttattatcaccatgcaatgcc

SEQ ID NO: 179985 - DNA, 25 bp, Probe Sequence
cattaaactgccaagctgctaagct

SEQ ID NO: 179986 - DNA, 25 bp, Probe Sequence
cattacacaccctagctggaactct

SEQ ID NO: 179987 - DNA, 25 bp, Probe Sequence
cattaactaccatcagcacaactct

SEQ ID NO: 179988 - DNA, 25 bp, Probe Sequence
catttctctaacagcagtaatatta

SEQ ID NO: 179989 - DNA, 25 bp, Probe Sequence
cattttccaagtcagtctatgagaa

SEQ ID NO: 179990 - DNA, 25 bp, Probe Sequence
catttcccaacgtgtatgaagatac

SEQ ID NO: 179991 - DNA, 25 bp, Probe Sequence
catttccacaaacagtgcacaagga

SEQ ID NO: 179992 - DNA, 25 bp, Probe Sequence
cattatccctagccaagcttcaagg

SEQ ID NO: 179993 - DNA, 25 bp, Probe Sequence
catttgccttattgctacttcaagc

SEQ ID NO: 179994 - DNA, 25 bp, Probe Sequence
cattatgacttcaccatctttcaca

SEQ ID NO: 179995 - DNA, 25 bp, Probe Sequence
cattaacattcagacacactccctt

SEQ ID NO: 179996 - DNA, 25 bp, Probe Sequence
cattaactattggacaatgcctctt

SEQ ID NO: 179997 - DNA, 25 bp, Probe Sequence
catatacaccgtgcaatactatgca

SEQ ID NO: 179998 - DNA, 25 bp, Probe Sequence
catatacacctgatagtcaaataag

SEQ ID NO: 179999 - DNA, 25 bp, Probe Sequence
cattaccctggtggctcaaagctag

SEQ ID NO: 180000 - DNA, 25 bp, Probe Sequence
cattacccggcacacagcatatgct

SEQ ID NO: 180001 - DNA, 25 bp, Probe Sequence
cattagccgggactggcacggtgtg

SEQ ID NO: 180002 - DNA, 25 bp, Probe Sequence
catataggagggtgggtgatgctga

SEQ ID NO: 180003 - DNA, 25 bp, Probe Sequence
cattgggggaatccccttgctggct

SEQ ID NO: 180004 - DNA, 25 bp, Probe Sequence
cttgggtggcaattcctcaaccact

SEQ ID NO: 180005 - DNA, 25 bp, Probe Sequence
cttgtccggaagattgcaaatactg

SEQ ID NO: 180006 - DNA, 25 bp, Probe Sequence
catttacccaaactgtccattactg

SEQ ID NO: 180007 - DNA, 25 bp, Probe Sequence
catttgcccgtcaagttatttactg

SEQ ID NO: 180008 - DNA, 25 bp, Probe Sequence
cattaatcctgggagtctttgtttg

SEQ ID NO: 180009 - DNA, 25 bp, Probe Sequence
cattaatggccagaattttgtgttt

SEQ ID NO: 180010 - DNA, 25 bp, Probe Sequence
catttacatccatatcttttttttt

SEQ ID NO: 180011 - DNA, 25 bp, Probe Sequence
catagttctacagtttgtttttgtt

SEQ ID NO: 180012 - DNA, 25 bp, Probe Sequence
cattctttcgagtttgtttttgtca

SEQ ID NO: 180013 - DNA, 25 bp, Probe Sequence
catttatatatgctttgtttcaggg

SEQ ID NO: 180014 - DNA, 25 bp, Probe Sequence
catttgcaactgctgttcgtacaca

SEQ ID NO: 180015 - DNA, 25 bp, Probe Sequence
catttgctactgtgtctggttaatt

SEQ ID NO: 180016 - DNA, 25 bp, Probe Sequence
catagtttctgtaattggcttttga

SEQ ID NO: 180017 - DNA, 25 bp, Probe Sequence
ctcctttttccatggctttaggtat

SEQ ID NO: 180018 - DNA, 25 bp, Probe Sequence
cattttccttcctggtttgtgtgtg

SEQ ID NO: 180019 - DNA, 25 bp, Probe Sequence
cattcttctcctgttggttattctg

SEQ ID NO: 180020 - DNA, 25 bp, Probe Sequence
catatatacccttttatctttccat

SEQ ID NO: 180021 - DNA, 25 bp, Probe Sequence
cattatccccatggaacgtttcact

SEQ ID NO: 180022 - DNA, 25 bp, Probe Sequence
catataacccagcaaatctgtactt

SEQ ID NO: 180023 - DNA, 25 bp, Probe Sequence
catatacacgaatagacatcaaact

SEQ ID NO: 180024 - DNA, 25 bp, Probe Sequence
cataccccaccaagaccagaagtaa

SEQ ID NO: 180025 - DNA, 25 bp, Probe Sequence
ctaccctgaccatgacctgaggttg

SEQ ID NO: 180026 - DNA, 25 bp, Probe Sequence
ctatcccatatggagaagaaagggg

SEQ ID NO: 180027 - DNA, 25 bp, Probe Sequence
catatcccattggttaaaagcaagt

SEQ ID NO: 180028 - DNA, 25 bp, Probe Sequence
catatctcttatcttacgaaaaaat

SEQ ID NO: 180029 - DNA, 25 bp, Probe Sequence
cattcatcttcgactttctaaaaaa

SEQ ID NO: 180030 - DNA, 25 bp, Probe Sequence
cattcttacgttggtggccaagtaa

SEQ ID NO: 180031 - DNA, 25 bp, Probe Sequence
cattcatggcaggttctgggctcaa

SEQ ID NO: 180032 - DNA, 25 bp, Probe Sequence
catattgccaccgtctaggctaaac

SEQ ID NO: 180033 - DNA, 25 bp, Probe Sequence
catattgccaccaaagatgcgtgaa

SEQ ID NO: 180034 - DNA, 25 bp, Probe Sequence
catttcaccagatgtgcaggtatca

SEQ ID NO: 180035 - DNA, 25 bp, Probe Sequence
catttgaacagttggcagctttgca

SEQ ID NO: 180036 - DNA, 25 bp, Probe Sequence
cattaacaagatgagccttgtgctc

SEQ ID NO: 180037 - DNA, 25 bp, Probe Sequence
ctatgaagaatgtgtcccttgtgaa

SEQ ID NO: 180038 - DNA, 25 bp, Probe Sequence
catagaagagcttatcacctttcat

SEQ ID NO: 180039 - DNA, 25 bp, Probe Sequence
cattcaagcgctgctcaaagattct

SEQ ID NO: 180040 - DNA, 25 bp, Probe Sequence
cattgcaatacagccaaagatttgg

SEQ ID NO: 180041 - DNA, 25 bp, Probe Sequence
catatctttctgctctaagtagtgg

SEQ ID NO: 180042 - DNA, 25 bp, Probe Sequence
catataatactgcctgcaacagttg

SEQ ID NO: 180043 - DNA, 25 bp, Probe Sequence
catatggcacaggcctgcaatccta

SEQ ID NO: 180044 - DNA, 25 bp, Probe Sequence
cattgtggcatggcagcaaatgcca

SEQ ID NO: 180045 - DNA, 25 bp, Probe Sequence
cattgctgagctgggcatctatcca

SEQ ID NO: 180046 - DNA, 25 bp, Probe Sequence
catatgtgcagtgtcagcaccatcc

SEQ ID NO: 180047 - DNA, 25 bp, Probe Sequence
cattgtcagtgaactcacctactta

SEQ ID NO: 180048 - DNA, 25 bp, Probe Sequence
catttaatggatgcaactcagttta

SEQ ID NO: 180049 - DNA, 25 bp, Probe Sequence
cattggacactggacacactagttc

SEQ ID NO: 180050 - DNA, 25 bp, Probe Sequence
catatgtgcacccttcaattagtcc

SEQ ID NO: 180051 - DNA, 25 bp, Probe Sequence
cattgtggagcgcctcactaactcc

SEQ ID NO: 180052 - DNA, 25 bp, Probe Sequence
cattgaggcagctctactataaaag

SEQ ID NO: 180053 - DNA, 25 bp, Probe Sequence
cattgaaactaccaaaataaagtgt

SEQ ID NO: 180054 - DNA, 25 bp, Probe Sequence
cattgaacttaataaactgacctta

SEQ ID NO: 180055 - DNA, 25 bp, Probe Sequence
cattaccttaaaaagccagtctctt

SEQ ID NO: 180056 - DNA, 25 bp, Probe Sequence
cattttttaactgagctcaattgtt

SEQ ID NO: 180057 - DNA, 25 bp, Probe Sequence
catatctagtgaaactttgcctttt

SEQ ID NO: 180058 - DNA, 25 bp, Probe Sequence
catatctcataaaaccttttgaatt

SEQ ID NO: 180059 - DNA, 25 bp, Probe Sequence
catatgtgaaagatccagtgttgga

SEQ ID NO: 180060 - DNA, 25 bp, Probe Sequence
catttagcccaaatcagtgctgtaa

SEQ ID NO: 180061 - DNA, 25 bp, Probe Sequence
catttatcgtcatcatctgctctga

SEQ ID NO: 180062 - DNA, 25 bp, Probe Sequence
cttgactcagatggtgcatatgctc

SEQ ID NO: 180063 - DNA, 25 bp, Probe Sequence
cttgtctagcaggatgcaaatcttc

SEQ ID NO: 180064 - DNA, 25 bp, Probe Sequence
cttgttaggtacaatcactgccccc

SEQ ID NO: 180065 - DNA, 25 bp, Probe Sequence
cattattgggccgaatcccttctgc

SEQ ID NO: 180066 - DNA, 25 bp, Probe Sequence
cattaagggcaccatctaccaactg

SEQ ID NO: 180067 - DNA, 25 bp, Probe Sequence
cattatataggaggccccaaaccgt

SEQ ID NO: 180068 - DNA, 25 bp, Probe Sequence
cattttggctgaaggtcctaacctg

SEQ ID NO: 180069 - DNA, 25 bp, Probe Sequence
cattttgagtgttggtgttaagcat

SEQ ID NO: 180070 - DNA, 25 bp, Probe Sequence
cattttgcaaattattgctctagaa

SEQ ID NO: 180071 - DNA, 25 bp, Probe Sequence
catttctgcagaacttactgtacag

SEQ ID NO: 180072 - DNA, 25 bp, Probe Sequence
cattgtctacctgctaagtcaaggg

SEQ ID NO: 180073 - DNA, 25 bp, Probe Sequence
cattgtctacctgctaagtcaaggg

SEQ ID NO: 180074 - DNA, 25 bp, Probe Sequence
catttcgatcctcgtcaggtgcagg

SEQ ID NO: 180075 - DNA, 25 bp, Probe Sequence
cattcctgctccatagacgtgaggc

SEQ ID NO: 180076 - DNA, 25 bp, Probe Sequence
cattttgccctggaggagctggccc

SEQ ID NO: 180077 - DNA, 25 bp, Probe Sequence
cattctgtacagggagtgaggagcc

SEQ ID NO: 180078 - DNA, 25 bp, Probe Sequence
cttctctgacagtgtgttagggccc

SEQ ID NO: 180079 - DNA, 25 bp, Probe Sequence
ctacctatcaagttctgttaggcct

SEQ ID NO: 180080 - DNA, 25 bp, Probe Sequence
catagactgtgaagtatctttactg

SEQ ID NO: 180081 - DNA, 25 bp, Probe Sequence
catagactttgacagcttcatcagc

SEQ ID NO: 180082 - DNA, 25 bp, Probe Sequence
cattactgttcacgatcgtctcagc

SEQ ID NO: 180083 - DNA, 25 bp, Probe Sequence
cattactgtggcctgcacgaacgcc

SEQ ID NO: 180084 - DNA, 25 bp, Probe Sequence
cattcatacttggctgcaagaccaa

SEQ ID NO: 180085 - DNA, 25 bp, Probe Sequence
cattaagcattggctgaaaatcact

SEQ ID NO: 180086 - DNA, 25 bp, Probe Sequence
cattcatacattaatgaataagctc

SEQ ID NO: 180087 - DNA, 25 bp, Probe Sequence
catttggttgaaacagactgtcgct

SEQ ID NO: 180088 - DNA, 25 bp, Probe Sequence
catttgaaagaaaggactctggggt

SEQ ID NO: 180089 - DNA, 25 bp, Probe Sequence
catattagactgaaatgtactctgt

SEQ ID NO: 180090 - DNA, 25 bp, Probe Sequence
catagtaggcattcgtgatgacttt

SEQ ID NO: 180091 - DNA, 25 bp, Probe Sequence
ctagtagactacatgggtgcctcct

SEQ ID NO: 180092 - DNA, 25 bp, Probe Sequence
catatgtatgacatcctgggtcctg

SEQ ID NO: 180093 - DNA, 25 bp, Probe Sequence
catatgaatgacattgctgtcgttt

SEQ ID NO: 180094 - DNA, 25 bp, Probe Sequence
cattaagatcttggttccttttcaa

SEQ ID NO: 180095 - DNA, 25 bp, Probe Sequence
catttcagtccgtttatcactttac

SEQ ID NO: 180096 - DNA, 25 bp, Probe Sequence
cattgcgtggcccacaaactcttta

SEQ ID NO: 180097 - DNA, 25 bp, Probe Sequence
cattatttccaccataaagtatgta

SEQ ID NO: 180098 - DNA, 25 bp, Probe Sequence
catttgtatcccatataatatattt

SEQ ID NO: 180099 - DNA, 25 bp, Probe Sequence
cattaattctccatctagtcttgtg

SEQ ID NO: 180100 - DNA, 25 bp, Probe Sequence
cattccacttaccttacttctggaa

SEQ ID NO: 180101 - DNA, 25 bp, Probe Sequence
catattccatttgtcctttcagaag

SEQ ID NO: 180102 - DNA, 25 bp, Probe Sequence
cattttacattccatcttttctgaa

SEQ ID NO: 180103 - DNA, 25 bp, Probe Sequence
cattaagatctctaatctgttttga

SEQ ID NO: 180104 - DNA, 25 bp, Probe Sequence
cattaaacttttattcttcatgcat

SEQ ID NO: 180105 - DNA, 25 bp, Probe Sequence
cattttccttttaatatctgtggta

SEQ ID NO: 180106 - DNA, 25 bp, Probe Sequence
cttgtatccgatatctaacgcttta

SEQ ID NO: 180107 - DNA, 25 bp, Probe Sequence
cttgattgttattataagtacttat

SEQ ID NO: 180108 - DNA, 25 bp, Probe Sequence
cattgggttttatagtggctttctg

SEQ ID NO: 180109 - DNA, 25 bp, Probe Sequence
cattgggtattttgaatgtttttct

SEQ ID NO: 180110 - DNA, 25 bp, Probe Sequence
cttgtggtacaattaatgttcgttt

SEQ ID NO: 180111 - DNA, 25 bp, Probe Sequence
cttggtttctaggatggttttgtgt

SEQ ID NO: 180112 - DNA, 25 bp, Probe Sequence
cattgacgtctatgggtgtttgttt

SEQ ID NO: 180113 - DNA, 25 bp, Probe Sequence
cattgccctgcacgtgggttttgac

SEQ ID NO: 180114 - DNA, 25 bp, Probe Sequence
catttgcaccacttgtggcttttga

SEQ ID NO: 180115 - DNA, 25 bp, Probe Sequence
catttcaccatgtatttcttctttg

SEQ ID NO: 180116 - DNA, 25 bp, Probe Sequence
catatgatgcccgtatttttttttt

SEQ ID NO: 180117 - DNA, 25 bp, Probe Sequence
cattaccattgccactgattttttt

SEQ ID NO: 180118 - DNA, 25 bp, Probe Sequence
catttctacccagtgagttcatttg

SEQ ID NO: 180119 - DNA, 25 bp, Probe Sequence
catatttatcctgtgagtcattgtg

SEQ ID NO: 180120 - DNA, 25 bp, Probe Sequence
catatttctgccaaggatgtgcctt

SEQ ID NO: 180121 - DNA, 25 bp, Probe Sequence
catatttctgccaaggatgtgcctt

SEQ ID NO: 180122 - DNA, 25 bp, Probe Sequence
catttttgcacaaggaattgctttg

SEQ ID NO: 180123 - DNA, 25 bp, Probe Sequence
cttgtttcaattacaaactcctggg

SEQ ID NO: 180124 - DNA, 25 bp, Probe Sequence
cttgtttaaggatcacacgcccagg

SEQ ID NO: 180125 - DNA, 25 bp, Probe Sequence
cttgtactgatataaacacttccaa

SEQ ID NO: 180126 - DNA, 25 bp, Probe Sequence
cttgttctgtctgcaaacctacgtc

SEQ ID NO: 180127 - DNA, 25 bp, Probe Sequence
cattttctatcctgcagaccataca

SEQ ID NO: 180128 - DNA, 25 bp, Probe Sequence
cattttttttgagtgatctgcacac

SEQ ID NO: 180129 - DNA, 25 bp, Probe Sequence
catatatttctttgcaagtttctca

SEQ ID NO: 180130 - DNA, 25 bp, Probe Sequence
catattttctggtcccattgcttct

SEQ ID NO: 180131 - DNA, 25 bp, Probe Sequence
catttttttacgtcttgcctataag

SEQ ID NO: 180132 - DNA, 25 bp, Probe Sequence
catttctttgagtgtcttaattaaa

SEQ ID NO: 180133 - DNA, 25 bp, Probe Sequence
catttcattaagatctctaatctgt

SEQ ID NO: 180134 - DNA, 25 bp, Probe Sequence
catattcatgtaatgtgcttttttt

SEQ ID NO: 180135 - DNA, 25 bp, Probe Sequence
catatctgctgtaaggttctgttct

SEQ ID NO: 180136 - DNA, 25 bp, Probe Sequence
catattagtaaggatgttttgctgg

SEQ ID NO: 180137 - DNA, 25 bp, Probe Sequence
catttagttgagcagtttttgacca

SEQ ID NO: 180138 - DNA, 25 bp, Probe Sequence
catttagttgagtagctcttgaaag

SEQ ID NO: 180139 - DNA, 25 bp, Probe Sequence
catttcagcattactgactgcttat

SEQ ID NO: 180140 - DNA, 25 bp, Probe Sequence
catttctgcatgcttggtctgtgtg

SEQ ID NO: 180141 - DNA, 25 bp, Probe Sequence
cattgcccaggcagagtctctgcgt

SEQ ID NO: 180142 - DNA, 25 bp, Probe Sequence
cattgtcatccgccgagactatctg

SEQ ID NO: 180143 - DNA, 25 bp, Probe Sequence
cattgtcatccgccgagactatctg

SEQ ID NO: 180144 - DNA, 25 bp, Probe Sequence
cattgtcatccgccgagactatctg

SEQ ID NO: 180145 - DNA, 25 bp, Probe Sequence
catatgtcattccccatatgtgttg

SEQ ID NO: 180146 - DNA, 25 bp, Probe Sequence
catttcttccacgatggtgcagtgt

SEQ ID NO: 180147 - DNA, 25 bp, Probe Sequence
cattttctccagcaatgagcatagt

SEQ ID NO: 180148 - DNA, 25 bp, Probe Sequence
catttagccctgatatgattactat

SEQ ID NO: 180149 - DNA, 25 bp, Probe Sequence
catttggccatcatttgttataata

SEQ ID NO: 180150 - DNA, 25 bp, Probe Sequence
catattggcttcattttagtttaat

SEQ ID NO: 180151 - DNA, 25 bp, Probe Sequence
cttgggcctctttctagttttgaat

SEQ ID NO: 180152 - DNA, 25 bp, Probe Sequence
cttgggcctctttctagttttgaat

SEQ ID NO: 180153 - DNA, 25 bp, Probe Sequence
cattacccctttacatgtttaacat

SEQ ID NO: 180154 - DNA, 25 bp, Probe Sequence
cattcagcccttaaacctttataat

SEQ ID NO: 180155 - DNA, 25 bp, Probe Sequence
cattagtttgtatccctcttttgac

SEQ ID NO: 180156 - DNA, 25 bp, Probe Sequence
catttatttgtctgccgcttttaaa

SEQ ID NO: 180157 - DNA, 25 bp, Probe Sequence
catatctttggatgggccttttaga

SEQ ID NO: 180158 - DNA, 25 bp, Probe Sequence
cattctttggaccgatccgacttgg

SEQ ID NO: 180159 - DNA, 25 bp, Probe Sequence
cttgctttgagttggaatcggtttg

SEQ ID NO: 180160 - DNA, 25 bp, Probe Sequence
catatttctacttataacctgttgc

SEQ ID NO: 180161 - DNA, 25 bp, Probe Sequence
cattgttcctgtgatagtcctgttg

SEQ ID NO: 180162 - DNA, 25 bp, Probe Sequence
cattcctacctggacatgtcccatt

SEQ ID NO: 180163 - DNA, 25 bp, Probe Sequence
cattcctagccgagtgtgacacagt

SEQ ID NO: 180164 - DNA, 25 bp, Probe Sequence
cattcacaactcaactattacacct

SEQ ID NO: 180165 - DNA, 25 bp, Probe Sequence
cattccagattttcgtgtacccatt

SEQ ID NO: 180166 - DNA, 25 bp, Probe Sequence
cttccaaatatgactttacccttga

SEQ ID NO: 180167 - DNA, 25 bp, Probe Sequence
cttcccaaattatgccacctaatga

SEQ ID NO: 180168 - DNA, 25 bp, Probe Sequence
cttgtccttgttttgcaaccaacta

SEQ ID NO: 180169 - DNA, 25 bp, Probe Sequence
cttgaccttgtagagaacacgcgta

SEQ ID NO: 180170 - DNA, 25 bp, Probe Sequence
catttctcttcttcctgttattggt

SEQ ID NO: 180171 - DNA, 25 bp, Probe Sequence
cattttagtgctggccctcatatta

SEQ ID NO: 180172 - DNA, 25 bp, Probe Sequence
catttgtttctccccaaatctagaa

SEQ ID NO: 180173 - DNA, 25 bp, Probe Sequence
cattggttaaaagcaagtcatagtt

SEQ ID NO: 180174 - DNA, 25 bp, Probe Sequence
cattttcagaactattctagtcttt

SEQ ID NO: 180175 - DNA, 25 bp, Probe Sequence
catatttcagaaccctctatttaaa

SEQ ID NO: 180176 - DNA, 25 bp, Probe Sequence
cattttggacagcttcttttgaata

SEQ ID NO: 180177 - DNA, 25 bp, Probe Sequence
catttcgagacatcttttattatga

SEQ ID NO: 180178 - DNA, 25 bp, Probe Sequence
cattcacgaatctcttattttggga

SEQ ID NO: 180179 - DNA, 25 bp, Probe Sequence
cattcactggtctctgtttgttttc

SEQ ID NO: 180180 - DNA, 25 bp, Probe Sequence
cattgatctgcgttttgtcactttt

SEQ ID NO: 180181 - DNA, 25 bp, Probe Sequence
cattatctctgtttattcactttca

SEQ ID NO: 180182 - DNA, 25 bp, Probe Sequence
cattttgctgtattgagacctataa

SEQ ID NO: 180183 - DNA, 25 bp, Probe Sequence
cattttcattatcagcagtctattg

SEQ ID NO: 180184 - DNA, 25 bp, Probe Sequence
catattgtcttactcagcattccct

SEQ ID NO: 180185 - DNA, 25 bp, Probe Sequence
catttgtttagtaaatcccttcagt

SEQ ID NO: 180186 - DNA, 25 bp, Probe Sequence
cattgttattcaaatggcccctcca

SEQ ID NO: 180187 - DNA, 25 bp, Probe Sequence
catttatttctagtgttcctgccaa

SEQ ID NO: 180188 - DNA, 25 bp, Probe Sequence
catttcatttcttgtgagctagctg

SEQ ID NO: 180189 - DNA, 25 bp, Probe Sequence
catttctgtagcatgtcagtttgga

SEQ ID NO: 180190 - DNA, 25 bp, Probe Sequence
catttatgtctcatgtaatttgcat

SEQ ID NO: 180191 - DNA, 25 bp, Probe Sequence
cattctatgtgccgttttgttgtta

SEQ ID NO: 180192 - DNA, 25 bp, Probe Sequence
catttcattgtcactgttgttgttt

SEQ ID NO: 180193 - DNA, 25 bp, Probe Sequence
cattttctgcattgactgcattttt

SEQ ID NO: 180194 - DNA, 25 bp, Probe Sequence
catatttcagcattggctctacagc

SEQ ID NO: 180195 - DNA, 25 bp, Probe Sequence
catttgtcaatcacttacacaagaa

SEQ ID NO: 180196 - DNA, 25 bp, Probe Sequence
cattctatgctgattttacaaaaga

SEQ ID NO: 180197 - DNA, 25 bp, Probe Sequence
catttagaccttctctcatatacag

SEQ ID NO: 180198 - DNA, 25 bp, Probe Sequence
catttgtgaacttccccctaagaga

SEQ ID NO: 180199 - DNA, 25 bp, Probe Sequence
cattgggaaatgccgcccatttaag

SEQ ID NO: 180200 - DNA, 25 bp, Probe Sequence
cattgggtttggggccatggtggag

SEQ ID NO: 180201 - DNA, 25 bp, Probe Sequence
cttgaggttcccttgtgagcttgaa

SEQ ID NO: 180202 - DNA, 25 bp, Probe Sequence
cttgtgggggctttggcagctatgg

SEQ ID NO: 180203 - DNA, 25 bp, Probe Sequence
cttgcttggggctgagaactgtcag

SEQ ID NO: 180204 - DNA, 25 bp, Probe Sequence
cattctttgtgttaggagcactcca

SEQ ID NO: 180205 - DNA, 25 bp, Probe Sequence
catttgtacattgatggacacttaa

SEQ ID NO: 180206 - DNA, 25 bp, Probe Sequence
cattttgaattgagaagcctataca

SEQ ID NO: 180207 - DNA, 25 bp, Probe Sequence
cattttcaatccaggagccttgagt

SEQ ID NO: 180208 - DNA, 25 bp, Probe Sequence
cattttcctgccagatacctttatc

SEQ ID NO: 180209 - DNA, 25 bp, Probe Sequence
catttgtcacccaagaactcttacc

SEQ ID NO: 180210 - DNA, 25 bp, Probe Sequence
cattgtgaaccctgacgcacttggg

SEQ ID NO: 180211 - DNA, 25 bp, Probe Sequence
cattgtattccaaagacgacaattt

SEQ ID NO: 180212 - DNA, 25 bp, Probe Sequence
catttcatcttcatagcaaaactat

SEQ ID NO: 180213 - DNA, 25 bp, Probe Sequence
catttcatttaagagatcatttcat

SEQ ID NO: 180214 - DNA, 25 bp, Probe Sequence
catttttcataattagtgctgtaca

SEQ ID NO: 180215 - DNA, 25 bp, Probe Sequence
cattttgtgtggaactgtgcttaaa

SEQ ID NO: 180216 - DNA, 25 bp, Probe Sequence
cattgatattggggaggctccaaaa

SEQ ID NO: 180217 - DNA, 25 bp, Probe Sequence
catttggtcgggcagccgcacacta

SEQ ID NO: 180218 - DNA, 25 bp, Probe Sequence
catttggaggagctgagcctgccgg

SEQ ID NO: 180219 - DNA, 25 bp, Probe Sequence
catttgaagcgcccgagggcaccgg

SEQ ID NO: 180220 - DNA, 25 bp, Probe Sequence
cttggtcagcagcatggagttcccg

SEQ ID NO: 180221 - DNA, 25 bp, Probe Sequence
cttggctaggtatggtgtctcacac

SEQ ID NO: 180222 - DNA, 25 bp, Probe Sequence
catttctaaatgtggttgctcatct

SEQ ID NO: 180223 - DNA, 25 bp, Probe Sequence
cattttagaattggggtctttgtgg

SEQ ID NO: 180224 - DNA, 25 bp, Probe Sequence
cattcttcgatctctgggatttatg

SEQ ID NO: 180225 - DNA, 25 bp, Probe Sequence
cattcttagtccctgggttggggag

SEQ ID NO: 180226 - DNA, 25 bp, Probe Sequence
cattctttccaaccaggtccaagga

SEQ ID NO: 180227 - DNA, 25 bp, Probe Sequence
cattcgattcccagaacccagagag

SEQ ID NO: 180228 - DNA, 25 bp, Probe Sequence
catttgagatccgaaggatgacgag

SEQ ID NO: 180229 - DNA, 25 bp, Probe Sequence
catttgtgaccatcagagaactgaa

SEQ ID NO: 180230 - DNA, 25 bp, Probe Sequence
cattattgagcccctgacagaggaa

SEQ ID NO: 180231 - DNA, 25 bp, Probe Sequence
cattaattctctcaacatcagtgtg

SEQ ID NO: 180232 - DNA, 25 bp, Probe Sequence
cattcagattctcgtgtaacacttg

SEQ ID NO: 180233 - DNA, 25 bp, Probe Sequence
cattactgactgcttatgtatcttg

SEQ ID NO: 180234 - DNA, 25 bp, Probe Sequence
cattaatccgtttatgtgatgtgta

SEQ ID NO: 180235 - DNA, 25 bp, Probe Sequence
cattaatccgtttatgtgatgtgta

SEQ ID NO: 180236 - DNA, 25 bp, Probe Sequence
cattggcctcgtggacagtgttaag

SEQ ID NO: 180237 - DNA, 25 bp, Probe Sequence
cattgacctcaactacatggtttac

SEQ ID NO: 180238 - DNA, 25 bp, Probe Sequence
cattgtggtccactacacgttcaac

SEQ ID NO: 180239 - DNA, 25 bp, Probe Sequence
cttctggctacctaaggttaacatg

SEQ ID NO: 180240 - DNA, 25 bp, Probe Sequence
cattccgttctcgaaccttcataat

SEQ ID NO: 180241 - DNA, 25 bp, Probe Sequence
cattccaaacctggaccttcatcac

SEQ ID NO: 180242 - DNA, 25 bp, Probe Sequence
cattccagaacgaacagcctgacac

SEQ ID NO: 180243 - DNA, 25 bp, Probe Sequence
catttcagaaatcaagcctgtcaca

SEQ ID NO: 180244 - DNA, 25 bp, Probe Sequence
catttgagaagcccttgcctggctc

SEQ ID NO: 180245 - DNA, 25 bp, Probe Sequence
catttacaatggactgctggtgcag

SEQ ID NO: 180246 - DNA, 25 bp, Probe Sequence
cattgaaagctgggtgtaggcactg

SEQ ID NO: 180247 - DNA, 25 bp, Probe Sequence
cattctaagcaggggctacaggatg

SEQ ID NO: 180248 - DNA, 25 bp, Probe Sequence
catttcaagccaagggaagagcata

SEQ ID NO: 180249 - DNA, 25 bp, Probe Sequence
catttagatcacatgagagcaaaga

SEQ ID NO: 180250 - DNA, 25 bp, Probe Sequence
cattatagcacaaaatcagccaaag

SEQ ID NO: 180251 - DNA, 25 bp, Probe Sequence
cattatagataatatgatccgagac

SEQ ID NO: 180252 - DNA, 25 bp, Probe Sequence
catttagtaaggacacaggagagct

SEQ ID NO: 180253 - DNA, 25 bp, Probe Sequence
catttacgaagacccacagcatcac

SEQ ID NO: 180254 - DNA, 25 bp, Probe Sequence
catttttgcataggtgccaccatca

SEQ ID NO: 180255 - DNA, 25 bp, Probe Sequence
cattacttcatctgtatcaagcaca

SEQ ID NO: 180256 - DNA, 25 bp, Probe Sequence
cattcatgcttctgtgtacacataa

SEQ ID NO: 180257 - DNA, 25 bp, Probe Sequence
catttcttgtaggcatcaccatgaa

SEQ ID NO: 180258 - DNA, 25 bp, Probe Sequence
catttattaatggctcagctcatca

SEQ ID NO: 180259 - DNA, 25 bp, Probe Sequence
cattgtatgcatgtgccacatttcg

SEQ ID NO: 180260 - DNA, 25 bp, Probe Sequence
catttgtgaggaggacttctcgccc

SEQ ID NO: 180261 - DNA, 25 bp, Probe Sequence
catttgcagacaaggatcttctgga

SEQ ID NO: 180262 - DNA, 25 bp, Probe Sequence
cattgggtcattcgtctgtggaaag

SEQ ID NO: 180263 - DNA, 25 bp, Probe Sequence
cattttgtaccttctgctggaacag

SEQ ID NO: 180264 - DNA, 25 bp, Probe Sequence
cattttgtcccagcttcgaaagtgt

SEQ ID NO: 180265 - DNA, 25 bp, Probe Sequence
catttttctgccgtttttcatagtt

SEQ ID NO: 180266 - DNA, 25 bp, Probe Sequence
catttgttggctctattttaatttt

SEQ ID NO: 180267 - DNA, 25 bp, Probe Sequence
cattttgtcctatttctgttacttt

SEQ ID NO: 180268 - DNA, 25 bp, Probe Sequence
cattttgtctcattattcctgtttt

SEQ ID NO: 180269 - DNA, 25 bp, Probe Sequence
cattttgtttttttctctgggtgag

SEQ ID NO: 180270 - DNA, 25 bp, Probe Sequence
catttgtatattgttgttcggggga

SEQ ID NO: 180271 - DNA, 25 bp, Probe Sequence
gcacttggcagtttattttcgggga

SEQ ID NO: 180272 - DNA, 25 bp, Probe Sequence
cattcatgacggtgattttcgtgta

SEQ ID NO: 180273 - DNA, 25 bp, Probe Sequence
cttcagtctgtagggcttcctgttg

SEQ ID NO: 180274 - DNA, 25 bp, Probe Sequence
cattgcgatctggggagccccatct

SEQ ID NO: 180275 - DNA, 25 bp, Probe Sequence
cattggttatgaggaggcccagagc

SEQ ID NO: 180276 - DNA, 25 bp, Probe Sequence
cattgccctagagggcccactagcc

SEQ ID NO: 180277 - DNA, 25 bp, Probe Sequence
cattgacgcaaatgggcggtaggcg

SEQ ID NO: 180278 - DNA, 25 bp, Probe Sequence
cattgacgcaaatgggcggtaggcg

SEQ ID NO: 180279 - DNA, 25 bp, Probe Sequence
cattatcagcactggggcagtgtga

SEQ ID NO: 180280 - DNA, 25 bp, Probe Sequence
catttgaaattgctggcgctgctgg

SEQ ID NO: 180281 - DNA, 25 bp, Probe Sequence
cattcagaagattctcggccttgcc

SEQ ID NO: 180282 - DNA, 25 bp, Probe Sequence
cattcagaagattctcggccttgcc

SEQ ID NO: 180283 - DNA, 25 bp, Probe Sequence
cattagaagctcttcttcagatccc

SEQ ID NO: 180284 - DNA, 25 bp, Probe Sequence
catttgctactaaccacagatccct

SEQ ID NO: 180285 - DNA, 25 bp, Probe Sequence
catttctccttcctcagaatacact

SEQ ID NO: 180286 - DNA, 25 bp, Probe Sequence
catttccctgtttcagagaacgtaa

SEQ ID NO: 180287 - DNA, 25 bp, Probe Sequence
catttcacctttctgcaacaagtta

SEQ ID NO: 180288 - DNA, 25 bp, Probe Sequence
catttttctcttctaaaggtagtct

SEQ ID NO: 180289 - DNA, 25 bp, Probe Sequence
cattttttttttggagacagtgtct

SEQ ID NO: 180290 - DNA, 25 bp, Probe Sequence
cattatttgggtaggtgacctgctt

SEQ ID NO: 180291 - DNA, 25 bp, Probe Sequence
cttttagggttgtgactggctttgg

SEQ ID NO: 180292 - DNA, 25 bp, Probe Sequence
cttctttgggttgatcccacctatg

SEQ ID NO: 180293 - DNA, 25 bp, Probe Sequence
cttttctgggatgtcaactaggaag

SEQ ID NO: 180294 - DNA, 25 bp, Probe Sequence
ctttccgggatcacaaacattaaca

SEQ ID NO: 180295 - DNA, 25 bp, Probe Sequence
ctacgacgcggagaacaaactgaac

SEQ ID NO: 180296 - DNA, 25 bp, Probe Sequence
cttggagggtgagaacataattgaa

SEQ ID NO: 180297 - DNA, 25 bp, Probe Sequence
ctttaggcgaaggaacagaacaata

SEQ ID NO: 180298 - DNA, 25 bp, Probe Sequence
cttgggactcaaggaacaacacagt

SEQ ID NO: 180299 - DNA, 25 bp, Probe Sequence
ctttgaggcctcggccaaactgcgt

SEQ ID NO: 180300 - DNA, 25 bp, Probe Sequence
ctttgagccctagctaagtcactga

SEQ ID NO: 180301 - DNA, 25 bp, Probe Sequence
ctttgcgtcctgtgaaggccattga

SEQ ID NO: 180302 - DNA, 25 bp, Probe Sequence
cattatggcccagtacaagacctta

SEQ ID NO: 180303 - DNA, 25 bp, Probe Sequence
cttgtgccccctaaacacatttact

SEQ ID NO: 180304 - DNA, 25 bp, Probe Sequence
cttgtgccccctaaacacatttact

SEQ ID NO: 180305 - DNA, 25 bp, Probe Sequence
cttgcgctcaccatcaataaaagta

SEQ ID NO: 180306 - DNA, 25 bp, Probe Sequence
cttgcccaccaacataaccaattta

SEQ ID NO: 180307 - DNA, 25 bp, Probe Sequence
cttctcccctaccataaaatagtca

SEQ ID NO: 180308 - DNA, 25 bp, Probe Sequence
cattctccccctgacacagagaagg

SEQ ID NO: 180309 - DNA, 25 bp, Probe Sequence
ctactcccgcctgcgggaactggta

SEQ ID NO: 180310 - DNA, 25 bp, Probe Sequence
ctacgactccctgctggtcaaagtc

SEQ ID NO: 180311 - DNA, 25 bp, Probe Sequence
ctaccactaggtggatagtaaattt

SEQ ID NO: 180312 - DNA, 25 bp, Probe Sequence
cattctcctggttctaagtacagtt

SEQ ID NO: 180313 - DNA, 25 bp, Probe Sequence
cattcccaggtattggagcctctgt

SEQ ID NO: 180314 - DNA, 25 bp, Probe Sequence
catttcttagcatgagctacctcat

SEQ ID NO: 180315 - DNA, 25 bp, Probe Sequence
catttcttctgcacatctacttgct

SEQ ID NO: 180316 - DNA, 25 bp, Probe Sequence
cattactggtgcatctcttgctgat

SEQ ID NO: 180317 - DNA, 25 bp, Probe Sequence
cattaccaatgcactttctgaagaa

SEQ ID NO: 180318 - DNA, 25 bp, Probe Sequence
ctacagaaatgctctatttacaaat

SEQ ID NO: 180319 - DNA, 25 bp, Probe Sequence
cttgcagagcaatttctgtttaaga

SEQ ID NO: 180320 - DNA, 25 bp, Probe Sequence
cttccacagctaacgttgttaattg

SEQ ID NO: 180321 - DNA, 25 bp, Probe Sequence
cttaacgtggtgcttttaatgctgt

SEQ ID NO: 180322 - DNA, 25 bp, Probe Sequence
cttcaactatggactttttaagcct

SEQ ID NO: 180323 - DNA, 25 bp, Probe Sequence
cctagtttagacaactggtaagcca

SEQ ID NO: 180324 - DNA, 25 bp, Probe Sequence
cgtaggatgtaaaaccagtatgacc

SEQ ID NO: 180325 - DNA, 25 bp, Probe Sequence
cttaggtataacagcacaatttcac

SEQ ID NO: 180326 - DNA, 25 bp, Probe Sequence
cttgggaaaatctgtggctgttcac

SEQ ID NO: 180327 - DNA, 25 bp, Probe Sequence
cttggggaaatgctgggcaatgctc

SEQ ID NO: 180328 - DNA, 25 bp, Probe Sequence
cttgggtgaaatcaccgcctgcagt

SEQ ID NO: 180329 - DNA, 25 bp, Probe Sequence
cttgaggtgaaggacgccccattta

SEQ ID NO: 180330 - DNA, 25 bp, Probe Sequence
cttggattgaagcaacactgcctct

SEQ ID NO: 180331 - DNA, 25 bp, Probe Sequence
cttgcactggaattcaacattccct

SEQ ID NO: 180332 - DNA, 25 bp, Probe Sequence
cattcatgctaatatacatttcctt

SEQ ID NO: 180333 - DNA, 25 bp, Probe Sequence
cattcatgtatgaagctgcttttca

SEQ ID NO: 180334 - DNA, 25 bp, Probe Sequence
cattaatatacaggcttagtcagct

SEQ ID NO: 180335 - DNA, 25 bp, Probe Sequence
cattcaatgctaggacgtactcgtt

SEQ ID NO: 180336 - DNA, 25 bp, Probe Sequence
cattcaagctcacgatgctgttccc

SEQ ID NO: 180337 - DNA, 25 bp, Probe Sequence
cattgcaggtgtcagcaggcgggcg

SEQ ID NO: 180338 - DNA, 25 bp, Probe Sequence
cattagctgtctaggcgtgtgggtg

SEQ ID NO: 180339 - DNA, 25 bp, Probe Sequence
cattgtcttattggcacatgggtgg

SEQ ID NO: 180340 - DNA, 25 bp, Probe Sequence
cttgtctttaccgagggatgctagt

SEQ ID NO: 180341 - DNA, 25 bp, Probe Sequence
catttactgtacttgctgggtcttg

SEQ ID NO: 180342 - DNA, 25 bp, Probe Sequence
cattctgacgtatgttagtctctta

SEQ ID NO: 180343 - DNA, 25 bp, Probe Sequence
cattcataggtattgattatattat

SEQ ID NO: 180344 - DNA, 25 bp, Probe Sequence
cattctcaggctttgtcacaaccaa

SEQ ID NO: 180345 - DNA, 25 bp, Probe Sequence
cattctcagcttgtgccaaacctga

SEQ ID NO: 180346 - DNA, 25 bp, Probe Sequence
cattcgctcctgagcggaatcctgc

SEQ ID NO: 180347 - DNA, 25 bp, Probe Sequence
cattcacacgcgattgcgcaatgcc

SEQ ID NO: 180348 - DNA, 25 bp, Probe Sequence
cattcagcatcctcattgctaagca

SEQ ID NO: 180349 - DNA, 25 bp, Probe Sequence
cattcagaccccatagcaggattca

SEQ ID NO: 180350 - DNA, 25 bp, Probe Sequence
cttctagctaacacaaggattcaga

SEQ ID NO: 180351 - DNA, 25 bp, Probe Sequence
cattctttacttacagtggaccaat

SEQ ID NO: 180352 - DNA, 25 bp, Probe Sequence
cattctttgcagctaattaagccga

SEQ ID NO: 180353 - DNA, 25 bp, Probe Sequence
cttgagttcgggacagtaagccagg

SEQ ID NO: 180354 - DNA, 25 bp, Probe Sequence
cttggggcccgagtgtggcaccaag

SEQ ID NO: 180355 - DNA, 25 bp, Probe Sequence
cttggaagcctggacgtgacacgat

SEQ ID NO: 180356 - DNA, 25 bp, Probe Sequence
cttgaaccactgaacttcccagatc

SEQ ID NO: 180357 - DNA, 25 bp, Probe Sequence
cttgaagaactatgatccccagaag

SEQ ID NO: 180358 - DNA, 25 bp, Probe Sequence
cttgaggatacacgggacccagaat

SEQ ID NO: 180359 - DNA, 25 bp, Probe Sequence
cttggccagaagctgaaccttattc

SEQ ID NO: 180360 - DNA, 25 bp, Probe Sequence
cttgccctaataaaagcctacatat

SEQ ID NO: 180361 - DNA, 25 bp, Probe Sequence
cttgccgatacttccggccgaataa

SEQ ID NO: 180362 - DNA, 25 bp, Probe Sequence
cttgcggaccattccgaggggagtc

SEQ ID NO: 180363 - DNA, 25 bp, Probe Sequence
cttggtctgccagacgtgggggctc

SEQ ID NO: 180364 - DNA, 25 bp, Probe Sequence
cttggccgcaatgacctggctgatg

SEQ ID NO: 180365 - DNA, 25 bp, Probe Sequence
cttgtggtgccacatcgtactgatg

SEQ ID NO: 180366 - DNA, 25 bp, Probe Sequence
cttggcgtggagccagggagcggcc

SEQ ID NO: 180367 - DNA, 25 bp, Probe Sequence
cttgacgtcaagccgtaaggcccgc

SEQ ID NO: 180368 - DNA, 25 bp, Probe Sequence
cttggcgtcattcctgaatctgtca

SEQ ID NO: 180369 - DNA, 25 bp, Probe Sequence
cttggcgtcattcctgaatctgtca

SEQ ID NO: 180370 - DNA, 25 bp, Probe Sequence
cattccccttggaaactggcacaag

SEQ ID NO: 180371 - DNA, 25 bp, Probe Sequence
cattgcctcctaagattgacccaac

SEQ ID NO: 180372 - DNA, 25 bp, Probe Sequence
cattaccgctatgggatgagccccc

SEQ ID NO: 180373 - DNA, 25 bp, Probe Sequence
cttgaacgtaggcagggctcagctc

SEQ ID NO: 180374 - DNA, 25 bp, Probe Sequence
cttcaagcggggcaaggcccacgcg

SEQ ID NO: 180375 - DNA, 25 bp, Probe Sequence
cggtgacggggtcacccacactgtg

SEQ ID NO: 180376 - DNA, 25 bp, Probe Sequence
ggggcaaggggtctacctaggtatg

SEQ ID NO: 180377 - DNA, 25 bp, Probe Sequence
gcttggaaggggtgtacctagagcc

SEQ ID NO: 180378 - DNA, 25 bp, Probe Sequence
cttggcatagggctcgacacacagg

SEQ ID NO: 180379 - DNA, 25 bp, Probe Sequence
ctagagacgggttgcaatgacaagg

SEQ ID NO: 180380 - DNA, 25 bp, Probe Sequence
cttggcacgtcgtcctgtaatagga

SEQ ID NO: 180381 - DNA, 25 bp, Probe Sequence
cttggcacagtctcatgttaacttg

SEQ ID NO: 180382 - DNA, 25 bp, Probe Sequence
cattacacagcctactgtaaaaatg

SEQ ID NO: 180383 - DNA, 25 bp, Probe Sequence
cttaccagccactttgcaaaaactg

SEQ ID NO: 180384 - DNA, 25 bp, Probe Sequence
ctaagcacctattttggaaaactgg

SEQ ID NO: 180385 - DNA, 25 bp, Probe Sequence
cttacacctgttatggaaaatgtca

SEQ ID NO: 180386 - DNA, 25 bp, Probe Sequence
cttaacccttagcatggaaatccaa

SEQ ID NO: 180387 - DNA, 25 bp, Probe Sequence
gtgttaccgataccgggaagacctg

SEQ ID NO: 180388 - DNA, 25 bp, Probe Sequence
ctgttaacttagtaggtggtacctg

SEQ ID NO: 180389 - DNA, 25 bp, Probe Sequence
cattctttttaaacggatgataccg

SEQ ID NO: 180390 - DNA, 25 bp, Probe Sequence
cattccattatttgtaaagttacct

SEQ ID NO: 180391 - DNA, 25 bp, Probe Sequence
cattcatttcttttatacctttcct

SEQ ID NO: 180392 - DNA, 25 bp, Probe Sequence
cattgatttttatatctcatatatt

SEQ ID NO: 180393 - DNA, 25 bp, Probe Sequence
cattcatttctctaacagcagtaat

SEQ ID NO: 180394 - DNA, 25 bp, Probe Sequence
cattcttctgatgtaacatgtgata

SEQ ID NO: 180395 - DNA, 25 bp, Probe Sequence
cattctttcatcttgcacactggaa

SEQ ID NO: 180396 - DNA, 25 bp, Probe Sequence
cattttctgctattatcactgataa

SEQ ID NO: 180397 - DNA, 25 bp, Probe Sequence
cattttgcgagattatcctgatgga

SEQ ID NO: 180398 - DNA, 25 bp, Probe Sequence
cattgtgatgcgttcttgccagtac

SEQ ID NO: 180399 - DNA, 25 bp, Probe Sequence
cattgacagggctggccttagcagg

SEQ ID NO: 180400 - DNA, 25 bp, Probe Sequence
cattcacgtggttcactttcacggc

SEQ ID NO: 180401 - DNA, 25 bp, Probe Sequence
cattcaccgagagcctatatctagg

SEQ ID NO: 180402 - DNA, 25 bp, Probe Sequence
cattccaggcaagtccattcatgtc

SEQ ID NO: 180403 - DNA, 25 bp, Probe Sequence
cattcacaatgattttgttctctgc

SEQ ID NO: 180404 - DNA, 25 bp, Probe Sequence
cattaatgtaattagcattcctgtt

SEQ ID NO: 180405 - DNA, 25 bp, Probe Sequence
cattctgattaaatactgtgcctta

SEQ ID NO: 180406 - DNA, 25 bp, Probe Sequence
cattttctacaatcatgtgcttatt

SEQ ID NO: 180407 - DNA, 25 bp, Probe Sequence
cattcttcacaatcacgacttctat

SEQ ID NO: 180408 - DNA, 25 bp, Probe Sequence
cattctccacgatgcagcgtatttc

SEQ ID NO: 180409 - DNA, 25 bp, Probe Sequence
cattctccaaattcagggcgcgatc

SEQ ID NO: 180410 - DNA, 25 bp, Probe Sequence
cattgctgcgcagatttgcagggtt

SEQ ID NO: 180411 - DNA, 25 bp, Probe Sequence
cattctgccttgctatgggttgttc

SEQ ID NO: 180412 - DNA, 25 bp, Probe Sequence
cattcgctgcattcgtaaggcctgt

SEQ ID NO: 180413 - DNA, 25 bp, Probe Sequence
cttcctgcccggaaagcagttgaag

SEQ ID NO: 180414 - DNA, 25 bp, Probe Sequence
cattcactcccacctaaaacagaac

SEQ ID NO: 180415 - DNA, 25 bp, Probe Sequence
cattttcctacctatattacacaaa

SEQ ID NO: 180416 - DNA, 25 bp, Probe Sequence
cattttcccactcattctgaattaa

SEQ ID NO: 180417 - DNA, 25 bp, Probe Sequence
cattttcctgcttgtcttagaagaa

SEQ ID NO: 180418 - DNA, 25 bp, Probe Sequence
cattttctggtactctgtgaaagaa

SEQ ID NO: 180419 - DNA, 25 bp, Probe Sequence
cttgtttggaacttgtcataaaatc

SEQ ID NO: 180420 - DNA, 25 bp, Probe Sequence
cttgatttgggccttgaagagtaat

SEQ ID NO: 180421 - DNA, 25 bp, Probe Sequence
cattatctttgccagttggagtgct

SEQ ID NO: 180422 - DNA, 25 bp, Probe Sequence
cattgatgcatgggtgtttggagat

SEQ ID NO: 180423 - DNA, 25 bp, Probe Sequence
cattgagcagttagctcatttgaga

SEQ ID NO: 180424 - DNA, 25 bp, Probe Sequence
cattagcctgtgactctgtgatgta

SEQ ID NO: 180425 - DNA, 25 bp, Probe Sequence
cattcacctagactattatgccaga

SEQ ID NO: 180426 - DNA, 25 bp, Probe Sequence
cattcctcgactcagtatccagatg

SEQ ID NO: 180427 - DNA, 25 bp, Probe Sequence
cattccctgcagtgcagtacctatc

SEQ ID NO: 180428 - DNA, 25 bp, Probe Sequence
cattgtccagctgaactacctgtcc

SEQ ID NO: 180429 - DNA, 25 bp, Probe Sequence
cattgtccagctgaactacctgtcc

SEQ ID NO: 180430 - DNA, 25 bp, Probe Sequence
cttcaccagtcaaagcgaactacta

SEQ ID NO: 180431 - DNA, 25 bp, Probe Sequence
cttgaccaccaaaggaactacctat

SEQ ID NO: 180432 - DNA, 25 bp, Probe Sequence
cttgacgcaccaagcggaactgcgc

SEQ ID NO: 180433 - DNA, 25 bp, Probe Sequence
cttgtcaagctagcagaaactccat

SEQ ID NO: 180434 - DNA, 25 bp, Probe Sequence
cattgtccaccactaaaatgcctct

SEQ ID NO: 180435 - DNA, 25 bp, Probe Sequence
cttgtagtccatttaaatgccctca

SEQ ID NO: 180436 - DNA, 25 bp, Probe Sequence
cattaggcctatttaggtgacacta

SEQ ID NO: 180437 - DNA, 25 bp, Probe Sequence
cattaggcctatttaggtgacacta

SEQ ID NO: 180438 - DNA, 25 bp, Probe Sequence
cattgggccatagtttgttaatctc

SEQ ID NO: 180439 - DNA, 25 bp, Probe Sequence
cattgcaggactttactgtttctcc

SEQ ID NO: 180440 - DNA, 25 bp, Probe Sequence
cattgtgtgctctcagatttcttcc

SEQ ID NO: 180441 - DNA, 25 bp, Probe Sequence
cattgtgcaatacagtttcattaac

SEQ ID NO: 180442 - DNA, 25 bp, Probe Sequence
cattctgcaaatgttattctgttgt

SEQ ID NO: 180443 - DNA, 25 bp, Probe Sequence
cattccttcatgtctttatttagtt

SEQ ID NO: 180444 - DNA, 25 bp, Probe Sequence
cattgtttcagttatctatccaagc

SEQ ID NO: 180445 - DNA, 25 bp, Probe Sequence
cattgtttattgtattttgaaccaa

SEQ ID NO: 180446 - DNA, 25 bp, Probe Sequence
cattagcccaggtgttatggactaa

SEQ ID NO: 180447 - DNA, 25 bp, Probe Sequence
cattaactcaagtccaaagtccaaa

SEQ ID NO: 180448 - DNA, 25 bp, Probe Sequence
cattacctcatatctcaaaggagaa

SEQ ID NO: 180449 - DNA, 25 bp, Probe Sequence
cattacccacacacgaaggaaagca

SEQ ID NO: 180450 - DNA, 25 bp, Probe Sequence
cttggctcccccggagggagcaaga

SEQ ID NO: 180451 - DNA, 25 bp, Probe Sequence
cttcctcccaagtggtgcctaaagt

SEQ ID NO: 180452 - DNA, 25 bp, Probe Sequence
cttcctcccagagggtgtttcctag

SEQ ID NO: 180453 - DNA, 25 bp, Probe Sequence
gctgtggtcgaagaggttttcctgg

SEQ ID NO: 180454 - DNA, 25 bp, Probe Sequence
cttggagcgtatggaggactttact

SEQ ID NO: 180455 - DNA, 25 bp, Probe Sequence
cttgtggctttgcaaccattttcat

SEQ ID NO: 180456 - DNA, 25 bp, Probe Sequence
cattgatgactgatgaaaccatgta

SEQ ID NO: 180457 - DNA, 25 bp, Probe Sequence
cattgcatgtgcatggaaacaaaga

SEQ ID NO: 180458 - DNA, 25 bp, Probe Sequence
cttgatagtttgcaggcaaaacaaa

SEQ ID NO: 180459 - DNA, 25 bp, Probe Sequence
cattctagtaatcagccaattgcct

SEQ ID NO: 180460 - DNA, 25 bp, Probe Sequence
cttcaatgttaccaccgttgacacc

SEQ ID NO: 180461 - DNA, 25 bp, Probe Sequence
cattaagctttaaccattatggcac

SEQ ID NO: 180462 - DNA, 25 bp, Probe Sequence
cattgacagcacatataccataacc

SEQ ID NO: 180463 - DNA, 25 bp, Probe Sequence
cattgacagcgaacatttcatgaaa

SEQ ID NO: 180464 - DNA, 25 bp, Probe Sequence
cttgacgcatgaagtttcgcaacat

SEQ ID NO: 180465 - DNA, 25 bp, Probe Sequence
cattcactatacttttctaactgag

SEQ ID NO: 180466 - DNA, 25 bp, Probe Sequence
cattcaccataaatttttgccagga

SEQ ID NO: 180467 - DNA, 25 bp, Probe Sequence
cattcaccataaatttttgccagga

SEQ ID NO: 180468 - DNA, 25 bp, Probe Sequence
cattgcccacaaatccttttaggaa

SEQ ID NO: 180469 - DNA, 25 bp, Probe Sequence
cattccccaccacattatgtcaaga

SEQ ID NO: 180470 - DNA, 25 bp, Probe Sequence
cattccttacccattagtctcagaa

SEQ ID NO: 180471 - DNA, 25 bp, Probe Sequence
cattgcctttctttttaccattaat

SEQ ID NO: 180472 - DNA, 25 bp, Probe Sequence
ctcggttgtgcctatttggccttgg

SEQ ID NO: 180473 - DNA, 25 bp, Probe Sequence
cttggttgatcctcttgtactggga

SEQ ID NO: 180474 - DNA, 25 bp, Probe Sequence
cttgaatgtcccagtctattcggga

SEQ ID NO: 180475 - DNA, 25 bp, Probe Sequence
cttgtagtcccagctactcgagagg

SEQ ID NO: 180476 - DNA, 25 bp, Probe Sequence
cttgtcagggtctcttcggagaccc

SEQ ID NO: 180477 - DNA, 25 bp, Probe Sequence
cttgtacggtcactgttggtgcgag

SEQ ID NO: 180478 - DNA, 25 bp, Probe Sequence
cttgtccagggaggttgggctaagg

SEQ ID NO: 180479 - DNA, 25 bp, Probe Sequence
cttggcctgggggttaagagcacag

SEQ ID NO: 180480 - DNA, 25 bp, Probe Sequence
cttggtctgcaacgggctaatccac

SEQ ID NO: 180481 - DNA, 25 bp, Probe Sequence
cttggattgatatcttcttatctca

SEQ ID NO: 180482 - DNA, 25 bp, Probe Sequence
cttggtgtgtatgctcttcattgtg

SEQ ID NO: 180483 - DNA, 25 bp, Probe Sequence
cattctgtgtttactctttgcatta

SEQ ID NO: 180484 - DNA, 25 bp, Probe Sequence
cttttgcatttctcaattgcatcgg

SEQ ID NO: 180485 - DNA, 25 bp, Probe Sequence
cttgctttatactctgatatggggt

SEQ ID NO: 180486 - DNA, 25 bp, Probe Sequence
cttgtgtaagcctcgacctgtagct

SEQ ID NO: 180487 - DNA, 25 bp, Probe Sequence
cttgtgaaattctcttgtctaatct

SEQ ID NO: 180488 - DNA, 25 bp, Probe Sequence
cattgataacatgttttgccaactt

SEQ ID NO: 180489 - DNA, 25 bp, Probe Sequence
cattgacaacagggttcgtagaaga

SEQ ID NO: 180490 - DNA, 25 bp, Probe Sequence
cttgaacacagagcccctagagatt

SEQ ID NO: 180491 - DNA, 25 bp, Probe Sequence
ctgtgaagaacagaccctgggtccc

SEQ ID NO: 180492 - DNA, 25 bp, Probe Sequence
cttgatcagaaggacccacggcgtc

SEQ ID NO: 180493 - DNA, 25 bp, Probe Sequence
cttgagcagatacaccgaggagtta

SEQ ID NO: 180494 - DNA, 25 bp, Probe Sequence
ctatgagagagactaaaggggtaag

SEQ ID NO: 180495 - DNA, 25 bp, Probe Sequence
cttggcggatcttacagagcagcag

SEQ ID NO: 180496 - DNA, 25 bp, Probe Sequence
cttgtgctgctgcctagacagtagg

SEQ ID NO: 180497 - DNA, 25 bp, Probe Sequence
cattccctgtgcaacatcagatttg

SEQ ID NO: 180498 - DNA, 25 bp, Probe Sequence
cttgacaagcttgttggggagttcc

SEQ ID NO: 180499 - DNA, 25 bp, Probe Sequence
ctatggggtggtcaggggattccgg

SEQ ID NO: 180500 - DNA, 25 bp, Probe Sequence
cttctgaactggtgcgcgtggttcc

SEQ ID NO: 180501 - DNA, 25 bp, Probe Sequence
cttcgagacaggagatgcaggggcc

SEQ ID NO: 180502 - DNA, 25 bp, Probe Sequence
cttgggacggcagggatggcgagct

SEQ ID NO: 180503 - DNA, 25 bp, Probe Sequence
cattggggctgtggggatcggcatt

SEQ ID NO: 180504 - DNA, 25 bp, Probe Sequence
cattgcagggcaacctggacccctg

SEQ ID NO: 180505 - DNA, 25 bp, Probe Sequence
cattgatgggcacaatgacctcccc

SEQ ID NO: 180506 - DNA, 25 bp, Probe Sequence
cattgagatgtaccgagacctcttc

SEQ ID NO: 180507 - DNA, 25 bp, Probe Sequence
cattggtgtggggtagcttgtcctg

SEQ ID NO: 180508 - DNA, 25 bp, Probe Sequence
cattgcaactggctgtagtttcctt

SEQ ID NO: 180509 - DNA, 25 bp, Probe Sequence
cattgaatcggtagtcccagttctt

SEQ ID NO: 180510 - DNA, 25 bp, Probe Sequence
cattgctacgtttctaccagtgttt

SEQ ID NO: 180511 - DNA, 25 bp, Probe Sequence
cattggaagtcatcttggagcgtat

SEQ ID NO: 180512 - DNA, 25 bp, Probe Sequence
cattggagagactgcatgggctcag

SEQ ID NO: 180513 - DNA, 25 bp, Probe Sequence
cattgaatgagatggatcagtggat

SEQ ID NO: 180514 - DNA, 25 bp, Probe Sequence
cattgtccagatttgtcgtgttaca

SEQ ID NO: 180515 - DNA, 25 bp, Probe Sequence
cattctctgcagttttctgttgggc

SEQ ID NO: 180516 - DNA, 25 bp, Probe Sequence
cattcttgccgtattctcatgatcc

SEQ ID NO: 180517 - DNA, 25 bp, Probe Sequence
cattcattcagatacttcttatccc

SEQ ID NO: 180518 - DNA, 25 bp, Probe Sequence
cattctcatgcgagccttcattgat

SEQ ID NO: 180519 - DNA, 25 bp, Probe Sequence
cattctttgaacctcatctctgatg

SEQ ID NO: 180520 - DNA, 25 bp, Probe Sequence
cattcttatcacatatcatagcttg

SEQ ID NO: 180521 - DNA, 25 bp, Probe Sequence
cattgattacttcatcacagacatg

SEQ ID NO: 180522 - DNA, 25 bp, Probe Sequence
cattgtcccattcacacagatattt

SEQ ID NO: 180523 - DNA, 25 bp, Probe Sequence
cattccccatcttaactgatttaac

SEQ ID NO: 180524 - DNA, 25 bp, Probe Sequence
cattctgccttttatactgtctaaa

SEQ ID NO: 180525 - DNA, 25 bp, Probe Sequence
cattctaccatcagacaagtctaaa

SEQ ID NO: 180526 - DNA, 25 bp, Probe Sequence
cattcatactaaaccacagttgcca

SEQ ID NO: 180527 - DNA, 25 bp, Probe Sequence
cttctacttgccacaccagtgcaat

SEQ ID NO: 180528 - DNA, 25 bp, Probe Sequence
cattaactggcctgatctaacaatg

SEQ ID NO: 180529 - DNA, 25 bp, Probe Sequence
cattcaaggatccaggatgccaaaa

SEQ ID NO: 180530 - DNA, 25 bp, Probe Sequence
cttgtagtacagagatccagataag

SEQ ID NO: 180531 - DNA, 25 bp, Probe Sequence
cttgtgaggacgcgtccacagggcc

SEQ ID NO: 180532 - DNA, 25 bp, Probe Sequence
ctttaagggtaggcccaggcagcca

SEQ ID NO: 180533 - DNA, 25 bp, Probe Sequence
cttaccattggtaacccagagtgct

SEQ ID NO: 180534 - DNA, 25 bp, Probe Sequence
cttccttcctttgaccaatgagcat

SEQ ID NO: 180535 - DNA, 25 bp, Probe Sequence
cttccagtaattcgccaaaatgacg

SEQ ID NO: 180536 - DNA, 25 bp, Probe Sequence
cattccttactaccctgaatacctg

SEQ ID NO: 180537 - DNA, 25 bp, Probe Sequence
cattcccaagtagcaaagagaccat

SEQ ID NO: 180538 - DNA, 25 bp, Probe Sequence
cattcaccacattatcagaataagt

SEQ ID NO: 180539 - DNA, 25 bp, Probe Sequence
cattgtcgcaagtcacagaattatt

SEQ ID NO: 180540 - DNA, 25 bp, Probe Sequence
cttgtcaccaaggcagcgcatgtat

SEQ ID NO: 180541 - DNA, 25 bp, Probe Sequence
cattctcatccatccaggatgtact

SEQ ID NO: 180542 - DNA, 25 bp, Probe Sequence
cattctcacataagcccagttcatc

SEQ ID NO: 180543 - DNA, 25 bp, Probe Sequence
cattaagcagcatgaccgcttcctg

SEQ ID NO: 180544 - DNA, 25 bp, Probe Sequence
cattgacatcagtcgagtcaccccc

SEQ ID NO: 180545 - DNA, 25 bp, Probe Sequence
cattgagcagtatgggcacatgccc

SEQ ID NO: 180546 - DNA, 25 bp, Probe Sequence
cttgacacttagccgctgtctcgcc

SEQ ID NO: 180547 - DNA, 25 bp, Probe Sequence
cttgaccaggagcctgatgtccgga

SEQ ID NO: 180548 - DNA, 25 bp, Probe Sequence
cttgatgccatatgccttggggagg

SEQ ID NO: 180549 - DNA, 25 bp, Probe Sequence
cattggccgagctcctggggagctc

SEQ ID NO: 180550 - DNA, 25 bp, Probe Sequence
cttggcatggacaccatctggcgag

SEQ ID NO: 180551 - DNA, 25 bp, Probe Sequence
cttgacatgctgtattccacgaggc

SEQ ID NO: 180552 - DNA, 25 bp, Probe Sequence
cttgtctgctaaataaacatgtgcc

SEQ ID NO: 180553 - DNA, 25 bp, Probe Sequence
cttgacagtgacttgaaacatttgc

SEQ ID NO: 180554 - DNA, 25 bp, Probe Sequence
cttgtaattttagcactttgggagg

SEQ ID NO: 180555 - DNA, 25 bp, Probe Sequence
cttctgttattgaaaccctgtgggc

SEQ ID NO: 180556 - DNA, 25 bp, Probe Sequence
ctctgcgttacaaactcctaggagg

SEQ ID NO: 180557 - DNA, 25 bp, Probe Sequence
cattggttatcaggatataccagga

SEQ ID NO: 180558 - DNA, 25 bp, Probe Sequence
cattggatgcaaagagatgtacagg

SEQ ID NO: 180559 - DNA, 25 bp, Probe Sequence
cattggagccaatatgtaacatact

SEQ ID NO: 180560 - DNA, 25 bp, Probe Sequence
cattgtacagcatgctatctatagt

SEQ ID NO: 180561 - DNA, 25 bp, Probe Sequence
cattgcccagcactgtctcatagaa

SEQ ID NO: 180562 - DNA, 25 bp, Probe Sequence
cattgagaacagctgcatcgcggcc

SEQ ID NO: 180563 - DNA, 25 bp, Probe Sequence
cattgaatccagctctccagaggtg

SEQ ID NO: 180564 - DNA, 25 bp, Probe Sequence
cttgcgacgatgcttgctggaggat

SEQ ID NO: 180565 - DNA, 25 bp, Probe Sequence
cattgccacggccatgagggctgga

SEQ ID NO: 180566 - DNA, 25 bp, Probe Sequence
cattgccatccaggcagaggagatc

SEQ ID NO: 180567 - DNA, 25 bp, Probe Sequence
cattgccatatcggctcgcaaatct

SEQ ID NO: 180568 - DNA, 25 bp, Probe Sequence
cttgtgctatgcgcttcaactagac

SEQ ID NO: 180569 - DNA, 25 bp, Probe Sequence
cttggtggtcctgcaccaaactaca

SEQ ID NO: 180570 - DNA, 25 bp, Probe Sequence
cttggaggtccttcccagagagaaa

SEQ ID NO: 180571 - DNA, 25 bp, Probe Sequence
cttggcttctttgcccataagaaaa

SEQ ID NO: 180572 - DNA, 25 bp, Probe Sequence
cttggctaattcgcccagaatatat

SEQ ID NO: 180573 - DNA, 25 bp, Probe Sequence
gctttggactgttactccggtaaag

SEQ ID NO: 180574 - DNA, 25 bp, Probe Sequence
cttgtgaacaggtactttgggaaat

SEQ ID NO: 180575 - DNA, 25 bp, Probe Sequence
cttgatttctggtgtcccggaaata

SEQ ID NO: 180576 - DNA, 25 bp, Probe Sequence
cttgtctcctgtaagaaccctgaag

SEQ ID NO: 180577 - DNA, 25 bp, Probe Sequence
cattgcctgcctcaagaacctgcag

SEQ ID NO: 180578 - DNA, 25 bp, Probe Sequence
cattctctgcctgtactgaagctga

SEQ ID NO: 180579 - DNA, 25 bp, Probe Sequence
cattcgatgcgtgtttaatgatgat

SEQ ID NO: 180580 - DNA, 25 bp, Probe Sequence
cattcactggtgctgactacataga

SEQ ID NO: 180581 - DNA, 25 bp, Probe Sequence
cattgtctcctggctgcaataacaa

SEQ ID NO: 180582 - DNA, 25 bp, Probe Sequence
cttgatgtactggagcaatcagatc

SEQ ID NO: 180583 - DNA, 25 bp, Probe Sequence
cttgtgatactgtcgctcttgatgt

SEQ ID NO: 180584 - DNA, 25 bp, Probe Sequence
ctttgtcctaatcctggaattaagt

SEQ ID NO: 180585 - DNA, 25 bp, Probe Sequence
cttgtgtgttaaacttgatttcata

SEQ ID NO: 180586 - DNA, 25 bp, Probe Sequence
cattgggtataatctgtgatttatt

SEQ ID NO: 180587 - DNA, 25 bp, Probe Sequence
cattgtatgttgcttctgtggttat

SEQ ID NO: 180588 - DNA, 25 bp, Probe Sequence
cttgtctttgtgttctgtggtactt

SEQ ID NO: 180589 - DNA, 25 bp, Probe Sequence
ctagtgccttttgaggggttcccat

SEQ ID NO: 180590 - DNA, 25 bp, Probe Sequence
ctagtctttatttatggtcgtgccc

SEQ ID NO: 180591 - DNA, 25 bp, Probe Sequence
cttgttttatagtggtcatatgacc

SEQ ID NO: 180592 - DNA, 25 bp, Probe Sequence
cttcctttttgtccgacatcttgac

SEQ ID NO: 180593 - DNA, 25 bp, Probe Sequence
cttccaacttaggaccaacctgaga

SEQ ID NO: 180594 - DNA, 25 bp, Probe Sequence
cttccaagtgaagatccatttaaga

SEQ ID NO: 180595 - DNA, 25 bp, Probe Sequence
cattggccagtggactcatccattc

SEQ ID NO: 180596 - DNA, 25 bp, Probe Sequence
cattggagcagtgtgtccctgatcg

SEQ ID NO: 180597 - DNA, 25 bp, Probe Sequence
cttggagcttctggttcctatcagt

SEQ ID NO: 180598 - DNA, 25 bp, Probe Sequence
cttggccttgggttcattcaagctc

SEQ ID NO: 180599 - DNA, 25 bp, Probe Sequence
cttccttgggggtcttcaatgcagt

SEQ ID NO: 180600 - DNA, 25 bp, Probe Sequence
cttccggggagtgcatcggtacttg

SEQ ID NO: 180601 - DNA, 25 bp, Probe Sequence
cttccctggaactaaccagtccttg

SEQ ID NO: 180602 - DNA, 25 bp, Probe Sequence
ctacctcatggctgaaaacaggcac

SEQ ID NO: 180603 - DNA, 25 bp, Probe Sequence
cattcctcattgggaccaggtgggc

SEQ ID NO: 180604 - DNA, 25 bp, Probe Sequence
cattgcccttcgcacataaatgtga

SEQ ID NO: 180605 - DNA, 25 bp, Probe Sequence
cattctcctgtctgtataggatata

SEQ ID NO: 180606 - DNA, 25 bp, Probe Sequence
cattccttgagctgtacgggaagtc

SEQ ID NO: 180607 - DNA, 25 bp, Probe Sequence
cattcctctgacaggaacagaaagt

SEQ ID NO: 180608 - DNA, 25 bp, Probe Sequence
cattcttgctaatggttagaacagt

SEQ ID NO: 180609 - DNA, 25 bp, Probe Sequence
cattgacgctaatggctgtaaggcg

SEQ ID NO: 180610 - DNA, 25 bp, Probe Sequence
cattgacgcgaatgggctgtaggcg

SEQ ID NO: 180611 - DNA, 25 bp, Probe Sequence
ccgccacgatttaggttagtcagtt

SEQ ID NO: 180612 - DNA, 25 bp, Probe Sequence
cattccaggttttgagtttgatcga

SEQ ID NO: 180613 - DNA, 25 bp, Probe Sequence
cattgacagtctttctagtaagcac

SEQ ID NO: 180614 - DNA, 25 bp, Probe Sequence
cattgacttgccagctagtctcaga

SEQ ID NO: 180615 - DNA, 25 bp, Probe Sequence
cattcctaccaagcagacacagacc

SEQ ID NO: 180616 - DNA, 25 bp, Probe Sequence
cattccgcttcaaggcagagcaaat

SEQ ID NO: 180617 - DNA, 25 bp, Probe Sequence
cattcttgcttagacagtcagcatt

SEQ ID NO: 180618 - DNA, 25 bp, Probe Sequence
cattcctttcagccatcgtcctttc

SEQ ID NO: 180619 - DNA, 25 bp, Probe Sequence
cattcctcttctccaagatcatttt

SEQ ID NO: 180620 - DNA, 25 bp, Probe Sequence
cattcttctgttaccgactttttga

SEQ ID NO: 180621 - DNA, 25 bp, Probe Sequence
cattcattctttcagtaaatattta

SEQ ID NO: 180622 - DNA, 25 bp, Probe Sequence
cattctgtttactgccacaagcact

SEQ ID NO: 180623 - DNA, 25 bp, Probe Sequence
cattgcgatttgaggctcagcaaca

SEQ ID NO: 180624 - DNA, 25 bp, Probe Sequence
cattgccatttgtagaccacacctt

SEQ ID NO: 180625 - DNA, 25 bp, Probe Sequence
cttccaaaccaaccacaccttgaag

SEQ ID NO: 180626 - DNA, 25 bp, Probe Sequence
cttgccaagacctgtgattccttca

SEQ ID NO: 180627 - DNA, 25 bp, Probe Sequence
cttccgaacgcacacttcaggagca

SEQ ID NO: 180628 - DNA, 25 bp, Probe Sequence
cttgtcgaaatccacctgtcaggac

SEQ ID NO: 180629 - DNA, 25 bp, Probe Sequence
cattggccttaccagttgtcaggag

SEQ ID NO: 180630 - DNA, 25 bp, Probe Sequence
cttggcctaaaggtctgtatgtgag

SEQ ID NO: 180631 - DNA, 25 bp, Probe Sequence
cttggcgcttgaaaatgcagtagtg

SEQ ID NO: 180632 - DNA, 25 bp, Probe Sequence
cttggacatctgtaaatctttgtac

SEQ ID NO: 180633 - DNA, 25 bp, Probe Sequence
cttggcaactactgattttgttctt

SEQ ID NO: 180634 - DNA, 25 bp, Probe Sequence
cttgagaactttattactcttgttc

SEQ ID NO: 180635 - DNA, 25 bp, Probe Sequence
ctaagcccttgctcttatttttggc

SEQ ID NO: 180636 - DNA, 25 bp, Probe Sequence
cttcagaccttacctgggttttcag

SEQ ID NO: 180637 - DNA, 25 bp, Probe Sequence
cttgagcccataagcctgggagttc

SEQ ID NO: 180638 - DNA, 25 bp, Probe Sequence
cttggcccaggggtcagcagagctt

SEQ ID NO: 180639 - DNA, 25 bp, Probe Sequence
cttggcccaggggtcagcagagctt

SEQ ID NO: 180640 - DNA, 25 bp, Probe Sequence
cttggtgcccggatggtgagcatat

SEQ ID NO: 180641 - DNA, 25 bp, Probe Sequence
cttggtgcccaacgtggttgtgtta

SEQ ID NO: 180642 - DNA, 25 bp, Probe Sequence
cattggggccaatgagagtgtctca

SEQ ID NO: 180643 - DNA, 25 bp, Probe Sequence
cttcgggccaagcaagatttcctga

SEQ ID NO: 180644 - DNA, 25 bp, Probe Sequence
cttcggcgccagtgaaataccacta

SEQ ID NO: 180645 - DNA, 25 bp, Probe Sequence
cttacggccaagtttcttctagtat

SEQ ID NO: 180646 - DNA, 25 bp, Probe Sequence
cattgactaccagatttatttttta

SEQ ID NO: 180647 - DNA, 25 bp, Probe Sequence
cattgactaccagatttatttttta

SEQ ID NO: 180648 - DNA, 25 bp, Probe Sequence
cattgactaccagatttatttttta

SEQ ID NO: 180649 - DNA, 25 bp, Probe Sequence
cattgtctaacacacttctttttct

SEQ ID NO: 180650 - DNA, 25 bp, Probe Sequence
cattctctaaaattccactgtttta

SEQ ID NO: 180651 - DNA, 25 bp, Probe Sequence
cttgtcataaaatcgatcagtttgg

SEQ ID NO: 180652 - DNA, 25 bp, Probe Sequence
cttgtcagagccaaccgtggtcagg

SEQ ID NO: 180653 - DNA, 25 bp, Probe Sequence
ctctgctgtaggaagcccggtacgt

SEQ ID NO: 180654 - DNA, 25 bp, Probe Sequence
cttgattcagatcaggtcggctatc

SEQ ID NO: 180655 - DNA, 25 bp, Probe Sequence
cttcttattcggcagggcttcgtga

SEQ ID NO: 180656 - DNA, 25 bp, Probe Sequence
cattggtttcttctgggttgagtga

SEQ ID NO: 180657 - DNA, 25 bp, Probe Sequence
cttgttttctggcttggaaggctga

SEQ ID NO: 180658 - DNA, 25 bp, Probe Sequence
cttgtacccatgtggtgtaaccata

SEQ ID NO: 180659 - DNA, 25 bp, Probe Sequence
cttgtcaccctgggacagtaatgcc

SEQ ID NO: 180660 - DNA, 25 bp, Probe Sequence
cttgtccactggggaactgggcatc

SEQ ID NO: 180661 - DNA, 25 bp, Probe Sequence
cttaactctgacacaattggatgct

SEQ ID NO: 180662 - DNA, 25 bp, Probe Sequence
cttgatacccactctctgtgaatac

SEQ ID NO: 180663 - DNA, 25 bp, Probe Sequence
cttgcaaccccttacgtgagatgtt

SEQ ID NO: 180664 - DNA, 25 bp, Probe Sequence
cttgaaccagcacacagggctattt

SEQ ID NO: 180665 - DNA, 25 bp, Probe Sequence
cttgttcaggcacgccagaaggatg

SEQ ID NO: 180666 - DNA, 25 bp, Probe Sequence
cttgtccagggcccgaggagagtga

SEQ ID NO: 180667 - DNA, 25 bp, Probe Sequence
cattgtcctggtcacccagacacaa

SEQ ID NO: 180668 - DNA, 25 bp, Probe Sequence
cttgtcctggatccaacaccaaata

SEQ ID NO: 180669 - DNA, 25 bp, Probe Sequence
cttcaacggaccacaccaaaatgcc

SEQ ID NO: 180670 - DNA, 25 bp, Probe Sequence
cttcaataccccacttgcaacaatg

SEQ ID NO: 180671 - DNA, 25 bp, Probe Sequence
cttgtgtaccgagagcttgaaaagt

SEQ ID NO: 180672 - DNA, 25 bp, Probe Sequence
cttggcgacccagctgttaagcaga

SEQ ID NO: 180673 - DNA, 25 bp, Probe Sequence
cttggaaggagcatcagtttgacag

SEQ ID NO: 180674 - DNA, 25 bp, Probe Sequence
cttggagaagcactcctctttgccg

SEQ ID NO: 180675 - DNA, 25 bp, Probe Sequence
cttggaaagatgtccttttctgaga

SEQ ID NO: 180676 - DNA, 25 bp, Probe Sequence
cattgcagcagataacttttttgag

SEQ ID NO: 180677 - DNA, 25 bp, Probe Sequence
cttgcagaaggaactaccatttaat

SEQ ID NO: 180678 - DNA, 25 bp, Probe Sequence
cttgctgaatccttctaaattctaa

SEQ ID NO: 180679 - DNA, 25 bp, Probe Sequence
cattgctttcgtgtaaattatgtaa

SEQ ID NO: 180680 - DNA, 25 bp, Probe Sequence
cattgtttcgtaacacagcattgta

SEQ ID NO: 180681 - DNA, 25 bp, Probe Sequence
cattggttcctttgatagccattca

SEQ ID NO: 180682 - DNA, 25 bp, Probe Sequence
cattgccttgcacagaattgcccca

SEQ ID NO: 180683 - DNA, 25 bp, Probe Sequence
cattgctgttctctgtatcgtgatc

SEQ ID NO: 180684 - DNA, 25 bp, Probe Sequence
cattgcttttatagattcttgattt

SEQ ID NO: 180685 - DNA, 25 bp, Probe Sequence
cattgcacagtggattgttttgatt

SEQ ID NO: 180686 - DNA, 25 bp, Probe Sequence
cattccagtaatggtatcactgttg

SEQ ID NO: 180687 - DNA, 25 bp, Probe Sequence
cattccaaatatgagatgcattgtt

SEQ ID NO: 180688 - DNA, 25 bp, Probe Sequence
cattccaatttcatgttgatgatat

SEQ ID NO: 180689 - DNA, 25 bp, Probe Sequence
cattccgcatggactctgggatcaa

SEQ ID NO: 180690 - DNA, 25 bp, Probe Sequence
cattccgagtggctgcctacaacaa

SEQ ID NO: 180691 - DNA, 25 bp, Probe Sequence
cttccagaccgcggcctaataatga

SEQ ID NO: 180692 - DNA, 25 bp, Probe Sequence
cgtccgttaacacctaatagtgatt

SEQ ID NO: 180693 - DNA, 25 bp, Probe Sequence
cgtcacgttaacacaatgtcactgt

SEQ ID NO: 180694 - DNA, 25 bp, Probe Sequence
cattcgtttaatgaacttgactgtc

SEQ ID NO: 180695 - DNA, 25 bp, Probe Sequence
cattcctgtttgtaatccttggttc

SEQ ID NO: 180696 - DNA, 25 bp, Probe Sequence
cattccttttgctctttgtggttgg

SEQ ID NO: 180697 - DNA, 25 bp, Probe Sequence
cattgctgtcaagttcctttgggtt

SEQ ID NO: 180698 - DNA, 25 bp, Probe Sequence
cattgcttcaacattgccttcattc

SEQ ID NO: 180699 - DNA, 25 bp, Probe Sequence
cattgtaattcaaatccattcagtg

SEQ ID NO: 180700 - DNA, 25 bp, Probe Sequence
cttgaaatatcaagacaattgcaga

SEQ ID NO: 180701 - DNA, 25 bp, Probe Sequence
cttgaactggcaggaaatgcatcaa

SEQ ID NO: 180702 - DNA, 25 bp, Probe Sequence
cttgtcacgagaggtacagctgccc

SEQ ID NO: 180703 - DNA, 25 bp, Probe Sequence
ctattgctcgggctgtagtgccctc

SEQ ID NO: 180704 - DNA, 25 bp, Probe Sequence
cattgaggggacctgtttgcctcct

SEQ ID NO: 180705 - DNA, 25 bp, Probe Sequence
cttgtagggatgcctttctagtcct

SEQ ID NO: 180706 - DNA, 25 bp, Probe Sequence
cttgtcagtgtgtggaccatggtca

SEQ ID NO: 180707 - DNA, 25 bp, Probe Sequence
cttgggctgctgaggggctagtgca

SEQ ID NO: 180708 - DNA, 25 bp, Probe Sequence
cttggctctggatgtggcctagata

SEQ ID NO: 180709 - DNA, 25 bp, Probe Sequence
cttggtcagtgtctactcatacata

SEQ ID NO: 180710 - DNA, 25 bp, Probe Sequence
cttggtaatggcatcactattcatg

SEQ ID NO: 180711 - DNA, 25 bp, Probe Sequence
cttgcctaattgttcacaatggtgg

SEQ ID NO: 180712 - DNA, 25 bp, Probe Sequence
cttgcacctcattttaccatgcgtg

SEQ ID NO: 180713 - DNA, 25 bp, Probe Sequence
cttgcacatgtaagttactcgagtt

SEQ ID NO: 180714 - DNA, 25 bp, Probe Sequence
cttccattttcctacaggcagtctc

SEQ ID NO: 180715 - DNA, 25 bp, Probe Sequence
gcagtcgttttcaccaggtacttac

SEQ ID NO: 180716 - DNA, 25 bp, Probe Sequence
tcccgtatatttgtctcgtacctac

SEQ ID NO: 180717 - DNA, 25 bp, Probe Sequence
cttcctttcattgtcttaggccttc

SEQ ID NO: 180718 - DNA, 25 bp, Probe Sequence
cattcctgttttgtacgagtgcctc

SEQ ID NO: 180719 - DNA, 25 bp, Probe Sequence
cttcatctggaagcctacggtgttc

SEQ ID NO: 180720 - DNA, 25 bp, Probe Sequence
cttcctggaacttctgtcgggttct

SEQ ID NO: 180721 - DNA, 25 bp, Probe Sequence
cttcctggtttgcctgtaggggtag

SEQ ID NO: 180722 - DNA, 25 bp, Probe Sequence
cttacttgctcctgcttacgaagta

SEQ ID NO: 180723 - DNA, 25 bp, Probe Sequence
cattgcaatcccagtgttaccacag

SEQ ID NO: 180724 - DNA, 25 bp, Probe Sequence
ctagctatagttaggaatacacaag

SEQ ID NO: 180725 - DNA, 25 bp, Probe Sequence
cttctgggtttgtatcatgaccaga

SEQ ID NO: 180726 - DNA, 25 bp, Probe Sequence
cttcagtgggttcttgagcgtgggt

SEQ ID NO: 180727 - DNA, 25 bp, Probe Sequence
cttcaagggcttctttgagctgttc

SEQ ID NO: 180728 - DNA, 25 bp, Probe Sequence
cttggaggaattccatgttatgttt

SEQ ID NO: 180729 - DNA, 25 bp, Probe Sequence
cttgaggtagatcacaggggtctgt

SEQ ID NO: 180730 - DNA, 25 bp, Probe Sequence
cttggagggatggcacgggggctgt

SEQ ID NO: 180731 - DNA, 25 bp, Probe Sequence
cttggagggatcccggagtctggtg

SEQ ID NO: 180732 - DNA, 25 bp, Probe Sequence
ctctgaggggacccctattcttcga

SEQ ID NO: 180733 - DNA, 25 bp, Probe Sequence
cttagcttcggacccatattttcca

SEQ ID NO: 180734 - DNA, 25 bp, Probe Sequence
cttgcccctggacagctattttaac

SEQ ID NO: 180735 - DNA, 25 bp, Probe Sequence
cttgaccctcagaaggcattcttta

SEQ ID NO: 180736 - DNA, 25 bp, Probe Sequence
cattgatttatcctctaatttttat

SEQ ID NO: 180737 - DNA, 25 bp, Probe Sequence
cttgttttcttaatatgcttcttga

SEQ ID NO: 180738 - DNA, 25 bp, Probe Sequence
tcatcgccattgtggcaggcctggt

SEQ ID NO: 180739 - DNA, 25 bp, Probe Sequence
cattgctctttttgtattttcgtag

SEQ ID NO: 180740 - DNA, 25 bp, Probe Sequence
cattgctctttctgattattctaat

SEQ ID NO: 180741 - DNA, 25 bp, Probe Sequence
cattggcttctcagatgtatttcaa

SEQ ID NO: 180742 - DNA, 25 bp, Probe Sequence
cttggacactgcagctcttttcagt

SEQ ID NO: 180743 - DNA, 25 bp, Probe Sequence
cttggacactgcagctcttttcagt

SEQ ID NO: 180744 - DNA, 25 bp, Probe Sequence
cttggacacacagtgtcttcctgtt

SEQ ID NO: 180745 - DNA, 25 bp, Probe Sequence
cttgcaatacacagttatcctttca

SEQ ID NO: 180746 - DNA, 25 bp, Probe Sequence
cttgaaccacaagtgaatctttctc

SEQ ID NO: 180747 - DNA, 25 bp, Probe Sequence
cttgagggaaatgcacactgtccca

SEQ ID NO: 180748 - DNA, 25 bp, Probe Sequence
ctagaggtaaagccacgtgtcagta

SEQ ID NO: 180749 - DNA, 25 bp, Probe Sequence
ctagaatttccagcctggtgcgtac

SEQ ID NO: 180750 - DNA, 25 bp, Probe Sequence
cttatttctaaaccggtggcttctg

SEQ ID NO: 180751 - DNA, 25 bp, Probe Sequence
ctttcctttcaagaggggcctctgt

SEQ ID NO: 180752 - DNA, 25 bp, Probe Sequence
cttcccttgatctgactgggggcct

SEQ ID NO: 180753 - DNA, 25 bp, Probe Sequence
cttcaacggccattgagctttgggc

SEQ ID NO: 180754 - DNA, 25 bp, Probe Sequence
cttgcaacctcttttcgtgatgggc

SEQ ID NO: 180755 - DNA, 25 bp, Probe Sequence
cttgaaacttaaactctgtgcttgt

SEQ ID NO: 180756 - DNA, 25 bp, Probe Sequence
cgtttacctcagagacgtctatttt

SEQ ID NO: 180757 - DNA, 25 bp, Probe Sequence
ctttgttcctaatgacgtggacttt

SEQ ID NO: 180758 - DNA, 25 bp, Probe Sequence
cttgatttcgcttaggccagagtga

SEQ ID NO: 180759 - DNA, 25 bp, Probe Sequence
cattgctttatcgtgagctctcggt

SEQ ID NO: 180760 - DNA, 25 bp, Probe Sequence
cattgactgctatatggttcggtag

SEQ ID NO: 180761 - DNA, 25 bp, Probe Sequence
cattgttgctgattctgttccggaa

SEQ ID NO: 180762 - DNA, 25 bp, Probe Sequence
cattgtttgacgtttccactgcatg

SEQ ID NO: 180763 - DNA, 25 bp, Probe Sequence
cattgttgttagtttaccagatccg

SEQ ID NO: 180764 - DNA, 25 bp, Probe Sequence
cttgttcttcagttaaaagagcttc

SEQ ID NO: 180765 - DNA, 25 bp, Probe Sequence
cttgagttctcaaccaaacatatgt

SEQ ID NO: 180766 - DNA, 25 bp, Probe Sequence
cattggcttgcttaccaacaccagc

SEQ ID NO: 180767 - DNA, 25 bp, Probe Sequence
cttgttctctgatcataaacctcag

SEQ ID NO: 180768 - DNA, 25 bp, Probe Sequence
cttgtttctgaacttcgtgccatat

SEQ ID NO: 180769 - DNA, 25 bp, Probe Sequence
cttgtcttattactttacctaatag

SEQ ID NO: 180770 - DNA, 25 bp, Probe Sequence
ctggtccttaagctttactaaacat

SEQ ID NO: 180771 - DNA, 25 bp, Probe Sequence
cttgttcttagtctttctctctaaa

SEQ ID NO: 180772 - DNA, 25 bp, Probe Sequence
ctttctcttacctgttatttatcca

SEQ ID NO: 180773 - DNA, 25 bp, Probe Sequence
ctgtcgttgtcagaggtttcctacc

SEQ ID NO: 180774 - DNA, 25 bp, Probe Sequence
ctacggtgtcagtgttggacctgac

SEQ ID NO: 180775 - DNA, 25 bp, Probe Sequence
ctacggcttaggctatgtgagggca

SEQ ID NO: 180776 - DNA, 25 bp, Probe Sequence
cttccggtaggcttccgagaggagc

SEQ ID NO: 180777 - DNA, 25 bp, Probe Sequence
cttccgaaatgcactccagaagaaa

SEQ ID NO: 180778 - DNA, 25 bp, Probe Sequence
cttgcctcacttctgcttaggaaag

SEQ ID NO: 180779 - DNA, 25 bp, Probe Sequence
cttgcctgacagtatttttgaatta

SEQ ID NO: 180780 - DNA, 25 bp, Probe Sequence
cttggtgacagtggaatctttgtct

SEQ ID NO: 180781 - DNA, 25 bp, Probe Sequence
cttgtagtcactgggcttttgtttt

SEQ ID NO: 180782 - DNA, 25 bp, Probe Sequence
cttgctagacaaggttgctgttgtg

SEQ ID NO: 180783 - DNA, 25 bp, Probe Sequence
cttgcatgatcccaggctctgggtg

SEQ ID NO: 180784 - DNA, 25 bp, Probe Sequence
cattgtactctagcctgggtgacag

SEQ ID NO: 180785 - DNA, 25 bp, Probe Sequence
cattgtattctcaggctcctatgcc

SEQ ID NO: 180786 - DNA, 25 bp, Probe Sequence
cattgtatgtctatgctttgtcatc

SEQ ID NO: 180787 - DNA, 25 bp, Probe Sequence
cttgttggatgcacttagatatgga

SEQ ID NO: 180788 - DNA, 25 bp, Probe Sequence
cattgtggtgtgagcttcagatggt

SEQ ID NO: 180789 - DNA, 25 bp, Probe Sequence
cttgtgttgcgagctctggagaggg

SEQ ID NO: 180790 - DNA, 25 bp, Probe Sequence
cttgtgtcggccactcagatgaggg

SEQ ID NO: 180791 - DNA, 25 bp, Probe Sequence
cttggctcccctgctgaaggtgggg

SEQ ID NO: 180792 - DNA, 25 bp, Probe Sequence
cttggctcctcctctggaggttaaa

SEQ ID NO: 180793 - DNA, 25 bp, Probe Sequence
cttggctatctttgggggcctttat

SEQ ID NO: 180794 - DNA, 25 bp, Probe Sequence
cattggatcatccttgggcagtcct

SEQ ID NO: 180795 - DNA, 25 bp, Probe Sequence
cattgacatcactacagggcagcat

SEQ ID NO: 180796 - DNA, 25 bp, Probe Sequence
cttgcataatggtcagaggcgcatg

SEQ ID NO: 180797 - DNA, 25 bp, Probe Sequence
cttgctattgattcagctggctgag

SEQ ID NO: 180798 - DNA, 25 bp, Probe Sequence
cttgccttgatgtactggagcaatc

SEQ ID NO: 180799 - DNA, 25 bp, Probe Sequence
cttccttgctctttaagcctcaagg

SEQ ID NO: 180800 - DNA, 25 bp, Probe Sequence
cttccttgttctttggccaaatgtt

SEQ ID NO: 180801 - DNA, 25 bp, Probe Sequence
cgatctatagttgttggcataaatg

SEQ ID NO: 180802 - DNA, 25 bp, Probe Sequence
cttctgtaattcattgagcagttag

SEQ ID NO: 180803 - DNA, 25 bp, Probe Sequence
cttgtgtataattctctattgctta

SEQ ID NO: 180804 - DNA, 25 bp, Probe Sequence
cattgtgtagaatttctagatcccc

SEQ ID NO: 180805 - DNA, 25 bp, Probe Sequence
cttgagccagaatctcaggaccccg

SEQ ID NO: 180806 - DNA, 25 bp, Probe Sequence
cttgagccattattgctaaggcccc

SEQ ID NO: 180807 - DNA, 25 bp, Probe Sequence
cttacacttgaacacagagccccta

SEQ ID NO: 180808 - DNA, 25 bp, Probe Sequence
cttccacttgaacagagaattggta

SEQ ID NO: 180809 - DNA, 25 bp, Probe Sequence
cttgccatcttgtggccgaataaaa

SEQ ID NO: 180810 - DNA, 25 bp, Probe Sequence
cttgcatgcttcttagaccagaaca

SEQ ID NO: 180811 - DNA, 25 bp, Probe Sequence
cttgctttgttaaccatcacgagag

SEQ ID NO: 180812 - DNA, 25 bp, Probe Sequence
cttgcttggtgggacctgacgagtt

SEQ ID NO: 180813 - DNA, 25 bp, Probe Sequence
cttgcttgggtgtcctcacaatttt

SEQ ID NO: 180814 - DNA, 25 bp, Probe Sequence
cttgcttcggacgccggattttgac

SEQ ID NO: 180815 - DNA, 25 bp, Probe Sequence
cttgtcacttgaatcccgtgattgt

SEQ ID NO: 180816 - DNA, 25 bp, Probe Sequence
cttgggtcatttgctcagtgtctga

SEQ ID NO: 180817 - DNA, 25 bp, Probe Sequence
cttgatgcttgctttattagtgttt

SEQ ID NO: 180818 - DNA, 25 bp, Probe Sequence
cattgtttgctgttattagtaataa

SEQ ID NO: 180819 - DNA, 25 bp, Probe Sequence
cattgtcacatcattttagtttata

SEQ ID NO: 180820 - DNA, 25 bp, Probe Sequence
cttgctagctagttcttacttcata

SEQ ID NO: 180821 - DNA, 25 bp, Probe Sequence
cttcttccaaatatgactttaccct

SEQ ID NO: 180822 - DNA, 25 bp, Probe Sequence
cttcggacacaatctactcctacgt

SEQ ID NO: 180823 - DNA, 25 bp, Probe Sequence
ctttggaccaaagatctctttcgtg

SEQ ID NO: 180824 - DNA, 25 bp, Probe Sequence
cttttcagtaaagccctctgttaca

SEQ ID NO: 180825 - DNA, 25 bp, Probe Sequence
cttcctttataagcccttgtagaca

SEQ ID NO: 180826 - DNA, 25 bp, Probe Sequence
cttgtgctttcatacgcacctttga

SEQ ID NO: 180827 - DNA, 25 bp, Probe Sequence
cttggtcaggctggacgccatgttc

SEQ ID NO: 180828 - DNA, 25 bp, Probe Sequence
cttggtcttctcgacacaatattaa

SEQ ID NO: 180829 - DNA, 25 bp, Probe Sequence
cttcgttgaatcttaaatagttaca

SEQ ID NO: 180830 - DNA, 25 bp, Probe Sequence
cttccttattcctgtatggtatcaa

SEQ ID NO: 180831 - DNA, 25 bp, Probe Sequence
ctaccccattacaaaatggtcaaag

SEQ ID NO: 180832 - DNA, 25 bp, Probe Sequence
cttccaccttgacaacggtgagaaa

SEQ ID NO: 180833 - DNA, 25 bp, Probe Sequence
cttgcactttatgtatacttcctga

SEQ ID NO: 180834 - DNA, 25 bp, Probe Sequence
cttaatatgcttcttgaaggttaaa

SEQ ID NO: 180835 - DNA, 25 bp, Probe Sequence
cttgaatgatccctttgaaattttt

SEQ ID NO: 180836 - DNA, 25 bp, Probe Sequence
cttatttccctttacagttctgcag

SEQ ID NO: 180837 - DNA, 25 bp, Probe Sequence
cttgtttaactttagcatgttgttg

SEQ ID NO: 180838 - DNA, 25 bp, Probe Sequence
cttgtttaattcctcagtgggtgtg

SEQ ID NO: 180839 - DNA, 25 bp, Probe Sequence
cattggctgcaatgccgtcagctgg

SEQ ID NO: 180840 - DNA, 25 bp, Probe Sequence
cattgaggatagatgcaggcgggtg

SEQ ID NO: 180841 - DNA, 25 bp, Probe Sequence
cttgcttatggcatgagggacctct

SEQ ID NO: 180842 - DNA, 25 bp, Probe Sequence
cttgttctggcaaaccagaccctgc

SEQ ID NO: 180843 - DNA, 25 bp, Probe Sequence
cttgtccttctaagccagattctca

SEQ ID NO: 180844 - DNA, 25 bp, Probe Sequence
cttgtttctctgtgccagatcttca

SEQ ID NO: 180845 - DNA, 25 bp, Probe Sequence
cttgtgattatcttctccacatctg

SEQ ID NO: 180846 - DNA, 25 bp, Probe Sequence
cattgtgtgaagattgcagccactg

SEQ ID NO: 180847 - DNA, 25 bp, Probe Sequence
cattgtggccgccatgagcaacctg

SEQ ID NO: 180848 - DNA, 25 bp, Probe Sequence
cattgtggccgccatgagcaacctg

SEQ ID NO: 180849 - DNA, 25 bp, Probe Sequence
cattgatgcctgccagggcgacagc

SEQ ID NO: 180850 - DNA, 25 bp, Probe Sequence
cattgtcactgccaagcgtacagac

SEQ ID NO: 180851 - DNA, 25 bp, Probe Sequence
cttgtcatctaaacttatgagacct

SEQ ID NO: 180852 - DNA, 25 bp, Probe Sequence
cattggctctacagcgttgcagaac

SEQ ID NO: 180853 - DNA, 25 bp, Probe Sequence
cttggtctaagtgtgctgcatggag

SEQ ID NO: 180854 - DNA, 25 bp, Probe Sequence
cttggtaaggggtctgcatgcagca

SEQ ID NO: 180855 - DNA, 25 bp, Probe Sequence
cttggtaagggctccgtgcagtagt

SEQ ID NO: 180856 - DNA, 25 bp, Probe Sequence
cttgggaagggaagccgtcaggtgg

SEQ ID NO: 180857 - DNA, 25 bp, Probe Sequence
cttcgggaggttgaggccggctgac

SEQ ID NO: 180858 - DNA, 25 bp, Probe Sequence
cttggggagggtgcagagctctgca

SEQ ID NO: 180859 - DNA, 25 bp, Probe Sequence
cttggtgtgagtcatcctgttctaa

SEQ ID NO: 180860 - DNA, 25 bp, Probe Sequence
cttgcttgtgagaaaccttgccatc

SEQ ID NO: 180861 - DNA, 25 bp, Probe Sequence
cttcctggagactcacttcctagat

SEQ ID NO: 180862 - DNA, 25 bp, Probe Sequence
cttcctgaacaagcagccatactga

SEQ ID NO: 180863 - DNA, 25 bp, Probe Sequence
cttcccaatccagtggacttcgcag

SEQ ID NO: 180864 - DNA, 25 bp, Probe Sequence
cttcctgacaccatgagggccagca

SEQ ID NO: 180865 - DNA, 25 bp, Probe Sequence
cttctgcgtcacgtggaacaccaac

SEQ ID NO: 180866 - DNA, 25 bp, Probe Sequence
cttcatcaggcgccacaaaaccaac

SEQ ID NO: 180867 - DNA, 25 bp, Probe Sequence
cttccagcaccaacggatgaccaac

SEQ ID NO: 180868 - DNA, 25 bp, Probe Sequence
cttgttgcaccgtggaggccacagg

SEQ ID NO: 180869 - DNA, 25 bp, Probe Sequence
ctttttgccagtgaaggccaacctg

SEQ ID NO: 180870 - DNA, 25 bp, Probe Sequence
cttggttccctgacaagggtaccag

SEQ ID NO: 180871 - DNA, 25 bp, Probe Sequence
cttggtgtcaccttgtatgtcgaac

SEQ ID NO: 180872 - DNA, 25 bp, Probe Sequence
cattgggaaccacttttcagtaata

SEQ ID NO: 180873 - DNA, 25 bp, Probe Sequence
ctatagtgcaacctatttgggtaaa

SEQ ID NO: 180874 - DNA, 25 bp, Probe Sequence
ctaaggcatacggaatttggggaag

SEQ ID NO: 180875 - DNA, 25 bp, Probe Sequence
ctcgggctaagcagattgtgtggaa

SEQ ID NO: 180876 - DNA, 25 bp, Probe Sequence
ttaggggaactgattggagaaagga

SEQ ID NO: 180877 - DNA, 25 bp, Probe Sequence
cttcgaagccatagggtggagaaag

SEQ ID NO: 180878 - DNA, 25 bp, Probe Sequence
cttgactcaggctgtagtgttgtaa

SEQ ID NO: 180879 - DNA, 25 bp, Probe Sequence
cttggctagatcactcactgttgta

SEQ ID NO: 180880 - DNA, 25 bp, Probe Sequence
cttggccgcagggctattgcttatg

SEQ ID NO: 180881 - DNA, 25 bp, Probe Sequence
cttggccgatgggaatggtctgtca

SEQ ID NO: 180882 - DNA, 25 bp, Probe Sequence
cttggacagtgggatgtggtgttcc

SEQ ID NO: 180883 - DNA, 25 bp, Probe Sequence
cttggaggctggcctgtgtggatat

SEQ ID NO: 180884 - DNA, 25 bp, Probe Sequence
cttggacttgcatgtgatgtgcctg

SEQ ID NO: 180885 - DNA, 25 bp, Probe Sequence
cttggcacaatgagtgtctctgctg

SEQ ID NO: 180886 - DNA, 25 bp, Probe Sequence
cttggcaggtgaggtgcgtctgtgc

SEQ ID NO: 180887 - DNA, 25 bp, Probe Sequence
cttgtcaggctattgatgccgccgc

SEQ ID NO: 180888 - DNA, 25 bp, Probe Sequence
cattggcgtctacacacgcccagag

SEQ ID NO: 180889 - DNA, 25 bp, Probe Sequence
cttggctgtgtacgtcccagcaaaa

SEQ ID NO: 180890 - DNA, 25 bp, Probe Sequence
ctatgacgtgtcggactcaggccag

SEQ ID NO: 180891 - DNA, 25 bp, Probe Sequence
cttggcagcgacgtggctcgagaag

SEQ ID NO: 180892 - DNA, 25 bp, Probe Sequence
cttggtgcgacactgtgcattgcat

SEQ ID NO: 180893 - DNA, 25 bp, Probe Sequence
cttggctggcaactctgaagtcatc

SEQ ID NO: 180894 - DNA, 25 bp, Probe Sequence
cttggcttcagccttgacaggcacc

SEQ ID NO: 180895 - DNA, 25 bp, Probe Sequence
cttggttcatgcttctactgtgaca

SEQ ID NO: 180896 - DNA, 25 bp, Probe Sequence
cttgccattcacccatcaatgtgaa

SEQ ID NO: 180897 - DNA, 25 bp, Probe Sequence
cttgtctgatcgttcaaagcatgaa

SEQ ID NO: 180898 - DNA, 25 bp, Probe Sequence
cttcagctatggcctgcactactga

SEQ ID NO: 180899 - DNA, 25 bp, Probe Sequence
cttgatgcctgtcggcacttctgaa

SEQ ID NO: 180900 - DNA, 25 bp, Probe Sequence
cttgtgccatgacaccttctgaaca

SEQ ID NO: 180901 - DNA, 25 bp, Probe Sequence
cttgtccacagcacttttgatatca

SEQ ID NO: 180902 - DNA, 25 bp, Probe Sequence
cattgtccacaacctgctcaaaata

SEQ ID NO: 180903 - DNA, 25 bp, Probe Sequence
cttcccaagagccctgcaaagaacc

SEQ ID NO: 180904 - DNA, 25 bp, Probe Sequence
cttcgaaatcgcctgctacaaaaac

SEQ ID NO: 180905 - DNA, 25 bp, Probe Sequence
cttccagttctactcaacaaaaatc

SEQ ID NO: 180906 - DNA, 25 bp, Probe Sequence
cttccagctccaaagcacctaagaa

SEQ ID NO: 180907 - DNA, 25 bp, Probe Sequence
cttggagccacaatggataatagaa

SEQ ID NO: 180908 - DNA, 25 bp, Probe Sequence
cttggtctcagcatgttgactggga

SEQ ID NO: 180909 - DNA, 25 bp, Probe Sequence
cttgagaccgcattatttatgggga

SEQ ID NO: 180910 - DNA, 25 bp, Probe Sequence
cttgagagcctgtagatttcttgtg

SEQ ID NO: 180911 - DNA, 25 bp, Probe Sequence
cttgaagctcgacgtcattcagctt

SEQ ID NO: 180912 - DNA, 25 bp, Probe Sequence
cttcagagctcaggcaggctccagt

SEQ ID NO: 180913 - DNA, 25 bp, Probe Sequence
cttgggctgcagcgagctcatcagc

SEQ ID NO: 180914 - DNA, 25 bp, Probe Sequence
cttggcctcagctggctgtatggaa

SEQ ID NO: 180915 - DNA, 25 bp, Probe Sequence
cttggccgtccaggttatggagaaa

SEQ ID NO: 180916 - DNA, 25 bp, Probe Sequence
cttggccgcccaggacgtggcggca

SEQ ID NO: 180917 - DNA, 25 bp, Probe Sequence
cttggcccacagggcactgaggggc

SEQ ID NO: 180918 - DNA, 25 bp, Probe Sequence
cttctggccacgggacctggtggcc

SEQ ID NO: 180919 - DNA, 25 bp, Probe Sequence
cttcaaggacatgtggcccgacgac

SEQ ID NO: 180920 - DNA, 25 bp, Probe Sequence
cttcaaagagcatctccacaaccca

SEQ ID NO: 180921 - DNA, 25 bp, Probe Sequence
ctactgaagatgtgcctcgaaagct

SEQ ID NO: 180922 - DNA, 25 bp, Probe Sequence
cttccagagatatcacttaattgtt

SEQ ID NO: 180923 - DNA, 25 bp, Probe Sequence
cttccatttctagtgtattattttt

SEQ ID NO: 180924 - DNA, 25 bp, Probe Sequence
cttcctagcctgtggataatttact

SEQ ID NO: 180925 - DNA, 25 bp, Probe Sequence
cttactacctgctgggcacatttat

SEQ ID NO: 180926 - DNA, 25 bp, Probe Sequence
cttgaattcctgggtacaaggaatt

SEQ ID NO: 180927 - DNA, 25 bp, Probe Sequence
gcctggttttggtttatagagtatt

SEQ ID NO: 180928 - DNA, 25 bp, Probe Sequence
cttggtttcttgtttttgctgtatt

SEQ ID NO: 180929 - DNA, 25 bp, Probe Sequence
cttgttgctgggtaaatttgtgttt

SEQ ID NO: 180930 - DNA, 25 bp, Probe Sequence
cttctgggtggttcacatttatttt

SEQ ID NO: 180931 - DNA, 25 bp, Probe Sequence
cttcgcctgggttcgtagtattgga

SEQ ID NO: 180932 - DNA, 25 bp, Probe Sequence
cttcccaggtgtgccaaggaattaa

SEQ ID NO: 180933 - DNA, 25 bp, Probe Sequence
ctaccacaggtatctggcagaattt

SEQ ID NO: 180934 - DNA, 25 bp, Probe Sequence
cttccagggccatgcttggcaaggt

SEQ ID NO: 180935 - DNA, 25 bp, Probe Sequence
cttccggcgcataaagtcagcaagg

SEQ ID NO: 180936 - DNA, 25 bp, Probe Sequence
cttccggccacactgaggacaaggc

SEQ ID NO: 180937 - DNA, 25 bp, Probe Sequence
cttctttctcaacgcaggaaacctc

SEQ ID NO: 180938 - DNA, 25 bp, Probe Sequence
cttgtttgacgacgaaaacacagcc

SEQ ID NO: 180939 - DNA, 25 bp, Probe Sequence
cttggttcctcacaaagccaagccc

SEQ ID NO: 180940 - DNA, 25 bp, Probe Sequence
cttcgactcctctgagaaggacggg

SEQ ID NO: 180941 - DNA, 25 bp, Probe Sequence
cttccaatcggataggatgcgcaat

SEQ ID NO: 180942 - DNA, 25 bp, Probe Sequence
cttgtactgggagaggtgccttttg

SEQ ID NO: 180943 - DNA, 25 bp, Probe Sequence
cttctacttggttaagacagttttg

SEQ ID NO: 180944 - DNA, 25 bp, Probe Sequence
cttcctccttttcagaactactctg

SEQ ID NO: 180945 - DNA, 25 bp, Probe Sequence
cttcctctctatcttaaagtaattt

SEQ ID NO: 180946 - DNA, 25 bp, Probe Sequence
cttccttctgtgcctttgaatacaa

SEQ ID NO: 180947 - DNA, 25 bp, Probe Sequence
cttcctttaatcttatgcaaaagag

SEQ ID NO: 180948 - DNA, 25 bp, Probe Sequence
cttcctcttcaacgaactcaaaggc

SEQ ID NO: 180949 - DNA, 25 bp, Probe Sequence
cttccatcctttcatagtcacaagt

SEQ ID NO: 180950 - DNA, 25 bp, Probe Sequence
cttccacggacttcacgtcattatt

SEQ ID NO: 180951 - DNA, 25 bp, Probe Sequence
cttccacaagtactcaagcctgttt

SEQ ID NO: 180952 - DNA, 25 bp, Probe Sequence
cttcctgaagatctctaccatttaa

SEQ ID NO: 180953 - DNA, 25 bp, Probe Sequence
cttggatagagctctgctacctgcc

SEQ ID NO: 180954 - DNA, 25 bp, Probe Sequence
cttggagatggcaatgctgaacctc

SEQ ID NO: 180955 - DNA, 25 bp, Probe Sequence
cttgggatgatggaggtactgccag

SEQ ID NO: 180956 - DNA, 25 bp, Probe Sequence
cttcgggatcaagtgtgacggcaga

SEQ ID NO: 180957 - DNA, 25 bp, Probe Sequence
cttctgggtacatttgatctgactg

SEQ ID NO: 180958 - DNA, 25 bp, Probe Sequence
cttccagataacctctgttgatatg

SEQ ID NO: 180959 - DNA, 25 bp, Probe Sequence
cttcctgggactctggctatagtac

SEQ ID NO: 180960 - DNA, 25 bp, Probe Sequence
cttcgtggaggccgtgtccaaagac

SEQ ID NO: 180961 - DNA, 25 bp, Probe Sequence
cttcgggaaggagttcacagaagcg

SEQ ID NO: 180962 - DNA, 25 bp, Probe Sequence
cttcaggtacagcagagataaaact

SEQ ID NO: 180963 - DNA, 25 bp, Probe Sequence
cttcgtctaacacaaaacagccagt

SEQ ID NO: 180964 - DNA, 25 bp, Probe Sequence
cttcagtaaacacagacccagccac

SEQ ID NO: 180965 - DNA, 25 bp, Probe Sequence
cttcagtaaacacagacccagccac

SEQ ID NO: 180966 - DNA, 25 bp, Probe Sequence
cttagaaatagactagaccaagcag

SEQ ID NO: 180967 - DNA, 25 bp, Probe Sequence
cttccaaaagcgcagaccacagtta

SEQ ID NO: 180968 - DNA, 25 bp, Probe Sequence
cttccaaaagcgcagaccacagtta

SEQ ID NO: 180969 - DNA, 25 bp, Probe Sequence
cttcagcatcagcaaaaattacagt

SEQ ID NO: 180970 - DNA, 25 bp, Probe Sequence
cttcagcatcagcaaaaattacagt

SEQ ID NO: 180971 - DNA, 25 bp, Probe Sequence
cttcagcaaggatcagtttccggag

SEQ ID NO: 180972 - DNA, 25 bp, Probe Sequence
cttcgaatggttggaattccaggaa

SEQ ID NO: 180973 - DNA, 25 bp, Probe Sequence
cttggacatgacctggactctccag

SEQ ID NO: 180974 - DNA, 25 bp, Probe Sequence
cttgagatgctcacattactgcccg

SEQ ID NO: 180975 - DNA, 25 bp, Probe Sequence
cttgcagccatgaccagttctggcc

SEQ ID NO: 180976 - DNA, 25 bp, Probe Sequence
cttgatgccatcaaaggacatcccc

SEQ ID NO: 180977 - DNA, 25 bp, Probe Sequence
cttgtgctcatcaggtaatctgcta

SEQ ID NO: 180978 - DNA, 25 bp, Probe Sequence
cttggctatcttggacatacagtaa

SEQ ID NO: 180979 - DNA, 25 bp, Probe Sequence
cttggttcattcatctgtcagtgca

SEQ ID NO: 180980 - DNA, 25 bp, Probe Sequence
cttggactattcagggagctgcaaa

SEQ ID NO: 180981 - DNA, 25 bp, Probe Sequence
cttgtatcgattatggttctgagaa

SEQ ID NO: 180982 - DNA, 25 bp, Probe Sequence
cttgtctctttcctggatgttcgaa

SEQ ID NO: 180983 - DNA, 25 bp, Probe Sequence
cttgttgtgtcctggattccgataa

SEQ ID NO: 180984 - DNA, 25 bp, Probe Sequence
cttcctgttccgggcaattgtgtga

SEQ ID NO: 180985 - DNA, 25 bp, Probe Sequence
cttcccttcagaaccacatgtgtgt

SEQ ID NO: 180986 - DNA, 25 bp, Probe Sequence
cttgctgcccaaatcagccaaggtt

SEQ ID NO: 180987 - DNA, 25 bp, Probe Sequence
cttcgcacctttgccagagtttgag

SEQ ID NO: 180988 - DNA, 25 bp, Probe Sequence
cttcgcacctttgccagagtttgag

SEQ ID NO: 180989 - DNA, 25 bp, Probe Sequence
cttagcatttttgcacaaggaattg

SEQ ID NO: 180990 - DNA, 25 bp, Probe Sequence
cttccttgctttggccagaagccat

SEQ ID NO: 180991 - DNA, 25 bp, Probe Sequence
cttgtcactgctgggccaagaagcc

SEQ ID NO: 180992 - DNA, 25 bp, Probe Sequence
cttggagagcttcacaaatgcccct

SEQ ID NO: 180993 - DNA, 25 bp, Probe Sequence
cttggagagcattccaagcccccac

SEQ ID NO: 180994 - DNA, 25 bp, Probe Sequence
cttgcaataattggcagatgcccac

SEQ ID NO: 180995 - DNA, 25 bp, Probe Sequence
cttgcaatgttctaggtgaccctgg

SEQ ID NO: 180996 - DNA, 25 bp, Probe Sequence
cttgatcgtgactagagatgacctc

SEQ ID NO: 180997 - DNA, 25 bp, Probe Sequence
cttgacgtcacatgggagatttgtt

SEQ ID NO: 180998 - DNA, 25 bp, Probe Sequence
cttgacgtcaatggtgaagattacg

SEQ ID NO: 180999 - DNA, 25 bp, Probe Sequence
cttgagctgtacgggaagtctcact

SEQ ID NO: 181000 - DNA, 25 bp, Probe Sequence
cttgatgtgtcaccggggcaactgc

SEQ ID NO: 181001 - DNA, 25 bp, Probe Sequence
cttgctgctctcacgggagaacgag

SEQ ID NO: 181002 - DNA, 25 bp, Probe Sequence
cttgcttccattgtgtctgaaactg

SEQ ID NO: 181003 - DNA, 25 bp, Probe Sequence
cttgttcctgctgagttacttgttc

SEQ ID NO: 181004 - DNA, 25 bp, Probe Sequence
cttgttgccattaagtgaacttgac

SEQ ID NO: 181005 - DNA, 25 bp, Probe Sequence
cttgttgctatagctgtacccgacc

SEQ ID NO: 181006 - DNA, 25 bp, Probe Sequence
cttgatagtcaaactctcaccacca

SEQ ID NO: 181007 - DNA, 25 bp, Probe Sequence
cttgtgtgtgcatacatctcatcca

SEQ ID NO: 181008 - DNA, 25 bp, Probe Sequence
cttgctgatgccaggatctcagcgc

SEQ ID NO: 181009 - DNA, 25 bp, Probe Sequence
cttgcttcacgtggatgctcagtgc

SEQ ID NO: 181010 - DNA, 25 bp, Probe Sequence
cttgcttcctgtattcaggcagctc

SEQ ID NO: 181011 - DNA, 25 bp, Probe Sequence
cttggtgcctggacttgagtctcac

SEQ ID NO: 181012 - DNA, 25 bp, Probe Sequence
cttggtcacagagctgggtgctgcc

SEQ ID NO: 181013 - DNA, 25 bp, Probe Sequence
cttgtccaagcaggtgtacttgcct

SEQ ID NO: 181014 - DNA, 25 bp, Probe Sequence
cttgtaaaggcgtctgacagtcctg

SEQ ID NO: 181015 - DNA, 25 bp, Probe Sequence
cttgtaaagtgtgaatcgcccttcc

SEQ ID NO: 181016 - DNA, 25 bp, Probe Sequence
cttgataaaggaaagggcaccatct

SEQ ID NO: 181017 - DNA, 25 bp, Probe Sequence
cttcatgggaggggacgtcggcatc

SEQ ID NO: 181018 - DNA, 25 bp, Probe Sequence
cttcgggaggcaaactcctggatgc

SEQ ID NO: 181019 - DNA, 25 bp, Probe Sequence
cttgccaacaaaaagccgcggatgc

SEQ ID NO: 181020 - DNA, 25 bp, Probe Sequence
gattacccaaacaccgcgtgattgg

SEQ ID NO: 181021 - DNA, 25 bp, Probe Sequence
cttagcccaaaggggttgtgaatgg

SEQ ID NO: 181022 - DNA, 25 bp, Probe Sequence
cttccctgaaccaggatctgcctat

SEQ ID NO: 181023 - DNA, 25 bp, Probe Sequence
ctaccctgaatacctggatctactc

SEQ ID NO: 181024 - DNA, 25 bp, Probe Sequence
cttccaccctcagcggatgataatc

SEQ ID NO: 181025 - DNA, 25 bp, Probe Sequence
cttccaccctcagcggatgataatc

SEQ ID NO: 181026 - DNA, 25 bp, Probe Sequence
cttccaccctcagcggatgataatc

SEQ ID NO: 181027 - DNA, 25 bp, Probe Sequence
cttccacacccctggtggacagaac

SEQ ID NO: 181028 - DNA, 25 bp, Probe Sequence
cttgccattcccttaggctttagca

SEQ ID NO: 181029 - DNA, 25 bp, Probe Sequence
cttgtgattcgctctagacttttgt

SEQ ID NO: 181030 - DNA, 25 bp, Probe Sequence
cttggttcgccactcatttatttgt

SEQ ID NO: 181031 - DNA, 25 bp, Probe Sequence
cttcgttcagaaccatttcacaagt

SEQ ID NO: 181032 - DNA, 25 bp, Probe Sequence
cttgcacttaaatcattaccacgga

SEQ ID NO: 181033 - DNA, 25 bp, Probe Sequence
cttgcacttatgaatactatacagc

SEQ ID NO: 181034 - DNA, 25 bp, Probe Sequence
cttgcctctatgagatcaaacagtt

SEQ ID NO: 181035 - DNA, 25 bp, Probe Sequence
cttgctgcctatgggatcctagaga

SEQ ID NO: 181036 - DNA, 25 bp, Probe Sequence
cttgtggccaattatccatatgatg

SEQ ID NO: 181037 - DNA, 25 bp, Probe Sequence
cttgggctctctaatgtgatttgca

SEQ ID NO: 181038 - DNA, 25 bp, Probe Sequence
cttcggacttatactgatcccaagt

SEQ ID NO: 181039 - DNA, 25 bp, Probe Sequence
cttccagagaggacctatcccaaat

SEQ ID NO: 181040 - DNA, 25 bp, Probe Sequence
cttccagagaacacttacctatcaa

SEQ ID NO: 181041 - DNA, 25 bp, Probe Sequence
cttccagagttcattctttactcaa

SEQ ID NO: 181042 - DNA, 25 bp, Probe Sequence
cttccagttacattgtcttactctc

SEQ ID NO: 181043 - DNA, 25 bp, Probe Sequence
cttccacagttatgattgtcctccc

SEQ ID NO: 181044 - DNA, 25 bp, Probe Sequence
cttcccctaaagatgctaatctcct

SEQ ID NO: 181045 - DNA, 25 bp, Probe Sequence
cttgccccaaaaggatctggaacac

SEQ ID NO: 181046 - DNA, 25 bp, Probe Sequence
cttaccatcaaatcaattggccacc

SEQ ID NO: 181047 - DNA, 25 bp, Probe Sequence
cttcagtccatatccaatggcctca

SEQ ID NO: 181048 - DNA, 25 bp, Probe Sequence
cttgcaccatcttgcctaatggact

SEQ ID NO: 181049 - DNA, 25 bp, Probe Sequence
cttccagctattttagtgatcatct

SEQ ID NO: 181050 - DNA, 25 bp, Probe Sequence
cttccatacatctacacaggacatg

SEQ ID NO: 181051 - DNA, 25 bp, Probe Sequence
cttccacaccatggacgagctggtg

SEQ ID NO: 181052 - DNA, 25 bp, Probe Sequence
cttcccccatcacagggtgtggggc

SEQ ID NO: 181053 - DNA, 25 bp, Probe Sequence
cttccctctcccagattggtgggga

SEQ ID NO: 181054 - DNA, 25 bp, Probe Sequence
ctttaccccttctctgagtgtgggg

SEQ ID NO: 181055 - DNA, 25 bp, Probe Sequence
cttgtcttcccttctgattgatggt

SEQ ID NO: 181056 - DNA, 25 bp, Probe Sequence
cttgtattacgattcgcacgatgag

SEQ ID NO: 181057 - DNA, 25 bp, Probe Sequence
cttgttcaaggagtcccgcatcaca

SEQ ID NO: 181058 - DNA, 25 bp, Probe Sequence
cttactctgaagttccggcattcac

SEQ ID NO: 181059 - DNA, 25 bp, Probe Sequence
cttcctatacaagggaggcatctac

SEQ ID NO: 181060 - DNA, 25 bp, Probe Sequence
cttatctacacatgggggactgaag

SEQ ID NO: 181061 - DNA, 25 bp, Probe Sequence
cttgtctccctctgagggaggcaag

SEQ ID NO: 181062 - DNA, 25 bp, Probe Sequence
cttgcctcgcgctgggaggggagat

SEQ ID NO: 181063 - DNA, 25 bp, Probe Sequence
cttgtcctccaagttatgggggatc

SEQ ID NO: 181064 - DNA, 25 bp, Probe Sequence
cttgtctctcactgcatttggtcag

SEQ ID NO: 181065 - DNA, 25 bp, Probe Sequence
cttgtcctcagggctacagcagtag

SEQ ID NO: 181066 - DNA, 25 bp, Probe Sequence
cttgtcacgcatgccacacaagaag

SEQ ID NO: 181067 - DNA, 25 bp, Probe Sequence
ctttaagccccatgcatcaggtgga

SEQ ID NO: 181068 - DNA, 25 bp, Probe Sequence
cttgatgaccctgcacaatactgtg

SEQ ID NO: 181069 - DNA, 25 bp, Probe Sequence
cttgctcaccctgcggtgacaggga

SEQ ID NO: 181070 - DNA, 25 bp, Probe Sequence
cttgacccaagcctgtgatgacatg

SEQ ID NO: 181071 - DNA, 25 bp, Probe Sequence
cttgcccctgacaggatactgagcc

SEQ ID NO: 181072 - DNA, 25 bp, Probe Sequence
cttgtccgtgaagatgtattgcccg

SEQ ID NO: 181073 - DNA, 25 bp, Probe Sequence
cttgtgacgtcatgtcagtactcca

SEQ ID NO: 181074 - DNA, 25 bp, Probe Sequence
cttgtccagctaactcagctgttta

SEQ ID NO: 181075 - DNA, 25 bp, Probe Sequence
cttgcacatcactacctgcagtttc

SEQ ID NO: 181076 - DNA, 25 bp, Probe Sequence
cttgagaaatagctggattctcccc

SEQ ID NO: 181077 - DNA, 25 bp, Probe Sequence
cttgaaaatgcttattcttcctccc

SEQ ID NO: 181078 - DNA, 25 bp, Probe Sequence
cttgtaaagttcatgtctttcaccc

SEQ ID NO: 181079 - DNA, 25 bp, Probe Sequence
cttgtaaaccacattcttgacaact

SEQ ID NO: 181080 - DNA, 25 bp, Probe Sequence
cttgtcaacaccatgttcttcaagc

SEQ ID NO: 181081 - DNA, 25 bp, Probe Sequence
cttgtcttccctggtatatcataaa

SEQ ID NO: 181082 - DNA, 25 bp, Probe Sequence
cttgtgctgtcgccttttagaagga

SEQ ID NO: 181083 - DNA, 25 bp, Probe Sequence
cttgaggtcaggagtttgagaccag

SEQ ID NO: 181084 - DNA, 25 bp, Probe Sequence
cttgagcccaggagttggaggctgc

SEQ ID NO: 181085 - DNA, 25 bp, Probe Sequence
cttgaaccggaacctgagtgacagc

SEQ ID NO: 181086 - DNA, 25 bp, Probe Sequence
cttgaatctgtattacccagaagcc

SEQ ID NO: 181087 - DNA, 25 bp, Probe Sequence
cttgatcttttctccactgagacac

SEQ ID NO: 181088 - DNA, 25 bp, Probe Sequence
cttgtgctttttcccatgatgggca

SEQ ID NO: 181089 - DNA, 25 bp, Probe Sequence
cttgtcttgcttatggcatgaggga

SEQ ID NO: 181090 - DNA, 25 bp, Probe Sequence
cttgctctggcaacagggcttgtag

SEQ ID NO: 181091 - DNA, 25 bp, Probe Sequence
cttgctgatgactcaggactctgct

SEQ ID NO: 181092 - DNA, 25 bp, Probe Sequence
cttgctaagttcagaccttctcttc

SEQ ID NO: 181093 - DNA, 25 bp, Probe Sequence
cttgctgagggtagcaggaccttct

SEQ ID NO: 181094 - DNA, 25 bp, Probe Sequence
cttgctgggtcttgccaagatcatt

SEQ ID NO: 181095 - DNA, 25 bp, Probe Sequence
cttgtgcagcaatggccaagatcaa

SEQ ID NO: 181096 - DNA, 25 bp, Probe Sequence
cttgcagagctttggccttgacaac

SEQ ID NO: 181097 - DNA, 25 bp, Probe Sequence
cttcgagcatgaaccgtcaatcaac

SEQ ID NO: 181098 - DNA, 25 bp, Probe Sequence
cttccctgctaggagtgcgacaagc

SEQ ID NO: 181099 - DNA, 25 bp, Probe Sequence
cttccgcgtcatgttcaaggagccg

SEQ ID NO: 181100 - DNA, 25 bp, Probe Sequence
cttccgccagatgtgctgcaaaacc

SEQ ID NO: 181101 - DNA, 25 bp, Probe Sequence
cttgccagccttgggcatcacattt

SEQ ID NO: 181102 - DNA, 25 bp, Probe Sequence
cttgccgcttttcatcacaagcttg

SEQ ID NO: 181103 - DNA, 25 bp, Probe Sequence
cttcaccgtgttaacataatctatc

SEQ ID NO: 181104 - DNA, 25 bp, Probe Sequence
cttcaacaggctcaactcagtttcc

SEQ ID NO: 181105 - DNA, 25 bp, Probe Sequence
cttcccagagtcatcctcagttgac

SEQ ID NO: 181106 - DNA, 25 bp, Probe Sequence
cttgccaaattgatctatagtttca

SEQ ID NO: 181107 - DNA, 25 bp, Probe Sequence
ctttcacaaggtacaaaatcttgca

SEQ ID NO: 181108 - DNA, 25 bp, Probe Sequence
cttcccaaggtcattgagctgttga

SEQ ID NO: 181109 - DNA, 25 bp, Probe Sequence
cttccttcagcacctttagctgcat

SEQ ID NO: 181110 - DNA, 25 bp, Probe Sequence
ctttttctacctgtacacattcctg

SEQ ID NO: 181111 - DNA, 25 bp, Probe Sequence
cttgttagtgcaactcctaaattcc

SEQ ID NO: 181112 - DNA, 25 bp, Probe Sequence
cttgagtaatcacaccatttcatac

SEQ ID NO: 181113 - DNA, 25 bp, Probe Sequence
cttgtgttcactccactatattaga

SEQ ID NO: 181114 - DNA, 25 bp, Probe Sequence
cttgtttcactgtcacatatgaaaa

SEQ ID NO: 181115 - DNA, 25 bp, Probe Sequence
cttgttctcaatcccagctggagaa

SEQ ID NO: 181116 - DNA, 25 bp, Probe Sequence
cttccactttgcccctgggaagagc

SEQ ID NO: 181117 - DNA, 25 bp, Probe Sequence
tttgtccatttgcattcggaaaaga

SEQ ID NO: 181118 - DNA, 25 bp, Probe Sequence
cttgtctcatggtgttcgggaaggc

SEQ ID NO: 181119 - DNA, 25 bp, Probe Sequence
cttgttggggagttcctggaagtga

SEQ ID NO: 181120 - DNA, 25 bp, Probe Sequence
cttgacagttgtgcttctctaggag

SEQ ID NO: 181121 - DNA, 25 bp, Probe Sequence
cttgttttgatcatttccactgcac

SEQ ID NO: 181122 - DNA, 25 bp, Probe Sequence
cttgttcttatggactaccatgcca

SEQ ID NO: 181123 - DNA, 25 bp, Probe Sequence
cttgttcttcacgactgtctatact

SEQ ID NO: 181124 - DNA, 25 bp, Probe Sequence
cttgttcatatccactctggttctt

SEQ ID NO: 181125 - DNA, 25 bp, Probe Sequence
cttgtgcctttgatggtgttcattt

SEQ ID NO: 181126 - DNA, 25 bp, Probe Sequence
cttgactctttgtgtgtgactgttt

SEQ ID NO: 181127 - DNA, 25 bp, Probe Sequence
cttgatccatgtccaggtgcaactg

SEQ ID NO: 181128 - DNA, 25 bp, Probe Sequence
cttgtcgcatgaacggtcaaatggg

SEQ ID NO: 181129 - DNA, 25 bp, Probe Sequence
cttgtcctggcactgtggccaagag

SEQ ID NO: 181130 - DNA, 25 bp, Probe Sequence
cttgtgccgcaggctgggcgggaga

SEQ ID NO: 181131 - DNA, 25 bp, Probe Sequence
cttctgctagagtctcagagggcgt

SEQ ID NO: 181132 - DNA, 25 bp, Probe Sequence
cttctatcatgagataataggccta

SEQ ID NO: 181133 - DNA, 25 bp, Probe Sequence
cttgtcatcaatggaaatcccatca

SEQ ID NO: 181134 - DNA, 25 bp, Probe Sequence
cttgctctgcttgacaacatctgag

SEQ ID NO: 181135 - DNA, 25 bp, Probe Sequence
cttcctgctgtgcacatcagctgtg

SEQ ID NO: 181136 - DNA, 25 bp, Probe Sequence
cttgatcaacttgtctgttcctggc

SEQ ID NO: 181137 - DNA, 25 bp, Probe Sequence
cttttggcttctgagggccattgct

SEQ ID NO: 181138 - DNA, 25 bp, Probe Sequence
cttcagggcttcacaggccagtact

SEQ ID NO: 181139 - DNA, 25 bp, Probe Sequence
cttgcagaggtgattctggcggccc

SEQ ID NO: 181140 - DNA, 25 bp, Probe Sequence
cttgaaggctggggcccaggcacct

SEQ ID NO: 181141 - DNA, 25 bp, Probe Sequence
cttgaaggctggggcccaggcacct

SEQ ID NO: 181142 - DNA, 25 bp, Probe Sequence
cttcagagactacgtccacagacac

SEQ ID NO: 181143 - DNA, 25 bp, Probe Sequence
cttgcagaagcgcattcccaagact

SEQ ID NO: 181144 - DNA, 25 bp, Probe Sequence
cttgagagagctcatctaccctgtc

SEQ ID NO: 181145 - DNA, 25 bp, Probe Sequence
cttgagagagctcatctaccctgtc

SEQ ID NO: 181146 - DNA, 25 bp, Probe Sequence
cttgaattctggctaccacttctgc

SEQ ID NO: 181147 - DNA, 25 bp, Probe Sequence
cttgaattctggctaccacttctgc

SEQ ID NO: 181148 - DNA, 25 bp, Probe Sequence
cttgatatgtttactcccaatctcc

SEQ ID NO: 181149 - DNA, 25 bp, Probe Sequence
cttgagggtgtggttccaactgctc

SEQ ID NO: 181150 - DNA, 25 bp, Probe Sequence
cttgagtggcctgatcgccacagcc

SEQ ID NO: 181151 - DNA, 25 bp, Probe Sequence
cttgattgtgtcactgcactccagc

SEQ ID NO: 181152 - DNA, 25 bp, Probe Sequence
cttgatttgctagctggtggcagaa

SEQ ID NO: 181153 - DNA, 25 bp, Probe Sequence
cttgtctggaatgctgtgtgctgga

SEQ ID NO: 181154 - DNA, 25 bp, Probe Sequence
cttgctctaaatgatatgtgtgctc

SEQ ID NO: 181155 - DNA, 25 bp, Probe Sequence
cttgctccagaaagactcactgctc

SEQ ID NO: 181156 - DNA, 25 bp, Probe Sequence
cttctcataaatggcctgccgtctc

SEQ ID NO: 181157 - DNA, 25 bp, Probe Sequence
cttccatcatgttgtctatcacagt

SEQ ID NO: 181158 - DNA, 25 bp, Probe Sequence
cttgccttgcatttgcacatccaga

SEQ ID NO: 181159 - DNA, 25 bp, Probe Sequence
cttgctgttgctcgatgcattctat

SEQ ID NO: 181160 - DNA, 25 bp, Probe Sequence
cttgctgctgatccatgaggtccta

SEQ ID NO: 181161 - DNA, 25 bp, Probe Sequence
cttgttgactcaagcagtttggaaa

SEQ ID NO: 181162 - DNA, 25 bp, Probe Sequence
cttgatatgattttgatgcttttaa

SEQ ID NO: 181163 - DNA, 25 bp, Probe Sequence
cttgtatatgcttgaactttcttaa

SEQ ID NO: 181164 - DNA, 25 bp, Probe Sequence
cttgatttcatatttccttctctaa

SEQ ID NO: 181165 - DNA, 25 bp, Probe Sequence
cttgtttatcagtcctgctcttata

SEQ ID NO: 181166 - DNA, 25 bp, Probe Sequence
cttgtcaataaacagcattctgatt

SEQ ID NO: 181167 - DNA, 25 bp, Probe Sequence
cttcacaattgatggtgcttctatt

SEQ ID NO: 181168 - DNA, 25 bp, Probe Sequence
cttgccactgtgctgtttttgattg

SEQ ID NO: 181169 - DNA, 25 bp, Probe Sequence
cttgccactgtgctgtttttgattg

SEQ ID NO: 181170 - DNA, 25 bp, Probe Sequence
cttgcccatgggtgactcttaccca

SEQ ID NO: 181171 - DNA, 25 bp, Probe Sequence
cttgcccaagtgttactaaatcctt

SEQ ID NO: 181172 - DNA, 25 bp, Probe Sequence
cttcctctatgtttgacgaatattt

SEQ ID NO: 181173 - DNA, 25 bp, Probe Sequence
cttcccatttcagacagcaacatgt

SEQ ID NO: 181174 - DNA, 25 bp, Probe Sequence
cttgccttttcaacacaaatcagtt

SEQ ID NO: 181175 - DNA, 25 bp, Probe Sequence
cttccttatctcctcaaaatgagtt

SEQ ID NO: 181176 - DNA, 25 bp, Probe Sequence
cttcctattttccagacttgagttc

SEQ ID NO: 181177 - DNA, 25 bp, Probe Sequence
cttcctttgtcctaatcctggaatt

SEQ ID NO: 181178 - DNA, 25 bp, Probe Sequence
ctttttaaccaatctctgtggcttc

SEQ ID NO: 181179 - DNA, 25 bp, Probe Sequence
ctttttaagtcacactactgcagct

SEQ ID NO: 181180 - DNA, 25 bp, Probe Sequence
ctttccaagggactgttcacggctt

SEQ ID NO: 181181 - DNA, 25 bp, Probe Sequence
cttaccagagagactccttcaaggc

SEQ ID NO: 181182 - DNA, 25 bp, Probe Sequence
cttccatagacagctgcctcaaagg

SEQ ID NO: 181183 - DNA, 25 bp, Probe Sequence
cttccagcgaggagagctcgacgga

SEQ ID NO: 181184 - DNA, 25 bp, Probe Sequence
cttgcacatcggaatcggtcgggtc

SEQ ID NO: 181185 - DNA, 25 bp, Probe Sequence
cttgagtgaggagtgcggggagctt

SEQ ID NO: 181186 - DNA, 25 bp, Probe Sequence
cttgatgccggagctgctggtgttt

SEQ ID NO: 181187 - DNA, 25 bp, Probe Sequence
cttgatgccggagctgctggtgttt

SEQ ID NO: 181188 - DNA, 25 bp, Probe Sequence
cttgatgccggagctgctggtgttt

SEQ ID NO: 181189 - DNA, 25 bp, Probe Sequence
cttcagccaggtgctcgagagcttt

SEQ ID NO: 181190 - DNA, 25 bp, Probe Sequence
cttccgctggatggcacagtacatt

SEQ ID NO: 181191 - DNA, 25 bp, Probe Sequence
cttccgctggatggcacagtacatt

SEQ ID NO: 181192 - DNA, 25 bp, Probe Sequence
cttccaattatgtcatcaattttag

SEQ ID NO: 181193 - DNA, 25 bp, Probe Sequence
cttctcaatttgtactttccaggca

SEQ ID NO: 181194 - DNA, 25 bp, Probe Sequence
cttccacttcataactttcggcgag

SEQ ID NO: 181195 - DNA, 25 bp, Probe Sequence
cttccacttcataactttcggcgag

SEQ ID NO: 181196 - DNA, 25 bp, Probe Sequence
cttgccacacaggtagttcggggat

SEQ ID NO: 181197 - DNA, 25 bp, Probe Sequence
cttgccaccaaaatgtttgctgagg

SEQ ID NO: 181198 - DNA, 25 bp, Probe Sequence
cttgcacaagcatcttctcagagga

SEQ ID NO: 181199 - DNA, 25 bp, Probe Sequence
cttgctgccagattctgttcagaaa

SEQ ID NO: 181200 - DNA, 25 bp, Probe Sequence
cttgcagctgtctctgttcaaagga

SEQ ID NO: 181201 - DNA, 25 bp, Probe Sequence
cttgagttcagctgctctgagaagg

SEQ ID NO: 181202 - DNA, 25 bp, Probe Sequence
cttgcagttgccttcctgatgtaaa

SEQ ID NO: 181203 - DNA, 25 bp, Probe Sequence
cttgctttccctaggagttgaatcc

SEQ ID NO: 181204 - DNA, 25 bp, Probe Sequence
cttgtttgccgctgctgagattgca

SEQ ID NO: 181205 - DNA, 25 bp, Probe Sequence
cttgtttgccgctgctgagattgca

SEQ ID NO: 181206 - DNA, 25 bp, Probe Sequence
cttctgctggccgggatgagattgt

SEQ ID NO: 181207 - DNA, 25 bp, Probe Sequence
cttcgaggcctgctgtggtgatttt

SEQ ID NO: 181208 - DNA, 25 bp, Probe Sequence
cttcgagatgcatgcctggggatca

SEQ ID NO: 181209 - DNA, 25 bp, Probe Sequence
cttcggatcacgcccggagtagaag

SEQ ID NO: 181210 - DNA, 25 bp, Probe Sequence
cttcggacaccactcaaacatttag

SEQ ID NO: 181211 - DNA, 25 bp, Probe Sequence
cttcggacaccactcaaacatttag

SEQ ID NO: 181212 - DNA, 25 bp, Probe Sequence
cttcggacgcaagaagacagcgaca

SEQ ID NO: 181213 - DNA, 25 bp, Probe Sequence
cttctgtaccagagggccggacaaa

SEQ ID NO: 181214 - DNA, 25 bp, Probe Sequence
cttccatccaaaaggggcagggcac

SEQ ID NO: 181215 - DNA, 25 bp, Probe Sequence
cttccttaaaagccaccatgggcct

SEQ ID NO: 181216 - DNA, 25 bp, Probe Sequence
cttccttcagaggattatccggggc

SEQ ID NO: 181217 - DNA, 25 bp, Probe Sequence
cttctttgggctgttgggtgtggca

SEQ ID NO: 181218 - DNA, 25 bp, Probe Sequence
cttcctagggctgcttctgagtggt

SEQ ID NO: 181219 - DNA, 25 bp, Probe Sequence
cttccgcggagcgggtgtgcagggc

SEQ ID NO: 181220 - DNA, 25 bp, Probe Sequence
cttgccagcctgccaggatggtgtc

SEQ ID NO: 181221 - DNA, 25 bp, Probe Sequence
cttgctggcctgagagagctgtgtg

SEQ ID NO: 181222 - DNA, 25 bp, Probe Sequence
cttctgaccatctgggttttgacac

SEQ ID NO: 181223 - DNA, 25 bp, Probe Sequence
cttcagatcctctggcagctagcta

SEQ ID NO: 181224 - DNA, 25 bp, Probe Sequence
cttagacttcgactcaggatccagt

SEQ ID NO: 181225 - DNA, 25 bp, Probe Sequence
cttctgttttgcccatggtcaagtc

SEQ ID NO: 181226 - DNA, 25 bp, Probe Sequence
cttgctattttgctctgtttacatg

SEQ ID NO: 181227 - DNA, 25 bp, Probe Sequence
cttgattctcttatttctgtccagc

SEQ ID NO: 181228 - DNA, 25 bp, Probe Sequence
cttgatctttgtcttttgtcatgac

SEQ ID NO: 181229 - DNA, 25 bp, Probe Sequence
cttgttcttttgaagcttgtgctga

SEQ ID NO: 181230 - DNA, 25 bp, Probe Sequence
ctcgtcatcttttaactagtgtttc

SEQ ID NO: 181231 - DNA, 25 bp, Probe Sequence
cttctgttttgatactagttttcac

SEQ ID NO: 181232 - DNA, 25 bp, Probe Sequence
cttcctttattctacaactcttaca

SEQ ID NO: 181233 - DNA, 25 bp, Probe Sequence
cttccaatgagcttaaaacattttt

SEQ ID NO: 181234 - DNA, 25 bp, Probe Sequence
cttccagatgtctaaaagattcttt

SEQ ID NO: 181235 - DNA, 25 bp, Probe Sequence
cttcgagactcatgcacaagcttca

SEQ ID NO: 181236 - DNA, 25 bp, Probe Sequence
cttcggctgtgatccaatctccagc

SEQ ID NO: 181237 - DNA, 25 bp, Probe Sequence
cttcgttgtagtgaggtcctgcagg

SEQ ID NO: 181238 - DNA, 25 bp, Probe Sequence
cttcgtggaagtggggcgactgcac

SEQ ID NO: 181239 - DNA, 25 bp, Probe Sequence
cttctgttaactgaagcctgctcct

SEQ ID NO: 181240 - DNA, 25 bp, Probe Sequence
cttgctcttacagaaacctggctcc

SEQ ID NO: 181241 - DNA, 25 bp, Probe Sequence
cttccttatcgccgacaagtggccc

SEQ ID NO: 181242 - DNA, 25 bp, Probe Sequence
cttcctccatccacaaagtgcatca

SEQ ID NO: 181243 - DNA, 25 bp, Probe Sequence
cttgctcctcaagtaagaggtgcag

SEQ ID NO: 181244 - DNA, 25 bp, Probe Sequence
cttcgcagtcaggtaagcaggtcaa

SEQ ID NO: 181245 - DNA, 25 bp, Probe Sequence
cttctcctcggggagcggtgaaccg

SEQ ID NO: 181246 - DNA, 25 bp, Probe Sequence
cttctcccctgtgacgggaaggcag

SEQ ID NO: 181247 - DNA, 25 bp, Probe Sequence
cttccccagggactgcggggaggag

SEQ ID NO: 181248 - DNA, 25 bp, Probe Sequence
cttcccatcagccagagggggtcag

SEQ ID NO: 181249 - DNA, 25 bp, Probe Sequence
cttccccgtgattatggggctagtt

SEQ ID NO: 181250 - DNA, 25 bp, Probe Sequence
cttccctgagtgtatatgttcgtaa

SEQ ID NO: 181251 - DNA, 25 bp, Probe Sequence
cttcctgtcattgtatttggcacat

SEQ ID NO: 181252 - DNA, 25 bp, Probe Sequence
cttcctctgctatgtggttgaagca

SEQ ID NO: 181253 - DNA, 25 bp, Probe Sequence
cttcctcctcaacgagctggagcgg

SEQ ID NO: 181254 - DNA, 25 bp, Probe Sequence
cttcgacttcagtgcactggcactg

SEQ ID NO: 181255 - DNA, 25 bp, Probe Sequence
cttccagttcagtcgacggcaacaa

SEQ ID NO: 181256 - DNA, 25 bp, Probe Sequence
cttccactacgagatcgccaacagc

SEQ ID NO: 181257 - DNA, 25 bp, Probe Sequence
cttcttcttcgagttctgcgactat

SEQ ID NO: 181258 - DNA, 25 bp, Probe Sequence
cttcttcttcagttttctactttca

SEQ ID NO: 181259 - DNA, 25 bp, Probe Sequence
cttcttcttcagttttctactttca

SEQ ID NO: 181260 - DNA, 25 bp, Probe Sequence
ctgtcttttaatattccagtatttg

SEQ ID NO: 181261 - DNA, 25 bp, Probe Sequence
cttgatatttattttactccatttt

SEQ ID NO: 181262 - DNA, 25 bp, Probe Sequence
cttgatattttgtgtccaccagatg

SEQ ID NO: 181263 - DNA, 25 bp, Probe Sequence
cttgctcaggtgcaagtgccccagg

SEQ ID NO: 181264 - DNA, 25 bp, Probe Sequence
cttgctcaggctcagagggacctca

SEQ ID NO: 181265 - DNA, 25 bp, Probe Sequence
cttgctcaggctcagagggacctca

SEQ ID NO: 181266 - DNA, 25 bp, Probe Sequence
cttgctcaacagtatagtggtacca

SEQ ID NO: 181267 - DNA, 25 bp, Probe Sequence
cttgctcaatcagttgttggagcac

SEQ ID NO: 181268 - DNA, 25 bp, Probe Sequence
cttgccaggagttgtctgcgagatt

SEQ ID NO: 181269 - DNA, 25 bp, Probe Sequence
cttccaggagtatgtggtgcttgtg

SEQ ID NO: 181270 - DNA, 25 bp, Probe Sequence
cttccgctttgatgtggcatggttc

SEQ ID NO: 181271 - DNA, 25 bp, Probe Sequence
cttctggctgtgcacgtttgtgtgt

SEQ ID NO: 181272 - DNA, 25 bp, Probe Sequence
cttctgcgtcatcttcgttgtagtg

SEQ ID NO: 181273 - DNA, 25 bp, Probe Sequence
cttcccctttgtgtgcttttggagc

SEQ ID NO: 181274 - DNA, 25 bp, Probe Sequence
cttcccttttgtcttcttgataata

SEQ ID NO: 181275 - DNA, 25 bp, Probe Sequence
cttcgtctttttgcttggatatgaa

SEQ ID NO: 181276 - DNA, 25 bp, Probe Sequence
cttcagatctctgcttcgtaggttc

SEQ ID NO: 181277 - DNA, 25 bp, Probe Sequence
cttgctgtatccctgttgtgaggtt

SEQ ID NO: 181278 - DNA, 25 bp, Probe Sequence
cttgatgtatctttggcgtgtgtgc

SEQ ID NO: 181279 - DNA, 25 bp, Probe Sequence
cttgagtcagctgcagggcagtggg

SEQ ID NO: 181280 - DNA, 25 bp, Probe Sequence
cttgcaggctgtggagcaagaggcc

SEQ ID NO: 181281 - DNA, 25 bp, Probe Sequence
cttgcgccctggtccaagatggcgg

SEQ ID NO: 181282 - DNA, 25 bp, Probe Sequence
cttccacgtggaccaagtgaccacc

SEQ ID NO: 181283 - DNA, 25 bp, Probe Sequence
cttccaccggagagactactgacct

SEQ ID NO: 181284 - DNA, 25 bp, Probe Sequence
cttcccaaggggtactgtgcagact

SEQ ID NO: 181285 - DNA, 25 bp, Probe Sequence
cttccgcaagggcaaggtgctggcc

SEQ ID NO: 181286 - DNA, 25 bp, Probe Sequence
cttcccaactggcactgggcagtca

SEQ ID NO: 181287 - DNA, 25 bp, Probe Sequence
cttcctaacgagtcacggagctgtc

SEQ ID NO: 181288 - DNA, 25 bp, Probe Sequence
cttcccaaggtgtggtgactgtgcc

SEQ ID NO: 181289 - DNA, 25 bp, Probe Sequence
cttcctaagaagagtgctgtcatta

SEQ ID NO: 181290 - DNA, 25 bp, Probe Sequence
cttgcctacagtggggtgcagtcca

SEQ ID NO: 181291 - DNA, 25 bp, Probe Sequence
cttccaccagttgtggcgtccagaa

SEQ ID NO: 181292 - DNA, 25 bp, Probe Sequence
cttcttccatgttctattagctcca

SEQ ID NO: 181293 - DNA, 25 bp, Probe Sequence
cttctttatatcttttgagctccct

SEQ ID NO: 181294 - DNA, 25 bp, Probe Sequence
cttgcttgtcattctgtttgcagta

SEQ ID NO: 181295 - DNA, 25 bp, Probe Sequence
cttgctatttttattcagtagattt

SEQ ID NO: 181296 - DNA, 25 bp, Probe Sequence
cttgctttgtgtatctcatttaatt

SEQ ID NO: 181297 - DNA, 25 bp, Probe Sequence
cttgctcttcatacttctattttga

SEQ ID NO: 181298 - DNA, 25 bp, Probe Sequence
cttccttgctacagcaagctctgga

SEQ ID NO: 181299 - DNA, 25 bp, Probe Sequence
cttccccatgactgcaagtgtcgtg

SEQ ID NO: 181300 - DNA, 25 bp, Probe Sequence
cttctgccacatcaacacaggactt

SEQ ID NO: 181301 - DNA, 25 bp, Probe Sequence
cttcctccagaagacacgaatcatg

SEQ ID NO: 181302 - DNA, 25 bp, Probe Sequence
cttcctccacagtaacacgctgaag

SEQ ID NO: 181303 - DNA, 25 bp, Probe Sequence
cttctccctggatctacctggaggg

SEQ ID NO: 181304 - DNA, 25 bp, Probe Sequence
cttcttgcccgagctgtggcgggag

SEQ ID NO: 181305 - DNA, 25 bp, Probe Sequence
cttcttccgcgaattggccgaggag

SEQ ID NO: 181306 - DNA, 25 bp, Probe Sequence
cttcttgcaccatcttgcctaatgg

SEQ ID NO: 181307 - DNA, 25 bp, Probe Sequence
cttccacccaccatcagtgaagatg

SEQ ID NO: 181308 - DNA, 25 bp, Probe Sequence
cttccattccacatccggaggagaa

SEQ ID NO: 181309 - DNA, 25 bp, Probe Sequence
cttctctctcctttacgagacgaaa

SEQ ID NO: 181310 - DNA, 25 bp, Probe Sequence
cttcctcctctattctctaaataat

SEQ ID NO: 181311 - DNA, 25 bp, Probe Sequence
cttgccagaactgatctcttttggt

SEQ ID NO: 181312 - DNA, 25 bp, Probe Sequence
cttgctgggacggattcttgcggga

SEQ ID NO: 181313 - DNA, 25 bp, Probe Sequence
cttgcatgggacgaaagcttggctc

SEQ ID NO: 181314 - DNA, 25 bp, Probe Sequence
cttcatggatcagcgattttcctgc

SEQ ID NO: 181315 - DNA, 25 bp, Probe Sequence
cttcaaagggcacttgtgtcttaga

SEQ ID NO: 181316 - DNA, 25 bp, Probe Sequence
cttcaagatgtctgtggttcccaga

SEQ ID NO: 181317 - DNA, 25 bp, Probe Sequence
cttctgaggcgctgctttgtcaaaa

SEQ ID NO: 181318 - DNA, 25 bp, Probe Sequence
cttaatgtctgctctgagccttaaa

SEQ ID NO: 181319 - DNA, 25 bp, Probe Sequence
cttccatgtccagaatcctgcttaa

SEQ ID NO: 181320 - DNA, 25 bp, Probe Sequence
cttccaatgcaaggcaatccacctc

SEQ ID NO: 181321 - DNA, 25 bp, Probe Sequence
cttccaatgcaaggtaagaggctgc

SEQ ID NO: 181322 - DNA, 25 bp, Probe Sequence
cttccactgcagtgcagacgggcga

SEQ ID NO: 181323 - DNA, 25 bp, Probe Sequence
cttccactcagcatcagcgtggcag

SEQ ID NO: 181324 - DNA, 25 bp, Probe Sequence
cttccacatcaaggcagccatccag

SEQ ID NO: 181325 - DNA, 25 bp, Probe Sequence
cttctcacccatacagacatcaagc

SEQ ID NO: 181326 - DNA, 25 bp, Probe Sequence
cttccagcatctgatctgttcactg

SEQ ID NO: 181327 - DNA, 25 bp, Probe Sequence
cttcctgagctttatggtcctaaaa

SEQ ID NO: 181328 - DNA, 25 bp, Probe Sequence
cttcctgacatttgtggcataaaaa

SEQ ID NO: 181329 - DNA, 25 bp, Probe Sequence
cttcctgacaattcccatattaata

SEQ ID NO: 181330 - DNA, 25 bp, Probe Sequence
cttcccattttcctatattgaaaat

SEQ ID NO: 181331 - DNA, 25 bp, Probe Sequence
cttccggtttcttcatattgagggg

SEQ ID NO: 181332 - DNA, 25 bp, Probe Sequence
cttcctggttacattcattgggtct

SEQ ID NO: 181333 - DNA, 25 bp, Probe Sequence
cttcctgagttcttggtttcgactc

SEQ ID NO: 181334 - DNA, 25 bp, Probe Sequence
cttctctaggtctcgtagtcgatct

SEQ ID NO: 181335 - DNA, 25 bp, Probe Sequence
cttactcgagctccacgtattggtc

SEQ ID NO: 181336 - DNA, 25 bp, Probe Sequence
cttacctggcttagcgttctgtttc

SEQ ID NO: 181337 - DNA, 25 bp, Probe Sequence
cttacaatccaaatgcgtctttaaa

SEQ ID NO: 181338 - DNA, 25 bp, Probe Sequence
cttacaagcaaacttactattagaa

SEQ ID NO: 181339 - DNA, 25 bp, Probe Sequence
cttgcataagctgaactaaaataaa

SEQ ID NO: 181340 - DNA, 25 bp, Probe Sequence
cttgcaaatgcgcactctatggaca

SEQ ID NO: 181341 - DNA, 25 bp, Probe Sequence
cttaatcaggctgctttgtaccgcc

SEQ ID NO: 181342 - DNA, 25 bp, Probe Sequence
cttaaccgccttattagccagattg

SEQ ID NO: 181343 - DNA, 25 bp, Probe Sequence
ctagaaccagggcctttaccagtct

SEQ ID NO: 181344 - DNA, 25 bp, Probe Sequence
ctaatcgccggggatttttcacctg

SEQ ID NO: 181345 - DNA, 25 bp, Probe Sequence
ctttgggcgagggagctttgtcacc

SEQ ID NO: 181346 - DNA, 25 bp, Probe Sequence
cttttgatggggccaatgtcgtccc

SEQ ID NO: 181347 - DNA, 25 bp, Probe Sequence
cttttatggggccctgtccaggtag

SEQ ID NO: 181348 - DNA, 25 bp, Probe Sequence
cttttgagcaggacccactgccagg

SEQ ID NO: 181349 - DNA, 25 bp, Probe Sequence
cttgctgtgagaggtctcaccccgg

SEQ ID NO: 181350 - DNA, 25 bp, Probe Sequence
cttgctgaaatgttctcatttcctg

SEQ ID NO: 181351 - DNA, 25 bp, Probe Sequence
cttgcagatgtgttttatttggctt

SEQ ID NO: 181352 - DNA, 25 bp, Probe Sequence
cttgaattggtcctatttctcttcc

SEQ ID NO: 181353 - DNA, 25 bp, Probe Sequence
gcattaaaattacacgttttgccca

SEQ ID NO: 181354 - DNA, 25 bp, Probe Sequence
gcattaaaatttctttgttacgagc

SEQ ID NO: 181355 - DNA, 25 bp, Probe Sequence
gcattaacttttgtaaggtactgaa

SEQ ID NO: 181356 - DNA, 25 bp, Probe Sequence
gcattaacttttgtaaggtactgaa

SEQ ID NO: 181357 - DNA, 25 bp, Probe Sequence
cttcacttccttctaaagagactaa

SEQ ID NO: 181358 - DNA, 25 bp, Probe Sequence
cttcctctaccccttagcaggaata

SEQ ID NO: 181359 - DNA, 25 bp, Probe Sequence
cttcctctaccccttagcaggaata

SEQ ID NO: 181360 - DNA, 25 bp, Probe Sequence
cttcctctaccccttagcaggaata

SEQ ID NO: 181361 - DNA, 25 bp, Probe Sequence
cttgcttcagaccatcagttacaga

SEQ ID NO: 181362 - DNA, 25 bp, Probe Sequence
cttgcatctccagattgattactca

SEQ ID NO: 181363 - DNA, 25 bp, Probe Sequence
ctgacttccctagattcccaatggg

SEQ ID NO: 181364 - DNA, 25 bp, Probe Sequence
cttatttattggctttccaaggtgc

SEQ ID NO: 181365 - DNA, 25 bp, Probe Sequence
cttcgtttccagctttacatgtggt

SEQ ID NO: 181366 - DNA, 25 bp, Probe Sequence
cttctttattctctttactgctgga

SEQ ID NO: 181367 - DNA, 25 bp, Probe Sequence
cttcgggttgtgctttagtctgtaa

SEQ ID NO: 181368 - DNA, 25 bp, Probe Sequence
cttctgagatttttggtttccttga

SEQ ID NO: 181369 - DNA, 25 bp, Probe Sequence
cttagagtttttctgaacctgatag

SEQ ID NO: 181370 - DNA, 25 bp, Probe Sequence
cttaagttactcttctgaaattgct

SEQ ID NO: 181371 - DNA, 25 bp, Probe Sequence
ctcgcaatttaactttaactatgcc

SEQ ID NO: 181372 - DNA, 25 bp, Probe Sequence
cttcaatttaatctctacctttcaa

SEQ ID NO: 181373 - DNA, 25 bp, Probe Sequence
cttaatggtcagtgttcctttcaaa

SEQ ID NO: 181374 - DNA, 25 bp, Probe Sequence
cttaaagtagtccattcttgctaat

SEQ ID NO: 181375 - DNA, 25 bp, Probe Sequence
cttcaatagtttcttctatgataaa

SEQ ID NO: 181376 - DNA, 25 bp, Probe Sequence
cttccatttttagtatctataagat

SEQ ID NO: 181377 - DNA, 25 bp, Probe Sequence
cttcctttcccagatcttcaataat

SEQ ID NO: 181378 - DNA, 25 bp, Probe Sequence
cttacctttcaacatgcttcaatct

SEQ ID NO: 181379 - DNA, 25 bp, Probe Sequence
ctatagtcctataagcttttccact

SEQ ID NO: 181380 - DNA, 25 bp, Probe Sequence
cttcgatgaaagtagtttggccaca

SEQ ID NO: 181381 - DNA, 25 bp, Probe Sequence
cttcagcaacgtcagttggtctcgc

SEQ ID NO: 181382 - DNA, 25 bp, Probe Sequence
cttcagcaaccactggattttctgg

SEQ ID NO: 181383 - DNA, 25 bp, Probe Sequence
cttccaacacagctagcattcctag

SEQ ID NO: 181384 - DNA, 25 bp, Probe Sequence
cttcaccaccagctgacaatattca

SEQ ID NO: 181385 - DNA, 25 bp, Probe Sequence
cttacagcgtcaatgtcaccttcac

SEQ ID NO: 181386 - DNA, 25 bp, Probe Sequence
cttagaggtgctaatcccgatttga

SEQ ID NO: 181387 - DNA, 25 bp, Probe Sequence
cttaagatgtccaaccctgttttga

SEQ ID NO: 181388 - DNA, 25 bp, Probe Sequence
cttagaactgccaacgggctctttg

SEQ ID NO: 181389 - DNA, 25 bp, Probe Sequence
cttaacttcctaggggctgctgagc

SEQ ID NO: 181390 - DNA, 25 bp, Probe Sequence
cttagagatttggggggctctggcc

SEQ ID NO: 181391 - DNA, 25 bp, Probe Sequence
cttcaagcactccaggggttgtggg

SEQ ID NO: 181392 - DNA, 25 bp, Probe Sequence
cttccagtctccagaggtgtgggag

SEQ ID NO: 181393 - DNA, 25 bp, Probe Sequence
cttccagacccctggtgatgctgga

SEQ ID NO: 181394 - DNA, 25 bp, Probe Sequence
cttataaccctctgactatgcggat

SEQ ID NO: 181395 - DNA, 25 bp, Probe Sequence
ctatagtccccgcgacttgggaggt

SEQ ID NO: 181396 - DNA, 25 bp, Probe Sequence
cttcaaccccagagcctaagaatgg

SEQ ID NO: 181397 - DNA, 25 bp, Probe Sequence
cttcaaactctgcttccttggacag

SEQ ID NO: 181398 - DNA, 25 bp, Probe Sequence
cttgcataaggcagttcctggagac

SEQ ID NO: 181399 - DNA, 25 bp, Probe Sequence
cttcatttggcttgtgtgcatctgg

SEQ ID NO: 181400 - DNA, 25 bp, Probe Sequence
cttatgttacttctcctggggtaca

SEQ ID NO: 181401 - DNA, 25 bp, Probe Sequence
cttgcatttctaattgacctgaggg

SEQ ID NO: 181402 - DNA, 25 bp, Probe Sequence
cttctactgtatactagccggggaa

SEQ ID NO: 181403 - DNA, 25 bp, Probe Sequence
cttcaaagtcatcttgccagccagg

SEQ ID NO: 181404 - DNA, 25 bp, Probe Sequence
cttcatttgtcagctttgctccaga

SEQ ID NO: 181405 - DNA, 25 bp, Probe Sequence
cttatttgccaacgtagtccatgtg

SEQ ID NO: 181406 - DNA, 25 bp, Probe Sequence
cttctttcgaagctatgcccaggtg

SEQ ID NO: 181407 - DNA, 25 bp, Probe Sequence
cttcttttgagacattagccagtag

SEQ ID NO: 181408 - DNA, 25 bp, Probe Sequence
cttctccttgaagatcttgcacaaa

SEQ ID NO: 181409 - DNA, 25 bp, Probe Sequence
cttcccagaccagcatttgcacaat

SEQ ID NO: 181410 - DNA, 25 bp, Probe Sequence
cttctctcaacccctttgtaatggt

SEQ ID NO: 181411 - DNA, 25 bp, Probe Sequence
cttcgtgaagaccctgactggtaag

SEQ ID NO: 181412 - DNA, 25 bp, Probe Sequence
cttcgtccgaaccatccaggataag

SEQ ID NO: 181413 - DNA, 25 bp, Probe Sequence
cttcggctccaggccaactggaaca

SEQ ID NO: 181414 - DNA, 25 bp, Probe Sequence
cttactgccggtgaggctgaaacgc

SEQ ID NO: 181415 - DNA, 25 bp, Probe Sequence
cttccgagggtgacaggtgaaagac

SEQ ID NO: 181416 - DNA, 25 bp, Probe Sequence
cttcccaggctgatctgaggtaaac

SEQ ID NO: 181417 - DNA, 25 bp, Probe Sequence
cttccacaagtactcgggcaaagag

SEQ ID NO: 181418 - DNA, 25 bp, Probe Sequence
ctatcctcaagtattggaagagcag

SEQ ID NO: 181419 - DNA, 25 bp, Probe Sequence
cttcccaactagactgtaagtgcct

SEQ ID NO: 181420 - DNA, 25 bp, Probe Sequence
cttcccccaagattgtggttgccat

SEQ ID NO: 181421 - DNA, 25 bp, Probe Sequence
cttccacccaagactgttgggtctg

SEQ ID NO: 181422 - DNA, 25 bp, Probe Sequence
cttctcccaacactcttggggacca

SEQ ID NO: 181423 - DNA, 25 bp, Probe Sequence
cttccacacaatagcctctgtaggt

SEQ ID NO: 181424 - DNA, 25 bp, Probe Sequence
cttccaacagttgctgactcacatt

SEQ ID NO: 181425 - DNA, 25 bp, Probe Sequence
cttccagatgcagactctcagtaat

SEQ ID NO: 181426 - DNA, 25 bp, Probe Sequence
cttccagatcgcttgcttcattggt

SEQ ID NO: 181427 - DNA, 25 bp, Probe Sequence
cttccagcagcggtatgttgggcca

SEQ ID NO: 181428 - DNA, 25 bp, Probe Sequence
cttgccctgcgtaatgtgcggcagc

SEQ ID NO: 181429 - DNA, 25 bp, Probe Sequence
cttgccctggcttagctgcaggaga

SEQ ID NO: 181430 - DNA, 25 bp, Probe Sequence
cttgccctggcttagctgcaggaga

SEQ ID NO: 181431 - DNA, 25 bp, Probe Sequence
cttcacctgctgtatggatgcaggt

SEQ ID NO: 181432 - DNA, 25 bp, Probe Sequence
cttcctctcatggggtcaggcatag

SEQ ID NO: 181433 - DNA, 25 bp, Probe Sequence
cttcctccgcgggtatgaacagttc

SEQ ID NO: 181434 - DNA, 25 bp, Probe Sequence
cttccccgctgatggagaacgttgc

SEQ ID NO: 181435 - DNA, 25 bp, Probe Sequence
cttcccctggcactggcaaacaggg

SEQ ID NO: 181436 - DNA, 25 bp, Probe Sequence
cttcccctggcactggcaaacaggg

SEQ ID NO: 181437 - DNA, 25 bp, Probe Sequence
cttccctgcttcctgggaatcagga

SEQ ID NO: 181438 - DNA, 25 bp, Probe Sequence
cttccactgcccaatgtggagacgg

SEQ ID NO: 181439 - DNA, 25 bp, Probe Sequence
cttccatccctcctgtagcagaggg

SEQ ID NO: 181440 - DNA, 25 bp, Probe Sequence
cttcgtccactctatgtgccagacg

SEQ ID NO: 181441 - DNA, 25 bp, Probe Sequence
cttgcgtctggcattgttcaatcca

SEQ ID NO: 181442 - DNA, 25 bp, Probe Sequence
cttcgtcggcagatctacaaggagc

SEQ ID NO: 181443 - DNA, 25 bp, Probe Sequence
cttgccctggagttaatagagtgag

SEQ ID NO: 181444 - DNA, 25 bp, Probe Sequence
cttgccaagagaattaatgtgcgta

SEQ ID NO: 181445 - DNA, 25 bp, Probe Sequence
cttaaacagtataaaatgcgtgaac

SEQ ID NO: 181446 - DNA, 25 bp, Probe Sequence
cttaactagacttctgaacttgaac

SEQ ID NO: 181447 - DNA, 25 bp, Probe Sequence
cttaccatggacactgaaattcgca

SEQ ID NO: 181448 - DNA, 25 bp, Probe Sequence
cttactgcttgtcacttgaatcccg

SEQ ID NO: 181449 - DNA, 25 bp, Probe Sequence
cttcctggagctaacttgaactctc

SEQ ID NO: 181450 - DNA, 25 bp, Probe Sequence
cttgcctcagatatactcatgcaaa

SEQ ID NO: 181451 - DNA, 25 bp, Probe Sequence
cttcctggtagaccactgccatatg

SEQ ID NO: 181452 - DNA, 25 bp, Probe Sequence
cttcctggaagccgcctggaatgtc

SEQ ID NO: 181453 - DNA, 25 bp, Probe Sequence
cttcctgtggaccctggagcaatgt

SEQ ID NO: 181454 - DNA, 25 bp, Probe Sequence
cttcgtgtctgactttgaggagctg

SEQ ID NO: 181455 - DNA, 25 bp, Probe Sequence
cttcgtgcctgttttatgtgcacac

SEQ ID NO: 181456 - DNA, 25 bp, Probe Sequence
cttcgacactgttcttagctcaatg

SEQ ID NO: 181457 - DNA, 25 bp, Probe Sequence
cttccctgctgttttagcatttctt

SEQ ID NO: 181458 - DNA, 25 bp, Probe Sequence
cttcctggcataatttccattttat

SEQ ID NO: 181459 - DNA, 25 bp, Probe Sequence
cttcctgcctttttcagattttcaa

SEQ ID NO: 181460 - DNA, 25 bp, Probe Sequence
cttcctgagcttctctcagatttcc

SEQ ID NO: 181461 - DNA, 25 bp, Probe Sequence
cttctgggtgcataccagtcttacc

SEQ ID NO: 181462 - DNA, 25 bp, Probe Sequence
cttctgggtgcataccagtcttacc

SEQ ID NO: 181463 - DNA, 25 bp, Probe Sequence
cttcttgagtaatcacaccatttca

SEQ ID NO: 181464 - DNA, 25 bp, Probe Sequence
cttcattttcattaccaggtttcat

SEQ ID NO: 181465 - DNA, 25 bp, Probe Sequence
cttcctgtgtctcacgcaagtttta

SEQ ID NO: 181466 - DNA, 25 bp, Probe Sequence
cttcctgtgtctcacgcaagtttta

SEQ ID NO: 181467 - DNA, 25 bp, Probe Sequence
cttccttagcatctgtggtgtcttt

SEQ ID NO: 181468 - DNA, 25 bp, Probe Sequence
cttcctctagctgtctggctgtata

SEQ ID NO: 181469 - DNA, 25 bp, Probe Sequence
cttccctgcagcacgtcgcttatat

SEQ ID NO: 181470 - DNA, 25 bp, Probe Sequence
cttcacttcagctcagtagctttgg

SEQ ID NO: 181471 - DNA, 25 bp, Probe Sequence
cttcctctcgcaacaaactatttgt

SEQ ID NO: 181472 - DNA, 25 bp, Probe Sequence
cttaccttatggggatctacttgga

SEQ ID NO: 181473 - DNA, 25 bp, Probe Sequence
cttaacccgtgagctctaattggat

SEQ ID NO: 181474 - DNA, 25 bp, Probe Sequence
cttaccactggttatcttaaagaat

SEQ ID NO: 181475 - DNA, 25 bp, Probe Sequence
cttcttcagcgtctacattaacaaa

SEQ ID NO: 181476 - DNA, 25 bp, Probe Sequence
cttttagacattgacttaggcgagg

SEQ ID NO: 181477 - DNA, 25 bp, Probe Sequence
ctgtttcaaagggatcctggggaag

SEQ ID NO: 181478 - DNA, 25 bp, Probe Sequence
ctttggaaggcgcacggggcgaaga

SEQ ID NO: 181479 - DNA, 25 bp, Probe Sequence
cttctggccagggatcctgggtctg

SEQ ID NO: 181480 - DNA, 25 bp, Probe Sequence
cttccagcaggggacctgagggctg

SEQ ID NO: 181481 - DNA, 25 bp, Probe Sequence
cttcaggagaggacaccagggtggg

SEQ ID NO: 181482 - DNA, 25 bp, Probe Sequence
cttctgggcaggaaccgtgggatcg

SEQ ID NO: 181483 - DNA, 25 bp, Probe Sequence
cttctggggcagaacctctgctggt

SEQ ID NO: 181484 - DNA, 25 bp, Probe Sequence
cttcgaggaggaggaccgcttctac

SEQ ID NO: 181485 - DNA, 25 bp, Probe Sequence
cttccaggagcgagatccctccaaa

SEQ ID NO: 181486 - DNA, 25 bp, Probe Sequence
cttccaggatggatgcatcacactc

SEQ ID NO: 181487 - DNA, 25 bp, Probe Sequence
cttctcagcggtgtcatctatgtga

SEQ ID NO: 181488 - DNA, 25 bp, Probe Sequence
cttctactgcgtgacttgccatgag

SEQ ID NO: 181489 - DNA, 25 bp, Probe Sequence
cttcgattactattcgtgcctagca

SEQ ID NO: 181490 - DNA, 25 bp, Probe Sequence
cttcacatacagtttcttgactagc

SEQ ID NO: 181491 - DNA, 25 bp, Probe Sequence
cttcacataaagcttgctaccgctc

SEQ ID NO: 181492 - DNA, 25 bp, Probe Sequence
cttccaatagttagatctaccctgc

SEQ ID NO: 181493 - DNA, 25 bp, Probe Sequence
cttcctgatctggtttcaaccctgg

SEQ ID NO: 181494 - DNA, 25 bp, Probe Sequence
cttaggaagagccttccacccaggg

SEQ ID NO: 181495 - DNA, 25 bp, Probe Sequence
cttactgaaggagccccgagatgtg

SEQ ID NO: 181496 - DNA, 25 bp, Probe Sequence
cttcctggagggtgtccgcaatgtt

SEQ ID NO: 181497 - DNA, 25 bp, Probe Sequence
cttcctgtcgggagtcatgctgacg

SEQ ID NO: 181498 - DNA, 25 bp, Probe Sequence
cttcgtgacaggcatcgtcagctgg

SEQ ID NO: 181499 - DNA, 25 bp, Probe Sequence
cttccagtgcaaggacgtcctgctg

SEQ ID NO: 181500 - DNA, 25 bp, Probe Sequence
cttccagcagaattactacttgtga

SEQ ID NO: 181501 - DNA, 25 bp, Probe Sequence
cttccagcaaactcaactcggcaat

SEQ ID NO: 181502 - DNA, 25 bp, Probe Sequence
cttccagaagaatatagcaccgcat

SEQ ID NO: 181503 - DNA, 25 bp, Probe Sequence
cttccggactcatgtaacacagatt

SEQ ID NO: 181504 - DNA, 25 bp, Probe Sequence
ctctaggtcctacctcagaaaatct

SEQ ID NO: 181505 - DNA, 25 bp, Probe Sequence
ctataggaccttctcaaacacacac

SEQ ID NO: 181506 - DNA, 25 bp, Probe Sequence
cttattcacgtaactgaacaccacc

SEQ ID NO: 181507 - DNA, 25 bp, Probe Sequence
cttttacctcatatatcccagacct

SEQ ID NO: 181508 - DNA, 25 bp, Probe Sequence
cttcttaaccctcaggcaaacctgt

SEQ ID NO: 181509 - DNA, 25 bp, Probe Sequence
cttcttaaccctcaggcaaacctgt

SEQ ID NO: 181510 - DNA, 25 bp, Probe Sequence
cttcaaaacccctcgcaagtttgtg

SEQ ID NO: 181511 - DNA, 25 bp, Probe Sequence
cttccattaccatcaatcctggttt

SEQ ID NO: 181512 - DNA, 25 bp, Probe Sequence
cggttgatcacctgagttgggattt

SEQ ID NO: 181513 - DNA, 25 bp, Probe Sequence
ctctgtgtaacctcatttggggggc

SEQ ID NO: 181514 - DNA, 25 bp, Probe Sequence
ctccgaggacacttttgtgggggtg

SEQ ID NO: 181515 - DNA, 25 bp, Probe Sequence
cttcgaggccattgcgttggtggag

SEQ ID NO: 181516 - DNA, 25 bp, Probe Sequence
cttcgcgggaaggctgtggtgctga

SEQ ID NO: 181517 - DNA, 25 bp, Probe Sequence
cttcctggtgcccgtgatgggctat

SEQ ID NO: 181518 - DNA, 25 bp, Probe Sequence
cttcctcctgcggcagagttgttca

SEQ ID NO: 181519 - DNA, 25 bp, Probe Sequence
cttccatagtagccacgtctgtaac

SEQ ID NO: 181520 - DNA, 25 bp, Probe Sequence
cttccagagcctcagcggtaacagc

SEQ ID NO: 181521 - DNA, 25 bp, Probe Sequence
cttccgtgctcttcctgggaaagat

SEQ ID NO: 181522 - DNA, 25 bp, Probe Sequence
ctttccgtcatggcgctgaaggtag

SEQ ID NO: 181523 - DNA, 25 bp, Probe Sequence
cttctccggtggcatggtggtagac

SEQ ID NO: 181524 - DNA, 25 bp, Probe Sequence
cttcccggatttggcaggagctgga

SEQ ID NO: 181525 - DNA, 25 bp, Probe Sequence
cttacagggtttcagcacagctggt

SEQ ID NO: 181526 - DNA, 25 bp, Probe Sequence
cttcacagtgcaaattccccacaag

SEQ ID NO: 181527 - DNA, 25 bp, Probe Sequence
cttcacggctttgcccgatgatcaa

SEQ ID NO: 181528 - DNA, 25 bp, Probe Sequence
cttcacgggcctgtactgtgagagc

SEQ ID NO: 181529 - DNA, 25 bp, Probe Sequence
cttccaggaccgcctttggaggcag

SEQ ID NO: 181530 - DNA, 25 bp, Probe Sequence
cttccgcgaggcggcttttcggagc

SEQ ID NO: 181531 - DNA, 25 bp, Probe Sequence
cttcctccgtgcagttttctgcaac

SEQ ID NO: 181532 - DNA, 25 bp, Probe Sequence
cttccccagagcaggtgaaccaagg

SEQ ID NO: 181533 - DNA, 25 bp, Probe Sequence
cttcaccttcagtgtgtaaccaagc

SEQ ID NO: 181534 - DNA, 25 bp, Probe Sequence
cttccgtctcgatgctgttaacaac

SEQ ID NO: 181535 - DNA, 25 bp, Probe Sequence
cttcccattgcctacaggataaaat

SEQ ID NO: 181536 - DNA, 25 bp, Probe Sequence
cttcgctgcacagtctacacagaaa

SEQ ID NO: 181537 - DNA, 25 bp, Probe Sequence
cttcactgtgtcttctacagacaga

SEQ ID NO: 181538 - DNA, 25 bp, Probe Sequence
cttcagcttgctcttggcaagagaa

SEQ ID NO: 181539 - DNA, 25 bp, Probe Sequence
cttcttcgctgcctgatgaggggaa

SEQ ID NO: 181540 - DNA, 25 bp, Probe Sequence
cttctgccctccttgtgggcagtca

SEQ ID NO: 181541 - DNA, 25 bp, Probe Sequence
cttctaccacacctgtggcggtagc

SEQ ID NO: 181542 - DNA, 25 bp, Probe Sequence
cttctgagctgctaccacatgacag

SEQ ID NO: 181543 - DNA, 25 bp, Probe Sequence
cttacagctctggccacaacagggc

SEQ ID NO: 181544 - DNA, 25 bp, Probe Sequence
cttccaggcacatcaacagcagggc

SEQ ID NO: 181545 - DNA, 25 bp, Probe Sequence
cttctcgcgcactcgaaagggaatc

SEQ ID NO: 181546 - DNA, 25 bp, Probe Sequence
cttcgtccctcgaaaatgggaatct

SEQ ID NO: 181547 - DNA, 25 bp, Probe Sequence
cttcgtgacctactccaatgtggag

SEQ ID NO: 181548 - DNA, 25 bp, Probe Sequence
cttcaggatccaagtccgtaggccc

SEQ ID NO: 181549 - DNA, 25 bp, Probe Sequence
cttcggaccaagtcctgtggccatg

SEQ ID NO: 181550 - DNA, 25 bp, Probe Sequence
cttcgggcaataactctgtggcacg

SEQ ID NO: 181551 - DNA, 25 bp, Probe Sequence
cttctgttgaattagctctgccacc

SEQ ID NO: 181552 - DNA, 25 bp, Probe Sequence
cttcctctgcaagtaggtgacctgc

SEQ ID NO: 181553 - DNA, 25 bp, Probe Sequence
cttccttgaatggaggatgcagctt

SEQ ID NO: 181554 - DNA, 25 bp, Probe Sequence
cttccttgacgcgagaggctctgag

SEQ ID NO: 181555 - DNA, 25 bp, Probe Sequence
cttctgcctaccagaggctccagag

SEQ ID NO: 181556 - DNA, 25 bp, Probe Sequence
cttctgcctaccagaggctccagag

SEQ ID NO: 181557 - DNA, 25 bp, Probe Sequence
cttcgaggcaccaacggccaaggaa

SEQ ID NO: 181558 - DNA, 25 bp, Probe Sequence
cttcagaaaacctccaaagtagatg

SEQ ID NO: 181559 - DNA, 25 bp, Probe Sequence
ctttaaacactcctcaaaactgaat

SEQ ID NO: 181560 - DNA, 25 bp, Probe Sequence
ctttaaaggccaccaaattttgatg

SEQ ID NO: 181561 - DNA, 25 bp, Probe Sequence
ctccccgaggctcttaattctttga

SEQ ID NO: 181562 - DNA, 25 bp, Probe Sequence
cttccctgtggcacttgacatttta

SEQ ID NO: 181563 - DNA, 25 bp, Probe Sequence
cttaccctgtgagaatgagcatttg

SEQ ID NO: 181564 - DNA, 25 bp, Probe Sequence
cttacaccctgtgttcatctgtgac

SEQ ID NO: 181565 - DNA, 25 bp, Probe Sequence
cttaggccctatattatggtgacac

SEQ ID NO: 181566 - DNA, 25 bp, Probe Sequence
cttacgctatttctgttggttagta

SEQ ID NO: 181567 - DNA, 25 bp, Probe Sequence
cttcccatttctgattgttgtatag

SEQ ID NO: 181568 - DNA, 25 bp, Probe Sequence
cttctcctttcgtagttttatctgg

SEQ ID NO: 181569 - DNA, 25 bp, Probe Sequence
cttcccagtgttttttattcctgtg

SEQ ID NO: 181570 - DNA, 25 bp, Probe Sequence
cttctcaaatttttcaatggttctt

SEQ ID NO: 181571 - DNA, 25 bp, Probe Sequence
ctttaccattaagccaggcttgttg

SEQ ID NO: 181572 - DNA, 25 bp, Probe Sequence
cttaaggattacgtatgcaggttgt

SEQ ID NO: 181573 - DNA, 25 bp, Probe Sequence
cttaaggatgtgattggatggatct

SEQ ID NO: 181574 - DNA, 25 bp, Probe Sequence
cttacagttccaattggctggagaa

SEQ ID NO: 181575 - DNA, 25 bp, Probe Sequence
cttacagttctcccggacggagcag

SEQ ID NO: 181576 - DNA, 25 bp, Probe Sequence
cttcaggttctcacaggacacaggg

SEQ ID NO: 181577 - DNA, 25 bp, Probe Sequence
gcttaggactccagagaaccggacc

SEQ ID NO: 181578 - DNA, 25 bp, Probe Sequence
gttcagtccctcaggaaccgtggac

SEQ ID NO: 181579 - DNA, 25 bp, Probe Sequence
cttcctgcccagactggataccggg

SEQ ID NO: 181580 - DNA, 25 bp, Probe Sequence
ctttttccggctggaaccatggagg

SEQ ID NO: 181581 - DNA, 25 bp, Probe Sequence
ctttttcgcctcagaaccgtattat

SEQ ID NO: 181582 - DNA, 25 bp, Probe Sequence
cttcttctaggagtccaaccttatt

SEQ ID NO: 181583 - DNA, 25 bp, Probe Sequence
cttctttaagacacagacgtaaggc

SEQ ID NO: 181584 - DNA, 25 bp, Probe Sequence
cttctctgtcacaacgctcagacgt

SEQ ID NO: 181585 - DNA, 25 bp, Probe Sequence
cttctctatcctgcagtcggcagat

SEQ ID NO: 181586 - DNA, 25 bp, Probe Sequence
cttctctatcactggctttgcacag

SEQ ID NO: 181587 - DNA, 25 bp, Probe Sequence
cttcttagctttggtactgacagtt

SEQ ID NO: 181588 - DNA, 25 bp, Probe Sequence
cttctctttactgtcactgattttt

SEQ ID NO: 181589 - DNA, 25 bp, Probe Sequence
cttcctaagatcaaaccctgctttt

SEQ ID NO: 181590 - DNA, 25 bp, Probe Sequence
cttcctgaagtcatgcacctgttta

SEQ ID NO: 181591 - DNA, 25 bp, Probe Sequence
cttcctctagtgaatgtcctttata

SEQ ID NO: 181592 - DNA, 25 bp, Probe Sequence
cttcctatctgtatgacccgagcaa

SEQ ID NO: 181593 - DNA, 25 bp, Probe Sequence
cttcctgatgatcattgtccctaca

SEQ ID NO: 181594 - DNA, 25 bp, Probe Sequence
cttcctgtatatttgtactcagaga

SEQ ID NO: 181595 - DNA, 25 bp, Probe Sequence
cttccttctatctattatctcatca

SEQ ID NO: 181596 - DNA, 25 bp, Probe Sequence
cttactaggacagttttctcataaa

SEQ ID NO: 181597 - DNA, 25 bp, Probe Sequence
cttctccagtactgctttcttcaaa

SEQ ID NO: 181598 - DNA, 25 bp, Probe Sequence
cttctcagagacccactttattcag

SEQ ID NO: 181599 - DNA, 25 bp, Probe Sequence
cttccgagaaacttttctgatcagt

SEQ ID NO: 181600 - DNA, 25 bp, Probe Sequence
cttacgctgacaaagattattgaag

SEQ ID NO: 181601 - DNA, 25 bp, Probe Sequence
cttcacgcataaaggcagtcgtaca

SEQ ID NO: 181602 - DNA, 25 bp, Probe Sequence
cttcccatatatacaatgttaacac

SEQ ID NO: 181603 - DNA, 25 bp, Probe Sequence
cttcctcataagagatgtgccagat

SEQ ID NO: 181604 - DNA, 25 bp, Probe Sequence
cttcctctcaagctagcccagaggg

SEQ ID NO: 181605 - DNA, 25 bp, Probe Sequence
cttcaccaaacactacccatggggg

SEQ ID NO: 181606 - DNA, 25 bp, Probe Sequence
cttagcaaacagcggcacgatgggg

SEQ ID NO: 181607 - DNA, 25 bp, Probe Sequence
cttaaaattgactgccaggctgggt

SEQ ID NO: 181608 - DNA, 25 bp, Probe Sequence
cttacaactcaaaccgggctgggca

SEQ ID NO: 181609 - DNA, 25 bp, Probe Sequence
ctctaaagtttagggtacatgggca

SEQ ID NO: 181610 - DNA, 25 bp, Probe Sequence
cttaaagtattgttatgtgatcttg

SEQ ID NO: 181611 - DNA, 25 bp, Probe Sequence
cttaatagacttgctttcactgtac

SEQ ID NO: 181612 - DNA, 25 bp, Probe Sequence
cttcaattagtctcagttctcttaa

SEQ ID NO: 181613 - DNA, 25 bp, Probe Sequence
cttcaggagaactcatgttattttt

SEQ ID NO: 181614 - DNA, 25 bp, Probe Sequence
ctctatgaaaacttaacgctttttg

SEQ ID NO: 181615 - DNA, 25 bp, Probe Sequence
tttataaagcctgtacccctgttgc

SEQ ID NO: 181616 - DNA, 25 bp, Probe Sequence
ctttaaaaagcaacccccatgtatg

SEQ ID NO: 181617 - DNA, 25 bp, Probe Sequence
ctttaaaatgcaaacccaccttgtg

SEQ ID NO: 181618 - DNA, 25 bp, Probe Sequence
ctttaaggtttagctccacatcatg

SEQ ID NO: 181619 - DNA, 25 bp, Probe Sequence
cttaggagagatctgaactccagct

SEQ ID NO: 181620 - DNA, 25 bp, Probe Sequence
cttattcatgagtccgtatcaacgc

SEQ ID NO: 181621 - DNA, 25 bp, Probe Sequence
cttatagtaggaatgtgtccccatt

SEQ ID NO: 181622 - DNA, 25 bp, Probe Sequence
cttctagtttagagacatccttcat

SEQ ID NO: 181623 - DNA, 25 bp, Probe Sequence
cttctcatcccaaaacaatgccttt

SEQ ID NO: 181624 - DNA, 25 bp, Probe Sequence
ctactcaagcctgcaaaacctttta

SEQ ID NO: 181625 - DNA, 25 bp, Probe Sequence
ctaaacccaggataaccttatctca

SEQ ID NO: 181626 - DNA, 25 bp, Probe Sequence
cttaaccctcaggcaaacctgtgtt

SEQ ID NO: 181627 - DNA, 25 bp, Probe Sequence
cttcaactggtgtccaaagacatgt

SEQ ID NO: 181628 - DNA, 25 bp, Probe Sequence
cttcaacatgattgatcagaacaga

SEQ ID NO: 181629 - DNA, 25 bp, Probe Sequence
cttcaacagctcggccaagcagaac

SEQ ID NO: 181630 - DNA, 25 bp, Probe Sequence
cttcgactgcacggccaccatgaag

SEQ ID NO: 181631 - DNA, 25 bp, Probe Sequence
cttctgaaggtcctccctaagagtc

SEQ ID NO: 181632 - DNA, 25 bp, Probe Sequence
cttattaggccgtgctccaaagtca

SEQ ID NO: 181633 - DNA, 25 bp, Probe Sequence
cttcagtaggccgtggccggaagcc

SEQ ID NO: 181634 - DNA, 25 bp, Probe Sequence
cttagttgaacagggccctgaagcg

SEQ ID NO: 181635 - DNA, 25 bp, Probe Sequence
gcttatcctaaggctgtccacgtac

SEQ ID NO: 181636 - DNA, 25 bp, Probe Sequence
cttcatccttatgctgatcatcctg

SEQ ID NO: 181637 - DNA, 25 bp, Probe Sequence
cttccctttgctggcaatggtgcct

SEQ ID NO: 181638 - DNA, 25 bp, Probe Sequence
cttcgccattgcggagaatgagagc

SEQ ID NO: 181639 - DNA, 25 bp, Probe Sequence
cttctgccatcttctgggagaagga

SEQ ID NO: 181640 - DNA, 25 bp, Probe Sequence
cttctggcttgactggatggaagga

SEQ ID NO: 181641 - DNA, 25 bp, Probe Sequence
cttctggtccagcgcaaggaggggc

SEQ ID NO: 181642 - DNA, 25 bp, Probe Sequence
ctttatccctgggaacttggctgcc

SEQ ID NO: 181643 - DNA, 25 bp, Probe Sequence
ctttgtttctgggctactgtctgcc

SEQ ID NO: 181644 - DNA, 25 bp, Probe Sequence
cttagtatttgggtaccctgctctt

SEQ ID NO: 181645 - DNA, 25 bp, Probe Sequence
cttagtattatctagtacccagtcc

SEQ ID NO: 181646 - DNA, 25 bp, Probe Sequence
cttctgtgattattaaccccactca

SEQ ID NO: 181647 - DNA, 25 bp, Probe Sequence
cttaggcagctgtagaaccccagga

SEQ ID NO: 181648 - DNA, 25 bp, Probe Sequence
cttcgtcatctgtggatccatccag

SEQ ID NO: 181649 - DNA, 25 bp, Probe Sequence
cttcgtcatctgtggatccatccag

SEQ ID NO: 181650 - DNA, 25 bp, Probe Sequence
cttcgtgatctggggatgtgccacc

SEQ ID NO: 181651 - DNA, 25 bp, Probe Sequence
cttctgcaaccagtatggtgcccgc

SEQ ID NO: 181652 - DNA, 25 bp, Probe Sequence
ctttgcaagagcgcagaccaccgcg

SEQ ID NO: 181653 - DNA, 25 bp, Probe Sequence
ctttccgagtgtgagcacagctccc

SEQ ID NO: 181654 - DNA, 25 bp, Probe Sequence
ctttccaagtctcaggatgcaccat

SEQ ID NO: 181655 - DNA, 25 bp, Probe Sequence
cttaccaaggcgaggagctcagcat

SEQ ID NO: 181656 - DNA, 25 bp, Probe Sequence
cttcccaaggttactcagcagcaga

SEQ ID NO: 181657 - DNA, 25 bp, Probe Sequence
cttacagagtggaaactggcaggag

SEQ ID NO: 181658 - DNA, 25 bp, Probe Sequence
cttacaacgagaccctggcttgagg

SEQ ID NO: 181659 - DNA, 25 bp, Probe Sequence
ctttcccatgaaccctggagggtgg

SEQ ID NO: 181660 - DNA, 25 bp, Probe Sequence
ctttttcaaagtgtgggtggtccag

SEQ ID NO: 181661 - DNA, 25 bp, Probe Sequence
cttctttaagcagtgtggggttgtt

SEQ ID NO: 181662 - DNA, 25 bp, Probe Sequence
ctttcttgaaggtcaggggctttat

SEQ ID NO: 181663 - DNA, 25 bp, Probe Sequence
ctagttattacccagagtttttatg

SEQ ID NO: 181664 - DNA, 25 bp, Probe Sequence
cttttcagccccgaggatggttttg

SEQ ID NO: 181665 - DNA, 25 bp, Probe Sequence
gatttatccccagaggggttgtcac

SEQ ID NO: 181666 - DNA, 25 bp, Probe Sequence
cttaacacccaggtgatgggttgat

SEQ ID NO: 181667 - DNA, 25 bp, Probe Sequence
cttcaacatcaagctttggttatat

SEQ ID NO: 181668 - DNA, 25 bp, Probe Sequence
cttcacaatcacgacttctatgcac

SEQ ID NO: 181669 - DNA, 25 bp, Probe Sequence
cttctcatacaggccatgtcttgca

SEQ ID NO: 181670 - DNA, 25 bp, Probe Sequence
cttctcagagaagagtgctgggact

SEQ ID NO: 181671 - DNA, 25 bp, Probe Sequence
cttcacgcataagaggcagtgcgaa

SEQ ID NO: 181672 - DNA, 25 bp, Probe Sequence
cttcccatattggtcccttgacatt

SEQ ID NO: 181673 - DNA, 25 bp, Probe Sequence
cttccctgtatcgatcctttaattt

SEQ ID NO: 181674 - DNA, 25 bp, Probe Sequence
cttccctcatatacacactatttat

SEQ ID NO: 181675 - DNA, 25 bp, Probe Sequence
cttcacctattcatgagtattattg

SEQ ID NO: 181676 - DNA, 25 bp, Probe Sequence
cttaggctttagcagctttgcattt

SEQ ID NO: 181677 - DNA, 25 bp, Probe Sequence
cttaggtcacttgggtttcaaattg

SEQ ID NO: 181678 - DNA, 25 bp, Probe Sequence
cttacccacttagcttcctaatttg

SEQ ID NO: 181679 - DNA, 25 bp, Probe Sequence
cttacctacttctctggtacaaggg

SEQ ID NO: 181680 - DNA, 25 bp, Probe Sequence
cttacctaagtctttggagatagag

SEQ ID NO: 181681 - DNA, 25 bp, Probe Sequence
cttatcctcgtttcttggagtcaga

SEQ ID NO: 181682 - DNA, 25 bp, Probe Sequence
cttctcctcggacctggagaacgtg

SEQ ID NO: 181683 - DNA, 25 bp, Probe Sequence
cttctgtctagtgcctgggaatctt

SEQ ID NO: 181684 - DNA, 25 bp, Probe Sequence
cttcatctctaaccctaagaccatt

SEQ ID NO: 181685 - DNA, 25 bp, Probe Sequence
cttcaactgcaacatctgggatgcc

SEQ ID NO: 181686 - DNA, 25 bp, Probe Sequence
cttctgcacatgtagttcctagagc

SEQ ID NO: 181687 - DNA, 25 bp, Probe Sequence
cttcccttgtatccagtgatgtgct

SEQ ID NO: 181688 - DNA, 25 bp, Probe Sequence
cttccgagctgaccactggatgctc

SEQ ID NO: 181689 - DNA, 25 bp, Probe Sequence
cttactggctcattcagcgggtgcc

SEQ ID NO: 181690 - DNA, 25 bp, Probe Sequence
cttactgtacatgctcggaggcctg

SEQ ID NO: 181691 - DNA, 25 bp, Probe Sequence
cttttgtcctcctgggtcagggaga

SEQ ID NO: 181692 - DNA, 25 bp, Probe Sequence
cttttaccccacagctgacgggatc

SEQ ID NO: 181693 - DNA, 25 bp, Probe Sequence
cttttacaccaaaaggtctgcaggg

SEQ ID NO: 181694 - DNA, 25 bp, Probe Sequence
ctttttcaacaagcacgaccatgga

SEQ ID NO: 181695 - DNA, 25 bp, Probe Sequence
cttttccaacaatctcaggtgtctg

SEQ ID NO: 181696 - DNA, 25 bp, Probe Sequence
cttaccgaagcgaacgcagcctttg

SEQ ID NO: 181697 - DNA, 25 bp, Probe Sequence
cttacctaacaagtactgctcattt

SEQ ID NO: 181698 - DNA, 25 bp, Probe Sequence
ctttctccaccatggactcaatctg

SEQ ID NO: 181699 - DNA, 25 bp, Probe Sequence
cttctctaacgcagaacatctctct

SEQ ID NO: 181700 - DNA, 25 bp, Probe Sequence
cttctctctaaggagaatggcccag

SEQ ID NO: 181701 - DNA, 25 bp, Probe Sequence
cttcaccaccatggagaaggctggg

SEQ ID NO: 181702 - DNA, 25 bp, Probe Sequence
cttctatctccaggagggcaagggc

SEQ ID NO: 181703 - DNA, 25 bp, Probe Sequence
cttcttcccaggtgtgccaaggaat

SEQ ID NO: 181704 - DNA, 25 bp, Probe Sequence
cttttctactaacctagaaggtatg

SEQ ID NO: 181705 - DNA, 25 bp, Probe Sequence
ctttgtccccactctagagcaggga

SEQ ID NO: 181706 - DNA, 25 bp, Probe Sequence
cttctcaccctcaccaacagggtga

SEQ ID NO: 181707 - DNA, 25 bp, Probe Sequence
cttctcaccacggtgtaccgggata

SEQ ID NO: 181708 - DNA, 25 bp, Probe Sequence
cttctccgcacgactgttacagagg

SEQ ID NO: 181709 - DNA, 25 bp, Probe Sequence
cttccccacaacaatattcatgtgc

SEQ ID NO: 181710 - DNA, 25 bp, Probe Sequence
cttccctcacagtatatgaatgatc

SEQ ID NO: 181711 - DNA, 25 bp, Probe Sequence
cttctgactccaatttaaaccagga

SEQ ID NO: 181712 - DNA, 25 bp, Probe Sequence
cttctctcccaaatttgttccagga

SEQ ID NO: 181713 - DNA, 25 bp, Probe Sequence
cttcagctcccatatttttagacag

SEQ ID NO: 181714 - DNA, 25 bp, Probe Sequence
cttacaactcagttgttttgagtca

SEQ ID NO: 181715 - DNA, 25 bp, Probe Sequence
cttcagagaagcagtattttgttaa

SEQ ID NO: 181716 - DNA, 25 bp, Probe Sequence
cttctgcaatagctttcattttctc

SEQ ID NO: 181717 - DNA, 25 bp, Probe Sequence
ctttgtgacagtctctaattccctt

SEQ ID NO: 181718 - DNA, 25 bp, Probe Sequence
cttcaagacctcgtcttatttcctc

SEQ ID NO: 181719 - DNA, 25 bp, Probe Sequence
cttcttactctctccatataatttc

SEQ ID NO: 181720 - DNA, 25 bp, Probe Sequence
cttcattgacctcaactacatggtt

SEQ ID NO: 181721 - DNA, 25 bp, Probe Sequence
cttcacccgcatcaactgtcagggg

SEQ ID NO: 181722 - DNA, 25 bp, Probe Sequence
cttagtccgggcaactgtccgggct

SEQ ID NO: 181723 - DNA, 25 bp, Probe Sequence
ctttgaccaggacatctacgggcgc

SEQ ID NO: 181724 - DNA, 25 bp, Probe Sequence
cttagcccaggactttcagacggcc

SEQ ID NO: 181725 - DNA, 25 bp, Probe Sequence
ctgtatccatctcagttacgacggg

SEQ ID NO: 181726 - DNA, 25 bp, Probe Sequence
cttcccatctgtaatttgcagggag

SEQ ID NO: 181727 - DNA, 25 bp, Probe Sequence
cttctcagtcttcagccagagggag

SEQ ID NO: 181728 - DNA, 25 bp, Probe Sequence
cttctcgacggcaccgtgttcgaaa

SEQ ID NO: 181729 - DNA, 25 bp, Probe Sequence
cttcgtacacctgcgagtgttccaa

SEQ ID NO: 181730 - DNA, 25 bp, Probe Sequence
ctaggaaaccctgtgtgtcatgcca

SEQ ID NO: 181731 - DNA, 25 bp, Probe Sequence
ctatgtgaatacccaggggccttca

SEQ ID NO: 181732 - DNA, 25 bp, Probe Sequence
cttaaaagccaccatgggcctggct

SEQ ID NO: 181733 - DNA, 25 bp, Probe Sequence
cttcaggatgatcaccgaggctccc

SEQ ID NO: 181734 - DNA, 25 bp, Probe Sequence
cttcagcactgaaaccgagtcacct

SEQ ID NO: 181735 - DNA, 25 bp, Probe Sequence
cttcatggctgaaacaccaaaggca

SEQ ID NO: 181736 - DNA, 25 bp, Probe Sequence
ccctgcctgtacctcaaacagtttt

SEQ ID NO: 181737 - DNA, 25 bp, Probe Sequence
cttcacgcactatcgatagggcacc

SEQ ID NO: 181738 - DNA, 25 bp, Probe Sequence
cttcccactcacggataagacacca

SEQ ID NO: 181739 - DNA, 25 bp, Probe Sequence
cttctcttcccggataagaagcaga

SEQ ID NO: 181740 - DNA, 25 bp, Probe Sequence
cttttgctcccaggcaacactgagc

SEQ ID NO: 181741 - DNA, 25 bp, Probe Sequence
cttcatcttcgaggacaccacaggc

SEQ ID NO: 181742 - DNA, 25 bp, Probe Sequence
cttcaacatcgaatacgccgcaggc

SEQ ID NO: 181743 - DNA, 25 bp, Probe Sequence
cttaaatcagttccagcctgcagcg

SEQ ID NO: 181744 - DNA, 25 bp, Probe Sequence
cttcgaagattaccagatcatcagt

SEQ ID NO: 181745 - DNA, 25 bp, Probe Sequence
cttagaaggtcacactcacagttcc

SEQ ID NO: 181746 - DNA, 25 bp, Probe Sequence
cttacacgtacctctcatcagtgtc

SEQ ID NO: 181747 - DNA, 25 bp, Probe Sequence
cttactggcaatgcttccacagcgt

SEQ ID NO: 181748 - DNA, 25 bp, Probe Sequence
cttactggaatctctccaagtccca

SEQ ID NO: 181749 - DNA, 25 bp, Probe Sequence
cttagtagctactcccaaattgtca

SEQ ID NO: 181750 - DNA, 25 bp, Probe Sequence
cttcaatacaagcccctcttttgta

SEQ ID NO: 181751 - DNA, 25 bp, Probe Sequence
cttctgttcacggcggattctttgt

SEQ ID NO: 181752 - DNA, 25 bp, Probe Sequence
cttttaccagtggctgaatctactt

SEQ ID NO: 181753 - DNA, 25 bp, Probe Sequence
cttttccagagatcatcgactacct

SEQ ID NO: 181754 - DNA, 25 bp, Probe Sequence
cttcaaccaagtgcaggaaagccct

SEQ ID NO: 181755 - DNA, 25 bp, Probe Sequence
cttctagcgtcttcacagcgaatac

SEQ ID NO: 181756 - DNA, 25 bp, Probe Sequence
cttctaggtaaagctgagatcacag

SEQ ID NO: 181757 - DNA, 25 bp, Probe Sequence
cttcttggggaaatgctgggcaatg

SEQ ID NO: 181758 - DNA, 25 bp, Probe Sequence
cttctgagtgggcttctctgggagc

SEQ ID NO: 181759 - DNA, 25 bp, Probe Sequence
cttctcatgtgcggctggttttgga

SEQ ID NO: 181760 - DNA, 25 bp, Probe Sequence
cttctcatttgcctagtatctctgc

SEQ ID NO: 181761 - DNA, 25 bp, Probe Sequence
cttctgatgtaacatgtgatacata

SEQ ID NO: 181762 - DNA, 25 bp, Probe Sequence
cttctgaaatcacactgatgacatc

SEQ ID NO: 181763 - DNA, 25 bp, Probe Sequence
cttctgaccacgttggatgacactt

SEQ ID NO: 181764 - DNA, 25 bp, Probe Sequence
cttcttccctacggatgacttctaa

SEQ ID NO: 181765 - DNA, 25 bp, Probe Sequence
cttctacccaagtgcttttgcttac

SEQ ID NO: 181766 - DNA, 25 bp, Probe Sequence
ctttactgtcaacatctgtatttaa

SEQ ID NO: 181767 - DNA, 25 bp, Probe Sequence
cttctgagcttattgggtgccattt

SEQ ID NO: 181768 - DNA, 25 bp, Probe Sequence
cttcgccatgaccatgtactgccaa

SEQ ID NO: 181769 - DNA, 25 bp, Probe Sequence
cttcagctcaggcttaggctcagat

SEQ ID NO: 181770 - DNA, 25 bp, Probe Sequence
cttcatgatattctatacaatccat

SEQ ID NO: 181771 - DNA, 25 bp, Probe Sequence
cttctcatcagtccaaaccatcata

SEQ ID NO: 181772 - DNA, 25 bp, Probe Sequence
cttacatcgtgttgcggctcatgaa

SEQ ID NO: 181773 - DNA, 25 bp, Probe Sequence
cttcacaggtgttcatagctatgca

SEQ ID NO: 181774 - DNA, 25 bp, Probe Sequence
cttatatctgtaagctttacctctc

SEQ ID NO: 181775 - DNA, 25 bp, Probe Sequence
cttttaccatgggatttcctcctct

SEQ ID NO: 181776 - DNA, 25 bp, Probe Sequence
cttcaacatcttcaattgtttcctt

SEQ ID NO: 181777 - DNA, 25 bp, Probe Sequence
cttcaccagtgttctatcttgttcc

SEQ ID NO: 181778 - DNA, 25 bp, Probe Sequence
cttatgtcatctctgttattgtccc

SEQ ID NO: 181779 - DNA, 25 bp, Probe Sequence
cttagctcttcggtggttgtcacac

SEQ ID NO: 181780 - DNA, 25 bp, Probe Sequence
cttcagcattcctgttgtctggacc

SEQ ID NO: 181781 - DNA, 25 bp, Probe Sequence
cttctgcattcaaagttcctcgacc

SEQ ID NO: 181782 - DNA, 25 bp, Probe Sequence
cttctgtgcacaaagtgctcccttc

SEQ ID NO: 181783 - DNA, 25 bp, Probe Sequence
cttcatgtgatctcaagtccctttt

SEQ ID NO: 181784 - DNA, 25 bp, Probe Sequence
cttactatcattgagtcctttctta

SEQ ID NO: 181785 - DNA, 25 bp, Probe Sequence
cttacatccttcgattactattcgt

SEQ ID NO: 181786 - DNA, 25 bp, Probe Sequence
cttagtggttcttactgctttcgtg

SEQ ID NO: 181787 - DNA, 25 bp, Probe Sequence
cttcgtggttcctctttgcaggaga

SEQ ID NO: 181788 - DNA, 25 bp, Probe Sequence
cttcgttttccatgtactgcatgct

SEQ ID NO: 181789 - DNA, 25 bp, Probe Sequence
cttctgtttgctcacagtaagctca

SEQ ID NO: 181790 - DNA, 25 bp, Probe Sequence
cttctgtaactttggtaactgcata

SEQ ID NO: 181791 - DNA, 25 bp, Probe Sequence
cttcattaatatacaggcttagtca

SEQ ID NO: 181792 - DNA, 25 bp, Probe Sequence
cttctgcgaaataagcctcatcctt

SEQ ID NO: 181793 - DNA, 25 bp, Probe Sequence
ctttgggaaatgactccatttctat

SEQ ID NO: 181794 - DNA, 25 bp, Probe Sequence
cttataaaatggccccatccctatc

SEQ ID NO: 181795 - DNA, 25 bp, Probe Sequence
cttacaaaattcctctactcctggg

SEQ ID NO: 181796 - DNA, 25 bp, Probe Sequence
cttacccaagtgcctatgcaccacg

SEQ ID NO: 181797 - DNA, 25 bp, Probe Sequence
cttcagctggcacgtcagttgacca

SEQ ID NO: 181798 - DNA, 25 bp, Probe Sequence
cttcatcagtgacgaggtatatctt

SEQ ID NO: 181799 - DNA, 25 bp, Probe Sequence
cttcattgtggccatggttagctcc

SEQ ID NO: 181800 - DNA, 25 bp, Probe Sequence
cttctgctgtgtgtgtgtatatata

SEQ ID NO: 181801 - DNA, 25 bp, Probe Sequence
cttctgcttgtggtgcattattttc

SEQ ID NO: 181802 - DNA, 25 bp, Probe Sequence
cttcacatctgaaattttgctgttc

SEQ ID NO: 181803 - DNA, 25 bp, Probe Sequence
cttcatgctctgataactgcctttc

SEQ ID NO: 181804 - DNA, 25 bp, Probe Sequence
cttctgcaatgcattttgactctta

SEQ ID NO: 181805 - DNA, 25 bp, Probe Sequence
cttctaataattttgcctctgggaa

SEQ ID NO: 181806 - DNA, 25 bp, Probe Sequence
ctttcaagatttgttttggtgtcaa

SEQ ID NO: 181807 - DNA, 25 bp, Probe Sequence
ctttgcctatttgtttttgggtgag

SEQ ID NO: 181808 - DNA, 25 bp, Probe Sequence
cttattcttcgtctttttgcttgga

SEQ ID NO: 181809 - DNA, 25 bp, Probe Sequence
ctatgaatttcgtacttattacctt

SEQ ID NO: 181810 - DNA, 25 bp, Probe Sequence
cttcaatttgaacccatttgaggtt

SEQ ID NO: 181811 - DNA, 25 bp, Probe Sequence
cttctctttatatgtctaatgtggt

SEQ ID NO: 181812 - DNA, 25 bp, Probe Sequence
cttctgttttaccatcaagatgata

SEQ ID NO: 181813 - DNA, 25 bp, Probe Sequence
cttttggtatcccagaacatgacaa

SEQ ID NO: 181814 - DNA, 25 bp, Probe Sequence
cttctgttttccctacctagaatgt

SEQ ID NO: 181815 - DNA, 25 bp, Probe Sequence
cgtttgcctatcaggacccagaatt

SEQ ID NO: 181816 - DNA, 25 bp, Probe Sequence
cttttccaagaacgtctcccaatat

SEQ ID NO: 181817 - DNA, 25 bp, Probe Sequence
cttttcgcaacataatcccagcact

SEQ ID NO: 181818 - DNA, 25 bp, Probe Sequence
ctcttcacagtgcaaattccccaca

SEQ ID NO: 181819 - DNA, 25 bp, Probe Sequence
cttagctgagttcaattccacacca

SEQ ID NO: 181820 - DNA, 25 bp, Probe Sequence
cttcagctgagacacttcccaagct

SEQ ID NO: 181821 - DNA, 25 bp, Probe Sequence
cttcacggatctgttctccaagtgg

SEQ ID NO: 181822 - DNA, 25 bp, Probe Sequence
cttagcttttgatgtctccaagtag

SEQ ID NO: 181823 - DNA, 25 bp, Probe Sequence
cttagggagctgagtgggaggatag

SEQ ID NO: 181824 - DNA, 25 bp, Probe Sequence
cttcatggggagaagatgagtactt

SEQ ID NO: 181825 - DNA, 25 bp, Probe Sequence
cttctagggacatgggtactctttt

SEQ ID NO: 181826 - DNA, 25 bp, Probe Sequence
cttctctggtacaagggcaagttcc

SEQ ID NO: 181827 - DNA, 25 bp, Probe Sequence
cttctctcagtgctagggcaacttc

SEQ ID NO: 181828 - DNA, 25 bp, Probe Sequence
cttcttcctgctcatgagaaacatc

SEQ ID NO: 181829 - DNA, 25 bp, Probe Sequence
cttctcaccgtgcagagctgcactt

SEQ ID NO: 181830 - DNA, 25 bp, Probe Sequence
cttctgacctgggcaagagctgtag

SEQ ID NO: 181831 - DNA, 25 bp, Probe Sequence
ctttcagcctgtacaagcagttagt

SEQ ID NO: 181832 - DNA, 25 bp, Probe Sequence
ctttcagcctattttgagttaactt

SEQ ID NO: 181833 - DNA, 25 bp, Probe Sequence
cttctcagttatttgtatgtcagga

SEQ ID NO: 181834 - DNA, 25 bp, Probe Sequence
cttctcccttgagtgcttgcatgag

SEQ ID NO: 181835 - DNA, 25 bp, Probe Sequence
cttctcccttcatcttgatctggga

SEQ ID NO: 181836 - DNA, 25 bp, Probe Sequence
cttctgccaatttactatgattgtg

SEQ ID NO: 181837 - DNA, 25 bp, Probe Sequence
cttctgtcgattttcaatgtcttga

SEQ ID NO: 181838 - DNA, 25 bp, Probe Sequence
cttctctagaatttccagcctggtg

SEQ ID NO: 181839 - DNA, 25 bp, Probe Sequence
cttctccaacatttctgcagccaag

SEQ ID NO: 181840 - DNA, 25 bp, Probe Sequence
cttctgccctcatttcatgtgacag

SEQ ID NO: 181841 - DNA, 25 bp, Probe Sequence
cttctgctcctctcatttgagatga

SEQ ID NO: 181842 - DNA, 25 bp, Probe Sequence
cttctgtccttccatgtgtggggaa

SEQ ID NO: 181843 - DNA, 25 bp, Probe Sequence
cttctcccatctggggtgggcaggc

SEQ ID NO: 181844 - DNA, 25 bp, Probe Sequence
cttcacgcctgggcagtggggaggc

SEQ ID NO: 181845 - DNA, 25 bp, Probe Sequence
cttctccctgaggctggtaggtggg

SEQ ID NO: 181846 - DNA, 25 bp, Probe Sequence
cttcttcctacctgatgaggggaaa

SEQ ID NO: 181847 - DNA, 25 bp, Probe Sequence
cttttccatgtatgaggagggggaa

SEQ ID NO: 181848 - DNA, 25 bp, Probe Sequence
cttttgccactttcatgggggtgtg

SEQ ID NO: 181849 - DNA, 25 bp, Probe Sequence
cttcttgcgaccatatggggaatag

SEQ ID NO: 181850 - DNA, 25 bp, Probe Sequence
cttcttgtgagtccccagggagtaa

SEQ ID NO: 181851 - DNA, 25 bp, Probe Sequence
cttctttgcttctccaaccaaaaca

SEQ ID NO: 181852 - DNA, 25 bp, Probe Sequence
cttctgtctctagcccaaggaaaga

SEQ ID NO: 181853 - DNA, 25 bp, Probe Sequence
cttttgtccccggcagcagggaaga

SEQ ID NO: 181854 - DNA, 25 bp, Probe Sequence
ctccttaccccagcaaaggtcaggt

SEQ ID NO: 181855 - DNA, 25 bp, Probe Sequence
cttttacaagccgcaaaggcagcag

SEQ ID NO: 181856 - DNA, 25 bp, Probe Sequence
cttcttcgagagccgctgggaggag

SEQ ID NO: 181857 - DNA, 25 bp, Probe Sequence
cttaacgagagccgcgagggcagcg

SEQ ID NO: 181858 - DNA, 25 bp, Probe Sequence
cttctgaggatccggcaagatggca

SEQ ID NO: 181859 - DNA, 25 bp, Probe Sequence
cttcatggccaatgggatgctgtga

SEQ ID NO: 181860 - DNA, 25 bp, Probe Sequence
cttaggccacactggtgtcacaagc

SEQ ID NO: 181861 - DNA, 25 bp, Probe Sequence
cttcaggaccacggtgttctcagag

SEQ ID NO: 181862 - DNA, 25 bp, Probe Sequence
cttctgccatcatgccgatgttcat

SEQ ID NO: 181863 - DNA, 25 bp, Probe Sequence
cttctccacgtgctgtgttatggtc

SEQ ID NO: 181864 - DNA, 25 bp, Probe Sequence
cttctacatcctggtgtttgtggtg

SEQ ID NO: 181865 - DNA, 25 bp, Probe Sequence
cttctgccatccaggggtgtagtga

SEQ ID NO: 181866 - DNA, 25 bp, Probe Sequence
ctttcttatgccgtgggttttcaag

SEQ ID NO: 181867 - DNA, 25 bp, Probe Sequence
cttttgttcctgtccgtttatcagg

SEQ ID NO: 181868 - DNA, 25 bp, Probe Sequence
cttatcgtaccttccatgttttgtt

SEQ ID NO: 181869 - DNA, 25 bp, Probe Sequence
cttcatgttacctaaatattgtatt

SEQ ID NO: 181870 - DNA, 25 bp, Probe Sequence
cttctgtattctccaacttttaaat

SEQ ID NO: 181871 - DNA, 25 bp, Probe Sequence
cttattgctacttcaagctctttaa

SEQ ID NO: 181872 - DNA, 25 bp, Probe Sequence
cttctctgctcaacaaggtcattca

SEQ ID NO: 181873 - DNA, 25 bp, Probe Sequence
cttcttgcatcaagttcagctcttc

SEQ ID NO: 181874 - DNA, 25 bp, Probe Sequence
cttctccacaggactcacttagcac

SEQ ID NO: 181875 - DNA, 25 bp, Probe Sequence
cttctccaatggatcattttaaagc

SEQ ID NO: 181876 - DNA, 25 bp, Probe Sequence
ctacacggaggttgtgtttacaatg

SEQ ID NO: 181877 - DNA, 25 bp, Probe Sequence
ctaagaaggcctttccttccagctg

SEQ ID NO: 181878 - DNA, 25 bp, Probe Sequence
ctagggaagtcatctcacttggcct

SEQ ID NO: 181879 - DNA, 25 bp, Probe Sequence
cttaggaacctaccagttggccatg

SEQ ID NO: 181880 - DNA, 25 bp, Probe Sequence
ctctcgggccctcctagagggccat

SEQ ID NO: 181881 - DNA, 25 bp, Probe Sequence
cttctaacccatcgcaaagaggcta

SEQ ID NO: 181882 - DNA, 25 bp, Probe Sequence
cttctccacctttgacaaggacaca

SEQ ID NO: 181883 - DNA, 25 bp, Probe Sequence
ctacacggcgcagaacttggaccac

SEQ ID NO: 181884 - DNA, 25 bp, Probe Sequence
cttttgcgagaccaacctggacgcc

SEQ ID NO: 181885 - DNA, 25 bp, Probe Sequence
cttatcaggaacgcctcgatacgct

SEQ ID NO: 181886 - DNA, 25 bp, Probe Sequence
ctatccctgtacgcctctggccgta

SEQ ID NO: 181887 - DNA, 25 bp, Probe Sequence
cttacacgttcaacttttgcctgta

SEQ ID NO: 181888 - DNA, 25 bp, Probe Sequence
cttaacatagtaatctttagctttt

SEQ ID NO: 181889 - DNA, 25 bp, Probe Sequence
cttaaatgattctttgtgtaccttt

SEQ ID NO: 181890 - DNA, 25 bp, Probe Sequence
ctttttactctgtgttaccattttg

SEQ ID NO: 181891 - DNA, 25 bp, Probe Sequence
cttctttacccaagattacaagttg

SEQ ID NO: 181892 - DNA, 25 bp, Probe Sequence
gttgctaaaccctggtacatcgtat

SEQ ID NO: 181893 - DNA, 25 bp, Probe Sequence
ctttaaggccctatctacatctttc

SEQ ID NO: 181894 - DNA, 25 bp, Probe Sequence
ctttaggcagcagcttttaatacag

SEQ ID NO: 181895 - DNA, 25 bp, Probe Sequence
ctttgtattcccattttctacagtt

SEQ ID NO: 181896 - DNA, 25 bp, Probe Sequence
cttattttcctaactccatcttagt

SEQ ID NO: 181897 - DNA, 25 bp, Probe Sequence
ctttttatagtgtgtcctttattct

SEQ ID NO: 181898 - DNA, 25 bp, Probe Sequence
ctttttatattatgccgctttcaat

SEQ ID NO: 181899 - DNA, 25 bp, Probe Sequence
ctttttattaaagctctgtagaatt

SEQ ID NO: 181900 - DNA, 25 bp, Probe Sequence
cttctttttgtctcccttagattat

SEQ ID NO: 181901 - DNA, 25 bp, Probe Sequence
cttaagttttttatctccagatcct

SEQ ID NO: 181902 - DNA, 25 bp, Probe Sequence
ctttaggcctgtttggctccgaagc

SEQ ID NO: 181903 - DNA, 25 bp, Probe Sequence
cttctaacgtgtgagatgtcccgag

SEQ ID NO: 181904 - DNA, 25 bp, Probe Sequence
cttctatgtcggtataatggcccgc

SEQ ID NO: 181905 - DNA, 25 bp, Probe Sequence
cttctcatgtggcttcgtgtgaacc

SEQ ID NO: 181906 - DNA, 25 bp, Probe Sequence
cttcttgatagtttgcaggcaaaac

SEQ ID NO: 181907 - DNA, 25 bp, Probe Sequence
cttctctgtagatcgctgagcgata

SEQ ID NO: 181908 - DNA, 25 bp, Probe Sequence
ctttcgtcagttgctgaggtgttcc

SEQ ID NO: 181909 - DNA, 25 bp, Probe Sequence
cttcatcgcttctcctggagtgtgc

SEQ ID NO: 181910 - DNA, 25 bp, Probe Sequence
cttcttgttgcatcctgtcaggagg

SEQ ID NO: 181911 - DNA, 25 bp, Probe Sequence
cttctctactcatgccagattttgg

SEQ ID NO: 181912 - DNA, 25 bp, Probe Sequence
cttctcttgctttctatgctgtttg

SEQ ID NO: 181913 - DNA, 25 bp, Probe Sequence
ctagcttttctgcctttgtagggac

SEQ ID NO: 181914 - DNA, 25 bp, Probe Sequence
cttcatttcctgccacttgattggt

SEQ ID NO: 181915 - DNA, 25 bp, Probe Sequence
cttcattttggagcttgtggagttg

SEQ ID NO: 181916 - DNA, 25 bp, Probe Sequence
cttatcttgctttccctaggagttg

SEQ ID NO: 181917 - DNA, 25 bp, Probe Sequence
cttagtagcattctcgatagtgggc

SEQ ID NO: 181918 - DNA, 25 bp, Probe Sequence
cttagtcagctgcccaagaactagt

SEQ ID NO: 181919 - DNA, 25 bp, Probe Sequence
cttcactcatcatcctcaaacaagt

SEQ ID NO: 181920 - DNA, 25 bp, Probe Sequence
cttcaccaccctgagattcagcagc

SEQ ID NO: 181921 - DNA, 25 bp, Probe Sequence
cttctacccatggtagactcacagc

SEQ ID NO: 181922 - DNA, 25 bp, Probe Sequence
cttctaccctgcggagatcatactg

SEQ ID NO: 181923 - DNA, 25 bp, Probe Sequence
cttctaccctgcggagatcatactg

SEQ ID NO: 181924 - DNA, 25 bp, Probe Sequence
cttctaaccgcaatagtgactctgt

SEQ ID NO: 181925 - DNA, 25 bp, Probe Sequence
cttctctgagatcgaacggactgtg

SEQ ID NO: 181926 - DNA, 25 bp, Probe Sequence
cttcttcagtgaaacgggtgctggc

SEQ ID NO: 181927 - DNA, 25 bp, Probe Sequence
ctctcccacagaaagcggtgacttc

SEQ ID NO: 181928 - DNA, 25 bp, Probe Sequence
cttttcacattaggctgttggttca

SEQ ID NO: 181929 - DNA, 25 bp, Probe Sequence
cttctactagtgtgtgctcttttca

SEQ ID NO: 181930 - DNA, 25 bp, Probe Sequence
cttctacttatttagatctttccat

SEQ ID NO: 181931 - DNA, 25 bp, Probe Sequence
ctttagccatattagagtccaacca

SEQ ID NO: 181932 - DNA, 25 bp, Probe Sequence
cttcaagctctttaaatcaccatct

SEQ ID NO: 181933 - DNA, 25 bp, Probe Sequence
cttcaagctgtgtaatattccaatg

SEQ ID NO: 181934 - DNA, 25 bp, Probe Sequence
cttctagcgtggttttcttgtggtt

SEQ ID NO: 181935 - DNA, 25 bp, Probe Sequence
cttctctgttggctatatattatgg

SEQ ID NO: 181936 - DNA, 25 bp, Probe Sequence
cttctctcctgactttgacattgta

SEQ ID NO: 181937 - DNA, 25 bp, Probe Sequence
cttctctccagacttgggcttaagg

SEQ ID NO: 181938 - DNA, 25 bp, Probe Sequence
cttctctccagactatcgtaacctg

SEQ ID NO: 181939 - DNA, 25 bp, Probe Sequence
ctttctgaatgttatctccaaccag

SEQ ID NO: 181940 - DNA, 25 bp, Probe Sequence
cttactgctttcaatacacgattag

SEQ ID NO: 181941 - DNA, 25 bp, Probe Sequence
cttcattgcttaatatcaaattaca

SEQ ID NO: 181942 - DNA, 25 bp, Probe Sequence
cttctctgcccaaatgataaggagg

SEQ ID NO: 181943 - DNA, 25 bp, Probe Sequence
ctcttgtaccaattataggggagga

SEQ ID NO: 181944 - DNA, 25 bp, Probe Sequence
cttttcccacattcatagcctgtag

SEQ ID NO: 181945 - DNA, 25 bp, Probe Sequence
cttcatatcccctcagcagagatgg

SEQ ID NO: 181946 - DNA, 25 bp, Probe Sequence
cttctttcctgtagcctagcatgga

SEQ ID NO: 181947 - DNA, 25 bp, Probe Sequence
cttcatttcctggatccaagataat

SEQ ID NO: 181948 - DNA, 25 bp, Probe Sequence
cttactccagctgaccgttaaatga

SEQ ID NO: 181949 - DNA, 25 bp, Probe Sequence
cttactacactcaacggtttggatc

SEQ ID NO: 181950 - DNA, 25 bp, Probe Sequence
cttacttatctgtatcggtcagggt

SEQ ID NO: 181951 - DNA, 25 bp, Probe Sequence
cttcagcaggttctcagtgtcagcc

SEQ ID NO: 181952 - DNA, 25 bp, Probe Sequence
cttcaggacctgcttggtcagctgc

SEQ ID NO: 181953 - DNA, 25 bp, Probe Sequence
cttcagaaaggctttgctcctgctc

SEQ ID NO: 181954 - DNA, 25 bp, Probe Sequence
ctagcaaggtgcctttgtacctcag

SEQ ID NO: 181955 - DNA, 25 bp, Probe Sequence
ctactgaggtggttctttctatcct

SEQ ID NO: 181956 - DNA, 25 bp, Probe Sequence
cttcttgttgatttattgtctacaa

SEQ ID NO: 181957 - DNA, 25 bp, Probe Sequence
cttcttgtggatctatctcatcaaa

SEQ ID NO: 181958 - DNA, 25 bp, Probe Sequence
cttcatattagtatcatcccacagc

SEQ ID NO: 181959 - DNA, 25 bp, Probe Sequence
cttcataaagatgtctcacagccct

SEQ ID NO: 181960 - DNA, 25 bp, Probe Sequence
cttcaacaaggacctcagcgccaat

SEQ ID NO: 181961 - DNA, 25 bp, Probe Sequence
cttaacaagtcacccacacgtagtg

SEQ ID NO: 181962 - DNA, 25 bp, Probe Sequence
cttctacaactcatacactcgtatg

SEQ ID NO: 181963 - DNA, 25 bp, Probe Sequence
cttctcagtcctcctaattggtatg

SEQ ID NO: 181964 - DNA, 25 bp, Probe Sequence
cttctagtgccgtcaatttgagata

SEQ ID NO: 181965 - DNA, 25 bp, Probe Sequence
cttctaggaatctaccctgcagata

SEQ ID NO: 181966 - DNA, 25 bp, Probe Sequence
cttctcagagtcaacctcctgtgat

SEQ ID NO: 181967 - DNA, 25 bp, Probe Sequence
cttctatactgcaagtcttttgata

SEQ ID NO: 181968 - DNA, 25 bp, Probe Sequence
cttctatactgccttattttgtaga

SEQ ID NO: 181969 - DNA, 25 bp, Probe Sequence
cttctacctgcactttttgtatgtg

SEQ ID NO: 181970 - DNA, 25 bp, Probe Sequence
cttcttcctgttattggtagttctg

SEQ ID NO: 181971 - DNA, 25 bp, Probe Sequence
cttcttcctgttattggtagttctg

SEQ ID NO: 181972 - DNA, 25 bp, Probe Sequence
cttcttcctgttattggtagttctg

SEQ ID NO: 181973 - DNA, 25 bp, Probe Sequence
cttcattctgccattgtctggtatg

SEQ ID NO: 181974 - DNA, 25 bp, Probe Sequence
cttctttgtctgttttgactttcct

SEQ ID NO: 181975 - DNA, 25 bp, Probe Sequence
cttcttgattatttattagctttgg

SEQ ID NO: 181976 - DNA, 25 bp, Probe Sequence
cttttcaggtcatttacaattggga

SEQ ID NO: 181977 - DNA, 25 bp, Probe Sequence
cttttcatggcccttcaaattggaa

SEQ ID NO: 181978 - DNA, 25 bp, Probe Sequence
cttacctgtccactctagagcattg

SEQ ID NO: 181979 - DNA, 25 bp, Probe Sequence
cttacacattccatcttacattagt

SEQ ID NO: 181980 - DNA, 25 bp, Probe Sequence
cttaacttactctttcatccgatgt

SEQ ID NO: 181981 - DNA, 25 bp, Probe Sequence
cttaacttaatttttcctgctgtat

SEQ ID NO: 181982 - DNA, 25 bp, Probe Sequence
cttttgtttatgttttcttgactat

SEQ ID NO: 181983 - DNA, 25 bp, Probe Sequence
ctttttaaatgcttgagtttcccat

SEQ ID NO: 181984 - DNA, 25 bp, Probe Sequence
ctttcttataatgtggcttgtcctc

SEQ ID NO: 181985 - DNA, 25 bp, Probe Sequence
ctttcttattaggtggtttgtattg

SEQ ID NO: 181986 - DNA, 25 bp, Probe Sequence
cttctactttactggctgagtgtga

SEQ ID NO: 181987 - DNA, 25 bp, Probe Sequence
cttctacgtgacctcggagactgtg

SEQ ID NO: 181988 - DNA, 25 bp, Probe Sequence
cttctacaatgagctgcgtgtggct

SEQ ID NO: 181989 - DNA, 25 bp, Probe Sequence
cttcatcatcttacctgtgcttggc

SEQ ID NO: 181990 - DNA, 25 bp, Probe Sequence
cttcaattgattcttgcttcgctct

SEQ ID NO: 181991 - DNA, 25 bp, Probe Sequence
cttcatttctatctctgtgtttctg

SEQ ID NO: 181992 - DNA, 25 bp, Probe Sequence
cttttgactgtacctttttctccag

SEQ ID NO: 181993 - DNA, 25 bp, Probe Sequence
cttttgcgtggtccttaggcttaca

SEQ ID NO: 181994 - DNA, 25 bp, Probe Sequence
cttttgcgtggtccttaggcttaca

SEQ ID NO: 181995 - DNA, 25 bp, Probe Sequence
ctttattggtggcttaagctttgaa

SEQ ID NO: 181996 - DNA, 25 bp, Probe Sequence
cttctttcctgcagtttagttaata

SEQ ID NO: 181997 - DNA, 25 bp, Probe Sequence
ctttattctgccaacctgggttaat

SEQ ID NO: 181998 - DNA, 25 bp, Probe Sequence
cttctttctccaaggtcagggtaat

SEQ ID NO: 181999 - DNA, 25 bp, Probe Sequence
ctttattaccaagcccagagataca

SEQ ID NO: 182000 - DNA, 25 bp, Probe Sequence
cttcttccacaatgaccacagcaaa

SEQ ID NO: 182001 - DNA, 25 bp, Probe Sequence
cttcttccttgatactcacgaagcg

SEQ ID NO: 182002 - DNA, 25 bp, Probe Sequence
cttctacggtgatcccaccaatgga

SEQ ID NO: 182003 - DNA, 25 bp, Probe Sequence
cttcatccgggcacttcataaggga

SEQ ID NO: 182004 - DNA, 25 bp, Probe Sequence
cttttggggttgctcatgactggga

SEQ ID NO: 182005 - DNA, 25 bp, Probe Sequence
ctttgggggtggcacaggtggcttt

SEQ ID NO: 182006 - DNA, 25 bp, Probe Sequence
ctttggggacttgtagggatgcctt

SEQ ID NO: 182007 - DNA, 25 bp, Probe Sequence
cttatggggatctacttggaggaat

SEQ ID NO: 182008 - DNA, 25 bp, Probe Sequence
cttaggggactgcatgggaagcacg

SEQ ID NO: 182009 - DNA, 25 bp, Probe Sequence
cttcaggcgcgcggtctggcagtaa

SEQ ID NO: 182010 - DNA, 25 bp, Probe Sequence
cttcatagagctgtgtctgtataca

SEQ ID NO: 182011 - DNA, 25 bp, Probe Sequence
cttaagagctcagcatctgtccctg

SEQ ID NO: 182012 - DNA, 25 bp, Probe Sequence
cttcaaagcacaactctatttcatg

SEQ ID NO: 182013 - DNA, 25 bp, Probe Sequence
cttaagatgcagtaattatgttcca

SEQ ID NO: 182014 - DNA, 25 bp, Probe Sequence
ctttaagatgcatccatgtttccag

SEQ ID NO: 182015 - DNA, 25 bp, Probe Sequence
cttttgaatcaatctggcttctgca

SEQ ID NO: 182016 - DNA, 25 bp, Probe Sequence
cttcttcattaattctccatctagt

SEQ ID NO: 182017 - DNA, 25 bp, Probe Sequence
cttcttcattattagtgcatttggt

SEQ ID NO: 182018 - DNA, 25 bp, Probe Sequence
cttctttcacagtgtcactgtggaa

SEQ ID NO: 182019 - DNA, 25 bp, Probe Sequence
cttctattacagcagtccatcttca

SEQ ID NO: 182020 - DNA, 25 bp, Probe Sequence
cttcatcatcaccagtggtttcttc

SEQ ID NO: 182021 - DNA, 25 bp, Probe Sequence
cttcttcacaagatgacttgctcgc

SEQ ID NO: 182022 - DNA, 25 bp, Probe Sequence
cttcaacaacagtgacttgctctcc

SEQ ID NO: 182023 - DNA, 25 bp, Probe Sequence
cttcaacgtcatcgagaggtgcccc

SEQ ID NO: 182024 - DNA, 25 bp, Probe Sequence
cttagggatcagccagcgcagctgc

SEQ ID NO: 182025 - DNA, 25 bp, Probe Sequence
cttcatgaagaaccagcggaactca

SEQ ID NO: 182026 - DNA, 25 bp, Probe Sequence
cttagatagcaagcgcggagctgcg

SEQ ID NO: 182027 - DNA, 25 bp, Probe Sequence
cttagttgtatggccaggcagtccc

SEQ ID NO: 182028 - DNA, 25 bp, Probe Sequence
cttcaattttgtcacagcacctaaa

SEQ ID NO: 182029 - DNA, 25 bp, Probe Sequence
cttaatgttggttccagtccttcaa

SEQ ID NO: 182030 - DNA, 25 bp, Probe Sequence
cttacattctagttctggtgctctc

SEQ ID NO: 182031 - DNA, 25 bp, Probe Sequence
cttcactgtgctttttgtatcatta

SEQ ID NO: 182032 - DNA, 25 bp, Probe Sequence
cttcagtagccaatttgatcatttg

SEQ ID NO: 182033 - DNA, 25 bp, Probe Sequence
cttcaggtgcccagagatcaggtgt

SEQ ID NO: 182034 - DNA, 25 bp, Probe Sequence
cttagggcaccttgagcctgagttt

SEQ ID NO: 182035 - DNA, 25 bp, Probe Sequence
cttaggtccctttggaggatattga

SEQ ID NO: 182036 - DNA, 25 bp, Probe Sequence
cttaggcttctctttgcgaaataaa

SEQ ID NO: 182037 - DNA, 25 bp, Probe Sequence
cttttgtggttgtagcaagtattaa

SEQ ID NO: 182038 - DNA, 25 bp, Probe Sequence
cttatggggttgtggaggctgctgt

SEQ ID NO: 182039 - DNA, 25 bp, Probe Sequence
cttatgcgtatgtgcacggggccgc

SEQ ID NO: 182040 - DNA, 25 bp, Probe Sequence
ctttgcaaagttccagagggctgac

SEQ ID NO: 182041 - DNA, 25 bp, Probe Sequence
ctacggaagcttccgcagagccggc

SEQ ID NO: 182042 - DNA, 25 bp, Probe Sequence
cttttggcactgctcacagagccca

SEQ ID NO: 182043 - DNA, 25 bp, Probe Sequence
cttcttggtctggtagagagactga

SEQ ID NO: 182044 - DNA, 25 bp, Probe Sequence
ctttctggtccaggaggtagtggag

SEQ ID NO: 182045 - DNA, 25 bp, Probe Sequence
ctttctacgctcgggagcggctggg

SEQ ID NO: 182046 - DNA, 25 bp, Probe Sequence
ctttgccacgctcgtgtcagacagg

SEQ ID NO: 182047 - DNA, 25 bp, Probe Sequence
ctttgctgcagcctatggctttcga

SEQ ID NO: 182048 - DNA, 25 bp, Probe Sequence
ctttacccttgactttgctgaaatt

SEQ ID NO: 182049 - DNA, 25 bp, Probe Sequence
cttataacatcttattgttggtaat

SEQ ID NO: 182050 - DNA, 25 bp, Probe Sequence
cttagctccctgttcttgggtaagg

SEQ ID NO: 182051 - DNA, 25 bp, Probe Sequence
cttactgcccaggcctatctggaag

SEQ ID NO: 182052 - DNA, 25 bp, Probe Sequence
ctatacgcccgggacgtggatcagc

SEQ ID NO: 182053 - DNA, 25 bp, Probe Sequence
cttcatcgccatgggctacgtggac

SEQ ID NO: 182054 - DNA, 25 bp, Probe Sequence
cttcatgccactgaatacgttgaaa

SEQ ID NO: 182055 - DNA, 25 bp, Probe Sequence
ctttgccagcattgatgaacggatg

SEQ ID NO: 182056 - DNA, 25 bp, Probe Sequence
cttcatgcgcaatgctgacttggag

SEQ ID NO: 182057 - DNA, 25 bp, Probe Sequence
cttagcacatcttcgactttaggtg

SEQ ID NO: 182058 - DNA, 25 bp, Probe Sequence
cttaatccattcaactctgtgacac

SEQ ID NO: 182059 - DNA, 25 bp, Probe Sequence
ctttctcctatggatcgcttacacc

SEQ ID NO: 182060 - DNA, 25 bp, Probe Sequence
ctttcctctaaggccttggccacaa

SEQ ID NO: 182061 - DNA, 25 bp, Probe Sequence
cttttaacattgcctcgtggcctca

SEQ ID NO: 182062 - DNA, 25 bp, Probe Sequence
cttcttgaaattaggcagactcttc

SEQ ID NO: 182063 - DNA, 25 bp, Probe Sequence
cttcatggacatttcatgtcaggat

SEQ ID NO: 182064 - DNA, 25 bp, Probe Sequence
cttcatcgactgctttcatgctgtc

SEQ ID NO: 182065 - DNA, 25 bp, Probe Sequence
cttatcggctctggctatgatgctt

SEQ ID NO: 182066 - DNA, 25 bp, Probe Sequence
cttagcatgagctacctcatctcta

SEQ ID NO: 182067 - DNA, 25 bp, Probe Sequence
cttacagatggacctcttgagaaga

SEQ ID NO: 182068 - DNA, 25 bp, Probe Sequence
cttcattgagccccctgagagaatg

SEQ ID NO: 182069 - DNA, 25 bp, Probe Sequence
cttcagctggtgggccgagaggcag

SEQ ID NO: 182070 - DNA, 25 bp, Probe Sequence
cttatgtgttgagtccaaagagctg

SEQ ID NO: 182071 - DNA, 25 bp, Probe Sequence
ctttcaaatcgtccgcgatgacatg

SEQ ID NO: 182072 - DNA, 25 bp, Probe Sequence
ctttaccacgagggatagagcatgc

SEQ ID NO: 182073 - DNA, 25 bp, Probe Sequence
ctttgcaggccgaggtagacagatg

SEQ ID NO: 182074 - DNA, 25 bp, Probe Sequence
ctttactgccacaggctaagaatgc

SEQ ID NO: 182075 - DNA, 25 bp, Probe Sequence
ctattcactgtcgagatggctaatc

SEQ ID NO: 182076 - DNA, 25 bp, Probe Sequence
ctttatcagcctcatgcctgaatca

SEQ ID NO: 182077 - DNA, 25 bp, Probe Sequence
ctttatagagcaagatggacacata

SEQ ID NO: 182078 - DNA, 25 bp, Probe Sequence
ctttcatgaggcttctagccaaaga

SEQ ID NO: 182079 - DNA, 25 bp, Probe Sequence
ctctacgggcttcaccaagtgacca

SEQ ID NO: 182080 - DNA, 25 bp, Probe Sequence
ctcacgggggatttccaagtctcca

SEQ ID NO: 182081 - DNA, 25 bp, Probe Sequence
ctcgacggggatttccaagtctcca

SEQ ID NO: 182082 - DNA, 25 bp, Probe Sequence
ctctccaagggttttcaccttagca

SEQ ID NO: 182083 - DNA, 25 bp, Probe Sequence
cggagaggtggtgttacgctttgct

SEQ ID NO: 182084 - DNA, 25 bp, Probe Sequence
cttagggctggtggtgaccctttct

SEQ ID NO: 182085 - DNA, 25 bp, Probe Sequence
cttagctttggtactgacagttttc

SEQ ID NO: 182086 - DNA, 25 bp, Probe Sequence
cttagtgtctgtttctgacttattt

SEQ ID NO: 182087 - DNA, 25 bp, Probe Sequence
cttagtgtgatccatttgtttattc

SEQ ID NO: 182088 - DNA, 25 bp, Probe Sequence
cttagatgctgattcttttgaaaac

SEQ ID NO: 182089 - DNA, 25 bp, Probe Sequence
cttcagaccaagaatttgacaactc

SEQ ID NO: 182090 - DNA, 25 bp, Probe Sequence
cttaactgacagatgttaaagcttt

SEQ ID NO: 182091 - DNA, 25 bp, Probe Sequence
cttagtctcaaggtatggaaatgtt

SEQ ID NO: 182092 - DNA, 25 bp, Probe Sequence
cttagttcagagttgtgtgtcagga

SEQ ID NO: 182093 - DNA, 25 bp, Probe Sequence
cttcagcattaattctgttgccagc

SEQ ID NO: 182094 - DNA, 25 bp, Probe Sequence
ctttgaccagattgtgatcccagct

SEQ ID NO: 182095 - DNA, 25 bp, Probe Sequence
cttaaccaatagtcatcaccttgtt

SEQ ID NO: 182096 - DNA, 25 bp, Probe Sequence
cttacacgatatcccatacctttaa

SEQ ID NO: 182097 - DNA, 25 bp, Probe Sequence
cttcaccgcacagacaccaaatgga

SEQ ID NO: 182098 - DNA, 25 bp, Probe Sequence
cttcaccagcctgaccaacatggag

SEQ ID NO: 182099 - DNA, 25 bp, Probe Sequence
cttcatcccctactccaagatggaa

SEQ ID NO: 182100 - DNA, 25 bp, Probe Sequence
ctttcaggtcattcccaagtaaatt

SEQ ID NO: 182101 - DNA, 25 bp, Probe Sequence
ctttcggctataattccgccaaagt

SEQ ID NO: 182102 - DNA, 25 bp, Probe Sequence
ctttcccttctgactacgtgaaaat

SEQ ID NO: 182103 - DNA, 25 bp, Probe Sequence
ctttatcatctttacccaaataaat

SEQ ID NO: 182104 - DNA, 25 bp, Probe Sequence
ctttccctcttacccagaaatctag

SEQ ID NO: 182105 - DNA, 25 bp, Probe Sequence
cttttgtatttactgccatgtaatt

SEQ ID NO: 182106 - DNA, 25 bp, Probe Sequence
cttttctcctatatcctgtagtcta

SEQ ID NO: 182107 - DNA, 25 bp, Probe Sequence
cttttcaacataattcccagttata

SEQ ID NO: 182108 - DNA, 25 bp, Probe Sequence
ctttgtcaagctcatttcctggtat

SEQ ID NO: 182109 - DNA, 25 bp, Probe Sequence
cttcagtatcctcattaacatttga

SEQ ID NO: 182110 - DNA, 25 bp, Probe Sequence
cttcagcgtctacattaacaaagag

SEQ ID NO: 182111 - DNA, 25 bp, Probe Sequence
cttcaaaccttactatacacaagag

SEQ ID NO: 182112 - DNA, 25 bp, Probe Sequence
cttcacccctgaactaagacacagg

SEQ ID NO: 182113 - DNA, 25 bp, Probe Sequence
cttcactccctaatcatcaagactt

SEQ ID NO: 182114 - DNA, 25 bp, Probe Sequence
cttatcttcaccccacaaacaataa

SEQ ID NO: 182115 - DNA, 25 bp, Probe Sequence
ctttagatactccaactcaccaaaa

SEQ ID NO: 182116 - DNA, 25 bp, Probe Sequence
ctttaaacttgttctggcaaaccag

SEQ ID NO: 182117 - DNA, 25 bp, Probe Sequence
ctttagggcttttctcagtggtcca

SEQ ID NO: 182118 - DNA, 25 bp, Probe Sequence
ctttagatggtttctcataaggtaa

SEQ ID NO: 182119 - DNA, 25 bp, Probe Sequence
cttactaggtttgaatgcggtgtag

SEQ ID NO: 182120 - DNA, 25 bp, Probe Sequence
cttactctggctgttccatgggaga

SEQ ID NO: 182121 - DNA, 25 bp, Probe Sequence
cttattcggcagggcttcgtgagaa

SEQ ID NO: 182122 - DNA, 25 bp, Probe Sequence
cttattcgaatagctcctggagtaa

SEQ ID NO: 182123 - DNA, 25 bp, Probe Sequence
cttattggtgtgtcctcagatcgag

SEQ ID NO: 182124 - DNA, 25 bp, Probe Sequence
cttataggttgattgcccacaggtc

SEQ ID NO: 182125 - DNA, 25 bp, Probe Sequence
cttatagagagtggtgttcacggag

SEQ ID NO: 182126 - DNA, 25 bp, Probe Sequence
cttatggcatgagggacctctcggg

SEQ ID NO: 182127 - DNA, 25 bp, Probe Sequence
cttcaggtgcactagacctccagga

SEQ ID NO: 182128 - DNA, 25 bp, Probe Sequence
cttttgtcagctacatcctactgtg

SEQ ID NO: 182129 - DNA, 25 bp, Probe Sequence
cttatgggactttcctacttggcag

SEQ ID NO: 182130 - DNA, 25 bp, Probe Sequence
cttatgggactttcctacttggcca

SEQ ID NO: 182131 - DNA, 25 bp, Probe Sequence
cttattggacttttctaccttggca

SEQ ID NO: 182132 - DNA, 25 bp, Probe Sequence
cttagattaccaaattagcccaggc

SEQ ID NO: 182133 - DNA, 25 bp, Probe Sequence
cttagttaccattcttacctgctat

SEQ ID NO: 182134 - DNA, 25 bp, Probe Sequence
ctcagggataccagttcatcctttt

SEQ ID NO: 182135 - DNA, 25 bp, Probe Sequence
cttcactgatactggagtctccgtt

SEQ ID NO: 182136 - DNA, 25 bp, Probe Sequence
cttcagtgttctgtggtctcttgtt

SEQ ID NO: 182137 - DNA, 25 bp, Probe Sequence
cttcaggtacagctggcattttggc

SEQ ID NO: 182138 - DNA, 25 bp, Probe Sequence
ctatctgggcacacgtgtttcacgt

SEQ ID NO: 182139 - DNA, 25 bp, Probe Sequence
ctttagacaaccctgaggtatctgt

SEQ ID NO: 182140 - DNA, 25 bp, Probe Sequence
ctttggaagatggcataacctgtct

SEQ ID NO: 182141 - DNA, 25 bp, Probe Sequence
ctttcggacatgacagcaacctttt

SEQ ID NO: 182142 - DNA, 25 bp, Probe Sequence
ctttatagaatgagaaccttttttg

SEQ ID NO: 182143 - DNA, 25 bp, Probe Sequence
ctattaaacttaccagcactttctt

SEQ ID NO: 182144 - DNA, 25 bp, Probe Sequence
ctattaatcttttgtcaacttcctg

SEQ ID NO: 182145 - DNA, 25 bp, Probe Sequence
ctttgaaaatttccttccatcctga

SEQ ID NO: 182146 - DNA, 25 bp, Probe Sequence
ctattaagtcatgtcctggtaccgt

SEQ ID NO: 182147 - DNA, 25 bp, Probe Sequence
ctttaagtcttacaggaagcctctc

SEQ ID NO: 182148 - DNA, 25 bp, Probe Sequence
cttcaaacccaaggaggaactcttg

SEQ ID NO: 182149 - DNA, 25 bp, Probe Sequence
cttaaatcactccaaagaagacttt

SEQ ID NO: 182150 - DNA, 25 bp, Probe Sequence
cttcaagacacccaaggaggctatt

SEQ ID NO: 182151 - DNA, 25 bp, Probe Sequence
cttaggaagcccacaaggttctggg

SEQ ID NO: 182152 - DNA, 25 bp, Probe Sequence
cttcagagaacaccctctaggggct

SEQ ID NO: 182153 - DNA, 25 bp, Probe Sequence
cttcaagaggagggcactagggccc

SEQ ID NO: 182154 - DNA, 25 bp, Probe Sequence
cttacgggatgcagcaagacagtgc

SEQ ID NO: 182155 - DNA, 25 bp, Probe Sequence
cttcacaggatcccagcaatgaact

SEQ ID NO: 182156 - DNA, 25 bp, Probe Sequence
cttactacatgccaagcactgctct

SEQ ID NO: 182157 - DNA, 25 bp, Probe Sequence
cttactatgtatcaggcatctgtgc

SEQ ID NO: 182158 - DNA, 25 bp, Probe Sequence
cttacatatggtggggctgaggcaa

SEQ ID NO: 182159 - DNA, 25 bp, Probe Sequence
ctttggatggtccgggcgtcaagag

SEQ ID NO: 182160 - DNA, 25 bp, Probe Sequence
ctttgagtctggcgtgaggcgccgg

SEQ ID NO: 182161 - DNA, 25 bp, Probe Sequence
ctttaggctgggcatggtggctcat

SEQ ID NO: 182162 - DNA, 25 bp, Probe Sequence
cttaaggtgatttgatggtgaggaa

SEQ ID NO: 182163 - DNA, 25 bp, Probe Sequence
ctttaggtttagagctggtcagtga

SEQ ID NO: 182164 - DNA, 25 bp, Probe Sequence
ctttaggttaaagcagcgccaggag

SEQ ID NO: 182165 - DNA, 25 bp, Probe Sequence
cttcaaggtttctgccagcccactg

SEQ ID NO: 182166 - DNA, 25 bp, Probe Sequence
cttaatgggttttcacagtccagct

SEQ ID NO: 182167 - DNA, 25 bp, Probe Sequence
cttaatgggtcttgtctatcttcat

SEQ ID NO: 182168 - DNA, 25 bp, Probe Sequence
cttagaggtgtctgcctatgcttaa

SEQ ID NO: 182169 - DNA, 25 bp, Probe Sequence
cttcagcttaactgacagatgttaa

SEQ ID NO: 182170 - DNA, 25 bp, Probe Sequence
cttactgaatacttactatgtatca

SEQ ID NO: 182171 - DNA, 25 bp, Probe Sequence
cttacggtagctgatgcattggaac

SEQ ID NO: 182172 - DNA, 25 bp, Probe Sequence
cttacggtcggagcatctagaacaa

SEQ ID NO: 182173 - DNA, 25 bp, Probe Sequence
cttttgctacgggccctagacaata

SEQ ID NO: 182174 - DNA, 25 bp, Probe Sequence
cttttgctcatcttagaccacagac

SEQ ID NO: 182175 - DNA, 25 bp, Probe Sequence
ctttttctcagttacctgcatgaat

SEQ ID NO: 182176 - DNA, 25 bp, Probe Sequence
ctttttctcaaagtcactgatgttt

SEQ ID NO: 182177 - DNA, 25 bp, Probe Sequence
cttatggcccagaactgcatttgat

SEQ ID NO: 182178 - DNA, 25 bp, Probe Sequence
ctttgggccacatagtgattttgga

SEQ ID NO: 182179 - DNA, 25 bp, Probe Sequence
ctttgacccaggtggatactggcca

SEQ ID NO: 182180 - DNA, 25 bp, Probe Sequence
ctttgaggaccctgaatcactccca

SEQ ID NO: 182181 - DNA, 25 bp, Probe Sequence
cttatatggatcggcgtgaccaccc

SEQ ID NO: 182182 - DNA, 25 bp, Probe Sequence
cttagcagccaccagaatgacagca

SEQ ID NO: 182183 - DNA, 25 bp, Probe Sequence
cttaagcccagatatgagaacttct

SEQ ID NO: 182184 - DNA, 25 bp, Probe Sequence
cttttcccattgaatagaagccagt

SEQ ID NO: 182185 - DNA, 25 bp, Probe Sequence
cttttctgccctctagcagggaggt

SEQ ID NO: 182186 - DNA, 25 bp, Probe Sequence
cttttctccctggtggcgaggaagc

SEQ ID NO: 182187 - DNA, 25 bp, Probe Sequence
ctttcttcctctgtttgcaggggag

SEQ ID NO: 182188 - DNA, 25 bp, Probe Sequence
cttttggcctgtcattcagaggctg

SEQ ID NO: 182189 - DNA, 25 bp, Probe Sequence
ctttgttgtctacatgtgtgacctg

SEQ ID NO: 182190 - DNA, 25 bp, Probe Sequence
ctttgttgctcagcaaggggctctg

SEQ ID NO: 182191 - DNA, 25 bp, Probe Sequence
ctttggtgaacagagccgagcttgg

SEQ ID NO: 182192 - DNA, 25 bp, Probe Sequence
ctttctctgaaggaagcccatgctt

SEQ ID NO: 182193 - DNA, 25 bp, Probe Sequence
ctttcttgagaggagagaccacaga

SEQ ID NO: 182194 - DNA, 25 bp, Probe Sequence
cttattgcataacagcagatgccaa

SEQ ID NO: 182195 - DNA, 25 bp, Probe Sequence
ctttgggcaccaacagatgccagaa

SEQ ID NO: 182196 - DNA, 25 bp, Probe Sequence
ctttgggagccgaggaagatagatc

SEQ ID NO: 182197 - DNA, 25 bp, Probe Sequence
ctttaaagccgtttcaagctgtata

SEQ ID NO: 182198 - DNA, 25 bp, Probe Sequence
ccgtcaaattcttgtataactttga

SEQ ID NO: 182199 - DNA, 25 bp, Probe Sequence
tccgtcctctcgggttaactttgca

SEQ ID NO: 182200 - DNA, 25 bp, Probe Sequence
ctagatcccccgattacatttctaa

SEQ ID NO: 182201 - DNA, 25 bp, Probe Sequence
ctatgctccctctgtgttagaattg

SEQ ID NO: 182202 - DNA, 25 bp, Probe Sequence
cttactctcaccttttatgagattg

SEQ ID NO: 182203 - DNA, 25 bp, Probe Sequence
cttacccaccttcctgtgagtgaag

SEQ ID NO: 182204 - DNA, 25 bp, Probe Sequence
cttacccaccttcctgtgagtgaag

SEQ ID NO: 182205 - DNA, 25 bp, Probe Sequence
ctctaccccttaacctatggaagtg

SEQ ID NO: 182206 - DNA, 25 bp, Probe Sequence
ctatgaccccttaggcctatttagg

SEQ ID NO: 182207 - DNA, 25 bp, Probe Sequence
cttttactttaagctattctagtgt

SEQ ID NO: 182208 - DNA, 25 bp, Probe Sequence
ctttaaccttaagctgatactttgc

SEQ ID NO: 182209 - DNA, 25 bp, Probe Sequence
ctttagagcctttcacctaatcatg

SEQ ID NO: 182210 - DNA, 25 bp, Probe Sequence
cttttggttcttgccaaatctgact

SEQ ID NO: 182211 - DNA, 25 bp, Probe Sequence
ctttcttgatactttccaaattctc

SEQ ID NO: 182212 - DNA, 25 bp, Probe Sequence
cttttgtttcatctcaagacaattc

SEQ ID NO: 182213 - DNA, 25 bp, Probe Sequence
cttttgattcttcctaacaaaatat

SEQ ID NO: 182214 - DNA, 25 bp, Probe Sequence
cttttattttccactcagattaata

SEQ ID NO: 182215 - DNA, 25 bp, Probe Sequence
ctttaatttttaccatccatttatg

SEQ ID NO: 182216 - DNA, 25 bp, Probe Sequence
cttacttcaatttgaacccatttga

SEQ ID NO: 182217 - DNA, 25 bp, Probe Sequence
cttaatcacagaggtgacatcccat

SEQ ID NO: 182218 - DNA, 25 bp, Probe Sequence
cttaattcaagccttcatgtcctcg

SEQ ID NO: 182219 - DNA, 25 bp, Probe Sequence
cttacattcatgaccttgacacctc

SEQ ID NO: 182220 - DNA, 25 bp, Probe Sequence
cttatagcctctgtctggcaatgcc

SEQ ID NO: 182221 - DNA, 25 bp, Probe Sequence
ctattggccatcactaccaaccagg

SEQ ID NO: 182222 - DNA, 25 bp, Probe Sequence
ctttgcccaaacaatccatggatgg

SEQ ID NO: 182223 - DNA, 25 bp, Probe Sequence
cttacccagacaatccccagattga

SEQ ID NO: 182224 - DNA, 25 bp, Probe Sequence
ctttcctcagacatactccatagat

SEQ ID NO: 182225 - DNA, 25 bp, Probe Sequence
ctttctcacttcacattctcaagtg

SEQ ID NO: 182226 - DNA, 25 bp, Probe Sequence
ctttctagtcctattctattgcagt

SEQ ID NO: 182227 - DNA, 25 bp, Probe Sequence
ctttctttcctcatgtttggcatgg

SEQ ID NO: 182228 - DNA, 25 bp, Probe Sequence
ctttttaaatctcccctggcatgag

SEQ ID NO: 182229 - DNA, 25 bp, Probe Sequence
ctttttggaatagccctgtctaggg

SEQ ID NO: 182230 - DNA, 25 bp, Probe Sequence
ctttgttgtcaaacacccgttcatc

SEQ ID NO: 182231 - DNA, 25 bp, Probe Sequence
ctttgttggaaatactgctcttgct

SEQ ID NO: 182232 - DNA, 25 bp, Probe Sequence
ctttttctgaaatacgatgcaacca

SEQ ID NO: 182233 - DNA, 25 bp, Probe Sequence
ctttctcttaaattagcctaactga

SEQ ID NO: 182234 - DNA, 25 bp, Probe Sequence
cttttttatctttatgcctgcaatt

SEQ ID NO: 182235 - DNA, 25 bp, Probe Sequence
cttactcttagcaggattcttatta

SEQ ID NO: 182236 - DNA, 25 bp, Probe Sequence
cttaccatatatacccttttatctt

SEQ ID NO: 182237 - DNA, 25 bp, Probe Sequence
cttacacactcaaccattcttatat

SEQ ID NO: 182238 - DNA, 25 bp, Probe Sequence
cttacaatgtgcactgaatcgtttc

SEQ ID NO: 182239 - DNA, 25 bp, Probe Sequence
cttcaagagcctctggcatctcttt

SEQ ID NO: 182240 - DNA, 25 bp, Probe Sequence
ctttcaacacatttagctattttag

SEQ ID NO: 182241 - DNA, 25 bp, Probe Sequence
cttacaaagctagttgccatatttc

SEQ ID NO: 182242 - DNA, 25 bp, Probe Sequence
cttacagagagcttgattcaccagt

SEQ ID NO: 182243 - DNA, 25 bp, Probe Sequence
cttacagcaacttgtccatcagcaa

SEQ ID NO: 182244 - DNA, 25 bp, Probe Sequence
cttactgcacaaagggctccataca

SEQ ID NO: 182245 - DNA, 25 bp, Probe Sequence
ctttctatttagctgtcactagcac

SEQ ID NO: 182246 - DNA, 25 bp, Probe Sequence
ctttcatttacacagatatccatgc

SEQ ID NO: 182247 - DNA, 25 bp, Probe Sequence
cttacatattccttggaacctggac

SEQ ID NO: 182248 - DNA, 25 bp, Probe Sequence
cttaataatatctggtatcctggca

SEQ ID NO: 182249 - DNA, 25 bp, Probe Sequence
cttaaaattttgtcatacccacaca

SEQ ID NO: 182250 - DNA, 25 bp, Probe Sequence
ctatagaaattgagatgccccccca

SEQ ID NO: 182251 - DNA, 25 bp, Probe Sequence
cttagacaaggttctggtccaccct

SEQ ID NO: 182252 - DNA, 25 bp, Probe Sequence
cttagacaaggaatttctccaggac

SEQ ID NO: 182253 - DNA, 25 bp, Probe Sequence
cttaaactgtgtgttctccatggtc

SEQ ID NO: 182254 - DNA, 25 bp, Probe Sequence
ctttcaactggtgcgtccatcaagg

SEQ ID NO: 182255 - DNA, 25 bp, Probe Sequence
ctttaaatgtgatagtctcagaaac

SEQ ID NO: 182256 - DNA, 25 bp, Probe Sequence
ctacttagagtgtggtctccccacc

SEQ ID NO: 182257 - DNA, 25 bp, Probe Sequence
cttttggatgtggggcatcatccgc

SEQ ID NO: 182258 - DNA, 25 bp, Probe Sequence
ctttagtgatggcctggctcacctg

SEQ ID NO: 182259 - DNA, 25 bp, Probe Sequence
ctttagtgatggcctggctcacctg

SEQ ID NO: 182260 - DNA, 25 bp, Probe Sequence
ctattgagattccagtggtgacttc

SEQ ID NO: 182261 - DNA, 25 bp, Probe Sequence
ctatcatgagataataggcctactc

SEQ ID NO: 182262 - DNA, 25 bp, Probe Sequence
ctttgcagtgaatgggaagcctcat

SEQ ID NO: 182263 - DNA, 25 bp, Probe Sequence
ctttcaacaaggtctgaagccttag

SEQ ID NO: 182264 - DNA, 25 bp, Probe Sequence
ctttactcaaggataacacggcgat

SEQ ID NO: 182265 - DNA, 25 bp, Probe Sequence
ctatctacctaggggaacactagta

SEQ ID NO: 182266 - DNA, 25 bp, Probe Sequence
ctaccaccaaggagaatagtttagg

SEQ ID NO: 182267 - DNA, 25 bp, Probe Sequence
ctaccactcacaagaacccaagttt

SEQ ID NO: 182268 - DNA, 25 bp, Probe Sequence
ctaccctcacaataccttatttaag

SEQ ID NO: 182269 - DNA, 25 bp, Probe Sequence
ccctagatacaatcccttttgataa

SEQ ID NO: 182270 - DNA, 25 bp, Probe Sequence
cttttgatacaatctcctttcatga

SEQ ID NO: 182271 - DNA, 25 bp, Probe Sequence
cttttgtcgatgccaccgcatttat

SEQ ID NO: 182272 - DNA, 25 bp, Probe Sequence
ctttggtgtgtaccccaatgtatgc

SEQ ID NO: 182273 - DNA, 25 bp, Probe Sequence
ctttgtgtgtctgttaaatgaatgt

SEQ ID NO: 182274 - DNA, 25 bp, Probe Sequence
cttattgttcagttcatccagatta

SEQ ID NO: 182275 - DNA, 25 bp, Probe Sequence
cttattgttggtaatagtgctttat

SEQ ID NO: 182276 - DNA, 25 bp, Probe Sequence
cttatctttgtcaacaagtgttcgt

SEQ ID NO: 182277 - DNA, 25 bp, Probe Sequence
cttattatctgtagaagttttgctt

SEQ ID NO: 182278 - DNA, 25 bp, Probe Sequence
ctttttgctgggtttattcgtgctg

SEQ ID NO: 182279 - DNA, 25 bp, Probe Sequence
ctttggtggtggtcttggacgtggt

SEQ ID NO: 182280 - DNA, 25 bp, Probe Sequence
ctttgccatcggcatcgtgggggac

SEQ ID NO: 182281 - DNA, 25 bp, Probe Sequence
ctttgcacacttcaaatcagagcag

SEQ ID NO: 182282 - DNA, 25 bp, Probe Sequence
cttagctctctacatacctatcatg

SEQ ID NO: 182283 - DNA, 25 bp, Probe Sequence
cttacatttcagacatatccaaagg

SEQ ID NO: 182284 - DNA, 25 bp, Probe Sequence
cttactttcagtagcaccataacga

SEQ ID NO: 182285 - DNA, 25 bp, Probe Sequence
cttagctattagtgacctatgacag

SEQ ID NO: 182286 - DNA, 25 bp, Probe Sequence
cttactgtgccgagatcgctcacaa

SEQ ID NO: 182287 - DNA, 25 bp, Probe Sequence
cttactgtgcttaggactgcacgca

SEQ ID NO: 182288 - DNA, 25 bp, Probe Sequence
cttacctgtgctagagatctctctc

SEQ ID NO: 182289 - DNA, 25 bp, Probe Sequence
cttacacttctcaaatgctactcag

SEQ ID NO: 182290 - DNA, 25 bp, Probe Sequence
ctttcagccctcaagatctacagct

SEQ ID NO: 182291 - DNA, 25 bp, Probe Sequence
ctttccacctggtcatatactctgc

SEQ ID NO: 182292 - DNA, 25 bp, Probe Sequence
ctttcctcctggcagaatgctagct

SEQ ID NO: 182293 - DNA, 25 bp, Probe Sequence
ctttcctcctggcagaatgctagct

SEQ ID NO: 182294 - DNA, 25 bp, Probe Sequence
cttactccactgtagattagctgga

SEQ ID NO: 182295 - DNA, 25 bp, Probe Sequence
ctttcccatctgtctatctatctgg

SEQ ID NO: 182296 - DNA, 25 bp, Probe Sequence
ctttccattggatactgtgctagca

SEQ ID NO: 182297 - DNA, 25 bp, Probe Sequence
ctttcactggaagatcattgtaatt

SEQ ID NO: 182298 - DNA, 25 bp, Probe Sequence
ctttgaggagaagtttcttatttgg

SEQ ID NO: 182299 - DNA, 25 bp, Probe Sequence
ctttggcgatatttctttgcttttt

SEQ ID NO: 182300 - DNA, 25 bp, Probe Sequence
cttatgtggactgtaaatgttttat

SEQ ID NO: 182301 - DNA, 25 bp, Probe Sequence
cttttccctgcctgcaatattttat

SEQ ID NO: 182302 - DNA, 25 bp, Probe Sequence
cttttccaggacagcaattgtggta

SEQ ID NO: 182303 - DNA, 25 bp, Probe Sequence
cttttcctaaatcgattcggtgctc

SEQ ID NO: 182304 - DNA, 25 bp, Probe Sequence
ctttgccctgaacttgtccgggtag

SEQ ID NO: 182305 - DNA, 25 bp, Probe Sequence
cttatcctagaacttgaggctgggc

SEQ ID NO: 182306 - DNA, 25 bp, Probe Sequence
cttattcatagtattgtcgcctggt

SEQ ID NO: 182307 - DNA, 25 bp, Probe Sequence
cttttcatcatgtctatagttcctg

SEQ ID NO: 182308 - DNA, 25 bp, Probe Sequence
cttttcacagcaagaacagtccatg

SEQ ID NO: 182309 - DNA, 25 bp, Probe Sequence
cttatctatcacagaccagtagcaa

SEQ ID NO: 182310 - DNA, 25 bp, Probe Sequence
ctttctattcattcctcagtacagt

SEQ ID NO: 182311 - DNA, 25 bp, Probe Sequence
cttacgtctcttactatgtgtcagg

SEQ ID NO: 182312 - DNA, 25 bp, Probe Sequence
ctttacttgcttccattgtgtctga

SEQ ID NO: 182313 - DNA, 25 bp, Probe Sequence
cttacactatgatgtttgagtcggg

SEQ ID NO: 182314 - DNA, 25 bp, Probe Sequence
cttacctgtgattttgcatggtcag

SEQ ID NO: 182315 - DNA, 25 bp, Probe Sequence
cttaccataatggatgctctgtgaa

SEQ ID NO: 182316 - DNA, 25 bp, Probe Sequence
cttacctgattgccatgtcttcaat

SEQ ID NO: 182317 - DNA, 25 bp, Probe Sequence
cttacgcattctggtgtttcacaaa

SEQ ID NO: 182318 - DNA, 25 bp, Probe Sequence
ctttccatactatgtttacaacatc

SEQ ID NO: 182319 - DNA, 25 bp, Probe Sequence
ctttcctggtgattgattttacaaa

SEQ ID NO: 182320 - DNA, 25 bp, Probe Sequence
ctattcgtgggcatgatcctgattc

SEQ ID NO: 182321 - DNA, 25 bp, Probe Sequence
ctttttagctgcatgcatgacttta

SEQ ID NO: 182322 - DNA, 25 bp, Probe Sequence
cttttgtatcctggcaaatactcct

SEQ ID NO: 182323 - DNA, 25 bp, Probe Sequence
cttttgatgccgtactgtaagctcc

SEQ ID NO: 182324 - DNA, 25 bp, Probe Sequence
ctttcagcatgcaagattctaaagc

SEQ ID NO: 182325 - DNA, 25 bp, Probe Sequence
ctttctgcatgttgatgcccgaaga

SEQ ID NO: 182326 - DNA, 25 bp, Probe Sequence
ctttctgcagcatagcttgtcaata

SEQ ID NO: 182327 - DNA, 25 bp, Probe Sequence
cttatgctcctgtactcttcagaga

SEQ ID NO: 182328 - DNA, 25 bp, Probe Sequence
cttttctatcatctagtgcagagaa

SEQ ID NO: 182329 - DNA, 25 bp, Probe Sequence
ctgtactctgtccctggggcaaaaa

SEQ ID NO: 182330 - DNA, 25 bp, Probe Sequence
ctatgactattccctcttgaaacaa

SEQ ID NO: 182331 - DNA, 25 bp, Probe Sequence
ctatggttctccactatggcaacta

SEQ ID NO: 182332 - DNA, 25 bp, Probe Sequence
ctttctacagacactgggccatcta

SEQ ID NO: 182333 - DNA, 25 bp, Probe Sequence
cttttcacaagcactgttgactctg

SEQ ID NO: 182334 - DNA, 25 bp, Probe Sequence
cttagtccaacttctttcactttgt

SEQ ID NO: 182335 - DNA, 25 bp, Probe Sequence
cttagtccaacttctttcactttgt

SEQ ID NO: 182336 - DNA, 25 bp, Probe Sequence
cttatcaccattcttatgtcacttt

SEQ ID NO: 182337 - DNA, 25 bp, Probe Sequence
ctttgctcaactgctaatttctctt

SEQ ID NO: 182338 - DNA, 25 bp, Probe Sequence
ctttggcaactgactagttccccta

SEQ ID NO: 182339 - DNA, 25 bp, Probe Sequence
cttacccctataagtactctctgct

SEQ ID NO: 182340 - DNA, 25 bp, Probe Sequence
cttacccacttgagtcaattatgac

SEQ ID NO: 182341 - DNA, 25 bp, Probe Sequence
cttttcccattgacgtacaatgggt

SEQ ID NO: 182342 - DNA, 25 bp, Probe Sequence
cttttcccattagatatatgtaagt

SEQ ID NO: 182343 - DNA, 25 bp, Probe Sequence
cttttcccttcagcttgcttagatg

SEQ ID NO: 182344 - DNA, 25 bp, Probe Sequence
cttttcccttcagcttgcttagatg

SEQ ID NO: 182345 - DNA, 25 bp, Probe Sequence
cttttcccttcagcttgcttagatg

SEQ ID NO: 182346 - DNA, 25 bp, Probe Sequence
cttttgctctctgagccttgcaaaa

SEQ ID NO: 182347 - DNA, 25 bp, Probe Sequence
cttttctcaggcctgtgattcacag

SEQ ID NO: 182348 - DNA, 25 bp, Probe Sequence
cttttgtctcatctcatgattcaca

SEQ ID NO: 182349 - DNA, 25 bp, Probe Sequence
ctttgtatcttgcctagcacctatc

SEQ ID NO: 182350 - DNA, 25 bp, Probe Sequence
cttatatatctcacgtgcataatat

SEQ ID NO: 182351 - DNA, 25 bp, Probe Sequence
ctgttataccccatatattacccct

SEQ ID NO: 182352 - DNA, 25 bp, Probe Sequence
ctgtgtaacctcatttggggggcca

SEQ ID NO: 182353 - DNA, 25 bp, Probe Sequence
ctttaaccctgtgtgtggcagtgac

SEQ ID NO: 182354 - DNA, 25 bp, Probe Sequence
ctttaaaggctgtgttgctatggca

SEQ ID NO: 182355 - DNA, 25 bp, Probe Sequence
ctttaagcaggcgtttatttctgca

SEQ ID NO: 182356 - DNA, 25 bp, Probe Sequence
ctttaatcactgcatttcattttga

SEQ ID NO: 182357 - DNA, 25 bp, Probe Sequence
ctttaatccgtcaaattcttgtata

SEQ ID NO: 182358 - DNA, 25 bp, Probe Sequence
tcttaagaccccacctattctagaa

SEQ ID NO: 182359 - DNA, 25 bp, Probe Sequence
cttagtggtcccaacttgttcttga

SEQ ID NO: 182360 - DNA, 25 bp, Probe Sequence
cttaggatgcacccaagcttgtcca

SEQ ID NO: 182361 - DNA, 25 bp, Probe Sequence
cttatggatagctcaagtctctgcc

SEQ ID NO: 182362 - DNA, 25 bp, Probe Sequence
cttagaatatgagacagactggcct

SEQ ID NO: 182363 - DNA, 25 bp, Probe Sequence
ctttgaagcttattgtactggcctg

SEQ ID NO: 182364 - DNA, 25 bp, Probe Sequence
ctttttcttctcatacaggccatgt

SEQ ID NO: 182365 - DNA, 25 bp, Probe Sequence
ctttcttcttacccagagtgcaagg

SEQ ID NO: 182366 - DNA, 25 bp, Probe Sequence
ctttaacttcacttcaattcaagaa

SEQ ID NO: 182367 - DNA, 25 bp, Probe Sequence
ctttttccatacttatatctaagaa

SEQ ID NO: 182368 - DNA, 25 bp, Probe Sequence
cttttatcactacctcaactgagga

SEQ ID NO: 182369 - DNA, 25 bp, Probe Sequence
gaatttaagcgcaagtactccaatg

SEQ ID NO: 182370 - DNA, 25 bp, Probe Sequence
ctttacaattacttggcctcaggta

SEQ ID NO: 182371 - DNA, 25 bp, Probe Sequence
cttatatgatttttttgccttggta

SEQ ID NO: 182372 - DNA, 25 bp, Probe Sequence
cttatgcaatctatgtttgcacttg

SEQ ID NO: 182373 - DNA, 25 bp, Probe Sequence
cttagacatcatctctcaacctggg

SEQ ID NO: 182374 - DNA, 25 bp, Probe Sequence
cttactgcatatttcttaacctgag

SEQ ID NO: 182375 - DNA, 25 bp, Probe Sequence
cttttctaattcttaacactcatac

SEQ ID NO: 182376 - DNA, 25 bp, Probe Sequence
ctttcatttcttctacaactcatac

SEQ ID NO: 182377 - DNA, 25 bp, Probe Sequence
ctttctgttcttcaacaccacataa

SEQ ID NO: 182378 - DNA, 25 bp, Probe Sequence
ctttggacctttcacactgagcata

SEQ ID NO: 182379 - DNA, 25 bp, Probe Sequence
cttttccttaggtatgccgagcaga

SEQ ID NO: 182380 - DNA, 25 bp, Probe Sequence
cttatagcctaactggcatgccaga

SEQ ID NO: 182381 - DNA, 25 bp, Probe Sequence
cttatagtcctagtcagcagctcag

SEQ ID NO: 182382 - DNA, 25 bp, Probe Sequence
cttagtttctaaggctgcacaggga

SEQ ID NO: 182383 - DNA, 25 bp, Probe Sequence
cttagtcatgtgcaagaccacggtg

SEQ ID NO: 182384 - DNA, 25 bp, Probe Sequence
cttaggcatgtgcaagtcccaggcc

SEQ ID NO: 182385 - DNA, 25 bp, Probe Sequence
ctatatggcaagcaagtcgcaaagc

SEQ ID NO: 182386 - DNA, 25 bp, Probe Sequence
ctttgcaggcggtcaggcctatacc

SEQ ID NO: 182387 - DNA, 25 bp, Probe Sequence
ctttgagcagcttgaggccctatta

SEQ ID NO: 182388 - DNA, 25 bp, Probe Sequence
ctttacactagctttctgcatttaa

SEQ ID NO: 182389 - DNA, 25 bp, Probe Sequence
ctttacttactttgtgattctggct

SEQ ID NO: 182390 - DNA, 25 bp, Probe Sequence
ctttacgccctatgagatctgggtg

SEQ ID NO: 182391 - DNA, 25 bp, Probe Sequence
cgttacccgaactgcatcaggcgtg

SEQ ID NO: 182392 - DNA, 25 bp, Probe Sequence
ctatgatccccagaaggacaagcgc

SEQ ID NO: 182393 - DNA, 25 bp, Probe Sequence
ctttctgcctcataaccagcaagcc

SEQ ID NO: 182394 - DNA, 25 bp, Probe Sequence
ctttcaccttaaagctctgccaagc

SEQ ID NO: 182395 - DNA, 25 bp, Probe Sequence
ctttcaccttaaagctctgccaagc

SEQ ID NO: 182396 - DNA, 25 bp, Probe Sequence
cttatgccctctaacctctgagaag

SEQ ID NO: 182397 - DNA, 25 bp, Probe Sequence
ctttgcctttttcactgtgtatgga

SEQ ID NO: 182398 - DNA, 25 bp, Probe Sequence
ctttcatttttcccccagtgaatga

SEQ ID NO: 182399 - DNA, 25 bp, Probe Sequence
ctttacctgattgccctcagtttgg

SEQ ID NO: 182400 - DNA, 25 bp, Probe Sequence
ctttacctagatcagccatcagcct

SEQ ID NO: 182401 - DNA, 25 bp, Probe Sequence
cttatcacctttcatggatcacgcc

SEQ ID NO: 182402 - DNA, 25 bp, Probe Sequence
cttatcacaccatcgtggacttcca

SEQ ID NO: 182403 - DNA, 25 bp, Probe Sequence
ctttcaccacaagtttgagatcctg

SEQ ID NO: 182404 - DNA, 25 bp, Probe Sequence
ctttatcccaagcctttatgcttga

SEQ ID NO: 182405 - DNA, 25 bp, Probe Sequence
ctttacctaagggctgtcagatata

SEQ ID NO: 182406 - DNA, 25 bp, Probe Sequence
ctttacctaagggctgtcagatata

SEQ ID NO: 182407 - DNA, 25 bp, Probe Sequence
ctttcagcattagatgcaggtcgta

SEQ ID NO: 182408 - DNA, 25 bp, Probe Sequence
ctttgcagcattcctagtcgttgct

SEQ ID NO: 182409 - DNA, 25 bp, Probe Sequence
ctttcatcatgatcataggcagttg

SEQ ID NO: 182410 - DNA, 25 bp, Probe Sequence
ctatgccattgcccatcagggactt

SEQ ID NO: 182411 - DNA, 25 bp, Probe Sequence
ctatggcagtggaacagatgtaaga

SEQ ID NO: 182412 - DNA, 25 bp, Probe Sequence
ctttattcttgagctgttcaccctc

SEQ ID NO: 182413 - DNA, 25 bp, Probe Sequence
ctttttcctgtgcagtggaacccct

SEQ ID NO: 182414 - DNA, 25 bp, Probe Sequence
cttttaatttgcaggggtgcccgct

SEQ ID NO: 182415 - DNA, 25 bp, Probe Sequence
ctccctactattcagcgggtggtcc

SEQ ID NO: 182416 - DNA, 25 bp, Probe Sequence
ctaccatacctcacacagcgttggt

SEQ ID NO: 182417 - DNA, 25 bp, Probe Sequence
ctatcccacctatccaggatatcct

SEQ ID NO: 182418 - DNA, 25 bp, Probe Sequence
ctattcccttcttccaaatatgact

SEQ ID NO: 182419 - DNA, 25 bp, Probe Sequence
ctttgccctctttcagtattatgcc

SEQ ID NO: 182420 - DNA, 25 bp, Probe Sequence
ctttgcgtcttccacaacatattga

SEQ ID NO: 182421 - DNA, 25 bp, Probe Sequence
ctttcgttgctcgctactttgatga

SEQ ID NO: 182422 - DNA, 25 bp, Probe Sequence
ctttcttttccagtcgtctttgaga

SEQ ID NO: 182423 - DNA, 25 bp, Probe Sequence
ctttcttgctgtccaatttctatta

SEQ ID NO: 182424 - DNA, 25 bp, Probe Sequence
ctttcttgctgtccaatttctatta

SEQ ID NO: 182425 - DNA, 25 bp, Probe Sequence
ctttcttgctgtccaatttctatta

SEQ ID NO: 182426 - DNA, 25 bp, Probe Sequence
ctttattgttcccttatgtattcaa

SEQ ID NO: 182427 - DNA, 25 bp, Probe Sequence
cttttccctgccaagtatgtttcag

SEQ ID NO: 182428 - DNA, 25 bp, Probe Sequence
cttttccttcctttaatcttatgca

SEQ ID NO: 182429 - DNA, 25 bp, Probe Sequence
cttttccttattttattgccaatca

SEQ ID NO: 182430 - DNA, 25 bp, Probe Sequence
cttttccttatacatattgattaaa

SEQ ID NO: 182431 - DNA, 25 bp, Probe Sequence
ctttatccatttgtacattgatgga

SEQ ID NO: 182432 - DNA, 25 bp, Probe Sequence
ctttcccttctggttatctgaagac

SEQ ID NO: 182433 - DNA, 25 bp, Probe Sequence
ctttgcacccactgttaccagaagc

SEQ ID NO: 182434 - DNA, 25 bp, Probe Sequence
cttagaacagcactgggagaccagc

SEQ ID NO: 182435 - DNA, 25 bp, Probe Sequence
cttaggccagagtgatggcaccatc

SEQ ID NO: 182436 - DNA, 25 bp, Probe Sequence
cttaggtaggtgcttctgcagctcc

SEQ ID NO: 182437 - DNA, 25 bp, Probe Sequence
cttaggtggcgtgtttcagcttggc

SEQ ID NO: 182438 - DNA, 25 bp, Probe Sequence
cttatgggagcgtttcctactgggc

SEQ ID NO: 182439 - DNA, 25 bp, Probe Sequence
cttatgggggtgtttctatctcttt

SEQ ID NO: 182440 - DNA, 25 bp, Probe Sequence
ctttatttggtctgcctatgttttt

SEQ ID NO: 182441 - DNA, 25 bp, Probe Sequence
ctttactttgtaatcctatgcattt

SEQ ID NO: 182442 - DNA, 25 bp, Probe Sequence
cttatacttggatttgctctcttcc

SEQ ID NO: 182443 - DNA, 25 bp, Probe Sequence
cttatacgagtaatatgcctgctat

SEQ ID NO: 182444 - DNA, 25 bp, Probe Sequence
ctttagcagaatatatggtttagaa

SEQ ID NO: 182445 - DNA, 25 bp, Probe Sequence
ctattctctaatatggggttaatga

SEQ ID NO: 182446 - DNA, 25 bp, Probe Sequence
cttattgtagctactgtttttaatg

SEQ ID NO: 182447 - DNA, 25 bp, Probe Sequence
cgattttacatgatattttgatagt

SEQ ID NO: 182448 - DNA, 25 bp, Probe Sequence
cttttattgcagatgtctttagagg

SEQ ID NO: 182449 - DNA, 25 bp, Probe Sequence
cttttctttacactcttctgaggga

SEQ ID NO: 182450 - DNA, 25 bp, Probe Sequence
ctttgttttcctcctatcaaggcag

SEQ ID NO: 182451 - DNA, 25 bp, Probe Sequence
ctttgtttcctgggtactgggcatg

SEQ ID NO: 182452 - DNA, 25 bp, Probe Sequence
ctttgtttcctgggtactgggcatg

SEQ ID NO: 182453 - DNA, 25 bp, Probe Sequence
ctttgttacctggaggactaaatgt

SEQ ID NO: 182454 - DNA, 25 bp, Probe Sequence
ctttccaaactggggaacaaatgat

SEQ ID NO: 182455 - DNA, 25 bp, Probe Sequence
ctttccaaccattggtcaccagaaa

SEQ ID NO: 182456 - DNA, 25 bp, Probe Sequence
ctttctcaactcagagtccaaccac

SEQ ID NO: 182457 - DNA, 25 bp, Probe Sequence
ctttgcagaccgagattgccaacct

SEQ ID NO: 182458 - DNA, 25 bp, Probe Sequence
ctttgggttgcagactgccaacttc

SEQ ID NO: 182459 - DNA, 25 bp, Probe Sequence
ctattagtttgctcctcactattgt

SEQ ID NO: 182460 - DNA, 25 bp, Probe Sequence
ctttcagatttgagtcttcattgtg

SEQ ID NO: 182461 - DNA, 25 bp, Probe Sequence
ctttcgaagtgtggtgtcttttata

SEQ ID NO: 182462 - DNA, 25 bp, Probe Sequence
ctttgcagatgatgtgggttttttt

SEQ ID NO: 182463 - DNA, 25 bp, Probe Sequence
ctttgatttggcaggttttcttcta

SEQ ID NO: 182464 - DNA, 25 bp, Probe Sequence
ctttcatattgggcagtggttcact

SEQ ID NO: 182465 - DNA, 25 bp, Probe Sequence
ctttcatcacttgtgggtttctctg

SEQ ID NO: 182466 - DNA, 25 bp, Probe Sequence
cttttcattctggatgggcttggcc

SEQ ID NO: 182467 - DNA, 25 bp, Probe Sequence
ctttatcgctgtgaggtcgttgctc

SEQ ID NO: 182468 - DNA, 25 bp, Probe Sequence
ctttatgtgcttgagtctcttccat

SEQ ID NO: 182469 - DNA, 25 bp, Probe Sequence
cttattgggtgccatttgatattca

SEQ ID NO: 182470 - DNA, 25 bp, Probe Sequence
cttatagggtacatatgttgtcata

SEQ ID NO: 182471 - DNA, 25 bp, Probe Sequence
cttttggtttgcaatattgatggat

SEQ ID NO: 182472 - DNA, 25 bp, Probe Sequence
ctttaccttctgccaaatgcagaga

SEQ ID NO: 182473 - DNA, 25 bp, Probe Sequence
ctttatccatctgcctcagacagtg

SEQ ID NO: 182474 - DNA, 25 bp, Probe Sequence
ctttgacacctctgccaacagatgc

SEQ ID NO: 182475 - DNA, 25 bp, Probe Sequence
ctatgtgatcacaaacccagacctc

SEQ ID NO: 182476 - DNA, 25 bp, Probe Sequence
ctttcacacaatacttcagacacac

SEQ ID NO: 182477 - DNA, 25 bp, Probe Sequence
cttttacaattcaagcagcagcagg

SEQ ID NO: 182478 - DNA, 25 bp, Probe Sequence
cttttacagataaagctgctaactc

SEQ ID NO: 182479 - DNA, 25 bp, Probe Sequence
ctttctccagtccacgtgtagactt

SEQ ID NO: 182480 - DNA, 25 bp, Probe Sequence
cttttgctggtgcacgtgtgtgcgc

SEQ ID NO: 182481 - DNA, 25 bp, Probe Sequence
ctttgctctggtggcactgtgggag

SEQ ID NO: 182482 - DNA, 25 bp, Probe Sequence
ctttgaccggaactatgggaccaag

SEQ ID NO: 182483 - DNA, 25 bp, Probe Sequence
ctttcccggagttcaggtgactgag

SEQ ID NO: 182484 - DNA, 25 bp, Probe Sequence
ctttccctaccatcgttgagagaga

SEQ ID NO: 182485 - DNA, 25 bp, Probe Sequence
ctaggccgacccgggttgagaggag

SEQ ID NO: 182486 - DNA, 25 bp, Probe Sequence
ctttgacaacccatgggctggtgga

SEQ ID NO: 182487 - DNA, 25 bp, Probe Sequence
ctttgacaacctgcagtcgggtgag

SEQ ID NO: 182488 - DNA, 25 bp, Probe Sequence
ctttaggattcagcaccatggcgga

SEQ ID NO: 182489 - DNA, 25 bp, Probe Sequence
ctttagagcccagcaaatagcgtga

SEQ ID NO: 182490 - DNA, 25 bp, Probe Sequence
ctttacatcccacagaggaaacaga

SEQ ID NO: 182491 - DNA, 25 bp, Probe Sequence
ctttacacaggcctcggaaaacaat

SEQ ID NO: 182492 - DNA, 25 bp, Probe Sequence
ctttatacagccccgcagaaaacgc

SEQ ID NO: 182493 - DNA, 25 bp, Probe Sequence
ctttatacagccccgcagaaaacgc

SEQ ID NO: 182494 - DNA, 25 bp, Probe Sequence
cttttacagacttgccgttaacagc

SEQ ID NO: 182495 - DNA, 25 bp, Probe Sequence
ctttgccaaagctctgggtgacacg

SEQ ID NO: 182496 - DNA, 25 bp, Probe Sequence
ctcttgataaaggaaagggcaccat

SEQ ID NO: 182497 - DNA, 25 bp, Probe Sequence
ctcttgaccaacttacttggaacat

SEQ ID NO: 182498 - DNA, 25 bp, Probe Sequence
cttttctcagccttatagtaggaat

SEQ ID NO: 182499 - DNA, 25 bp, Probe Sequence
ctatgaggtaccttgctgtgtagga

SEQ ID NO: 182500 - DNA, 25 bp, Probe Sequence
ctatgagccatagcctatttaggtg

SEQ ID NO: 182501 - DNA, 25 bp, Probe Sequence
ctttatcatgaatgcttttagtgtg

SEQ ID NO: 182502 - DNA, 25 bp, Probe Sequence
ctttatctgagctgcttgtcagttt

SEQ ID NO: 182503 - DNA, 25 bp, Probe Sequence
ctttttgcgattggcttagtcagct

SEQ ID NO: 182504 - DNA, 25 bp, Probe Sequence
cttttacaccttctagtagctcaag

SEQ ID NO: 182505 - DNA, 25 bp, Probe Sequence
cttttgtcaacttcctgattatgta

SEQ ID NO: 182506 - DNA, 25 bp, Probe Sequence
ctttcttccctgagtgtatatgttc

SEQ ID NO: 182507 - DNA, 25 bp, Probe Sequence
ctttcttgcctctatttcttagttg

SEQ ID NO: 182508 - DNA, 25 bp, Probe Sequence
ctttttgccagccatactctttggc

SEQ ID NO: 182509 - DNA, 25 bp, Probe Sequence
ctttttgcccacactgctttggata

SEQ ID NO: 182510 - DNA, 25 bp, Probe Sequence
ctttctctccccaactaaaggatat

SEQ ID NO: 182511 - DNA, 25 bp, Probe Sequence
cttttgtcatcccacactcaaagtt

SEQ ID NO: 182512 - DNA, 25 bp, Probe Sequence
ctttcgtatctcctcaggcaaaagt

SEQ ID NO: 182513 - DNA, 25 bp, Probe Sequence
cttatctgtatcggtcagggtccag

SEQ ID NO: 182514 - DNA, 25 bp, Probe Sequence
ctttctgtatcccatggtggtcaaa

SEQ ID NO: 182515 - DNA, 25 bp, Probe Sequence
ctatgtgctcccagaggtttccaag

SEQ ID NO: 182516 - DNA, 25 bp, Probe Sequence
gctagggaccaaagaaaactaagct

SEQ ID NO: 182517 - DNA, 25 bp, Probe Sequence
ctcagggacctaagccacgttaagt

SEQ ID NO: 182518 - DNA, 25 bp, Probe Sequence
ctcgggaggctaaggcaggaaaatt

SEQ ID NO: 182519 - DNA, 25 bp, Probe Sequence
ctttggacctcatgccggaaaattg

SEQ ID NO: 182520 - DNA, 25 bp, Probe Sequence
ctttggacctcatgccggaaaattg

SEQ ID NO: 182521 - DNA, 25 bp, Probe Sequence
ctttggtctgaatgactgggaagat

SEQ ID NO: 182522 - DNA, 25 bp, Probe Sequence
cttatattgggatgacctgaagaga

SEQ ID NO: 182523 - DNA, 25 bp, Probe Sequence
cttatattgttctgactgctgacaa

SEQ ID NO: 182524 - DNA, 25 bp, Probe Sequence
cttattttcatctcaccatgcacag

SEQ ID NO: 182525 - DNA, 25 bp, Probe Sequence
cttttttcacttctcatgatagctg

SEQ ID NO: 182526 - DNA, 25 bp, Probe Sequence
ctttaattcacttgttcagatcagt

SEQ ID NO: 182527 - DNA, 25 bp, Probe Sequence
cttattttcagcacttacatcattt

SEQ ID NO: 182528 - DNA, 25 bp, Probe Sequence
ctttcttttgctctcttcagcaatt

SEQ ID NO: 182529 - DNA, 25 bp, Probe Sequence
cttttaatttacttgtacaattcat

SEQ ID NO: 182530 - DNA, 25 bp, Probe Sequence
ctatttaaccctttgtatatttctg

SEQ ID NO: 182531 - DNA, 25 bp, Probe Sequence
ctttttaccctttgctgatgataaa

SEQ ID NO: 182532 - DNA, 25 bp, Probe Sequence
cttatatccccagttcctagattaa

SEQ ID NO: 182533 - DNA, 25 bp, Probe Sequence
ctttttgcccgttgaccagataaat

SEQ ID NO: 182534 - DNA, 25 bp, Probe Sequence
cttttctccccttaccataatggat

SEQ ID NO: 182535 - DNA, 25 bp, Probe Sequence
cttttctgtcatcctaacccaaggc

SEQ ID NO: 182536 - DNA, 25 bp, Probe Sequence
ctttcatctattctttccctagagg

SEQ ID NO: 182537 - DNA, 25 bp, Probe Sequence
ctttatcttttaagccaccagagag

SEQ ID NO: 182538 - DNA, 25 bp, Probe Sequence
ctttgtgttttcatctcctaaaagt

SEQ ID NO: 182539 - DNA, 25 bp, Probe Sequence
ctttggtctttctgtccttagacta

SEQ ID NO: 182540 - DNA, 25 bp, Probe Sequence
ctttggccttttttctttgagtgct

SEQ ID NO: 182541 - DNA, 25 bp, Probe Sequence
cttttacttgttatgtgttattgat

SEQ ID NO: 182542 - DNA, 25 bp, Probe Sequence
cttttaattgaatcagtggtgtctg

SEQ ID NO: 182543 - DNA, 25 bp, Probe Sequence
cttttggtgtgataagtatgttcat

SEQ ID NO: 182544 - DNA, 25 bp, Probe Sequence
ctttctgggatgtttgggacttcac

SEQ ID NO: 182545 - DNA, 25 bp, Probe Sequence
ctttttggattcagggctcctcaca

SEQ ID NO: 182546 - DNA, 25 bp, Probe Sequence
cttttattgtatatgggttccttgt

SEQ ID NO: 182547 - DNA, 25 bp, Probe Sequence
ctttctgttgtcattgctgttgtcc

SEQ ID NO: 182548 - DNA, 25 bp, Probe Sequence
ctttcttctgaggattgcagaggat

SEQ ID NO: 182549 - DNA, 25 bp, Probe Sequence
cttttccgaggatgagattgccctc

SEQ ID NO: 182550 - DNA, 25 bp, Probe Sequence
ctttcttcgtggtaggttctagcac

SEQ ID NO: 182551 - DNA, 25 bp, Probe Sequence
cttttctccgaatttgtacttgctc

SEQ ID NO: 182552 - DNA, 25 bp, Probe Sequence
ctttctatcacgttattgtcactac

SEQ ID NO: 182553 - DNA, 25 bp, Probe Sequence
ctttcttagttatttgctccttgca

SEQ ID NO: 182554 - DNA, 25 bp, Probe Sequence
ctttgcttttatcactacctggcac

SEQ ID NO: 182555 - DNA, 25 bp, Probe Sequence
ctttttgtttatttaatgctgtggc

SEQ ID NO: 182556 - DNA, 25 bp, Probe Sequence
ctttgtctgttcctaagacacttgg

SEQ ID NO: 182557 - DNA, 25 bp, Probe Sequence
ctttgcttatttgaagaatcagtgg

SEQ ID NO: 182558 - DNA, 25 bp, Probe Sequence
ctttcccatcttgcaaactaaggtc

SEQ ID NO: 182559 - DNA, 25 bp, Probe Sequence
ctttccccctctgaatctatgggat

SEQ ID NO: 182560 - DNA, 25 bp, Probe Sequence
ctttcccccctgaaatgtatagaat

SEQ ID NO: 182561 - DNA, 25 bp, Probe Sequence
ctttccagcccctttatatattgga

SEQ ID NO: 182562 - DNA, 25 bp, Probe Sequence
ctttcaacccctttgagctgactaa

SEQ ID NO: 182563 - DNA, 25 bp, Probe Sequence
ctttgagacccctttgggtgctaag

SEQ ID NO: 182564 - DNA, 25 bp, Probe Sequence
ctttgagcccattcttctgggtgtg

SEQ ID NO: 182565 - DNA, 25 bp, Probe Sequence
ctttaccacatcttgggtgatgtat

SEQ ID NO: 182566 - DNA, 25 bp, Probe Sequence
ctttatcactctgcattggtgaatt

SEQ ID NO: 182567 - DNA, 25 bp, Probe Sequence
ctttgatagccattcagtgaaaatt

SEQ ID NO: 182568 - DNA, 25 bp, Probe Sequence
ctttgtcatccatgcgtgcacatat

SEQ ID NO: 182569 - DNA, 25 bp, Probe Sequence
ctttggcatctatggctccaagaaa

SEQ ID NO: 182570 - DNA, 25 bp, Probe Sequence
ctttgtgcagcttcgaggacaggaa

SEQ ID NO: 182571 - DNA, 25 bp, Probe Sequence
cttttctgctgaagctagagccgga

SEQ ID NO: 182572 - DNA, 25 bp, Probe Sequence
cttttgcttggggatgtgcttggag

SEQ ID NO: 182573 - DNA, 25 bp, Probe Sequence
cttttgttgaggaagtcaggtatat

SEQ ID NO: 182574 - DNA, 25 bp, Probe Sequence
cttttcctacaaagcatcgtgtgag

SEQ ID NO: 182575 - DNA, 25 bp, Probe Sequence
ctttctcggagcaaagtgacttgag

SEQ ID NO: 182576 - DNA, 25 bp, Probe Sequence
ctttttcgagacctgtgacctggac

SEQ ID NO: 182577 - DNA, 25 bp, Probe Sequence
ctttttatgaagtgctgacaagaga

SEQ ID NO: 182578 - DNA, 25 bp, Probe Sequence
ctttccattgaaataggccatgaag

SEQ ID NO: 182579 - DNA, 25 bp, Probe Sequence
cttttgcattactatactactgaga

SEQ ID NO: 182580 - DNA, 25 bp, Probe Sequence
cttttgcctaatacagctcagctaa

SEQ ID NO: 182581 - DNA, 25 bp, Probe Sequence
ctatgttgcctgcaatagggctctt

SEQ ID NO: 182582 - DNA, 25 bp, Probe Sequence
ctatgtttctggcttgggctttgga

SEQ ID NO: 182583 - DNA, 25 bp, Probe Sequence
ctttataccagctctgaggtttaaa

SEQ ID NO: 182584 - DNA, 25 bp, Probe Sequence
cttttggccactgccagtgtcctaa

SEQ ID NO: 182585 - DNA, 25 bp, Probe Sequence
cttttggcgcccacagtgatgatgt

SEQ ID NO: 182586 - DNA, 25 bp, Probe Sequence
ctttctgactcacatacagtagatc

SEQ ID NO: 182587 - DNA, 25 bp, Probe Sequence
cttttgagacattagccagtagctc

SEQ ID NO: 182588 - DNA, 25 bp, Probe Sequence
cttttgaattgatgccgtatggtaa

SEQ ID NO: 182589 - DNA, 25 bp, Probe Sequence
ctttctgtgttgaagcactgttggt

SEQ ID NO: 182590 - DNA, 25 bp, Probe Sequence
cttttgagcttgaacgcctgcgtgt

SEQ ID NO: 182591 - DNA, 25 bp, Probe Sequence
ctaggtagtggagcgccgctgctta

SEQ ID NO: 182592 - DNA, 25 bp, Probe Sequence
ctagggatgcggtccattcccattg

SEQ ID NO: 182593 - DNA, 25 bp, Probe Sequence
ctagggaggccactgtctcctaagc

SEQ ID NO: 182594 - DNA, 25 bp, Probe Sequence
ctagggaggccactgtctcctaagc

SEQ ID NO: 182595 - DNA, 25 bp, Probe Sequence
ctaatagggcctctgcctctaaaat

SEQ ID NO: 182596 - DNA, 25 bp, Probe Sequence
ctttggggcttactattcaaaagag

SEQ ID NO: 182597 - DNA, 25 bp, Probe Sequence
ctttaaggcagaggctggtcgaaaa

SEQ ID NO: 182598 - DNA, 25 bp, Probe Sequence
ctttaagcaggaccatcggcaggaa

SEQ ID NO: 182599 - DNA, 25 bp, Probe Sequence
cttttcagcaggttccagtgcctga

SEQ ID NO: 182600 - DNA, 25 bp, Probe Sequence
cttttccaggcctaactgctctggg

SEQ ID NO: 182601 - DNA, 25 bp, Probe Sequence
cttttcctggcactcaaattcatga

SEQ ID NO: 182602 - DNA, 25 bp, Probe Sequence
cttttcctccagcctaaactgacat

SEQ ID NO: 182603 - DNA, 25 bp, Probe Sequence
cttttcactccagcctgggtgacag

SEQ ID NO: 182604 - DNA, 25 bp, Probe Sequence
ctttcacaccctgtcgggagaatgt

SEQ ID NO: 182605 - DNA, 25 bp, Probe Sequence
ctttccctctaggtgtgtgggaatg

SEQ ID NO: 182606 - DNA, 25 bp, Probe Sequence
cttttctcagcatggttgttagaag

SEQ ID NO: 182607 - DNA, 25 bp, Probe Sequence
ctttctctaaagcttgtttgatgaa

SEQ ID NO: 182608 - DNA, 25 bp, Probe Sequence
ctttttgagatacgtttattgtatt

SEQ ID NO: 182609 - DNA, 25 bp, Probe Sequence
ctttttggattggattctatttcat

SEQ ID NO: 182610 - DNA, 25 bp, Probe Sequence
ctttcttctgttcaagttttctgta

SEQ ID NO: 182611 - DNA, 25 bp, Probe Sequence
ctatctttgcgcatgggttgttttt

SEQ ID NO: 182612 - DNA, 25 bp, Probe Sequence
cttttcatctgcaaagccttttttt

SEQ ID NO: 182613 - DNA, 25 bp, Probe Sequence
cttttattcagcatcctttatctgt

SEQ ID NO: 182614 - DNA, 25 bp, Probe Sequence
ctttctttgagctcctatttctctg

SEQ ID NO: 182615 - DNA, 25 bp, Probe Sequence
ctttttttcctggatatctgtgtat

SEQ ID NO: 182616 - DNA, 25 bp, Probe Sequence
ctttttcttcctgttcattatgctt

SEQ ID NO: 182617 - DNA, 25 bp, Probe Sequence
cttttcttctcttaatgtcatttct

SEQ ID NO: 182618 - DNA, 25 bp, Probe Sequence
ctttttgtcttattgatggatttga

SEQ ID NO: 182619 - DNA, 25 bp, Probe Sequence
ctttgatcttcactatatattgggt

SEQ ID NO: 182620 - DNA, 25 bp, Probe Sequence
ctttgatcttcactatatattgggt

SEQ ID NO: 182621 - DNA, 25 bp, Probe Sequence
ctttatctgtgacttcatgctctga

SEQ ID NO: 182622 - DNA, 25 bp, Probe Sequence
ctttccgttgcattcatgatgcaaa

SEQ ID NO: 182623 - DNA, 25 bp, Probe Sequence
ctttctctttaagtggataacttat

SEQ ID NO: 182624 - DNA, 25 bp, Probe Sequence
ctttcctttcacgttgattattcct

SEQ ID NO: 182625 - DNA, 25 bp, Probe Sequence
ctttctcagtgtccgtggcattttt

SEQ ID NO: 182626 - DNA, 25 bp, Probe Sequence
ctttcacgtgtctgggatggggtca

SEQ ID NO: 182627 - DNA, 25 bp, Probe Sequence
ctttcacttctcggggatctggagg

SEQ ID NO: 182628 - DNA, 25 bp, Probe Sequence
ctttcatttgttgggatggcattag

SEQ ID NO: 182629 - DNA, 25 bp, Probe Sequence
cttttattatttggatgtatatcag

SEQ ID NO: 182630 - DNA, 25 bp, Probe Sequence
cttttttattttggtctccaagatg

SEQ ID NO: 182631 - DNA, 25 bp, Probe Sequence
cttttcttatgtgtttcttcaagtc

SEQ ID NO: 182632 - DNA, 25 bp, Probe Sequence
cttttttgagtcattgacttcattt

SEQ ID NO: 182633 - DNA, 25 bp, Probe Sequence
ctattttgaggatgttgagattatt

SEQ ID NO: 182634 - DNA, 25 bp, Probe Sequence
ctttcttagtgcctgtgtggatttt

SEQ ID NO: 182635 - DNA, 25 bp, Probe Sequence
ctttctctgtgtctggctagtattg

SEQ ID NO: 182636 - DNA, 25 bp, Probe Sequence
ctttatcattctatgttattattat

SEQ ID NO: 182637 - DNA, 25 bp, Probe Sequence
ctttattcttctactctgaaaaatc

SEQ ID NO: 182638 - DNA, 25 bp, Probe Sequence
cttttctcttctacattgacacaca

SEQ ID NO: 182639 - DNA, 25 bp, Probe Sequence
ctttactgattctgcctacaccagc

SEQ ID NO: 182640 - DNA, 25 bp, Probe Sequence
ctggctactgatacaccttaacaag

SEQ ID NO: 182641 - DNA, 25 bp, Probe Sequence
ctggctgaccccggattaaaagcct

SEQ ID NO: 182642 - DNA, 25 bp, Probe Sequence
cgggtggcccggatcatcaatggga

SEQ ID NO: 182643 - DNA, 25 bp, Probe Sequence
cggagttttttacctcagtggtgca

SEQ ID NO: 182644 - DNA, 25 bp, Probe Sequence
ctagtgttttttaccatccgtcatt

SEQ ID NO: 182645 - DNA, 25 bp, Probe Sequence
ctattgggttaatttctccctatgt

SEQ ID NO: 182646 - DNA, 25 bp, Probe Sequence
ctttgggaggtgatgttcccattgt

SEQ ID NO: 182647 - DNA, 25 bp, Probe Sequence
ctttgggaggcgatgtcgggcatat

SEQ ID NO: 182648 - DNA, 25 bp, Probe Sequence
ctttgagtgaccgtctgtgcaggcc

SEQ ID NO: 182649 - DNA, 25 bp, Probe Sequence
ctttggagaactcctcatgcaccct

SEQ ID NO: 182650 - DNA, 25 bp, Probe Sequence
ctttgtgaataccctatctgactcc

SEQ ID NO: 182651 - DNA, 25 bp, Probe Sequence
ctttgtgacaggccgcaatgtccgc

SEQ ID NO: 182652 - DNA, 25 bp, Probe Sequence
ctatgttgacagcgtcttgctgggc

SEQ ID NO: 182653 - DNA, 25 bp, Probe Sequence
cttttagaagacatgtgctgggcac

SEQ ID NO: 182654 - DNA, 25 bp, Probe Sequence
ctttggaaaagttgcatgagtggac

SEQ ID NO: 182655 - DNA, 25 bp, Probe Sequence
ctttgtgaaatagtggttgtggaac

SEQ ID NO: 182656 - DNA, 25 bp, Probe Sequence
cttttatgacagggtgttgcagtaa

SEQ ID NO: 182657 - DNA, 25 bp, Probe Sequence
ctttttgaagaaggtctcatacaga

SEQ ID NO: 182658 - DNA, 25 bp, Probe Sequence
ctttcattaaaggcttctctctcac

SEQ ID NO: 182659 - DNA, 25 bp, Probe Sequence
ctattcttaataaaactcactcact

SEQ ID NO: 182660 - DNA, 25 bp, Probe Sequence
ctttcttatcgagatagtcactccc

SEQ ID NO: 182661 - DNA, 25 bp, Probe Sequence
ctttgattacaaggagcagctcccc

SEQ ID NO: 182662 - DNA, 25 bp, Probe Sequence
ctttgagctcaatgggcagctgcgg

SEQ ID NO: 182663 - DNA, 25 bp, Probe Sequence
ctttgagtcaaggggcttcactgcc

SEQ ID NO: 182664 - DNA, 25 bp, Probe Sequence
ctttgaggaacatggtgatctcacc

SEQ ID NO: 182665 - DNA, 25 bp, Probe Sequence
ctttgagaaagccgcaggagcccgc

SEQ ID NO: 182666 - DNA, 25 bp, Probe Sequence
ctatcagaaccagggccagtggccg

SEQ ID NO: 182667 - DNA, 25 bp, Probe Sequence
ctacaagagtcggatccagtccctc

SEQ ID NO: 182668 - DNA, 25 bp, Probe Sequence
ctacagaagttgtgcgcgtgctttc

SEQ ID NO: 182669 - DNA, 25 bp, Probe Sequence
ctacgtgactggttgcgcgtagttg

SEQ ID NO: 182670 - DNA, 25 bp, Probe Sequence
ctacgctacctgtgcgccataagga

SEQ ID NO: 182671 - DNA, 25 bp, Probe Sequence
ctatgggaactatggctatgctaat

SEQ ID NO: 182672 - DNA, 25 bp, Probe Sequence
ctaggtgacctgaaagctttaattt

SEQ ID NO: 182673 - DNA, 25 bp, Probe Sequence
ctcggtgcccttcacggaaatgaag

SEQ ID NO: 182674 - DNA, 25 bp, Probe Sequence
ctaggagctcctattgggagacatg

SEQ ID NO: 182675 - DNA, 25 bp, Probe Sequence
ctagggggtggaagcggatgagtaa

SEQ ID NO: 182676 - DNA, 25 bp, Probe Sequence
ctagatgggatggcggccgggcaga

SEQ ID NO: 182677 - DNA, 25 bp, Probe Sequence
ctaggggatgaggggcttcctgggt

SEQ ID NO: 182678 - DNA, 25 bp, Probe Sequence
ctagtgagggactgtgttgactgac

SEQ ID NO: 182679 - DNA, 25 bp, Probe Sequence
ctaggaaggaatggtggggtggcgt

SEQ ID NO: 182680 - DNA, 25 bp, Probe Sequence
ctttgaagagcatggagggggagcc

SEQ ID NO: 182681 - DNA, 25 bp, Probe Sequence
ctttgatgaggccctcaggggagag

SEQ ID NO: 182682 - DNA, 25 bp, Probe Sequence
ctttgcttgttgctgggcggatgat

SEQ ID NO: 182683 - DNA, 25 bp, Probe Sequence
ctttgctggctgtggtgatggggat

SEQ ID NO: 182684 - DNA, 25 bp, Probe Sequence
ctttgctggctgtggtgatggggat

SEQ ID NO: 182685 - DNA, 25 bp, Probe Sequence
ctttcatgttgtgggttctgggagc

SEQ ID NO: 182686 - DNA, 25 bp, Probe Sequence
ctttctattttattatctgggacat

SEQ ID NO: 182687 - DNA, 25 bp, Probe Sequence
ctttctatcatcttttgttgtgtaa

SEQ ID NO: 182688 - DNA, 25 bp, Probe Sequence
ctttctacctactttggtgatcaaa

SEQ ID NO: 182689 - DNA, 25 bp, Probe Sequence
cttttagctcctctgtggtgaatta

SEQ ID NO: 182690 - DNA, 25 bp, Probe Sequence
ctttgtactccagcctgggcaacga

SEQ ID NO: 182691 - DNA, 25 bp, Probe Sequence
ctttgtactccagcctgggcaacga

SEQ ID NO: 182692 - DNA, 25 bp, Probe Sequence
ctttgtaccgcctcagtggagactg

SEQ ID NO: 182693 - DNA, 25 bp, Probe Sequence
ctttgtgagccgtgtcgtatgacct

SEQ ID NO: 182694 - DNA, 25 bp, Probe Sequence
ctttggatccagcacttatcagacc

SEQ ID NO: 182695 - DNA, 25 bp, Probe Sequence
ctttggatccagcacttatcagacc

SEQ ID NO: 182696 - DNA, 25 bp, Probe Sequence
ctttgtgtggagctctctggacacc

SEQ ID NO: 182697 - DNA, 25 bp, Probe Sequence
ctttgctgtgaggctgtcctgtaca

SEQ ID NO: 182698 - DNA, 25 bp, Probe Sequence
ctttcttggacttcctgtggcacaa

SEQ ID NO: 182699 - DNA, 25 bp, Probe Sequence
ctttgttcagacgattaggtgccta

SEQ ID NO: 182700 - DNA, 25 bp, Probe Sequence
ctttgcttacaattgtgacttccta

SEQ ID NO: 182701 - DNA, 25 bp, Probe Sequence
ctttctgcaaattattcagcctcca

SEQ ID NO: 182702 - DNA, 25 bp, Probe Sequence
ctttcagctgaattatattggtcca

SEQ ID NO: 182703 - DNA, 25 bp, Probe Sequence
ctttcctgatcactatgcattttaa

SEQ ID NO: 182704 - DNA, 25 bp, Probe Sequence
ctattcagagtactgtttttagatg

SEQ ID NO: 182705 - DNA, 25 bp, Probe Sequence
ctattcgggagtctgagtatagaga

SEQ ID NO: 182706 - DNA, 25 bp, Probe Sequence
ctagttgggaggctgagatgggaga

SEQ ID NO: 182707 - DNA, 25 bp, Probe Sequence
ctatcttggtaacacagcagcggga

SEQ ID NO: 182708 - DNA, 25 bp, Probe Sequence
ctttgtgttcagcccagacacaggt

SEQ ID NO: 182709 - DNA, 25 bp, Probe Sequence
cttttattcatgtccaccagctagt

SEQ ID NO: 182710 - DNA, 25 bp, Probe Sequence
cttttatgatgtgcctacatgcata

SEQ ID NO: 182711 - DNA, 25 bp, Probe Sequence
ctatcttctaggatctaagccacta

SEQ ID NO: 182712 - DNA, 25 bp, Probe Sequence
ctattctcatgaactttgaacccat

SEQ ID NO: 182713 - DNA, 25 bp, Probe Sequence
ctttcattgagccttttatcctctg

SEQ ID NO: 182714 - DNA, 25 bp, Probe Sequence
ctttcatgtcaggcgttaaactgtc

SEQ ID NO: 182715 - DNA, 25 bp, Probe Sequence
ctttctcacccagttaatcagtctc

SEQ ID NO: 182716 - DNA, 25 bp, Probe Sequence
ctatctccagtcattaaatcagtgc

SEQ ID NO: 182717 - DNA, 25 bp, Probe Sequence
gctaaggttcctgaaagagtccctc

SEQ ID NO: 182718 - DNA, 25 bp, Probe Sequence
ctggggtccgtgggcaagttgccca

SEQ ID NO: 182719 - DNA, 25 bp, Probe Sequence
cgggaccggataacacatttcacca

SEQ ID NO: 182720 - DNA, 25 bp, Probe Sequence
ctccgaccggtgagtcatttgcatc

SEQ ID NO: 182721 - DNA, 25 bp, Probe Sequence
ctcccgggttcaagtgattttcctg

SEQ ID NO: 182722 - DNA, 25 bp, Probe Sequence
ctttgggtattctgagattttctct

SEQ ID NO: 182723 - DNA, 25 bp, Probe Sequence
ctttcagcctttttatttcttactg

SEQ ID NO: 182724 - DNA, 25 bp, Probe Sequence
ctttatccgtatgtctttgttagtg

SEQ ID NO: 182725 - DNA, 25 bp, Probe Sequence
ctatttgccaatacctttttctagg

SEQ ID NO: 182726 - DNA, 25 bp, Probe Sequence
ctttatcccatcgctttgattattg

SEQ ID NO: 182727 - DNA, 25 bp, Probe Sequence
ctttaccgagggatgctagtgagtc

SEQ ID NO: 182728 - DNA, 25 bp, Probe Sequence
ctttccccacggttatatgtgtgtc

SEQ ID NO: 182729 - DNA, 25 bp, Probe Sequence
ctttcctccccaggaatatgtgttt

SEQ ID NO: 182730 - DNA, 25 bp, Probe Sequence
ctactaccaccaaggagaatagttt

SEQ ID NO: 182731 - DNA, 25 bp, Probe Sequence
ctagcaactccctagtggcgttttt

SEQ ID NO: 182732 - DNA, 25 bp, Probe Sequence
ctagatcactcactgttgtagcttc

SEQ ID NO: 182733 - DNA, 25 bp, Probe Sequence
ctttgggacgatagtgcagctttgg

SEQ ID NO: 182734 - DNA, 25 bp, Probe Sequence
ctttgaggattgtacaactttgtaa

SEQ ID NO: 182735 - DNA, 25 bp, Probe Sequence
ctttgagtgatcctccaacttcatt

SEQ ID NO: 182736 - DNA, 25 bp, Probe Sequence
ctttgagtgcctttgccagttattt

SEQ ID NO: 182737 - DNA, 25 bp, Probe Sequence
ctttcactgacaattccaacattct

SEQ ID NO: 182738 - DNA, 25 bp, Probe Sequence
ctttctctgacactccatcataaag

SEQ ID NO: 182739 - DNA, 25 bp, Probe Sequence
ctttcattgattacttcatcacaga

SEQ ID NO: 182740 - DNA, 25 bp, Probe Sequence
ctttcactcactagctctcatagga

SEQ ID NO: 182741 - DNA, 25 bp, Probe Sequence
ctattcattcctccattgctaaaca

SEQ ID NO: 182742 - DNA, 25 bp, Probe Sequence
ctagtgtcttcaaatcctcaccaac

SEQ ID NO: 182743 - DNA, 25 bp, Probe Sequence
ctaggagggatgaccccactcagct

SEQ ID NO: 182744 - DNA, 25 bp, Probe Sequence
ctatgggggttctctgcaggagctg

SEQ ID NO: 182745 - DNA, 25 bp, Probe Sequence
ctttggggattcacgtggtggcggt

SEQ ID NO: 182746 - DNA, 25 bp, Probe Sequence
ctttagggattgagcctctggatgg

SEQ ID NO: 182747 - DNA, 25 bp, Probe Sequence
ctttggttgtggcatgacatctggg

SEQ ID NO: 182748 - DNA, 25 bp, Probe Sequence
ctttgcggaggtcaatgccgacgtg

SEQ ID NO: 182749 - DNA, 25 bp, Probe Sequence
ctatcggggactacaatggccacgt

SEQ ID NO: 182750 - DNA, 25 bp, Probe Sequence
cgaccggtgagtcatttgcatcact

SEQ ID NO: 182751 - DNA, 25 bp, Probe Sequence
ctatgaccgggacatcttgaccatt

SEQ ID NO: 182752 - DNA, 25 bp, Probe Sequence
ctatctcctggctagttaccactag

SEQ ID NO: 182753 - DNA, 25 bp, Probe Sequence
ctagcctctgaatgttccaaataaa

SEQ ID NO: 182754 - DNA, 25 bp, Probe Sequence
ctatccaagcactgtgccatgtcag

SEQ ID NO: 182755 - DNA, 25 bp, Probe Sequence
ctttcagcagcctccatgatgtagt

SEQ ID NO: 182756 - DNA, 25 bp, Probe Sequence
ctttcaagtgcgttctttagaccaa

SEQ ID NO: 182757 - DNA, 25 bp, Probe Sequence
ctttcaaggagctcacttggcctgc

SEQ ID NO: 182758 - DNA, 25 bp, Probe Sequence
ctttcgatggtagtcgccgtgccta

SEQ ID NO: 182759 - DNA, 25 bp, Probe Sequence
ctctaccatgtgagtcccagagact

SEQ ID NO: 182760 - DNA, 25 bp, Probe Sequence
ctataattgataactccctgagcct

SEQ ID NO: 182761 - DNA, 25 bp, Probe Sequence
ctatgattgtgtatgtgccgctacc

SEQ ID NO: 182762 - DNA, 25 bp, Probe Sequence
ctatgattgtgtatgtgccgctacc

SEQ ID NO: 182763 - DNA, 25 bp, Probe Sequence
ctatgtcggtataatggcccgcctg

SEQ ID NO: 182764 - DNA, 25 bp, Probe Sequence
ctagagcttggctgggtctaggctg

SEQ ID NO: 182765 - DNA, 25 bp, Probe Sequence
ctaaggtggaagccgcctaatgtct

SEQ ID NO: 182766 - DNA, 25 bp, Probe Sequence
ctatagtggcgcacaagcgctctgc

SEQ ID NO: 182767 - DNA, 25 bp, Probe Sequence
ctaccggccatttagatgactgcag

SEQ ID NO: 182768 - DNA, 25 bp, Probe Sequence
ctactctgaccctagacaacctggg

SEQ ID NO: 182769 - DNA, 25 bp, Probe Sequence
ctggatatacgttaattatccgggc

SEQ ID NO: 182770 - DNA, 25 bp, Probe Sequence
ctaaaaactgtattgctggccgggc

SEQ ID NO: 182771 - DNA, 25 bp, Probe Sequence
ctaggtaacttattgtggcccagat

SEQ ID NO: 182772 - DNA, 25 bp, Probe Sequence
ctaggtaactcaagtgtcacctcct

SEQ ID NO: 182773 - DNA, 25 bp, Probe Sequence
ctaggaaatgcacaggctccacttc

SEQ ID NO: 182774 - DNA, 25 bp, Probe Sequence
ctaggataatgcccaggttcttgtt

SEQ ID NO: 182775 - DNA, 25 bp, Probe Sequence
ctacgtgaagcggtggctttggacc

SEQ ID NO: 182776 - DNA, 25 bp, Probe Sequence
gctacggaaccgtgagttccgctgc

SEQ ID NO: 182777 - DNA, 25 bp, Probe Sequence
ctacccaacacgctggtatttggcc

SEQ ID NO: 182778 - DNA, 25 bp, Probe Sequence
ctatcctaaactggtttatctccac

SEQ ID NO: 182779 - DNA, 25 bp, Probe Sequence
ctttcatcatgtttctgtttaccca

SEQ ID NO: 182780 - DNA, 25 bp, Probe Sequence
ctttcatcatgtttctgtttaccca

SEQ ID NO: 182781 - DNA, 25 bp, Probe Sequence
ctttacatgagatttgttaacacac

SEQ ID NO: 182782 - DNA, 25 bp, Probe Sequence
ctttagcaaatgtgtcataagtcct

SEQ ID NO: 182783 - DNA, 25 bp, Probe Sequence
ctttagcaccttgtattagtccgtt

SEQ ID NO: 182784 - DNA, 25 bp, Probe Sequence
ctttcaggctcttgttttggttcag

SEQ ID NO: 182785 - DNA, 25 bp, Probe Sequence
ctttaggtctggttgttgcaccatc

SEQ ID NO: 182786 - DNA, 25 bp, Probe Sequence
ctttaggcccgcctctgatgaaatc

SEQ ID NO: 182787 - DNA, 25 bp, Probe Sequence
ctgttaggcctacatcgtggaattt

SEQ ID NO: 182788 - DNA, 25 bp, Probe Sequence
ctttgagaactatattgcggacatt

SEQ ID NO: 182789 - DNA, 25 bp, Probe Sequence
ctttggacacttctggcagcttttt

SEQ ID NO: 182790 - DNA, 25 bp, Probe Sequence
ctcttaaagcaacctgtcagttttc

SEQ ID NO: 182791 - DNA, 25 bp, Probe Sequence
ctttgaaggacccgtatgtttccag

SEQ ID NO: 182792 - DNA, 25 bp, Probe Sequence
ctttagaggacccacatatcattaa

SEQ ID NO: 182793 - DNA, 25 bp, Probe Sequence
ctatccgagggaagaatatgattca

SEQ ID NO: 182794 - DNA, 25 bp, Probe Sequence
ctatcatctagtgcagagaacttgt

SEQ ID NO: 182795 - DNA, 25 bp, Probe Sequence
ctatatagtgtattggatggcttct

SEQ ID NO: 182796 - DNA, 25 bp, Probe Sequence
ctttcatgattgtggtgcacctgat

SEQ ID NO: 182797 - DNA, 25 bp, Probe Sequence
ctttaatgagcatggaacctgagca

SEQ ID NO: 182798 - DNA, 25 bp, Probe Sequence
ctttacacatgcaggaatctccaca

SEQ ID NO: 182799 - DNA, 25 bp, Probe Sequence
ctattacactgcctggaggatagca

SEQ ID NO: 182800 - DNA, 25 bp, Probe Sequence
ctttgccacagactaatggctatga

SEQ ID NO: 182801 - DNA, 25 bp, Probe Sequence
ctttcctcaactacagacttatata

SEQ ID NO: 182802 - DNA, 25 bp, Probe Sequence
ctttctccctctatgacacaaatga

SEQ ID NO: 182803 - DNA, 25 bp, Probe Sequence
ctttagaccttaatgtacataagat

SEQ ID NO: 182804 - DNA, 25 bp, Probe Sequence
ctttagattttttgaagaagcgcat

SEQ ID NO: 182805 - DNA, 25 bp, Probe Sequence
ctatgtacatttaaaaggtagcagc

SEQ ID NO: 182806 - DNA, 25 bp, Probe Sequence
ctttccatttcaacacggttgaaga

SEQ ID NO: 182807 - DNA, 25 bp, Probe Sequence
ctttgtctcttcaccgtgttaacat

SEQ ID NO: 182808 - DNA, 25 bp, Probe Sequence
ctatcggctttcttactggtaaaat

SEQ ID NO: 182809 - DNA, 25 bp, Probe Sequence
ctatggggttactctctaagacatt

SEQ ID NO: 182810 - DNA, 25 bp, Probe Sequence
ctataggattgagcccttaaacata

SEQ ID NO: 182811 - DNA, 25 bp, Probe Sequence
ctttggcattcaggcccctatattt

SEQ ID NO: 182812 - DNA, 25 bp, Probe Sequence
ctttagcttctggtcagcactgatt

SEQ ID NO: 182813 - DNA, 25 bp, Probe Sequence
ctttgcactatgtgatctgcctgtc

SEQ ID NO: 182814 - DNA, 25 bp, Probe Sequence
ctttgatctgtaatgcaccactgtc

SEQ ID NO: 182815 - DNA, 25 bp, Probe Sequence
ctttctcttgatgacgcagctgtca

SEQ ID NO: 182816 - DNA, 25 bp, Probe Sequence
ctttgctccagaaacacagatgtgt

SEQ ID NO: 182817 - DNA, 25 bp, Probe Sequence
ctttgccagcagacaaggcagcctt

SEQ ID NO: 182818 - DNA, 25 bp, Probe Sequence
ctttgcaagaatcagccagccaaca

SEQ ID NO: 182819 - DNA, 25 bp, Probe Sequence
ctagtcaatttctgctgacccacac

SEQ ID NO: 182820 - DNA, 25 bp, Probe Sequence
ctagaacttaagatggccccaaact

SEQ ID NO: 182821 - DNA, 25 bp, Probe Sequence
ctaaggctaaagaggagcagtccta

SEQ ID NO: 182822 - DNA, 25 bp, Probe Sequence
ctatggagccaagatatgtggactc

SEQ ID NO: 182823 - DNA, 25 bp, Probe Sequence
ctatttgccaagccttgctagtcat

SEQ ID NO: 182824 - DNA, 25 bp, Probe Sequence
ctatttgtctgaggttctcaagcta

SEQ ID NO: 182825 - DNA, 25 bp, Probe Sequence
ctatcttttcatcatgtctatagtt

SEQ ID NO: 182826 - DNA, 25 bp, Probe Sequence
ctattcttacttactctacagtgtc

SEQ ID NO: 182827 - DNA, 25 bp, Probe Sequence
ctattttcactagggctgaggggcc

SEQ ID NO: 182828 - DNA, 25 bp, Probe Sequence
ctattttcgtatttgccatggatgg

SEQ ID NO: 182829 - DNA, 25 bp, Probe Sequence
ctttaatatctatggccatgggggc

SEQ ID NO: 182830 - DNA, 25 bp, Probe Sequence
ctttggcaactatggtgctcaggtg

SEQ ID NO: 182831 - DNA, 25 bp, Probe Sequence
ctttgaatacagacgttgctaggaa

SEQ ID NO: 182832 - DNA, 25 bp, Probe Sequence
ctttgaaaagaccgtgctggcgcgt

SEQ ID NO: 182833 - DNA, 25 bp, Probe Sequence
ctttgcaaaaactgtcaggagggac

SEQ ID NO: 182834 - DNA, 25 bp, Probe Sequence
ctttgccggccctgaaagaggaggc

SEQ ID NO: 182835 - DNA, 25 bp, Probe Sequence
ctttccgaccagtgagaatagtgca

SEQ ID NO: 182836 - DNA, 25 bp, Probe Sequence
ctttcccagccgtggataaaaactg

SEQ ID NO: 182837 - DNA, 25 bp, Probe Sequence
ctttccctgccacgtggaaacaatc

SEQ ID NO: 182838 - DNA, 25 bp, Probe Sequence
ctatacccccattatgtaaatccat

SEQ ID NO: 182839 - DNA, 25 bp, Probe Sequence
ctaacccctcgatgtacatagcttt

SEQ ID NO: 182840 - DNA, 25 bp, Probe Sequence
ctagattggcccatggtgccaggtt

SEQ ID NO: 182841 - DNA, 25 bp, Probe Sequence
ctagatttgcttttgtggggagacc

SEQ ID NO: 182842 - DNA, 25 bp, Probe Sequence
ctagctgttgtcaatctggggacag

SEQ ID NO: 182843 - DNA, 25 bp, Probe Sequence
ctatgcttcaaacgcggtgtcagag

SEQ ID NO: 182844 - DNA, 25 bp, Probe Sequence
ctaggatcaaagtggctgcagcaga

SEQ ID NO: 182845 - DNA, 25 bp, Probe Sequence
ctatcacatcacaagataatgctgg

SEQ ID NO: 182846 - DNA, 25 bp, Probe Sequence
ctatcccactaaatattgtaatcct

SEQ ID NO: 182847 - DNA, 25 bp, Probe Sequence
ctattcatgagtattattgaaacct

SEQ ID NO: 182848 - DNA, 25 bp, Probe Sequence
ctttgtatttggattcagaactcat

SEQ ID NO: 182849 - DNA, 25 bp, Probe Sequence
ctttccatttggtattacacagtca

SEQ ID NO: 182850 - DNA, 25 bp, Probe Sequence
ctttaattattgttatacacagctt

SEQ ID NO: 182851 - DNA, 25 bp, Probe Sequence
ctttccctatttcagcacaatctta

SEQ ID NO: 182852 - DNA, 25 bp, Probe Sequence
ctttctgcacactccagacaaactt

SEQ ID NO: 182853 - DNA, 25 bp, Probe Sequence
ctttaacatgaatcagaatcacctg

SEQ ID NO: 182854 - DNA, 25 bp, Probe Sequence
ctatttaatacatgaacagcctttg

SEQ ID NO: 182855 - DNA, 25 bp, Probe Sequence
cgtcttgaaacttaaactctgtgct

SEQ ID NO: 182856 - DNA, 25 bp, Probe Sequence
ctgggaccaactcaagaccttgttt

SEQ ID NO: 182857 - DNA, 25 bp, Probe Sequence
ctataactgatgtccaaagcaccct

SEQ ID NO: 182858 - DNA, 25 bp, Probe Sequence
ctattacttgtgcatttgcctcacc

SEQ ID NO: 182859 - DNA, 25 bp, Probe Sequence
ctagtgacttgtgtcccatgatccc

SEQ ID NO: 182860 - DNA, 25 bp, Probe Sequence
ctttgagccactgtaagcatgttac

SEQ ID NO: 182861 - DNA, 25 bp, Probe Sequence
ctttgcaaaccttcaagctgtgtaa

SEQ ID NO: 182862 - DNA, 25 bp, Probe Sequence
ctattctccacctaaatctctgaaa

SEQ ID NO: 182863 - DNA, 25 bp, Probe Sequence
ctttctcccagcttcaaatgcaaat

SEQ ID NO: 182864 - DNA, 25 bp, Probe Sequence
ctttcccgcagctgcagagaggagg

SEQ ID NO: 182865 - DNA, 25 bp, Probe Sequence
ctttcacacggcagtgtgctgggcc

SEQ ID NO: 182866 - DNA, 25 bp, Probe Sequence
ctatcctccaggagatcgccgggtg

SEQ ID NO: 182867 - DNA, 25 bp, Probe Sequence
ctttctctgcagtaaatctcgcagg

SEQ ID NO: 182868 - DNA, 25 bp, Probe Sequence
ctttgccgaagtgtccgcactgtaa

SEQ ID NO: 182869 - DNA, 25 bp, Probe Sequence
ctattgcaatacatttcttccttca

SEQ ID NO: 182870 - DNA, 25 bp, Probe Sequence
ctattggtagaaatttgaccccaca

SEQ ID NO: 182871 - DNA, 25 bp, Probe Sequence
ctttggttgatgttaaggccctcca

SEQ ID NO: 182872 - DNA, 25 bp, Probe Sequence
ctttgtgggataggattggcggctc

SEQ ID NO: 182873 - DNA, 25 bp, Probe Sequence
ctttgtgagtaataatgtcaggtct

SEQ ID NO: 182874 - DNA, 25 bp, Probe Sequence
ctcaaggaaagataaagctgggcgg

SEQ ID NO: 182875 - DNA, 25 bp, Probe Sequence
ctgctacaaaaacaaggtcgtcggc

SEQ ID NO: 182876 - DNA, 25 bp, Probe Sequence
ctaagaggaaacaaagcgttctgcg

SEQ ID NO: 182877 - DNA, 25 bp, Probe Sequence
ctagcaaggaagggagtgctgtgtt

SEQ ID NO: 182878 - DNA, 25 bp, Probe Sequence
ctcaccagtaacacctgtgtgtgtc

SEQ ID NO: 182879 - DNA, 25 bp, Probe Sequence
ctatccagaaaacacggtgggccaa

SEQ ID NO: 182880 - DNA, 25 bp, Probe Sequence
ctatgcctaagaccaactgcgttgg

SEQ ID NO: 182881 - DNA, 25 bp, Probe Sequence
ctatccagaaggccgtctcagaagg

SEQ ID NO: 182882 - DNA, 25 bp, Probe Sequence
ctttcagcaagagatggtcacatca

SEQ ID NO: 182883 - DNA, 25 bp, Probe Sequence
ctttcagctgctgggaggtgaccat

SEQ ID NO: 182884 - DNA, 25 bp, Probe Sequence
ctttctggcctggaggctatccagc

SEQ ID NO: 182885 - DNA, 25 bp, Probe Sequence
ctttcattgtcttaggccttcatgg

SEQ ID NO: 182886 - DNA, 25 bp, Probe Sequence
ctttcattgtcttaggccttcatgg

SEQ ID NO: 182887 - DNA, 25 bp, Probe Sequence
ctttgattttattcgcaccattgcg

SEQ ID NO: 182888 - DNA, 25 bp, Probe Sequence
ctatgagatgctcttcaactccttc

SEQ ID NO: 182889 - DNA, 25 bp, Probe Sequence
ctatacatgcaactacagcctccta

SEQ ID NO: 182890 - DNA, 25 bp, Probe Sequence
ctccagagaaccggaccctaatcaa

SEQ ID NO: 182891 - DNA, 25 bp, Probe Sequence
ctcttgaactcgggactccttacat

SEQ ID NO: 182892 - DNA, 25 bp, Probe Sequence
cccatcaactctggggacctctttg

SEQ ID NO: 182893 - DNA, 25 bp, Probe Sequence
ctcagctaagactgggtcctttgga

SEQ ID NO: 182894 - DNA, 25 bp, Probe Sequence
ctaggaaagtgggggtcatcctgga

SEQ ID NO: 182895 - DNA, 25 bp, Probe Sequence
ctaggaaagtggggatcttcctgga

SEQ ID NO: 182896 - DNA, 25 bp, Probe Sequence
ctacgagaagcggggtcaggcctgg

SEQ ID NO: 182897 - DNA, 25 bp, Probe Sequence
ctactcgaaatggcgtccgcctctg

SEQ ID NO: 182898 - DNA, 25 bp, Probe Sequence
ctattctaatagtgctctcgcctca

SEQ ID NO: 182899 - DNA, 25 bp, Probe Sequence
ctatcttaagaactgcccagcctca

SEQ ID NO: 182900 - DNA, 25 bp, Probe Sequence
ctttctcaagaatgcccatctgtga

SEQ ID NO: 182901 - DNA, 25 bp, Probe Sequence
ctttcctaaatactccatctgttta

SEQ ID NO: 182902 - DNA, 25 bp, Probe Sequence
ctttcccacaggttccactttatat

SEQ ID NO: 182903 - DNA, 25 bp, Probe Sequence
ctatggcacccagattaactgttaa

SEQ ID NO: 182904 - DNA, 25 bp, Probe Sequence
ctcacgcaagcatggttaacgtccc

SEQ ID NO: 182905 - DNA, 25 bp, Probe Sequence
ctaccacgaggagttcaaccctcca

SEQ ID NO: 182906 - DNA, 25 bp, Probe Sequence
ctgacaacgataccttctacgacct

SEQ ID NO: 182907 - DNA, 25 bp, Probe Sequence
ctagaactgacgtactccctgacgt

SEQ ID NO: 182908 - DNA, 25 bp, Probe Sequence
ctagatttgaagtgtccttgtagat

SEQ ID NO: 182909 - DNA, 25 bp, Probe Sequence
ctagttgtgaagcactttttgagtg

SEQ ID NO: 182910 - DNA, 25 bp, Probe Sequence
ctttgctggttgctccttttgagca

SEQ ID NO: 182911 - DNA, 25 bp, Probe Sequence
ctttgctgacctctccaatatggag

SEQ ID NO: 182912 - DNA, 25 bp, Probe Sequence
ctttctgacactttcacttttgcag

SEQ ID NO: 182913 - DNA, 25 bp, Probe Sequence
ctttctcaacattgccatttttcat

SEQ ID NO: 182914 - DNA, 25 bp, Probe Sequence
ctttcatgctaagccaatctttgca

SEQ ID NO: 182915 - DNA, 25 bp, Probe Sequence
ctttgctgtggctcacagattgttc

SEQ ID NO: 182916 - DNA, 25 bp, Probe Sequence
ctttgctgatgaggtaatagttttc

SEQ ID NO: 182917 - DNA, 25 bp, Probe Sequence
ctttgggctggtgatggccttgtcg

SEQ ID NO: 182918 - DNA, 25 bp, Probe Sequence
ctttggtcgggcatgtgccctgagc

SEQ ID NO: 182919 - DNA, 25 bp, Probe Sequence
ctttggagcagggcacgggactggc

SEQ ID NO: 182920 - DNA, 25 bp, Probe Sequence
ctatggctgggggcactaggactga

SEQ ID NO: 182921 - DNA, 25 bp, Probe Sequence
ctatgggtagggacaagcagagggc

SEQ ID NO: 182922 - DNA, 25 bp, Probe Sequence
ctatagttaggaatacacaagccgt

SEQ ID NO: 182923 - DNA, 25 bp, Probe Sequence
ctatagttaggaatacacaagccgt

SEQ ID NO: 182924 - DNA, 25 bp, Probe Sequence
ctaggtctcggactaagcctacctg

SEQ ID NO: 182925 - DNA, 25 bp, Probe Sequence
ctacgtgttgagcgtggcctacgtg

SEQ ID NO: 182926 - DNA, 25 bp, Probe Sequence
ctaggcatggtagcgcctgccttag

SEQ ID NO: 182927 - DNA, 25 bp, Probe Sequence
ctaggtggtccataggctcttggtg

SEQ ID NO: 182928 - DNA, 25 bp, Probe Sequence
ctacccttccaagttgactgtggtg

SEQ ID NO: 182929 - DNA, 25 bp, Probe Sequence
ctcaccctgacacagttacatagtc

SEQ ID NO: 182930 - DNA, 25 bp, Probe Sequence
ctatttcttgccgagttgacaagta

SEQ ID NO: 182931 - DNA, 25 bp, Probe Sequence
ctttgtatctccggtaagtagatga

SEQ ID NO: 182932 - DNA, 25 bp, Probe Sequence
ctttgcatttctgcgaaagatcaag

SEQ ID NO: 182933 - DNA, 25 bp, Probe Sequence
ctttctttctgaactgcaagtgcta

SEQ ID NO: 182934 - DNA, 25 bp, Probe Sequence
ctttcttcaagacctgagcctggag

SEQ ID NO: 182935 - DNA, 25 bp, Probe Sequence
ctttgcctgggatatgagccggtgg

SEQ ID NO: 182936 - DNA, 25 bp, Probe Sequence
ctttccgtggatttcatttggggca

SEQ ID NO: 182937 - DNA, 25 bp, Probe Sequence
ctttccgttgacgtcaatgtggtgg

SEQ ID NO: 182938 - DNA, 25 bp, Probe Sequence
ctttccgattcaagaaagggtgaca

SEQ ID NO: 182939 - DNA, 25 bp, Probe Sequence
ctatacccttcaaggacagtttgcc

SEQ ID NO: 182940 - DNA, 25 bp, Probe Sequence
ctttcccttcagagcactttggcaa

SEQ ID NO: 182941 - DNA, 25 bp, Probe Sequence
ctttccctctgaatgtcacttttgt

SEQ ID NO: 182942 - DNA, 25 bp, Probe Sequence
ctttgctgccatttatttcttgttg

SEQ ID NO: 182943 - DNA, 25 bp, Probe Sequence
ctttgcgtctgcactgtgatcgtga

SEQ ID NO: 182944 - DNA, 25 bp, Probe Sequence
ctataggacgcagctgttgccatga

SEQ ID NO: 182945 - DNA, 25 bp, Probe Sequence
ctattgtgcacaagtctttccagag

SEQ ID NO: 182946 - DNA, 25 bp, Probe Sequence
ctatgttgagccttgcttaccagca

SEQ ID NO: 182947 - DNA, 25 bp, Probe Sequence
ctatttatgcagctggtaccacaat

SEQ ID NO: 182948 - DNA, 25 bp, Probe Sequence
ctttgcttcatcttttcacaacagc

SEQ ID NO: 182949 - DNA, 25 bp, Probe Sequence
ctttctcttcatattcagcttgcac

SEQ ID NO: 182950 - DNA, 25 bp, Probe Sequence
ctttcctgcatctttcatagttctg

SEQ ID NO: 182951 - DNA, 25 bp, Probe Sequence
ctttcctgtgatgctctgaatttgg

SEQ ID NO: 182952 - DNA, 25 bp, Probe Sequence
ctttccttgacgtcatgggtggagt

SEQ ID NO: 182953 - DNA, 25 bp, Probe Sequence
ctttcccatgaggccttggttcaga

SEQ ID NO: 182954 - DNA, 25 bp, Probe Sequence
ctttccctgggagttatgatatagt

SEQ ID NO: 182955 - DNA, 25 bp, Probe Sequence
ctttctctttggtttattgatttgg

SEQ ID NO: 182956 - DNA, 25 bp, Probe Sequence
ctttctgcctcaaggttttgcattc

SEQ ID NO: 182957 - DNA, 25 bp, Probe Sequence
ctttgcatagtctgtttctgctgac

SEQ ID NO: 182958 - DNA, 25 bp, Probe Sequence
ctatatattgatgtgactttctgac

SEQ ID NO: 182959 - DNA, 25 bp, Probe Sequence
ctatcaatgtagtgtatgtatcttc

SEQ ID NO: 182960 - DNA, 25 bp, Probe Sequence
ctataggctgatgtctcagtatttc

SEQ ID NO: 182961 - DNA, 25 bp, Probe Sequence
ctatactgatgttttcgttttgcca

SEQ ID NO: 182962 - DNA, 25 bp, Probe Sequence
ctatcattgagtcctttcttattta

SEQ ID NO: 182963 - DNA, 25 bp, Probe Sequence
ctatttggtaacatcttgaaattca

SEQ ID NO: 182964 - DNA, 25 bp, Probe Sequence
ctatatgctgcactaacctttggta

SEQ ID NO: 182965 - DNA, 25 bp, Probe Sequence
ctatatccgtaacctggatagtgaa

SEQ ID NO: 182966 - DNA, 25 bp, Probe Sequence
ctattttgatgatcttgggtggaaa

SEQ ID NO: 182967 - DNA, 25 bp, Probe Sequence
ctaggcttagtacttgggtgacaaa

SEQ ID NO: 182968 - DNA, 25 bp, Probe Sequence
ctaggtttgaatgcggtgtagaaat

SEQ ID NO: 182969 - DNA, 25 bp, Probe Sequence
ctatgatgtttgagtcgggaagtaa

SEQ ID NO: 182970 - DNA, 25 bp, Probe Sequence
ctttgtggctgtggttggctgaaaa

SEQ ID NO: 182971 - DNA, 25 bp, Probe Sequence
ctttgtgtgcttttggagcgggcag

SEQ ID NO: 182972 - DNA, 25 bp, Probe Sequence
ctttgtgttatcattgatgggccag

SEQ ID NO: 182973 - DNA, 25 bp, Probe Sequence
ctttgtcattcagttctaggccttt

SEQ ID NO: 182974 - DNA, 25 bp, Probe Sequence
ctatttcatctatttttggcagtct

SEQ ID NO: 182975 - DNA, 25 bp, Probe Sequence
ctttcctcacatttggatgattgtc

SEQ ID NO: 182976 - DNA, 25 bp, Probe Sequence
ctttccaaatgtcggtacactccgc

SEQ ID NO: 182977 - DNA, 25 bp, Probe Sequence
ctttcctacttgcgtacatctacgt

SEQ ID NO: 182978 - DNA, 25 bp, Probe Sequence
ctttcctacttgcagtacatctacg

SEQ ID NO: 182979 - DNA, 25 bp, Probe Sequence
ctttcctacttggcagtacatctac

SEQ ID NO: 182980 - DNA, 25 bp, Probe Sequence
ctttcgtacttggcagtaccatcta

SEQ ID NO: 182981 - DNA, 25 bp, Probe Sequence
ctttccaacttggcagtaaatctac

SEQ ID NO: 182982 - DNA, 25 bp, Probe Sequence
ctttcctacttggccagtacatcta

SEQ ID NO: 182983 - DNA, 25 bp, Probe Sequence
ctttcctatcttccctgtgataata

SEQ ID NO: 182984 - DNA, 25 bp, Probe Sequence
ctttcctatctcgccatgtgaagaa

SEQ ID NO: 182985 - DNA, 25 bp, Probe Sequence
ctttcctgcccagttatctgcatag

SEQ ID NO: 182986 - DNA, 25 bp, Probe Sequence
ctattcctgctgctttcattgacag

SEQ ID NO: 182987 - DNA, 25 bp, Probe Sequence
ctttccatctgttcttgttgcaatg

SEQ ID NO: 182988 - DNA, 25 bp, Probe Sequence
ctttctgctccttgcattttgacat

SEQ ID NO: 182989 - DNA, 25 bp, Probe Sequence
ctttgaggcccacttttgtcattta

SEQ ID NO: 182990 - DNA, 25 bp, Probe Sequence
ctcttaagccttattcttcaactaa

SEQ ID NO: 182991 - DNA, 25 bp, Probe Sequence
ctctgtaaccgtattctttgaaagc

SEQ ID NO: 182992 - DNA, 25 bp, Probe Sequence
gtttacacccttgttctgtcaaagc

SEQ ID NO: 182993 - DNA, 25 bp, Probe Sequence
gtggtaacctccggtttgtggacag

SEQ ID NO: 182994 - DNA, 25 bp, Probe Sequence
ctagtaaccttctgcttgtggtgca

SEQ ID NO: 182995 - DNA, 25 bp, Probe Sequence
gcttaagacttttagattgtttatt

SEQ ID NO: 182996 - DNA, 25 bp, Probe Sequence
gttccaactatacagttttctaaca

SEQ ID NO: 182997 - DNA, 25 bp, Probe Sequence
ctaccaacttactgctcttttgtaa

SEQ ID NO: 182998 - DNA, 25 bp, Probe Sequence
ctgaaatgaatttcctttttctgaa

SEQ ID NO: 182999 - DNA, 25 bp, Probe Sequence
ctgaacaaagtagctttccccaagg

SEQ ID NO: 183000 - DNA, 25 bp, Probe Sequence
ctgaacaagaactcgaacccggacg

SEQ ID NO: 183001 - DNA, 25 bp, Probe Sequence
ctaccaagacactattggccgcctg

SEQ ID NO: 183002 - DNA, 25 bp, Probe Sequence
ctagctagaggatctgtgaccccag

SEQ ID NO: 183003 - DNA, 25 bp, Probe Sequence
ctagccaatggtctggacaacaagc

SEQ ID NO: 183004 - DNA, 25 bp, Probe Sequence
ctacaatgaggctgctggtaacaaa

SEQ ID NO: 183005 - DNA, 25 bp, Probe Sequence
ctattctggtgctgcttcataacaa

SEQ ID NO: 183006 - DNA, 25 bp, Probe Sequence
ctatgtgcggaccaccatcaacaag

SEQ ID NO: 183007 - DNA, 25 bp, Probe Sequence
ctttgggcctgaccatggagcataa

SEQ ID NO: 183008 - DNA, 25 bp, Probe Sequence
ctttggccacatatatgcgaatcta

SEQ ID NO: 183009 - DNA, 25 bp, Probe Sequence
ctttggcacacacttacgagtattc

SEQ ID NO: 183010 - DNA, 25 bp, Probe Sequence
ctcctggaacaggtccgactttcga

SEQ ID NO: 183011 - DNA, 25 bp, Probe Sequence
ctacgagtacggcccagacttaggt

SEQ ID NO: 183012 - DNA, 25 bp, Probe Sequence
ctacggtacaagctacatatgtagg

SEQ ID NO: 183013 - DNA, 25 bp, Probe Sequence
ctaccttccaggttacatttagtgg

SEQ ID NO: 183014 - DNA, 25 bp, Probe Sequence
ctatttctccaatgtacaataaaag

SEQ ID NO: 183015 - DNA, 25 bp, Probe Sequence
ctatctccccttttatactaataat

SEQ ID NO: 183016 - DNA, 25 bp, Probe Sequence
ctatccaacctttctgaagtctata

SEQ ID NO: 183017 - DNA, 25 bp, Probe Sequence
ctttcctgtctttgtacagttgaat

SEQ ID NO: 183018 - DNA, 25 bp, Probe Sequence
ctattgacttctatgtcggtataat

SEQ ID NO: 183019 - DNA, 25 bp, Probe Sequence
ctatggacttctactcgcagtacat

SEQ ID NO: 183020 - DNA, 25 bp, Probe Sequence
ctatggttaccaggctcagcattat

SEQ ID NO: 183021 - DNA, 25 bp, Probe Sequence
ctaggaatctaccctgcagatattc

SEQ ID NO: 183022 - DNA, 25 bp, Probe Sequence
ctaggcacgtaacctgcaatgtcgc

SEQ ID NO: 183023 - DNA, 25 bp, Probe Sequence
ctatgagcaacatgcagatctacag

SEQ ID NO: 183024 - DNA, 25 bp, Probe Sequence
ctatgtgcaggctgatagccctgaa

SEQ ID NO: 183025 - DNA, 25 bp, Probe Sequence
ctttgcattctctatagcctctgca

SEQ ID NO: 183026 - DNA, 25 bp, Probe Sequence
ctttgcttctaattcctggttgaca

SEQ ID NO: 183027 - DNA, 25 bp, Probe Sequence
ctcttctttatacacagggtgactc

SEQ ID NO: 183028 - DNA, 25 bp, Probe Sequence
ctttccccaattacagggtgactca

SEQ ID NO: 183029 - DNA, 25 bp, Probe Sequence
ctatgtccccaaaaagccgtgagtc

SEQ ID NO: 183030 - DNA, 25 bp, Probe Sequence
ctatgtccccaaaaagccgtgagtc

SEQ ID NO: 183031 - DNA, 25 bp, Probe Sequence
ctatgtccccaaaaagccgtgagtc

SEQ ID NO: 183032 - DNA, 25 bp, Probe Sequence
ctatgacggctaggaacaccacggt

SEQ ID NO: 183033 - DNA, 25 bp, Probe Sequence
ctagcacgccaaataaattccaggt

SEQ ID NO: 183034 - DNA, 25 bp, Probe Sequence
ctagcacggttgaacatctttcatg

SEQ ID NO: 183035 - DNA, 25 bp, Probe Sequence
ctagcagccttaattccatttgcag

SEQ ID NO: 183036 - DNA, 25 bp, Probe Sequence
ctagagctctttcagccgtttggaa

SEQ ID NO: 183037 - DNA, 25 bp, Probe Sequence
ctatacccatgtgatccgttttggc

SEQ ID NO: 183038 - DNA, 25 bp, Probe Sequence
ctattaccattgtgatgcgttcttg

SEQ ID NO: 183039 - DNA, 25 bp, Probe Sequence
ctatccacctggtcttgttcttatg

SEQ ID NO: 183040 - DNA, 25 bp, Probe Sequence
ctatcacgcgtgaatcggtgtccca

SEQ ID NO: 183041 - DNA, 25 bp, Probe Sequence
ctattgccaagaatgtgttgtccaa

SEQ ID NO: 183042 - DNA, 25 bp, Probe Sequence
ctattgcaaaaacctgctgttctca

SEQ ID NO: 183043 - DNA, 25 bp, Probe Sequence
ctattggccaacaatcctttctgcc

SEQ ID NO: 183044 - DNA, 25 bp, Probe Sequence
ctattcgcctacacaattctccgat

SEQ ID NO: 183045 - DNA, 25 bp, Probe Sequence
ctttgatgcctaaaaattttccatt

SEQ ID NO: 183046 - DNA, 25 bp, Probe Sequence
ctttgactctaagagtttctggctg

SEQ ID NO: 183047 - DNA, 25 bp, Probe Sequence
ctctgatgatatcaacaagtttctt

SEQ ID NO: 183048 - DNA, 25 bp, Probe Sequence
ctatgaaatgtgaccacgtccttat

SEQ ID NO: 183049 - DNA, 25 bp, Probe Sequence
ctatgcagaataaagctcgagccga

SEQ ID NO: 183050 - DNA, 25 bp, Probe Sequence
ctatgtagagaacacgcttcacccc

SEQ ID NO: 183051 - DNA, 25 bp, Probe Sequence
ctatgtgggcgacgaggcccagagc

SEQ ID NO: 183052 - DNA, 25 bp, Probe Sequence
ctatgtgaagcatcagggcctgaac

SEQ ID NO: 183053 - DNA, 25 bp, Probe Sequence
ctcatggctagcatatgggcacttt

SEQ ID NO: 183054 - DNA, 25 bp, Probe Sequence
ctatgatgaagctttaggcatgttt

SEQ ID NO: 183055 - DNA, 25 bp, Probe Sequence
ctttgcagagtctttgctgtgcttt

SEQ ID NO: 183056 - DNA, 25 bp, Probe Sequence
ctttgcagcctgtttctgtcatgta

SEQ ID NO: 183057 - DNA, 25 bp, Probe Sequence
ctttgcagcctgtttctgtcatgta

SEQ ID NO: 183058 - DNA, 25 bp, Probe Sequence
ctatagagccttctgatgtctctaa

SEQ ID NO: 183059 - DNA, 25 bp, Probe Sequence
ctatcacccagtcatgtgcactgaa

SEQ ID NO: 183060 - DNA, 25 bp, Probe Sequence
ctatccgcacgtcttcactaaagga

SEQ ID NO: 183061 - DNA, 25 bp, Probe Sequence
ctcaactccgtgcttaaccaaagaa

SEQ ID NO: 183062 - DNA, 25 bp, Probe Sequence
ctcaactccgtgcttaaccaaagaa

SEQ ID NO: 183063 - DNA, 25 bp, Probe Sequence
ctttccttgtgctttgataacaaag

SEQ ID NO: 183064 - DNA, 25 bp, Probe Sequence
ctatatcctttgcctgtaaataaaa

SEQ ID NO: 183065 - DNA, 25 bp, Probe Sequence
ctataccttctgcataatgaattaa

SEQ ID NO: 183066 - DNA, 25 bp, Probe Sequence
ttatacacttcgataaccctaacga

SEQ ID NO: 183067 - DNA, 25 bp, Probe Sequence
ctataccactccaagaaacctacta

SEQ ID NO: 183068 - DNA, 25 bp, Probe Sequence
ctatatccctaaagaaaatccttca

SEQ ID NO: 183069 - DNA, 25 bp, Probe Sequence
ctattcccatccagagacattctct

SEQ ID NO: 183070 - DNA, 25 bp, Probe Sequence
ctttccaatctcagtcactctagga

SEQ ID NO: 183071 - DNA, 25 bp, Probe Sequence
ctattcacaaccagtttccagctga

SEQ ID NO: 183072 - DNA, 25 bp, Probe Sequence
ctttgcccaaggctgcattccagta

SEQ ID NO: 183073 - DNA, 25 bp, Probe Sequence
ctttgcccaaaatgcagtgccaagt

SEQ ID NO: 183074 - DNA, 25 bp, Probe Sequence
ctttgccccaaatttgagctcacaa

SEQ ID NO: 183075 - DNA, 25 bp, Probe Sequence
ctttgaggccaatgtgctggctgag

SEQ ID NO: 183076 - DNA, 25 bp, Probe Sequence
ctttgctggccagagtctgtcctgg

SEQ ID NO: 183077 - DNA, 25 bp, Probe Sequence
ctttgggctgtgggtttcagcttga

SEQ ID NO: 183078 - DNA, 25 bp, Probe Sequence
ctttgctatgttgttcttgtgtgtg

SEQ ID NO: 183079 - DNA, 25 bp, Probe Sequence
ctttgcattttcttatacgtttgat

SEQ ID NO: 183080 - DNA, 25 bp, Probe Sequence
ctttgtgtttatatggcgttttgtc

SEQ ID NO: 183081 - DNA, 25 bp, Probe Sequence
ctttgatggtgttcatttgcatttt

SEQ ID NO: 183082 - DNA, 25 bp, Probe Sequence
ctatgtgccgttttgttgttattca

SEQ ID NO: 183083 - DNA, 25 bp, Probe Sequence
ctattcacagcatttagttcgttta

SEQ ID NO: 183084 - DNA, 25 bp, Probe Sequence
ctaggtccaattgttctgctctaac

SEQ ID NO: 183085 - DNA, 25 bp, Probe Sequence
ctatggggaattgctgctctttacc

SEQ ID NO: 183086 - DNA, 25 bp, Probe Sequence
ctagcaaatgaagtattttttccct

SEQ ID NO: 183087 - DNA, 25 bp, Probe Sequence
ctagcatcctgacatcactgttatt

SEQ ID NO: 183088 - DNA, 25 bp, Probe Sequence
ctatgtgcccagcattgactaatgt

SEQ ID NO: 183089 - DNA, 25 bp, Probe Sequence
ctatgtccatattgatgttgtagtg

SEQ ID NO: 183090 - DNA, 25 bp, Probe Sequence
ctatgggcagtatgatctgtggctg

SEQ ID NO: 183091 - DNA, 25 bp, Probe Sequence
ctttgctcatgttattgttgacatg

SEQ ID NO: 183092 - DNA, 25 bp, Probe Sequence
ctttgctatgacttctggccagatg

SEQ ID NO: 183093 - DNA, 25 bp, Probe Sequence
ctttgctatgacttctggccagatg

SEQ ID NO: 183094 - DNA, 25 bp, Probe Sequence
ctaggctcagagatgtgcacccatg

SEQ ID NO: 183095 - DNA, 25 bp, Probe Sequence
ctatgacgcagctgtgatatgcacc

SEQ ID NO: 183096 - DNA, 25 bp, Probe Sequence
ctatcctgcagtcggcagatcatgg

SEQ ID NO: 183097 - DNA, 25 bp, Probe Sequence
ctacccagtcagaagatcacaccat

SEQ ID NO: 183098 - DNA, 25 bp, Probe Sequence
ctagccatgggctggtcaccagatt

SEQ ID NO: 183099 - DNA, 25 bp, Probe Sequence
ctacctgacggtggccaccgtgttc

SEQ ID NO: 183100 - DNA, 25 bp, Probe Sequence
ctacctgaagggcgaccacgcaggc

SEQ ID NO: 183101 - DNA, 25 bp, Probe Sequence
ctaccagtacgatgagacctccggc

SEQ ID NO: 183102 - DNA, 25 bp, Probe Sequence
ctagaagcttcgaagggcctcgtcc

SEQ ID NO: 183103 - DNA, 25 bp, Probe Sequence
ctagaaagtcttttggccatcagat

SEQ ID NO: 183104 - DNA, 25 bp, Probe Sequence
ctagtacaactgatgctccctgaga

SEQ ID NO: 183105 - DNA, 25 bp, Probe Sequence
ctatctacacttggagaccctacac

SEQ ID NO: 183106 - DNA, 25 bp, Probe Sequence
ctttgtgacttcaagagcctctggc

SEQ ID NO: 183107 - DNA, 25 bp, Probe Sequence
ctttgctgacttacgaattgctaca

SEQ ID NO: 183108 - DNA, 25 bp, Probe Sequence
ctatacgatcgtagtacatcttaca

SEQ ID NO: 183109 - DNA, 25 bp, Probe Sequence
ctataggatctgtctgctaatggtg

SEQ ID NO: 183110 - DNA, 25 bp, Probe Sequence
ctatgagaccatcctgaaagagcag

SEQ ID NO: 183111 - DNA, 25 bp, Probe Sequence
ctagagtcaaccaaagatcagcatg

SEQ ID NO: 183112 - DNA, 25 bp, Probe Sequence
ctatacacaaccaagtgaaaggatt

SEQ ID NO: 183113 - DNA, 25 bp, Probe Sequence
ctagacaatacgatggaacgttcta

SEQ ID NO: 183114 - DNA, 25 bp, Probe Sequence
ctagatcaagacatgttaacctttt

SEQ ID NO: 183115 - DNA, 25 bp, Probe Sequence
ctattaaatctgttctacacacgtg

SEQ ID NO: 183116 - DNA, 25 bp, Probe Sequence
ctataataatttacattgccaccaa

SEQ ID NO: 183117 - DNA, 25 bp, Probe Sequence
ctatgaagaatactgcaccgccaac

SEQ ID NO: 183118 - DNA, 25 bp, Probe Sequence
ctatgaatgaatctgctcccactgg

SEQ ID NO: 183119 - DNA, 25 bp, Probe Sequence
ctagctctgccagttgctagccagg

SEQ ID NO: 183120 - DNA, 25 bp, Probe Sequence
ctagccccgttctgtggggcactgg

SEQ ID NO: 183121 - DNA, 25 bp, Probe Sequence
ctagccccgaggtggtggcacgggc

SEQ ID NO: 183122 - DNA, 25 bp, Probe Sequence
ctaccgcgcgggcggggaggaggag

SEQ ID NO: 183123 - DNA, 25 bp, Probe Sequence
ctactaccgcgcgggcggggaggag

SEQ ID NO: 183124 - DNA, 25 bp, Probe Sequence
ctaccagaccggagaggggagaagt

SEQ ID NO: 183125 - DNA, 25 bp, Probe Sequence
ctaggccccgtgccagaggggaaga

SEQ ID NO: 183126 - DNA, 25 bp, Probe Sequence
ctagggctgccagacatacgctgga

SEQ ID NO: 183127 - DNA, 25 bp, Probe Sequence
ctatctggggcaggcacaaattggt

SEQ ID NO: 183128 - DNA, 25 bp, Probe Sequence
ctttggcagacagagaattggagtg

SEQ ID NO: 183129 - DNA, 25 bp, Probe Sequence
ctttggcagactcaccaggggtagg

SEQ ID NO: 183130 - DNA, 25 bp, Probe Sequence
ctttgacagagcctacccaaataag

SEQ ID NO: 183131 - DNA, 25 bp, Probe Sequence
ctaatccaactaacctcaaacaaat

SEQ ID NO: 183132 - DNA, 25 bp, Probe Sequence
ctaattctcacatccctctaaaagt

SEQ ID NO: 183133 - DNA, 25 bp, Probe Sequence
ctaatcaggaatgacccggaagagg

SEQ ID NO: 183134 - DNA, 25 bp, Probe Sequence
ctatgttgtacagaccacgtgaaag

SEQ ID NO: 183135 - DNA, 25 bp, Probe Sequence
ctatttctacacctacttggatata

SEQ ID NO: 183136 - DNA, 25 bp, Probe Sequence
ctattttatccttacccaatctgta

SEQ ID NO: 183137 - DNA, 25 bp, Probe Sequence
ctatattttctttacaggtatttat

SEQ ID NO: 183138 - DNA, 25 bp, Probe Sequence
ctatttctagctccacaagtgtgtg

SEQ ID NO: 183139 - DNA, 25 bp, Probe Sequence
ctattcatttgattgcccaatgagg

SEQ ID NO: 183140 - DNA, 25 bp, Probe Sequence
ctatttgttcattgcttgccagaga

SEQ ID NO: 183141 - DNA, 25 bp, Probe Sequence
ctatatttgtcttccgatcaacatt

SEQ ID NO: 183142 - DNA, 25 bp, Probe Sequence
ctatcatattcatcggcgtaaatct

SEQ ID NO: 183143 - DNA, 25 bp, Probe Sequence
ctattttaacctcaattatgcattt

SEQ ID NO: 183144 - DNA, 25 bp, Probe Sequence
ctagctttagtcgtggtttatcttc

SEQ ID NO: 183145 - DNA, 25 bp, Probe Sequence
ctagttctactgagttttgtgctgt

SEQ ID NO: 183146 - DNA, 25 bp, Probe Sequence
ctagttctgcccagctttatgtctt

SEQ ID NO: 183147 - DNA, 25 bp, Probe Sequence
ctagttctgcccagctttatgtctt

SEQ ID NO: 183148 - DNA, 25 bp, Probe Sequence
ctagttctgcccagctttatgtctt

SEQ ID NO: 183149 - DNA, 25 bp, Probe Sequence
ctttgtctccgtaaatttcatttgc

SEQ ID NO: 183150 - DNA, 25 bp, Probe Sequence
ctttgtccccgtagagttcatagtc

SEQ ID NO: 183151 - DNA, 25 bp, Probe Sequence
ctactattcagcgggtggtcctagc

SEQ ID NO: 183152 - DNA, 25 bp, Probe Sequence
gctacgttacggtggttctacaata

SEQ ID NO: 183153 - DNA, 25 bp, Probe Sequence
ctttgtccatcgaggtgtttcataa

SEQ ID NO: 183154 - DNA, 25 bp, Probe Sequence
ctttgttgacccggtacttcatact

SEQ ID NO: 183155 - DNA, 25 bp, Probe Sequence
ctttgttcccacctgattttgtgac

SEQ ID NO: 183156 - DNA, 25 bp, Probe Sequence
ctaggagcccacgggattctctgta

SEQ ID NO: 183157 - DNA, 25 bp, Probe Sequence
ctatgggatcctggaagttccttag

SEQ ID NO: 183158 - DNA, 25 bp, Probe Sequence
ctatgtggagagcgacagtaggctg

SEQ ID NO: 183159 - DNA, 25 bp, Probe Sequence
ctatgtctgggttgacctaggccaa

SEQ ID NO: 183160 - DNA, 25 bp, Probe Sequence
ctagtctatgatgtgactcccccag

SEQ ID NO: 183161 - DNA, 25 bp, Probe Sequence
ctatgtgtgatgatgatccacccac

SEQ ID NO: 183162 - DNA, 25 bp, Probe Sequence
ctagagctgcaggtaccagccactc

SEQ ID NO: 183163 - DNA, 25 bp, Probe Sequence
ctaggctgcagactgccttgtactc

SEQ ID NO: 183164 - DNA, 25 bp, Probe Sequence
ctagtggagatctctttgactgctg

SEQ ID NO: 183165 - DNA, 25 bp, Probe Sequence
ctattggagtgcaatccttacttga

SEQ ID NO: 183166 - DNA, 25 bp, Probe Sequence
ctttgttgatctgagccttctatga

SEQ ID NO: 183167 - DNA, 25 bp, Probe Sequence
ctttgtgtgattgaatctgattgga

SEQ ID NO: 183168 - DNA, 25 bp, Probe Sequence
ctattgcaggaggccacactgatgt

SEQ ID NO: 183169 - DNA, 25 bp, Probe Sequence
ctatctagagagccacatcctgttg

SEQ ID NO: 183170 - DNA, 25 bp, Probe Sequence
ctatgatagagccgagctcgtttag

SEQ ID NO: 183171 - DNA, 25 bp, Probe Sequence
ctatgaaatcgcgcttcttgaagac

SEQ ID NO: 183172 - DNA, 25 bp, Probe Sequence
cgttcagtcggctttactacaacaa

SEQ ID NO: 183173 - DNA, 25 bp, Probe Sequence
ctatctattgtggctttaccaaaaa

SEQ ID NO: 183174 - DNA, 25 bp, Probe Sequence
ctatcttagtggttccccaccgaag

SEQ ID NO: 183175 - DNA, 25 bp, Probe Sequence
ctgacctagaagtatcccacaaaag

SEQ ID NO: 183176 - DNA, 25 bp, Probe Sequence
ctcactaaggagacttcaaacaaac

SEQ ID NO: 183177 - DNA, 25 bp, Probe Sequence
gctttcaaaagtgtcaacaacccca

SEQ ID NO: 183178 - DNA, 25 bp, Probe Sequence
ctttgtggaggtggatgaaaacggt

SEQ ID NO: 183179 - DNA, 25 bp, Probe Sequence
ctttgtgggtgttatcaatagaaaa

SEQ ID NO: 183180 - DNA, 25 bp, Probe Sequence
ctatttaggtgacactatagaacaa

SEQ ID NO: 183181 - DNA, 25 bp, Probe Sequence
ctagttagttccacaaagacagatg

SEQ ID NO: 183182 - DNA, 25 bp, Probe Sequence
ctatgttgttgtctccaaccaccag

SEQ ID NO: 183183 - DNA, 25 bp, Probe Sequence
ctcagttatggcttctacggctgcc

SEQ ID NO: 183184 - DNA, 25 bp, Probe Sequence
ctcagttatggcttctacggctgcc

SEQ ID NO: 183185 - DNA, 25 bp, Probe Sequence
ctattttacttcagcatgtgtgcac

SEQ ID NO: 183186 - DNA, 25 bp, Probe Sequence
ctattcttaagcgggcagttgcagg

SEQ ID NO: 183187 - DNA, 25 bp, Probe Sequence
ctatatcttcaggcgcgcggtctgg

SEQ ID NO: 183188 - DNA, 25 bp, Probe Sequence
ctatatttcatagtcaaagccttga

SEQ ID NO: 183189 - DNA, 25 bp, Probe Sequence
ctattaccacagtcaaagcaacaga

SEQ ID NO: 183190 - DNA, 25 bp, Probe Sequence
ctattactcactgcatcaagccctg

SEQ ID NO: 183191 - DNA, 25 bp, Probe Sequence
ctattcgctgcactaactgtgcccg

SEQ ID NO: 183192 - DNA, 25 bp, Probe Sequence
ctattgccttgatgacagctgtcca

SEQ ID NO: 183193 - DNA, 25 bp, Probe Sequence
ctattgtcttatgatcacgtttgcc

SEQ ID NO: 183194 - DNA, 25 bp, Probe Sequence
ctttgttcaatggtcagcttttcag

SEQ ID NO: 183195 - DNA, 25 bp, Probe Sequence
ctttgtcaaatatcacagtttaaaa

SEQ ID NO: 183196 - DNA, 25 bp, Probe Sequence
ctttgtccatatttctacttataac

SEQ ID NO: 183197 - DNA, 25 bp, Probe Sequence
ctattgtgacttacttatctgtatc

SEQ ID NO: 183198 - DNA, 25 bp, Probe Sequence
ctattgcaagtcccttgtcttgata

SEQ ID NO: 183199 - DNA, 25 bp, Probe Sequence
ctattcaatggtcttggcattgcat

SEQ ID NO: 183200 - DNA, 25 bp, Probe Sequence
ctatatacggctgttgcagcaggct

SEQ ID NO: 183201 - DNA, 25 bp, Probe Sequence
ctattacgacatgaacgcggccaat

SEQ ID NO: 183202 - DNA, 25 bp, Probe Sequence
ctatatcaggacagcaactgggcca

SEQ ID NO: 183203 - DNA, 25 bp, Probe Sequence
ctatgtgcagaaccactttggtcca

SEQ ID NO: 183204 - DNA, 25 bp, Probe Sequence
ctatggcatgaatgccctgcgggcc

SEQ ID NO: 183205 - DNA, 25 bp, Probe Sequence
ctatgcttgaatgccacgcggtaca

SEQ ID NO: 183206 - DNA, 25 bp, Probe Sequence
ctatggcatgcattcccagtggcct

SEQ ID NO: 183207 - DNA, 25 bp, Probe Sequence
ctatggctccattcctgtggtggaa

SEQ ID NO: 183208 - DNA, 25 bp, Probe Sequence
ctagctgtactgacagcagtgagtg

SEQ ID NO: 183209 - DNA, 25 bp, Probe Sequence
ctagtgtggctgacagtgcaagacc

SEQ ID NO: 183210 - DNA, 25 bp, Probe Sequence
ctagtggttgtggctcacatcctgc

SEQ ID NO: 183211 - DNA, 25 bp, Probe Sequence
ctagttgggggctagtcgctgatct

SEQ ID NO: 183212 - DNA, 25 bp, Probe Sequence
ctattttgactagacatcctgtgca

SEQ ID NO: 183213 - DNA, 25 bp, Probe Sequence
ctttgggaagtggagcaccgatgat

SEQ ID NO: 183214 - DNA, 25 bp, Probe Sequence
ctatgtttaaatccagaccctgatg

SEQ ID NO: 183215 - DNA, 25 bp, Probe Sequence
ctatgttgtagttggggcccagaga

SEQ ID NO: 183216 - DNA, 25 bp, Probe Sequence
ctatttattgactgggcccagtggc

SEQ ID NO: 183217 - DNA, 25 bp, Probe Sequence
ctatttattatgagcttctacaggt

SEQ ID NO: 183218 - DNA, 25 bp, Probe Sequence
ctatttgtattttctgatgctatca

SEQ ID NO: 183219 - DNA, 25 bp, Probe Sequence
ctattttctttgttgtctacatgtg

SEQ ID NO: 183220 - DNA, 25 bp, Probe Sequence
ctacttttgcgttaggaatctgtgc

SEQ ID NO: 183221 - DNA, 25 bp, Probe Sequence
ctatctttgtggttcatgaggactt

SEQ ID NO: 183222 - DNA, 25 bp, Probe Sequence
ctatgcttaggactccagagaaccg

SEQ ID NO: 183223 - DNA, 25 bp, Probe Sequence
ctatctctagagttcactaggaatg

SEQ ID NO: 183224 - DNA, 25 bp, Probe Sequence
ctatcatgtacagtttccagaattg

SEQ ID NO: 183225 - DNA, 25 bp, Probe Sequence
ctatcattgtgattagatcagcaga

SEQ ID NO: 183226 - DNA, 25 bp, Probe Sequence
ctatctgctgtctgcaacatcatga

SEQ ID NO: 183227 - DNA, 25 bp, Probe Sequence
ctatctcagatctgtggcagcagat

SEQ ID NO: 183228 - DNA, 25 bp, Probe Sequence
ctatgccgagcaagatgagctggat

SEQ ID NO: 183229 - DNA, 25 bp, Probe Sequence
ctatgggagcaaggagctgcgcagc

SEQ ID NO: 183230 - DNA, 25 bp, Probe Sequence
ctacggatgcactgggccaggtctt

SEQ ID NO: 183231 - DNA, 25 bp, Probe Sequence
ctagaggatcctcggattcagccct

SEQ ID NO: 183232 - DNA, 25 bp, Probe Sequence
ctatgagcggcgctgggagcagtcc

SEQ ID NO: 183233 - DNA, 25 bp, Probe Sequence
ctagaggtggccaaggacttccctg

SEQ ID NO: 183234 - DNA, 25 bp, Probe Sequence
ctacgggccctagacaatacgatgg

SEQ ID NO: 183235 - DNA, 25 bp, Probe Sequence
ctatcgaagccagaaagccaaggag

SEQ ID NO: 183236 - DNA, 25 bp, Probe Sequence
ctaggagcccaagatctgacggaag

SEQ ID NO: 183237 - DNA, 25 bp, Probe Sequence
ctatctgacgccgagtttgaggggg

SEQ ID NO: 183238 - DNA, 25 bp, Probe Sequence
ctatagtcccagctagttgggaggc

SEQ ID NO: 183239 - DNA, 25 bp, Probe Sequence
ctataatcccagctacttgggaggc

SEQ ID NO: 183240 - DNA, 25 bp, Probe Sequence
ctattacccggttttacagatgatg

SEQ ID NO: 183241 - DNA, 25 bp, Probe Sequence
ctatttcgccgtcctataataggct

SEQ ID NO: 183242 - DNA, 25 bp, Probe Sequence
ctattattccttccttagaagttga

SEQ ID NO: 183243 - DNA, 25 bp, Probe Sequence
ctataattcctacttttggaggctg

SEQ ID NO: 183244 - DNA, 25 bp, Probe Sequence
ctattcttccaccagttgtggcgtc

SEQ ID NO: 183245 - DNA, 25 bp, Probe Sequence
ctattcacccatgggttcctggtgc

SEQ ID NO: 183246 - DNA, 25 bp, Probe Sequence
ctattacccattggtgattcggttt

SEQ ID NO: 183247 - DNA, 25 bp, Probe Sequence
ctatttcctattgaatcataggtta

SEQ ID NO: 183248 - DNA, 25 bp, Probe Sequence
ctattctctctgtcataaaatatgt

SEQ ID NO: 183249 - DNA, 25 bp, Probe Sequence
ctattcctctccttagaactttcat

SEQ ID NO: 183250 - DNA, 25 bp, Probe Sequence
ctatctactcgttgttgaaattttt

SEQ ID NO: 183251 - DNA, 25 bp, Probe Sequence
ctttgggcgctttcatgcctattgt

SEQ ID NO: 183252 - DNA, 25 bp, Probe Sequence
ctttgggatgaatcagcatcatttt

SEQ ID NO: 183253 - DNA, 25 bp, Probe Sequence
ctttggagtccacacacattttaaa

SEQ ID NO: 183254 - DNA, 25 bp, Probe Sequence
ctgtggggctcaccccaaagtatta

SEQ ID NO: 183255 - DNA, 25 bp, Probe Sequence
ctatgactgacgtccccagaagttt

SEQ ID NO: 183256 - DNA, 25 bp, Probe Sequence
ctgaaagtgctttccggaagttaga

SEQ ID NO: 183257 - DNA, 25 bp, Probe Sequence
ctaaaacaattctgagaggaaatgt

SEQ ID NO: 183258 - DNA, 25 bp, Probe Sequence
ctacgcattcagtccttaaggggtt

SEQ ID NO: 183259 - DNA, 25 bp, Probe Sequence
ctaccatcatggacctattgttcgg

SEQ ID NO: 183260 - DNA, 25 bp, Probe Sequence
ctatccacatgtgctctgcatagga

SEQ ID NO: 183261 - DNA, 25 bp, Probe Sequence
ctatcccttttcctagctagagaag

SEQ ID NO: 183262 - DNA, 25 bp, Probe Sequence
ctatcccttttcctagctagagaag

SEQ ID NO: 183263 - DNA, 25 bp, Probe Sequence
ctagcccattagggacactatagaa

SEQ ID NO: 183264 - DNA, 25 bp, Probe Sequence
ctagcgcaattgaaggatcatctga

SEQ ID NO: 183265 - DNA, 25 bp, Probe Sequence
ctagccagcttcacgattatgacta

SEQ ID NO: 183266 - DNA, 25 bp, Probe Sequence
ctgtccagattctccacattgactc

SEQ ID NO: 183267 - DNA, 25 bp, Probe Sequence
ctattagatctaatgccacactgat

SEQ ID NO: 183268 - DNA, 25 bp, Probe Sequence
ctataagcttttccacttgatggag

SEQ ID NO: 183269 - DNA, 25 bp, Probe Sequence
ctaggagtttctcttgtgctgtcag

SEQ ID NO: 183270 - DNA, 25 bp, Probe Sequence
ctatcctcttttcttgatctttttt

SEQ ID NO: 183271 - DNA, 25 bp, Probe Sequence
ctagcctctttgtgtttttgttgtt

SEQ ID NO: 183272 - DNA, 25 bp, Probe Sequence
ctaggcacatttcttgttgttgttg

SEQ ID NO: 183273 - DNA, 25 bp, Probe Sequence
ctatggactttggtggggctggtgc

SEQ ID NO: 183274 - DNA, 25 bp, Probe Sequence
ctaggacactgttgtggggtttgca

SEQ ID NO: 183275 - DNA, 25 bp, Probe Sequence
ctagccactgttttggggctttaat

SEQ ID NO: 183276 - DNA, 25 bp, Probe Sequence
ctcagccttattttataacgtggaa

SEQ ID NO: 183277 - DNA, 25 bp, Probe Sequence
ctacctgtttaagaaagtgaaatgt

SEQ ID NO: 183278 - DNA, 25 bp, Probe Sequence
ctggcctggttttcaaaataaagtg

SEQ ID NO: 183279 - DNA, 25 bp, Probe Sequence
ctgacctgccgtctagaaaaacctg

SEQ ID NO: 183280 - DNA, 25 bp, Probe Sequence
ctgaggcccaagcgggagaaacggc

SEQ ID NO: 183281 - DNA, 25 bp, Probe Sequence
ctgggccctgtgtgggacagggtac

SEQ ID NO: 183282 - DNA, 25 bp, Probe Sequence
ctagggccatggtgggccgcttgaa

SEQ ID NO: 183283 - DNA, 25 bp, Probe Sequence
ctaggtcctggagatgagcaccctc

SEQ ID NO: 183284 - DNA, 25 bp, Probe Sequence
ctacagtacatggaagggacgcacc

SEQ ID NO: 183285 - DNA, 25 bp, Probe Sequence
ctatcagagaaggagacggaggagc

SEQ ID NO: 183286 - DNA, 25 bp, Probe Sequence
ctatcgcagaagtaagcatttggca

SEQ ID NO: 183287 - DNA, 25 bp, Probe Sequence
ctagccgtagtatgatctgggattc

SEQ ID NO: 183288 - DNA, 25 bp, Probe Sequence
ctagggaagggaccatggagctccg

SEQ ID NO: 183289 - DNA, 25 bp, Probe Sequence
ctagggagcagttacaagggcctgc

SEQ ID NO: 183290 - DNA, 25 bp, Probe Sequence
ctagggacttcctacttgggcagac

SEQ ID NO: 183291 - DNA, 25 bp, Probe Sequence
ctagttgatctttcagatctttcca

SEQ ID NO: 183292 - DNA, 25 bp, Probe Sequence
ctattgttatttaatttgtccacca

SEQ ID NO: 183293 - DNA, 25 bp, Probe Sequence
ctattgtgtagttttgtttgtgaaa

SEQ ID NO: 183294 - DNA, 25 bp, Probe Sequence
ctatctttggggatgttttcaagaa

SEQ ID NO: 183295 - DNA, 25 bp, Probe Sequence
ctatgcttttagctgcgttactaag

SEQ ID NO: 183296 - DNA, 25 bp, Probe Sequence
ctatttttacttccttctctgaaat

SEQ ID NO: 183297 - DNA, 25 bp, Probe Sequence
ctatttgtaacagccaactctggaa

SEQ ID NO: 183298 - DNA, 25 bp, Probe Sequence
ctatcttgttaagaaggtcgtgcaa

SEQ ID NO: 183299 - DNA, 25 bp, Probe Sequence
ctagcttcttacagagaggggtcca

SEQ ID NO: 183300 - DNA, 25 bp, Probe Sequence
ctacttgcctacagtggggtgcagt

SEQ ID NO: 183301 - DNA, 25 bp, Probe Sequence
ctactatcccgctgggtagtgcagt

SEQ ID NO: 183302 - DNA, 25 bp, Probe Sequence
ctagctaccactaggtggatagtaa

SEQ ID NO: 183303 - DNA, 25 bp, Probe Sequence
ctactaaactgggggatattatgaa

SEQ ID NO: 183304 - DNA, 25 bp, Probe Sequence
ctaccacaactcaacggctacatag

SEQ ID NO: 183305 - DNA, 25 bp, Probe Sequence
ctagaagacgctatccgatccatca

SEQ ID NO: 183306 - DNA, 25 bp, Probe Sequence
ctatgtaccctttactactctcagg

SEQ ID NO: 183307 - DNA, 25 bp, Probe Sequence
ctacttctccgttactactacgaca

SEQ ID NO: 183308 - DNA, 25 bp, Probe Sequence
ctaccgacctggtgtggaaggcaca

SEQ ID NO: 183309 - DNA, 25 bp, Probe Sequence
ctacctaccattgcgctgtgtaaca

SEQ ID NO: 183310 - DNA, 25 bp, Probe Sequence
ctacctaccattgcgctgtgtaaca

SEQ ID NO: 183311 - DNA, 25 bp, Probe Sequence
ctacctaccattgcgctgtgtaaca

SEQ ID NO: 183312 - DNA, 25 bp, Probe Sequence
ctacccccacgtggtgtaagcagag

SEQ ID NO: 183313 - DNA, 25 bp, Probe Sequence
ctaggccgcgggacggataacaatt

SEQ ID NO: 183314 - DNA, 25 bp, Probe Sequence
ctaggccgcgggaccggataacaat

SEQ ID NO: 183315 - DNA, 25 bp, Probe Sequence
ctaccccgagggtggcattgatgcc

SEQ ID NO: 183316 - DNA, 25 bp, Probe Sequence
ctagccaggcaaagggggcaatggc

SEQ ID NO: 183317 - DNA, 25 bp, Probe Sequence
ctagcggggaggtgaggcgtgtctg

SEQ ID NO: 183318 - DNA, 25 bp, Probe Sequence
ctagcgggcagggttgggctgaatc

SEQ ID NO: 183319 - DNA, 25 bp, Probe Sequence
ctacggagggttgggtagacatcta

SEQ ID NO: 183320 - DNA, 25 bp, Probe Sequence
ctagggaggtggtaggcaggacctc

SEQ ID NO: 183321 - DNA, 25 bp, Probe Sequence
ctagagaggccgcaaggggaccgcc

SEQ ID NO: 183322 - DNA, 25 bp, Probe Sequence
ctagatgatatgtgtgggtggggcc

SEQ ID NO: 183323 - DNA, 25 bp, Probe Sequence
ctatcattattacctcctagggcca

SEQ ID NO: 183324 - DNA, 25 bp, Probe Sequence
ctattgccattaccataccattggc

SEQ ID NO: 183325 - DNA, 25 bp, Probe Sequence
gcgacctcgaagtaactcttggcaa

SEQ ID NO: 183326 - DNA, 25 bp, Probe Sequence
gaacaaagtaacagcctttcaattc

SEQ ID NO: 183327 - DNA, 25 bp, Probe Sequence
ctccaaggtaccagactcttcttac

SEQ ID NO: 183328 - DNA, 25 bp, Probe Sequence
ctaccggtgtgtgagacgacttata

SEQ ID NO: 183329 - DNA, 25 bp, Probe Sequence
ctacaaagggccggacgcagctatt

SEQ ID NO: 183330 - DNA, 25 bp, Probe Sequence
ctatcgatagggcaccgcgtgctga

SEQ ID NO: 183331 - DNA, 25 bp, Probe Sequence
ctatcaggagcacggccaccgaatg

SEQ ID NO: 183332 - DNA, 25 bp, Probe Sequence
ctctatgaatgcgagagcccctggg

SEQ ID NO: 183333 - DNA, 25 bp, Probe Sequence
ctcttgtagccatatcctttgcaat

SEQ ID NO: 183334 - DNA, 25 bp, Probe Sequence
ctatgactagacattcactttgcaa

SEQ ID NO: 183335 - DNA, 25 bp, Probe Sequence
ctatgactcggtcagcgtcttcaac

SEQ ID NO: 183336 - DNA, 25 bp, Probe Sequence
ctatgacacggtcactctgtatccc

SEQ ID NO: 183337 - DNA, 25 bp, Probe Sequence
ctataccttgatttctggtgtcccg

SEQ ID NO: 183338 - DNA, 25 bp, Probe Sequence
ctaagtttaagtagtgtatcctgca

SEQ ID NO: 183339 - DNA, 25 bp, Probe Sequence
ctaactattaactgagtagccacaa

SEQ ID NO: 183340 - DNA, 25 bp, Probe Sequence
ctatcccttaactatgagcaggtgc

SEQ ID NO: 183341 - DNA, 25 bp, Probe Sequence
ctagtccccaattctgataggctga

SEQ ID NO: 183342 - DNA, 25 bp, Probe Sequence
ctaccttggcagaacatgtacgtat

SEQ ID NO: 183343 - DNA, 25 bp, Probe Sequence
ctatttgggacagcattcctctctc

SEQ ID NO: 183344 - DNA, 25 bp, Probe Sequence
ctatttgggcaagagatgcgcttat

SEQ ID NO: 183345 - DNA, 25 bp, Probe Sequence
ctattatgggcaaccaatctttgga

SEQ ID NO: 183346 - DNA, 25 bp, Probe Sequence
ctatttcagtggaccaacattgtgg

SEQ ID NO: 183347 - DNA, 25 bp, Probe Sequence
ctatatatcagggaccacattatta

SEQ ID NO: 183348 - DNA, 25 bp, Probe Sequence
ctatattatggtgacacctatatga

SEQ ID NO: 183349 - DNA, 25 bp, Probe Sequence
ctatttcattgatttatcctctaat

SEQ ID NO: 183350 - DNA, 25 bp, Probe Sequence
ctatttctgtatgtctccatctatt

SEQ ID NO: 183351 - DNA, 25 bp, Probe Sequence
ctatttagctgtcactagcactctt

SEQ ID NO: 183352 - DNA, 25 bp, Probe Sequence
ctaccatgaggtccactacatcctg

SEQ ID NO: 183353 - DNA, 25 bp, Probe Sequence
ctacctaagtcagctttcatctttg

SEQ ID NO: 183354 - DNA, 25 bp, Probe Sequence
ctacctagttgatctttcagatctt

SEQ ID NO: 183355 - DNA, 25 bp, Probe Sequence
ctacgggatctttccattatgtcgt

SEQ ID NO: 183356 - DNA, 25 bp, Probe Sequence
ctacggatgactcgtgctttgaccc

SEQ ID NO: 183357 - DNA, 25 bp, Probe Sequence
ctacggcatcatcatggcaattgtc

SEQ ID NO: 183358 - DNA, 25 bp, Probe Sequence
ctagctacatctggtaccttggctg

SEQ ID NO: 183359 - DNA, 25 bp, Probe Sequence
ctagtaatactttgcctttttcact

SEQ ID NO: 183360 - DNA, 25 bp, Probe Sequence
ctgagtcgacagatacgtttttctt

SEQ ID NO: 183361 - DNA, 25 bp, Probe Sequence
ctaccaacaatttcgtttttcatag

SEQ ID NO: 183362 - DNA, 25 bp, Probe Sequence
ctactcaagcaattcctttggttct

SEQ ID NO: 183363 - DNA, 25 bp, Probe Sequence
ctatctctgagctataatttgtttt

SEQ ID NO: 183364 - DNA, 25 bp, Probe Sequence
ctatctatgacctacctgtgtgttc

SEQ ID NO: 183365 - DNA, 25 bp, Probe Sequence
ctatataaccgagtctcgtttagtg

SEQ ID NO: 183366 - DNA, 25 bp, Probe Sequence
ctatattcccaaattcatatttcag

SEQ ID NO: 183367 - DNA, 25 bp, Probe Sequence
ctatttcatacattctcatacattt

SEQ ID NO: 183368 - DNA, 25 bp, Probe Sequence
ctatgcttctcatttctacactact

SEQ ID NO: 183369 - DNA, 25 bp, Probe Sequence
ctatgctttctctcctaggagctgt

SEQ ID NO: 183370 - DNA, 25 bp, Probe Sequence
ctagataccacatctctagggcccc

SEQ ID NO: 183371 - DNA, 25 bp, Probe Sequence
ctatgaagcccgacttcaatggtcc

SEQ ID NO: 183372 - DNA, 25 bp, Probe Sequence
ctatatatcttgtttacctggtctc

SEQ ID NO: 183373 - DNA, 25 bp, Probe Sequence
ctataatttgtggtacagtattgct

SEQ ID NO: 183374 - DNA, 25 bp, Probe Sequence
ctattagtgacctatgacagtttgt

SEQ ID NO: 183375 - DNA, 25 bp, Probe Sequence
ctatccagtcaactttcagcttttc

SEQ ID NO: 183376 - DNA, 25 bp, Probe Sequence
ctacatcgtggaccactccattgcc

SEQ ID NO: 183377 - DNA, 25 bp, Probe Sequence
ctatccagtcagttcgctgctattc

SEQ ID NO: 183378 - DNA, 25 bp, Probe Sequence
ctatccagtcagttcgctgctattc

SEQ ID NO: 183379 - DNA, 25 bp, Probe Sequence
ctatgaagtcaggctcatctgctta

SEQ ID NO: 183380 - DNA, 25 bp, Probe Sequence
ctatgatgtgtcttccattctaaca

SEQ ID NO: 183381 - DNA, 25 bp, Probe Sequence
ctatggtgtgctgcggttcatcatg

SEQ ID NO: 183382 - DNA, 25 bp, Probe Sequence
ctatgaaggtggtgcttatgctgct

SEQ ID NO: 183383 - DNA, 25 bp, Probe Sequence
ctataaggggtttcctgctggacag

SEQ ID NO: 183384 - DNA, 25 bp, Probe Sequence
ctaaaagtggttgactctgggaggt

SEQ ID NO: 183385 - DNA, 25 bp, Probe Sequence
ctacaagtttagcaactcggggagc

SEQ ID NO: 183386 - DNA, 25 bp, Probe Sequence
ctaagcccttactagaccaatggga

SEQ ID NO: 183387 - DNA, 25 bp, Probe Sequence
ctaactggtatattagatcccatgg

SEQ ID NO: 183388 - DNA, 25 bp, Probe Sequence
ctacacggtgtacatttccagagcc

SEQ ID NO: 183389 - DNA, 25 bp, Probe Sequence
ctataggggtagctctttccaacag

SEQ ID NO: 183390 - DNA, 25 bp, Probe Sequence
ctaccacggaagtttcagtacaaag

SEQ ID NO: 183391 - DNA, 25 bp, Probe Sequence
ctaccctaacagtgccaaagcaaag

SEQ ID NO: 183392 - DNA, 25 bp, Probe Sequence
ctaccaccaaactcatcgacaggac

SEQ ID NO: 183393 - DNA, 25 bp, Probe Sequence
ctatccacccctgctcattggtgga

SEQ ID NO: 183394 - DNA, 25 bp, Probe Sequence
ctaccacctcgaactttgacagcga

SEQ ID NO: 183395 - DNA, 25 bp, Probe Sequence
ctaccaggacagaactttccccaat

SEQ ID NO: 183396 - DNA, 25 bp, Probe Sequence
ctaccaggtctaatattctaccaac

SEQ ID NO: 183397 - DNA, 25 bp, Probe Sequence
ctacctgcgtctttatgacaacccc

SEQ ID NO: 183398 - DNA, 25 bp, Probe Sequence
ctatgcacggtttgtgatcacaata

SEQ ID NO: 183399 - DNA, 25 bp, Probe Sequence
ctatgcacgttattttcaaccagta

SEQ ID NO: 183400 - DNA, 25 bp, Probe Sequence
ctatcacgctgatttttgacctcac

SEQ ID NO: 183401 - DNA, 25 bp, Probe Sequence
ctatctgcagtaattgaggacccat

SEQ ID NO: 183402 - DNA, 25 bp, Probe Sequence
ctacatgttgtgagaggacccagtg

SEQ ID NO: 183403 - DNA, 25 bp, Probe Sequence
ctaagctgactcagggcccaatgtc

SEQ ID NO: 183404 - DNA, 25 bp, Probe Sequence
ctatagtgaccttagtgatccctcc

SEQ ID NO: 183405 - DNA, 25 bp, Probe Sequence
ctatcgcggccatcgtgatcgccgc

SEQ ID NO: 183406 - DNA, 25 bp, Probe Sequence
ctatcgcggccatcgtgatcgccgc

SEQ ID NO: 183407 - DNA, 25 bp, Probe Sequence
ctagagccagcctcagttgatgcct

SEQ ID NO: 183408 - DNA, 25 bp, Probe Sequence
ctatgagccacctggatggtcttcc

SEQ ID NO: 183409 - DNA, 25 bp, Probe Sequence
ctatgagcccgtgttggccattggt

SEQ ID NO: 183410 - DNA, 25 bp, Probe Sequence
ctaactccctcacttggacttgaga

SEQ ID NO: 183411 - DNA, 25 bp, Probe Sequence
ctagcaccccttacgggctgggtgc

SEQ ID NO: 183412 - DNA, 25 bp, Probe Sequence
ctatgagccccggactgggctggtt

SEQ ID NO: 183413 - DNA, 25 bp, Probe Sequence
ctatgaggccaccctgaggtgctgg

SEQ ID NO: 183414 - DNA, 25 bp, Probe Sequence
ctatgcaggctactggtgcagagga

SEQ ID NO: 183415 - DNA, 25 bp, Probe Sequence
ctatcatgccaactactgcgagggt

SEQ ID NO: 183416 - DNA, 25 bp, Probe Sequence
ctatccacaacttcgcagagtgttt

SEQ ID NO: 183417 - DNA, 25 bp, Probe Sequence
ctatcccaagtgtgatccttcatcc

SEQ ID NO: 183418 - DNA, 25 bp, Probe Sequence
ctaaatacagaaagatacttcctca

SEQ ID NO: 183419 - DNA, 25 bp, Probe Sequence
ctaatagacaagtgtaatctcacca

SEQ ID NO: 183420 - DNA, 25 bp, Probe Sequence
ctacataactttcgtaatggcccgc

SEQ ID NO: 183421 - DNA, 25 bp, Probe Sequence
ctataaactctcttgttacagcccc

SEQ ID NO: 183422 - DNA, 25 bp, Probe Sequence
ctagactccctggagtattcgcccc

SEQ ID NO: 183423 - DNA, 25 bp, Probe Sequence
ctagtaacttgcgagtatttgtcta

SEQ ID NO: 183424 - DNA, 25 bp, Probe Sequence
ctatataattccggtcagtgctgac

SEQ ID NO: 183425 - DNA, 25 bp, Probe Sequence
ctatcatacctcccagtctggagat

SEQ ID NO: 183426 - DNA, 25 bp, Probe Sequence
ctatgctgaccccaatacttgcaga

SEQ ID NO: 183427 - DNA, 25 bp, Probe Sequence
ctcagtgacccgtccattgtgggta

SEQ ID NO: 183428 - DNA, 25 bp, Probe Sequence
ctagtacccagtccatgttcaaatg

SEQ ID NO: 183429 - DNA, 25 bp, Probe Sequence
ctactgacccagagcatgtttacca

SEQ ID NO: 183430 - DNA, 25 bp, Probe Sequence
ctatctacctcaacaagtttctaag

SEQ ID NO: 183431 - DNA, 25 bp, Probe Sequence
ctatcaacccaacattttgctctgg

SEQ ID NO: 183432 - DNA, 25 bp, Probe Sequence
ctatcataactacgtattcattgtc

SEQ ID NO: 183433 - DNA, 25 bp, Probe Sequence
ctaacatagctgagagattgatttc

SEQ ID NO: 183434 - DNA, 25 bp, Probe Sequence
ctagacatcctgtgcaatagtttgt

SEQ ID NO: 183435 - DNA, 25 bp, Probe Sequence
ctagacatgccttaggtaactgcag

SEQ ID NO: 183436 - DNA, 25 bp, Probe Sequence
ctagaagctctggagatgctttccc

SEQ ID NO: 183437 - DNA, 25 bp, Probe Sequence
ctagaatctattaagctttgagcag

SEQ ID NO: 183438 - DNA, 25 bp, Probe Sequence
ctatggcatcatataatttgctagt

SEQ ID NO: 183439 - DNA, 25 bp, Probe Sequence
ctatagtttatgtcttggctggttt

SEQ ID NO: 183440 - DNA, 25 bp, Probe Sequence
ctatgtatttcaatttggtatgcta

SEQ ID NO: 183441 - DNA, 25 bp, Probe Sequence
ctatgtgttccagtttgacctgaag

SEQ ID NO: 183442 - DNA, 25 bp, Probe Sequence
ctatgtttcatagtttacaataagt

SEQ ID NO: 183443 - DNA, 25 bp, Probe Sequence
ctatgttcctccttaactatacttg

SEQ ID NO: 183444 - DNA, 25 bp, Probe Sequence
ctatgtctccccatacacaaaaatc

SEQ ID NO: 183445 - DNA, 25 bp, Probe Sequence
ctgatcaccccgagaaagtaaacaa

SEQ ID NO: 183446 - DNA, 25 bp, Probe Sequence
ctacctgccaccaaactagtaaaat

SEQ ID NO: 183447 - DNA, 25 bp, Probe Sequence
ctaggcatggtggctcacacctgta

SEQ ID NO: 183448 - DNA, 25 bp, Probe Sequence
ctagagaggaggcccctcttagccc

SEQ ID NO: 183449 - DNA, 25 bp, Probe Sequence
ctagagaggaagcccctctgagccc

SEQ ID NO: 183450 - DNA, 25 bp, Probe Sequence
ctagtgggaagcttcacctgctgga

SEQ ID NO: 183451 - DNA, 25 bp, Probe Sequence
ctatgtcagggacacccagatgtag

SEQ ID NO: 183452 - DNA, 25 bp, Probe Sequence
ctatccagcgtactccaaagattca

SEQ ID NO: 183453 - DNA, 25 bp, Probe Sequence
ctatctcttgtactacactgaattc

SEQ ID NO: 183454 - DNA, 25 bp, Probe Sequence
ctatcctggcctacacagctgaagg

SEQ ID NO: 183455 - DNA, 25 bp, Probe Sequence
ctatcttgcggtagcacaggctctg

SEQ ID NO: 183456 - DNA, 25 bp, Probe Sequence
ctatctgaaggttgcactggccagc

SEQ ID NO: 183457 - DNA, 25 bp, Probe Sequence
ctataaacctagccatggccatccc

SEQ ID NO: 183458 - DNA, 25 bp, Probe Sequence
ctaaaactacatgtggccagctcca

SEQ ID NO: 183459 - DNA, 25 bp, Probe Sequence
ctgaaataaaagggagccgcttaca

SEQ ID NO: 183460 - DNA, 25 bp, Probe Sequence
cgaagacaaacggatgcacccgtct

SEQ ID NO: 183461 - DNA, 25 bp, Probe Sequence
ctagaacaaacgcagcagcctctgt

SEQ ID NO: 183462 - DNA, 25 bp, Probe Sequence
ctatgaactagacggagctcccacg

SEQ ID NO: 183463 - DNA, 25 bp, Probe Sequence
ctataataaacacagcttgcccagt

SEQ ID NO: 183464 - DNA, 25 bp, Probe Sequence
ctaccataaacacaccaccttgatt

SEQ ID NO: 183465 - DNA, 25 bp, Probe Sequence
ctaaagaactgaccagccaccgagg

SEQ ID NO: 183466 - DNA, 25 bp, Probe Sequence
ctataaacttataaccccagctgtg

SEQ ID NO: 183467 - DNA, 25 bp, Probe Sequence
ctataaagcttagctgccccttctg

SEQ ID NO: 183468 - DNA, 25 bp, Probe Sequence
ctcatgtaactttacaacccttgcg

SEQ ID NO: 183469 - DNA, 25 bp, Probe Sequence
ctatgtaacttgttgcagactggtg

SEQ ID NO: 183470 - DNA, 25 bp, Probe Sequence
ctatggacattggacggactgtgct

SEQ ID NO: 183471 - DNA, 25 bp, Probe Sequence
ctaggaatatgaatgctgggcgtgt

SEQ ID NO: 183472 - DNA, 25 bp, Probe Sequence
ctaaggatcatgtctgcgagccagg

SEQ ID NO: 183473 - DNA, 25 bp, Probe Sequence
ctatgatgcctatctgaagcgctgt

SEQ ID NO: 183474 - DNA, 25 bp, Probe Sequence
ctatcagcctccctgaacgattaaa

SEQ ID NO: 183475 - DNA, 25 bp, Probe Sequence
ctaagcccccgctgtaatgaaacac

SEQ ID NO: 183476 - DNA, 25 bp, Probe Sequence
ctaaccctccctgagaagataaccg

SEQ ID NO: 183477 - DNA, 25 bp, Probe Sequence
ctagaccaagcagaagaaagaaatt

SEQ ID NO: 183478 - DNA, 25 bp, Probe Sequence
ctagcactccagcctgggtgacaga

SEQ ID NO: 183479 - DNA, 25 bp, Probe Sequence
ctagcaatcgcatcatcggtgccaa

SEQ ID NO: 183480 - DNA, 25 bp, Probe Sequence
ctatctatctgaggcactggtggaa

SEQ ID NO: 183481 - DNA, 25 bp, Probe Sequence
ctatctatctgaggcactggtggaa

SEQ ID NO: 183482 - DNA, 25 bp, Probe Sequence
ctatctatctgaggcactggtggaa

SEQ ID NO: 183483 - DNA, 25 bp, Probe Sequence
ctatctatctgaggcactggtggaa

SEQ ID NO: 183484 - DNA, 25 bp, Probe Sequence
ctatctatctgaggcactggtggaa

SEQ ID NO: 183485 - DNA, 25 bp, Probe Sequence
ctatgtatcaggcatctgtgctgaa

SEQ ID NO: 183486 - DNA, 25 bp, Probe Sequence
ctatcttaggtagtcatgctgtgca

SEQ ID NO: 183487 - DNA, 25 bp, Probe Sequence
ctacttccgccagatgtgctgcaaa

SEQ ID NO: 183488 - DNA, 25 bp, Probe Sequence
ctagatctttcaggaattggcacac

SEQ ID NO: 183489 - DNA, 25 bp, Probe Sequence
ctaacttcaatttcaagagaccctg

SEQ ID NO: 183490 - DNA, 25 bp, Probe Sequence
tctaactctacaaccggagaactac

SEQ ID NO: 183491 - DNA, 25 bp, Probe Sequence
ctatctgtccacaccgaagaccaga

SEQ ID NO: 183492 - DNA, 25 bp, Probe Sequence
ctagttacaaccagagatgctccac

SEQ ID NO: 183493 - DNA, 25 bp, Probe Sequence
ctggttacaactctgaacctatcct

SEQ ID NO: 183494 - DNA, 25 bp, Probe Sequence
ctagaaacaacgcaaacctctcctt

SEQ ID NO: 183495 - DNA, 25 bp, Probe Sequence
ctagaaacaacgcaaacctctcctt

SEQ ID NO: 183496 - DNA, 25 bp, Probe Sequence
ctagtatagcatggggaaccacccc

SEQ ID NO: 183497 - DNA, 25 bp, Probe Sequence
ctaggtcactggctgctgacaacct

SEQ ID NO: 183498 - DNA, 25 bp, Probe Sequence
ctaggagcagccgttgtgaaccagc

SEQ ID NO: 183499 - DNA, 25 bp, Probe Sequence
ctaggcgcaggcccaggaatggctg

SEQ ID NO: 183500 - DNA, 25 bp, Probe Sequence
ctatggacgtctccaatcagctggc

SEQ ID NO: 183501 - DNA, 25 bp, Probe Sequence
ctatccacctgacaaagggctgata

SEQ ID NO: 183502 - DNA, 25 bp, Probe Sequence
ctatctccaggagggcaagggcgat

SEQ ID NO: 183503 - DNA, 25 bp, Probe Sequence
ctagaccagtgagcgcttgggcgcc

SEQ ID NO: 183504 - DNA, 25 bp, Probe Sequence
ctatgaccttggagatgtgctggag

SEQ ID NO: 183505 - DNA, 25 bp, Probe Sequence
ctaggcactgtgctatgttctggga

SEQ ID NO: 183506 - DNA, 25 bp, Probe Sequence
ctagggcgggtgcttcgagctaaaa

SEQ ID NO: 183507 - DNA, 25 bp, Probe Sequence
ctagagcagcggctggaaccctcaa

SEQ ID NO: 183508 - DNA, 25 bp, Probe Sequence
ctaacactggaatgaccacctaaga

SEQ ID NO: 183509 - DNA, 25 bp, Probe Sequence
ctaacacggtgaaaccccatctcta

SEQ ID NO: 183510 - DNA, 25 bp, Probe Sequence
ctaacacggtgaaaccccatctcta

SEQ ID NO: 183511 - DNA, 25 bp, Probe Sequence
ctaccatagttaaacttcaccctct

SEQ ID NO: 183512 - DNA, 25 bp, Probe Sequence
ctacctcaaaacactttcccatgag

SEQ ID NO: 183513 - DNA, 25 bp, Probe Sequence
ctacctaaaggtaatgttactagag

SEQ ID NO: 183514 - DNA, 25 bp, Probe Sequence
ctacactcaacggtttggatcctag

SEQ ID NO: 183515 - DNA, 25 bp, Probe Sequence
ctacttgaaaaccttggatactcag

SEQ ID NO: 183516 - DNA, 25 bp, Probe Sequence
ctacccctagaccttggtcactgta

SEQ ID NO: 183517 - DNA, 25 bp, Probe Sequence
ctacggccaggacggctggaccgta

SEQ ID NO: 183518 - DNA, 25 bp, Probe Sequence
ctacgcggtggactacgagaccttg

SEQ ID NO: 183519 - DNA, 25 bp, Probe Sequence
ctacagtggggacatcaagaatgca

SEQ ID NO: 183520 - DNA, 25 bp, Probe Sequence
ctaggtcaagatctagcgataatga

SEQ ID NO: 183521 - DNA, 25 bp, Probe Sequence
ctaggtgatccacaaggctcagata

SEQ ID NO: 183522 - DNA, 25 bp, Probe Sequence
ctatggctgaatctaatgctccaaa

SEQ ID NO: 183523 - DNA, 25 bp, Probe Sequence
ctatgttaacctttgctgctcagat

SEQ ID NO: 183524 - DNA, 25 bp, Probe Sequence
ctagtttacttatgcatctctttgc

SEQ ID NO: 183525 - DNA, 25 bp, Probe Sequence
ctatgttttcagaattcatcttttg

SEQ ID NO: 183526 - DNA, 25 bp, Probe Sequence
ctcaattttatgtttccttttggca

SEQ ID NO: 183527 - DNA, 25 bp, Probe Sequence
ctcaatctaagtcagtccactttga

SEQ ID NO: 183528 - DNA, 25 bp, Probe Sequence
ctgcggcttatacagtaccctaacc

SEQ ID NO: 183529 - DNA, 25 bp, Probe Sequence
ctctgttgattccaagtttcctata

SEQ ID NO: 183530 - DNA, 25 bp, Probe Sequence
ctgcctttttacagtcacctgaaca

SEQ ID NO: 183531 - DNA, 25 bp, Probe Sequence
ctcactcctgttacttacctaaaca

SEQ ID NO: 183532 - DNA, 25 bp, Probe Sequence
ctacccttgtgagttaccattcggt

SEQ ID NO: 183533 - DNA, 25 bp, Probe Sequence
gctaccttagggataagaccgtgat

SEQ ID NO: 183534 - DNA, 25 bp, Probe Sequence
ctacttgtgggacaacaaccaggtg

SEQ ID NO: 183535 - DNA, 25 bp, Probe Sequence
ctacgcggccgggaacaacaatggc

SEQ ID NO: 183536 - DNA, 25 bp, Probe Sequence
ctgaacggaccgctatccagaaggc

SEQ ID NO: 183537 - DNA, 25 bp, Probe Sequence
ctaccgtggcctggtaccaggtgag

SEQ ID NO: 183538 - DNA, 25 bp, Probe Sequence
ctcactcagggaaggtccctgggtg

SEQ ID NO: 183539 - DNA, 25 bp, Probe Sequence
ctacctggagaactctgcatcctgg

SEQ ID NO: 183540 - DNA, 25 bp, Probe Sequence
ctaaggaggaaaagaccttgacata

SEQ ID NO: 183541 - DNA, 25 bp, Probe Sequence
ctatgtggggaaaaagcagcttgta

SEQ ID NO: 183542 - DNA, 25 bp, Probe Sequence
ctactggggtagaaaagcttatatt

SEQ ID NO: 183543 - DNA, 25 bp, Probe Sequence
ctagctgtctggctgtataactctt

SEQ ID NO: 183544 - DNA, 25 bp, Probe Sequence
ctactttgaatgtctttactctttt

SEQ ID NO: 183545 - DNA, 25 bp, Probe Sequence
ctatgctagctattaatttcatctt

SEQ ID NO: 183546 - DNA, 25 bp, Probe Sequence
ctatgccttcaaaagagtctctgtt

SEQ ID NO: 183547 - DNA, 25 bp, Probe Sequence
ctagatcattagaaaagcactggta

SEQ ID NO: 183548 - DNA, 25 bp, Probe Sequence
ctaggcttggaattcacactgatct

SEQ ID NO: 183549 - DNA, 25 bp, Probe Sequence
ctagggtgtgtatccatctggctgt

SEQ ID NO: 183550 - DNA, 25 bp, Probe Sequence
ctagtgttcctatcccaggatggct

SEQ ID NO: 183551 - DNA, 25 bp, Probe Sequence
ctagttatgacttccaaatagattg

SEQ ID NO: 183552 - DNA, 25 bp, Probe Sequence
ctatgttctgacactcacagatttc

SEQ ID NO: 183553 - DNA, 25 bp, Probe Sequence
ctatccttgataccatgaccattta

SEQ ID NO: 183554 - DNA, 25 bp, Probe Sequence
ctaccttcagcactatgggattcta

SEQ ID NO: 183555 - DNA, 25 bp, Probe Sequence
ctacctgctaagtcaagggttcact

SEQ ID NO: 183556 - DNA, 25 bp, Probe Sequence
ctacctgctaagtcaagggttcact

SEQ ID NO: 183557 - DNA, 25 bp, Probe Sequence
ctatcctggcaactcaaggctgctt

SEQ ID NO: 183558 - DNA, 25 bp, Probe Sequence
ctacctggccaccatggccatggat

SEQ ID NO: 183559 - DNA, 25 bp, Probe Sequence
ctacagcgtgacgctggcacggctg

SEQ ID NO: 183560 - DNA, 25 bp, Probe Sequence
ctcaagtctgaagccgcaggcagcc

SEQ ID NO: 183561 - DNA, 25 bp, Probe Sequence
ctagcaatctgcaagaccaccaggc

SEQ ID NO: 183562 - DNA, 25 bp, Probe Sequence
ctaccagtgcataacaccacactca

SEQ ID NO: 183563 - DNA, 25 bp, Probe Sequence
ctaccgttaagagacatccagcagg

SEQ ID NO: 183564 - DNA, 25 bp, Probe Sequence
ctacggtttcaagatccatgcgatg

SEQ ID NO: 183565 - DNA, 25 bp, Probe Sequence
ctacgggttcctctctgagcgagcg

SEQ ID NO: 183566 - DNA, 25 bp, Probe Sequence
ctacagggctcgctatttcatctgg

SEQ ID NO: 183567 - DNA, 25 bp, Probe Sequence
ctacggcgctctatattttagtaga

SEQ ID NO: 183568 - DNA, 25 bp, Probe Sequence
ctaggtccacccatgttgtagaatg

SEQ ID NO: 183569 - DNA, 25 bp, Probe Sequence
ctaggtcaccctaatcattaaagaa

SEQ ID NO: 183570 - DNA, 25 bp, Probe Sequence
ctagggtacccaactcagaccagaa

SEQ ID NO: 183571 - DNA, 25 bp, Probe Sequence
ctagaagagaccttggccagtgcca

SEQ ID NO: 183572 - DNA, 25 bp, Probe Sequence
ctagaaataactttgcaaggagagc

SEQ ID NO: 183573 - DNA, 25 bp, Probe Sequence
ctaggcacaagagattgacgagaga

SEQ ID NO: 183574 - DNA, 25 bp, Probe Sequence
ctagatgatcaatgtatatccaaaa

SEQ ID NO: 183575 - DNA, 25 bp, Probe Sequence
ctactgtcaaatgatgtgcaaaacc

SEQ ID NO: 183576 - DNA, 25 bp, Probe Sequence
ctacccagtattagtataggatccc

SEQ ID NO: 183577 - DNA, 25 bp, Probe Sequence
tctacccgttctatttgtaactcca

SEQ ID NO: 183578 - DNA, 25 bp, Probe Sequence
ctacccgttctatttgtaactccat

SEQ ID NO: 183579 - DNA, 25 bp, Probe Sequence
ctaccaccctgtttttacatatcca

SEQ ID NO: 183580 - DNA, 25 bp, Probe Sequence
ctatgtacctatgttatctatctat

SEQ ID NO: 183581 - DNA, 25 bp, Probe Sequence
ctatgatacgcttttttctttcatt

SEQ ID NO: 183582 - DNA, 25 bp, Probe Sequence
ctagaacgctcttcttttagtgttt

SEQ ID NO: 183583 - DNA, 25 bp, Probe Sequence
ctagcatacgtttttcttaattgtt

SEQ ID NO: 183584 - DNA, 25 bp, Probe Sequence
ctagcttgagtgcttttattttttc

SEQ ID NO: 183585 - DNA, 25 bp, Probe Sequence
ctactataaggtattctatatttat

SEQ ID NO: 183586 - DNA, 25 bp, Probe Sequence
ctacttgtgatagttcatttacatt

SEQ ID NO: 183587 - DNA, 25 bp, Probe Sequence
ctactgctgctttcctaagttactc

SEQ ID NO: 183588 - DNA, 25 bp, Probe Sequence
ctacctctataccttcatgtaagcc

SEQ ID NO: 183589 - DNA, 25 bp, Probe Sequence
ctatgcactttagcttataaagcca

SEQ ID NO: 183590 - DNA, 25 bp, Probe Sequence
ctatgaccattaggcctatttaggt

SEQ ID NO: 183591 - DNA, 25 bp, Probe Sequence
ctatgaccattaggcctatttaggt

SEQ ID NO: 183592 - DNA, 25 bp, Probe Sequence
ctagctccagatggggctgttaaag

SEQ ID NO: 183593 - DNA, 25 bp, Probe Sequence
ctactctcagtatggattattaatg

SEQ ID NO: 183594 - DNA, 25 bp, Probe Sequence
ctactcctctgatggttttagtctc

SEQ ID NO: 183595 - DNA, 25 bp, Probe Sequence
ctagatggtctattgctgtattcag

SEQ ID NO: 183596 - DNA, 25 bp, Probe Sequence
ctatgtgtccacagctgtttgcaga

SEQ ID NO: 183597 - DNA, 25 bp, Probe Sequence
ctatgtttcaatctgtccatctacc

SEQ ID NO: 183598 - DNA, 25 bp, Probe Sequence
ctagactaatagctgatgactttcc

SEQ ID NO: 183599 - DNA, 25 bp, Probe Sequence
ctatgacgctatattatgagtgtac

SEQ ID NO: 183600 - DNA, 25 bp, Probe Sequence
ctagcttgcttactaatgcagacta

SEQ ID NO: 183601 - DNA, 25 bp, Probe Sequence
ctaactgttaccatctgactgaggt

SEQ ID NO: 183602 - DNA, 25 bp, Probe Sequence
ctagacggctactttctgtttgttt

SEQ ID NO: 183603 - DNA, 25 bp, Probe Sequence
ctgaacggttgccccttatttaatg

SEQ ID NO: 183604 - DNA, 25 bp, Probe Sequence
ctgaagaggcttctcctgttttata

SEQ ID NO: 183605 - DNA, 25 bp, Probe Sequence
cgcaggggttttctgcacttctaca

SEQ ID NO: 183606 - DNA, 25 bp, Probe Sequence
ctagggccattttactgcacccaaa

SEQ ID NO: 183607 - DNA, 25 bp, Probe Sequence
ctagggcttgtattaaaccactgaa

SEQ ID NO: 183608 - DNA, 25 bp, Probe Sequence
ctaaggtcgtgctctacaccaagaa

SEQ ID NO: 183609 - DNA, 25 bp, Probe Sequence
ctacagtttattacttgcccaagtg

SEQ ID NO: 183610 - DNA, 25 bp, Probe Sequence
ctacagcttctattcattatgcaac

SEQ ID NO: 183611 - DNA, 25 bp, Probe Sequence
ctacaatcttgacatttgaaccatg

SEQ ID NO: 183612 - DNA, 25 bp, Probe Sequence
ctacctcctgaatttattcaccttt

SEQ ID NO: 183613 - DNA, 25 bp, Probe Sequence
ctagctccgtaatgaatgttgtctt

SEQ ID NO: 183614 - DNA, 25 bp, Probe Sequence
ctactgccgccataggaattatttc

SEQ ID NO: 183615 - DNA, 25 bp, Probe Sequence
ctacgtgggcaatgggactgtcttc

SEQ ID NO: 183616 - DNA, 25 bp, Probe Sequence
ctacgtgtccaatgacgacatgttg

SEQ ID NO: 183617 - DNA, 25 bp, Probe Sequence
ctagcaggcacctagcgggacagtg

SEQ ID NO: 183618 - DNA, 25 bp, Probe Sequence
ctagggcctgcaaagcgagaagaga

SEQ ID NO: 183619 - DNA, 25 bp, Probe Sequence
ctaggccatctgagtgtgacaagag

SEQ ID NO: 183620 - DNA, 25 bp, Probe Sequence
ctaggccaccatggggacctgagag

SEQ ID NO: 183621 - DNA, 25 bp, Probe Sequence
ctaccacgccttctcagcaatgaag

SEQ ID NO: 183622 - DNA, 25 bp, Probe Sequence
ctaccacttcttcacatgacacagg

SEQ ID NO: 183623 - DNA, 25 bp, Probe Sequence
ctacgacgacttcatgatctactgc

SEQ ID NO: 183624 - DNA, 25 bp, Probe Sequence
ctaccagcagagatggatattcctc

SEQ ID NO: 183625 - DNA, 25 bp, Probe Sequence
ctacccgtgaattatatggcctgac

SEQ ID NO: 183626 - DNA, 25 bp, Probe Sequence
ctacctctaggaatttgtcctacaa

SEQ ID NO: 183627 - DNA, 25 bp, Probe Sequence
ctacctgccaggttcagttctttta

SEQ ID NO: 183628 - DNA, 25 bp, Probe Sequence
ctacctgctgggcacatttatttaa

SEQ ID NO: 183629 - DNA, 25 bp, Probe Sequence
ctagccatgcttaaacatttttcat

SEQ ID NO: 183630 - DNA, 25 bp, Probe Sequence
ctaccatttcctacactatttgagc

SEQ ID NO: 183631 - DNA, 25 bp, Probe Sequence
ctaccgctcttgcaataattggcag

SEQ ID NO: 183632 - DNA, 25 bp, Probe Sequence
ctaccaggcctgcaggtttgggcag

SEQ ID NO: 183633 - DNA, 25 bp, Probe Sequence
tctaccaaactgaagattttccgag

SEQ ID NO: 183634 - DNA, 25 bp, Probe Sequence
ctaccaaccaaaccagtttcaagag

SEQ ID NO: 183635 - DNA, 25 bp, Probe Sequence
ctaaagtgcccaagccgcatttaaa

SEQ ID NO: 183636 - DNA, 25 bp, Probe Sequence
ctcagcaagtgcacaagccttactt

SEQ ID NO: 183637 - DNA, 25 bp, Probe Sequence
ctagcacattcagaagctcgatagc

SEQ ID NO: 183638 - DNA, 25 bp, Probe Sequence
ctagacaacacaaactgcaggcatg

SEQ ID NO: 183639 - DNA, 25 bp, Probe Sequence
ctacgaacaaaacgcagcgcatggt

SEQ ID NO: 183640 - DNA, 25 bp, Probe Sequence
ctaccaactgatgcaggagccaccc

SEQ ID NO: 183641 - DNA, 25 bp, Probe Sequence
ctcactccagttgaggaggctccca

SEQ ID NO: 183642 - DNA, 25 bp, Probe Sequence
ctcacctagtctgggagcaacactc

SEQ ID NO: 183643 - DNA, 25 bp, Probe Sequence
ctacctgcggctggatggaaactac

SEQ ID NO: 183644 - DNA, 25 bp, Probe Sequence
ctacacatgggggactgaagagttc

SEQ ID NO: 183645 - DNA, 25 bp, Probe Sequence
ctaacaggggcgccgtaaagcccat

SEQ ID NO: 183646 - DNA, 25 bp, Probe Sequence
ctaccgtgaggatggtgtgacccca

SEQ ID NO: 183647 - DNA, 25 bp, Probe Sequence
ctactctggaggagtctgtcccact

SEQ ID NO: 183648 - DNA, 25 bp, Probe Sequence
ctacacgggagacgacgtccgcatc

SEQ ID NO: 183649 - DNA, 25 bp, Probe Sequence
ctacacgggagacgacgtccgcatc

SEQ ID NO: 183650 - DNA, 25 bp, Probe Sequence
ctacacgacagacgtacttccttcc

SEQ ID NO: 183651 - DNA, 25 bp, Probe Sequence
ctcacacgacaagacctcaactttg

SEQ ID NO: 183652 - DNA, 25 bp, Probe Sequence
ctcacccataaaacagtcaaccact

SEQ ID NO: 183653 - DNA, 25 bp, Probe Sequence
ctacctacagaaaagtgcccagagc

SEQ ID NO: 183654 - DNA, 25 bp, Probe Sequence
ctagacattaccaaagtgacctacc

SEQ ID NO: 183655 - DNA, 25 bp, Probe Sequence
ctagtcactttctattgctacctgc

SEQ ID NO: 183656 - DNA, 25 bp, Probe Sequence
ctagtcctattctattgcagttata

SEQ ID NO: 183657 - DNA, 25 bp, Probe Sequence
ctagtccctgtgtcaggatggtaca

SEQ ID NO: 183658 - DNA, 25 bp, Probe Sequence
ctagggccagtgacagttgcagaaa

SEQ ID NO: 183659 - DNA, 25 bp, Probe Sequence
ctagccatgcagcaatccttgcaaa

SEQ ID NO: 183660 - DNA, 25 bp, Probe Sequence
ctagatcagccatcagcctgtcaac

SEQ ID NO: 183661 - DNA, 25 bp, Probe Sequence
ctagagaacaacagccatcatcagc

SEQ ID NO: 183662 - DNA, 25 bp, Probe Sequence
ctagcagacactgactgcgcacctg

SEQ ID NO: 183663 - DNA, 25 bp, Probe Sequence
ctagaggagctcaaagccactctgc

SEQ ID NO: 183664 - DNA, 25 bp, Probe Sequence
ctagcatgaactaacccagcttcca

SEQ ID NO: 183665 - DNA, 25 bp, Probe Sequence
ctagcgctactcaagcctgcaaaac

SEQ ID NO: 183666 - DNA, 25 bp, Probe Sequence
ctagccaacatgcagttacaacagc

SEQ ID NO: 183667 - DNA, 25 bp, Probe Sequence
ctagctcaccagcagtgaatccaaa

SEQ ID NO: 183668 - DNA, 25 bp, Probe Sequence
ctaggacacaggggactccttgacg

SEQ ID NO: 183669 - DNA, 25 bp, Probe Sequence
ctgagaccacggagaatcgcttgaa

SEQ ID NO: 183670 - DNA, 25 bp, Probe Sequence
ctagcaccagggagatccagttacc

SEQ ID NO: 183671 - DNA, 25 bp, Probe Sequence
ctagcacccgagattctatgtgtag

SEQ ID NO: 183672 - DNA, 25 bp, Probe Sequence
ctagcactttaggaagctgaggtgg

SEQ ID NO: 183673 - DNA, 25 bp, Probe Sequence
ctagagtttatcaacacagaggtgt

SEQ ID NO: 183674 - DNA, 25 bp, Probe Sequence
ctaagttctattccaagagtttgga

SEQ ID NO: 183675 - DNA, 25 bp, Probe Sequence
ctaacccagactccaagtctttgga

SEQ ID NO: 183676 - DNA, 25 bp, Probe Sequence
ctaaaccatcccgtagtcttctaat

SEQ ID NO: 183677 - DNA, 25 bp, Probe Sequence
ctacatacgtgttcctagtttttat

SEQ ID NO: 183678 - DNA, 25 bp, Probe Sequence
ctacaaggagttctgtgacttttat

SEQ ID NO: 183679 - DNA, 25 bp, Probe Sequence
ctaaagctagatgtttacctatatt

SEQ ID NO: 183680 - DNA, 25 bp, Probe Sequence
ctagatacaaaggtcctccctcatt

SEQ ID NO: 183681 - DNA, 25 bp, Probe Sequence
ctaataaatagcgctcttcccttca

SEQ ID NO: 183682 - DNA, 25 bp, Probe Sequence
ctaacgtaatctaccatttcctaca

SEQ ID NO: 183683 - DNA, 25 bp, Probe Sequence
ctccaagtagtccaccttcatttaa

SEQ ID NO: 183684 - DNA, 25 bp, Probe Sequence
ctccaagcttggaactgttttgaaa

SEQ ID NO: 183685 - DNA, 25 bp, Probe Sequence
ctctaagctggcctcaggtttattg

SEQ ID NO: 183686 - DNA, 25 bp, Probe Sequence
ctctgaacaagtccgtgatatatta

SEQ ID NO: 183687 - DNA, 25 bp, Probe Sequence
ctctgagagaatcactcaattccta

SEQ ID NO: 183688 - DNA, 25 bp, Probe Sequence
ctagtaagtgccttccatgtcggcc

SEQ ID NO: 183689 - DNA, 25 bp, Probe Sequence
ctaggagtgcgacaagcagttcctc

SEQ ID NO: 183690 - DNA, 25 bp, Probe Sequence
ctagctgaaggacatccagttcccc

SEQ ID NO: 183691 - DNA, 25 bp, Probe Sequence
ctagcatgaatgcacttcctctgta

SEQ ID NO: 183692 - DNA, 25 bp, Probe Sequence
ctagcatgtatactctgccacggac

SEQ ID NO: 183693 - DNA, 25 bp, Probe Sequence
ctagcagtggcactttatagccacg

SEQ ID NO: 183694 - DNA, 25 bp, Probe Sequence
ctagatgttgagtcttgtcaccaca

SEQ ID NO: 183695 - DNA, 25 bp, Probe Sequence
ctagatcttgttcttctagatcaaa

SEQ ID NO: 183696 - DNA, 25 bp, Probe Sequence
ctagcagtcagttcttgttttcaaa

SEQ ID NO: 183697 - DNA, 25 bp, Probe Sequence
ctaccaagcttcttctatgttaaaa

SEQ ID NO: 183698 - DNA, 25 bp, Probe Sequence
ctacctatggacatctattaaagtg

SEQ ID NO: 183699 - DNA, 25 bp, Probe Sequence
ctaccatgattatttttttaagctg

SEQ ID NO: 183700 - DNA, 25 bp, Probe Sequence
ctacctatcttgccttaattaacat

SEQ ID NO: 183701 - DNA, 25 bp, Probe Sequence
ctactcttcctgtcctaaaaatagg

SEQ ID NO: 183702 - DNA, 25 bp, Probe Sequence
ctaccctggttactctagaggaagg

SEQ ID NO: 183703 - DNA, 25 bp, Probe Sequence
ctccccttttccttcagagtgaatc

SEQ ID NO: 183704 - DNA, 25 bp, Probe Sequence
ctccactttttctaccttggaactg

SEQ ID NO: 183705 - DNA, 25 bp, Probe Sequence
ctccctggttacaaagtagtaatct

SEQ ID NO: 183706 - DNA, 25 bp, Probe Sequence
ctctcaggcctttcgaagaactttc

SEQ ID NO: 183707 - DNA, 25 bp, Probe Sequence
ctctgggccttaggaagagccttcc

SEQ ID NO: 183708 - DNA, 25 bp, Probe Sequence
ctcatcgtcctgggtgaacgggtgc

SEQ ID NO: 183709 - DNA, 25 bp, Probe Sequence
ctactctcctccaaattcgcgaggc

SEQ ID NO: 183710 - DNA, 25 bp, Probe Sequence
ctacctccttaagtgactgccaaac

SEQ ID NO: 183711 - DNA, 25 bp, Probe Sequence
ctacctgccttacagagcagcccag

SEQ ID NO: 183712 - DNA, 25 bp, Probe Sequence
ctacctcaagtacagcaggccacaa

SEQ ID NO: 183713 - DNA, 25 bp, Probe Sequence
ctacgccgagtgacagagacgctca

SEQ ID NO: 183714 - DNA, 25 bp, Probe Sequence
ctacccagcaacctgagaagcacag

SEQ ID NO: 183715 - DNA, 25 bp, Probe Sequence
ctaccaggaggccatggacatcagc

SEQ ID NO: 183716 - DNA, 25 bp, Probe Sequence
ctagctcagtgatcttggccaagtt

SEQ ID NO: 183717 - DNA, 25 bp, Probe Sequence
ctaggcttgttgggtggcaatttga

SEQ ID NO: 183718 - DNA, 25 bp, Probe Sequence
ctacagctttgtggtaggccattat

SEQ ID NO: 183719 - DNA, 25 bp, Probe Sequence
ctaccttggtagatcagccttatgc

SEQ ID NO: 183720 - DNA, 25 bp, Probe Sequence
ctacctggagtcagtggccatcttg

SEQ ID NO: 183721 - DNA, 25 bp, Probe Sequence
ctactctggagttgaggtgcgagtt

SEQ ID NO: 183722 - DNA, 25 bp, Probe Sequence
ctactggccagttggtgactctgtg

SEQ ID NO: 183723 - DNA, 25 bp, Probe Sequence
ctagttcatagttgcctgtctggga

SEQ ID NO: 183724 - DNA, 25 bp, Probe Sequence
ctagtgtatgagttgttgttgggaa

SEQ ID NO: 183725 - DNA, 25 bp, Probe Sequence
ctagacaaggttgctgttgtgcagt

SEQ ID NO: 183726 - DNA, 25 bp, Probe Sequence
ctagacacggtgtccatatggagag

SEQ ID NO: 183727 - DNA, 25 bp, Probe Sequence
ctagacccgtgacctgagatgtgtg

SEQ ID NO: 183728 - DNA, 25 bp, Probe Sequence
ctagggtggatggctgctggtgtgg

SEQ ID NO: 183729 - DNA, 25 bp, Probe Sequence
ctaggggtatcaggcggggaggttg

SEQ ID NO: 183730 - DNA, 25 bp, Probe Sequence
ctagggagtatgctggaggcagagg

SEQ ID NO: 183731 - DNA, 25 bp, Probe Sequence
ctactggcgtattttgagcagagga

SEQ ID NO: 183732 - DNA, 25 bp, Probe Sequence
ctactgtgcgtgtatatacgcgtgt

SEQ ID NO: 183733 - DNA, 25 bp, Probe Sequence
ctacatccgcattgctgataccaat

SEQ ID NO: 183734 - DNA, 25 bp, Probe Sequence
ctacctgtgaatggagagccagtgc

SEQ ID NO: 183735 - DNA, 25 bp, Probe Sequence
ctactcttgaatcagtcacaggcag

SEQ ID NO: 183736 - DNA, 25 bp, Probe Sequence
ctaccttggattttgcatgagtgag

SEQ ID NO: 183737 - DNA, 25 bp, Probe Sequence
ctacctcgttcttgtcttgatgtgt

SEQ ID NO: 183738 - DNA, 25 bp, Probe Sequence
ctacacttctcttgggttatgttcc

SEQ ID NO: 183739 - DNA, 25 bp, Probe Sequence
ctaccatttcgagggcttcttcgac

SEQ ID NO: 183740 - DNA, 25 bp, Probe Sequence
ctaccagtattatggcttctcgcat

SEQ ID NO: 183741 - DNA, 25 bp, Probe Sequence
ctaccggctcattagtgttgtcagc

SEQ ID NO: 183742 - DNA, 25 bp, Probe Sequence
ctaccagacccttctggtgccagat

SEQ ID NO: 183743 - DNA, 25 bp, Probe Sequence
ctaccaatcctccaacttgatgcag

SEQ ID NO: 183744 - DNA, 25 bp, Probe Sequence
ctacctcatctctagaagctgggat

SEQ ID NO: 183745 - DNA, 25 bp, Probe Sequence
ctaccatagctacatcagtttgata

SEQ ID NO: 183746 - DNA, 25 bp, Probe Sequence
ctacccagtgagttcatttgtcata

SEQ ID NO: 183747 - DNA, 25 bp, Probe Sequence
ctacctgcacgagtgtattggtctg

SEQ ID NO: 183748 - DNA, 25 bp, Probe Sequence
ctagcctgcactttgatgtcatgtg

SEQ ID NO: 183749 - DNA, 25 bp, Probe Sequence
ctagcatctcagtacacatcctatg

SEQ ID NO: 183750 - DNA, 25 bp, Probe Sequence
ctagcaatcacaacactggctgagc

SEQ ID NO: 183751 - DNA, 25 bp, Probe Sequence
ctagcaatctatgtctgggaatatc

SEQ ID NO: 183752 - DNA, 25 bp, Probe Sequence
ctagcattcttctttggaaatcttt

SEQ ID NO: 183753 - DNA, 25 bp, Probe Sequence
ctagctcttttattctaccacggct

SEQ ID NO: 183754 - DNA, 25 bp, Probe Sequence
ctagttttttaatcctcaggcagtg

SEQ ID NO: 183755 - DNA, 25 bp, Probe Sequence
ctagtgatttttgatacccagcctt

SEQ ID NO: 183756 - DNA, 25 bp, Probe Sequence
ctagtatgttttgttcctgctgaat

SEQ ID NO: 183757 - DNA, 25 bp, Probe Sequence
ctaatctgttttgagtctttacaaa

SEQ ID NO: 183758 - DNA, 25 bp, Probe Sequence
ctaccgattctttggagttgtcaca

SEQ ID NO: 183759 - DNA, 25 bp, Probe Sequence
ctaccagattttaaacagatacgca

SEQ ID NO: 183760 - DNA, 25 bp, Probe Sequence
ctccggtttgtggacaggcaacagg

SEQ ID NO: 183761 - DNA, 25 bp, Probe Sequence
ctacggcatccggaatcgagacgag

SEQ ID NO: 183762 - DNA, 25 bp, Probe Sequence
ctacatcaacgtggaacgagaggag

SEQ ID NO: 183763 - DNA, 25 bp, Probe Sequence
ctcaccaacacggtgactgcggtga

SEQ ID NO: 183764 - DNA, 25 bp, Probe Sequence
ctacaagacccgcatccaggtgaga

SEQ ID NO: 183765 - DNA, 25 bp, Probe Sequence
ctacacggctcccgaaagtatgcag

SEQ ID NO: 183766 - DNA, 25 bp, Probe Sequence
ctacccctcagctgaaagtggtggg

SEQ ID NO: 183767 - DNA, 25 bp, Probe Sequence
ctcacccccaacacaggtggaaggt

SEQ ID NO: 183768 - DNA, 25 bp, Probe Sequence
ctcattacccacacacgaaggaaag

SEQ ID NO: 183769 - DNA, 25 bp, Probe Sequence
ctactacccagacaccaaaagaaga

SEQ ID NO: 183770 - DNA, 25 bp, Probe Sequence
ctagttcctagacacagccaaagat

SEQ ID NO: 183771 - DNA, 25 bp, Probe Sequence
ctaatatgttagtaccaacagtatc

SEQ ID NO: 183772 - DNA, 25 bp, Probe Sequence
ctagatttcatcattccacactgta

SEQ ID NO: 183773 - DNA, 25 bp, Probe Sequence
ctagtattccatctacagcacagta

SEQ ID NO: 183774 - DNA, 25 bp, Probe Sequence
ctaaatctcagtctacaaccttgct

SEQ ID NO: 183775 - DNA, 25 bp, Probe Sequence
ctagatacatcacattaaagctttt

SEQ ID NO: 183776 - DNA, 25 bp, Probe Sequence
ctaaatgctagctctaaattgtgta

SEQ ID NO: 183777 - DNA, 25 bp, Probe Sequence
ctaagacttctgactccaatttaaa

SEQ ID NO: 183778 - DNA, 25 bp, Probe Sequence
ctaaactttgcctccagtggtcaaa

SEQ ID NO: 183779 - DNA, 25 bp, Probe Sequence
ctaatagctgattcctcccaattta

SEQ ID NO: 183780 - DNA, 25 bp, Probe Sequence
ctactaatcaacgcccataatcata

SEQ ID NO: 183781 - DNA, 25 bp, Probe Sequence
ctagaaaaacctgccaaatatgatg

SEQ ID NO: 183782 - DNA, 25 bp, Probe Sequence
ctcacaaaacccgctacagacaagc

SEQ ID NO: 183783 - DNA, 25 bp, Probe Sequence
ctaccacacctctgttagcaaattc

SEQ ID NO: 183784 - DNA, 25 bp, Probe Sequence
ctaccaacacagctgttaaacattc

SEQ ID NO: 183785 - DNA, 25 bp, Probe Sequence
ctaacatcccagactttaaaattca

SEQ ID NO: 183786 - DNA, 25 bp, Probe Sequence
ctaactggccgtatttattcattca

SEQ ID NO: 183787 - DNA, 25 bp, Probe Sequence
ctaagctggcctcaggtttattggc

SEQ ID NO: 183788 - DNA, 25 bp, Probe Sequence
ctaaggccccagagatcgtttgatc

SEQ ID NO: 183789 - DNA, 25 bp, Probe Sequence
ctacggtcccagacaggtggttgta

SEQ ID NO: 183790 - DNA, 25 bp, Probe Sequence
ctcacggtcaccaggggtttgcaaa

SEQ ID NO: 183791 - DNA, 25 bp, Probe Sequence
ctcacatttcctatcgggtcttgaa

SEQ ID NO: 183792 - DNA, 25 bp, Probe Sequence
ctacttttctgcttcgtttttacat

SEQ ID NO: 183793 - DNA, 25 bp, Probe Sequence
ctaatattgcttcttgtgttttact

SEQ ID NO: 183794 - DNA, 25 bp, Probe Sequence
ctagattcactgtcttttgattctt

SEQ ID NO: 183795 - DNA, 25 bp, Probe Sequence
ctactttctcctatggatcgcttac

SEQ ID NO: 183796 - DNA, 25 bp, Probe Sequence
ctagcttagtccgcggacggataac

SEQ ID NO: 183797 - DNA, 25 bp, Probe Sequence
ctagctggttcttcacgtagtggaa

SEQ ID NO: 183798 - DNA, 25 bp, Probe Sequence
ctagctcttctctaacttggttaac

SEQ ID NO: 183799 - DNA, 25 bp, Probe Sequence
ctagtttcttagacttatctgcata

SEQ ID NO: 183800 - DNA, 25 bp, Probe Sequence
ctagtttcttagacttatctgcata

SEQ ID NO: 183801 - DNA, 25 bp, Probe Sequence
ctagctgtattttttgtatgcttaa

SEQ ID NO: 183802 - DNA, 25 bp, Probe Sequence
ctagctgtattttttgtatgcttaa

SEQ ID NO: 183803 - DNA, 25 bp, Probe Sequence
ctaagctggagttctgatttttaac

SEQ ID NO: 183804 - DNA, 25 bp, Probe Sequence
ctaactgtgcaatttgttctttctc

SEQ ID NO: 183805 - DNA, 25 bp, Probe Sequence
ctaacagtgttgagtcttcctaccc

SEQ ID NO: 183806 - DNA, 25 bp, Probe Sequence
ctctaggttctgagctctggctttg

SEQ ID NO: 183807 - DNA, 25 bp, Probe Sequence
ctaaggttgatgaagctgtagctgt

SEQ ID NO: 183808 - DNA, 25 bp, Probe Sequence
ctacatgatgtggtggaagtggctg

SEQ ID NO: 183809 - DNA, 25 bp, Probe Sequence
ctacagatgattatgcagcatttga

SEQ ID NO: 183810 - DNA, 25 bp, Probe Sequence
ctaaggctaaagttgatctgaacaa

SEQ ID NO: 183811 - DNA, 25 bp, Probe Sequence
ctactgggaggagctactagacaca

SEQ ID NO: 183812 - DNA, 25 bp, Probe Sequence
ctcctgggggatgctccccagggtt

SEQ ID NO: 183813 - DNA, 25 bp, Probe Sequence
ctcctctaagaaactcccctaaatg

SEQ ID NO: 183814 - DNA, 25 bp, Probe Sequence
ctccctaagagtctcctgacaaaag

SEQ ID NO: 183815 - DNA, 25 bp, Probe Sequence
cctcaataaggtctcaaaaatctac

SEQ ID NO: 183816 - DNA, 25 bp, Probe Sequence
gatccagataagagttaaaaccttt

SEQ ID NO: 183817 - DNA, 25 bp, Probe Sequence
tcataaggggttctaaaacactctt

SEQ ID NO: 183818 - DNA, 25 bp, Probe Sequence
ctcaagggaatacacatacaaacac

SEQ ID NO: 183819 - DNA, 25 bp, Probe Sequence
ctaagtggattacccaaacaccgcg

SEQ ID NO: 183820 - DNA, 25 bp, Probe Sequence
ctcacaatgtttcctccaagaaccg

SEQ ID NO: 183821 - DNA, 25 bp, Probe Sequence
ctcacgttgctccaccaataaacgt

SEQ ID NO: 183822 - DNA, 25 bp, Probe Sequence
ctcacctgaccaaccagtatatgca

SEQ ID NO: 183823 - DNA, 25 bp, Probe Sequence
ctagttgaacatctcactttgcccc

SEQ ID NO: 183824 - DNA, 25 bp, Probe Sequence
ctagttgaacatctcactttgcccc

SEQ ID NO: 183825 - DNA, 25 bp, Probe Sequence
ctaattatccattccttttggccct

SEQ ID NO: 183826 - DNA, 25 bp, Probe Sequence
ctagatctatccaccttgttttttt

SEQ ID NO: 183827 - DNA, 25 bp, Probe Sequence
ctagcaccatccataccagtaaact

SEQ ID NO: 183828 - DNA, 25 bp, Probe Sequence
ctagctgattcctataccactcaaa

SEQ ID NO: 183829 - DNA, 25 bp, Probe Sequence
ctactgttcgtaaattcctataata

SEQ ID NO: 183830 - DNA, 25 bp, Probe Sequence
ctacatggtttacatgttccaatat

SEQ ID NO: 183831 - DNA, 25 bp, Probe Sequence
ctacgtttctaccagtgtttcaatt

SEQ ID NO: 183832 - DNA, 25 bp, Probe Sequence
ctactttctctacagcttttcatgt

SEQ ID NO: 183833 - DNA, 25 bp, Probe Sequence
ctcacttccaaaagattgttgtagg

SEQ ID NO: 183834 - DNA, 25 bp, Probe Sequence
ctaattccattaaatccatactagg

SEQ ID NO: 183835 - DNA, 25 bp, Probe Sequence
ccatatgtccatcacagtactattc

SEQ ID NO: 183836 - DNA, 25 bp, Probe Sequence
ctcattgacttgcacagtccttctg

SEQ ID NO: 183837 - DNA, 25 bp, Probe Sequence
ctactactgtgctaggtcctttgtt

SEQ ID NO: 183838 - DNA, 25 bp, Probe Sequence
ctacaactgcagaagtgttccttta

SEQ ID NO: 183839 - DNA, 25 bp, Probe Sequence
ctacaatcccatcggtatcttcttg

SEQ ID NO: 183840 - DNA, 25 bp, Probe Sequence
ctacatacttcgttaatgccgcctg

SEQ ID NO: 183841 - DNA, 25 bp, Probe Sequence
ctaatggcttctctggagctgacct

SEQ ID NO: 183842 - DNA, 25 bp, Probe Sequence
ctaagtgcctccctagaggactcca

SEQ ID NO: 183843 - DNA, 25 bp, Probe Sequence
ctacatgtgccttccagagggacta

SEQ ID NO: 183844 - DNA, 25 bp, Probe Sequence
ctaccttctcatccaagtggtctgt

SEQ ID NO: 183845 - DNA, 25 bp, Probe Sequence
ctacctctccatcattgaggttctg

SEQ ID NO: 183846 - DNA, 25 bp, Probe Sequence
ctacctcagcctcataagtaggtgg

SEQ ID NO: 183847 - DNA, 25 bp, Probe Sequence
ctaccgagctgtcagcaagacggtg

SEQ ID NO: 183848 - DNA, 25 bp, Probe Sequence
ctaccatatgttccaaatactgcct

SEQ ID NO: 183849 - DNA, 25 bp, Probe Sequence
ctacctgtgtggcaagatcagcttt

SEQ ID NO: 183850 - DNA, 25 bp, Probe Sequence
ctacctctgttgaggctcactattt

SEQ ID NO: 183851 - DNA, 25 bp, Probe Sequence
ctagccgcgtggacggatcacgatt

SEQ ID NO: 183852 - DNA, 25 bp, Probe Sequence
ctacagcggggagagtgacagtgag

SEQ ID NO: 183853 - DNA, 25 bp, Probe Sequence
ctactgcgagggtgagtgcccgagc

SEQ ID NO: 183854 - DNA, 25 bp, Probe Sequence
ctaagccggcaacatggcccggttg

SEQ ID NO: 183855 - DNA, 25 bp, Probe Sequence
ctacagacggagtgctgtgccacct

SEQ ID NO: 183856 - DNA, 25 bp, Probe Sequence
ctaccacgtgtgtattttccgctag

SEQ ID NO: 183857 - DNA, 25 bp, Probe Sequence
ctaattcctgtatgttatccactac

SEQ ID NO: 183858 - DNA, 25 bp, Probe Sequence
ctaagcaccgtaagacctacagtac

SEQ ID NO: 183859 - DNA, 25 bp, Probe Sequence
ctaactccgatgaagacaaacctga

SEQ ID NO: 183860 - DNA, 25 bp, Probe Sequence
ctacacccaattccaaaagcctgag

SEQ ID NO: 183861 - DNA, 25 bp, Probe Sequence
ctacctcaaagcacaaaagtggtgc

SEQ ID NO: 183862 - DNA, 25 bp, Probe Sequence
ctacctccagacttcaaaaggaatg

SEQ ID NO: 183863 - DNA, 25 bp, Probe Sequence
ctacctttcacttccaaagccaatg

SEQ ID NO: 183864 - DNA, 25 bp, Probe Sequence
ctacctttcacttccaaagccaatg

SEQ ID NO: 183865 - DNA, 25 bp, Probe Sequence
ctagcgtcttcacagcgaatacaca

SEQ ID NO: 183866 - DNA, 25 bp, Probe Sequence
ctagctctatgtttacaaatggaca

SEQ ID NO: 183867 - DNA, 25 bp, Probe Sequence
ctcagttactcaggacgcaatttaa

SEQ ID NO: 183868 - DNA, 25 bp, Probe Sequence
ctacttcatccaagaccgttttcta

SEQ ID NO: 183869 - DNA, 25 bp, Probe Sequence
ctaagcctccagaaacgtcttctta

SEQ ID NO: 183870 - DNA, 25 bp, Probe Sequence
ctaactgcaccaaagaaccctctaa

SEQ ID NO: 183871 - DNA, 25 bp, Probe Sequence
ctaagcaaccgccaagaccttgcat

SEQ ID NO: 183872 - DNA, 25 bp, Probe Sequence
ctaccaacccgaaaccatcaagaat

SEQ ID NO: 183873 - DNA, 25 bp, Probe Sequence
ctaccaacccaaaaccatcaagaat

SEQ ID NO: 183874 - DNA, 25 bp, Probe Sequence
ctaaagtccatcaaaaacatccaga

SEQ ID NO: 183875 - DNA, 25 bp, Probe Sequence
ctgaaaagccgcacatatagacaaa

SEQ ID NO: 183876 - DNA, 25 bp, Probe Sequence
ctaaacctcctttctcaagacaaag

SEQ ID NO: 183877 - DNA, 25 bp, Probe Sequence
ctaatgacatccagtgtctccaaaa

SEQ ID NO: 183878 - DNA, 25 bp, Probe Sequence
ctaagcactgtctgttgtctttata

SEQ ID NO: 183879 - DNA, 25 bp, Probe Sequence
ctagcagacttttacttctcttaca

SEQ ID NO: 183880 - DNA, 25 bp, Probe Sequence
ctaaactttatcccatcgctttgat

SEQ ID NO: 183881 - DNA, 25 bp, Probe Sequence
ctacaatttaagcatcacccagtga

SEQ ID NO: 183882 - DNA, 25 bp, Probe Sequence
ctcacttcttaacatattcctgtgt

SEQ ID NO: 183883 - DNA, 25 bp, Probe Sequence
ctcacctctcaattaattaccttta

SEQ ID NO: 183884 - DNA, 25 bp, Probe Sequence
ctacctctcaatttgcatatccaga

SEQ ID NO: 183885 - DNA, 25 bp, Probe Sequence
ctaactccaatttctaagcagtcat

SEQ ID NO: 183886 - DNA, 25 bp, Probe Sequence
ctacttcccatatatacaatgttaa

SEQ ID NO: 183887 - DNA, 25 bp, Probe Sequence
ctagcccctgtctatcaaaagttat

SEQ ID NO: 183888 - DNA, 25 bp, Probe Sequence
ctactacctgtagacaaagccttct

SEQ ID NO: 183889 - DNA, 25 bp, Probe Sequence
ctactaactgttgagacgtgcttcc

SEQ ID NO: 183890 - DNA, 25 bp, Probe Sequence
ctagccaggctgttcaagactgctc

SEQ ID NO: 183891 - DNA, 25 bp, Probe Sequence
ctactgggctactaatacttctctc

SEQ ID NO: 183892 - DNA, 25 bp, Probe Sequence
ctacgggcttcaccaagtgaccatg

SEQ ID NO: 183893 - DNA, 25 bp, Probe Sequence
ctcaacgacttcctccaggagtatg

SEQ ID NO: 183894 - DNA, 25 bp, Probe Sequence
ctcaacgacttcctccaggagtatg

SEQ ID NO: 183895 - DNA, 25 bp, Probe Sequence
ctcacacgacatacccggagggact

SEQ ID NO: 183896 - DNA, 25 bp, Probe Sequence
ctaccacatgtaccgggagcgcggg

SEQ ID NO: 183897 - DNA, 25 bp, Probe Sequence
ctaaaatgtcacccaaggccaggtg

SEQ ID NO: 183898 - DNA, 25 bp, Probe Sequence
ctaacactttcttgaaggtcagggg

SEQ ID NO: 183899 - DNA, 25 bp, Probe Sequence
ctaccctcctctagaaggctgagta

SEQ ID NO: 183900 - DNA, 25 bp, Probe Sequence
ctaccctcctctagaaggctgagta

SEQ ID NO: 183901 - DNA, 25 bp, Probe Sequence
ctagccacccgcaagcagagtgtgg

SEQ ID NO: 183902 - DNA, 25 bp, Probe Sequence
ctaccaccaatcagcaggagatcgc

SEQ ID NO: 183903 - DNA, 25 bp, Probe Sequence
ctactacaatctcacagaagtccac

SEQ ID NO: 183904 - DNA, 25 bp, Probe Sequence
ctaccacatgacagacacaaggctc

SEQ ID NO: 183905 - DNA, 25 bp, Probe Sequence
ctactcgcaggcggccatgatgggc

SEQ ID NO: 183906 - DNA, 25 bp, Probe Sequence
ctacggcattgctccagtggatggt

SEQ ID NO: 183907 - DNA, 25 bp, Probe Sequence
ctagcagagttgtgtcagggggaag

SEQ ID NO: 183908 - DNA, 25 bp, Probe Sequence
ctagcacctggttccaggaggtaag

SEQ ID NO: 183909 - DNA, 25 bp, Probe Sequence
ctaaactggtcgagcgatggatttc

SEQ ID NO: 183910 - DNA, 25 bp, Probe Sequence
ctcgtactggatatacgttaattat

SEQ ID NO: 183911 - DNA, 25 bp, Probe Sequence
ctctgctacctgccgataggggaaa

SEQ ID NO: 183912 - DNA, 25 bp, Probe Sequence
ctcagccgcctgcaatcaggtgaat

SEQ ID NO: 183913 - DNA, 25 bp, Probe Sequence
ctagccactgtggacttgagcatgt

SEQ ID NO: 183914 - DNA, 25 bp, Probe Sequence
ctcagccttggatcaggagattatt

SEQ ID NO: 183915 - DNA, 25 bp, Probe Sequence
ctaccatgtgagtcccagagactat

SEQ ID NO: 183916 - DNA, 25 bp, Probe Sequence
ctagcacagtagttgacagaggaaa

SEQ ID NO: 183917 - DNA, 25 bp, Probe Sequence
ctagctcaggagttggcaaataaga

SEQ ID NO: 183918 - DNA, 25 bp, Probe Sequence
ctagctcactggagtagaattagat

SEQ ID NO: 183919 - DNA, 25 bp, Probe Sequence
cggcggctttggtgactctagataa

SEQ ID NO: 183920 - DNA, 25 bp, Probe Sequence
ctgtcggcgttacagagcctggtga

SEQ ID NO: 183921 - DNA, 25 bp, Probe Sequence
ctacgccgtagacaacacagggtta

SEQ ID NO: 183922 - DNA, 25 bp, Probe Sequence
ctcacgccctaataaggagcgaatc

SEQ ID NO: 183923 - DNA, 25 bp, Probe Sequence
ctaccccagtcatcacgtggagaaa

SEQ ID NO: 183924 - DNA, 25 bp, Probe Sequence
ctaccccggaaggctggaaatacag

SEQ ID NO: 183925 - DNA, 25 bp, Probe Sequence
ctcaccacggtgtaccgggatatta

SEQ ID NO: 183926 - DNA, 25 bp, Probe Sequence
ctacaaccttgaactgctgggatca

SEQ ID NO: 183927 - DNA, 25 bp, Probe Sequence
ctggtggcctgtaccagagggactc

SEQ ID NO: 183928 - DNA, 25 bp, Probe Sequence
ctgagtggccttgaggacgaacccc

SEQ ID NO: 183929 - DNA, 25 bp, Probe Sequence
ctgcgtgagtttggaggggaacgtg

SEQ ID NO: 183930 - DNA, 25 bp, Probe Sequence
ctctagtttttgtgtgtaacctctt

SEQ ID NO: 183931 - DNA, 25 bp, Probe Sequence
ctctttttttgctgttccaccaaat

SEQ ID NO: 183932 - DNA, 25 bp, Probe Sequence
ctgttttgttttgttttgctacgag

SEQ ID NO: 183933 - DNA, 25 bp, Probe Sequence
ctgttttgttttgtttttgagacat

SEQ ID NO: 183934 - DNA, 25 bp, Probe Sequence
cggtttgtttacacatttcctgttg

SEQ ID NO: 183935 - DNA, 25 bp, Probe Sequence
cctgtttagtaagtggcaattccat

SEQ ID NO: 183936 - DNA, 25 bp, Probe Sequence
ctctctggtaggtttaattttatgc

SEQ ID NO: 183937 - DNA, 25 bp, Probe Sequence
ctcactttgggctgtgggtttcagc

SEQ ID NO: 183938 - DNA, 25 bp, Probe Sequence
ctacagtggccgggagcgggtctac

SEQ ID NO: 183939 - DNA, 25 bp, Probe Sequence
ctacggcgactggagagggtgagta

SEQ ID NO: 183940 - DNA, 25 bp, Probe Sequence
ctacgaggagctggaggcggaggag

SEQ ID NO: 183941 - DNA, 25 bp, Probe Sequence
ctacgaggagctggaggcggaggag

SEQ ID NO: 183942 - DNA, 25 bp, Probe Sequence
ctcaacgggctctacgggagcacag

SEQ ID NO: 183943 - DNA, 25 bp, Probe Sequence
ctcaacgggctctacgggagcacag

SEQ ID NO: 183944 - DNA, 25 bp, Probe Sequence
ctaaggggtctagggagtcgcgcct

SEQ ID NO: 183945 - DNA, 25 bp, Probe Sequence
ctactttggttaggtagctccagcc

SEQ ID NO: 183946 - DNA, 25 bp, Probe Sequence
ctacttaggggcgggatgtcactcc

SEQ ID NO: 183947 - DNA, 25 bp, Probe Sequence
ctactttaacagggtatgctgcctc

SEQ ID NO: 183948 - DNA, 25 bp, Probe Sequence
ctactttaggactggatcccataaa

SEQ ID NO: 183949 - DNA, 25 bp, Probe Sequence
ctaccttggaactgtattagataaa

SEQ ID NO: 183950 - DNA, 25 bp, Probe Sequence
ctaccttggaactgtattagataaa

SEQ ID NO: 183951 - DNA, 25 bp, Probe Sequence
ctacctggacatgtcccattaaaaa

SEQ ID NO: 183952 - DNA, 25 bp, Probe Sequence
ctacctaagcatctcccgagaaaaa

SEQ ID NO: 183953 - DNA, 25 bp, Probe Sequence
ctaccacaagtactccctgataaag

SEQ ID NO: 183954 - DNA, 25 bp, Probe Sequence
ctcaccagaacaagctagaagaaat

SEQ ID NO: 183955 - DNA, 25 bp, Probe Sequence
ctcagacgaacgctagagagccaaa

SEQ ID NO: 183956 - DNA, 25 bp, Probe Sequence
ctcagaaaccgtgagagagccccca

SEQ ID NO: 183957 - DNA, 25 bp, Probe Sequence
ctcaagaaaggcccggaagccccag

SEQ ID NO: 183958 - DNA, 25 bp, Probe Sequence
ctgaagagtcagactggggggcccc

SEQ ID NO: 183959 - DNA, 25 bp, Probe Sequence
ctgaagagtcagactggggggcccc

SEQ ID NO: 183960 - DNA, 25 bp, Probe Sequence
ctaaagtagctgtgctaggggcctc

SEQ ID NO: 183961 - DNA, 25 bp, Probe Sequence
ctaaatatcagtctccacgggaccc

SEQ ID NO: 183962 - DNA, 25 bp, Probe Sequence
ctaaactcggccaaccaaggcacgc

SEQ ID NO: 183963 - DNA, 25 bp, Probe Sequence
ctacaatctttaaaatctaggccag

SEQ ID NO: 183964 - DNA, 25 bp, Probe Sequence
ctactcacttcacaagaccgtcaag

SEQ ID NO: 183965 - DNA, 25 bp, Probe Sequence
ctactaaattcctgactctgtaaga

SEQ ID NO: 183966 - DNA, 25 bp, Probe Sequence
ctacgaaatgcttgctcaggctcag

SEQ ID NO: 183967 - DNA, 25 bp, Probe Sequence
ctacgagatgatgctgcccagcgag

SEQ ID NO: 183968 - DNA, 25 bp, Probe Sequence
ctaagtggtggtggccagcgtgcag

SEQ ID NO: 183969 - DNA, 25 bp, Probe Sequence
ctacaatggtgagcaccctggagtg

SEQ ID NO: 183970 - DNA, 25 bp, Probe Sequence
ctacagaggcaatgccaccatgata

SEQ ID NO: 183971 - DNA, 25 bp, Probe Sequence
ctacgaggcatgccagcaggcctgt

SEQ ID NO: 183972 - DNA, 25 bp, Probe Sequence
ctaatggagatccatctgtcctgtg

SEQ ID NO: 183973 - DNA, 25 bp, Probe Sequence
ctaatggagatccatctgtcctgtg

SEQ ID NO: 183974 - DNA, 25 bp, Probe Sequence
ctaacagataggaatgacctatggc

SEQ ID NO: 183975 - DNA, 25 bp, Probe Sequence
ctaccacaatggcagatccttctcc

SEQ ID NO: 183976 - DNA, 25 bp, Probe Sequence
ctacgttagatccagaattatgcca

SEQ ID NO: 183977 - DNA, 25 bp, Probe Sequence
ctcacagtaactcagagattaccaa

SEQ ID NO: 183978 - DNA, 25 bp, Probe Sequence
ctactgtaaccaaatgatgaggcgc

SEQ ID NO: 183979 - DNA, 25 bp, Probe Sequence
ctacatttacacatctagcagtcag

SEQ ID NO: 183980 - DNA, 25 bp, Probe Sequence
ctagccttatcctctatgaggaagt

SEQ ID NO: 183981 - DNA, 25 bp, Probe Sequence
ctactcatttccttcctagtaatac

SEQ ID NO: 183982 - DNA, 25 bp, Probe Sequence
ctaacattgcccttcgcacataaat

SEQ ID NO: 183983 - DNA, 25 bp, Probe Sequence
ctaaagactccatggtgcattcaag

SEQ ID NO: 183984 - DNA, 25 bp, Probe Sequence
ctaaggactcctgagaattcctgtt

SEQ ID NO: 183985 - DNA, 25 bp, Probe Sequence
ctgaagagttttgggcattttttct

SEQ ID NO: 183986 - DNA, 25 bp, Probe Sequence
ctaaggtgtctaccatgattatttt

SEQ ID NO: 183987 - DNA, 25 bp, Probe Sequence
ctaccttgtgcttgtctgactagta

SEQ ID NO: 183988 - DNA, 25 bp, Probe Sequence
ctacgtattcattgtctacctgcta

SEQ ID NO: 183989 - DNA, 25 bp, Probe Sequence
ctacctacctggttgatcctgccag

SEQ ID NO: 183990 - DNA, 25 bp, Probe Sequence
ctacatgtacgtgttcatcctggcg

SEQ ID NO: 183991 - DNA, 25 bp, Probe Sequence
ctacattacctgttcttgcctaata

SEQ ID NO: 183992 - DNA, 25 bp, Probe Sequence
ctacattcatcttcgactttctaaa

SEQ ID NO: 183993 - DNA, 25 bp, Probe Sequence
ctactgtgcaccttatcttatatac

SEQ ID NO: 183994 - DNA, 25 bp, Probe Sequence
ctgacttacatgttactttatccgt

SEQ ID NO: 183995 - DNA, 25 bp, Probe Sequence
ctacggtcatgttcagcttcattgc

SEQ ID NO: 183996 - DNA, 25 bp, Probe Sequence
ctacgatgctctggaggtcttcgct

SEQ ID NO: 183997 - DNA, 25 bp, Probe Sequence
ctacgcagcactggttgcttctggt

SEQ ID NO: 183998 - DNA, 25 bp, Probe Sequence
ctaagcagtctggtccatgttggtc

SEQ ID NO: 183999 - DNA, 25 bp, Probe Sequence
ctaaagaccaatgtttggccactaa

SEQ ID NO: 184000 - DNA, 25 bp, Probe Sequence
ctaaatgaccaaagttgggagatca

SEQ ID NO: 184001 - DNA, 25 bp, Probe Sequence
cgcaaatgtcctcagattggggaaa

SEQ ID NO: 184002 - DNA, 25 bp, Probe Sequence
ctaagattaccttcttgttgataaa

SEQ ID NO: 184003 - DNA, 25 bp, Probe Sequence
ctaaattcccattgtgattaattga

SEQ ID NO: 184004 - DNA, 25 bp, Probe Sequence
ctactcattccctgttgtaatcaag

SEQ ID NO: 184005 - DNA, 25 bp, Probe Sequence
ctctttagcaccttgtattagtccg

SEQ ID NO: 184006 - DNA, 25 bp, Probe Sequence
ctcacgtctaccttacaaattccag

SEQ ID NO: 184007 - DNA, 25 bp, Probe Sequence
ctcatgctttacttttaaacccgag

SEQ ID NO: 184008 - DNA, 25 bp, Probe Sequence
ctcagtgtatacctttaaacccata

SEQ ID NO: 184009 - DNA, 25 bp, Probe Sequence
ctcaagtcccttttaaaatcgctag

SEQ ID NO: 184010 - DNA, 25 bp, Probe Sequence
ctcaagccgtttttattacacttag

SEQ ID NO: 184011 - DNA, 25 bp, Probe Sequence
ctaaacttttaaacatctccattat

SEQ ID NO: 184012 - DNA, 25 bp, Probe Sequence
ctaaagatagcagaaacatcccttc

SEQ ID NO: 184013 - DNA, 25 bp, Probe Sequence
ctaaagcataagttagtcttttcct

SEQ ID NO: 184014 - DNA, 25 bp, Probe Sequence
ctaaacatgtaaccatgccctaccc

SEQ ID NO: 184015 - DNA, 25 bp, Probe Sequence
ctaactttgatactcataacaactc

SEQ ID NO: 184016 - DNA, 25 bp, Probe Sequence
ctaacatgttgtgcctggaccatcg

SEQ ID NO: 184017 - DNA, 25 bp, Probe Sequence
ctaacatgcttgaatcaaagtcctt

SEQ ID NO: 184018 - DNA, 25 bp, Probe Sequence
ctaaatgtatgtccaacttccactt

SEQ ID NO: 184019 - DNA, 25 bp, Probe Sequence
ctaaatggcttccagaccatctctc

SEQ ID NO: 184020 - DNA, 25 bp, Probe Sequence
ctaacaggctggggacgcagcccag

SEQ ID NO: 184021 - DNA, 25 bp, Probe Sequence
ctaatactgcttgtaccagccagag

SEQ ID NO: 184022 - DNA, 25 bp, Probe Sequence
ctcaaaatgttgctgtgcgcctagg

SEQ ID NO: 184023 - DNA, 25 bp, Probe Sequence
ctacagaatttcaatgagcgccaac

SEQ ID NO: 184024 - DNA, 25 bp, Probe Sequence
ctacagaagtctaacaggaattccc

SEQ ID NO: 184025 - DNA, 25 bp, Probe Sequence
ctcacagaagtccactaaagttcac

SEQ ID NO: 184026 - DNA, 25 bp, Probe Sequence
ctccaggagttagaaggcctcccgg

SEQ ID NO: 184027 - DNA, 25 bp, Probe Sequence
ctaaggtgttcaggaaggccggacg

SEQ ID NO: 184028 - DNA, 25 bp, Probe Sequence
ctaaaaattagaaagcgcgcagaac

SEQ ID NO: 184029 - DNA, 25 bp, Probe Sequence
ctgactccaatttaaaccaggaaag

SEQ ID NO: 184030 - DNA, 25 bp, Probe Sequence
ctgacccaaatttagtcccagaaat

SEQ ID NO: 184031 - DNA, 25 bp, Probe Sequence
ctacccataatttttgcacagtgaa

SEQ ID NO: 184032 - DNA, 25 bp, Probe Sequence
ctacctctactgtttcagctcatta

SEQ ID NO: 184033 - DNA, 25 bp, Probe Sequence
ctaccttgactggattaggcaacaa

SEQ ID NO: 184034 - DNA, 25 bp, Probe Sequence
ctacactcttgagcaataccagaaa

SEQ ID NO: 184035 - DNA, 25 bp, Probe Sequence
ctccaccttcctcaggaaaaaccag

SEQ ID NO: 184036 - DNA, 25 bp, Probe Sequence
cctacctttggcagtacaatctacc

SEQ ID NO: 184037 - DNA, 25 bp, Probe Sequence
cgtcaccatcatgtattggaaatta

SEQ ID NO: 184038 - DNA, 25 bp, Probe Sequence
ctactccttgctgttgtgaaatcta

SEQ ID NO: 184039 - DNA, 25 bp, Probe Sequence
ctaccctgtctgttggtcagactca

SEQ ID NO: 184040 - DNA, 25 bp, Probe Sequence
ctactgcctctcagctggaggacga

SEQ ID NO: 184041 - DNA, 25 bp, Probe Sequence
ctactgcctctcagctggaggacga

SEQ ID NO: 184042 - DNA, 25 bp, Probe Sequence
ctacaacgtcatagtggaggcactg

SEQ ID NO: 184043 - DNA, 25 bp, Probe Sequence
ctacaaccactgaggtgatcactgt

SEQ ID NO: 184044 - DNA, 25 bp, Probe Sequence
ctcaccacccacagtgtgaatcctg

SEQ ID NO: 184045 - DNA, 25 bp, Probe Sequence
ctcacctacagctgggatgtacctg

SEQ ID NO: 184046 - DNA, 25 bp, Probe Sequence
ctcacagtaccaacggattccctgg

SEQ ID NO: 184047 - DNA, 25 bp, Probe Sequence
ctcaaaaccatcaggatcctgccac

SEQ ID NO: 184048 - DNA, 25 bp, Probe Sequence
ctaaaagcctcacagatactctccc

SEQ ID NO: 184049 - DNA, 25 bp, Probe Sequence
ctaaatcccatcttgatatactatg

SEQ ID NO: 184050 - DNA, 25 bp, Probe Sequence
ctaaccctaagaccattcgcatggc

SEQ ID NO: 184051 - DNA, 25 bp, Probe Sequence
ctcaaccagctcgacggctttgagg

SEQ ID NO: 184052 - DNA, 25 bp, Probe Sequence
ctactcctcctgtcggtgattgaga

SEQ ID NO: 184053 - DNA, 25 bp, Probe Sequence
ctacatcctactgtgcgtgtatata

SEQ ID NO: 184054 - DNA, 25 bp, Probe Sequence
ctacacctagctactttatttattt

SEQ ID NO: 184055 - DNA, 25 bp, Probe Sequence
ctacacctacttggatatacttctg

SEQ ID NO: 184056 - DNA, 25 bp, Probe Sequence
ctactccttgttggatacactcagc

SEQ ID NO: 184057 - DNA, 25 bp, Probe Sequence
ctacctctcatgctggatgccagct

SEQ ID NO: 184058 - DNA, 25 bp, Probe Sequence
ctactctgtctgctgtgattaaaca

SEQ ID NO: 184059 - DNA, 25 bp, Probe Sequence
ctacctgactgtggtcttcgagcac

SEQ ID NO: 184060 - DNA, 25 bp, Probe Sequence
ctactgcaccgtgggagtcgagccc

SEQ ID NO: 184061 - DNA, 25 bp, Probe Sequence
ctactacgttgacactgctgtgcgc

SEQ ID NO: 184062 - DNA, 25 bp, Probe Sequence
ctacaacaatctatcctgctgctgg

SEQ ID NO: 184063 - DNA, 25 bp, Probe Sequence
ctaatctcagccaaacctgctgctt

SEQ ID NO: 184064 - DNA, 25 bp, Probe Sequence
ctactgtagcctcagcatcttgcta

SEQ ID NO: 184065 - DNA, 25 bp, Probe Sequence
ctactgttcacgaaatcctgtgcaa

SEQ ID NO: 184066 - DNA, 25 bp, Probe Sequence
ctactcttgcaagccacacttagag

SEQ ID NO: 184067 - DNA, 25 bp, Probe Sequence
ctacacccacgtccagatctacgtg

SEQ ID NO: 184068 - DNA, 25 bp, Probe Sequence
ctacacccacaaacattcttcgttc

SEQ ID NO: 184069 - DNA, 25 bp, Probe Sequence
ctacatccaccaaaattgtgtgtgt

SEQ ID NO: 184070 - DNA, 25 bp, Probe Sequence
ctacatccagcacctgtcatttggg

SEQ ID NO: 184071 - DNA, 25 bp, Probe Sequence
ctacatccagcacctgtcatttggg

SEQ ID NO: 184072 - DNA, 25 bp, Probe Sequence
ctacagccaagcaggtgtgggaggc

SEQ ID NO: 184073 - DNA, 25 bp, Probe Sequence
ctacatgctccaaggggtggcgcag

SEQ ID NO: 184074 - DNA, 25 bp, Probe Sequence
ctcagacttcatagagctgtgtctg

SEQ ID NO: 184075 - DNA, 25 bp, Probe Sequence
ctctggttgttggcagctttggggc

SEQ ID NO: 184076 - DNA, 25 bp, Probe Sequence
ctctggttgttggcagctttggggc

SEQ ID NO: 184077 - DNA, 25 bp, Probe Sequence
ctaagttgttggccttgtgtgtgtg

SEQ ID NO: 184078 - DNA, 25 bp, Probe Sequence
ctctagttttgggtgtgcatgtttg

SEQ ID NO: 184079 - DNA, 25 bp, Probe Sequence
ctctggttttgaccttcaggaaaca

SEQ ID NO: 184080 - DNA, 25 bp, Probe Sequence
ctccggttatgttgctccagtaaaa

SEQ ID NO: 184081 - DNA, 25 bp, Probe Sequence
ctacggctttgctgccctgaaatat

SEQ ID NO: 184082 - DNA, 25 bp, Probe Sequence
ctaccctgactactcaccaaaatat

SEQ ID NO: 184083 - DNA, 25 bp, Probe Sequence
ctaccctcccactatcaagaaataa

SEQ ID NO: 184084 - DNA, 25 bp, Probe Sequence
ctacctctactccattctagacaaa

SEQ ID NO: 184085 - DNA, 25 bp, Probe Sequence
ctacgcaattctcgattctttgaag

SEQ ID NO: 184086 - DNA, 25 bp, Probe Sequence
ctcagcgacttttattgcagatgtc

SEQ ID NO: 184087 - DNA, 25 bp, Probe Sequence
ctcaagactagtgaggcctgtcccc

SEQ ID NO: 184088 - DNA, 25 bp, Probe Sequence
ctaagttactcaaagcactgcttct

SEQ ID NO: 184089 - DNA, 25 bp, Probe Sequence
ctaagttgacactgccctgggcaga

SEQ ID NO: 184090 - DNA, 25 bp, Probe Sequence
ctacctgtgtcattggccttaacaa

SEQ ID NO: 184091 - DNA, 25 bp, Probe Sequence
ctaattattgcaaacctatacacaa

SEQ ID NO: 184092 - DNA, 25 bp, Probe Sequence
ctaaatatgtcaaaattgtggagaa

SEQ ID NO: 184093 - DNA, 25 bp, Probe Sequence
ctaacatatgtaataattgccagga

SEQ ID NO: 184094 - DNA, 25 bp, Probe Sequence
ctaataagacattagctgtctaggc

SEQ ID NO: 184095 - DNA, 25 bp, Probe Sequence
ctaacaaacggagtactgagtcttc

SEQ ID NO: 184096 - DNA, 25 bp, Probe Sequence
ctaactacctggccaccatggccat

SEQ ID NO: 184097 - DNA, 25 bp, Probe Sequence
ctacaaaactgacccgttcatcttc

SEQ ID NO: 184098 - DNA, 25 bp, Probe Sequence
ctacaccaaatccagcccttgattt

SEQ ID NO: 184099 - DNA, 25 bp, Probe Sequence
ctacagatgcaaaatcaccccttct

SEQ ID NO: 184100 - DNA, 25 bp, Probe Sequence
ctaagattaaatgcccctcgctgtt

SEQ ID NO: 184101 - DNA, 25 bp, Probe Sequence
ctaagatctaagatggcccggcgcg

SEQ ID NO: 184102 - DNA, 25 bp, Probe Sequence
ctcagacttaacagacccagctctg

SEQ ID NO: 184103 - DNA, 25 bp, Probe Sequence
ctcagaaaagacgcaccagcccaga

SEQ ID NO: 184104 - DNA, 25 bp, Probe Sequence
ctcaaagagaaaggccccacgctgc

SEQ ID NO: 184105 - DNA, 25 bp, Probe Sequence
ctcaacaagtacgacgacaacgtca

SEQ ID NO: 184106 - DNA, 25 bp, Probe Sequence
ctcaataattacacaaggacctaga

SEQ ID NO: 184107 - DNA, 25 bp, Probe Sequence
ctcaaagtctcccgaaaggtctaag

SEQ ID NO: 184108 - DNA, 25 bp, Probe Sequence
ctgcaaaatcccggaaggagccaag

SEQ ID NO: 184109 - DNA, 25 bp, Probe Sequence
ctcaaattcttcgaaagtggttgga

SEQ ID NO: 184110 - DNA, 25 bp, Probe Sequence
ctacaacatttggcagagagctggg

SEQ ID NO: 184111 - DNA, 25 bp, Probe Sequence
ctacagccagaagtgcagagtcaga

SEQ ID NO: 184112 - DNA, 25 bp, Probe Sequence
ctactgcctgctgtgcgagtgcagg

SEQ ID NO: 184113 - DNA, 25 bp, Probe Sequence
ctacttccggatccgcagaggaact

SEQ ID NO: 184114 - DNA, 25 bp, Probe Sequence
ctaccccatgcctgctgcagaaata

SEQ ID NO: 184115 - DNA, 25 bp, Probe Sequence
ctacgccaagcacaccaaacagagc

SEQ ID NO: 184116 - DNA, 25 bp, Probe Sequence
ctaaacaagcaggcaccacgtgggc

SEQ ID NO: 184117 - DNA, 25 bp, Probe Sequence
ctaaatccgcagcaaactgccgtgc

SEQ ID NO: 184118 - DNA, 25 bp, Probe Sequence
ctcaagaagtctcagaactccaggc

SEQ ID NO: 184119 - DNA, 25 bp, Probe Sequence
ctcgacggcattcaggaagccctgc

SEQ ID NO: 184120 - DNA, 25 bp, Probe Sequence
ctctcatggggtcaggcatagacct

SEQ ID NO: 184121 - DNA, 25 bp, Probe Sequence
ctcatctgggtctcccaggacacat

SEQ ID NO: 184122 - DNA, 25 bp, Probe Sequence
ctcacaatggtcttcacttggtctg

SEQ ID NO: 184123 - DNA, 25 bp, Probe Sequence
ctacatatcgtcttcttcgtgggaa

SEQ ID NO: 184124 - DNA, 25 bp, Probe Sequence
ctacattctgcaggtattggttgga

SEQ ID NO: 184125 - DNA, 25 bp, Probe Sequence
ctcaattcaggctatgtatgactat

SEQ ID NO: 184126 - DNA, 25 bp, Probe Sequence
ctaattcgcatctggaagctcagca

SEQ ID NO: 184127 - DNA, 25 bp, Probe Sequence
ctcaattcctattggagtgcaatcc

SEQ ID NO: 184128 - DNA, 25 bp, Probe Sequence
ctcaatatcccatcagcgcatcagg

SEQ ID NO: 184129 - DNA, 25 bp, Probe Sequence
ctaatcccagtgaccgccagggagc

SEQ ID NO: 184130 - DNA, 25 bp, Probe Sequence
ctaatgccctggcccacaagtatca

SEQ ID NO: 184131 - DNA, 25 bp, Probe Sequence
ctaccctatggccctgaatggtgca

SEQ ID NO: 184132 - DNA, 25 bp, Probe Sequence
ctaacactatacacagagtaggcac

SEQ ID NO: 184133 - DNA, 25 bp, Probe Sequence
ctaaagatgaactgaggccaggcac

SEQ ID NO: 184134 - DNA, 25 bp, Probe Sequence
ctactcaagaccggaggcacagagg

SEQ ID NO: 184135 - DNA, 25 bp, Probe Sequence
ctactacatgattggtgagcagaag

SEQ ID NO: 184136 - DNA, 25 bp, Probe Sequence
ctcagctgacagcgtgggcaacgcc

SEQ ID NO: 184137 - DNA, 25 bp, Probe Sequence
ctcagcatggcatctgtagtaaatg

SEQ ID NO: 184138 - DNA, 25 bp, Probe Sequence
ctaaggcagttgctatccacatgca

SEQ ID NO: 184139 - DNA, 25 bp, Probe Sequence
ctacatgcaggaaggttcacaccag

SEQ ID NO: 184140 - DNA, 25 bp, Probe Sequence
ctactctgaggacgatattcaccgt

SEQ ID NO: 184141 - DNA, 25 bp, Probe Sequence
ctacccagagattgcttctcatccc

SEQ ID NO: 184142 - DNA, 25 bp, Probe Sequence
ctacacctgagccaggctcttgcca

SEQ ID NO: 184143 - DNA, 25 bp, Probe Sequence
ctaacacttgggttctatgctcaga

SEQ ID NO: 184144 - DNA, 25 bp, Probe Sequence
ctaacactgggtctgcttatgctag

SEQ ID NO: 184145 - DNA, 25 bp, Probe Sequence
ctaacttggtgtatgatcttgagca

SEQ ID NO: 184146 - DNA, 25 bp, Probe Sequence
ctacatctgtgtatactgtcctggt

SEQ ID NO: 184147 - DNA, 25 bp, Probe Sequence
ctacggtggcatcacagatcctggc

SEQ ID NO: 184148 - DNA, 25 bp, Probe Sequence
ctacgactggtgggacatcctgctg

SEQ ID NO: 184149 - DNA, 25 bp, Probe Sequence
ctactctgctttggtacatcacagc

SEQ ID NO: 184150 - DNA, 25 bp, Probe Sequence
ctactcagctgtagcctgaagccgc

SEQ ID NO: 184151 - DNA, 25 bp, Probe Sequence
ctactcagccatggggtacggctcc

SEQ ID NO: 184152 - DNA, 25 bp, Probe Sequence
ctacatcgccttggtgaacgtgctc

SEQ ID NO: 184153 - DNA, 25 bp, Probe Sequence
ctcacttggccttctgaaggtcctc

SEQ ID NO: 184154 - DNA, 25 bp, Probe Sequence
ctacaatgccacactgtcggtgcac

SEQ ID NO: 184155 - DNA, 25 bp, Probe Sequence
ctcacaagccagaaatttgggagca

SEQ ID NO: 184156 - DNA, 25 bp, Probe Sequence
ctcaaagtaaaaatggccctcagga

SEQ ID NO: 184157 - DNA, 25 bp, Probe Sequence
ctcaaattggccaacataccctcag

SEQ ID NO: 184158 - DNA, 25 bp, Probe Sequence
ctcaaaattcacaacttgcaaatca

SEQ ID NO: 184159 - DNA, 25 bp, Probe Sequence
ctactacttcacacattatagataa

SEQ ID NO: 184160 - DNA, 25 bp, Probe Sequence
ctacattcttgcttccttaaattaa

SEQ ID NO: 184161 - DNA, 25 bp, Probe Sequence
ctcacattcaatgccagttaaaatt

SEQ ID NO: 184162 - DNA, 25 bp, Probe Sequence
ctcactctgttgtccaggttggagt

SEQ ID NO: 184163 - DNA, 25 bp, Probe Sequence
ctactggcgctgccaaggctgtggg

SEQ ID NO: 184164 - DNA, 25 bp, Probe Sequence
ctaaacgtggaatgcatgtgactgt

SEQ ID NO: 184165 - DNA, 25 bp, Probe Sequence
ctcaaactttaaggaggctctgtga

SEQ ID NO: 184166 - DNA, 25 bp, Probe Sequence
ctcgacttattggagccaggctttg

SEQ ID NO: 184167 - DNA, 25 bp, Probe Sequence
ctctgtctactgccagagccaggcc

SEQ ID NO: 184168 - DNA, 25 bp, Probe Sequence
gctttccctgaactgggacctttag

SEQ ID NO: 184169 - DNA, 25 bp, Probe Sequence
gctttcccttttgaatctggtttga

SEQ ID NO: 184170 - DNA, 25 bp, Probe Sequence
ctctcccttttttatatcaagtttg

SEQ ID NO: 184171 - DNA, 25 bp, Probe Sequence
ctcgctcctttagaaaacgtggtga

SEQ ID NO: 184172 - DNA, 25 bp, Probe Sequence
ctcactggttccctaaaccttggtg

SEQ ID NO: 184173 - DNA, 25 bp, Probe Sequence
ctactggttcccaagctacaggtgg

SEQ ID NO: 184174 - DNA, 25 bp, Probe Sequence
ctacagtggctacaaatacgtggga

SEQ ID NO: 184175 - DNA, 25 bp, Probe Sequence
ctacaaggcctcacaatgcacgtgg

SEQ ID NO: 184176 - DNA, 25 bp, Probe Sequence
ctcactaactccatgatgatgcacg

SEQ ID NO: 184177 - DNA, 25 bp, Probe Sequence
ctactcgatcaccaagatgcttctg

SEQ ID NO: 184178 - DNA, 25 bp, Probe Sequence
ctactccaagagtaagttctgctac

SEQ ID NO: 184179 - DNA, 25 bp, Probe Sequence
ctacttaggattttccactctatct

SEQ ID NO: 184180 - DNA, 25 bp, Probe Sequence
ctactgtcagtaaatctacgttatt

SEQ ID NO: 184181 - DNA, 25 bp, Probe Sequence
ctactggccagtacatctacgtatt

SEQ ID NO: 184182 - DNA, 25 bp, Probe Sequence
ctacttggcagtacatctacgtatt

SEQ ID NO: 184183 - DNA, 25 bp, Probe Sequence
ctacttggcagtacatctacgtatt

SEQ ID NO: 184184 - DNA, 25 bp, Probe Sequence
ctacttggcagtacatctacgtatt

SEQ ID NO: 184185 - DNA, 25 bp, Probe Sequence
ctacttggcagtacatctacgtatt

SEQ ID NO: 184186 - DNA, 25 bp, Probe Sequence
ctacttggcagtacatctacgtatt

SEQ ID NO: 184187 - DNA, 25 bp, Probe Sequence
ctacttggcagtacatctacgtatt

SEQ ID NO: 184188 - DNA, 25 bp, Probe Sequence
ctacttggcagtacatctacgtatt

SEQ ID NO: 184189 - DNA, 25 bp, Probe Sequence
ctacttggcagtacatctacgtatt

SEQ ID NO: 184190 - DNA, 25 bp, Probe Sequence
ctacttggcagtacatctacgtatt

SEQ ID NO: 184191 - DNA, 25 bp, Probe Sequence
ctacttggatatacttctggtcagt

SEQ ID NO: 184192 - DNA, 25 bp, Probe Sequence
ctacttggacattctcatgcgagcc

SEQ ID NO: 184193 - DNA, 25 bp, Probe Sequence
ctacttggactattcagggagctgc

SEQ ID NO: 184194 - DNA, 25 bp, Probe Sequence
ctactctgagcaggacacgggccag

SEQ ID NO: 184195 - DNA, 25 bp, Probe Sequence
ctactgagagccgtcaggcctgtaa

SEQ ID NO: 184196 - DNA, 25 bp, Probe Sequence
ctacgggcaagcgggcagctgaaga

SEQ ID NO: 184197 - DNA, 25 bp, Probe Sequence
ctacgggcaagcgggcagctgaaga

SEQ ID NO: 184198 - DNA, 25 bp, Probe Sequence
ctaaggatccagcggcagtgacaga

SEQ ID NO: 184199 - DNA, 25 bp, Probe Sequence
ctaagactccagacttgcgttcaac

SEQ ID NO: 184200 - DNA, 25 bp, Probe Sequence
ctaacctccaacacagtgcatctca

SEQ ID NO: 184201 - DNA, 25 bp, Probe Sequence
ctaaaataaatcgacagtgtctcag

SEQ ID NO: 184202 - DNA, 25 bp, Probe Sequence
ctaagggaaaccatgatgtctgagt

SEQ ID NO: 184203 - DNA, 25 bp, Probe Sequence
ctaagggtttctgtgattggatgga

SEQ ID NO: 184204 - DNA, 25 bp, Probe Sequence
ctaatgggactttcctactggccag

SEQ ID NO: 184205 - DNA, 25 bp, Probe Sequence
tctacgggactttcccaaatgtcgt

SEQ ID NO: 184206 - DNA, 25 bp, Probe Sequence
gtacggtcagtttgcgtaaagaaga

SEQ ID NO: 184207 - DNA, 25 bp, Probe Sequence
ctactgcaacaggcttttaaagaag

SEQ ID NO: 184208 - DNA, 25 bp, Probe Sequence
ctacttacaccttccatgcaaaaaa

SEQ ID NO: 184209 - DNA, 25 bp, Probe Sequence
ctaaatcacacactatcctaatcgc

SEQ ID NO: 184210 - DNA, 25 bp, Probe Sequence
ctacaaacaatgccacgcttataga

SEQ ID NO: 184211 - DNA, 25 bp, Probe Sequence
ctaaaacaaccatcccattcctaga

SEQ ID NO: 184212 - DNA, 25 bp, Probe Sequence
ctgttagaaacctccacattcttag

SEQ ID NO: 184213 - DNA, 25 bp, Probe Sequence
gctgttacataacaccccaaattaa

SEQ ID NO: 184214 - DNA, 25 bp, Probe Sequence
ctactactaatcaacgcccataatc

SEQ ID NO: 184215 - DNA, 25 bp, Probe Sequence
ctactcatctgacaaagggctaata

SEQ ID NO: 184216 - DNA, 25 bp, Probe Sequence
ctaacccatcgcaaagaggctaaaa

SEQ ID NO: 184217 - DNA, 25 bp, Probe Sequence
ctaatcccagcattaaagtgaaacc

SEQ ID NO: 184218 - DNA, 25 bp, Probe Sequence
ctacatcctcattgttcacagtgaa

SEQ ID NO: 184219 - DNA, 25 bp, Probe Sequence
ctactctatcattattccttatcaa

SEQ ID NO: 184220 - DNA, 25 bp, Probe Sequence
ctaattccatttacttttagatgaa

SEQ ID NO: 184221 - DNA, 25 bp, Probe Sequence
ctacataccatttctctcttagaga

SEQ ID NO: 184222 - DNA, 25 bp, Probe Sequence
ctacagtcctctctgtctgaaggct

SEQ ID NO: 184223 - DNA, 25 bp, Probe Sequence
ctacttcctgagcttctctcagatt

SEQ ID NO: 184224 - DNA, 25 bp, Probe Sequence
ctacttgtcttgcttatggcatgag

SEQ ID NO: 184225 - DNA, 25 bp, Probe Sequence
ctactttgtctccataagcctgttt

SEQ ID NO: 184226 - DNA, 25 bp, Probe Sequence
ctacaacttctccttagacactttg

SEQ ID NO: 184227 - DNA, 25 bp, Probe Sequence
ctaaggtgtcaccttataagcatct

SEQ ID NO: 184228 - DNA, 25 bp, Probe Sequence
ctaaatttcatccattattagcctg

SEQ ID NO: 184229 - DNA, 25 bp, Probe Sequence
ctaactcattaccattcgttccttt

SEQ ID NO: 184230 - DNA, 25 bp, Probe Sequence
ctaatccaataggactagtgttctt

SEQ ID NO: 184231 - DNA, 25 bp, Probe Sequence
ctaaccaacagacttggattgtctt

SEQ ID NO: 184232 - DNA, 25 bp, Probe Sequence
ctcacccaagagattccttatcatc

SEQ ID NO: 184233 - DNA, 25 bp, Probe Sequence
ctaagtcaagggttcactgcatttc

SEQ ID NO: 184234 - DNA, 25 bp, Probe Sequence
ctaagtcaagctacttcctgagctt

SEQ ID NO: 184235 - DNA, 25 bp, Probe Sequence
ctcaattgtcagtgttccatggtgt

SEQ ID NO: 184236 - DNA, 25 bp, Probe Sequence
ctaactgtctacatctccatatgtt

SEQ ID NO: 184237 - DNA, 25 bp, Probe Sequence
ctacactgcttacgttgccatgatc

SEQ ID NO: 184238 - DNA, 25 bp, Probe Sequence
ctactgctcttattttgcctgtgaa

SEQ ID NO: 184239 - DNA, 25 bp, Probe Sequence
ctaaccttgaagtatgccttgaact

SEQ ID NO: 184240 - DNA, 25 bp, Probe Sequence
ctaacctccctgttcttatgaattc

SEQ ID NO: 184241 - DNA, 25 bp, Probe Sequence
ctaaactaattgttcttttgttgct

SEQ ID NO: 184242 - DNA, 25 bp, Probe Sequence
ctcaaacagtttttctactgttcgt

SEQ ID NO: 184243 - DNA, 25 bp, Probe Sequence
ctcaaccgcttttctacagtttgtg

SEQ ID NO: 184244 - DNA, 25 bp, Probe Sequence
ctcaagcgggtctcagagcagttta

SEQ ID NO: 184245 - DNA, 25 bp, Probe Sequence
ctaagggattcactgcatcatagct

SEQ ID NO: 184246 - DNA, 25 bp, Probe Sequence
ctaagggatctcatctaatctcatg

SEQ ID NO: 184247 - DNA, 25 bp, Probe Sequence
ctaagcctgtccacgagctcaatag

SEQ ID NO: 184248 - DNA, 25 bp, Probe Sequence
ctacacctggcaacgctggccagta

SEQ ID NO: 184249 - DNA, 25 bp, Probe Sequence
ctaacactggaccattggatcgata

SEQ ID NO: 184250 - DNA, 25 bp, Probe Sequence
ctcacccgcgacaatggaagccata

SEQ ID NO: 184251 - DNA, 25 bp, Probe Sequence
ctactccggacgcaaagctgtcatc

SEQ ID NO: 184252 - DNA, 25 bp, Probe Sequence
ctactcctctgacgaatgggtatat

SEQ ID NO: 184253 - DNA, 25 bp, Probe Sequence
ctactcctctgacgaatgggtatat

SEQ ID NO: 184254 - DNA, 25 bp, Probe Sequence
ctacttgatctcagagaaggtcaat

SEQ ID NO: 184255 - DNA, 25 bp, Probe Sequence
ctcacaggttctgggaatgcaatag

SEQ ID NO: 184256 - DNA, 25 bp, Probe Sequence
ctacagcgttgcagaacatgaacga

SEQ ID NO: 184257 - DNA, 25 bp, Probe Sequence
ctacacctatcgggactacagcgga

SEQ ID NO: 184258 - DNA, 25 bp, Probe Sequence
ctcacagccttcctgggatacaagg

SEQ ID NO: 184259 - DNA, 25 bp, Probe Sequence
ctacactccagcctgggcaacagag

SEQ ID NO: 184260 - DNA, 25 bp, Probe Sequence
ctacagtccagccaggactatgaag

SEQ ID NO: 184261 - DNA, 25 bp, Probe Sequence
ctacaactactatgacaatgagaag

SEQ ID NO: 184262 - DNA, 25 bp, Probe Sequence
ctcaatactcatgtggccttagttg

SEQ ID NO: 184263 - DNA, 25 bp, Probe Sequence
ctaaccctgcgtcgcatcagtagct

SEQ ID NO: 184264 - DNA, 25 bp, Probe Sequence
ctaatccacaggcctgtgagaactg

SEQ ID NO: 184265 - DNA, 25 bp, Probe Sequence
ctcaacatccagggcccaatttgcc

SEQ ID NO: 184266 - DNA, 25 bp, Probe Sequence
ctcaagcccaaggccttatcttcac

SEQ ID NO: 184267 - DNA, 25 bp, Probe Sequence
ctaattctttgttcactgtgttacc

SEQ ID NO: 184268 - DNA, 25 bp, Probe Sequence
ctaattcttcgcttcacaatgtctc

SEQ ID NO: 184269 - DNA, 25 bp, Probe Sequence
ctacaatcttcccatgcacaagatg

SEQ ID NO: 184270 - DNA, 25 bp, Probe Sequence
ctaacgctccttcacaagatggcaa

SEQ ID NO: 184271 - DNA, 25 bp, Probe Sequence
ctacagccaccttgaaaatatccag

SEQ ID NO: 184272 - DNA, 25 bp, Probe Sequence
ctacagctagtatgcaaagttcaca

SEQ ID NO: 184273 - DNA, 25 bp, Probe Sequence
ctaagtgcctatcaacagatatcca

SEQ ID NO: 184274 - DNA, 25 bp, Probe Sequence
ctccaggcttaccagacgtattcct

SEQ ID NO: 184275 - DNA, 25 bp, Probe Sequence
cccagttctacgcttttgaacttgc

SEQ ID NO: 184276 - DNA, 25 bp, Probe Sequence
cccttttaccagtggctgaatctac

SEQ ID NO: 184277 - DNA, 25 bp, Probe Sequence
ctgcctgactaagcccggtagttaa

SEQ ID NO: 184278 - DNA, 25 bp, Probe Sequence
ctcaacagcaacacccaggtagttt

SEQ ID NO: 184279 - DNA, 25 bp, Probe Sequence
ctcacacatcacattcccatggtgg

SEQ ID NO: 184280 - DNA, 25 bp, Probe Sequence
ctcacacatcacattcccatggtgg

SEQ ID NO: 184281 - DNA, 25 bp, Probe Sequence
ctacactgctacatgcctgcagctt

SEQ ID NO: 184282 - DNA, 25 bp, Probe Sequence
ctaactgtactgggcatgagtgctg

SEQ ID NO: 184283 - DNA, 25 bp, Probe Sequence
ctaacagtggctcgactgcagatca

SEQ ID NO: 184284 - DNA, 25 bp, Probe Sequence
ctacacagtggcctcatgcagaggg

SEQ ID NO: 184285 - DNA, 25 bp, Probe Sequence
ctacacagcagtccttgatggctga

SEQ ID NO: 184286 - DNA, 25 bp, Probe Sequence
ctacaatgagctgcgtgtggctccc

SEQ ID NO: 184287 - DNA, 25 bp, Probe Sequence
ctacactgagcaccaggtggtctcc

SEQ ID NO: 184288 - DNA, 25 bp, Probe Sequence
ctacatgggcaaagtgaccttctca

SEQ ID NO: 184289 - DNA, 25 bp, Probe Sequence
ctaaccgcaatagtgactctgtgct

SEQ ID NO: 184290 - DNA, 25 bp, Probe Sequence
ctaaccatcaaccaactgctagctg

SEQ ID NO: 184291 - DNA, 25 bp, Probe Sequence
ctcaactagcaacataggcacaatg

SEQ ID NO: 184292 - DNA, 25 bp, Probe Sequence
ctcacttccaacttaggaccaacct

SEQ ID NO: 184293 - DNA, 25 bp, Probe Sequence
ctcagcatcccttaaaggcccaact

SEQ ID NO: 184294 - DNA, 25 bp, Probe Sequence
ctcactcacttctgctagagtctca

SEQ ID NO: 184295 - DNA, 25 bp, Probe Sequence
ctcacatccgaaagtcagtctctac

SEQ ID NO: 184296 - DNA, 25 bp, Probe Sequence
ctaatggccagtggtttcatcaatc

SEQ ID NO: 184297 - DNA, 25 bp, Probe Sequence
ctactagtagtactgttcacatatc

SEQ ID NO: 184298 - DNA, 25 bp, Probe Sequence
ctaatcagtcagcagtaatcaacat

SEQ ID NO: 184299 - DNA, 25 bp, Probe Sequence
ctaatcaacgcccataatcatacca

SEQ ID NO: 184300 - DNA, 25 bp, Probe Sequence
ctacatcaaggtctcacacttcctg

SEQ ID NO: 184301 - DNA, 25 bp, Probe Sequence
ctcaacaaatgtaattcctgctcct

SEQ ID NO: 184302 - DNA, 25 bp, Probe Sequence
ctacaccaatgtaatctactaccaa

SEQ ID NO: 184303 - DNA, 25 bp, Probe Sequence
ctaacttatgtgaactgagagaaaa

SEQ ID NO: 184304 - DNA, 25 bp, Probe Sequence
ctaaccaatgtggccgtggtacgga

SEQ ID NO: 184305 - DNA, 25 bp, Probe Sequence
ctgaacccgggtgatggctgaacgc

SEQ ID NO: 184306 - DNA, 25 bp, Probe Sequence
ctgggcctagggagggctcgaagtc

SEQ ID NO: 184307 - DNA, 25 bp, Probe Sequence
ctcaccctaaggacagggtggaaga

SEQ ID NO: 184308 - DNA, 25 bp, Probe Sequence
ctcaccctaaggatcagtggtggaa

SEQ ID NO: 184309 - DNA, 25 bp, Probe Sequence
ctcagcctcccgagtagctgggatt

SEQ ID NO: 184310 - DNA, 25 bp, Probe Sequence
ctcagcctcccgagtagctgggatt

SEQ ID NO: 184311 - DNA, 25 bp, Probe Sequence
ctcacagattcctggtcgggtggct

SEQ ID NO: 184312 - DNA, 25 bp, Probe Sequence
ctcaaacccacatgagggcaggtct

SEQ ID NO: 184313 - DNA, 25 bp, Probe Sequence
ctcaagacctacgagcaggtgctgg

SEQ ID NO: 184314 - DNA, 25 bp, Probe Sequence
ctaagaccattcgcatggccaaatt

SEQ ID NO: 184315 - DNA, 25 bp, Probe Sequence
ctaaaccattcaccaagagccaata

SEQ ID NO: 184316 - DNA, 25 bp, Probe Sequence
ctaaaccattcaccgagagcctata

SEQ ID NO: 184317 - DNA, 25 bp, Probe Sequence
ctaagagctataaagcggaggcttc

SEQ ID NO: 184318 - DNA, 25 bp, Probe Sequence
ctaagagcatatatacccacgctga

SEQ ID NO: 184319 - DNA, 25 bp, Probe Sequence
ctaaggcagtttgctgctcacccag

SEQ ID NO: 184320 - DNA, 25 bp, Probe Sequence
ctgtaagattttgtgcttcccaatc

SEQ ID NO: 184321 - DNA, 25 bp, Probe Sequence
ctgtaaatgtctattgccgtaaatt

SEQ ID NO: 184322 - DNA, 25 bp, Probe Sequence
ctgctggaacctattccctatgaat

SEQ ID NO: 184323 - DNA, 25 bp, Probe Sequence
cctggaaggttattacctaatggag

SEQ ID NO: 184324 - DNA, 25 bp, Probe Sequence
tcctggaaggttattacctaatgga

SEQ ID NO: 184325 - DNA, 25 bp, Probe Sequence
ctcatggaaggtgacgttcccggag

SEQ ID NO: 184326 - DNA, 25 bp, Probe Sequence
ctcagcaaagtctggcgtgatcaac

SEQ ID NO: 184327 - DNA, 25 bp, Probe Sequence
ctcaagagtcccgtgagtcatccag

SEQ ID NO: 184328 - DNA, 25 bp, Probe Sequence
ctcacggatacagcacagacccgcg

SEQ ID NO: 184329 - DNA, 25 bp, Probe Sequence
ctacatgaagaagcacgtcgacgag

SEQ ID NO: 184330 - DNA, 25 bp, Probe Sequence
ctacagaaaagtgcccagagcatag

SEQ ID NO: 184331 - DNA, 25 bp, Probe Sequence
ctaaggactgaagccactacatacc

SEQ ID NO: 184332 - DNA, 25 bp, Probe Sequence
ctaatggactgtccccatctgcaga

SEQ ID NO: 184333 - DNA, 25 bp, Probe Sequence
ctaactgagttgtcctacatgcaag

SEQ ID NO: 184334 - DNA, 25 bp, Probe Sequence
ctaactgcagtagttctttcaagaa

SEQ ID NO: 184335 - DNA, 25 bp, Probe Sequence
ctaacgcagaacatctctctagaaa

SEQ ID NO: 184336 - DNA, 25 bp, Probe Sequence
ctaacgaaaaggcctgcatgaaact

SEQ ID NO: 184337 - DNA, 25 bp, Probe Sequence
ctaaagacccttttataatgcacat

SEQ ID NO: 184338 - DNA, 25 bp, Probe Sequence
ctaaagtcaacaatttattgtacat

SEQ ID NO: 184339 - DNA, 25 bp, Probe Sequence
ctcaatagatccacctcaagtgtaa

SEQ ID NO: 184340 - DNA, 25 bp, Probe Sequence
ctaatagaatatctctgaagctgga

SEQ ID NO: 184341 - DNA, 25 bp, Probe Sequence
ctcaactttatccacatgaaatgtg

SEQ ID NO: 184342 - DNA, 25 bp, Probe Sequence
ctcacatctgtaatcccagccaagg

SEQ ID NO: 184343 - DNA, 25 bp, Probe Sequence
ctcacacttgttgcaccaaagtgat

SEQ ID NO: 184344 - DNA, 25 bp, Probe Sequence
ctcacctcttaatcccatgagagta

SEQ ID NO: 184345 - DNA, 25 bp, Probe Sequence
ctcagccccttataacaggtgctca

SEQ ID NO: 184346 - DNA, 25 bp, Probe Sequence
ctcactgccctggaatcaacaggct

SEQ ID NO: 184347 - DNA, 25 bp, Probe Sequence
cgactcctctgagaaggacgggcag

SEQ ID NO: 184348 - DNA, 25 bp, Probe Sequence
ctgacatcccgagaagtccagacgg

SEQ ID NO: 184349 - DNA, 25 bp, Probe Sequence
ctgagcttcccataagtctaccaag

SEQ ID NO: 184350 - DNA, 25 bp, Probe Sequence
ctacaatctcacagaagtccactaa

SEQ ID NO: 184351 - DNA, 25 bp, Probe Sequence
ctacagcctgcaggccaaatccagc

SEQ ID NO: 184352 - DNA, 25 bp, Probe Sequence
ctcacaccgacagcatcaaaatgcc

SEQ ID NO: 184353 - DNA, 25 bp, Probe Sequence
ctcaccactgaagggcgtaatgcac

SEQ ID NO: 184354 - DNA, 25 bp, Probe Sequence
ctcacgagctatagtggcgcacaag

SEQ ID NO: 184355 - DNA, 25 bp, Probe Sequence
ctcaaagctgatcttgccacacagg

SEQ ID NO: 184356 - DNA, 25 bp, Probe Sequence
ctcaaggctgatggctgtgaccctg

SEQ ID NO: 184357 - DNA, 25 bp, Probe Sequence
ctcaaggctgcttctgttaactgaa

SEQ ID NO: 184358 - DNA, 25 bp, Probe Sequence
ctacagcagtgatctgggcaagctc

SEQ ID NO: 184359 - DNA, 25 bp, Probe Sequence
ctaagcagatggtcgggcactgcag

SEQ ID NO: 184360 - DNA, 25 bp, Probe Sequence
ctaaggaggatgtgctgcagtgcat

SEQ ID NO: 184361 - DNA, 25 bp, Probe Sequence
ctaagggcacagtctgctggagtca

SEQ ID NO: 184362 - DNA, 25 bp, Probe Sequence
ctaagtggcagacgctcggggagag

SEQ ID NO: 184363 - DNA, 25 bp, Probe Sequence
ctaatgagtcgactttgagctggaa

SEQ ID NO: 184364 - DNA, 25 bp, Probe Sequence
ctaattgcatattctcttcagagga

SEQ ID NO: 184365 - DNA, 25 bp, Probe Sequence
ctaatgtcacattgcatacctggat

SEQ ID NO: 184366 - DNA, 25 bp, Probe Sequence
ctcacagtgcaggagctcctctgtg

SEQ ID NO: 184367 - DNA, 25 bp, Probe Sequence
ctaagggctggtctctgctgaaggt

SEQ ID NO: 184368 - DNA, 25 bp, Probe Sequence
ctacagtggtgtgattcgtgcagaa

SEQ ID NO: 184369 - DNA, 25 bp, Probe Sequence
ctacagtgagtcaaaatcctgccac

SEQ ID NO: 184370 - DNA, 25 bp, Probe Sequence
ctcacgtgcagtaatcaacgcccgc

SEQ ID NO: 184371 - DNA, 25 bp, Probe Sequence
ctcacttcagagagacactcactcg

SEQ ID NO: 184372 - DNA, 25 bp, Probe Sequence
ctaattctggcaggacctcaccaaa

SEQ ID NO: 184373 - DNA, 25 bp, Probe Sequence
ctaattttcagcgttcatacccagc

SEQ ID NO: 184374 - DNA, 25 bp, Probe Sequence
ctcttggaggtggttcagacccggc

SEQ ID NO: 184375 - DNA, 25 bp, Probe Sequence
ctcattaaggtgtttatgtctctgc

SEQ ID NO: 184376 - DNA, 25 bp, Probe Sequence
ctcactgaaggtggggtttgtgttt

SEQ ID NO: 184377 - DNA, 25 bp, Probe Sequence
ggacgtgatgctgggctgtgtttac

SEQ ID NO: 184378 - DNA, 25 bp, Probe Sequence
ctcagacactactgaggtggttctt

SEQ ID NO: 184379 - DNA, 25 bp, Probe Sequence
ctcaacagcccaatggtgcaggttt

SEQ ID NO: 184380 - DNA, 25 bp, Probe Sequence
ctcaagcaggccctgttggaattga

SEQ ID NO: 184381 - DNA, 25 bp, Probe Sequence
ctcacagagtcgccgtctggatgac

SEQ ID NO: 184382 - DNA, 25 bp, Probe Sequence
ctcaaacctgcaggtctcagggccc

SEQ ID NO: 184383 - DNA, 25 bp, Probe Sequence
ctaattagctagggctggggtcagc

SEQ ID NO: 184384 - DNA, 25 bp, Probe Sequence
ctctgatgctgacaaggtggggaac

SEQ ID NO: 184385 - DNA, 25 bp, Probe Sequence
ctcgatctgcttgggatgatggagg

SEQ ID NO: 184386 - DNA, 25 bp, Probe Sequence
ctcagctctcacaggagagggcgtt

SEQ ID NO: 184387 - DNA, 25 bp, Probe Sequence
ctcacctacattccatagtgggccc

SEQ ID NO: 184388 - DNA, 25 bp, Probe Sequence
ctcggatcaattctcagctggtggc

SEQ ID NO: 184389 - DNA, 25 bp, Probe Sequence
ctcagagtcgtcagtgcagatttgg

SEQ ID NO: 184390 - DNA, 25 bp, Probe Sequence
ctcagcttcttcaggcggtagctga

SEQ ID NO: 184391 - DNA, 25 bp, Probe Sequence
ctcacttcgacatcacgggaatgaa

SEQ ID NO: 184392 - DNA, 25 bp, Probe Sequence
ctcacttcacaagaccgtcaagagg

SEQ ID NO: 184393 - DNA, 25 bp, Probe Sequence
ctaattcacgctcattccacaagag

SEQ ID NO: 184394 - DNA, 25 bp, Probe Sequence
ctaagtacgtatgttcatctacagt

SEQ ID NO: 184395 - DNA, 25 bp, Probe Sequence
ctaaatcctttgttgtcatttcagc

SEQ ID NO: 184396 - DNA, 25 bp, Probe Sequence
ctaaatcatttatgtccatttctca

SEQ ID NO: 184397 - DNA, 25 bp, Probe Sequence
ctaaaatttgttaccacatcattgc

SEQ ID NO: 184398 - DNA, 25 bp, Probe Sequence
ccgagttttgtatccgcattccggg

SEQ ID NO: 184399 - DNA, 25 bp, Probe Sequence
ctccagtttcagcaaccgctaggtt

SEQ ID NO: 184400 - DNA, 25 bp, Probe Sequence
gcccgatgacgctgaactagtaagg

SEQ ID NO: 184401 - DNA, 25 bp, Probe Sequence
ctcaagcaaccatgaactcagctat

SEQ ID NO: 184402 - DNA, 25 bp, Probe Sequence
ctaatcaccacccacattgactaat

SEQ ID NO: 184403 - DNA, 25 bp, Probe Sequence
ctcaacagcccctgatcaactaagt

SEQ ID NO: 184404 - DNA, 25 bp, Probe Sequence
ctcagcccccgggatgaactagtgt

SEQ ID NO: 184405 - DNA, 25 bp, Probe Sequence
ctcagaccccaacctagtcaagggg

SEQ ID NO: 184406 - DNA, 25 bp, Probe Sequence
ctcaacttccaccttgacaacggtg

SEQ ID NO: 184407 - DNA, 25 bp, Probe Sequence
gctagtttctaggaatacaaaagtg

SEQ ID NO: 184408 - DNA, 25 bp, Probe Sequence
ctcagtcccaaggagaacgaaggtt

SEQ ID NO: 184409 - DNA, 25 bp, Probe Sequence
ctgactgggaaggacataaaaggtt

SEQ ID NO: 184410 - DNA, 25 bp, Probe Sequence
ctcagctgctggtggatcagatata

SEQ ID NO: 184411 - DNA, 25 bp, Probe Sequence
ctcagattggacctctgcctgaagg

SEQ ID NO: 184412 - DNA, 25 bp, Probe Sequence
ctaaatgtggcctttctgaatgtta

SEQ ID NO: 184413 - DNA, 25 bp, Probe Sequence
ctcacaagaaccttataactttcac

SEQ ID NO: 184414 - DNA, 25 bp, Probe Sequence
ctcacaagaaacctataacttcaca

SEQ ID NO: 184415 - DNA, 25 bp, Probe Sequence
ctaaaagcatcacctttacttccag

SEQ ID NO: 184416 - DNA, 25 bp, Probe Sequence
ctaattagtcgtattctgctactcg

SEQ ID NO: 184417 - DNA, 25 bp, Probe Sequence
ctacaacgttgctgttcgcatcact

SEQ ID NO: 184418 - DNA, 25 bp, Probe Sequence
ctaaacatttgctgttcaaacatgt

SEQ ID NO: 184419 - DNA, 25 bp, Probe Sequence
ctacaaccttgctgcccaaatcagc

SEQ ID NO: 184420 - DNA, 25 bp, Probe Sequence
ctaaaaatctagccccaatctcagc

SEQ ID NO: 184421 - DNA, 25 bp, Probe Sequence
ctcatgaaaatcctggccaagtaca

SEQ ID NO: 184422 - DNA, 25 bp, Probe Sequence
ctcaaaacgcttagcctagccacac

SEQ ID NO: 184423 - DNA, 25 bp, Probe Sequence
ctcaaatacacgtgatctggcccta

SEQ ID NO: 184424 - DNA, 25 bp, Probe Sequence
ctcaagtgtaagtgtggggccattg

SEQ ID NO: 184425 - DNA, 25 bp, Probe Sequence
ctcaagtcccagctggtggaccttg

SEQ ID NO: 184426 - DNA, 25 bp, Probe Sequence
ctcacttcccagacggggtagcggc

SEQ ID NO: 184427 - DNA, 25 bp, Probe Sequence
ctcactggccactgcaggggatggc

SEQ ID NO: 184428 - DNA, 25 bp, Probe Sequence
ctcagctgcccagcgggggaaagct

SEQ ID NO: 184429 - DNA, 25 bp, Probe Sequence
ctcaggagccgctggggctggaggt

SEQ ID NO: 184430 - DNA, 25 bp, Probe Sequence
ctcagagtgtccaggggcttggaga

SEQ ID NO: 184431 - DNA, 25 bp, Probe Sequence
ctcagacctcctggtgggtttgtgc

SEQ ID NO: 184432 - DNA, 25 bp, Probe Sequence
ctcagaccacacagtagccaagttc

SEQ ID NO: 184433 - DNA, 25 bp, Probe Sequence
ctcaactaacgcctacattacattc

SEQ ID NO: 184434 - DNA, 25 bp, Probe Sequence
ctcgatctgaacctccaattaaaaa

SEQ ID NO: 184435 - DNA, 25 bp, Probe Sequence
ctcctggttcctgttttccaaattg

SEQ ID NO: 184436 - DNA, 25 bp, Probe Sequence
ctcacttttacaattttcccacaat

SEQ ID NO: 184437 - DNA, 25 bp, Probe Sequence
ctaagttttattattcaggcaataa

SEQ ID NO: 184438 - DNA, 25 bp, Probe Sequence
ctaatctttttgttgtacagggatt

SEQ ID NO: 184439 - DNA, 25 bp, Probe Sequence
ctaatttttgccagtctcatgggta

SEQ ID NO: 184440 - DNA, 25 bp, Probe Sequence
ctcagattacttcattgttcagtgg

SEQ ID NO: 184441 - DNA, 25 bp, Probe Sequence
ctcatactgaattttctgtatcgta

SEQ ID NO: 184442 - DNA, 25 bp, Probe Sequence
ctaatatgtatactatctttttatc

SEQ ID NO: 184443 - DNA, 25 bp, Probe Sequence
ctcaactgtttctctttgttatcta

SEQ ID NO: 184444 - DNA, 25 bp, Probe Sequence
ctcaagctgttgacatactcattgc

SEQ ID NO: 184445 - DNA, 25 bp, Probe Sequence
ctaagagatgtgactacagcctgcc

SEQ ID NO: 184446 - DNA, 25 bp, Probe Sequence
ctcagcaagtgccatgctacagccc

SEQ ID NO: 184447 - DNA, 25 bp, Probe Sequence
ctcacagtgtcactgtcagatggtc

SEQ ID NO: 184448 - DNA, 25 bp, Probe Sequence
ctgaatatgtgactgaatttgctgc

SEQ ID NO: 184449 - DNA, 25 bp, Probe Sequence
ctgaatggctgaggaccttcccagt

SEQ ID NO: 184450 - DNA, 25 bp, Probe Sequence
ctgaatggctgaggaccttcccagt

SEQ ID NO: 184451 - DNA, 25 bp, Probe Sequence
ctcagaggtgagtgcttcttccagg

SEQ ID NO: 184452 - DNA, 25 bp, Probe Sequence
ctaatatgtagtggccttttcaagg

SEQ ID NO: 184453 - DNA, 25 bp, Probe Sequence
ctcaaatgtaccttcctcctaaggc

SEQ ID NO: 184454 - DNA, 25 bp, Probe Sequence
ctgccagatgaacagtttcctgaag

SEQ ID NO: 184455 - DNA, 25 bp, Probe Sequence
ctaagtgaaatttctagcctgcact

SEQ ID NO: 184456 - DNA, 25 bp, Probe Sequence
ctaagcgaaacaatgcacagcgtca

SEQ ID NO: 184457 - DNA, 25 bp, Probe Sequence
ctcaaggataacacggcgatgaacg

SEQ ID NO: 184458 - DNA, 25 bp, Probe Sequence
ctcaagactaccaaagccaggacac

SEQ ID NO: 184459 - DNA, 25 bp, Probe Sequence
ctcaagattgaggcagcaagtaaga

SEQ ID NO: 184460 - DNA, 25 bp, Probe Sequence
ctaactgtgccccagcagtacatga

SEQ ID NO: 184461 - DNA, 25 bp, Probe Sequence
ctaagtgtgactgcagcaggcagct

SEQ ID NO: 184462 - DNA, 25 bp, Probe Sequence
ctaattgatgcactgctccttcagt

SEQ ID NO: 184463 - DNA, 25 bp, Probe Sequence
ctcagatcaatcgtgcatccttagt

SEQ ID NO: 184464 - DNA, 25 bp, Probe Sequence
ctcaggccatcagacgttactattt

SEQ ID NO: 184465 - DNA, 25 bp, Probe Sequence
ctcatggaatcctgcagctttaatt

SEQ ID NO: 184466 - DNA, 25 bp, Probe Sequence
ctcaggtgtccctcatcattaacta

SEQ ID NO: 184467 - DNA, 25 bp, Probe Sequence
ctcaagttcctttcactgtgatttg

SEQ ID NO: 184468 - DNA, 25 bp, Probe Sequence
ctcaaggtcttgtctgaatgttcac

SEQ ID NO: 184469 - DNA, 25 bp, Probe Sequence
ctcaaggttgatagtggtgttcact

SEQ ID NO: 184470 - DNA, 25 bp, Probe Sequence
ctcaacagtcactggagcttatcca

SEQ ID NO: 184471 - DNA, 25 bp, Probe Sequence
ctcaccattaactggcctgatctaa

SEQ ID NO: 184472 - DNA, 25 bp, Probe Sequence
ctcaaattctggtggccgcattgac

SEQ ID NO: 184473 - DNA, 25 bp, Probe Sequence
ctcaaggtggagtggacgcatgtca

SEQ ID NO: 184474 - DNA, 25 bp, Probe Sequence
ctcaatgggcagctgcggtccatct

SEQ ID NO: 184475 - DNA, 25 bp, Probe Sequence
ctcagatggggcctgggctgttgtg

SEQ ID NO: 184476 - DNA, 25 bp, Probe Sequence
ctcaggagttgcttgtacattcttg

SEQ ID NO: 184477 - DNA, 25 bp, Probe Sequence
ctcagaagactcttgtgttttgttt

SEQ ID NO: 184478 - DNA, 25 bp, Probe Sequence
ctaataactgcagtgtttccgcctt

SEQ ID NO: 184479 - DNA, 25 bp, Probe Sequence
ctaataagctgagattcccatttct

SEQ ID NO: 184480 - DNA, 25 bp, Probe Sequence
ctcacttagatgtcgtttccttctt

SEQ ID NO: 184481 - DNA, 25 bp, Probe Sequence
ctcatttcggacggatggatccctt

SEQ ID NO: 184482 - DNA, 25 bp, Probe Sequence
ctcattcccaagtagaagaccctgc

SEQ ID NO: 184483 - DNA, 25 bp, Probe Sequence
ctcatttgccaataataatacctcc

SEQ ID NO: 184484 - DNA, 25 bp, Probe Sequence
ctcatcggcacgtgcagtcagaacg

SEQ ID NO: 184485 - DNA, 25 bp, Probe Sequence
ctcagggatctccgagtcaggacgg

SEQ ID NO: 184486 - DNA, 25 bp, Probe Sequence
ctcactatgttgcctgcaatagggc

SEQ ID NO: 184487 - DNA, 25 bp, Probe Sequence
ctccgtaagctccaaagggcgttcg

SEQ ID NO: 184488 - DNA, 25 bp, Probe Sequence
ctccctgaactccaaggttcagttc

SEQ ID NO: 184489 - DNA, 25 bp, Probe Sequence
ttccccaaccctggataccagtagc

SEQ ID NO: 184490 - DNA, 25 bp, Probe Sequence
ctcacccaggccgtggtagacaaac

SEQ ID NO: 184491 - DNA, 25 bp, Probe Sequence
ctcacccaggacgtgagggtctggg

SEQ ID NO: 184492 - DNA, 25 bp, Probe Sequence
ctgtcccggaggaggttgggaggtg

SEQ ID NO: 184493 - DNA, 25 bp, Probe Sequence
ctccccggagggcagccatgggggc

SEQ ID NO: 184494 - DNA, 25 bp, Probe Sequence
ctcaccctgaatgaggacctgcgct

SEQ ID NO: 184495 - DNA, 25 bp, Probe Sequence
ctcaactctatagctctaactggct

SEQ ID NO: 184496 - DNA, 25 bp, Probe Sequence
ctaactccatgtctctgagcattag

SEQ ID NO: 184497 - DNA, 25 bp, Probe Sequence
ctaactcctgatctaactgatgaaa

SEQ ID NO: 184498 - DNA, 25 bp, Probe Sequence
ctaactctctacttagacaacaata

SEQ ID NO: 184499 - DNA, 25 bp, Probe Sequence
ctaacctgctactaatcacagagaa

SEQ ID NO: 184500 - DNA, 25 bp, Probe Sequence
ctcaccttcaactgtgtagagaggc

SEQ ID NO: 184501 - DNA, 25 bp, Probe Sequence
ctcaccttatcctagaacttgaggc

SEQ ID NO: 184502 - DNA, 25 bp, Probe Sequence
ctcacctattctgaatactatgaag

SEQ ID NO: 184503 - DNA, 25 bp, Probe Sequence
ctcggccatgttgagctacttcaag

SEQ ID NO: 184504 - DNA, 25 bp, Probe Sequence
ctcagtacatctataggaagtgaag

SEQ ID NO: 184505 - DNA, 25 bp, Probe Sequence
ctcagcatttccatgacgcacatta

SEQ ID NO: 184506 - DNA, 25 bp, Probe Sequence
ctaatttgcatgggcaccacatttc

SEQ ID NO: 184507 - DNA, 25 bp, Probe Sequence
ctaagtggctcagtcacacctttgc

SEQ ID NO: 184508 - DNA, 25 bp, Probe Sequence
ctaagtgacccggacacttccgagg

SEQ ID NO: 184509 - DNA, 25 bp, Probe Sequence
ctaagtacccgctacaattctgcag

SEQ ID NO: 184510 - DNA, 25 bp, Probe Sequence
ctaagcataccttataaatttgcat

SEQ ID NO: 184511 - DNA, 25 bp, Probe Sequence
ctaagaagcaccttaagattagggt

SEQ ID NO: 184512 - DNA, 25 bp, Probe Sequence
ctaagaagcccattgaatataaaag

SEQ ID NO: 184513 - DNA, 25 bp, Probe Sequence
ctcacaaagtctgtgaatatcacat

SEQ ID NO: 184514 - DNA, 25 bp, Probe Sequence
ctcaaaacttcttactcatcacaaa

SEQ ID NO: 184515 - DNA, 25 bp, Probe Sequence
ctaagaacattcaatgccctgaaaa

SEQ ID NO: 184516 - DNA, 25 bp, Probe Sequence
ctaagaatcattcctgtactacaga

SEQ ID NO: 184517 - DNA, 25 bp, Probe Sequence
ctaagaattgttttttcacagatct

SEQ ID NO: 184518 - DNA, 25 bp, Probe Sequence
ctcaaactttgattttacaatacta

SEQ ID NO: 184519 - DNA, 25 bp, Probe Sequence
ctcaaagctgttttttccctttctg

SEQ ID NO: 184520 - DNA, 25 bp, Probe Sequence
ctcaagacttcattatttgcctttt

SEQ ID NO: 184521 - DNA, 25 bp, Probe Sequence
ctcaagacttttgactgccattttg

SEQ ID NO: 184522 - DNA, 25 bp, Probe Sequence
ctcaaattgtattctatatccatta

SEQ ID NO: 184523 - DNA, 25 bp, Probe Sequence
ctaatattcttgtctgttccagtct

SEQ ID NO: 184524 - DNA, 25 bp, Probe Sequence
ctaattatctctttgagtccttgct

SEQ ID NO: 184525 - DNA, 25 bp, Probe Sequence
ctcagatttcttctagtatttgctt

SEQ ID NO: 184526 - DNA, 25 bp, Probe Sequence
ctcagaagttcaagctaaatattgt

SEQ ID NO: 184527 - DNA, 25 bp, Probe Sequence
ctcgaagatctggtcaaaactgtat

SEQ ID NO: 184528 - DNA, 25 bp, Probe Sequence
ctcagtaactgatgcaatcaactgg

SEQ ID NO: 184529 - DNA, 25 bp, Probe Sequence
ctcttaagatgtccaaccctgtttt

SEQ ID NO: 184530 - DNA, 25 bp, Probe Sequence
ctcttgtgctttcatacgcaccttt

SEQ ID NO: 184531 - DNA, 25 bp, Probe Sequence
ctcaaccattctcaacagcagcatt

SEQ ID NO: 184532 - DNA, 25 bp, Probe Sequence
ctcacaccattcatgcttggagcct

SEQ ID NO: 184533 - DNA, 25 bp, Probe Sequence
ctcaaccacttgtcttggctgtaga

SEQ ID NO: 184534 - DNA, 25 bp, Probe Sequence
ctaagcagagctcgcagcgtggctt

SEQ ID NO: 184535 - DNA, 25 bp, Probe Sequence
ctcaagcacatcaacgagctgacta

SEQ ID NO: 184536 - DNA, 25 bp, Probe Sequence
ctcacgcacagctctcagaagctgc

SEQ ID NO: 184537 - DNA, 25 bp, Probe Sequence
ctcagcgcacacctgtacagatgat

SEQ ID NO: 184538 - DNA, 25 bp, Probe Sequence
ctaagccaccgccacagagatggct

SEQ ID NO: 184539 - DNA, 25 bp, Probe Sequence
ctcatcactcccctcaaagaggtga

SEQ ID NO: 184540 - DNA, 25 bp, Probe Sequence
ctcaagaccggaggcacagagggca

SEQ ID NO: 184541 - DNA, 25 bp, Probe Sequence
ctcaaacttctgtgcacaaagtgct

SEQ ID NO: 184542 - DNA, 25 bp, Probe Sequence
ctcgaaaattgtccaagaagccaaa

SEQ ID NO: 184543 - DNA, 25 bp, Probe Sequence
ctcggcagaaactctacaagccaga

SEQ ID NO: 184544 - DNA, 25 bp, Probe Sequence
ctcaagagtaactacaatcttccca

SEQ ID NO: 184545 - DNA, 25 bp, Probe Sequence
ctctaggtaactcaagtgtcacctc

SEQ ID NO: 184546 - DNA, 25 bp, Probe Sequence
ctaacttaatcacagaggtgacatc

SEQ ID NO: 184547 - DNA, 25 bp, Probe Sequence
ctaatcttgttcttcacggtgatat

SEQ ID NO: 184548 - DNA, 25 bp, Probe Sequence
ctcaattctgtttttcgtttgcatt

SEQ ID NO: 184549 - DNA, 25 bp, Probe Sequence
ctcaatactattgcttcaggctttt

SEQ ID NO: 184550 - DNA, 25 bp, Probe Sequence
ctcagtagctttggtcataggcaag

SEQ ID NO: 184551 - DNA, 25 bp, Probe Sequence
ctctctagctggccagtgctgagga

SEQ ID NO: 184552 - DNA, 25 bp, Probe Sequence
ctcagccagcagaacatcgctggga

SEQ ID NO: 184553 - DNA, 25 bp, Probe Sequence
ctcacagaagcaacacagctgggaa

SEQ ID NO: 184554 - DNA, 25 bp, Probe Sequence
ctcacaatcaagccagcctgggctc

SEQ ID NO: 184555 - DNA, 25 bp, Probe Sequence
ctcactgcctaggaggctggccaag

SEQ ID NO: 184556 - DNA, 25 bp, Probe Sequence
ctcagtgcctgagggaagatgccta

SEQ ID NO: 184557 - DNA, 25 bp, Probe Sequence
ctcaagttacagtatatgatcacta

SEQ ID NO: 184558 - DNA, 25 bp, Probe Sequence
ctcaagtgtgtctaagtgaccatgg

SEQ ID NO: 184559 - DNA, 25 bp, Probe Sequence
ctcagatgtggctagaccaaccagt

SEQ ID NO: 184560 - DNA, 25 bp, Probe Sequence
ctcagtggtctagaaaatcagaaaa

SEQ ID NO: 184561 - DNA, 25 bp, Probe Sequence
ctcggcgtccagtgaccaggagaag

SEQ ID NO: 184562 - DNA, 25 bp, Probe Sequence
ctcacagctccacgaagactcaaaa

SEQ ID NO: 184563 - DNA, 25 bp, Probe Sequence
ctcaagctcacggagacccaagtga

SEQ ID NO: 184564 - DNA, 25 bp, Probe Sequence
ctaagctacagcgtactccaggaga

SEQ ID NO: 184565 - DNA, 25 bp, Probe Sequence
ctcaactactgcgtatggcgggaca

SEQ ID NO: 184566 - DNA, 25 bp, Probe Sequence
ctcatgactatcctgatattggaag

SEQ ID NO: 184567 - DNA, 25 bp, Probe Sequence
ctcagtcttcagccagagggagggc

SEQ ID NO: 184568 - DNA, 25 bp, Probe Sequence
ctcttctatcatgagataataggcc

SEQ ID NO: 184569 - DNA, 25 bp, Probe Sequence
ctcttgttctggccaaacaacccta

SEQ ID NO: 184570 - DNA, 25 bp, Probe Sequence
ctcatttttggtcaacactaggtga

SEQ ID NO: 184571 - DNA, 25 bp, Probe Sequence
ctcatttttgtgttaagccagtttg

SEQ ID NO: 184572 - DNA, 25 bp, Probe Sequence
ctcatttatttgtaacttgacttct

SEQ ID NO: 184573 - DNA, 25 bp, Probe Sequence
gcctttttaatacctgaacgactag

SEQ ID NO: 184574 - DNA, 25 bp, Probe Sequence
gaattccttaatttagaaaagctca

SEQ ID NO: 184575 - DNA, 25 bp, Probe Sequence
ctcttccggagatgtagcaaaacgc

SEQ ID NO: 184576 - DNA, 25 bp, Probe Sequence
ctctgtacgcccagggaaagcggcg

SEQ ID NO: 184577 - DNA, 25 bp, Probe Sequence
ctcacacaggctcccgaggaggagc

SEQ ID NO: 184578 - DNA, 25 bp, Probe Sequence
ctcaccaggggccagagtcaggggg

SEQ ID NO: 184579 - DNA, 25 bp, Probe Sequence
ctcacctaacccaagtcctggaggt

SEQ ID NO: 184580 - DNA, 25 bp, Probe Sequence
ctcactccaacccaaactagctggg

SEQ ID NO: 184581 - DNA, 25 bp, Probe Sequence
ctcagtaaccctcagaatagcatgt

SEQ ID NO: 184582 - DNA, 25 bp, Probe Sequence
ctcagcataaccgtaaagacaccta

SEQ ID NO: 184583 - DNA, 25 bp, Probe Sequence
ctcattctaccattaagggcaccat

SEQ ID NO: 184584 - DNA, 25 bp, Probe Sequence
ctctactaccaccaaggagaatagt

SEQ ID NO: 184585 - DNA, 25 bp, Probe Sequence
ctcttttccctgtgtacgtggtggt

SEQ ID NO: 184586 - DNA, 25 bp, Probe Sequence
ctctctttccggtgtggagtctgga

SEQ ID NO: 184587 - DNA, 25 bp, Probe Sequence
ctctttacctggggttgctgtcgag

SEQ ID NO: 184588 - DNA, 25 bp, Probe Sequence
ctctttactggatgtttatttataa

SEQ ID NO: 184589 - DNA, 25 bp, Probe Sequence
ctcttttcagtttttgcttatacac

SEQ ID NO: 184590 - DNA, 25 bp, Probe Sequence
ctcttttcagtttttgcttatacac

SEQ ID NO: 184591 - DNA, 25 bp, Probe Sequence
ctgactgtccagtttaccttaacaa

SEQ ID NO: 184592 - DNA, 25 bp, Probe Sequence
ctcactcatctcttttacctaaatt

SEQ ID NO: 184593 - DNA, 25 bp, Probe Sequence
ctcattcacgggactagttagcttt

SEQ ID NO: 184594 - DNA, 25 bp, Probe Sequence
ctcagtgacacggctcaagtctaca

SEQ ID NO: 184595 - DNA, 25 bp, Probe Sequence
ctcacgaagcggacacagttctcat

SEQ ID NO: 184596 - DNA, 25 bp, Probe Sequence
ttcacgtagtggaagggttcgagct

SEQ ID NO: 184597 - DNA, 25 bp, Probe Sequence
ctcaagccttggtagggtctggagt

SEQ ID NO: 184598 - DNA, 25 bp, Probe Sequence
ctcaagcccgcggggacattgggaa

SEQ ID NO: 184599 - DNA, 25 bp, Probe Sequence
ctcaagatcctggtggcgaccatgg

SEQ ID NO: 184600 - DNA, 25 bp, Probe Sequence
ctcagagtctgggtaccccaggctc

SEQ ID NO: 184601 - DNA, 25 bp, Probe Sequence
ctcagggtgtttgcagcctcagagc

SEQ ID NO: 184602 - DNA, 25 bp, Probe Sequence
ctcagtaatgactcaagcctctggc

SEQ ID NO: 184603 - DNA, 25 bp, Probe Sequence
ctcagaaaacaccaaccatgctgtt

SEQ ID NO: 184604 - DNA, 25 bp, Probe Sequence
ctgcgagcaaggtccttccatagtg

SEQ ID NO: 184605 - DNA, 25 bp, Probe Sequence
ctcaggccagcgcctgtatcctgag

SEQ ID NO: 184606 - DNA, 25 bp, Probe Sequence
ctcaagtcatgaccgtcacactggc

SEQ ID NO: 184607 - DNA, 25 bp, Probe Sequence
ctcacaattggcgagatcccatgga

SEQ ID NO: 184608 - DNA, 25 bp, Probe Sequence
ctcacagagctcctagatccttgaa

SEQ ID NO: 184609 - DNA, 25 bp, Probe Sequence
ctcacagagccggagtacttcctct

SEQ ID NO: 184610 - DNA, 25 bp, Probe Sequence
ctcacagaggaggagttccgcacta

SEQ ID NO: 184611 - DNA, 25 bp, Probe Sequence
ctcacaggagagggcgttcaggatg

SEQ ID NO: 184612 - DNA, 25 bp, Probe Sequence
ctcatagagaagccgcttccggctg

SEQ ID NO: 184613 - DNA, 25 bp, Probe Sequence
ctcttgcaaagggtctccttcatcc

SEQ ID NO: 184614 - DNA, 25 bp, Probe Sequence
ctcaatgccaaggctttttctcttc

SEQ ID NO: 184615 - DNA, 25 bp, Probe Sequence
ctcaagtatagcgagattctttcta

SEQ ID NO: 184616 - DNA, 25 bp, Probe Sequence
ctcagatgtacacaattgctcttac

SEQ ID NO: 184617 - DNA, 25 bp, Probe Sequence
ctcagatgtacacaattgctcttac

SEQ ID NO: 184618 - DNA, 25 bp, Probe Sequence
ctcatgtgcggctggttttggacag

SEQ ID NO: 184619 - DNA, 25 bp, Probe Sequence
ctcagcgctggcagcgtcctggaaa

SEQ ID NO: 184620 - DNA, 25 bp, Probe Sequence
ctcatgtctagtgctgtccagctaa

SEQ ID NO: 184621 - DNA, 25 bp, Probe Sequence
ctcagcttcactggcacatccagat

SEQ ID NO: 184622 - DNA, 25 bp, Probe Sequence
ctcagagtctctgatcaagcagatt

SEQ ID NO: 184623 - DNA, 25 bp, Probe Sequence
ctcaagccttactaagcatatgata

SEQ ID NO: 184624 - DNA, 25 bp, Probe Sequence
ctaagtcatgtttactgcatattgc

SEQ ID NO: 184625 - DNA, 25 bp, Probe Sequence
ctaagtgcattaaacatctttgcag

SEQ ID NO: 184626 - DNA, 25 bp, Probe Sequence
ctaattattgctagagatctttatg

SEQ ID NO: 184627 - DNA, 25 bp, Probe Sequence
ctaatgctgcatcttggactatccg

SEQ ID NO: 184628 - DNA, 25 bp, Probe Sequence
ctaatgtgatgcccggaatatctgg

SEQ ID NO: 184629 - DNA, 25 bp, Probe Sequence
ctctagcttgcacccgaaggattga

SEQ ID NO: 184630 - DNA, 25 bp, Probe Sequence
ctctagttgaaccctgggaacaatt

SEQ ID NO: 184631 - DNA, 25 bp, Probe Sequence
ctcaagttgaaccctgtcggagcca

SEQ ID NO: 184632 - DNA, 25 bp, Probe Sequence
ctcagttcagaacactttgggccac

SEQ ID NO: 184633 - DNA, 25 bp, Probe Sequence
ctcaggtaataccagctttagccaa

SEQ ID NO: 184634 - DNA, 25 bp, Probe Sequence
ctcaggtgaaacatttcaacatcac

SEQ ID NO: 184635 - DNA, 25 bp, Probe Sequence
ctcaacgaccactttgtcaagctca

SEQ ID NO: 184636 - DNA, 25 bp, Probe Sequence
ctcaacctcactgatcgtcaagtca

SEQ ID NO: 184637 - DNA, 25 bp, Probe Sequence
ctcaagttatctcctctgctaagac

SEQ ID NO: 184638 - DNA, 25 bp, Probe Sequence
ctcaagtgtcacctccttggagaag

SEQ ID NO: 184639 - DNA, 25 bp, Probe Sequence
ctcaaggtctcaccgcttggaggaa

SEQ ID NO: 184640 - DNA, 25 bp, Probe Sequence
ctcagaagctttttcttggagggta

SEQ ID NO: 184641 - DNA, 25 bp, Probe Sequence
ctcagatttctttctcctataaatg

SEQ ID NO: 184642 - DNA, 25 bp, Probe Sequence
ctcttccctcctaggcttaaagtat

SEQ ID NO: 184643 - DNA, 25 bp, Probe Sequence
ctctatttctcctggttcaacgtgg

SEQ ID NO: 184644 - DNA, 25 bp, Probe Sequence
ctctttttccggctggaaccatgga

SEQ ID NO: 184645 - DNA, 25 bp, Probe Sequence
ctcttcttattacccaaacccatgg

SEQ ID NO: 184646 - DNA, 25 bp, Probe Sequence
ctcagtttatttaaccattcccatg

SEQ ID NO: 184647 - DNA, 25 bp, Probe Sequence
ctcagattattcttactccttacct

SEQ ID NO: 184648 - DNA, 25 bp, Probe Sequence
ctcagcatggtttttgtcagttcac

SEQ ID NO: 184649 - DNA, 25 bp, Probe Sequence
ctcatcagacctttatcatagcccc

SEQ ID NO: 184650 - DNA, 25 bp, Probe Sequence
ctcagcaacaaacaatacacccagg

SEQ ID NO: 184651 - DNA, 25 bp, Probe Sequence
ctcaattgcatcggagaaactccta

SEQ ID NO: 184652 - DNA, 25 bp, Probe Sequence
ctcaagagatcctagatatccccca

SEQ ID NO: 184653 - DNA, 25 bp, Probe Sequence
ctcagtagtctaagtattccacaca

SEQ ID NO: 184654 - DNA, 25 bp, Probe Sequence
ctcagccgtgctacactacggacac

SEQ ID NO: 184655 - DNA, 25 bp, Probe Sequence
ctcactgcttggacactacattcca

SEQ ID NO: 184656 - DNA, 25 bp, Probe Sequence
ctcactgctggggagtccctgccac

SEQ ID NO: 184657 - DNA, 25 bp, Probe Sequence
ctcactatggtatgctggccagcac

SEQ ID NO: 184658 - DNA, 25 bp, Probe Sequence
ctctcaagttcatgctgacgaatct

SEQ ID NO: 184659 - DNA, 25 bp, Probe Sequence
ctcacatgaattacactgactcaat

SEQ ID NO: 184660 - DNA, 25 bp, Probe Sequence
ctcacagtatatgaatgatctggac

SEQ ID NO: 184661 - DNA, 25 bp, Probe Sequence
ctcagcatgttgactgggattggaa

SEQ ID NO: 184662 - DNA, 25 bp, Probe Sequence
ctcagcaatcagactgtcgacattc

SEQ ID NO: 184663 - DNA, 25 bp, Probe Sequence
ctcacaaagtagacgattcctctgg

SEQ ID NO: 184664 - DNA, 25 bp, Probe Sequence
ctcaaagagtatatgttccctccag

SEQ ID NO: 184665 - DNA, 25 bp, Probe Sequence
ctcaaatgatgtgcctgcttcagcc

SEQ ID NO: 184666 - DNA, 25 bp, Probe Sequence
ctcaaaatatacctcttgcccagct

SEQ ID NO: 184667 - DNA, 25 bp, Probe Sequence
ctcaacaaaatcccaatccaagtca

SEQ ID NO: 184668 - DNA, 25 bp, Probe Sequence
ctcaaaaatgctgacaatccagagt

SEQ ID NO: 184669 - DNA, 25 bp, Probe Sequence
ctcaacacaacattagcaaatcaaa

SEQ ID NO: 184670 - DNA, 25 bp, Probe Sequence
ctcaagctcagtgcatagtggtaaa

SEQ ID NO: 184671 - DNA, 25 bp, Probe Sequence
ctcaatcctgcggctttggtgacag

SEQ ID NO: 184672 - DNA, 25 bp, Probe Sequence
ctcactgcttgggaaatgactacag

SEQ ID NO: 184673 - DNA, 25 bp, Probe Sequence
ctcactgtgctcctaaaggcagcaa

SEQ ID NO: 184674 - DNA, 25 bp, Probe Sequence
ctcactcttttccaggacagcaatt

SEQ ID NO: 184675 - DNA, 25 bp, Probe Sequence
ctcatgtaaattatggagcacaatg

SEQ ID NO: 184676 - DNA, 25 bp, Probe Sequence
ctcaatccattctctgggacacatg

SEQ ID NO: 184677 - DNA, 25 bp, Probe Sequence
ctcatatcctgttcaagttaatcaa

SEQ ID NO: 184678 - DNA, 25 bp, Probe Sequence
ctcaatcccagattttcaaaaaata

SEQ ID NO: 184679 - DNA, 25 bp, Probe Sequence
ctcaaccacacattctctaagaaac

SEQ ID NO: 184680 - DNA, 25 bp, Probe Sequence
ctcagagccacccctaaagagatcc

SEQ ID NO: 184681 - DNA, 25 bp, Probe Sequence
ctcaagacacctcccgagtgtctgc

SEQ ID NO: 184682 - DNA, 25 bp, Probe Sequence
ctcaagacagtgccctgtgggttcc

SEQ ID NO: 184683 - DNA, 25 bp, Probe Sequence
ctcaaagaggtgactgggccctgcc

SEQ ID NO: 184684 - DNA, 25 bp, Probe Sequence
ctcaaagaccatctgtatgccctgc

SEQ ID NO: 184685 - DNA, 25 bp, Probe Sequence
ctcaaagaccatctgtatgccctgc

SEQ ID NO: 184686 - DNA, 25 bp, Probe Sequence
ctcaagaatgcccatctgtgaacac

SEQ ID NO: 184687 - DNA, 25 bp, Probe Sequence
ctcaatgacatgacctctatataat

SEQ ID NO: 184688 - DNA, 25 bp, Probe Sequence
ctcaatcactcagctcttaaagcaa

SEQ ID NO: 184689 - DNA, 25 bp, Probe Sequence
ctcttccagcaggtctataaaggga

SEQ ID NO: 184690 - DNA, 25 bp, Probe Sequence
ctcttctcccgactatttggcaaga

SEQ ID NO: 184691 - DNA, 25 bp, Probe Sequence
ccgtcgctactaccgattggatggt

SEQ ID NO: 184692 - DNA, 25 bp, Probe Sequence
ctcagtcccaacctcggggatgtgt

SEQ ID NO: 184693 - DNA, 25 bp, Probe Sequence
ctcagtcccaacctcggggatgtgt

SEQ ID NO: 184694 - DNA, 25 bp, Probe Sequence
ctcagtccctctttgggaggtgatg

SEQ ID NO: 184695 - DNA, 25 bp, Probe Sequence
ctcagactcctctgcgtggagaggg

SEQ ID NO: 184696 - DNA, 25 bp, Probe Sequence
ctcaagctctctgtgggtaggggtt

SEQ ID NO: 184697 - DNA, 25 bp, Probe Sequence
ctcaggccactgaatgggtaggagc

SEQ ID NO: 184698 - DNA, 25 bp, Probe Sequence
ctcaggccactgaatgggtaggagc

SEQ ID NO: 184699 - DNA, 25 bp, Probe Sequence
ctcagtccttgcaatgttctaggtg

SEQ ID NO: 184700 - DNA, 25 bp, Probe Sequence
ctcacatccattaagatggctcctg

SEQ ID NO: 184701 - DNA, 25 bp, Probe Sequence
ctcacagcaccaaatgattccctgg

SEQ ID NO: 184702 - DNA, 25 bp, Probe Sequence
ctcaagtctcaattgaactgcctcc

SEQ ID NO: 184703 - DNA, 25 bp, Probe Sequence
ctcattcctaaataacttgccttac

SEQ ID NO: 184704 - DNA, 25 bp, Probe Sequence
ctcagctcttaaagcaacctgtcag

SEQ ID NO: 184705 - DNA, 25 bp, Probe Sequence
ctcagcacagtacgagaccctgtcg

SEQ ID NO: 184706 - DNA, 25 bp, Probe Sequence
ctcaccaagagcacagctttgtcgt

SEQ ID NO: 184707 - DNA, 25 bp, Probe Sequence
ctcaccgcaggcagcagtttgcatt

SEQ ID NO: 184708 - DNA, 25 bp, Probe Sequence
ctcaaccactgtggcgttctgctgc

SEQ ID NO: 184709 - DNA, 25 bp, Probe Sequence
ctcaaatcttgttggatctctgcag

SEQ ID NO: 184710 - DNA, 25 bp, Probe Sequence
ctcagaccttgcaggctgtggagca

SEQ ID NO: 184711 - DNA, 25 bp, Probe Sequence
ctcacatcctgtgggactctgttga

SEQ ID NO: 184712 - DNA, 25 bp, Probe Sequence
ctcatccctgatggctgtggggtca

SEQ ID NO: 184713 - DNA, 25 bp, Probe Sequence
ctcacctgtttgtgtggggacggct

SEQ ID NO: 184714 - DNA, 25 bp, Probe Sequence
ctcacctttaaactggggatcatgc

SEQ ID NO: 184715 - DNA, 25 bp, Probe Sequence
ctcagccttgttttcggtgtgtagg

SEQ ID NO: 184716 - DNA, 25 bp, Probe Sequence
ctcagtcttttttgcggctttgctg

SEQ ID NO: 184717 - DNA, 25 bp, Probe Sequence
ctcatgtttgtgataaccgtggcga

SEQ ID NO: 184718 - DNA, 25 bp, Probe Sequence
ctcattctagctgtaactctttcca

SEQ ID NO: 184719 - DNA, 25 bp, Probe Sequence
ctcgttctgggcagaccttatccaa

SEQ ID NO: 184720 - DNA, 25 bp, Probe Sequence
ctcagaacttgggtgaccggatcct

SEQ ID NO: 184721 - DNA, 25 bp, Probe Sequence
ctcaggacttgggctgtttgtagtt

SEQ ID NO: 184722 - DNA, 25 bp, Probe Sequence
ctcagcccttctgcttctggaaggg

SEQ ID NO: 184723 - DNA, 25 bp, Probe Sequence
ctcagcccttctgcttctggaaggg

SEQ ID NO: 184724 - DNA, 25 bp, Probe Sequence
ctcaccaccattatgtcctgattag

SEQ ID NO: 184725 - DNA, 25 bp, Probe Sequence
ctcgccacaaatatgggtactgcgg

SEQ ID NO: 184726 - DNA, 25 bp, Probe Sequence
ctcaggcaaactatcacagtcctgc

SEQ ID NO: 184727 - DNA, 25 bp, Probe Sequence
ctcaggtatatatcccagtacgccc

SEQ ID NO: 184728 - DNA, 25 bp, Probe Sequence
ctcagtgtttaaggcacaccctgct

SEQ ID NO: 184729 - DNA, 25 bp, Probe Sequence
ctcacagttattaaccagactcaga

SEQ ID NO: 184730 - DNA, 25 bp, Probe Sequence
ctcatcgattgatttacggcgctaa

SEQ ID NO: 184731 - DNA, 25 bp, Probe Sequence
ctcaacatggagtctcactggccaa

SEQ ID NO: 184732 - DNA, 25 bp, Probe Sequence
ctctatcatcaacttcactactcat

SEQ ID NO: 184733 - DNA, 25 bp, Probe Sequence
ctcatgcataaactctaatattcag

SEQ ID NO: 184734 - DNA, 25 bp, Probe Sequence
ctcacctaactgccaatctatagga

SEQ ID NO: 184735 - DNA, 25 bp, Probe Sequence
ctcactgcgaaggcaggttattaga

SEQ ID NO: 184736 - DNA, 25 bp, Probe Sequence
ctcactgccagggaagctccataaa

SEQ ID NO: 184737 - DNA, 25 bp, Probe Sequence
ctcactaccgacaagctctagacat

SEQ ID NO: 184738 - DNA, 25 bp, Probe Sequence
ctctaactctgaatggctctaacca

SEQ ID NO: 184739 - DNA, 25 bp, Probe Sequence
ctcagaactcagatgtggctagacc

SEQ ID NO: 184740 - DNA, 25 bp, Probe Sequence
ctcaaatggcaaatgggtccccttt

SEQ ID NO: 184741 - DNA, 25 bp, Probe Sequence
ctcaaagagatattggtacacccat

SEQ ID NO: 184742 - DNA, 25 bp, Probe Sequence
ctcaatcaggactttgtcccagaca

SEQ ID NO: 184743 - DNA, 25 bp, Probe Sequence
ctcaacaggactttgtccagactct

SEQ ID NO: 184744 - DNA, 25 bp, Probe Sequence
cccagcagaacctgaacgacctgat

SEQ ID NO: 184745 - DNA, 25 bp, Probe Sequence
ctcaccagggccggaaagaccgacg

SEQ ID NO: 184746 - DNA, 25 bp, Probe Sequence
ctcagccaaggccctgaatgaagcc

SEQ ID NO: 184747 - DNA, 25 bp, Probe Sequence
ctcaccattggctcgaagctgcagg

SEQ ID NO: 184748 - DNA, 25 bp, Probe Sequence
ctcatccacatgtctggcagatggc

SEQ ID NO: 184749 - DNA, 25 bp, Probe Sequence
ctcatgctcatcaagttggacgaat

SEQ ID NO: 184750 - DNA, 25 bp, Probe Sequence
ctcactgctctaacatgctgaagaa

SEQ ID NO: 184751 - DNA, 25 bp, Probe Sequence
ctcactatcacaagatagcaaggga

SEQ ID NO: 184752 - DNA, 25 bp, Probe Sequence
ctcagctactcaggaggctaaggca

SEQ ID NO: 184753 - DNA, 25 bp, Probe Sequence
ctcacatgagaaggacagctaaccc

SEQ ID NO: 184754 - DNA, 25 bp, Probe Sequence
ctcaaagacagcgcatggaagctcc

SEQ ID NO: 184755 - DNA, 25 bp, Probe Sequence
ctcaaagcacagcccaaacagacaa

SEQ ID NO: 184756 - DNA, 25 bp, Probe Sequence
ctcaaaagcacagacaaccacaaca

SEQ ID NO: 184757 - DNA, 25 bp, Probe Sequence
ctgcaggcaaaagaaacccccagct

SEQ ID NO: 184758 - DNA, 25 bp, Probe Sequence
ctctgtgataaaaagacccctcccg

SEQ ID NO: 184759 - DNA, 25 bp, Probe Sequence
ctcttgtagaatgcagctctggccc

SEQ ID NO: 184760 - DNA, 25 bp, Probe Sequence
ctctttggagatgcccattctactt

SEQ ID NO: 184761 - DNA, 25 bp, Probe Sequence
ctcactctggagatcaccttcgagg

SEQ ID NO: 184762 - DNA, 25 bp, Probe Sequence
ctcacatttgatattctcttatatg

SEQ ID NO: 184763 - DNA, 25 bp, Probe Sequence
ctcactttgctcatgttattgttga

SEQ ID NO: 184764 - DNA, 25 bp, Probe Sequence
ctcttgttgctcagcatggcacggt

SEQ ID NO: 184765 - DNA, 25 bp, Probe Sequence
ctcagggtcctaatggcagcagaac

SEQ ID NO: 184766 - DNA, 25 bp, Probe Sequence
ctcatagccttgcactgagcacaga

SEQ ID NO: 184767 - DNA, 25 bp, Probe Sequence
ctcagatgccactggctggcacagc

SEQ ID NO: 184768 - DNA, 25 bp, Probe Sequence
ctcaagccagctgggctgtgggcgg

SEQ ID NO: 184769 - DNA, 25 bp, Probe Sequence
ctcaacctcgagccgctggacgagg

SEQ ID NO: 184770 - DNA, 25 bp, Probe Sequence
ctcaacctctagcccagggcataca

SEQ ID NO: 184771 - DNA, 25 bp, Probe Sequence
ctcatacgtgattgcagccgggcat

SEQ ID NO: 184772 - DNA, 25 bp, Probe Sequence
ctcagacagtgtgcggcggcacatg

SEQ ID NO: 184773 - DNA, 25 bp, Probe Sequence
ctcacacagcgaggcctcaagacag

SEQ ID NO: 184774 - DNA, 25 bp, Probe Sequence
ctcatgctagcctcacgaaactgga

SEQ ID NO: 184775 - DNA, 25 bp, Probe Sequence
ctcagtgagcacaaacaaatacatg

SEQ ID NO: 184776 - DNA, 25 bp, Probe Sequence
ctcactgagagcgcaaaatgcagct

SEQ ID NO: 184777 - DNA, 25 bp, Probe Sequence
ctcagcagagtggtgcagtttcgct

SEQ ID NO: 184778 - DNA, 25 bp, Probe Sequence
ctcatgctggatgccagctggcccc

SEQ ID NO: 184779 - DNA, 25 bp, Probe Sequence
ctcacatgtgaacagcttgcacctc

SEQ ID NO: 184780 - DNA, 25 bp, Probe Sequence
ctcagcagccaagagcttcaggtat

SEQ ID NO: 184781 - DNA, 25 bp, Probe Sequence
ctcagcccagagtgttctgcgtggg

SEQ ID NO: 184782 - DNA, 25 bp, Probe Sequence
gtacctaggaccatctagttagttc

SEQ ID NO: 184783 - DNA, 25 bp, Probe Sequence
ctcacttatggagcttctctgttag

SEQ ID NO: 184784 - DNA, 25 bp, Probe Sequence
ctcacttatgtttggatctccgtaa

SEQ ID NO: 184785 - DNA, 25 bp, Probe Sequence
ctcacttggacttgagacccttcac

SEQ ID NO: 184786 - DNA, 25 bp, Probe Sequence
ctcagctgggagtggaacctgtcga

SEQ ID NO: 184787 - DNA, 25 bp, Probe Sequence
ctcatagtggagaggaatcctacaa

SEQ ID NO: 184788 - DNA, 25 bp, Probe Sequence
ctctgaagtggttctgaacacacca

SEQ ID NO: 184789 - DNA, 25 bp, Probe Sequence
ctctgaagacctgatgacccagctt

SEQ ID NO: 184790 - DNA, 25 bp, Probe Sequence
ctctaggacactctaacaagctctg

SEQ ID NO: 184791 - DNA, 25 bp, Probe Sequence
ctcacggaatctgattaagccctgg

SEQ ID NO: 184792 - DNA, 25 bp, Probe Sequence
ctcaggtgagttacttaaggctagg

SEQ ID NO: 184793 - DNA, 25 bp, Probe Sequence
ctcagggagctgaatattacggcag

SEQ ID NO: 184794 - DNA, 25 bp, Probe Sequence
ctcatccgccagatttgagcagcgc

SEQ ID NO: 184795 - DNA, 25 bp, Probe Sequence
ctcacagaggagatgctgctgaagc

SEQ ID NO: 184796 - DNA, 25 bp, Probe Sequence
ctcatcaggtaatctgctaaggagg

SEQ ID NO: 184797 - DNA, 25 bp, Probe Sequence
ctcacactgtgaaccacttaggatg

SEQ ID NO: 184798 - DNA, 25 bp, Probe Sequence
ctcactctattcgccttaggcatgt

SEQ ID NO: 184799 - DNA, 25 bp, Probe Sequence
ctctttattggtggcttaagctttg

SEQ ID NO: 184800 - DNA, 25 bp, Probe Sequence
cgtttattggtagttcgagagctca

SEQ ID NO: 184801 - DNA, 25 bp, Probe Sequence
ctcttttgggctcttctggagggaa

SEQ ID NO: 184802 - DNA, 25 bp, Probe Sequence
ctctttaagggattatctgacaggg

SEQ ID NO: 184803 - DNA, 25 bp, Probe Sequence
ctctttaaggaccagaaccaggaat

SEQ ID NO: 184804 - DNA, 25 bp, Probe Sequence
ctcttcaaaggatgcaatagtagaa

SEQ ID NO: 184805 - DNA, 25 bp, Probe Sequence
ctcttccttggaacatcacagtaca

SEQ ID NO: 184806 - DNA, 25 bp, Probe Sequence
ctcttcctgttgggcaaacttctga

SEQ ID NO: 184807 - DNA, 25 bp, Probe Sequence
ctcttccctagggccttttgtggat

SEQ ID NO: 184808 - DNA, 25 bp, Probe Sequence
ctcttccctagggccttttgtggat

SEQ ID NO: 184809 - DNA, 25 bp, Probe Sequence
ccttactttaggatggggtgtgata

SEQ ID NO: 184810 - DNA, 25 bp, Probe Sequence
ctcttttttagagttctgggggctg

SEQ ID NO: 184811 - DNA, 25 bp, Probe Sequence
ctctttttgacatacttcgggtata

SEQ ID NO: 184812 - DNA, 25 bp, Probe Sequence
ctctgtttgaaatacctagtgtggt

SEQ ID NO: 184813 - DNA, 25 bp, Probe Sequence
ctctttccaacagcccaagtggggt

SEQ ID NO: 184814 - DNA, 25 bp, Probe Sequence
ctcttacccacagctgactagggcc

SEQ ID NO: 184815 - DNA, 25 bp, Probe Sequence
ctcatctccctcaaggatggctacg

SEQ ID NO: 184816 - DNA, 25 bp, Probe Sequence
ctcactcccaggcagagttgtctga

SEQ ID NO: 184817 - DNA, 25 bp, Probe Sequence
ctcatccctgggcatatgtgtacca

SEQ ID NO: 184818 - DNA, 25 bp, Probe Sequence
ctctctcctggggtaggtttagtag

SEQ ID NO: 184819 - DNA, 25 bp, Probe Sequence
ctcttgcctgccaggggtttttcgg

SEQ ID NO: 184820 - DNA, 25 bp, Probe Sequence
ctcttgggctttggggtcattatta

SEQ ID NO: 184821 - DNA, 25 bp, Probe Sequence
ctcttgaggctctggagtcccaatt

SEQ ID NO: 184822 - DNA, 25 bp, Probe Sequence
ctcttgggccctgatttcagagtcc

SEQ ID NO: 184823 - DNA, 25 bp, Probe Sequence
ctctgtagccgctctatctggctag

SEQ ID NO: 184824 - DNA, 25 bp, Probe Sequence
ctcttagactcgcctatcttaggta

SEQ ID NO: 184825 - DNA, 25 bp, Probe Sequence
ctcacaagcaattccttctggaggc

SEQ ID NO: 184826 - DNA, 25 bp, Probe Sequence
ctcaccagcaaggctgctcgggggc

SEQ ID NO: 184827 - DNA, 25 bp, Probe Sequence
ctcatcctgcaagtctctcggaaac

SEQ ID NO: 184828 - DNA, 25 bp, Probe Sequence
ctcatcctgcaagtctctcggaaac

SEQ ID NO: 184829 - DNA, 25 bp, Probe Sequence
ctcttcaaacctcctgtagagagcc

SEQ ID NO: 184830 - DNA, 25 bp, Probe Sequence
ctctctcgaacctgggaagacctgg

SEQ ID NO: 184831 - DNA, 25 bp, Probe Sequence
ctcatctcgaactcgtggggtcaag

SEQ ID NO: 184832 - DNA, 25 bp, Probe Sequence
ctcagcctgaaccccagggctgtaa

SEQ ID NO: 184833 - DNA, 25 bp, Probe Sequence
ctcactgtgaagcccaaggagaaag

SEQ ID NO: 184834 - DNA, 25 bp, Probe Sequence
ctcactggacgccacaggggcaaga

SEQ ID NO: 184835 - DNA, 25 bp, Probe Sequence
ctcagatgaacccgaatggcccagc

SEQ ID NO: 184836 - DNA, 25 bp, Probe Sequence
ctcaggcagtgcaggacaacccagc

SEQ ID NO: 184837 - DNA, 25 bp, Probe Sequence
ctcaggacgctggatgccagctccc

SEQ ID NO: 184838 - DNA, 25 bp, Probe Sequence
ctcttgacacttagccgctgtctcg

SEQ ID NO: 184839 - DNA, 25 bp, Probe Sequence
ctcttcacataaagcttgctaccgc

SEQ ID NO: 184840 - DNA, 25 bp, Probe Sequence
ctcttacttcaatttgaacccattt

SEQ ID NO: 184841 - DNA, 25 bp, Probe Sequence
ctcttacacctgttatggaaaatgt

SEQ ID NO: 184842 - DNA, 25 bp, Probe Sequence
ctgagtagccacaattagtaaagta

SEQ ID NO: 184843 - DNA, 25 bp, Probe Sequence
ctcgggccacgaaaggaaagaaatg

SEQ ID NO: 184844 - DNA, 25 bp, Probe Sequence
ctcgggccacgaaaggaaagaaatg

SEQ ID NO: 184845 - DNA, 25 bp, Probe Sequence
ctctggtcaccctgaggaaaaagaa

SEQ ID NO: 184846 - DNA, 25 bp, Probe Sequence
ctgaattcacccccactgaaaaaga

SEQ ID NO: 184847 - DNA, 25 bp, Probe Sequence
ctgacacttacatacttggaccaaa

SEQ ID NO: 184848 - DNA, 25 bp, Probe Sequence
ctgcacctttatacacttcgataac

SEQ ID NO: 184849 - DNA, 25 bp, Probe Sequence
ctcactttaatcctctatccagaaa

SEQ ID NO: 184850 - DNA, 25 bp, Probe Sequence
ctcacataaacatctatatcccagc

SEQ ID NO: 184851 - DNA, 25 bp, Probe Sequence
ctccattcgaatgcagaacctcacc

SEQ ID NO: 184852 - DNA, 25 bp, Probe Sequence
ctccattcgaatgcagaacctcacc

SEQ ID NO: 184853 - DNA, 25 bp, Probe Sequence
ctcacaagctggaaagaaactatcc

SEQ ID NO: 184854 - DNA, 25 bp, Probe Sequence
ctcactagctctcataggagtgcta

SEQ ID NO: 184855 - DNA, 25 bp, Probe Sequence
ctcaccatcccctaggagacataaa

SEQ ID NO: 184856 - DNA, 25 bp, Probe Sequence
ctcactcttgtcctctggagacaaa

SEQ ID NO: 184857 - DNA, 25 bp, Probe Sequence
ctcactcttgctcttacattaaagt

SEQ ID NO: 184858 - DNA, 25 bp, Probe Sequence
ctcactgtcctgttttcttaggcac

SEQ ID NO: 184859 - DNA, 25 bp, Probe Sequence
ctcactgtcctgttttcttaggcac

SEQ ID NO: 184860 - DNA, 25 bp, Probe Sequence
ctcattctctttgttttgtggcact

SEQ ID NO: 184861 - DNA, 25 bp, Probe Sequence
ctcttctcctctgtttcgtgaaggc

SEQ ID NO: 184862 - DNA, 25 bp, Probe Sequence
ctcttcttcctgttattggtagttc

SEQ ID NO: 184863 - DNA, 25 bp, Probe Sequence
ctcttcttcccaagcataggcttta

SEQ ID NO: 184864 - DNA, 25 bp, Probe Sequence
ctcatgtttcccagtacacctgtag

SEQ ID NO: 184865 - DNA, 25 bp, Probe Sequence
ctcattttccagttggacaggcctg

SEQ ID NO: 184866 - DNA, 25 bp, Probe Sequence
ctcttacagtcgatggacttcctga

SEQ ID NO: 184867 - DNA, 25 bp, Probe Sequence
ctcagccagcagtccttggacttcg

SEQ ID NO: 184868 - DNA, 25 bp, Probe Sequence
ctcagccagcagtccttggacttcg

SEQ ID NO: 184869 - DNA, 25 bp, Probe Sequence
ctcagcacctgctgcatctggagca

SEQ ID NO: 184870 - DNA, 25 bp, Probe Sequence
ctcagccctgagacacaggcctcag

SEQ ID NO: 184871 - DNA, 25 bp, Probe Sequence
ctcaccctagttagcacgcatgggc

SEQ ID NO: 184872 - DNA, 25 bp, Probe Sequence
ctcagctgcctggtttaccgagctg

SEQ ID NO: 184873 - DNA, 25 bp, Probe Sequence
ctcagtgcactggtttttctaggaa

SEQ ID NO: 184874 - DNA, 25 bp, Probe Sequence
ctcaggctgtttttattctgcaggt

SEQ ID NO: 184875 - DNA, 25 bp, Probe Sequence
ctcactcatgttcttattgcagcaa

SEQ ID NO: 184876 - DNA, 25 bp, Probe Sequence
ctcacttttgcagttgattactgaa

SEQ ID NO: 184877 - DNA, 25 bp, Probe Sequence
ctcacattttgcgagattatcctga

SEQ ID NO: 184878 - DNA, 25 bp, Probe Sequence
ctcacgtacctgcagcttctgcaga

SEQ ID NO: 184879 - DNA, 25 bp, Probe Sequence
ctcacctgacaacactgttgcattg

SEQ ID NO: 184880 - DNA, 25 bp, Probe Sequence
ctcaccaagcataaacatattcctg

SEQ ID NO: 184881 - DNA, 25 bp, Probe Sequence
ctcacacctgtaatcccaatactgg

SEQ ID NO: 184882 - DNA, 25 bp, Probe Sequence
ctcacgcctgtaatcccagcacttt

SEQ ID NO: 184883 - DNA, 25 bp, Probe Sequence
ctcactgtgcattttgcaccaacta

SEQ ID NO: 184884 - DNA, 25 bp, Probe Sequence
ctcacgtgcataatatattctacta

SEQ ID NO: 184885 - DNA, 25 bp, Probe Sequence
ctcactgtgtacaattctgaagaca

SEQ ID NO: 184886 - DNA, 25 bp, Probe Sequence
ctcagttatatcattgctccatgca

SEQ ID NO: 184887 - DNA, 25 bp, Probe Sequence
ctcagtttgccagtcttgcaatcag

SEQ ID NO: 184888 - DNA, 25 bp, Probe Sequence
ctcagagtcccagtgttgagtctgg

SEQ ID NO: 184889 - DNA, 25 bp, Probe Sequence
ctcacagtgcagggcggtatgccgc

SEQ ID NO: 184890 - DNA, 25 bp, Probe Sequence
ctcacagctgacaaggcaaatgccc

SEQ ID NO: 184891 - DNA, 25 bp, Probe Sequence
ctcatactgctcagtgacatggccc

SEQ ID NO: 184892 - DNA, 25 bp, Probe Sequence
ctcatcttgtcccatggagagtcca

SEQ ID NO: 184893 - DNA, 25 bp, Probe Sequence
ctcatctctgttgatgtgaggcgac

SEQ ID NO: 184894 - DNA, 25 bp, Probe Sequence
ctcatagctgtagattacgtgaagg

SEQ ID NO: 184895 - DNA, 25 bp, Probe Sequence
ctcatagctgaaaattacttaagga

SEQ ID NO: 184896 - DNA, 25 bp, Probe Sequence
ctctacgcattcagtccttaagggg

SEQ ID NO: 184897 - DNA, 25 bp, Probe Sequence
ctcaggccgatcaggacttcaaggg

SEQ ID NO: 184898 - DNA, 25 bp, Probe Sequence
ctcatggcccacatggcctccaagg

SEQ ID NO: 184899 - DNA, 25 bp, Probe Sequence
ctcaggtgccacttagtccagaaag

SEQ ID NO: 184900 - DNA, 25 bp, Probe Sequence
ctcaggaagccggagtcgcaggagg

SEQ ID NO: 184901 - DNA, 25 bp, Probe Sequence
ctcatgaaagggacgacgggagctg

SEQ ID NO: 184902 - DNA, 25 bp, Probe Sequence
ctcattaaagagacgtgaaccagct

SEQ ID NO: 184903 - DNA, 25 bp, Probe Sequence
ctcggcagaagctcgttaccagctt

SEQ ID NO: 184904 - DNA, 25 bp, Probe Sequence
ctcggccgagaggccttacttcatg

SEQ ID NO: 184905 - DNA, 25 bp, Probe Sequence
ctcggctcttgacacttagccgctg

SEQ ID NO: 184906 - DNA, 25 bp, Probe Sequence
ctcagtccttgacaccgatggggac

SEQ ID NO: 184907 - DNA, 25 bp, Probe Sequence
ctcagcttcttgcccataaatgggg

SEQ ID NO: 184908 - DNA, 25 bp, Probe Sequence
ctcacttgctggtcctcaacaagat

SEQ ID NO: 184909 - DNA, 25 bp, Probe Sequence
ctcatcttctggtcccataattctc

SEQ ID NO: 184910 - DNA, 25 bp, Probe Sequence
ctccttctgcttgcacaagtttcct

SEQ ID NO: 184911 - DNA, 25 bp, Probe Sequence
ctgctgtgttttgactagttatccc

SEQ ID NO: 184912 - DNA, 25 bp, Probe Sequence
ctctggaggaccactagttcatcct

SEQ ID NO: 184913 - DNA, 25 bp, Probe Sequence
ctctccggtccatctgaattatacc

SEQ ID NO: 184914 - DNA, 25 bp, Probe Sequence
ctctttgtgtacttgtacggtactg

SEQ ID NO: 184915 - DNA, 25 bp, Probe Sequence
cgttttatccttgtgggtcagattt

SEQ ID NO: 184916 - DNA, 25 bp, Probe Sequence
cgttcgtatcgtccactgggactga

SEQ ID NO: 184917 - DNA, 25 bp, Probe Sequence
ctcttctgcatattgctgacctgag

SEQ ID NO: 184918 - DNA, 25 bp, Probe Sequence
ctcatgctcatatgtgtgcacgctt

SEQ ID NO: 184919 - DNA, 25 bp, Probe Sequence
ctcagccagtagatgcacatgttac

SEQ ID NO: 184920 - DNA, 25 bp, Probe Sequence
ctcagccattttgggcatatgtatc

SEQ ID NO: 184921 - DNA, 25 bp, Probe Sequence
ctcatgccagattttgggattacaa

SEQ ID NO: 184922 - DNA, 25 bp, Probe Sequence
ctcatgccgagtcgaggacatcaaa

SEQ ID NO: 184923 - DNA, 25 bp, Probe Sequence
ctcagccctgctcatgaggcagcaa

SEQ ID NO: 184924 - DNA, 25 bp, Probe Sequence
ctcagccagtgagatggccagcccc

SEQ ID NO: 184925 - DNA, 25 bp, Probe Sequence
ctcatcctcagagagagccagctct

SEQ ID NO: 184926 - DNA, 25 bp, Probe Sequence
ctcacttggcagtcagagcatcatg

SEQ ID NO: 184927 - DNA, 25 bp, Probe Sequence
ctcacctgtgagttcagcatctgtg

SEQ ID NO: 184928 - DNA, 25 bp, Probe Sequence
ctcagtgctgtagtccaactgtccc

SEQ ID NO: 184929 - DNA, 25 bp, Probe Sequence
ctcagcagcttaatccaaggcaccc

SEQ ID NO: 184930 - DNA, 25 bp, Probe Sequence
ctcagcaaacatactctgcggtcgg

SEQ ID NO: 184931 - DNA, 25 bp, Probe Sequence
ctcaccatgtctatcgaggctcggg

SEQ ID NO: 184932 - DNA, 25 bp, Probe Sequence
ctcatcgccattgtggcaggcctgg

SEQ ID NO: 184933 - DNA, 25 bp, Probe Sequence
ctcttgcaataattggcagatgccc

SEQ ID NO: 184934 - DNA, 25 bp, Probe Sequence
ctcatctgaatttactagagcccca

SEQ ID NO: 184935 - DNA, 25 bp, Probe Sequence
ctcattacttatactgggacaccat

SEQ ID NO: 184936 - DNA, 25 bp, Probe Sequence
ctcttacttactgggaacacacatc

SEQ ID NO: 184937 - DNA, 25 bp, Probe Sequence
ctcttcccgatctaggagaactctc

SEQ ID NO: 184938 - DNA, 25 bp, Probe Sequence
ctcactgcccgtgtgcagaaaccgg

SEQ ID NO: 184939 - DNA, 25 bp, Probe Sequence
ctcacctgcctggcttagaagacct

SEQ ID NO: 184940 - DNA, 25 bp, Probe Sequence
ctcatccacagtcatcaagaaacct

SEQ ID NO: 184941 - DNA, 25 bp, Probe Sequence
ctctccgtgtggtcagcgaaaccat

SEQ ID NO: 184942 - DNA, 25 bp, Probe Sequence
ctctgcctagagcccaggagggact

SEQ ID NO: 184943 - DNA, 25 bp, Probe Sequence
ctcttctcaggggctctagggactg

SEQ ID NO: 184944 - DNA, 25 bp, Probe Sequence
ctcttccaatgagcttaaaacattt

SEQ ID NO: 184945 - DNA, 25 bp, Probe Sequence
ctctgtcccagggtccaatatccaa

SEQ ID NO: 184946 - DNA, 25 bp, Probe Sequence
ctctgcctccaaggcattcgatgcg

SEQ ID NO: 184947 - DNA, 25 bp, Probe Sequence
ctcactgcccaaggtctgtgatggg

SEQ ID NO: 184948 - DNA, 25 bp, Probe Sequence
ctcactgctctccagaggctagtgt

SEQ ID NO: 184949 - DNA, 25 bp, Probe Sequence
ctcactgcatataagagttatgtta

SEQ ID NO: 184950 - DNA, 25 bp, Probe Sequence
ctctatgcatgtcaggaaagtcttc

SEQ ID NO: 184951 - DNA, 25 bp, Probe Sequence
ctctgacatggcttggctgactttt

SEQ ID NO: 184952 - DNA, 25 bp, Probe Sequence
ctcagacatgtctttctatctctct

SEQ ID NO: 184953 - DNA, 25 bp, Probe Sequence
ctcagcctctgcaatccatatatat

SEQ ID NO: 184954 - DNA, 25 bp, Probe Sequence
ctcaggcatccattccaatcaagaa

SEQ ID NO: 184955 - DNA, 25 bp, Probe Sequence
ctcaggcatccattccaatcaagaa

SEQ ID NO: 184956 - DNA, 25 bp, Probe Sequence
ctcagcctactttcacactaagaaa

SEQ ID NO: 184957 - DNA, 25 bp, Probe Sequence
ctcattctcatctttaagccagaga

SEQ ID NO: 184958 - DNA, 25 bp, Probe Sequence
ctctgaatggctctaaccagggaat

SEQ ID NO: 184959 - DNA, 25 bp, Probe Sequence
ctctaaatgaccaaagttgggagat

SEQ ID NO: 184960 - DNA, 25 bp, Probe Sequence
ctctgagggtcccacttggaggaat

SEQ ID NO: 184961 - DNA, 25 bp, Probe Sequence
ctcatggggtacccttgataaacca

SEQ ID NO: 184962 - DNA, 25 bp, Probe Sequence
ctcatgggggttttgtgatattaac

SEQ ID NO: 184963 - DNA, 25 bp, Probe Sequence
ctcttgaaggtctactgtgattcga

SEQ ID NO: 184964 - DNA, 25 bp, Probe Sequence
ctcatggagcacctggggctggaga

SEQ ID NO: 184965 - DNA, 25 bp, Probe Sequence
ctcagcgagcactgagctggcccta

SEQ ID NO: 184966 - DNA, 25 bp, Probe Sequence
ctcagagtcaaccatgacgcaccca

SEQ ID NO: 184967 - DNA, 25 bp, Probe Sequence
ctcagagtcaacctcctgtgatgcc

SEQ ID NO: 184968 - DNA, 25 bp, Probe Sequence
ctcaggaatcatctcctttgcagaa

SEQ ID NO: 184969 - DNA, 25 bp, Probe Sequence
ctctgtggatatccccttggacaaa

SEQ ID NO: 184970 - DNA, 25 bp, Probe Sequence
ctcttagtgtctgtttctgacttat

SEQ ID NO: 184971 - DNA, 25 bp, Probe Sequence
ctcttacgtgcgcctttctgccgga

SEQ ID NO: 184972 - DNA, 25 bp, Probe Sequence
ctcttcaggatccaagtccgtaggc

SEQ ID NO: 184973 - DNA, 25 bp, Probe Sequence
ctcttcagagactacgtccacagac

SEQ ID NO: 184974 - DNA, 25 bp, Probe Sequence
ctctgaggtaaaggtccatgaaccc

SEQ ID NO: 184975 - DNA, 25 bp, Probe Sequence
ctggattgatacggggaaaacatct

SEQ ID NO: 184976 - DNA, 25 bp, Probe Sequence
ctgattagtcaacagtggaaaatct

SEQ ID NO: 184977 - DNA, 25 bp, Probe Sequence
ctcagaaggcaacattccctgaaca

SEQ ID NO: 184978 - DNA, 25 bp, Probe Sequence
ctgaataaagtgcttcttcgaaaaa

SEQ ID NO: 184979 - DNA, 25 bp, Probe Sequence
ctcagtaaagtcttccatccaaaag

SEQ ID NO: 184980 - DNA, 25 bp, Probe Sequence
ctctgtaacgttaccctcaacaggg

SEQ ID NO: 184981 - DNA, 25 bp, Probe Sequence
ctcagaaacctatccaacacagcac

SEQ ID NO: 184982 - DNA, 25 bp, Probe Sequence
ctctgcatcaactgaacgcaaatca

SEQ ID NO: 184983 - DNA, 25 bp, Probe Sequence
ctctgcaagactcatcgccaaagca

SEQ ID NO: 184984 - DNA, 25 bp, Probe Sequence
ctctgctggagcggatacatcaacc

SEQ ID NO: 184985 - DNA, 25 bp, Probe Sequence
ctgctgtcaacgcaaaggcaccagt

SEQ ID NO: 184986 - DNA, 25 bp, Probe Sequence
ctcagtcacaacaagaaaacgcagt

SEQ ID NO: 184987 - DNA, 25 bp, Probe Sequence
ctcagttacacaaaggacctcagct

SEQ ID NO: 184988 - DNA, 25 bp, Probe Sequence
ctcagtgtcaactaaggatcgcttg

SEQ ID NO: 184989 - DNA, 25 bp, Probe Sequence
ctcaggctgccctgaggatctgtgt

SEQ ID NO: 184990 - DNA, 25 bp, Probe Sequence
ctcaggctgcagtcactgacagtgc

SEQ ID NO: 184991 - DNA, 25 bp, Probe Sequence
ctcagccagccatgctgagcatctg

SEQ ID NO: 184992 - DNA, 25 bp, Probe Sequence
ctcagccagctgccattagcttggc

SEQ ID NO: 184993 - DNA, 25 bp, Probe Sequence
ctcagctcatcgcaagagtagcagc

SEQ ID NO: 184994 - DNA, 25 bp, Probe Sequence
ctcaggcagctgcagagcttcaaca

SEQ ID NO: 184995 - DNA, 25 bp, Probe Sequence
ctcggacatccagctaacactaagt

SEQ ID NO: 184996 - DNA, 25 bp, Probe Sequence
ctcaggctttcagcttgaactaaga

SEQ ID NO: 184997 - DNA, 25 bp, Probe Sequence
ctcagtgccttcatctatgaggcat

SEQ ID NO: 184998 - DNA, 25 bp, Probe Sequence
ctcatgtctcatggcatcctggagg

SEQ ID NO: 184999 - DNA, 25 bp, Probe Sequence
ctcagtcatcatcctcatcaggaca

SEQ ID NO: 185000 - DNA, 25 bp, Probe Sequence
ctcagtgcattcgtgtgctcgcacg

SEQ ID NO: 185001 - DNA, 25 bp, Probe Sequence
ctcagtgcattcgtgtgctcgcacg

SEQ ID NO: 185002 - DNA, 25 bp, Probe Sequence
ctcagagtgatctgtcctgccagga

SEQ ID NO: 185003 - DNA, 25 bp, Probe Sequence
ctcagagctgacagtcctgcttaga

SEQ ID NO: 185004 - DNA, 25 bp, Probe Sequence
ctcagagccagcagtacctgtactg

SEQ ID NO: 185005 - DNA, 25 bp, Probe Sequence
ctcaccgcagaggtacttgaactgg

SEQ ID NO: 185006 - DNA, 25 bp, Probe Sequence
ctcaccctagcattacttatatgat

SEQ ID NO: 185007 - DNA, 25 bp, Probe Sequence
ctcacccatgctgaacattatgaag

SEQ ID NO: 185008 - DNA, 25 bp, Probe Sequence
ctcagccttgctgcagacttcaggc

SEQ ID NO: 185009 - DNA, 25 bp, Probe Sequence
ctcagtctgctggacaggttcacgg

SEQ ID NO: 185010 - DNA, 25 bp, Probe Sequence
ctcagggctgtcaagagctccaggc

SEQ ID NO: 185011 - DNA, 25 bp, Probe Sequence
ctcagaagcttcaaatatcaaccta

SEQ ID NO: 185012 - DNA, 25 bp, Probe Sequence
ctgctaactcctgatctaactgatg

SEQ ID NO: 185013 - DNA, 25 bp, Probe Sequence
ctcattagtgttgtcagccatcttg

SEQ ID NO: 185014 - DNA, 25 bp, Probe Sequence
ctcattaatcctgggagtctttgtt

SEQ ID NO: 185015 - DNA, 25 bp, Probe Sequence
ctcattagtgaaggtggcttttgct

SEQ ID NO: 185016 - DNA, 25 bp, Probe Sequence
ctcttttcatactggctgttggcat

SEQ ID NO: 185017 - DNA, 25 bp, Probe Sequence
ctcttggccaacgggtctgtgatgt

SEQ ID NO: 185018 - DNA, 25 bp, Probe Sequence
ctctacagcccaagggttatgttaa

SEQ ID NO: 185019 - DNA, 25 bp, Probe Sequence
ctcttgaggctcaggcggagaagta

SEQ ID NO: 185020 - DNA, 25 bp, Probe Sequence
ctcttcgcagtcaggtaagcaggtc

SEQ ID NO: 185021 - DNA, 25 bp, Probe Sequence
ctgttcgaccagcggcaggtgtaca

SEQ ID NO: 185022 - DNA, 25 bp, Probe Sequence
ctctgctcagacggacgtcagggat

SEQ ID NO: 185023 - DNA, 25 bp, Probe Sequence
ctcagcctcccgaagtgctgggatt

SEQ ID NO: 185024 - DNA, 25 bp, Probe Sequence
ctcagcctcctgagtagctggtatt

SEQ ID NO: 185025 - DNA, 25 bp, Probe Sequence
ctcagcctcacgagtagctgggact

SEQ ID NO: 185026 - DNA, 25 bp, Probe Sequence
ctcagcctccctagtagctgggatt

SEQ ID NO: 185027 - DNA, 25 bp, Probe Sequence
ctcattcccactaggtgtcgggttt

SEQ ID NO: 185028 - DNA, 25 bp, Probe Sequence
ctcttccctgctaggagtgcgacaa

SEQ ID NO: 185029 - DNA, 25 bp, Probe Sequence
ctctttactgccacaggctaagaat

SEQ ID NO: 185030 - DNA, 25 bp, Probe Sequence
ctctcattacccacacacgaaggaa

SEQ ID NO: 185031 - DNA, 25 bp, Probe Sequence
ctctactacccagacaccaaaagaa

SEQ ID NO: 185032 - DNA, 25 bp, Probe Sequence
ctctttttccatgatctaccaacta

SEQ ID NO: 185033 - DNA, 25 bp, Probe Sequence
ctcatttttccaaattctttactgt

SEQ ID NO: 185034 - DNA, 25 bp, Probe Sequence
ctctatattcccaaattcatatttc

SEQ ID NO: 185035 - DNA, 25 bp, Probe Sequence
ctcagttatcgctgtttccaatctc

SEQ ID NO: 185036 - DNA, 25 bp, Probe Sequence
ctcagttttgctggaggccgcaacc

SEQ ID NO: 185037 - DNA, 25 bp, Probe Sequence
ctcagtgatcttaaaagctccaggc

SEQ ID NO: 185038 - DNA, 25 bp, Probe Sequence
ggcaggttcataaatttccttggtc

SEQ ID NO: 185039 - DNA, 25 bp, Probe Sequence
ctcagctatcaccggaatccgctac

SEQ ID NO: 185040 - DNA, 25 bp, Probe Sequence
ctcagtgacacggagacatcctctc

SEQ ID NO: 185041 - DNA, 25 bp, Probe Sequence
ctcagcatggccctgagcgcatgga

SEQ ID NO: 185042 - DNA, 25 bp, Probe Sequence
ctcagcagcaccctgacgctgagca

SEQ ID NO: 185043 - DNA, 25 bp, Probe Sequence
ctcagagcaccacacactgagcacc

SEQ ID NO: 185044 - DNA, 25 bp, Probe Sequence
ctcagcagcaggacgacttgagccc

SEQ ID NO: 185045 - DNA, 25 bp, Probe Sequence
ctcaccatggatgacttgacaacag

SEQ ID NO: 185046 - DNA, 25 bp, Probe Sequence
ctcagccggcagcataatgaaaagt

SEQ ID NO: 185047 - DNA, 25 bp, Probe Sequence
ctcagcccagaacaatgctaaagta

SEQ ID NO: 185048 - DNA, 25 bp, Probe Sequence
ctcagtccagaaccaatattatcgt

SEQ ID NO: 185049 - DNA, 25 bp, Probe Sequence
ctcagctcccaaccagctgttagga

SEQ ID NO: 185050 - DNA, 25 bp, Probe Sequence
ctcagcctgggacagtttatcatga

SEQ ID NO: 185051 - DNA, 25 bp, Probe Sequence
ctcttctgccgtcagagtttcagct

SEQ ID NO: 185052 - DNA, 25 bp, Probe Sequence
ctcttggacacacagtgtcttcctg

SEQ ID NO: 185053 - DNA, 25 bp, Probe Sequence
ctcttggacccgtttactttgagct

SEQ ID NO: 185054 - DNA, 25 bp, Probe Sequence
ctcttctagcgtggttttcttgtgg

SEQ ID NO: 185055 - DNA, 25 bp, Probe Sequence
ctctaccaagagggtcttcctaaga

SEQ ID NO: 185056 - DNA, 25 bp, Probe Sequence
ctcttcctctggacgattcatctta

SEQ ID NO: 185057 - DNA, 25 bp, Probe Sequence
ctctgtcttctggactggttttcac

SEQ ID NO: 185058 - DNA, 25 bp, Probe Sequence
ctcatagttctatcctctaattcca

SEQ ID NO: 185059 - DNA, 25 bp, Probe Sequence
ctcatagaaattgcctccagtccag

SEQ ID NO: 185060 - DNA, 25 bp, Probe Sequence
ctctcatagaaattgcctccagtcc

SEQ ID NO: 185061 - DNA, 25 bp, Probe Sequence
ctctttggaagaggcctcatggcct

SEQ ID NO: 185062 - DNA, 25 bp, Probe Sequence
ctcatcttcgccgaggtgctcggcc

SEQ ID NO: 185063 - DNA, 25 bp, Probe Sequence
ctcagtgaactcggtgtgctgggcc

SEQ ID NO: 185064 - DNA, 25 bp, Probe Sequence
ctcagtacagcccacagtgggtgcc

SEQ ID NO: 185065 - DNA, 25 bp, Probe Sequence
ctcagtcacaggcaatgtggagggc

SEQ ID NO: 185066 - DNA, 25 bp, Probe Sequence
ctcagctccaggctatctggcaata

SEQ ID NO: 185067 - DNA, 25 bp, Probe Sequence
ctcagacacactctctgtgcgtata

SEQ ID NO: 185068 - DNA, 25 bp, Probe Sequence
ctcagagcacttcttcgagtacaag

SEQ ID NO: 185069 - DNA, 25 bp, Probe Sequence
ctcagcttcttgttcctgggacaag

SEQ ID NO: 185070 - DNA, 25 bp, Probe Sequence
ctcagttcaagtactatggtgattt

SEQ ID NO: 185071 - DNA, 25 bp, Probe Sequence
ctcagatccggtcccaggttatgac

SEQ ID NO: 185072 - DNA, 25 bp, Probe Sequence
ctcagctctaggacccaattctata

SEQ ID NO: 185073 - DNA, 25 bp, Probe Sequence
ctccgtaggagctcacagtctagat

SEQ ID NO: 185074 - DNA, 25 bp, Probe Sequence
ctctttaaatgtgatagtctcagaa

SEQ ID NO: 185075 - DNA, 25 bp, Probe Sequence
ctcttagaatttgtttcatctattt

SEQ ID NO: 185076 - DNA, 25 bp, Probe Sequence
ctctattgtaattttgttcctgttt

SEQ ID NO: 185077 - DNA, 25 bp, Probe Sequence
ctcagttccaacttgtgattcctga

SEQ ID NO: 185078 - DNA, 25 bp, Probe Sequence
ctcatttcactcttcagtgttcctg

SEQ ID NO: 185079 - DNA, 25 bp, Probe Sequence
ctcttcaattgattcttgcttcgct

SEQ ID NO: 185080 - DNA, 25 bp, Probe Sequence
ctcttgtattacgattcgcacgatg

SEQ ID NO: 185081 - DNA, 25 bp, Probe Sequence
ctcaggcttgtaaatctcagcattt

SEQ ID NO: 185082 - DNA, 25 bp, Probe Sequence
ctcagatgcaggatccactaatttt

SEQ ID NO: 185083 - DNA, 25 bp, Probe Sequence
ctcatatgcaggattcattcattca

SEQ ID NO: 185084 - DNA, 25 bp, Probe Sequence
ctctacagtctgatattaaaggcat

SEQ ID NO: 185085 - DNA, 25 bp, Probe Sequence
ctcatcaatgtgcctttgcataaag

SEQ ID NO: 185086 - DNA, 25 bp, Probe Sequence
ctcatgcagatttgcattgttttgg

SEQ ID NO: 185087 - DNA, 25 bp, Probe Sequence
ctcataaaaattgttgccgatgtct

SEQ ID NO: 185088 - DNA, 25 bp, Probe Sequence
ctcttgaaacaagtaatgactggtt

SEQ ID NO: 185089 - DNA, 25 bp, Probe Sequence
ctctagaaacaagtattccagattt

SEQ ID NO: 185090 - DNA, 25 bp, Probe Sequence
ctctaaacagaagcatttctataga

SEQ ID NO: 185091 - DNA, 25 bp, Probe Sequence
ctctgtaaagggtcttcctgaagat

SEQ ID NO: 185092 - DNA, 25 bp, Probe Sequence
ctctgtgaagagccagttgccctta

SEQ ID NO: 185093 - DNA, 25 bp, Probe Sequence
ctcttaagatgatgttgcccagcct

SEQ ID NO: 185094 - DNA, 25 bp, Probe Sequence
ctctattgaagactttgccctgcca

SEQ ID NO: 185095 - DNA, 25 bp, Probe Sequence
ctctattgaagactttgccctgcca

SEQ ID NO: 185096 - DNA, 25 bp, Probe Sequence
ctctaaggagaatggcccagtcctc

SEQ ID NO: 185097 - DNA, 25 bp, Probe Sequence
ctctagtggtacaggcccagatgcc

SEQ ID NO: 185098 - DNA, 25 bp, Probe Sequence
ctctacaagtaccgctgctacaagt

SEQ ID NO: 185099 - DNA, 25 bp, Probe Sequence
ctctagaatttccagcctggtgcgt

SEQ ID NO: 185100 - DNA, 25 bp, Probe Sequence
ctcagcagcaaatgccactctgggc

SEQ ID NO: 185101 - DNA, 25 bp, Probe Sequence
ctcagtcattgaacacccaggtgtg

SEQ ID NO: 185102 - DNA, 25 bp, Probe Sequence
ctcattcattcagcatcctcattgc

SEQ ID NO: 185103 - DNA, 25 bp, Probe Sequence
ctcattcagtccattgccttaacac

SEQ ID NO: 185104 - DNA, 25 bp, Probe Sequence
ctcttgagctccacgacttcaaaat

SEQ ID NO: 185105 - DNA, 25 bp, Probe Sequence
ctctatttacttaacttcatatata

SEQ ID NO: 185106 - DNA, 25 bp, Probe Sequence
ctctttcgactttgcagctgtactt

SEQ ID NO: 185107 - DNA, 25 bp, Probe Sequence
ctcttccggttttgctgttattcaa

SEQ ID NO: 185108 - DNA, 25 bp, Probe Sequence
ctctaatctgttttgagtctttaca

SEQ ID NO: 185109 - DNA, 25 bp, Probe Sequence
ctcttcatttatatagttacttact

SEQ ID NO: 185110 - DNA, 25 bp, Probe Sequence
ccgttttgactttgccaatttggcg

SEQ ID NO: 185111 - DNA, 25 bp, Probe Sequence
ctcagtctttgagcgagcccatttt

SEQ ID NO: 185112 - DNA, 25 bp, Probe Sequence
ctcagtttgagaacaacaccttttc

SEQ ID NO: 185113 - DNA, 25 bp, Probe Sequence
ctcagcttaggggaatgcacctttt

SEQ ID NO: 185114 - DNA, 25 bp, Probe Sequence
ctcagcttattggagccatgccctt

SEQ ID NO: 185115 - DNA, 25 bp, Probe Sequence
ctcccatttcaagcttccttaatca

SEQ ID NO: 185116 - DNA, 25 bp, Probe Sequence
ctctagtttatagatggcctgtcat

SEQ ID NO: 185117 - DNA, 25 bp, Probe Sequence
ctctttttatattatgccgctttca

SEQ ID NO: 185118 - DNA, 25 bp, Probe Sequence
ctcattcttataatttcagcacttt

SEQ ID NO: 185119 - DNA, 25 bp, Probe Sequence
ctcatttgttactttacagcctgta

SEQ ID NO: 185120 - DNA, 25 bp, Probe Sequence
ctcttatgttagttcttcacctgct

SEQ ID NO: 185121 - DNA, 25 bp, Probe Sequence
ctctgtattgtactaaccaacctcc

SEQ ID NO: 185122 - DNA, 25 bp, Probe Sequence
ctcgaactgacactgagccacaacc

SEQ ID NO: 185123 - DNA, 25 bp, Probe Sequence
ctgcgatgaatgtaggccacaaacc

SEQ ID NO: 185124 - DNA, 25 bp, Probe Sequence
ctcagattagatgtgccaataacca

SEQ ID NO: 185125 - DNA, 25 bp, Probe Sequence
ctcatgaatattcgtgcaaaaatcc

SEQ ID NO: 185126 - DNA, 25 bp, Probe Sequence
ctcatgttattgttgacatgaatct

SEQ ID NO: 185127 - DNA, 25 bp, Probe Sequence
ctgctggtatcgcaccagtactgcc

SEQ ID NO: 185128 - DNA, 25 bp, Probe Sequence
ctctgtgcattggttccggaaccgg

SEQ ID NO: 185129 - DNA, 25 bp, Probe Sequence
ctctggtcagaatccggatactggg

SEQ ID NO: 185130 - DNA, 25 bp, Probe Sequence
ctcttgtcaggcagggacaactggg

SEQ ID NO: 185131 - DNA, 25 bp, Probe Sequence
ctctacaagcgcaggtgacctctgg

SEQ ID NO: 185132 - DNA, 25 bp, Probe Sequence
ctcttccaggttttgacctgcaggc

SEQ ID NO: 185133 - DNA, 25 bp, Probe Sequence
ctcttccattaccatcaatcctggt

SEQ ID NO: 185134 - DNA, 25 bp, Probe Sequence
ctctagccatctcccatataattgt

SEQ ID NO: 185135 - DNA, 25 bp, Probe Sequence
ctcgaccagccatcatgacatttac

SEQ ID NO: 185136 - DNA, 25 bp, Probe Sequence
ctcgaccatggctaacagcttccag

SEQ ID NO: 185137 - DNA, 25 bp, Probe Sequence
ctcagagcctgcccaacagcaggga

SEQ ID NO: 185138 - DNA, 25 bp, Probe Sequence
ctcagaactgaataactgcagtgac

SEQ ID NO: 185139 - DNA, 25 bp, Probe Sequence
ctcagcaacttaaatcctcatagaa

SEQ ID NO: 185140 - DNA, 25 bp, Probe Sequence
ctctgacctttccatccttgaaaaa

SEQ ID NO: 185141 - DNA, 25 bp, Probe Sequence
ctcttcctagtccttttaatgctgt

SEQ ID NO: 185142 - DNA, 25 bp, Probe Sequence
ctcagtccttgttcttttgaagctt

SEQ ID NO: 185143 - DNA, 25 bp, Probe Sequence
ctctggcccttatttgtctaatttt

SEQ ID NO: 185144 - DNA, 25 bp, Probe Sequence
ctcaggtcgtaactttctttatgtg

SEQ ID NO: 185145 - DNA, 25 bp, Probe Sequence
ctcagaatcactacacattccttta

SEQ ID NO: 185146 - DNA, 25 bp, Probe Sequence
ctcgcaataccaaagtcgcaagaat

SEQ ID NO: 185147 - DNA, 25 bp, Probe Sequence
ctctgaacacgccagaatgctgaaa

SEQ ID NO: 185148 - DNA, 25 bp, Probe Sequence
ctcaggaccctggaagataatgaaa

SEQ ID NO: 185149 - DNA, 25 bp, Probe Sequence
ctcatccccactctacatatgtaaa

SEQ ID NO: 185150 - DNA, 25 bp, Probe Sequence
ctctacctgcacgacaacacataaa

SEQ ID NO: 185151 - DNA, 25 bp, Probe Sequence
ctcttcctgacagcagaatgatctg

SEQ ID NO: 185152 - DNA, 25 bp, Probe Sequence
ctcatctcctaaatggactgtgcct

SEQ ID NO: 185153 - DNA, 25 bp, Probe Sequence
ctcttgctctaaatgatatgtgtgc

SEQ ID NO: 185154 - DNA, 25 bp, Probe Sequence
ctcatttcttatgtgatggtaaaaa

SEQ ID NO: 185155 - DNA, 25 bp, Probe Sequence
ctcagtttttccttggctcataaca

SEQ ID NO: 185156 - DNA, 25 bp, Probe Sequence
ctcagtctttctgaagccctgaaat

SEQ ID NO: 185157 - DNA, 25 bp, Probe Sequence
ctcttttttataccctctatattat

SEQ ID NO: 185158 - DNA, 25 bp, Probe Sequence
ctcattattttttgcacactcacaa

SEQ ID NO: 185159 - DNA, 25 bp, Probe Sequence
ctcattgtctttttgcatcagtact

SEQ ID NO: 185160 - DNA, 25 bp, Probe Sequence
ctcattctgccttttatactgtcta

SEQ ID NO: 185161 - DNA, 25 bp, Probe Sequence
ctcatttcctgagctgggcattgct

SEQ ID NO: 185162 - DNA, 25 bp, Probe Sequence
ctcagtgtcctctctgagtatatct

SEQ ID NO: 185163 - DNA, 25 bp, Probe Sequence
ctcagatcccttcctgtgatcatat

SEQ ID NO: 185164 - DNA, 25 bp, Probe Sequence
ctcaggtccttgactgattcacata

SEQ ID NO: 185165 - DNA, 25 bp, Probe Sequence
ctcaggacagctaattgccaccatg

SEQ ID NO: 185166 - DNA, 25 bp, Probe Sequence
ctcattccactcaagtctcacttga

SEQ ID NO: 185167 - DNA, 25 bp, Probe Sequence
ctcttagcaaggtctcacactgtga

SEQ ID NO: 185168 - DNA, 25 bp, Probe Sequence
ctcttgtgcggttcaccacagttgt

SEQ ID NO: 185169 - DNA, 25 bp, Probe Sequence
ctcaggtctagaatcccaagcagtg

SEQ ID NO: 185170 - DNA, 25 bp, Probe Sequence
ctcatctgtttcatcgacaagttca

SEQ ID NO: 185171 - DNA, 25 bp, Probe Sequence
ctcattgctttctccaagcttggaa

SEQ ID NO: 185172 - DNA, 25 bp, Probe Sequence
ctcattcatatttagctcaggcttt

SEQ ID NO: 185173 - DNA, 25 bp, Probe Sequence
ctcatcatgcaaattagccaatgta

SEQ ID NO: 185174 - DNA, 25 bp, Probe Sequence
ctcatcaccatcatcgccatgagct

SEQ ID NO: 185175 - DNA, 25 bp, Probe Sequence
ctcatcaccatcatcgccatgagct

SEQ ID NO: 185176 - DNA, 25 bp, Probe Sequence
ctcatcacgcaggcagtccagagtg

SEQ ID NO: 185177 - DNA, 25 bp, Probe Sequence
ctcatgcttggcctggacaatgctg

SEQ ID NO: 185178 - DNA, 25 bp, Probe Sequence
ctcagtcaggtgcagacaagtgggc

SEQ ID NO: 185179 - DNA, 25 bp, Probe Sequence
ctcagtcctgctcaatcacaaggtg

SEQ ID NO: 185180 - DNA, 25 bp, Probe Sequence
ctcagtgccatgcgttcgctgaaag

SEQ ID NO: 185181 - DNA, 25 bp, Probe Sequence
ctcaggaagcggctcgtcaatcaca

SEQ ID NO: 185182 - DNA, 25 bp, Probe Sequence
ctctgaaagaggtgcagtcactcac

SEQ ID NO: 185183 - DNA, 25 bp, Probe Sequence
ctctgagaaggacgggcaggtcaca

SEQ ID NO: 185184 - DNA, 25 bp, Probe Sequence
ctctacgagaagcggggtcaggcct

SEQ ID NO: 185185 - DNA, 25 bp, Probe Sequence
ctcttcgaaggctctggggaggccc

SEQ ID NO: 185186 - DNA, 25 bp, Probe Sequence
ctcattcggtgttttgggaagagag

SEQ ID NO: 185187 - DNA, 25 bp, Probe Sequence
ctcttaggtttattggagctagcaa

SEQ ID NO: 185188 - DNA, 25 bp, Probe Sequence
ctcttaggtttattggagctagcaa

SEQ ID NO: 185189 - DNA, 25 bp, Probe Sequence
ctctgaacttctaaatgggcccatt

SEQ ID NO: 185190 - DNA, 25 bp, Probe Sequence
ctctaacagtccacataggtctgca

SEQ ID NO: 185191 - DNA, 25 bp, Probe Sequence
ctctagtcagaaaatcatgaggtcc

SEQ ID NO: 185192 - DNA, 25 bp, Probe Sequence
ctctcagtagagggaggggctgccc

SEQ ID NO: 185193 - DNA, 25 bp, Probe Sequence
ctcttccagtgggcagggtcagcag

SEQ ID NO: 185194 - DNA, 25 bp, Probe Sequence
ctcttccatggggtgagacttgagc

SEQ ID NO: 185195 - DNA, 25 bp, Probe Sequence
ctctgcattagccaggtgaacctga

SEQ ID NO: 185196 - DNA, 25 bp, Probe Sequence
ctcatggggtcaggcatagacctga

SEQ ID NO: 185197 - DNA, 25 bp, Probe Sequence
ctcatgcaggtgtggtgcgaccaga

SEQ ID NO: 185198 - DNA, 25 bp, Probe Sequence
ctcagtgagtgatggtcagaataga

SEQ ID NO: 185199 - DNA, 25 bp, Probe Sequence
ctcaggcgtgaatgtgagccatggg

SEQ ID NO: 185200 - DNA, 25 bp, Probe Sequence
ctcatgtctgtgtcccatggtcata

SEQ ID NO: 185201 - DNA, 25 bp, Probe Sequence
ctctcactgaaactcatggtcatga

SEQ ID NO: 185202 - DNA, 25 bp, Probe Sequence
ctcttccacatccgcaagatcatga

SEQ ID NO: 185203 - DNA, 25 bp, Probe Sequence
ctcttctacctgcatatgccagacc

SEQ ID NO: 185204 - DNA, 25 bp, Probe Sequence
ctcatgtccacaggaatatccagac

SEQ ID NO: 185205 - DNA, 25 bp, Probe Sequence
ctcagtgtaacgacatggccagtgc

SEQ ID NO: 185206 - DNA, 25 bp, Probe Sequence
ctcatatttaagctgctgctctggc

SEQ ID NO: 185207 - DNA, 25 bp, Probe Sequence
ctctattctaacaccctgagtctac

SEQ ID NO: 185208 - DNA, 25 bp, Probe Sequence
ctctattcttccaccagttgtggcg

SEQ ID NO: 185209 - DNA, 25 bp, Probe Sequence
ctcttttattctaccacggctggag

SEQ ID NO: 185210 - DNA, 25 bp, Probe Sequence
ctctttatttacatcatagtcttgg

SEQ ID NO: 185211 - DNA, 25 bp, Probe Sequence
ctctctttttcttgattagtctgat

SEQ ID NO: 185212 - DNA, 25 bp, Probe Sequence
ctctccttttccatgtaccagagct

SEQ ID NO: 185213 - DNA, 25 bp, Probe Sequence
ctctgcctttgtcttcacaagacct

SEQ ID NO: 185214 - DNA, 25 bp, Probe Sequence
ctcttgtcgtgtctgttcaaaccgg

SEQ ID NO: 185215 - DNA, 25 bp, Probe Sequence
ctcatcttcgtacttgatgctcaca

SEQ ID NO: 185216 - DNA, 25 bp, Probe Sequence
ctctccttgtagtggtcaagaggtc

SEQ ID NO: 185217 - DNA, 25 bp, Probe Sequence
ctctttgggattcacttcaaggtct

SEQ ID NO: 185218 - DNA, 25 bp, Probe Sequence
ctctttcggttctgcttacagtgtg

SEQ ID NO: 185219 - DNA, 25 bp, Probe Sequence
ctctcttggagcatccgtgctaagg

SEQ ID NO: 185220 - DNA, 25 bp, Probe Sequence
ctcatcatggggctcctgtacaagg

SEQ ID NO: 185221 - DNA, 25 bp, Probe Sequence
ctcttggaccgcggcggacatggcg

SEQ ID NO: 185222 - DNA, 25 bp, Probe Sequence
ctctttccccacagtgcaattcaga

SEQ ID NO: 185223 - DNA, 25 bp, Probe Sequence
ctcttccaccctccgtggatgataa

SEQ ID NO: 185224 - DNA, 25 bp, Probe Sequence
ctcttccaccctccgtggatgataa

SEQ ID NO: 185225 - DNA, 25 bp, Probe Sequence
ctcttccaccctcagtggatgataa

SEQ ID NO: 185226 - DNA, 25 bp, Probe Sequence
ctcttccaacagtgatctgtattct

SEQ ID NO: 185227 - DNA, 25 bp, Probe Sequence
ctcttctcccatgagattttgtctt

SEQ ID NO: 185228 - DNA, 25 bp, Probe Sequence
ctcttatcccattcttagtttttct

SEQ ID NO: 185229 - DNA, 25 bp, Probe Sequence
ctcttagacgctttaaagttctcaa

SEQ ID NO: 185230 - DNA, 25 bp, Probe Sequence
ctcttcaccgtgttaacataatcta

SEQ ID NO: 185231 - DNA, 25 bp, Probe Sequence
ctgttcacggtcttatactattgtt

SEQ ID NO: 185232 - DNA, 25 bp, Probe Sequence
ctcttccaggtccaatagtgactta

SEQ ID NO: 185233 - DNA, 25 bp, Probe Sequence
ctctttgaggtaaaagtgcctttat

SEQ ID NO: 185234 - DNA, 25 bp, Probe Sequence
ctcccaaggccaagattgtcctttt

SEQ ID NO: 185235 - DNA, 25 bp, Probe Sequence
ctccccgtgccaaaaatcttttcat

SEQ ID NO: 185236 - DNA, 25 bp, Probe Sequence
ctcccacgccgtggaagctttgttc

SEQ ID NO: 185237 - DNA, 25 bp, Probe Sequence
ctcgagaccttttcaacttggcttc

SEQ ID NO: 185238 - DNA, 25 bp, Probe Sequence
ctcggacatttatacctatggcccc

SEQ ID NO: 185239 - DNA, 25 bp, Probe Sequence
ctcaggacattgtgtagcctatggt

SEQ ID NO: 185240 - DNA, 25 bp, Probe Sequence
ctcaggcaattagacactttggaag

SEQ ID NO: 185241 - DNA, 25 bp, Probe Sequence
ctcaggaagaacaccctctaaatgg

SEQ ID NO: 185242 - DNA, 25 bp, Probe Sequence
ctctgaaacaccactcctttttgtg

SEQ ID NO: 185243 - DNA, 25 bp, Probe Sequence
ctcatcaacacagctcgcaacttat

SEQ ID NO: 185244 - DNA, 25 bp, Probe Sequence
ctcatcacacacagggctattcctt

SEQ ID NO: 185245 - DNA, 25 bp, Probe Sequence
ctcatccacagtaggacaccatcct

SEQ ID NO: 185246 - DNA, 25 bp, Probe Sequence
ctcatcaaggtgaatgataccattc

SEQ ID NO: 185247 - DNA, 25 bp, Probe Sequence
ctcatcaaggctacaattgctggtg

SEQ ID NO: 185248 - DNA, 25 bp, Probe Sequence
ctctacgctgtgaatattgcctggt

SEQ ID NO: 185249 - DNA, 25 bp, Probe Sequence
ctctactgacgggagctgcactgtg

SEQ ID NO: 185250 - DNA, 25 bp, Probe Sequence
ctcaggggcagtgcatgtcctgctg

SEQ ID NO: 185251 - DNA, 25 bp, Probe Sequence
ctcaggagagagcccgctcttgtct

SEQ ID NO: 185252 - DNA, 25 bp, Probe Sequence
ctcggtaaggcttcttggtctggta

SEQ ID NO: 185253 - DNA, 25 bp, Probe Sequence
ctcgaaaagcctgcggtgtgcggat

SEQ ID NO: 185254 - DNA, 25 bp, Probe Sequence
ctctgcagaaaccaccgtgggggcc

SEQ ID NO: 185255 - DNA, 25 bp, Probe Sequence
ctcatgcaaaaggaatcgtgctgga

SEQ ID NO: 185256 - DNA, 25 bp, Probe Sequence
ctcaggcaggaggacatcttggcag

SEQ ID NO: 185257 - DNA, 25 bp, Probe Sequence
ctcatccaggacgacatgctctgtg

SEQ ID NO: 185258 - DNA, 25 bp, Probe Sequence
ctcatctgcagacccattctgatgt

SEQ ID NO: 185259 - DNA, 25 bp, Probe Sequence
ctcatgtgacactcatgctgtctgt

SEQ ID NO: 185260 - DNA, 25 bp, Probe Sequence
ctcattgctcatgcacatcgtcgta

SEQ ID NO: 185261 - DNA, 25 bp, Probe Sequence
ctctctgctcagcccagaacttaag

SEQ ID NO: 185262 - DNA, 25 bp, Probe Sequence
ctcattgacagggctggccttagca

SEQ ID NO: 185263 - DNA, 25 bp, Probe Sequence
ctcattgtgcaggaaggtctataac

SEQ ID NO: 185264 - DNA, 25 bp, Probe Sequence
ctcatttatctgtcctgtgttatag

SEQ ID NO: 185265 - DNA, 25 bp, Probe Sequence
ctcatttgatgagcctgctttcagg

SEQ ID NO: 185266 - DNA, 25 bp, Probe Sequence
ctcatgatcgatatcccatttctga

SEQ ID NO: 185267 - DNA, 25 bp, Probe Sequence
ctctattgcaagtcccttgtcttga

SEQ ID NO: 185268 - DNA, 25 bp, Probe Sequence
ctcgtgctcaaagtcctttcggatc

SEQ ID NO: 185269 - DNA, 25 bp, Probe Sequence
ctctttctaagtcggcttcgagcac

SEQ ID NO: 185270 - DNA, 25 bp, Probe Sequence
ctctgtagctgctagtgagccttcc

SEQ ID NO: 185271 - DNA, 25 bp, Probe Sequence
ctctgtgccttagtggctcttggca

SEQ ID NO: 185272 - DNA, 25 bp, Probe Sequence
ctcatggccctagtgttcatcaagt

SEQ ID NO: 185273 - DNA, 25 bp, Probe Sequence
ctcatggccctagtgttcatcaagt

SEQ ID NO: 185274 - DNA, 25 bp, Probe Sequence
ctcattcttgccttgagttccagtt

SEQ ID NO: 185275 - DNA, 25 bp, Probe Sequence
ctcatttctctctgcaatctgcaaa

SEQ ID NO: 185276 - DNA, 25 bp, Probe Sequence
ctcttttccccagtgctggacagat

SEQ ID NO: 185277 - DNA, 25 bp, Probe Sequence
ctcttgttgcccaggctggagtgca

SEQ ID NO: 185278 - DNA, 25 bp, Probe Sequence
ctcttcgctttcacttggactgagc

SEQ ID NO: 185279 - DNA, 25 bp, Probe Sequence
ctctatggtgttatcctgtcctggc

SEQ ID NO: 185280 - DNA, 25 bp, Probe Sequence
ctcttggttgatcctcttgtactgg

SEQ ID NO: 185281 - DNA, 25 bp, Probe Sequence
ctcttggttctcctctagattgaag

SEQ ID NO: 185282 - DNA, 25 bp, Probe Sequence
ccttccttccccagtggaagcattt

SEQ ID NO: 185283 - DNA, 25 bp, Probe Sequence
ctctttttccccttgatggaaattg

SEQ ID NO: 185284 - DNA, 25 bp, Probe Sequence
ctcttagttgcctcaagtgttgaat

SEQ ID NO: 185285 - DNA, 25 bp, Probe Sequence
ctcttactatactcatacattttta

SEQ ID NO: 185286 - DNA, 25 bp, Probe Sequence
ctctctactaaatataattaccaaa

SEQ ID NO: 185287 - DNA, 25 bp, Probe Sequence
ctcttacctaattattcttacaagt

SEQ ID NO: 185288 - DNA, 25 bp, Probe Sequence
ctctcataccaacagaacttccggt

SEQ ID NO: 185289 - DNA, 25 bp, Probe Sequence
ctctctcataccaacagaacttccg

SEQ ID NO: 185290 - DNA, 25 bp, Probe Sequence
ctcttctcatcccaaaacaatgcct

SEQ ID NO: 185291 - DNA, 25 bp, Probe Sequence
ctcatttgtcccttaaacagctgca

SEQ ID NO: 185292 - DNA, 25 bp, Probe Sequence
ctcatggagtgctcactaaggagtt

SEQ ID NO: 185293 - DNA, 25 bp, Probe Sequence
ctctcagaggtgttctaagggatct

SEQ ID NO: 185294 - DNA, 25 bp, Probe Sequence
ctcttgagactcgttactgggcatc

SEQ ID NO: 185295 - DNA, 25 bp, Probe Sequence
ctcatgtggagcagctgctccgggc

SEQ ID NO: 185296 - DNA, 25 bp, Probe Sequence
ctcatcggcattgctgccatcgtgg

SEQ ID NO: 185297 - DNA, 25 bp, Probe Sequence
ctcatctacacgccattcactgagg

SEQ ID NO: 185298 - DNA, 25 bp, Probe Sequence
ctcatcatgatcagcgtcatcgtgg

SEQ ID NO: 185299 - DNA, 25 bp, Probe Sequence
ctcatgctggcttggctgagctggg

SEQ ID NO: 185300 - DNA, 25 bp, Probe Sequence
ctcatgctgagagttctgcgcttcc

SEQ ID NO: 185301 - DNA, 25 bp, Probe Sequence
ctcatgatgcacgtgttttccacca

SEQ ID NO: 185302 - DNA, 25 bp, Probe Sequence
ctctatgcacggtttgtgatcacaa

SEQ ID NO: 185303 - DNA, 25 bp, Probe Sequence
ctctatctcaactttatgtgcactg

SEQ ID NO: 185304 - DNA, 25 bp, Probe Sequence
ctctctctacactgtggtgcactta

SEQ ID NO: 185305 - DNA, 25 bp, Probe Sequence
ctctctgtaaccgtattctttgaaa

SEQ ID NO: 185306 - DNA, 25 bp, Probe Sequence
ctctctgtgaaacacaatcctcaga

SEQ ID NO: 185307 - DNA, 25 bp, Probe Sequence
ctcttctgaataaagcaattagcaa

SEQ ID NO: 185308 - DNA, 25 bp, Probe Sequence
ctcttcatagtcaaggctcttagta

SEQ ID NO: 185309 - DNA, 25 bp, Probe Sequence
ctctttcatgctctactctgtatgg

SEQ ID NO: 185310 - DNA, 25 bp, Probe Sequence
ctcttggtgtggaaccattacgccc

SEQ ID NO: 185311 - DNA, 25 bp, Probe Sequence
ctcttggtgctgggactccagaggc

SEQ ID NO: 185312 - DNA, 25 bp, Probe Sequence
ctcttttctaagatgcacaacactt

SEQ ID NO: 185313 - DNA, 25 bp, Probe Sequence
ctcttgtattactatgtgataacac

SEQ ID NO: 185314 - DNA, 25 bp, Probe Sequence
ctcttctattggtggatgagatctg

SEQ ID NO: 185315 - DNA, 25 bp, Probe Sequence
ctcattcttgatgtggtgtaattga

SEQ ID NO: 185316 - DNA, 25 bp, Probe Sequence
ctcattttagagctctgtacataat

SEQ ID NO: 185317 - DNA, 25 bp, Probe Sequence
ctctagcctagccgttaactcaatc

SEQ ID NO: 185318 - DNA, 25 bp, Probe Sequence
ctcttgccccggtatgaacatgcta

SEQ ID NO: 185319 - DNA, 25 bp, Probe Sequence
ctcttgcccctgacaggatactgag

SEQ ID NO: 185320 - DNA, 25 bp, Probe Sequence
ctcattgccgcggagcgtgagaggg

SEQ ID NO: 185321 - DNA, 25 bp, Probe Sequence
ctcatggacgtgggggagacggcca

SEQ ID NO: 185322 - DNA, 25 bp, Probe Sequence
ctctggaacatgaggtgaggcccca

SEQ ID NO: 185323 - DNA, 25 bp, Probe Sequence
ctctaacactatgcttaggcgctat

SEQ ID NO: 185324 - DNA, 25 bp, Probe Sequence
ctctaaatgctagctctaaattgtg

SEQ ID NO: 185325 - DNA, 25 bp, Probe Sequence
ctctctaagctggcctcaggtttat

SEQ ID NO: 185326 - DNA, 25 bp, Probe Sequence
ctctgtcacaacgctcagacgttca

SEQ ID NO: 185327 - DNA, 25 bp, Probe Sequence
ctctcagccaggcttcgacaatctc

SEQ ID NO: 185328 - DNA, 25 bp, Probe Sequence
ctctcccgggcttagaaggccggct

SEQ ID NO: 185329 - DNA, 25 bp, Probe Sequence
ctcttcacggattactacggccgga

SEQ ID NO: 185330 - DNA, 25 bp, Probe Sequence
ctcttccggatgtcccggagcaagg

SEQ ID NO: 185331 - DNA, 25 bp, Probe Sequence
ctctagccgtggtccaggagacgga

SEQ ID NO: 185332 - DNA, 25 bp, Probe Sequence
ctctaccgagctgtcagcaagacgg

SEQ ID NO: 185333 - DNA, 25 bp, Probe Sequence
ctctaccaccatgaacaatgacgtg

SEQ ID NO: 185334 - DNA, 25 bp, Probe Sequence
ctctaatccgagctaccagggaggc

SEQ ID NO: 185335 - DNA, 25 bp, Probe Sequence
ctctttctcggtaaccacggcagag

SEQ ID NO: 185336 - DNA, 25 bp, Probe Sequence
ctctttctcggtaaccacggcagag

SEQ ID NO: 185337 - DNA, 25 bp, Probe Sequence
ctcttccttgttaccttcaggcaga

SEQ ID NO: 185338 - DNA, 25 bp, Probe Sequence
ctctaccctgagtaccttatctaat

SEQ ID NO: 185339 - DNA, 25 bp, Probe Sequence
ctctaactcatgctgtccttgtgat

SEQ ID NO: 185340 - DNA, 25 bp, Probe Sequence
ctctcagtgctagggcaacttctgc

SEQ ID NO: 185341 - DNA, 25 bp, Probe Sequence
ctctgccctaggaagatctttgcct

SEQ ID NO: 185342 - DNA, 25 bp, Probe Sequence
ctctccctaggtccaaatgccctag

SEQ ID NO: 185343 - DNA, 25 bp, Probe Sequence
ctcccagtacaacaacatgcgcgtg

SEQ ID NO: 185344 - DNA, 25 bp, Probe Sequence
ctcccgtgcgagcacaactcaggta

SEQ ID NO: 185345 - DNA, 25 bp, Probe Sequence
ctcccgtgcgagcacaactcaggta

SEQ ID NO: 185346 - DNA, 25 bp, Probe Sequence
ctcccgtgcgagcacaactcaggta

SEQ ID NO: 185347 - DNA, 25 bp, Probe Sequence
ctctcaagggtgcacatcactcagg

SEQ ID NO: 185348 - DNA, 25 bp, Probe Sequence
ctctacgcggtggactacgagacct

SEQ ID NO: 185349 - DNA, 25 bp, Probe Sequence
ctctaccttcagcactatgggattc

SEQ ID NO: 185350 - DNA, 25 bp, Probe Sequence
ctctcagccatgaccgttatgagga

SEQ ID NO: 185351 - DNA, 25 bp, Probe Sequence
ctcatccacttccagtttgctggtc

SEQ ID NO: 185352 - DNA, 25 bp, Probe Sequence
ctctcccttgcaggtttgggtttga

SEQ ID NO: 185353 - DNA, 25 bp, Probe Sequence
ctcttccttgggacagggctgttca

SEQ ID NO: 185354 - DNA, 25 bp, Probe Sequence
ctctgtcctaggcagggagcgtatg

SEQ ID NO: 185355 - DNA, 25 bp, Probe Sequence
ctctacccagcgggaggggttgaag

SEQ ID NO: 185356 - DNA, 25 bp, Probe Sequence
ctctaccaagctgaacccatgttta

SEQ ID NO: 185357 - DNA, 25 bp, Probe Sequence
ctctccccagcttaaactttgttgt

SEQ ID NO: 185358 - DNA, 25 bp, Probe Sequence
ctctggaccgtctcaaggtgtttga

SEQ ID NO: 185359 - DNA, 25 bp, Probe Sequence
ctctggacacacgcccaggttgtag

SEQ ID NO: 185360 - DNA, 25 bp, Probe Sequence
ctctaactcactgcctaggaggctg

SEQ ID NO: 185361 - DNA, 25 bp, Probe Sequence
ctctccagcctctcttaggaggggt

SEQ ID NO: 185362 - DNA, 25 bp, Probe Sequence
ctctccgccttagttcagagttgtg

SEQ ID NO: 185363 - DNA, 25 bp, Probe Sequence
ctctcctctatttagtaccttgcac

SEQ ID NO: 185364 - DNA, 25 bp, Probe Sequence
ctccagaatttcaagcacaacccca

SEQ ID NO: 185365 - DNA, 25 bp, Probe Sequence
ctccagattatgaaagccatccctg

SEQ ID NO: 185366 - DNA, 25 bp, Probe Sequence
ctctgtgtgttgaaagccatcccgt

SEQ ID NO: 185367 - DNA, 25 bp, Probe Sequence
ctctgttgataataccacaccatgt

SEQ ID NO: 185368 - DNA, 25 bp, Probe Sequence
ctctctaagcactgactctagccag

SEQ ID NO: 185369 - DNA, 25 bp, Probe Sequence
ctcttcagccatcggacttggacag

SEQ ID NO: 185370 - DNA, 25 bp, Probe Sequence
ctcttcagccatcggacttggacag

SEQ ID NO: 185371 - DNA, 25 bp, Probe Sequence
ctcattagcctgtgactctgtgatg

SEQ ID NO: 185372 - DNA, 25 bp, Probe Sequence
ctcattgccgtgtccaatcattatg

SEQ ID NO: 185373 - DNA, 25 bp, Probe Sequence
ctcatcgagcagagcctgtctttag

SEQ ID NO: 185374 - DNA, 25 bp, Probe Sequence
ctctctagagaggactttcttatgt

SEQ ID NO: 185375 - DNA, 25 bp, Probe Sequence
ctctctcagaaatcaatggcatttg

SEQ ID NO: 185376 - DNA, 25 bp, Probe Sequence
ctctcagcagctacaacatcatgga

SEQ ID NO: 185377 - DNA, 25 bp, Probe Sequence
ctctgcactgtttctctctgcagac

SEQ ID NO: 185378 - DNA, 25 bp, Probe Sequence
ctctcatcggagatattgcaagcca

SEQ ID NO: 185379 - DNA, 25 bp, Probe Sequence
ctctctgccagaattgtgtgcactc

SEQ ID NO: 185380 - DNA, 25 bp, Probe Sequence
ctctgtgcctgttgaatgtccatgc

SEQ ID NO: 185381 - DNA, 25 bp, Probe Sequence
ctcttcctgctggagtactgcatgg

SEQ ID NO: 185382 - DNA, 25 bp, Probe Sequence
ctcttcagtgcaacagtactgcgca

SEQ ID NO: 185383 - DNA, 25 bp, Probe Sequence
ctcttcagtaacctctgcagcagct

SEQ ID NO: 185384 - DNA, 25 bp, Probe Sequence
ctcattcaatttctctagcagcagt

SEQ ID NO: 185385 - DNA, 25 bp, Probe Sequence
ctcattcatttctctaacagcagta

SEQ ID NO: 185386 - DNA, 25 bp, Probe Sequence
ctctacttgatctcagagaaggtca

SEQ ID NO: 185387 - DNA, 25 bp, Probe Sequence
ctcttcttcatcttcgaggacacca

SEQ ID NO: 185388 - DNA, 25 bp, Probe Sequence
ctctcctctacgttggaaaccacat

SEQ ID NO: 185389 - DNA, 25 bp, Probe Sequence
ctctttctacagagccttacactct

SEQ ID NO: 185390 - DNA, 25 bp, Probe Sequence
ctctttatcccaagcctttatgctt

SEQ ID NO: 185391 - DNA, 25 bp, Probe Sequence
ctcttattctccatgtggtcttctt

SEQ ID NO: 185392 - DNA, 25 bp, Probe Sequence
ctctttcatctctgcttggattatt

SEQ ID NO: 185393 - DNA, 25 bp, Probe Sequence
ctcttctgcttccctataataagga

SEQ ID NO: 185394 - DNA, 25 bp, Probe Sequence
ctctacaggtagctattgatataat

SEQ ID NO: 185395 - DNA, 25 bp, Probe Sequence
ctcttgaggaacttttaatttgcag

SEQ ID NO: 185396 - DNA, 25 bp, Probe Sequence
ctctctgggaaacgtcccttgtcag

SEQ ID NO: 185397 - DNA, 25 bp, Probe Sequence
ctctctggagaaagggccctgggcc

SEQ ID NO: 185398 - DNA, 25 bp, Probe Sequence
ctctgcgggaagcggttcctggata

SEQ ID NO: 185399 - DNA, 25 bp, Probe Sequence
ctctgctttgagctgggtctttgga

SEQ ID NO: 185400 - DNA, 25 bp, Probe Sequence
ctctgttccagcctatggctttagg

SEQ ID NO: 185401 - DNA, 25 bp, Probe Sequence
ctctctttcttgttggctctggagg

SEQ ID NO: 185402 - DNA, 25 bp, Probe Sequence
ctcttattctgcgttagcatctggt

SEQ ID NO: 185403 - DNA, 25 bp, Probe Sequence
ctctcacatctcctgttggatgctg

SEQ ID NO: 185404 - DNA, 25 bp, Probe Sequence
ctctcagcactgggatgggcctgat

SEQ ID NO: 185405 - DNA, 25 bp, Probe Sequence
ctctcaggctgcaagtaagtatgaa

SEQ ID NO: 185406 - DNA, 25 bp, Probe Sequence
ctctgaggccatcgtgaagtttgtt

SEQ ID NO: 185407 - DNA, 25 bp, Probe Sequence
ctcttgagatcttgtggattccatg

SEQ ID NO: 185408 - DNA, 25 bp, Probe Sequence
ctcttgtcattgctgtcagcctcag

SEQ ID NO: 185409 - DNA, 25 bp, Probe Sequence
ctctgagagctgtgctccaggccag

SEQ ID NO: 185410 - DNA, 25 bp, Probe Sequence
ctctgagagctgtgctccaggccag

SEQ ID NO: 185411 - DNA, 25 bp, Probe Sequence
ctctaggtgatccacaaggctcaga

SEQ ID NO: 185412 - DNA, 25 bp, Probe Sequence
ctctgaagtcaccatacatgaacaa

SEQ ID NO: 185413 - DNA, 25 bp, Probe Sequence
ctctacgtccagaagcataacattc

SEQ ID NO: 185414 - DNA, 25 bp, Probe Sequence
ctctacagtctcaaaatgacctgat

SEQ ID NO: 185415 - DNA, 25 bp, Probe Sequence
ctctctgagccttgcaaaacctgca

SEQ ID NO: 185416 - DNA, 25 bp, Probe Sequence
ctctctaccatgtcaatgaaaagcc

SEQ ID NO: 185417 - DNA, 25 bp, Probe Sequence
ctctcatattcaacttgtacaagta

SEQ ID NO: 185418 - DNA, 25 bp, Probe Sequence
ctctagatttgaagtgtccttgtag

SEQ ID NO: 185419 - DNA, 25 bp, Probe Sequence
ctctaataagacattagctgtctag

SEQ ID NO: 185420 - DNA, 25 bp, Probe Sequence
ctctaacaggaccatcacagcttct

SEQ ID NO: 185421 - DNA, 25 bp, Probe Sequence
ctctcataggagacccatgtgcttc

SEQ ID NO: 185422 - DNA, 25 bp, Probe Sequence
ctctcatggggtacccttgataaac

SEQ ID NO: 185423 - DNA, 25 bp, Probe Sequence
ctctcagggtgtggaaattattaac

SEQ ID NO: 185424 - DNA, 25 bp, Probe Sequence
ctctcggtggtgggattatgaatga

SEQ ID NO: 185425 - DNA, 25 bp, Probe Sequence
ctctcgctgctgctaggtttacaaa

SEQ ID NO: 185426 - DNA, 25 bp, Probe Sequence
ctctagcgtggccaagttctatcca

SEQ ID NO: 185427 - DNA, 25 bp, Probe Sequence
ctctaggtccaattgttctgctcta

SEQ ID NO: 185428 - DNA, 25 bp, Probe Sequence
ctccaggccacgtttgggcatgtag

SEQ ID NO: 185429 - DNA, 25 bp, Probe Sequence
ctccagtcccaaactaatctgtcag

SEQ ID NO: 185430 - DNA, 25 bp, Probe Sequence
ctctgaggcccgatccagtgggcag

SEQ ID NO: 185431 - DNA, 25 bp, Probe Sequence
ctctgtgggccgaccagaggggggc

SEQ ID NO: 185432 - DNA, 25 bp, Probe Sequence
ctctactggcgctgccaaggctgtg

SEQ ID NO: 185433 - DNA, 25 bp, Probe Sequence
ctctagcggtgaagctccagggggc

SEQ ID NO: 185434 - DNA, 25 bp, Probe Sequence
ctcgggtatgaagatcgggcggatt

SEQ ID NO: 185435 - DNA, 25 bp, Probe Sequence
cctgggcttacctggggggcaggat

SEQ ID NO: 185436 - DNA, 25 bp, Probe Sequence
ctggccatttttctgggggtaggat

SEQ ID NO: 185437 - DNA, 25 bp, Probe Sequence
ctgtcctgttttcttaggcactgag

SEQ ID NO: 185438 - DNA, 25 bp, Probe Sequence
ctgtcctgttttcttaggcactgag

SEQ ID NO: 185439 - DNA, 25 bp, Probe Sequence
ctctttgtatttattggaactggag

SEQ ID NO: 185440 - DNA, 25 bp, Probe Sequence
ctcttcatgtaagtccttggaattg

SEQ ID NO: 185441 - DNA, 25 bp, Probe Sequence
ctctcctctaacccactagagattg

SEQ ID NO: 185442 - DNA, 25 bp, Probe Sequence
ctctctattgaccaccagttaacgt

SEQ ID NO: 185443 - DNA, 25 bp, Probe Sequence
ctcttatttctgtccagcatatgta

SEQ ID NO: 185444 - DNA, 25 bp, Probe Sequence
ctcttcacttcagctcagtagcttt

SEQ ID NO: 185445 - DNA, 25 bp, Probe Sequence
ctcttctcatctggttcagaactta

SEQ ID NO: 185446 - DNA, 25 bp, Probe Sequence
ctcttagcacatcttcgactttagg

SEQ ID NO: 185447 - DNA, 25 bp, Probe Sequence
ctcttcacctatatctaccttgggg

SEQ ID NO: 185448 - DNA, 25 bp, Probe Sequence
ctcttcacctatatctaccttgggg

SEQ ID NO: 185449 - DNA, 25 bp, Probe Sequence
ccttgcacgtttattccacggtaga

SEQ ID NO: 185450 - DNA, 25 bp, Probe Sequence
ctcgtcacggttatcccaggaggga

SEQ ID NO: 185451 - DNA, 25 bp, Probe Sequence
ctcttcgcagtagaacctcgtgggg

SEQ ID NO: 185452 - DNA, 25 bp, Probe Sequence
ctcttctcctacaaatgccaagtgg

SEQ ID NO: 185453 - DNA, 25 bp, Probe Sequence
ctcttctcttcagctaggctagctg

SEQ ID NO: 185454 - DNA, 25 bp, Probe Sequence
ctctttctgcaggcggggaagctaa

SEQ ID NO: 185455 - DNA, 25 bp, Probe Sequence
ctcttcgtggaggctgtggaacaaa

SEQ ID NO: 185456 - DNA, 25 bp, Probe Sequence
ctcttcggtgcggcagagggacaag

SEQ ID NO: 185457 - DNA, 25 bp, Probe Sequence
ctcttcctctgggtgggagcaagcg

SEQ ID NO: 185458 - DNA, 25 bp, Probe Sequence
ctcttctctcagtgctagggcaact

SEQ ID NO: 185459 - DNA, 25 bp, Probe Sequence
ctcttctgaaattgctaggaccatt

SEQ ID NO: 185460 - DNA, 25 bp, Probe Sequence
ctctctctgaccactaatcaaatgt

SEQ ID NO: 185461 - DNA, 25 bp, Probe Sequence
ctctctagaccaactgatgcagaaa

SEQ ID NO: 185462 - DNA, 25 bp, Probe Sequence
ctcttagagcctgtgcataaaactg

SEQ ID NO: 185463 - DNA, 25 bp, Probe Sequence
ctcttgacagttgtgcttctctagg

SEQ ID NO: 185464 - DNA, 25 bp, Probe Sequence
ctctgagagagttctattttttggt

SEQ ID NO: 185465 - DNA, 25 bp, Probe Sequence
ctctcagctgaggactttaatatct

SEQ ID NO: 185466 - DNA, 25 bp, Probe Sequence
ctctagtgaatgtcctttatataat

SEQ ID NO: 185467 - DNA, 25 bp, Probe Sequence
ctctgtttaaacctgtattaatagg

SEQ ID NO: 185468 - DNA, 25 bp, Probe Sequence
ctctgttacaaagtggcaataataa

SEQ ID NO: 185469 - DNA, 25 bp, Probe Sequence
ctctcgtgcaaaaggggtgcattaa

SEQ ID NO: 185470 - DNA, 25 bp, Probe Sequence
ctctgcggcaaggccgtggtgctga

SEQ ID NO: 185471 - DNA, 25 bp, Probe Sequence
ctctgctggcacaccagtggcaagg

SEQ ID NO: 185472 - DNA, 25 bp, Probe Sequence
ctctctggaccaaagggcctatgta

SEQ ID NO: 185473 - DNA, 25 bp, Probe Sequence
ctctcgaacctgggaagacctggca

SEQ ID NO: 185474 - DNA, 25 bp, Probe Sequence
cgccctattcgggaatgcccggcgt

SEQ ID NO: 185475 - DNA, 25 bp, Probe Sequence
ctccctttcacagactgtccggagt

SEQ ID NO: 185476 - DNA, 25 bp, Probe Sequence
ctcccttagtgaggccgatcttaag

SEQ ID NO: 185477 - DNA, 25 bp, Probe Sequence
ctctcacttaagcaggatacttact

SEQ ID NO: 185478 - DNA, 25 bp, Probe Sequence
ctcctttcatgagaatatacttata

SEQ ID NO: 185479 - DNA, 25 bp, Probe Sequence
ctctttcctcaactacagacttata

SEQ ID NO: 185480 - DNA, 25 bp, Probe Sequence
ctgcttaccttacaaaatagtgaaa

SEQ ID NO: 185481 - DNA, 25 bp, Probe Sequence
ctcttcagccactgcccaaaaagga

SEQ ID NO: 185482 - DNA, 25 bp, Probe Sequence
cggtaccacacgtccaaagttagat

SEQ ID NO: 185483 - DNA, 25 bp, Probe Sequence
ctcgttctcccactcaaaaatttgt

SEQ ID NO: 185484 - DNA, 25 bp, Probe Sequence
ctctgttctcccccagtgaaaaaga

SEQ ID NO: 185485 - DNA, 25 bp, Probe Sequence
ctctttccctgccacgtggaaacaa

SEQ ID NO: 185486 - DNA, 25 bp, Probe Sequence
ctcttccccagccatttagaaacaa

SEQ ID NO: 185487 - DNA, 25 bp, Probe Sequence
ctctcctcctgagctcttaggaaca

SEQ ID NO: 185488 - DNA, 25 bp, Probe Sequence
ctctcaatcactcagctcttaaagc

SEQ ID NO: 185489 - DNA, 25 bp, Probe Sequence
ctctaaattccagccatcaaatcca

SEQ ID NO: 185490 - DNA, 25 bp, Probe Sequence
cctcaaccccgacatcattaccggg

SEQ ID NO: 185491 - DNA, 25 bp, Probe Sequence
ctctaaccctaagaccattcgcatg

SEQ ID NO: 185492 - DNA, 25 bp, Probe Sequence
gtccaatgtccttaggaccccgatg

SEQ ID NO: 185493 - DNA, 25 bp, Probe Sequence
ctctcatttccttagtaagccaaat

SEQ ID NO: 185494 - DNA, 25 bp, Probe Sequence
ctctatttgtctgaggaaagaaagg

SEQ ID NO: 185495 - DNA, 25 bp, Probe Sequence
ctgctactttgtgagtaaagaaaac

SEQ ID NO: 185496 - DNA, 25 bp, Probe Sequence
ctctttaatgtgcactcaacatgta

SEQ ID NO: 185497 - DNA, 25 bp, Probe Sequence
ctctttcctgctgcaccaaagtagt

SEQ ID NO: 185498 - DNA, 25 bp, Probe Sequence
ctctttcctctttagaaatggcagt

SEQ ID NO: 185499 - DNA, 25 bp, Probe Sequence
ctcttccccttggaaggatgagctg

SEQ ID NO: 185500 - DNA, 25 bp, Probe Sequence
ctcttcattcctcttaggagagtgc

SEQ ID NO: 185501 - DNA, 25 bp, Probe Sequence
ctcttttctcagccttatagtagga

SEQ ID NO: 185502 - DNA, 25 bp, Probe Sequence
ctcctattccccctgaagtcaggac

SEQ ID NO: 185503 - DNA, 25 bp, Probe Sequence
ctccaagttctagggccgtcaggac

SEQ ID NO: 185504 - DNA, 25 bp, Probe Sequence
ctccgagtggctgtaccgggtgacg

SEQ ID NO: 185505 - DNA, 25 bp, Probe Sequence
ctcccaggatggtgaagggggacct

SEQ ID NO: 185506 - DNA, 25 bp, Probe Sequence
tccataagaaggtgggttggggcct

SEQ ID NO: 185507 - DNA, 25 bp, Probe Sequence
ccgaggaaggagtggctgggggtct

SEQ ID NO: 185508 - DNA, 25 bp, Probe Sequence
ctcggggagtgaaggcctcgttgag

SEQ ID NO: 185509 - DNA, 25 bp, Probe Sequence
ctcggggatgtgtgcagacagggct

SEQ ID NO: 185510 - DNA, 25 bp, Probe Sequence
ctctgaacggagttcaaaggctgct

SEQ ID NO: 185511 - DNA, 25 bp, Probe Sequence
ctctgaagctggattgatacgggga

SEQ ID NO: 185512 - DNA, 25 bp, Probe Sequence
ctcgactggtgtttgatcactatgg

SEQ ID NO: 185513 - DNA, 25 bp, Probe Sequence
ctctgacattcggcttgatccatgt

SEQ ID NO: 185514 - DNA, 25 bp, Probe Sequence
ctctagctgtctggctgtataactc

SEQ ID NO: 185515 - DNA, 25 bp, Probe Sequence
ctctcagtctcgccatgttgaagtc

SEQ ID NO: 185516 - DNA, 25 bp, Probe Sequence
ctctcagacagccacattcagtcgc

SEQ ID NO: 185517 - DNA, 25 bp, Probe Sequence
ctcggatacgacactgtccaggttg

SEQ ID NO: 185518 - DNA, 25 bp, Probe Sequence
ctcggaagatgaacctgacccgggg

SEQ ID NO: 185519 - DNA, 25 bp, Probe Sequence
ctctggaagataccttcacggccgc

SEQ ID NO: 185520 - DNA, 25 bp, Probe Sequence
ctctggacgcagaacttcagccatg

SEQ ID NO: 185521 - DNA, 25 bp, Probe Sequence
ctcggatggccaacattcagttgtt

SEQ ID NO: 185522 - DNA, 25 bp, Probe Sequence
ctctctgtgttctgtgtatttgtct

SEQ ID NO: 185523 - DNA, 25 bp, Probe Sequence
ctctcttttctatctaggtgtctat

SEQ ID NO: 185524 - DNA, 25 bp, Probe Sequence
ctgctttctaaatctcagtggttgg

SEQ ID NO: 185525 - DNA, 25 bp, Probe Sequence
ctcttcctaaatttcattgtgttga

SEQ ID NO: 185526 - DNA, 25 bp, Probe Sequence
ctcttccctttgttattcagtgtga

SEQ ID NO: 185527 - DNA, 25 bp, Probe Sequence
ctctagctacttggactattcaggg

SEQ ID NO: 185528 - DNA, 25 bp, Probe Sequence
ctctactactgttgattttgccctc

SEQ ID NO: 185529 - DNA, 25 bp, Probe Sequence
ctctactttttgatatgctccagat

SEQ ID NO: 185530 - DNA, 25 bp, Probe Sequence
ctctattgagttagcttattcaagt

SEQ ID NO: 185531 - DNA, 25 bp, Probe Sequence
ctcttctgagctagttggttgaatt

SEQ ID NO: 185532 - DNA, 25 bp, Probe Sequence
ctcttctgagctatttcatctattt

SEQ ID NO: 185533 - DNA, 25 bp, Probe Sequence
ctctatctgccttgtgttcattttg

SEQ ID NO: 185534 - DNA, 25 bp, Probe Sequence
ctctatctgccttgtgttcattttg

SEQ ID NO: 185535 - DNA, 25 bp, Probe Sequence
ctctatctgccttgtgttcattttg

SEQ ID NO: 185536 - DNA, 25 bp, Probe Sequence
ctcttctgccttatgttctatcatg

SEQ ID NO: 185537 - DNA, 25 bp, Probe Sequence
ctcttctcaatcatctgtgggtcat

SEQ ID NO: 185538 - DNA, 25 bp, Probe Sequence
ctctagtcagttcagtaggagcatt

SEQ ID NO: 185539 - DNA, 25 bp, Probe Sequence
ctctcagctagttggcgggggtgct

SEQ ID NO: 185540 - DNA, 25 bp, Probe Sequence
ctctcgctttggccatggagcggga

SEQ ID NO: 185541 - DNA, 25 bp, Probe Sequence
ctctagattggcccatggtgccagg

SEQ ID NO: 185542 - DNA, 25 bp, Probe Sequence
ctctaaagcaggacgcctgccaggg

SEQ ID NO: 185543 - DNA, 25 bp, Probe Sequence
ctctggaggcggaggttgcagtgag

SEQ ID NO: 185544 - DNA, 25 bp, Probe Sequence
ctctgtggggcagttggtgggggct

SEQ ID NO: 185545 - DNA, 25 bp, Probe Sequence
ctctctcctgatgctaggttggggc

SEQ ID NO: 185546 - DNA, 25 bp, Probe Sequence
ctcttttttataccatctggccagc

SEQ ID NO: 185547 - DNA, 25 bp, Probe Sequence
ctcttttattcaacctttgccactg

SEQ ID NO: 185548 - DNA, 25 bp, Probe Sequence
ctctttgtattcccattttctacag

SEQ ID NO: 185549 - DNA, 25 bp, Probe Sequence
ctctttgtgtgtgactgtttctcat

SEQ ID NO: 185550 - DNA, 25 bp, Probe Sequence
ctctatcgatgttgccacttttttc

SEQ ID NO: 185551 - DNA, 25 bp, Probe Sequence
ctctctcggtggacaccttttatca

SEQ ID NO: 185552 - DNA, 25 bp, Probe Sequence
ctctctagttgaaccctgggaacaa

SEQ ID NO: 185553 - DNA, 25 bp, Probe Sequence
ctcttctttgattccctgggatagt

SEQ ID NO: 185554 - DNA, 25 bp, Probe Sequence
ctctccttttctgactgggacagag

SEQ ID NO: 185555 - DNA, 25 bp, Probe Sequence
ctcttaatatttgctctgggtcagg

SEQ ID NO: 185556 - DNA, 25 bp, Probe Sequence
ctcttaataatatctggtatcctgg

SEQ ID NO: 185557 - DNA, 25 bp, Probe Sequence
ctcttaaactgtgtgttctccatgg

SEQ ID NO: 185558 - DNA, 25 bp, Probe Sequence
ctcttaattggcagatgttccagtg

SEQ ID NO: 185559 - DNA, 25 bp, Probe Sequence
ctcttagaggacaatggcgttcagc

SEQ ID NO: 185560 - DNA, 25 bp, Probe Sequence
ctcttcagaggagatgatgcttatt

SEQ ID NO: 185561 - DNA, 25 bp, Probe Sequence
ctcttctgctgggaaatgcagcttt

SEQ ID NO: 185562 - DNA, 25 bp, Probe Sequence
ctcttctgcgaaataagcctcatcc

SEQ ID NO: 185563 - DNA, 25 bp, Probe Sequence
ctctagctctaaatgctagctctaa

SEQ ID NO: 185564 - DNA, 25 bp, Probe Sequence
ctcttctatcagactgcacctctaa

SEQ ID NO: 185565 - DNA, 25 bp, Probe Sequence
ctctgatgtgtctctcacagcttgt

SEQ ID NO: 185566 - DNA, 25 bp, Probe Sequence
ctctgatgtgtctctcacagcttgt

SEQ ID NO: 185567 - DNA, 25 bp, Probe Sequence
ctctggctatcatgccaactactgc

SEQ ID NO: 185568 - DNA, 25 bp, Probe Sequence
ctgctggcatgtaatgcttagtttt

SEQ ID NO: 185569 - DNA, 25 bp, Probe Sequence
ctcggttcttctgacattcttaatt

SEQ ID NO: 185570 - DNA, 25 bp, Probe Sequence
ctctggtttttcagcacttgggatt

SEQ ID NO: 185571 - DNA, 25 bp, Probe Sequence
ctctggaagttctggcactggggaa

SEQ ID NO: 185572 - DNA, 25 bp, Probe Sequence
ctctggacaataaaaacgaatgtac

SEQ ID NO: 185573 - DNA, 25 bp, Probe Sequence
ctcggcataattctcataaaaacac

SEQ ID NO: 185574 - DNA, 25 bp, Probe Sequence
ctcggaggaaccagagaaactcagc

SEQ ID NO: 185575 - DNA, 25 bp, Probe Sequence
ctctgtggtgaataatggaccccag

SEQ ID NO: 185576 - DNA, 25 bp, Probe Sequence
ctctgtgggtgctgggtactccaga

SEQ ID NO: 185577 - DNA, 25 bp, Probe Sequence
ctccctggtgcctgtaatcccaggt

SEQ ID NO: 185578 - DNA, 25 bp, Probe Sequence
ctccctggtctccagcttaaacagg

SEQ ID NO: 185579 - DNA, 25 bp, Probe Sequence
ctccctggtctccagcttaaacagg

SEQ ID NO: 185580 - DNA, 25 bp, Probe Sequence
ctctcttggttccactagaaataga

SEQ ID NO: 185581 - DNA, 25 bp, Probe Sequence
ctccttggattccttcacgaaagcc

SEQ ID NO: 185582 - DNA, 25 bp, Probe Sequence
ctctttgactacctggcggacaagc

SEQ ID NO: 185583 - DNA, 25 bp, Probe Sequence
ctcttattcatgagtccgtatcaac

SEQ ID NO: 185584 - DNA, 25 bp, Probe Sequence
ctcttttcagagttcatgctatcac

SEQ ID NO: 185585 - DNA, 25 bp, Probe Sequence
ctcttttccaggacagcaattgtgg

SEQ ID NO: 185586 - DNA, 25 bp, Probe Sequence
ctcttcttgtcagtgaatccagtat

SEQ ID NO: 185587 - DNA, 25 bp, Probe Sequence
ctctctttgctggtattcacctgat

SEQ ID NO: 185588 - DNA, 25 bp, Probe Sequence
ctctcagattctttgattattctca

SEQ ID NO: 185589 - DNA, 25 bp, Probe Sequence
ctctcagagcatgcttttctttatt

SEQ ID NO: 185590 - DNA, 25 bp, Probe Sequence
ctctgaatgtcacttttgtttttaa

SEQ ID NO: 185591 - DNA, 25 bp, Probe Sequence
ctctttgccagtaacttgttttata

SEQ ID NO: 185592 - DNA, 25 bp, Probe Sequence
ctccctcctggaacttggatcttaa

SEQ ID NO: 185593 - DNA, 25 bp, Probe Sequence
ctccctcccacaaaaagacctgaag

SEQ ID NO: 185594 - DNA, 25 bp, Probe Sequence
ctctcctcccacagattacaaaaac

SEQ ID NO: 185595 - DNA, 25 bp, Probe Sequence
ctctttcacacaatacttcagacac

SEQ ID NO: 185596 - DNA, 25 bp, Probe Sequence
ctctttagctcaatttctgggcctg

SEQ ID NO: 185597 - DNA, 25 bp, Probe Sequence
ctctattagatctttaggggacaga

SEQ ID NO: 185598 - DNA, 25 bp, Probe Sequence
ctcgtgtaagcagtttggtggaaga

SEQ ID NO: 185599 - DNA, 25 bp, Probe Sequence
ctctagtgggaccttgactggagaa

SEQ ID NO: 185600 - DNA, 25 bp, Probe Sequence
ctctagggtgatacgtgggtgagaa

SEQ ID NO: 185601 - DNA, 25 bp, Probe Sequence
ctctagggagtatgctggaggcaga

SEQ ID NO: 185602 - DNA, 25 bp, Probe Sequence
ctctgagccagattaacaggaatga

SEQ ID NO: 185603 - DNA, 25 bp, Probe Sequence
ctctggagcaaaacaggcctggaac

SEQ ID NO: 185604 - DNA, 25 bp, Probe Sequence
ctctgtacaagaacaggctcggctc

SEQ ID NO: 185605 - DNA, 25 bp, Probe Sequence
gccgaatgccaaacctgactggctg

SEQ ID NO: 185606 - DNA, 25 bp, Probe Sequence
ctctgaggctcagccctgagctggc

SEQ ID NO: 185607 - DNA, 25 bp, Probe Sequence
ctctgaggctcagccctgagctggc

SEQ ID NO: 185608 - DNA, 25 bp, Probe Sequence
ctctgacggactgcgtggtggtggt

SEQ ID NO: 185609 - DNA, 25 bp, Probe Sequence
ctctaccggcgggatttgatggcgt

SEQ ID NO: 185610 - DNA, 25 bp, Probe Sequence
ctctcaccccttaatactgtgcagc

SEQ ID NO: 185611 - DNA, 25 bp, Probe Sequence
ctctgacacccaatttccattctgg

SEQ ID NO: 185612 - DNA, 25 bp, Probe Sequence
ctctgagcattagatttctcatttg

SEQ ID NO: 185613 - DNA, 25 bp, Probe Sequence
ctctactgtgcaccttatcttatat

SEQ ID NO: 185614 - DNA, 25 bp, Probe Sequence
ctgtaatgtcaagaatttaagaatt

SEQ ID NO: 185615 - DNA, 25 bp, Probe Sequence
ctctcaatcccagattttcaaaaaa

SEQ ID NO: 185616 - DNA, 25 bp, Probe Sequence
ctccaatccttgatccgtaacaaaa

SEQ ID NO: 185617 - DNA, 25 bp, Probe Sequence
ctctgcagtcacttttccttagaag

SEQ ID NO: 185618 - DNA, 25 bp, Probe Sequence
ccgttagtttctcctctaatcagta

SEQ ID NO: 185619 - DNA, 25 bp, Probe Sequence
ctcctttgtctgttcctaagacact

SEQ ID NO: 185620 - DNA, 25 bp, Probe Sequence
ctcttacattcttttgcataaggca

SEQ ID NO: 185621 - DNA, 25 bp, Probe Sequence
ctctggactttctccaaaggcactg

SEQ ID NO: 185622 - DNA, 25 bp, Probe Sequence
ctctggggtagctctcaagggccag

SEQ ID NO: 185623 - DNA, 25 bp, Probe Sequence
ctctggggctcagccctgagctagt

SEQ ID NO: 185624 - DNA, 25 bp, Probe Sequence
ctctgttggacaaaccgagtgcaat

SEQ ID NO: 185625 - DNA, 25 bp, Probe Sequence
ctctgcctaccaacaactgggctta

SEQ ID NO: 185626 - DNA, 25 bp, Probe Sequence
ctctgcctaccaacaactgggctta

SEQ ID NO: 185627 - DNA, 25 bp, Probe Sequence
ctctgcctaccaacaactgggctta

SEQ ID NO: 185628 - DNA, 25 bp, Probe Sequence
ctctaccaccaatcagcaggagatc

SEQ ID NO: 185629 - DNA, 25 bp, Probe Sequence
ctctcaccaccactgaatctggtta

SEQ ID NO: 185630 - DNA, 25 bp, Probe Sequence
ctctcagcacagtatggaattggat

SEQ ID NO: 185631 - DNA, 25 bp, Probe Sequence
ctctgctgccagggcgagtgcgagt

SEQ ID NO: 185632 - DNA, 25 bp, Probe Sequence
ctctccatcatggcgcaggatcaag

SEQ ID NO: 185633 - DNA, 25 bp, Probe Sequence
ctctcatactgctcagtgacatggc

SEQ ID NO: 185634 - DNA, 25 bp, Probe Sequence
ctctgcatcacctaccaggatgtct

SEQ ID NO: 185635 - DNA, 25 bp, Probe Sequence
ctctctcctacataggtgtctccaa

SEQ ID NO: 185636 - DNA, 25 bp, Probe Sequence
cctgctaccacaaagggtccgacag

SEQ ID NO: 185637 - DNA, 25 bp, Probe Sequence
ctctgtacagtccctgggatccgac

SEQ ID NO: 185638 - DNA, 25 bp, Probe Sequence
ctctctatgcacggtttgtgatcac

SEQ ID NO: 185639 - DNA, 25 bp, Probe Sequence
ctctgatgatcactggtgttgagct

SEQ ID NO: 185640 - DNA, 25 bp, Probe Sequence
ctcgatgacaatctgggagtgtgct

SEQ ID NO: 185641 - DNA, 25 bp, Probe Sequence
ctcgacacacagggcactggttcca

SEQ ID NO: 185642 - DNA, 25 bp, Probe Sequence
ctcgaccactgtgctcaagtaccag

SEQ ID NO: 185643 - DNA, 25 bp, Probe Sequence
ctctacccttccaagttgactgtgg

SEQ ID NO: 185644 - DNA, 25 bp, Probe Sequence
ctctacacccccaagtgcatatggg

SEQ ID NO: 185645 - DNA, 25 bp, Probe Sequence
ctctttccccacggttatatgtgtg

SEQ ID NO: 185646 - DNA, 25 bp, Probe Sequence
ctcggtccaccaggttcttattgga

SEQ ID NO: 185647 - DNA, 25 bp, Probe Sequence
ctcgtgtcagacaggttcctcaggg

SEQ ID NO: 185648 - DNA, 25 bp, Probe Sequence
ctgcggtcgcaaaggataccctgga

SEQ ID NO: 185649 - DNA, 25 bp, Probe Sequence
ctcgaggccatgagcagatatacca

SEQ ID NO: 185650 - DNA, 25 bp, Probe Sequence
ctctaacttcaccatattaccacag

SEQ ID NO: 185651 - DNA, 25 bp, Probe Sequence
ctctacacttatcatcttcacaatt

SEQ ID NO: 185652 - DNA, 25 bp, Probe Sequence
ctctacctggcatgtgcttgtcaag

SEQ ID NO: 185653 - DNA, 25 bp, Probe Sequence
ctcgtacggcaagtatttcaagttg

SEQ ID NO: 185654 - DNA, 25 bp, Probe Sequence
ctctcttccgaggttctcacagagt

SEQ ID NO: 185655 - DNA, 25 bp, Probe Sequence
ctctttctagaggtgctacatagtt

SEQ ID NO: 185656 - DNA, 25 bp, Probe Sequence
ctctatttagcggagaaatatggta

SEQ ID NO: 185657 - DNA, 25 bp, Probe Sequence
ctctctacttggggaaatcaggtgc

SEQ ID NO: 185658 - DNA, 25 bp, Probe Sequence
ctgccaggcctgtgggaacagggct

SEQ ID NO: 185659 - DNA, 25 bp, Probe Sequence
ctgccacccaaggggaagcttcgga

SEQ ID NO: 185660 - DNA, 25 bp, Probe Sequence
ctgccaaaacagagtggagtacgag

SEQ ID NO: 185661 - DNA, 25 bp, Probe Sequence
ctccaactacactgactggttcgag

SEQ ID NO: 185662 - DNA, 25 bp, Probe Sequence
ctccatcaccactgaccgggaaagt

SEQ ID NO: 185663 - DNA, 25 bp, Probe Sequence
ctccatcaccactgaccgggaaagt

SEQ ID NO: 185664 - DNA, 25 bp, Probe Sequence
ctcccacatgccttaaggggaccgt

SEQ ID NO: 185665 - DNA, 25 bp, Probe Sequence
ctcggcctcctttagtaggtgggat

SEQ ID NO: 185666 - DNA, 25 bp, Probe Sequence
ctctggccttttcaagcagtggatg

SEQ ID NO: 185667 - DNA, 25 bp, Probe Sequence
ctctgctgtccttactcaacagtgg

SEQ ID NO: 185668 - DNA, 25 bp, Probe Sequence
ctctgcagctctgacccaaatttag

SEQ ID NO: 185669 - DNA, 25 bp, Probe Sequence
ctcggccggccaccaataatatgaa

SEQ ID NO: 185670 - DNA, 25 bp, Probe Sequence
ctcccaccccagaaatcactgtgaa

SEQ ID NO: 185671 - DNA, 25 bp, Probe Sequence
ctctctgccccacataattatgtta

SEQ ID NO: 185672 - DNA, 25 bp, Probe Sequence
ctctttcccagatgacaattgtgtt

SEQ ID NO: 185673 - DNA, 25 bp, Probe Sequence
ctcctgctcttcaaggaccggattt

SEQ ID NO: 185674 - DNA, 25 bp, Probe Sequence
ctctcttcttctaggagtccaacct

SEQ ID NO: 185675 - DNA, 25 bp, Probe Sequence
ctctttctcactagagactcaatga

SEQ ID NO: 185676 - DNA, 25 bp, Probe Sequence
ctctatgaccctacaaccatcatga

SEQ ID NO: 185677 - DNA, 25 bp, Probe Sequence
ctctgttaccttgactcatctcaga

SEQ ID NO: 185678 - DNA, 25 bp, Probe Sequence
ctcggatacccaggacagcatgtcc

SEQ ID NO: 185679 - DNA, 25 bp, Probe Sequence
ctcggagagtacggcctgatggctc

SEQ ID NO: 185680 - DNA, 25 bp, Probe Sequence
ctcgggatgtgggctctagagcgcc

SEQ ID NO: 185681 - DNA, 25 bp, Probe Sequence
ctctgtgggagggactttgctgatt

SEQ ID NO: 185682 - DNA, 25 bp, Probe Sequence
ctctggtctgagtcaactttcgctg

SEQ ID NO: 185683 - DNA, 25 bp, Probe Sequence
ctctgagggaaacgctgtctgctgc

SEQ ID NO: 185684 - DNA, 25 bp, Probe Sequence
ctctgaaggaagcccatgcttctgc

SEQ ID NO: 185685 - DNA, 25 bp, Probe Sequence
ctctgagagaggacagcctgctccc

SEQ ID NO: 185686 - DNA, 25 bp, Probe Sequence
ctcgcagtcaggggcagctgaccat

SEQ ID NO: 185687 - DNA, 25 bp, Probe Sequence
ctcgatggcacgagcagcgttctct

SEQ ID NO: 185688 - DNA, 25 bp, Probe Sequence
ctctgtctgggaagagactctctaa

SEQ ID NO: 185689 - DNA, 25 bp, Probe Sequence
ctctacatgggctgtggctgtcagc

SEQ ID NO: 185690 - DNA, 25 bp, Probe Sequence
ctctggattccatttgggtcagcct

SEQ ID NO: 185691 - DNA, 25 bp, Probe Sequence
ctctgtggtccgtaggagccactat

SEQ ID NO: 185692 - DNA, 25 bp, Probe Sequence
ctctttgccggcgatgaggtcaatg

SEQ ID NO: 185693 - DNA, 25 bp, Probe Sequence
ctctacctcaacgatgacttccagg

SEQ ID NO: 185694 - DNA, 25 bp, Probe Sequence
ctctgacaccaatcagatcttcggc

SEQ ID NO: 185695 - DNA, 25 bp, Probe Sequence
ctctggctcctaccgagttcgagcc

SEQ ID NO: 185696 - DNA, 25 bp, Probe Sequence
ctctgcgtttacaggcttgtgactc

SEQ ID NO: 185697 - DNA, 25 bp, Probe Sequence
ctctgtttaacagtccttggaccat

SEQ ID NO: 185698 - DNA, 25 bp, Probe Sequence
ctctttgtcaacgttgccagtacct

SEQ ID NO: 185699 - DNA, 25 bp, Probe Sequence
ctctttggccggagccagatctgcc

SEQ ID NO: 185700 - DNA, 25 bp, Probe Sequence
ctctagtgccctggtttagatctcc

SEQ ID NO: 185701 - DNA, 25 bp, Probe Sequence
ctctagggcctcagtctggagtggg

SEQ ID NO: 185702 - DNA, 25 bp, Probe Sequence
ctctactgccccaagtgcatggatg

SEQ ID NO: 185703 - DNA, 25 bp, Probe Sequence
ctctacccccgggatgaggacacac

SEQ ID NO: 185704 - DNA, 25 bp, Probe Sequence
ctctctccccctttgacaggaaggg

SEQ ID NO: 185705 - DNA, 25 bp, Probe Sequence
ctctctccccgtggtgaatggatct

SEQ ID NO: 185706 - DNA, 25 bp, Probe Sequence
ctctctgaccagtttggagggcact

SEQ ID NO: 185707 - DNA, 25 bp, Probe Sequence
ctctcacctagactttggagagcag

SEQ ID NO: 185708 - DNA, 25 bp, Probe Sequence
ctctgactgtggttgccttgagaag

SEQ ID NO: 185709 - DNA, 25 bp, Probe Sequence
ctcgacatcgaggacccataagcag

SEQ ID NO: 185710 - DNA, 25 bp, Probe Sequence
ctctgagctccatgtcccagataaa

SEQ ID NO: 185711 - DNA, 25 bp, Probe Sequence
ctctcacttgtaccccactaaaagt

SEQ ID NO: 185712 - DNA, 25 bp, Probe Sequence
ctctctcttaagccccatttgaaag

SEQ ID NO: 185713 - DNA, 25 bp, Probe Sequence
ctctctttacttggactttgaacaa

SEQ ID NO: 185714 - DNA, 25 bp, Probe Sequence
cccttccatctacacttttgtgtac

SEQ ID NO: 185715 - DNA, 25 bp, Probe Sequence
ctcgttacctgaccgatgtcttttt

SEQ ID NO: 185716 - DNA, 25 bp, Probe Sequence
ctctgactactcagccttgttttcg

SEQ ID NO: 185717 - DNA, 25 bp, Probe Sequence
ctctactgatacatgtctgtgtttg

SEQ ID NO: 185718 - DNA, 25 bp, Probe Sequence
ctctgattgttaagctttccatctg

SEQ ID NO: 185719 - DNA, 25 bp, Probe Sequence
ctctgctttgtaaatttgccatcca

SEQ ID NO: 185720 - DNA, 25 bp, Probe Sequence
ctcgctctggattccatttgggtca

SEQ ID NO: 185721 - DNA, 25 bp, Probe Sequence
ctctcgcagttctgcattctgtcgg

SEQ ID NO: 185722 - DNA, 25 bp, Probe Sequence
ctctctgggctgtgatccattgggc

SEQ ID NO: 185723 - DNA, 25 bp, Probe Sequence
ctctcgggatgtgggctctagagcg

SEQ ID NO: 185724 - DNA, 25 bp, Probe Sequence
ctctcagtatgcgattggtctcaag

SEQ ID NO: 185725 - DNA, 25 bp, Probe Sequence
ctccaaacgttgcttagatgcttca

SEQ ID NO: 185726 - DNA, 25 bp, Probe Sequence
ctctctgtaggaaccttatgactta

SEQ ID NO: 185727 - DNA, 25 bp, Probe Sequence
ctccgtctcgagactttctacttga

SEQ ID NO: 185728 - DNA, 25 bp, Probe Sequence
ctccttcctactggtttagactaca

SEQ ID NO: 185729 - DNA, 25 bp, Probe Sequence
ctccgacactgagggtcttgtaaag

SEQ ID NO: 185730 - DNA, 25 bp, Probe Sequence
ctcgtgataagtgggactttcagaa

SEQ ID NO: 185731 - DNA, 25 bp, Probe Sequence
ctctggatgagttggtcctttcagc

SEQ ID NO: 185732 - DNA, 25 bp, Probe Sequence
ctctctggaagaggtgacgtccgca

SEQ ID NO: 185733 - DNA, 25 bp, Probe Sequence
ctccgtggaaggatcctcatccaca

SEQ ID NO: 185734 - DNA, 25 bp, Probe Sequence
ctctcagtttagttaccagcatgcc

SEQ ID NO: 185735 - DNA, 25 bp, Probe Sequence
ctctaattatagtggcagcatgccg

SEQ ID NO: 185736 - DNA, 25 bp, Probe Sequence
ctctacaaatagggctggctccagc

SEQ ID NO: 185737 - DNA, 25 bp, Probe Sequence
ctctcaacatatttccagtctacag

SEQ ID NO: 185738 - DNA, 25 bp, Probe Sequence
ctctcgacaatacccgttggcaagg

SEQ ID NO: 185739 - DNA, 25 bp, Probe Sequence
ctctctaaatgaccaaagttgggag

SEQ ID NO: 185740 - DNA, 25 bp, Probe Sequence
ctctcatcaaggctacaattgctgg

SEQ ID NO: 185741 - DNA, 25 bp, Probe Sequence
ctctcacccatgctgaacattatga

SEQ ID NO: 185742 - DNA, 25 bp, Probe Sequence
ctctcatccctgaggcacttagaga

SEQ ID NO: 185743 - DNA, 25 bp, Probe Sequence
ctctcaacactcagaccttcaactg

SEQ ID NO: 185744 - DNA, 25 bp, Probe Sequence
ctctctgagcaaaacacctgtaact

SEQ ID NO: 185745 - DNA, 25 bp, Probe Sequence
ctctctcacaagcatcaaggtatat

SEQ ID NO: 185746 - DNA, 25 bp, Probe Sequence
ctctctcactaggcaagaacttata

SEQ ID NO: 185747 - DNA, 25 bp, Probe Sequence
ctctctcctagacttaatgattaat

SEQ ID NO: 185748 - DNA, 25 bp, Probe Sequence
ctctctggggagtttcatttgcaag

SEQ ID NO: 185749 - DNA, 25 bp, Probe Sequence
ctctggcttgggcttacctcaagag

SEQ ID NO: 185750 - DNA, 25 bp, Probe Sequence
ctctggcttgggcttacctcaagag

SEQ ID NO: 185751 - DNA, 25 bp, Probe Sequence
ctcctcatggggcattacacttcaa

SEQ ID NO: 185752 - DNA, 25 bp, Probe Sequence
ctcctagggaggcatcaacttcctg

SEQ ID NO: 185753 - DNA, 25 bp, Probe Sequence
ctcctaatccaaccttatttgcctc

SEQ ID NO: 185754 - DNA, 25 bp, Probe Sequence
ctcctccagggacattgattttctc

SEQ ID NO: 185755 - DNA, 25 bp, Probe Sequence
ctcctctttagacatattttggccc

SEQ ID NO: 185756 - DNA, 25 bp, Probe Sequence
ctctcctttggtcagattattatgt

SEQ ID NO: 185757 - DNA, 25 bp, Probe Sequence
ctcccattttgttagcgtcagctag

SEQ ID NO: 185758 - DNA, 25 bp, Probe Sequence
ctctcgcatctatgtggtggacgtg

SEQ ID NO: 185759 - DNA, 25 bp, Probe Sequence
ctctgcgtctgatggaggagaactg

SEQ ID NO: 185760 - DNA, 25 bp, Probe Sequence
ctcggattgaaagtgtggagacagg

SEQ ID NO: 185761 - DNA, 25 bp, Probe Sequence
ctctgttgtccaggttggagtgcag

SEQ ID NO: 185762 - DNA, 25 bp, Probe Sequence
ctctgttgcccaggctggagtgcaa

SEQ ID NO: 185763 - DNA, 25 bp, Probe Sequence
ctctgtttcatgatgcatgggtcat

SEQ ID NO: 185764 - DNA, 25 bp, Probe Sequence
ctctgttccatgagcctgttgcagg

SEQ ID NO: 185765 - DNA, 25 bp, Probe Sequence
ctctgagtgccaagcgacgtggcgg

SEQ ID NO: 185766 - DNA, 25 bp, Probe Sequence
ctctgattggcaagcaggagggccg

SEQ ID NO: 185767 - DNA, 25 bp, Probe Sequence
ctctgcgctgaggacagggacgccc

SEQ ID NO: 185768 - DNA, 25 bp, Probe Sequence
ctctgcgctgaggacagggacgccc

SEQ ID NO: 185769 - DNA, 25 bp, Probe Sequence
ctctcctgcagtatgagtgaccaca

SEQ ID NO: 185770 - DNA, 25 bp, Probe Sequence
ctctctcctgcagtatgagtgacca

SEQ ID NO: 185771 - DNA, 25 bp, Probe Sequence
ctctctcccataagactgtgagcat

SEQ ID NO: 185772 - DNA, 25 bp, Probe Sequence
ctctcccttgagaagctgagtcttc

SEQ ID NO: 185773 - DNA, 25 bp, Probe Sequence
ctctcccataagactgtgagcatct

SEQ ID NO: 185774 - DNA, 25 bp, Probe Sequence
ctctgctccaagtcattgcttacta

SEQ ID NO: 185775 - DNA, 25 bp, Probe Sequence
ctctgccacaggtcagctatgtgac

SEQ ID NO: 185776 - DNA, 25 bp, Probe Sequence
ctctgagacagaagcccatgatgac

SEQ ID NO: 185777 - DNA, 25 bp, Probe Sequence
ctctgcaacagatgtgatctgatca

SEQ ID NO: 185778 - DNA, 25 bp, Probe Sequence
ctctgacacaattggatgctgtgga

SEQ ID NO: 185779 - DNA, 25 bp, Probe Sequence
ctctgtaaaataatctgggacgaca

SEQ ID NO: 185780 - DNA, 25 bp, Probe Sequence
ctctctaaatcttccttgtgaggat

SEQ ID NO: 185781 - DNA, 25 bp, Probe Sequence
ctctcccacattgtcttgctaaata

SEQ ID NO: 185782 - DNA, 25 bp, Probe Sequence
ctctcagtccttgttcttttgaagc

SEQ ID NO: 185783 - DNA, 25 bp, Probe Sequence
ctctcattcttgtattgccttttaa

SEQ ID NO: 185784 - DNA, 25 bp, Probe Sequence
ctctcaatttgcatatccagattta

SEQ ID NO: 185785 - DNA, 25 bp, Probe Sequence
ctgccaacttctaaccgcaatagtg

SEQ ID NO: 185786 - DNA, 25 bp, Probe Sequence
ctcccaactctaaagccaagcactt

SEQ ID NO: 185787 - DNA, 25 bp, Probe Sequence
ctctccggacatgaaccataaccat

SEQ ID NO: 185788 - DNA, 25 bp, Probe Sequence
ctctccagtggtgaaacgaagcaat

SEQ ID NO: 185789 - DNA, 25 bp, Probe Sequence
ctctacagcgttgcagaacatgaac

SEQ ID NO: 185790 - DNA, 25 bp, Probe Sequence
ctctgatgcagcttatacgaaataa

SEQ ID NO: 185791 - DNA, 25 bp, Probe Sequence
ctctcatcatgcaaattagccaatg

SEQ ID NO: 185792 - DNA, 25 bp, Probe Sequence
ctctgtcatctaccaagccagtgga

SEQ ID NO: 185793 - DNA, 25 bp, Probe Sequence
ctctgtctcttctaaaagcggaagc

SEQ ID NO: 185794 - DNA, 25 bp, Probe Sequence
ctctgagccttgcaaaacctgcaca

SEQ ID NO: 185795 - DNA, 25 bp, Probe Sequence
ctctgagctttgcatgttccactaa

SEQ ID NO: 185796 - DNA, 25 bp, Probe Sequence
ctctcagatttctttctcctataaa

SEQ ID NO: 185797 - DNA, 25 bp, Probe Sequence
ctctcagatcttcacttcacagata

SEQ ID NO: 185798 - DNA, 25 bp, Probe Sequence
ctctaagctctctacttactgtgag

SEQ ID NO: 185799 - DNA, 25 bp, Probe Sequence
ctctcaagccatgaccacactggag

SEQ ID NO: 185800 - DNA, 25 bp, Probe Sequence
ctctcattcctcacgtcactgagaa

SEQ ID NO: 185801 - DNA, 25 bp, Probe Sequence
ctctcctactggcagtacatgtacg

SEQ ID NO: 185802 - DNA, 25 bp, Probe Sequence
ctctcctcacgtgcagtaatcaacg

SEQ ID NO: 185803 - DNA, 25 bp, Probe Sequence
ctccttcagcttgcaaaccatactg

SEQ ID NO: 185804 - DNA, 25 bp, Probe Sequence
ctctcctacttggataactgtggta

SEQ ID NO: 185805 - DNA, 25 bp, Probe Sequence
ctctcggacatttatacctatggcc

SEQ ID NO: 185806 - DNA, 25 bp, Probe Sequence
ctctctggactttctccaaaggcac

SEQ ID NO: 185807 - DNA, 25 bp, Probe Sequence
ctctgctggtaattcctgaagaggc

SEQ ID NO: 185808 - DNA, 25 bp, Probe Sequence
ctctctttaaatgtgatagtctcag

SEQ ID NO: 185809 - DNA, 25 bp, Probe Sequence
ctctcttccaaatgtaagtgacagt

SEQ ID NO: 185810 - DNA, 25 bp, Probe Sequence
ctctctttgcccagttggagactgt

SEQ ID NO: 185811 - DNA, 25 bp, Probe Sequence
ctctctgatccagcccgggagagga

SEQ ID NO: 185812 - DNA, 25 bp, Probe Sequence
ctctcatcaactccactggggaagg

SEQ ID NO: 185813 - DNA, 25 bp, Probe Sequence
ctctcatcaactccactggggaaga

SEQ ID NO: 185814 - DNA, 25 bp, Probe Sequence
ctctctcagatcctatcctgtggaa

SEQ ID NO: 185815 - DNA, 25 bp, Probe Sequence
ctctctcgatccctacgatagacac

SEQ ID NO: 185816 - DNA, 25 bp, Probe Sequence
ctctccagtgcccgcagagatgagc

SEQ ID NO: 185817 - DNA, 25 bp, Probe Sequence
ctctgccctggtcgcataaatttgt

SEQ ID NO: 185818 - DNA, 25 bp, Probe Sequence
ctccccaggtcctaggcagtaggtt

SEQ ID NO: 185819 - DNA, 25 bp, Probe Sequence
ctcccaagaacctgctcctgcaggg

SEQ ID NO: 185820 - DNA, 25 bp, Probe Sequence
ctctccaaggagaacgctaccacgg

SEQ ID NO: 185821 - DNA, 25 bp, Probe Sequence
ctctccaaggagaacgctaccacgg

SEQ ID NO: 185822 - DNA, 25 bp, Probe Sequence
ctctccaaataggagcctcccatct

SEQ ID NO: 185823 - DNA, 25 bp, Probe Sequence
ctctccagaaacagcctccagaaga

SEQ ID NO: 185824 - DNA, 25 bp, Probe Sequence
ctctccaaaaatgcacccaactagc

SEQ ID NO: 185825 - DNA, 25 bp, Probe Sequence
ctctgctcaaaaaccacctgtaaaa

SEQ ID NO: 185826 - DNA, 25 bp, Probe Sequence
ctctaaggcctaccaccttcagaag

SEQ ID NO: 185827 - DNA, 25 bp, Probe Sequence
ctctaaggcctatattcacacacgt

SEQ ID NO: 185828 - DNA, 25 bp, Probe Sequence
ctcgcaaagttattcttccaccatg

SEQ ID NO: 185829 - DNA, 25 bp, Probe Sequence
ctcgcaacaaactatttgtcgcagg

SEQ ID NO: 185830 - DNA, 25 bp, Probe Sequence
ctctcaaatacacgtgatctggccc

SEQ ID NO: 185831 - DNA, 25 bp, Probe Sequence
ctctcagaaatcctgatgacgtctg

SEQ ID NO: 185832 - DNA, 25 bp, Probe Sequence
ctctcagccaccttgatagtcactg

SEQ ID NO: 185833 - DNA, 25 bp, Probe Sequence
ctctcagccaccttgatagtcactg

SEQ ID NO: 185834 - DNA, 25 bp, Probe Sequence
ctctcagccaccttgatagtcactg

SEQ ID NO: 185835 - DNA, 25 bp, Probe Sequence
ctctcggatcaggtgaagatcagtg

SEQ ID NO: 185836 - DNA, 25 bp, Probe Sequence
ctgatgtggtagggtaatcttgttt

SEQ ID NO: 185837 - DNA, 25 bp, Probe Sequence
ctctgggtgagaggctacagtgtgt

SEQ ID NO: 185838 - DNA, 25 bp, Probe Sequence
ctctcggcggaagtgatcgctgtgt

SEQ ID NO: 185839 - DNA, 25 bp, Probe Sequence
ctctcccaggattatgcacgattcg

SEQ ID NO: 185840 - DNA, 25 bp, Probe Sequence
ctctcaccacttatgcagcagatca

SEQ ID NO: 185841 - DNA, 25 bp, Probe Sequence
ctctcagctcctaaagcacaactgt

SEQ ID NO: 185842 - DNA, 25 bp, Probe Sequence
ctctcagcaagcatgtagtaactct

SEQ ID NO: 185843 - DNA, 25 bp, Probe Sequence
ctctgtgaaactgcagctgagcctc

SEQ ID NO: 185844 - DNA, 25 bp, Probe Sequence
ctcctgcaagaagagctgctgctcc

SEQ ID NO: 185845 - DNA, 25 bp, Probe Sequence
ctctcctacacagagcctctgtttg

SEQ ID NO: 185846 - DNA, 25 bp, Probe Sequence
ctctccatggagtgaccagctttgt

SEQ ID NO: 185847 - DNA, 25 bp, Probe Sequence
ctctctatggtgttatcctgtcctg

SEQ ID NO: 185848 - DNA, 25 bp, Probe Sequence
ctctcttactgtctgttgacctggt

SEQ ID NO: 185849 - DNA, 25 bp, Probe Sequence
ctccctgacttctgttgagttctgt

SEQ ID NO: 185850 - DNA, 25 bp, Probe Sequence
ctccctatttgccaggctttcattt

SEQ ID NO: 185851 - DNA, 25 bp, Probe Sequence
ctgccagttgttgaagttaatgtta

SEQ ID NO: 185852 - DNA, 25 bp, Probe Sequence
ctgctgtgctttattagtaaaattg

SEQ ID NO: 185853 - DNA, 25 bp, Probe Sequence
ctctgtgtctgttgttggatccaaa

SEQ ID NO: 185854 - DNA, 25 bp, Probe Sequence
ctctgcaccgtactgtggaaaagaa

SEQ ID NO: 185855 - DNA, 25 bp, Probe Sequence
ctcccaagtagtaggcaacacagat

SEQ ID NO: 185856 - DNA, 25 bp, Probe Sequence
ctctccacgattctgtgcatcaaca

SEQ ID NO: 185857 - DNA, 25 bp, Probe Sequence
ctctgctcatgggtggctgtgacaa

SEQ ID NO: 185858 - DNA, 25 bp, Probe Sequence
ctctcgtgggagacgcaggcacaac

SEQ ID NO: 185859 - DNA, 25 bp, Probe Sequence
ctctctgtggtccagcgagagccgg

SEQ ID NO: 185860 - DNA, 25 bp, Probe Sequence
ctcctggttcaacgaggccattgac

SEQ ID NO: 185861 - DNA, 25 bp, Probe Sequence
ctcctgtttctcagaggatttatca

SEQ ID NO: 185862 - DNA, 25 bp, Probe Sequence
ctccctttctcatgtttttataaat

SEQ ID NO: 185863 - DNA, 25 bp, Probe Sequence
ctcctcccccattttgatgttaagg

SEQ ID NO: 185864 - DNA, 25 bp, Probe Sequence
ctcctgccccagaaggttgtttagt

SEQ ID NO: 185865 - DNA, 25 bp, Probe Sequence
ctcctgccttgctacactaatgttt

SEQ ID NO: 185866 - DNA, 25 bp, Probe Sequence
ctcctctgcttatcgtattttatca

SEQ ID NO: 185867 - DNA, 25 bp, Probe Sequence
ctcctctgcttatcgtattttatca

SEQ ID NO: 185868 - DNA, 25 bp, Probe Sequence
ctctctctttacttggactttgaac

SEQ ID NO: 185869 - DNA, 25 bp, Probe Sequence
ctcccatcttagtcttaccttgagg

SEQ ID NO: 185870 - DNA, 25 bp, Probe Sequence
ctctctccctagtctaagtcttgat

SEQ ID NO: 185871 - DNA, 25 bp, Probe Sequence
ctctctgagcctattctggtttgag

SEQ ID NO: 185872 - DNA, 25 bp, Probe Sequence
ctctctcagcatgtttcagaagttc

SEQ ID NO: 185873 - DNA, 25 bp, Probe Sequence
ctcctagctgagacttacacgttca

SEQ ID NO: 185874 - DNA, 25 bp, Probe Sequence
ctccaactggtctggcaactacttc

SEQ ID NO: 185875 - DNA, 25 bp, Probe Sequence
ctccaactgtttctcagacttcttt

SEQ ID NO: 185876 - DNA, 25 bp, Probe Sequence
ctcccaaattctctagtttatagat

SEQ ID NO: 185877 - DNA, 25 bp, Probe Sequence
ctcccaaaacgttgcgattataagt

SEQ ID NO: 185878 - DNA, 25 bp, Probe Sequence
ctctccaaaagcctactgttaacca

SEQ ID NO: 185879 - DNA, 25 bp, Probe Sequence
ctctcggaagtcacaccttatacca

SEQ ID NO: 185880 - DNA, 25 bp, Probe Sequence
ctccggaaccaagcgctgaatttat

SEQ ID NO: 185881 - DNA, 25 bp, Probe Sequence
ctcggagaacgacgccctgtatgag

SEQ ID NO: 185882 - DNA, 25 bp, Probe Sequence
ctctggaatagctggctttattggc

SEQ ID NO: 185883 - DNA, 25 bp, Probe Sequence
ctctggaatatatgtggccttctac

SEQ ID NO: 185884 - DNA, 25 bp, Probe Sequence
ctctggaagcttactgttctgctaa

SEQ ID NO: 185885 - DNA, 25 bp, Probe Sequence
ctctgaggcctgaagttctgtgata

SEQ ID NO: 185886 - DNA, 25 bp, Probe Sequence
ctctgatcgccgatcacctctgaga

SEQ ID NO: 185887 - DNA, 25 bp, Probe Sequence
ctctgatcgccgatcacctctgaga

SEQ ID NO: 185888 - DNA, 25 bp, Probe Sequence
ctcgacagcactttcaagcctggac

SEQ ID NO: 185889 - DNA, 25 bp, Probe Sequence
ctctgaagactctgcacccagattt

SEQ ID NO: 185890 - DNA, 25 bp, Probe Sequence
ctctgagaacgatctcccagaatgg

SEQ ID NO: 185891 - DNA, 25 bp, Probe Sequence
ccagaaaagcccaccaactctggct

SEQ ID NO: 185892 - DNA, 25 bp, Probe Sequence
ctccagtaacaccttctaacctgtg

SEQ ID NO: 185893 - DNA, 25 bp, Probe Sequence
ctcctcaaagaagcctgcaaccagt

SEQ ID NO: 185894 - DNA, 25 bp, Probe Sequence
ctcccagtaggagctctcaaacaca

SEQ ID NO: 185895 - DNA, 25 bp, Probe Sequence
ctctccagatatggtcgctgctcaa

SEQ ID NO: 185896 - DNA, 25 bp, Probe Sequence
ctctgccacatgacagtcctttaat

SEQ ID NO: 185897 - DNA, 25 bp, Probe Sequence
ctctgacctgtgatcatgtttcagg

SEQ ID NO: 185898 - DNA, 25 bp, Probe Sequence
ctctctgcctggatcccggcagaag

SEQ ID NO: 185899 - DNA, 25 bp, Probe Sequence
ctctctcctgacaccacagataaat

SEQ ID NO: 185900 - DNA, 25 bp, Probe Sequence
ctctgtccagattctccacattgac

SEQ ID NO: 185901 - DNA, 25 bp, Probe Sequence
ctctgctggcagatgatccactaga

SEQ ID NO: 185902 - DNA, 25 bp, Probe Sequence
ctctgtggcttttcctgttattgtc

SEQ ID NO: 185903 - DNA, 25 bp, Probe Sequence
ctctgtggcttttcctgttattgtc

SEQ ID NO: 185904 - DNA, 25 bp, Probe Sequence
ctctgtggcttttcctgttattgtc

SEQ ID NO: 185905 - DNA, 25 bp, Probe Sequence
ctctgtggtatctcacgtttctgta

SEQ ID NO: 185906 - DNA, 25 bp, Probe Sequence
ctctgttgaggctcactatttttag

SEQ ID NO: 185907 - DNA, 25 bp, Probe Sequence
ctctgttgcaatgtaaattagtcca

SEQ ID NO: 185908 - DNA, 25 bp, Probe Sequence
ctctgttcaatcatgggtgtattca

SEQ ID NO: 185909 - DNA, 25 bp, Probe Sequence
ctctgttcctcactgtggggattac

SEQ ID NO: 185910 - DNA, 25 bp, Probe Sequence
ctctgttcctcactgtggggattac

SEQ ID NO: 185911 - DNA, 25 bp, Probe Sequence
ctctgtgtcttgactgtgggcaagt

SEQ ID NO: 185912 - DNA, 25 bp, Probe Sequence
ctctgttgtctgcctgtgtgacaca

SEQ ID NO: 185913 - DNA, 25 bp, Probe Sequence
ctcgttgcactgctgagagcaagat

SEQ ID NO: 185914 - DNA, 25 bp, Probe Sequence
ctctctagcctgcctgggaatgaat

SEQ ID NO: 185915 - DNA, 25 bp, Probe Sequence
ctctctggctgccacttggttatgt

SEQ ID NO: 185916 - DNA, 25 bp, Probe Sequence
ctctctcgatctgcttgggatgatg

SEQ ID NO: 185917 - DNA, 25 bp, Probe Sequence
ctctctggctcaggtgtgggtggga

SEQ ID NO: 185918 - DNA, 25 bp, Probe Sequence
ctctctggctcaggtgtgggtggga

SEQ ID NO: 185919 - DNA, 25 bp, Probe Sequence
ctctctggctcaggtgtgggtggga

SEQ ID NO: 185920 - DNA, 25 bp, Probe Sequence
ctccgtctccgtggcagtggaaaga

SEQ ID NO: 185921 - DNA, 25 bp, Probe Sequence
ctcgagatcttcgcgggaagaagaa

SEQ ID NO: 185922 - DNA, 25 bp, Probe Sequence
ccttgaattcctgggtacaaggaat

SEQ ID NO: 185923 - DNA, 25 bp, Probe Sequence
cccgattgctcctgttaaaggaact

SEQ ID NO: 185924 - DNA, 25 bp, Probe Sequence
ctcccaatcctctcttaaaaaagtg

SEQ ID NO: 185925 - DNA, 25 bp, Probe Sequence
ctcccgtttcaatgtccaataaatg

SEQ ID NO: 185926 - DNA, 25 bp, Probe Sequence
ctgcccctttgccaggttaataaag

SEQ ID NO: 185927 - DNA, 25 bp, Probe Sequence
ctctctcctttacgagacgaaaagg

SEQ ID NO: 185928 - DNA, 25 bp, Probe Sequence
ctctctccctttggaaacagtcaag

SEQ ID NO: 185929 - DNA, 25 bp, Probe Sequence
ctctctctctctcagacacagaagt

SEQ ID NO: 185930 - DNA, 25 bp, Probe Sequence
ctctctcactctgaaccatgaagct

SEQ ID NO: 185931 - DNA, 25 bp, Probe Sequence
ctcctccgtgataacgcgagcgttt

SEQ ID NO: 185932 - DNA, 25 bp, Probe Sequence
ctcgtgcgtgtgatccagcgagcgg

SEQ ID NO: 185933 - DNA, 25 bp, Probe Sequence
ctcggcaattgttgcctcggcagct

SEQ ID NO: 185934 - DNA, 25 bp, Probe Sequence
ctcggcaattgttgcctcggcagct

SEQ ID NO: 185935 - DNA, 25 bp, Probe Sequence
ctcctacttgattgcacacggtttc

SEQ ID NO: 185936 - DNA, 25 bp, Probe Sequence
ctcgcatatgtatgacatcctgggt

SEQ ID NO: 185937 - DNA, 25 bp, Probe Sequence
ctctcgatgctaatcacacaggggc

SEQ ID NO: 185938 - DNA, 25 bp, Probe Sequence
ctctctggtcagacatcgctggaaa

SEQ ID NO: 185939 - DNA, 25 bp, Probe Sequence
ctctctgcaccgtactgtggaaaag

SEQ ID NO: 185940 - DNA, 25 bp, Probe Sequence
ctctctgtcaagtttggaaacgatg

SEQ ID NO: 185941 - DNA, 25 bp, Probe Sequence
ctctctgtagatgctaggatatata

SEQ ID NO: 185942 - DNA, 25 bp, Probe Sequence
ctctgctgtgactgcagggcatatt

SEQ ID NO: 185943 - DNA, 25 bp, Probe Sequence
ctctctggaacttgccatcatcatt

SEQ ID NO: 185944 - DNA, 25 bp, Probe Sequence
ctctgctgcgtaggtctacatctta

SEQ ID NO: 185945 - DNA, 25 bp, Probe Sequence
ctctggctcgatggttactcggtga

SEQ ID NO: 185946 - DNA, 25 bp, Probe Sequence
ctctggtctgttgtatctctagtca

SEQ ID NO: 185947 - DNA, 25 bp, Probe Sequence
ctctcctcttcaaaatatgctatat

SEQ ID NO: 185948 - DNA, 25 bp, Probe Sequence
ctctccgcttgccaaaataaccgaa

SEQ ID NO: 185949 - DNA, 25 bp, Probe Sequence
ctctcctgtctgcaacctaagtgca

SEQ ID NO: 185950 - DNA, 25 bp, Probe Sequence
ctctcccttatagtcctaagccaag

SEQ ID NO: 185951 - DNA, 25 bp, Probe Sequence
ctccctctattactgtttcaccaga

SEQ ID NO: 185952 - DNA, 25 bp, Probe Sequence
ctccctctattactgtttcaccaga

SEQ ID NO: 185953 - DNA, 25 bp, Probe Sequence
ctccctctattactgtttcaccaga

SEQ ID NO: 185954 - DNA, 25 bp, Probe Sequence
ctcctcactattgtttacccaaagg

SEQ ID NO: 185955 - DNA, 25 bp, Probe Sequence
ctccaactcagtgtttaaggcacac

SEQ ID NO: 185956 - DNA, 25 bp, Probe Sequence
ccctgctccagtagttcgaggacca

SEQ ID NO: 185957 - DNA, 25 bp, Probe Sequence
ctctctgctctctttgataaaggca

SEQ ID NO: 185958 - DNA, 25 bp, Probe Sequence
ctctgctgctctggatggctgaagg

SEQ ID NO: 185959 - DNA, 25 bp, Probe Sequence
ctctcgatctgcttgggatgatgga

SEQ ID NO: 185960 - DNA, 25 bp, Probe Sequence
ctctgtgaagcatggggggagggaa

SEQ ID NO: 185961 - DNA, 25 bp, Probe Sequence
ctcgtaccttgtggatgtgccggga

SEQ ID NO: 185962 - DNA, 25 bp, Probe Sequence
ctcgtaatgcctcttgacttgggca

SEQ ID NO: 185963 - DNA, 25 bp, Probe Sequence
ctctgctttctcctttaattgtaaa

SEQ ID NO: 185964 - DNA, 25 bp, Probe Sequence
ctctgtggtcccttcaaagttgtta

SEQ ID NO: 185965 - DNA, 25 bp, Probe Sequence
ctctgtgtatgcacgtaaagtttgt

SEQ ID NO: 185966 - DNA, 25 bp, Probe Sequence
ctctctgagtgcatcatgtacaagg

SEQ ID NO: 185967 - DNA, 25 bp, Probe Sequence
ctcctgggcccaagactcagggaaa

SEQ ID NO: 185968 - DNA, 25 bp, Probe Sequence
ctgccgcaacccagacggggatgag

SEQ ID NO: 185969 - DNA, 25 bp, Probe Sequence
ctctccaaactatgccaaggcggcg

SEQ ID NO: 185970 - DNA, 25 bp, Probe Sequence
ctctccgacccatgcagaaataggc

SEQ ID NO: 185971 - DNA, 25 bp, Probe Sequence
ctctcctgaccctgaagaactgtgt

SEQ ID NO: 185972 - DNA, 25 bp, Probe Sequence
ctctcctgaacctttaggcttgtct

SEQ ID NO: 185973 - DNA, 25 bp, Probe Sequence
ctctccgcaaactcaaggcatcatc

SEQ ID NO: 185974 - DNA, 25 bp, Probe Sequence
ctctcccacaaaaaacggcagccta

SEQ ID NO: 185975 - DNA, 25 bp, Probe Sequence
ctctcccctgtaacaagccagagcc

SEQ ID NO: 185976 - DNA, 25 bp, Probe Sequence
ctccccgctggcaccagtcagcggg

SEQ ID NO: 185977 - DNA, 25 bp, Probe Sequence
ctctccccctgagccattgtggggg

SEQ ID NO: 185978 - DNA, 25 bp, Probe Sequence
ctctcgctctggattccatttgggt

SEQ ID NO: 185979 - DNA, 25 bp, Probe Sequence
ctctcgattgccgtttcaattgtgg

SEQ ID NO: 185980 - DNA, 25 bp, Probe Sequence
ctccctattcctgatgcaaatgtct

SEQ ID NO: 185981 - DNA, 25 bp, Probe Sequence
ctccccaacctaattaggtcattca

SEQ ID NO: 185982 - DNA, 25 bp, Probe Sequence
ctcccacaggcagctttaaccatta

SEQ ID NO: 185983 - DNA, 25 bp, Probe Sequence
ctcccacaggcagctttaaccatta

SEQ ID NO: 185984 - DNA, 25 bp, Probe Sequence
ctccagcaagggattcgggcgaaga

SEQ ID NO: 185985 - DNA, 25 bp, Probe Sequence
ctcccaaggctgcgtctggaggggc

SEQ ID NO: 185986 - DNA, 25 bp, Probe Sequence
ctctccagggagcgattaggggcag

SEQ ID NO: 185987 - DNA, 25 bp, Probe Sequence
ctctcgcgtgttggagagaaggggc

SEQ ID NO: 185988 - DNA, 25 bp, Probe Sequence
ctctccagtgtgtgtaacagggtca

SEQ ID NO: 185989 - DNA, 25 bp, Probe Sequence
ctctccatgggatgatgacagcggc

SEQ ID NO: 185990 - DNA, 25 bp, Probe Sequence
ctctcgcgagagcgtatctgcgtgt

SEQ ID NO: 185991 - DNA, 25 bp, Probe Sequence
ctctcggagtccttggtggttgaac

SEQ ID NO: 185992 - DNA, 25 bp, Probe Sequence
ctcctgtaatcctgggggtgtaact

SEQ ID NO: 185993 - DNA, 25 bp, Probe Sequence
gctttcattacctggttggttaaat

SEQ ID NO: 185994 - DNA, 25 bp, Probe Sequence
gcttccttagtctgggcaactaaaa

SEQ ID NO: 185995 - DNA, 25 bp, Probe Sequence
cgaccccagctcggggaatttcact

SEQ ID NO: 185996 - DNA, 25 bp, Probe Sequence
cgaccactccctgtggagggtcaat

SEQ ID NO: 185997 - DNA, 25 bp, Probe Sequence
ctcccaaccctggcttggggtcaag

SEQ ID NO: 185998 - DNA, 25 bp, Probe Sequence
ctcccagacaccggcgtgggaatgt

SEQ ID NO: 185999 - DNA, 25 bp, Probe Sequence
ctctccaaccatgtctggcgttgag

SEQ ID NO: 186000 - DNA, 25 bp, Probe Sequence
ctctccacctatatgctatgggtag

SEQ ID NO: 186001 - DNA, 25 bp, Probe Sequence
ctctccatctgcattagtattttaa

SEQ ID NO: 186002 - DNA, 25 bp, Probe Sequence
ctcccaggctataagaattccccac

SEQ ID NO: 186003 - DNA, 25 bp, Probe Sequence
ctccctagcataaatttcccaaaca

SEQ ID NO: 186004 - DNA, 25 bp, Probe Sequence
ctcccgaattactcaccgagacaca

SEQ ID NO: 186005 - DNA, 25 bp, Probe Sequence
ctcctcagattggaacccccaaatc

SEQ ID NO: 186006 - DNA, 25 bp, Probe Sequence
ctcctctgttctaaccacttcagaa

SEQ ID NO: 186007 - DNA, 25 bp, Probe Sequence
ctcctccttgtacctctggtagaat

SEQ ID NO: 186008 - DNA, 25 bp, Probe Sequence
ctcctcctgagtaccatcggaaagc

SEQ ID NO: 186009 - DNA, 25 bp, Probe Sequence
ctctcccgtggatgacggatgagga

SEQ ID NO: 186010 - DNA, 25 bp, Probe Sequence
ctctcccagtgtaaatctggagcca

SEQ ID NO: 186011 - DNA, 25 bp, Probe Sequence
ctctgcctggtgatagactgaagcc

SEQ ID NO: 186012 - DNA, 25 bp, Probe Sequence
ctctcctggtgcagagttgcaagca

SEQ ID NO: 186013 - DNA, 25 bp, Probe Sequence
ctctccgtgatctgcaatggtcagc

SEQ ID NO: 186014 - DNA, 25 bp, Probe Sequence
ctctccctgtcttaaagtcagctga

SEQ ID NO: 186015 - DNA, 25 bp, Probe Sequence
ctctgcctttttactatacagcata

SEQ ID NO: 186016 - DNA, 25 bp, Probe Sequence
ctctcctgatgcatttgtaaacaag

SEQ ID NO: 186017 - DNA, 25 bp, Probe Sequence
ctctgccctgctttttagaactgca

SEQ ID NO: 186018 - DNA, 25 bp, Probe Sequence
ctctccctgccacattgagatgatc

SEQ ID NO: 186019 - DNA, 25 bp, Probe Sequence
ctctccaattccaaggagttctcag

SEQ ID NO: 186020 - DNA, 25 bp, Probe Sequence
ctctccagtgtccaggggcttggag

SEQ ID NO: 186021 - DNA, 25 bp, Probe Sequence
ctctccaactgctggggcaggtcgt

SEQ ID NO: 186022 - DNA, 25 bp, Probe Sequence
ctgccaaggctgtgggcaaggtcat

SEQ ID NO: 186023 - DNA, 25 bp, Probe Sequence
ctgccagatcgtcagcgctaaggga

SEQ ID NO: 186024 - DNA, 25 bp, Probe Sequence
ctccgttggcttctgaactggaatt

SEQ ID NO: 186025 - DNA, 25 bp, Probe Sequence
ctcggttccatttgtaatcagtaat

SEQ ID NO: 186026 - DNA, 25 bp, Probe Sequence
ctccgcttgccaaaataaccgaagg

SEQ ID NO: 186027 - DNA, 25 bp, Probe Sequence
ctccagattccagccataaaccaat

SEQ ID NO: 186028 - DNA, 25 bp, Probe Sequence
ctcgagaacacatccaaagtccctg

SEQ ID NO: 186029 - DNA, 25 bp, Probe Sequence
ctctggatacatctcctgacagtac

SEQ ID NO: 186030 - DNA, 25 bp, Probe Sequence
ctctgcttacatctcctggataaat

SEQ ID NO: 186031 - DNA, 25 bp, Probe Sequence
ctctcctgcatctcctatggaaaag

SEQ ID NO: 186032 - DNA, 25 bp, Probe Sequence
ctctgccagcctacaggaggaaaag

SEQ ID NO: 186033 - DNA, 25 bp, Probe Sequence
ctctgccagcctacaggaggaaaag

SEQ ID NO: 186034 - DNA, 25 bp, Probe Sequence
ctctgccagcagatgggaggatata

SEQ ID NO: 186035 - DNA, 25 bp, Probe Sequence
ctctgctccaaatggagagtgtagc

SEQ ID NO: 186036 - DNA, 25 bp, Probe Sequence
ctctgcagctcaaagatgtgggttc

SEQ ID NO: 186037 - DNA, 25 bp, Probe Sequence
ctctgcaggtgcagatgcaggcagt

SEQ ID NO: 186038 - DNA, 25 bp, Probe Sequence
ctctgcagtggacataagcattggg

SEQ ID NO: 186039 - DNA, 25 bp, Probe Sequence
ctctgcaggagctgttagcttcagg

SEQ ID NO: 186040 - DNA, 25 bp, Probe Sequence
ctctgaggcgtgaggactcgcagtc

SEQ ID NO: 186041 - DNA, 25 bp, Probe Sequence
ctctgagatcgaacggactgtgaat

SEQ ID NO: 186042 - DNA, 25 bp, Probe Sequence
ctctgaatcctaagggctggtctct

SEQ ID NO: 186043 - DNA, 25 bp, Probe Sequence
ctctggacctaatagctgttcctta

SEQ ID NO: 186044 - DNA, 25 bp, Probe Sequence
ctctgcgcactctgaaagtttgctc

SEQ ID NO: 186045 - DNA, 25 bp, Probe Sequence
ctctgctgattctagggaactatcc

SEQ ID NO: 186046 - DNA, 25 bp, Probe Sequence
ctctgctgattgtgatgtacctcag

SEQ ID NO: 186047 - DNA, 25 bp, Probe Sequence
ctctgctgggttggctgacccaggg

SEQ ID NO: 186048 - DNA, 25 bp, Probe Sequence
ctctgtgtgcgaatggtaccagcgt

SEQ ID NO: 186049 - DNA, 25 bp, Probe Sequence
ctcggctgtattaatcacgcgatgt

SEQ ID NO: 186050 - DNA, 25 bp, Probe Sequence
ctctggtgtagctgatgatccgaat

SEQ ID NO: 186051 - DNA, 25 bp, Probe Sequence
ctctgccgtctctggatcggaattt

SEQ ID NO: 186052 - DNA, 25 bp, Probe Sequence
ctctccagcctctgagaaccagaat

SEQ ID NO: 186053 - DNA, 25 bp, Probe Sequence
ctctccagccagcctagaaagcaaa

SEQ ID NO: 186054 - DNA, 25 bp, Probe Sequence
ctctgccccagcctggagaagcaac

SEQ ID NO: 186055 - DNA, 25 bp, Probe Sequence
ctctgccccagcctggagaagcaac

SEQ ID NO: 186056 - DNA, 25 bp, Probe Sequence
ctctgcgctccgacggaggcacgag

SEQ ID NO: 186057 - DNA, 25 bp, Probe Sequence
ctctccagcaagaggctagcactga

SEQ ID NO: 186058 - DNA, 25 bp, Probe Sequence
ctctgccaccagagagcgcaggctg

SEQ ID NO: 186059 - DNA, 25 bp, Probe Sequence
ctctccagccaacatgcaaggctgc

SEQ ID NO: 186060 - DNA, 25 bp, Probe Sequence
ctctccagtcaagtagcgaagctcc

SEQ ID NO: 186061 - DNA, 25 bp, Probe Sequence
ctctgccgtaactggaatcttcata

SEQ ID NO: 186062 - DNA, 25 bp, Probe Sequence
ctctgctttgagtcaaggggcttca

SEQ ID NO: 186063 - DNA, 25 bp, Probe Sequence
ctctgcactgggtagagctgggcct

SEQ ID NO: 186064 - DNA, 25 bp, Probe Sequence
ctcgcacacacgcagagttctgctc

SEQ ID NO: 186065 - DNA, 25 bp, Probe Sequence
ctctgccaccaatatgtatcttcat

SEQ ID NO: 186066 - DNA, 25 bp, Probe Sequence
ctcccacactaacttgtgcattgac

SEQ ID NO: 186067 - DNA, 25 bp, Probe Sequence
ctcccaccgaaccttgatttcaagg

SEQ ID NO: 186068 - DNA, 25 bp, Probe Sequence
ctcggaggggagcttgaactagggg

SEQ ID NO: 186069 - DNA, 25 bp, Probe Sequence
ctctgggggggccctgagagggaag

SEQ ID NO: 186070 - DNA, 25 bp, Probe Sequence
ctccggagaggagcttcaggggaag

SEQ ID NO: 186071 - DNA, 25 bp, Probe Sequence
ctccgggaacacacagggtggcaca

SEQ ID NO: 186072 - DNA, 25 bp, Probe Sequence
ctccgggaacacacagggtggcaca

SEQ ID NO: 186073 - DNA, 25 bp, Probe Sequence
ctccgggaacacacagggtggcaca

SEQ ID NO: 186074 - DNA, 25 bp, Probe Sequence
ctccaaagccaataaagtgatacac

SEQ ID NO: 186075 - DNA, 25 bp, Probe Sequence
ctctccaaagccaataaagtgatac

SEQ ID NO: 186076 - DNA, 25 bp, Probe Sequence
cggccttcacgcataaaggcagtcg

SEQ ID NO: 186077 - DNA, 25 bp, Probe Sequence
ctcgccttacacatgaagaggcatt

SEQ ID NO: 186078 - DNA, 25 bp, Probe Sequence
ctcccgtagcacactataacatctg

SEQ ID NO: 186079 - DNA, 25 bp, Probe Sequence
ctcccctcaacgctatattttgaca

SEQ ID NO: 186080 - DNA, 25 bp, Probe Sequence
ctcctttatcccctgtatttagtca

SEQ ID NO: 186081 - DNA, 25 bp, Probe Sequence
ctcgattttttctgaatcataatta

SEQ ID NO: 186082 - DNA, 25 bp, Probe Sequence
ctcgactgctttctaaatctcagtg

SEQ ID NO: 186083 - DNA, 25 bp, Probe Sequence
ctctgccctatttgaaagtctcagg

SEQ ID NO: 186084 - DNA, 25 bp, Probe Sequence
ctctgctcctatcagggttgctaaa

SEQ ID NO: 186085 - DNA, 25 bp, Probe Sequence
ctctgcttctcttagacgctttaaa

SEQ ID NO: 186086 - DNA, 25 bp, Probe Sequence
ctctgcttgctcaattgatcatgac

SEQ ID NO: 186087 - DNA, 25 bp, Probe Sequence
ctctgctcatctacacatataaaca

SEQ ID NO: 186088 - DNA, 25 bp, Probe Sequence
ctcgcatctcgtgttatgccacaac

SEQ ID NO: 186089 - DNA, 25 bp, Probe Sequence
ctctgcaccgtggctaaggcaaggg

SEQ ID NO: 186090 - DNA, 25 bp, Probe Sequence
ctctgcaccgtggctaaggcaaggg

SEQ ID NO: 186091 - DNA, 25 bp, Probe Sequence
ctcgcccgtcacaaagagcttcaac

SEQ ID NO: 186092 - DNA, 25 bp, Probe Sequence
ctcccaccccattgaagtccaaggg

SEQ ID NO: 186093 - DNA, 25 bp, Probe Sequence
ctcccacaaccctgagaccaagaag

SEQ ID NO: 186094 - DNA, 25 bp, Probe Sequence
ctcccgggcccatgatggccataga

SEQ ID NO: 186095 - DNA, 25 bp, Probe Sequence
ctcggccggtgctttgatggcacat

SEQ ID NO: 186096 - DNA, 25 bp, Probe Sequence
ctctggcctgaggtattgtgaagat

SEQ ID NO: 186097 - DNA, 25 bp, Probe Sequence
ctctgggctgctggaataggacact

SEQ ID NO: 186098 - DNA, 25 bp, Probe Sequence
ctctggcgctcagactcaaacatct

SEQ ID NO: 186099 - DNA, 25 bp, Probe Sequence
ctctggagccattagtcaaagcaca

SEQ ID NO: 186100 - DNA, 25 bp, Probe Sequence
ctctgctgagccacaatccaagaac

SEQ ID NO: 186101 - DNA, 25 bp, Probe Sequence
ctctgctggtcttcaattaccaaga

SEQ ID NO: 186102 - DNA, 25 bp, Probe Sequence
ctctgttgagtacatatactgacag

SEQ ID NO: 186103 - DNA, 25 bp, Probe Sequence
ctctgagagactacttatgaataag

SEQ ID NO: 186104 - DNA, 25 bp, Probe Sequence
ctctgcatgcagatttgttcacaaa

SEQ ID NO: 186105 - DNA, 25 bp, Probe Sequence
ctctggttttccatcaaatcaagga

SEQ ID NO: 186106 - DNA, 25 bp, Probe Sequence
ctctggttagaccttgattgatgca

SEQ ID NO: 186107 - DNA, 25 bp, Probe Sequence
ctctgtgttagatcttgtgctcaat

SEQ ID NO: 186108 - DNA, 25 bp, Probe Sequence
ctctgtggataagcttgtcattcag

SEQ ID NO: 186109 - DNA, 25 bp, Probe Sequence
ctctgtgtattgctctttgaatcga

SEQ ID NO: 186110 - DNA, 25 bp, Probe Sequence
ctctgcttagtctcaaggtatggaa

SEQ ID NO: 186111 - DNA, 25 bp, Probe Sequence
ctctgcaaagtccaccagtctttaa

SEQ ID NO: 186112 - DNA, 25 bp, Probe Sequence
ctccaccgcttagagatttgggggg

SEQ ID NO: 186113 - DNA, 25 bp, Probe Sequence
ctccccgtacagctgtctaagggtt

SEQ ID NO: 186114 - DNA, 25 bp, Probe Sequence
ctcccacggacacaccatgataagg

SEQ ID NO: 186115 - DNA, 25 bp, Probe Sequence
ctcccctggggcacagagatatatt

SEQ ID NO: 186116 - DNA, 25 bp, Probe Sequence
cccctggcaaccacaaatctttcca

SEQ ID NO: 186117 - DNA, 25 bp, Probe Sequence
ccctacctcacagctgaaactttaa

SEQ ID NO: 186118 - DNA, 25 bp, Probe Sequence
ccctacctcacagctgaaactttaa

SEQ ID NO: 186119 - DNA, 25 bp, Probe Sequence
ccctacctcacagctgaaactttaa

SEQ ID NO: 186120 - DNA, 25 bp, Probe Sequence
ccctacctcacagctgaaactttaa

SEQ ID NO: 186121 - DNA, 25 bp, Probe Sequence
ccctacctcacagctgaaactttaa

SEQ ID NO: 186122 - DNA, 25 bp, Probe Sequence
ccctacctcacagctgaaactttaa

SEQ ID NO: 186123 - DNA, 25 bp, Probe Sequence
ctgcccccgagctcgaaataaaaca

SEQ ID NO: 186124 - DNA, 25 bp, Probe Sequence
ctgcccccgagctcgaaataaaaca

SEQ ID NO: 186125 - DNA, 25 bp, Probe Sequence
ctgccctctccctgaaataaagaac

SEQ ID NO: 186126 - DNA, 25 bp, Probe Sequence
ctgccttgtctgcaccaaaaacaaa

SEQ ID NO: 186127 - DNA, 25 bp, Probe Sequence
ctccgtggttaccaaatcggccaag

SEQ ID NO: 186128 - DNA, 25 bp, Probe Sequence
cccaaggactttcttttgccaagcg

SEQ ID NO: 186129 - DNA, 25 bp, Probe Sequence
ctccaagggtttcgactggtccagc

SEQ ID NO: 186130 - DNA, 25 bp, Probe Sequence
ctccaagggtttcgactggtccagc

SEQ ID NO: 186131 - DNA, 25 bp, Probe Sequence
ctcctagtttagacaactggtaagc

SEQ ID NO: 186132 - DNA, 25 bp, Probe Sequence
ctgttttttatgataaggtcaagat

SEQ ID NO: 186133 - DNA, 25 bp, Probe Sequence
ctgaatcgtttcatgtaagaatcca

SEQ ID NO: 186134 - DNA, 25 bp, Probe Sequence
ctgaagtgctctgtaatcgaaatcc

SEQ ID NO: 186135 - DNA, 25 bp, Probe Sequence
cgcagagtcctaaagaagaacccac

SEQ ID NO: 186136 - DNA, 25 bp, Probe Sequence
cggacccatattttccatagccaac

SEQ ID NO: 186137 - DNA, 25 bp, Probe Sequence
ctgtccccattatgacttagtccct

SEQ ID NO: 186138 - DNA, 25 bp, Probe Sequence
ctccccctctaagaggaggatcctg

SEQ ID NO: 186139 - DNA, 25 bp, Probe Sequence
ctcccccttacgcaatggcgtagct

SEQ ID NO: 186140 - DNA, 25 bp, Probe Sequence
ctcctaactgtcagggtggggagct

SEQ ID NO: 186141 - DNA, 25 bp, Probe Sequence
ctcctgggtaaggggcggaggactg

SEQ ID NO: 186142 - DNA, 25 bp, Probe Sequence
ctcctggggaacagctggggcgaag

SEQ ID NO: 186143 - DNA, 25 bp, Probe Sequence
ctcctgccgggtttcagggggacag

SEQ ID NO: 186144 - DNA, 25 bp, Probe Sequence
ctcccacgagggccacacgggagtc

SEQ ID NO: 186145 - DNA, 25 bp, Probe Sequence
ctcgaccaaggccaggacgtggagg

SEQ ID NO: 186146 - DNA, 25 bp, Probe Sequence
ctctgggccagtgcggggtggaggc

SEQ ID NO: 186147 - DNA, 25 bp, Probe Sequence
ctctgggtcagagagctctggtctg

SEQ ID NO: 186148 - DNA, 25 bp, Probe Sequence
ctctgtccgcaaaaccaaatctggg

SEQ ID NO: 186149 - DNA, 25 bp, Probe Sequence
ctcgtaccctgatccagaactgtgg

SEQ ID NO: 186150 - DNA, 25 bp, Probe Sequence
ctcgtgcccgtattgccaaggggct

SEQ ID NO: 186151 - DNA, 25 bp, Probe Sequence
ctcggtccctcattgcaggggggag

SEQ ID NO: 186152 - DNA, 25 bp, Probe Sequence
ctctgagacccatgatcaggggatg

SEQ ID NO: 186153 - DNA, 25 bp, Probe Sequence
ctctgaggacgtcatcggaggctgg

SEQ ID NO: 186154 - DNA, 25 bp, Probe Sequence
ctctgagagagccaccaaggaggag

SEQ ID NO: 186155 - DNA, 25 bp, Probe Sequence
ctctggagggccggaggcaggaggt

SEQ ID NO: 186156 - DNA, 25 bp, Probe Sequence
ctctgagcaggacacgggccagatg

SEQ ID NO: 186157 - DNA, 25 bp, Probe Sequence
ctcggcagagaagtagtgtccaggc

SEQ ID NO: 186158 - DNA, 25 bp, Probe Sequence
ctctgggcatttgatgctgtcaagg

SEQ ID NO: 186159 - DNA, 25 bp, Probe Sequence
ctcgggtgctctacattgacattga

SEQ ID NO: 186160 - DNA, 25 bp, Probe Sequence
ctcctggactcaatcatggcttgtg

SEQ ID NO: 186161 - DNA, 25 bp, Probe Sequence
ctccgtgatctgcaatggtcagctg

SEQ ID NO: 186162 - DNA, 25 bp, Probe Sequence
ctccggacgcaaagctgtcatcgtg

SEQ ID NO: 186163 - DNA, 25 bp, Probe Sequence
ctcggccaaccaaggtgctgggatt

SEQ ID NO: 186164 - DNA, 25 bp, Probe Sequence
ctcggcctcccaaagtgctgggatg

SEQ ID NO: 186165 - DNA, 25 bp, Probe Sequence
ctcggcctcccaaagtgctgggatg

SEQ ID NO: 186166 - DNA, 25 bp, Probe Sequence
ctctgaccgcacttgaaggctgggg

SEQ ID NO: 186167 - DNA, 25 bp, Probe Sequence
ctctgaccgcacttgaaggctgggg

SEQ ID NO: 186168 - DNA, 25 bp, Probe Sequence
ctctgtcctgccttgttattgtaag

SEQ ID NO: 186169 - DNA, 25 bp, Probe Sequence
ctctgtcctgccttgttattgtaag

SEQ ID NO: 186170 - DNA, 25 bp, Probe Sequence
ctcgctccttctggtatatgcatgt

SEQ ID NO: 186171 - DNA, 25 bp, Probe Sequence
ctcgtccgcatggtgctgaatggct

SEQ ID NO: 186172 - DNA, 25 bp, Probe Sequence
ctcgtccgcatggtgctgaatggct

SEQ ID NO: 186173 - DNA, 25 bp, Probe Sequence
ctctgacctcatgtgcgtggatgtc

SEQ ID NO: 186174 - DNA, 25 bp, Probe Sequence
ctctggctgccacttggttatgttg

SEQ ID NO: 186175 - DNA, 25 bp, Probe Sequence
ctctggctgccacttggttatgttg

SEQ ID NO: 186176 - DNA, 25 bp, Probe Sequence
ctctgagctcactttgtgcactgag

SEQ ID NO: 186177 - DNA, 25 bp, Probe Sequence
ctctgagctcactttgtgcactgag

SEQ ID NO: 186178 - DNA, 25 bp, Probe Sequence
ctctggctatgattttgacgtgttt

SEQ ID NO: 186179 - DNA, 25 bp, Probe Sequence
ctctggctatgatgcttactgcgtc

SEQ ID NO: 186180 - DNA, 25 bp, Probe Sequence
ctctggatgatgccagtgctcctcg

SEQ ID NO: 186181 - DNA, 25 bp, Probe Sequence
ctctggcatgagacagtggtgcaag

SEQ ID NO: 186182 - DNA, 25 bp, Probe Sequence
ctctgtgcatgatcgtggtggtagc

SEQ ID NO: 186183 - DNA, 25 bp, Probe Sequence
ctcctctcaagcctggttgtagttc

SEQ ID NO: 186184 - DNA, 25 bp, Probe Sequence
ctccccaagactttactagtgccga

SEQ ID NO: 186185 - DNA, 25 bp, Probe Sequence
ctccccacgaatgtgaagaggcctt

SEQ ID NO: 186186 - DNA, 25 bp, Probe Sequence
ctcgctccacccggaaaaagcgctg

SEQ ID NO: 186187 - DNA, 25 bp, Probe Sequence
ctccctagcccgcaaaaacatatcg

SEQ ID NO: 186188 - DNA, 25 bp, Probe Sequence
ctcccggccaccgaatcaaattagc

SEQ ID NO: 186189 - DNA, 25 bp, Probe Sequence
ctcccggccgcatgcggcaatttga

SEQ ID NO: 186190 - DNA, 25 bp, Probe Sequence
ctcctaggcgacccagacaattata

SEQ ID NO: 186191 - DNA, 25 bp, Probe Sequence
ctccgtcagtaaccgtgcgattata

SEQ ID NO: 186192 - DNA, 25 bp, Probe Sequence
ctcgcgagatattctccggcggata

SEQ ID NO: 186193 - DNA, 25 bp, Probe Sequence
ctccctgattttgctgctgggcaac

SEQ ID NO: 186194 - DNA, 25 bp, Probe Sequence
ctcgctccatttcttgctggaacag

SEQ ID NO: 186195 - DNA, 25 bp, Probe Sequence
ctcccactttgtctgtacatactgg

SEQ ID NO: 186196 - DNA, 25 bp, Probe Sequence
ctcccactttctctttttgatgtgg

SEQ ID NO: 186197 - DNA, 25 bp, Probe Sequence
ctccgaaccttcagctttttgggct

SEQ ID NO: 186198 - DNA, 25 bp, Probe Sequence
ctccgaaccttcagctttttgggct

SEQ ID NO: 186199 - DNA, 25 bp, Probe Sequence
ctcctgaagccttgaagcctcttcg

SEQ ID NO: 186200 - DNA, 25 bp, Probe Sequence
ctcgcggtcagcatgaaagccttca

SEQ ID NO: 186201 - DNA, 25 bp, Probe Sequence
ctcgctgcgatctattgaaagtcag

SEQ ID NO: 186202 - DNA, 25 bp, Probe Sequence
ctgctgtgattctttgacctgccag

SEQ ID NO: 186203 - DNA, 25 bp, Probe Sequence
ctctgtgatctcatttcatctgcac

SEQ ID NO: 186204 - DNA, 25 bp, Probe Sequence
ctctgtgatgtatcatgatagtcac

SEQ ID NO: 186205 - DNA, 25 bp, Probe Sequence
ctctggcatgctaactagttacgcg

SEQ ID NO: 186206 - DNA, 25 bp, Probe Sequence
ctgcatgtgcacttttgtttactga

SEQ ID NO: 186207 - DNA, 25 bp, Probe Sequence
ctctggagcttcctgttgttcatac

SEQ ID NO: 186208 - DNA, 25 bp, Probe Sequence
ctctgggtgacacgtggctccagat

SEQ ID NO: 186209 - DNA, 25 bp, Probe Sequence
ctctgtcagggccagggctcatgaa

SEQ ID NO: 186210 - DNA, 25 bp, Probe Sequence
ctcgtgcacttgctgctggacgaag

SEQ ID NO: 186211 - DNA, 25 bp, Probe Sequence
ctcggcattaggtggctccaagtac

SEQ ID NO: 186212 - DNA, 25 bp, Probe Sequence
ctcggtgaaggaggagaccaaggag

SEQ ID NO: 186213 - DNA, 25 bp, Probe Sequence
ctctggggggcacaggccaactata

SEQ ID NO: 186214 - DNA, 25 bp, Probe Sequence
ctcgtgggagacgcaggcacaactc

SEQ ID NO: 186215 - DNA, 25 bp, Probe Sequence
ctcgggggaccccgagcaaacacag

SEQ ID NO: 186216 - DNA, 25 bp, Probe Sequence
ctcggggatacctagaggatgagca

SEQ ID NO: 186217 - DNA, 25 bp, Probe Sequence
ctctgtggtctcctgaagggagcgc

SEQ ID NO: 186218 - DNA, 25 bp, Probe Sequence
ctctgtagtcttcagtgctaccgca

SEQ ID NO: 186219 - DNA, 25 bp, Probe Sequence
ctcgcgcgtttgcggcaaccgcaag

SEQ ID NO: 186220 - DNA, 25 bp, Probe Sequence
ctccgcgtcttccgcggagcgggtg

SEQ ID NO: 186221 - DNA, 25 bp, Probe Sequence
ctctgatcgtcttcctcaggaatag

SEQ ID NO: 186222 - DNA, 25 bp, Probe Sequence
ctctgttgtcaacctcatagaagtg

SEQ ID NO: 186223 - DNA, 25 bp, Probe Sequence
ctcgctgttcaagttccagacagga

SEQ ID NO: 186224 - DNA, 25 bp, Probe Sequence
ctcctgcttaaagtccacacgttat

SEQ ID NO: 186225 - DNA, 25 bp, Probe Sequence
ctccaagctgaaacttccacgttaa

SEQ ID NO: 186226 - DNA, 25 bp, Probe Sequence
ctcccactattcctaaactcttata

SEQ ID NO: 186227 - DNA, 25 bp, Probe Sequence
ctccaccacttcctaaatcttaaga

SEQ ID NO: 186228 - DNA, 25 bp, Probe Sequence
ctccctcccttttattatgtaatga

SEQ ID NO: 186229 - DNA, 25 bp, Probe Sequence
ctccctcccttttattatgtaatga

SEQ ID NO: 186230 - DNA, 25 bp, Probe Sequence
ctccctcccttttattatgtaatga

SEQ ID NO: 186231 - DNA, 25 bp, Probe Sequence
ctccctcccttttattatgtaatga

SEQ ID NO: 186232 - DNA, 25 bp, Probe Sequence
ctcccttcttgcattttcagagaaa

SEQ ID NO: 186233 - DNA, 25 bp, Probe Sequence
ctccttcctctctatcttaaagtaa

SEQ ID NO: 186234 - DNA, 25 bp, Probe Sequence
ctcgttccgcaaatcctaaagctcc

SEQ ID NO: 186235 - DNA, 25 bp, Probe Sequence
ctgcgttacaaactcctaggagggc

SEQ ID NO: 186236 - DNA, 25 bp, Probe Sequence
ctgctggaagggttcctgaaaggag

SEQ ID NO: 186237 - DNA, 25 bp, Probe Sequence
ctcggaagagcgctcccaggagaaa

SEQ ID NO: 186238 - DNA, 25 bp, Probe Sequence
ctcgctgaagagagactacgcagga

SEQ ID NO: 186239 - DNA, 25 bp, Probe Sequence
ctcgaagggattcctggagcagcaa

SEQ ID NO: 186240 - DNA, 25 bp, Probe Sequence
ctctgtgccacggggaaacgcagcc

SEQ ID NO: 186241 - DNA, 25 bp, Probe Sequence
ctcgctacctggggaattcacccta

SEQ ID NO: 186242 - DNA, 25 bp, Probe Sequence
ctcgtacctacagatatgtgcacgt

SEQ ID NO: 186243 - DNA, 25 bp, Probe Sequence
ctctgtagcctttgtcaagtgagga

SEQ ID NO: 186244 - DNA, 25 bp, Probe Sequence
ctctgtgacctcttcagcatggtga

SEQ ID NO: 186245 - DNA, 25 bp, Probe Sequence
ctctgttgcgccttcaggaggatgc

SEQ ID NO: 186246 - DNA, 25 bp, Probe Sequence
ctctgttgcccgggatggagtgcag

SEQ ID NO: 186247 - DNA, 25 bp, Probe Sequence
ctctgttgcccaggttggagtgcac

SEQ ID NO: 186248 - DNA, 25 bp, Probe Sequence
ctcctgggccagtttctggtcatgc

SEQ ID NO: 186249 - DNA, 25 bp, Probe Sequence
ctcgatgcaagtgtttctgttctgg

SEQ ID NO: 186250 - DNA, 25 bp, Probe Sequence
ctctgtcttgggattcttttggtat

SEQ ID NO: 186251 - DNA, 25 bp, Probe Sequence
ctgcgttttgtcacttttcgttttg

SEQ ID NO: 186252 - DNA, 25 bp, Probe Sequence
ctgcctttcttaccattttggtttg

SEQ ID NO: 186253 - DNA, 25 bp, Probe Sequence
ctccttttgcgcttatttggaaatt

SEQ ID NO: 186254 - DNA, 25 bp, Probe Sequence
ctctgttttgactctgttgagtaca

SEQ ID NO: 186255 - DNA, 25 bp, Probe Sequence
ctctgtattgtatcacttgtaaaaa

SEQ ID NO: 186256 - DNA, 25 bp, Probe Sequence
ccgtgtcgtatgacctagtaaactt

SEQ ID NO: 186257 - DNA, 25 bp, Probe Sequence
ctcgtgtcctcaattctaatatcaa

SEQ ID NO: 186258 - DNA, 25 bp, Probe Sequence
ctcgggccttagaactttgcatagc

SEQ ID NO: 186259 - DNA, 25 bp, Probe Sequence
ctcgggcgggaaccgagcgcagagc

SEQ ID NO: 186260 - DNA, 25 bp, Probe Sequence
ctcggtgctgggcaccatggagatg

SEQ ID NO: 186261 - DNA, 25 bp, Probe Sequence
ctcgttgctgttctcacgatggtga

SEQ ID NO: 186262 - DNA, 25 bp, Probe Sequence
ctcgtgtggtctccagcaagggatt

SEQ ID NO: 186263 - DNA, 25 bp, Probe Sequence
ctcgttcactgctatctcaagggca

SEQ ID NO: 186264 - DNA, 25 bp, Probe Sequence
ctctggtcactcattgacagggctg

SEQ ID NO: 186265 - DNA, 25 bp, Probe Sequence
ctcgcagtaccaaaacaggcacagc

SEQ ID NO: 186266 - DNA, 25 bp, Probe Sequence
ctccctaccatgaaacagtctactc

SEQ ID NO: 186267 - DNA, 25 bp, Probe Sequence
ctcccaccacatagaatcaacatat

SEQ ID NO: 186268 - DNA, 25 bp, Probe Sequence
ctcctccccaaatcaatacactagt

SEQ ID NO: 186269 - DNA, 25 bp, Probe Sequence
ctcgtcctcaagaaaaagtagctaa

SEQ ID NO: 186270 - DNA, 25 bp, Probe Sequence
ctcgtaccgcgagacggtcagtgaa

SEQ ID NO: 186271 - DNA, 25 bp, Probe Sequence
ctcgatacgctggaaaaagtgcgcg

SEQ ID NO: 186272 - DNA, 25 bp, Probe Sequence
ctcgttcctgcaggagaaggcggca

SEQ ID NO: 186273 - DNA, 25 bp, Probe Sequence
ctctgtctccctggctaagggtgtt

SEQ ID NO: 186274 - DNA, 25 bp, Probe Sequence
ctctgtcacccaggctggagtgcag

SEQ ID NO: 186275 - DNA, 25 bp, Probe Sequence
ctctgtcacccaggctggagtgcag

SEQ ID NO: 186276 - DNA, 25 bp, Probe Sequence
ctctgtcacccaggctggagtgcag

SEQ ID NO: 186277 - DNA, 25 bp, Probe Sequence
ctctgtgcagtttaggggtggaccc

SEQ ID NO: 186278 - DNA, 25 bp, Probe Sequence
ctcggtgtctgtgaaggtgcccacc

SEQ ID NO: 186279 - DNA, 25 bp, Probe Sequence
ctcgtggtttgtcctggatgtccac

SEQ ID NO: 186280 - DNA, 25 bp, Probe Sequence
ctctgtggtttttgctgggctggag

SEQ ID NO: 186281 - DNA, 25 bp, Probe Sequence
ctctggcaggtgaccgtggcctgcg

SEQ ID NO: 186282 - DNA, 25 bp, Probe Sequence
ctctggggctgaccaggcgacaggt

SEQ ID NO: 186283 - DNA, 25 bp, Probe Sequence
ctctgtgggctgtcatagttaattg

SEQ ID NO: 186284 - DNA, 25 bp, Probe Sequence
ctcgtatctgccatgagttcaattg

SEQ ID NO: 186285 - DNA, 25 bp, Probe Sequence
ctcgctgtgcccatgatggacacac

SEQ ID NO: 186286 - DNA, 25 bp, Probe Sequence
ctcggtgcgatactgatgatgaaat

SEQ ID NO: 186287 - DNA, 25 bp, Probe Sequence
ctcctgatctaactgatgaaaattt

SEQ ID NO: 186288 - DNA, 25 bp, Probe Sequence
ctcgctatcatattcattaataatt

SEQ ID NO: 186289 - DNA, 25 bp, Probe Sequence
ctcgaatcttccagagatatcactt

SEQ ID NO: 186290 - DNA, 25 bp, Probe Sequence
ctcgtcatcagggccaagttcgtgg

SEQ ID NO: 186291 - DNA, 25 bp, Probe Sequence
ctctgtctcaacatctgtgttgggg

SEQ ID NO: 186292 - DNA, 25 bp, Probe Sequence
ctcccgcagacttctctgtagatcg

SEQ ID NO: 186293 - DNA, 25 bp, Probe Sequence
ctcccgattgctcctgtgtaaagat

SEQ ID NO: 186294 - DNA, 25 bp, Probe Sequence
ctgccaggatgtacctgcagaaaga

SEQ ID NO: 186295 - DNA, 25 bp, Probe Sequence
ctcctggtgcatcttaataaagtgt

SEQ ID NO: 186296 - DNA, 25 bp, Probe Sequence
ctccgttgcattttcagagactacg

SEQ ID NO: 186297 - DNA, 25 bp, Probe Sequence
ctccgttcctaccatgagactagca

SEQ ID NO: 186298 - DNA, 25 bp, Probe Sequence
ctcccttctctacaggaatctctgg

SEQ ID NO: 186299 - DNA, 25 bp, Probe Sequence
ctgcctttggttcctggacatttgg

SEQ ID NO: 186300 - DNA, 25 bp, Probe Sequence
ctcctatttgccactgggctgttgg

SEQ ID NO: 186301 - DNA, 25 bp, Probe Sequence
ctcgttagctgcgttcggggaaggt

SEQ ID NO: 186302 - DNA, 25 bp, Probe Sequence
ctcggtgacgtcttcttggggacgt

SEQ ID NO: 186303 - DNA, 25 bp, Probe Sequence
ctccgtccgctaagtatggcgggcg

SEQ ID NO: 186304 - DNA, 25 bp, Probe Sequence
ctcgctgaccctatgaaggcacgtg

SEQ ID NO: 186305 - DNA, 25 bp, Probe Sequence
ctccgccccatgacgcaaatggcgg

SEQ ID NO: 186306 - DNA, 25 bp, Probe Sequence
ctccgccccatgacgcaaatgggcg

SEQ ID NO: 186307 - DNA, 25 bp, Probe Sequence
ctccgccccatgacgcaaatgggcg

SEQ ID NO: 186308 - DNA, 25 bp, Probe Sequence
ctccgccccatgacgcaaatgggcg

SEQ ID NO: 186309 - DNA, 25 bp, Probe Sequence
ctccgccccatgacgcaaatgggcg

SEQ ID NO: 186310 - DNA, 25 bp, Probe Sequence
ctccgccccattgacgcaatggcgg

SEQ ID NO: 186311 - DNA, 25 bp, Probe Sequence
ctccgccccattgacgcaatggcgg

SEQ ID NO: 186312 - DNA, 25 bp, Probe Sequence
ctccgccccattgacgcaaatggtg

SEQ ID NO: 186313 - DNA, 25 bp, Probe Sequence
ctccgccccattgacgcaaatgggc

SEQ ID NO: 186314 - DNA, 25 bp, Probe Sequence
ctcggccccattgacgcaaatggtc

SEQ ID NO: 186315 - DNA, 25 bp, Probe Sequence
ctcggcccatttgaagaccaggaag

SEQ ID NO: 186316 - DNA, 25 bp, Probe Sequence
ctcggaacttccttagagccatgaa

SEQ ID NO: 186317 - DNA, 25 bp, Probe Sequence
ctcggaacttccttagagccatgaa

SEQ ID NO: 186318 - DNA, 25 bp, Probe Sequence
ctcggaagccgccatcagaagcgtg

SEQ ID NO: 186319 - DNA, 25 bp, Probe Sequence
ctctggccgtaccactggcatcgtg

SEQ ID NO: 186320 - DNA, 25 bp, Probe Sequence
ctctggcgcgaacactggaatgcat

SEQ ID NO: 186321 - DNA, 25 bp, Probe Sequence
ctctgggcgcaagcacagtgattga

SEQ ID NO: 186322 - DNA, 25 bp, Probe Sequence
ctctggctagcgacatcactgatga

SEQ ID NO: 186323 - DNA, 25 bp, Probe Sequence
ctctggcatcacctacatggcagga

SEQ ID NO: 186324 - DNA, 25 bp, Probe Sequence
ctcggctcacagtcgcaggagagtt

SEQ ID NO: 186325 - DNA, 25 bp, Probe Sequence
ctcgctctgggatgcaggcatgctt

SEQ ID NO: 186326 - DNA, 25 bp, Probe Sequence
ctccttgggaccgtgagttcctaga

SEQ ID NO: 186327 - DNA, 25 bp, Probe Sequence
ctcgtaggaacgctgagctgcctca

SEQ ID NO: 186328 - DNA, 25 bp, Probe Sequence
ctcgcatgggcatagggacccatca

SEQ ID NO: 186329 - DNA, 25 bp, Probe Sequence
ctcctgtgagcagcgggaacctgga

SEQ ID NO: 186330 - DNA, 25 bp, Probe Sequence
ctccggtgagtctggagtccggtcg

SEQ ID NO: 186331 - DNA, 25 bp, Probe Sequence
ctgcccttaaggaggtcgtggtctt

SEQ ID NO: 186332 - DNA, 25 bp, Probe Sequence
ctcgccttaattccttgctaggtgt

SEQ ID NO: 186333 - DNA, 25 bp, Probe Sequence
ctcgacgtcattcagcttcacggtg

SEQ ID NO: 186334 - DNA, 25 bp, Probe Sequence
ctcccagctaagcagcatgtaccgg

SEQ ID NO: 186335 - DNA, 25 bp, Probe Sequence
ctccgtctcaagcatattaacaggg

SEQ ID NO: 186336 - DNA, 25 bp, Probe Sequence
ctcggtccatctagctatctatgac

SEQ ID NO: 186337 - DNA, 25 bp, Probe Sequence
ctcggtctcctcatctgtgagatgc

SEQ ID NO: 186338 - DNA, 25 bp, Probe Sequence
ctcggcttgtcctggtgaatgctat

SEQ ID NO: 186339 - DNA, 25 bp, Probe Sequence
ctcgttccgtgctggagaatgcata

SEQ ID NO: 186340 - DNA, 25 bp, Probe Sequence
ctcggtgccgatcagcggaagacca

SEQ ID NO: 186341 - DNA, 25 bp, Probe Sequence
ctctgggctcggtcagtggagaacc

SEQ ID NO: 186342 - DNA, 25 bp, Probe Sequence
ctgcagccccgtgagtggaagaagc

SEQ ID NO: 186343 - DNA, 25 bp, Probe Sequence
ctgactcccgagggctagggctaga

SEQ ID NO: 186344 - DNA, 25 bp, Probe Sequence
ctcctccttaggcctggaggccaag

SEQ ID NO: 186345 - DNA, 25 bp, Probe Sequence
ctcgctctgggagtactagggccgg

SEQ ID NO: 186346 - DNA, 25 bp, Probe Sequence
ctcgctctgggggccaatggagctg

SEQ ID NO: 186347 - DNA, 25 bp, Probe Sequence
ctccgctagcaatcgcatcatcggt

SEQ ID NO: 186348 - DNA, 25 bp, Probe Sequence
ctcctgttcatttgccagtcaggta

SEQ ID NO: 186349 - DNA, 25 bp, Probe Sequence
ctgccttttgatgccgtactgtaag

SEQ ID NO: 186350 - DNA, 25 bp, Probe Sequence
ctccttgttatttctgtttgtaaga

SEQ ID NO: 186351 - DNA, 25 bp, Probe Sequence
ctcctaggtgtttgatatttttgaa

SEQ ID NO: 186352 - DNA, 25 bp, Probe Sequence
ctcctaagacttttggtttctcgca

SEQ ID NO: 186353 - DNA, 25 bp, Probe Sequence
ctcctgaacctttaggcttgtctcg

SEQ ID NO: 186354 - DNA, 25 bp, Probe Sequence
ctcccactccttgaggtatttcagc

SEQ ID NO: 186355 - DNA, 25 bp, Probe Sequence
ctcccagaccctgaggatactgtgc

SEQ ID NO: 186356 - DNA, 25 bp, Probe Sequence
ctcctcagttttgtggagcctgatc

SEQ ID NO: 186357 - DNA, 25 bp, Probe Sequence
ctcctcggattgaaagtgtggagac

SEQ ID NO: 186358 - DNA, 25 bp, Probe Sequence
ctcgccaggaagcacctggctgagc

SEQ ID NO: 186359 - DNA, 25 bp, Probe Sequence
ctccctagaggactccatggctgag

SEQ ID NO: 186360 - DNA, 25 bp, Probe Sequence
ctccctgcagagatggcacagactg

SEQ ID NO: 186361 - DNA, 25 bp, Probe Sequence
ctcgtcaggtgcaggtcagcacgtt

SEQ ID NO: 186362 - DNA, 25 bp, Probe Sequence
ctccaacgtgcacagtcaatgagtt

SEQ ID NO: 186363 - DNA, 25 bp, Probe Sequence
ctcgaacatctctcagcatttactg

SEQ ID NO: 186364 - DNA, 25 bp, Probe Sequence
ctcctgacactaccaagttacttga

SEQ ID NO: 186365 - DNA, 25 bp, Probe Sequence
ctcctagactagtgctttaccttta

SEQ ID NO: 186366 - DNA, 25 bp, Probe Sequence
ctgactagaaaagctattaccttaa

SEQ ID NO: 186367 - DNA, 25 bp, Probe Sequence
ctcctggaaataggtctgtccactc

SEQ ID NO: 186368 - DNA, 25 bp, Probe Sequence
ctccaagagtaagttctgctacctc

SEQ ID NO: 186369 - DNA, 25 bp, Probe Sequence
ctcccaggaaagtgctgtgccctat

SEQ ID NO: 186370 - DNA, 25 bp, Probe Sequence
ctcccaaaaggtgctcttcctaact

SEQ ID NO: 186371 - DNA, 25 bp, Probe Sequence
ctcctgaaacacatctccattgact

SEQ ID NO: 186372 - DNA, 25 bp, Probe Sequence
ctccttgcaaccaggcagctgagac

SEQ ID NO: 186373 - DNA, 25 bp, Probe Sequence
ctccctcagaacggcgcgagaagcg

SEQ ID NO: 186374 - DNA, 25 bp, Probe Sequence
ctcccacaattggccagggcaacaa

SEQ ID NO: 186375 - DNA, 25 bp, Probe Sequence
ctcctcacagttgccatgtagaccc

SEQ ID NO: 186376 - DNA, 25 bp, Probe Sequence
ctcccaagatgttcacaaaaggtga

SEQ ID NO: 186377 - DNA, 25 bp, Probe Sequence
ctcccaactgctcacagaacggatc

SEQ ID NO: 186378 - DNA, 25 bp, Probe Sequence
ctcccctcgccgagaaaggcatcgg

SEQ ID NO: 186379 - DNA, 25 bp, Probe Sequence
ctcccttggctccagaacgaagatc

SEQ ID NO: 186380 - DNA, 25 bp, Probe Sequence
ctccctctgcggtgaaccaagcagc

SEQ ID NO: 186381 - DNA, 25 bp, Probe Sequence
ctccggcagggagggtgacaagcac

SEQ ID NO: 186382 - DNA, 25 bp, Probe Sequence
ctcgggcaggggctttgcgagcccg

SEQ ID NO: 186383 - DNA, 25 bp, Probe Sequence
ctcgctggcagtcagtgtctctaag

SEQ ID NO: 186384 - DNA, 25 bp, Probe Sequence
ctcctgcctgggcaggctcttcaag

SEQ ID NO: 186385 - DNA, 25 bp, Probe Sequence
ctcggacgggaattgtttcgagttg

SEQ ID NO: 186386 - DNA, 25 bp, Probe Sequence
ctcgaaagggaatcctcctgtttgc

SEQ ID NO: 186387 - DNA, 25 bp, Probe Sequence
ctccaactggggtaacccctgatct

SEQ ID NO: 186388 - DNA, 25 bp, Probe Sequence
ctcctattagatctaatgccacact

SEQ ID NO: 186389 - DNA, 25 bp, Probe Sequence
ctcctattgggagacatgaaacata

SEQ ID NO: 186390 - DNA, 25 bp, Probe Sequence
ctcgaagtcgcggtcatcaggaact

SEQ ID NO: 186391 - DNA, 25 bp, Probe Sequence
ctcggcgctggggtatcagtgaggg

SEQ ID NO: 186392 - DNA, 25 bp, Probe Sequence
ctcccacgtctggttcgtgatgggc

SEQ ID NO: 186393 - DNA, 25 bp, Probe Sequence
ctcccagttcatgttgcttagggaa

SEQ ID NO: 186394 - DNA, 25 bp, Probe Sequence
ctcccagttcatgaggttcatcgtg

SEQ ID NO: 186395 - DNA, 25 bp, Probe Sequence
ctcccacctgatgcggtggtgcgtg

SEQ ID NO: 186396 - DNA, 25 bp, Probe Sequence
ctgcccaccaggaggggacttagcc

SEQ ID NO: 186397 - DNA, 25 bp, Probe Sequence
ctcccacagaaagcggtgacttcac

SEQ ID NO: 186398 - DNA, 25 bp, Probe Sequence
ctcgccaagcggtatgggggcttca

SEQ ID NO: 186399 - DNA, 25 bp, Probe Sequence
ctcgctcagacactttggcaggatg

SEQ ID NO: 186400 - DNA, 25 bp, Probe Sequence
ctcctcagccagccatgctgagcat

SEQ ID NO: 186401 - DNA, 25 bp, Probe Sequence
ctcctgaggatggatctgcagatag

SEQ ID NO: 186402 - DNA, 25 bp, Probe Sequence
ctcgctgctggtgacgcagaatggg

SEQ ID NO: 186403 - DNA, 25 bp, Probe Sequence
ctcgctttgttgttcaggctgaagt

SEQ ID NO: 186404 - DNA, 25 bp, Probe Sequence
ctcctggtgggcatgtgggacgttt

SEQ ID NO: 186405 - DNA, 25 bp, Probe Sequence
ctccggttccagctggagacgtcac

SEQ ID NO: 186406 - DNA, 25 bp, Probe Sequence
ctccggctcttacgtagaaacgcgc

SEQ ID NO: 186407 - DNA, 25 bp, Probe Sequence
ctcccctccaaggtgaaacactgca

SEQ ID NO: 186408 - DNA, 25 bp, Probe Sequence
ctcctctcctacactgaaagactca

SEQ ID NO: 186409 - DNA, 25 bp, Probe Sequence
ctcccctctctttctaagagacctg

SEQ ID NO: 186410 - DNA, 25 bp, Probe Sequence
ctcctcaacccttctgcaacaaggg

SEQ ID NO: 186411 - DNA, 25 bp, Probe Sequence
ctcctcactccctgtacagaatggg

SEQ ID NO: 186412 - DNA, 25 bp, Probe Sequence
ctcctcgacctccgatgggaatgag

SEQ ID NO: 186413 - DNA, 25 bp, Probe Sequence
ctccccactctcctgggataatggg

SEQ ID NO: 186414 - DNA, 25 bp, Probe Sequence
ctcgcacacactggctggtggagaa

SEQ ID NO: 186415 - DNA, 25 bp, Probe Sequence
ctcgctacactactcctgaggatgc

SEQ ID NO: 186416 - DNA, 25 bp, Probe Sequence
ctcgctacactactcctgaggatgc

SEQ ID NO: 186417 - DNA, 25 bp, Probe Sequence
ctcgctacactactcctgaggatgc

SEQ ID NO: 186418 - DNA, 25 bp, Probe Sequence
ctcccacattagcctcatgagtagc

SEQ ID NO: 186419 - DNA, 25 bp, Probe Sequence
ctcccaattcatccttaattccaag

SEQ ID NO: 186420 - DNA, 25 bp, Probe Sequence
ctcccatttcttgctagctattgca

SEQ ID NO: 186421 - DNA, 25 bp, Probe Sequence
ctccctcttgttttagctgttacac

SEQ ID NO: 186422 - DNA, 25 bp, Probe Sequence
ctcccactgtttatccattattcat

SEQ ID NO: 186423 - DNA, 25 bp, Probe Sequence
ctgcccctagtattagccattactt

SEQ ID NO: 186424 - DNA, 25 bp, Probe Sequence
ctcccttaataaactcacaactctc

SEQ ID NO: 186425 - DNA, 25 bp, Probe Sequence
ctcccctaaaatacgcccagatttg

SEQ ID NO: 186426 - DNA, 25 bp, Probe Sequence
ctccccttatgattactaaatattt

SEQ ID NO: 186427 - DNA, 25 bp, Probe Sequence
ctcctccttatgactccattcaaat

SEQ ID NO: 186428 - DNA, 25 bp, Probe Sequence
ctcctccttatgactccattcaaat

SEQ ID NO: 186429 - DNA, 25 bp, Probe Sequence
ctcctgccctacagcaattacagaa

SEQ ID NO: 186430 - DNA, 25 bp, Probe Sequence
ctcgcttcctcaaaaagatcacaga

SEQ ID NO: 186431 - DNA, 25 bp, Probe Sequence
ctcgctcttctcagaagtgacacca

SEQ ID NO: 186432 - DNA, 25 bp, Probe Sequence
ctcgattctttgaagagatgacaac

SEQ ID NO: 186433 - DNA, 25 bp, Probe Sequence
ctccaatttctaagcagtcataacg

SEQ ID NO: 186434 - DNA, 25 bp, Probe Sequence
ctccagatcttcacgtacaacagcc

SEQ ID NO: 186435 - DNA, 25 bp, Probe Sequence
ctccagattagcacctggccagact

SEQ ID NO: 186436 - DNA, 25 bp, Probe Sequence
ctcgcagagctacacgcggagcagg

SEQ ID NO: 186437 - DNA, 25 bp, Probe Sequence
ctccaatgctgctttcccaggaggg

SEQ ID NO: 186438 - DNA, 25 bp, Probe Sequence
ctccttttctccagagcgaggggag

SEQ ID NO: 186439 - DNA, 25 bp, Probe Sequence
ctccctactctccagaatccagggg

SEQ ID NO: 186440 - DNA, 25 bp, Probe Sequence
ctcctgagactcacaaaccattttg

SEQ ID NO: 186441 - DNA, 25 bp, Probe Sequence
ctccggaccttcaagactgtctttg

SEQ ID NO: 186442 - DNA, 25 bp, Probe Sequence
ctccggactctagtctaggtccgcg

SEQ ID NO: 186443 - DNA, 25 bp, Probe Sequence
ctccgtgacatctatgcctatggtt

SEQ ID NO: 186444 - DNA, 25 bp, Probe Sequence
ctccgagatgatgtgtttagatatc

SEQ ID NO: 186445 - DNA, 25 bp, Probe Sequence
ctccagaggcatgttttcacatact

SEQ ID NO: 186446 - DNA, 25 bp, Probe Sequence
ctccgttgcctaatgttatctgaca

SEQ ID NO: 186447 - DNA, 25 bp, Probe Sequence
ctcgctcttgccctgtttgaagagc

SEQ ID NO: 186448 - DNA, 25 bp, Probe Sequence
ctcctgcttgctgtacttgggatga

SEQ ID NO: 186449 - DNA, 25 bp, Probe Sequence
ctcctctttgtgtcagtgatggaaa

SEQ ID NO: 186450 - DNA, 25 bp, Probe Sequence
ctcccttcatcttgatctgggaaga

SEQ ID NO: 186451 - DNA, 25 bp, Probe Sequence
ctccctctgtctaattgccgagtta

SEQ ID NO: 186452 - DNA, 25 bp, Probe Sequence
ctcccctgtttgacgacagtgcatt

SEQ ID NO: 186453 - DNA, 25 bp, Probe Sequence
ctcccagctgatggtgagctgacag

SEQ ID NO: 186454 - DNA, 25 bp, Probe Sequence
ctcctcactggagactacaagtggt

SEQ ID NO: 186455 - DNA, 25 bp, Probe Sequence
ctcccagctaggaaaccctgtgtgt

SEQ ID NO: 186456 - DNA, 25 bp, Probe Sequence
ctccctgaaggtcaccattctgcag

SEQ ID NO: 186457 - DNA, 25 bp, Probe Sequence
ctccctgcagtttgacttctttgag

SEQ ID NO: 186458 - DNA, 25 bp, Probe Sequence
ctcccaggcagactgccttctttca

SEQ ID NO: 186459 - DNA, 25 bp, Probe Sequence
ctcccaggcagactgccttctttca

SEQ ID NO: 186460 - DNA, 25 bp, Probe Sequence
ctccgaggggctcatgttcaggcag

SEQ ID NO: 186461 - DNA, 25 bp, Probe Sequence
ctcccaggccagtgagctttacttg

SEQ ID NO: 186462 - DNA, 25 bp, Probe Sequence
ctcccaagccaatcctcttaaagac

SEQ ID NO: 186463 - DNA, 25 bp, Probe Sequence
ctcctagacctaacctgactagaaa

SEQ ID NO: 186464 - DNA, 25 bp, Probe Sequence
ctcgaagacgctatccgatccatca

SEQ ID NO: 186465 - DNA, 25 bp, Probe Sequence
ctcgaagacgctatccgatccatca

SEQ ID NO: 186466 - DNA, 25 bp, Probe Sequence
ctcgagaaagtgaccctgtccgggg

SEQ ID NO: 186467 - DNA, 25 bp, Probe Sequence
ctcgcttgaaggaggcgtcgccgga

SEQ ID NO: 186468 - DNA, 25 bp, Probe Sequence
ctcgattgaaggtgacctctgcccc

SEQ ID NO: 186469 - DNA, 25 bp, Probe Sequence
ctccggaaagtgtagtcctgcccta

SEQ ID NO: 186470 - DNA, 25 bp, Probe Sequence
ctccgaacaggtccaacctacatgc

SEQ ID NO: 186471 - DNA, 25 bp, Probe Sequence
ctcctaaaggcagcaaccattcatc

SEQ ID NO: 186472 - DNA, 25 bp, Probe Sequence
ctcctaaactgagcagtctcatacc

SEQ ID NO: 186473 - DNA, 25 bp, Probe Sequence
ctcccaaatcgctgagctgcttgtt

SEQ ID NO: 186474 - DNA, 25 bp, Probe Sequence
ctcccagagacgcagctgtctcagt

SEQ ID NO: 186475 - DNA, 25 bp, Probe Sequence
ctcccagaggcacggatccaagtac

SEQ ID NO: 186476 - DNA, 25 bp, Probe Sequence
ctgccccaggaaatgtctccaaacc

SEQ ID NO: 186477 - DNA, 25 bp, Probe Sequence
ctgccccagtcaatagtctacaaat

SEQ ID NO: 186478 - DNA, 25 bp, Probe Sequence
ctcccgcagcttatgtctagcgtgt

SEQ ID NO: 186479 - DNA, 25 bp, Probe Sequence
ctccagtacttgagagcgactctgt

SEQ ID NO: 186480 - DNA, 25 bp, Probe Sequence
ctccaggccctcagatggcacatta

SEQ ID NO: 186481 - DNA, 25 bp, Probe Sequence
ctcctgggccacaagggctactaga

SEQ ID NO: 186482 - DNA, 25 bp, Probe Sequence
ctccaggagggcaagggcgattctg

SEQ ID NO: 186483 - DNA, 25 bp, Probe Sequence
ctcgaggagcggatgcagcggtttg

SEQ ID NO: 186484 - DNA, 25 bp, Probe Sequence
ctccagggctggctctggtgtttac

SEQ ID NO: 186485 - DNA, 25 bp, Probe Sequence
ctccatttctggctcctatgtatta

SEQ ID NO: 186486 - DNA, 25 bp, Probe Sequence
ctccttggcggcatgtgcattttct

SEQ ID NO: 186487 - DNA, 25 bp, Probe Sequence
ctcccatatgggcctgagttgtacc

SEQ ID NO: 186488 - DNA, 25 bp, Probe Sequence
ctgaccttgggccagcaggttttta

SEQ ID NO: 186489 - DNA, 25 bp, Probe Sequence
ctgagccggggctggttttctatga

SEQ ID NO: 186490 - DNA, 25 bp, Probe Sequence
ctgagccggggctggttttctatga

SEQ ID NO: 186491 - DNA, 25 bp, Probe Sequence
ctcgcggggatgtgttcactatgcc

SEQ ID NO: 186492 - DNA, 25 bp, Probe Sequence
ctgccagggggctctgaactagtgc

SEQ ID NO: 186493 - DNA, 25 bp, Probe Sequence
ctcccaggtctgggcaacccagatc

SEQ ID NO: 186494 - DNA, 25 bp, Probe Sequence
ctcccaggtgcggtgtgcaccgagc

SEQ ID NO: 186495 - DNA, 25 bp, Probe Sequence
ctcccaggagagtgtcacagagcag

SEQ ID NO: 186496 - DNA, 25 bp, Probe Sequence
ctcccatctatgcacgacacataag

SEQ ID NO: 186497 - DNA, 25 bp, Probe Sequence
ctccctgtataagacactttgccaa

SEQ ID NO: 186498 - DNA, 25 bp, Probe Sequence
ctccctgtaacttgatccatttcta

SEQ ID NO: 186499 - DNA, 25 bp, Probe Sequence
ctcccattgtacagcatgctatcta

SEQ ID NO: 186500 - DNA, 25 bp, Probe Sequence
ctcccctattcatgatgcatcatct

SEQ ID NO: 186501 - DNA, 25 bp, Probe Sequence
ctccttccatactggccatattttg

SEQ ID NO: 186502 - DNA, 25 bp, Probe Sequence
ctcctggcctacatcagccaaactt

SEQ ID NO: 186503 - DNA, 25 bp, Probe Sequence
ctccgtgcttaaccaaagaagctgt

SEQ ID NO: 186504 - DNA, 25 bp, Probe Sequence
ctccgtctctatataaggaattttc

SEQ ID NO: 186505 - DNA, 25 bp, Probe Sequence
ctccatctttgatttcggttatttt

SEQ ID NO: 186506 - DNA, 25 bp, Probe Sequence
ctccttttaaccaagcttagcttct

SEQ ID NO: 186507 - DNA, 25 bp, Probe Sequence
ctcctttatatagttccctcacttg

SEQ ID NO: 186508 - DNA, 25 bp, Probe Sequence
ctccttttatgtttggcctagattg

SEQ ID NO: 186509 - DNA, 25 bp, Probe Sequence
ctcctttcatgtacttggcctgaga

SEQ ID NO: 186510 - DNA, 25 bp, Probe Sequence
ctccatcttagtgtatagcctggaa

SEQ ID NO: 186511 - DNA, 25 bp, Probe Sequence
ctcctcatgatatcggctacgtcaa

SEQ ID NO: 186512 - DNA, 25 bp, Probe Sequence
ctcccagagactgttcatggtactg

SEQ ID NO: 186513 - DNA, 25 bp, Probe Sequence
ctcccatcaaatgtaaggtctatga

SEQ ID NO: 186514 - DNA, 25 bp, Probe Sequence
ctccctgcacacggaaagaactctg

SEQ ID NO: 186515 - DNA, 25 bp, Probe Sequence
ctccctcagagacaaagtcacttgc

SEQ ID NO: 186516 - DNA, 25 bp, Probe Sequence
ctccccatggactatagcgccaatg

SEQ ID NO: 186517 - DNA, 25 bp, Probe Sequence
ctccccataccaaagtgctgacagg

SEQ ID NO: 186518 - DNA, 25 bp, Probe Sequence
ctcccagagaccaacgttcaagcag

SEQ ID NO: 186519 - DNA, 25 bp, Probe Sequence
ctccaaaagcctactgttaaccaga

SEQ ID NO: 186520 - DNA, 25 bp, Probe Sequence
ctccaattagatagtcctttcccaa

SEQ ID NO: 186521 - DNA, 25 bp, Probe Sequence
ctccagaagttttccatcttcccaa

SEQ ID NO: 186522 - DNA, 25 bp, Probe Sequence
ctcgcgagatttgggtctcttccta

SEQ ID NO: 186523 - DNA, 25 bp, Probe Sequence
ctccgatgcgttcagtgtctgtagt

SEQ ID NO: 186524 - DNA, 25 bp, Probe Sequence
ctcccatgctttcagccattgtggg

SEQ ID NO: 186525 - DNA, 25 bp, Probe Sequence
ctcccaagtgtgccaccactggagc

SEQ ID NO: 186526 - DNA, 25 bp, Probe Sequence
ctccgatgagtagtgacaccgggcc

SEQ ID NO: 186527 - DNA, 25 bp, Probe Sequence
ctccagaagggtgcccagtcaggcc

SEQ ID NO: 186528 - DNA, 25 bp, Probe Sequence
ctccaaccaggcttcctgcaaagac

SEQ ID NO: 186529 - DNA, 25 bp, Probe Sequence
ctccagtccacgttcacaaaatgtg

SEQ ID NO: 186530 - DNA, 25 bp, Probe Sequence
ctccaggactccctcaataatgagg

SEQ ID NO: 186531 - DNA, 25 bp, Probe Sequence
ctcctcgtctctgctttaatcagga

SEQ ID NO: 186532 - DNA, 25 bp, Probe Sequence
ctgcccgttctccttgaagataaac

SEQ ID NO: 186533 - DNA, 25 bp, Probe Sequence
ctcgccgtgtctggcactgaaaata

SEQ ID NO: 186534 - DNA, 25 bp, Probe Sequence
ctccccgattccgtgaatcagctac

SEQ ID NO: 186535 - DNA, 25 bp, Probe Sequence
ctgcccctttcacatcaaagaacta

SEQ ID NO: 186536 - DNA, 25 bp, Probe Sequence
ctcccgcggtactacaagaacatcg

SEQ ID NO: 186537 - DNA, 25 bp, Probe Sequence
ctcccgcggtactacaagaacatcg

SEQ ID NO: 186538 - DNA, 25 bp, Probe Sequence
ctcccagaggtattcccagacaggc

SEQ ID NO: 186539 - DNA, 25 bp, Probe Sequence
ctccctcaggatatcctgaactgga

SEQ ID NO: 186540 - DNA, 25 bp, Probe Sequence
ctcgccaatggaattcctgactctg

SEQ ID NO: 186541 - DNA, 25 bp, Probe Sequence
ctcccagatatactacttgcacttg

SEQ ID NO: 186542 - DNA, 25 bp, Probe Sequence
ctcctagtaaccttctgcttgtggt

SEQ ID NO: 186543 - DNA, 25 bp, Probe Sequence
ctcctgagtgacagcattctcctgg

SEQ ID NO: 186544 - DNA, 25 bp, Probe Sequence
ctcgctggagaacaactaaggggca

SEQ ID NO: 186545 - DNA, 25 bp, Probe Sequence
ctcgctgctgagaagagccactaac

SEQ ID NO: 186546 - DNA, 25 bp, Probe Sequence
ctccagctggaattgtcaaaactgg

SEQ ID NO: 186547 - DNA, 25 bp, Probe Sequence
ctccctgtccacctcagaataatag

SEQ ID NO: 186548 - DNA, 25 bp, Probe Sequence
ctcccagcttcaaatgcaaattcat

SEQ ID NO: 186549 - DNA, 25 bp, Probe Sequence
ctcccacgtggttgcagatacctca

SEQ ID NO: 186550 - DNA, 25 bp, Probe Sequence
ctcctccagggtggcagcaacaata

SEQ ID NO: 186551 - DNA, 25 bp, Probe Sequence
ctcccatgcagatgtcctgcagatc

SEQ ID NO: 186552 - DNA, 25 bp, Probe Sequence
ctccgtgcagttttctgcaactctg

SEQ ID NO: 186553 - DNA, 25 bp, Probe Sequence
ctccgatactacatgctcaacattg

SEQ ID NO: 186554 - DNA, 25 bp, Probe Sequence
cgtcgtactgatgggctaggtagtt

SEQ ID NO: 186555 - DNA, 25 bp, Probe Sequence
cgtctggcctcagccaaggttttta

SEQ ID NO: 186556 - DNA, 25 bp, Probe Sequence
ctgctctggccaagtgcctaatttt

SEQ ID NO: 186557 - DNA, 25 bp, Probe Sequence
ctccaggcccttgccatatgatact

SEQ ID NO: 186558 - DNA, 25 bp, Probe Sequence
ctccgggtcactgctgtatataact

SEQ ID NO: 186559 - DNA, 25 bp, Probe Sequence
ctccggcttcacgcttgtgagattg

SEQ ID NO: 186560 - DNA, 25 bp, Probe Sequence
ctccaggcttcacgtttggaaatct

SEQ ID NO: 186561 - DNA, 25 bp, Probe Sequence
ctcccagcactaccttattgcaaga

SEQ ID NO: 186562 - DNA, 25 bp, Probe Sequence
ctcccatgcctagctggattgcaga

SEQ ID NO: 186563 - DNA, 25 bp, Probe Sequence
ctcccactcttggcagcaattgaga

SEQ ID NO: 186564 - DNA, 25 bp, Probe Sequence
ctcccaccatttggacctgtgaagt

SEQ ID NO: 186565 - DNA, 25 bp, Probe Sequence
ctcccaatcttttgacttatgcaca

SEQ ID NO: 186566 - DNA, 25 bp, Probe Sequence
ctcctcccatttggacatttgcact

SEQ ID NO: 186567 - DNA, 25 bp, Probe Sequence
ctcgcattgcctctcagactaagca

SEQ ID NO: 186568 - DNA, 25 bp, Probe Sequence
ctccttgtctgcacaactgcatgca

SEQ ID NO: 186569 - DNA, 25 bp, Probe Sequence
ctcctgtgatctgtgctagctgtga

SEQ ID NO: 186570 - DNA, 25 bp, Probe Sequence
ctccagtatcagctggcacgggctc

SEQ ID NO: 186571 - DNA, 25 bp, Probe Sequence
ctccagtatcagctggcacgggctc

SEQ ID NO: 186572 - DNA, 25 bp, Probe Sequence
ctccgaccgacatcacggagcagcc

SEQ ID NO: 186573 - DNA, 25 bp, Probe Sequence
ctccagagtggagaacgtgcgccct

SEQ ID NO: 186574 - DNA, 25 bp, Probe Sequence
ctcccagctggctaaactttgcctc

SEQ ID NO: 186575 - DNA, 25 bp, Probe Sequence
ctcgcgcactcgaaagggaatcctc

SEQ ID NO: 186576 - DNA, 25 bp, Probe Sequence
ctgcgcaccatctcaagggaataca

SEQ ID NO: 186577 - DNA, 25 bp, Probe Sequence
ctccagtcactgaaagggctaaact

SEQ ID NO: 186578 - DNA, 25 bp, Probe Sequence
ctcctggactactagtcctcaggac

SEQ ID NO: 186579 - DNA, 25 bp, Probe Sequence
ctcctgcgacatcaggttctcagtc

SEQ ID NO: 186580 - DNA, 25 bp, Probe Sequence
ctcctgagaattcctgttacagtaa

SEQ ID NO: 186581 - DNA, 25 bp, Probe Sequence
ctcctggaacttggatcttaagaga

SEQ ID NO: 186582 - DNA, 25 bp, Probe Sequence
ctcctggaactgacttcttctgtca

SEQ ID NO: 186583 - DNA, 25 bp, Probe Sequence
ctccgcaagagtctgtcttcgatga

SEQ ID NO: 186584 - DNA, 25 bp, Probe Sequence
ctcccacttgtagttcttatgctga

SEQ ID NO: 186585 - DNA, 25 bp, Probe Sequence
ctcccacttggagagagagatccag

SEQ ID NO: 186586 - DNA, 25 bp, Probe Sequence
ctcccagtgtgggcaacaagagcca

SEQ ID NO: 186587 - DNA, 25 bp, Probe Sequence
ctccacattcagatcaaacaggcca

SEQ ID NO: 186588 - DNA, 25 bp, Probe Sequence
ctccctatcatggatcaagagctgg

SEQ ID NO: 186589 - DNA, 25 bp, Probe Sequence
ctcccgcatcagctcaaagctgatc

SEQ ID NO: 186590 - DNA, 25 bp, Probe Sequence
ctccctgcacacacatacacagata

SEQ ID NO: 186591 - DNA, 25 bp, Probe Sequence
ctcctccactctataagcagtcatc

SEQ ID NO: 186592 - DNA, 25 bp, Probe Sequence
ctgccaccatcacaataaagtcccc

SEQ ID NO: 186593 - DNA, 25 bp, Probe Sequence
ctccaccacccactatatgagaacc

SEQ ID NO: 186594 - DNA, 25 bp, Probe Sequence
ctccccacagctggtaatctggact

SEQ ID NO: 186595 - DNA, 25 bp, Probe Sequence
ctgccaccacgtagtcaagggtctc

SEQ ID NO: 186596 - DNA, 25 bp, Probe Sequence
ctccaacccggttgatgtggttcga

SEQ ID NO: 186597 - DNA, 25 bp, Probe Sequence
ctccatcactccaggggtggtgtct

SEQ ID NO: 186598 - DNA, 25 bp, Probe Sequence
ctccacctcctgggttcaagtgatt

SEQ ID NO: 186599 - DNA, 25 bp, Probe Sequence
ctgcactgcaatctgggttacggag

SEQ ID NO: 186600 - DNA, 25 bp, Probe Sequence
ctcctcattgctggggttgacttaa

SEQ ID NO: 186601 - DNA, 25 bp, Probe Sequence
ctcctttgtttactagcagcctgga

SEQ ID NO: 186602 - DNA, 25 bp, Probe Sequence
ctcctttgcttgtttatcagtcctg

SEQ ID NO: 186603 - DNA, 25 bp, Probe Sequence
ctcctgtttctttgccatagtggct

SEQ ID NO: 186604 - DNA, 25 bp, Probe Sequence
ctcctctgtctctggagagtctggt

SEQ ID NO: 186605 - DNA, 25 bp, Probe Sequence
ctccctctgtttcgggactggatca

SEQ ID NO: 186606 - DNA, 25 bp, Probe Sequence
ctccttcgttcggaaggcgcgtcat

SEQ ID NO: 186607 - DNA, 25 bp, Probe Sequence
ctcctttggccctacaggtcagaat

SEQ ID NO: 186608 - DNA, 25 bp, Probe Sequence
ctcctttggccctacaggtcagaat

SEQ ID NO: 186609 - DNA, 25 bp, Probe Sequence
ctcccctggacacagaggtgcccat

SEQ ID NO: 186610 - DNA, 25 bp, Probe Sequence
ctcccctggacaaagttgctgacaa

SEQ ID NO: 186611 - DNA, 25 bp, Probe Sequence
ctccctctctgtcaagtttggaaac

SEQ ID NO: 186612 - DNA, 25 bp, Probe Sequence
ctcctcctctgtcttttggagaacc

SEQ ID NO: 186613 - DNA, 25 bp, Probe Sequence
ctcctccctgtgttaactggggctg

SEQ ID NO: 186614 - DNA, 25 bp, Probe Sequence
ctccctcctcagcgaacagtgggtg

SEQ ID NO: 186615 - DNA, 25 bp, Probe Sequence
ctccttgggccaccaaaggtggtgg

SEQ ID NO: 186616 - DNA, 25 bp, Probe Sequence
ctccgtgtcccttaaagcgtcaggg

SEQ ID NO: 186617 - DNA, 25 bp, Probe Sequence
ctcccttgccccaaaaggatctgga

SEQ ID NO: 186618 - DNA, 25 bp, Probe Sequence
ctccccttaccataatggatgctct

SEQ ID NO: 186619 - DNA, 25 bp, Probe Sequence
ctccctccaaccagagttgtgtcta

SEQ ID NO: 186620 - DNA, 25 bp, Probe Sequence
ctcccttcagcaacttattttgctt

SEQ ID NO: 186621 - DNA, 25 bp, Probe Sequence
ctcccatgaacgttcttgtctgtgt

SEQ ID NO: 186622 - DNA, 25 bp, Probe Sequence
ctccctgaactcttggggctgagct

SEQ ID NO: 186623 - DNA, 25 bp, Probe Sequence
ctccctgaggctggtaggtgggccc

SEQ ID NO: 186624 - DNA, 25 bp, Probe Sequence
ctccctgtgcctggcatcagaggga

SEQ ID NO: 186625 - DNA, 25 bp, Probe Sequence
ctcccaggctcttctggagctggag

SEQ ID NO: 186626 - DNA, 25 bp, Probe Sequence
ctcccaggagcaagaggagcggagc

SEQ ID NO: 186627 - DNA, 25 bp, Probe Sequence
ctcctcaggacacggtgcagcgatg

SEQ ID NO: 186628 - DNA, 25 bp, Probe Sequence
ctcccaggcaacactgagctgagct

SEQ ID NO: 186629 - DNA, 25 bp, Probe Sequence
ctgcaactggcaaacctgccgacgc

SEQ ID NO: 186630 - DNA, 25 bp, Probe Sequence
ctgaatatatgaccacgctcacccg

SEQ ID NO: 186631 - DNA, 25 bp, Probe Sequence
ctcctcatggatgcacgcatcccct

SEQ ID NO: 186632 - DNA, 25 bp, Probe Sequence
ctccatcatgtatgccaagcctgac

SEQ ID NO: 186633 - DNA, 25 bp, Probe Sequence
ctccatcatgtatgccaagcctgac

SEQ ID NO: 186634 - DNA, 25 bp, Probe Sequence
ctcccatgtgagtccctgtgatggc

SEQ ID NO: 186635 - DNA, 25 bp, Probe Sequence
ctcccatgtgagtccctgtgatggc

SEQ ID NO: 186636 - DNA, 25 bp, Probe Sequence
ctcccttgatcatacagtgaggcta

SEQ ID NO: 186637 - DNA, 25 bp, Probe Sequence
ctcccactgtgaaatcgctggtgct

SEQ ID NO: 186638 - DNA, 25 bp, Probe Sequence
ctcccaggtgacttcagtgtgtgta

SEQ ID NO: 186639 - DNA, 25 bp, Probe Sequence
ctccccagtgccttgagagtttcac

SEQ ID NO: 186640 - DNA, 25 bp, Probe Sequence
ctccccgcaactggagcagttcaac

SEQ ID NO: 186641 - DNA, 25 bp, Probe Sequence
ctcctcgccaaaagacagcctagag

SEQ ID NO: 186642 - DNA, 25 bp, Probe Sequence
ctcctcccctagagcaatgctgagg

SEQ ID NO: 186643 - DNA, 25 bp, Probe Sequence
ctccctggcgcttaccgaggaggag

SEQ ID NO: 186644 - DNA, 25 bp, Probe Sequence
ctccaggctggatacaaggggcggg

SEQ ID NO: 186645 - DNA, 25 bp, Probe Sequence
ctccgcgctggatccagggaagcgc

SEQ ID NO: 186646 - DNA, 25 bp, Probe Sequence
ctccttcgtgatctggggatgtgcc

SEQ ID NO: 186647 - DNA, 25 bp, Probe Sequence
ctccctctttgctggaggcatgctg

SEQ ID NO: 186648 - DNA, 25 bp, Probe Sequence
ctccctgcgctatagggtcacttta

SEQ ID NO: 186649 - DNA, 25 bp, Probe Sequence
ctcctgtggtggtgaattcagttta

SEQ ID NO: 186650 - DNA, 25 bp, Probe Sequence
ctccttcgggcaggatatgtgcagg

SEQ ID NO: 186651 - DNA, 25 bp, Probe Sequence
ctccttctggtatatgcatgtcact

SEQ ID NO: 186652 - DNA, 25 bp, Probe Sequence
ctcctcctttaactgagtcatcatc

SEQ ID NO: 186653 - DNA, 25 bp, Probe Sequence
ctcccagcctcttagctgaaagcac

SEQ ID NO: 186654 - DNA, 25 bp, Probe Sequence
ctccgcaaccatgtctgacaaaccc

SEQ ID NO: 186655 - DNA, 25 bp, Probe Sequence
ctccgcctgcagcgttgagaaaccc

SEQ ID NO: 186656 - DNA, 25 bp, Probe Sequence
ctccctctgaggcgtgaggactcgc

SEQ ID NO: 186657 - DNA, 25 bp, Probe Sequence
ctcccatctggggtgggcaggctgg

SEQ ID NO: 186658 - DNA, 25 bp, Probe Sequence
ctcccagttgaggggcacagggctg

SEQ ID NO: 186659 - DNA, 25 bp, Probe Sequence
ctcctgatttgagattcacgggcac

SEQ ID NO: 186660 - DNA, 25 bp, Probe Sequence
ctcctggcattggagaccctgggca

SEQ ID NO: 186661 - DNA, 25 bp, Probe Sequence
ctcctggcttgtgacgctataagac

SEQ ID NO: 186662 - DNA, 25 bp, Probe Sequence
ctgcggactcgtgacatcatcaatg

SEQ ID NO: 186663 - DNA, 25 bp, Probe Sequence
ctcccattctgtgatgagtacagca

SEQ ID NO: 186664 - DNA, 25 bp, Probe Sequence
ctccactccatgtttgcaatacaca

SEQ ID NO: 186665 - DNA, 25 bp, Probe Sequence
ctccagtctagaaggcataagccaa

SEQ ID NO: 186666 - DNA, 25 bp, Probe Sequence
ctcctgctctcagatcagatcaagc

SEQ ID NO: 186667 - DNA, 25 bp, Probe Sequence
ctcctgtcacaaatgctgcactatt

SEQ ID NO: 186668 - DNA, 25 bp, Probe Sequence
ctccttcagacacgtgcttgatgct

SEQ ID NO: 186669 - DNA, 25 bp, Probe Sequence
ctccttcgagcaccctttgtgaaaa

SEQ ID NO: 186670 - DNA, 25 bp, Probe Sequence
ctccttccaagtccattgttgcaag

SEQ ID NO: 186671 - DNA, 25 bp, Probe Sequence
ctccttcactactaactgttgagac

SEQ ID NO: 186672 - DNA, 25 bp, Probe Sequence
ctcctctcaaaggatctcctctgga

SEQ ID NO: 186673 - DNA, 25 bp, Probe Sequence
ctccctcagcgagatctgagcatct

SEQ ID NO: 186674 - DNA, 25 bp, Probe Sequence
ctccgcacggagaacgagctgcatg

SEQ ID NO: 186675 - DNA, 25 bp, Probe Sequence
ctccccaggatgacacacttcatgt

SEQ ID NO: 186676 - DNA, 25 bp, Probe Sequence
ctccatgccagctgtcaacattcag

SEQ ID NO: 186677 - DNA, 25 bp, Probe Sequence
ctccagtcacagctcagacttcata

SEQ ID NO: 186678 - DNA, 25 bp, Probe Sequence
ctccagctgcaacggagactctggc

SEQ ID NO: 186679 - DNA, 25 bp, Probe Sequence
ctccctgcagtgccaacatgcactg

SEQ ID NO: 186680 - DNA, 25 bp, Probe Sequence
ctccattgctctccaaagccaataa

SEQ ID NO: 186681 - DNA, 25 bp, Probe Sequence
ctcccctgctcagaatctgatacca

SEQ ID NO: 186682 - DNA, 25 bp, Probe Sequence
ctccgtcttcagatggctgcagacc

SEQ ID NO: 186683 - DNA, 25 bp, Probe Sequence
ctccctgtacagaatgggtgcccag

SEQ ID NO: 186684 - DNA, 25 bp, Probe Sequence
ctcccaggcaatgtgggccaccagg

SEQ ID NO: 186685 - DNA, 25 bp, Probe Sequence
ctcctgggatatgtcgtccacaatg

SEQ ID NO: 186686 - DNA, 25 bp, Probe Sequence
ctccggtggcatggtggtagactac

SEQ ID NO: 186687 - DNA, 25 bp, Probe Sequence
ctccgggccatgattatcgcagaac

SEQ ID NO: 186688 - DNA, 25 bp, Probe Sequence
ctccgccccattgtacgcacaatgg

SEQ ID NO: 186689 - DNA, 25 bp, Probe Sequence
ctccaccccattgacgtcaaatggg

SEQ ID NO: 186690 - DNA, 25 bp, Probe Sequence
ctccacccccatgacgtcaatggga

SEQ ID NO: 186691 - DNA, 25 bp, Probe Sequence
ctccaccccagttgacgtcaatggg

SEQ ID NO: 186692 - DNA, 25 bp, Probe Sequence
ctccgccccagttgacgcaaatggg

SEQ ID NO: 186693 - DNA, 25 bp, Probe Sequence
ctcccatcccagatacgacagatga

SEQ ID NO: 186694 - DNA, 25 bp, Probe Sequence
ctccctgctcaagacctacgagcag

SEQ ID NO: 186695 - DNA, 25 bp, Probe Sequence
ctccctcatctacaccaactatgag

SEQ ID NO: 186696 - DNA, 25 bp, Probe Sequence
ctccccatctagccaggaatctatt

SEQ ID NO: 186697 - DNA, 25 bp, Probe Sequence
ctccccatctagccaggaatctatt

SEQ ID NO: 186698 - DNA, 25 bp, Probe Sequence
ctcccctgtcaatgagaatcagatc

SEQ ID NO: 186699 - DNA, 25 bp, Probe Sequence
ctgcccttgtaatagtccattttgc

SEQ ID NO: 186700 - DNA, 25 bp, Probe Sequence
ctccctgttaatacagttgcttttg

SEQ ID NO: 186701 - DNA, 25 bp, Probe Sequence
ctcccgcctaaatgtctggctgagt

SEQ ID NO: 186702 - DNA, 25 bp, Probe Sequence
ctccaccaataaacgtttcgatctt

SEQ ID NO: 186703 - DNA, 25 bp, Probe Sequence
ctccaaactaagggcttctagcttt

SEQ ID NO: 186704 - DNA, 25 bp, Probe Sequence
ctccagaccttttgtttttgctttg

SEQ ID NO: 186705 - DNA, 25 bp, Probe Sequence
ctccagacctgtgtttttcaacttt

SEQ ID NO: 186706 - DNA, 25 bp, Probe Sequence
ctcctggctcttgattttgtctgcc

SEQ ID NO: 186707 - DNA, 25 bp, Probe Sequence
ctcctgatccttgcctttgtgggag

SEQ ID NO: 186708 - DNA, 25 bp, Probe Sequence
ctcctgtagtcccagctacttggga

SEQ ID NO: 186709 - DNA, 25 bp, Probe Sequence
ctgctgggggcccagtttggtgggc

SEQ ID NO: 186710 - DNA, 25 bp, Probe Sequence
ctgcgggagagagcgaagggtggga

SEQ ID NO: 186711 - DNA, 25 bp, Probe Sequence
ctgccctgggacccaactggtaaga

SEQ ID NO: 186712 - DNA, 25 bp, Probe Sequence
ctcccgagagcctcattcaggtatg

SEQ ID NO: 186713 - DNA, 25 bp, Probe Sequence
ctcccgtagcctcagaagagtgcag

SEQ ID NO: 186714 - DNA, 25 bp, Probe Sequence
ctccccttcctttgaattgctgagc

SEQ ID NO: 186715 - DNA, 25 bp, Probe Sequence
ctccctctgtccttctataatagag

SEQ ID NO: 186716 - DNA, 25 bp, Probe Sequence
ctccccttcacttctgagaattggg

SEQ ID NO: 186717 - DNA, 25 bp, Probe Sequence
ctccccttcctgcaagagtctggga

SEQ ID NO: 186718 - DNA, 25 bp, Probe Sequence
ctcccttctttcaaagcactttgct

SEQ ID NO: 186719 - DNA, 25 bp, Probe Sequence
ctcccttctttcaaagcactttgct

SEQ ID NO: 186720 - DNA, 25 bp, Probe Sequence
ctcccttctttcaaagcactttgct

SEQ ID NO: 186721 - DNA, 25 bp, Probe Sequence
ctccctctcctaaagtaatttgatc

SEQ ID NO: 186722 - DNA, 25 bp, Probe Sequence
ctgcccccttcaaacagaactagac

SEQ ID NO: 186723 - DNA, 25 bp, Probe Sequence
ctccctgcctgatgaaaggactaag

SEQ ID NO: 186724 - DNA, 25 bp, Probe Sequence
ctccctgccccattaaggaatcaga

SEQ ID NO: 186725 - DNA, 25 bp, Probe Sequence
ctccttccctcctcaagaagcagag

SEQ ID NO: 186726 - DNA, 25 bp, Probe Sequence
ctccggccctccgagaaggagagca

SEQ ID NO: 186727 - DNA, 25 bp, Probe Sequence
ctccctcgttctgcagcaagcggag

SEQ ID NO: 186728 - DNA, 25 bp, Probe Sequence
ctgcccccttgtacagaatcgaact

SEQ ID NO: 186729 - DNA, 25 bp, Probe Sequence
ctccatgcccttctgtaataaatat

SEQ ID NO: 186730 - DNA, 25 bp, Probe Sequence
ctcctcctcttgcagtggaaacttt

SEQ ID NO: 186731 - DNA, 25 bp, Probe Sequence
ctccatccatccccaaggagaactt

SEQ ID NO: 186732 - DNA, 25 bp, Probe Sequence
ctcctcccagctcaagggacaggtc

SEQ ID NO: 186733 - DNA, 25 bp, Probe Sequence
ctcctcccagctcaagggacaggtc

SEQ ID NO: 186734 - DNA, 25 bp, Probe Sequence
ctccccactcatcactaaacagagt

SEQ ID NO: 186735 - DNA, 25 bp, Probe Sequence
ctccccactcatcactaaacagagc

SEQ ID NO: 186736 - DNA, 25 bp, Probe Sequence
ctccccctgcatcacatcaggagga

SEQ ID NO: 186737 - DNA, 25 bp, Probe Sequence
acactccatgagtgtctgtgagagg

SEQ ID NO: 186738 - DNA, 25 bp, Probe Sequence
ctccctgccctccattcagggagaa

SEQ ID NO: 186739 - DNA, 25 bp, Probe Sequence
ctccttggttccatcgtgaagccat

SEQ ID NO: 186740 - DNA, 25 bp, Probe Sequence
ctccttacttacctgcctgaagaaa

SEQ ID NO: 186741 - DNA, 25 bp, Probe Sequence
ctcctgtactttttccagacacttt

SEQ ID NO: 186742 - DNA, 25 bp, Probe Sequence
ctccttactctcaccaaagcaattt

SEQ ID NO: 186743 - DNA, 25 bp, Probe Sequence
ctccttacctatcaacaatgacttt

SEQ ID NO: 186744 - DNA, 25 bp, Probe Sequence
ctccttcaaattcagtcaccactgt

SEQ ID NO: 186745 - DNA, 25 bp, Probe Sequence
ctccttacaatgccattccattctt

SEQ ID NO: 186746 - DNA, 25 bp, Probe Sequence
ctcctgtagaagtctttgctttgtt

SEQ ID NO: 186747 - DNA, 25 bp, Probe Sequence
ctccatgggtcattctttgctttta

SEQ ID NO: 186748 - DNA, 25 bp, Probe Sequence
ctgctaaagtctcctgttgtttacc

SEQ ID NO: 186749 - DNA, 25 bp, Probe Sequence
ctgccaagggttattttggcaccta

SEQ ID NO: 186750 - DNA, 25 bp, Probe Sequence
ctgccacgctggagtttaatccctc

SEQ ID NO: 186751 - DNA, 25 bp, Probe Sequence
ctgccccgaagactcctaataggtc

SEQ ID NO: 186752 - DNA, 25 bp, Probe Sequence
ctccccgacaggtcacataacagct

SEQ ID NO: 186753 - DNA, 25 bp, Probe Sequence
ctccccgaagtgttcacaacgtcac

SEQ ID NO: 186754 - DNA, 25 bp, Probe Sequence
ctccccgagttactcagcaacttaa

SEQ ID NO: 186755 - DNA, 25 bp, Probe Sequence
ctccccgagatgttgccatcagttt

SEQ ID NO: 186756 - DNA, 25 bp, Probe Sequence
ctccgcctggaagccatcatgaatg

SEQ ID NO: 186757 - DNA, 25 bp, Probe Sequence
ctccgcagctggttcccagatagat

SEQ ID NO: 186758 - DNA, 25 bp, Probe Sequence
ctccagcagttctctcgaatacttt

SEQ ID NO: 186759 - DNA, 25 bp, Probe Sequence
ctgcccatagtcaccaaattctgtt

SEQ ID NO: 186760 - DNA, 25 bp, Probe Sequence
ctccaaagccattgtaaatgtgtgt

SEQ ID NO: 186761 - DNA, 25 bp, Probe Sequence
ctccaccgccatgtcaaacttgtgg

SEQ ID NO: 186762 - DNA, 25 bp, Probe Sequence
ctccgtctctgtctcaaatttgtgg

SEQ ID NO: 186763 - DNA, 25 bp, Probe Sequence
ctccttgtctggcctagaagtgtgg

SEQ ID NO: 186764 - DNA, 25 bp, Probe Sequence
ctccctggtggcgaggaagctgagc

SEQ ID NO: 186765 - DNA, 25 bp, Probe Sequence
ctcctcggacctggagaacgtgcca

SEQ ID NO: 186766 - DNA, 25 bp, Probe Sequence
ctcctcggacctggagaacgtgcca

SEQ ID NO: 186767 - DNA, 25 bp, Probe Sequence
ctcctcggacctggagaacgtgcca

SEQ ID NO: 186768 - DNA, 25 bp, Probe Sequence
ctcctcggcctttgaaggcttccag

SEQ ID NO: 186769 - DNA, 25 bp, Probe Sequence
ctgcgattgtttgtgaaacttccag

SEQ ID NO: 186770 - DNA, 25 bp, Probe Sequence
ctgactagtttaaggagactggccg

SEQ ID NO: 186771 - DNA, 25 bp, Probe Sequence
ctgaagctggtgaacggcaaccccg

SEQ ID NO: 186772 - DNA, 25 bp, Probe Sequence
ctgaactgttactccaaatccactc

SEQ ID NO: 186773 - DNA, 25 bp, Probe Sequence
ctgaacgcaaatcagccactttaat

SEQ ID NO: 186774 - DNA, 25 bp, Probe Sequence
ctgacccaaaaagccatgattgtcc

SEQ ID NO: 186775 - DNA, 25 bp, Probe Sequence
ctgcctcccataaagcccaattatg

SEQ ID NO: 186776 - DNA, 25 bp, Probe Sequence
ctgcgttccataaaggtggctccag

SEQ ID NO: 186777 - DNA, 25 bp, Probe Sequence
ctcctgtccatgtgaaggtgtggag

SEQ ID NO: 186778 - DNA, 25 bp, Probe Sequence
ctcctgtccatgtgaaggtgtggag

SEQ ID NO: 186779 - DNA, 25 bp, Probe Sequence
ctcctgtcttgctagacaaggttgc

SEQ ID NO: 186780 - DNA, 25 bp, Probe Sequence
ctccgtctggcctaaaggtgatgta

SEQ ID NO: 186781 - DNA, 25 bp, Probe Sequence
ctccggcatggagagagagcggaaa

SEQ ID NO: 186782 - DNA, 25 bp, Probe Sequence
ctccggcatgtgcaaggccggcttc

SEQ ID NO: 186783 - DNA, 25 bp, Probe Sequence
ctccaggactgctcagaggggcgat

SEQ ID NO: 186784 - DNA, 25 bp, Probe Sequence
ctcctggtcatatgatgctgggggt

SEQ ID NO: 186785 - DNA, 25 bp, Probe Sequence
ctcctagtcttgatagcgagcgtta

SEQ ID NO: 186786 - DNA, 25 bp, Probe Sequence
ctccattgctcctctacaagcaatt

SEQ ID NO: 186787 - DNA, 25 bp, Probe Sequence
ctcctgctggtatcgcaccagtact

SEQ ID NO: 186788 - DNA, 25 bp, Probe Sequence
ctccctggtctgaccaccaggatcc

SEQ ID NO: 186789 - DNA, 25 bp, Probe Sequence
ctcctgcgggctaggcagccaggag

SEQ ID NO: 186790 - DNA, 25 bp, Probe Sequence
ctcccgaggctgagcagggcggggc

SEQ ID NO: 186791 - DNA, 25 bp, Probe Sequence
ctccctggagctgcacattgagcgg

SEQ ID NO: 186792 - DNA, 25 bp, Probe Sequence
ctcccgctgcagagtaagccgggct

SEQ ID NO: 186793 - DNA, 25 bp, Probe Sequence
ctcccgctgatgagcgaggcgggtg

SEQ ID NO: 186794 - DNA, 25 bp, Probe Sequence
ctcccgctaggtggtgtcaagcagg

SEQ ID NO: 186795 - DNA, 25 bp, Probe Sequence
ctcctgctgcttgctgtgttcaaga

SEQ ID NO: 186796 - DNA, 25 bp, Probe Sequence
ctcctgctgcttgctgtgttcaaga

SEQ ID NO: 186797 - DNA, 25 bp, Probe Sequence
ctccatcgatgttgtatttgcagtg

SEQ ID NO: 186798 - DNA, 25 bp, Probe Sequence
ctcctcagaggattatattcatcga

SEQ ID NO: 186799 - DNA, 25 bp, Probe Sequence
ctccgagagcagcttgagcacatca

SEQ ID NO: 186800 - DNA, 25 bp, Probe Sequence
ctgcgcggagctgtgtccaataaag

SEQ ID NO: 186801 - DNA, 25 bp, Probe Sequence
ctgcgcctgtgggattcccacgtat

SEQ ID NO: 186802 - DNA, 25 bp, Probe Sequence
ctccgctacggagcgccaggaatgg

SEQ ID NO: 186803 - DNA, 25 bp, Probe Sequence
ctgctggtttggggcacaaggaagc

SEQ ID NO: 186804 - DNA, 25 bp, Probe Sequence
ctgctgaccacgccgaatccggaag

SEQ ID NO: 186805 - DNA, 25 bp, Probe Sequence
ctgcccaactgtcaaccttgacaaa

SEQ ID NO: 186806 - DNA, 25 bp, Probe Sequence
ctgccccatgccacaaagttgaaaa

SEQ ID NO: 186807 - DNA, 25 bp, Probe Sequence
ctcccctcttccaatgagcttaaaa

SEQ ID NO: 186808 - DNA, 25 bp, Probe Sequence
ctcccccattgagcatgagctgtaa

SEQ ID NO: 186809 - DNA, 25 bp, Probe Sequence
ctcccccatccatcagaggcaaata

SEQ ID NO: 186810 - DNA, 25 bp, Probe Sequence
ctcccccatccatcagaggcaaata

SEQ ID NO: 186811 - DNA, 25 bp, Probe Sequence
ctcccccaaacaagtgagaacatac

SEQ ID NO: 186812 - DNA, 25 bp, Probe Sequence
ctcccccaactggtgaagaggatac

SEQ ID NO: 186813 - DNA, 25 bp, Probe Sequence
ctgccacccggagctgaatcagtat

SEQ ID NO: 186814 - DNA, 25 bp, Probe Sequence
ctccgcccaaaggctgcagatcagt

SEQ ID NO: 186815 - DNA, 25 bp, Probe Sequence
ctcccctgaacagcagctgcagcag

SEQ ID NO: 186816 - DNA, 25 bp, Probe Sequence
ctccccagcatgaaggcgctgagcc

SEQ ID NO: 186817 - DNA, 25 bp, Probe Sequence
ctgcagcccaaatacctgcagcccc

SEQ ID NO: 186818 - DNA, 25 bp, Probe Sequence
ctgcccttacagtagtgtagcgccc

SEQ ID NO: 186819 - DNA, 25 bp, Probe Sequence
ctgcccttacagtagtgtagcgccc

SEQ ID NO: 186820 - DNA, 25 bp, Probe Sequence
ctgcccttggtgtggacacaccctc

SEQ ID NO: 186821 - DNA, 25 bp, Probe Sequence
ctcctcatgcggagggacaagaccc

SEQ ID NO: 186822 - DNA, 25 bp, Probe Sequence
ctcctccacatcagggacaatctcc

SEQ ID NO: 186823 - DNA, 25 bp, Probe Sequence
ctcctgatcactctgaggacaatat

SEQ ID NO: 186824 - DNA, 25 bp, Probe Sequence
ctcctgacaccacagataaatctga

SEQ ID NO: 186825 - DNA, 25 bp, Probe Sequence
ctccagtgcccaccaggaggatctg

SEQ ID NO: 186826 - DNA, 25 bp, Probe Sequence
ctccagtgcccaccaggaggatctg

SEQ ID NO: 186827 - DNA, 25 bp, Probe Sequence
ctgccagctgagcaaaggacagtct

SEQ ID NO: 186828 - DNA, 25 bp, Probe Sequence
ctccagggtaaactagcgctccttt

SEQ ID NO: 186829 - DNA, 25 bp, Probe Sequence
ctgccaggaaacgatttgggcctct

SEQ ID NO: 186830 - DNA, 25 bp, Probe Sequence
ctccacgaaggcgtcctggagtcac

SEQ ID NO: 186831 - DNA, 25 bp, Probe Sequence
ctccaccaaggcgctggtgcaacac

SEQ ID NO: 186832 - DNA, 25 bp, Probe Sequence
ctccagcacaatcccagcgaaaaag

SEQ ID NO: 186833 - DNA, 25 bp, Probe Sequence
ctccactttccccttatagcaagtg

SEQ ID NO: 186834 - DNA, 25 bp, Probe Sequence
ctccactgtcctccattttaaacag

SEQ ID NO: 186835 - DNA, 25 bp, Probe Sequence
ctccagccctctcaagttaaacgaa

SEQ ID NO: 186836 - DNA, 25 bp, Probe Sequence
ctccagccctctcaagttaaacgaa

SEQ ID NO: 186837 - DNA, 25 bp, Probe Sequence
ctccagctttcctaacttcaaaatc

SEQ ID NO: 186838 - DNA, 25 bp, Probe Sequence
ctccagcatcttcagaacgctcaac

SEQ ID NO: 186839 - DNA, 25 bp, Probe Sequence
ctccagcatatgcacgttcactgca

SEQ ID NO: 186840 - DNA, 25 bp, Probe Sequence
ctgctggattgccacagttatcact

SEQ ID NO: 186841 - DNA, 25 bp, Probe Sequence
ctgctgcgtgtgaactgaacagacg

SEQ ID NO: 186842 - DNA, 25 bp, Probe Sequence
ctgcgcggcatatgcacacgaactg

SEQ ID NO: 186843 - DNA, 25 bp, Probe Sequence
ctgcgtagccatcagcaggaccgtt

SEQ ID NO: 186844 - DNA, 25 bp, Probe Sequence
ctgcggaccatgctgggagtcgcaa

SEQ ID NO: 186845 - DNA, 25 bp, Probe Sequence
ctgcagtactacatgggcttggccg

SEQ ID NO: 186846 - DNA, 25 bp, Probe Sequence
ctgcctactgagcaaggttgggtgc

SEQ ID NO: 186847 - DNA, 25 bp, Probe Sequence
ctgcctacggtgtcagtgttggacc

SEQ ID NO: 186848 - DNA, 25 bp, Probe Sequence
ctccttccggtcttgattggcagta

SEQ ID NO: 186849 - DNA, 25 bp, Probe Sequence
ctccgtggggaccagcattagcagt

SEQ ID NO: 186850 - DNA, 25 bp, Probe Sequence
ctccggcggacagctgcttacatgt

SEQ ID NO: 186851 - DNA, 25 bp, Probe Sequence
ctccaggccgacacctgtgaactga

SEQ ID NO: 186852 - DNA, 25 bp, Probe Sequence
ctgccaggggacaccgagaaaaaat

SEQ ID NO: 186853 - DNA, 25 bp, Probe Sequence
ctgcctgggtatccacgggacaaaa

SEQ ID NO: 186854 - DNA, 25 bp, Probe Sequence
ctgccgtacctttcagggacataaa

SEQ ID NO: 186855 - DNA, 25 bp, Probe Sequence
ctccactccgtttgctgtgaaaaaa

SEQ ID NO: 186856 - DNA, 25 bp, Probe Sequence
ctccgcatccggtgcgaggaagaag

SEQ ID NO: 186857 - DNA, 25 bp, Probe Sequence
ctcctgtcctggtgcggaagggatg

SEQ ID NO: 186858 - DNA, 25 bp, Probe Sequence
ctccaacctggggggcagtggtgtg

SEQ ID NO: 186859 - DNA, 25 bp, Probe Sequence
ctccgactgccgctgagaagggttg

SEQ ID NO: 186860 - DNA, 25 bp, Probe Sequence
ctccgactacagcatgtggaggaag

SEQ ID NO: 186861 - DNA, 25 bp, Probe Sequence
ctccagacttagctcctcaggaggg

SEQ ID NO: 186862 - DNA, 25 bp, Probe Sequence
ctccagggaatccgcctgcagagga

SEQ ID NO: 186863 - DNA, 25 bp, Probe Sequence
ctccagggagctctgaccaagcaga

SEQ ID NO: 186864 - DNA, 25 bp, Probe Sequence
ctgcgagggactttgaacatgtcgg

SEQ ID NO: 186865 - DNA, 25 bp, Probe Sequence
ctgcgcagggctctttgaggtgggt

SEQ ID NO: 186866 - DNA, 25 bp, Probe Sequence
ctgcggggccattcgtaggatgggt

SEQ ID NO: 186867 - DNA, 25 bp, Probe Sequence
ctgttgaccgtatgcttgcttgggt

SEQ ID NO: 186868 - DNA, 25 bp, Probe Sequence
ctgtttgacgtttgagtgccggctt

SEQ ID NO: 186869 - DNA, 25 bp, Probe Sequence
ctgttcatacccaaactgtctggca

SEQ ID NO: 186870 - DNA, 25 bp, Probe Sequence
ctgcgttacctcaacattgttctga

SEQ ID NO: 186871 - DNA, 25 bp, Probe Sequence
ctgcctctacctcatatgttgaata

SEQ ID NO: 186872 - DNA, 25 bp, Probe Sequence
ctgcctcccgaagttgcttgaaagc

SEQ ID NO: 186873 - DNA, 25 bp, Probe Sequence
ctgcctcccgaagttgcttgaaagc

SEQ ID NO: 186874 - DNA, 25 bp, Probe Sequence
ctccaccacagaagtccctgaaaga

SEQ ID NO: 186875 - DNA, 25 bp, Probe Sequence
ctgcgaatgaagaggcccggggagg

SEQ ID NO: 186876 - DNA, 25 bp, Probe Sequence
ctcctccaaacggactgagtgctcc

SEQ ID NO: 186877 - DNA, 25 bp, Probe Sequence
ctcctcactttccagactgggcagc

SEQ ID NO: 186878 - DNA, 25 bp, Probe Sequence
ctcctcacatcccagacgatgggcg

SEQ ID NO: 186879 - DNA, 25 bp, Probe Sequence
ctgcgtcctctacgacaatgtggtc

SEQ ID NO: 186880 - DNA, 25 bp, Probe Sequence
ctgcctccgtgaagacaagctgggc

SEQ ID NO: 186881 - DNA, 25 bp, Probe Sequence
ctcctctgccaaaaagttgagtgct

SEQ ID NO: 186882 - DNA, 25 bp, Probe Sequence
ctcctcccattatagttggtgaaga

SEQ ID NO: 186883 - DNA, 25 bp, Probe Sequence
ctcctcgctctcagttgttgggaaa

SEQ ID NO: 186884 - DNA, 25 bp, Probe Sequence
ctcctcatgctcgggtttttgatta

SEQ ID NO: 186885 - DNA, 25 bp, Probe Sequence
ctgcctatcctgaatggtttgtcat

SEQ ID NO: 186886 - DNA, 25 bp, Probe Sequence
ctccttgctcgttgattttgtttta

SEQ ID NO: 186887 - DNA, 25 bp, Probe Sequence
ctcctttggcttatttgcttttcca

SEQ ID NO: 186888 - DNA, 25 bp, Probe Sequence
ctgccttttattagttcgttttgct

SEQ ID NO: 186889 - DNA, 25 bp, Probe Sequence
ctccttttatgccttttggtcttga

SEQ ID NO: 186890 - DNA, 25 bp, Probe Sequence
ctcctgttcattgttcttgtgttct

SEQ ID NO: 186891 - DNA, 25 bp, Probe Sequence
ctcctgttatctccttgtttgaatt

SEQ ID NO: 186892 - DNA, 25 bp, Probe Sequence
ctccttcagtctgctctgtttaatt

SEQ ID NO: 186893 - DNA, 25 bp, Probe Sequence
ctccttcagtctgctctgtttaatt

SEQ ID NO: 186894 - DNA, 25 bp, Probe Sequence
ctccttcagtctgctctgtttaatt

SEQ ID NO: 186895 - DNA, 25 bp, Probe Sequence
ctcctgatcggtggcactgagacca

SEQ ID NO: 186896 - DNA, 25 bp, Probe Sequence
ctcctgtaggccgtctagaactggc

SEQ ID NO: 186897 - DNA, 25 bp, Probe Sequence
ctcctggagtacttccaacagttgc

SEQ ID NO: 186898 - DNA, 25 bp, Probe Sequence
ctgccttggatctcccaaagtgctg

SEQ ID NO: 186899 - DNA, 25 bp, Probe Sequence
ctccattatatcctcatccaacagg

SEQ ID NO: 186900 - DNA, 25 bp, Probe Sequence
ctcctgatattgccttagcaataga

SEQ ID NO: 186901 - DNA, 25 bp, Probe Sequence
ctcctgcatgcaactaattcaataa

SEQ ID NO: 186902 - DNA, 25 bp, Probe Sequence
ctcctgcatgcaactaattcaataa

SEQ ID NO: 186903 - DNA, 25 bp, Probe Sequence
ctcctgcatgcaactaattcaataa

SEQ ID NO: 186904 - DNA, 25 bp, Probe Sequence
ctcctcgtacatagacacagaaatc

SEQ ID NO: 186905 - DNA, 25 bp, Probe Sequence
ctcctcctataggatcacaactcct

SEQ ID NO: 186906 - DNA, 25 bp, Probe Sequence
ctccttcagtcagatcaccagtggt

SEQ ID NO: 186907 - DNA, 25 bp, Probe Sequence
ctccttaccgagaacacgtggctca

SEQ ID NO: 186908 - DNA, 25 bp, Probe Sequence
ctgcacgtcaccaagtaaccaggcc

SEQ ID NO: 186909 - DNA, 25 bp, Probe Sequence
ctcctgtgcaaccagtgcaacctgg

SEQ ID NO: 186910 - DNA, 25 bp, Probe Sequence
ctccatccacaaagtgcatcacctc

SEQ ID NO: 186911 - DNA, 25 bp, Probe Sequence
ctccacgcacacagtgagcagctgc

SEQ ID NO: 186912 - DNA, 25 bp, Probe Sequence
ctccacgcacacagtgagcagctgc

SEQ ID NO: 186913 - DNA, 25 bp, Probe Sequence
ctccagcgacccaatggcgtgtaac

SEQ ID NO: 186914 - DNA, 25 bp, Probe Sequence
ctccaggtcgctgagaggttgacca

SEQ ID NO: 186915 - DNA, 25 bp, Probe Sequence
ctccaggattgtcagtggcttcgcc

SEQ ID NO: 186916 - DNA, 25 bp, Probe Sequence
ctccggcaatgtgagctggctctgg

SEQ ID NO: 186917 - DNA, 25 bp, Probe Sequence
ctccgtgaagacaagctgggctggg

SEQ ID NO: 186918 - DNA, 25 bp, Probe Sequence
ctccgtgggaggctgggcaaggccg

SEQ ID NO: 186919 - DNA, 25 bp, Probe Sequence
ctcctggggagtccttggagtgccc

SEQ ID NO: 186920 - DNA, 25 bp, Probe Sequence
ctcctttgacgtcgtgtctcagatg

SEQ ID NO: 186921 - DNA, 25 bp, Probe Sequence
ctcctttgcaatagcagttataaca

SEQ ID NO: 186922 - DNA, 25 bp, Probe Sequence
ctgctccttgcccatagtaaaacag

SEQ ID NO: 186923 - DNA, 25 bp, Probe Sequence
ctgccacctgccacagtaaagcatc

SEQ ID NO: 186924 - DNA, 25 bp, Probe Sequence
ctcctcctgtgtcgctaagaagcta

SEQ ID NO: 186925 - DNA, 25 bp, Probe Sequence
ctcctctcttcctatagaacactgt

SEQ ID NO: 186926 - DNA, 25 bp, Probe Sequence
ctcctcttgctcctcaagtaagagg

SEQ ID NO: 186927 - DNA, 25 bp, Probe Sequence
ctcctacctcagtctatgtgagagg

SEQ ID NO: 186928 - DNA, 25 bp, Probe Sequence
ctcctgccctgctgtcattacaggg

SEQ ID NO: 186929 - DNA, 25 bp, Probe Sequence
ctcctgccctctggatgacataggg

SEQ ID NO: 186930 - DNA, 25 bp, Probe Sequence
ctcctggatcttgctgaattagtgg

SEQ ID NO: 186931 - DNA, 25 bp, Probe Sequence
ctcctgagagccactaatgtaagat

SEQ ID NO: 186932 - DNA, 25 bp, Probe Sequence
ctcctgggcgctattgtgtcagcag

SEQ ID NO: 186933 - DNA, 25 bp, Probe Sequence
ctcctgggcgctattgtgtcagcag

SEQ ID NO: 186934 - DNA, 25 bp, Probe Sequence
ctcctcgctgccagatgattgttca

SEQ ID NO: 186935 - DNA, 25 bp, Probe Sequence
ctcctctgttcaatcatgggtgtat

SEQ ID NO: 186936 - DNA, 25 bp, Probe Sequence
ctcctatggcttttgctgggttttg

SEQ ID NO: 186937 - DNA, 25 bp, Probe Sequence
ctccaatggctttatcctacctaga

SEQ ID NO: 186938 - DNA, 25 bp, Probe Sequence
ctcctgaggttcttcatattccaga

SEQ ID NO: 186939 - DNA, 25 bp, Probe Sequence
ctcctgggtgtctgtatacacgcca

SEQ ID NO: 186940 - DNA, 25 bp, Probe Sequence
ctccaggtggcctggtgactccatg

SEQ ID NO: 186941 - DNA, 25 bp, Probe Sequence
ctcctggggctatggctgtgcccag

SEQ ID NO: 186942 - DNA, 25 bp, Probe Sequence
ctcctggggctatggctgtgcccag

SEQ ID NO: 186943 - DNA, 25 bp, Probe Sequence
ctcctggggctatggctgtgcccag

SEQ ID NO: 186944 - DNA, 25 bp, Probe Sequence
ctcctggggctatggctgtgcccag

SEQ ID NO: 186945 - DNA, 25 bp, Probe Sequence
ctcctggggggcccagatcatcggg

SEQ ID NO: 186946 - DNA, 25 bp, Probe Sequence
ctcctgagcaaggggctgcaggtcg

SEQ ID NO: 186947 - DNA, 25 bp, Probe Sequence
ctcctacacagagcctctgtttgcc

SEQ ID NO: 186948 - DNA, 25 bp, Probe Sequence
ctcctagagccagcctcagttgatg

SEQ ID NO: 186949 - DNA, 25 bp, Probe Sequence
ctcctgagcggaatcctgcaaagat

SEQ ID NO: 186950 - DNA, 25 bp, Probe Sequence
ctcctgactgccatctggcacaagt

SEQ ID NO: 186951 - DNA, 25 bp, Probe Sequence
ctcctcattgcaaatctaagaacta

SEQ ID NO: 186952 - DNA, 25 bp, Probe Sequence
ctcctgctacattatatccagaagt

SEQ ID NO: 186953 - DNA, 25 bp, Probe Sequence
ctccatctgacattatttagactta

SEQ ID NO: 186954 - DNA, 25 bp, Probe Sequence
ctccatggacatcttcaacagcttc

SEQ ID NO: 186955 - DNA, 25 bp, Probe Sequence
ctccggcagttcttcaagcagctgc

SEQ ID NO: 186956 - DNA, 25 bp, Probe Sequence
ctcctgtgcaggtctctcggagagc

SEQ ID NO: 186957 - DNA, 25 bp, Probe Sequence
ctcctgtgctgagccaggctgagtg

SEQ ID NO: 186958 - DNA, 25 bp, Probe Sequence
ctcctgtgctgagccaggctgagtg

SEQ ID NO: 186959 - DNA, 25 bp, Probe Sequence
ctcctgtgctgacccaggctaagtg

SEQ ID NO: 186960 - DNA, 25 bp, Probe Sequence
ctcctggttcacgagtagagatgtg

SEQ ID NO: 186961 - DNA, 25 bp, Probe Sequence
ctgccggtgatactggtagttggtg

SEQ ID NO: 186962 - DNA, 25 bp, Probe Sequence
ctcctaggagggcttgctgtgcgga

SEQ ID NO: 186963 - DNA, 25 bp, Probe Sequence
ctcctaggagggcttgctgtgcgga

SEQ ID NO: 186964 - DNA, 25 bp, Probe Sequence
ctccagaggctcggggtggtctggg

SEQ ID NO: 186965 - DNA, 25 bp, Probe Sequence
ctgccgcagacgaagggttttggga

SEQ ID NO: 186966 - DNA, 25 bp, Probe Sequence
ctcctgagtcgctgggattactgag

SEQ ID NO: 186967 - DNA, 25 bp, Probe Sequence
ctgcccttccagaggttggtgaggg

SEQ ID NO: 186968 - DNA, 25 bp, Probe Sequence
ctgcccttgccatcttttaggatgg

SEQ ID NO: 186969 - DNA, 25 bp, Probe Sequence
ctccacctgcaaggtctttcaggta

SEQ ID NO: 186970 - DNA, 25 bp, Probe Sequence
ctccacccagcagtgtcctggggag

SEQ ID NO: 186971 - DNA, 25 bp, Probe Sequence
ctccatgaccaagatctatggggga

SEQ ID NO: 186972 - DNA, 25 bp, Probe Sequence
ctccatgtctgctagccatttaggt

SEQ ID NO: 186973 - DNA, 25 bp, Probe Sequence
ctccagcttctacgtggtcatgtgg

SEQ ID NO: 186974 - DNA, 25 bp, Probe Sequence
ctccatctcttcagtgtgcctgatg

SEQ ID NO: 186975 - DNA, 25 bp, Probe Sequence
ctccatctcctgtccaatgacatgt

SEQ ID NO: 186976 - DNA, 25 bp, Probe Sequence
ctccatccctatggcagaggaatgg

SEQ ID NO: 186977 - DNA, 25 bp, Probe Sequence
ctcctcgctctgggcgtggaaaggg

SEQ ID NO: 186978 - DNA, 25 bp, Probe Sequence
ctcctccctgacatgctgagaaagg

SEQ ID NO: 186979 - DNA, 25 bp, Probe Sequence
ctcctccctgacatgctgagaaagg

SEQ ID NO: 186980 - DNA, 25 bp, Probe Sequence
ctgccgttctgagtgtgcggaaggc

SEQ ID NO: 186981 - DNA, 25 bp, Probe Sequence
ctgctctttctgtctcgctagacag

SEQ ID NO: 186982 - DNA, 25 bp, Probe Sequence
ctgacttggctggcaactctgaagt

SEQ ID NO: 186983 - DNA, 25 bp, Probe Sequence
ctccttggctgatgacccagagccc

SEQ ID NO: 186984 - DNA, 25 bp, Probe Sequence
ctccttggctgatgacccagagccc

SEQ ID NO: 186985 - DNA, 25 bp, Probe Sequence
ctgccattagtgaccacctcaagtc

SEQ ID NO: 186986 - DNA, 25 bp, Probe Sequence
ctcctgggtgtggccaccatatgtg

SEQ ID NO: 186987 - DNA, 25 bp, Probe Sequence
ctcctcagatttgccaactgtggtg

SEQ ID NO: 186988 - DNA, 25 bp, Probe Sequence
ctcctagatacatacaatcttggac

SEQ ID NO: 186989 - DNA, 25 bp, Probe Sequence
ctcctatatacgctgccattactca

SEQ ID NO: 186990 - DNA, 25 bp, Probe Sequence
ctcctacatccgcattgctgatacc

SEQ ID NO: 186991 - DNA, 25 bp, Probe Sequence
ctcctgcacactctctatggatact

SEQ ID NO: 186992 - DNA, 25 bp, Probe Sequence
ctcctaaattgcatcagtgatcctg

SEQ ID NO: 186993 - DNA, 25 bp, Probe Sequence
ctgccacaaggtgcatgcagtgata

SEQ ID NO: 186994 - DNA, 25 bp, Probe Sequence
ctccaccactggtcatgctgatgac

SEQ ID NO: 186995 - DNA, 25 bp, Probe Sequence
ctccagccagttgtgctcatgagcg

SEQ ID NO: 186996 - DNA, 25 bp, Probe Sequence
ctccatggcggtggatgcctgactg

SEQ ID NO: 186997 - DNA, 25 bp, Probe Sequence
ctcctagggctgccagacatacgct

SEQ ID NO: 186998 - DNA, 25 bp, Probe Sequence
ctccatagaggtgagatcatacagt

SEQ ID NO: 186999 - DNA, 25 bp, Probe Sequence
ctcctagcagctgtcacactgaagt

SEQ ID NO: 187000 - DNA, 25 bp, Probe Sequence
ctcctgacagtcatacctgaaacaa

SEQ ID NO: 187001 - DNA, 25 bp, Probe Sequence
ctgcctacaacaaagccaaaaaagc

SEQ ID NO: 187002 - DNA, 25 bp, Probe Sequence
ctgatataaacacttccaaataaaa

SEQ ID NO: 187003 - DNA, 25 bp, Probe Sequence
ctgtaggaaccttatgacttacgta

SEQ ID NO: 187004 - DNA, 25 bp, Probe Sequence
ctgaaaaccctattacttatgcctg

SEQ ID NO: 187005 - DNA, 25 bp, Probe Sequence
ctgtaaaatagccaggaatttcctg

SEQ ID NO: 187006 - DNA, 25 bp, Probe Sequence
ctggccaagaagggccttactcctt

SEQ ID NO: 187007 - DNA, 25 bp, Probe Sequence
ctgcagctgaaatcggattcgtccc

SEQ ID NO: 187008 - DNA, 25 bp, Probe Sequence
ctgctgcagctgaaatcggattcgt

SEQ ID NO: 187009 - DNA, 25 bp, Probe Sequence
ctgtccattgaaggggtctgaaggc

SEQ ID NO: 187010 - DNA, 25 bp, Probe Sequence
gcgtcactaaagcaaaaacaggggg

SEQ ID NO: 187011 - DNA, 25 bp, Probe Sequence
ctgtccaaacagctagtaaccggct

SEQ ID NO: 187012 - DNA, 25 bp, Probe Sequence
ctgccaacagaccaccagaaacggg

SEQ ID NO: 187013 - DNA, 25 bp, Probe Sequence
ctgccgacgccgccggaaagcgtgc

SEQ ID NO: 187014 - DNA, 25 bp, Probe Sequence
cgacgaccggctcaacaaggttatc

SEQ ID NO: 187015 - DNA, 25 bp, Probe Sequence
cggcgagcggagtgaacaacctttc

SEQ ID NO: 187016 - DNA, 25 bp, Probe Sequence
ctgaccccggattaaaagcctcatc

SEQ ID NO: 187017 - DNA, 25 bp, Probe Sequence
cgacccgggttgagaggagctctgg

SEQ ID NO: 187018 - DNA, 25 bp, Probe Sequence
ctggcccgggtctgcttgggccagg

SEQ ID NO: 187019 - DNA, 25 bp, Probe Sequence
ctgttggggagattccctaggctag

SEQ ID NO: 187020 - DNA, 25 bp, Probe Sequence
ctgtcaggggtctccctgacgtcct

SEQ ID NO: 187021 - DNA, 25 bp, Probe Sequence
ctccagggagttaactcttcttctg

SEQ ID NO: 187022 - DNA, 25 bp, Probe Sequence
ctccaccagggtaccctgtcttggt

SEQ ID NO: 187023 - DNA, 25 bp, Probe Sequence
ctccaaatggggcccatggccttga

SEQ ID NO: 187024 - DNA, 25 bp, Probe Sequence
ctcctaagggggtcattctctatgg

SEQ ID NO: 187025 - DNA, 25 bp, Probe Sequence
ctcctaagggggtcattctctatgg

SEQ ID NO: 187026 - DNA, 25 bp, Probe Sequence
gctaatactcggggaaatgcttttg

SEQ ID NO: 187027 - DNA, 25 bp, Probe Sequence
ctgctaactcggctacaacatttgg

SEQ ID NO: 187028 - DNA, 25 bp, Probe Sequence
ctgcggaaccggagcaagctgtggg

SEQ ID NO: 187029 - DNA, 25 bp, Probe Sequence
ctgaggaaccgggtgcgggcaggtc

SEQ ID NO: 187030 - DNA, 25 bp, Probe Sequence
cggaattcgaaatggctggcggtaa

SEQ ID NO: 187031 - DNA, 25 bp, Probe Sequence
cggaaactagcctagtgtggtggcg

SEQ ID NO: 187032 - DNA, 25 bp, Probe Sequence
ctgttaagctgggcgttgtggttca

SEQ ID NO: 187033 - DNA, 25 bp, Probe Sequence
ctgggaactctagccgtggtccagg

SEQ ID NO: 187034 - DNA, 25 bp, Probe Sequence
ctgcccagactggataccgggaccg

SEQ ID NO: 187035 - DNA, 25 bp, Probe Sequence
ctccatagagagacacccgggaccg

SEQ ID NO: 187036 - DNA, 25 bp, Probe Sequence
ctccagagaacctcttgggagacag

SEQ ID NO: 187037 - DNA, 25 bp, Probe Sequence
ctccagggaccatctggggctggaa

SEQ ID NO: 187038 - DNA, 25 bp, Probe Sequence
ctccatgctggtcactagggtgctg

SEQ ID NO: 187039 - DNA, 25 bp, Probe Sequence
ctgccttcgagggtcaggttggaca

SEQ ID NO: 187040 - DNA, 25 bp, Probe Sequence
ctcctctgagaaggacgggcaggtc

SEQ ID NO: 187041 - DNA, 25 bp, Probe Sequence
ctgctccaggacagcggggaggtac

SEQ ID NO: 187042 - DNA, 25 bp, Probe Sequence
ctgccaggagacgtgaggggaagcc

SEQ ID NO: 187043 - DNA, 25 bp, Probe Sequence
ctgcctgcaaacagactgggatctg

SEQ ID NO: 187044 - DNA, 25 bp, Probe Sequence
ctgcctaccaacaactgggcttatc

SEQ ID NO: 187045 - DNA, 25 bp, Probe Sequence
ctgcccctgcaatagggtgtgtttg

SEQ ID NO: 187046 - DNA, 25 bp, Probe Sequence
ctcctcctcccattgaggtggggag

SEQ ID NO: 187047 - DNA, 25 bp, Probe Sequence
ctccacccctcatatgggcgtgggg

SEQ ID NO: 187048 - DNA, 25 bp, Probe Sequence
ctccacccctcatatgggcgtgggg

SEQ ID NO: 187049 - DNA, 25 bp, Probe Sequence
ctccacccctcatatgggcgtgggg

SEQ ID NO: 187050 - DNA, 25 bp, Probe Sequence
ctccacccctcatatgggcgtgggg

SEQ ID NO: 187051 - DNA, 25 bp, Probe Sequence
ctccacggcacctgtaggaggcggg

SEQ ID NO: 187052 - DNA, 25 bp, Probe Sequence
ctccatcatggcgcaggatcaaggt

SEQ ID NO: 187053 - DNA, 25 bp, Probe Sequence
ctccaagctctctaagatccgagtc

SEQ ID NO: 187054 - DNA, 25 bp, Probe Sequence
ctgcccagcttaaggtcctaaccat

SEQ ID NO: 187055 - DNA, 25 bp, Probe Sequence
ctgcggcaattggagtatttacacc

SEQ ID NO: 187056 - DNA, 25 bp, Probe Sequence
ctgctggaatggttgttgttttcca

SEQ ID NO: 187057 - DNA, 25 bp, Probe Sequence
ctgcggtggttcattcctttcagcc

SEQ ID NO: 187058 - DNA, 25 bp, Probe Sequence
ctgcgtgggtatttgtctccttagc

SEQ ID NO: 187059 - DNA, 25 bp, Probe Sequence
ctgcggaaattcttgtgcgcacact

SEQ ID NO: 187060 - DNA, 25 bp, Probe Sequence
ctgcggaaattcttgtgcgcacact

SEQ ID NO: 187061 - DNA, 25 bp, Probe Sequence
ctgctggaaacagactcgattcata

SEQ ID NO: 187062 - DNA, 25 bp, Probe Sequence
ctgctggtaagagagttgtcactac

SEQ ID NO: 187063 - DNA, 25 bp, Probe Sequence
ctgctgttagcagtcgttttcacca

SEQ ID NO: 187064 - DNA, 25 bp, Probe Sequence
ctgccttgctatgggttgttcaaga

SEQ ID NO: 187065 - DNA, 25 bp, Probe Sequence
ctgcccacttggcagtacatcaagt

SEQ ID NO: 187066 - DNA, 25 bp, Probe Sequence
ctgcccacttggcagtacatcaagt

SEQ ID NO: 187067 - DNA, 25 bp, Probe Sequence
ctcctctcttggggactctcaagag

SEQ ID NO: 187068 - DNA, 25 bp, Probe Sequence
ctcctctcttggggactctcaagag

SEQ ID NO: 187069 - DNA, 25 bp, Probe Sequence
ctgccaagcttggagtgacctaaag

SEQ ID NO: 187070 - DNA, 25 bp, Probe Sequence
ctgccaagtacatcgacctagacaa

SEQ ID NO: 187071 - DNA, 25 bp, Probe Sequence
ctgccaagtacatcgacctagacaa

SEQ ID NO: 187072 - DNA, 25 bp, Probe Sequence
ctgccagcatgttcaaagattatag

SEQ ID NO: 187073 - DNA, 25 bp, Probe Sequence
ctgccagatgtgccggtgacttcag

SEQ ID NO: 187074 - DNA, 25 bp, Probe Sequence
ctggtgtcagtccctacttaggaaa

SEQ ID NO: 187075 - DNA, 25 bp, Probe Sequence
ctgcgtggaaccggacatcaaggat

SEQ ID NO: 187076 - DNA, 25 bp, Probe Sequence
ctgctgttaccggccatataagaat

SEQ ID NO: 187077 - DNA, 25 bp, Probe Sequence
ctgcgtccagcctctaaatggaatg

SEQ ID NO: 187078 - DNA, 25 bp, Probe Sequence
ctcctctcagtctactcaattgtga

SEQ ID NO: 187079 - DNA, 25 bp, Probe Sequence
ctcctctgcagttactcaagtccat

SEQ ID NO: 187080 - DNA, 25 bp, Probe Sequence
ctccagctggataatcccactcaca

SEQ ID NO: 187081 - DNA, 25 bp, Probe Sequence
ctgccagtagcatatgcttgtctca

SEQ ID NO: 187082 - DNA, 25 bp, Probe Sequence
ctgccagtagcatatgcttgtctca

SEQ ID NO: 187083 - DNA, 25 bp, Probe Sequence
ctgccgatcagacatgtgggctccc

SEQ ID NO: 187084 - DNA, 25 bp, Probe Sequence
ctgccatgtaatctgtatagttcca

SEQ ID NO: 187085 - DNA, 25 bp, Probe Sequence
ctccattagcgctctgtggagtcca

SEQ ID NO: 187086 - DNA, 25 bp, Probe Sequence
ctcctctagctctggtgggaggccc

SEQ ID NO: 187087 - DNA, 25 bp, Probe Sequence
ctcctctgtgtcttgactgtgggca

SEQ ID NO: 187088 - DNA, 25 bp, Probe Sequence
ctcctctggatgttacttcctcagt

SEQ ID NO: 187089 - DNA, 25 bp, Probe Sequence
ctgcccactgtgttactgacctggg

SEQ ID NO: 187090 - DNA, 25 bp, Probe Sequence
ctgctccagataactttgaccagga

SEQ ID NO: 187091 - DNA, 25 bp, Probe Sequence
ctgccagacatacgctggagccagg

SEQ ID NO: 187092 - DNA, 25 bp, Probe Sequence
ctgccagaaagggggcctgttgtgc

SEQ ID NO: 187093 - DNA, 25 bp, Probe Sequence
ctgccagaaacgaacctctttgaaa

SEQ ID NO: 187094 - DNA, 25 bp, Probe Sequence
ctgccgagaagctttacctcgctga

SEQ ID NO: 187095 - DNA, 25 bp, Probe Sequence
ctccaagagtgatctaagctcagta

SEQ ID NO: 187096 - DNA, 25 bp, Probe Sequence
ctccaagaggtctccgtcatggcag

SEQ ID NO: 187097 - DNA, 25 bp, Probe Sequence
ctccacagggctttcggacatgaca

SEQ ID NO: 187098 - DNA, 25 bp, Probe Sequence
ctccaaagcctgttcaagctctaag

SEQ ID NO: 187099 - DNA, 25 bp, Probe Sequence
ctccaagactttccagacctggcag

SEQ ID NO: 187100 - DNA, 25 bp, Probe Sequence
ctccaaactttccaactgtgtaggc

SEQ ID NO: 187101 - DNA, 25 bp, Probe Sequence
gtacaaacttttcacccatgaggcc

SEQ ID NO: 187102 - DNA, 25 bp, Probe Sequence
gctaaaattatgactttccctgggt

SEQ ID NO: 187103 - DNA, 25 bp, Probe Sequence
gctacaaataaatgtcccgtggccc

SEQ ID NO: 187104 - DNA, 25 bp, Probe Sequence
ctgaaacataaatccgcaagtcacc

SEQ ID NO: 187105 - DNA, 25 bp, Probe Sequence
ctgtcaaaaattgagtcacgtccga

SEQ ID NO: 187106 - DNA, 25 bp, Probe Sequence
ctgccaaaaatatagctcacttatc

SEQ ID NO: 187107 - DNA, 25 bp, Probe Sequence
ctgccaatacacgaatgacatgaat

SEQ ID NO: 187108 - DNA, 25 bp, Probe Sequence
ctccttaaccaatagtcatcacctt

SEQ ID NO: 187109 - DNA, 25 bp, Probe Sequence
ctgccctaaggataaatgatcactt

SEQ ID NO: 187110 - DNA, 25 bp, Probe Sequence
ctccaccatccgtgagaacatcacg

SEQ ID NO: 187111 - DNA, 25 bp, Probe Sequence
ctccacactagcagagaccaaccga

SEQ ID NO: 187112 - DNA, 25 bp, Probe Sequence
ctgccagcctacaggaggaaaagca

SEQ ID NO: 187113 - DNA, 25 bp, Probe Sequence
ctgctggcctacagtggctacaaat

SEQ ID NO: 187114 - DNA, 25 bp, Probe Sequence
ctgccgctcagctttgatggaacaa

SEQ ID NO: 187115 - DNA, 25 bp, Probe Sequence
ctgctcagtgcaggttgtgacaacg

SEQ ID NO: 187116 - DNA, 25 bp, Probe Sequence
ctccagctcctcttggagaagctgt

SEQ ID NO: 187117 - DNA, 25 bp, Probe Sequence
ctccattcctcattgggaccaggtg

SEQ ID NO: 187118 - DNA, 25 bp, Probe Sequence
ctccttccctgaggcgcaggagggc

SEQ ID NO: 187119 - DNA, 25 bp, Probe Sequence
ctccttgccagctggcgagagggtg

SEQ ID NO: 187120 - DNA, 25 bp, Probe Sequence
ctccattgcgcgtgcgcgttgaggg

SEQ ID NO: 187121 - DNA, 25 bp, Probe Sequence
ctccatttgctgtactctttgctag

SEQ ID NO: 187122 - DNA, 25 bp, Probe Sequence
ctccattcaggattctgttccttag

SEQ ID NO: 187123 - DNA, 25 bp, Probe Sequence
ctgcctataggcattatgtccctca

SEQ ID NO: 187124 - DNA, 25 bp, Probe Sequence
ctgcctggagggtgctgtccagtat

SEQ ID NO: 187125 - DNA, 25 bp, Probe Sequence
ctgcttcaggggagctggttctttc

SEQ ID NO: 187126 - DNA, 25 bp, Probe Sequence
ctggaagggtcagcggtttgttcac

SEQ ID NO: 187127 - DNA, 25 bp, Probe Sequence
ctgggggaacacgtctttagtcctg

SEQ ID NO: 187128 - DNA, 25 bp, Probe Sequence
ctgaggggcaccacttttgagtgtt

SEQ ID NO: 187129 - DNA, 25 bp, Probe Sequence
ctgaggggtctataggtttgtgatt

SEQ ID NO: 187130 - DNA, 25 bp, Probe Sequence
ctgcgatggggccaaatcgtcctta

SEQ ID NO: 187131 - DNA, 25 bp, Probe Sequence
ctgccataggggcagtcctgcctta

SEQ ID NO: 187132 - DNA, 25 bp, Probe Sequence
ctccaacgagagccagagcctcgat

SEQ ID NO: 187133 - DNA, 25 bp, Probe Sequence
ctccagcaggaggacagagtgccct

SEQ ID NO: 187134 - DNA, 25 bp, Probe Sequence
ctccatctgtggttggagcgcctct

SEQ ID NO: 187135 - DNA, 25 bp, Probe Sequence
ctccatcttttttgcaacatctcat

SEQ ID NO: 187136 - DNA, 25 bp, Probe Sequence
ctccatcgtcttacagtcagtgttt

SEQ ID NO: 187137 - DNA, 25 bp, Probe Sequence
ctccagctgcttaacttcattttat

SEQ ID NO: 187138 - DNA, 25 bp, Probe Sequence
ctccatatctgtattacttttctgt

SEQ ID NO: 187139 - DNA, 25 bp, Probe Sequence
ctccatggtgttttagagtttctgt

SEQ ID NO: 187140 - DNA, 25 bp, Probe Sequence
ctgccttgttattgtaagtgccttc

SEQ ID NO: 187141 - DNA, 25 bp, Probe Sequence
ctgccaatgttaccttcaggccatg

SEQ ID NO: 187142 - DNA, 25 bp, Probe Sequence
ctgctaattccaccttatgggggaa

SEQ ID NO: 187143 - DNA, 25 bp, Probe Sequence
ctgctgtttattctgtaaggggaag

SEQ ID NO: 187144 - DNA, 25 bp, Probe Sequence
ctgcttcttttctgaccgggaaata

SEQ ID NO: 187145 - DNA, 25 bp, Probe Sequence
ctcctttttcaagcagcggataact

SEQ ID NO: 187146 - DNA, 25 bp, Probe Sequence
ctccatttatacagacaggcgtgaa

SEQ ID NO: 187147 - DNA, 25 bp, Probe Sequence
ctccattgataacgaggccctgtat

SEQ ID NO: 187148 - DNA, 25 bp, Probe Sequence
ctgccctgaaaagatacagtgtatg

SEQ ID NO: 187149 - DNA, 25 bp, Probe Sequence
ctgacctgcaactcaaaggcttttt

SEQ ID NO: 187150 - DNA, 25 bp, Probe Sequence
ctgtgccgcacagactaaggccacc

SEQ ID NO: 187151 - DNA, 25 bp, Probe Sequence
ctgcctcagctgggactgaagacct

SEQ ID NO: 187152 - DNA, 25 bp, Probe Sequence
ctgctctcctggacaatgtggaccc

SEQ ID NO: 187153 - DNA, 25 bp, Probe Sequence
ctgccatcctggatacgggcacgtc

SEQ ID NO: 187154 - DNA, 25 bp, Probe Sequence
ctgcctcggtttgttgagacagtca

SEQ ID NO: 187155 - DNA, 25 bp, Probe Sequence
gctgcagtggagctttttaaccgtg

SEQ ID NO: 187156 - DNA, 25 bp, Probe Sequence
cgcatgctaatcgctttttaccgcc

SEQ ID NO: 187157 - DNA, 25 bp, Probe Sequence
ctgttaactactacgttgacactgc

SEQ ID NO: 187158 - DNA, 25 bp, Probe Sequence
ctgattatacttctgagctgctacc

SEQ ID NO: 187159 - DNA, 25 bp, Probe Sequence
ctgcgttttctgcagatgctgctgc

SEQ ID NO: 187160 - DNA, 25 bp, Probe Sequence
ctcctagaatcttatgtgctgtgaa

SEQ ID NO: 187161 - DNA, 25 bp, Probe Sequence
ctccaaaatctgcatcagcggcaca

SEQ ID NO: 187162 - DNA, 25 bp, Probe Sequence
ctccacaatgcaagctacagagctg

SEQ ID NO: 187163 - DNA, 25 bp, Probe Sequence
ctccagacatgcggtgaccactatc

SEQ ID NO: 187164 - DNA, 25 bp, Probe Sequence
ctccatactgaaggctccattttca

SEQ ID NO: 187165 - DNA, 25 bp, Probe Sequence
ctccacatctgaaattccttttgac

SEQ ID NO: 187166 - DNA, 25 bp, Probe Sequence
ctgccatgtatgaaagtctctttat

SEQ ID NO: 187167 - DNA, 25 bp, Probe Sequence
ctgccatgcttattttgcctttcta

SEQ ID NO: 187168 - DNA, 25 bp, Probe Sequence
ctgcgctgttgttgtccgtatttaa

SEQ ID NO: 187169 - DNA, 25 bp, Probe Sequence
ctgcggccttaactctgtattaaaa

SEQ ID NO: 187170 - DNA, 25 bp, Probe Sequence
ctgccccagtattgctctgtattta

SEQ ID NO: 187171 - DNA, 25 bp, Probe Sequence
ctgccccctttgatgatgatgacaa

SEQ ID NO: 187172 - DNA, 25 bp, Probe Sequence
ctgccccctttgatgatgatgacaa

SEQ ID NO: 187173 - DNA, 25 bp, Probe Sequence
ctgccccctttgatgatgatgacaa

SEQ ID NO: 187174 - DNA, 25 bp, Probe Sequence
ctccacaccattaacaagatgagcc

SEQ ID NO: 187175 - DNA, 25 bp, Probe Sequence
ctccacctgagttacaaagacagac

SEQ ID NO: 187176 - DNA, 25 bp, Probe Sequence
ctgccgcctgagtttcaagaattaa

SEQ ID NO: 187177 - DNA, 25 bp, Probe Sequence
ctgcagagcaagttttcaaaatgta

SEQ ID NO: 187178 - DNA, 25 bp, Probe Sequence
ctgcagtgggtagtaataacatgta

SEQ ID NO: 187179 - DNA, 25 bp, Probe Sequence
ctgcggggatgctgcaaaactctga

SEQ ID NO: 187180 - DNA, 25 bp, Probe Sequence
ctgcggctggatggaaactacttga

SEQ ID NO: 187181 - DNA, 25 bp, Probe Sequence
ctgcggctggatggaaactacttga

SEQ ID NO: 187182 - DNA, 25 bp, Probe Sequence
ctgcggctggatggaaactacttga

SEQ ID NO: 187183 - DNA, 25 bp, Probe Sequence
ctgccctggtcgcataaatttgtct

SEQ ID NO: 187184 - DNA, 25 bp, Probe Sequence
ctgctcccctgcaaataaagccttt

SEQ ID NO: 187185 - DNA, 25 bp, Probe Sequence
ctgctcccctgcaaataaagccttt

SEQ ID NO: 187186 - DNA, 25 bp, Probe Sequence
ctgccaccccattctagaaaagtct

SEQ ID NO: 187187 - DNA, 25 bp, Probe Sequence
ctccacatcacaattctccaaaatt

SEQ ID NO: 187188 - DNA, 25 bp, Probe Sequence
ctccagacagaattctacatcggtc

SEQ ID NO: 187189 - DNA, 25 bp, Probe Sequence
ctgccagaatcaatttcctcaagcc

SEQ ID NO: 187190 - DNA, 25 bp, Probe Sequence
ctgctcggcactataccacaggtgc

SEQ ID NO: 187191 - DNA, 25 bp, Probe Sequence
cgtcggcatctacaccaatgtttac

SEQ ID NO: 187192 - DNA, 25 bp, Probe Sequence
cgtcagagccaacacctttgttgca

SEQ ID NO: 187193 - DNA, 25 bp, Probe Sequence
ctgtaggccagcccatggtgttgtg

SEQ ID NO: 187194 - DNA, 25 bp, Probe Sequence
ctgccaggtggtcagcgtgtttacg

SEQ ID NO: 187195 - DNA, 25 bp, Probe Sequence
ctccaaggcattcgatgcgtgttta

SEQ ID NO: 187196 - DNA, 25 bp, Probe Sequence
ctccaggacatcaggggttatcatc

SEQ ID NO: 187197 - DNA, 25 bp, Probe Sequence
ctccatggtatcagtgttcatttcc

SEQ ID NO: 187198 - DNA, 25 bp, Probe Sequence
ctccatgtctctgagcattagattt

SEQ ID NO: 187199 - DNA, 25 bp, Probe Sequence
ctccagtgtccatgcaatgaattgc

SEQ ID NO: 187200 - DNA, 25 bp, Probe Sequence
ctccagacatccaatcagaacattc

SEQ ID NO: 187201 - DNA, 25 bp, Probe Sequence
ctccatgtttgcaatacacaattcc

SEQ ID NO: 187202 - DNA, 25 bp, Probe Sequence
ctccttctgctgatagagctcattc

SEQ ID NO: 187203 - DNA, 25 bp, Probe Sequence
ctgccattgtctggtatgatctccc

SEQ ID NO: 187204 - DNA, 25 bp, Probe Sequence
ctgccattggcttgtatctctggga

SEQ ID NO: 187205 - DNA, 25 bp, Probe Sequence
ctgcccgttcagatctgcgagaagt

SEQ ID NO: 187206 - DNA, 25 bp, Probe Sequence
ctgcccgttcagatctgcgagaagt

SEQ ID NO: 187207 - DNA, 25 bp, Probe Sequence
ctgccttttctgtctcagcgggcag

SEQ ID NO: 187208 - DNA, 25 bp, Probe Sequence
ctccttcttgcgaccatatggggaa

SEQ ID NO: 187209 - DNA, 25 bp, Probe Sequence
ctccattctgggaccatctccagga

SEQ ID NO: 187210 - DNA, 25 bp, Probe Sequence
ctccatggggccaaatctgcctgaa

SEQ ID NO: 187211 - DNA, 25 bp, Probe Sequence
ctccatcgtggcctaactttgatta

SEQ ID NO: 187212 - DNA, 25 bp, Probe Sequence
ctccatctctatctcaactttatgt

SEQ ID NO: 187213 - DNA, 25 bp, Probe Sequence
ctccttctcatgcataaactctaat

SEQ ID NO: 187214 - DNA, 25 bp, Probe Sequence
ccctggtcatggagaccttgaacga

SEQ ID NO: 187215 - DNA, 25 bp, Probe Sequence
ctccttgatttgtgaccttgaccaa

SEQ ID NO: 187216 - DNA, 25 bp, Probe Sequence
ctgcctgtaattgagcctctctgat

SEQ ID NO: 187217 - DNA, 25 bp, Probe Sequence
ctgccgtaactggaatcttcatagg

SEQ ID NO: 187218 - DNA, 25 bp, Probe Sequence
ctgctgggaacgggacttctaaaag

SEQ ID NO: 187219 - DNA, 25 bp, Probe Sequence
ctgctgggaacgggacttctaaaag

SEQ ID NO: 187220 - DNA, 25 bp, Probe Sequence
ctggacaaacccttcttttaagatg

SEQ ID NO: 187221 - DNA, 25 bp, Probe Sequence
ctgcgacaagcagatttttgtaaaa

SEQ ID NO: 187222 - DNA, 25 bp, Probe Sequence
ctgcgaaggcaggttattagaagag

SEQ ID NO: 187223 - DNA, 25 bp, Probe Sequence
ctgccaagctgctgtacttcaaagg

SEQ ID NO: 187224 - DNA, 25 bp, Probe Sequence
ctgccaagatgctgatgcctaagaa

SEQ ID NO: 187225 - DNA, 25 bp, Probe Sequence
ctgccaagcatccagaccacaaatg

SEQ ID NO: 187226 - DNA, 25 bp, Probe Sequence
ctccattatccattcccaagatgcc

SEQ ID NO: 187227 - DNA, 25 bp, Probe Sequence
ctccattctccagtctgaacagttc

SEQ ID NO: 187228 - DNA, 25 bp, Probe Sequence
ctgctgcattcatggttagaagctt

SEQ ID NO: 187229 - DNA, 25 bp, Probe Sequence
ctgcatcatctttggcagacagaga

SEQ ID NO: 187230 - DNA, 25 bp, Probe Sequence
ctgcctttgactcactgacagaagt

SEQ ID NO: 187231 - DNA, 25 bp, Probe Sequence
ctgccttagcctcacaaagcattgg

SEQ ID NO: 187232 - DNA, 25 bp, Probe Sequence
ctgccctcagccaaacctgagtgat

SEQ ID NO: 187233 - DNA, 25 bp, Probe Sequence
ctccaacatggcgatcgttgatgtg

SEQ ID NO: 187234 - DNA, 25 bp, Probe Sequence
ctccaccaacaccgattgcatgtgc

SEQ ID NO: 187235 - DNA, 25 bp, Probe Sequence
ctgccataccactgtgactgcattg

SEQ ID NO: 187236 - DNA, 25 bp, Probe Sequence
ctgccataccactgtgactgcattg

SEQ ID NO: 187237 - DNA, 25 bp, Probe Sequence
ctgcctgaccacgtgagcattgtgg

SEQ ID NO: 187238 - DNA, 25 bp, Probe Sequence
ctgcctgtacaggagtctcaagctg

SEQ ID NO: 187239 - DNA, 25 bp, Probe Sequence
ctgccttaaccagtcgctagatgcc

SEQ ID NO: 187240 - DNA, 25 bp, Probe Sequence
ctgcctaaagcaggtagctctgaca

SEQ ID NO: 187241 - DNA, 25 bp, Probe Sequence
ctgcgtagcagttgagtgatgctgg

SEQ ID NO: 187242 - DNA, 25 bp, Probe Sequence
ctgcgcttcgcttggtgagtgcgta

SEQ ID NO: 187243 - DNA, 25 bp, Probe Sequence
ctgcctctcagaatgcttttgattg

SEQ ID NO: 187244 - DNA, 25 bp, Probe Sequence
ctgcctcctgaactacctgagggag

SEQ ID NO: 187245 - DNA, 25 bp, Probe Sequence
ctgcctccctaattagctagggctg

SEQ ID NO: 187246 - DNA, 25 bp, Probe Sequence
ctgccccctgaatggtatgtggtgc

SEQ ID NO: 187247 - DNA, 25 bp, Probe Sequence
ctgccacccggggagtatgtggtgg

SEQ ID NO: 187248 - DNA, 25 bp, Probe Sequence
ctccacccggtcttggtggtggtat

SEQ ID NO: 187249 - DNA, 25 bp, Probe Sequence
ctccaccgggagtctgcatggttgg

SEQ ID NO: 187250 - DNA, 25 bp, Probe Sequence
ctccacggtgagggccgatgtctgg

SEQ ID NO: 187251 - DNA, 25 bp, Probe Sequence
ctccacctggtcggacatacttgag

SEQ ID NO: 187252 - DNA, 25 bp, Probe Sequence
ctgccactctggacctaatagctgt

SEQ ID NO: 187253 - DNA, 25 bp, Probe Sequence
ctgcctttggtctgaatgactggga

SEQ ID NO: 187254 - DNA, 25 bp, Probe Sequence
ctgccctttcttaatatgactagtg

SEQ ID NO: 187255 - DNA, 25 bp, Probe Sequence
ctccactgagtctctaatgattagt

SEQ ID NO: 187256 - DNA, 25 bp, Probe Sequence
ctgcccgagagctcttagtttttaa

SEQ ID NO: 187257 - DNA, 25 bp, Probe Sequence
ctgcccaggactgcattgttttcta

SEQ ID NO: 187258 - DNA, 25 bp, Probe Sequence
ctgcccaggactgcattgttttcta

SEQ ID NO: 187259 - DNA, 25 bp, Probe Sequence
ctgcaaagaaccccagtttcctatt

SEQ ID NO: 187260 - DNA, 25 bp, Probe Sequence
ctgcaacgagccggacgtttcgaat

SEQ ID NO: 187261 - DNA, 25 bp, Probe Sequence
ctgccagcggtctgagtgtgagtcc

SEQ ID NO: 187262 - DNA, 25 bp, Probe Sequence
ctgctgaaggacctgttgctgcttc

SEQ ID NO: 187263 - DNA, 25 bp, Probe Sequence
ctgctgaaacccgatgctgtggaca

SEQ ID NO: 187264 - DNA, 25 bp, Probe Sequence
ctgcgagaggggccgcggagacaaa

SEQ ID NO: 187265 - DNA, 25 bp, Probe Sequence
ctgcagaatggctcccgcaaagaag

SEQ ID NO: 187266 - DNA, 25 bp, Probe Sequence
ctgctggctggagtctcaggccaaa

SEQ ID NO: 187267 - DNA, 25 bp, Probe Sequence
ctgctgagcgggactggtgacccat

SEQ ID NO: 187268 - DNA, 25 bp, Probe Sequence
ctgctgcagcagcatgaggagtacc

SEQ ID NO: 187269 - DNA, 25 bp, Probe Sequence
ctccacagctaagtgagatgcctca

SEQ ID NO: 187270 - DNA, 25 bp, Probe Sequence
ctccagctgcaatggcactgcagta

SEQ ID NO: 187271 - DNA, 25 bp, Probe Sequence
ctgcggctgatcaaggagctggcta

SEQ ID NO: 187272 - DNA, 25 bp, Probe Sequence
ctgctgcgtatccagagggtgccag

SEQ ID NO: 187273 - DNA, 25 bp, Probe Sequence
ctgctgctgtttggaggtctgtgca

SEQ ID NO: 187274 - DNA, 25 bp, Probe Sequence
ctgcgcagatttgcagggttgagat

SEQ ID NO: 187275 - DNA, 25 bp, Probe Sequence
ctgcggatctgtgagcagcggcaga

SEQ ID NO: 187276 - DNA, 25 bp, Probe Sequence
ctgcgcgtcgccaaagtgacaggcg

SEQ ID NO: 187277 - DNA, 25 bp, Probe Sequence
ctccacccccattggacgtcaatgg

SEQ ID NO: 187278 - DNA, 25 bp, Probe Sequence
ctccaaccccatttgacgtcaatgg

SEQ ID NO: 187279 - DNA, 25 bp, Probe Sequence
ctccaccctgccatctgaggaaggg

SEQ ID NO: 187280 - DNA, 25 bp, Probe Sequence
ctgccagtccccactgaggaaggaa

SEQ ID NO: 187281 - DNA, 25 bp, Probe Sequence
ctgccagtccccactgaggaaggaa

SEQ ID NO: 187282 - DNA, 25 bp, Probe Sequence
ctccagatccccatgtgagtacatg

SEQ ID NO: 187283 - DNA, 25 bp, Probe Sequence
ctccagcctggcgacggaggaatgc

SEQ ID NO: 187284 - DNA, 25 bp, Probe Sequence
ctccagcctggcaacagagtgagac

SEQ ID NO: 187285 - DNA, 25 bp, Probe Sequence
ctgcgcagccaggatagcatgagct

SEQ ID NO: 187286 - DNA, 25 bp, Probe Sequence
ctccagcatgcacatcacagactgc

SEQ ID NO: 187287 - DNA, 25 bp, Probe Sequence
ctccagctgctggtgaagatgcatg

SEQ ID NO: 187288 - DNA, 25 bp, Probe Sequence
ctgccatgtgctggtaacgcatgcc

SEQ ID NO: 187289 - DNA, 25 bp, Probe Sequence
ctccagcctggtgacagagccagat

SEQ ID NO: 187290 - DNA, 25 bp, Probe Sequence
ctccagcctgggcagcagagcaaca

SEQ ID NO: 187291 - DNA, 25 bp, Probe Sequence
ctccagcctgggcggcagagcaaaa

SEQ ID NO: 187292 - DNA, 25 bp, Probe Sequence
ctccagcctgggtgacagagtgaaa

SEQ ID NO: 187293 - DNA, 25 bp, Probe Sequence
ctccagcctgggtgacagagtgaga

SEQ ID NO: 187294 - DNA, 25 bp, Probe Sequence
ctccagcctgggcgacagagcgaga

SEQ ID NO: 187295 - DNA, 25 bp, Probe Sequence
ctccagcctgggccacaaagcaaga

SEQ ID NO: 187296 - DNA, 25 bp, Probe Sequence
ctccagcggcgccatgagcaaatga

SEQ ID NO: 187297 - DNA, 25 bp, Probe Sequence
ctccatggctggtcatgagagcaaa

SEQ ID NO: 187298 - DNA, 25 bp, Probe Sequence
ctgcgtgacttgccatgagaccaag

SEQ ID NO: 187299 - DNA, 25 bp, Probe Sequence
ctgcccacttgccagtacatcaagt

SEQ ID NO: 187300 - DNA, 25 bp, Probe Sequence
ctgccatcgttgtaggagtagagct

SEQ ID NO: 187301 - DNA, 25 bp, Probe Sequence
ctgcgatcatgtccaaggattggcc

SEQ ID NO: 187302 - DNA, 25 bp, Probe Sequence
ctgaatttccaaagtgtaccaattt

SEQ ID NO: 187303 - DNA, 25 bp, Probe Sequence
ctgaattcccttctgagttaatgtc

SEQ ID NO: 187304 - DNA, 25 bp, Probe Sequence
ctgccacatccctgggtttatgatg

SEQ ID NO: 187305 - DNA, 25 bp, Probe Sequence
ctgccaacccatggaagttgtttct

SEQ ID NO: 187306 - DNA, 25 bp, Probe Sequence
ctgccaactttcaacagtgtctctt

SEQ ID NO: 187307 - DNA, 25 bp, Probe Sequence
ctgctcaacctactgcaggggctgg

SEQ ID NO: 187308 - DNA, 25 bp, Probe Sequence
ctgccaccactgacgaggagcggca

SEQ ID NO: 187309 - DNA, 25 bp, Probe Sequence
ctgccccactgggagtagcggctaa

SEQ ID NO: 187310 - DNA, 25 bp, Probe Sequence
ctgcctcccaggcagggggtgcaga

SEQ ID NO: 187311 - DNA, 25 bp, Probe Sequence
ctgccccaagtaagagcgagtctgc

SEQ ID NO: 187312 - DNA, 25 bp, Probe Sequence
ctgcctgccaaggacatacagacca

SEQ ID NO: 187313 - DNA, 25 bp, Probe Sequence
ctgccagccatcggcagcaagcgac

SEQ ID NO: 187314 - DNA, 25 bp, Probe Sequence
ctgctgcagcagaggagaagaaaga

SEQ ID NO: 187315 - DNA, 25 bp, Probe Sequence
ctgcgacagagggaaatgacattgc

SEQ ID NO: 187316 - DNA, 25 bp, Probe Sequence
ctgccaggtctggaaagtcttggag

SEQ ID NO: 187317 - DNA, 25 bp, Probe Sequence
ctgctcgggtcatcaactatgagga

SEQ ID NO: 187318 - DNA, 25 bp, Probe Sequence
ctccagggtgcatctcctggtcagg

SEQ ID NO: 187319 - DNA, 25 bp, Probe Sequence
ctgccagggtgattctggtggccct

SEQ ID NO: 187320 - DNA, 25 bp, Probe Sequence
ctgccagggtgattctggtggccct

SEQ ID NO: 187321 - DNA, 25 bp, Probe Sequence
ctgaaggtgtacaggtgccctctgt

SEQ ID NO: 187322 - DNA, 25 bp, Probe Sequence
gcgcaagggttcaggagttcccttt

SEQ ID NO: 187323 - DNA, 25 bp, Probe Sequence
cgcatcgggtctcagtttttttgtt

SEQ ID NO: 187324 - DNA, 25 bp, Probe Sequence
ctgctctcgtttcagctttgatttt

SEQ ID NO: 187325 - DNA, 25 bp, Probe Sequence
ctgctttttagtctttatcattcta

SEQ ID NO: 187326 - DNA, 25 bp, Probe Sequence
ctgcccctaagtgaatctcatcata

SEQ ID NO: 187327 - DNA, 25 bp, Probe Sequence
ctgccatcttaaatgtaagctgaaa

SEQ ID NO: 187328 - DNA, 25 bp, Probe Sequence
ctgcctctccaggatgtctacaaaa

SEQ ID NO: 187329 - DNA, 25 bp, Probe Sequence
ctgccctcccagtttcaagggattc

SEQ ID NO: 187330 - DNA, 25 bp, Probe Sequence
ctgccctgcccattttgaaggaaca

SEQ ID NO: 187331 - DNA, 25 bp, Probe Sequence
ctgccctgacccttgtataggttgg

SEQ ID NO: 187332 - DNA, 25 bp, Probe Sequence
ctccacagcccgcagtatatttttg

SEQ ID NO: 187333 - DNA, 25 bp, Probe Sequence
ctccaccctcagcagatgataatat

SEQ ID NO: 187334 - DNA, 25 bp, Probe Sequence
ctccacccacactatcatagatttc

SEQ ID NO: 187335 - DNA, 25 bp, Probe Sequence
ctccaccactcattttatgactcca

SEQ ID NO: 187336 - DNA, 25 bp, Probe Sequence
ctccactctatatttgtattgccct

SEQ ID NO: 187337 - DNA, 25 bp, Probe Sequence
ctccaagccactatatgttgccctg

SEQ ID NO: 187338 - DNA, 25 bp, Probe Sequence
ctgccacaccacgtaagttctcagt

SEQ ID NO: 187339 - DNA, 25 bp, Probe Sequence
ctgccacaccacgtaagttctcagt

SEQ ID NO: 187340 - DNA, 25 bp, Probe Sequence
ctgccagctccaagctatttctaca

SEQ ID NO: 187341 - DNA, 25 bp, Probe Sequence
ctgcagcacccaagcaagttttccc

SEQ ID NO: 187342 - DNA, 25 bp, Probe Sequence
ctgccagcaaccgaagttttcactc

SEQ ID NO: 187343 - DNA, 25 bp, Probe Sequence
ctgccaagcaccgggtggtttccgg

SEQ ID NO: 187344 - DNA, 25 bp, Probe Sequence
ctgcaaagcaccctactggttttga

SEQ ID NO: 187345 - DNA, 25 bp, Probe Sequence
ctgcaaatgtccagaaggcttcttg

SEQ ID NO: 187346 - DNA, 25 bp, Probe Sequence
ctgcgactataacaaggtggccatc

SEQ ID NO: 187347 - DNA, 25 bp, Probe Sequence
ctgcaacggagactccggtgggccg

SEQ ID NO: 187348 - DNA, 25 bp, Probe Sequence
cgcaactgacaccccgggtggtgga

SEQ ID NO: 187349 - DNA, 25 bp, Probe Sequence
ctgccactcaaccccgggagtggtg

SEQ ID NO: 187350 - DNA, 25 bp, Probe Sequence
ctgccccatgggcacgggaggggcg

SEQ ID NO: 187351 - DNA, 25 bp, Probe Sequence
ctgcccctgggccgcaagaagggag

SEQ ID NO: 187352 - DNA, 25 bp, Probe Sequence
ctgcccctgggccgcaagaagggag

SEQ ID NO: 187353 - DNA, 25 bp, Probe Sequence
ctgccccttggctcaaaggtggtgg

SEQ ID NO: 187354 - DNA, 25 bp, Probe Sequence
ctgccctttgggcaaggttgggaca

SEQ ID NO: 187355 - DNA, 25 bp, Probe Sequence
ctgctcctttgggggaatgtttggc

SEQ ID NO: 187356 - DNA, 25 bp, Probe Sequence
ctgccgttagcgactgcgacgttcg

SEQ ID NO: 187357 - DNA, 25 bp, Probe Sequence
ctgccgttagcgactgcgacgttcg

SEQ ID NO: 187358 - DNA, 25 bp, Probe Sequence
ctgccgtctctggatcggaatttac

SEQ ID NO: 187359 - DNA, 25 bp, Probe Sequence
ctgccggccatgacatcacagagca

SEQ ID NO: 187360 - DNA, 25 bp, Probe Sequence
ctgctcggccgagacggctacatga

SEQ ID NO: 187361 - DNA, 25 bp, Probe Sequence
ctgctggtccgtgacgccaagcaga

SEQ ID NO: 187362 - DNA, 25 bp, Probe Sequence
ctgcgtgccctttaagccaagagag

SEQ ID NO: 187363 - DNA, 25 bp, Probe Sequence
ctgctgtcctttcacagccatggag

SEQ ID NO: 187364 - DNA, 25 bp, Probe Sequence
ctgcctcctcttgtcaggcagggac

SEQ ID NO: 187365 - DNA, 25 bp, Probe Sequence
ctgcttccgtggttgaggcgcggaa

SEQ ID NO: 187366 - DNA, 25 bp, Probe Sequence
ctgccctccttgttgtggacaggga

SEQ ID NO: 187367 - DNA, 25 bp, Probe Sequence
ctgccaccccgtgagggcagaggca

SEQ ID NO: 187368 - DNA, 25 bp, Probe Sequence
ctgccaactcacgtctggggagtgg

SEQ ID NO: 187369 - DNA, 25 bp, Probe Sequence
ctgccaactcacgtctggggagtgg

SEQ ID NO: 187370 - DNA, 25 bp, Probe Sequence
ctgccatcatcttcgtggtggccag

SEQ ID NO: 187371 - DNA, 25 bp, Probe Sequence
ctgccatcatcttcgtggtggccag

SEQ ID NO: 187372 - DNA, 25 bp, Probe Sequence
ctgcctgacctcagagtgtccaggg

SEQ ID NO: 187373 - DNA, 25 bp, Probe Sequence
ctgcccgcctcattgagatgtaccg

SEQ ID NO: 187374 - DNA, 25 bp, Probe Sequence
ctgcccgcctcattgagatgtaccg

SEQ ID NO: 187375 - DNA, 25 bp, Probe Sequence
ctgccaagcgtacagactgatccaa

SEQ ID NO: 187376 - DNA, 25 bp, Probe Sequence
ctgctattcgggtaatcttcacaga

SEQ ID NO: 187377 - DNA, 25 bp, Probe Sequence
ctgctcttggggccagagccaagag

SEQ ID NO: 187378 - DNA, 25 bp, Probe Sequence
ctgcattaccggtcgatgcaacgag

SEQ ID NO: 187379 - DNA, 25 bp, Probe Sequence
ctgcttctgacacagtgagcaacaa

SEQ ID NO: 187380 - DNA, 25 bp, Probe Sequence
ctgctttaaaagtcagtgccaagtg

SEQ ID NO: 187381 - DNA, 25 bp, Probe Sequence
ctgcttatgcccagacggactatgg

SEQ ID NO: 187382 - DNA, 25 bp, Probe Sequence
ctgcctgatggggtgacttggcctg

SEQ ID NO: 187383 - DNA, 25 bp, Probe Sequence
ctgcctgtatatgtggcttcctctg

SEQ ID NO: 187384 - DNA, 25 bp, Probe Sequence
ctgctcattaatcctgggagtcttt

SEQ ID NO: 187385 - DNA, 25 bp, Probe Sequence
ctgccagtgactcttagtgtctgtt

SEQ ID NO: 187386 - DNA, 25 bp, Probe Sequence
ctgccagcaccgtttttgtggttag

SEQ ID NO: 187387 - DNA, 25 bp, Probe Sequence
ctgcccattcagtattttgttttcc

SEQ ID NO: 187388 - DNA, 25 bp, Probe Sequence
ctgaccaggagctactttgagtttg

SEQ ID NO: 187389 - DNA, 25 bp, Probe Sequence
ctgaccaggagctactttgagtttg

SEQ ID NO: 187390 - DNA, 25 bp, Probe Sequence
ctgctgacgggctcttgtgaagtta

SEQ ID NO: 187391 - DNA, 25 bp, Probe Sequence
ctgctctctgggtatttgaaatgtc

SEQ ID NO: 187392 - DNA, 25 bp, Probe Sequence
ctgcttcagccccatttgaattgta

SEQ ID NO: 187393 - DNA, 25 bp, Probe Sequence
ctgctacagcagggtggtaatattg

SEQ ID NO: 187394 - DNA, 25 bp, Probe Sequence
ctgccaccatgttttgtaatttgag

SEQ ID NO: 187395 - DNA, 25 bp, Probe Sequence
ctgctgcctagtctctgataattta

SEQ ID NO: 187396 - DNA, 25 bp, Probe Sequence
ctgctgtctcaggaatgattgcaat

SEQ ID NO: 187397 - DNA, 25 bp, Probe Sequence
ctgctgctatcaggatacctgaaaa

SEQ ID NO: 187398 - DNA, 25 bp, Probe Sequence
ctgcactctcaggagcccaaaatca

SEQ ID NO: 187399 - DNA, 25 bp, Probe Sequence
ctgcagttgggggccaacaaagctc

SEQ ID NO: 187400 - DNA, 25 bp, Probe Sequence
ctgcgtatggcgggacaaccatggc

SEQ ID NO: 187401 - DNA, 25 bp, Probe Sequence
ctgccactgtccggaaattcatggt

SEQ ID NO: 187402 - DNA, 25 bp, Probe Sequence
ctgcaactgttccgcaaactggggc

SEQ ID NO: 187403 - DNA, 25 bp, Probe Sequence
ctgcaaacttcctgaactgggtggt

SEQ ID NO: 187404 - DNA, 25 bp, Probe Sequence
ctgcttaagtactgcaacctcttgg

SEQ ID NO: 187405 - DNA, 25 bp, Probe Sequence
ctgcctaagctgtatctgaaacacc

SEQ ID NO: 187406 - DNA, 25 bp, Probe Sequence
ctgccttattattctgatgactcac

SEQ ID NO: 187407 - DNA, 25 bp, Probe Sequence
ctgccttgagtggcctgatcgccac

SEQ ID NO: 187408 - DNA, 25 bp, Probe Sequence
ctgacactgattgatccaggacatc

SEQ ID NO: 187409 - DNA, 25 bp, Probe Sequence
ctgagaaattggcccagttccatta

SEQ ID NO: 187410 - DNA, 25 bp, Probe Sequence
ctgcaactttggaaaactcctcttc

SEQ ID NO: 187411 - DNA, 25 bp, Probe Sequence
ctgcaactttcttaacaatgattct

SEQ ID NO: 187412 - DNA, 25 bp, Probe Sequence
ctgcgactcttcacagtgcaaattc

SEQ ID NO: 187413 - DNA, 25 bp, Probe Sequence
ctgcccatgcccaggagcaaattcg

SEQ ID NO: 187414 - DNA, 25 bp, Probe Sequence
ctgccctgctacaggaagagtggga

SEQ ID NO: 187415 - DNA, 25 bp, Probe Sequence
ctgccaccaacatggagactttgta

SEQ ID NO: 187416 - DNA, 25 bp, Probe Sequence
ctgctgcccaactggcagggtagtg

SEQ ID NO: 187417 - DNA, 25 bp, Probe Sequence
ctgcgcgaaatcctggcggggaagg

SEQ ID NO: 187418 - DNA, 25 bp, Probe Sequence
ctgcgggctaccagtgatgggttgg

SEQ ID NO: 187419 - DNA, 25 bp, Probe Sequence
ctgcaaggacaaaggctatggaggt

SEQ ID NO: 187420 - DNA, 25 bp, Probe Sequence
ctgcctctgaaaagctgctcggggt

SEQ ID NO: 187421 - DNA, 25 bp, Probe Sequence
ctccacgtcattttgtcaggctggt

SEQ ID NO: 187422 - DNA, 25 bp, Probe Sequence
ctccaagctcctctgtgaagcaggt

SEQ ID NO: 187423 - DNA, 25 bp, Probe Sequence
ctgctcaaatagtacggacagcggt

SEQ ID NO: 187424 - DNA, 25 bp, Probe Sequence
ctgctccagtagttcgaggaccacc

SEQ ID NO: 187425 - DNA, 25 bp, Probe Sequence
ctgctgcttgtatttcggtacagaa

SEQ ID NO: 187426 - DNA, 25 bp, Probe Sequence
ctgctgcttggagttcagtgagagc

SEQ ID NO: 187427 - DNA, 25 bp, Probe Sequence
ctgctgcaatgggctctgagctgga

SEQ ID NO: 187428 - DNA, 25 bp, Probe Sequence
ctgccactgctgacatctggggaga

SEQ ID NO: 187429 - DNA, 25 bp, Probe Sequence
ctgccactgctgacatctggggaga

SEQ ID NO: 187430 - DNA, 25 bp, Probe Sequence
ctgccagctctgaactgagtccaac

SEQ ID NO: 187431 - DNA, 25 bp, Probe Sequence
ctgcgcatcgcttactatgcatcca

SEQ ID NO: 187432 - DNA, 25 bp, Probe Sequence
ctgcgcatcgcttactatgcatcca

SEQ ID NO: 187433 - DNA, 25 bp, Probe Sequence
ctgctatcagcatcattatgtaaaa

SEQ ID NO: 187434 - DNA, 25 bp, Probe Sequence
ctgcatataagagttatgttagcca

SEQ ID NO: 187435 - DNA, 25 bp, Probe Sequence
ctgctatgggactattgctgtgatc

SEQ ID NO: 187436 - DNA, 25 bp, Probe Sequence
ctgctgggtgtccattgccatatcg

SEQ ID NO: 187437 - DNA, 25 bp, Probe Sequence
ctgcttaatggccacatgccagtgc

SEQ ID NO: 187438 - DNA, 25 bp, Probe Sequence
ctgctttcagggcctacgagtgaag

SEQ ID NO: 187439 - DNA, 25 bp, Probe Sequence
ctgcttgtctgggactcacatacat

SEQ ID NO: 187440 - DNA, 25 bp, Probe Sequence
ctgctaactcctagctgactcagca

SEQ ID NO: 187441 - DNA, 25 bp, Probe Sequence
cgtatggtccatagtacccattagg

SEQ ID NO: 187442 - DNA, 25 bp, Probe Sequence
ctgccatggtacagaactggattct

SEQ ID NO: 187443 - DNA, 25 bp, Probe Sequence
ctgccagtgccgacaggacggtcat

SEQ ID NO: 187444 - DNA, 25 bp, Probe Sequence
ctgccagtgccgacaggacggtcat

SEQ ID NO: 187445 - DNA, 25 bp, Probe Sequence
ctgccatctgaggaaggggtgacaa

SEQ ID NO: 187446 - DNA, 25 bp, Probe Sequence
ctgctcctgcgtggagggggaatgt

SEQ ID NO: 187447 - DNA, 25 bp, Probe Sequence
cgacctcctaagtgggactgaagac

SEQ ID NO: 187448 - DNA, 25 bp, Probe Sequence
ctgaccctcaaatacggagcgaagc

SEQ ID NO: 187449 - DNA, 25 bp, Probe Sequence
ctgccctgccaatcagactttgggg

SEQ ID NO: 187450 - DNA, 25 bp, Probe Sequence
ctgccggccacataacatttgcact

SEQ ID NO: 187451 - DNA, 25 bp, Probe Sequence
ctgccgcccactgcaagatgaatga

SEQ ID NO: 187452 - DNA, 25 bp, Probe Sequence
ctgcggcgcaccggattgcagaagg

SEQ ID NO: 187453 - DNA, 25 bp, Probe Sequence
ctgcggcgcaccggattgcagaagg

SEQ ID NO: 187454 - DNA, 25 bp, Probe Sequence
ctgcgggcaaggggtgcaggcgggt

SEQ ID NO: 187455 - DNA, 25 bp, Probe Sequence
ctgcgggaggagcggctacggcagt

SEQ ID NO: 187456 - DNA, 25 bp, Probe Sequence
ctgcgggaggagcggctacggcagt

SEQ ID NO: 187457 - DNA, 25 bp, Probe Sequence
ctgcggcctgggccagagtcaggga

SEQ ID NO: 187458 - DNA, 25 bp, Probe Sequence
ctgcggcaaggccgtggtgctgatg

SEQ ID NO: 187459 - DNA, 25 bp, Probe Sequence
ctgcctgaaggcgagtgtgggcata

SEQ ID NO: 187460 - DNA, 25 bp, Probe Sequence
ctgctggacaggggcgtgggattga

SEQ ID NO: 187461 - DNA, 25 bp, Probe Sequence
ctgctgttcggcagcgatggctact

SEQ ID NO: 187462 - DNA, 25 bp, Probe Sequence
ctgctttgagtcaaggggcttcact

SEQ ID NO: 187463 - DNA, 25 bp, Probe Sequence
ctgcttctgttaaagtcactgacct

SEQ ID NO: 187464 - DNA, 25 bp, Probe Sequence
ctgctttgacttcagtacgctgctc

SEQ ID NO: 187465 - DNA, 25 bp, Probe Sequence
ctgctatatggttcggtaggctgtg

SEQ ID NO: 187466 - DNA, 25 bp, Probe Sequence
ctgctatcactggtccgttggtgga

SEQ ID NO: 187467 - DNA, 25 bp, Probe Sequence
ctgcaaacaggtgcgtcggaccgag

SEQ ID NO: 187468 - DNA, 25 bp, Probe Sequence
ctgcacagacagcatccaggggacc

SEQ ID NO: 187469 - DNA, 25 bp, Probe Sequence
ctgcacagtaggtacagtgtacact

SEQ ID NO: 187470 - DNA, 25 bp, Probe Sequence
ctgctaacaagaacgcttccatctc

SEQ ID NO: 187471 - DNA, 25 bp, Probe Sequence
ctgccagagaactcctatgcatccc

SEQ ID NO: 187472 - DNA, 25 bp, Probe Sequence
ctgacaggaagctcaagttccccct

SEQ ID NO: 187473 - DNA, 25 bp, Probe Sequence
ctgacaagaccagaggctaccaccc

SEQ ID NO: 187474 - DNA, 25 bp, Probe Sequence
ctgaaacggcgaggaccaccaaccg

SEQ ID NO: 187475 - DNA, 25 bp, Probe Sequence
ctgcctgacggccaggtcatcacca

SEQ ID NO: 187476 - DNA, 25 bp, Probe Sequence
ctgcctgacggccaggtcatcacca

SEQ ID NO: 187477 - DNA, 25 bp, Probe Sequence
ctgctctgaaggagggcaaccctga

SEQ ID NO: 187478 - DNA, 25 bp, Probe Sequence
ctgcctggagaattaaggaccctga

SEQ ID NO: 187479 - DNA, 25 bp, Probe Sequence
ctgccatgggcaagaagaagatcgc

SEQ ID NO: 187480 - DNA, 25 bp, Probe Sequence
ctgcctgggctcgggagatatctga

SEQ ID NO: 187481 - DNA, 25 bp, Probe Sequence
ctgcgtgcggcagacggttcgcagc

SEQ ID NO: 187482 - DNA, 25 bp, Probe Sequence
ctgcgtctggatgactgtgacttcc

SEQ ID NO: 187483 - DNA, 25 bp, Probe Sequence
ctgcgctgtgcactcaacaagagtt

SEQ ID NO: 187484 - DNA, 25 bp, Probe Sequence
ctgcgttgcacttgtcattgtgttt

SEQ ID NO: 187485 - DNA, 25 bp, Probe Sequence
ctgccattggcttctcagatgtatt

SEQ ID NO: 187486 - DNA, 25 bp, Probe Sequence
ctgccacatgggtccagtgttcatc

SEQ ID NO: 187487 - DNA, 25 bp, Probe Sequence
ctgccactgtgggcatcagaggccc

SEQ ID NO: 187488 - DNA, 25 bp, Probe Sequence
ctgccactggcagtcatcaagtgta

SEQ ID NO: 187489 - DNA, 25 bp, Probe Sequence
ctgccactgagcctgtgcagggtac

SEQ ID NO: 187490 - DNA, 25 bp, Probe Sequence
ctgccactgagcctgtgcagggtac

SEQ ID NO: 187491 - DNA, 25 bp, Probe Sequence
ctgccactgagctgtagctgcgtga

SEQ ID NO: 187492 - DNA, 25 bp, Probe Sequence
ctgccactcaacaaatgctggtgca

SEQ ID NO: 187493 - DNA, 25 bp, Probe Sequence
ctgcctccaaaatctgcatcagcgg

SEQ ID NO: 187494 - DNA, 25 bp, Probe Sequence
ctgcctccaaggcattcgatgcgtg

SEQ ID NO: 187495 - DNA, 25 bp, Probe Sequence
ctgcctgaagtgcgagaaatgtggg

SEQ ID NO: 187496 - DNA, 25 bp, Probe Sequence
ctgcctgcagcagtcacggaaggtg

SEQ ID NO: 187497 - DNA, 25 bp, Probe Sequence
ctgccttcttcaaggcctgggcaat

SEQ ID NO: 187498 - DNA, 25 bp, Probe Sequence
ctgccatatcttcaggccatgggtt

SEQ ID NO: 187499 - DNA, 25 bp, Probe Sequence
ctgctaattatatcagctctgaggt

SEQ ID NO: 187500 - DNA, 25 bp, Probe Sequence
ctgctgtttgaagcgcagcaggtgc

SEQ ID NO: 187501 - DNA, 25 bp, Probe Sequence
ctgcctgctgtgaacctgaaggtga

SEQ ID NO: 187502 - DNA, 25 bp, Probe Sequence
ctgcctgtgtacctcgtaggaacgc

SEQ ID NO: 187503 - DNA, 25 bp, Probe Sequence
ctgcactggcaagaaaatggaccca

SEQ ID NO: 187504 - DNA, 25 bp, Probe Sequence
ctgctttggacctaaatggcctcat

SEQ ID NO: 187505 - DNA, 25 bp, Probe Sequence
ctgctgggtggcagaaatggttcct

SEQ ID NO: 187506 - DNA, 25 bp, Probe Sequence
ctgctgtggggcacacattgggtca

SEQ ID NO: 187507 - DNA, 25 bp, Probe Sequence
ctgctgtgggccagtcaggggtgag

SEQ ID NO: 187508 - DNA, 25 bp, Probe Sequence
ctgctgggaccccgggagtgagagc

SEQ ID NO: 187509 - DNA, 25 bp, Probe Sequence
ctgagcagggcctctagtggaacac

SEQ ID NO: 187510 - DNA, 25 bp, Probe Sequence
ctgaacgtggtgtctcactctgaaa

SEQ ID NO: 187511 - DNA, 25 bp, Probe Sequence
ctgaaagggctggagccctgaggag

SEQ ID NO: 187512 - DNA, 25 bp, Probe Sequence
ctgcccatcaagctcaatcagtggt

SEQ ID NO: 187513 - DNA, 25 bp, Probe Sequence
ctgctgctctgcaggtaccatggag

SEQ ID NO: 187514 - DNA, 25 bp, Probe Sequence
ctgctgtggcattgtgtgggcatgt

SEQ ID NO: 187515 - DNA, 25 bp, Probe Sequence
ctgcctgagatggttgctgctatga

SEQ ID NO: 187516 - DNA, 25 bp, Probe Sequence
ctgcctgacatggaggctgtggcag

SEQ ID NO: 187517 - DNA, 25 bp, Probe Sequence
ctgccatagctggggccaagctgag

SEQ ID NO: 187518 - DNA, 25 bp, Probe Sequence
ctgccatcaccgagaacagtatgtg

SEQ ID NO: 187519 - DNA, 25 bp, Probe Sequence
ctgccacccagaagactgtggatgg

SEQ ID NO: 187520 - DNA, 25 bp, Probe Sequence
ctgccatcacccaggctggagtgtg

SEQ ID NO: 187521 - DNA, 25 bp, Probe Sequence
ctgctgacccactacgtgaaggtgc

SEQ ID NO: 187522 - DNA, 25 bp, Probe Sequence
ctgccaccgcatgacgtcaatggag

SEQ ID NO: 187523 - DNA, 25 bp, Probe Sequence
ctgccgtagcatgattgcgctcatg

SEQ ID NO: 187524 - DNA, 25 bp, Probe Sequence
ctgcctttgcacatctagtgctggt

SEQ ID NO: 187525 - DNA, 25 bp, Probe Sequence
ctgcctcttcatagtcaaggctctt

SEQ ID NO: 187526 - DNA, 25 bp, Probe Sequence
ctgccttctgcatttatttgccttt

SEQ ID NO: 187527 - DNA, 25 bp, Probe Sequence
ctgcctctatcttgttttttgtttt

SEQ ID NO: 187528 - DNA, 25 bp, Probe Sequence
ctgctttcaattcttgttggtatat

SEQ ID NO: 187529 - DNA, 25 bp, Probe Sequence
ctgcttgtcaacaccatgttcttca

SEQ ID NO: 187530 - DNA, 25 bp, Probe Sequence
ctgcctaatgaccccatgtttaagt

SEQ ID NO: 187531 - DNA, 25 bp, Probe Sequence
ctgcactcaagaccctcgagattaa

SEQ ID NO: 187532 - DNA, 25 bp, Probe Sequence
ctgcactcaagaccctcgagattaa

SEQ ID NO: 187533 - DNA, 25 bp, Probe Sequence
ctgcctcaaatcacccaatcaaagt

SEQ ID NO: 187534 - DNA, 25 bp, Probe Sequence
ctgccttctagcacgccaaataaat

SEQ ID NO: 187535 - DNA, 25 bp, Probe Sequence
ctgcccattcagatgcccaagaaga

SEQ ID NO: 187536 - DNA, 25 bp, Probe Sequence
ctgcctttggtgacacactgagtga

SEQ ID NO: 187537 - DNA, 25 bp, Probe Sequence
ctgcctgttggtggcatcaaggaga

SEQ ID NO: 187538 - DNA, 25 bp, Probe Sequence
ctgccggtggtggactatgaacact

SEQ ID NO: 187539 - DNA, 25 bp, Probe Sequence
ctgcccgtggtggactataagcact

SEQ ID NO: 187540 - DNA, 25 bp, Probe Sequence
ctgcccttggtggaccaatttccaa

SEQ ID NO: 187541 - DNA, 25 bp, Probe Sequence
ctgcctctgtttgacaaacctctaa

SEQ ID NO: 187542 - DNA, 25 bp, Probe Sequence
ctgcctctggtgagaggtagctcct

SEQ ID NO: 187543 - DNA, 25 bp, Probe Sequence
ctgccctgttctggtggtttcaggc

SEQ ID NO: 187544 - DNA, 25 bp, Probe Sequence
ctgccctgagtggagtattaaagac

SEQ ID NO: 187545 - DNA, 25 bp, Probe Sequence
ctgcccagagctggagacattaggg

SEQ ID NO: 187546 - DNA, 25 bp, Probe Sequence
ctgcccgagctggtgcattacagag

SEQ ID NO: 187547 - DNA, 25 bp, Probe Sequence
ctgctcactgcgtggattaccagaa

SEQ ID NO: 187548 - DNA, 25 bp, Probe Sequence
ctgctccagctgcggagctggtcga

SEQ ID NO: 187549 - DNA, 25 bp, Probe Sequence
ctgcctcagccttctgagtagctgg

SEQ ID NO: 187550 - DNA, 25 bp, Probe Sequence
ctgcctgagctcttctgtaagctgg

SEQ ID NO: 187551 - DNA, 25 bp, Probe Sequence
ctgctcacagtcctcatttactgga

SEQ ID NO: 187552 - DNA, 25 bp, Probe Sequence
ctgccccatatccttgatactggag

SEQ ID NO: 187553 - DNA, 25 bp, Probe Sequence
ctgccgcctcatgtaggacaggatg

SEQ ID NO: 187554 - DNA, 25 bp, Probe Sequence
ctgctcaggtggctagggtggatgg

SEQ ID NO: 187555 - DNA, 25 bp, Probe Sequence
ctgccaggctggattgtacgggccc

SEQ ID NO: 187556 - DNA, 25 bp, Probe Sequence
ctgccggcagatatgtttcaagagc

SEQ ID NO: 187557 - DNA, 25 bp, Probe Sequence
ctgcctgaaaggtttgtacagatgc

SEQ ID NO: 187558 - DNA, 25 bp, Probe Sequence
ctgctcctatcagggttgctaaacc

SEQ ID NO: 187559 - DNA, 25 bp, Probe Sequence
ctgcccttcactgcatagacagaac

SEQ ID NO: 187560 - DNA, 25 bp, Probe Sequence
ctgcccctggctgaagaagatcatg

SEQ ID NO: 187561 - DNA, 25 bp, Probe Sequence
ctgcccctgacccaagggcagctgg

SEQ ID NO: 187562 - DNA, 25 bp, Probe Sequence
ctgcccttaggccacatgggagcag

SEQ ID NO: 187563 - DNA, 25 bp, Probe Sequence
ctgcctttctgacaatgtgtggagt

SEQ ID NO: 187564 - DNA, 25 bp, Probe Sequence
ctgcctgtactactctagggagtat

SEQ ID NO: 187565 - DNA, 25 bp, Probe Sequence
ctgccccagctacttgggaggctga

SEQ ID NO: 187566 - DNA, 25 bp, Probe Sequence
ctgcctcacattttgtgggtgttga

SEQ ID NO: 187567 - DNA, 25 bp, Probe Sequence
ctgactatgactgcagtgggttttt

SEQ ID NO: 187568 - DNA, 25 bp, Probe Sequence
ctgcactaacctttggtatcctttt

SEQ ID NO: 187569 - DNA, 25 bp, Probe Sequence
ctgcctcaaggttttgcattcatct

SEQ ID NO: 187570 - DNA, 25 bp, Probe Sequence
ctgcctcctggtgatatttgctgct

SEQ ID NO: 187571 - DNA, 25 bp, Probe Sequence
ctgcccttgtctgagatgctggtaa

SEQ ID NO: 187572 - DNA, 25 bp, Probe Sequence
ctgccttggttcagcagcgggtcaa

SEQ ID NO: 187573 - DNA, 25 bp, Probe Sequence
ctgacctggttaagagaatgaccga

SEQ ID NO: 187574 - DNA, 25 bp, Probe Sequence
ctgacctggttctcaacagacccag

SEQ ID NO: 187575 - DNA, 25 bp, Probe Sequence
ctgaagtggttctgaacacaccaca

SEQ ID NO: 187576 - DNA, 25 bp, Probe Sequence
ctgaaatgggtgcgtcatcagcctc

SEQ ID NO: 187577 - DNA, 25 bp, Probe Sequence
cgaagcgaactggatccacgctcgc

SEQ ID NO: 187578 - DNA, 25 bp, Probe Sequence
ctgaaagaactgaatgcccgaccct

SEQ ID NO: 187579 - DNA, 25 bp, Probe Sequence
ctgaaagaactgaatgcccgaccct

SEQ ID NO: 187580 - DNA, 25 bp, Probe Sequence
ctgagaaggcctgagccgtgacctc

SEQ ID NO: 187581 - DNA, 25 bp, Probe Sequence
ctgcaaggagcggggtcgtgaccgc

SEQ ID NO: 187582 - DNA, 25 bp, Probe Sequence
ctgcacgtgacaggcgaggcggcag

SEQ ID NO: 187583 - DNA, 25 bp, Probe Sequence
ctgcctctgacagcagcctgtgagg

SEQ ID NO: 187584 - DNA, 25 bp, Probe Sequence
ctgcttagatcactgcagcttctag

SEQ ID NO: 187585 - DNA, 25 bp, Probe Sequence
ctgctgataagctggcttcattaaa

SEQ ID NO: 187586 - DNA, 25 bp, Probe Sequence
ctgctgatgataccagtgctgctgt

SEQ ID NO: 187587 - DNA, 25 bp, Probe Sequence
ctgctgtgcatacagacgtggctac

SEQ ID NO: 187588 - DNA, 25 bp, Probe Sequence
ctgctggtgaacttctgtggccacc

SEQ ID NO: 187589 - DNA, 25 bp, Probe Sequence
ctgctggtcaaagtcattgcccacg

SEQ ID NO: 187590 - DNA, 25 bp, Probe Sequence
ctgctgtgtacatctgagcatccca

SEQ ID NO: 187591 - DNA, 25 bp, Probe Sequence
ctgctcctacattcatgcattttcc

SEQ ID NO: 187592 - DNA, 25 bp, Probe Sequence
ctgctaagcagctgctgctttatcc

SEQ ID NO: 187593 - DNA, 25 bp, Probe Sequence
ctgcaaacactgctgctcatgattt

SEQ ID NO: 187594 - DNA, 25 bp, Probe Sequence
ctgcaagaatactggcagttcactg

SEQ ID NO: 187595 - DNA, 25 bp, Probe Sequence
ctgctcttgtagtggacttcctgag

SEQ ID NO: 187596 - DNA, 25 bp, Probe Sequence
ctgctattgttgttgagttatagga

SEQ ID NO: 187597 - DNA, 25 bp, Probe Sequence
ctgcttggtgtagagttgatggcaa

SEQ ID NO: 187598 - DNA, 25 bp, Probe Sequence
ctgctaaggctaaagttgatctgaa

SEQ ID NO: 187599 - DNA, 25 bp, Probe Sequence
ctgctaagtcaagggttcactgcat

SEQ ID NO: 187600 - DNA, 25 bp, Probe Sequence
ctgctaagtcaagggttcactgcat

SEQ ID NO: 187601 - DNA, 25 bp, Probe Sequence
ctgctggagtcagacgtcagacttg

SEQ ID NO: 187602 - DNA, 25 bp, Probe Sequence
ctgctggagctggcaaggtcaccaa

SEQ ID NO: 187603 - DNA, 25 bp, Probe Sequence
ctgcatgccctggcagggttccagc

SEQ ID NO: 187604 - DNA, 25 bp, Probe Sequence
ctgcatgccctggcagggttccagc

SEQ ID NO: 187605 - DNA, 25 bp, Probe Sequence
ctgcatgccctggcagggttccagc

SEQ ID NO: 187606 - DNA, 25 bp, Probe Sequence
ctgcgccacccagtgtgtgtggagc

SEQ ID NO: 187607 - DNA, 25 bp, Probe Sequence
ctgcgcagccagaagcctgtgatgg

SEQ ID NO: 187608 - DNA, 25 bp, Probe Sequence
ctgcctgccagaacatgctgtttga

SEQ ID NO: 187609 - DNA, 25 bp, Probe Sequence
ctgctgttaatgaagctgttctgat

SEQ ID NO: 187610 - DNA, 25 bp, Probe Sequence
ctgcagttcttatgcaggcctatcg

SEQ ID NO: 187611 - DNA, 25 bp, Probe Sequence
ctgcgcccattgagcaggagccatc

SEQ ID NO: 187612 - DNA, 25 bp, Probe Sequence
ctgcccaatctctgagaagcctgca

SEQ ID NO: 187613 - DNA, 25 bp, Probe Sequence
ctgcccagtgccttagatacaagaa

SEQ ID NO: 187614 - DNA, 25 bp, Probe Sequence
ctgaccgtgcctgcaggttggcaaa

SEQ ID NO: 187615 - DNA, 25 bp, Probe Sequence
ctgctccagtgtgtccgtgaggcag

SEQ ID NO: 187616 - DNA, 25 bp, Probe Sequence
ctgctccagtgtgtccgtgaggcag

SEQ ID NO: 187617 - DNA, 25 bp, Probe Sequence
ctgctctagattggcccatggtgcc

SEQ ID NO: 187618 - DNA, 25 bp, Probe Sequence
ctgtcatcagtcagcagcctggtat

SEQ ID NO: 187619 - DNA, 25 bp, Probe Sequence
ctgctcagccttcagcctgagatgc

SEQ ID NO: 187620 - DNA, 25 bp, Probe Sequence
ctgcgagtgcaagatcacgcgctgc

SEQ ID NO: 187621 - DNA, 25 bp, Probe Sequence
ctgcgagtgcaagatcacgcgctgc

SEQ ID NO: 187622 - DNA, 25 bp, Probe Sequence
ctgctgtggaaggacccgcgaaacg

SEQ ID NO: 187623 - DNA, 25 bp, Probe Sequence
ctgcgggaagccgaccggcagaagg

SEQ ID NO: 187624 - DNA, 25 bp, Probe Sequence
ctgcagccagaacaacgtggtgaga

SEQ ID NO: 187625 - DNA, 25 bp, Probe Sequence
ccgacagcaacgtggtcttggacac

SEQ ID NO: 187626 - DNA, 25 bp, Probe Sequence
cgcttagcaacctggagtttgccca

SEQ ID NO: 187627 - DNA, 25 bp, Probe Sequence
ctgctgtacagatatcgagagtttc

SEQ ID NO: 187628 - DNA, 25 bp, Probe Sequence
ctgcctgaaatttgaacagctttcc

SEQ ID NO: 187629 - DNA, 25 bp, Probe Sequence
ctgcattgagacttgaaacctttgg

SEQ ID NO: 187630 - DNA, 25 bp, Probe Sequence
ctgcttatgagggccaaacttctgg

SEQ ID NO: 187631 - DNA, 25 bp, Probe Sequence
ctggttgcagctgcagatacctcgg

SEQ ID NO: 187632 - DNA, 25 bp, Probe Sequence
ctgcgcaggactcagatgacttcga

SEQ ID NO: 187633 - DNA, 25 bp, Probe Sequence
ctgcccagactgatgagcacatctc

SEQ ID NO: 187634 - DNA, 25 bp, Probe Sequence
ctgcccagaagttggcatgtcctgt

SEQ ID NO: 187635 - DNA, 25 bp, Probe Sequence
ctgctcacagaacggatcatgtccc

SEQ ID NO: 187636 - DNA, 25 bp, Probe Sequence
ctgctcaatgacgggatcctacgga

SEQ ID NO: 187637 - DNA, 25 bp, Probe Sequence
ctgctgtagccagtgcagacctcac

SEQ ID NO: 187638 - DNA, 25 bp, Probe Sequence
ctgctgtagaatggattccacacag

SEQ ID NO: 187639 - DNA, 25 bp, Probe Sequence
ctgcatatcaaagtcattcccacac

SEQ ID NO: 187640 - DNA, 25 bp, Probe Sequence
cggataacacatttcaccacccgga

SEQ ID NO: 187641 - DNA, 25 bp, Probe Sequence
gcgtgaaacaatgcaccgtctttag

SEQ ID NO: 187642 - DNA, 25 bp, Probe Sequence
gcgtgccaacaagcctgcttaattt

SEQ ID NO: 187643 - DNA, 25 bp, Probe Sequence
ctgctccaccaacaggctaaatttg

SEQ ID NO: 187644 - DNA, 25 bp, Probe Sequence
ctgctgccagcattagcctggctca

SEQ ID NO: 187645 - DNA, 25 bp, Probe Sequence
ctgctgccagcattagcctggctca

SEQ ID NO: 187646 - DNA, 25 bp, Probe Sequence
ctgatgcagctgtacagtgcgcgcc

SEQ ID NO: 187647 - DNA, 25 bp, Probe Sequence
ctgctgacgactctgtgcagctgcg

SEQ ID NO: 187648 - DNA, 25 bp, Probe Sequence
ctgcgaggagtgcgacgtgagtctg

SEQ ID NO: 187649 - DNA, 25 bp, Probe Sequence
ctgaaggggctttgtggcatctctg

SEQ ID NO: 187650 - DNA, 25 bp, Probe Sequence
ctgagggagtggagaggcccggggc

SEQ ID NO: 187651 - DNA, 25 bp, Probe Sequence
ctgagtgggtagacgcaggcggcag

SEQ ID NO: 187652 - DNA, 25 bp, Probe Sequence
ctgacaagggacaagacggtggtct

SEQ ID NO: 187653 - DNA, 25 bp, Probe Sequence
ctgaactggatgaggacgagggctt

SEQ ID NO: 187654 - DNA, 25 bp, Probe Sequence
ctgaacggagttcaaaggctgctgg

SEQ ID NO: 187655 - DNA, 25 bp, Probe Sequence
ctgcttcggaggaacccagagcgga

SEQ ID NO: 187656 - DNA, 25 bp, Probe Sequence
ctgctgggagagatcccctggcttg

SEQ ID NO: 187657 - DNA, 25 bp, Probe Sequence
ctgccggaagacaccgtgttgcttc

SEQ ID NO: 187658 - DNA, 25 bp, Probe Sequence
ctgacacggaacaccaggtctgctc

SEQ ID NO: 187659 - DNA, 25 bp, Probe Sequence
ctgaccagaaacacttcgctgctgc

SEQ ID NO: 187660 - DNA, 25 bp, Probe Sequence
ctgaaaaggaaagcattctgctctt

SEQ ID NO: 187661 - DNA, 25 bp, Probe Sequence
ctgaaaagggcttccagtcccgtca

SEQ ID NO: 187662 - DNA, 25 bp, Probe Sequence
ctgaaaagggcttccagtcccgtca

SEQ ID NO: 187663 - DNA, 25 bp, Probe Sequence
cggaaaatggcagacaatttttcgc

SEQ ID NO: 187664 - DNA, 25 bp, Probe Sequence
cgcgaaaattcggccagggttctcg

SEQ ID NO: 187665 - DNA, 25 bp, Probe Sequence
ctgcagaaagaggccctcggggtcc

SEQ ID NO: 187666 - DNA, 25 bp, Probe Sequence
ctgcaacaagggccaagcccgggcc

SEQ ID NO: 187667 - DNA, 25 bp, Probe Sequence
ctgaaaatgtggtctcaggggtgcc

SEQ ID NO: 187668 - DNA, 25 bp, Probe Sequence
ctgaaaaggaacttgctgaggctgc

SEQ ID NO: 187669 - DNA, 25 bp, Probe Sequence
ctgaagataccttcatcgctgaccc

SEQ ID NO: 187670 - DNA, 25 bp, Probe Sequence
ctgcagaaattctcatcctggccga

SEQ ID NO: 187671 - DNA, 25 bp, Probe Sequence
ctgctgaagtaccaccactgtgtgg

SEQ ID NO: 187672 - DNA, 25 bp, Probe Sequence
ctgcgagacaacctgacactgtgga

SEQ ID NO: 187673 - DNA, 25 bp, Probe Sequence
ctgcggagcaaccagcatctggtgg

SEQ ID NO: 187674 - DNA, 25 bp, Probe Sequence
ctgcaggaggcagatcatccgggct

SEQ ID NO: 187675 - DNA, 25 bp, Probe Sequence
ctgctggatacaggcaccaagaggc

SEQ ID NO: 187676 - DNA, 25 bp, Probe Sequence
ctgctggatcagggcagccggggag

SEQ ID NO: 187677 - DNA, 25 bp, Probe Sequence
ctgctgctgagggatcgggagggag

SEQ ID NO: 187678 - DNA, 25 bp, Probe Sequence
ctgctcgaggagtctgtaaggtcat

SEQ ID NO: 187679 - DNA, 25 bp, Probe Sequence
ctgcttggggacttcaatgctgact

SEQ ID NO: 187680 - DNA, 25 bp, Probe Sequence
ctgctctgtgagcacttcagggtcc

SEQ ID NO: 187681 - DNA, 25 bp, Probe Sequence
ctgctctttcaatcctggtgtgatt

SEQ ID NO: 187682 - DNA, 25 bp, Probe Sequence
ctgactttacttgtggtgtgaccat

SEQ ID NO: 187683 - DNA, 25 bp, Probe Sequence
ctgtttttcaaatggttgcaacatt

SEQ ID NO: 187684 - DNA, 25 bp, Probe Sequence
ctgcttctcttagacgctttaaagt

SEQ ID NO: 187685 - DNA, 25 bp, Probe Sequence
ctgactctttcctcacagggaaggc

SEQ ID NO: 187686 - DNA, 25 bp, Probe Sequence
ctgacccccccaatggggactgtca

SEQ ID NO: 187687 - DNA, 25 bp, Probe Sequence
ctgccctgccccaagttgggggtca

SEQ ID NO: 187688 - DNA, 25 bp, Probe Sequence
ctgccctgccccaagttgggggtca

SEQ ID NO: 187689 - DNA, 25 bp, Probe Sequence
ctgcccagcctcctgagtagctggg

SEQ ID NO: 187690 - DNA, 25 bp, Probe Sequence
ctgcccagcttgggcccagctgggc

SEQ ID NO: 187691 - DNA, 25 bp, Probe Sequence
ctgcgccccgatagctttgtgggcg

SEQ ID NO: 187692 - DNA, 25 bp, Probe Sequence
ctgcgtgcccagagtagtggccgaa

SEQ ID NO: 187693 - DNA, 25 bp, Probe Sequence
ctgcgtgttgagtgtgtgggcggca

SEQ ID NO: 187694 - DNA, 25 bp, Probe Sequence
ctgctggtgggttttggcagcgtca

SEQ ID NO: 187695 - DNA, 25 bp, Probe Sequence
ctgaggtggttctttctatcctagt

SEQ ID NO: 187696 - DNA, 25 bp, Probe Sequence
ctgaggttcttaccagctcagccaa

SEQ ID NO: 187697 - DNA, 25 bp, Probe Sequence
ctgcggtccaggcagcattagccat

SEQ ID NO: 187698 - DNA, 25 bp, Probe Sequence
ctgctggccctggtagatttgactt

SEQ ID NO: 187699 - DNA, 25 bp, Probe Sequence
ctgcggctcactgcttatattccga

SEQ ID NO: 187700 - DNA, 25 bp, Probe Sequence
ctgctggctcccggatgaatttcag

SEQ ID NO: 187701 - DNA, 25 bp, Probe Sequence
ctgctggcctcgggagggcagaagc

SEQ ID NO: 187702 - DNA, 25 bp, Probe Sequence
ctgctgtcgtcgggaggaaagatga

SEQ ID NO: 187703 - DNA, 25 bp, Probe Sequence
ctgctggcttcttcccgaagagata

SEQ ID NO: 187704 - DNA, 25 bp, Probe Sequence
ctgctttttgtcctccaggaaacca

SEQ ID NO: 187705 - DNA, 25 bp, Probe Sequence
ctgctgttcctggagaaaggaaact

SEQ ID NO: 187706 - DNA, 25 bp, Probe Sequence
ctgcttcacctgtagtaactgcaag

SEQ ID NO: 187707 - DNA, 25 bp, Probe Sequence
ctgcccacacatcagtgaagctgaa

SEQ ID NO: 187708 - DNA, 25 bp, Probe Sequence
ctgcccatggcataggcacctgtgg

SEQ ID NO: 187709 - DNA, 25 bp, Probe Sequence
ctgccctggggggagactgcatggg

SEQ ID NO: 187710 - DNA, 25 bp, Probe Sequence
ctgctctgctgactggggaagtcat

SEQ ID NO: 187711 - DNA, 25 bp, Probe Sequence
ctgctcctgcagggggaacatcaga

SEQ ID NO: 187712 - DNA, 25 bp, Probe Sequence
ctgctgcctcgtgaagagtatcaga

SEQ ID NO: 187713 - DNA, 25 bp, Probe Sequence
ctgctgccggtggtggactatgaac

SEQ ID NO: 187714 - DNA, 25 bp, Probe Sequence
ctgctgctatgaagcccgacttcaa

SEQ ID NO: 187715 - DNA, 25 bp, Probe Sequence
ctgctgtccagggtctgatttcact

SEQ ID NO: 187716 - DNA, 25 bp, Probe Sequence
ctgcatctcgagggatctgacctac

SEQ ID NO: 187717 - DNA, 25 bp, Probe Sequence
ctgcatctccacttggcattagcta

SEQ ID NO: 187718 - DNA, 25 bp, Probe Sequence
ctgacatccagtaccctgatgctac

SEQ ID NO: 187719 - DNA, 25 bp, Probe Sequence
ctgacattcgtgaggatgacaacat

SEQ ID NO: 187720 - DNA, 25 bp, Probe Sequence
ctgctcattccttctggaggacaca

SEQ ID NO: 187721 - DNA, 25 bp, Probe Sequence
ctgcgtgtggctcccgaggagcacc

SEQ ID NO: 187722 - DNA, 25 bp, Probe Sequence
ctgcgggagctgctggagttcaccc

SEQ ID NO: 187723 - DNA, 25 bp, Probe Sequence
ctgcaggaggcaattaggattgccc

SEQ ID NO: 187724 - DNA, 25 bp, Probe Sequence
ctgcactttgatgtcatgtgttccc

SEQ ID NO: 187725 - DNA, 25 bp, Probe Sequence
ctgccctatgatgactgtgtgtttg

SEQ ID NO: 187726 - DNA, 25 bp, Probe Sequence
ctgcccactgcattttctggaagga

SEQ ID NO: 187727 - DNA, 25 bp, Probe Sequence
ctgcccatccatttgaggaagaggt

SEQ ID NO: 187728 - DNA, 25 bp, Probe Sequence
ctgcccccaacagagcaatcaggat

SEQ ID NO: 187729 - DNA, 25 bp, Probe Sequence
ctgcccaacaaaacagctatgactg

SEQ ID NO: 187730 - DNA, 25 bp, Probe Sequence
ctgcccagcaacatggaggatggtg

SEQ ID NO: 187731 - DNA, 25 bp, Probe Sequence
ctgcccagcgggtctgagtgtgagg

SEQ ID NO: 187732 - DNA, 25 bp, Probe Sequence
ctgctccacgggctagaggacagga

SEQ ID NO: 187733 - DNA, 25 bp, Probe Sequence
ctgccctgggcgatgaggtacggtg

SEQ ID NO: 187734 - DNA, 25 bp, Probe Sequence
ctgcccggagctgtgcagcaaacag

SEQ ID NO: 187735 - DNA, 25 bp, Probe Sequence
ctgctcaggaatggcccacaaatct

SEQ ID NO: 187736 - DNA, 25 bp, Probe Sequence
ctgctcaggtgtaccaaaatctcag

SEQ ID NO: 187737 - DNA, 25 bp, Probe Sequence
ctgtcgggcggtgagcaatcgcagg

SEQ ID NO: 187738 - DNA, 25 bp, Probe Sequence
ctgacggacacgtcgtacacgcgag

SEQ ID NO: 187739 - DNA, 25 bp, Probe Sequence
ctgacatggacccaaatcctcgggc

SEQ ID NO: 187740 - DNA, 25 bp, Probe Sequence
ctgaagtactacaactccgacgtgc

SEQ ID NO: 187741 - DNA, 25 bp, Probe Sequence
ctgacaggaaaccttccgtcgtgag

SEQ ID NO: 187742 - DNA, 25 bp, Probe Sequence
ctgctcaatgaaaccttcctcttga

SEQ ID NO: 187743 - DNA, 25 bp, Probe Sequence
ctgctaatgaagccctgtggccttt

SEQ ID NO: 187744 - DNA, 25 bp, Probe Sequence
ctgaaaaagccccagagccacatgt

SEQ ID NO: 187745 - DNA, 25 bp, Probe Sequence
ctgcaagctgaagaccaaccacatt

SEQ ID NO: 187746 - DNA, 25 bp, Probe Sequence
ctgagagtcatccgaagaacaaatt

SEQ ID NO: 187747 - DNA, 25 bp, Probe Sequence
ctgaacttcctcaaggaccacttcc

SEQ ID NO: 187748 - DNA, 25 bp, Probe Sequence
ctgcgccttcctaggagagtcttac

SEQ ID NO: 187749 - DNA, 25 bp, Probe Sequence
ctgctgcctacctggagattcagta

SEQ ID NO: 187750 - DNA, 25 bp, Probe Sequence
ctgctgcctacctggagattcagta

SEQ ID NO: 187751 - DNA, 25 bp, Probe Sequence
ctgctgcctacctggagattcagta

SEQ ID NO: 187752 - DNA, 25 bp, Probe Sequence
ctgctgcctagcctgtgggcaaagg

SEQ ID NO: 187753 - DNA, 25 bp, Probe Sequence
ctgctctctctgttgatggtgaaga

SEQ ID NO: 187754 - DNA, 25 bp, Probe Sequence
ctgcatgcccaagagactggagacc

SEQ ID NO: 187755 - DNA, 25 bp, Probe Sequence
ctgctgtgaaagaggctggctacac

SEQ ID NO: 187756 - DNA, 25 bp, Probe Sequence
ctgcttggcctgggcctggtagagc

SEQ ID NO: 187757 - DNA, 25 bp, Probe Sequence
ctgctttcggctgccttggaagggg

SEQ ID NO: 187758 - DNA, 25 bp, Probe Sequence
ctgcaaataggcatgcttttgaaga

SEQ ID NO: 187759 - DNA, 25 bp, Probe Sequence
ctgcactagactactcttttgcaag

SEQ ID NO: 187760 - DNA, 25 bp, Probe Sequence
ctgcacgagcacttagcttgttcag

SEQ ID NO: 187761 - DNA, 25 bp, Probe Sequence
ctgcttgagctgttgaccgtatgct

SEQ ID NO: 187762 - DNA, 25 bp, Probe Sequence
ctgctgaacgtcagccggatcatcg

SEQ ID NO: 187763 - DNA, 25 bp, Probe Sequence
ctgctggacgtcagcctgtttgagc

SEQ ID NO: 187764 - DNA, 25 bp, Probe Sequence
ctgctggacgtcagcctgtttgagc

SEQ ID NO: 187765 - DNA, 25 bp, Probe Sequence
ctgctggccgcttagcgttgtttga

SEQ ID NO: 187766 - DNA, 25 bp, Probe Sequence
ctgctgggccttaagctttccaggg

SEQ ID NO: 187767 - DNA, 25 bp, Probe Sequence
ctgcttggccttgggttcattcaag

SEQ ID NO: 187768 - DNA, 25 bp, Probe Sequence
ctgtcggcccgtagatttatcaagg

SEQ ID NO: 187769 - DNA, 25 bp, Probe Sequence
ctgtcagttaccttagttaacaagc

SEQ ID NO: 187770 - DNA, 25 bp, Probe Sequence
ctgctgcagctttaagtaccttaaa

SEQ ID NO: 187771 - DNA, 25 bp, Probe Sequence
ctgagagcattttacgacccgaaca

SEQ ID NO: 187772 - DNA, 25 bp, Probe Sequence
ctgaagcattttccactgccaatga

SEQ ID NO: 187773 - DNA, 25 bp, Probe Sequence
ctgaagctttgcccaaacaatccat

SEQ ID NO: 187774 - DNA, 25 bp, Probe Sequence
ctgaacgggccattgaacaagtatt

SEQ ID NO: 187775 - DNA, 25 bp, Probe Sequence
ctgcgaatggctcattaaatcagtt

SEQ ID NO: 187776 - DNA, 25 bp, Probe Sequence
ctgctgcagaggttactgaagagca

SEQ ID NO: 187777 - DNA, 25 bp, Probe Sequence
ctgcgcaagtacaactacacgctgc

SEQ ID NO: 187778 - DNA, 25 bp, Probe Sequence
ctgtcaagtccaagtacaaggcctc

SEQ ID NO: 187779 - DNA, 25 bp, Probe Sequence
ctgctcagcgtcgtgagtactgggg

SEQ ID NO: 187780 - DNA, 25 bp, Probe Sequence
ctgctcaccatctcagtgaggggca

SEQ ID NO: 187781 - DNA, 25 bp, Probe Sequence
ctgctgcagtgtttcgggcatgggc

SEQ ID NO: 187782 - DNA, 25 bp, Probe Sequence
ctgctgcttttttgggatggggtat

SEQ ID NO: 187783 - DNA, 25 bp, Probe Sequence
ctgacttttctgtggatgccgattt

SEQ ID NO: 187784 - DNA, 25 bp, Probe Sequence
ctgcatcttataatggtaaccaatt

SEQ ID NO: 187785 - DNA, 25 bp, Probe Sequence
ctgcgttggacaccataagccacag

SEQ ID NO: 187786 - DNA, 25 bp, Probe Sequence
ctgagtttcagccactgaactccaa

SEQ ID NO: 187787 - DNA, 25 bp, Probe Sequence
ctgcgtcctggggtgagacatcccc

SEQ ID NO: 187788 - DNA, 25 bp, Probe Sequence
ctgcgagcgctgcgggaagacactg

SEQ ID NO: 187789 - DNA, 25 bp, Probe Sequence
ctgcgctcagtgcttggggaagctg

SEQ ID NO: 187790 - DNA, 25 bp, Probe Sequence
ctgcgtcgctggttcgtggagacgg

SEQ ID NO: 187791 - DNA, 25 bp, Probe Sequence
ctgcgggtgggcatgggaagtggct

SEQ ID NO: 187792 - DNA, 25 bp, Probe Sequence
ctgctcgagtggcccttagaaaact

SEQ ID NO: 187793 - DNA, 25 bp, Probe Sequence
ctgtctgggacacttaagtaacatc

SEQ ID NO: 187794 - DNA, 25 bp, Probe Sequence
ctgttttcagccatgaggtagtccc

SEQ ID NO: 187795 - DNA, 25 bp, Probe Sequence
ctgctttgtcctttgatgctgtcag

SEQ ID NO: 187796 - DNA, 25 bp, Probe Sequence
ctgctgggactcaattcaggctatg

SEQ ID NO: 187797 - DNA, 25 bp, Probe Sequence
ctgcggaactgctactcatgggcag

SEQ ID NO: 187798 - DNA, 25 bp, Probe Sequence
ctgtagagatcaccaatctggactg

SEQ ID NO: 187799 - DNA, 25 bp, Probe Sequence
ctgctatgaagcccgacttcaatgg

SEQ ID NO: 187800 - DNA, 25 bp, Probe Sequence
ctgcgaaagatcaaggtctgcaagg

SEQ ID NO: 187801 - DNA, 25 bp, Probe Sequence
ctgcgagattgtaggtgcctcaagt

SEQ ID NO: 187802 - DNA, 25 bp, Probe Sequence
ctgcaaccatgtgtgtcctataatg

SEQ ID NO: 187803 - DNA, 25 bp, Probe Sequence
ctgcaactctgagggaccgtgactc

SEQ ID NO: 187804 - DNA, 25 bp, Probe Sequence
ctgctgacttaggtggcgtgtttca

SEQ ID NO: 187805 - DNA, 25 bp, Probe Sequence
ctgcttttagtttctcttaatcaaa

SEQ ID NO: 187806 - DNA, 25 bp, Probe Sequence
ctgacccgttattcttataatcaaa

SEQ ID NO: 187807 - DNA, 25 bp, Probe Sequence
ctgacccgttgcactgaacaagacc

SEQ ID NO: 187808 - DNA, 25 bp, Probe Sequence
ctgacccgttgcactgaacaagacc

SEQ ID NO: 187809 - DNA, 25 bp, Probe Sequence
ctgctctcctgctctttgaaaagac

SEQ ID NO: 187810 - DNA, 25 bp, Probe Sequence
ctgctgcctccataaacagaaagag

SEQ ID NO: 187811 - DNA, 25 bp, Probe Sequence
ctgtccctacaccaaataccagacg

SEQ ID NO: 187812 - DNA, 25 bp, Probe Sequence
ctgaaggttcacagaattccgaaga

SEQ ID NO: 187813 - DNA, 25 bp, Probe Sequence
ctgaagagttcgagagatccaagag

SEQ ID NO: 187814 - DNA, 25 bp, Probe Sequence
ctgaaagaccagcagaggcataagg

SEQ ID NO: 187815 - DNA, 25 bp, Probe Sequence
ctgcaacacccgcaagaagccggta

SEQ ID NO: 187816 - DNA, 25 bp, Probe Sequence
ctgaagcagcccgcatattaggcgc

SEQ ID NO: 187817 - DNA, 25 bp, Probe Sequence
ctgaagagccgtgcaattctgccat

SEQ ID NO: 187818 - DNA, 25 bp, Probe Sequence
ctgagggccaggctgagtccctggt

SEQ ID NO: 187819 - DNA, 25 bp, Probe Sequence
ctgcacgggctgaggaacctctggc

SEQ ID NO: 187820 - DNA, 25 bp, Probe Sequence
ctgagccaggcaagggaaaatatct

SEQ ID NO: 187821 - DNA, 25 bp, Probe Sequence
ctgatctaactgatgaaaatttctc

SEQ ID NO: 187822 - DNA, 25 bp, Probe Sequence
cgactacctttatgagacgactcta

SEQ ID NO: 187823 - DNA, 25 bp, Probe Sequence
ctgaactcccttttagacagagctt

SEQ ID NO: 187824 - DNA, 25 bp, Probe Sequence
ctgaacctcaattgtatatctagac

SEQ ID NO: 187825 - DNA, 25 bp, Probe Sequence
ctgatacagtatcttaattacaagg

SEQ ID NO: 187826 - DNA, 25 bp, Probe Sequence
ctgaaggcttgctgtccttaccagc

SEQ ID NO: 187827 - DNA, 25 bp, Probe Sequence
ctgacatggcttggctgacttttct

SEQ ID NO: 187828 - DNA, 25 bp, Probe Sequence
ctgaagagcaatagccacttgagtg

SEQ ID NO: 187829 - DNA, 25 bp, Probe Sequence
ctgaattctcatcccatctaagttg

SEQ ID NO: 187830 - DNA, 25 bp, Probe Sequence
ctgaattctatagtgcctgggtctc

SEQ ID NO: 187831 - DNA, 25 bp, Probe Sequence
ctgagatagtgtttgccaggacctc

SEQ ID NO: 187832 - DNA, 25 bp, Probe Sequence
ctgcagttagtttgcgggaactcag

SEQ ID NO: 187833 - DNA, 25 bp, Probe Sequence
ctgcagtttactgagggcatttcag

SEQ ID NO: 187834 - DNA, 25 bp, Probe Sequence
ctgcgtatgtcctaagctggagttc

SEQ ID NO: 187835 - DNA, 25 bp, Probe Sequence
ctgctgtatgctcatagccttgcac

SEQ ID NO: 187836 - DNA, 25 bp, Probe Sequence
ctgctgaatgtcctgaccttgaacc

SEQ ID NO: 187837 - DNA, 25 bp, Probe Sequence
ctgcaatgcattttgactcttaaag

SEQ ID NO: 187838 - DNA, 25 bp, Probe Sequence
ctgctcttatgctgcttcttttatg

SEQ ID NO: 187839 - DNA, 25 bp, Probe Sequence
ctgctttctcagttacatgttttgt

SEQ ID NO: 187840 - DNA, 25 bp, Probe Sequence
ctgcgttcctgttagcataatgtga

SEQ ID NO: 187841 - DNA, 25 bp, Probe Sequence
ctgcgtccctgttttacaatgcaaa

SEQ ID NO: 187842 - DNA, 25 bp, Probe Sequence
ctgcggattttatttgcaaacaatg

SEQ ID NO: 187843 - DNA, 25 bp, Probe Sequence
ctgctggtcttcaattaccaagaat

SEQ ID NO: 187844 - DNA, 25 bp, Probe Sequence
ctgctctctttcctctttagaaatg

SEQ ID NO: 187845 - DNA, 25 bp, Probe Sequence
ctgctctctttcctctttagaaatg

SEQ ID NO: 187846 - DNA, 25 bp, Probe Sequence
ctgcttactatccatccctaaagtt

SEQ ID NO: 187847 - DNA, 25 bp, Probe Sequence
ctgctgtagttgctccattcaaatg

SEQ ID NO: 187848 - DNA, 25 bp, Probe Sequence
ctgctgtggcttttcagttaaaatt

SEQ ID NO: 187849 - DNA, 25 bp, Probe Sequence
ctgcagtcacttttccttagaaggt

SEQ ID NO: 187850 - DNA, 25 bp, Probe Sequence
ctgagctcagtaagttgtgttaggg

SEQ ID NO: 187851 - DNA, 25 bp, Probe Sequence
ctgagccctacgaggagctggaggc

SEQ ID NO: 187852 - DNA, 25 bp, Probe Sequence
ctgagccctacgaggagctggaggc

SEQ ID NO: 187853 - DNA, 25 bp, Probe Sequence
ctgcaccccctgaacgagtgtgaag

SEQ ID NO: 187854 - DNA, 25 bp, Probe Sequence
ctgcgggatccgagccagattgaca

SEQ ID NO: 187855 - DNA, 25 bp, Probe Sequence
ctgctggcagatcagggccagagct

SEQ ID NO: 187856 - DNA, 25 bp, Probe Sequence
ctgctgagcaacatcaggcctgatt

SEQ ID NO: 187857 - DNA, 25 bp, Probe Sequence
ctgctggcaccgagtgccttatctc

SEQ ID NO: 187858 - DNA, 25 bp, Probe Sequence
ctgctgcgtcccaggactgagacgc

SEQ ID NO: 187859 - DNA, 25 bp, Probe Sequence
ctgcttctctcgaggcactagatta

SEQ ID NO: 187860 - DNA, 25 bp, Probe Sequence
ctgcttcgcccagggcgcattgaca

SEQ ID NO: 187861 - DNA, 25 bp, Probe Sequence
ctgctgtcccacaccgtggaagaga

SEQ ID NO: 187862 - DNA, 25 bp, Probe Sequence
ctgcgtcttacatccagtctgacga

SEQ ID NO: 187863 - DNA, 25 bp, Probe Sequence
ccgatttaatcctatgttgtcacat

SEQ ID NO: 187864 - DNA, 25 bp, Probe Sequence
ctgctgatgttcccctatgggtaca

SEQ ID NO: 187865 - DNA, 25 bp, Probe Sequence
ctgctgtgcttcgacatcatcgagg

SEQ ID NO: 187866 - DNA, 25 bp, Probe Sequence
ctgctgctcttcgcaagctgacagg

SEQ ID NO: 187867 - DNA, 25 bp, Probe Sequence
ctgctgcttccaggtatctacactg

SEQ ID NO: 187868 - DNA, 25 bp, Probe Sequence
ctgctcttacggaatcctatgtgaa

SEQ ID NO: 187869 - DNA, 25 bp, Probe Sequence
ctgctcattctcgtagctttttaaa

SEQ ID NO: 187870 - DNA, 25 bp, Probe Sequence
ctgctacaccattactttcttgaga

SEQ ID NO: 187871 - DNA, 25 bp, Probe Sequence
ctgctacaccatttttgatttgggc

SEQ ID NO: 187872 - DNA, 25 bp, Probe Sequence
ctgtataggatgttgtttggtttgt

SEQ ID NO: 187873 - DNA, 25 bp, Probe Sequence
ctgcttgacaaccaggttggtttta

SEQ ID NO: 187874 - DNA, 25 bp, Probe Sequence
ctgcttggacagcaggcctggcact

SEQ ID NO: 187875 - DNA, 25 bp, Probe Sequence
ctgcttggacagcaggcctggcact

SEQ ID NO: 187876 - DNA, 25 bp, Probe Sequence
ctgcttggaagcctggacgtgacac

SEQ ID NO: 187877 - DNA, 25 bp, Probe Sequence
ctgcttgggatgatggaggtactgc

SEQ ID NO: 187878 - DNA, 25 bp, Probe Sequence
ctgctgctgtcgtcgggaggaaaga

SEQ ID NO: 187879 - DNA, 25 bp, Probe Sequence
ctgcatgcttggtctgtgtgggaaa

SEQ ID NO: 187880 - DNA, 25 bp, Probe Sequence
ctgctgcgtgggatgtgcgtgcatg

SEQ ID NO: 187881 - DNA, 25 bp, Probe Sequence
ctgcagtctgggagtctttggagta

SEQ ID NO: 187882 - DNA, 25 bp, Probe Sequence
ctgaactgggaagtccctggctggc

SEQ ID NO: 187883 - DNA, 25 bp, Probe Sequence
ctgaacgggaagctcactggcatgg

SEQ ID NO: 187884 - DNA, 25 bp, Probe Sequence
ctgaacgggaagctcactggcatgg

SEQ ID NO: 187885 - DNA, 25 bp, Probe Sequence
ctgaacgggaagctcactggcatgg

SEQ ID NO: 187886 - DNA, 25 bp, Probe Sequence
ctgcggggaagggtcctgagcaggg

SEQ ID NO: 187887 - DNA, 25 bp, Probe Sequence
ctgcggccgagagggtgatctgggc

SEQ ID NO: 187888 - DNA, 25 bp, Probe Sequence
tcttcccgaagagatataggagcca

SEQ ID NO: 187889 - DNA, 25 bp, Probe Sequence
ctgctctccagggagcgattagggg

SEQ ID NO: 187890 - DNA, 25 bp, Probe Sequence
ctgctgtccacgtcagttcatgagg

SEQ ID NO: 187891 - DNA, 25 bp, Probe Sequence
ctgctgtgtccgctttcatgaacac

SEQ ID NO: 187892 - DNA, 25 bp, Probe Sequence
ctgctgtgtccgctttcatgaacac

SEQ ID NO: 187893 - DNA, 25 bp, Probe Sequence
ctgcatgtatgcccgaatttgtaat

SEQ ID NO: 187894 - DNA, 25 bp, Probe Sequence
ctgcagctctgacccaaatttagtc

SEQ ID NO: 187895 - DNA, 25 bp, Probe Sequence
ctgaattagcttcattttcagctcc

SEQ ID NO: 187896 - DNA, 25 bp, Probe Sequence
ctgaattagcctcgatctttttgat

SEQ ID NO: 187897 - DNA, 25 bp, Probe Sequence
ctgattcttgacagatttagtcgtt

SEQ ID NO: 187898 - DNA, 25 bp, Probe Sequence
ctgcatccttccagttgcgattagg

SEQ ID NO: 187899 - DNA, 25 bp, Probe Sequence
ctgctgccttcgaagtgtgcgaaca

SEQ ID NO: 187900 - DNA, 25 bp, Probe Sequence
ctgctgcatctgtctgagaggggaa

SEQ ID NO: 187901 - DNA, 25 bp, Probe Sequence
ctgctgaggccgccagggagaaggg

SEQ ID NO: 187902 - DNA, 25 bp, Probe Sequence
ctgctggtggcctgtgagaaactgg

SEQ ID NO: 187903 - DNA, 25 bp, Probe Sequence
ctgcagcgtggcttctttgacaagc

SEQ ID NO: 187904 - DNA, 25 bp, Probe Sequence
ctgaggtggaagcttacacatctcc

SEQ ID NO: 187905 - DNA, 25 bp, Probe Sequence
ctgaaaggaagggctggtcctgccc

SEQ ID NO: 187906 - DNA, 25 bp, Probe Sequence
ctgaaaccaggacgtggaccacgcc

SEQ ID NO: 187907 - DNA, 25 bp, Probe Sequence
ctgacaaccttgtgctgaacctaca

SEQ ID NO: 187908 - DNA, 25 bp, Probe Sequence
ctgtaaattacatctgaaggctata

SEQ ID NO: 187909 - DNA, 25 bp, Probe Sequence
ctgtaaacccagctgctcaggacac

SEQ ID NO: 187910 - DNA, 25 bp, Probe Sequence
ctgcatgaaagccgaagttatggac

SEQ ID NO: 187911 - DNA, 25 bp, Probe Sequence
ctgctggaggccgaacgtcaggagc

SEQ ID NO: 187912 - DNA, 25 bp, Probe Sequence
ctgatggaggccaaggtccgagtgc

SEQ ID NO: 187913 - DNA, 25 bp, Probe Sequence
ctgacgacgtcctgaggctggtgaa

SEQ ID NO: 187914 - DNA, 25 bp, Probe Sequence
ctgagcaacagaaaaaggcggccat

SEQ ID NO: 187915 - DNA, 25 bp, Probe Sequence
cggcccactcaaggggtggccggca

SEQ ID NO: 187916 - DNA, 25 bp, Probe Sequence
cgttcccacaagcggtggacgtgct

SEQ ID NO: 187917 - DNA, 25 bp, Probe Sequence
cgttgacaccaaaaggcggaccgag

SEQ ID NO: 187918 - DNA, 25 bp, Probe Sequence
ctgttgaaccaattgggtggatttg

SEQ ID NO: 187919 - DNA, 25 bp, Probe Sequence
ctgtaggaacacatccgggattcta

SEQ ID NO: 187920 - DNA, 25 bp, Probe Sequence
ctgggtatagccaaccggactttga

SEQ ID NO: 187921 - DNA, 25 bp, Probe Sequence
ctggccgataaatccctggctacta

SEQ ID NO: 187922 - DNA, 25 bp, Probe Sequence
ctgaccaaggaaaggctcggctact

SEQ ID NO: 187923 - DNA, 25 bp, Probe Sequence
ctgaacgaagcctggctcctacagc

SEQ ID NO: 187924 - DNA, 25 bp, Probe Sequence
ctgagtaacaccaggctcctcaggc

SEQ ID NO: 187925 - DNA, 25 bp, Probe Sequence
ctgcagtctacaaactttgccctgg

SEQ ID NO: 187926 - DNA, 25 bp, Probe Sequence
cgaggcaactgtttttccatctggg

SEQ ID NO: 187927 - DNA, 25 bp, Probe Sequence
ctgcagggtctgcttttacttgggg

SEQ ID NO: 187928 - DNA, 25 bp, Probe Sequence
gctgaaagttgggttcaccttgggc

SEQ ID NO: 187929 - DNA, 25 bp, Probe Sequence
ctgaaggcaggggttcaggctcgtc

SEQ ID NO: 187930 - DNA, 25 bp, Probe Sequence
ctgaagccaaagttatgcaagggac

SEQ ID NO: 187931 - DNA, 25 bp, Probe Sequence
ctgaagcactaccttcagaggggag

SEQ ID NO: 187932 - DNA, 25 bp, Probe Sequence
ctgagagactacttatgaataagtt

SEQ ID NO: 187933 - DNA, 25 bp, Probe Sequence
ctgctgtccttcctgcagaaacagt

SEQ ID NO: 187934 - DNA, 25 bp, Probe Sequence
ctgctgtccttcctgcagaaacagt

SEQ ID NO: 187935 - DNA, 25 bp, Probe Sequence
ctgcattccttcaacagaacacttt

SEQ ID NO: 187936 - DNA, 25 bp, Probe Sequence
ctgcaatgccttaacgagagccgcg

SEQ ID NO: 187937 - DNA, 25 bp, Probe Sequence
ctgcagtccttcaaagatgaccacc

SEQ ID NO: 187938 - DNA, 25 bp, Probe Sequence
ctgcagtcctacagagatacagcaa

SEQ ID NO: 187939 - DNA, 25 bp, Probe Sequence
ctgattcatgctattgcaaacaata

SEQ ID NO: 187940 - DNA, 25 bp, Probe Sequence
ctgcattccagttctcaagtcttaa

SEQ ID NO: 187941 - DNA, 25 bp, Probe Sequence
ctgcattccagttctcaagtcttaa

SEQ ID NO: 187942 - DNA, 25 bp, Probe Sequence
ctgcattccagttctcaagtcttaa

SEQ ID NO: 187943 - DNA, 25 bp, Probe Sequence
ctgctagccagcaaatatggtcttg

SEQ ID NO: 187944 - DNA, 25 bp, Probe Sequence
ctgtaaatgaagtaggctgccatat

SEQ ID NO: 187945 - DNA, 25 bp, Probe Sequence
cgacaaatgggctgggccttggtgg

SEQ ID NO: 187946 - DNA, 25 bp, Probe Sequence
cgtcatcaacggccgggccgtggag

SEQ ID NO: 187947 - DNA, 25 bp, Probe Sequence
cgtcaccaagttgggccgcttggtc

SEQ ID NO: 187948 - DNA, 25 bp, Probe Sequence
cgtctccaactacactgactggttc

SEQ ID NO: 187949 - DNA, 25 bp, Probe Sequence
cgccgaatgccaaacctgactggct

SEQ ID NO: 187950 - DNA, 25 bp, Probe Sequence
ctgagcgagacggaacctggctcct

SEQ ID NO: 187951 - DNA, 25 bp, Probe Sequence
ctgcagacaacggagggcagcgccc

SEQ ID NO: 187952 - DNA, 25 bp, Probe Sequence
ctgcagaggacggatctagctcctg

SEQ ID NO: 187953 - DNA, 25 bp, Probe Sequence
ctgagatgtgcaaagactaccgagt

SEQ ID NO: 187954 - DNA, 25 bp, Probe Sequence
ctgagcggctgcagtctacaaactt

SEQ ID NO: 187955 - DNA, 25 bp, Probe Sequence
ctgacggtgatcttgggcagaacat

SEQ ID NO: 187956 - DNA, 25 bp, Probe Sequence
ctgactgttagaaggggaccgacaa

SEQ ID NO: 187957 - DNA, 25 bp, Probe Sequence
ctgattgaaagactggggacccctc

SEQ ID NO: 187958 - DNA, 25 bp, Probe Sequence
ctgagggaaattcttgcccaactaa

SEQ ID NO: 187959 - DNA, 25 bp, Probe Sequence
cgtggcgaaagtcttgttaatgtca

SEQ ID NO: 187960 - DNA, 25 bp, Probe Sequence
ctgtggagaaagctttaatatttga

SEQ ID NO: 187961 - DNA, 25 bp, Probe Sequence
ctgatgtaaaacggttttcttgtgg

SEQ ID NO: 187962 - DNA, 25 bp, Probe Sequence
ctgattacaaaaagatacttcaagt

SEQ ID NO: 187963 - DNA, 25 bp, Probe Sequence
ctgaaacaacccgacgctggaagtt

SEQ ID NO: 187964 - DNA, 25 bp, Probe Sequence
ctgacacaaaccagcttgctgacaa

SEQ ID NO: 187965 - DNA, 25 bp, Probe Sequence
ctgacatgtaacattcaattaccac

SEQ ID NO: 187966 - DNA, 25 bp, Probe Sequence
ctgcagcgtgcatcttggcatatgt

SEQ ID NO: 187967 - DNA, 25 bp, Probe Sequence
ctgcagctctgaagtggttctgaac

SEQ ID NO: 187968 - DNA, 25 bp, Probe Sequence
ctgcacctgtagagatcaccaatct

SEQ ID NO: 187969 - DNA, 25 bp, Probe Sequence
ctgacctgacctgatgtccattcat

SEQ ID NO: 187970 - DNA, 25 bp, Probe Sequence
ctgacctgacctgatgtccattcat

SEQ ID NO: 187971 - DNA, 25 bp, Probe Sequence
ctgaacgacctgatgctgcttcagc

SEQ ID NO: 187972 - DNA, 25 bp, Probe Sequence
ctgagacggccgatgccatgaaccg

SEQ ID NO: 187973 - DNA, 25 bp, Probe Sequence
ctgagaagccctttccagtagggtg

SEQ ID NO: 187974 - DNA, 25 bp, Probe Sequence
ctgaagacctttaacagggtcggtg

SEQ ID NO: 187975 - DNA, 25 bp, Probe Sequence
ctgacgtccccagaagtttctgggt

SEQ ID NO: 187976 - DNA, 25 bp, Probe Sequence
cgatcagataccgtcgtagttccga

SEQ ID NO: 187977 - DNA, 25 bp, Probe Sequence
ctgacgcataatgacgtatggtcca

SEQ ID NO: 187978 - DNA, 25 bp, Probe Sequence
ctgcacacaagatgggtggttgcca

SEQ ID NO: 187979 - DNA, 25 bp, Probe Sequence
ctgcagcaggcgagtgtgcaggtgc

SEQ ID NO: 187980 - DNA, 25 bp, Probe Sequence
ctgctcttcgcaagctgacaggctg

SEQ ID NO: 187981 - DNA, 25 bp, Probe Sequence
ctgctttgccacagcaaggctgtcg

SEQ ID NO: 187982 - DNA, 25 bp, Probe Sequence
ctgctttcacacggcagtgtgctgg

SEQ ID NO: 187983 - DNA, 25 bp, Probe Sequence
ctgcttggacacagctcggtggaag

SEQ ID NO: 187984 - DNA, 25 bp, Probe Sequence
ctgcttggacctgggaggcggaggt

SEQ ID NO: 187985 - DNA, 25 bp, Probe Sequence
ctgcaggagaaggcggcaggcggcg

SEQ ID NO: 187986 - DNA, 25 bp, Probe Sequence
ctgcaggcccagatgaagtgcgtgc

SEQ ID NO: 187987 - DNA, 25 bp, Probe Sequence
ctgaggctcccttgaactcaggact

SEQ ID NO: 187988 - DNA, 25 bp, Probe Sequence
ctgagctgcccagcatagtccaaga

SEQ ID NO: 187989 - DNA, 25 bp, Probe Sequence
ctgcactgtccatctaaggatgcaa

SEQ ID NO: 187990 - DNA, 25 bp, Probe Sequence
ctgcacttccttgaagatgaaaaat

SEQ ID NO: 187991 - DNA, 25 bp, Probe Sequence
ctgcacctactttaatgatatagca

SEQ ID NO: 187992 - DNA, 25 bp, Probe Sequence
ctgcaagcttcctgattatgttcac

SEQ ID NO: 187993 - DNA, 25 bp, Probe Sequence
ctgctcgttcccaatgtatcttaat

SEQ ID NO: 187994 - DNA, 25 bp, Probe Sequence
ctgctcctcttcaattgattcttgc

SEQ ID NO: 187995 - DNA, 25 bp, Probe Sequence
ctgctcactctcatcatctagtgtt

SEQ ID NO: 187996 - DNA, 25 bp, Probe Sequence
ctgcatcctcacctacagagatggc

SEQ ID NO: 187997 - DNA, 25 bp, Probe Sequence
ctgcatcacctcctaaactgagcag

SEQ ID NO: 187998 - DNA, 25 bp, Probe Sequence
ctgcttctccatcagaacttcattt

SEQ ID NO: 187999 - DNA, 25 bp, Probe Sequence
ctgctctctctgtaggaaccttatg

SEQ ID NO: 188000 - DNA, 25 bp, Probe Sequence
ctgctctacagcaaagacaccgagt

SEQ ID NO: 188001 - DNA, 25 bp, Probe Sequence
ctgctctacagcaaagacaccgagt

SEQ ID NO: 188002 - DNA, 25 bp, Probe Sequence
ctgcttgtcacttgaatcccgtgat

SEQ ID NO: 188003 - DNA, 25 bp, Probe Sequence
ctgcttctgcacatattttcatgga

SEQ ID NO: 188004 - DNA, 25 bp, Probe Sequence
ctgctctccagcatacatttctgga

SEQ ID NO: 188005 - DNA, 25 bp, Probe Sequence
ctgctctcctcacacattgtgtggt

SEQ ID NO: 188006 - DNA, 25 bp, Probe Sequence
ctgctcacccaggacgtgagggtct

SEQ ID NO: 188007 - DNA, 25 bp, Probe Sequence
ctgctgcctccagggtgtgaggtgg

SEQ ID NO: 188008 - DNA, 25 bp, Probe Sequence
ctgctgctgacctgggagagtgggc

SEQ ID NO: 188009 - DNA, 25 bp, Probe Sequence
ctgcagtggtcaagggagattgcct

SEQ ID NO: 188010 - DNA, 25 bp, Probe Sequence
ctgcagtggccgaggagattcagga

SEQ ID NO: 188011 - DNA, 25 bp, Probe Sequence
ctgcttgaccgaaggatttctgaca

SEQ ID NO: 188012 - DNA, 25 bp, Probe Sequence
ctgcttacctgactgtgcattttaa

SEQ ID NO: 188013 - DNA, 25 bp, Probe Sequence
ctgctctacctgacgcgcaaatata

SEQ ID NO: 188014 - DNA, 25 bp, Probe Sequence
ctgaatacgtgaagccaaattgaca

SEQ ID NO: 188015 - DNA, 25 bp, Probe Sequence
ctgatactgaggaagcgcaaataga

SEQ ID NO: 188016 - DNA, 25 bp, Probe Sequence
ctgctacggacaatccaagccatag

SEQ ID NO: 188017 - DNA, 25 bp, Probe Sequence
ctgctagagtttatcaacacagagg

SEQ ID NO: 188018 - DNA, 25 bp, Probe Sequence
ctgaagtgttccaccaagccatggt

SEQ ID NO: 188019 - DNA, 25 bp, Probe Sequence
ctgggagttcgagaccagcctggac

SEQ ID NO: 188020 - DNA, 25 bp, Probe Sequence
cgtgttcttcgacattgccgtcgac

SEQ ID NO: 188021 - DNA, 25 bp, Probe Sequence
cgtgcgtcttcgaaattacttcaag

SEQ ID NO: 188022 - DNA, 25 bp, Probe Sequence
cgttgttctcctattaccttgacaa

SEQ ID NO: 188023 - DNA, 25 bp, Probe Sequence
cgttattcaagcactccagacttga

SEQ ID NO: 188024 - DNA, 25 bp, Probe Sequence
cggttctacagcacccggtgctgcg

SEQ ID NO: 188025 - DNA, 25 bp, Probe Sequence
cggtatttcaacggccaggactgcc

SEQ ID NO: 188026 - DNA, 25 bp, Probe Sequence
cggtttccagccaggaagctttcgg

SEQ ID NO: 188027 - DNA, 25 bp, Probe Sequence
ctgattcttgcgccctagacaagct

SEQ ID NO: 188028 - DNA, 25 bp, Probe Sequence
ctgcttcctgcttgccaaggcagag

SEQ ID NO: 188029 - DNA, 25 bp, Probe Sequence
ctgcatattgctgacctgagaggat

SEQ ID NO: 188030 - DNA, 25 bp, Probe Sequence
ctgacctgcttgaccgaaggatttc

SEQ ID NO: 188031 - DNA, 25 bp, Probe Sequence
ctgagcccgtgcccgaagagggctc

SEQ ID NO: 188032 - DNA, 25 bp, Probe Sequence
ctgcagaccgtcaatggagcagagg

SEQ ID NO: 188033 - DNA, 25 bp, Probe Sequence
ctgcagaccgctcgggcatggagaa

SEQ ID NO: 188034 - DNA, 25 bp, Probe Sequence
cgcatgagctggagtcctaggcaca

SEQ ID NO: 188035 - DNA, 25 bp, Probe Sequence
ctgcataggaggctctcgatagcac

SEQ ID NO: 188036 - DNA, 25 bp, Probe Sequence
ctgcttcagagggtgcccagagctc

SEQ ID NO: 188037 - DNA, 25 bp, Probe Sequence
ctgcaacaggtgctgcacgcaggct

SEQ ID NO: 188038 - DNA, 25 bp, Probe Sequence
ctgcatgaagttctacgcacgcgtc

SEQ ID NO: 188039 - DNA, 25 bp, Probe Sequence
ctgagaactctcatgagcccagcag

SEQ ID NO: 188040 - DNA, 25 bp, Probe Sequence
ctgataaattcatagcccaacaagg

SEQ ID NO: 188041 - DNA, 25 bp, Probe Sequence
ctgcacacaaatatgccacctcaaa

SEQ ID NO: 188042 - DNA, 25 bp, Probe Sequence
cgccaataagaacatcgccaacccc

SEQ ID NO: 188043 - DNA, 25 bp, Probe Sequence
cgccaataagaacatcgccaacccc

SEQ ID NO: 188044 - DNA, 25 bp, Probe Sequence
ctgacactaaaacacctcagctgcc

SEQ ID NO: 188045 - DNA, 25 bp, Probe Sequence
ctgaaaacataaccagccattggct

SEQ ID NO: 188046 - DNA, 25 bp, Probe Sequence
ctgcaacaacatcttcatcgtcttc

SEQ ID NO: 188047 - DNA, 25 bp, Probe Sequence
ctgaagcccgtggtcaggatcttcc

SEQ ID NO: 188048 - DNA, 25 bp, Probe Sequence
ctgagactcctgagccagaatcctc

SEQ ID NO: 188049 - DNA, 25 bp, Probe Sequence
ctgagcctcctgagtgacagaaagg

SEQ ID NO: 188050 - DNA, 25 bp, Probe Sequence
ctgacctcgcttaagggcagggaga

SEQ ID NO: 188051 - DNA, 25 bp, Probe Sequence
ctgtcaccgtccaggcagacgaagt

SEQ ID NO: 188052 - DNA, 25 bp, Probe Sequence
cggcccgacctggcggataaagtgg

SEQ ID NO: 188053 - DNA, 25 bp, Probe Sequence
cggcccgacctggcggataaagtgg

SEQ ID NO: 188054 - DNA, 25 bp, Probe Sequence
tcagtcccaacctcggggatgtgtg

SEQ ID NO: 188055 - DNA, 25 bp, Probe Sequence
ctgtcccaactgtttgaacagtgtg

SEQ ID NO: 188056 - DNA, 25 bp, Probe Sequence
ctgctctccaaactatgccaaggcg

SEQ ID NO: 188057 - DNA, 25 bp, Probe Sequence
ctgcttgctgtgagtgtctctaggg

SEQ ID NO: 188058 - DNA, 25 bp, Probe Sequence
ctgctagatttcgtattctagtagt

SEQ ID NO: 188059 - DNA, 25 bp, Probe Sequence
ctgaagttcagtgctagtagtagga

SEQ ID NO: 188060 - DNA, 25 bp, Probe Sequence
ctgaagttcaaattagtgcctcgga

SEQ ID NO: 188061 - DNA, 25 bp, Probe Sequence
ctgacagattattacaggtccctgg

SEQ ID NO: 188062 - DNA, 25 bp, Probe Sequence
ctgcattgtattctcaggctcctat

SEQ ID NO: 188063 - DNA, 25 bp, Probe Sequence
ctgcaggtactgctaggcaactaga

SEQ ID NO: 188064 - DNA, 25 bp, Probe Sequence
ctgcattttctggaaggacaccgac

SEQ ID NO: 188065 - DNA, 25 bp, Probe Sequence
ctgcattcttggggggagctgctgc

SEQ ID NO: 188066 - DNA, 25 bp, Probe Sequence
ctgcagtcattgccatggggagctg

SEQ ID NO: 188067 - DNA, 25 bp, Probe Sequence
ctgcagtggtgtcgtgggtgttacg

SEQ ID NO: 188068 - DNA, 25 bp, Probe Sequence
ctgcagaggttactgaagagcaata

SEQ ID NO: 188069 - DNA, 25 bp, Probe Sequence
ctgcagtgagttatgatcgcaccac

SEQ ID NO: 188070 - DNA, 25 bp, Probe Sequence
ctgagtcacgtgcatatccagtcca

SEQ ID NO: 188071 - DNA, 25 bp, Probe Sequence
ctgacattcggcttgatccatgtcc

SEQ ID NO: 188072 - DNA, 25 bp, Probe Sequence
ctgcatgttctggttgtctgtgtca

SEQ ID NO: 188073 - DNA, 25 bp, Probe Sequence
ctgcatgatactggaatgctccctg

SEQ ID NO: 188074 - DNA, 25 bp, Probe Sequence
ctgctattgcaggaggccacactga

SEQ ID NO: 188075 - DNA, 25 bp, Probe Sequence
ctgctttgagctgtctctccaagca

SEQ ID NO: 188076 - DNA, 25 bp, Probe Sequence
ctgctttagaaatgctgcctgatgg

SEQ ID NO: 188077 - DNA, 25 bp, Probe Sequence
ctgaaggaactattgccctctgggg

SEQ ID NO: 188078 - DNA, 25 bp, Probe Sequence
ctgaatggagacacgacctctggcc

SEQ ID NO: 188079 - DNA, 25 bp, Probe Sequence
ctgagcgtcgacacagtcgctgttg

SEQ ID NO: 188080 - DNA, 25 bp, Probe Sequence
ctgagactccactgagacgtggctg

SEQ ID NO: 188081 - DNA, 25 bp, Probe Sequence
ctgaatgcttgctacgagcggtggc

SEQ ID NO: 188082 - DNA, 25 bp, Probe Sequence
ctgcacgttctgccaaggtggtggt

SEQ ID NO: 188083 - DNA, 25 bp, Probe Sequence
ctgagctcttctgtaagctggggta

SEQ ID NO: 188084 - DNA, 25 bp, Probe Sequence
ctgacttgctcaaaccagaggagga

SEQ ID NO: 188085 - DNA, 25 bp, Probe Sequence
ctgacgctatgacacacagcgcgag

SEQ ID NO: 188086 - DNA, 25 bp, Probe Sequence
ctgacgctgagccaagccagatcta

SEQ ID NO: 188087 - DNA, 25 bp, Probe Sequence
ctgaagcgagcgtcttcgatgccta

SEQ ID NO: 188088 - DNA, 25 bp, Probe Sequence
ctgaccccagaggatctggctctag

SEQ ID NO: 188089 - DNA, 25 bp, Probe Sequence
ctgacggccaggtcatcaccattgg

SEQ ID NO: 188090 - DNA, 25 bp, Probe Sequence
ctgcaggacgaggctcgtctcctcg

SEQ ID NO: 188091 - DNA, 25 bp, Probe Sequence
ctgcagaaggatctcagcctctctg

SEQ ID NO: 188092 - DNA, 25 bp, Probe Sequence
ctgctacagagaagaccctcctgga

SEQ ID NO: 188093 - DNA, 25 bp, Probe Sequence
ctgctacagcgtgacgctggcacgg

SEQ ID NO: 188094 - DNA, 25 bp, Probe Sequence
ctgcaggagctttcacagtggacag

SEQ ID NO: 188095 - DNA, 25 bp, Probe Sequence
ctgagtaggtctgggatggacagga

SEQ ID NO: 188096 - DNA, 25 bp, Probe Sequence
ctgagtaggtctgggatggacagga

SEQ ID NO: 188097 - DNA, 25 bp, Probe Sequence
ctgcagtgtttcgggcatgggcaaa

SEQ ID NO: 188098 - DNA, 25 bp, Probe Sequence
ctgctattcttcgaggcagtggccc

SEQ ID NO: 188099 - DNA, 25 bp, Probe Sequence
ctgcttcctgtagggcaagaactgg

SEQ ID NO: 188100 - DNA, 25 bp, Probe Sequence
ctgcttcttggggaacggcactggg

SEQ ID NO: 188101 - DNA, 25 bp, Probe Sequence
ctgaatatcggggtcattgccaatg

SEQ ID NO: 188102 - DNA, 25 bp, Probe Sequence
ctgctttctgttgtcattgctgttg

SEQ ID NO: 188103 - DNA, 25 bp, Probe Sequence
ctgctactcatttgcttctatgggt

SEQ ID NO: 188104 - DNA, 25 bp, Probe Sequence
ctgcagactcatgcagccctatggc

SEQ ID NO: 188105 - DNA, 25 bp, Probe Sequence
ctgcagtgctctgagccctaggatt

SEQ ID NO: 188106 - DNA, 25 bp, Probe Sequence
ctgtgaggtcgtgctgtcaggcatt

SEQ ID NO: 188107 - DNA, 25 bp, Probe Sequence
ctgaaagtcaggcctgctgcaggac

SEQ ID NO: 188108 - DNA, 25 bp, Probe Sequence
ctgaagggcaggcctcatgcagcag

SEQ ID NO: 188109 - DNA, 25 bp, Probe Sequence
ctgagcaagacagtgcgcttcaacg

SEQ ID NO: 188110 - DNA, 25 bp, Probe Sequence
ctgaccaaacagacttcaaccacac

SEQ ID NO: 188111 - DNA, 25 bp, Probe Sequence
ctgcaacatcagtgacagtaacccc

SEQ ID NO: 188112 - DNA, 25 bp, Probe Sequence
ctgcaagagagcctactgtaaccct

SEQ ID NO: 188113 - DNA, 25 bp, Probe Sequence
ctgacaggatactgagccaagccct

SEQ ID NO: 188114 - DNA, 25 bp, Probe Sequence
ctgaattatatgtgagcccagccct

SEQ ID NO: 188115 - DNA, 25 bp, Probe Sequence
ctgaagtctgctgagagcttcccct

SEQ ID NO: 188116 - DNA, 25 bp, Probe Sequence
ctgaagttgctatggctatcttgtc

SEQ ID NO: 188117 - DNA, 25 bp, Probe Sequence
ctgcttctggaagggctatcctggg

SEQ ID NO: 188118 - DNA, 25 bp, Probe Sequence
ctgcttctgggggcagtgaccttgt

SEQ ID NO: 188119 - DNA, 25 bp, Probe Sequence
ctgctttgtggggcagggccatgcg

SEQ ID NO: 188120 - DNA, 25 bp, Probe Sequence
ctgctttgaggtcactgtggagctg

SEQ ID NO: 188121 - DNA, 25 bp, Probe Sequence
ctgttctggcggcattgtgggctta

SEQ ID NO: 188122 - DNA, 25 bp, Probe Sequence
ctgctacttcgacattgagcggcgt

SEQ ID NO: 188123 - DNA, 25 bp, Probe Sequence
ctgctacctagtttgttagtgcatt

SEQ ID NO: 188124 - DNA, 25 bp, Probe Sequence
ctgctaccggccatttagatgactg

SEQ ID NO: 188125 - DNA, 25 bp, Probe Sequence
ctgcttgcctgtccatttgtggaac

SEQ ID NO: 188126 - DNA, 25 bp, Probe Sequence
ctgcttgtagcaccagctattggct

SEQ ID NO: 188127 - DNA, 25 bp, Probe Sequence
ctgctttgcagaccgagattgccaa

SEQ ID NO: 188128 - DNA, 25 bp, Probe Sequence
ctgctactcgaacagatgagctatt

SEQ ID NO: 188129 - DNA, 25 bp, Probe Sequence
ctgatactgccacaacatgtcaact

SEQ ID NO: 188130 - DNA, 25 bp, Probe Sequence
ctgacactaaggaaatgctgaagct

SEQ ID NO: 188131 - DNA, 25 bp, Probe Sequence
ctgactcatcgaggtgagactagag

SEQ ID NO: 188132 - DNA, 25 bp, Probe Sequence
ctgcactgcagcctgggcaacaaag

SEQ ID NO: 188133 - DNA, 25 bp, Probe Sequence
ctgcaggcagccgatgtggacaaga

SEQ ID NO: 188134 - DNA, 25 bp, Probe Sequence
ctgcatctgcaccaatgcgggcagc

SEQ ID NO: 188135 - DNA, 25 bp, Probe Sequence
ctgcatacatcgctgcaggccacag

SEQ ID NO: 188136 - DNA, 25 bp, Probe Sequence
ctgcttcctgagacagatgctcaag

SEQ ID NO: 188137 - DNA, 25 bp, Probe Sequence
ctgcttgtgctgctcaatgacggga

SEQ ID NO: 188138 - DNA, 25 bp, Probe Sequence
ctgctttgtgaagtatgcacacgga

SEQ ID NO: 188139 - DNA, 25 bp, Probe Sequence
ctgatttgtaactaacactggacca

SEQ ID NO: 188140 - DNA, 25 bp, Probe Sequence
ctgcttttggaatgacactccccac

SEQ ID NO: 188141 - DNA, 25 bp, Probe Sequence
ctgcatttgggaaaatcctctcttc

SEQ ID NO: 188142 - DNA, 25 bp, Probe Sequence
ctgttggtgcgagacttgttttgcc

SEQ ID NO: 188143 - DNA, 25 bp, Probe Sequence
ctgtatggggactccaattgcttgg

SEQ ID NO: 188144 - DNA, 25 bp, Probe Sequence
ctgaagggcgacggcccagtgcagg

SEQ ID NO: 188145 - DNA, 25 bp, Probe Sequence
ctgaattggcatacccctggtgaag

SEQ ID NO: 188146 - DNA, 25 bp, Probe Sequence
ctgacttggaaggtgccctgtgcta

SEQ ID NO: 188147 - DNA, 25 bp, Probe Sequence
ctgacggtggtcagcacctttgagc

SEQ ID NO: 188148 - DNA, 25 bp, Probe Sequence
ctgagacctacaggaatcgcttctg

SEQ ID NO: 188149 - DNA, 25 bp, Probe Sequence
ctgcaatccatatatatcctggtct

SEQ ID NO: 188150 - DNA, 25 bp, Probe Sequence
ctgagatataagttgtactgcgtat

SEQ ID NO: 188151 - DNA, 25 bp, Probe Sequence
ctgagtaatcatgtggtgtgcgtgt

SEQ ID NO: 188152 - DNA, 25 bp, Probe Sequence
ctgcatctgcaaaggggcgtcggac

SEQ ID NO: 188153 - DNA, 25 bp, Probe Sequence
ctgcatccagctcgggggaggacag

SEQ ID NO: 188154 - DNA, 25 bp, Probe Sequence
ctgcatccagctcgggggaggacag

SEQ ID NO: 188155 - DNA, 25 bp, Probe Sequence
ctgcatagccggtgggtgaggagat

SEQ ID NO: 188156 - DNA, 25 bp, Probe Sequence
ctgcaaagctggtgccgttgagaag

SEQ ID NO: 188157 - DNA, 25 bp, Probe Sequence
ctgcagaactagacacccttgaaga

SEQ ID NO: 188158 - DNA, 25 bp, Probe Sequence
ctgcacagactccaacctcaatgga

SEQ ID NO: 188159 - DNA, 25 bp, Probe Sequence
ctgcagcaccaccaatatccaatgc

SEQ ID NO: 188160 - DNA, 25 bp, Probe Sequence
ctgagctgctaccacatgacagaca

SEQ ID NO: 188161 - DNA, 25 bp, Probe Sequence
ctgatgatgtcccatctaaacagtc

SEQ ID NO: 188162 - DNA, 25 bp, Probe Sequence
ctgcttctccagactttagcagcct

SEQ ID NO: 188163 - DNA, 25 bp, Probe Sequence
ctgctttatcatctttacccaaata

SEQ ID NO: 188164 - DNA, 25 bp, Probe Sequence
ctgcttccatatctttcatcttaga

SEQ ID NO: 188165 - DNA, 25 bp, Probe Sequence
ctgcttccactaaatccagttgtga

SEQ ID NO: 188166 - DNA, 25 bp, Probe Sequence
ctgcatgttggtcacccagtttgca

SEQ ID NO: 188167 - DNA, 25 bp, Probe Sequence
ctgacttgagtcgccactgattgtg

SEQ ID NO: 188168 - DNA, 25 bp, Probe Sequence
ctgcactgtattggctctcaggttt

SEQ ID NO: 188169 - DNA, 25 bp, Probe Sequence
ctgcagcatgtcatgctcccagaat

SEQ ID NO: 188170 - DNA, 25 bp, Probe Sequence
ctgactggcaggtctcgcatgaatt

SEQ ID NO: 188171 - DNA, 25 bp, Probe Sequence
ctgaccactgagtctgccatgaaga

SEQ ID NO: 188172 - DNA, 25 bp, Probe Sequence
ctgaatcactggcctgaattcaggc

SEQ ID NO: 188173 - DNA, 25 bp, Probe Sequence
ctgcatcaactgaacgcaaatcagc

SEQ ID NO: 188174 - DNA, 25 bp, Probe Sequence
ctgcacatttgcaagccaagatcaa

SEQ ID NO: 188175 - DNA, 25 bp, Probe Sequence
ctgcaggtgtgtcctcagtgtcaga

SEQ ID NO: 188176 - DNA, 25 bp, Probe Sequence
ctgcagtgtgtggtgctgacatggc

SEQ ID NO: 188177 - DNA, 25 bp, Probe Sequence
ctgcagctgcttttggaatgacact

SEQ ID NO: 188178 - DNA, 25 bp, Probe Sequence
ctgcagcagctggttgaggggcacc

SEQ ID NO: 188179 - DNA, 25 bp, Probe Sequence
ctgacagtgtgttagggccctggcg

SEQ ID NO: 188180 - DNA, 25 bp, Probe Sequence
ctgaagctgtttaggcgttggagag

SEQ ID NO: 188181 - DNA, 25 bp, Probe Sequence
ctgaagctggattgatacggggaaa

SEQ ID NO: 188182 - DNA, 25 bp, Probe Sequence
ctgcaatctgggttacggagtgaga

SEQ ID NO: 188183 - DNA, 25 bp, Probe Sequence
ctgagctctgggtaaggacgagaag

SEQ ID NO: 188184 - DNA, 25 bp, Probe Sequence
ctgaccctggtctggtctcagaatc

SEQ ID NO: 188185 - DNA, 25 bp, Probe Sequence
ctgcacacctgtcgccaggttaaac

SEQ ID NO: 188186 - DNA, 25 bp, Probe Sequence
ctgcagacactgctgctcatggttc

SEQ ID NO: 188187 - DNA, 25 bp, Probe Sequence
ctgcacagcaggctgccagtgcctg

SEQ ID NO: 188188 - DNA, 25 bp, Probe Sequence
ctgcaccatgactgtcgtactggat

SEQ ID NO: 188189 - DNA, 25 bp, Probe Sequence
ctgcaccaactcatgctggactgtt

SEQ ID NO: 188190 - DNA, 25 bp, Probe Sequence
ctgcacgagtgtattggtctgtctg

SEQ ID NO: 188191 - DNA, 25 bp, Probe Sequence
ctgcattggtgaatttaatcctctc

SEQ ID NO: 188192 - DNA, 25 bp, Probe Sequence
ctgcttggtgcatttctttacttgc

SEQ ID NO: 188193 - DNA, 25 bp, Probe Sequence
ctgcttgagtacaggcttaatctgc

SEQ ID NO: 188194 - DNA, 25 bp, Probe Sequence
ctgttaatacgcatattcacatagc

SEQ ID NO: 188195 - DNA, 25 bp, Probe Sequence
ctgttaatcctgtcttttgcatgcc

SEQ ID NO: 188196 - DNA, 25 bp, Probe Sequence
ctgtctcattcccgcagtaatgaca

SEQ ID NO: 188197 - DNA, 25 bp, Probe Sequence
cggcatttcccgggacagacaaact

SEQ ID NO: 188198 - DNA, 25 bp, Probe Sequence
cggatttcttcctgaacaagtccct

SEQ ID NO: 188199 - DNA, 25 bp, Probe Sequence
cgttttgctaccagaagaattccct

SEQ ID NO: 188200 - DNA, 25 bp, Probe Sequence
ctgttccttaccttgacaatattca

SEQ ID NO: 188201 - DNA, 25 bp, Probe Sequence
ctgcttccccagtgtacatattgta

SEQ ID NO: 188202 - DNA, 25 bp, Probe Sequence
ctgcacccctagagatgccatttgt

SEQ ID NO: 188203 - DNA, 25 bp, Probe Sequence
gctacccccagaagggtcaatgttg

SEQ ID NO: 188204 - DNA, 25 bp, Probe Sequence
ctgaccctctccatgggtcattctt

SEQ ID NO: 188205 - DNA, 25 bp, Probe Sequence
ctgagccatgcctcatttattcatt

SEQ ID NO: 188206 - DNA, 25 bp, Probe Sequence
ctgcagtcactgcacgttttcatct

SEQ ID NO: 188207 - DNA, 25 bp, Probe Sequence
ctgcagctcttttcagtttttgctt

SEQ ID NO: 188208 - DNA, 25 bp, Probe Sequence
ctgagcctgcgttcctaggtggctc

SEQ ID NO: 188209 - DNA, 25 bp, Probe Sequence
ctgagcgtgcctaccaaaagcagcc

SEQ ID NO: 188210 - DNA, 25 bp, Probe Sequence
ctgagcgtgcctaccaaaagcagcc

SEQ ID NO: 188211 - DNA, 25 bp, Probe Sequence
ctgagcgtgcctaccaaaagcagcc

SEQ ID NO: 188212 - DNA, 25 bp, Probe Sequence
ctgacttccttgctacagcaagctc

SEQ ID NO: 188213 - DNA, 25 bp, Probe Sequence
ctgcagttccttgctaatctgagct

SEQ ID NO: 188214 - DNA, 25 bp, Probe Sequence
ctgagtttcctgaccactctatttt

SEQ ID NO: 188215 - DNA, 25 bp, Probe Sequence
ctgatctttccgttgcattcatgat

SEQ ID NO: 188216 - DNA, 25 bp, Probe Sequence
ctgaagatatccggtgcaaatgcat

SEQ ID NO: 188217 - DNA, 25 bp, Probe Sequence
ctgaaggagccccgagatgtggtcc

SEQ ID NO: 188218 - DNA, 25 bp, Probe Sequence
ctgcagagtgtcacggagatgggac

SEQ ID NO: 188219 - DNA, 25 bp, Probe Sequence
ctgcagagactcaccctgattgagg

SEQ ID NO: 188220 - DNA, 25 bp, Probe Sequence
ctgcagagcgccaatgcctctgttg

SEQ ID NO: 188221 - DNA, 25 bp, Probe Sequence
ctgcagtgggcttggctttgtgagg

SEQ ID NO: 188222 - DNA, 25 bp, Probe Sequence
ctgcagatgcagagggcttactgtg

SEQ ID NO: 188223 - DNA, 25 bp, Probe Sequence
ctgattggagggccctatcttgtga

SEQ ID NO: 188224 - DNA, 25 bp, Probe Sequence
ctgatggtgcagttaacttccagga

SEQ ID NO: 188225 - DNA, 25 bp, Probe Sequence
ctgatagtcagttcgaatgcccgga

SEQ ID NO: 188226 - DNA, 25 bp, Probe Sequence
ctgattgtctcaacggcagcgacga

SEQ ID NO: 188227 - DNA, 25 bp, Probe Sequence
ctgcatagttgtactgtgcctgtct

SEQ ID NO: 188228 - DNA, 25 bp, Probe Sequence
ctgcatagagtgctgtctgcatttt

SEQ ID NO: 188229 - DNA, 25 bp, Probe Sequence
ctgcatagagtgctgtctgcatttt

SEQ ID NO: 188230 - DNA, 25 bp, Probe Sequence
ctgcaccaatgcgggcagcatctgt

SEQ ID NO: 188231 - DNA, 25 bp, Probe Sequence
ctgcagcgactagggacacttgtaa

SEQ ID NO: 188232 - DNA, 25 bp, Probe Sequence
ctgcaggcccatgggaatttggtga

SEQ ID NO: 188233 - DNA, 25 bp, Probe Sequence
ctgcagctgggagagacttgggtca

SEQ ID NO: 188234 - DNA, 25 bp, Probe Sequence
ctgcagtggacataagcattgggcc

SEQ ID NO: 188235 - DNA, 25 bp, Probe Sequence
ctgcagtggaaagggatcgccagtg

SEQ ID NO: 188236 - DNA, 25 bp, Probe Sequence
ctgcagaggacatcgcgtaccagct

SEQ ID NO: 188237 - DNA, 25 bp, Probe Sequence
ctgcagtggcacaatcacagctcac

SEQ ID NO: 188238 - DNA, 25 bp, Probe Sequence
ctgagtcagcaagtgaactgcacaa

SEQ ID NO: 188239 - DNA, 25 bp, Probe Sequence
ctgcaatctgcaaataactcctcca

SEQ ID NO: 188240 - DNA, 25 bp, Probe Sequence
ctgagatgcgcaaattcactcccca

SEQ ID NO: 188241 - DNA, 25 bp, Probe Sequence
ctgagatcgcgagttcaacatgacc

SEQ ID NO: 188242 - DNA, 25 bp, Probe Sequence
ctggactgcggcatcctggatgcct

SEQ ID NO: 188243 - DNA, 25 bp, Probe Sequence
ctgagcctctgtatcctgtattcag

SEQ ID NO: 188244 - DNA, 25 bp, Probe Sequence
ctgacaccaggtattttgatgagga

SEQ ID NO: 188245 - DNA, 25 bp, Probe Sequence
ctgactccaatgaattttctgtaat

SEQ ID NO: 188246 - DNA, 25 bp, Probe Sequence
ctgagtccactgctccatttataac

SEQ ID NO: 188247 - DNA, 25 bp, Probe Sequence
ctgagcggcactttcagcggctcag

SEQ ID NO: 188248 - DNA, 25 bp, Probe Sequence
ctgcaggagaccttcagcgggatgg

SEQ ID NO: 188249 - DNA, 25 bp, Probe Sequence
ctgcaggagtccgtcagcaagaagg

SEQ ID NO: 188250 - DNA, 25 bp, Probe Sequence
ctgagggtcacatgcagcaactagc

SEQ ID NO: 188251 - DNA, 25 bp, Probe Sequence
ctgcatgggtcatttcccagcatga

SEQ ID NO: 188252 - DNA, 25 bp, Probe Sequence
ctgcagcggtctttcctgcagttgg

SEQ ID NO: 188253 - DNA, 25 bp, Probe Sequence
ctgcactaactgtgcccgatgcgtg

SEQ ID NO: 188254 - DNA, 25 bp, Probe Sequence
ctgcagcacaaacggcggcgtattg

SEQ ID NO: 188255 - DNA, 25 bp, Probe Sequence
ctgcacagcagttgggctgcttgtt

SEQ ID NO: 188256 - DNA, 25 bp, Probe Sequence
ctgaaggaatgtctctttgtcccgc

SEQ ID NO: 188257 - DNA, 25 bp, Probe Sequence
ctgaaggaagcccatgcttctgccc

SEQ ID NO: 188258 - DNA, 25 bp, Probe Sequence
ctgaaggaggccaagcacatcgctg

SEQ ID NO: 188259 - DNA, 25 bp, Probe Sequence
ctgaaggaggccaagcacatcgctg

SEQ ID NO: 188260 - DNA, 25 bp, Probe Sequence
ctgacagggatcgagagcgtggcta

SEQ ID NO: 188261 - DNA, 25 bp, Probe Sequence
ctgacaaggacccgtgtcacatcgt

SEQ ID NO: 188262 - DNA, 25 bp, Probe Sequence
ctgagaagcccgaggtcatcacctc

SEQ ID NO: 188263 - DNA, 25 bp, Probe Sequence
ctgagaaggacgggcaggtcacact

SEQ ID NO: 188264 - DNA, 25 bp, Probe Sequence
ctgactctggaagcagacgtgacct

SEQ ID NO: 188265 - DNA, 25 bp, Probe Sequence
ctgattctggaagcaacgttctttc

SEQ ID NO: 188266 - DNA, 25 bp, Probe Sequence
ctgtttggaaacaaccccttgagct

SEQ ID NO: 188267 - DNA, 25 bp, Probe Sequence
ctgagttggacttgttcccttggtt

SEQ ID NO: 188268 - DNA, 25 bp, Probe Sequence
ctgagatgagggcagctctctccat

SEQ ID NO: 188269 - DNA, 25 bp, Probe Sequence
ctgcaaactgcagagtggcactcat

SEQ ID NO: 188270 - DNA, 25 bp, Probe Sequence
ctgcaaactgcagagtggcactcat

SEQ ID NO: 188271 - DNA, 25 bp, Probe Sequence
ctgcaaaagccatctgtgaccacgt

SEQ ID NO: 188272 - DNA, 25 bp, Probe Sequence
ctgaaggagccattggtcccggttg

SEQ ID NO: 188273 - DNA, 25 bp, Probe Sequence
cgttggaacgtgagcctcggatttc

SEQ ID NO: 188274 - DNA, 25 bp, Probe Sequence
cgtggaaacagtgccctatcttttc

SEQ ID NO: 188275 - DNA, 25 bp, Probe Sequence
ctgggcaaactactccctacttaag

SEQ ID NO: 188276 - DNA, 25 bp, Probe Sequence
ctgaaaaagctactccacatcactc

SEQ ID NO: 188277 - DNA, 25 bp, Probe Sequence
ctgaagaacagtactccacaaacat

SEQ ID NO: 188278 - DNA, 25 bp, Probe Sequence
ctgaccaacgtcatccataacctgg

SEQ ID NO: 188279 - DNA, 25 bp, Probe Sequence
ctgatgccaccgggttcatcaacat

SEQ ID NO: 188280 - DNA, 25 bp, Probe Sequence
ctgaacactcaagtgtccatcagca

SEQ ID NO: 188281 - DNA, 25 bp, Probe Sequence
ctgacagagcatttcttccatgcaa

SEQ ID NO: 188282 - DNA, 25 bp, Probe Sequence
ctgaagatcaatttctcccaaggcc

SEQ ID NO: 188283 - DNA, 25 bp, Probe Sequence
ctgagaccttgtgtccctgagtctc

SEQ ID NO: 188284 - DNA, 25 bp, Probe Sequence
ctggaccattggatcgatattatat

SEQ ID NO: 188285 - DNA, 25 bp, Probe Sequence
ctgagacaccaaatgttgatatttt

SEQ ID NO: 188286 - DNA, 25 bp, Probe Sequence
ctgaacctgatagttttcacctcat

SEQ ID NO: 188287 - DNA, 25 bp, Probe Sequence
ctgaagccagtcatcaaatcccagc

SEQ ID NO: 188288 - DNA, 25 bp, Probe Sequence
ctgaagccagtcatcaaatcccagc

SEQ ID NO: 188289 - DNA, 25 bp, Probe Sequence
ctgacagcctggaaaacattcctga

SEQ ID NO: 188290 - DNA, 25 bp, Probe Sequence
ctgaagcttgagtttgaacgccatg

SEQ ID NO: 188291 - DNA, 25 bp, Probe Sequence
ctgatggcttgaacttgcccacagt

SEQ ID NO: 188292 - DNA, 25 bp, Probe Sequence
ctgagcgtgatgatctagcctccat

SEQ ID NO: 188293 - DNA, 25 bp, Probe Sequence
ctgaggtatggccatgccctagacc

SEQ ID NO: 188294 - DNA, 25 bp, Probe Sequence
ctgaggtgggaggatcacttgagcc

SEQ ID NO: 188295 - DNA, 25 bp, Probe Sequence
ctgcagcgggtggctactttgtgcc

SEQ ID NO: 188296 - DNA, 25 bp, Probe Sequence
ctgagcctaggggactttgccagtg

SEQ ID NO: 188297 - DNA, 25 bp, Probe Sequence
ctgaccaaggtgccagctattcaac

SEQ ID NO: 188298 - DNA, 25 bp, Probe Sequence
ctgaaagaggtgcagtcactcacac

SEQ ID NO: 188299 - DNA, 25 bp, Probe Sequence
ctgaaaggcggccagatccacatct

SEQ ID NO: 188300 - DNA, 25 bp, Probe Sequence
ctgcagagaactggcaagacccttc

SEQ ID NO: 188301 - DNA, 25 bp, Probe Sequence
ctgaagaactgtcagctcagcgttg

SEQ ID NO: 188302 - DNA, 25 bp, Probe Sequence
ctgaagaacgagccagatacctgga

SEQ ID NO: 188303 - DNA, 25 bp, Probe Sequence
ctgacagcccgagcacaaggcgtga

SEQ ID NO: 188304 - DNA, 25 bp, Probe Sequence
ctgaaggggaccaaggtgcacatga

SEQ ID NO: 188305 - DNA, 25 bp, Probe Sequence
ctgaagcgcctgcgcaaggccaaga

SEQ ID NO: 188306 - DNA, 25 bp, Probe Sequence
ctgaagcacgtgagagaccctcgca

SEQ ID NO: 188307 - DNA, 25 bp, Probe Sequence
ctgaagcagcggaagggttgcttga

SEQ ID NO: 188308 - DNA, 25 bp, Probe Sequence
ctgagagacggtggcgcgattggga

SEQ ID NO: 188309 - DNA, 25 bp, Probe Sequence
ctgcaaggcggcagcgaggctgggg

SEQ ID NO: 188310 - DNA, 25 bp, Probe Sequence
ctgcaataggcgggtgggtgcgtgc

SEQ ID NO: 188311 - DNA, 25 bp, Probe Sequence
ctgaaacgccgcctggagaatgagc

SEQ ID NO: 188312 - DNA, 25 bp, Probe Sequence
ctgaaagcagccagtcggccaagcc

SEQ ID NO: 188313 - DNA, 25 bp, Probe Sequence
ctgcaaaggggcgtcggacaagtgc

SEQ ID NO: 188314 - DNA, 25 bp, Probe Sequence
cggaaggggccttggcgaagctggg

SEQ ID NO: 188315 - DNA, 25 bp, Probe Sequence
ctgaggggggtttgggaggcttgtg

SEQ ID NO: 188316 - DNA, 25 bp, Probe Sequence
ctgtcttggtggttaggggccactt

SEQ ID NO: 188317 - DNA, 25 bp, Probe Sequence
ctgtcttttggattcaaagtgggca

SEQ ID NO: 188318 - DNA, 25 bp, Probe Sequence
cgtcattctatgtaccctttactac

SEQ ID NO: 188319 - DNA, 25 bp, Probe Sequence
ctgtccctggtcacgggaactcagc

SEQ ID NO: 188320 - DNA, 25 bp, Probe Sequence
ctgttcctgtactcgcttaacaagg

SEQ ID NO: 188321 - DNA, 25 bp, Probe Sequence
ctgtttcgttccccagtgaagggag

SEQ ID NO: 188322 - DNA, 25 bp, Probe Sequence
ctgaatcttttccccagtatagtgg

SEQ ID NO: 188323 - DNA, 25 bp, Probe Sequence
ctgtttttcagctctagaatagttg

SEQ ID NO: 188324 - DNA, 25 bp, Probe Sequence
ctgatttcctcagtcctttaggtta

SEQ ID NO: 188325 - DNA, 25 bp, Probe Sequence
ctgacttcctaggccctgtaattta

SEQ ID NO: 188326 - DNA, 25 bp, Probe Sequence
ctgcacttgatttgggccttgaaga

SEQ ID NO: 188327 - DNA, 25 bp, Probe Sequence
ctgcagctcctggttggttctggag

SEQ ID NO: 188328 - DNA, 25 bp, Probe Sequence
ctgcagcacgtcgcttatattggga

SEQ ID NO: 188329 - DNA, 25 bp, Probe Sequence
ctgcagctggggccatttgagggga

SEQ ID NO: 188330 - DNA, 25 bp, Probe Sequence
ctgcacctgggtagggatggtggca

SEQ ID NO: 188331 - DNA, 25 bp, Probe Sequence
ctgacctggccagtgtggattttca

SEQ ID NO: 188332 - DNA, 25 bp, Probe Sequence
ctgcaccctcctagggcattgtatc

SEQ ID NO: 188333 - DNA, 25 bp, Probe Sequence
cgagaggccctagggacgtattcct

SEQ ID NO: 188334 - DNA, 25 bp, Probe Sequence
ctggagtccgctttaaggttgtcaa

SEQ ID NO: 188335 - DNA, 25 bp, Probe Sequence
ctgtggtcccttcaaagttgttata

SEQ ID NO: 188336 - DNA, 25 bp, Probe Sequence
ctgtggtctccttggaaatccgtct

SEQ ID NO: 188337 - DNA, 25 bp, Probe Sequence
ctgtgttttccaggagttacgtcaa

SEQ ID NO: 188338 - DNA, 25 bp, Probe Sequence
ctgatgctttaggaaatgtctactg

SEQ ID NO: 188339 - DNA, 25 bp, Probe Sequence
ctgatcgtccacaacggttactgcg

SEQ ID NO: 188340 - DNA, 25 bp, Probe Sequence
ctgatgctgttcttaccagattaaa

SEQ ID NO: 188341 - DNA, 25 bp, Probe Sequence
ctgagctgcttcctgagacagatgc

SEQ ID NO: 188342 - DNA, 25 bp, Probe Sequence
ctgagctcttaggaacagatgccat

SEQ ID NO: 188343 - DNA, 25 bp, Probe Sequence
ctgcactcccatgacacagagacac

SEQ ID NO: 188344 - DNA, 25 bp, Probe Sequence
ctgcaccaccattactgtggcctgc

SEQ ID NO: 188345 - DNA, 25 bp, Probe Sequence
ctgcagccccaggactggacattgt

SEQ ID NO: 188346 - DNA, 25 bp, Probe Sequence
ctgcaccttcatcagcggcatgatg

SEQ ID NO: 188347 - DNA, 25 bp, Probe Sequence
ctgcagcccgcttatgcgtatgtgc

SEQ ID NO: 188348 - DNA, 25 bp, Probe Sequence
ctgcacgcgcgctacactgactggc

SEQ ID NO: 188349 - DNA, 25 bp, Probe Sequence
ctgcagcgcaggcacagtgacgtga

SEQ ID NO: 188350 - DNA, 25 bp, Probe Sequence
ctgcagctggattacgcaacagtaa

SEQ ID NO: 188351 - DNA, 25 bp, Probe Sequence
ctgcactggatacccatgactgcaa

SEQ ID NO: 188352 - DNA, 25 bp, Probe Sequence
ctgagtggagcacgctgcaggctcg

SEQ ID NO: 188353 - DNA, 25 bp, Probe Sequence
ctgagcacgcagagagcatgggcga

SEQ ID NO: 188354 - DNA, 25 bp, Probe Sequence
ctgacacaattggatgctgtggaga

SEQ ID NO: 188355 - DNA, 25 bp, Probe Sequence
ctgacaatgcattgctgtgtgtgga

SEQ ID NO: 188356 - DNA, 25 bp, Probe Sequence
ctgcaaatgccacctgagatgaaca

SEQ ID NO: 188357 - DNA, 25 bp, Probe Sequence
ctgatcagtcactctcagaaaagga

SEQ ID NO: 188358 - DNA, 25 bp, Probe Sequence
ctgatagtgaccctgcagcaattat

SEQ ID NO: 188359 - DNA, 25 bp, Probe Sequence
ctgcaagtcttttgatagatgtcat

SEQ ID NO: 188360 - DNA, 25 bp, Probe Sequence
ctgaatgtcttatatgcattatctt

SEQ ID NO: 188361 - DNA, 25 bp, Probe Sequence
ctgagtgtattgcatctcttgattt

SEQ ID NO: 188362 - DNA, 25 bp, Probe Sequence
ctgactcaagcatatcctctattat

SEQ ID NO: 188363 - DNA, 25 bp, Probe Sequence
ctgaccaacatatctcatgaatatt

SEQ ID NO: 188364 - DNA, 25 bp, Probe Sequence
ctgacacccatcaagctcagcaaat

SEQ ID NO: 188365 - DNA, 25 bp, Probe Sequence
ctgacaatactaaatcatcatcttc

SEQ ID NO: 188366 - DNA, 25 bp, Probe Sequence
ctgaagataattttcatattcctga

SEQ ID NO: 188367 - DNA, 25 bp, Probe Sequence
ctgaacatccgtttattgtcctcat

SEQ ID NO: 188368 - DNA, 25 bp, Probe Sequence
ctgatatcccgtttctggtaataag

SEQ ID NO: 188369 - DNA, 25 bp, Probe Sequence
ctgtagccctgcctacttggaaagt

SEQ ID NO: 188370 - DNA, 25 bp, Probe Sequence
ctgtcagggcctctgccaaggaaat

SEQ ID NO: 188371 - DNA, 25 bp, Probe Sequence
ctgtcaaactgtcaccaacagaaag

SEQ ID NO: 188372 - DNA, 25 bp, Probe Sequence
ctgatcttacttcatccagtctaat

SEQ ID NO: 188373 - DNA, 25 bp, Probe Sequence
ctgacgtgtctcattcacagctaaa

SEQ ID NO: 188374 - DNA, 25 bp, Probe Sequence
ctgcacggagctgggcatccgcacc

SEQ ID NO: 188375 - DNA, 25 bp, Probe Sequence
ctgcactggtggggcatacagccta

SEQ ID NO: 188376 - DNA, 25 bp, Probe Sequence
ctgcacattgtgcacatgtacccta

SEQ ID NO: 188377 - DNA, 25 bp, Probe Sequence
ctgcaatgtgaaacagctgccctgt

SEQ ID NO: 188378 - DNA, 25 bp, Probe Sequence
ctgcaatgtgaaacagctgccctgt

SEQ ID NO: 188379 - DNA, 25 bp, Probe Sequence
ctgcaagtgaaacctcagcgcctga

SEQ ID NO: 188380 - DNA, 25 bp, Probe Sequence
ctgcaagaaaagctgctgctcctgc

SEQ ID NO: 188381 - DNA, 25 bp, Probe Sequence
ctgcaatgatgccaaggtgccagcc

SEQ ID NO: 188382 - DNA, 25 bp, Probe Sequence
ctgcacaggccctggtcatgacgag

SEQ ID NO: 188383 - DNA, 25 bp, Probe Sequence
ctgacagccaggctgaggccacagg

SEQ ID NO: 188384 - DNA, 25 bp, Probe Sequence
ctgcactccaggctgggcaacagta

SEQ ID NO: 188385 - DNA, 25 bp, Probe Sequence
ctgcactccaggctgggcaacagta

SEQ ID NO: 188386 - DNA, 25 bp, Probe Sequence
ctgcactccaggctgggcaacagta

SEQ ID NO: 188387 - DNA, 25 bp, Probe Sequence
ctgcactccaggctgggcaacagta

SEQ ID NO: 188388 - DNA, 25 bp, Probe Sequence
ctgcactccagcctgggcgacagag

SEQ ID NO: 188389 - DNA, 25 bp, Probe Sequence
ctgcactccagcttgggtgacagag

SEQ ID NO: 188390 - DNA, 25 bp, Probe Sequence
ctgacccgcatcgggctggagacgt

SEQ ID NO: 188391 - DNA, 25 bp, Probe Sequence
ctgagatcgaacggactgtgaatcc

SEQ ID NO: 188392 - DNA, 25 bp, Probe Sequence
ctgagtggagagtgactgggcacag

SEQ ID NO: 188393 - DNA, 25 bp, Probe Sequence
ctgtgcccaggtccctggaatgcag

SEQ ID NO: 188394 - DNA, 25 bp, Probe Sequence
ctgacacagcagatctccaggaagg

SEQ ID NO: 188395 - DNA, 25 bp, Probe Sequence
ctgagaagcagctcatccctgatgg

SEQ ID NO: 188396 - DNA, 25 bp, Probe Sequence
ctgaacagcagaaacccatgtgcag

SEQ ID NO: 188397 - DNA, 25 bp, Probe Sequence
ctgaagcgccattatgctgcctttc

SEQ ID NO: 188398 - DNA, 25 bp, Probe Sequence
ctgaacctttaggcttgtctcggcc

SEQ ID NO: 188399 - DNA, 25 bp, Probe Sequence
ctgaaagctttgcctctttcttggc

SEQ ID NO: 188400 - DNA, 25 bp, Probe Sequence
ctgtaacttagacctttcctgggat

SEQ ID NO: 188401 - DNA, 25 bp, Probe Sequence
ctgaacacagaagcctcttcctgga

SEQ ID NO: 188402 - DNA, 25 bp, Probe Sequence
ctgaaagaggaggccttctcccggg

SEQ ID NO: 188403 - DNA, 25 bp, Probe Sequence
ctgaagaaccaggttcctgcccggt

SEQ ID NO: 188404 - DNA, 25 bp, Probe Sequence
ctgtaagccaggattcctgatccag

SEQ ID NO: 188405 - DNA, 25 bp, Probe Sequence
ctgtaatgcgcacctttgctaataa

SEQ ID NO: 188406 - DNA, 25 bp, Probe Sequence
ctgcaactctggctttcataagtag

SEQ ID NO: 188407 - DNA, 25 bp, Probe Sequence
ctgaaatgctgtctttcccagtagc

SEQ ID NO: 188408 - DNA, 25 bp, Probe Sequence
ctgaatcatgtctgtatccccagtg

SEQ ID NO: 188409 - DNA, 25 bp, Probe Sequence
ctgaatcttgaagactgcaaagtga

SEQ ID NO: 188410 - DNA, 25 bp, Probe Sequence
ctgacatctagaggaataaatcgta

SEQ ID NO: 188411 - DNA, 25 bp, Probe Sequence
ctgcaatcaggtgaatatacagcct

SEQ ID NO: 188412 - DNA, 25 bp, Probe Sequence
cgcattgctgataccaatatcacca

SEQ ID NO: 188413 - DNA, 25 bp, Probe Sequence
ctgtcagcgagcatgcacaacgcca

SEQ ID NO: 188414 - DNA, 25 bp, Probe Sequence
ctgtcacgtccactaatcggcaaaa

SEQ ID NO: 188415 - DNA, 25 bp, Probe Sequence
cgtctcgtactggatatacgttaat

SEQ ID NO: 188416 - DNA, 25 bp, Probe Sequence
ctgttcaaagtcgtagggcttataa

SEQ ID NO: 188417 - DNA, 25 bp, Probe Sequence
ctgacccaagagcttaactctgaca

SEQ ID NO: 188418 - DNA, 25 bp, Probe Sequence
ctgtcactgaattgggaaacctaca

SEQ ID NO: 188419 - DNA, 25 bp, Probe Sequence
ctgactccattctgggaacgctgca

SEQ ID NO: 188420 - DNA, 25 bp, Probe Sequence
ctgacttattgattatggaacctgt

SEQ ID NO: 188421 - DNA, 25 bp, Probe Sequence
ctgcaattttacctagctaccacta

SEQ ID NO: 188422 - DNA, 25 bp, Probe Sequence
ctgaaatctctagaacaacatcaaa

SEQ ID NO: 188423 - DNA, 25 bp, Probe Sequence
ctgaagccacttcagagcaaccaca

SEQ ID NO: 188424 - DNA, 25 bp, Probe Sequence
ctgcaacagctcctggaagggccac

SEQ ID NO: 188425 - DNA, 25 bp, Probe Sequence
ctgaatcctgcccggagtggaactg

SEQ ID NO: 188426 - DNA, 25 bp, Probe Sequence
ctgaatcctgcccggagtggaagct

SEQ ID NO: 188427 - DNA, 25 bp, Probe Sequence
cgttagctgcgttcggggaaggttg

SEQ ID NO: 188428 - DNA, 25 bp, Probe Sequence
tcgttagctgcgttcggggaaggtt

SEQ ID NO: 188429 - DNA, 25 bp, Probe Sequence
ctgttggtggcatcaaggagaagac

SEQ ID NO: 188430 - DNA, 25 bp, Probe Sequence
ctgattttactacagggagacagaa

SEQ ID NO: 188431 - DNA, 25 bp, Probe Sequence
ctgtccttcctaggggtgcaggaag

SEQ ID NO: 188432 - DNA, 25 bp, Probe Sequence
ctgtaccaactagagtggagaagaa

SEQ ID NO: 188433 - DNA, 25 bp, Probe Sequence
ctgaaccatcagcatgtcagtggca

SEQ ID NO: 188434 - DNA, 25 bp, Probe Sequence
ctgtacacataattatcatgttgat

SEQ ID NO: 188435 - DNA, 25 bp, Probe Sequence
ctgtaacaagtactcattaaaggaa

SEQ ID NO: 188436 - DNA, 25 bp, Probe Sequence
ctgtaaattcatgtattcaaaggaa

SEQ ID NO: 188437 - DNA, 25 bp, Probe Sequence
ctgatgaatgattatggtctataca

SEQ ID NO: 188438 - DNA, 25 bp, Probe Sequence
ctgataatgtgtgggctctgaaaat

SEQ ID NO: 188439 - DNA, 25 bp, Probe Sequence
ctgaaatgtattggcaggatccaca

SEQ ID NO: 188440 - DNA, 25 bp, Probe Sequence
ctgtaattcattgagcagttagctc

SEQ ID NO: 188441 - DNA, 25 bp, Probe Sequence
ctgtaagaagtgtagccctggctat

SEQ ID NO: 188442 - DNA, 25 bp, Probe Sequence
ctgtaggggatatctcttgctctta

SEQ ID NO: 188443 - DNA, 25 bp, Probe Sequence
ctgcaagggaattcttgtgtgctgc

SEQ ID NO: 188444 - DNA, 25 bp, Probe Sequence
ctgagcattagatttctcatttgcc

SEQ ID NO: 188445 - DNA, 25 bp, Probe Sequence
ctgagctcaattgttctgatagcac

SEQ ID NO: 188446 - DNA, 25 bp, Probe Sequence
ctgatgtaacatgtgatacatacaa

SEQ ID NO: 188447 - DNA, 25 bp, Probe Sequence
ctgaggcaccaagtatagatgagaa

SEQ ID NO: 188448 - DNA, 25 bp, Probe Sequence
ctgaggcctgaagttctgtgataga

SEQ ID NO: 188449 - DNA, 25 bp, Probe Sequence
ctgagagaccagttcttttagaagc

SEQ ID NO: 188450 - DNA, 25 bp, Probe Sequence
ctgcaatggccacctctttaaaagg

SEQ ID NO: 188451 - DNA, 25 bp, Probe Sequence
ctgaattgcccgtttccatacaggg

SEQ ID NO: 188452 - DNA, 25 bp, Probe Sequence
ctgaaatcccagctactcaagaggc

SEQ ID NO: 188453 - DNA, 25 bp, Probe Sequence
ctgaaaccaagcaataccgtcatgt

SEQ ID NO: 188454 - DNA, 25 bp, Probe Sequence
ctgaaacctggcaaagtcgatgtga

SEQ ID NO: 188455 - DNA, 25 bp, Probe Sequence
ctgaaagtctctgaagacctgatga

SEQ ID NO: 188456 - DNA, 25 bp, Probe Sequence
ctgacacaactctgctagacctgca

SEQ ID NO: 188457 - DNA, 25 bp, Probe Sequence
ctgtaccactgtggccaaccagttc

SEQ ID NO: 188458 - DNA, 25 bp, Probe Sequence
ctgtaccactgtggccaaccagttc

SEQ ID NO: 188459 - DNA, 25 bp, Probe Sequence
ctgacccactgttgcagaatgaagt

SEQ ID NO: 188460 - DNA, 25 bp, Probe Sequence
ctgacacccattggaaatgaaccat

SEQ ID NO: 188461 - DNA, 25 bp, Probe Sequence
ctgatctaccttggacggaaacagg

SEQ ID NO: 188462 - DNA, 25 bp, Probe Sequence
ctgtctacttaccaccaaaggcaga

SEQ ID NO: 188463 - DNA, 25 bp, Probe Sequence
ctgacatacttcacccttttgatag

SEQ ID NO: 188464 - DNA, 25 bp, Probe Sequence
ctgacagacaaccatctctttttat

SEQ ID NO: 188465 - DNA, 25 bp, Probe Sequence
ctgagctactcggactctttattag

SEQ ID NO: 188466 - DNA, 25 bp, Probe Sequence
ctgaagatctctaccatttaattaa

SEQ ID NO: 188467 - DNA, 25 bp, Probe Sequence
ctgaaatcctagccctgtaagtaca

SEQ ID NO: 188468 - DNA, 25 bp, Probe Sequence
ctgaccagtcttggccttaagctga

SEQ ID NO: 188469 - DNA, 25 bp, Probe Sequence
ctggtcgtcttcagttaatggcaag

SEQ ID NO: 188470 - DNA, 25 bp, Probe Sequence
ctgagtcattctaaagtaagttgca

SEQ ID NO: 188471 - DNA, 25 bp, Probe Sequence
ctgaatcattctcgatttaactcga

SEQ ID NO: 188472 - DNA, 25 bp, Probe Sequence
ctggaagtcgcagtttaggcctgaa

SEQ ID NO: 188473 - DNA, 25 bp, Probe Sequence
ctgatagttactgttgtgacctgaa

SEQ ID NO: 188474 - DNA, 25 bp, Probe Sequence
ctgtccttactgcttatgcagggaa

SEQ ID NO: 188475 - DNA, 25 bp, Probe Sequence
ctgtcgttccggttatgttgtgtaa

SEQ ID NO: 188476 - DNA, 25 bp, Probe Sequence
ctgggttcgtagtattggattattg

SEQ ID NO: 188477 - DNA, 25 bp, Probe Sequence
ctgagttcctgctagatttcgtatt

SEQ ID NO: 188478 - DNA, 25 bp, Probe Sequence
ctgaaagctgtctatgttccatttt

SEQ ID NO: 188479 - DNA, 25 bp, Probe Sequence
ctgtaacttcacttgacgcacgtta

SEQ ID NO: 188480 - DNA, 25 bp, Probe Sequence
ctgttactgtccttggcgaatcgat

SEQ ID NO: 188481 - DNA, 25 bp, Probe Sequence
ctgttcacttgtgcatgggctaaaa

SEQ ID NO: 188482 - DNA, 25 bp, Probe Sequence
ctgaaggtctgcgtcacggtgaaaa

SEQ ID NO: 188483 - DNA, 25 bp, Probe Sequence
ctgatgacgtctggccacaattaag

SEQ ID NO: 188484 - DNA, 25 bp, Probe Sequence
cgagtggctcctgaatttaagtctg

SEQ ID NO: 188485 - DNA, 25 bp, Probe Sequence
cgagtggtcagcacatttagtaagg

SEQ ID NO: 188486 - DNA, 25 bp, Probe Sequence
ctgagcgttcctactttaaagcatg

SEQ ID NO: 188487 - DNA, 25 bp, Probe Sequence
ctgaggttcttcatattccagagtc

SEQ ID NO: 188488 - DNA, 25 bp, Probe Sequence
ctgagagttcacctggacatccagg

SEQ ID NO: 188489 - DNA, 25 bp, Probe Sequence
ctgagccttcactttgagccgaaga

SEQ ID NO: 188490 - DNA, 25 bp, Probe Sequence
ctgagagctacctattggcataaaa

SEQ ID NO: 188491 - DNA, 25 bp, Probe Sequence
ctgaagctggcctggcacaagaaga

SEQ ID NO: 188492 - DNA, 25 bp, Probe Sequence
ctgaagcgctgtttgcagcatcagg

SEQ ID NO: 188493 - DNA, 25 bp, Probe Sequence
ctgacagcagtgcttacatcaaatc

SEQ ID NO: 188494 - DNA, 25 bp, Probe Sequence
ctgacagcattccaataaagcatac

SEQ ID NO: 188495 - DNA, 25 bp, Probe Sequence
ctgaccacccaatgcagtgcatatt

SEQ ID NO: 188496 - DNA, 25 bp, Probe Sequence
ctgattccccactcaatgacatcat

SEQ ID NO: 188497 - DNA, 25 bp, Probe Sequence
ctgataccagccgctgcaaaatcat

SEQ ID NO: 188498 - DNA, 25 bp, Probe Sequence
ctgttcaacacgactgcagacccat

SEQ ID NO: 188499 - DNA, 25 bp, Probe Sequence
ctgttgaaatgctcaagacttcatt

SEQ ID NO: 188500 - DNA, 25 bp, Probe Sequence
ctgtatctttgctcaactgctaatt

SEQ ID NO: 188501 - DNA, 25 bp, Probe Sequence
ctgtttgcttcacaacaatatctat

SEQ ID NO: 188502 - DNA, 25 bp, Probe Sequence
ctgttttccaaagtcacgctcattg

SEQ ID NO: 188503 - DNA, 25 bp, Probe Sequence
ctgttttccaaagtcacgctcattg

SEQ ID NO: 188504 - DNA, 25 bp, Probe Sequence
ctgatttgaccttacctactatttg

SEQ ID NO: 188505 - DNA, 25 bp, Probe Sequence
ctgtttgcattttggccttaaagca

SEQ ID NO: 188506 - DNA, 25 bp, Probe Sequence
ctgtacccttacccacatatgaaga

SEQ ID NO: 188507 - DNA, 25 bp, Probe Sequence
ctgtgacccttttctactggaatag

SEQ ID NO: 188508 - DNA, 25 bp, Probe Sequence
ctgttacttttgttggtgttatggg

SEQ ID NO: 188509 - DNA, 25 bp, Probe Sequence
ctgttaagttagtctgttgttatag

SEQ ID NO: 188510 - DNA, 25 bp, Probe Sequence
ctgttaagttctttcatttgtttgt

SEQ ID NO: 188511 - DNA, 25 bp, Probe Sequence
ctgttcaggggatccttctgtttct

SEQ ID NO: 188512 - DNA, 25 bp, Probe Sequence
ctgtctgggagctgaccttttattc

SEQ ID NO: 188513 - DNA, 25 bp, Probe Sequence
ctgtctggggttcctttagtcttga

SEQ ID NO: 188514 - DNA, 25 bp, Probe Sequence
ctgttgtttgggctgcctaacttcc

SEQ ID NO: 188515 - DNA, 25 bp, Probe Sequence
ctgtttatttggtgtatatactttc

SEQ ID NO: 188516 - DNA, 25 bp, Probe Sequence
ctgtttgtgttgctggtggttttat

SEQ ID NO: 188517 - DNA, 25 bp, Probe Sequence
ctgtttcgccaagggttgtatttag

SEQ ID NO: 188518 - DNA, 25 bp, Probe Sequence
ctgtaccccatagggactttccttg

SEQ ID NO: 188519 - DNA, 25 bp, Probe Sequence
ctgttctccaaaggtaccttatcct

SEQ ID NO: 188520 - DNA, 25 bp, Probe Sequence
ctgtttcccaagctagactgtgtct

SEQ ID NO: 188521 - DNA, 25 bp, Probe Sequence
ctgtttgattaagaagcactatgtt

SEQ ID NO: 188522 - DNA, 25 bp, Probe Sequence
ctggttgtaatgtccatttccatct

SEQ ID NO: 188523 - DNA, 25 bp, Probe Sequence
ctgttgtggagtacgctttggactg

SEQ ID NO: 188524 - DNA, 25 bp, Probe Sequence
ctgagtccgacaaccattggggtgg

SEQ ID NO: 188525 - DNA, 25 bp, Probe Sequence
ctgaagcctggaactgattgcggag

SEQ ID NO: 188526 - DNA, 25 bp, Probe Sequence
ctgagtgcctgggactatatatgtg

SEQ ID NO: 188527 - DNA, 25 bp, Probe Sequence
ctgagtcacatggcaattctatttg

SEQ ID NO: 188528 - DNA, 25 bp, Probe Sequence
ctgatgtcatcttgagctcttcatt

SEQ ID NO: 188529 - DNA, 25 bp, Probe Sequence
ctgactcctgagactattttaactg

SEQ ID NO: 188530 - DNA, 25 bp, Probe Sequence
ctgacctgcagacttcatttggagt

SEQ ID NO: 188531 - DNA, 25 bp, Probe Sequence
ctgtcttgcgtgctatttcagagtg

SEQ ID NO: 188532 - DNA, 25 bp, Probe Sequence
ctgacggctgctcatgttgtggagg

SEQ ID NO: 188533 - DNA, 25 bp, Probe Sequence
ctgaagccttagagtgtgtgtgcgt

SEQ ID NO: 188534 - DNA, 25 bp, Probe Sequence
ctgaaatcatctctagtcttgcttt

SEQ ID NO: 188535 - DNA, 25 bp, Probe Sequence
ctgaaattcattacatatctgtctc

SEQ ID NO: 188536 - DNA, 25 bp, Probe Sequence
ctgagaagaatgtgcctctgtccaa

SEQ ID NO: 188537 - DNA, 25 bp, Probe Sequence
ctgatgggacagtcagccctaaagg

SEQ ID NO: 188538 - DNA, 25 bp, Probe Sequence
ctgggctggaccgtttcaacagaga

SEQ ID NO: 188539 - DNA, 25 bp, Probe Sequence
ctgggctggaccgtttcaacagaga

SEQ ID NO: 188540 - DNA, 25 bp, Probe Sequence
ctgacttgagaccagttgaataaaa

SEQ ID NO: 188541 - DNA, 25 bp, Probe Sequence
cgactctaacgggattgtaagaatc

SEQ ID NO: 188542 - DNA, 25 bp, Probe Sequence
ctgtcctaaggggatttacccacat

SEQ ID NO: 188543 - DNA, 25 bp, Probe Sequence
ctgtccaaattcagtcattgaccca

SEQ ID NO: 188544 - DNA, 25 bp, Probe Sequence
ctgtacaattacatcgattcttcca

SEQ ID NO: 188545 - DNA, 25 bp, Probe Sequence
ctgaacgattaaacagctcctccca

SEQ ID NO: 188546 - DNA, 25 bp, Probe Sequence
ctgagaaagctaagccctacatttc

SEQ ID NO: 188547 - DNA, 25 bp, Probe Sequence
ctgagaaagcccaatcctatatgtt

SEQ ID NO: 188548 - DNA, 25 bp, Probe Sequence
ctgatgaaacactgacctcttgtct

SEQ ID NO: 188549 - DNA, 25 bp, Probe Sequence
ctgagaagaatctgaaggctttatt

SEQ ID NO: 188550 - DNA, 25 bp, Probe Sequence
ctgaggagcgatgcgacaggcatga

SEQ ID NO: 188551 - DNA, 25 bp, Probe Sequence
ctgatcggctgtatgactccatgaa

SEQ ID NO: 188552 - DNA, 25 bp, Probe Sequence
ctgtccgtgaaaaccgctacattgt

SEQ ID NO: 188553 - DNA, 25 bp, Probe Sequence
ctgttccactcaaaccgtgttagga

SEQ ID NO: 188554 - DNA, 25 bp, Probe Sequence
ctgtactcgcttaacaaggagttgg

SEQ ID NO: 188555 - DNA, 25 bp, Probe Sequence
ctgagactattttaactgggattgg

SEQ ID NO: 188556 - DNA, 25 bp, Probe Sequence
ctggtaatttctacctgtaattcca

SEQ ID NO: 188557 - DNA, 25 bp, Probe Sequence
cgggtatttctttcggatcttctcg

SEQ ID NO: 188558 - DNA, 25 bp, Probe Sequence
ctgacgacatttttcctcgattact

SEQ ID NO: 188559 - DNA, 25 bp, Probe Sequence
ctgattgaattttatgccccttggt

SEQ ID NO: 188560 - DNA, 25 bp, Probe Sequence
ctgactgaattgctgacccttcaag

SEQ ID NO: 188561 - DNA, 25 bp, Probe Sequence
ctgacttctgggaactgctttgcat

SEQ ID NO: 188562 - DNA, 25 bp, Probe Sequence
ctgatgccaatgggaaatcctttgc

SEQ ID NO: 188563 - DNA, 25 bp, Probe Sequence
ctgtgctatgtgcagaaccactttg

SEQ ID NO: 188564 - DNA, 25 bp, Probe Sequence
ctgtttgcctgatatctactttagc

SEQ ID NO: 188565 - DNA, 25 bp, Probe Sequence
ctgtatgtgaagtgcatgctaggaa

SEQ ID NO: 188566 - DNA, 25 bp, Probe Sequence
ctgactgcatgatgagtctgaaggc

SEQ ID NO: 188567 - DNA, 25 bp, Probe Sequence
ctgaggcaatagctgtgaatgtgga

SEQ ID NO: 188568 - DNA, 25 bp, Probe Sequence
ctgaccacaagcttctgcctgaaga

SEQ ID NO: 188569 - DNA, 25 bp, Probe Sequence
ctgacccacatgtgctttgcagagg

SEQ ID NO: 188570 - DNA, 25 bp, Probe Sequence
ctgaactccagatgtttgcacagta

SEQ ID NO: 188571 - DNA, 25 bp, Probe Sequence
ctgaggcaccagggctaagcaatta

SEQ ID NO: 188572 - DNA, 25 bp, Probe Sequence
ctgaggccacaggtctaggctggct

SEQ ID NO: 188573 - DNA, 25 bp, Probe Sequence
ctgagagacacagggcgctacggct

SEQ ID NO: 188574 - DNA, 25 bp, Probe Sequence
ctgaaagcacaggtggcatatgcga

SEQ ID NO: 188575 - DNA, 25 bp, Probe Sequence
ctgtacagccagggcagcaagggcc

SEQ ID NO: 188576 - DNA, 25 bp, Probe Sequence
ctgatccagcctgtagagactcgcc

SEQ ID NO: 188577 - DNA, 25 bp, Probe Sequence
ctgatctgtctggcatgtcaggagc

SEQ ID NO: 188578 - DNA, 25 bp, Probe Sequence
ctgtctgctatagctcagtgactgt

SEQ ID NO: 188579 - DNA, 25 bp, Probe Sequence
ctgatctctgaggttcagtatcatt

SEQ ID NO: 188580 - DNA, 25 bp, Probe Sequence
ctgtcctacttgcagtacatctacg

SEQ ID NO: 188581 - DNA, 25 bp, Probe Sequence
ctgtccatcaactgttaccatcaca

SEQ ID NO: 188582 - DNA, 25 bp, Probe Sequence
ctgtcctcagagtgcatttcctgga

SEQ ID NO: 188583 - DNA, 25 bp, Probe Sequence
ctgagcaccaggtggtctcctctga

SEQ ID NO: 188584 - DNA, 25 bp, Probe Sequence
ctgactacacgctggagtactcggt

SEQ ID NO: 188585 - DNA, 25 bp, Probe Sequence
ctgagctgaacgggaagctcactgg

SEQ ID NO: 188586 - DNA, 25 bp, Probe Sequence
ctgaccaacatggagaaaccccgtc

SEQ ID NO: 188587 - DNA, 25 bp, Probe Sequence
ctgagtcagagtttgagaccgccct

SEQ ID NO: 188588 - DNA, 25 bp, Probe Sequence
ctgagggggcctggatgccccctgt

SEQ ID NO: 188589 - DNA, 25 bp, Probe Sequence
ctgagggatggacttcagcccctct

SEQ ID NO: 188590 - DNA, 25 bp, Probe Sequence
ctggatggcatgtggtaggtactaa

SEQ ID NO: 188591 - DNA, 25 bp, Probe Sequence
ctgacaacatgctaggtagtgacct

SEQ ID NO: 188592 - DNA, 25 bp, Probe Sequence
ctgactgcctgatggggtgacttgg

SEQ ID NO: 188593 - DNA, 25 bp, Probe Sequence
ctgagtcctgtggggggtccaggtc

SEQ ID NO: 188594 - DNA, 25 bp, Probe Sequence
ctgagcccagccagaggcgggcagg

SEQ ID NO: 188595 - DNA, 25 bp, Probe Sequence
ctgtccaagctggtgattgtggcca

SEQ ID NO: 188596 - DNA, 25 bp, Probe Sequence
ctgtagcagacacggaagagtccaa

SEQ ID NO: 188597 - DNA, 25 bp, Probe Sequence
ctgtatcaacagcaaggaattcaat

SEQ ID NO: 188598 - DNA, 25 bp, Probe Sequence
ctgttgagaaaacggaactactggg

SEQ ID NO: 188599 - DNA, 25 bp, Probe Sequence
ctgttggaaaacgcttcaaagaggc

SEQ ID NO: 188600 - DNA, 25 bp, Probe Sequence
ctgacgaaaaaggtgttgccaaggg

SEQ ID NO: 188601 - DNA, 25 bp, Probe Sequence
ctgaggtgataaatgttgtttcaaa

SEQ ID NO: 188602 - DNA, 25 bp, Probe Sequence
ctgaggatgatatatggagttttta

SEQ ID NO: 188603 - DNA, 25 bp, Probe Sequence
ctgactggataacaatgatcacttt

SEQ ID NO: 188604 - DNA, 25 bp, Probe Sequence
ctgactcacatacagtagatcactt

SEQ ID NO: 188605 - DNA, 25 bp, Probe Sequence
ctgatctactataaggtattctata

SEQ ID NO: 188606 - DNA, 25 bp, Probe Sequence
ctgactgctcttacggaatcctatg

SEQ ID NO: 188607 - DNA, 25 bp, Probe Sequence
ctgaccctgccacagattggctgtg

SEQ ID NO: 188608 - DNA, 25 bp, Probe Sequence
ctgatccctcgagagcatctggaag

SEQ ID NO: 188609 - DNA, 25 bp, Probe Sequence
ctgtcccttgagagccaggaatggc

SEQ ID NO: 188610 - DNA, 25 bp, Probe Sequence
ctgacgcccatgtttctcatggtca

SEQ ID NO: 188611 - DNA, 25 bp, Probe Sequence
ctgacagtctcagtttgccagtctt

SEQ ID NO: 188612 - DNA, 25 bp, Probe Sequence
ctgactgcttttcctgtcagtgctt

SEQ ID NO: 188613 - DNA, 25 bp, Probe Sequence
ctgaccatctttgtgctgtgtgtgt

SEQ ID NO: 188614 - DNA, 25 bp, Probe Sequence
ctgactcatcagtgtggtggttgct

SEQ ID NO: 188615 - DNA, 25 bp, Probe Sequence
ctgagctgcatggtagttggggatc

SEQ ID NO: 188616 - DNA, 25 bp, Probe Sequence
ctgagatcctccctgatggggacca

SEQ ID NO: 188617 - DNA, 25 bp, Probe Sequence
ctgagatcctccctgatggggacca

SEQ ID NO: 188618 - DNA, 25 bp, Probe Sequence
ctgagatcctccctgatggggacca

SEQ ID NO: 188619 - DNA, 25 bp, Probe Sequence
ctgagcatctttccggaggctaaca

SEQ ID NO: 188620 - DNA, 25 bp, Probe Sequence
ctgttctgtcccttggagctgtaaa

SEQ ID NO: 188621 - DNA, 25 bp, Probe Sequence
ctgagccagtcccaggggcatgtat

SEQ ID NO: 188622 - DNA, 25 bp, Probe Sequence
ctgagactgtcgcagaggctgtctg

SEQ ID NO: 188623 - DNA, 25 bp, Probe Sequence
ctgagcagcagggcaagggtgtggc

SEQ ID NO: 188624 - DNA, 25 bp, Probe Sequence
ctgagccagctcaaagcatgtttgg

SEQ ID NO: 188625 - DNA, 25 bp, Probe Sequence
ctgagccagattaacaggaatgaag

SEQ ID NO: 188626 - DNA, 25 bp, Probe Sequence
ctgagcgagattaccaagtataaga

SEQ ID NO: 188627 - DNA, 25 bp, Probe Sequence
ctgactgacattgccaagtattcaa

SEQ ID NO: 188628 - DNA, 25 bp, Probe Sequence
ctgacttctctaccacataattcta

SEQ ID NO: 188629 - DNA, 25 bp, Probe Sequence
ctgacacttctacatcatttgttct

SEQ ID NO: 188630 - DNA, 25 bp, Probe Sequence
ctgacactttcacttttgcagattg

SEQ ID NO: 188631 - DNA, 25 bp, Probe Sequence
ctgatacttcacgtttatgcttctg

SEQ ID NO: 188632 - DNA, 25 bp, Probe Sequence
ctgtgatgtccacctcataagtcat

SEQ ID NO: 188633 - DNA, 25 bp, Probe Sequence
ctgagactctcggcacatacgatat

SEQ ID NO: 188634 - DNA, 25 bp, Probe Sequence
ctgggctgccaggaaacgatttggg

SEQ ID NO: 188635 - DNA, 25 bp, Probe Sequence
ctggactcatgggatttcgtttggc

SEQ ID NO: 188636 - DNA, 25 bp, Probe Sequence
ctgtgactctgtgatgtatcatgat

SEQ ID NO: 188637 - DNA, 25 bp, Probe Sequence
ctgtgtccttaagtacttcctgaag

SEQ ID NO: 188638 - DNA, 25 bp, Probe Sequence
ctgtttttacagacctatcggcctt

SEQ ID NO: 188639 - DNA, 25 bp, Probe Sequence
ctgtgtttttttcaatcaccctctt

SEQ ID NO: 188640 - DNA, 25 bp, Probe Sequence
ctgattttctttatcttcagcctct

SEQ ID NO: 188641 - DNA, 25 bp, Probe Sequence
ctgtatcccaaagcttaagtctctg

SEQ ID NO: 188642 - DNA, 25 bp, Probe Sequence
cgataccccacaggtaaatcctgtg

SEQ ID NO: 188643 - DNA, 25 bp, Probe Sequence
ctgtacgcccagggaaagcggcgtt

SEQ ID NO: 188644 - DNA, 25 bp, Probe Sequence
ctgtctccctagggtacttgggttg

SEQ ID NO: 188645 - DNA, 25 bp, Probe Sequence
cgcaatggcgtagctttcgtggagt

SEQ ID NO: 188646 - DNA, 25 bp, Probe Sequence
ctgagatgggtagttggtaggggtg

SEQ ID NO: 188647 - DNA, 25 bp, Probe Sequence
ctggcagtaggggtggggtaggtga

SEQ ID NO: 188648 - DNA, 25 bp, Probe Sequence
ctgaggttggacgtggggaatttct

SEQ ID NO: 188649 - DNA, 25 bp, Probe Sequence
ctgaggtcaggtcttggtaggtgcc

SEQ ID NO: 188650 - DNA, 25 bp, Probe Sequence
ctgaggtctgtttctctgggaggta

SEQ ID NO: 188651 - DNA, 25 bp, Probe Sequence
ctgagcttcggttctccagaatgta

SEQ ID NO: 188652 - DNA, 25 bp, Probe Sequence
ctgttccaggattgctccaggtttg

SEQ ID NO: 188653 - DNA, 25 bp, Probe Sequence
ctgttcatgcatttttccagttgcg

SEQ ID NO: 188654 - DNA, 25 bp, Probe Sequence
ctgtcaatatataacccgcctgcag

SEQ ID NO: 188655 - DNA, 25 bp, Probe Sequence
ctgtcacttcaaaactccagcttgc

SEQ ID NO: 188656 - DNA, 25 bp, Probe Sequence
ctgtccattccaagaaaagattcgg

SEQ ID NO: 188657 - DNA, 25 bp, Probe Sequence
ctgtccattcctacctggacatgtc

SEQ ID NO: 188658 - DNA, 25 bp, Probe Sequence
ctgttgacccttgtggaagatatga

SEQ ID NO: 188659 - DNA, 25 bp, Probe Sequence
ctgattgcccgtaggttaagaggtc

SEQ ID NO: 188660 - DNA, 25 bp, Probe Sequence
ctgtgggccggtgtttgaggagtcc

SEQ ID NO: 188661 - DNA, 25 bp, Probe Sequence
cggaagtttgttctctggacactcc

SEQ ID NO: 188662 - DNA, 25 bp, Probe Sequence
cggaggttatgtcttcggtgtctca

SEQ ID NO: 188663 - DNA, 25 bp, Probe Sequence
cgaccgttatccagtcggttcgtgg

SEQ ID NO: 188664 - DNA, 25 bp, Probe Sequence
ctgatccagttcaccagtaggttgg

SEQ ID NO: 188665 - DNA, 25 bp, Probe Sequence
ctgtactgtcccggaggaggttggg

SEQ ID NO: 188666 - DNA, 25 bp, Probe Sequence
ctgaccttcgccagcaacaatgtga

SEQ ID NO: 188667 - DNA, 25 bp, Probe Sequence
ctgaggcttctgcctactgagcaag

SEQ ID NO: 188668 - DNA, 25 bp, Probe Sequence
ctgaggcatcctatccatatgaagg

SEQ ID NO: 188669 - DNA, 25 bp, Probe Sequence
ctgaggcatcctatccatatgaagg

SEQ ID NO: 188670 - DNA, 25 bp, Probe Sequence
ctgaggcatcctatccatatgaagg

SEQ ID NO: 188671 - DNA, 25 bp, Probe Sequence
ctgggtcctttcatcataagggaga

SEQ ID NO: 188672 - DNA, 25 bp, Probe Sequence
ctgagtccactttattctggggcac

SEQ ID NO: 188673 - DNA, 25 bp, Probe Sequence
ctgtttcactggttatgcggcggat

SEQ ID NO: 188674 - DNA, 25 bp, Probe Sequence
ctgtttctctggttagaccttgatt

SEQ ID NO: 188675 - DNA, 25 bp, Probe Sequence
ctgtgtacctcgtaggaacgctgag

SEQ ID NO: 188676 - DNA, 25 bp, Probe Sequence
ctgtttcctctaaggaatactagtg

SEQ ID NO: 188677 - DNA, 25 bp, Probe Sequence
ctgtccaccttatagaaacatcagt

SEQ ID NO: 188678 - DNA, 25 bp, Probe Sequence
ctgtccttctttaagacacagacgt

SEQ ID NO: 188679 - DNA, 25 bp, Probe Sequence
cgtcctttaatatgtccaacctgct

SEQ ID NO: 188680 - DNA, 25 bp, Probe Sequence
ctgtttataaaacctctaaccatct

SEQ ID NO: 188681 - DNA, 25 bp, Probe Sequence
ctgtatctagaaaacccatcgactc

SEQ ID NO: 188682 - DNA, 25 bp, Probe Sequence
ctgataccaatatcaccagcattcc

SEQ ID NO: 188683 - DNA, 25 bp, Probe Sequence
ctgaggtaaaggtccatgaaccctg

SEQ ID NO: 188684 - DNA, 25 bp, Probe Sequence
ctgagttacaaagacagaccctgtc

SEQ ID NO: 188685 - DNA, 25 bp, Probe Sequence
ctgagacttcaatctacagcccagc

SEQ ID NO: 188686 - DNA, 25 bp, Probe Sequence
ctgaccttatatgtgacccctgagg

SEQ ID NO: 188687 - DNA, 25 bp, Probe Sequence
ctgtcccatcaagtataccccagag

SEQ ID NO: 188688 - DNA, 25 bp, Probe Sequence
ctgtccgcaaggttcatgtgaccaa

SEQ ID NO: 188689 - DNA, 25 bp, Probe Sequence
ctgtcccaatcgaccagtgtatcga

SEQ ID NO: 188690 - DNA, 25 bp, Probe Sequence
ctgacccaaccacagaggatgctga

SEQ ID NO: 188691 - DNA, 25 bp, Probe Sequence
ctgacctaaacgtggaatgcatgtg

SEQ ID NO: 188692 - DNA, 25 bp, Probe Sequence
ctgacctcaaaaacagcaaagctgt

SEQ ID NO: 188693 - DNA, 25 bp, Probe Sequence
ctgacctgagactgtcgcagaggct

SEQ ID NO: 188694 - DNA, 25 bp, Probe Sequence
cgtcctgaacactgcagctagcttt

SEQ ID NO: 188695 - DNA, 25 bp, Probe Sequence
ctgtatgatgcacagccgagccatg

SEQ ID NO: 188696 - DNA, 25 bp, Probe Sequence
ctgagcatgacacagctcgggctgt

SEQ ID NO: 188697 - DNA, 25 bp, Probe Sequence
ctgaggagagaaccggtgcgtcctg

SEQ ID NO: 188698 - DNA, 25 bp, Probe Sequence
ctgatgaaggagatcgaggcggcgg

SEQ ID NO: 188699 - DNA, 25 bp, Probe Sequence
ctgatgaaggcatctcgttcagggg

SEQ ID NO: 188700 - DNA, 25 bp, Probe Sequence
ctgtgtatgtcattcacacttaggc

SEQ ID NO: 188701 - DNA, 25 bp, Probe Sequence
ctgttcatttgttccttggacctta

SEQ ID NO: 188702 - DNA, 25 bp, Probe Sequence
ctgttcttggaggcctctgtaacgt

SEQ ID NO: 188703 - DNA, 25 bp, Probe Sequence
ctgattctggggggcattaaagctg

SEQ ID NO: 188704 - DNA, 25 bp, Probe Sequence
tctttggaaggtacttaatcctaag

SEQ ID NO: 188705 - DNA, 25 bp, Probe Sequence
ctgatgggctaggtagttcaatcct

SEQ ID NO: 188706 - DNA, 25 bp, Probe Sequence
ctgtgagaatagctgactgtcccaa

SEQ ID NO: 188707 - DNA, 25 bp, Probe Sequence
ctgacgaatggaatttatcctcaca

SEQ ID NO: 188708 - DNA, 25 bp, Probe Sequence
ctgtaactgagatttctaccacacc

SEQ ID NO: 188709 - DNA, 25 bp, Probe Sequence
ctgagattctgtaagttacccagta

SEQ ID NO: 188710 - DNA, 25 bp, Probe Sequence
ctgagattgagtacgccatggccta

SEQ ID NO: 188711 - DNA, 25 bp, Probe Sequence
ctgttgtgcagtgtgcctgtcacta

SEQ ID NO: 188712 - DNA, 25 bp, Probe Sequence
ctgtgttaggaaactgctagtaaga

SEQ ID NO: 188713 - DNA, 25 bp, Probe Sequence
cggtgtaggcacagctctcctattg

SEQ ID NO: 188714 - DNA, 25 bp, Probe Sequence
ctggtaagaccatcactctcgaagt

SEQ ID NO: 188715 - DNA, 25 bp, Probe Sequence
ctgagttagacctgcagatgtgtac

SEQ ID NO: 188716 - DNA, 25 bp, Probe Sequence
ctgagatgctggtaatggccatggt

SEQ ID NO: 188717 - DNA, 25 bp, Probe Sequence
ctgagcatctgttaagtgttggggg

SEQ ID NO: 188718 - DNA, 25 bp, Probe Sequence
ctgagtttaacatgtgtggtcttgg

SEQ ID NO: 188719 - DNA, 25 bp, Probe Sequence
ctgagcatgttaccaaggctttttg

SEQ ID NO: 188720 - DNA, 25 bp, Probe Sequence
ctgagctgcctcaacagggctgtat

SEQ ID NO: 188721 - DNA, 25 bp, Probe Sequence
ctgagtgcctcaaaggagcagctcc

SEQ ID NO: 188722 - DNA, 25 bp, Probe Sequence
ctgaggctgtgaaagtgtagctgct

SEQ ID NO: 188723 - DNA, 25 bp, Probe Sequence
ctgagctgggcatctatccagctgt

SEQ ID NO: 188724 - DNA, 25 bp, Probe Sequence
ctgatcggcgcagagtccgtgtgag

SEQ ID NO: 188725 - DNA, 25 bp, Probe Sequence
ctgatccagaaggagctcaccattg

SEQ ID NO: 188726 - DNA, 25 bp, Probe Sequence
ctgagccagaatcctccatctcaga

SEQ ID NO: 188727 - DNA, 25 bp, Probe Sequence
ctgagcatgctgcatacaccctcag

SEQ ID NO: 188728 - DNA, 25 bp, Probe Sequence
ctgagcacagcaaggcaccaaagcc

SEQ ID NO: 188729 - DNA, 25 bp, Probe Sequence
ctgagacagcgaggacctgcaggct

SEQ ID NO: 188730 - DNA, 25 bp, Probe Sequence
ctgagaacgaagacactcagccgga

SEQ ID NO: 188731 - DNA, 25 bp, Probe Sequence
ctgaggggaatgacatccgccggac

SEQ ID NO: 188732 - DNA, 25 bp, Probe Sequence
ctgatgggtggaccaccagcctggg

SEQ ID NO: 188733 - DNA, 25 bp, Probe Sequence
ctgagggctttgctcgagctgtgcg

SEQ ID NO: 188734 - DNA, 25 bp, Probe Sequence
ctgtacatgcttcggtcagggtcgg

SEQ ID NO: 188735 - DNA, 25 bp, Probe Sequence
ctgtacttctggatgggaggggctc

SEQ ID NO: 188736 - DNA, 25 bp, Probe Sequence
ctgtatcttgggggacagggctggc

SEQ ID NO: 188737 - DNA, 25 bp, Probe Sequence
ttgagttgggggcaagggtccctgc

SEQ ID NO: 188738 - DNA, 25 bp, Probe Sequence
ttgagttgggggcaagggtccctgc

SEQ ID NO: 188739 - DNA, 25 bp, Probe Sequence
cggtgtgtaaggtggcctattcctc

SEQ ID NO: 188740 - DNA, 25 bp, Probe Sequence
ctggtttacggatgtgactgattca

SEQ ID NO: 188741 - DNA, 25 bp, Probe Sequence
cggttccagcagcagcagtagctat

SEQ ID NO: 188742 - DNA, 25 bp, Probe Sequence
cggttccagcagcagcagtagctat

SEQ ID NO: 188743 - DNA, 25 bp, Probe Sequence
ctggtatcctggcacaataatttta

SEQ ID NO: 188744 - DNA, 25 bp, Probe Sequence
ctgagcccctgtgtcaaagttgtta

SEQ ID NO: 188745 - DNA, 25 bp, Probe Sequence
ctgaccccactgacttcagagttat

SEQ ID NO: 188746 - DNA, 25 bp, Probe Sequence
ctgtctcacctggacttaagcgtct

SEQ ID NO: 188747 - DNA, 25 bp, Probe Sequence
ctgtctacagtggtttacaaggcca

SEQ ID NO: 188748 - DNA, 25 bp, Probe Sequence
ctgttacagtgtacatgggaaggca

SEQ ID NO: 188749 - DNA, 25 bp, Probe Sequence
ctgattccatgtctgggatgacttc

SEQ ID NO: 188750 - DNA, 25 bp, Probe Sequence
ctgattttgctgctgggcaacttct

SEQ ID NO: 188751 - DNA, 25 bp, Probe Sequence
ctgatggggctgcaagtgctacctc

SEQ ID NO: 188752 - DNA, 25 bp, Probe Sequence
ctgagagttgtgaaggtgtctacca

SEQ ID NO: 188753 - DNA, 25 bp, Probe Sequence
ctgagagtcaggagttttactgcct

SEQ ID NO: 188754 - DNA, 25 bp, Probe Sequence
ctgaggctaggggcggcttacgcct

SEQ ID NO: 188755 - DNA, 25 bp, Probe Sequence
ctgtcgtggggagggtgtcaaactg

SEQ ID NO: 188756 - DNA, 25 bp, Probe Sequence
ctgttgtgggtaggatgtgctcatc

SEQ ID NO: 188757 - DNA, 25 bp, Probe Sequence
ctgtctttccgagtgtgagcacagc

SEQ ID NO: 188758 - DNA, 25 bp, Probe Sequence
ctgagacttcctggatggagccgcc

SEQ ID NO: 188759 - DNA, 25 bp, Probe Sequence
ctgagacttttcaggagagccagcc

SEQ ID NO: 188760 - DNA, 25 bp, Probe Sequence
ctgagactttcactttctagctagc

SEQ ID NO: 188761 - DNA, 25 bp, Probe Sequence
ctgagcagctcttggttttggcgtc

SEQ ID NO: 188762 - DNA, 25 bp, Probe Sequence
ctgatcgtggggatttgccgcatca

SEQ ID NO: 188763 - DNA, 25 bp, Probe Sequence
ctgtcactgcagagttattccgata

SEQ ID NO: 188764 - DNA, 25 bp, Probe Sequence
ctgttgctgcagagttatcattaaa

SEQ ID NO: 188765 - DNA, 25 bp, Probe Sequence
ctgtgcgccataaggaatttcaaag

SEQ ID NO: 188766 - DNA, 25 bp, Probe Sequence
ctgtcgccagtgggcactttttttt

SEQ ID NO: 188767 - DNA, 25 bp, Probe Sequence
ctgttgccagagggagttattgtgc

SEQ ID NO: 188768 - DNA, 25 bp, Probe Sequence
ctgtagccagtgcagacctcactgt

SEQ ID NO: 188769 - DNA, 25 bp, Probe Sequence
ctgttgcccgaatcctagttcagtt

SEQ ID NO: 188770 - DNA, 25 bp, Probe Sequence
ctgtcaccccacactgtaggtgcag

SEQ ID NO: 188771 - DNA, 25 bp, Probe Sequence
ctgtgccaccccattaaagtgcagt

SEQ ID NO: 188772 - DNA, 25 bp, Probe Sequence
ctgtgccaccccattaaagtgcagt

SEQ ID NO: 188773 - DNA, 25 bp, Probe Sequence
ctgtggaccactgcctgaaaggttt

SEQ ID NO: 188774 - DNA, 25 bp, Probe Sequence
ctgtagcccctctcaaaaggagtct

SEQ ID NO: 188775 - DNA, 25 bp, Probe Sequence
ctgtaggttctcccaaaccaagtat

SEQ ID NO: 188776 - DNA, 25 bp, Probe Sequence
ctgttgtctcttttcaaaccaaatt

SEQ ID NO: 188777 - DNA, 25 bp, Probe Sequence
ctgttgttctcattacaacccttct

SEQ ID NO: 188778 - DNA, 25 bp, Probe Sequence
ctgttgcgtctctaagggtttctgt

SEQ ID NO: 188779 - DNA, 25 bp, Probe Sequence
ctgttgcgtaactggctgtgttctg

SEQ ID NO: 188780 - DNA, 25 bp, Probe Sequence
cgatgtggtaacctccggtttgtgg

SEQ ID NO: 188781 - DNA, 25 bp, Probe Sequence
tcgaggttgaaccctcggatacgat

SEQ ID NO: 188782 - DNA, 25 bp, Probe Sequence
ctggtttgaacttgctcggaaagcg

SEQ ID NO: 188783 - DNA, 25 bp, Probe Sequence
ctggagcgtaactgccacttaagcg

SEQ ID NO: 188784 - DNA, 25 bp, Probe Sequence
ctgtatgagcccagagtcctatctg

SEQ ID NO: 188785 - DNA, 25 bp, Probe Sequence
ctggatgacaccaaattccgctctc

SEQ ID NO: 188786 - DNA, 25 bp, Probe Sequence
ctgagaagcaccttttcagcaccat

SEQ ID NO: 188787 - DNA, 25 bp, Probe Sequence
ctgagaaattgctttgtgtcccact

SEQ ID NO: 188788 - DNA, 25 bp, Probe Sequence
ctgagcgagttctgggtcctcagca

SEQ ID NO: 188789 - DNA, 25 bp, Probe Sequence
ctgggcaatgtaggggtactccacc

SEQ ID NO: 188790 - DNA, 25 bp, Probe Sequence
ctgagccgtggaggggctgaagtcc

SEQ ID NO: 188791 - DNA, 25 bp, Probe Sequence
ctgaggagggaggagacgaggttct

SEQ ID NO: 188792 - DNA, 25 bp, Probe Sequence
ctggggttccgatccaggaactgga

SEQ ID NO: 188793 - DNA, 25 bp, Probe Sequence
ctgagggtcccacttggaggaattc

SEQ ID NO: 188794 - DNA, 25 bp, Probe Sequence
ctggaaccccaaagggataattcat

SEQ ID NO: 188795 - DNA, 25 bp, Probe Sequence
ctggatacccatgactgcaagaata

SEQ ID NO: 188796 - DNA, 25 bp, Probe Sequence
ctgttaccttgctagctgcaaaata

SEQ ID NO: 188797 - DNA, 25 bp, Probe Sequence
ctgatgtatctaatccagtgaaatt

SEQ ID NO: 188798 - DNA, 25 bp, Probe Sequence
ctgttgatctacctcctgaatttat

SEQ ID NO: 188799 - DNA, 25 bp, Probe Sequence
ctgtgtataaggcttgcaacttgaa

SEQ ID NO: 188800 - DNA, 25 bp, Probe Sequence
ctgtattaaggtgtcatagctatga

SEQ ID NO: 188801 - DNA, 25 bp, Probe Sequence
ctgttttagctattccttctagaag

SEQ ID NO: 188802 - DNA, 25 bp, Probe Sequence
ctgtattgggcttcttcgttaatag

SEQ ID NO: 188803 - DNA, 25 bp, Probe Sequence
ctgttgttattatatcgtttcataa

SEQ ID NO: 188804 - DNA, 25 bp, Probe Sequence
ctgggtcttggatgtcgggttcgac

SEQ ID NO: 188805 - DNA, 25 bp, Probe Sequence
ctgaggtcctggagtgcgtgagcct

SEQ ID NO: 188806 - DNA, 25 bp, Probe Sequence
ctgatggctccgagagtggctgcgg

SEQ ID NO: 188807 - DNA, 25 bp, Probe Sequence
ctgagcgtgctggagtgcgtggagg

SEQ ID NO: 188808 - DNA, 25 bp, Probe Sequence
ctgagagcagtgcttggattcagcc

SEQ ID NO: 188809 - DNA, 25 bp, Probe Sequence
ctgagatcacgccattgcaatccag

SEQ ID NO: 188810 - DNA, 25 bp, Probe Sequence
ctgagattgtgccactgcactccag

SEQ ID NO: 188811 - DNA, 25 bp, Probe Sequence
ctgagtggcatggactgggcctgcc

SEQ ID NO: 188812 - DNA, 25 bp, Probe Sequence
ctgagggcagagtctgtgggtgcag

SEQ ID NO: 188813 - DNA, 25 bp, Probe Sequence
ctgaggctgcaagcaagtgggctgc

SEQ ID NO: 188814 - DNA, 25 bp, Probe Sequence
ctgaggccaggctgataggagctca

SEQ ID NO: 188815 - DNA, 25 bp, Probe Sequence
ctgaggtgaggctacaaggggtgtg

SEQ ID NO: 188816 - DNA, 25 bp, Probe Sequence
cggggtgttaatgtgggagatcttc

SEQ ID NO: 188817 - DNA, 25 bp, Probe Sequence
ccggcgtgggaatgtgggaacagtg

SEQ ID NO: 188818 - DNA, 25 bp, Probe Sequence
gcagagggtgggaaaggttgaacca

SEQ ID NO: 188819 - DNA, 25 bp, Probe Sequence
gcgggtggggagaggattgaaccct

SEQ ID NO: 188820 - DNA, 25 bp, Probe Sequence
cggagtgggggtgtttgtgagcggt

SEQ ID NO: 188821 - DNA, 25 bp, Probe Sequence
ctggaagatggacgtactttgtctg

SEQ ID NO: 188822 - DNA, 25 bp, Probe Sequence
ctgtaagaggtggctccttcctctg

SEQ ID NO: 188823 - DNA, 25 bp, Probe Sequence
cgagcagaagggattccgcctcgtg

SEQ ID NO: 188824 - DNA, 25 bp, Probe Sequence
ctgagctataggctcttcatctgcc

SEQ ID NO: 188825 - DNA, 25 bp, Probe Sequence
ctgtgctgaatgtcttatatgcatt

SEQ ID NO: 188826 - DNA, 25 bp, Probe Sequence
ctgatctgagaattgtgtttctttc

SEQ ID NO: 188827 - DNA, 25 bp, Probe Sequence
ctgttgggctgctttctgtattgtc

SEQ ID NO: 188828 - DNA, 25 bp, Probe Sequence
ctgtagaggccactgtgtttctagc

SEQ ID NO: 188829 - DNA, 25 bp, Probe Sequence
ctgtagagggccctggtgtttctag

SEQ ID NO: 188830 - DNA, 25 bp, Probe Sequence
ctgtaaaggcagccgaggaatccaa

SEQ ID NO: 188831 - DNA, 25 bp, Probe Sequence
ctgtaagaacgccaacggctcctac

SEQ ID NO: 188832 - DNA, 25 bp, Probe Sequence
ctgtttgaagcgcagcaggtgcatc

SEQ ID NO: 188833 - DNA, 25 bp, Probe Sequence
ctgttgtgatccagagcaatcagac

SEQ ID NO: 188834 - DNA, 25 bp, Probe Sequence
ctgtgtgttctccatggtcataggc

SEQ ID NO: 188835 - DNA, 25 bp, Probe Sequence
ctgttttgactcagctctaggaccc

SEQ ID NO: 188836 - DNA, 25 bp, Probe Sequence
ctgttttgacctccctagaagacac

SEQ ID NO: 188837 - DNA, 25 bp, Probe Sequence
ctgttttccctacctagaatgtcag

SEQ ID NO: 188838 - DNA, 25 bp, Probe Sequence
ctgtaagccttcccgtaaatctcag

SEQ ID NO: 188839 - DNA, 25 bp, Probe Sequence
ctgttacctatctcggcataattct

SEQ ID NO: 188840 - DNA, 25 bp, Probe Sequence
cgttacctactgttgtcattgttat

SEQ ID NO: 188841 - DNA, 25 bp, Probe Sequence
ctgttgactctgcatatttatttta

SEQ ID NO: 188842 - DNA, 25 bp, Probe Sequence
ctgtattctctttttcttcttgtac

SEQ ID NO: 188843 - DNA, 25 bp, Probe Sequence
ctgttgtgtttgttgatctttgatt

SEQ ID NO: 188844 - DNA, 25 bp, Probe Sequence
ctgtcttgtcttctcattttattga

SEQ ID NO: 188845 - DNA, 25 bp, Probe Sequence
ctgtttgtccacgttcaggatattg

SEQ ID NO: 188846 - DNA, 25 bp, Probe Sequence
ctgtatgtttacttctcaccatttg

SEQ ID NO: 188847 - DNA, 25 bp, Probe Sequence
ctgggttttcagaccccatgttgtt

SEQ ID NO: 188848 - DNA, 25 bp, Probe Sequence
ctgggtttatcccacatcgagttgc

SEQ ID NO: 188849 - DNA, 25 bp, Probe Sequence
ctgtttttgccctctggcagtacat

SEQ ID NO: 188850 - DNA, 25 bp, Probe Sequence
ctgttactaccccaagctgtgtaat

SEQ ID NO: 188851 - DNA, 25 bp, Probe Sequence
ctgtcttacacctcaagtgctgcta

SEQ ID NO: 188852 - DNA, 25 bp, Probe Sequence
ctgtagtataccccaaagtgcattt

SEQ ID NO: 188853 - DNA, 25 bp, Probe Sequence
gctgtgggtaccaggaagtcctagg

SEQ ID NO: 188854 - DNA, 25 bp, Probe Sequence
ctgggcgtcaccaggaaggctctga

SEQ ID NO: 188855 - DNA, 25 bp, Probe Sequence
cgggcaccctacagaaactcagagg

SEQ ID NO: 188856 - DNA, 25 bp, Probe Sequence
cgtgagccactgtgtaaaaccgtgg

SEQ ID NO: 188857 - DNA, 25 bp, Probe Sequence
ctgagagccactaatgtaagataca

SEQ ID NO: 188858 - DNA, 25 bp, Probe Sequence
ctggaggctgttagctaacttgcac

SEQ ID NO: 188859 - DNA, 25 bp, Probe Sequence
ctgttgattgtttgcttgagttctc

SEQ ID NO: 188860 - DNA, 25 bp, Probe Sequence
ctgatggtcttcagcattcaccttc

SEQ ID NO: 188861 - DNA, 25 bp, Probe Sequence
ctgatggtcttcagcattcaccttc

SEQ ID NO: 188862 - DNA, 25 bp, Probe Sequence
ctgttgcctatcagaagtcaattca

SEQ ID NO: 188863 - DNA, 25 bp, Probe Sequence
ctgtctggctgtataactcttacag

SEQ ID NO: 188864 - DNA, 25 bp, Probe Sequence
ctgtcaatgtgtttgcaaccttaag

SEQ ID NO: 188865 - DNA, 25 bp, Probe Sequence
ctgtgatattttcctactcttaaga

SEQ ID NO: 188866 - DNA, 25 bp, Probe Sequence
ctgttgaggctcactatttttagag

SEQ ID NO: 188867 - DNA, 25 bp, Probe Sequence
ctgggccctctactgattgttaaag

SEQ ID NO: 188868 - DNA, 25 bp, Probe Sequence
ctgaggcaccactgagagttgtgaa

SEQ ID NO: 188869 - DNA, 25 bp, Probe Sequence
ctgagtgccctcaaagagaaggaga

SEQ ID NO: 188870 - DNA, 25 bp, Probe Sequence
ctgagtgtccaaacactgcagagtg

SEQ ID NO: 188871 - DNA, 25 bp, Probe Sequence
cgagttcaaagagctggttacccag

SEQ ID NO: 188872 - DNA, 25 bp, Probe Sequence
cggttgcaaactgctgaccacgccg

SEQ ID NO: 188873 - DNA, 25 bp, Probe Sequence
cggatagagaagagcgagtcgtcgt

SEQ ID NO: 188874 - DNA, 25 bp, Probe Sequence
ctgtgctgcggcaggacggggtggt

SEQ ID NO: 188875 - DNA, 25 bp, Probe Sequence
ctgttgcagaaggtgtcgccggtgg

SEQ ID NO: 188876 - DNA, 25 bp, Probe Sequence
ctgtcatcagaatctgtcggccaaa

SEQ ID NO: 188877 - DNA, 25 bp, Probe Sequence
ctgtgatcgcataccgtacgtcata

SEQ ID NO: 188878 - DNA, 25 bp, Probe Sequence
ctgtgggatatctcatcagcctcga

SEQ ID NO: 188879 - DNA, 25 bp, Probe Sequence
ctgggatgccattaatcgactctca

SEQ ID NO: 188880 - DNA, 25 bp, Probe Sequence
ctgggatctgagtattcccccaggg

SEQ ID NO: 188881 - DNA, 25 bp, Probe Sequence
ctgggactcagtttaccttaatgcc

SEQ ID NO: 188882 - DNA, 25 bp, Probe Sequence
ctgaggccttgtgtcctttaatcac

SEQ ID NO: 188883 - DNA, 25 bp, Probe Sequence
ctgtcgccagttgtgcacttttaca

SEQ ID NO: 188884 - DNA, 25 bp, Probe Sequence
ctgtcatgccacatttcactgattg

SEQ ID NO: 188885 - DNA, 25 bp, Probe Sequence
ctgatcaagcagattccacgaatcc

SEQ ID NO: 188886 - DNA, 25 bp, Probe Sequence
ctgataacagaattgccaaggcagc

SEQ ID NO: 188887 - DNA, 25 bp, Probe Sequence
ctgagtgaagaattcccagtgcccc

SEQ ID NO: 188888 - DNA, 25 bp, Probe Sequence
ctgaggacgatattcaccgttccat

SEQ ID NO: 188889 - DNA, 25 bp, Probe Sequence
ctgggacagctgtgcccagtttgtc

SEQ ID NO: 188890 - DNA, 25 bp, Probe Sequence
ctgatggctcggtgcggatgtttga

SEQ ID NO: 188891 - DNA, 25 bp, Probe Sequence
ctgatgcggtggtgcgtgtgatttg

SEQ ID NO: 188892 - DNA, 25 bp, Probe Sequence
ctgatggttctacctgctgtgagct

SEQ ID NO: 188893 - DNA, 25 bp, Probe Sequence
ctgtgagctttgccacagcgtgcat

SEQ ID NO: 188894 - DNA, 25 bp, Probe Sequence
ctgatcactgggctcaggtcagggc

SEQ ID NO: 188895 - DNA, 25 bp, Probe Sequence
ctgtgacgaggctaaggccgtggat

SEQ ID NO: 188896 - DNA, 25 bp, Probe Sequence
ctgtcagcctgggcaatggctgcgt

SEQ ID NO: 188897 - DNA, 25 bp, Probe Sequence
ctgtcaccggccttgtgacattcac

SEQ ID NO: 188898 - DNA, 25 bp, Probe Sequence
ctgtcccctgcaggtagtattcaca

SEQ ID NO: 188899 - DNA, 25 bp, Probe Sequence
ctgtaactccacctgagttacaaag

SEQ ID NO: 188900 - DNA, 25 bp, Probe Sequence
ctgtattctgccattgcctttgaaa

SEQ ID NO: 188901 - DNA, 25 bp, Probe Sequence
ctgtatatgtggcttcctctgatgc

SEQ ID NO: 188902 - DNA, 25 bp, Probe Sequence
ctgattaggcagattacaccacgga

SEQ ID NO: 188903 - DNA, 25 bp, Probe Sequence
ctgtcttggcattaaaccacatcat

SEQ ID NO: 188904 - DNA, 25 bp, Probe Sequence
ctgatggggctgttttctcacaata

SEQ ID NO: 188905 - DNA, 25 bp, Probe Sequence
ctgtaggctcattcatttctctaac

SEQ ID NO: 188906 - DNA, 25 bp, Probe Sequence
cggacccatccaagtcatctgattg

SEQ ID NO: 188907 - DNA, 25 bp, Probe Sequence
cgtggccactaacgtgtctttgttt

SEQ ID NO: 188908 - DNA, 25 bp, Probe Sequence
ctgatgggttagagtgcctttgaga

SEQ ID NO: 188909 - DNA, 25 bp, Probe Sequence
ctgatggagtttatatggctctctg

SEQ ID NO: 188910 - DNA, 25 bp, Probe Sequence
ctgattgtttcattgttcgcttctg

SEQ ID NO: 188911 - DNA, 25 bp, Probe Sequence
ctgttgtttctttgccacatgtgtt

SEQ ID NO: 188912 - DNA, 25 bp, Probe Sequence
ctgatgctgtttgttgtactgagag

SEQ ID NO: 188913 - DNA, 25 bp, Probe Sequence
ctgttcaatcatgggtgtattcagg

SEQ ID NO: 188914 - DNA, 25 bp, Probe Sequence
ctgtacaatcgtttcatcattcggc

SEQ ID NO: 188915 - DNA, 25 bp, Probe Sequence
ctgtccagacagcctgtatcttggg

SEQ ID NO: 188916 - DNA, 25 bp, Probe Sequence
ctgatgccacaacttcttcgtgtag

SEQ ID NO: 188917 - DNA, 25 bp, Probe Sequence
ctgatgatcactggtgttgagcttt

SEQ ID NO: 188918 - DNA, 25 bp, Probe Sequence
ctgatgaacagatttctacaattgt

SEQ ID NO: 188919 - DNA, 25 bp, Probe Sequence
ctgtgcaacaaatctgcccttgtac

SEQ ID NO: 188920 - DNA, 25 bp, Probe Sequence
ctgtgacacttatctcactgtttta

SEQ ID NO: 188921 - DNA, 25 bp, Probe Sequence
ctgtacccatgatctcttggtgtta

SEQ ID NO: 188922 - DNA, 25 bp, Probe Sequence
ctgtaccttagctgtgtttgcttat

SEQ ID NO: 188923 - DNA, 25 bp, Probe Sequence
ctgtactgcttatggttgtaggatt

SEQ ID NO: 188924 - DNA, 25 bp, Probe Sequence
ctgattctcattcaggcttctcacg

SEQ ID NO: 188925 - DNA, 25 bp, Probe Sequence
ctgatggcttggcagagcaccttcg

SEQ ID NO: 188926 - DNA, 25 bp, Probe Sequence
ctgaggcgtgagaatggcgtcccgc

SEQ ID NO: 188927 - DNA, 25 bp, Probe Sequence
ctgaggcaggagaatggcatgaaca

SEQ ID NO: 188928 - DNA, 25 bp, Probe Sequence
ctgaggatggcagtgtagacacctg

SEQ ID NO: 188929 - DNA, 25 bp, Probe Sequence
ctgaggagagggtagtcagcatctc

SEQ ID NO: 188930 - DNA, 25 bp, Probe Sequence
ctgaggaaggcacacttgctcctgt

SEQ ID NO: 188931 - DNA, 25 bp, Probe Sequence
ctggacaaggccaagcttttcttta

SEQ ID NO: 188932 - DNA, 25 bp, Probe Sequence
ctgggaagttaacttttcagagcca

SEQ ID NO: 188933 - DNA, 25 bp, Probe Sequence
ctgggaagtctaagagtccatgcca

SEQ ID NO: 188934 - DNA, 25 bp, Probe Sequence
ctgttggagactctgcctacagcac

SEQ ID NO: 188935 - DNA, 25 bp, Probe Sequence
ctgatgtgcagggggtggctacaga

SEQ ID NO: 188936 - DNA, 25 bp, Probe Sequence
ctgatggaggcacgtgtggatctca

SEQ ID NO: 188937 - DNA, 25 bp, Probe Sequence
ctgatggacatgttcagggatcgcc

SEQ ID NO: 188938 - DNA, 25 bp, Probe Sequence
ctgaggacagtgagggcatcatcgt

SEQ ID NO: 188939 - DNA, 25 bp, Probe Sequence
ctgaggacctgcagaagactcagtg

SEQ ID NO: 188940 - DNA, 25 bp, Probe Sequence
ctgagggatctgagtaggtctggga

SEQ ID NO: 188941 - DNA, 25 bp, Probe Sequence
ctgagggatctgagtaggtctggga

SEQ ID NO: 188942 - DNA, 25 bp, Probe Sequence
ctgtggagcacgaggggcttgtagg

SEQ ID NO: 188943 - DNA, 25 bp, Probe Sequence
ctgttgaaggagagggtgaggaaga

SEQ ID NO: 188944 - DNA, 25 bp, Probe Sequence
ctgttgaaggccgtgggccggacgc

SEQ ID NO: 188945 - DNA, 25 bp, Probe Sequence
ctgttgaaggccgtgggccggacgc

SEQ ID NO: 188946 - DNA, 25 bp, Probe Sequence
ctgttgaaggccgtgggccggacgc

SEQ ID NO: 188947 - DNA, 25 bp, Probe Sequence
ctgttgaaggccgtgggccggacgc

SEQ ID NO: 188948 - DNA, 25 bp, Probe Sequence
ctgtgggaggacgattgcccggacc

SEQ ID NO: 188949 - DNA, 25 bp, Probe Sequence
cggacgagttcgagtccggcatctc

SEQ ID NO: 188950 - DNA, 25 bp, Probe Sequence
cggaccattccgaggggagtccaga

SEQ ID NO: 188951 - DNA, 25 bp, Probe Sequence
ctgggctttctggggaggggttcag

SEQ ID NO: 188952 - DNA, 25 bp, Probe Sequence
ctgattctctttgggagatggggtc

SEQ ID NO: 188953 - DNA, 25 bp, Probe Sequence
ctgtcttgcttatcacaagggcgac

SEQ ID NO: 188954 - DNA, 25 bp, Probe Sequence
ctgattttatacccactgtgtggac

SEQ ID NO: 188955 - DNA, 25 bp, Probe Sequence
ctgttctctaccacgtgtgatggcc

SEQ ID NO: 188956 - DNA, 25 bp, Probe Sequence
ctgttcccaccatgagtctggaggc

SEQ ID NO: 188957 - DNA, 25 bp, Probe Sequence
ctgtctctccatgcctagggaagtc

SEQ ID NO: 188958 - DNA, 25 bp, Probe Sequence
ctgtctgcattttcttggagaaatt

SEQ ID NO: 188959 - DNA, 25 bp, Probe Sequence
ctgtctcatttctacccagtgagtt

SEQ ID NO: 188960 - DNA, 25 bp, Probe Sequence
ctgtgctacgtcgccctggacttcg

SEQ ID NO: 188961 - DNA, 25 bp, Probe Sequence
ctgtgctacgtcgccctggacttcg

SEQ ID NO: 188962 - DNA, 25 bp, Probe Sequence
ctgtgcttttggtccctggaaacaa

SEQ ID NO: 188963 - DNA, 25 bp, Probe Sequence
ctgtgcccagtacttcctggacaag

SEQ ID NO: 188964 - DNA, 25 bp, Probe Sequence
ctgtgcccagtacttcctggacaag

SEQ ID NO: 188965 - DNA, 25 bp, Probe Sequence
ctgtgcctgcgctgcagtttggaaa

SEQ ID NO: 188966 - DNA, 25 bp, Probe Sequence
ctgatgcctctgtgggtgtgtgtaa

SEQ ID NO: 188967 - DNA, 25 bp, Probe Sequence
ctgtcctcatagctgggtttgttca

SEQ ID NO: 188968 - DNA, 25 bp, Probe Sequence
ctgtactcatccctgggcatatgtg

SEQ ID NO: 188969 - DNA, 25 bp, Probe Sequence
ctgatcagcatggcctatgggcaga

SEQ ID NO: 188970 - DNA, 25 bp, Probe Sequence
ctgatcaccccaagtagcatgactg

SEQ ID NO: 188971 - DNA, 25 bp, Probe Sequence
cggctacccatcgtactggtgggta

SEQ ID NO: 188972 - DNA, 25 bp, Probe Sequence
ctgtgctatccctgtacgcctctgg

SEQ ID NO: 188973 - DNA, 25 bp, Probe Sequence
ctgtctgtctactctcaggtttgga

SEQ ID NO: 188974 - DNA, 25 bp, Probe Sequence
ctgtgctgttcctgtaagtttgcta

SEQ ID NO: 188975 - DNA, 25 bp, Probe Sequence
ctgtcatttctcagtggttttgcct

SEQ ID NO: 188976 - DNA, 25 bp, Probe Sequence
ctgttgtatctctagtcagttcagt

SEQ ID NO: 188977 - DNA, 25 bp, Probe Sequence
ctgtcttgctcctatggagtcacat

SEQ ID NO: 188978 - DNA, 25 bp, Probe Sequence
ctgtcttgctcatgcatatgcctgc

SEQ ID NO: 188979 - DNA, 25 bp, Probe Sequence
ctgtctgctgccttcatacagatgc

SEQ ID NO: 188980 - DNA, 25 bp, Probe Sequence
ctgatcgctgccaatgcactcgatc

SEQ ID NO: 188981 - DNA, 25 bp, Probe Sequence
ctgatcatccgcaagcctgtgacgg

SEQ ID NO: 188982 - DNA, 25 bp, Probe Sequence
ctgtcatccgctacacttgtgagga

SEQ ID NO: 188983 - DNA, 25 bp, Probe Sequence
ctgtcagccacaatgccttctgatg

SEQ ID NO: 188984 - DNA, 25 bp, Probe Sequence
ctgtctgctcaatgccattgtgcag

SEQ ID NO: 188985 - DNA, 25 bp, Probe Sequence
ctgtcctgcatcgccatgatgtgta

SEQ ID NO: 188986 - DNA, 25 bp, Probe Sequence
ctgtgcttagcaggccatagtctcc

SEQ ID NO: 188987 - DNA, 25 bp, Probe Sequence
ctgattacgcagcacatacttacta

SEQ ID NO: 188988 - DNA, 25 bp, Probe Sequence
ctgattgatccaggacatccatagc

SEQ ID NO: 188989 - DNA, 25 bp, Probe Sequence
ctgatgctcatcgacaactatagga

SEQ ID NO: 188990 - DNA, 25 bp, Probe Sequence
ctgtctcatggaagcactggaggat

SEQ ID NO: 188991 - DNA, 25 bp, Probe Sequence
ctgtccatgtgaaggtgtggagcga

SEQ ID NO: 188992 - DNA, 25 bp, Probe Sequence
ctgatcagcatgcaggcgaggggca

SEQ ID NO: 188993 - DNA, 25 bp, Probe Sequence
ctgtgcagatgcagccagcaggaaa

SEQ ID NO: 188994 - DNA, 25 bp, Probe Sequence
ctgtcagatggtctgcagcgagtca

SEQ ID NO: 188995 - DNA, 25 bp, Probe Sequence
ctgatgtgatgcctgttgagtcaga

SEQ ID NO: 188996 - DNA, 25 bp, Probe Sequence
ctgatatcatcccattgcattccag

SEQ ID NO: 188997 - DNA, 25 bp, Probe Sequence
ctgtgatgcatgtgagtgttccgac

SEQ ID NO: 188998 - DNA, 25 bp, Probe Sequence
ctgtctgcagattggctacccaact

SEQ ID NO: 188999 - DNA, 25 bp, Probe Sequence
ctgtcctgtgatggcttccacaaac

SEQ ID NO: 189000 - DNA, 25 bp, Probe Sequence
ctgtactgtatccagcaccacagaa

SEQ ID NO: 189001 - DNA, 25 bp, Probe Sequence
ctgtagtgttgtaacctgctgcacg

SEQ ID NO: 189002 - DNA, 25 bp, Probe Sequence
ctgtagatctttgcctcattcacag

SEQ ID NO: 189003 - DNA, 25 bp, Probe Sequence
ctgatgagtctcaccattctgatga

SEQ ID NO: 189004 - DNA, 25 bp, Probe Sequence
ctgatgacctttctctctagagagg

SEQ ID NO: 189005 - DNA, 25 bp, Probe Sequence
ctgtacctctttccattggatactg

SEQ ID NO: 189006 - DNA, 25 bp, Probe Sequence
ctgtaactttggtaactgcatactt

SEQ ID NO: 189007 - DNA, 25 bp, Probe Sequence
ctgtgaagctggggaagacgcagaa

SEQ ID NO: 189008 - DNA, 25 bp, Probe Sequence
ctgatctctcggcagaaactctaca

SEQ ID NO: 189009 - DNA, 25 bp, Probe Sequence
ctgtctgctttgttacaagctccca

SEQ ID NO: 189010 - DNA, 25 bp, Probe Sequence
ctgttttctggccacaactgccaaa

SEQ ID NO: 189011 - DNA, 25 bp, Probe Sequence
ctgatgtctttggccagaacaccgt

SEQ ID NO: 189012 - DNA, 25 bp, Probe Sequence
ctgatgcctttgtctctaatgagct

SEQ ID NO: 189013 - DNA, 25 bp, Probe Sequence
ctgatgttgatgtacttacagacac

SEQ ID NO: 189014 - DNA, 25 bp, Probe Sequence
ctgattgtgatgtacctcagccaca

SEQ ID NO: 189015 - DNA, 25 bp, Probe Sequence
ctgatgtgtcattaagtgcagaaat

SEQ ID NO: 189016 - DNA, 25 bp, Probe Sequence
ctgatgagtatctaggatgccatga

SEQ ID NO: 189017 - DNA, 25 bp, Probe Sequence
ctgtctgcatgaggaggtgccagca

SEQ ID NO: 189018 - DNA, 25 bp, Probe Sequence
ctgtcagggccagggctcatgaatc

SEQ ID NO: 189019 - DNA, 25 bp, Probe Sequence
ctgatgagcgaggcgggtgctggcc

SEQ ID NO: 189020 - DNA, 25 bp, Probe Sequence
ctgatgcgggagccgtgcatcacgc

SEQ ID NO: 189021 - DNA, 25 bp, Probe Sequence
ctgttcggcagcgatggctactacg

SEQ ID NO: 189022 - DNA, 25 bp, Probe Sequence
ctgtactccagcgtgggcaacagag

SEQ ID NO: 189023 - DNA, 25 bp, Probe Sequence
ctgtgacggagggggcaagcaagcc

SEQ ID NO: 189024 - DNA, 25 bp, Probe Sequence
ctgttgcccaggttggagtgcaccg

SEQ ID NO: 189025 - DNA, 25 bp, Probe Sequence
ctgttgtccaggttggagtgcagcg

SEQ ID NO: 189026 - DNA, 25 bp, Probe Sequence
ctgtcacccaggctggagtgcagtg

SEQ ID NO: 189027 - DNA, 25 bp, Probe Sequence
ctgtatcccaagcagcggtcattca

SEQ ID NO: 189028 - DNA, 25 bp, Probe Sequence
ctgttctccagggactggtcactgc

SEQ ID NO: 189029 - DNA, 25 bp, Probe Sequence
ctgttccctgggtagagctagcatg

SEQ ID NO: 189030 - DNA, 25 bp, Probe Sequence
ctgtatcacctttgccaagtaagag

SEQ ID NO: 189031 - DNA, 25 bp, Probe Sequence
ctgtctcctgttggccgagtggaga

SEQ ID NO: 189032 - DNA, 25 bp, Probe Sequence
ctgtcacacagtaggcccagtgcaa

SEQ ID NO: 189033 - DNA, 25 bp, Probe Sequence
ctgtcagacagaggctgcggcctgg

SEQ ID NO: 189034 - DNA, 25 bp, Probe Sequence
ctgatctcacaggccatgggactgg

SEQ ID NO: 189035 - DNA, 25 bp, Probe Sequence
ctgtctgccattcagaatgactgtg

SEQ ID NO: 189036 - DNA, 25 bp, Probe Sequence
ctgttgcctatgtaggttctctgac

SEQ ID NO: 189037 - DNA, 25 bp, Probe Sequence
ctgttcctctttggtttcttcagag

SEQ ID NO: 189038 - DNA, 25 bp, Probe Sequence
ctgtttcacctggtttgtcctaagg

SEQ ID NO: 189039 - DNA, 25 bp, Probe Sequence
ctgtctcataccagtttccctggag

SEQ ID NO: 189040 - DNA, 25 bp, Probe Sequence
ctgttgataatatctctcacccgga

SEQ ID NO: 189041 - DNA, 25 bp, Probe Sequence
ctgtagtgaagctcttcacccccat

SEQ ID NO: 189042 - DNA, 25 bp, Probe Sequence
ctgtgaatggactctgtgtccctgc

SEQ ID NO: 189043 - DNA, 25 bp, Probe Sequence
ctgtatatgtatgagtcttcctgtc

SEQ ID NO: 189044 - DNA, 25 bp, Probe Sequence
ctgattatgtatgtgttttttcaat

SEQ ID NO: 189045 - DNA, 25 bp, Probe Sequence
ctgttctttactttactgcctgaat

SEQ ID NO: 189046 - DNA, 25 bp, Probe Sequence
ctgtcatcttcattttaacttgcta

SEQ ID NO: 189047 - DNA, 25 bp, Probe Sequence
ctgtagctgtatctgtatacctgta

SEQ ID NO: 189048 - DNA, 25 bp, Probe Sequence
ctgtgagtttgtagaatacttttct

SEQ ID NO: 189049 - DNA, 25 bp, Probe Sequence
ctgtcaaatgatgtgcaaaaccttt

SEQ ID NO: 189050 - DNA, 25 bp, Probe Sequence
ctgtcaacagcttgctgaaggagct

SEQ ID NO: 189051 - DNA, 25 bp, Probe Sequence
ctgtcacccttgccacagaggtaga

SEQ ID NO: 189052 - DNA, 25 bp, Probe Sequence
ctgtacaggatgtcccagggtagat

SEQ ID NO: 189053 - DNA, 25 bp, Probe Sequence
ctgtacagggagtgaggagccttgc

SEQ ID NO: 189054 - DNA, 25 bp, Probe Sequence
ctgtgacgagctcaggagggctctg

SEQ ID NO: 189055 - DNA, 25 bp, Probe Sequence
ctgtatctgaatcttgaagactgca

SEQ ID NO: 189056 - DNA, 25 bp, Probe Sequence
ctgtttattttctgagactcctaca

SEQ ID NO: 189057 - DNA, 25 bp, Probe Sequence
ctggtttattactctcacccataaa

SEQ ID NO: 189058 - DNA, 25 bp, Probe Sequence
ctggattattgatattctacttcta

SEQ ID NO: 189059 - DNA, 25 bp, Probe Sequence
ctgtttatctgttaactattatcca

SEQ ID NO: 189060 - DNA, 25 bp, Probe Sequence
ctgtgtatgcacgtaaagtttgtac

SEQ ID NO: 189061 - DNA, 25 bp, Probe Sequence
ctgttacttgctttgagttggaatc

SEQ ID NO: 189062 - DNA, 25 bp, Probe Sequence
ctgttcctggcgttgagtgagaaca

SEQ ID NO: 189063 - DNA, 25 bp, Probe Sequence
ctgtatcctggccgcagggtaatag

SEQ ID NO: 189064 - DNA, 25 bp, Probe Sequence
ctgtggtctggcctaggttaagtgt

SEQ ID NO: 189065 - DNA, 25 bp, Probe Sequence
ctgtgggaggctgaggactgcaaga

SEQ ID NO: 189066 - DNA, 25 bp, Probe Sequence
ctgtggggttagagcccagagcaag

SEQ ID NO: 189067 - DNA, 25 bp, Probe Sequence
ctgtggtagcttgagggtcaggaag

SEQ ID NO: 189068 - DNA, 25 bp, Probe Sequence
ctgtggtgaattaaacgtacttgag

SEQ ID NO: 189069 - DNA, 25 bp, Probe Sequence
ctgggtactccagaggtgccactgg

SEQ ID NO: 189070 - DNA, 25 bp, Probe Sequence
ctgggtcttcaattagaatgtggct

SEQ ID NO: 189071 - DNA, 25 bp, Probe Sequence
ctgtggtttaccagcagagttcaaa

SEQ ID NO: 189072 - DNA, 25 bp, Probe Sequence
ctgtgtagtctctctagtagttaaa

SEQ ID NO: 189073 - DNA, 25 bp, Probe Sequence
ctggttttcagggtgttggtcgatt

SEQ ID NO: 189074 - DNA, 25 bp, Probe Sequence
ctgtttttctggtctgaccgtcgca

SEQ ID NO: 189075 - DNA, 25 bp, Probe Sequence
ctgtacttactgaaggagccccgag

SEQ ID NO: 189076 - DNA, 25 bp, Probe Sequence
ctgttttcatctagaggatcctcgg

SEQ ID NO: 189077 - DNA, 25 bp, Probe Sequence
ctgttttcatcttgaggtggccaat

SEQ ID NO: 189078 - DNA, 25 bp, Probe Sequence
ctgttttgactctgttgagtacata

SEQ ID NO: 189079 - DNA, 25 bp, Probe Sequence
ctgtttccctcatgtgtgcagtggt

SEQ ID NO: 189080 - DNA, 25 bp, Probe Sequence
ctgtttaactctttggtgtctgtgc

SEQ ID NO: 189081 - DNA, 25 bp, Probe Sequence
ctgtttcagatcactgcggtgggct

SEQ ID NO: 189082 - DNA, 25 bp, Probe Sequence
ctgttgggatgctggctgcagtggg

SEQ ID NO: 189083 - DNA, 25 bp, Probe Sequence
ctgttggccatgtcttcatcagtgg

SEQ ID NO: 189084 - DNA, 25 bp, Probe Sequence
ctgttgccgagcctgacatcatggc

SEQ ID NO: 189085 - DNA, 25 bp, Probe Sequence
cggtgcactgatcgctgccaatgca

SEQ ID NO: 189086 - DNA, 25 bp, Probe Sequence
ctgttgcactgatgtccggagagac

SEQ ID NO: 189087 - DNA, 25 bp, Probe Sequence
ctgtctctcgaatcttccagagata

SEQ ID NO: 189088 - DNA, 25 bp, Probe Sequence
ctgtgtcaccatcactactcaagac

SEQ ID NO: 189089 - DNA, 25 bp, Probe Sequence
ctgggaccatcttgttctgcaaggt

SEQ ID NO: 189090 - DNA, 25 bp, Probe Sequence
ctgttgacctttactcagacagatg

SEQ ID NO: 189091 - DNA, 25 bp, Probe Sequence
ctgtatacctgtaatatagcctggg

SEQ ID NO: 189092 - DNA, 25 bp, Probe Sequence
ctgtatacactgggtaacctgatcg

SEQ ID NO: 189093 - DNA, 25 bp, Probe Sequence
ctgtgtaagcatgtttacctgttgg

SEQ ID NO: 189094 - DNA, 25 bp, Probe Sequence
cgtgttacagttatacaatgatttt

SEQ ID NO: 189095 - DNA, 25 bp, Probe Sequence
ctgtgttccgtctccaataattaat

SEQ ID NO: 189096 - DNA, 25 bp, Probe Sequence
ctgttctccagtcacacgatacatt

SEQ ID NO: 189097 - DNA, 25 bp, Probe Sequence
ctgttcctgcttcgataccaaacta

SEQ ID NO: 189098 - DNA, 25 bp, Probe Sequence
ctgttcctgcttcgataccaaacta

SEQ ID NO: 189099 - DNA, 25 bp, Probe Sequence
ctgattcctgcgtgtccgaaagaac

SEQ ID NO: 189100 - DNA, 25 bp, Probe Sequence
ctgtcctctgagggtcccttaaact

SEQ ID NO: 189101 - DNA, 25 bp, Probe Sequence
ctggccctggctaatgccttataat

SEQ ID NO: 189102 - DNA, 25 bp, Probe Sequence
ctgtccagatggttaccatttgcca

SEQ ID NO: 189103 - DNA, 25 bp, Probe Sequence
ctgttaatgctgggatccatattta

SEQ ID NO: 189104 - DNA, 25 bp, Probe Sequence
ctgttcactctggagcccttaatga

SEQ ID NO: 189105 - DNA, 25 bp, Probe Sequence
ctgttaattgtccttttagtagcca

SEQ ID NO: 189106 - DNA, 25 bp, Probe Sequence
ctgttcattttgcctttgttcttgc

SEQ ID NO: 189107 - DNA, 25 bp, Probe Sequence
ctgttagatttgcttggtccagagc

SEQ ID NO: 189108 - DNA, 25 bp, Probe Sequence
ctgtgaagtcttctttgatctcgag

SEQ ID NO: 189109 - DNA, 25 bp, Probe Sequence
ctgtgaatccgctctttgtcggaag

SEQ ID NO: 189110 - DNA, 25 bp, Probe Sequence
ctgtaatcccagcactttgggaggc

SEQ ID NO: 189111 - DNA, 25 bp, Probe Sequence
ctgttatctccgaacattgatggag

SEQ ID NO: 189112 - DNA, 25 bp, Probe Sequence
ctgtgttcatctgtgacattaaaag

SEQ ID NO: 189113 - DNA, 25 bp, Probe Sequence
ctgtgattcacagactttaacatga

SEQ ID NO: 189114 - DNA, 25 bp, Probe Sequence
ctgtgatactgagagctacctattg

SEQ ID NO: 189115 - DNA, 25 bp, Probe Sequence
ctgtacactgacttgagaccagttg

SEQ ID NO: 189116 - DNA, 25 bp, Probe Sequence
ctgttactgaactagatcgagtcta

SEQ ID NO: 189117 - DNA, 25 bp, Probe Sequence
ctgttcagctgttaatgctgggatc

SEQ ID NO: 189118 - DNA, 25 bp, Probe Sequence
ctgttgaggtacttgctgggacgga

SEQ ID NO: 189119 - DNA, 25 bp, Probe Sequence
ctgttggattccatgctaagcaagc

SEQ ID NO: 189120 - DNA, 25 bp, Probe Sequence
ctgattgtgttccttttccacagat

SEQ ID NO: 189121 - DNA, 25 bp, Probe Sequence
ctgtctgtgtcttctatttggcaaa

SEQ ID NO: 189122 - DNA, 25 bp, Probe Sequence
ctgtatgaagcttgtcctctgacta

SEQ ID NO: 189123 - DNA, 25 bp, Probe Sequence
ctgggatcatgctagtcacttcctg

SEQ ID NO: 189124 - DNA, 25 bp, Probe Sequence
ctgggcatcatcgacagtgccttcg

SEQ ID NO: 189125 - DNA, 25 bp, Probe Sequence
ctgtcatctgggacaggccgtccag

SEQ ID NO: 189126 - DNA, 25 bp, Probe Sequence
ctgtcttgacccaagccagaataga

SEQ ID NO: 189127 - DNA, 25 bp, Probe Sequence
ctgtccacaccgaagaccagaggac

SEQ ID NO: 189128 - DNA, 25 bp, Probe Sequence
ctgtcacacgcatagatccacgagg

SEQ ID NO: 189129 - DNA, 25 bp, Probe Sequence
ctgtaatctcagctactcaggaggc

SEQ ID NO: 189130 - DNA, 25 bp, Probe Sequence
ctgtaatatcatggttcccagccct

SEQ ID NO: 189131 - DNA, 25 bp, Probe Sequence
ctgtaatcacaacatcctgactccg

SEQ ID NO: 189132 - DNA, 25 bp, Probe Sequence
ctgtaacagagacaccagccttcct

SEQ ID NO: 189133 - DNA, 25 bp, Probe Sequence
ctgttccaggggagcaggcttctta

SEQ ID NO: 189134 - DNA, 25 bp, Probe Sequence
ctgttccatgagcctgttgcaggtt

SEQ ID NO: 189135 - DNA, 25 bp, Probe Sequence
ctgtttgtgatctattatgcctttt

SEQ ID NO: 189136 - DNA, 25 bp, Probe Sequence
ctgtattctgtgtattattctttat

SEQ ID NO: 189137 - DNA, 25 bp, Probe Sequence
ctgtttttctattaatcttttgtca

SEQ ID NO: 189138 - DNA, 25 bp, Probe Sequence
ctgttttgtttcttgtctttgtgtt

SEQ ID NO: 189139 - DNA, 25 bp, Probe Sequence
ctgttttgtattatctgctttgctg

SEQ ID NO: 189140 - DNA, 25 bp, Probe Sequence
ctgtgtttcctaagctctgagtttt

SEQ ID NO: 189141 - DNA, 25 bp, Probe Sequence
ctgtgtttgccttgatgctgatcat

SEQ ID NO: 189142 - DNA, 25 bp, Probe Sequence
ctgtgatgtatcatgatagtcacaa

SEQ ID NO: 189143 - DNA, 25 bp, Probe Sequence
ctgtatctacttcatgctgaccaga

SEQ ID NO: 189144 - DNA, 25 bp, Probe Sequence
ctgtctcaacttcatggtgcactga

SEQ ID NO: 189145 - DNA, 25 bp, Probe Sequence
ctgtctcaacttcatggtgcactga

SEQ ID NO: 189146 - DNA, 25 bp, Probe Sequence
ctgtctcaaatttgtggtccactga

SEQ ID NO: 189147 - DNA, 25 bp, Probe Sequence
ctgtcacaatgctaagtggtatccg

SEQ ID NO: 189148 - DNA, 25 bp, Probe Sequence
ctgtctttgaaaccgtacctgggag

SEQ ID NO: 189149 - DNA, 25 bp, Probe Sequence
ctgtctgtagagtgccgaaggctgt

SEQ ID NO: 189150 - DNA, 25 bp, Probe Sequence
ctgtctggaggctgctagactccta

SEQ ID NO: 189151 - DNA, 25 bp, Probe Sequence
ctgtctggcagttgcctatgtttag

SEQ ID NO: 189152 - DNA, 25 bp, Probe Sequence
ctgtctagagcttgtctcaatggat

SEQ ID NO: 189153 - DNA, 25 bp, Probe Sequence
ctgtctgtgagaaaccagctggttt

SEQ ID NO: 189154 - DNA, 25 bp, Probe Sequence
ctgtccaggcaaatgccaggccttg

SEQ ID NO: 189155 - DNA, 25 bp, Probe Sequence
ctgtacgccaacacagtgctgtctg

SEQ ID NO: 189156 - DNA, 25 bp, Probe Sequence
ctgtttccagtcacactgcagtgtg

SEQ ID NO: 189157 - DNA, 25 bp, Probe Sequence
ctgtttactgccacaagcactgtgg

SEQ ID NO: 189158 - DNA, 25 bp, Probe Sequence
ctgtttcatgctaaccagacacgcc

SEQ ID NO: 189159 - DNA, 25 bp, Probe Sequence
ctgttctaggtactgcatagacgca

SEQ ID NO: 189160 - DNA, 25 bp, Probe Sequence
ctgttccggcattggctgcaagagc

SEQ ID NO: 189161 - DNA, 25 bp, Probe Sequence
ctgtccggcagaatctggccatgac

SEQ ID NO: 189162 - DNA, 25 bp, Probe Sequence
ctgtcacggagcgactgtcgagatc

SEQ ID NO: 189163 - DNA, 25 bp, Probe Sequence
ctgtcatagtgagcttgtgccgtcc

SEQ ID NO: 189164 - DNA, 25 bp, Probe Sequence
ctgtctactgcaactgtgatttccc

SEQ ID NO: 189165 - DNA, 25 bp, Probe Sequence
ctgtctactgcctgattcattcaac

SEQ ID NO: 189166 - DNA, 25 bp, Probe Sequence
ctgtatagtgcctgctgacttaggt

SEQ ID NO: 189167 - DNA, 25 bp, Probe Sequence
ctgtcttgttcatgtagccgagggg

SEQ ID NO: 189168 - DNA, 25 bp, Probe Sequence
ctgtgtgagtcttttagggagggtg

SEQ ID NO: 189169 - DNA, 25 bp, Probe Sequence
cggggtgtcaggggagtgaggggtg

SEQ ID NO: 189170 - DNA, 25 bp, Probe Sequence
ctgtgtgttgtgggaggggatggga

SEQ ID NO: 189171 - DNA, 25 bp, Probe Sequence
ctgtacttgtgaaacattgtgtggg

SEQ ID NO: 189172 - DNA, 25 bp, Probe Sequence
ctgtgactattaagaccatgttgga

SEQ ID NO: 189173 - DNA, 25 bp, Probe Sequence
ctgtgtggactaagatgccattaaa

SEQ ID NO: 189174 - DNA, 25 bp, Probe Sequence
ctggggacgaagaccaagaggaaga

SEQ ID NO: 189175 - DNA, 25 bp, Probe Sequence
ctggcaggggaccccatggaaaaga

SEQ ID NO: 189176 - DNA, 25 bp, Probe Sequence
ctgtagcgtgactcctctagaaaaa

SEQ ID NO: 189177 - DNA, 25 bp, Probe Sequence
ctgtaccattataccctagaagaaa

SEQ ID NO: 189178 - DNA, 25 bp, Probe Sequence
ctgtacttttatgttctcaagaaat

SEQ ID NO: 189179 - DNA, 25 bp, Probe Sequence
ctgtcctggttagttttgtacaaca

SEQ ID NO: 189180 - DNA, 25 bp, Probe Sequence
ctgtattggctttttgattgtcaaa

SEQ ID NO: 189181 - DNA, 25 bp, Probe Sequence
ctgtaggtttttagtagcatccaca

SEQ ID NO: 189182 - DNA, 25 bp, Probe Sequence
ctgtcagttttcagctgtcagtaac

SEQ ID NO: 189183 - DNA, 25 bp, Probe Sequence
ctgttttattctgggtcatctatag

SEQ ID NO: 189184 - DNA, 25 bp, Probe Sequence
ctgtggttatcctggtcattttgcc

SEQ ID NO: 189185 - DNA, 25 bp, Probe Sequence
ctgtggttaacgccttcatttatag

SEQ ID NO: 189186 - DNA, 25 bp, Probe Sequence
ctgtggaatatagacccataatcga

SEQ ID NO: 189187 - DNA, 25 bp, Probe Sequence
ctggaggctacgtcacccaaagtag

SEQ ID NO: 189188 - DNA, 25 bp, Probe Sequence
ctggggctaaatccgcagcaaactg

SEQ ID NO: 189189 - DNA, 25 bp, Probe Sequence
ctgtggctcgaattcccagagttcg

SEQ ID NO: 189190 - DNA, 25 bp, Probe Sequence
ctgtgacctcaattaaagcaattcc

SEQ ID NO: 189191 - DNA, 25 bp, Probe Sequence
ctgtgacctcactaaactgtttatg

SEQ ID NO: 189192 - DNA, 25 bp, Probe Sequence
ctgtgtcaccagttaatctttctcc

SEQ ID NO: 189193 - DNA, 25 bp, Probe Sequence
ctgggctactaatacttctctcagc

SEQ ID NO: 189194 - DNA, 25 bp, Probe Sequence
ctgggtattaagaccttgctcttcc

SEQ ID NO: 189195 - DNA, 25 bp, Probe Sequence
ctgtggatattctatgacctctgtc

SEQ ID NO: 189196 - DNA, 25 bp, Probe Sequence
ctggtatattagatcccatgggagg

SEQ ID NO: 189197 - DNA, 25 bp, Probe Sequence
ctgtttttgagcttctcattgtgta

SEQ ID NO: 189198 - DNA, 25 bp, Probe Sequence
ctgtatttcgtgtctcataattgtc

SEQ ID NO: 189199 - DNA, 25 bp, Probe Sequence
ctgtctctttgtttctgagctttcc

SEQ ID NO: 189200 - DNA, 25 bp, Probe Sequence
ctgtctccttgcaagtcaacttgta

SEQ ID NO: 189201 - DNA, 25 bp, Probe Sequence
cgtgggagatgaagtcaactggtat

SEQ ID NO: 189202 - DNA, 25 bp, Probe Sequence
ctgggtgagaggctacagtgtgtat

SEQ ID NO: 189203 - DNA, 25 bp, Probe Sequence
ctgggcagatggggtcaaggctggg

SEQ ID NO: 189204 - DNA, 25 bp, Probe Sequence
ctggagcaatgggtgtgccagccct

SEQ ID NO: 189205 - DNA, 25 bp, Probe Sequence
ctgtagcgtatggtgctgctgtcca

SEQ ID NO: 189206 - DNA, 25 bp, Probe Sequence
ctgtatggatgcaggtcttgccaga

SEQ ID NO: 189207 - DNA, 25 bp, Probe Sequence
ctgtctcgtcataagcatctagcca

SEQ ID NO: 189208 - DNA, 25 bp, Probe Sequence
ctgtgcatcgaagagcataatccac

SEQ ID NO: 189209 - DNA, 25 bp, Probe Sequence
ctgtgctccatggggatggtccagc

SEQ ID NO: 189210 - DNA, 25 bp, Probe Sequence
ctgtccaaggcccagatgttagcca

SEQ ID NO: 189211 - DNA, 25 bp, Probe Sequence
ctgtccacgaggccaatgggaccga

SEQ ID NO: 189212 - DNA, 25 bp, Probe Sequence
ctgtcaccactgctaagggactcta

SEQ ID NO: 189213 - DNA, 25 bp, Probe Sequence
ctgtcaggacgcctaggggtctgta

SEQ ID NO: 189214 - DNA, 25 bp, Probe Sequence
ctgtattactgccgagtggacctgc

SEQ ID NO: 189215 - DNA, 25 bp, Probe Sequence
ctgtcagtcggccgaggtgcacggc

SEQ ID NO: 189216 - DNA, 25 bp, Probe Sequence
cggcatgctcgatgaagtcgccggc

SEQ ID NO: 189217 - DNA, 25 bp, Probe Sequence
ctggcctagaggtcagtcctttgca

SEQ ID NO: 189218 - DNA, 25 bp, Probe Sequence
ctgtgcactaggcacgtaacctgca

SEQ ID NO: 189219 - DNA, 25 bp, Probe Sequence
cggcctatcgggcttaccagaactg

SEQ ID NO: 189220 - DNA, 25 bp, Probe Sequence
cgggataaaccatttaccagccact

SEQ ID NO: 189221 - DNA, 25 bp, Probe Sequence
ctggtgaataacgatttcccgtctt

SEQ ID NO: 189222 - DNA, 25 bp, Probe Sequence
cggctacatagaaaaatccacccct

SEQ ID NO: 189223 - DNA, 25 bp, Probe Sequence
cgttcaagaacataagctaccacct

SEQ ID NO: 189224 - DNA, 25 bp, Probe Sequence
ctgtttacaaatcacgtgtccatcg

SEQ ID NO: 189225 - DNA, 25 bp, Probe Sequence
ctgtttaaagtgtcacccctcactg

SEQ ID NO: 189226 - DNA, 25 bp, Probe Sequence
ctgtattctgaagacagcgccccag

SEQ ID NO: 189227 - DNA, 25 bp, Probe Sequence
ctgtattctgaagacagcgccccag

SEQ ID NO: 189228 - DNA, 25 bp, Probe Sequence
ctgtagattaaatgagctcccctgt

SEQ ID NO: 189229 - DNA, 25 bp, Probe Sequence
ctggatcaggtaaagggccccttct

SEQ ID NO: 189230 - DNA, 25 bp, Probe Sequence
ctggccacagttgaggggaactttg

SEQ ID NO: 189231 - DNA, 25 bp, Probe Sequence
ctgtgcctcttgtgagggccatttg

SEQ ID NO: 189232 - DNA, 25 bp, Probe Sequence
ctgtacataatgttgtgggtctttg

SEQ ID NO: 189233 - DNA, 25 bp, Probe Sequence
ctgtatataagctttggggtaatga

SEQ ID NO: 189234 - DNA, 25 bp, Probe Sequence
cgtagacaacacagggttagcaggt

SEQ ID NO: 189235 - DNA, 25 bp, Probe Sequence
cgcgaggtggacacggtctagcggg

SEQ ID NO: 189236 - DNA, 25 bp, Probe Sequence
cgggcaatggaacgggttatgtacg

SEQ ID NO: 189237 - DNA, 25 bp, Probe Sequence
ctggggtgtagaaaagtgtattgac

SEQ ID NO: 189238 - DNA, 25 bp, Probe Sequence
ctgtgaggttagaagtggttctgga

SEQ ID NO: 189239 - DNA, 25 bp, Probe Sequence
ctgtgggctttgggagctttcttgg

SEQ ID NO: 189240 - DNA, 25 bp, Probe Sequence
ctgtctgtacttgtgaaacattgtg

SEQ ID NO: 189241 - DNA, 25 bp, Probe Sequence
ctgtctactttcggcacaacatgta

SEQ ID NO: 189242 - DNA, 25 bp, Probe Sequence
ctgtctactttcggcacaacatgta

SEQ ID NO: 189243 - DNA, 25 bp, Probe Sequence
ctgtctactttcggcacaacatgta

SEQ ID NO: 189244 - DNA, 25 bp, Probe Sequence
ctgtctactttcggcacaacatgta

SEQ ID NO: 189245 - DNA, 25 bp, Probe Sequence
ctgtctccttgtgggccaaactgaa

SEQ ID NO: 189246 - DNA, 25 bp, Probe Sequence
ctgtccctctgactggaaaacagac

SEQ ID NO: 189247 - DNA, 25 bp, Probe Sequence
ttcatactccacctgcaaaagctaa

SEQ ID NO: 189248 - DNA, 25 bp, Probe Sequence
ctgtcctcgctgctgagaagagcca

SEQ ID NO: 189249 - DNA, 25 bp, Probe Sequence
ctgtctccctggtgggagtcaccgt

SEQ ID NO: 189250 - DNA, 25 bp, Probe Sequence
ctgtctccctggtgggagtcaccgt

SEQ ID NO: 189251 - DNA, 25 bp, Probe Sequence
ctgtctccctggtgggagtcaccgt

SEQ ID NO: 189252 - DNA, 25 bp, Probe Sequence
ctgtagaccggctgacggacaccag

SEQ ID NO: 189253 - DNA, 25 bp, Probe Sequence
ctggagaactggggccaggaccctg

SEQ ID NO: 189254 - DNA, 25 bp, Probe Sequence
ctgggccgatgaccacaaggaccct

SEQ ID NO: 189255 - DNA, 25 bp, Probe Sequence
cgggctcgatgccggaaaaacacct

SEQ ID NO: 189256 - DNA, 25 bp, Probe Sequence
ctgggtgggccaggccaacgacatc

SEQ ID NO: 189257 - DNA, 25 bp, Probe Sequence
ctgtggagggcgctgaaacttcatc

SEQ ID NO: 189258 - DNA, 25 bp, Probe Sequence
ctgtggtgagcggcctggtacagtt

SEQ ID NO: 189259 - DNA, 25 bp, Probe Sequence
ctgtggcatgagcctgtagtcccag

SEQ ID NO: 189260 - DNA, 25 bp, Probe Sequence
ctgtgccatggcgtatatgttcaaa

SEQ ID NO: 189261 - DNA, 25 bp, Probe Sequence
ctgtcccagctttgcagaatgaaaa

SEQ ID NO: 189262 - DNA, 25 bp, Probe Sequence
ctgtcccagtcaccactaaagaaga

SEQ ID NO: 189263 - DNA, 25 bp, Probe Sequence
ctgtcagacctcccagttattgata

SEQ ID NO: 189264 - DNA, 25 bp, Probe Sequence
ctgtccacactcctcatgaaattaa

SEQ ID NO: 189265 - DNA, 25 bp, Probe Sequence
ctgtacatactggcctctgtgatta

SEQ ID NO: 189266 - DNA, 25 bp, Probe Sequence
ctgtaaatgcaggtctcttggtatt

SEQ ID NO: 189267 - DNA, 25 bp, Probe Sequence
ctgtcacattgctctttttgtattt

SEQ ID NO: 189268 - DNA, 25 bp, Probe Sequence
ctgtgcaacatttttgtactgtatg

SEQ ID NO: 189269 - DNA, 25 bp, Probe Sequence
ctggtaccttggctggcattatggg

SEQ ID NO: 189270 - DNA, 25 bp, Probe Sequence
ctggtccggaggttatgtcttcggt

SEQ ID NO: 189271 - DNA, 25 bp, Probe Sequence
ctggtccttggaggtcatgtcccag

SEQ ID NO: 189272 - DNA, 25 bp, Probe Sequence
ctgtgtcttcaggagtctcatggcc

SEQ ID NO: 189273 - DNA, 25 bp, Probe Sequence
ctgtgatttgcagaccctgtctaaa

SEQ ID NO: 189274 - DNA, 25 bp, Probe Sequence
ctgtgttgctatggcacccagatta

SEQ ID NO: 189275 - DNA, 25 bp, Probe Sequence
ctgtgtctgtatacactgggtaacc

SEQ ID NO: 189276 - DNA, 25 bp, Probe Sequence
ctgtgcttgttccatttctgtacac

SEQ ID NO: 189277 - DNA, 25 bp, Probe Sequence
ctgtcccttcactgtttagagcatg

SEQ ID NO: 189278 - DNA, 25 bp, Probe Sequence
ctgtctgtcccaactgtttgaacag

SEQ ID NO: 189279 - DNA, 25 bp, Probe Sequence
ctgtctactctcaggtttggactgg

SEQ ID NO: 189280 - DNA, 25 bp, Probe Sequence
ctgtcccttgcaaggtgacaggccg

SEQ ID NO: 189281 - DNA, 25 bp, Probe Sequence
ctgtgccctggaagttcaggggccc

SEQ ID NO: 189282 - DNA, 25 bp, Probe Sequence
ctggcacggtgtattctggggcctt

SEQ ID NO: 189283 - DNA, 25 bp, Probe Sequence
cggatttggtcgtattgggcgcctg

SEQ ID NO: 189284 - DNA, 25 bp, Probe Sequence
cgcagtttgaatcgcggtgcgacga

SEQ ID NO: 189285 - DNA, 25 bp, Probe Sequence
ctggttctggtctggtcggatgaac

SEQ ID NO: 189286 - DNA, 25 bp, Probe Sequence
ctggctctctggattagtgcgggta

SEQ ID NO: 189287 - DNA, 25 bp, Probe Sequence
ctggcacttggatcgggggtgtaga

SEQ ID NO: 189288 - DNA, 25 bp, Probe Sequence
ctgtccactcgattccaagggtaaa

SEQ ID NO: 189289 - DNA, 25 bp, Probe Sequence
ctgtcggccgaagccatcggcatca

SEQ ID NO: 189290 - DNA, 25 bp, Probe Sequence
ctgtcaggctcttacagccacaggc

SEQ ID NO: 189291 - DNA, 25 bp, Probe Sequence
ctgtcctgcacttcaggtgcaagct

SEQ ID NO: 189292 - DNA, 25 bp, Probe Sequence
ctgtcactcactacatgaataagca

SEQ ID NO: 189293 - DNA, 25 bp, Probe Sequence
ctgtacatcaccatcatcaaagacc

SEQ ID NO: 189294 - DNA, 25 bp, Probe Sequence
ctgtatgtctccatctattgatgag

SEQ ID NO: 189295 - DNA, 25 bp, Probe Sequence
ctgtagtcccatgctatctcagggg

SEQ ID NO: 189296 - DNA, 25 bp, Probe Sequence
ctgtcgtcccagttactcgggaggc

SEQ ID NO: 189297 - DNA, 25 bp, Probe Sequence
ctgtaatcccagctactcgggaggc

SEQ ID NO: 189298 - DNA, 25 bp, Probe Sequence
cgtgaacccgggagcggagcttgca

SEQ ID NO: 189299 - DNA, 25 bp, Probe Sequence
gcggaaccgcagtgaccggttctac

SEQ ID NO: 189300 - DNA, 25 bp, Probe Sequence
ctgtaatcccactgagtcggttgat

SEQ ID NO: 189301 - DNA, 25 bp, Probe Sequence
cctaatggccgctggggggtgaggg

SEQ ID NO: 189302 - DNA, 25 bp, Probe Sequence
ctgtaatccgccttggggagtggag

SEQ ID NO: 189303 - DNA, 25 bp, Probe Sequence
ctgtcagaccccgagctgggggtgg

SEQ ID NO: 189304 - DNA, 25 bp, Probe Sequence
ctgtcgcgcccaagtctgggaagtg

SEQ ID NO: 189305 - DNA, 25 bp, Probe Sequence
ctgtcggaccctttgtggtagcagg

SEQ ID NO: 189306 - DNA, 25 bp, Probe Sequence
ctgggtaacctgatcgtggagagtg

SEQ ID NO: 189307 - DNA, 25 bp, Probe Sequence
ctgggggcctctctcaaggatgagg

SEQ ID NO: 189308 - DNA, 25 bp, Probe Sequence
ctgggcttaattcctcggtgatgaa

SEQ ID NO: 189309 - DNA, 25 bp, Probe Sequence
ctgggatttatgctcatgaactaaa

SEQ ID NO: 189310 - DNA, 25 bp, Probe Sequence
ctggggttggctccatgaccaagat

SEQ ID NO: 189311 - DNA, 25 bp, Probe Sequence
ctggggttggctccatgaccaagat

SEQ ID NO: 189312 - DNA, 25 bp, Probe Sequence
ctgtgcctgggtaccagcatccaag

SEQ ID NO: 189313 - DNA, 25 bp, Probe Sequence
ctgtcttgaggagccatagcagaaa

SEQ ID NO: 189314 - DNA, 25 bp, Probe Sequence
cgacctggcgactctggatggtcag

SEQ ID NO: 189315 - DNA, 25 bp, Probe Sequence
cggcctgagcgagacggaacctggc

SEQ ID NO: 189316 - DNA, 25 bp, Probe Sequence
ctggactttagatcctgaacctgtc

SEQ ID NO: 189317 - DNA, 25 bp, Probe Sequence
ctggtcaatttgtacctgcaggcct

SEQ ID NO: 189318 - DNA, 25 bp, Probe Sequence
ctgtaacagatcaaacaccggcgct

SEQ ID NO: 189319 - DNA, 25 bp, Probe Sequence
cctgagtatcaggaagtggcccctt

SEQ ID NO: 189320 - DNA, 25 bp, Probe Sequence
cgttagagtaacacatatcctgcct

SEQ ID NO: 189321 - DNA, 25 bp, Probe Sequence
ctgtgagggtaacccacaggtgcct

SEQ ID NO: 189322 - DNA, 25 bp, Probe Sequence
ctgtaggagtcagagcccacatggc

SEQ ID NO: 189323 - DNA, 25 bp, Probe Sequence
ctgtcagtgaaagagccccagctgg

SEQ ID NO: 189324 - DNA, 25 bp, Probe Sequence
ctgtagatgaactgagcaggcaggg

SEQ ID NO: 189325 - DNA, 25 bp, Probe Sequence
ctgtagagaggcctgcctccagggc

SEQ ID NO: 189326 - DNA, 25 bp, Probe Sequence
ctgtgaagagcccctctacgtgggg

SEQ ID NO: 189327 - DNA, 25 bp, Probe Sequence
cggcaaacagcacactaatcctgga

SEQ ID NO: 189328 - DNA, 25 bp, Probe Sequence
ctgtgaaaagacgtcaatatctgct

SEQ ID NO: 189329 - DNA, 25 bp, Probe Sequence
ctgtcaagaagaagtcagcttgagc

SEQ ID NO: 189330 - DNA, 25 bp, Probe Sequence
ctgtcaagaagaaggcagctgagca

SEQ ID NO: 189331 - DNA, 25 bp, Probe Sequence
ctgtcaagaagaaggcagctgagca

SEQ ID NO: 189332 - DNA, 25 bp, Probe Sequence
ctgtaatgaatgaggctgggctttt

SEQ ID NO: 189333 - DNA, 25 bp, Probe Sequence
ctgtaatcagatgggtgtgggtttg

SEQ ID NO: 189334 - DNA, 25 bp, Probe Sequence
ctgggacgctggctttgggttgtcc

SEQ ID NO: 189335 - DNA, 25 bp, Probe Sequence
ctggagttgaagttttggggtgtgt

SEQ ID NO: 189336 - DNA, 25 bp, Probe Sequence
ctgggtaagagctcttgggctggtt

SEQ ID NO: 189337 - DNA, 25 bp, Probe Sequence
ctgggattagccaggtgggctggtg

SEQ ID NO: 189338 - DNA, 25 bp, Probe Sequence
ctgtccttagactagtggttctggt

SEQ ID NO: 189339 - DNA, 25 bp, Probe Sequence
ctgtcctgggcctgcagaatttggg

SEQ ID NO: 189340 - DNA, 25 bp, Probe Sequence
ctgtcgtgtgggtgccaagtgcttg

SEQ ID NO: 189341 - DNA, 25 bp, Probe Sequence
ctggtgtgtgggtgttcagttctgt

SEQ ID NO: 189342 - DNA, 25 bp, Probe Sequence
ctgtggagaggtgggcttccttgtg

SEQ ID NO: 189343 - DNA, 25 bp, Probe Sequence
ctgtcaggggcttggatttcgtgtg

SEQ ID NO: 189344 - DNA, 25 bp, Probe Sequence
ctgtcaggaggactggtttccagcc

SEQ ID NO: 189345 - DNA, 25 bp, Probe Sequence
ctgtctgtatctttggttatcctgt

SEQ ID NO: 189346 - DNA, 25 bp, Probe Sequence
ctgtctttggggccattagcatctg

SEQ ID NO: 189347 - DNA, 25 bp, Probe Sequence
ctgtctttctggtcctttctggacc

SEQ ID NO: 189348 - DNA, 25 bp, Probe Sequence
ctggttttggtcgtctttctgacag

SEQ ID NO: 189349 - DNA, 25 bp, Probe Sequence
ctggattttgaccccttattgattc

SEQ ID NO: 189350 - DNA, 25 bp, Probe Sequence
ctggtgctgaataaacccttctgat

SEQ ID NO: 189351 - DNA, 25 bp, Probe Sequence
ctgtgttgaataaacgtatctgcta

SEQ ID NO: 189352 - DNA, 25 bp, Probe Sequence
ctgtcttgtaaaccacattcttgac

SEQ ID NO: 189353 - DNA, 25 bp, Probe Sequence
ctgtctttgagaactatattgcgga

SEQ ID NO: 189354 - DNA, 25 bp, Probe Sequence
ctgtggtgggaaattcaatgggaga

SEQ ID NO: 189355 - DNA, 25 bp, Probe Sequence
ctgtggtgggattttgccttttggt

SEQ ID NO: 189356 - DNA, 25 bp, Probe Sequence
ctgtggataaattttgcctgtgggt

SEQ ID NO: 189357 - DNA, 25 bp, Probe Sequence
ctgtgtttatttgtggccgagtgta

SEQ ID NO: 189358 - DNA, 25 bp, Probe Sequence
ctgtgtttatttgtggccgagtgta

SEQ ID NO: 189359 - DNA, 25 bp, Probe Sequence
ctggtttgtcctaaggccatagtta

SEQ ID NO: 189360 - DNA, 25 bp, Probe Sequence
ctggtggtgtcaactcaggcccagt

SEQ ID NO: 189361 - DNA, 25 bp, Probe Sequence
ctgtgaggggcatccaggtctaggc

SEQ ID NO: 189362 - DNA, 25 bp, Probe Sequence
ctgtggaattgcacaaattctacag

SEQ ID NO: 189363 - DNA, 25 bp, Probe Sequence
ctgtgtgctttcaaccaatcgtaga

SEQ ID NO: 189364 - DNA, 25 bp, Probe Sequence
ctgtgactgcttcccaatatttatg

SEQ ID NO: 189365 - DNA, 25 bp, Probe Sequence
ctggaccttgcggaatttgctaaga

SEQ ID NO: 189366 - DNA, 25 bp, Probe Sequence
ctgggccttgacaaagtgtaaaccg

SEQ ID NO: 189367 - DNA, 25 bp, Probe Sequence
ctgtgggtataaactgttgaaacca

SEQ ID NO: 189368 - DNA, 25 bp, Probe Sequence
ctgtgggtccaaacatgttgctccg

SEQ ID NO: 189369 - DNA, 25 bp, Probe Sequence
ctgtggacatggcagttgttgctcc

SEQ ID NO: 189370 - DNA, 25 bp, Probe Sequence
ctgggtatgcctggactgttgccca

SEQ ID NO: 189371 - DNA, 25 bp, Probe Sequence
ctgtggttcgtgggatgttcagctg

SEQ ID NO: 189372 - DNA, 25 bp, Probe Sequence
ctgtcttgtgggagatgcgtagggg

SEQ ID NO: 189373 - DNA, 25 bp, Probe Sequence
ctggcttcgccgagtatgtgggccg

SEQ ID NO: 189374 - DNA, 25 bp, Probe Sequence
ctggttagcggaggcatcggggccc

SEQ ID NO: 189375 - DNA, 25 bp, Probe Sequence
ctggttggcggatggcagcgtccgc

SEQ ID NO: 189376 - DNA, 25 bp, Probe Sequence
ctggtttcttaactgacgtaccatg

SEQ ID NO: 189377 - DNA, 25 bp, Probe Sequence
ctggtccctttaaagagcaatcctg

SEQ ID NO: 189378 - DNA, 25 bp, Probe Sequence
ctgtctcccgatgaaaacatatctt

SEQ ID NO: 189379 - DNA, 25 bp, Probe Sequence
ctgtctcccgatgaaaacatatctt

SEQ ID NO: 189380 - DNA, 25 bp, Probe Sequence
ctgtctcccgatgaaaacatatctt

SEQ ID NO: 189381 - DNA, 25 bp, Probe Sequence
ctgtcatccacgtctagtcagggac

SEQ ID NO: 189382 - DNA, 25 bp, Probe Sequence
ctgtctgcccctgcaatagggtgtg

SEQ ID NO: 189383 - DNA, 25 bp, Probe Sequence
ctgtctccacttgcattcaggggtg

SEQ ID NO: 189384 - DNA, 25 bp, Probe Sequence
ctgtctccagtttcacaactcaggt

SEQ ID NO: 189385 - DNA, 25 bp, Probe Sequence
ctgtctacactgtctactgaccaga

SEQ ID NO: 189386 - DNA, 25 bp, Probe Sequence
ctgtccagctgggtactgctaatga

SEQ ID NO: 189387 - DNA, 25 bp, Probe Sequence
ctgtccgtggcagagctgtactggc

SEQ ID NO: 189388 - DNA, 25 bp, Probe Sequence
ctgtcactggctaaagttacatggc

SEQ ID NO: 189389 - DNA, 25 bp, Probe Sequence
ctgggctgagtggaagttatctgtc

SEQ ID NO: 189390 - DNA, 25 bp, Probe Sequence
ctgggccagggggttggatgtccct

SEQ ID NO: 189391 - DNA, 25 bp, Probe Sequence
ctgggaaggcctcttggagacctta

SEQ ID NO: 189392 - DNA, 25 bp, Probe Sequence
ctgtgggggtctgagtctagagccc

SEQ ID NO: 189393 - DNA, 25 bp, Probe Sequence
ctgtcggggtcaagctggaaaggcc

SEQ ID NO: 189394 - DNA, 25 bp, Probe Sequence
ctgtcgggactgagcaggcaatggc

SEQ ID NO: 189395 - DNA, 25 bp, Probe Sequence
ctgtctgtcagagttcggagaacac

SEQ ID NO: 189396 - DNA, 25 bp, Probe Sequence
ctgtggaaggcatttggtagatatc

SEQ ID NO: 189397 - DNA, 25 bp, Probe Sequence
ctggaaaataatactgctgagatac

SEQ ID NO: 189398 - DNA, 25 bp, Probe Sequence
ctggtgatttcagttctgtgaaata

SEQ ID NO: 189399 - DNA, 25 bp, Probe Sequence
cggccacattcagttcttatcaaag

SEQ ID NO: 189400 - DNA, 25 bp, Probe Sequence
cggccacattcagttcttatcaaag

SEQ ID NO: 189401 - DNA, 25 bp, Probe Sequence
ctgggccttattatccatcacagga

SEQ ID NO: 189402 - DNA, 25 bp, Probe Sequence
cgggccgtggtatccatgacggtga

SEQ ID NO: 189403 - DNA, 25 bp, Probe Sequence
ctgtgtgccgggaacagccagaggg

SEQ ID NO: 189404 - DNA, 25 bp, Probe Sequence
ctgtgggcaaggtcatccctgagct

SEQ ID NO: 189405 - DNA, 25 bp, Probe Sequence
ctgtcgcgaaggacctggcgtctag

SEQ ID NO: 189406 - DNA, 25 bp, Probe Sequence
ctgtccgagacagccgggaggagcc

SEQ ID NO: 189407 - DNA, 25 bp, Probe Sequence
ctgtccaggacaacctgggggccgc

SEQ ID NO: 189408 - DNA, 25 bp, Probe Sequence
cggccaggaacgccgtaaccacagc

SEQ ID NO: 189409 - DNA, 25 bp, Probe Sequence
cggggaaacagacctagatccaagg

SEQ ID NO: 189410 - DNA, 25 bp, Probe Sequence
ctgggaacaacacagccgtccagga

SEQ ID NO: 189411 - DNA, 25 bp, Probe Sequence
ctggggaccagcgaagaccaccagc

SEQ ID NO: 189412 - DNA, 25 bp, Probe Sequence
ctgtgaggctcttctaacaccctca

SEQ ID NO: 189413 - DNA, 25 bp, Probe Sequence
ctgtgatgtgttttacccagcacct

SEQ ID NO: 189414 - DNA, 25 bp, Probe Sequence
ctgtggtgttagcaccagccagctc

SEQ ID NO: 189415 - DNA, 25 bp, Probe Sequence
ctggggaaagcagccatgctccccc

SEQ ID NO: 189416 - DNA, 25 bp, Probe Sequence
ctgggggtcacagagcatgttctcg

SEQ ID NO: 189417 - DNA, 25 bp, Probe Sequence
ctgggggcaactggccatttgccaa

SEQ ID NO: 189418 - DNA, 25 bp, Probe Sequence
ctggggaaagtctgtttacagcatg

SEQ ID NO: 189419 - DNA, 25 bp, Probe Sequence
ctggggcaaaccactcttcaagtgg

SEQ ID NO: 189420 - DNA, 25 bp, Probe Sequence
ctggtaagaccatcactctcgaagt

SEQ ID NO: 189421 - DNA, 25 bp, Probe Sequence
ctgggttcacacagctttttagctt

SEQ ID NO: 189422 - DNA, 25 bp, Probe Sequence
ctgggtagcaccatttctttcatgt

SEQ ID NO: 189423 - DNA, 25 bp, Probe Sequence
ctggaaatggccattgagctgtttc

SEQ ID NO: 189424 - DNA, 25 bp, Probe Sequence
ctggaaatggccattcgacttcttt

SEQ ID NO: 189425 - DNA, 25 bp, Probe Sequence
cggcataatgccagtacagacttag

SEQ ID NO: 189426 - DNA, 25 bp, Probe Sequence
ctggatcaatgtgggtcagctacat

SEQ ID NO: 189427 - DNA, 25 bp, Probe Sequence
ctgtgctaagggtccagtatttatt

SEQ ID NO: 189428 - DNA, 25 bp, Probe Sequence
ctggctaaggtctagaaagttttca

SEQ ID NO: 189429 - DNA, 25 bp, Probe Sequence
ctggaccttgtctaaaatttctttg

SEQ ID NO: 189430 - DNA, 25 bp, Probe Sequence
ctgggttaacagtaaatatacactt

SEQ ID NO: 189431 - DNA, 25 bp, Probe Sequence
ctggtttggccagacagtataccca

SEQ ID NO: 189432 - DNA, 25 bp, Probe Sequence
cggctttggtgactctagataacct

SEQ ID NO: 189433 - DNA, 25 bp, Probe Sequence
ctgtgttggggtcctcaaagaagta

SEQ ID NO: 189434 - DNA, 25 bp, Probe Sequence
ctggttgatacccactcaaaaagga

SEQ ID NO: 189435 - DNA, 25 bp, Probe Sequence
ctgggtgtaggggctgaaactaaag

SEQ ID NO: 189436 - DNA, 25 bp, Probe Sequence
ctggggggaggattactatatagga

SEQ ID NO: 189437 - DNA, 25 bp, Probe Sequence
ctgggggagcagttttccttgagcg

SEQ ID NO: 189438 - DNA, 25 bp, Probe Sequence
ctggggatgaggttgcttactaagc

SEQ ID NO: 189439 - DNA, 25 bp, Probe Sequence
cggctggatggaaactacttgaagc

SEQ ID NO: 189440 - DNA, 25 bp, Probe Sequence
ctgtgcagagtataagattttggac

SEQ ID NO: 189441 - DNA, 25 bp, Probe Sequence
ctgtgcaggttggaggatggttggt

SEQ ID NO: 189442 - DNA, 25 bp, Probe Sequence
ctggggttggagcaggtgggcctcc

SEQ ID NO: 189443 - DNA, 25 bp, Probe Sequence
ctgggtgtctgggaagtggggcaca

SEQ ID NO: 189444 - DNA, 25 bp, Probe Sequence
ctggggtctatgtgaggatgtggaa

SEQ ID NO: 189445 - DNA, 25 bp, Probe Sequence
ctgtgggttgcttcgagggtgatga

SEQ ID NO: 189446 - DNA, 25 bp, Probe Sequence
ctgtggtgtctttgctgagggtcac

SEQ ID NO: 189447 - DNA, 25 bp, Probe Sequence
ctgtgagttctgatgtcttagtgac

SEQ ID NO: 189448 - DNA, 25 bp, Probe Sequence
ctgggtcatcagcatgtcccagtca

SEQ ID NO: 189449 - DNA, 25 bp, Probe Sequence
ctgtggactgtggcattcctgaatc

SEQ ID NO: 189450 - DNA, 25 bp, Probe Sequence
ctgtgaacacccatctgcagtatcc

SEQ ID NO: 189451 - DNA, 25 bp, Probe Sequence
ctgtgaaaaccgaagcagctgatca

SEQ ID NO: 189452 - DNA, 25 bp, Probe Sequence
ctggagcataacccacaggcgtttt

SEQ ID NO: 189453 - DNA, 25 bp, Probe Sequence
ctgggcaaatcacaacatggggaat

SEQ ID NO: 189454 - DNA, 25 bp, Probe Sequence
ctggaggggctgaaaatggtggaaa

SEQ ID NO: 189455 - DNA, 25 bp, Probe Sequence
ctgggggactgagaactgtagaaag

SEQ ID NO: 189456 - DNA, 25 bp, Probe Sequence
cggggctgggcagaacaccaaaaca

SEQ ID NO: 189457 - DNA, 25 bp, Probe Sequence
cggggcgggagagactcagcaacga

SEQ ID NO: 189458 - DNA, 25 bp, Probe Sequence
gctggcaaaggggacgtcccaacga

SEQ ID NO: 189459 - DNA, 25 bp, Probe Sequence
cggcaagagggggctgattccacag

SEQ ID NO: 189460 - DNA, 25 bp, Probe Sequence
cgtgtaagggtggtctcttccagaa

SEQ ID NO: 189461 - DNA, 25 bp, Probe Sequence
tcgaggaaggttgccctccaaaacg

SEQ ID NO: 189462 - DNA, 25 bp, Probe Sequence
cgggaagaattcgcttccacctgtc

SEQ ID NO: 189463 - DNA, 25 bp, Probe Sequence
ctggtgaaagatttggtatccccaa

SEQ ID NO: 189464 - DNA, 25 bp, Probe Sequence
ctgtgtgtagacattgtattccaca

SEQ ID NO: 189465 - DNA, 25 bp, Probe Sequence
ctgtgtggggctgttattccacctc

SEQ ID NO: 189466 - DNA, 25 bp, Probe Sequence
ctgtctggtgggtgattctctgccc

SEQ ID NO: 189467 - DNA, 25 bp, Probe Sequence
ctgtcggtggggaagacttgcctca

SEQ ID NO: 189468 - DNA, 25 bp, Probe Sequence
ctgtccgggatggacacacttccca

SEQ ID NO: 189469 - DNA, 25 bp, Probe Sequence
ctgtgcttgggggagacaccccacc

SEQ ID NO: 189470 - DNA, 25 bp, Probe Sequence
ctggtccagttggagaccgtcaacc

SEQ ID NO: 189471 - DNA, 25 bp, Probe Sequence
gctagtccgtcgggacgggattacg

SEQ ID NO: 189472 - DNA, 25 bp, Probe Sequence
ctgggcctgtctcagattgggatta

SEQ ID NO: 189473 - DNA, 25 bp, Probe Sequence
ctggtgttgtctccagaccgagatg

SEQ ID NO: 189474 - DNA, 25 bp, Probe Sequence
ctggtctggacacagtgcccgtgtc

SEQ ID NO: 189475 - DNA, 25 bp, Probe Sequence
ctgtgccggccaaaggccaaggcca

SEQ ID NO: 189476 - DNA, 25 bp, Probe Sequence
ctgtgctctaggtgggctaagtgcc

SEQ ID NO: 189477 - DNA, 25 bp, Probe Sequence
ctgtgttatggtcgatggctcctgg

SEQ ID NO: 189478 - DNA, 25 bp, Probe Sequence
ctgtgtactgcggacatgtccctgc

SEQ ID NO: 189479 - DNA, 25 bp, Probe Sequence
ctgtgtcctgaggtgcatttcctgt

SEQ ID NO: 189480 - DNA, 25 bp, Probe Sequence
ctgtgtcctgaggtgcatttcctgt

SEQ ID NO: 189481 - DNA, 25 bp, Probe Sequence
ctgtccagtcaggtgtgtgttcttt

SEQ ID NO: 189482 - DNA, 25 bp, Probe Sequence
ctgtgcgaggatctcactggttgtt

SEQ ID NO: 189483 - DNA, 25 bp, Probe Sequence
ctgtgcgtgtatatacgcgtgtgta

SEQ ID NO: 189484 - DNA, 25 bp, Probe Sequence
gctgggttgactaacctctggtatc

SEQ ID NO: 189485 - DNA, 25 bp, Probe Sequence
ctgggttggctgacccagggttctc

SEQ ID NO: 189486 - DNA, 25 bp, Probe Sequence
ctgggtttgtccgcatgttgtaatc

SEQ ID NO: 189487 - DNA, 25 bp, Probe Sequence
ctgtgacttttatgcgaaattcaac

SEQ ID NO: 189488 - DNA, 25 bp, Probe Sequence
ctgtgcctttgaatacaaatttcag

SEQ ID NO: 189489 - DNA, 25 bp, Probe Sequence
cgtgcatttatcagatcaaaaccaa

SEQ ID NO: 189490 - DNA, 25 bp, Probe Sequence
ctggtgtaattggcaaataactcaa

SEQ ID NO: 189491 - DNA, 25 bp, Probe Sequence
ctgggcttactgctaccaatgccaa

SEQ ID NO: 189492 - DNA, 25 bp, Probe Sequence
ctggacattaaacaccactgcgcag

SEQ ID NO: 189493 - DNA, 25 bp, Probe Sequence
ctgggatgtaaggtaccacctccgg

SEQ ID NO: 189494 - DNA, 25 bp, Probe Sequence
cgaagcatagattgtaacccctcca

SEQ ID NO: 189495 - DNA, 25 bp, Probe Sequence
ctgggcaggattggcaacaccccca

SEQ ID NO: 189496 - DNA, 25 bp, Probe Sequence
ctgtgatcagtgtggaggacccgcc

SEQ ID NO: 189497 - DNA, 25 bp, Probe Sequence
ctgtgtcagctgtgacaggccctta

SEQ ID NO: 189498 - DNA, 25 bp, Probe Sequence
ctgggactgattcacagcccttagt

SEQ ID NO: 189499 - DNA, 25 bp, Probe Sequence
ctggtcctgaagcactaccttcaga

SEQ ID NO: 189500 - DNA, 25 bp, Probe Sequence
ctggtatgtggagaccacctccgag

SEQ ID NO: 189501 - DNA, 25 bp, Probe Sequence
ctggtgtgggggttccaccgagaag

SEQ ID NO: 189502 - DNA, 25 bp, Probe Sequence
ctggtgtgggggttccaccgagaag

SEQ ID NO: 189503 - DNA, 25 bp, Probe Sequence
ctgtgtggggtgggtacactggaaa

SEQ ID NO: 189504 - DNA, 25 bp, Probe Sequence
ctggtgacgtttgggacattgacaa

SEQ ID NO: 189505 - DNA, 25 bp, Probe Sequence
ctggtggcgaccatggagaggaaac

SEQ ID NO: 189506 - DNA, 25 bp, Probe Sequence
ctgggcgctgatgaaggagatcgag

SEQ ID NO: 189507 - DNA, 25 bp, Probe Sequence
ctggggcaagcagagggactgggtc

SEQ ID NO: 189508 - DNA, 25 bp, Probe Sequence
ctgggtgcaaagaacggcttggctt

SEQ ID NO: 189509 - DNA, 25 bp, Probe Sequence
ctggggcaacactctgagctttggt

SEQ ID NO: 189510 - DNA, 25 bp, Probe Sequence
ctggggcaacactctgagctttggt

SEQ ID NO: 189511 - DNA, 25 bp, Probe Sequence
ctggggcaataccctgagctcaggg

SEQ ID NO: 189512 - DNA, 25 bp, Probe Sequence
ctgggcaaacacgctgcgatacggc

SEQ ID NO: 189513 - DNA, 25 bp, Probe Sequence
ctggtgcagaaggagcctgtagaag

SEQ ID NO: 189514 - DNA, 25 bp, Probe Sequence
ctgggcatcaatcagccttgtctac

SEQ ID NO: 189515 - DNA, 25 bp, Probe Sequence
ctgggatcattggcagccacatgta

SEQ ID NO: 189516 - DNA, 25 bp, Probe Sequence
ctgtgcgatcgcgacgtcacagtga

SEQ ID NO: 189517 - DNA, 25 bp, Probe Sequence
ctgtgggctggcagtcctggaagcc

SEQ ID NO: 189518 - DNA, 25 bp, Probe Sequence
ctggccaggcgcagtgacttacgcc

SEQ ID NO: 189519 - DNA, 25 bp, Probe Sequence
ctggtagggcatgtgcctgtttccc

SEQ ID NO: 189520 - DNA, 25 bp, Probe Sequence
cggattgaggatgtcacccccatcc

SEQ ID NO: 189521 - DNA, 25 bp, Probe Sequence
ctggcatgtgggtgtaccctttcct

SEQ ID NO: 189522 - DNA, 25 bp, Probe Sequence
gctggaggggatcaactcccccaag

SEQ ID NO: 189523 - DNA, 25 bp, Probe Sequence
gtggaaggtggataacgccctccaa

SEQ ID NO: 189524 - DNA, 25 bp, Probe Sequence
ctggaaggtggagagcctccctgga

SEQ ID NO: 189525 - DNA, 25 bp, Probe Sequence
ctggaaggaacggatgggcctctag

SEQ ID NO: 189526 - DNA, 25 bp, Probe Sequence
ctggagggctagcaaggccttctca

SEQ ID NO: 189527 - DNA, 25 bp, Probe Sequence
ctggtccccaggagagatgctttga

SEQ ID NO: 189528 - DNA, 25 bp, Probe Sequence
ctggccgcaaagtgggtctcattgc

SEQ ID NO: 189529 - DNA, 25 bp, Probe Sequence
ctgggccgcaagaagggagccaagc

SEQ ID NO: 189530 - DNA, 25 bp, Probe Sequence
ctggacctggagaagggacctacgg

SEQ ID NO: 189531 - DNA, 25 bp, Probe Sequence
ctgtggcctgggtggagcagtcatc

SEQ ID NO: 189532 - DNA, 25 bp, Probe Sequence
ctgggtgatagagtgggacgctgtc

SEQ ID NO: 189533 - DNA, 25 bp, Probe Sequence
ctgtgccttgaagggcagcaggccc

SEQ ID NO: 189534 - DNA, 25 bp, Probe Sequence
ctgtgcgctaagtggcagacgctcg

SEQ ID NO: 189535 - DNA, 25 bp, Probe Sequence
ctggcaaaagaccgcagtcagtagg

SEQ ID NO: 189536 - DNA, 25 bp, Probe Sequence
ctggcacagaagaggagtcaagtaa

SEQ ID NO: 189537 - DNA, 25 bp, Probe Sequence
ctggatcatgtcccatccagtccag

SEQ ID NO: 189538 - DNA, 25 bp, Probe Sequence
ctggatctcgggtctcatcatccag

SEQ ID NO: 189539 - DNA, 25 bp, Probe Sequence
ctgtgtgaaatgtattatcaccagc

SEQ ID NO: 189540 - DNA, 25 bp, Probe Sequence
ctgtgcttactgtagtaccacactg

SEQ ID NO: 189541 - DNA, 25 bp, Probe Sequence
ctggttgtcgggacattccactggt

SEQ ID NO: 189542 - DNA, 25 bp, Probe Sequence
cgggttagcagtgttccaagccttc

SEQ ID NO: 189543 - DNA, 25 bp, Probe Sequence
cgggttactttcacatacagccctc

SEQ ID NO: 189544 - DNA, 25 bp, Probe Sequence
cgggtttttggaatctacatgtctt

SEQ ID NO: 189545 - DNA, 25 bp, Probe Sequence
ctgggtcctttggagttactgcagt

SEQ ID NO: 189546 - DNA, 25 bp, Probe Sequence
ctgtcccctagtgagggactgtgtt

SEQ ID NO: 189547 - DNA, 25 bp, Probe Sequence
ctgtcctttcacttggctgagactg

SEQ ID NO: 189548 - DNA, 25 bp, Probe Sequence
ctgtcctttcacagccatggagtag

SEQ ID NO: 189549 - DNA, 25 bp, Probe Sequence
ctgtccttgttctccagtgaggaga

SEQ ID NO: 189550 - DNA, 25 bp, Probe Sequence
ctgtccattcttctctgtgtagaag

SEQ ID NO: 189551 - DNA, 25 bp, Probe Sequence
ctgtccaccttccagcagatgtgga

SEQ ID NO: 189552 - DNA, 25 bp, Probe Sequence
ctgtccaccttccagcagatgtgga

SEQ ID NO: 189553 - DNA, 25 bp, Probe Sequence
ctgtccaccctggcgtggtggcaga

SEQ ID NO: 189554 - DNA, 25 bp, Probe Sequence
ctggcaactcggacgtgtatgaaaa

SEQ ID NO: 189555 - DNA, 25 bp, Probe Sequence
ctgtgccctcagaacattctagtaa

SEQ ID NO: 189556 - DNA, 25 bp, Probe Sequence
ctgtgcgcaccaaagactcgggaga

SEQ ID NO: 189557 - DNA, 25 bp, Probe Sequence
ctgtgagcatctgaccacttggaag

SEQ ID NO: 189558 - DNA, 25 bp, Probe Sequence
ctgtgagccgcgggactctagagaa

SEQ ID NO: 189559 - DNA, 25 bp, Probe Sequence
ctgtgaaatcgctggtgctcacaat

SEQ ID NO: 189560 - DNA, 25 bp, Probe Sequence
ctgtgcaggtcttcggacgcaagaa

SEQ ID NO: 189561 - DNA, 25 bp, Probe Sequence
ctgtgtctgttgttggatccaaata

SEQ ID NO: 189562 - DNA, 25 bp, Probe Sequence
ctgtgtcatcttctggagttatcaa

SEQ ID NO: 189563 - DNA, 25 bp, Probe Sequence
ctgtgccatttgcctggatgaatat

SEQ ID NO: 189564 - DNA, 25 bp, Probe Sequence
ctgtgctgagggctgtgagaatgtg

SEQ ID NO: 189565 - DNA, 25 bp, Probe Sequence
ctgggacgtgtgcgcagacatggtg

SEQ ID NO: 189566 - DNA, 25 bp, Probe Sequence
ctggggggtagggacagggcaggcg

SEQ ID NO: 189567 - DNA, 25 bp, Probe Sequence
ctggagggcagttacgacggccacc

SEQ ID NO: 189568 - DNA, 25 bp, Probe Sequence
ctggggagcacttaattcttcccat

SEQ ID NO: 189569 - DNA, 25 bp, Probe Sequence
ctggggatcagtaacgtcttcacct

SEQ ID NO: 189570 - DNA, 25 bp, Probe Sequence
ctggggaagtcatcgtgccacccag

SEQ ID NO: 189571 - DNA, 25 bp, Probe Sequence
ctggggacttcaactgcccagcaac

SEQ ID NO: 189572 - DNA, 25 bp, Probe Sequence
ctgggagaccagagtcccctttagg

SEQ ID NO: 189573 - DNA, 25 bp, Probe Sequence
cgtggaccaagtgaccaccgtgaag

SEQ ID NO: 189574 - DNA, 25 bp, Probe Sequence
cggaactctagcttagtccgcggac

SEQ ID NO: 189575 - DNA, 25 bp, Probe Sequence
cggaatatctggggtccaagggatt

SEQ ID NO: 189576 - DNA, 25 bp, Probe Sequence
cggaagacccggtccaaggtatctg

SEQ ID NO: 189577 - DNA, 25 bp, Probe Sequence
ggtaaaccggaacaagcagtgaatg

SEQ ID NO: 189578 - DNA, 25 bp, Probe Sequence
cggaagacaccgaggaagaggagga

SEQ ID NO: 189579 - DNA, 25 bp, Probe Sequence
ctggcggaaccggaggaagtggagg

SEQ ID NO: 189580 - DNA, 25 bp, Probe Sequence
cggctggaaccatggagggtgtaga

SEQ ID NO: 189581 - DNA, 25 bp, Probe Sequence
ctggtggacccatggatgaaggacc

SEQ ID NO: 189582 - DNA, 25 bp, Probe Sequence
ctgggtgtccgcaatgttgccagtg

SEQ ID NO: 189583 - DNA, 25 bp, Probe Sequence
ctgtgggctgtgccaagtgtgccca

SEQ ID NO: 189584 - DNA, 25 bp, Probe Sequence
ctgtgctgcctggcaaagtgggaga

SEQ ID NO: 189585 - DNA, 25 bp, Probe Sequence
ctgtgcagcgcagctactgatggca

SEQ ID NO: 189586 - DNA, 25 bp, Probe Sequence
ctgtgcactagccatagctggtgac

SEQ ID NO: 189587 - DNA, 25 bp, Probe Sequence
ctgtgatgccgccacacataggaga

SEQ ID NO: 189588 - DNA, 25 bp, Probe Sequence
ctgtgcatgtccctgcgatgggagt

SEQ ID NO: 189589 - DNA, 25 bp, Probe Sequence
ctgtgattgcgcacgtgggaatggc

SEQ ID NO: 189590 - DNA, 25 bp, Probe Sequence
ctgtgttgactgacgagccgagggg

SEQ ID NO: 189591 - DNA, 25 bp, Probe Sequence
ctgtgctcgcaaatgaagccggaga

SEQ ID NO: 189592 - DNA, 25 bp, Probe Sequence
ctgtgctgctgccttaacagggaag

SEQ ID NO: 189593 - DNA, 25 bp, Probe Sequence
ctgtgtgctgccttaggggttagga

SEQ ID NO: 189594 - DNA, 25 bp, Probe Sequence
ctgtgttcctattgctggtggggtg

SEQ ID NO: 189595 - DNA, 25 bp, Probe Sequence
ctgtgttcctattgctggtggggtg

SEQ ID NO: 189596 - DNA, 25 bp, Probe Sequence
ctgtgtcccatcatcgggtgggtga

SEQ ID NO: 189597 - DNA, 25 bp, Probe Sequence
ctggccccacgtgtgtggtgtttgt

SEQ ID NO: 189598 - DNA, 25 bp, Probe Sequence
ctggcagccagtcttttgaagttta

SEQ ID NO: 189599 - DNA, 25 bp, Probe Sequence
ctggcaggattcacttatgggtaaa

SEQ ID NO: 189600 - DNA, 25 bp, Probe Sequence
ctgtgaatatttcttgttggtacca

SEQ ID NO: 189601 - DNA, 25 bp, Probe Sequence
ctggattcagtgcaggtttggatac

SEQ ID NO: 189602 - DNA, 25 bp, Probe Sequence
ctgtgttcgtgtcttgcactggaat

SEQ ID NO: 189603 - DNA, 25 bp, Probe Sequence
ctggtccaaagagtgtccgatagat

SEQ ID NO: 189604 - DNA, 25 bp, Probe Sequence
ctggtccaaggaggttctgttatta

SEQ ID NO: 189605 - DNA, 25 bp, Probe Sequence
ctgtgtgtacaccagggatctgttt

SEQ ID NO: 189606 - DNA, 25 bp, Probe Sequence
ctggatataacttgggcacctcctg

SEQ ID NO: 189607 - DNA, 25 bp, Probe Sequence
ctggagcccctaggagatactcagg

SEQ ID NO: 189608 - DNA, 25 bp, Probe Sequence
ctgggccacccagtgaaagcaaagc

SEQ ID NO: 189609 - DNA, 25 bp, Probe Sequence
ctggttcccagcgcaaagaaggcca

SEQ ID NO: 189610 - DNA, 25 bp, Probe Sequence
ctggtatctcctctaagtaaggaag

SEQ ID NO: 189611 - DNA, 25 bp, Probe Sequence
ctgggatcccttttatgtatacttt

SEQ ID NO: 189612 - DNA, 25 bp, Probe Sequence
ctgtggatcctcggggatgtcttcc

SEQ ID NO: 189613 - DNA, 25 bp, Probe Sequence
ctgtgtttaaggccgtgtcattcaa

SEQ ID NO: 189614 - DNA, 25 bp, Probe Sequence
cgtgtttaatgatgatgactccgca

SEQ ID NO: 189615 - DNA, 25 bp, Probe Sequence
ctggatcttcacattgaactcaatg

SEQ ID NO: 189616 - DNA, 25 bp, Probe Sequence
ctgtgcctatcacctcttatgcaca

SEQ ID NO: 189617 - DNA, 25 bp, Probe Sequence
ctgtgtgctgtacttttacactcct

SEQ ID NO: 189618 - DNA, 25 bp, Probe Sequence
ctggtgcgtacattctgtagagttt

SEQ ID NO: 189619 - DNA, 25 bp, Probe Sequence
ctgtgtaggaagttgttggtagtca

SEQ ID NO: 189620 - DNA, 25 bp, Probe Sequence
ctgtgcgaggggctgctggaggagt

SEQ ID NO: 189621 - DNA, 25 bp, Probe Sequence
ctgtgcgaggggctgctggaggagt

SEQ ID NO: 189622 - DNA, 25 bp, Probe Sequence
ctgtgctagggacctgcagtggcag

SEQ ID NO: 189623 - DNA, 25 bp, Probe Sequence
ctgtgctagggacctgcagtggcag

SEQ ID NO: 189624 - DNA, 25 bp, Probe Sequence
ctgtgagggcgagctgcacgggaag

SEQ ID NO: 189625 - DNA, 25 bp, Probe Sequence
cgtgagactgactgatgcactagta

SEQ ID NO: 189626 - DNA, 25 bp, Probe Sequence
ctgtgcgacgagtttcagctggcca

SEQ ID NO: 189627 - DNA, 25 bp, Probe Sequence
ctgtgcagggatggtgctcagcagg

SEQ ID NO: 189628 - DNA, 25 bp, Probe Sequence
ctgtgcaggtgattggggctctgat

SEQ ID NO: 189629 - DNA, 25 bp, Probe Sequence
ctgtgcatgagtgtggagggtttat

SEQ ID NO: 189630 - DNA, 25 bp, Probe Sequence
ctgtgcatagtggtgcgcgcttgta

SEQ ID NO: 189631 - DNA, 25 bp, Probe Sequence
ctgtgcatgatcgtggtggtagcca

SEQ ID NO: 189632 - DNA, 25 bp, Probe Sequence
ctgtgctgagaggcctggtgctgcc

SEQ ID NO: 189633 - DNA, 25 bp, Probe Sequence
ctgtgctgaagtttgctgctgccac

SEQ ID NO: 189634 - DNA, 25 bp, Probe Sequence
ctgtgcatagcagatcatcttcacc

SEQ ID NO: 189635 - DNA, 25 bp, Probe Sequence
ctgtgcattgcattatggacagcac

SEQ ID NO: 189636 - DNA, 25 bp, Probe Sequence
ctgtgagtgataagtgtcagatcaa

SEQ ID NO: 189637 - DNA, 25 bp, Probe Sequence
ctgtgacatgcatttatgtaacaaa

SEQ ID NO: 189638 - DNA, 25 bp, Probe Sequence
ctggagttctttcaccacaagtttg

SEQ ID NO: 189639 - DNA, 25 bp, Probe Sequence
ctggtgattcttaccaatccacaat

SEQ ID NO: 189640 - DNA, 25 bp, Probe Sequence
ctgggtctgtctccaaaaaaagttg

SEQ ID NO: 189641 - DNA, 25 bp, Probe Sequence
ctgtggactgttccaccaacaaccc

SEQ ID NO: 189642 - DNA, 25 bp, Probe Sequence
ctgtgaacttcggacaagaacatcc

SEQ ID NO: 189643 - DNA, 25 bp, Probe Sequence
ctgtgacctgctgggaaggcaggct

SEQ ID NO: 189644 - DNA, 25 bp, Probe Sequence
ctgtgtctgagggcgaaggggccag

SEQ ID NO: 189645 - DNA, 25 bp, Probe Sequence
ctgtgcccgcgcggaagggagagca

SEQ ID NO: 189646 - DNA, 25 bp, Probe Sequence
ctgtgctccgcagcgtctaggaaag

SEQ ID NO: 189647 - DNA, 25 bp, Probe Sequence
ctggtctgacatgcctcacaagaaa

SEQ ID NO: 189648 - DNA, 25 bp, Probe Sequence
ctgtgacttcatgctctgataactg

SEQ ID NO: 189649 - DNA, 25 bp, Probe Sequence
ctgtgatctcactctcaggagacca

SEQ ID NO: 189650 - DNA, 25 bp, Probe Sequence
ctgtgatgccacacagagtggtctt

SEQ ID NO: 189651 - DNA, 25 bp, Probe Sequence
ctggtgccagcaccagtggcagctc

SEQ ID NO: 189652 - DNA, 25 bp, Probe Sequence
ctgtgttcagagtagtaagatgctt

SEQ ID NO: 189653 - DNA, 25 bp, Probe Sequence
ctgtggctgcaggggaccagatgct

SEQ ID NO: 189654 - DNA, 25 bp, Probe Sequence
ctgtggctgcaggggaccagatgct

SEQ ID NO: 189655 - DNA, 25 bp, Probe Sequence
ctgtgacgtgcaaggcagcctgagc

SEQ ID NO: 189656 - DNA, 25 bp, Probe Sequence
ctgtgttggaatgggcctgcagccc

SEQ ID NO: 189657 - DNA, 25 bp, Probe Sequence
ctgtgtgggacagggtacgcccagc

SEQ ID NO: 189658 - DNA, 25 bp, Probe Sequence
ctgtgggaagccaagtaccctcacc

SEQ ID NO: 189659 - DNA, 25 bp, Probe Sequence
ctgtgggaagccaagtaccctcacc

SEQ ID NO: 189660 - DNA, 25 bp, Probe Sequence
ctgtggggatgcgtggtgccccatc

SEQ ID NO: 189661 - DNA, 25 bp, Probe Sequence
ctgtgcggaagtagcttgcctcact

SEQ ID NO: 189662 - DNA, 25 bp, Probe Sequence
ctgggagccaggactgatcttccat

SEQ ID NO: 189663 - DNA, 25 bp, Probe Sequence
ctggatccagcaggacgatgggtct

SEQ ID NO: 189664 - DNA, 25 bp, Probe Sequence
ctgtgttgcagatgacaaggacctc

SEQ ID NO: 189665 - DNA, 25 bp, Probe Sequence
ctgtgtacaattctgaagacactca

SEQ ID NO: 189666 - DNA, 25 bp, Probe Sequence
ctgtgtaatttgttcaagataatga

SEQ ID NO: 189667 - DNA, 25 bp, Probe Sequence
ctgtgtttttgtgcatcaaatattg

SEQ ID NO: 189668 - DNA, 25 bp, Probe Sequence
cggtctctgttggccaaggacttga

SEQ ID NO: 189669 - DNA, 25 bp, Probe Sequence
ctggacctggctggccgggacctga

SEQ ID NO: 189670 - DNA, 25 bp, Probe Sequence
ctgtggcctcagctgcttgggaggc

SEQ ID NO: 189671 - DNA, 25 bp, Probe Sequence
ctgtggtcgctgctgtgatgtggag

SEQ ID NO: 189672 - DNA, 25 bp, Probe Sequence
ctgtggactccactgatgagaggca

SEQ ID NO: 189673 - DNA, 25 bp, Probe Sequence
ctgtggcacccaatgcttggtcaac

SEQ ID NO: 189674 - DNA, 25 bp, Probe Sequence
ctgtgaagccacattttccaacatg

SEQ ID NO: 189675 - DNA, 25 bp, Probe Sequence
ctggcaaccttattttactacacgc

SEQ ID NO: 189676 - DNA, 25 bp, Probe Sequence
gctgagaaccttctttacccaagat

SEQ ID NO: 189677 - DNA, 25 bp, Probe Sequence
ctggaaactttgatccacccagcag

SEQ ID NO: 189678 - DNA, 25 bp, Probe Sequence
ctggaagttgggttctcatccccac

SEQ ID NO: 189679 - DNA, 25 bp, Probe Sequence
ctgtgaattacgacttctcttgccc

SEQ ID NO: 189680 - DNA, 25 bp, Probe Sequence
ctggttttccttatcatgctgcacc

SEQ ID NO: 189681 - DNA, 25 bp, Probe Sequence
ctggttcctcttgtgtttgacacta

SEQ ID NO: 189682 - DNA, 25 bp, Probe Sequence
ctgtgttttttattcttggatacat

SEQ ID NO: 189683 - DNA, 25 bp, Probe Sequence
ctgggatttttattgtatatgttat

SEQ ID NO: 189684 - DNA, 25 bp, Probe Sequence
ctggggtcagtttacctctgtgtat

SEQ ID NO: 189685 - DNA, 25 bp, Probe Sequence
ctggggggcattaaagctgctgttt

SEQ ID NO: 189686 - DNA, 25 bp, Probe Sequence
cggtactggcagaaaagtcattttt

SEQ ID NO: 189687 - DNA, 25 bp, Probe Sequence
ctggtgcaaggagaagcgtcatttt

SEQ ID NO: 189688 - DNA, 25 bp, Probe Sequence
ctggaacgtgaagagctgtttggtt

SEQ ID NO: 189689 - DNA, 25 bp, Probe Sequence
ctggaaccatacatcaggataaggt

SEQ ID NO: 189690 - DNA, 25 bp, Probe Sequence
ctgtgacacgcagtgcaacagtgaa

SEQ ID NO: 189691 - DNA, 25 bp, Probe Sequence
ctgtgaccgcatcaagcagtcagca

SEQ ID NO: 189692 - DNA, 25 bp, Probe Sequence
ctgtgtccgcagcaacaacatctgc

SEQ ID NO: 189693 - DNA, 25 bp, Probe Sequence
ctggtcctggaatcagagactcctt

SEQ ID NO: 189694 - DNA, 25 bp, Probe Sequence
cggtctgggcttcaagacacccaag

SEQ ID NO: 189695 - DNA, 25 bp, Probe Sequence
tctcgtctgcggggccaaaacttaa

SEQ ID NO: 189696 - DNA, 25 bp, Probe Sequence
ctgggtggttagcattcaagttaag

SEQ ID NO: 189697 - DNA, 25 bp, Probe Sequence
cggattggttaaaaaatgcttcata

SEQ ID NO: 189698 - DNA, 25 bp, Probe Sequence
cggattggcctaatgaagaagttca

SEQ ID NO: 189699 - DNA, 25 bp, Probe Sequence
ctgggggcactaggactgacaatcc

SEQ ID NO: 189700 - DNA, 25 bp, Probe Sequence
ctgggtggccccactgatatatgca

SEQ ID NO: 189701 - DNA, 25 bp, Probe Sequence
ctgtggtcccactaatctgtgactg

SEQ ID NO: 189702 - DNA, 25 bp, Probe Sequence
ctgggccccaaaagagctagcagaa

SEQ ID NO: 189703 - DNA, 25 bp, Probe Sequence
ctgtgggtgccaagggcagccagcg

SEQ ID NO: 189704 - DNA, 25 bp, Probe Sequence
ctgtggttgtcggagaagctgcgcg

SEQ ID NO: 189705 - DNA, 25 bp, Probe Sequence
ctggtgtttgaggatgacgtgcgct

SEQ ID NO: 189706 - DNA, 25 bp, Probe Sequence
ctggtgatattgccagcagaccccc

SEQ ID NO: 189707 - DNA, 25 bp, Probe Sequence
ctgtggccattgatgcaagcctgac

SEQ ID NO: 189708 - DNA, 25 bp, Probe Sequence
ctgtggccatctacggcatcatcat

SEQ ID NO: 189709 - DNA, 25 bp, Probe Sequence
ctgtgtgcaactaactgactctgtt

SEQ ID NO: 189710 - DNA, 25 bp, Probe Sequence
ctgtggtatctcacgtttctgtaga

SEQ ID NO: 189711 - DNA, 25 bp, Probe Sequence
tcttggttctaaaggtacctacaag

SEQ ID NO: 189712 - DNA, 25 bp, Probe Sequence
ctggagttcaacaatggtacctaca

SEQ ID NO: 189713 - DNA, 25 bp, Probe Sequence
ctggcaccataacatggggccaaat

SEQ ID NO: 189714 - DNA, 25 bp, Probe Sequence
ctggactctactttgggtcccagat

SEQ ID NO: 189715 - DNA, 25 bp, Probe Sequence
ctggttatatcctctagttcctgat

SEQ ID NO: 189716 - DNA, 25 bp, Probe Sequence
ctggactactcctctgatggtttta

SEQ ID NO: 189717 - DNA, 25 bp, Probe Sequence
cggagtaatccaggtcggtttctat

SEQ ID NO: 189718 - DNA, 25 bp, Probe Sequence
cggtttgactcacggggatttccag

SEQ ID NO: 189719 - DNA, 25 bp, Probe Sequence
cgggtggaacagtcaacctttctag

SEQ ID NO: 189720 - DNA, 25 bp, Probe Sequence
ctgggggcaaattacactgtcctta

SEQ ID NO: 189721 - DNA, 25 bp, Probe Sequence
ctggggctgcattgtattctcaggc

SEQ ID NO: 189722 - DNA, 25 bp, Probe Sequence
ctgggcactgatttccctaggttta

SEQ ID NO: 189723 - DNA, 25 bp, Probe Sequence
ctgggactgaagacctaagctgatt

SEQ ID NO: 189724 - DNA, 25 bp, Probe Sequence
ctgtgtttcaataccatccactatg

SEQ ID NO: 189725 - DNA, 25 bp, Probe Sequence
ctgtggtccgtaggagccactatga

SEQ ID NO: 189726 - DNA, 25 bp, Probe Sequence
ctgtgagtgcaacagtgaccactgt

SEQ ID NO: 189727 - DNA, 25 bp, Probe Sequence
ctgtgggcaacactggtcctcagtg

SEQ ID NO: 189728 - DNA, 25 bp, Probe Sequence
cggcagagaagccatgcgttccagc

SEQ ID NO: 189729 - DNA, 25 bp, Probe Sequence
cggaagatcccacgattccgatcga

SEQ ID NO: 189730 - DNA, 25 bp, Probe Sequence
ctgtggacacccagttcatcgacga

SEQ ID NO: 189731 - DNA, 25 bp, Probe Sequence
ctggtgcccaggtgtacttgagctg

SEQ ID NO: 189732 - DNA, 25 bp, Probe Sequence
ctggtctgccgcaaattccgagacg

SEQ ID NO: 189733 - DNA, 25 bp, Probe Sequence
ctggttgtgcgcttaacgtgagggt

SEQ ID NO: 189734 - DNA, 25 bp, Probe Sequence
ctggttgtgcgcttaacgtgagggt

SEQ ID NO: 189735 - DNA, 25 bp, Probe Sequence
ctggactgacctaaacgtggaatgc

SEQ ID NO: 189736 - DNA, 25 bp, Probe Sequence
ctggtctggcagaaacacggacaaa

SEQ ID NO: 189737 - DNA, 25 bp, Probe Sequence
ctggtgcgggctgtccggaaatacc

SEQ ID NO: 189738 - DNA, 25 bp, Probe Sequence
cggcacggtctgatccggaaatatg

SEQ ID NO: 189739 - DNA, 25 bp, Probe Sequence
cggccaggtcatcaccattggcaat

SEQ ID NO: 189740 - DNA, 25 bp, Probe Sequence
cggccaggtcatcaccattggcaat

SEQ ID NO: 189741 - DNA, 25 bp, Probe Sequence
ctgtggccgcatggaaccttgagaa

SEQ ID NO: 189742 - DNA, 25 bp, Probe Sequence
ctgtggtcagtgcgacctgtgagga

SEQ ID NO: 189743 - DNA, 25 bp, Probe Sequence
ctgtggagcttttactctgttgtga

SEQ ID NO: 189744 - DNA, 25 bp, Probe Sequence
ctgtgttgctgtaccttagctgtgt

SEQ ID NO: 189745 - DNA, 25 bp, Probe Sequence
ctgtgtacatgctgtcttcagatct

SEQ ID NO: 189746 - DNA, 25 bp, Probe Sequence
ctgtgtcactcatgactgttgctac

SEQ ID NO: 189747 - DNA, 25 bp, Probe Sequence
ctgtgtacactccagctgtttgaag

SEQ ID NO: 189748 - DNA, 25 bp, Probe Sequence
ctgtgtacctaattatgtatagcag

SEQ ID NO: 189749 - DNA, 25 bp, Probe Sequence
ctgtgtcttctatttggcaaacagc

SEQ ID NO: 189750 - DNA, 25 bp, Probe Sequence
ctggttgcgcgtagttgctaacagc

SEQ ID NO: 189751 - DNA, 25 bp, Probe Sequence
ctggatcgatggtgttctcaacaac

SEQ ID NO: 189752 - DNA, 25 bp, Probe Sequence
ctggagccaggagcgttatcaacgc

SEQ ID NO: 189753 - DNA, 25 bp, Probe Sequence
ctggaggcggaggagtgcgggatcc

SEQ ID NO: 189754 - DNA, 25 bp, Probe Sequence
ctgggaggcggctttggatggtccg

SEQ ID NO: 189755 - DNA, 25 bp, Probe Sequence
ctgggaagggcagctgggggcagtg

SEQ ID NO: 189756 - DNA, 25 bp, Probe Sequence
ctgggccgtgactctgggtgagtcg

SEQ ID NO: 189757 - DNA, 25 bp, Probe Sequence
ctgggcttggactactcttatgatt

SEQ ID NO: 189758 - DNA, 25 bp, Probe Sequence
ctgggcttgctactatttgtaactc

SEQ ID NO: 189759 - DNA, 25 bp, Probe Sequence
ctggttctcatctttcttgatcaac

SEQ ID NO: 189760 - DNA, 25 bp, Probe Sequence
ctgggtgctcagtttctaccaacat

SEQ ID NO: 189761 - DNA, 25 bp, Probe Sequence
ctgggtgcataccagtcttaccaat

SEQ ID NO: 189762 - DNA, 25 bp, Probe Sequence
ctgggcgtagtagtgcctacctata

SEQ ID NO: 189763 - DNA, 25 bp, Probe Sequence
ctggactgagttttgccaaatgtta

SEQ ID NO: 189764 - DNA, 25 bp, Probe Sequence
ctggcaacacgtttgcaaaggtttt

SEQ ID NO: 189765 - DNA, 25 bp, Probe Sequence
ctggcactccaaactaagggcttct

SEQ ID NO: 189766 - DNA, 25 bp, Probe Sequence
ctggcatcctaaatcaacgggactt

SEQ ID NO: 189767 - DNA, 25 bp, Probe Sequence
ctggcattgccctcaacgaccactt

SEQ ID NO: 189768 - DNA, 25 bp, Probe Sequence
ctggcgcccaatacaaaacccatac

SEQ ID NO: 189769 - DNA, 25 bp, Probe Sequence
ctgggacacagagacagtacctgta

SEQ ID NO: 189770 - DNA, 25 bp, Probe Sequence
ctgggcagacaagacaggagctgtc

SEQ ID NO: 189771 - DNA, 25 bp, Probe Sequence
ctgtggccaagaggtgcttgaggtc

SEQ ID NO: 189772 - DNA, 25 bp, Probe Sequence
ctgtggccgagcagtatgtcagcgc

SEQ ID NO: 189773 - DNA, 25 bp, Probe Sequence
ctgtggtcccagctattcaggaggc

SEQ ID NO: 189774 - DNA, 25 bp, Probe Sequence
ctgtgggaccattccattcaggagc

SEQ ID NO: 189775 - DNA, 25 bp, Probe Sequence
ctggaagtctctctcttcatgtatc

SEQ ID NO: 189776 - DNA, 25 bp, Probe Sequence
ctggggtctttttatgcatttgcat

SEQ ID NO: 189777 - DNA, 25 bp, Probe Sequence
ctgggctgctgcattgtctagtttt

SEQ ID NO: 189778 - DNA, 25 bp, Probe Sequence
ctgtgtctgctcataagtacttgtg

SEQ ID NO: 189779 - DNA, 25 bp, Probe Sequence
ctgtgtccatgtgatgatgcccttt

SEQ ID NO: 189780 - DNA, 25 bp, Probe Sequence
ctggatcctgtcaattggccttaaa

SEQ ID NO: 189781 - DNA, 25 bp, Probe Sequence
cgtgatccttaaagactgctatata

SEQ ID NO: 189782 - DNA, 25 bp, Probe Sequence
ctgtgtcccaaaaggctgttcaaaa

SEQ ID NO: 189783 - DNA, 25 bp, Probe Sequence
ctgtgtcccaaagggcctctgagaa

SEQ ID NO: 189784 - DNA, 25 bp, Probe Sequence
ctgtgtcccaaagggcctctgagaa

SEQ ID NO: 189785 - DNA, 25 bp, Probe Sequence
ctggccacgaaagccgccaggaaaa

SEQ ID NO: 189786 - DNA, 25 bp, Probe Sequence
cgtgcaacggaagccaggccaactg

SEQ ID NO: 189787 - DNA, 25 bp, Probe Sequence
cggcatagggacctaaggcccactg

SEQ ID NO: 189788 - DNA, 25 bp, Probe Sequence
gctggtggggaccaaatgttacctg

SEQ ID NO: 189789 - DNA, 25 bp, Probe Sequence
ctggggatgtccccaatgctgtacc

SEQ ID NO: 189790 - DNA, 25 bp, Probe Sequence
ctggtagatgtccatgcccatgtgc

SEQ ID NO: 189791 - DNA, 25 bp, Probe Sequence
ctgtgtaggtaaccagatggctctt

SEQ ID NO: 189792 - DNA, 25 bp, Probe Sequence
ctgtgtgagatggagcccgtggcac

SEQ ID NO: 189793 - DNA, 25 bp, Probe Sequence
ctgtgtaacatccccgtgacgggac

SEQ ID NO: 189794 - DNA, 25 bp, Probe Sequence
ctggtatatcttcatcagtgacgag

SEQ ID NO: 189795 - DNA, 25 bp, Probe Sequence
ctggtgatacctcacattcaatgcc

SEQ ID NO: 189796 - DNA, 25 bp, Probe Sequence
ctgtgtgtgacctcgcatatgtatg

SEQ ID NO: 189797 - DNA, 25 bp, Probe Sequence
ctgggtgcaggctggcattgtgagc

SEQ ID NO: 189798 - DNA, 25 bp, Probe Sequence
ctgggaggcagaggttgcagtgagc

SEQ ID NO: 189799 - DNA, 25 bp, Probe Sequence
ctgggcggcagcgactgcagagtga

SEQ ID NO: 189800 - DNA, 25 bp, Probe Sequence
ctgtggtgcgagccagtgcaggaga

SEQ ID NO: 189801 - DNA, 25 bp, Probe Sequence
ctggcattgccgacaggatgcagaa

SEQ ID NO: 189802 - DNA, 25 bp, Probe Sequence
ctggccatgcctaatatagcagtag

SEQ ID NO: 189803 - DNA, 25 bp, Probe Sequence
ctgggcaggctcttcaagtgtggcc

SEQ ID NO: 189804 - DNA, 25 bp, Probe Sequence
ctggaaggtctgaccacgggctggg

SEQ ID NO: 189805 - DNA, 25 bp, Probe Sequence
ctggaaggttattacctaatggaga

SEQ ID NO: 189806 - DNA, 25 bp, Probe Sequence
ctggaaagaaactatccgagggaag

SEQ ID NO: 189807 - DNA, 25 bp, Probe Sequence
cggcgaaagaaggaacgagttgaag

SEQ ID NO: 189808 - DNA, 25 bp, Probe Sequence
ctggcgaaaaatccaaagggcaaag

SEQ ID NO: 189809 - DNA, 25 bp, Probe Sequence
ctgggcaaggaatcccgggccaaga

SEQ ID NO: 189810 - DNA, 25 bp, Probe Sequence
ctgggcaaggattggcaccggccct

SEQ ID NO: 189811 - DNA, 25 bp, Probe Sequence
ctggggagtacatcatcctgtgctc

SEQ ID NO: 189812 - DNA, 25 bp, Probe Sequence
ctgggtaccacttctgcagtggctc

SEQ ID NO: 189813 - DNA, 25 bp, Probe Sequence
ctggttcgacctttgcagataccca

SEQ ID NO: 189814 - DNA, 25 bp, Probe Sequence
ctggttggtcctttcagtgaacaaa

SEQ ID NO: 189815 - DNA, 25 bp, Probe Sequence
ctggttttgttttatgctgaaagta

SEQ ID NO: 189816 - DNA, 25 bp, Probe Sequence
cggcggttggtcagtgtgaatttgt

SEQ ID NO: 189817 - DNA, 25 bp, Probe Sequence
ctgtggggtggggctgttgatattt

SEQ ID NO: 189818 - DNA, 25 bp, Probe Sequence
ctgtgggtggtgattgcttaattct

SEQ ID NO: 189819 - DNA, 25 bp, Probe Sequence
ctgggccgagttgtgcatataatcc

SEQ ID NO: 189820 - DNA, 25 bp, Probe Sequence
ctgggcgcaagcacagtgattgaat

SEQ ID NO: 189821 - DNA, 25 bp, Probe Sequence
ctgggaatgccataggattttttgt

SEQ ID NO: 189822 - DNA, 25 bp, Probe Sequence
ctgggattccagtagcaattttcat

SEQ ID NO: 189823 - DNA, 25 bp, Probe Sequence
ctgggaaacaaacgatatatctcat

SEQ ID NO: 189824 - DNA, 25 bp, Probe Sequence
ctggagaaactccacgatcttcctg

SEQ ID NO: 189825 - DNA, 25 bp, Probe Sequence
ctgggaaacctgggaatctgccctc

SEQ ID NO: 189826 - DNA, 25 bp, Probe Sequence
ctgggtaacacggcgagaccctgtc

SEQ ID NO: 189827 - DNA, 25 bp, Probe Sequence
ctggggaaagcgggaagcgctcgct

SEQ ID NO: 189828 - DNA, 25 bp, Probe Sequence
ctgggaaagggcacggcctgtgctc

SEQ ID NO: 189829 - DNA, 25 bp, Probe Sequence
ctgggtacaaggaattctcctgtct

SEQ ID NO: 189830 - DNA, 25 bp, Probe Sequence
ctgggtaaagcactatgtctgggtt

SEQ ID NO: 189831 - DNA, 25 bp, Probe Sequence
ctggtttctagacttgtgctgatcg

SEQ ID NO: 189832 - DNA, 25 bp, Probe Sequence
ctggtatttaatgctgatctactat

SEQ ID NO: 189833 - DNA, 25 bp, Probe Sequence
ctggtatttagagcgcagcggctga

SEQ ID NO: 189834 - DNA, 25 bp, Probe Sequence
ctggtctttgaagtgcagcagccct

SEQ ID NO: 189835 - DNA, 25 bp, Probe Sequence
ctggtttgtggaccctccaattaga

SEQ ID NO: 189836 - DNA, 25 bp, Probe Sequence
ctgggagttgtacccaacagtctca

SEQ ID NO: 189837 - DNA, 25 bp, Probe Sequence
ctggtgttttaccacagaccccagc

SEQ ID NO: 189838 - DNA, 25 bp, Probe Sequence
ctgggtttgtttacagcaattcctg

SEQ ID NO: 189839 - DNA, 25 bp, Probe Sequence
cggcgccagtgaaataccactacct

SEQ ID NO: 189840 - DNA, 25 bp, Probe Sequence
ctggtggctggaattgaccgctacc

SEQ ID NO: 189841 - DNA, 25 bp, Probe Sequence
ctggtggctgggattcagatgccac

SEQ ID NO: 189842 - DNA, 25 bp, Probe Sequence
ctgggactgtggagctggatgacca

SEQ ID NO: 189843 - DNA, 25 bp, Probe Sequence
ctgggacgctggttctagaggcagc

SEQ ID NO: 189844 - DNA, 25 bp, Probe Sequence
ctgggaactggtgtagctgcaagga

SEQ ID NO: 189845 - DNA, 25 bp, Probe Sequence
ctgggcagacgatcacgactcaaaa

SEQ ID NO: 189846 - DNA, 25 bp, Probe Sequence
ctggtgagccggtcaggcacacaag

SEQ ID NO: 189847 - DNA, 25 bp, Probe Sequence
ctgggaggtgtttggcatcgtcagc

SEQ ID NO: 189848 - DNA, 25 bp, Probe Sequence
ctggctgcagggtctaggaggtaag

SEQ ID NO: 189849 - DNA, 25 bp, Probe Sequence
ctggcacgggtgtcgaggcaggaag

SEQ ID NO: 189850 - DNA, 25 bp, Probe Sequence
cccacagggcactgaggggcaacag

SEQ ID NO: 189851 - DNA, 25 bp, Probe Sequence
ctggaagggccccagtgaggcccca

SEQ ID NO: 189852 - DNA, 25 bp, Probe Sequence
ctgggaggtgggggtgagcccctca

SEQ ID NO: 189853 - DNA, 25 bp, Probe Sequence
ctgggaggtgggggtgagcccctca

SEQ ID NO: 189854 - DNA, 25 bp, Probe Sequence
ctggggtgtgggctgtggccagaag

SEQ ID NO: 189855 - DNA, 25 bp, Probe Sequence
ctgggggtgctgaggagagccgagt

SEQ ID NO: 189856 - DNA, 25 bp, Probe Sequence
ctgggctggtgtggctgctgaagcc

SEQ ID NO: 189857 - DNA, 25 bp, Probe Sequence
ctgggatgtattatctgcacagacc

SEQ ID NO: 189858 - DNA, 25 bp, Probe Sequence
ctgggagtaccagttccagcaccag

SEQ ID NO: 189859 - DNA, 25 bp, Probe Sequence
cggagcaatacctttctgtacccgt

SEQ ID NO: 189860 - DNA, 25 bp, Probe Sequence
cggaaaacatcctctgtgagcaccc

SEQ ID NO: 189861 - DNA, 25 bp, Probe Sequence
ctggtaaacattccacgggacactg

SEQ ID NO: 189862 - DNA, 25 bp, Probe Sequence
cgtgtcttaagtaacagggaccaga

SEQ ID NO: 189863 - DNA, 25 bp, Probe Sequence
cgtactgattagtcaacagtggaaa

SEQ ID NO: 189864 - DNA, 25 bp, Probe Sequence
cggcattgtattccaaagacgacaa

SEQ ID NO: 189865 - DNA, 25 bp, Probe Sequence
ctggaatgtacacaagatgcggaaa

SEQ ID NO: 189866 - DNA, 25 bp, Probe Sequence
ctggcatccaactcaaggctgtgaa

SEQ ID NO: 189867 - DNA, 25 bp, Probe Sequence
ctggccgaacatcaagggatcatat

SEQ ID NO: 189868 - DNA, 25 bp, Probe Sequence
cggcccaggcatcctgggtttcacc

SEQ ID NO: 189869 - DNA, 25 bp, Probe Sequence
cggcctagaaggcgggctgtactga

SEQ ID NO: 189870 - DNA, 25 bp, Probe Sequence
cctgcttaaagtccacacgttatta

SEQ ID NO: 189871 - DNA, 25 bp, Probe Sequence
cctcattaaagcagccggtgtaaat

SEQ ID NO: 189872 - DNA, 25 bp, Probe Sequence
ccgatgatgtaaccctgcatgactt

SEQ ID NO: 189873 - DNA, 25 bp, Probe Sequence
gccggagtaactgtgtccttgaaac

SEQ ID NO: 189874 - DNA, 25 bp, Probe Sequence
gctggggttactgttccctatggaa

SEQ ID NO: 189875 - DNA, 25 bp, Probe Sequence
ctggggttactgcctttgtttggca

SEQ ID NO: 189876 - DNA, 25 bp, Probe Sequence
ctggggtttgggaatgtgctttgtg

SEQ ID NO: 189877 - DNA, 25 bp, Probe Sequence
ctggctgtgttctggtgaggccttg

SEQ ID NO: 189878 - DNA, 25 bp, Probe Sequence
ctggatgttagctgtgttggccttt

SEQ ID NO: 189879 - DNA, 25 bp, Probe Sequence
ctgggcttcagcaggtgtgactccc

SEQ ID NO: 189880 - DNA, 25 bp, Probe Sequence
ctgggctgtagggtgagtggcttgc

SEQ ID NO: 189881 - DNA, 25 bp, Probe Sequence
ctgggatttgaggatggatcagttc

SEQ ID NO: 189882 - DNA, 25 bp, Probe Sequence
ctggcagttcactgtggacagtttg

SEQ ID NO: 189883 - DNA, 25 bp, Probe Sequence
ctggattccatttgggtcagcctgg

SEQ ID NO: 189884 - DNA, 25 bp, Probe Sequence
ctggatctgctgtttgaagcgcagc

SEQ ID NO: 189885 - DNA, 25 bp, Probe Sequence
ctggtctgcgtgcataaccagctgc

SEQ ID NO: 189886 - DNA, 25 bp, Probe Sequence
ctggtctgagtgctctagcacctgc

SEQ ID NO: 189887 - DNA, 25 bp, Probe Sequence
ctggggcagtagtcatggcagactc

SEQ ID NO: 189888 - DNA, 25 bp, Probe Sequence
ctgtggctcctagtgatgtggactc

SEQ ID NO: 189889 - DNA, 25 bp, Probe Sequence
ctgtggagcctgaggatgaggtcaa

SEQ ID NO: 189890 - DNA, 25 bp, Probe Sequence
ctggaggatccagggatgaggatag

SEQ ID NO: 189891 - DNA, 25 bp, Probe Sequence
ctggaggttctggatgaaggctgaa

SEQ ID NO: 189892 - DNA, 25 bp, Probe Sequence
ctggaggttggggatatgactgaca

SEQ ID NO: 189893 - DNA, 25 bp, Probe Sequence
ctgggaggtagaggttgcagtgagc

SEQ ID NO: 189894 - DNA, 25 bp, Probe Sequence
ctgggagcagcctagggagagcccc

SEQ ID NO: 189895 - DNA, 25 bp, Probe Sequence
ctggagaagccaaggggagagtcta

SEQ ID NO: 189896 - DNA, 25 bp, Probe Sequence
ctgggagagacttgggtcagactta

SEQ ID NO: 189897 - DNA, 25 bp, Probe Sequence
ctgggagacccaggttagagcttag

SEQ ID NO: 189898 - DNA, 25 bp, Probe Sequence
ctgggggctggaagttagacattag

SEQ ID NO: 189899 - DNA, 25 bp, Probe Sequence
ctgggaggcatgacaagtaaagaaa

SEQ ID NO: 189900 - DNA, 25 bp, Probe Sequence
ctggtggcccactagtacaagaaga

SEQ ID NO: 189901 - DNA, 25 bp, Probe Sequence
ctgggcacccattctgtacagggag

SEQ ID NO: 189902 - DNA, 25 bp, Probe Sequence
ctgggcacaccattttgatcattaa

SEQ ID NO: 189903 - DNA, 25 bp, Probe Sequence
ctggccaaccatttcttattcaaat

SEQ ID NO: 189904 - DNA, 25 bp, Probe Sequence
ctggcgatacttctttagtagacat

SEQ ID NO: 189905 - DNA, 25 bp, Probe Sequence
ctggctgtataactcttacagtagt

SEQ ID NO: 189906 - DNA, 25 bp, Probe Sequence
ctggtcttcaatggttagcagaagg

SEQ ID NO: 189907 - DNA, 25 bp, Probe Sequence
ctggtcttcaatggttagcagaagg

SEQ ID NO: 189908 - DNA, 25 bp, Probe Sequence
ctggtcttaaacatgagggagcgtg

SEQ ID NO: 189909 - DNA, 25 bp, Probe Sequence
ctgggcattcaggaccttgaggaca

SEQ ID NO: 189910 - DNA, 25 bp, Probe Sequence
cggcgttacagagcctggtgaagga

SEQ ID NO: 189911 - DNA, 25 bp, Probe Sequence
ctgggtggacacagccttgtggaag

SEQ ID NO: 189912 - DNA, 25 bp, Probe Sequence
ctgggatggaggagccctaggccag

SEQ ID NO: 189913 - DNA, 25 bp, Probe Sequence
ctggctttgggttgtccggagccag

SEQ ID NO: 189914 - DNA, 25 bp, Probe Sequence
ctggcctttactggatcccaaaagc

SEQ ID NO: 189915 - DNA, 25 bp, Probe Sequence
ctggtgtctatattcttctctcaaa

SEQ ID NO: 189916 - DNA, 25 bp, Probe Sequence
ctggcttctctatattcccaaattc

SEQ ID NO: 189917 - DNA, 25 bp, Probe Sequence
ctggcatttaattacccaatactgt

SEQ ID NO: 189918 - DNA, 25 bp, Probe Sequence
ctggatgtttatcacccaagcctat

SEQ ID NO: 189919 - DNA, 25 bp, Probe Sequence
ctggagtttcaataccggagatcat

SEQ ID NO: 189920 - DNA, 25 bp, Probe Sequence
ctggtttttcagcacttgggattgg

SEQ ID NO: 189921 - DNA, 25 bp, Probe Sequence
cgagttgtttcctcgctgatcgatt

SEQ ID NO: 189922 - DNA, 25 bp, Probe Sequence
cgtgtctgttcaaaccggcacggtc

SEQ ID NO: 189923 - DNA, 25 bp, Probe Sequence
cgttctgctttcacacggcagtgtg

SEQ ID NO: 189924 - DNA, 25 bp, Probe Sequence
cggtttggacaggcacggatggtga

SEQ ID NO: 189925 - DNA, 25 bp, Probe Sequence
cggctgtattaatcacgcgatgttg

SEQ ID NO: 189926 - DNA, 25 bp, Probe Sequence
ctggtgtggtattgtgcccgatgta

SEQ ID NO: 189927 - DNA, 25 bp, Probe Sequence
ctgggaggcttatctcactgagtga

SEQ ID NO: 189928 - DNA, 25 bp, Probe Sequence
ctgggcaacttcttctgcattagga

SEQ ID NO: 189929 - DNA, 25 bp, Probe Sequence
ctgggcaatttctatatcaggacag

SEQ ID NO: 189930 - DNA, 25 bp, Probe Sequence
ctgggagcactttgataaggacggc

SEQ ID NO: 189931 - DNA, 25 bp, Probe Sequence
ctgggagcactttgataaggacggc

SEQ ID NO: 189932 - DNA, 25 bp, Probe Sequence
ctggggtctgtacagcaggatctgg

SEQ ID NO: 189933 - DNA, 25 bp, Probe Sequence
ctgggactttggcactggtgctgga

SEQ ID NO: 189934 - DNA, 25 bp, Probe Sequence
ctggtacacgggcgagggcatggac

SEQ ID NO: 189935 - DNA, 25 bp, Probe Sequence
ctgggatcctggggggagggaggca

SEQ ID NO: 189936 - DNA, 25 bp, Probe Sequence
cggcgacacgagagagacgggcggt

SEQ ID NO: 189937 - DNA, 25 bp, Probe Sequence
ctgggctcaaagctgaactggggag

SEQ ID NO: 189938 - DNA, 25 bp, Probe Sequence
cgtgaagacaagctgggctggggag

SEQ ID NO: 189939 - DNA, 25 bp, Probe Sequence
ctggcagatgactcactgtgggggg

SEQ ID NO: 189940 - DNA, 25 bp, Probe Sequence
ctggtgccacagtcacgtgggggaa

SEQ ID NO: 189941 - DNA, 25 bp, Probe Sequence
ctggggcctacatctgtggagagga

SEQ ID NO: 189942 - DNA, 25 bp, Probe Sequence
ctggaggccaccaagtggggtggaa

SEQ ID NO: 189943 - DNA, 25 bp, Probe Sequence
ctgggacccagcgattgaggggtca

SEQ ID NO: 189944 - DNA, 25 bp, Probe Sequence
ctgggagcccagattagcaagatta

SEQ ID NO: 189945 - DNA, 25 bp, Probe Sequence
ctgggtgctccactgattggaggat

SEQ ID NO: 189946 - DNA, 25 bp, Probe Sequence
ctgggtctgcaactttggaaaactc

SEQ ID NO: 189947 - DNA, 25 bp, Probe Sequence
ctggtggtccaccattggataaacc

SEQ ID NO: 189948 - DNA, 25 bp, Probe Sequence
ctgggtggccactcaggcaaatcac

SEQ ID NO: 189949 - DNA, 25 bp, Probe Sequence
ctggttggtgactgaggcagcaaga

SEQ ID NO: 189950 - DNA, 25 bp, Probe Sequence
ctggctggggacaaagtgacaactt

SEQ ID NO: 189951 - DNA, 25 bp, Probe Sequence
ctggctggggacaaagtgacaactt

SEQ ID NO: 189952 - DNA, 25 bp, Probe Sequence
ctggcatttcagtccaaggaagctc

SEQ ID NO: 189953 - DNA, 25 bp, Probe Sequence
cggattctagtgacagggggctctg

SEQ ID NO: 189954 - DNA, 25 bp, Probe Sequence
ctggtcactcattgacagggctggc

SEQ ID NO: 189955 - DNA, 25 bp, Probe Sequence
ctggtcactgtgaatcagtgccggc

SEQ ID NO: 189956 - DNA, 25 bp, Probe Sequence
ctggtacagagaatcagctcgcccc

SEQ ID NO: 189957 - DNA, 25 bp, Probe Sequence
ctggtacagaagatgtcgtccgagt

SEQ ID NO: 189958 - DNA, 25 bp, Probe Sequence
ctgggaaaaattgcattcctgtgtg

SEQ ID NO: 189959 - DNA, 25 bp, Probe Sequence
cggacgaaaagctcatccgcgtgtc

SEQ ID NO: 189960 - DNA, 25 bp, Probe Sequence
ctggcagcgaaaagaccccggaagg

SEQ ID NO: 189961 - DNA, 25 bp, Probe Sequence
ctggagcgacactgacagccagggg

SEQ ID NO: 189962 - DNA, 25 bp, Probe Sequence
ctggagcgacactgacagccagggg

SEQ ID NO: 189963 - DNA, 25 bp, Probe Sequence
ctggtagagccaggcacccagtgtg

SEQ ID NO: 189964 - DNA, 25 bp, Probe Sequence
ctgggaatacaggcacgccaccatg

SEQ ID NO: 189965 - DNA, 25 bp, Probe Sequence
ctggtggtagctgcagcagcccttg

SEQ ID NO: 189966 - DNA, 25 bp, Probe Sequence
ctgggagaactccaatgctgaatgg

SEQ ID NO: 189967 - DNA, 25 bp, Probe Sequence
ctgggagacgtcaagggcaatggca

SEQ ID NO: 189968 - DNA, 25 bp, Probe Sequence
ctgggagacagtgtttgcagtgagc

SEQ ID NO: 189969 - DNA, 25 bp, Probe Sequence
ctgggacgagggctgtgcccagccc

SEQ ID NO: 189970 - DNA, 25 bp, Probe Sequence
ctgggatatgagccggtggccgtgt

SEQ ID NO: 189971 - DNA, 25 bp, Probe Sequence
ctgggtactgggcatgtgcctgtct

SEQ ID NO: 189972 - DNA, 25 bp, Probe Sequence
ctggggaggggcaagggctactatg

SEQ ID NO: 189973 - DNA, 25 bp, Probe Sequence
ctgggagagtgggcaagtcctcagc

SEQ ID NO: 189974 - DNA, 25 bp, Probe Sequence
ctggtgcacaggcctgtagtcccag

SEQ ID NO: 189975 - DNA, 25 bp, Probe Sequence
ctggaagggcttcgagttctcggtg

SEQ ID NO: 189976 - DNA, 25 bp, Probe Sequence
ctggaagggcttcgagttctcggtg

SEQ ID NO: 189977 - DNA, 25 bp, Probe Sequence
ctggaatggttgttgttttccactg

SEQ ID NO: 189978 - DNA, 25 bp, Probe Sequence
ctggacttttgctgtttgacatcct

SEQ ID NO: 189979 - DNA, 25 bp, Probe Sequence
ctggatcttttgacgtggttcacgt

SEQ ID NO: 189980 - DNA, 25 bp, Probe Sequence
cggcaggtttgaagctgcttcttcg

SEQ ID NO: 189981 - DNA, 25 bp, Probe Sequence
ctggcatgtgtggtgtagtttctaa

SEQ ID NO: 189982 - DNA, 25 bp, Probe Sequence
ctggcagttgcctatgtttagcaaa

SEQ ID NO: 189983 - DNA, 25 bp, Probe Sequence
ctggctttgccttggctttgcaagg

SEQ ID NO: 189984 - DNA, 25 bp, Probe Sequence
cggctttcctcagcaagctgtggac

SEQ ID NO: 189985 - DNA, 25 bp, Probe Sequence
ctggctttaaaccaactgggactca

SEQ ID NO: 189986 - DNA, 25 bp, Probe Sequence
ctggtttaacccttctgataggtag

SEQ ID NO: 189987 - DNA, 25 bp, Probe Sequence
ctggtttagtctgcagtctccgaga

SEQ ID NO: 189988 - DNA, 25 bp, Probe Sequence
ctgggattatcaggcacagttgctc

SEQ ID NO: 189989 - DNA, 25 bp, Probe Sequence
ctggatgattttgtagttctatttt

SEQ ID NO: 189990 - DNA, 25 bp, Probe Sequence
ctggttgtgtatgctttgtctttta

SEQ ID NO: 189991 - DNA, 25 bp, Probe Sequence
cggtctggaaactatcgatttgatc

SEQ ID NO: 189992 - DNA, 25 bp, Probe Sequence
ctggcagctggagaacatggtttaa

SEQ ID NO: 189993 - DNA, 25 bp, Probe Sequence
ctggattgacaaaatcatgaggctc

SEQ ID NO: 189994 - DNA, 25 bp, Probe Sequence
ctggccatgaactttcatgaggtcc

SEQ ID NO: 189995 - DNA, 25 bp, Probe Sequence
ctggcacaataattttatggttatg

SEQ ID NO: 189996 - DNA, 25 bp, Probe Sequence
ctggcccgaacattctacgtattag

SEQ ID NO: 189997 - DNA, 25 bp, Probe Sequence
ctggcttgcagaaaatccagaaaat

SEQ ID NO: 189998 - DNA, 25 bp, Probe Sequence
ctggtggctggcaagctcaagaaag

SEQ ID NO: 189999 - DNA, 25 bp, Probe Sequence
ctggtgcagcttgaatcttggtagc

SEQ ID NO: 190000 - DNA, 25 bp, Probe Sequence
ctggtctgttgtatctctagtcagt

SEQ ID NO: 190001 - DNA, 25 bp, Probe Sequence
ctggatatggagtatgttttgctat

SEQ ID NO: 190002 - DNA, 25 bp, Probe Sequence
ctggcaatgccagtgagtttctgta

SEQ ID NO: 190003 - DNA, 25 bp, Probe Sequence
ctggcagagccagtgtgttggggta

SEQ ID NO: 190004 - DNA, 25 bp, Probe Sequence
ctggcggcgaaccttgggactaagg

SEQ ID NO: 190005 - DNA, 25 bp, Probe Sequence
ctggggcgaaggagtggactggagc

SEQ ID NO: 190006 - DNA, 25 bp, Probe Sequence
ctggggcgaaggctgtgctcaaagg

SEQ ID NO: 190007 - DNA, 25 bp, Probe Sequence
ctggagtaaatggttggctctacgg

SEQ ID NO: 190008 - DNA, 25 bp, Probe Sequence
ctggatctcaaagggctgcattctg

SEQ ID NO: 190009 - DNA, 25 bp, Probe Sequence
ctggtctgcattggggtgctggatg

SEQ ID NO: 190010 - DNA, 25 bp, Probe Sequence
ctggattcttgaaggcagtggatga

SEQ ID NO: 190011 - DNA, 25 bp, Probe Sequence
cagctggggcccgagagatggtggc

SEQ ID NO: 190012 - DNA, 25 bp, Probe Sequence
ctggtgatttagccaggtgtcccca

SEQ ID NO: 190013 - DNA, 25 bp, Probe Sequence
cggacatttatacctatggccccgg

SEQ ID NO: 190014 - DNA, 25 bp, Probe Sequence
ctggatcatttatgcctatgacaga

SEQ ID NO: 190015 - DNA, 25 bp, Probe Sequence
cgtgtctgctcaaggatccaatcaa

SEQ ID NO: 190016 - DNA, 25 bp, Probe Sequence
ctggtcatcatcaaggagtacatca

SEQ ID NO: 190017 - DNA, 25 bp, Probe Sequence
ctggttctcaagaaaatcatcataa

SEQ ID NO: 190018 - DNA, 25 bp, Probe Sequence
ctggatcccggcagaagctatgaaa

SEQ ID NO: 190019 - DNA, 25 bp, Probe Sequence
ctgggtccatggctggcagtggaaa

SEQ ID NO: 190020 - DNA, 25 bp, Probe Sequence
ctggaccctgagaaccagggggaca

SEQ ID NO: 190021 - DNA, 25 bp, Probe Sequence
ctggtcacccagacacaaagatggg

SEQ ID NO: 190022 - DNA, 25 bp, Probe Sequence
ctggatcaccgacagcacagacaga

SEQ ID NO: 190023 - DNA, 25 bp, Probe Sequence
ctggtcctcagtcagcctgatgagg

SEQ ID NO: 190024 - DNA, 25 bp, Probe Sequence
ctggcatcccagccaggttcagtgg

SEQ ID NO: 190025 - DNA, 25 bp, Probe Sequence
ctggtcatccagcaggtgttcgaca

SEQ ID NO: 190026 - DNA, 25 bp, Probe Sequence
ctggccatacagctaggtattccca

SEQ ID NO: 190027 - DNA, 25 bp, Probe Sequence
ctggcagctgaactcgggtagtcca

SEQ ID NO: 190028 - DNA, 25 bp, Probe Sequence
ctggcggaactactttgagagcacc

SEQ ID NO: 190029 - DNA, 25 bp, Probe Sequence
ctggatggaaactacttgaagccgc

SEQ ID NO: 190030 - DNA, 25 bp, Probe Sequence
ctggaggtaattggctaaccagcca

SEQ ID NO: 190031 - DNA, 25 bp, Probe Sequence
ctggtggtatctgaggtgaccacat

SEQ ID NO: 190032 - DNA, 25 bp, Probe Sequence
ctggcctatatatcagggaccacat

SEQ ID NO: 190033 - DNA, 25 bp, Probe Sequence
ctggagatgtgattacagggcatga

SEQ ID NO: 190034 - DNA, 25 bp, Probe Sequence
ctggaggcatcacatgctggtgctg

SEQ ID NO: 190035 - DNA, 25 bp, Probe Sequence
ctggatggcatccgaattgtctgga

SEQ ID NO: 190036 - DNA, 25 bp, Probe Sequence
ctggatgagcaacacattacatgta

SEQ ID NO: 190037 - DNA, 25 bp, Probe Sequence
ctggtacaagcaccttatctatcac

SEQ ID NO: 190038 - DNA, 25 bp, Probe Sequence
ctggtaagagagttgtcactactag

SEQ ID NO: 190039 - DNA, 25 bp, Probe Sequence
ctggccaagggaggtgccaacactg

SEQ ID NO: 190040 - DNA, 25 bp, Probe Sequence
ctgggtagtggacagcgcagaccgc

SEQ ID NO: 190041 - DNA, 25 bp, Probe Sequence
ctggtggaagggtcagcggagcccc

SEQ ID NO: 190042 - DNA, 25 bp, Probe Sequence
cgtctgcgaagggacgggctgcggg

SEQ ID NO: 190043 - DNA, 25 bp, Probe Sequence
cggccgttggctgagggtgggagcc

SEQ ID NO: 190044 - DNA, 25 bp, Probe Sequence
ctggcttggtctgccagacgtgggg

SEQ ID NO: 190045 - DNA, 25 bp, Probe Sequence
ctggtttgactccgctggaggtggg

SEQ ID NO: 190046 - DNA, 25 bp, Probe Sequence
ctggccttgaacgagtgcgggctgg

SEQ ID NO: 190047 - DNA, 25 bp, Probe Sequence
ctggagattaacgtactgtggctgc

SEQ ID NO: 190048 - DNA, 25 bp, Probe Sequence
ctggaatcccagctacttgagaggc

SEQ ID NO: 190049 - DNA, 25 bp, Probe Sequence
ctggttccatagccaacactggggc

SEQ ID NO: 190050 - DNA, 25 bp, Probe Sequence
ctggtttcagagacatcctgctgcg

SEQ ID NO: 190051 - DNA, 25 bp, Probe Sequence
ctggttctgccattcaccatggcat

SEQ ID NO: 190052 - DNA, 25 bp, Probe Sequence
ctggctggctatttcatccatggag

SEQ ID NO: 190053 - DNA, 25 bp, Probe Sequence
ctggtgctcctctttcacaggagat

SEQ ID NO: 190054 - DNA, 25 bp, Probe Sequence
ctggggccgagatcacagtgatggc

SEQ ID NO: 190055 - DNA, 25 bp, Probe Sequence
ctggggaatgtgtcccctgcatatc

SEQ ID NO: 190056 - DNA, 25 bp, Probe Sequence
ctggggcaagtggcttcattcataa

SEQ ID NO: 190057 - DNA, 25 bp, Probe Sequence
ctggaaagggtcaatgattctagaa

SEQ ID NO: 190058 - DNA, 25 bp, Probe Sequence
cggaatgggtactgtctaggaggac

SEQ ID NO: 190059 - DNA, 25 bp, Probe Sequence
ctggggaggacggtgtctaggaggg

SEQ ID NO: 190060 - DNA, 25 bp, Probe Sequence
ctggtggaggccattgtcttgccaa

SEQ ID NO: 190061 - DNA, 25 bp, Probe Sequence
ctgggtggtgccagctgatctatca

SEQ ID NO: 190062 - DNA, 25 bp, Probe Sequence
ctggtgtggctggtcgtaaacagtt

SEQ ID NO: 190063 - DNA, 25 bp, Probe Sequence
cggtttctctgttatcaaaggcatt

SEQ ID NO: 190064 - DNA, 25 bp, Probe Sequence
cggatatggtttcatcaacaggaat

SEQ ID NO: 190065 - DNA, 25 bp, Probe Sequence
cggcctgaggaacgacactcgaaat

SEQ ID NO: 190066 - DNA, 25 bp, Probe Sequence
cgtgcccaggtacaactttcaagac

SEQ ID NO: 190067 - DNA, 25 bp, Probe Sequence
ctggcagcaacgtaaaaattgtgaa

SEQ ID NO: 190068 - DNA, 25 bp, Probe Sequence
ctggcagccatctgaaaatatttca

SEQ ID NO: 190069 - DNA, 25 bp, Probe Sequence
ctggactctcgtgcagaaaatgtag

SEQ ID NO: 190070 - DNA, 25 bp, Probe Sequence
ctggacctggctggaggaaaacagt

SEQ ID NO: 190071 - DNA, 25 bp, Probe Sequence
ctggacgaggcggcgtacaagcaca

SEQ ID NO: 190072 - DNA, 25 bp, Probe Sequence
ctggagctgaagcgtgctcacaaaa

SEQ ID NO: 190073 - DNA, 25 bp, Probe Sequence
ctgggtgaacgggtgcgcaaggaca

SEQ ID NO: 190074 - DNA, 25 bp, Probe Sequence
ctggtggggcggagcagacacagac

SEQ ID NO: 190075 - DNA, 25 bp, Probe Sequence
ctggtggggcagcaccgtgaagacg

SEQ ID NO: 190076 - DNA, 25 bp, Probe Sequence
ctggtggggcagcagcgtgaaaacc

SEQ ID NO: 190077 - DNA, 25 bp, Probe Sequence
ctggctggcagggaaggaaagaact

SEQ ID NO: 190078 - DNA, 25 bp, Probe Sequence
ctggcagagcatgaagggaaggaca

SEQ ID NO: 190079 - DNA, 25 bp, Probe Sequence
ctggaggcaaggatggccaggccat

SEQ ID NO: 190080 - DNA, 25 bp, Probe Sequence
ctggcaggataccttgtccaaccag

SEQ ID NO: 190081 - DNA, 25 bp, Probe Sequence
ctggaggacactcccatcagaacct

SEQ ID NO: 190082 - DNA, 25 bp, Probe Sequence
cggcggacttgtgatcggcctgcat

SEQ ID NO: 190083 - DNA, 25 bp, Probe Sequence
ctggggactctatgatgggcagcct

SEQ ID NO: 190084 - DNA, 25 bp, Probe Sequence
ctggaggacctgttgatgctagttc

SEQ ID NO: 190085 - DNA, 25 bp, Probe Sequence
ctggaggaacatttgcagaagcttc

SEQ ID NO: 190086 - DNA, 25 bp, Probe Sequence
ctggggccatagttgcagcagcagc

SEQ ID NO: 190087 - DNA, 25 bp, Probe Sequence
ctggggctcaagtatcactgactcc

SEQ ID NO: 190088 - DNA, 25 bp, Probe Sequence
ctggtacaactgctgcacagactcc

SEQ ID NO: 190089 - DNA, 25 bp, Probe Sequence
ctggtcagcaccaattcaagccatg

SEQ ID NO: 190090 - DNA, 25 bp, Probe Sequence
ctggatcaaccaggtcatagcctac

SEQ ID NO: 190091 - DNA, 25 bp, Probe Sequence
ctggatcaaccagatcctgcaggca

SEQ ID NO: 190092 - DNA, 25 bp, Probe Sequence
ctggaaatctcacatggtgggcact

SEQ ID NO: 190093 - DNA, 25 bp, Probe Sequence
ctggtgtttctgcgagaatggaatg

SEQ ID NO: 190094 - DNA, 25 bp, Probe Sequence
ctggagtcggcgcgcaaagcgaaag

SEQ ID NO: 190095 - DNA, 25 bp, Probe Sequence
cggcagggtgcgcaaaacgaccgcc

SEQ ID NO: 190096 - DNA, 25 bp, Probe Sequence
cggcgcaaggcccgagaacaggccg

SEQ ID NO: 190097 - DNA, 25 bp, Probe Sequence
cggccagggctccaagagaaaagga

SEQ ID NO: 190098 - DNA, 25 bp, Probe Sequence
cggttgcccttgcgatcaaagagaa

SEQ ID NO: 190099 - DNA, 25 bp, Probe Sequence
cggcttccgttgttatccacgaaat

SEQ ID NO: 190100 - DNA, 25 bp, Probe Sequence
cggcttaccgtcgtttacgacagtg

SEQ ID NO: 190101 - DNA, 25 bp, Probe Sequence
cggccaacggcaagtggttcgacaa

SEQ ID NO: 190102 - DNA, 25 bp, Probe Sequence
ctggacagactggctgttggaacga

SEQ ID NO: 190103 - DNA, 25 bp, Probe Sequence
ctggtcaggctggcttctgatgttc

SEQ ID NO: 190104 - DNA, 25 bp, Probe Sequence
ctggtcgacattccatgctgattta

SEQ ID NO: 190105 - DNA, 25 bp, Probe Sequence
cggtcgcctctggcagcgaaaagac

SEQ ID NO: 190106 - DNA, 25 bp, Probe Sequence
ctggtctccctgctagaaaacacat

SEQ ID NO: 190107 - DNA, 25 bp, Probe Sequence
ctggtgtcactctctaaatgaccaa

SEQ ID NO: 190108 - DNA, 25 bp, Probe Sequence
ctggatgacctctttgtgacaggcc

SEQ ID NO: 190109 - DNA, 25 bp, Probe Sequence
ctggtgcggtaccagtgcacagagg

SEQ ID NO: 190110 - DNA, 25 bp, Probe Sequence
ctggcgcgggatgaggacgggccac

SEQ ID NO: 190111 - DNA, 25 bp, Probe Sequence
ctggtgggagtgtcaacagcgggcc

SEQ ID NO: 190112 - DNA, 25 bp, Probe Sequence
cgacgaggagatgaaccgcgtcctg

SEQ ID NO: 190113 - DNA, 25 bp, Probe Sequence
ctggccagggtcaccaaggtcctgg

SEQ ID NO: 190114 - DNA, 25 bp, Probe Sequence
cggccatcgtgggctacaaggactc

SEQ ID NO: 190115 - DNA, 25 bp, Probe Sequence
ctggtcatggtgtgtacctgtaatc

SEQ ID NO: 190116 - DNA, 25 bp, Probe Sequence
ctggtcatctgaccctacttgaaca

SEQ ID NO: 190117 - DNA, 25 bp, Probe Sequence
ctggtcataattcctgtctgtgtaa

SEQ ID NO: 190118 - DNA, 25 bp, Probe Sequence
ctggtctgtactccttggatttgca

SEQ ID NO: 190119 - DNA, 25 bp, Probe Sequence
ctggccttagctctgtgtatgtgta

SEQ ID NO: 190120 - DNA, 25 bp, Probe Sequence
ctggcttgggctttggaatcatgag

SEQ ID NO: 190121 - DNA, 25 bp, Probe Sequence
ctggttgcttctggtgggatcattg

SEQ ID NO: 190122 - DNA, 25 bp, Probe Sequence
ctggtctgtttgcatttgatacatt

SEQ ID NO: 190123 - DNA, 25 bp, Probe Sequence
ctggtctgttctgttgagtggtttc

SEQ ID NO: 190124 - DNA, 25 bp, Probe Sequence
ctggggcttttactagtgtgggctc

SEQ ID NO: 190125 - DNA, 25 bp, Probe Sequence
ctggaccgtttactacatgctggaa

SEQ ID NO: 190126 - DNA, 25 bp, Probe Sequence
ctggcacaagtagaaaagctgacaa

SEQ ID NO: 190127 - DNA, 25 bp, Probe Sequence
ctggccacagttgacaagttcacaa

SEQ ID NO: 190128 - DNA, 25 bp, Probe Sequence
ctggtcactgagtctgaaagtccca

SEQ ID NO: 190129 - DNA, 25 bp, Probe Sequence
ctggagatcgagtgatcttgcccca

SEQ ID NO: 190130 - DNA, 25 bp, Probe Sequence
ctggaattcagatcttccaccacct

SEQ ID NO: 190131 - DNA, 25 bp, Probe Sequence
ctggccaataatgccccagaaccag

SEQ ID NO: 190132 - DNA, 25 bp, Probe Sequence
ctggtcttatactcccagactcaag

SEQ ID NO: 190133 - DNA, 25 bp, Probe Sequence
ctggaacaatacacccaggccatcg

SEQ ID NO: 190134 - DNA, 25 bp, Probe Sequence
ctggagcaaaacaggcctggaactt

SEQ ID NO: 190135 - DNA, 25 bp, Probe Sequence
ctggtcagagatacctggcctggtc

SEQ ID NO: 190136 - DNA, 25 bp, Probe Sequence
ctggtgaagatgaccgcccaggagc

SEQ ID NO: 190137 - DNA, 25 bp, Probe Sequence
ctggatggagaaggccccagctcac

SEQ ID NO: 190138 - DNA, 25 bp, Probe Sequence
ctggatggagaaggccccagctcac

SEQ ID NO: 190139 - DNA, 25 bp, Probe Sequence
ctggtgcgatgatgggcctggcaac

SEQ ID NO: 190140 - DNA, 25 bp, Probe Sequence
ctggtggagcatggctgggcgacag

SEQ ID NO: 190141 - DNA, 25 bp, Probe Sequence
ctggtggagcagtcaagagccaagg

SEQ ID NO: 190142 - DNA, 25 bp, Probe Sequence
ctggtgagcagctacaaggccaggt

SEQ ID NO: 190143 - DNA, 25 bp, Probe Sequence
cggatacgacactgtccaggttgga

SEQ ID NO: 190144 - DNA, 25 bp, Probe Sequence
cggctcaggacaaagggcaggtggg

SEQ ID NO: 190145 - DNA, 25 bp, Probe Sequence
cggcctgtgaccaaggtcggggagg

SEQ ID NO: 190146 - DNA, 25 bp, Probe Sequence
cggcctaatcttagccctgaagagg

SEQ ID NO: 190147 - DNA, 25 bp, Probe Sequence
cggcccatttgaagaccaggaagtt

SEQ ID NO: 190148 - DNA, 25 bp, Probe Sequence
ctggccgtttacaagcagcgggcgc

SEQ ID NO: 190149 - DNA, 25 bp, Probe Sequence
ctggcacgtgttaccaggccgagtg

SEQ ID NO: 190150 - DNA, 25 bp, Probe Sequence
ctggagcacttgttccgggatggtg

SEQ ID NO: 190151 - DNA, 25 bp, Probe Sequence
ctggctgcagagtgtcacggagatg

SEQ ID NO: 190152 - DNA, 25 bp, Probe Sequence
ctggacacatgagccctggatgagt

SEQ ID NO: 190153 - DNA, 25 bp, Probe Sequence
ctggaccatctgcatccagaggacc

SEQ ID NO: 190154 - DNA, 25 bp, Probe Sequence
ctggttcagtcacccagggaagcct

SEQ ID NO: 190155 - DNA, 25 bp, Probe Sequence
ctggactggctccgcacggagaacg

SEQ ID NO: 190156 - DNA, 25 bp, Probe Sequence
ctggagcggctgcaatgccttaacg

SEQ ID NO: 190157 - DNA, 25 bp, Probe Sequence
ctggacaggatgcaggcagatttta

SEQ ID NO: 190158 - DNA, 25 bp, Probe Sequence
ctggcactgtggccaagaggtgctt

SEQ ID NO: 190159 - DNA, 25 bp, Probe Sequence
ctggcaatgtggtgaagctgagttt

SEQ ID NO: 190160 - DNA, 25 bp, Probe Sequence
ctggcagctgtggatgctacagtca

SEQ ID NO: 190161 - DNA, 25 bp, Probe Sequence
ctggactggcgaggaagatcagtgc

SEQ ID NO: 190162 - DNA, 25 bp, Probe Sequence
ctggacggctctgcaacatcgagcc

SEQ ID NO: 190163 - DNA, 25 bp, Probe Sequence
cggtaggcttccgagaggagccctg

SEQ ID NO: 190164 - DNA, 25 bp, Probe Sequence
ctggatggatgtagggcaggggccc

SEQ ID NO: 190165 - DNA, 25 bp, Probe Sequence
ctggaagtctgcagtgggggtcgct

SEQ ID NO: 190166 - DNA, 25 bp, Probe Sequence
ctggcggtgagcagggggttcagca

SEQ ID NO: 190167 - DNA, 25 bp, Probe Sequence
cggcgactggagagggtgagtagcc

SEQ ID NO: 190168 - DNA, 25 bp, Probe Sequence
ctggcagcctgggcaggggggctga

SEQ ID NO: 190169 - DNA, 25 bp, Probe Sequence
ctggtccagcgcaaggaggggctgc

SEQ ID NO: 190170 - DNA, 25 bp, Probe Sequence
ctggcccattgacagatgagaggtc

SEQ ID NO: 190171 - DNA, 25 bp, Probe Sequence
ctggctccctatcccaagagcaaga

SEQ ID NO: 190172 - DNA, 25 bp, Probe Sequence
ctggctccctatcccaagagcaaga

SEQ ID NO: 190173 - DNA, 25 bp, Probe Sequence
ctggccaacctttctgtggagtgat

SEQ ID NO: 190174 - DNA, 25 bp, Probe Sequence
ctggacaaagttgctgacaagctgc

SEQ ID NO: 190175 - DNA, 25 bp, Probe Sequence
ctggtaacagtggcccagacgctgc

SEQ ID NO: 190176 - DNA, 25 bp, Probe Sequence
ctggattaaggacaccatcgctgcc

SEQ ID NO: 190177 - DNA, 25 bp, Probe Sequence
ctggattaaggacaccatcgctgcc

SEQ ID NO: 190178 - DNA, 25 bp, Probe Sequence
ctggcaagcgagcattaccacctga

SEQ ID NO: 190179 - DNA, 25 bp, Probe Sequence
ctggccactgcggttaaagcacgaa

SEQ ID NO: 190180 - DNA, 25 bp, Probe Sequence
ctggcctggggcacaagagcaaaga

SEQ ID NO: 190181 - DNA, 25 bp, Probe Sequence
ctggccgaggacatcgataaaggcg

SEQ ID NO: 190182 - DNA, 25 bp, Probe Sequence
ctggctctactgcttatgtaacagg

SEQ ID NO: 190183 - DNA, 25 bp, Probe Sequence
cggtgtccttgtaggtggcaactgg

SEQ ID NO: 190184 - DNA, 25 bp, Probe Sequence
cggaccctttgtggtagcaggtggt

SEQ ID NO: 190185 - DNA, 25 bp, Probe Sequence
ctggatttcttgactggccacaggg

SEQ ID NO: 190186 - DNA, 25 bp, Probe Sequence
ctggctcctcggattgaaagtgtgg

SEQ ID NO: 190187 - DNA, 25 bp, Probe Sequence
ctggtgctccgtcttagaggtggga

SEQ ID NO: 190188 - DNA, 25 bp, Probe Sequence
ctggtgctccgtcttagaggtggga

SEQ ID NO: 190189 - DNA, 25 bp, Probe Sequence
ctggttccatgtttctgatggggaa

SEQ ID NO: 190190 - DNA, 25 bp, Probe Sequence
ctggatctcctggagtctgggggtc

SEQ ID NO: 190191 - DNA, 25 bp, Probe Sequence
ctggcagctcctctgagtggggaga

SEQ ID NO: 190192 - DNA, 25 bp, Probe Sequence
ctggactcttggcgtgtgggaaggg

SEQ ID NO: 190193 - DNA, 25 bp, Probe Sequence
ctggaccctggctggcatggaaata

SEQ ID NO: 190194 - DNA, 25 bp, Probe Sequence
ctggcacccaccgtggaggaggaag

SEQ ID NO: 190195 - DNA, 25 bp, Probe Sequence
cggagctgtcccctagtgagggact

SEQ ID NO: 190196 - DNA, 25 bp, Probe Sequence
ctggactggccatgaagtgaggaga

SEQ ID NO: 190197 - DNA, 25 bp, Probe Sequence
ctggacccctggggctcagatagag

SEQ ID NO: 190198 - DNA, 25 bp, Probe Sequence
ctggacccatcacagagtcttcagg

SEQ ID NO: 190199 - DNA, 25 bp, Probe Sequence
ctggaatcttcataggtcatattga

SEQ ID NO: 190200 - DNA, 25 bp, Probe Sequence
ctggagtcattctcagcagacatca

SEQ ID NO: 190201 - DNA, 25 bp, Probe Sequence
ctggcgttacagcgcaacagcagcc

SEQ ID NO: 190202 - DNA, 25 bp, Probe Sequence
ctggcgcgaacactggaatgcatat

SEQ ID NO: 190203 - DNA, 25 bp, Probe Sequence
ctggtcagaatccggatactgggtt

SEQ ID NO: 190204 - DNA, 25 bp, Probe Sequence
ctggagaagatcccgctacatgtgc

SEQ ID NO: 190205 - DNA, 25 bp, Probe Sequence
cggatgaagcagcacgcggctgtgc

SEQ ID NO: 190206 - DNA, 25 bp, Probe Sequence
cgggaaagaacaggtcgtgtctcct

SEQ ID NO: 190207 - DNA, 25 bp, Probe Sequence
cgggagatcgacacgtcatggacca

SEQ ID NO: 190208 - DNA, 25 bp, Probe Sequence
ctggagcaaggacactttggccaca

SEQ ID NO: 190209 - DNA, 25 bp, Probe Sequence
cggaggactggctcttgtagtcaca

SEQ ID NO: 190210 - DNA, 25 bp, Probe Sequence
cgaggaacgagtgttgccgtccatt

SEQ ID NO: 190211 - DNA, 25 bp, Probe Sequence
cgaggaaagggtatccgcctcacca

SEQ ID NO: 190212 - DNA, 25 bp, Probe Sequence
cgaggaaagggtatccgcctcacca

SEQ ID NO: 190213 - DNA, 25 bp, Probe Sequence
cccgaatgagggagcctcccgaagg

SEQ ID NO: 190214 - DNA, 25 bp, Probe Sequence
cggtggtggcggagtctacggaagc

SEQ ID NO: 190215 - DNA, 25 bp, Probe Sequence
cggtggtggcggagtctacggaagc

SEQ ID NO: 190216 - DNA, 25 bp, Probe Sequence
cgtcggtctgggtgttaagtgctcc

SEQ ID NO: 190217 - DNA, 25 bp, Probe Sequence
cgaccagtcgggcttggacgtgatc

SEQ ID NO: 190218 - DNA, 25 bp, Probe Sequence
cggtaacggccacttggccagtaca

SEQ ID NO: 190219 - DNA, 25 bp, Probe Sequence
cggaaacctcgacttggaggtgcca

SEQ ID NO: 190220 - DNA, 25 bp, Probe Sequence
cggaattcccggtattatgagtcca

SEQ ID NO: 190221 - DNA, 25 bp, Probe Sequence
cggattgtgcccagttctatgacat

SEQ ID NO: 190222 - DNA, 25 bp, Probe Sequence
ctggtactgcccacagtgcaaacag

SEQ ID NO: 190223 - DNA, 25 bp, Probe Sequence
ctggcaagtgttctcagctgaaaag

SEQ ID NO: 190224 - DNA, 25 bp, Probe Sequence
ctggacgacttgatcgtgactagag

SEQ ID NO: 190225 - DNA, 25 bp, Probe Sequence
ctggatcgttatctactgactagta

SEQ ID NO: 190226 - DNA, 25 bp, Probe Sequence
ctggacttcattctgacgtatgtta

SEQ ID NO: 190227 - DNA, 25 bp, Probe Sequence
ctggactccctggttcagtatttaa

SEQ ID NO: 190228 - DNA, 25 bp, Probe Sequence
ctggttcctcttacttcaatttgaa

SEQ ID NO: 190229 - DNA, 25 bp, Probe Sequence
cgtttccctccaggtgttgttgagg

SEQ ID NO: 190230 - DNA, 25 bp, Probe Sequence
cgtcgccatgcctcggaaaattgag

SEQ ID NO: 190231 - DNA, 25 bp, Probe Sequence
ctggacctgcactgggagaaattca

SEQ ID NO: 190232 - DNA, 25 bp, Probe Sequence
ctggaggtgcacttcgtggaacact

SEQ ID NO: 190233 - DNA, 25 bp, Probe Sequence
ctggagagtgccttcgagtgcgagg

SEQ ID NO: 190234 - DNA, 25 bp, Probe Sequence
ctggaggtcatctccgtgtgtgatt

SEQ ID NO: 190235 - DNA, 25 bp, Probe Sequence
ctggatcattcatttcaccttggtt

SEQ ID NO: 190236 - DNA, 25 bp, Probe Sequence
ctggataatgctttactttctgtgt

SEQ ID NO: 190237 - DNA, 25 bp, Probe Sequence
ctggatgagttggtcctttcagctt

SEQ ID NO: 190238 - DNA, 25 bp, Probe Sequence
ctggttggtggttctactcgtatcc

SEQ ID NO: 190239 - DNA, 25 bp, Probe Sequence
ctggttggtggttctactcgtatcc

SEQ ID NO: 190240 - DNA, 25 bp, Probe Sequence
cgtgttggtggcctctgaagggaac

SEQ ID NO: 190241 - DNA, 25 bp, Probe Sequence
ctggtcatggagaccttgaacgaag

SEQ ID NO: 190242 - DNA, 25 bp, Probe Sequence
ctggccaaaccacttacagcggagt

SEQ ID NO: 190243 - DNA, 25 bp, Probe Sequence
ctggctaataccctgtttttgagtt

SEQ ID NO: 190244 - DNA, 25 bp, Probe Sequence
cggaaaacggttcatgtctcagttc

SEQ ID NO: 190245 - DNA, 25 bp, Probe Sequence
cggaaacgggggctgttggtcgcag

SEQ ID NO: 190246 - DNA, 25 bp, Probe Sequence
gggacaacggggtgtcaggggagtg

SEQ ID NO: 190247 - DNA, 25 bp, Probe Sequence
gggacccgggaagaaccatgaagtg

SEQ ID NO: 190248 - DNA, 25 bp, Probe Sequence
cggattcccggatagcaacctcggg
